United States Patent Application Publication US 2011/0183924 A1 - sequence listing, part 217

SEQ ID NO: 547896 - DNA, 12248 bp, Homo sapiens
ctggctccgcgtcggccggtcggtttggtcggttgtagtggcctcgccgcccggtccgctgtcgcagcgctcatccgcgccgggagcccttggctgcgtcgcccggcagccgccaccacctttacagtaaagacgctgcgaattgacgccttttataataaagacacttatcttgcccaagagctgggctggagtgtagtggcgcaatcttggatcaccacaacctccgtctcccaggttcaagcgattctcccgcctcagcctcctgagtagcaattacagggagcatttcctgaagacgtagtcatgcagcacgtcagcagctcccagagcagccagcgccatgtccagtggcctggggcctgccccggcgcgggcgaggagcagccagcgtgctcccagccgtccctgcccctcacactgccatcccccagccaccaactacagcagctgatggtccagacccagagtcccacgcagcccagtccggggccggggcaggccttgcagaatgtgcgtgcaggtgcccctggccctgggctgggcctctgcagcagcagccctacaggggacttcgtggatgccagcgtgctggtgaggcagatcagcttgagcccctccagtggtggacactttgtgtttcaggatgggtcagggctcacccagatcgcccagggagcccaggttcagctccagcacccgggtacgcccatcacagtccgagagcggagaccctcccagccccacacacagtcagggggcaccatccaccacctgggaccccagagccctgcagccgcgggtggggccggcctgcagcccctggccagcccaagccacatcaccacggctaacttgccaccgcagatcagcagcatcatccagggccagctggttcagcagcagcaggtgctgcaggggccgccgctgccccggcccctgggcttcgagaggacgcccggcgtgctgctccccggggctgggggcgcagcggggtttgggatgacgtccccacccccgcccaccagcccttccaggactgccgtgcccccaggcctttccagcctcccactcacgtctgtggggaacacgggaatgaagaaggttcccaagaagttagaggagattcccccagcctctccggagatggcacagatgaggaagcagtgcctggactatcattaccaggagatgcaggctctgaaggaggtcttcaaggagtatttgattgaactgtttttcttgcaacactttcaagggaacatgatggatttcttagctttcaaggagagactgtatggaccattacaagcatatcttaggcagaatgatttggacattgaagaagaggaggaggaggaggaagaggaggaagaaaaatctgaggttatcaatgacgaggtaaaggttgtgacaggaaaggatgggcagactgggactcccgttgctatagcaacccagcttccgccaaaggtttctgctgctttttcatcccagcagcaaccatttcagcaagccctcgcagggagcctggtagcaggggccggaagcacagtagagacggacctgtttaagaggcagcaggcgatgccctccacaggtatggcaggaggaatgccccccacgccgcaggccgcgcagctcgctggacagaggcagagtcagcagcagtatgacccctccacggggcctcccgtgcagaacgctgccagcttgcacaccccactgccgcagctgcccgggaggctgcccccagccggtgttcccactgcagccctctcctctgcgctgcagtttgcacagcagccgcaagtggtagaggcccagacacagctccaaatcccggtgaagactcagcagcccaatgttcccatccctgcaccgcccagcagccaactccccatccctccctcgcagcctgcacagctggccctccacgttcccacacctggaaaggtgcaggtgcaggcctctcagctttcctccctgccacagatggtagcatcgacaaggctccctgtggaccctgccccgccctgcccacggcctctgcccacctcttctacctcgtccctcgcgcctgtgagtggctccggcccaggaccctcccctgctcgatcctctccagtaaatagaccttcctcagccaccaataaggcactatctccagtcacttcccggaccccaggggtggtggcatctgcccccaccaaaccacagagtcctgctcagaatgccacctcgtcccaagacagttctcaggatacgctgacagaacaaataactctggagaaccaggtgcatcagcgcattgcggagctgaggaaagcaggtctgtggtcccagaggcgtctgccaaagctgcaggaggccccacgccccaagtcccactgggactatctgctggaggagatgcagtggatggccacagactttgcccaggagaggaggtggaaggtggctgctgcgaagaagctcgttagaactgtggtgcgccatcacgaggagaagcagctccgtgaagaaagggggaagaaggaagagcagagcagactgaggcggatagccgcctccacggcccgggagatagagtgcttttggtcgaatattgaacaggttgtggaaataaaactacgagtagaattagaagaaaaaaggaagaaggccttaaatttacagaaagtttccaggagagggaaagaattgagacctaaaggatttgacgcattacaggaaagttctctggattcaggaatgtctggaagaaaaagaaaagctagcatatctttgactgatgacgaagtggacgatgaagaggaaacaattgaagaggaggaagcaaatgaaggcgttgtggaccaccaaacagaactttctaatttagccaaggaagctgagctgcccctcctggacctgatgaagctgtacgaaggcgccttcctgccgagttctcagtggccccggccgaagcctgatggggaggacacaagcggagaggaagatgcagatgactgtccaggcgacagggagagtcgcaaggacttggttctcatcgactcgcttttcatcatggatcagttcaaagctgccgagaggatgaatatcgggaagccaaacgccaaggacattgcggacgtcactgcggtggctgaagccatcctgccgaagggcagtgctcgggtcacaacctcggtcaagtttaatgctccatctttgttgtatggggctctcagagattatcagaagattggcctggactggctggccaaactttacaggaagaatctcaatggcatattggcagatgaagctgggctgggtaaaacagtgcagatcattgctttttttgcccacctagcttgtaacgaaggtaattggggcccccatcttgttgttgtgagaagttgtaacatactcaagtgggagcttgaattgaaacgttggtgtcccggactcaaaatcctctcatatattggcagccacagagaactcaaagcaaagagacaggagtgggccgaacccaacagcttccacgtctgcatcacgtcctacactcagttcttccggggcctcaccgccttcacacgagtgcgctggaagtgcctggtcattgatgagatgcagcgcgtgaagggcatgaccgagaggcactgggaagcggttttcaccctgcagagccaacaacgtctgcttctgatcgactcgccgctgcacaataccttcctggagctctggaccatggtgcacttcctggtcccagggatctccaggccctacctgagctcccctctgagggcccccagtgaagagagccaggattactaccataaagtggtcataaggttacacagggtgacacagccatttattttgaggagaactaagagagatgtggaaaagcaactaacaaagaaatatgagcatgttttgaagtgtcgcctttctaaccgacaaaaagccttatacgaggacgttatcctgcaacctggcactcaggaggccttgaagagcgggcactttgtcaacgtcctgagcatccttgtgcggctgcagcgcatctgcaaccaccctgggctcgtcgagccccggcacccaggctcttcctacgtggcggggccactggagtatccgtccgcatctctaatcctgaaggcactggagagagatttctggaaggaagcagatctttctatgtttgatctcatcggcttagaaaataaaatcactcgtcacgaggcagagttgctgtctaagaaaaagataccgcggaaactcatggaggaaatctccacttcagcagccccagcagcccgaccagcagcagcaaagctgaaggccagcaggttgtttcagcctgtgcagtatggccagaagcccgagggtcgcaccgtggctttccccagcactcacccgccccggacggcagcccccaccacggcctctgctgctccacagggcccgcttcgaggacggccgcccatcgccacgttctctgccaatccggaggcaaaagcagcagcagccccgtttcagacctctcaggcttccgccagtgctccacgacaccagcccgcctcggcctccagcacagccgctagcccggcccatcctgcgaaactgcgggcccagaccacagcacaggccttcaccccaggccagcccccgccccagccccaggccccctcgcacgcggccgggcagagcgcgctgcctcagaggctggtgctcccctcgcaggcccaggcccgcttgcccagtggagaggtagtgaaaatagctcagctggcatccatcacaggaccacagagccgcgtggctcagccagagacgccggtgacactgcagttccagggcagcaagttcaccctgtcacacagccagctccggcagctcacagcgggccagccgctgcagctgcaaggcagcgtcctccagatcgtgtccgcccccgggcagccctaccttcgagcccctggccctgtggtgatgcagaccgtgtctcaggcgggcgctgtgcacggcgccctgggaagcaagcccccggccggcggtcccagccctgcacccttgaccccacaagttggcgttccgggccgcgtggcggtgaatgccttggctgtaggagaacccggaacggcctccaaaccagcttctcccattggagggccgacccaggaggaaaagaccagactcttgaaagagcgcctggatcagatttatttagtcaacgagcggcgctgttctcaagctccagtctatggcagagacttgctaaggatttgtgccctgcctagccatggaagggtacagtggcgtgggtccctggatggccgtcgtgggaaggaggccgggccagcgcacagttacacttcatcctcagaaagtccaagtgagctgatgttgacgctttgtcggtgtggagagtctctgcaggatgttattgacagggtggcctttgtgattcctccggtggtggcagcacccccgtccctacgggtgccgcggccgccacccctgtacagccacagaatgaggatcttgaggcagggcctgagagagcacgctgcgccgtacttccagcagctgcggcagaccacggctccacgcctgctgcagttccctgagctgaggctggtgcagttcgactcagggaagttggaagctttagctatcttgcttcagaaattgaaatctgaaggacgtcgggtgctgattttatcacagatgattcttatgttggacattttagagatgttcttgaacttccattacctcacctatgtaagaatcgatgaaaatgccagcagtgagcaacggcaggaactgatgaggagtttcaacagagacaggcggattttttgtgccattctctccactcacagccgtaccacaggtataaaccttgtagaggcggacaccgtcgtgttttatgacaatgacctgaatccagtgatggatgccaaagctcaggagtggtgcgataggatcgggagatgcaaagacatccacatatacaggcttgtgagtggcaattccattgaagagaaattgttgaaaaatggaactaaagatctgatccgagaagtggctgctcagggaaatgactactccatggctttcttaactcagcgaaccatccaggagctgtttgaagtttattctcccatggatgatgctggcttcccggtcaaagctgaggagtttgtggtgctttctcaggaaccttctgtcacggaaaccattgcacccaaaattgcaagacctttcatagaggccctcaagagtattgagtatctggaggaggatgcccagaagtccgcacaggagggggtgctgggaccacacactgatgctctgtcatcagactctgagaacatgccgtgtgatgaagaaccatcccaattagaggagctagctgacttcatggagcagcttacaccaattgaaaaatatgctttaaattacctggaattattccatacttctattgagcaagaaaaggagagaaacagtgaggacgcagtgatgactgcagtgagggcatgggagttctggaacctgaagaccctgcaggagagggaggcccggctgcggctggagcaggaggaggcggagctcctgacctacacgcgagaggatgcctacagcatggagtatgtctacgaagatgtcgatgggcagacagaagtcatgccgctctggaccccacccaccccgccgcaggacgacagcgacatctacctcgactcggtcatgtgtctcatgtatgaagccactcccatcccagaggctaagctgccccctgtgtacgtgaggaaggagcggaagcgacacaaaacagacccctcagctgcaggcaggaagaagaagcagcgtcacggggaggcggtcgtccctcctcggtccctgtttgaccgcgcaacaccaggacttctgaaaattcgcagagagggcaaggagcagaagaagaatattctgctgaagcagcaggtgccattcgccaagcccctgccaacttttgccaaacccacagctgagcctggtcaagacaaccccgagtggctcatcagtgaggactgggcgctgctgcaggctgtaaagcagttactggagctgcctttgaacctcacaatcgtgtcacctgctcacacacctaattgggatcttgtcagtgacgttgttaactcctgtagccgaatctaccgctcttccaaacagtgccggaatcgctacgagaatgtcatcattccacgagaggaggggaagagtaaaaacaaccgtcctctccgtacgagccagatctatgcccaggatgagaatgccacacacacccagctgtacacgagccactttgacttaatgaaaatgactgctggcaagaggagtcccccaatcaaacctctgcttggcatgaatccctttcagaagaaccccaagcacgcgtctgtgttggcagaaagtggaatcaactatgacaagccgctgcctcccatccaggtggcatctctccgtgcagagcgaatcgcaaaagagaaaaaggctctggctgatcagcagaaggcacagcagccggccgtggcccagccacccccgccccagccgcagcccccaccacccccgcagcagccaccgccaccgctgccacaaccacaggcagcgggcagccagccgccagcagggccaccagctgtccagccccaaccccagccacagccccagacccagccacagcctgtgcaggccccagcgaaggcgcagcccgcaatcacgacggggggcagtgcagccgtactggcaggaaccattaaaacatcagttactgggacgagcatgcccactggtgccgtgagtggaaatgtgatcgtgaacaccatcgcaggggtcccagctgccaccttccagtccatcaacaagcgcctggcgtcgccagtggctcctggggccttgactacgccgggaggctctgctcccgcccaggtggtgcacacccagcccccgccacgggcagtcggctccccagccacggcgacccctgacctggtgtccatggcaacgactcagggtgttcgagcggtcacttctgtgacagcctcggccgtggtcactaccaacctgaccccagtgcagaccccggcacggtctttggtgccccaagtgtcccaagccacaggagttcagctccctggaaaaaccatcacacctgcacatttccagcttctcaggcagcagcagcagcagcagcagcaacagcagcagcagcagcagcagcagcagcagcagcagcagcagcagcaacagcagcagcagcaacagacgacgacgacctctcaggtgcaagttccacagatccagggccaggcccagtccccagcacagatcaaagctgtgggcaagctgacgccggaacacctcatcaaaatgcagaagcagaaactgcagatgcccccgcagcccccaccgccacaggcccagtctgcgcccccgcagccagcagcccaagtgcaagtgcagacctcgcagccgccgcagcagcagagcccccagctcacgacggtcacggccccaaggcctggtgccctgctgacgggcaccaccgtggccaacctccaggtggcccggctcacccgggttcccacttctcaactgcagtcgcaagggcagatgcagacccaggcaccccagccagcccaggtgcccttggcgaagcctccggtggtgtccgtcccggcagctgtggtctcctcaccgggagtcaccaccctgcccatgaacgtcgcggggatcagcgtggcgatcggtcagccacagaaggcagcaggacagaccgtggtggcccagcccgtgcacatgcagcagctgctgaagctgaagcagcaggccgtccagcagcagaaggccatccagccccaggctgcacagggcccggcagccgtccagcagaagatcaccgcacagcagatcaccacccctggcgcgcagcagaaggttgcctacgccgcgcagccggcccttaagacccagtttcttaccacacccatctcccaggcccagaaactggccggggcccagcaagtgcagacccagatccaggttgcaaaacttcctcaagttgttcaacagcaaacacccgtggccagcatccagcaagttgcctctgcttcccagcaggcttctccacagactgtggcgctcacgcaggcgacggcggccgggcagcaggtgcagatgatccctgcagtgaccgcgactgcccaggtggttcagcagaaactcattcagcagcaggtggtgaccacggcgtcggccccgctccagactccaggcgctcccaacccagcccaggtgcccgccagctccgacagcccaagccagcagcccaagttacagatgagggtccctgctgtcaggctaaagacacctactaagcctccgtgccagtagtcagggcagcagggctgcctctcatctaaagcaaaactaccttcctcacagaaaacgctttattagtgaaccttgggaccatgtcacgcaagagattcagcactgggaaagatataattgaaacaaaatagtgtaatcattttattaaaatgcatcccacactgcaggacaaatggtccttatggagtgccgcgttctctgtactacgtggctcatggaaaaagtgacaacatggcttcctctaaatcatttcacctttcagtccccacccgcacccgtcccctagagccatagtactgtgttctgaaagccatttagaatttctttgtgagcatgtagtgctttgcacgccacagaagccgtctgccgtgtgtgaggagcatacaatggactttctaaagataaggcgtgggcttccacagtgtctgccagagtttagttctttataccttactgaaaaatgcctcgtggtcttcgcagaggggaaggcctgtctaaagtcaatcatccgagatgggttttccattccaaagaaaggcaatatggttccttccttccctcctaaaatatgacttaacttttaagagaaatgttctgacacccacctaaacacacaaggcacgttcctggcctgtgttcaagggaaatgatcagtcattgcattgttattccaaagagcagccaacagtggcctcccccaggccctaccctgcaatgggattcgctttcatttaatggaaacttctgggactgatgcccaactcagtgcactcaagacgcatctccagttttcgggggaagctggtatttgacatagtgtgttaaacagctcctgagaacctttgggacactctgccatggctggcgtgaggcccagaggaccacgcagaggcaatggtagtacagatgtcacagctgagggtacgatgaggcctgggctcagtgagccaggacgaatgtgacagacaccccttgctgccacagtcagccctttgacgaaggtgggctggtgattctggaagtattggctatagcggtgggcccagtcaactcttccttgtggacttacgacagcagattttctctaggataagcttgtgtggttctgccagtgaagcagagaaccacctgtgctgttgtggaaggcgtgccgttgagggggaaaacgaagcccagtatttgctactgtttttcctttttttactatgacaggaaaataaatgcaattttagtggaattgattgacagtgtctccttactttgaagttttcaccaaagcaaaaaggtccatatccaatagtatcctttgtgctgtggcttgattttggcctattttacattatttggtccaggaaattaggttatattaggttttttgtatactaaaaatcagttatggcacaataaagattttctgtttttaaattgtatttcatctgcttcctccccattctctcactttaagtgacattgaggaaggtattctgtcccacaggtttctgtggacagcgatacagcaggagtcagtgaaatcaactggggagctcacttgagctcttgataagaaatgtggagaaaagtaaaaaccaagctttgaagaaacagaagaaattaatcttttagttagttgaacataccaaagcagaggactggaatctgtttgttctaaccaacccgttctccctggcttggcacgtgccgtgagagcgcagcttgccggagggagggccgctgtgtgcgcctcacatctggctcccagtggaaacttttactcctcctcatccgcagatgtgatagaactgaagtatctaggaattctgcctttgtcatttgttttaatttgtgtgccctgttcattttttttgtctttcccaaatcttggtagtctccttatagttgaagataaaatgttgagtgcacttattttagaatatcctagacataactgtctaagtaaaagcgctctattaatctaaaacactacaagagaatttaacaccatctctcaaatgcttttttggagagcttaatgggattctgaatatttgcaatgtggagtttccgccccgatctcacgtcagtgagggtctcctgtctctcaagtgtgtttcctttggctgttccctaatacaaaacacggacatatttttactcgtagcactcaatttagtaacttctagatgctaccgttgacctgagttaaattcatttagtcgtgtacgtaaaaactctccttttagtgtgttattttcttggccttcccttttaaaggttaaagtttctaacctaagaattaagtacgcgttcaggaagctgttgtctaggccttccccttgtgaatctgggttcattccaatacggcaagtaagagttggaaactttgagaacacagactataaaggcagcagcccgaacactgtcagactctaattggcgaccctgggaaacagttgccctgctattctttaaagaaagacgtttattctgatgataaaaacagttagccagactgtttttaaagcacctggcgggaagcagaaggttggatccaagcccttgttcagatttggtgcctgataagacaggggtttctctttttgtgacctttattattattattttgttaactgttgtaaccagttagctgttgtgttttaagatagaaaggaacaagactaaaattgtaaatactttgtaaacatcagcatttgtacttgaatagtaggattttaaagggcattgatagcataccaaacaaaaggcaaaataaagtgacctttttataaaaaaaaaaagaaaaagtcgac

SEQ ID NO: 547897 - DNA, 11373 bp, Homo sapiens
ctggctccgcgtcggccggtcggtttggtcggttgtagtggcctcgccgcccggtccgctgtcgcagcgctcatccgcgccgggagcccttggctgcgtcgcccggcagccgcgggagcatttcctgaagacgtagtcatgcagcacgtcagcagctcccagagcagccagcgccatgtccagtggcctggggcctgccccggcgcgggcgaggagcagccagcgtgctcccagccgtccctgcccctcacactgccatcccccagccaccaactacagcagctgatggtccagacccagagtcccacgcagcccagtccggggccggggcaggccttgcagaatgtgcgtgcaggtgcccctggccctgggctgggcctctgcagcagcagccctacaggggacttcgtggatgccagcgtgctggtgaggcagatcagcttgagcccctccagtggtggacactttgtgtttcaggatgggtcagggctcacccagatcgcccagggagcccaggttcagctccagcacccgggtacgcccatcacagtccgagagcggagaccctcccagccccacacacagtcagggggcaccatccaccacctgggaccccagagccctgcagccgcgggtggggccggcctgcagcccctggccagcccaagccacatcaccacggctaacttgccaccgcagatcagcagcatcatccagggccagctggttcagcagcagcaggtgctgcaggggccgccgctgccccggcccctgggcttcgagaggacgcccggcgtgctgctccccggggctgggggcgcagcggggtttgggatgacgtccccacccccgcccaccagcccttccaggactgccgtgcccccaggcctttccagcctcccactcacgtctgtggggaacacgggaatgaagaaggttcccaagaagttagaggagattcccccagcctctccggagatggcacagatgaggaagcagtgcctggactatcattaccaggagatgcaggctctgaaggaggtcttcaaggagtatttgattgaactgtttttcttgcaacactttcaagggaacatgatggatttcttagctttcaaggagagactgtatggaccattacaagcatatcttaggcagaatgatttggacattgaagaagaggaagaggagcactttgaagtcattaatgatgaggtaaaggttgtggccagaaagcacgggcagcctgggactcctgttgccatagcaacccagctaccgccgaggacttctgcggcttttccagcccagcagcagccgctccagcaaatacatatggtgactccagtacctggagatgtgaatgccataaaaatggaagcatctaagaggcagtgaacactggcgcccacaggagaaccaggtgcatcagcgcattgcggagctgaggaaagcaggtctgtggtcccagaggcgtctgccaaagctgcaggaggccccacgccccaagtcccactgggactatctgctggaggagatgcagtggatggccacagactttgcccaggagaggaggtggaaggtggctgctgcgaagaagctcgttagaactgtggtgcgccatcacgaggagaagcagctccgtgaagaaagggggaagaaggaagagcagagcagactgaggcggatagccgcctccacggcccgggagatagagtgcttttggtcgaatattgaacaggttgtggaaataaaactacgagtagaattagaagaaaaaaggaagaaggccttaaatttacagaaagtttccaggagagggaaagaattgagacctaaaggatttgacgcattacaggaaagttctctggattcaggaatgtctggaagaaaaagaaaagctagcatatctttgactgatgacgaagtggacgatgaagaggaaacaattgaagaggaggaagcaaatgaaggcgttgtggaccaccaaacagaactttctaatttagccaaggaagctgagctgcccctcctggacctgatgaagctgtacgaaggcgccttcctgccgagttctcagtggccccggccgaagcctgatggggaggacacaagcggagaggaagatgcagatgactgtccaggcgacagggagagtcgcaaggacttggttctcatcgactcgcttttcatcatggatcagttcaaagctgccgagaggatgaatatcgggaagccaaacgccaaggacattgcggacgtcactgcggtggctgaagccatcctgccgaagggcagtgctcgggtcacaacctcggtcaagtttaatgctccatctttgttgtatggggctctcagagattatcagaagattggcctggactggctggccaaactttacaggaagaatctcaatggcatattggcagatgaagctgggctgggtaaaacagtgcagatcattgctttttttgcccacctagcttgtaacgaaggtaattggggcccccatcttgttgttgtgagaagttgtaacatactcaagtgggagcttgaattgaaacgttggtgtcccggactcaaaatcctctcatatattggcagccacagagaactcaaagcaaagagacaggagtgggccgaacccaacagcttccacgtctgcatcacgtcctacactcagttcttccggggcctcaccgccttcacacgagtgcgctggaagtgcctggtcattgatgagatgcagcgcgtgaagggcatgaccgagaggcactgggaagcggttttcaccctgcagagccaacaacgtctgcttctgatcgactcgccgctgcacaataccttcctggagctctggaccatggtgcacttcctggtcccagggatctccaggccctacctgagctcccctctgagggcccccagtgaagagagccaggattactaccataaagtggtcataaggttacacagggtgacacagccatttattttgaggagaactaagagagatgtggaaaagcaactaacaaagaaatatgagcatgttttgaagtgtcgcctttctaaccgacaaaaagccttatacgaggacgttatcctgcaacctggcactcaggaggccttgaagagcgggcactttgtcaacgtcctgagcatccttgtgcggctgcagcgcatctgcaaccaccctgggctcgtcgagccccggcacccaggctcttcctacgtggcggggccactggagtatccgtccgcatctctaatcctgaaggcactggagagagatttctggaaggaagcagatctttctatgtttgatctcatcggcttagaaaataaaatcactcgtcacgaggcagagttgctgtctaagaaaaagataccgcggaaactcatggaggaaatctccacttcagcagccccagcagcccgaccagcagcagcaaagctgaaggccagcaggttgtttcagcctgtgcagtatggccagaagcccgagggtcgcaccgtggctttccccagcactcacccgccccggacggcagcccccaccacggcctctgctgctccacagggcccgcttcgaggacggccgcccatcgccacgttctctgccaatccggaggcaaaagcagcagcagccccgtttcagacctctcaggcttccgccagtgctccacgacaccagcccgcctcggcctccagcacagccgctagcccggcccatcctgcgaaactgcgggcccagaccacagcacaggccttcaccccaggccagcccccgccccagccccaggccccctcgcacgcggccgggcagagcgcgctgcctcagaggctggtgctcccctcgcaggcccaggcccgcttgcccagtggagaggtagtgaaaatagctcagctggcatccatcacaggaccacagagccgcgtggctcagccagagacgccggtgacactgcagttccagggcagcaagttcaccctgtcacacagccagctccggcagctcacagcgggccagccgctgcagctgcaaggcagcgtcctccagatcgtgtccgcccccgggcagccctaccttcgagcccctggccctgtggtgatgcagaccgtgtctcaggcgggcgctgtgcacggcgccctgggaagcaagcccccggccggcggtcccagccctgcacccttgaccccacaagttggcgttccgggccgcgtggcggtgaatgccttggctgtaggagaacccggaacggcctccaaaccagcttctcccattggagggccgacccaggaggaaaagaccagactcttgaaagagcgcctggatcagatttatttagtcaacgagcggcgctgttctcaagctccagtctatggcagagacttgctaaggatttgtgccctgcctagccatggaagggtacagtggcgtgggtccctggatggccgtcgtgggaaggaggccgggccagcgcacagttacacttcatcctcagaaagtccaagtgagctgatgttgacgctttgtcggtgtggagagtctctgcaggatgttattgacagggtggcctttgtgattcctccggtggtggcagcacccccgtccctacgggtgccgcggccgccacccctgtacagccacagaatgaggatcttgaggcagggcctgagagagcacgctgcgccgtacttccagcagctgcggcagaccacggctccacgcctgctgcagttccctgagctgaggctggtgcagttcgactcagggaagttggaagctttagctatcttgcttcagaaattgaaatctgaaggacgtcgggtgctgattttatcacagatgattcttatgttggacattttagagatgttcttgaacttccattacctcacctatgtaagaatcgatgaaaatgccagcagtgagcaacggcaggaactgatgaggagtttcaacagagacaggcggattttttgtgccattctctccactcacagccgtaccacaggtataaaccttgtagaggcggacaccgtcgtgttttatgacaatgacctgaatccagtgatggatgccaaagctcaggagtggtgcgataggatcgggagatgcaaagacatccacatatacaggcttgtgagtggcaattccattgaagagaaattgttgaaaaatggaactaaagatctgatccgagaagtggctgctcagggaaatgactactccatggctttcttaactcagcgaaccatccaggagctgtttgaagtttattctcccatggatgatgctggcttcccggtcaaagctgaggagtttgtggtgctttctcaggaaccttctgtcacggaaaccattgcacccaaaattgcaagacctttcatagaggccctcaagagtattgagtatctggaggaggatgcccagaagtccgcacaggagggggtgctgggaccacacactgatgctctgtcatcagactctgagaacatgccgtgtgatgaagaaccatcccaattagaggagctagctgacttcatggagcagcttacaccaattgaaaaatatgctttaaattacctggaattattccatacttctattgagcaagaaaaggagagaaacagtgaggacgcagtgatgactgcagtgagggcatgggagttctggaacctgaagaccctgcaggagagggaggcccggctgcggctggagcaggaggaggcggagctcctgacctacacgcgagaggatgcctacagcatggagtatgtctacgaagatgtcgatgggcagacagaagtcatgccgctctggaccccacccaccccgccgcaggacgacagcgacatctacctcgactcggtcatgtgtctcatgtatgaagccactcccatcccagaggctaagctgccccctgtgtacgtgaggaaggagcggaagcgacacaaaacagacccctcagctgcaggcaggaagaagaagcagcgtcacggggaggcggtcgtccctcctcggtccctgtttgaccgcgcaacaccaggacttctgaaaattcgcagagagggcaaggagcagaagaagaatattctgctgaagcagcaggtgccattcgccaagcccctgccaacttttgccaaacccacagctgagcctggtcaagacaaccccgagtggctcatcagtgaggactgggcgctgctgcaggctgtaaagcagttactggagctgcctttgaacctcacaatcgtgtcacctgctcacacacctaattgggatcttgtcagtgacgttgttaactcctgtagccgaatctaccgctcttccaaacagtgccggaatcgctacgagaatgtcatcattccacgagaggaggggaagagtaaaaacaaccgtcctctccgtacgagccagatctatgcccaggatgagaatgccacacacacccagctgtacacgagccactttgacttaatgaaaatgactgctggcaagaggagtcccccaatcaaacctctgcttggcatgaatccctttcagaagaaccccaagcacgcgtctgtgttggcagaaagtggaatcaactatgacaagccgctgcctcccatccaggtggcatctctccgtgcagagcgaatcgcaaaagagaaaaaggctctggctgatcagcagaaggcacagcagccggccgtggcccagccacccccgccccagccgcagcccccaccacccccgcagcagccaccgccaccgctgccacaaccacaggcagcgggcagccagccgccagcagggccaccagctgtccagccccaaccccagccacagccccagacccagccacagcctgtgcaggccccagcgaaggcgcagcccgcaatcacgacggggggcagtgcagccgtactggcaggaaccattaaaacatcagttactgggacgagcatgcccactggtgccgtgagtggaaatgtgatcgtgaacaccatcgcaggggtcccagctgccaccttccagtccatcaacaagcgcctggcgtcgccagtggctcctggggccttgactacgccgggaggctctgctcccgcccaggtggtgcacacccagcccccgccacgggcagtcggctccccagccacggcgacccctgacctggtgtccatggcaacgactcagggtgttcgagcggtcacttctgtgacagcctcggccgtggtcactaccaacctgaccccagtgcagaccccggcacggtctttggtgccccaagtgtcccaagccacaggagttcagctccctggaaaaaccatcacacctgcacatttccagcttctcaggcagcagcagcagcagcagcagcaacagcagcagcagcagcagcagcagcagcagcagcagcagcagcagcaacagcagcagcagcaacagacgacgacgacctctcaggtgcaagttccacagatccagggccaggcccagtccccagcacagatcaaagctgtgggcaagctgacgccggaacacctcatcaaaatgcagaagcagaaactgcagatgcccccgcagcccccaccgccacaggcccagtctgcgcccccgcagccagcagcccaagtgcaagtgcagacctcgcagccgccgcagcagcagagcccccagctcacgacggtcacggccccaaggcctggtgccctgctgacgggcaccaccgtggccaacctccaggtggcccggctcacccgggttcccacttctcaactgcagtcgcaagggcagatgcagacccaggcaccccagccagcccaggtgcccttggcgaagcctccggtggtgtccgtcccggcagctgtggtctcctcaccgggagtcaccaccctgcccatgaacgtcgcggggatcagcgtggcgatcggtcagccacagaaggcagcaggacagaccgtggtggcccagcccgtgcacatgcagcagctgctgaagctgaagcagcaggccgtccagcagcagaaggccatccagccccaggctgcacagggcccggcagccgtccagcagaagatcaccgcacagcagatcaccacccctggcgcgcagcagaaggttgcctacgccgcgcagccggcccttaagacccagtttcttaccacacccatctcccaggcccagaaactggccggggcccagcaagtgcagacccagatccaggttgcaaaacttcctcaagttgttcaacagcaaacacccgtggccagcatccagcaagttgcctctgcttcccagcaggcttctccacagactgtggcgctcacgcaggcgacggcggccgggcagcaggtgcagatgatccctgcagtgaccgcgactgcccaggtggttcagcagaaactcattcagcagcaggtggtgaccacggcgtcggccccgctccagactccaggcgctcccaacccagcccaggtgcccgccagctccgacagcccaagccagcagcccaagttacagatgagggtccctgctgtcaggctaaagacacctactaagcctccgtgccagtagtcagggcagcagggctgcctctcatctaaagcaaaactaccttcctcacagaaaacgctttattagtgaaccttgggaccatgtcacgcaagagattcagcactgggaaagatataattgaaacaaaatagtgtaatcattttattaaaatgcatcccacactgcaggacaaatggtccttatggagtgccgcgttctctgtactacgtggctcatggaaaaagtgacaacatggcttcctctaaatcatttcacctttcagtccccacccgcacccgtcccctagagccatagtactgtgttctgaaagccatttagaatttctttgtgagcatgtagtgctttgcacgccacagaagccgtctgccgtgtgtgaggagcatacaatggactttctaaagataaggcgtgggcttccacagtgtctgccagagtttagttctttataccttactgaaaaatgcctcgtggtcttcgcagaggggaaggcctgtctaaagtcaatcatccgagatgggttttccattccaaagaaaggcaatatggttccttccttccctcctaaaatatgacttaacttttaagagaaatgttctgacacccacctaaacacacaaggcacgttcctggcctgtgttcaagggaaatgatcagtcattgcattgttattccaaagagcagccaacagtggcctcccccaggccctaccctgcaatgggattcgctttcatttaatggaaacttctgggactgatgcccaactcagtgcactcaagacgcatctccagttttcgggggaagctggtatttgacatagtgtgttaaacagctcctgagaacctttgggacactctgccatggctggcgtgaggcccagaggaccacgcagaggcaatggtagtacagatgtcacagctgagggtacgatgaggcctgggctcagtgagccaggacgaatgtgacagacaccccttgctgccacagtcagccctttgacgaaggtgggctggtgattctggaagtattggctatagcggtgggcccagtcaactcttccttgtggacttacgacagcagattttctctaggataagcttgtgtggttctgccagtgaagcagagaaccacctgtgctgttgtggaaggcgtgccgttgagggggaaaacgaagcccagtatttgctactgtttttcctttttttactatgacaggaaaataaatgcaattttagtggaattgattgacagtgtctccttactttgaagttttcaccaaagcaaaaaggtccatatccaatagtatcctttgtgctgtggcttgattttggcctattttacattatttggtccaggaaattaggttatattaggttttttgtatactaaaaatcagttatggcacaataaagattttctgtttttaaattgtatttcatctgcttcctccccattctctcactttaagtgacattgaggaaggtattctgtcccacaggtttctgtggacagcgatacagcaggagtcagtgaaatcaactggggagctcacttgagctcttgataagaaatgtggagaaaagtaaaaaccaagctttgaagaaacagaagaaattaatcttttagttagttgaacataccaaagcagaggactggaatctgtttgttctaaccaacccgttctccctggcttggcacgtgccgtgagagcgcagcttgccggagggagggccgctgtgtgcgcctcacatctggctcccagtggaaacttttactcctcctcatccgcagatgtgatagaactgaagtatctaggaattctgcctttgtcatttgttttaatttgtgtgccctgttcattttttttgtctttcccaaatcttggtagtctccttatagttgaagataaaatgttgagtgcacttattttagaatatcctagacataactgtctaagtaaaagcgctctattaatctaaaacactacaagagaatttaacaccatctctcaaatgcttttttggagagcttaatgggattctgaatatttgcaatgtggagtttccgccccgatctcacgtcagtgagggtctcctgtctctcaagtgtgtttcctttggctgttccctaatacaaaacacggacatatttttactcgtagcactcaatttagtaacttctagatgctaccgttgacctgagttaaattcatttagtcgtgtacgtaaaaactctccttttagtgtgttattttcttggccttcccttttaaaggttaaagtttctaacctaagaattaagtacgcgttcaggaagctgttgtctaggccttccccttgtgaatctgggttcattccaatacggcaagtaagagttggaaactttgagaacacagactataaaggcagcagcccgaacactgtcagactctaattggcgaccctgggaaacagttgccctgctattctttaaagaaagacgtttattctgatgataaaaacagttagccagactgtttttaaagcacctggcgggaagcagaaggttggatccaagcccttgttcagatttggtgcctgataagacaggggtttctctttttgtgacctttattattattattttgttaactgttgtaaccagttagctgttgtgttttaagatagaaaggaacaagactaaaattgtaaatactttgtaaacatcagcatttgtacttgaatagtaggattttaaagggcattgatagcataccaaacaaaaggcaaaataaagtgacctttttataaaaaaaaaaagaaaaagtcgac

SEQ ID NO: 547898 - DNA, 904 bp, Homo sapiens
tgggaccgagcccgcaagttatgggctcagacatcagagttgctaagctgtaatgaggaagttagatgcatgctgccaaattgaggtagtggagagactcgtggatgaatgctgggcaggctaggtctagcagggagttccctgaagttacaactaaggtaggtgggctaagtgatgtgatcatttattattcccttctttaacctatctagtggacatctatgatggtatggcatgctccatactcctcgttcttttctgttctttacttattgataagttttattgatatatggagatgggagttctctggtgcccagagacgtggaagtgacagaaggcgcaatactacggacatcagattgcaaaccattcggccttccacggagtaccaggcagaatactccgagcacatcatgcacattcaccagagaataagctgggataaacacgagcgcaccaacacaacaacaagcacaagactaaaatatcaaagagaaattaatatagggaaggagaggcaagggagatcatcagcccatgtggtgagggcaccacggacccaaggacatgagaaatacacagtgaagcaagtcaaagatgagaaatcacaacattcaggcacatacaaaaagcatcagcacaaaaaaagagtacgaggggacatcaaacactgaacagatgacgacacaacccgagaagcacccgaggaacttccgtgaacaccacaccacttatagtctccgtacacgcaaaagggatgacaccacagatatcccccacaaatcatgataccaaggaatcacatattcacgggagacattaaccacaatggagtaacgcaacagacataggaagaacacacagaaaaacaggggcacatagagatcccaggaggacgacg

SEQ ID NO: 547899 - DNA, 8565 bp, Homo sapiens
cctaccacttgcttgcccccacttctctttcagagcactcgctatgattgtgaatgaagtggagtggctgtctttccgtcagctctggtggggcggatgtcattctcaactggggatggcgaacaagtgcggaggggcctgcctgggatgtggacttgaatggccactctgtctaactcattaagcggacctagaaaatctgctcctgcctgcctttctggagttgggacagtcgatggtgagggtgggactatgtccatgtgcccgtttggattgaatgcttcgtgtttctttctccacgggcagcactcaggaggccttgaagagcgggcactttgtcaacgtcctgagcatccttgtgcggctgcagcgcatctgcaaccaccctgggctcgtcgagccccggcacccaggctcttcctacgtggcggggccactggagtatccgtccgcatctctaatcctgaaggcactggagagagatttctggaaggaagcagatctttctatgtttgatctcatcggcttagaaaataaaatcactcgtcacgaggcagagttgctgtctaagaaaaagataccgcggaaactcatggaggaaatctccacttcagcagccccagcagcccgaccagcagcagcaaagctgaaggccagcaggttgtttcagcctgtgcagtatggccagaagcccgagggtcgcaccgtggctttccccagcactcacccgccccggacggcagcccccaccacggcctctgctgctccacagggcccgcttcgaggacggccgcccatcgccacgttctctgccaatccggaggcaaaagcagcagcagccccgtttcagacctctcaggcttccgccagtgctccacgacaccagcccgcctcggcctccagcacagccgctagcccggcccatcctgcgaaactgcgggcccagaccacagcacaggccttcaccccaggccagcccccgccccagccccaggccccctcgcacgcggccgggcagagcgcgctgcctcagaggctggtgctcccctcgcaggcccaggcccgcttgcccagtggagaggtagtgaaaatagctcagctggcatccatcacaggaccacagagccgcgtggctcagccagagacgccggtgacactgcagttccagggcagcaagttcaccctgtcacacagccagctccggcagctcacagcgggccagccgctgcagctgcaaggcagcgtcctccagatcgtgtccgcccccgggcagccctaccttcgagcccctggccctgtggtgatgcagaccgtgtctcaggcgggcgctgtgcacggcgccctgggaagcaagcccccggccggcggtcccagccctgcacccttgaccccacaagttggcgttccgggccgcgtggcggtgaatgccttggctgtaggagaacccggaacggcctccaaaccagcttctcccattggagggccgacccaggaggaaaagaccagactcttgaaagagcgcctggatcagatttatttagtcaacgagcggcgctgttctcaagctccagtctatggcagagacttgctaaggatttgtgccctgcctagccatggaagggtacagtggcgtgggtccctggatggccgtcgtgggaaggaggccgggccagcgcacagttacacttcatcctcagaaagtccaagtgagctgatgttgacgctttgtcggtgtggagagtctctgcaggatgttattgacagggtggcctttgtgattcctccggtggtggcagcacccccgtccctacgggtgccgcggccgccacccctgtacagccacagaatgaggatcttgaggcagggcctgagagagcacgctgcgccgtacttccagcagctgcggcagaccacggctccacgcctgctgcagttccctgagctgaggctggtgcagttcgactcagggaagttggaagctttagctatcttgcttcagaaattgaaatctgaaggacgtcgggtgctgattttatcacagatgattcttatgttggacattttagagatgttcttgaacttccattacctcacctatgtaagaatcgatgaaaatgccagcagtgagcaacggcaggaactgatgaggagtttcaacagagacaggcggattttttgtgccattctctccactcacagccgtaccacaggtataaaccttgtagaggcggacaccgtcgtgttttatgacaatgacctgaatccagtgatggatgccaaagctcaggagtggtgcgataggatcgggagatgcaaagacatccacatatacaggcttgtgagtggcaattccattgaagagaaattgttgaaaaatggaactaaagatctgatccgagaagtggctgctcagggaaatgactactccatggctttcttaactcagcgaaccatccaggagctgtttgaagtttattctcccatggatgatgctggcttcccggtcaaagctgaggagtttgtggtgctttctcaggaaccttctgtcacggaaaccattgcacccaaaattgcaagacctttcatagaggccctcaagagtattgagtatctggaggaggatgcccagaagtccgcacaggagggggtgctgggaccacacactgatgctctgtcatcagactctgagaacatgccgtgtgatgaagaaccatcccaattagaggagctagctgacttcatggagcagcttacaccaattgaaaaatatgctttaaattacctggaattattccatacttctattgagcaagaaaaggagagaaacagtgaggacgcagtgatgactgcagtgagggcatgggagttctggaacctgaagaccctgcaggagagggaggcccggctgcggctggagcaggaggaggcggagctcctgacctacacgcgagaggatgcctacagcatggagtatgtctacgaagatgtcgatgggcagacagaagtcatgccgctctggaccccacccaccccgccgcaggacgacagcgacatctacctcgactcggtcatgtgtctcatgtatgaagccactcccatcccagaggctaagctgccccctgtgtacgtgaggaaggagcggaagcgacacaaaacagacccctcagctgcaggcaggaagaagaagcagcgtcacggggaggcggtcgtccctcctcggtccctgtttgaccgcgcaacaccaggacttctgaaaattcgcagagagggcaaggagcagaagaagaatattctgctgaagcagcaggtgccattcgccaagcccctgccaacttttgccaaacccacagctgagcctggtcaagacaaccccgagtggctcatcagtgaggactgggcgctgctgcaggctgtaaagcagttactggagctgcctttgaacctcacaatcgtgtcacctgctcacacacctaattgggatcttgtcagtgacgttgttaactcctgtagccgaatctaccgctcttccaaacagtgccggaatcgctacgagaatgtcatcattccacgagaggaggggaagagtaaaaacaaccgtcctctccgtacgagccagatctatgcccaggatgagaatgccacacacacccagctgtacacgagccactttgacttaatgaaaatgactgctggcaagaggagtcccccaatcaaacctctgcttggcatgaatccctttcagaagaaccccaagcacgcgtctgtgttggcagaaagtggaatcaactatgacaagccgctgcctcccatccaggtggcatctctccgtgcagagcgaatcgcaaaagagaaaaaggctctggctgatcagcagaaggcacagcagccggccgtggcccagccacccccgccccagccgcagcccccaccacccccgcagcagccaccgccaccgctgccacaaccacaggcagcgggcagccagccgccagcagggccaccagctgtccagccccaaccccagccacagccccagacccagccacagcctgtgcaggccccagcgaaggcgcagcccgcaatcacgacggggggcagtgcagccgtactggcaggaaccattaaaacatcagttactgggacgagcatgcccactggtgccgtgagtggaaatgtgatcgtgaacaccatcgcaggggtcccagctgccaccttccagtccatcaacaagcgcctggcgtcgccagtggctcctggggccttgactacgccgggaggctctgctcccgcccaggtggtgcacacccagcccccgccacgggcagtcggctccccagccacggcgacccctgacctggtgtccatggcaacgactcagggtgttcgagcggtcacttctgtgacagcctcggccgtggtcactaccaacctgaccccagtgcagaccccggcacggtctttggtgccccaagtgtcccaagccacaggagttcagctccctggaaaaaccatcacacctgcacatttccagcttctcaggcagcagcagcagcagcagcagcaacagcagcagcagcagcagcagcagcagcagcagcagcagcagcagcaacagcagcagcagcaacagacgacgacgacctctcaggtgcaagttccacagatccagggccaggcccagtccccagcacagatcaaagctgtgggcaagctgacgccggaacacctcatcaaaatgcagaagcagaaactgcagatgcccccgcagcccccaccgccacaggcccagtctgcgcccccgcagccagcagcccaagtgcaagtgcagacctcgcagccgccgcagcagcagagcccccagctcacgacggtcacggccccaaggcctggtgccctgctgacgggcaccaccgtggccaacctccaggtggcccggctcacccgggttcccacttctcaactgcagtcgcaagggcagatgcagacccaggcaccccagccagcccaggtgcccttggcgaagcctccggtggtgtccgtcccggcagctgtggtctcctcaccgggagtcaccaccctgcccatgaacgtcgcggggatcagcgtggcgatcggtcagccacagaaggcagcaggacagaccgtggtggcccagcccgtgcacatgcagcagctgctgaagctgaagcagcaggccgtccagcagcagaaggccatccagccccaggctgcacagggcccggcagccgtccagcagaagatcaccgcacagcagatcaccacccctggcgcgcagcagaaggttgcctacgccgcgcagccggcccttaagacccagtttcttaccacacccatctcccaggcccagaaactggccggggcccagcaagtgcagacccagatccaggttgcaaaacttcctcaagttgttcaacagcaaacacccgtggccagcatccagcaagttgcctctgcttcccagcaggcttctccacagactgtggcgctcacgcaggcgacggcggccgggcagcaggtgcagatgatccctgcagtgaccgcgactgcccaggtggttcagcagaaactcattcagcagcaggtggtgaccacggcgtcggccccgctccagactccaggcgctcccaacccagcccaggtgcccgccagctccgacagcccaagccagcagcccaagttacagatgagggtccctgctgtcaggctaaagacacctactaagcctccgtgccagtagtcagggcagcagggctgcctctcatctaaagcaaaactaccttcctcacagaaaacgctttattagtgaaccttgggaccatgtcacgcaagagattcagcactgggaaagatataattgaaacaaaatagtgtaatcattttattaaaatgcatcccacactgcaggacaaatggtccttatggagtgccgcgttctctgtactacgtggctcatggaaaaagtgacaacatggcttcctctaaatcatttcacctttcagtccccacccgcacccgtcccctagagccatagtactgtgttctgaaagccatttagaatttctttgtgagcatgtagtgctttgcacgccacagaagccgtctgccgtgtgtgaggagcatacaatggactttctaaagataaggcgtgggcttccacagtgtctgccagagtttagttctttataccttactgaaaaatgcctcgtggtcttcgcagaggggaaggcctgtctaaagtcaatcatccgagatgggttttccattccaaagaaaggcaatatggttccttccttccctcctaaaatatgacttaacttttaagagaaatgttctgacacccacctaaacacacaaggcacgttcctggcctgtgttcaagggaaatgatcagtcattgcattgttattccaaagagcagccaacagtggcctcccccaggccctaccctgcaatgggattcgctttcatttaatggaaacttctgggactgatgcccaactcagtgcactcaagacgcatctccagttttcgggggaagctggtatttgacatagtgtgttaaacagctcctgagaacctttgggacactctgccatggctggcgtgaggcccagaggaccacgcagaggcaatggtagtacagatgtcacagctgagggtacgatgaggcctgggctcagtgagccaggacgaatgtgacagacaccccttgctgccacagtcagccctttgacgaaggtgggctggtgattctggaagtattggctatagcggtgggcccagtcaactcttccttgtggacttacgacagcagattttctctaggataagcttgtgtggttctgccagtgaagcagagaaccacctgtgctgttgtggaaggcgtgccgttgagggggaaaacgaagcccagtatttgctactgtttttcctttttttactatgacaggaaaataaatgcaattttagtggaattgattgacagtgtctccttactttgaagttttcaccaaagcaaaaaggtccatatccaatagtatcctttgtgctgtggcttgattttggcctattttacattatttggtccaggaaattaggttatattaggttttttgtatactaaaaatcagttatggcacaataaagattttctgtttttaaattgtatttcatctgcttcctccccattctctcactttaagtgacattgaggaaggtattctgtcccacaggtttctgtggacagcgatacagcaggagtcagtgaaatcaactggggagctcacttgagctcttgataagaaatgtggagaaaagtaaaaaccaagctttgaagaaacagaagaaattaatcttttagttagttgaacataccaaagcagaggactggaatctgtttgttctaaccaacccgttctccctggcttggcacgtgccgtgagagcgcagcttgccggagggagggccgctgtgtgcgcctcacatctggctcccagtggaaacttttactcctcctcatccgcagatgtgatagaactgaagtatctaggaattctgcctttgtcatttgttttaatttgtgtgccctgttcattttttttgtctttcccaaatcttggtagtctccttatagttgaagataaaatgttgagtgcacttattttagaatatcctagacataactgtctaagtaaaagcgctctattaatctaaaacactacaagagaatttaacaccatctctcaaatgcttttttggagagcttaatgggattctgaatatttgcaatgtggagtttccgccccgatctcacgtcagtgagggtctcctgtctctcaagtgtgtttcctttggctgttccctaatacaaaacacggacatatttttactcgtagcactcaatttagtaacttctagatgctaccgttgacctgagttaaattcatttagtcgtgtacgtaaaaactctccttttagtgtgttattttcttggccttcccttttaaaggttaaagtttctaacctaagaattaagtacgcgttcaggaagctgttgtctaggccttccccttgtgaatctgggttcattccaatacggcaagtaagagttggaaactttgagaacacagactataaaggcagcagcccgaacactgtcagactctaattggcgaccctgggaaacagttgccctgctattctttaaagaaagacgtttattctgatgataaaaacagttagccagactgtttttaaagcacctggcgggaagcagaaggttggatccaagcccttgttcagatttggtgcctgataagacaggggtttctctttttgtgacctttattattattattttgttaactgttgtaaccagttagctgttgtgttttaagatagaaaggaacaagactaaaattgtaaatactttgtaaacatcagcatttgtacttgaatagtaggattttaaagggcattgatagcataccaaacaaaaggcaaaataaagtgacctttttataaaaaaaaaaagaaaaagtcgac

SEQ ID NO: 547900 - DNA, 871 bp, Homo sapiens
tgcttgagtcaatactgcaccactgcactccagcctgggcaacagcgagactcttgtctcaaaaaaaaaaaaagattattggctgaaaagaacccagcctgccaaactcaggggcagccaggggcaggtcagtgggaaatgggaagtgggagctcaagcggctcccaaaaccttccaaatggccctcaaggccattctctggcctctttcccaatcaagtccagctggcttctggggcatggtccttgggcaagagatttggccttcccttcccagttcaaagctccctctttaagtatgtgtggtcccaacgccaattggagtcttgtcgcggacacgtgggtcaggatgtctaagtcgtggcccaatgggcaggaatcccaagaaacaggtgtgagtggaggggacagtcgtgtggagtggccctccatctgggactgggaggcaggtctatgtcaggcctgcattaagatctctaaatggttccaagaaaagccctttcagttcattaagccgtgtttcctaacacagctgtggggatggtggctgggttaacatagcacgcgataccatcatagatccactttggcgaaatcttgaggccccaggagtgatctggtggccctcgcgggccaccgaggaagggcccaatctcagcctggcagcagggtggccagaaatgatctcgccccaaccgggaaaagccttctggataacgtggttccaaagagagctgggcccaaagggcactccgattcgggacggggagcctgggaggggacaaaaagggcctgggggcgcacggaagaaaaaacccgcgctctgagggggtgccaccccatccggggtctcgagccggggggggggacaa

SEQ ID NO: 547901 - DNA, 404 bp, Homo sapiens
agaagtttttaggccaggcgtggtggctcagctgtatcccagcatttgggaggccgagatgggcagataacctgaggtcaggagttggagacaaaactggccaacatgatgaaactccacctccattaaaaatagaaaaattagcctggcgtggtggtgcatgcctctggtcccagctacttgggaggctgaagcaggagaatcacttgtacccgggaggcggaaggtgcagtgaactgagaccacgccattgtactccagccagggcaacgagtgaaattccgtctcaaaaaaaaaaagggtttttaatttttcggccaggtcttttaccaaatttttttggagaccttcccttggggcggggggatggagggcggcaactccttagtggaattaaaggggga

SEQ ID NO: 547902 - DNA, 12266 bp, Homo sapiens
agcggggcggcggcgcggcttccatcctcccgccctcctgacgcggccggagcgcagccctgaggcccagggagaacgacacattggatacagaagggaggtgatcatgcaccatggcactggcccccagaacgtccagcatcagctgcagaggtccagggcctgccctggcagcgagggtgaggagcagccggcccaccccaacccacccccgtcccccgcagctcccttcgctccctcagcaagcccgtcggcaccccagtctcccagttatcaaatacagcagctgatgaataggagccctgcaaccgggcagaacgtgaacatcaccctgcagagcgtgggccctgtcgtcgggggaaaccagcagatcacactggccccactgccgctccccagccccacctctccaggcttccagttcagcgctcagcctcggcggtttgagcatgggtctccatcatacattcaggtcacgtcccccttgtcccagcaggtccagacccagagtcccacgcagcccagtccggggccggggcaggccttgcagaatgtgcgtgcaggtgcccctggccctgggctgggcctctgcagcagcagccctacaggggacttcgtggatgccagcgtgctggtgaggcagatcagcttgagcccctccagtggtggacactttgtgtttcaggatgggtcagggctcacccagatcgcccagggagcccaggttcagctccagcacccgggtacgcccatcacagtccgagagcggagaccctcccagccccacacacagtcagggggcaccatccaccacctgggaccccagagccctgcagccgcgggtggggccggcctgcagcccctggccagcccaagccacatcaccacggctaacttgccaccgcagatcagcagcatcatccagggccagctggttcagcagcagcaggtgctgcaggggccgccgctgccccggcccctgggcttcgagaggacgcccggcgtgctgctccccggggctgggggcgcagcggggtttgggatgacgtccccacccccgcccaccagcccttccaggactgccgtgcccccaggcctttccagcctcccactcacgtctgtggggaacacgggaatgaagaaggttcccaagaagttagaggagattcccccagcctctccggagatggcacagatgaggaagcagtgcctggactatcattaccaggagatgcaggctctgaaggaggtcttcaaggagtatttgattgaactgtttttcttgcaacactttcaagggaacatgatggatttcttagctttcaaggagagactgtatggaccattacaagcatatcttaggcagaatgatttggacattgaagaagaggaggaggaggaggaagaggaggaagaaaaatctgaggttatcaatgacgagcagcaagccctcgcagggagcctggtagcaggggccggaagcacagtagagacggacctgtttaagaggcagcaggcgatgccctccacaggtatggcagagcagtctaagaggcctcgccttgaagtgggtcaccaaggggtagttttccagcacccaggggcggacgcaggcgttcctctccagcaactaatgccgaccgcacaaggaggaatgccccccacgccgcaggccgcgcagctcgctggacagaggcagagtcagcagcagtatgacccctccacggggcctcccgtgcagaacgctgccagcttgcacaccccactgccgcagctgcccgggaggctgcccccagccggtgttcccactgcagccctctcctctgcgctgcagtttgcacagcagccgcaagtggtagaggcccagacacagctccaaatcccggtgaagactcagcagcccaatgttcccatccctgcaccgcccagcagccaactccccatccctccctcgcagcctgcacagctggccctccacgttcccacacctggaaaggtgcaggtgcaggcctctcagctttcctccctgccacagatggtagcatcgacaaggctccctgtggaccctgccccgccctgcccacggcctctgcccacctcttctacctcgtccctcgcgcctgtgagtggctccggcccaggaccctcccctgctcgatcctctccagtaaatagaccttcctcagccaccaataaggcactatctccagtcacttcccggaccccaggggtggtggcatctgcccccaccaaaccacagagtcctgctcagaatgccacctcgtcccaagacagttctcaggatacgctgacagaacaaataactctggagaaccaggtgcatcagcgcattgcggagctgaggaaagcaggtctgtggtcccagaggcgtctgccaaagctgcaggaggccccacgccccaagtcccactgggactatctgctggaggagatgcagtggatggccacagactttgcccaggagaggaggtggaaggtggctgctgcgaagaagctcgttagaactgtggtgcgccatcacgaggagaagcagctccgtgaagaaagggggaagaaggaagagcagagcagactgaggcggatagccgcctccacggcccgggagatagagtgcttttggtcgaatattgaacaggttgtggaaataaaactacgagtagaattagaagaaaaaaggaagaaggccttaaatttacagaaagtttccaggagagggaaagaattgagacctaaaggatttgacgcattacaggaaagttctctggattcaggaatgtctggaagaaaaagaaaagctagcatatctttgactgatgacgaagtggacgatgaagaggaaacaattgaagaggaggaagcaaatgaaggcgttgtggaccaccaaacagaactttctaatttagccaaggaagctgagctgcccctcctggacctgatgaagctgtacgaaggcgccttcctgccgagttctcagtggccccggccgaagcctgatggggaggacacaagcggagaggaagatgcagatgactgtccaggcgacagggagagtcgcaaggacttggttctcatcgactcgcttttcatcatggatcagttcaaagctgccgagaggatgaatatcgggaagccaaacgccaaggacattgcggacgtcactgcggtggctgaagccatcctgccgaagggcagtgctcgggtcacaacctcggtcaagtttaatgctccatctttgttgtatggggctctcagagattatcagaagattggcctggactggctggccaaactttacaggaagaatctcaatggcatattggcagatgaagctgggctgggtaaaacagtgcagatcattgctttttttgcccacctagcttgtaacgaaggtaattggggcccccatcttgttgttgtgagaagttgtaacatactcaagtgggagcttgaattgaaacgttggtgtcccggactcaaaatcctctcatatattggcagccacagagaactcaaagcaaagagacaggagtgggccgaacccaacagcttccacgtctgcatcacgtcctacactcagttcttccggggcctcaccgccttcacacgagtgcgctggaagtgcctggtcattgatgagatgcagcgcgtgaagggcatgaccgagaggcactgggaagcggttttcaccctgcagagccaacaacgtctgcttctgatcgactcgccgctgcacaataccttcctggagctctggaccatggtgcacttcctggtcccagggatctccaggccctacctgagctcccctctgagggcccccagtgaagagagccaggattactaccataaagtggtcataaggttacacagggtgacacagccatttattttgaggagaactaagagagatgtggaaaagcaactaacaaagaaatatgagcatgttttgaagtgtcgcctttctaaccgacaaaaagccttatacgaggacgttatcctgcaacctggcactcaggaggccttgaagagcgggcactttgtcaacgtcctgagcatccttgtgcggctgcagcgcatctgcaaccaccctgggctcgtcgagccccggcacccaggctcttcctacgtggcggggccactggagtatccgtccgcatctctaatcctgaaggcactggagagagatttctggaaggaagcagatctttctatgtttgatctcatcggcttagaaaataaaatcactcgtcacgaggcagagttgctgtctaagaaaaagataccgcggaaactcatggaggaaatctccacttcagcagccccagcagcccgaccagcagcagcaaagctgaaggccagcaggttgtttcagcctgtgcagtatggccagaagcccgagggtcgcaccgtggctttccccagcactcacccgccccggacggcagcccccaccacggcctctgctgctccacagggcccgcttcgaggacggccgcccatcgccacgttctctgccaatccggaggcaaaagcagcagcagccccgtttcagacctctcaggcttccgccagtgctccacgacaccagcccgcctcggcctccagcacagccgctagcccggcccatcctgcgaaactgcgggcccagaccacagcacaggccttcaccccaggccagcccccgccccagccccaggccccctcgcacgcggccgggcagagcgcgctgcctcagaggctggtgctcccctcgcaggcccaggcccgcttgcccagtggagaggtagtgaaaatagctcagctggcatccatcacaggaccacagagccgcgtggctcagccagagacgccggtgacactgcagttccagggcagcaagttcaccctgtcacacagccagctccggcagctcacagcgggccagccgctgcagctgcaaggcagcgtcctccagatcgtgtccgcccccgggcagccctaccttcgagcccctggccctgtggtgatgcagaccgtgtctcaggcgggcgctgtgcacggcgccctgggaagcaagcccccggccggcggtcccagccctgcacccttgaccccacaagttggcgttccgggccgcgtggcggtgaatgccttggctgtaggagaacccggaacggcctccaaaccagcttctcccattggagggccgacccaggaggaaaagaccagactcttgaaagagcgcctggatcagatttatttagtcaacgagcggcgctgttctcaagctccagtctatggcagagacttgctaaggatttgtgccctgcctagccatggaagggtacagtggcgtgggtccctggatggccgtcgtgggaaggaggccgggccagcgcacagttacacttcatcctcagaaagtccaagtgagctgatgttgacgctttgtcggtgtggagagtctctgcaggatgttattgacagggtggcctttgtgattcctccggtggtggcagcacccccgtccctacgggtgccgcggccgccacccctgtacagccacagaatgaggatcttgaggcagggcctgagagagcacgctgcgccgtacttccagcagctgcggcagaccacggctccacgcctgctgcagttccctgagctgaggctggtgcagttcgactcagggaagttggaagctttagctatcttgcttcagaaattgaaatctgaaggacgtcgggtgctgattttatcacagatgattcttatgttggacattttagagatgttcttgaacttccattacctcacctatgtaagaatcgatgaaaatgccagcagtgagcaacggcaggaactgatgaggagtttcaacagagacaggcggattttttgtgccattctctccactcacagccgtaccacaggtataaaccttgtagaggcggacaccgtcgtgttttatgacaatgacctgaatccagtgatggatgccaaagctcaggagtggtgcgataggatcgggagatgcaaagacatccacatatacaggcttgtgagtggcaattccattgaagagaaattgttgaaaaatggaactaaagatctgatccgagaagtggctgctcagggaaatgactactccatggctttcttaactcagcgaaccatccaggagctgtttgaagtttattctcccatggatgatgctggcttcccggtcaaagctgaggagtttgtggtgctttctcaggaaccttctgtcacggaaaccattgcacccaaaattgcaagacctttcatagaggccctcaagagtattgagtatctggaggaggatgcccagaagtccgcacaggagggggtgctgggaccacacactgatgctctgtcatcagactctgagaacatgccgtgtgatgaagaaccatcccaattagaggagctagctgacttcatggagcagcttacaccaattgaaaaatatgctttaaattacctggaattattccatacttctattgagcaagaaaaggagagaaacagtgaggacgcagtgatgactgcagtgagggcatgggagttctggaacctgaagaccctgcaggagagggaggcccggctgcggctggagcaggaggaggcggagctcctgacctacacgcgagaggatgcctacagcatggagtatgtctacgaagatgtcgatgggcagacagaagtcatgccgctctggaccccacccaccccgccgcaggacgacagcgacatctacctcgactcggtcatgtgtctcatgtatgaagccactcccatcccagaggctaagctgccccctgtgtacgtgaggaaggagcggaagcgacacaaaacagacccctcagctgcaggcaggaagaagaagcagcgtcacggggaggcggtcgtccctcctcggtccctgtttgaccgcgcaacaccaggacttctgaaaattcgcagagagggcaaggagcagaagaagaatattctgctgaagcagcaggtgccattcgccaagcccctgccaacttttgccaaacccacagctgagcctggtcaagacaaccccgagtggctcatcagtgaggactgggcgctgctgcaggctgtaaagcagttactggagctgcctttgaacctcacaatcgtgtcacctgctcacacacctaattgggatcttgtcagtgacgttgttaactcctgtagccgaatctaccgctcttccaaacagtgccggaatcgctacgagaatgtcatcattccacgagaggaggggaagagtaaaaacaaccgtcctctccgtacgagccagatctatgcccaggatgagaatgccacacacacccagctgtacacgagccactttgacttaatgaaaatgactgctggcaagaggagtcccccaatcaaacctctgcttggcatgaatccctttcagaagaaccccaagcacgcgtctgtgttggcagaaagtggaatcaactatgacaagccgctgcctcccatccaggtggcatctctccgtgcagagcgaatcgcaaaagagaaaaaggctctggctgatcagcagaaggcacagcagccggccgtggcccagccacccccgccccagccgcagcccccaccacccccgcagcagccaccgccaccgctgccacaaccacaggcagcgggcagccagccgccagcagggccaccagctgtccagccccaaccccagccacagccccagacccagccacagcctgtgcaggccccagcgaaggcgcagcccgcaatcacgacggggggcagtgcagccgtactggcaggaaccattaaaacatcagttactgggacgagcatgcccactggtgccgtgagtggaaatgtgatcgtgaacaccatcgcaggggtcccagctgccaccttccagtccatcaacaagcgcctggcgtcgccagtggctcctggggccttgactacgccgggaggctctgctcccgcccaggtggtgcacacccagcccccgccacgggcagtcggctccccagccacggcgacccctgacctggtgtccatggcaacgactcagggtgttcgagcggtcacttctgtgacagcctcggccgtggtcactaccaacctgaccccagtgcagaccccggcacggtctttggtgccccaagtgtcccaagccacaggagttcagctccctggaaaaaccatcacacctgcacatttccagcttctcaggcagcagcagcagcagcagcagcaacagcagcagcagcagcagcagcagcagcagcagcagcagcagcagcaacagcagcagcagcaacagacgacgacgacctctcaggtgcaagttccacagatccagggccaggcccagtccccagcacagatcaaagctgtgggcaagctgacgccggaacacctcatcaaaatgcagaagcagaaactgcagatgcccccgcagcccccaccgccacaggcccagtctgcgcccccgcagccagcagcccaagtgcaagtgcagacctcgcagccgccgcagcagcagagcccccagctcacgacggtcacggccccaaggcctggtgccctgctgacgggcaccaccgtggccaacctccaggtggcccggctcacccgggttcccacttctcaactgcagtcgcaagggcagatgcagacccaggcaccccagccagcccaggtgcccttggcgaagcctccggtggtgtccgtcccggcagctgtggtctcctcaccgggagtcaccaccctgcccatgaacgtcgcggggatcagcgtggcgatcggtcagccacagaaggcagcaggacagaccgtggtggcccagcccgtgcacatgcagcagctgctgaagctgaagcagcaggccgtccagcagcagaaggccatccagccccaggctgcacagggcccggcagccgtccagcagaagatcaccgcacagcagatcaccacccctggcgcgcagcagaaggttgcctacgccgcgcagccggcccttaagacccagtttcttaccacacccatctcccaggcccagaaactggccggggcccagcaagtgcagacccagatccaggttgcaaaacttcctcaagttgttcaacagcaaacacccgtggccagcatccagcaagttgcctctgcttcccagcaggcttctccacagactgtggcgctcacgcaggcgacggcggccgggcagcaggtgcagatgatccctgcagtgaccgcgactgcccaggtggttcagcagaaactcattcagcagcaggtggtgaccacggcgtcggccccgctccagactccaggcgctcccaacccagcccaggtgcccgccagctccgacagcccaagccagcagcccaagttacagatgagggtccctgctgtcaggctaaagacacctactaagcctccgtgccagtagtcagggcagcagggctgcctctcatctaaagcaaaactaccttcctcacagaaaacgctttattagtgaaccttgggaccatgtcacgcaagagattcagcactgggaaagatataattgaaacaaaatagtgtaatcattttattaaaatgcatcccacactgcaggacaaatggtccttatggagtgccgcgttctctgtactacgtggctcatggaaaaagtgacaacatggcttcctctaaatcatttcacctttcagtccccacccgcacccgtcccctagagccatagtactgtgttctgaaagccatttagaatttctttgtgagcatgtagtgctttgcacgccacagaagccgtctgccgtgtgtgaggagcatacaatggactttctaaagataaggcgtgggcttccacagtgtctgccagagtttagttctttataccttactgaaaaatgcctcgtggtcttcgcagaggggaaggcctgtctaaagtcaatcatccgagatgggttttccattccaaagaaaggcaatatggttccttccttccctcctaaaatatgacttaacttttaagagaaatgttctgacacccacctaaacacacaaggcacgttcctggcctgtgttcaagggaaatgatcagtcattgcattgttattccaaagagcagccaacagtggcctcccccaggccctaccctgcaatgggattcgctttcatttaatggaaacttctgggactgatgcccaactcagtgcactcaagacgcatctccagttttcgggggaagctggtatttgacatagtgtgttaaacagctcctgagaacctttgggacactctgccatggctggcgtgaggcccagaggaccacgcagaggcaatggtagtacagatgtcacagctgagggtacgatgaggcctgggctcagtgagccaggacgaatgtgacagacaccccttgctgccacagtcagccctttgacgaaggtgggctggtgattctggaagtattggctatagcggtgggcccagtcaactcttccttgtggacttacgacagcagattttctctaggataagcttgtgtggttctgccagtgaagcagagaaccacctgtgctgttgtggaaggcgtgccgttgagggggaaaacgaagcccagtatttgctactgtttttcctttttttactatgacaggaaaataaatgcaattttagtggaattgattgacagtgtctccttactttgaagttttcaccaaagcaaaaaggtccatatccaatagtatcctttgtgctgtggcttgattttggcctattttacattatttggtccaggaaattaggttatattaggttttttgtatactaaaaatcagttatggcacaataaagattttctgtttttaaattgtatttcatctgcttcctccccattctctcactttaagtgacattgaggaaggtattctgtcccacaggtttctgtggacagcgatacagcaggagtcagtgaaatcaactggggagctcacttgagctcttgataagaaatgtggagaaaagtaaaaaccaagctttgaagaaacagaagaaattaatcttttagttagttgaacataccaaagcagaggactggaatctgtttgttctaaccaacccgttctccctggcttggcacgtgccgtgagagcgcagcttgccggagggagggccgctgtgtgcgcctcacatctggctcccagtggaaacttttactcctcctcatccgcagatgtgatagaactgaagtatctaggaattctgcctttgtcatttgttttaatttgtgtgccctgttcattttttttgtctttcccaaatcttggtagtctccttatagttgaagataaaatgttgagtgcacttattttagaatatcctagacataactgtctaagtaaaagcgctctattaatctaaaacactacaagagaatttaacaccatctctcaaatgcttttttggagagcttaatgggattctgaatatttgcaatgtggagtttccgccccgatctcacgtcagtgagggtctcctgtctctcaagtgtgtttcctttggctgttccctaatacaaaacacggacatatttttactcgtagcactcaatttagtaacttctagatgctaccgttgacctgagttaaattcatttagtcgtgtacgtaaaaactctccttttagtgtgttattttcttggccttcccttttaaaggttaaagtttctaacctaagaattaagtacgcgttcaggaagctgttgtctaggccttccccttgtgaatctgggttcattccaatacggcaagtaagagttggaaactttgagaacacagactataaaggcagcagcccgaacactgtcagactctaattggcgaccctgggaaacagttgccctgctattctttaaagaaagacgtttattctgatgataaaaacagttagccagactgtttttaaagcacctggcgggaagcagaaggttggatccaagcccttgttcagatttggtgcctgataagacaggggtttctctttttgtgacctttattattattattttgttaactgttgtaaccagttagctgttgtgttttaagatagaaaggaacaagactaaaattgtaaatactttgtaaacatcagcatttgtacttgaatagtaggattgcaaccaacttaaccagtttcaatagcaaaacacaggaaataaaggcttacttctt

SEQ ID NO: 547903 - DNA, 476 bp, Homo sapiens
  misc_feature (205)..(205): n is a, c, g, or t
  misc_feature (216)..(216): n is a, c, g, or t
  misc_feature (221)..(221): n is a, c, g, or t
  misc_feature (224)..(224): n is a, c, g, or t
  misc_feature (226)..(226): n is a, c, g, or t
  misc_feature (240)..(240): n is a, c, g, or t
  misc_feature (243)..(245): n is a, c, g, or t
  misc_feature (248)..(248): n is a, c, g, or t
  misc_feature (253)..(253): n is a, c, g, or t
  misc_feature (256)..(256): n is a, c, g, or t
gctcgaccatccagccaatggggatgagtccccgggtcatcttacgtccctgcaggatgccatgtgcgagactatggagcagcagctctcctcggaccctgactcggaccctgactgaggatggcagctcttctgctcccccatcaggactggtgctgcttccagagacttccttggggttgcaacctggggaagccacatcccnctggatccacncccgnccncncttctccatcttanaannnccntctcntgnctcccgttctgttcatgatttgcctctggtccagtttctcatctctggactgcaatggtcttcttgtgctagaactcaggctcggctcggagttccacaggagtgttaggggcagggccgtgcaagtcagcccgcatgtgttcagaagctgctgcctgagggcagggcctacctgggcacacagaagagcatatgggagggcaggggtttgggtgtgggt

SEQ ID NO: 547904 - DNA, 3768 bp, Homo sapiens
  misc_feature (361)..(361): n is a, c, g, or t
gcggagagctggagcccagaggagctctgtagcaggcctcgaccggcgaccgccggtctagttatcatcactagcgcccgggaggagccgggagctgccgcagtccggtcccaggtcgaccatcgaccgataacatgagcaggcgaggccgagacccagcgaggcgtctggcgaagcctccggtggtgtccgtcccggcagctgtggtctcctcaccgggagtcaccaccctgcccatgaacgtcgcggggatcagcgtggcgatcggtcagccacagaaggcagcaggacaagagcgcgtgtgctggacaccgaagaccgctgtgcgagcaatagcaggtcaagacatggcgttgtacangctggtaaggcgagacagggctcagttcgctagcagtcagacatggcacatcacagcccccgagggctgtcgacatggggcccggcagccgtccagcagaagatcaccgcacagcagatcaccacccctggcgcgcagcagaaggttgcctacgccgcgcagccggcccttaagacccagtttcttaccacacccatctcccaggcccagaaactggccggggcccagcaagtgcagacccagatccaggttgcaaaacttcctcaagttgttcaacagcaaacacccgtggccagcatccagcaagttgcctctgcttcccagcaggcttctccacagactgtggcgctcacgcaggcgacggcggccgggcagcaggtgcagatgatccctgcagtgaccgcgactgcccaggtggttcagcagaaactcattcagcagcaggtggtgaccacggcgtcggccccgctccagactccaggcgctcccaacccagcccaggtgcccgccagctccgacagcccaagccagcagcccaagttacagatgagggtccctgctgtcaggctaaagacacctactaagcctccgtgccagtagtcagggcagcagggctgcctctcatctaaagcaaaactaccttcctcacagaaaacgctttattagtgaaccttgggaccatgtcacgcaagagattcagcactgggaaagatataattgaaacaaaatagtgtaatcattttattaaaatgcatcccacactgcaggacaaatggtccttatggagtgccgcgttctctgtactacgtggctcatggaaaaagtgacaacatggcttcctctaaatcatttcacctttcagtccccacccgcacccgtcccctagagccatagtactgtgttctgaaagccatttagaatttctttgtgagcatgtagtgctttgcacgccacagaagccgtctgccgtgtgtgaggagcatacaatggactttctaaagataaggcgtgggcttccacagtgtctgccagagtttagttctttataccttactgaaaaatgcctcgtggtcttcgcagaggggaaggcctgtctaaagtcaatcatccgagatgggttttccattccaaagaaaggcaatatggttccttccttccctcctaaaatatgacttaacttttaagagaaatgttctgacacccacctaaacacacaaggcacgttcctggcctgtgttcaagggaaatgatcagtcattgcattgttattccaaagagcagccaacagtggcctcccccaggccctaccctgcaatgggattcgctttcatttaatggaaacttctgggactgatgcccaactcagtgcactcaagacgcatctccagttttcgggggaagctggtatttgacatagtgtgttaaacagctcctgagaacctttgggacactctgccatggctggcgtgaggcccagaggaccacgcagaggcaatggtagtacagatgtcacagctgagggtacgatgaggcctgggctcagtgagccaggacgaatgtgacagacaccccttgctgccacagtcagccctttgacgaaggtgggctggtgattctggaagtattggctatagcggtgggcccagtcaactcttccttgtggacttacgacagcagattttctctaggataagcttgtgtggttctgccagtgaagcagagaaccacctgtgctgttgtggaaggcgtgccgttgagggggaaaacgaagcccagtatttgctactgtttttcctttttttactatgacaggaaaataaatgcaattttagtggaattgattgacagtgtctccttactttgaagttttcaccaaagcaaaaaggtccatatccaatagtatcctttgtgctgtggcttgattttggcctattttacattatttggtccaggaaattaggttatattaggttttttgtatactaaaaatcagttatggcacaataaagattttctgtttttaaattgtatttcatctgcttcctccccattctctcactttaagtgacattgaggaaggtattctgtcccacaggtttctgtggacagcgatacagcaggagtcagtgaaatcaactggggagctcacttgagctcttgataagaaatgtggagaaaagtaaaaaccaagctttgaagaaacagaagaaattaatcttttagttagttgaacataccaaagcagaggactggaatctgtttgttctaaccaacccgttctccctggcttggcacgtgccgtgagagcgcagcttgccggagggagggccgctgtgtgcgcctcacatctggctcccagtggaaacttttactcctcctcatccgcagatgtgatagaactgaagtatctaggaattctgcctttgtcatttgttttaatttgtgtgccctgttcattttttttgtctttcccaaatcttggtagtctccttatagttgaagataaaatgttgagtgcacttattttagaatatcctagacataactgtctaagtaaaagcgctctattaatctaaaacactacaagagaatttaacaccatctctcaaatgcttttttggagagcttaatgggattctgaatatttgcaatgtggagtttccgccccgatctcacgtcagtgagggtctcctgtctctcaagtgtgtttcctttggctgttccctaatacaaaacacggacatatttttactcgtagcactcaatttagtaacttctagatgctaccgttgacctgagttaaattcatttagtcgtgtacgtaaaaactctccttttagtgtgttattttcttggccttcccttttaaaggttaaagtttctaacctaagaattaagtacgcgttcaggaagctgttgtctaggccttccccttgtgaatctgggttcattccaatacggcaagtaagagttggaaactttgagaacacagactataaaggcagcagcccgaacactgtcagactctaattggcgaccctgggaaacagttgccctgctattctttaaagaaagacgtttattctgatgataaaaacagttagccagactgtttttaaagcacctggcgggaagcagaaggttggatccaagcccttgttcagatttggtgcctgataagacaggggtttctctttttgtgacctttattattattattttgttaactgttgtaaccagttagctgttgtgttttaagatagaaaggaacaagactaaaattgtaaatactttgtaaacatcagcatttgtacttgaatagtaggattttaaagggcattgatagcataccaaacaaaaggcaaaataaagtgacctttttataaaaaaaaaaagaaaaagtcgac

SEQ ID NO: 547905 - DNA, 305 bp, Homo sapiens
  misc_feature (6)..(6): n is a, c, g, or t
  misc_feature (179)..(179): n is a, c, g, or t
cgtttnggaggccaaggtgggcagatcacgaggtcaggagatcgagaccatcctggctaacaaggtgctaggattacaggcatgagcaccatgcccggccaagaatgttaatatatcttaaaaattaataaacttacatgttagcaaataacctttttaatgaaaaatattttctaaancaataaaattggaagagtagaattgttttacgcatttgaaaatttgaagatgtctggctccatagagacagctagattcctagatctccttcaacatatagcctgttgtgacttattgtttttgat

SEQ ID NO: 547906 - DNA, 2723 bp, Homo sapiens
tcctcccaccccccagataccaacctaacggctaggtagcgaggctgcgtgttgattttattaaaatgcatcccacactgcaggacaaatggtccttatggagtgccgcgttctctgtactacgtggctcatggaaaaagtgacaacatggcttcctctaaatcatttcacctttcagtccccacccgcacccgtcccctagagccatagtactgtgttctgaaagccatttagaatttctttgtgagcatgtagtgctttgcacgccacagaagccgtctgccgtgtgtgaggagcatacaatggactttctaaagataaggcgtgggcttccacagtgtctgccagagtttagttctttataccttactgaaaaatgcctcgtggtcttcgcagaggggaaggcctgtctaaagtcaatcatccgagatgggttttccattccaaagaaaggcaatatggttccttccttccctcctaaaatatgacttaacttttaagagaaatgttctgacacccacctaaacacacaaggcacgttcctggcctgtgttcaagggaaatgatcagtcattgcattgttattccaaagagcagccaacagtggcctcccccaggccctaccctgcaatgggattcgctttcatttaatggaaacttctgggactgatgcccaactcagtgcactcaagacgcatctccagttttcgggggaagctggtatttgacatagtgtgttaaacagctcctgagaacctttgggacactctgccatggctggcgtgaggcccagaggaccacgcagaggcaatggtagtacagatgtcacagctgagggtacgatgaggcctgggctcagtgagccaggacgaatgtgacagacaccccttgctgccacagtcagccctttgacgaaggtgggctggtgattctggaagtattggctatagcggtgggcccagtcaactcttccttgtggacttacgacagcagattttctctaggataagcttgtgtggttctgccagtgaagcagagaaccacctgtgctgttgtggaaggcgtgccgttgagggggaaaacgaagcccagtatttgctactgtttttcctttttttactatgacaggaaaataaatgcaattttagtggaattgattgacagtgtctccttactttgaagttttcaccaaagcaaaaaggtccatatccaatagtatcctttgtgctgtggcttgattttggcctattttacattatttggtccaggaaattaggttatattaggttttttgtatactaaaaatcagttatggcacaataaagattttctgtttttaaattgtatttcatctgcttcctccccattctctcactttaagtgacattgaggaaggtattctgtcccacaggtttctgtggacagcgatacagcaggagtcagtgaaatcaactggggagctcacttgagctcttgataagaaatgtggagaaaagtaaaaaccaagctttgaagaaacagaagaaattaatcttttagttagttgaacataccaaagcagaggactggaatctgtttgttctaaccaacccgttctccctggcttggcacgtgccgtgagagcgcagcttgccggagggagggccgctgtgtgcgcctcacatctggctcccagtggaaacttttactcctcctcatccgcagatgtgatagaactgaagtatctaggaattctgcctttgtcatttgttttaatttgtgtgccctgttcattttttttgtctttcccaaatcttggtagtctccttatagttgaagataaaatgttgagtgcacttattttagaatatcctagacataactgtctaagtaaaagcgctctattaatctaaaacactacaagagaatttaacaccatctctcaaatgcttttttggagagcttaatgggattctgaatatttgcaatgtggagtttccgccccgatctcacgtcagtgagggtctcctgtctctcaagtgtgtttcctttggctgttccctaatacaaaacacggacatatttttactcgtagcactcaatttagtaacttctagatgctaccgttgacctgagttaaattcatttagtcgtgtacgtaaaaactctccttttagtgtgttattttcttggccttcccttttaaaggttaaagtttctaacctaagaattaagtacgcgttcaggaagctgttgtctaggccttccccttgtgaatctgggttcattccaatacggcaagtaagagttggaaactttgagaacacagactataaaggcagcagcccgaacactgtcagactctaattggcgaccctgggaaacagttgccctgctattctttaaagaaagacgtttattctgatgataaaaacagttagccagactgtttttaaagcacctggcgggaagcagaaggttggatccaagcccttgttcagatttggtgcctgataagacaggggtttctctttttgtgacctttattattattattttgttaactgttgtaaccagttagctgttgtgttttaagatagaaaggaacaagactaaaattgtaaatactttgtaaacatcagcatttgtacttgaatagtaggattttaaagggcattgatagcataccaaacaaaaggcaaaataaagtgacctttttataaaaaaaaaaagaaaaagtcgac

SEQ ID NO: 547907 - DNA, 196 bp, Homo sapiens
taccgatcggctagttctcttactcctctagcctatcttgccctccctgaactacttttaggtaaacgtagtattgatatttttggtttttacccttcagatttgttggcaagaataggagaagcaaccaagcctggtgggacagtggagcacattggtcacattcttgtaaactgggtatggactaggccgatcg

SEQ ID NO: 547908 - DNA, 944 bp, Homo sapiens
  misc_feature (944)..(944): n is a, c, g, or t
ggtactaaacctaaagagaactatgaatagcttctgtcaaagtgatgctcataagatgaccaacagaccttcggaaactgctgcatgttggaagttctgaagcatgtgccatcacagaggaagctgatgacttgaaggctgctgttgccaacttgatggaatcaaccaaaacttgcagtgggtccagtgggagagaacaagatatgctaccagtaaatgtacagcatccagccttcatagtgtggacgagtgtaatgaaaatgggagtgctcagaagaccctcttggatgaaggctattctgtcatgggggattgtacctcagaaatggttagcaagtcatgtaactcctcatgtgagatgcacatggtgagcaaaactaatcctccaaaacaggtagatgaccagagtgatggccttcttactagcaatagctgcactgtgagtcagcgctccacaggggcctgtttccttacagatggggtgtattcccatgaggcttgtgctcagaaggagggcgtctatgagggagcttgcctaagtgatgagactcacattcctatcagagactgccatacaattcactctgtgcattcaaaagaaaacaaatgcactgatgatctggaatcaactgaagaactcaaactgttgacaaaagtcccaaaggttttagcttctggagaattctatgtttcacaatgagtctaatggtctacttttcaaaaggtcatttcgttagttcccaaggccttcctaagtgaactatctgaactggtagacataggccttaaaatttaatgcccgtgaaagggcgaagaacttttggagaacaccgtccctgccggctacagtgaacgaaaaccaattacggataagacgctcactaggggagacccggcgccacggctaaatgaagacacggggcacccaatatatcacaacaatn

SEQ ID NO: 547909 - DNA, 398 bp, Homo sapiens
taagcatagagacaagacggaataaacggaagtaagccaaaaaaaaccggatcggcaggcagataaccagcagcagacgaccgagccatcacgcagtcacaacgccggtcgataaattcagtaccggtgtacccgtactgaatacggacgagagccggatcgtcgccgatccgaacagattgtccctcttcgctaaaaatacgccggaagtagcggtggcgccgacccaccagacttatgtcatcgctttacaggatgcgcatcgcgctcggattactggtgacgatctgcccgccgggagcgatcaccatgatgcctactgacaggttggtgaccaccgaacgataacgtacttcactttcctccagactctgctccatgtactatacatcgattgc

SEQ ID NO: 547910 - DNA, 477 bp, Homo sapiens
gcccaccaaaaaattttttttggggaaacggaaataaaaatttctgcgagcaaaaaaatctacacccccctttgtgggccggggccccccttcaaaaaaacaccgggggcgcctttttttatgtaccccaggggaaaagagctctctcctctaagggggtcttctcccaccaaaggggttttgggggaagggccccccccccatgtttaaaaaacccagccccccccccccccacaaattcggggacaaaattttgggggggtaatacaacccccccgaggccccatttacacaccactggggggcgcccgggcttccctttggggggagaaattgcccacgccccctctggtgaaaaggaaaaacatcagggagccgcccccaaattaaaaaataaatcttctttaagagaatattttccgtcccccccacaaaatgaagaatttcttcgctccaccaaaaggggcttctcccaca

SEQ ID NO: 547911 - DNA, 412 bp, Homo sapiens
tgtacatattacatatgtacatatcgtataagatgaacttctctagtctttccattttctgaaactctttgacccagactcaggctgctagtatgatgtcccataccttataacgtctatatagtttaacccacacggatacccactgtggatcctagattgttttagattataaggctgcttgctaagagtgaaattctcatatcttagggcttgcctttaaaggatgaaagtacagaggctcgtttggctctaaagagaatacgcctttgatatagctgtatgtatatacaggtaagaaacttctcagatattactggctctagtggtctttactgcgtaacatataccccacatttagactctatgtgcccaactgtcttgcctatcgtgtctcctgatgtgctgctcc

SEQ ID NO: 547912 - DNA, 202 bp, Homo sapiens
tgatcgtcggattagcgggattggtgttccacgggctggcgagcagaatgccatgtgccatggagaagtctggcaggaggctgggcccacagtgagaagtaaggcaccattgttggtgcgagggcatagaggtggggcggtggaccaccatttggtaatcttctgtctttgcatattgtgatgggtctcgtctgtaggtatg

SEQ ID NO: 547913 - DNA, 81 bp, Homo sapiens
agcttctacatctgcagtgctagaggaggccggtcgcccactgaagctttctttggacaaggcaccagactcacagttgta

SEQ ID NO: 547914 - DNA, 219 bp, Homo sapiens
acttttattgttggtcttcttgcatcgatgatccaacagcaacaccattttttaattattgtgaaaagattaactggcaatgtacagagtttactcaaagtttttttaagggaaaaccctccaaaaagtcccaaggataccaaatggaaacacatgatgatgcctttgggtttgtatgagaccgtgatgaagtaaaaataaagcccttttgagatggca

SEQ ID NO: 547915 - DNA, 343 bp, Homo sapiens
ctgatggtgtaaagaaatgctcgtgatctatgcccattgattgcgtatcctgagcttattcaggcattcgttatcaatctaagtagtgttggggctccgatgatggcgtgttatgcgatacaacatcatgtcatctgcaagcacagtcaatctgacttcccctgtgcgactttggatagtcttgaactagctctctagcgtgattgccctgtccagaacttccaatcacagggaatgctcccagctcatgctcattcagtatgatataggctggaggtttgtcatacataggtcgcattattaggaggtatgtctcatcaaggcttagtaagctcaaagttat

SEQ ID NO: 547916 - DNA, 116 bp, Homo sapiens
caagccaattgctaaatcagctagcattcatactcggtaacacaataagttggcaacaacaataagtttgtatcttggttattaacatgtatctgggcctggtttgggcagaatat

SEQ ID NO: 547917 - DNA, 147 bp, Homo sapiens
  misc_feature (1)..(1): n is a, c, g, or t
  misc_feature (111)..(111): n is a, c, g, or t
ncttcaggtgacatgccctgctcccctcttcaccctcgatcatgattgtaaacttcgtgaggacatcaccaaaggctgacattgacggcatgcgtcctgtacaatctgcanaacaacgatggaacaaaataaacaccttttctttat

SEQ ID NO: 547918 - DNA, 122 bp, Homo sapiens
ctagtccgagacatattatatatcattactaaatgttaaactattacaacacagccataaaacagcatttgcgtttatggagagagaggatgtgccatcatggttaatgaaaactatctttt

SEQ ID NO: 547919 - DNA, 536 bp, Homo sapiens
aatcccacgatggatcacctgaggtcaggagttcaagaccagcctggccaacaaggtgaaaccctgtctctattaaaaatacaaaaattagctgggcgtgggggcgcgtgcctgtaatcccagctactcaggaggctgaggcaggagaatcacttgaacccaggaggcagaggttgcagtcagccgagattgtgccattgcactccagcctgggcgacaagagcaaaactccgtctacaaaaaaaaaaagggctccaaagaagaaaaggcactgggcgtagcgtcctatccattacgtggagtacttagacaggattccagcaggacgaggcgacatccatggtcccataagaacaggacttgcaagttttcaccaggttattaaagagcctcttaacactaagacataaggagacctcatgctctacagaaaggaagtacaaaaatttcgcggacttggtgggcacgtgcctgtagtcccaatactcagggggctgaggggggaagattccttgagcccaggaggtcaagacggg

SEQ ID NO: 547920 - DNA, 187 bp, Homo sapiens
aattagccgacgcattctactgcagaatgtgttatattgtggatactggaagatgtacagctttttgatttgaacaacgaagtgcataaattagaaacttccaagtgcactggttttggaagagatatatatatataaaatacatttattctgtcaggctaaaaataaagtatgatctttatgattc

SEQ ID NO: 547921 - DNA, 350 bp, Homo sapiens
tttttggagacagagtctggctctgtcacccaggctggagtgcagtggcacatctcggctcactgcaagctccacctcctgggttcacgccattctcctgcctcagcctccccagtggctgggactacaggtgcccgccaccacgcccggctaattttctgtatttttagtagagacggggtttcgccgtgttagccaggatggtctcgatctcctgaccttgtgatccgcccgcctcagcctcccaaagtgctgggattacaagcatgagccactgcaccagacctaaatactatatatttaaaaagcatcaggctggaggtggtggctcatgcctgtaatccgtcgac

SEQ ID NO: 547922 - DNA, 156 bp, Homo sapiens
gtttatccgtccttctggctccagctgctcaaacatgtaccactcacatgaagcccacttgtgggccctgcacacaactatataccccacaatgaattcaggaatgcaaaactcttgcagatttttttcaacgtttctcgggtttttttttgtgtt

SEQ ID NO: 547923 - DNA, 202 bp, Homo sapiens
agctctgtgatgatggatctgagatagtcaagatgcgagccttcgtagatgctatgaccaacgtggatgttattgctggaggtcacacatgatgttcttgttcttaggctccttatatacactgatcagagctttgggttcttgagagagcaacctacagcgattcttgaatgttttatgaatcgacagtgcagggtatcct

SEQ ID NO: 547924 - DNA, 1050 bp, Homo sapiens
  misc_feature (1050)..(1050): n is a, c, g, or t
ggacacacgtggcctcgtgtgtctcaaatacatgaccatgtgtcctgagtgtggcaatgtcccaacattggaagatgtgttggagcgtcatgaaacttcacactgagtgtaaaacccctgaaccacatacggactggcctgcccctgacctgtggccagatgatagtgaaatgcatgtagcctccacctgtggggtgcttctagtgaggacagccacgctcagtgggagtgggcacgatctgccagagtcggagcttgtgccccctgtttgcgcatgtgctgtgcacacatgtccatgcaatgacacgacactgttgcggcgacattgaactgctttgtgcaactgaccaggaacgtcaccttgtgcctgagagttgtgccacagatgccccatgaaatcaagagccaagggtcttgtactcgacccatgacgagattactggctaattcataaccaacttctttccacgggacacgacaaggatgtgggaccctgacacgacttacgccctatctatgataccttacgaacgatcataagacgatacgaagaacaaggaacgcaacaaggggaaaattcaaccttccccttcaaccacagagccaccttatcacactcatcaaccttggcaactggcttctcacggcaacgcgtgggcatgcacgccacgacaagcacgtgcaaccacgtatggtgggcacacattgcgattgggagccgccttgcgcaagacagtatctgactgaggacacgtaccccatatcccccgttgggttccaaccgaaaagttcagacaaacattttacatcagcagatgttgacctcccacaggatcaggggcgaacagcccatcatctatgcagctggagccacagcagcaatgtaccaagtgaccagacccgctcgacccaatggagaccaccccattctataacacacagtcgcagcataggcatcagtgcggatcccacatatcgagtaccaccgatttgatttacagcaacccgaacacgcccagatatcatacggcgcacacaacacaacaccan

SEQ ID NO: 547925 - DNA, 155 bp, Homo sapiens
aacgcagtcatagtaatatggtcagtgttcatgtagtgcttgggtggccctagctcaggcatgctggctcatagaatgagttagaaagtattcctcctcttcaagttttgaaagagttgcaaaggactggcattaattttcgttaaatgtctggt

SEQ ID NO: 547926 - DNA, 288 bp, Homo sapiens
cccaaaaagtgttaattccatgtcacttttctacataccaagtggtccccttcttattctgtataacactaagtactcaaaggacacaacaattaaaagatactttatcttcagtcaatgtagttctactggtataaagtaatggtgggggacgcggttcgtatatttcatctctcacagtacacgtttcccaatcaatctatcggaatacttattagccgaggccaggcgcggtggctcatccctgttatccccgcagtttgggaggctgaggcaggcggctcactt

SEQ ID NO: 547927 - DNA, 426 bp, Homo sapiens
gcacccaggcacttctggatgggaccctgtctggactccacgtggaatttaggcaagacacttagaatatgttctgggatctgggtcaagttgtagtaggggatggacatgggtctcgagagagatgtgcgtggcgcagaagacggacagtgttcattccgcctcacctgggctatggggaagctgggcgtggatggaccagagtgcccggtacggccgcatgagtgtaggagattgatgtgctggagctggtggctggccttcctgaggggtacatgttcatatggaatggtgaggtgtcacccaacctctttgaagaaattgacaaggatggcaacggagaagtcctcctggaagagttctcagagtacattcacgcccaggtggcatctggcaaagggaaactcgctcctggctttgatgctg

SEQ ID NO: 547928 - DNA, 629 bp, Homo sapiens
actaagttatattagaattataggagtttcacataattttggaacatacaccaataacatatttatacaaatacagcccaaagaaaaccaaacaccatttcacatttgacaatgcttcctatataatttttataccaaataagccaaattatgtcattttaggactttagggaaactaagatcttaaaggattaattaggttagaaaaatacataatttataatttgattttggaaagcttgtcaaatacaaaaggtttaaaacacttgacattacaaaataaaattacaggtcatcgtaaagtcatttatttaatccaagtgataattcaaggatttcaaaaaaagcaaaaaccttcattctttgagagaggtgacttaactttctaaacaagaagccctaataaaaacagcctgaagccaatcacatttgatttttaaaattttgtaaacaaactataagatttaatcttgattttaaaatataactttcataagccttttataacctttatgaaagagttggttaatgctttaaaaaaaccttgctaataagacacaaggggtgcctatactgaattttgataagtgtgccttttaacttgaaggattaatttataaagaaactgg

SEQ ID NO: 547929 - DNA, 184 bp, Homo sapiens
tcaacaccatggaagcgagtaactgcgtgaatacattcacactcttttaggtatattttgtactttcaaaataatatgacatcttaattgtggttctgtgcattctttcgaagacaatatttgcttattcatgtagcgagccagaccacaactactcgacgatctgctgctactaccatacgtg

SEQ ID NO: 547930 - DNA, 891 bp, Homo sapiens
ggaacaacaacaataaaaaaaactactgatcgttactgactttgcctaatatacacaagcagctgatgtactattaatgagagcgaatatacacattaggaaaatggacgccattccaacctagtggtatgggcaaggatggggaagagaaggggaaactattcatagtggatcgtggagttacattgaattaggcccctcctgaaaaggtggttgtcattggcattaattcaaagcaggtaatatgcaggaatgtaactgaggattatcttcaggcaatcagcaagatatcctcctcatggtccctttagctctcaaaggagcaatgagaatcctccggtctcatgtttactggctgtggttgtgctgctgaacaatactatcttctcaaattccatgccagaaattcagccaataacttttggatgtgaatttaacaaagatactgtaattggatgctgatgtggacaagaatatattgatttcgattgtcactcccgaatgtgatggcaccagtcttttatataggctgctgtggtatttgtaaaaccagaaggttctttaaattatgttgcaaggtgatctttggtgaatgtggggggggaatggctaagtgattaggttcgaagacacagctttaaatgatttagaatgggaggattcggggtacgttcaggaaataaagggatcctgggggtgtaccctcaggggagttgggaatgtttttttaaatctagagtcctggaacaatttagaaagatttatgggggtgtttaggatttcggccataatgaaagagcgttggtggggaacataaaacgtctttaagaaaaaaaaaaattgtggggcgcgaaaaaaaagggggcgggaagatatttgacagagggacag

SEQ ID NO: 547931 - DNA, 111 bp, Homo sapiens
aaccgtcctgcccacagtggataacttccctttctgaagttgattataccaaggaacaataggaatcattaggacaaattattattactgcttcatggtgcgacgatagct

SEQ ID NO: 547932 - DNA, 474 bp, Homo sapiens
actcatgcgtgtaagcatctgtaagacacgaacagtggtcaccaagagatcatgtgcactacaagcccatgtcatttaaatgaaagaaaaaaaccttggaaataaagtggtacatgcaaactttaacttccttagataccatgctgcagatttcagcactgttaagggtatagcaagaatgcccaaccctctggtgtctgatcatgtatctagcaacatggcagtatgaagaaaggagatgccccggtctcagcccatggactagttaatacagtgaagcaggttcctgtcttttacccttcctgctcagaacataaaagattaaggactaaaatcacggaagactgggagttttagagctggcaccatgacgtctaaaagataaatcaaggcaaacaattactgagaacttggcctgtagcttaacctggcaagtctaaaagcctttctttaaccttgtaggaattagatgca

SEQ ID NO: 547933 - DNA, 368 bp, Homo sapiens
tgtaaatgcattcaggatcatactaccataatcttggatgaataggcatctgtgttccatctatccatactaatctcctatagtcaataggtcactgtaccacagctcctttagtgtatactcccacacatgttcacacaacctgggcaagctgaaaaacttcaccatatccttaaattctgcttccttttctctgacggaaactgaggttctctattctgtcacgcaggtctagagcgcaacacctgaatcatggctcacttgaaacctctgtccttcctgggttcaagctatcttcctcacttcagtcctgactgaatatagctgggattacatgagtcgtgtgcctatcacgcccaactacttat

SEQ ID NO: 547934 - DNA, 328 bp, Homo sapiens
ggtggcctgacgcgaggtggtgcgtctcttggcctgctctactcgttatgtccggttgaacgtgtctgaacatgtcggtcattcccaggttctctagtgggcttcctgaggtcgacttcagtctccagggagaacttgggcagaaccaggaggcgggtgcagcctggtcatgttgccttaccagtggccgatgagctgggcactcagaatgttggtgagggcagagagaggcacctctttatcataaggggcagcaatgaacatgctgagggtgtccccgtggtagggcagttccaggatgtcgtaataaggggccatcgggcggaga

SEQ ID NO: 547935 - DNA, 232 bp, Homo sapiens
gaatcttggtacgtaagaatcatagggagaagagccaggcactgtcatagtcccagaatcttctgacagtgttatgcccttgaactatgggctacttgttccctagagcaatagttcttttttttttttttttggaaataatttcttgccttgtggcccaggcggaattgcagtgattgaccccattcgcggctctcaccgcacccctccgccctccggggttacaaacaat

SEQ ID NO: 547936 - DNA, 9882 bp, Homo sapiens
agcggggcggcggcgcggcttccatcctcccgccctcctgacgcggccggagcgcagccctgaggcccagggagaacgacacattggatacagaagggaggtgatcatgcaccatggcactggcccccagaacgtccagcatcagctgcagaggtccagggcctgccctggcagcgagggtgaggagcagccggcccaccccaacccacccccgtcccccgcagctcccttcgctccctcagcaagcccgtcggcaccccagtctcccagttatcaaatacagcagctgatgaataggagccctgcaaccgggcagaacgtgaacatcaccctgcagagcgtgggccctgtcgtcgggggaaaccagcagatcacactggccccactgccgctccccagccccacctctccaggcttccagttcagcgctcagcctcggcggtttgagcatgggtctccatcatacattcaggtcacgtcccccttgtcccagcaggtccagacccagagtcccacgcagcccagtccggggccggggcaggccttgcagaatgtgcgtgcaggtgcccctggccctgggctgggcctctgcagcagcagccctacaggggacttcgtggatgccagcgtgctggtgaggcagatcagcttgagcccctccagtggtggacactttgtgtttcaggatgggtcagggctcacccagatcgcccagggagcccaggttcagctccagcacccgggtacgcccatcacagtccgagagcggagaccctcccagccccacacacagtcagggggcaccatccaccacctgggaccccagagccctgcagccgcgggtggggccggcctgcagcccctggccagcccaagccacatcaccacggctaacttgccaccgcagatcagcagcatcatccagggccagctggttcagcagcagcaggtgctgcaggggccgccgctgccccggcccctgggcttcgagaggacgcccggcgtgctgctccccggggctgggggcgcagcggggtttgggatgacgtccccacccccgcccaccagcccttccaggactgccgtgcccccaggcctttccagcctcccactcacgtctgtggggaacacgggaatgaagaaggttcccaagaagttagaggagattcccccagcctctccggagatggcacagatgaggaagcagtgcctggactatcattaccaggagatgcaggctctgaaggaggtcttcaaggagtatttgattgaactgtttttcttgcaacactttcaagggaacatgatggatttcttagctttcaaggagagactgtatggaccattacaagcatatcttaggcagaatgatttggacattgaagaagaggaggaggaggaggaagaggaggaagaaaaatctgaggttatcaatgacgagcagcaagccctcgcagggagcctggtagcaggggccggaagcacagtagagacggacctgtttaagaggcagcaggcgatgccctccacaggtatggcagagcagtctaagaggcctcgccttgaagtgggtcaccaaggggtagttttccagcacccaggggcggacgcaggcgttcctctccagcaactaatgccgaccgcacaaggaggaatgccccccacgccgcaggccgcgcagctcgctggacagaggcagagtcagcagcagtatgacccctccacggggcctcccgtgcagaacgctgccagcttgcacaccccactgccgcagctgcccgggaggctgcccccagccggtgttcccactgcagccctctcctctgcgctgcagtttgcacagcagccgcaagtggtagaggcccagacacagctccaaatcccggtgaagactcagcagcccaatgttcccatccctgcaccgcccagcagccaactccccatccctccctcgcagcctgcacagctggccctccacgttcccacacctggaaaggtgcaggtgcaggcctctcagctttcctccctgccacagatggtagcatcgacaaggctccctgtggaccctgccccgccctgcccacggcctctgcccacctcttctacctcgtccctcgcgcctgtgagtggctccggcccaggaccctcccctgctcgatcctctccagtaaatagaccttcctcagccaccaataaggcactatctccagtcacttcccggaccccaggggtggtggcatctgcccccaccaaaccacagagtcctgctcagaatgccacctcgtcccaagacagttctcaggatacgctgacagaacaaataactctggagaaccaggtgcatcagcgcattgcggagctgaggaaagcaggtctgtggtcccagaggcgtctgccaaagctgcaggaggccccacgccccaagtcccactgggactatctgctggaggagatgcagtggatggccacagactttgcccaggagaggaggtggaaggtggctgctgcgaagaagctcgttagaactgtggtgcgccatcacgaggagaagcagctccgtgaagaaagggggaagaaggaagagcagagcagactgaggcggatagccgcctccacggcccgggagatagagtgcttttggtcgaatattgaacaggttgtggaaataaaactacgagtagaattagaagaaaaaaggaagaaggccttaaatttacagaaagtttccaggagagggaaagaattgagacctaaaggatttgacgcattacaggaaagttctctggattcaggaatgtctggaagaaaaagaaaagctagcatatctttgactgatgacgaagtggacgatgaagaggaaacaattgaagaggaggaagcaaatgaaggcgttgtggaccaccaaacagaactttctaatttagccaaggaagctgagctgcccctcctggacctgatgaagctgtacgaaggcgccttcctgccgagttctcagtggccccggccgaagcctgatggggaggacacaagcggagaggaagatgcagatgactgtccaggcgacagggagagtcgcaaggacttggttctcatcgactcgcttttcatcatggatcagttcaaagctgccgagaggatgaatatcgggaagccaaacgccaaggacattgcggacgtcactgcggtggctgaagccatcctgccgaagggcagtgctcgggtcacaacctcggtcaagtttaatgctccatctttgttgtatggggctctcagagattatcagaagattggcctggactggctggccaaactttacaggaagaatctcaatggcatattggcagatgaagctgggctgggtaaaacagtgcagatcattgctttttttgcccacctagcttgtaacgaaggtaattggggcccccatcttgttgttgtgagaagttgtaacatactcaagtgggagcttgaattgaaacgttggtgtcccggactcaaaatcctctcatatattggcagccacagagaactcaaagcaaagagacaggagtgggccgaacccaacagcttccacgtctgcatcacgtcctacactcagttcttccggggcctcaccgccttcacacgagtgcgctggaagtgcctggtcattgatgagatgcagcgcgtgaagggcatgaccgagaggcactgggaagcggttttcaccctgcagagccaacaacgtctgcttctgatcgactcgccgctgcacaataccttcctggagctctggaccatggtgcacttcctggtcccagggatctccaggccctacctgagctcccctctgagggcccccagtgaagagagccaggattactaccataaagtggtcataaggttacacagggtgacacagccatttattttgaggagaactaagagagatgtggaaaagcaactaacaaagaaatatgagcatgttttgaagtgtcgcctttctaaccgacaaaaagccttatacgaggacgttatcctgcaacctggcactcaggaggccttgaagagcgggcactttgtcaacgtcctgagcatccttgtgcggctgcagcgcatctgcaaccaccctgggctcgtcgagccccggcacccaggctcttcctacgtggcggggccactggagtatccgtccgcatctctaatcctgaaggcactggagagagatttctggaaggaagcagatctttctatgtttgatctcatcggcttagaaaataaaatcactcgtcacgaggcagagttgctgtctaagaaaaagataccgcggaaactcatggaggaaatctccacttcagcagccccagcagcccgaccagcagcagcaaagctgaaggccagcaggttgtttcagcctgtgcagtatggccagaagcccgagggtcgcaccgtggctttccccagcactcacccgccccggacggcagcccccaccacggcctctgctgctccacagggcccgcttcgaggacggccgcccatcgccacgttctctgccaatccggaggcaaaaggtggagaggtagtgaaaatagctcagctggcatccatcacaggaccacagagccgcgtggctcagccagagacgccggtgacactgcagttccagggcagcaagttcaccctgtcacacagccagctccggcagctcacagcgggccagccgctgcagctgcaaggcagcgtcctccagatcgtgtccgcccccgggcagccctaccttcgagcccctggccctgtggtgatgcagaccgtgtctcaggcgggcgctgtgcacggcgccctgggaagcaagcccccggccggcggtcccagccctgcacccttgaccccacaagttggcgttccgggccgcgtggcggtgaatgccttggctgtaggagaacccggaacggcctccaaaccagcttctcccattggagggccgacccaggaggaaaagaccagactcttgaaagagcgcctggatcagatttatttagtcaacgagcggcgctgttctcaagctccagtctatggcagagacttgctaaggatttgtgccctgcctagccatggaagggtacagtggcgtgggtccctggatggccgtcgtgggaaggaggccgggccagcgcacagttacacttcatcctcagaaagtccaagtgagctgatgttgacgctttgtcggtgtggagagtctctgcaggatgttattgacagggtggcctttgtgattcctccggtggtggcagcacccccgtccctacgggtgccgcggccgccacccctgtacagccacagaatgaggatcttgaggcagggcctgagagagcacgctgcgccgtacttccagcagctgcggcagaccacggctccacgcctgctgcagttccctgagctgaggctggtgcagttcgactcagggaagttggaagctttagctatcttgcttcagaaattgaaatctgaaggacgtcgggtgctgattttatcacagatgattcttatgttggacattttagagatgttcttgaacttccattacctcacctatgtaagaatcgatgaaaatgccagcagtgagcaacggcaggaactgatgaggagtttcaacagagacaggcggattttttgtgccattctctccactcacagccgtaccacaggtataaaccttgtagaggcggacaccgtcgtgttttatgacaatgacctgaatccagtgatggatgccaaagctcaggagtggtgcgataggatcgggagatgcaaagacatccacatatacaggcttgtgagtggcaattccattgaagagaaattgttgaaaaatggaactaaagatctgatccgagaagtggctgctcagggaaatgactactccatggctttcttaactcagcgaaccatccaggagctgtttgaagtttattctcccatggatgatgctggcttcccggtcaaagctgaggagtttgtggtgctttctcaggaaccttctgtcacggaaaccattgcacccaaaattgcaagacctttcatagaggccctcaagagtattgagtatctggaggaggatgcccagaagtccgcacaggagggggtgctgggaccacacactgatgctctgtcatcagactctgagaacatgccgtgtgatgaagaaccatcccaattagaggagctagctgacttcatggagcagcttacaccaattgaaaaatatgctttaaattacctggaattattccatacttctattgagcaagaaaaggagagaaacagtgaggacgcagtgatgactgcagtgagggcatgggagttctggaacctgaagaccctgcaggagagggaggcccggctgcggctggagcaggaggaggcggagctcctgacctacacgcgagaggatgcctacagcatggagtatgtctacgaagatgtcgatgggcagacagaagtcatgccgctctggaccccacccaccccgccgcaggacgacagcgacatctacctcgactcggtcatgtgtctcatgtatgaagccactcccatcccagaggctaagctgccccctgtgtacgtgaggaaggagcggaagcgacacaaaacagacccctcagctgcaggcaggaagaagaagcagcgtcacggggaggcggtcgtccctcctcggtccctgtttgaccgcgcaacaccaggacttctgaaaattcgcagagagggcaaggagcagaagaagaatattctgctgaagcagcaggtgccattcgccaagcccctgccaacttttgccaaacccacagctgagcctggtcaagacaaccccgagtggctcatcagtgaggactgggcgctgctgcaggctgtaaagcagttactggagctgcctttgaacctcacaatcgtgtcacctgctcacacacctaattgggatcttgtcagtgacgttgttaactcctgtagccgaatctaccgctcttccaaacagtgccggaatcgctacgagaatgtcatcattccacgagaggaggggaagagtaaaaacaaccgtcctctccgtacgagccagatctatgcccaggatgagaatgccacacacacccagctgtacacgagccactttgacttaatgaaaatgactgctggcaagaggagtcccccaatcaaacctctgcttggcatgaatccctttcagaagaaccccaagcacgcgtctgtgttggcagaaagtggaatcaactatgacaagccgctgcctcccatccaggtggcatctctccgtgcagagcgaatcgcaaaagagaaaaaggctctggctgatcagcagaaggcacagcagccggccgtggcccagccacccccgccccagccgcagcccccaccacccccgcagcagccaccgccaccgctgccacaaccacaggcagcgggcagccagccgccagcagggccaccagctgtccagccccaaccccagccacagccccagacccagccacagcctgtgcaggccccagcgaaggcgcagcccgcaatcacgacggggggcagtgcagccgtactggcaggaaccattaaaacatcagttactgggacgagcatgcccactggtgccgtgagtggaaatgtgatcgtgaacaccatcgcaggggtcccagctgccaccttccagtccatcaacaagcgcctggcgtcgccagtggctcctggggccttgactacgccgggaggctctgctcccgcccaggtggtgcacacccagcccccgccacgggcagtcggctccccagccacggcgacccctgacctggtgtccatggcaacgactcagggtgttcgagcggtcacttctgtgacagcctcggccgtggtcactaccaacctgaccccagtgcagaccccggcacggtctttggtgccccaagtgtcccaagccacaggagttcagctccctggaaaaaccatcacacctgcacatttccagcttctcaggcagcagcagcagcagcagcagcaacagcagcagcagcagcagcagcagcagcagcagcagcagcagcagcaacagcagcagcagcaacagacgacgacgacctctcaggtgcaagttccacagatccagggccaggcccagtccccagcacagatcaaagctgtgggcaagctgacgccggaacacctcatcaaaatgcagaagcagaaactgcagatgcccccgcagcccccaccgccacaggcccagtctgcgcccccgcagccagcagcccaagtgcaagtgcagacctcgcagccgccgcagcagcagagcccccagctcacgacggtcacggccccaaggcctggtgccctgctgacgggcaccaccgtggccaacctccaggtggcccggctcacccgggttcccacttctcaactgcagtcgcaagggcagatgcagacccaggcaccccagccagcccaggtgcccttggcgaagcctccggtggtgtccgtcccggcagctgtggtctcctcaccgggagtcaccaccctgcccatgaacgtcgcggggatcagcgtggcgatcggtcagccacagaaggcagcaggacagaccgtggtggcccagcccgtgcacatgcagcagctgctgaagctgaagcagcaggccgtccagcagcagaaggccatccagccccaggctgcacagggcccggcagccgtccagcagaagatcaccgcacagcagatcaccacccctggcgcgcagcagaaggttgcctacgccgcgcagccggcccttaagacccagtttcttaccacacccatctcccaggcccagaaactggccggggcccagcaagtgcagacccagatccaggttgcaaaacttcctcaagttgttcaacagcaaacacccgtggccagcatccagcaagttgcctctgcttcccagcaggcttctccacagactgtggcgctcacgcaggcgacggcggccgggcagcaggtgcagatgatccctgcagtgaccgcgactgcccaggtggttcagcagaaactcattcagcagcaggtggtgaccacggcgtcggccccgctccagactccaggcgctcccaacccagcccaggtgcccgccagctccgacagcccaagccagcagcccaagttacagatgagggtccctgctgtcaggctaaagacacctactaagcctccgtgccagtagtcagggcagcagggctgcctctcatctaaagcaaaactaccttcctcacagaaaacgctttattagtgaaccttgggaccatgtcacgcaagagattcagcactgggaaagatataattgaaacaaaatagtgtaatcattttattaaaatgcatcccacactgcaggacaaatggtccttatggagtgccgcgttctctgtactacgtggctcatggaaaaagtgacaacatggcttcctctaaatcatttcacctttcagtccccacccgcacccgtcccctagagccatagtactgtgttctgaaagccatttagaatttctttgtgagcatgtagtgctttgcacgccacagaagccgtctgccgtgtgtgaggagcatacaatggactttctaaagataaggcgtgggcttccacagtgtctgccagagtttagttctttattattattattttgttaactgttgtaaccagttagctgttgtgttttaagatagaaaggaacaagactaaaattgtaaatactttgtaaacatcagcatttgtacttgaatagtaggattttaaagggcattgatagcataccaaacaaaaggcaaaataaagtgacctttttataaaaaaaaaaagaaaaagtcgac

SEQ ID NO: 547937 - DNA, 777 bp, Homo sapiens
gagcggacgtgaggtgtgcgcgcgcgcggacgcgcggcggacgctggaactgctgcagctgcctgcgccgcccggaggaaccttgatccccgtgctccggacaccccgggccctcgccatggcgtgaccagctgcactgagcgagcagctcgcagagttcaaggaggccttctccctctttgacaaggatggcgcatggcactatcaccacccaggcacgcttggggaccgctgactgagatcccctgggcacaggaaccccactgaagccagagctgccggcatctgatcacatgcaggctggcatgccccactgtggcacccgggcacccattgaccttccccggaagcttccctggacccatgcactggccacgccacagcatgcaacgcgacaccacgaaccaccctgacggacacgcagatccctgcagcaaggggcggttacccagcgtgatcctgtctgaaccacacgggactgggcgaacttggacctacccatttcactgacggcccgcccagaagccttggcggtctttccccctgttaaccttgaacccaaaacccccttgaggtggggactgcaacacggcccgcacccccggaatgcaacgggtacggccttgggcaatcgaaccaactggcactgccacgcgggcacggggcgtgcacatcacttccggcatgcgcagcacatgaggcgcccgggctccaccctgtcgtcgacatcaggcttcatggctccacacggcatttactgcacccgccacacatgaa

SEQ ID NO: 547938 - DNA, 6651 bp, Homo sapiens
agcggggcggcggcgcggcttccatcctcccgccctcctgacgcggccggagcgcagccctgaggcccagggagaacgacacattggatacagaagggaggtgatcatgcaccatggcactggcccccagaacgtccagcatcagctgcagaggtccagggcctgccctggcagcgagggtgaggagcagccggcccaccccaacccacccccgtcccccgcagctcccttcgctccctcagcaagcccgtcggcaccccagtctcccagttatcaaatacagcagctgatgaataggagccctgcaaccgggcagaacgtgaacatcaccctgcagagcgtgggccctgtcgtcgggggaaaccagcagatcacactggccccactgccgctccccagccccacctctccaggcttccagttcagcgctcagcctcggcggtttgagcatgggtctccatcatacattcaggtcacgtcccccttgtcccagcaggtccagacccagagtcccacgcagcccagtccggggccggggcaggccttgcagaatgtgcgtgcaggtgcccctggccctgggctgggcctctgcagcagcagccctacaggggacttcgtggatgccagcgtgctggtgaggcagatcagcttgagcccctccagtggtggacactttgtgtttcaggatgggtcagggctcacccagatcgcccagggagcccaggttcagctccagcacccgggtacgcccatcacagtccgagagcggagaccctcccagccccacacacagtcagggggcaccatccaccacctgggaccccagagccctgcagccgcgggtggggccggcctgcagcccctggccagcccaagccacatcaccacggctaacttgccaccgcagatcagcagcatcatccagggccagctggttcagcagcagcaggtgctgcaggggccgccgctgccccggcccctgggcttcgagaggacgcccggcgtgctgctccccggggctgggggcgcagcggggtttgggatgacgtccccacccccgcccaccagcccttccaggactgccgtgcccccaggcctttccagcctcccactcacgtctgtggggaacacgggaatgaagaaggttcccaagaagttagaggagattcccccagcctctccggagatggcacagatgaggaagcagtgcctggactatcattaccaggagatgcaggctctgaaggaggtcttcaaggagtatttgattgaactgtttttcttgcaacactttcaagggaacatgatggatttcttagctttcaaggagagactgtatggaccattacaagcatatcttaggcagaatgatttggacattgaagaagaggaggaggaggaggaagaggaggaagaaaaatctgaggttatcaatgacgagcagcaagccctcgcagggagcctggtagcaggggccggaagcacagtagagacggacctgtttaagaggcagcaggcgatgccctccacaggtatggcagagcagtctaagaggcctcgccttgaagtgggtcaccaaggggtagttttccagcacccaggggcggacgcaggcgttcctctccagcaactaatgccgaccgcacaaggaggaatgccccccacgccgcaggccgcgcagctcgctggacagaggcagagtcagcagcagtatgacccctccacggggcctcccgtgcagaacgctgccagcttgcacaccccactgccgcagctgcccgggaggctgcccccagccggtgttcccactgcagccctctcctctgcgctgcagtttgcacagcagccgcaagtggtagaggcccagacacagctccaaatcccggtgaagactcagcagcccaatgttcccatccctgcaccgcccagcagccaactccccatccctccctcgcagcctgcacagctggccctccacgttcccacacctggaaaggtgcaggtgcaggcctctcagctttcctccctgccacagatggtagcatcgacaaggctccctgtggaccctgccccgccctgcccacggcctctgcccacctcttctacctcgtccctcgcgcctgtgagtggctccggcccaggaccctcccctgctcgatcctctccagtaaatagaccttcctcagccaccaataaggcactatctccagtcacttcccggaccccaggggtggtggcatctgcccccaccaaaccacagagtcctgctcagaatgccacctcgtcccaagacagttctcaggatacgctgacagaacaaataactctggagaaccaggtgcatcagcgcattgcggagctgaggaaagcaggtctgtggtcccagaggcgtctgccaaagctgcaggaggccccacgccccaagtcccactgggactatctgctggaggagatgcagtggatggccacagactttgcccaggagaggaggtggaaggtggctgctgcgaagaagctcgttagaactgtggtgcgccatcacgaggagaagcagctccgtgaagaaagggggaagaaggaagagcagagcagactgaggcggatagccgcctccacggcccgggagatagagtgcttttggtcgaatattgaacaggttgtggaaataaaactacgagtagaattagaagaaaaaaggaagaaggccttaaatttacagaaagtttccaggagagggaaagaattgagacctaaaggatttgacgcattacaggaaagttctctggattcaggaatgtctggaagaaaaagaaaagctagcatatctttgactgatgacgaagtggacgatgaagaggaaacaattgaagaggaggaagcaaatgaaggcgttgtggaccaccaaacagaactttctaatttagccaaggaagctgagctgcccctcctggacctgatgaagctgtacgaaggcgccttcctgccgagttctcagtggccccggccgaagcctgatggggaggacacaagcggagaggaagatgcagatgactgtccaggcgacagggagagtcgcaaggacttggttctcatcgactcgcttttcatcatggatcagttcaaagctgccgagaggatgaatatcgggaagccaaacgccaaggacattgcggacgtcactgcggtggctgaagccatcctgccgaagggcagtgctcgggtcacaacctcggtcaagtttaatgctccatctttgttgtatggggctctcagagattatcagaagattggcctggactggctggccaaactttacaggaagaatctcaatggcatattggcagatgaagctgggctgggtaaaacagtgcagatcattgctttttttgcccacctagcttgtaacgaaggtaattggggcccccatcttgttgttgtgagaagttgtaacatactcaagtgggagcttgaattgaaacgttggtgtcccggactcaaaatcctctcatatattggcagccacagagaactcaaagcaaagagacaggagtgggccgaacccaacagcttccacgtctgcatcacgtcctacactcagttcttccggggcctcaccgccttcacacgagtgcgctggaagtgcctggtcattgatgagatgcagcgcgtgaagggcatgaccgagaggcactgggaagcggttttcaccctgcagagccaacaacgtctgcttctgatcgactcgccgctgcacaataccttcctggagctctggaccatggtgcacttcctggtcccagggatctccaggccctacctgagctcccctctgagggcccccagtgaagagagccaggattactaccataaagtggtcataaggttacacagggtgacacagccatttattttgaggagaactaagagagatgtggaaaagcaactaacaaagaaatatgagcatgttttgaagtgtcgcctttctaaccgacaaaaagccttatacgaggacgttatcctgcaacctggcactcaggaggccttgaagagcgggcactttgtcaacgtcctgagcatccttgtgcggctgcagcgcatctgcaaccaccctgggctcgtcgagccccggcacccaggctcttcctacgtggcggggccactggagtatccgtccgcatctctaatcctgaaggcactggagagagatttctggaaggaagcagatctttctatgtttgatctcatcggcttagaaaataaaatcactcgtcacgaggcagagttgctgtctaagaaaaagataccgcggaaactcatggaggaaatctccacttcagcagccccagcagcccgaccagcagcagcaaagctgaaggccagcaggttgtttcagcctgtgcagtatggccagaagcccgagggtcgcaccgtggctttccccagcactcacccgccccggacggcagcccccaccacggcctctgctgctccacagggcccgcttcgaggacggccgcccatcgccacgttctctgccaatccggaggcaaaaggtggagaggtagtgaaaatagctcagctggcatccatcacaggaccacagagccgcgtggctcagccagagacgccggtgacactgcagttccagggcagcaagttcaccctgtcacacagccagctccggcagctcacagcgggccagccgctgcagctgcaaggcagcgtcctccagatcgtgtccgcccccgggcagccctaccttcgagcccctggccctgtggtgatgcagaccgtgtctcaggcgggcgctgtgcacggcgccctgggaagcaagcccccggccggcggtcccagccctgcacccttgaccccacaagttggcgttccgggccgcgtggcggtgaatgccttggctgtaggagaacccggaacggcctccaaaccagcttctcccattggagggccgacccaggaggaaaagaccagactcttgaaagagcgcctggatcagatttatttagtcaacgagcggcgctgttctcaagctccagtctatggcagagacttgctaaggatttgtgccctgcctagccatggaagggtacagtggcgtgggtccctggatggccgtcgtgggaaggaggccgggccagcgcacagttacacttcatcctcagaaagtccaagtgagctgatgttgacgctttgtcggtgtggagagtctctgcaggatgttattgacagggtggcctttgtgattcctccggtggtggcagcacccccgtccctacgggtgccgcggccgccacccctgtacagccacagaatgaggatcttgaggcagggcctgagagagcacgctgcgccgtacttccagcagctgcggcagaccacggctccacgcctgctgcagttccctgagctgaggctggtgcagttcgactcagggaagttggaagctttagctatcttgcttcagaaattgaaatctgaaggacgtcgggtgctgattttatcacagatgattcttatgttggacattttagagatgttcttgaacttccattacctcacctatgtaagaatcgatgaaaatgccagcagtgagcaacggcaggaactgatgaggagtttcaacagagacaggcggattttttgtgccattctctccactcacagccgtaccacaggtataaaccttgtagaggcggacaccgtcgtgttttatgacaatgacctgaatccagtgatggatgccaaagctcaggagtggtgcgataggatcgggagatgcaaagacatccacatatacaggcttgtgagtggcaattccattgaagagaaattgttgaaaaatggaactaaagatctgatccgagaagtggctgctcagggaaatgactactccatggctttcttaactcagcgaaccatccaggagctgtttgaagtttattctcccatggatgatgctggcttcccggtcaaagctgaggagtttgtggtgctttctcaggaaccttctgtcacggaaaccattgcacccaaaattgcaagacctttcatagaggccctcaagagtattgagtatctggaggaggatgcccagaagtccgcacaggagggggtgctgggaccacacactgatgctctgtcatcagactctgagaacatgccgtgtgatgaagaaccatcccaattagaggagctagctgacttcatggagcagcttacaccaattgaaaaatatgctttaaattacctggaattattccatacttctattgagcaagaaaaggagagaaacagtgaggacgcagtgatgactgcagtgagggcatgggagttctggaacctgaagaccctgcaggagagggaggcccggctgcggctggagcaggaggaggcggagctcctgacctacacgcgagaggatggtgtgaccccatatatgattttctttaaggatggtttagaaaatggaaaaatgttacaatgtggcattatttggatctatcacccgtcatcatactggttctgtgtcatcacacacaccgacttagacaatggcggtgtcatctgaaccctcattatgaatggatatgggggggagcctgtttaagaaaactgtcgtgtgtccaataagctttc

SEQ ID NO: 547939 - DNA, 6687 bp, Homo sapiens
agcggggcggcggcgcggcttccatcctcccgccctcctgacgcggccggagcgcagccctgaggcccagggagaacgacacattggatacagaagggaggtgatcatgcaccatggcactggcccccagaacgtccagcatcagctgcagaggtccagggcctgccctggcagcgagggtgaggagcagccggcccaccccaacccacccccgtcccccgcagctcccttcgctccctcagcaagcccgtcggcaccccagtctcccagttatcaaatacagcagctgatgaataggagccctgcaaccgggcagaacgtgaacatcaccctgcagagcgtgggccctgtcgtcgggggaaaccagcagatcacactggccccactgccgctccccagccccacctctccaggcttccagttcagcgctcagcctcggcggtttgagcatgggtctccatcatacattcaggtcacgtcccccttgtcccagcaggtccagacccagagtcccacgcagcccagtccggggccggggcaggccttgcagaatgtgcgtgcaggtgcccctggccctgggctgggcctctgcagcagcagccctacaggggacttcgtggatgccagcgtgctggtgaggcagatcagcttgagcccctccagtggtggacactttgtgtttcaggatgggtcagggctcacccagatcgcccagggagcccaggttcagctccagcacccgggtacgcccatcacagtccgagagcggagaccctcccagccccacacacagtcagggggcaccatccaccacctgggaccccagagccctgcagccgcgggtggggccggcctgcagcccctggccagcccaagccacatcaccacggctaacttgccaccgcagatcagcagcatcatccagggccagctggttcagcagcagcaggtgctgcaggggccgccgctgccccggcccctgggcttcgagaggacgcccggcgtgctgctccccggggctgggggcgcagcggggtttgggatgacgtccccacccccgcccaccagcccttccaggactgccgtgcccccaggcctttccagcctcccactcacgtctgtggggaacacgggaatgaagaaggttcccaagaagttagaggagattcccccagcctctccggagatggcacagatgaggaagcagtgcctggactatcattaccaggagatgcaggctctgaaggaggtcttcaaggagtatttgattgaactgtttttcttgcaacactttcaagggaacatgatggatttcttagctttcaaggagagactgtatggaccattacaagcatatcttaggcagaatgatttggacattgaagaagaggaggaggaggaggaagaggaggaagaaaaatctgaggttatcaatgacgagcagcaagccctcgcagggagcctggtagcaggggccggaagcacagtagagacggacctgtttaagaggcagcaggcgatgccctccacaggtatggcagagcagtctaagaggcctcgccttgaagtgggtcaccaaggggtagttttccagcacccaggggcggacgcaggcgttcctctccagcaactaatgccgaccgcacaaggaggaatgccccccacgccgcaggccgcgcagctcgctggacagaggcagagtcagcagcagtatgacccctccacggggcctcccgtgcagaacgctgccagcttgcacaccccactgccgcagctgcccgggaggctgcccccagccggtgttcccactgcagccctctcctctgcgctgcagtttgcacagcagccgcaagtggtagaggcccagacacagctccaaatcccggtgaagactcagcagcccaatgttcccatccctgcaccgcccagcagccaactccccatccctccctcgcagcctgcacagctggccctccacgttcccacacctggaaaggtgcaggtgcaggcctctcagctttcctccctgccacagatggtagcatcgacaaggctccctgtggaccctgccccgccctgcccacggcctctgcccacctcttctacctcgtccctcgcgcctgtgagtggctccggcccaggaccctcccctgctcgatcctctccagtaaatagaccttcctcagccaccaataaggcactatctccagtcacttcccggaccccaggggtggtggcatctgcccccaccaaaccacagagtcctgctcagaatgccacctcgtcccaagacagttctcaggatacgctgacagaacaaataactctggagaaccaggtgcatcagcgcattgcggagctgaggaaagcaggtctgtggtcccagaggcgtctgccaaagctgcaggaggccccacgccccaagtcccactgggactatctgctggaggagatgcagtggatggccacagactttgcccaggagaggaggtggaaggtggctgctgcgaagaagctcgttagaactgtggtgcgccatcacgaggagaagcagctccgtgaagaaagggggaagaaggaagagcagagcagactgaggcggatagccgcctccacggcccgggagatagagtgcttttggtcgaatattgaacaggttgtggaaataaaactacgagtagaattagaagaaaaaaggaagaaggccttaaatttacagaaagtttccaggagagggaaagaattgagacctaaaggatttgacgcattacaggaaagttctctggattcaggaatgtctggaagaaaaagaaaagctagcatatctttgactgatgacgaagtggacgatgaagaggaaacaattgaagaggaggaagcaaatgaaggcgttgtggaccaccaaacagaactttctaatttagccaaggaagctgagctgcccctcctggacctgatgaagctgtacgaaggcgccttcctgccgagttctcagtggccccggccgaagcctgatggggaggacacaagcggagaggaagatgcagatgactgtccaggcgacagggagagtcgcaaggacttggttctcatcgactcgcttttcatcatggatcagttcaaagctgccgagaggatgaatatcgggaagccaaacgccaaggacattgcggacgtcactgcggtggctgaagccatcctgccgaagggcagtgctcgggtcacaacctcggtcaagtttaatgctccatctttgttgtatggggctctcagagattatcagaagattggcctggactggctggccaaactttacaggaagaatctcaatggcatattggcagatgaagctgggctgggtaaaacagtgcagatcattgctttttttgcccacctagcttgtaacgaaggtaattggggcccccatcttgttgttgtgagaagttgtaacatactcaagtgggagcttgaattgaaacgttggtgtcccggactcaaaatcctctcatatattggcagccacagagaactcaaagcaaagagacaggagtgggccgaacccaacagcttccacgtctgcatcacgtcctacactcagttcttccggggcctcaccgccttcacacgagtgcgctggaagtgcctggtcattgatgagatgcagcgcgtgaagggcatgaccgagaggcactgggaagcggttttcaccctgcagagccaacaacgtctgcttctgatcgactcgccgctgcacaataccttcctggagctctggaccatggtgcacttcctggtcccagggatctccaggccctacctgagctcccctctgagggcccccagtgaagagagccaggattactaccataaagtggtcataaggttacacagggtgacacagccatttattttgaggagaactaagagagatgtggaaaagcaactaacaaagaaatatgagcatgttttgaagtgtcgcctttctaaccgacaaaaagccttatacgaggacgttatcctgcaacctggcactcaggaggccttgaagagcgggcactttgtcaacgtcctgagcatccttgtgcggctgcagcgcatctgcaaccaccctgggctcgtcgagccccggcacccaggctcttcctacgtggcggggccactggagtatccgtccgcatctctaatcctgaaggcactggagagagatttctggaaggaagcagatctttctatgtttgatctcatcggcttagaaaataaaatcactcgtcacgaggcagagttgctgtctaagaaaaagataccgcggaaactcatggaggaaatctccacttcagcagccccagcagcccgaccagcagcagcaaagctgaaggccagcaggttgtttcagcctgtgcagtatggccagaagcccgagggtcgcaccgtggctttccccagcactcacccgccccggacggcagcccccaccacggcctctgctgctccacagggcccgcttcgaggacggccgcccatcgccacgttctctgccaatccggaggcaaaaggtggagaggtagtgaaaatagctcagctggcatccatcacaggaccacagagccgcgtggctcagccagagacgccggtgacactgcagttccagggcagcaagttcaccctgtcacacagccagctccggcagctcacagcgggccagccgctgcagctgcaaggcagcgtcctccagatcgtgtccgcccccgggcagccctaccttcgagcccctggccctgtggtgatgcagaccgtgtctcaggcgggcgctgtgcacggcgccctgggaagcaagcccccggccggcggtcccagccctgcacccttgaccccacaagttggcgttccgggccgcgtggcggtgaatgccttggctgtaggagaacccggaacggcctccaaaccagcttctcccattggagggccgacccaggaggaaaagaccagactcttgaaagagcgcctggatcagatttatttagtcaacgagcggcgctgttctcaagctccagtctatggcagagacttgctaaggatttgtgccctgcctagccatggaagggtacagtggcgtgggtccctggatggccgtcgtgggaaggaggccgggccagcgcacagttacacttcatcctcagaaagtccaagtgagctgatgttgacgctttgtcggtgtggagagtctctgcaggatgttattgacagggtggcctttgtgattcctccggtggtggcagcacccccgtccctacgggtgccgcggccgccacccctgtacagccacagaatgaggatcttgaggcagggcctgagagagcacgctgcgccgtacttccagcagctgcggcagaccacggctccacgcctgctgcagttccctgagctgaggctggtgcagttcgactcagggaagttggaagctttagctatcttgcttcagaaattgaaatctgaaggacgtcgggtgctgattttatcacagatgattcttatgttggacattttagagatgttcttgaacttccattacctcacctatgtaagaatcgatgaaaatgccagcagtgagcaacggcaggaactgatgaggagtttcaacagagacaggcggattttttgtgccattctctccactcacagccgtaccacaggtataaaccttgtagaggcggacaccgtcgtgttttatgacaatgacctgaatccagtgatggatgccaaagctcaggagtggtgcgataggatcgggagatgcaaagacatccacatatacaggcttgtgagtggcaattccattgaagagaaattgttgaaaaatggaactaaagatctgatccgagaagtggctgctcagggaaatgactactccatggctttcttaactcagcgaaccatccaggagctgtttgaagtttattctcccatggatgatgctggcttcccggtcaaagctgaggagtttgtggtgctttctcaggaaccttctgtcacggaaaccattgcacccaaaattgcaagacctttcatagaggccctcaagagtattgagtatctggaggaggatgcccagaagtccgcacaggagggggtgctgggaccacacactgatgctctgtcatcagactctgagaacatgccgtgtgatgaagaaccatcccaattagaggagctagctgacttcatggagcagcttacaccaattgaaaaatatgctttaaattacctggaattattccatacttctattgagcaagaaaaggagagaaacagtgaggacgcagtgatgactgcagtgagggcatgggagttctggaacctgaagaccctgcaggagagggaggcccggctgcggctggagcaggaggaggcggagctcctgacctacacgcgagaggatgcctacagcatggtacccggcccggggccctcctgccctcttgcccccctgctgaggggcacttgtgcagccatgtttggcttgttcaaagtctgtgtacattgacatgagaaaatgcctaggaatttttacttctcatatcaacacaacctaacttatgttctaaaaacacaattttcttaaaaattgacacttggagattgtcagttagatattgaccagctctgattaaaacatttataagtcttata

SEQ ID NO: 547940 - DNA, 5882 bp, Homo sapiens
agcggggcggcggcgcggcttccatcctcccgccctcctgacgcggccggagcgcagccctgaggcccagggagaacgacacattggatacagaagggaggtgatcatgcaccatggcactggcccccagaacgtccagcatcagctgcagaggtccagggcctgccctggcagcgagggtgaggagcagccggcccaccccaacccacccccgtcccccgcagctcccttcgctccctcagcaagcccgtcggcaccccagtctcccagttatcaaatacagcagctgatgaataggagccctgcaaccgggcagaacgtgaacatcaccctgcagagcgtgggccctgtcgtcgggggaaaccagcagatcacactggccccactgccgctccccagccccacctctccaggcttccagttcagcgctcagcctcggcggtttgagcatgggtctccatcatacattcaggtcacgtcccccttgtcccagcaggtccagacccagagtcccacgcagcccagtccggggccggggcaggccttgcagaatgtgcgtgcaggtgcccctggccctgggctgggcctctgcagcagcagccctacaggggacttcgtggatgccagcgtgctggtgaggcagatcagcttgagcccctccagtggtggacactttgtgtttcaggatgggtcagggctcacccagatcgcccagggagcccaggttcagctccagcacccgggtacgcccatcacagtccgagagcggagaccctcccagccccacacacagtcagggggcaccatccaccacctgggaccccagagccctgcagccgcgggtggggccggcctgcagcccctggccagcccaagccacatcaccacggctaacttgccaccgcagatcagcagcatcatccagggccagctggttcagcagcagcaggtgctgcaggggccgccgctgccccggcccctgggcttcgagaggacgcccggcgtgctgctccccggggctgggggcgcagcggggtttgggatgacgtccccacccccgcccaccagcccttccaggactgccgtgcccccaggcctttccagcctcccactcacgtctgtggggaacacgggaatgaagaaggttcccaagaagttagaggagattcccccagcctctccggagatggcacagatgaggaagcagtgcctggactatcattaccaggagatgcaggctctgaaggaggtcttcaaggagtatttgattgaactgtttttcttgcaacactttcaagggaacatgatggatttcttagctttcaaggagagactgtatggaccattacaagcatatcttaggcagaatgatttggacattgaagaagaggaggaggaggaggaagaggaggaagaaaaatctgaggttatcaatgacgagcagcaagccctcgcagggagcctggtagcaggggccggaagcacagtagagacggacctgtttaagaggcagcaggcgatgccctccacaggtatggcagagcagtctaagaggcctcgccttgaagtgggtcaccaaggggtagttttccagcacccaggggcggacgcaggcgttcctctccagcaactaatgccgaccgcacaaggaggaatgccccccacgccgcaggccgcgcagctcgctggacagaggcagagtcagcagcagtatgacccctccacggggcctcccgtgcagaacgctgccagcttgcacaccccactgccgcagctgcccgggaggctgcccccagccggtgttcccactgcagccctctcctctgcgctgcagtttgcacagcagccgcaagtggtagaggcccagacacagctccaaatcccggtgaagactcagcagcccaatgttcccatccctgcaccgcccagcagccaactccccatccctccctcgcagcctgcacagctggccctccacgttcccacacctggaaaggtgcaggtgcaggcctctcagctttcctccctgccacagatggtagcatcgacaaggctccctgtggaccctgccccgccctgcccacggcctctgcccacctcttctacctcgtccctcgcgcctgtgagtggctccggcccaggaccctcccctgctcgatcctctccagtaaatagaccttcctcagccaccaataaggcactatctccagtcacttcccggaccccaggggtggtggcatctgcccccaccaaaccacagagtcctgctcagaatgccacctcgtcccaagacagttctcaggatacgctgacagaacaaataactctggagaaccaggtgcatcagcgcattgcggagctgaggaaagcaggtctgtggtcccagaggcgtctgccaaagctgcaggaggccccacgccccaagtcccactgggactatctgctggaggagatgcagtggatggccacagactttgcccaggagaggaggtggaaggtggctgctgcgaagaagctcgttagaactgtggtgcgccatcacgaggagaagcagctccgtgaagaaagggggaagaaggaagagcagagcagactgaggcggatagccgcctccacggcccgggagatagagtgcttttggtcgaatattgaacaggttgtggaaataaaactacgagtagaattagaagaaaaaaggaagaaggccttaaatttacagaaagtttccaggagagggaaagaattgagacctaaaggatttgacgcattacaggaaagttctctggattcaggaatgtctggaagaaaaagaaaagctagcatatctttgactgatgacgaagtggacgatgaagaggaaacaattgaagaggaggaagcaaatgaaggcgttgtggaccaccaaacagaactttctaatttagccaaggaagctgagctgcccctcctggacctgatgaagctgtacgaaggcgccttcctgccgagttctcagtggccccggccgaagcctgatggggaggacacaagcggagaggaagatgcagatgactgtccaggcgacagggagagtcgcaaggacttggttctcatcgactcgcttttcatcatggatcagttcaaagctgccgagaggatgaatatcgggaagccaaacgccaaggacattgcggacgtcactgcggtggctgaagccatcctgccgaagggcagtgctcgggtcacaacctcggtcaagtttaatgctccatctttgttgtatggggctctcagagattatcagaagattggcctggactggctggccaaactttacaggaagaatctcaatggcatattggcagatgaagctgggctgggtaaaacagtgcagatcattgctttttttgcccacctagcttgtaacgaaggtaattggggcccccatcttgttgttgtgagaagttgtaacatactcaagtgggagcttgaattgaaacgttggtgtcccggactcaaaatcctctcatatattggcagccacagagaactcaaagcaaagagacaggagtgggccgaacccaacagcttccacgtctgcatcacgtcctacactcagttcttccggggcctcaccgccttcacacgagtgcgctggaagtgcctggtcattgatgagatgcagcgcgtgaagggcatgaccgagaggcactgggaagcggttttcaccctgcagagccaacaacgtctgcttctgatcgactcgccgctgcacaataccttcctggagctctggaccatggtgcacttcctggtcccagggatctccaggccctacctgagctcccctctgagggcccccagtgaagagagccaggattactaccataaagtggtcataaggttacacagggtgacacagccatttattttgaggagaactaagagagatgtggaaaagcaactaacaaagaaatatgagcatgttttgaagtgtcgcctttctaaccgacaaaaagccttatacgaggacgttatcctgcaacctggcactcaggaggccttgaagagcgggcactttgtcaacgtcctgagcatccttgtgcggctgcagcgcatctgcaaccaccctgggctcgtcgagccccggcacccaggctcttcctacgtggcggggccactggagtatccgtccgcatctctaatcctgaaggcactggagagagatttctggaaggaagcagatctttctatgtttgatctcatcggcttagaaaataaaatcactcgtcacgaggcagagttgctgtctaagaaaaagataccgcggaaactcatggaggaaatctccacttcagcagccccagcagcccgaccagcagcagcaaagctgaaggccagcaggttgtttcagcctgtgcagtatggccagaagcccgagggtcgcaccgtggctttccccagcactcacccgccccggacggcagcccccaccacggcctctgctgctccacagggcccgcttcgaggacggccgcccatcgccacgttctctgccaatccggaggcaaaaggtggagaggtagtgaaaatagctcagctggcatccatcacaggaccacagagccgcgtggctcagccagagacgccggtgacactgcagttccagggcagcaagttcaccctgtcacacagccagctccggcagctcacagcgggccagccgctgcagctgcaaggcagcgtcctccagatcgtgtccgcccccgggcagccctaccttcgagcccctggccctgtggtgatgcagaccgtgtctcaggcgggcgctgtgcacggcgccctgggaagcaagcccccggccggcggtcccagccctgcacccttgaccccacaagttggcgttccgggccgcgtggcggtgaatgccttggctgtaggagaacccggaacggcctccaaaccagcttctcccattggagggccgacccaggaggaaaagaccagactcttgaaagagcgcctggatcagatttatttagtcaacgagcggcgctgttctcaagctccagtctatggcagagacttgctaaggatttgtgccctgcctagccatggaagggtacagtggcgtgggtccctggatggccgtcgtgggaaggaggccgggccagcgcacagttacacttcatcctcagaaagtccaagtgagctgatgttgacgctttgtcggtgtggagagtctctgcaggatgttattgacagggtggcctttgtgattcctccggtggtggcagcacccccgtccctacgggtgccgcggccgccacccctgtacagccacagaatgaggatcttgaggcagggcctgagagagcacgctgcgccgtacttccagcagctgcggcagaccacggctccacgcctgctgcagttccctgagctgaggctggtgcagttcgactcagggaagttggaagctttagctatcttgcttcagaaattgaaatctgaaggacgtcgggtgctgattttatcacagatgattcttatgttggacattttagagatgttcttgaacttccattacctcacctatgtaagaatcgatgaaaatgccagcagtgagcaacggcaggaactgatgaggagtttcaacagagacaggcggattttttgtgccattctctccactcacagccgtaccacaggtataaaccttgtagaggcggacaccgtcgtgttttatgacaatgacctgaatccagtgatggatgccaaagctcaggagtggtgcgataggatcgggagatgcaaagacatccacatatacaggtgaaggcctgcggggggatggatcaggagatgcaaagacatccacatatacaggtgaagggcctgcg

SEQ ID NO: 547941 - DNA, 567 bp, Homo sapiens
cgggcatcagggggatgaagaagagcataggataatagctaacgcatgtggggcttaatacctaggcacctaggctgtgggtggataggtacagcaaatcatcatagtgcacgtttacctatgtaacaaaccggcatgtcctgcacatgtatcctggaacttaaaataaaattttaaaaaaataaaaagataacaagagtactgaaaatgggctcacagttccacagcctgtacagcaagcatgatgctgacatctgctcagcttctgcggaggcctcaggagacttcataatcatgtgggaagggaaagcaagagcaggaggaagagagagagggggaaggtcctacacactttaaacaacaagatctcatgagaactctatcacaagagcagcgctagggtaatttaatgtcggcaaaggatggttagataattttagaaagaaggttggcttaaaatatgtcacaatagcagaaggggcagcttctgccaacgaagaggcagcagatgaattcccagataccattaagaaaatcatggagaccaggcatggtggctcacgtcta

SEQ ID NO: 547942 - DNA, 3055 bp, Homo sapiens
  misc_feature (2337)..(2337): n is a, c, g, or t
  misc_feature (2343)..(2343): n is a, c, g, or t
  misc_feature (2348)..(2348): n is a, c, g, or t
  misc_feature (2354)..(2354): n is a, c, g, or t
  misc_feature (2360)..(2360): n is a, c, g, or t
  misc_feature (2365)..(2365): n is a, c, g, or t
  misc_feature (2369)..(2369): n is a, c, g, or t
  misc_feature (2372)..(2372): n is a, c, g, or t
  misc_feature (2375)..(2375): n is a, c, g, or t
  misc_feature (2377)..(2378): n is a, c, g, or t
  misc_feature (2391)..(2391): n is a, c, g, or t
  misc_feature (2400)..(2400): n is a, c, g, or t
  misc_feature (2402)..(2402): n is a, c, g, or t
  misc_feature (2404)..(2404): n is a, c, g, or t
  misc_feature (2419)..(2419): n is a, c, g, or t
ctggctccgcgtcggccggtcggtttggtcggttgtagtggcctcgccgcccggtccgctgtcgcagcgctcatccgcgccgggagcccttggctgcgtcgcccggcagccgcgggagcatttcctgaagacgtagtcatgcagcacgtcagcagctcccagagcagccagcgccatgtccagtggcctggggcctgccccggcgcgggcgaggagcagccagcgtgctcccagccgtccctgcccctcacactgccatcccccagccaccaactacagcagctgatggtccagacccagagtcccacgcagcccagtccggggccggggcaggccttgcagaatgtgcgtgcaggtgcccctggccctgggctgggcctctgcagcagcagccctacaggggacttcgtggatgccagcgtgctggtgaggcagatcagcttgagcccctccagtggtggacactttgtgtttcaggatgggtcagggctcacccagatcgcccagggagcccaggttcagctccagcacccgggtacgcccatcacagtccgagagcggagaccctcccagccccacacacagtcagggggcaccatccaccacctgggaccccagagccctgcagccgcgggtggggccggcctgcagcccctggccagcccaagccacatcaccacggctaacttgccaccgcagatcagcagcatcatccagggccagctggttcagcagcagcaggtgctgcaggggccgccgctgccccggcccctgggcttcgagaggacgcccggcgtgctgctccccggggctgggggcgcagcggggtttgggatgacgtccccacccccgcccaccagcccttccaggactgccgtgcccccaggcctttccagcctcccactcacgtctgtggggaacacgggaatgaagaaggttcccaagaagttagaggagattcccccagcctctccggagatggcacagatgaggaagcagtgcctggactatcattaccaggagatgcaggctctgaaggaggtcttcaaggagtatttgattgaactgtttttcttgcaacactttcaagggaacatgatggatttcttagctttcaaggagagactgtatggaccattacaagcatatcttaggcagaatgatttggacattgaagaagaggaggaggaggaggaagaggaggaagaaaaatctgaggttatcaatgacgaggtaaaggttgtgacaggaaaggatgggcagactgggactcccgttgctatagcaacccagcttccgccaaaggtttctgctgctttttcatcccagcagcaaccatttcagcaagccctcgcagggagcctggtagcaggggccggaagcacagtagagacggacctgtttaagaggcagcaggcgatgccctccacaggtatggcaggaggaatgccccccacgccgcaggccgcgcagctcgctggacagaggcagagtcagcagcagtatgacccctccacggggcctcccgtgcagaacgctgccagcttgcacaccccactgccgcagctgcccgggaggctgcccccagccggtgttcccactgcagccctctcctctgcgctgcagtttgcacagcagccgcaagtggtagaggcccagacacagctccaaatcccggtgaagactcagcagcccaatgttcccatccctgcaccgcccagcagccaactccccatccctccctcgcagcctgcacagctggccctccacgttcccacacctggaaaggtgcaggtgcaggcctctcagctttcctccctgccacagatggtagcatcgacaaggctccctgtggaccctgccccgccctgcccacggcctctgcccacctcttctacctcgtccctcgcgcctgtgagtggctccggcccaggaccctcccctgctcgatcctctccagtaaatagaccttcctcagccaccaataaggcactatctccagtcacttcccggaccccaggggtggtggcatctgcccccaccaaaccacagagtcctgctcagaatgccacctcgtcccaagacagttctcaggatacgctgacagaacaaataactctggagaaccaggtgcatcagcgcattgcggagctgaggaaagcaggtctgtggtcccagaggcgtctgccaaagctgcaggaggccccacgccccaagtcccactgggactatctgctggaggagatgcagtggatggccacagactttgcccaggagaggaggtggaaggtggctgctgcgaagaagctcgttagaactgtggcccggcagccaggncaggangcganggaggncggggncagangganganccnannaggcgaggcagangtcacctgnantnccagagaaatcgagngtccctggtctagtactgcgcaggtaaagattccagcatcttggaagcaagtgctccactggaaaataaaagccacgtggagcacttgattagactccagaaacagaaactgcagctgctcccaccacccccaccaccacaggccctgcccggggcacagccaaccacacaagtgcaagtgcagccgtcacccgcctaccacagcagagcccccagctcaccacagtcacggccccgagacccagagccctgttgatgggcaccaccatggccaacctccagactcgagtttccacctcccacctgcaaggcccaagactgacgtcagcgctgacgtaccagatggcccaggttgctgtggccacgccccctgtggtgtctgtcctggcagttgtggtgctgtcagccagggtcacagtgcttccatcaacgcaacgggatcagtgttgtgataaggcagctgcaaaaagcggcaggtaggcagccaccttcgcctcaccaaactcgaaacaactcacttgagtgagttgcatcaaacctttctaaatttctcattctagaagttgctgagttgttctgccatgtgttaacttttttttcttatcagtaaaatcttttatttggtttataaaaaaa

SEQ ID NO: 547943 - DNA, 3023 bp, Homo sapiens
  misc_feature (2337)..(2337): n is a, c, g, or t
  misc_feature (2343)..(2343): n is a, c, g, or t
  misc_feature (2348)..(2348): n is a, c, g, or t
  misc_feature (2354)..(2354): n is a, c, g, or t
  misc_feature (2360)..(2360): n is a, c, g, or t
  misc_feature (2365)..(2365): n is a, c, g, or t
  misc_feature (2369)..(2369): n is a, c, g, or t
  misc_feature (2372)..(2372): n is a, c, g, or t
  misc_feature (2375)..(2375): n is a, c, g, or t
  misc_feature (2377)..(2378): n is a, c, g, or t
  misc_feature (2391)..(2391): n is a, c, g, or t
  misc_feature (2400)..(2400): n is a, c, g, or t
  misc_feature (2402)..(2402): n is a, c, g, or t
  misc_feature (2404)..(2404): n is a, c, g, or t
  misc_feature (2419)..(2419): n is a, c, g, or t
ctggctccgcgtcggccggtcggtttggtcggttgtagtggcctcgccgcccggtccgctgtcgcagcgctcatccgcgccgggagcccttggctgcgtcgcccggcagccgcgggagcatttcctgaagacgtagtcatgcagcacgtcagcagctcccagagcagccagcgccatgtccagtggcctggggcctgccccggcgcgggcgaggagcagccagcgtgctcccagccgtccctgcccctcacactgccatcccccagccaccaactacagcagctgatggtccagacccagagtcccacgcagcccagtccggggccggggcaggccttgcagaatgtgcgtgcaggtgcccctggccctgggctgggcctctgcagcagcagccctacaggggacttcgtggatgccagcgtgctggtgaggcagatcagcttgagcccctccagtggtggacactttgtgtttcaggatgggtcagggctcacccagatcgcccagggagcccaggttcagctccagcacccgggtacgcccatcacagtccgagagcggagaccctcccagccccacacacagtcagggggcaccatccaccacctgggaccccagagccctgcagccgcgggtggggccggcctgcagcccctggccagcccaagccacatcaccacggctaacttgccaccgcagatcagcagcatcatccagggccagctggttcagcagcagcaggtgctgcaggggccgccgctgccccggcccctgggcttcgagaggacgcccggcgtgctgctccccggggctgggggcgcagcggggtttgggatgacgtccccacccccgcccaccagcccttccaggactgccgtgcccccaggcctttccagcctcccactcacgtctgtggggaacacgggaatgaagaaggttcccaagaagttagaggagattcccccagcctctccggagatggcacagatgaggaagcagtgcctggactatcattaccaggagatgcaggctctgaaggaggtcttcaaggagtatttgattgaactgtttttcttgcaacactttcaagggaacatgatggatttcttagctttcaaggagagactgtatggaccattacaagcatatcttaggcagaatgatttggacattgaagaagaggaggaggaggaggaagaggaggaagaaaaatctgaggttatcaatgacgaggtaaaggttgtgacaggaaaggatgggcagactgggactcccgttgctatagcaacccagcttccgccaaaggtttctgctgctttttcatcccagcagcaaccatttcagcaagccctcgcagggagcctggtagcaggggccggaagcacagtagagacggacctgtttaagaggcagcaggcgatgccctccacaggtatggcaggaggaatgccccccacgccgcaggccgcgcagctcgctggacagaggcagagtcagcagcagtatgacccctccacggggcctcccgtgcagaacgctgccagcttgcacaccccactgccgcagctgcccgggaggctgcccccagccggtgttcccactgcagccctctcctctgcgctgcagtttgcacagcagccgcaagtggtagaggcccagacacagctccaaatcccggtgaagactcagcagcccaatgttcccatccctgcaccgcccagcagccaactccccatccctccctcgcagcctgcacagctggccctccacgttcccacacctggaaaggtgcaggtgcaggcctctcagctttcctccctgccacagatggtagcatcgacaaggctccctgtggaccctgccccgccctgcccacggcctctgcccacctcttctacctcgtccctcgcgcctgtgagtggctccggcccaggaccctcccctgctcgatcctctccagtaaatagaccttcctcagccaccaataaggcactatctccagtcacttcccggaccccaggggtggtggcatctgcccccaccaaaccacagagtcctgctcagaatgccacctcgtcccaagacagttctcaggatacgctgacagaacaaataactctggagaaccaggtgcatcagcgcattgcggagctgaggaaagcaggtctgtggtcccagaggcgtctgccaaagctgcaggaggccccacgccccaagtcccactgggactatctgctggaggagatgcagtggatggccacagactttgcccaggagaggaggtggaaggtggctgctgcgaagaagctcgttagaactgtggcccggcagccaggncaggangcganggaggncggggncagangganganccnannaggcgaggcagangtcacctgnantnccagagaaatcgagngtccctggtctagtactgcgcaggtaaagattccagcatcttggaagcaagtgctccactggaaaataaaagccacgtggagcacttgattagactccagaaacagaaactgcagctgctcccaccacccccaccaccacaggccctgcccggggcacagccaaccacacaagtgcaagtgcagccgtcacccgcctaccacagcagagcccccagctcaccacagtcacggccccgagacccagagccctgttgatgggcaccaccatggccaacctccagactcgagtttccacctcccacctgcaaggcccaagactgacgtcagcgctgacgtaccagatggcccaggttgctgtggccacgccccctgtggtgtctgtcctggcagttgtggtgctgtcagccagggtcacagtgcttccatcaacgcaacgggatcagtgttgtgataaggcagctgcaaaaagcggcagtgggcaacagatttgagcagacactccaccaaagaagctctctaggtggcaaataagcactgtcctctgggaaatgcaaataaaaatcacaatgagaaactactgcacacccgtgagaatgccttaaa

SEQ ID NO: 547944 - DNA, 2918 bp, Homo sapiens
  misc_feature (2337)..(2337): n is a, c, g, or t
  misc_feature (2343)..(2343): n is a, c, g, or t
  misc_feature (2348)..(2348): n is a, c, g, or t
  misc_feature (2354)..(2354): n is a, c, g, or t
  misc_feature (2360)..(2360): n is a, c, g, or t
  misc_feature (2365)..(2365): n is a, c, g, or t
  misc_feature (2369)..(2369): n is a, c, g, or t
  misc_feature (2372)..(2372): n is a, c, g, or t
  misc_feature (2375)..(2375): n is a, c, g, or t
  misc_feature (2377)..(2378): n is a, c, g, or t
  misc_feature (2391)..(2391): n is a, c, g, or t
  misc_feature (2400)..(2400): n is a, c, g, or t
  misc_feature (2402)..(2402): n is a, c, g, or t
  misc_feature (2404)..(2404): n is a, c, g, or t
  misc_feature (2419)..(2419): n is a, c, g, or t
ctggctccgcgtcggccggtcggtttggtcggttgtagtggcctcgccgcccggtccgctgtcgcagcgctcatccgcgccgggagcccttggctgcgtcgcccggcagccgcgggagcatttcctgaagacgtagtcatgcagcacgtcagcagctcccagagcagccagcgccatgtccagtggcctggggcctgccccggcgcgggcgaggagcagccagcgtgctcccagccgtccctgcccctcacactgccatcccccagccaccaactacagcagctgatggtccagacccagagtcccacgcagcccagtccggggccggggcaggccttgcagaatgtgcgtgcaggtgcccctggccctgggctgggcctctgcagcagcagccctacaggggacttcgtggatgccagcgtgctggtgaggcagatcagcttgagcccctccagtggtggacactttgtgtttcaggatgggtcagggctcacccagatcgcccagggagcccaggttcagctccagcacccgggtacgcccatcacagtccgagagcggagaccctcccagccccacacacagtcagggggcaccatccaccacctgggaccccagagccctgcagccgcgggtggggccggcctgcagcccctggccagcccaagccacatcaccacggctaacttgccaccgcagatcagcagcatcatccagggccagctggttcagcagcagcaggtgctgcaggggccgccgctgccccggcccctgggcttcgagaggacgcccggcgtgctgctccccggggctgggggcgcagcggggtttgggatgacgtccccacccccgcccaccagcccttccaggactgccgtgcccccaggcctttccagcctcccactcacgtctgtggggaacacgggaatgaagaaggttcccaagaagttagaggagattcccccagcctctccggagatggcacagatgaggaagcagtgcctggactatcattaccaggagatgcaggctctgaaggaggtcttcaaggagtatttgattgaactgtttttcttgcaacactttcaagggaacatgatggatttcttagctttcaaggagagactgtatggaccattacaagcatatcttaggcagaatgatttggacattgaagaagaggaggaggaggaggaagaggaggaagaaaaatctgaggttatcaatgacgaggtaaaggttgtgacaggaaaggatgggcagactgggactcccgttgctatagcaacccagcttccgccaaaggtttctgctgctttttcatcccagcagcaaccatttcagcaagccctcgcagggagcctggtagcaggggccggaagcacagtagagacggacctgtttaagaggcagcaggcgatgccctccacaggtatggcaggaggaatgccccccacgccgcaggccgcgcagctcgctggacagaggcagagtcagcagcagtatgacccctccacggggcctcccgtgcagaacgctgccagcttgcacaccccactgccgcagctgcccgggaggctgcccccagccggtgttcccactgcagccctctcctctgcgctgcagtttgcacagcagccgcaagtggtagaggcccagacacagctccaaatcccggtgaagactcagcagcccaatgttcccatccctgcaccgcccagcagccaactccccatccctccctcgcagcctgcacagctggccctccacgttcccacacctggaaaggtgcaggtgcaggcctctcagctttcctccctgccacagatggtagcatcgacaaggctccctgtggaccctgccccgccctgcccacggcctctgcccacctcttctacctcgtccctcgcgcctgtgagtggctccggcccaggaccctcccctgctcgatcctctccagtaaatagaccttcctcagccaccaataaggcactatctccagtcacttcccggaccccaggggtggtggcatctgcccccaccaaaccacagagtcctgctcagaatgccacctcgtcccaagacagttctcaggatacgctgacagaacaaataactctggagaaccaggtgcatcagcgcattgcggagctgaggaaagcaggtctgtggtcccagaggcgtctgccaaagctgcaggaggccccacgccccaagtcccactgggactatctgctggaggagatgcagtggatggccacagactttgcccaggagaggaggtggaaggtggctgctgcgaagaagctcgttagaactgtggcccggcagccaggncaggangcganggaggncggggncagangganganccnannaggcgaggcagangtcacctgnantnccagagaaatcgagngtccctggtctagtactgcgcaggtaaagattccagcatcttggaagcaagtgctccactggaaaataaaagccacgtggagcacttgattagactccagaaacagaaactgcagctgctcccaccacccccaccaccacaggccctgcccggggcacagccaaccacacaagtgcaagtgcagccgtcacccgcctaccacagcagagcccccagctcaccacagtcacggccccgagacccagagccctgttgatgggcaccaccatggccaacctccagactcgagtttccacctcccacctgcaaggcccaagactgacgtcagcgctgacgtaccagatggcccaggttgctgtggccacgccccctgtggtgtctgtcctggcagttgtggtgctgtcagccagggtcacagtgcttccatcaacgcaacgggatcagtgtgtgggcagtcgtgtaatggcacagattgaccgacctcaccgagcttttgtgc

SEQ ID NO: 547945 - DNA, 950 bp, Homo sapiens
ctggctccgcgtcggccggtcggtttggtcggttgtagtggcctcgccgcccggtccgctgtcgcagcgctcatccgcgccgggagcccttggctgcgtcgcccggcagccgcgcctcgcgagaccgctgtctacggcgctgacgccgcctctgcctcttgaccccttggccccgctgtcctgatccctgaggtcggggcctggtctgcactccaggaaagacgagtgcgcttagtgtgcgctgcacgtgagcagtgaagttgattccacgcgctgcgctgctcggcagctgtcccagaactgaccacggacccctccgcgggtcctgctcctgacaagggccttccggcactgggagttttgtgttagtggaaaggaagaatctaataataccaccacctttacagtaaagacgctgcgaattgacgccttttataataaagacacttatcttgcccaagagctgggtgagtatttcctccttaccaaaaagttggtttacttacagttaactggctgaaagtttgagtcttaggcttatttgtgccgctccaggcaggctgattggcgctggtttccatctgtcagattggacagcagtaccactggctgttgggggctcacgaccagatagagtcttgtctgggaaccacaagtgagtgttgttaccacagctctgcagcagtgagggcacctctcaatccacgtgcagtcgccccaccttatcttcaggggatacggtccaacaccctcaatggatgcctgaaatcaaggatagtagtgaacactatatacactgttttgttatgcatccttccatatctacgataaagtttaattcataaactaggcacaggaagagattaataacagctaataataaaatagaacagtcgtaacaatatactgtaataaaagtcatgtgaaagtgatgtctctctcctaaaaaa

SEQ ID NO: 547946 - DNA, 846 bp, Homo sapiens
cttgaacctgaaggaaacagaaaaacaaaaaccaaaaaacaccacacacaccaaccaaacaacaaaacaaaacaacaacacaaaaaaaaaaaaaaaaaaaaaaacacaacaacaacacaaaaaaaaaaacaacacaaaccaaaaacaccaaccacaccacccaaaagataaaacccaagagaaaatagaaagcaaatgtactatacaaagactatggacatataatagtattaataagtaaaaaacacaaaaaaaaatagataagtcagaaagatagctaagtaagactgtagaccagatctaaactatacgagatcagatataaatataataagaaagatcctcatagagtattaataataataccataatctatattaatagagataagctaagtacagactatatctaatagctaagtatagagaagatatggaatagtgataactaaaaaatcataatgtatatataataaatacaaataaagataaaatataaaaattacattactaatagatacaatataatatgatatataatataagataaatataataatataaatatatatatatatagataagaatatatatataatatatatatagataatatattaaaatataagataaaactataaaaaaatataaacatacaagatacaatataattataaaacatcatgccctctgcataaatagattacatcactttcgtcgatataaaataaatacctcaactcattttctcttattatatcattctaccactctttattaatagtataattttatttctattatttttcacatctatcttattaatttttataattataatacaatg

SEQ ID NO: 547947 - DNA, 128 bp, Homo sapiens
tgtttctctaatagatggtgacactgtcatatccagccaatatgtgtgtctcatcatatatcgtgccacagatctacagttgctcaaataatccaatctgtcatcattatacacctagccaagtgtat

SEQ ID NO: 547948 - DNA, 315 bp, Homo sapiens
agaaactgctgcagcgccagggttttaccctttgcaggaactcaggggcacaacagatgcttaatggaccaatgctttctgactgagctcctctctaccctgaatacaagagaccctaataggcaggaatatcatcgcccctgttcagcatgaagaagttgcagaagatggaccttcatccttctgcagcccttaggattaaaggtccttttgtaaaagggaagggggaaatatgtaagaagcattcaaaccagagcgactacattttgaataagggctcggtgctatttgtaacggaataaaatttgtagccag

SEQ ID NO: 547949 - DNA, 704 bp, Homo sapiens
ctggctccgcgtcggccggtcggtttggtcggttgtagtggcctcgccgcccggtccgctgtcgcagcgctcatccgcgccgggagcccttggctgcgtcgcccggcagccgcgcctcgcgagaccgctgtctacggcgctgacgccgcctctgcctcttgaccccttggccccgctgtcctgatccctgaggtcggggcctggtctgcactccaggaaagacgagtgcgcttagtgtgcgctgcacgtgagcagtgaagttgattccacgcgctgcgctgctcggcagctgtcccagaactgaccacggacccctccgcgggtcctgctcctgacaagggccttccggcactgggagttttgtgttagtggccagaaagcacgggcagcctgggactcctgttgccatagcaacccagctaccgccgaggacttctgcggcttttccagcccagcagcagccgctccaggtactttctgatggctccacagtgcagctccccagactttcctcactcggatttgaggactcgatgtgctgaggcaggacccagaggggtcccaagagcctgtcctcttttgttcaaaatacatcttgaaacgtctttgtgaaggctcttagttttaatgcatggatgctgttatttttccctactgttactgaaattaaaaagtgtttgtctctgaaaacaacaaaaaaaaaa

SEQ ID NO: 547950 - DNA, 1635 bp, Homo sapiens
ctggctccgcgtcggccggtcggtttggtcggttgtagtggcctcgccgcccggtccgctgtcgcagcgctcatccgcgccgggagcccttggctgcgtcgcccggcagccgcgggagcatttcctgaagacgtagtcatgcagcacgtcagcagctcccagagcagccagcgccatgtccagtggcctggggcctgccccggcgcgggcgaggagcagccagcgtgctcccagccgtccctgcccctcacactgccatcccccagccaccaactacagcagctgatggtccagacccagagtcccacgcagcccagtccggggccggggcaggccttgcagaatgtgcgtgcaggtgcccctggccctgggctgggcctctgcagcagcagccctacaggggacttcgtggatgccagcgtgctggtgaggcagatcagcttgagcccctccagtggtggacactttgtgtttcaggatgggtcagggctcacccagatcgcccagggagcccaggttcagctccagcacccgggtacgcccatcacagtccgagagcggagaccctcccagccccacacacagtcagggggcaccatccaccacctgggaccccagagccctgcagccgcgggtggggccggcctgcagcccctggccagcccaagccacatcaccacggctaacttgccaccgcagatcagcagcatcatccagggccagctggttcagcagcagcaggtgctgcaggggccgccgctgccccggcccctgggcttcgagaggacgcccggcgtgctgctccccggggctgggggcgcagcggggtttgggatgacgtccccacccccgcccaccagcccttccaggactgccgtgcccccaggcctttccagcctcccactcacgtctgtggggaacacgggaatgaagaaggttcccaagaagttagaggagattcccccagcctctccggagatggcacagatgaggaagcagtgcctggactatcattaccaggagatgcaggctctgaaggaggtcttcaaggagtatttgattgaactgtttttcttgcaacactttcaagggaacatgatggatttcttagctttcaaggagagactgtatggaccattacaagcatatcttaggcagaatgatttggacattgaagaagaggaggaggaggaggaagaggaggaagaaaaatctgaggttatcaatgacgagcagcaagccctcgcagggagcctggtagcaggggccggaagcacagtagagacggacctgtttaagaggcagcaggcgatgccctccacaggtatggcagagcagtctaagaggcctcgccttgaagtgggtcaccaaggggtagttttccagcacccaggggcggacgcaggcgttcctctccagcaactaatgccgaccgcacaaggaggaatgccccccacgccgcaggccgcgcagctcgctggacagaggcagagtcagcagcagtatgacccctccacggggcctcccgtgcagaacgctgccagcttgcacaccccactgccgcagctgcccctgagtacctgcagctcgcctctgagttagcagctcgcgcctgagttagcagctcgccccgag

SEQ ID NO: 547951 - DNA, 912 bp, Homo sapiens
ggctgcctgctggacagctccggcatgctctcgcccgtggactccctggagtcaccccatggctacctgtcagacgtggcctcgccgccactgctgccctccccgttccagcagtctccgtcctgtgcccctcaaccacctgcctgggatgcccgacacccacctgggcatcgggcacctgatacgtggcgggcaatgccccgagatggctggtgctgggtggggtgcgggcggctggcctttgagactggcgccacctcgtctctcccacgctgcctgtggcctctggcaccagcatcctggtcctgggctccacgcatgcggtactgggggccctgaatttcactgtgggcgggtccaccacgtttgaatggtcaatgcgagtggctgtcccggctgcagagcgggcatggtggccctgaacgcaatacaaccctcgtgctgggggaagttgttgggcaccaggccccctgagcacacgaggccccctccctgcagcgatggcatggtagtgcccgattgcacagtatgccttgcatggcagcgccctgtcccagatgatgagctagcagggcctgtccagcacccggctggcacccagtcgtcacctggtgcatgacctcagcactgttgcatgcgcacaatagacttcacaagattgcagggagcatgaacctggagccagcaaactgtccagcagcagccaaagcctgcatagacaggcaccaccatcaacagcagcggactttgggtgagcccagaagccagcggccacctgggccggaacccctgaggtgacaagccaagcccgcaagttcgccctgggccacacctggcgggcacgatttgcgccgggagccgcccgccacggggccctctgcccccggacgggccagagcccccacgactgcc

SEQ ID NO: 547952 - DNA, 367 bp, Homo sapiens
caaagggagggcctccggcaattggccttggagaccctttggcatccaacaaaggacccgttcttcaataaaaacccccctgggctcctatgaatgcaaactttgcctgacccttcccaacaatgagggagctacctggcacatacgcaggggaaaaagccccagaccaacctggcccggcgaacaaccaaggaggccaaggaggcccctgcccagcccgggccttaaaaggtcaaggtggaggtgaaaaagtttgttaagatcggccgcccggggtacaaaatgaccaaacaaaaagactcggagatgggccagcaaagcctccttttccagattgactaccctgagtgccctgaaaaaaaaaaaa

SEQ ID NO: 547953 - DNA, 495 bp, Homo sapiens
  misc_feature (26)..(26): n is a, c, g, or t
tctgtctgtacatcggatggacctcncaatcggagaatgagagctgcccagcctggccttacattttttcaattaattcataaacagaaagggggatatgcagggagccgaaggcccatgggatgtgaccaacgcagcattccactggaggctatatgatccaacagcaaactgtttatcatgaatgcaggatgtgagaaaactgacgactgctcctgccgacagaatgtttgctggaggcaatcactccctggcgctgaggttatctactgcaacatttagcctgttgttcgaggaatgcagtcttgcaagcctgctctagactgagcagctgaccccttcttccaccccgcttctcactatctcttttgcctaataaataaggagggctgtataaagctcagggcccttgtccactaggggcaaggtaccccctgaccccttcttcaagatatacaaaataataaaaaaaacacaatggcctccttggcctca

SEQ ID NO: 547954 - DNA, 325 bp, Homo sapiens
  misc_feature (15)..(15): n is a, c, g, or t
  misc_feature (22)..(22): n is a, c, g, or t
aagaacccaggcggnaggcttngagtcccagatctttccactggtgggaagtttctttcaggagaaatacagttgccatgctgggctcagcaaggaaagtctgcagctctgccccaacagtcaggcagtcctggtgcttgtgaatagccttggagaagatgacttcttttccccctcattcaccactgcagacacaggtggggcttttcccatgggagcttggcatgggtatacctataggacaacctctctggaaacacttcagggtgacttgcatccccacagggagggagcatttccaagtgcagggtttgcattgaggagg

SEQ ID NO: 547955 - DNA, 103 bp, Homo sapiens
ccttcgagactccatcagaatcacctcccaatacgaaccccctggactgctcagtgctgagatacgaagggagattacctccaatatcacgacagagtgccat

SEQ ID NO: 547956 - DNA, 395 bp, Homo sapiens
caagtaaaacactgtaagctatatacatactacgacttagatgaaccttgaggatgttatgctaagtgaaataagccagtcacagcctggcgcgatggctcatgcctgtaatcccagcactttgggaggctgaggcaggagaattgcttgaacccaggagttggaggttgtagtgaaccaagatcgtgccaccgtactccagcctgggcaacaggacaattgtgccactacactccagcttgggtaacagagtgagacctcacctaaaaagataaaataacccatacagtaaaattgacctgaccacaattatctcactgcagcctggaactgttggcctcaagcaatcctctaacctcagcctcccaaagtgctgggaattaagtatgagccac

SEQ ID NO: 547957 - DNA, 247 bp, Homo sapiens
cccccctttttgggggaaaattttttttttccccccccaattttttttttttggggccccccccgggggggggggggggggggggcccccccttcttttttttcttttttttttttttttttggggggggggggggcccaaattcccccccctttggggggggggggtttttttttttttttttttttttttccctttggggggaaaattttgggggttttttcccggggggggggggggggaaaga

SEQ ID NO: 547958 - DNA, 347 bp, Homo sapiens
  misc_feature (56)..(56): n is a, c, g, or t
ttgcacgctcgggtatgtgcagaatagtgggaagatttataggtagaggcgacaanctaccgagcctggtgatagctgtgtccaagatagaatcttagttcaactttaaatttgcccacagaaccctctaaatccccttgtaaatttaactgttagtccaaagaggaacagctctttggacactaggaaaaaaccttgtagagagagtaaaaaatttaacacccatagtaggcctgctacgcaaccaccggttaaggaagcgctcaagtctccacacacactacctgtataatgcccctatactagtataagcttgaactcctctacatcgcccattgacttattta

SEQ ID NO: 547959 - DNA, 935 bp, Homo sapiens
agcgggagggctccggggtaggtgggtgacggcgtgtcggacgcgtgtaggagggacgccgtgttatgcgtccatggtgactgcttagaataactgcgacagtcatctgactgaaattagcagaactaatgaacatcaagccatgctcttacactccaggagttggatggctgaccccgtccgccagtatggcccacgaggatctcttctataagcatccaggaaggatcacatcatgtgttcgttgtggagaatagcagaatgaacgtcgtgaagtcagacttggaacacgctcagagattcagcctgagattgaggcaatcggttgctcaccgagaagctagctagttagtatcgtaaccagacttgcgcgagaagaatactagattacagtacagttaaaagagtttggaatctcatgacccaccagcccccaggtgaacagcgtcaatcggagaatgcagaaggatcgcttagtggcagagtttcatcgaactagtctactgacaagacttcctagaaggtccagaggcagggctgctgagcgagcaggaaagagttcgttgctcgagtaagagccagttccagagtgtctggcagttttcctgaggacagctcatatagaaaggaagtcgtggtatcctgggaaagccaaactcaagctcaagtgccggtgcaggatgaagaagatcacacgaggatgacctccgtcttattcatgagagagaatcttcgtatcaggcaacttgaagcgtgatatcatggatattaatgaaactatttgaagagattgggtgaatgctgattgcatgaaccaaggagatgtgagtagataggcatagaagccaatgttgggaaaatgcagaggtgcacgttcaggaaagcaaatcagcagctgtcaaaggcagcagattatcagggcaatccagaaaaac

SEQ ID NO: 547960 - DNA, 268 bp, Homo sapiens
taaagagacaggtctcgctctgttgccaggctggagtgcagtggtgtgatcatggctcactgcatcctctaactccggggctcaagcgaacctcccactttaccctccggaatagctggaaccacaagcgcacaccaccacatccagctaagttttaaaaaactgcttgtaaagacagggtctcactatgttgcccaggttcaaggtcagatttgttaatccttctgacattgtctcctgtgggagttctggatgttcattagttcat

SEQ ID NO: 547961 - DNA, 366 bp, Homo sapiens
ctaaacctaggcacaaacccactccaccttactaccagacaaccttagccaaaccatttacccaaataaagtataggcgatagaaattgaaacctggcgcaatagatatagtaccgcaagggaaagatgaaaaattataaccaagcataatatagcaaggactaacccctatacctctgcatatagaaattacccaggcatacactctgcgcaaggggacgcacagattaagcgctcgcgcggagccgagcgggtagacttggagccagtagagaggagaccacaccgtctttgtggcgctaaatgagtggggtgagtgtatgtaggtaggagaggcgcccaacaccccgcggtcggtgtgttatg

SEQ ID NO: 547962 - DNA, 494 bp, Homo sapiens
  misc_feature (272)..(272): n is a, c, g, or t
  misc_feature (284)..(284): n is a, c, g, or t
  misc_feature (428)..(428): n is a, c, g, or t
  misc_feature (430)..(430): n is a, c, g, or t
  misc_feature (489)..(489): n is a, c, g, or t
  misc_feature (492)..(492): n is a, c, g, or t
ctaaacctaggcacaaacccactccaccttactaccagacaaccttagccaaaccatttacccaaataaagtataggcgatagaaattgaaacctggcgcaatagatatagtaccgcaagggaaagatgaaaaattataaccaagcataatatagcaaggactaacccctataccttctgcataatgaattaactagaaataactttgcaaggagagccaaagctaagacccccgaaaccagacgagctacctaagaacagtctatgtagcnaaatatgggagnttatagtagaggcgacaaacctaccgagcctggtgatagctggtgtccagatagatctagttcactttaattgccacagacctctaatccctgtaattactgtagtcaagggacagcttttgacactagaaaacctgtagaggntnttacacccaagtaggctaagcgccaccataagggttcagtcacacctactatcccactntantg

SEQ ID NO: 547963 - DNA, 269 bp, Homo sapiens
acgcgcatacgtggagaacgtgcttaagatcactatgatgggaaacatttcattctcaaaaaaaaaaaaaattttctcttcttcctgtaatagggtagtttctgaccgttagatatttattttcccatggggtcaaaaggtacctaagtatataattgcgagtggaaaaataggggacagaattcaggttttggcagtttttcccattttccatttgtgtgtgtgacttttttaattataaattgcgcgagacgttaatagcatttaat

SEQ ID NO: 547964 - DNA, 234 bp, Homo sapiens
tgcgacgcagtcttcctctgtcgactagtggctcttctgtgggcgagattacaggacacaacgaaagtcatcaacagcgtgcacatcaagcagagccggacataccggctggccacgggaagcgatgataactgcgcggaattctttgagggacccccattcaagttcaagttcacagttggcgaccacagcccgctttgtcaaactgtgtgcgattctctcctgatgggaaca

SEQ ID NO: 547965 - DNA, 708 bp, Homo sapiens
  misc_feature (436)..(436): n is a, c, g, or t
  misc_feature (442)..(442): n is a, c, g, or t
  misc_feature (448)..(448): n is a, c, g, or t
  misc_feature (453)..(453): n is a, c, g, or t
  misc_feature (455)..(455): n is a, c, g, or t
cccccccccccccggggcagaatgttaagcttcccccccagtccaaggaactcttttactatactcaattgatccaataacttgaccaacggaacaagttaccctagggataacagcgcaatcctattctagagtccatatcaacaatagggtttacgacctcgatgttggatcaggacatcccgatggtgcagccgctattaaaggttcgtttgttcaacgattaaagtcctacgtgatctgagttcagaccggagtaatccaggtcggtttctatctacttcaaattcctccctgtacgaaaggacaagagaaataaggcctacttcacaaagcgccttcccccgtaaatgatatcatctcaacttagtattatacccacacccaccccaagaacagggtttgttaagatggcagagcccggtaatcgcataanacttanaacttnacagncngaggttcaattcctcttcttaacaacaatacccatggacaaactcctactccctcattgtaaccattctaatcgcaatgggaattctaatgctaaccgaagaaaaattctaggctatataaactacgcaaaggcccaagtagtaagacctaagggctatacaacctttgctgacgcataaaatctaacaaaagcctaaaaccgcaactacatacataaatcacgaccgactagtttacatgaaataatagaac

SEQ ID NO: 547966 - DNA, 128 bp, Homo sapiens
  misc_feature (6)..(7): n is a, c, g, or t
tggatnnccgggctgcaggaattcggcacgaggctaaacctagccccaaacccactccaccttactaccagacaaccttagccaaaccatttacccaaataaagtataggcgatagaaattgaaacct

SEQ ID NO: 547967 - DNA, 551 bp, Homo sapiens
gcacgagctcacacatacaatccaaccatcggagcgacaaagcggaaaagcgagtatactgtcaattctcataagaatacctttatccattataatggtttcgaggctaacttcgacgcttcacttaaaattttaccgctagttactttgcttgaatgtggcaaggtaatgattacgtttctcatcggagctcttggcttccttaattgagaggcaaacaccaaagaacttgttagcaacgccaaagcaccagcttgatggatagaagctaacgatattgggactaggtacaatatagttaaaataccaagggttgcttgtaaagtaacgacgcccatcataacatgcaaagaggtcatcgcgttccttggaattacggccttctttttgatagcgtacatatgagcagctagtactgatgtaaacgcaacgtacgcacatgtcctatggaccaactgaactgtaactgggttttctagcaaattcctccaccacagatctttcttgtcctctcttctacagaagttttcgtccattaattcacgagaact

SEQ ID NO: 547968 - DNA, 412 bp, Homo sapiens
  misc_feature (163)..(163): n is a, c, g, or t
ctaaacctaggcacaaacccactccaccttactaccagacaaccttagccaaaccatttacccaaataaagtataggcgatagaaattgaaacctggcgcaatagatatagtaccgcaagggaaagatgaaaattattaccccaggattattttggcgagggncttacccctattaacttctggcaatatatgaattaactagggagtacacttttcaaagggagaacacagagtgtaagccccccgggacccagagcgagtggtctctctgagccagggtataagggccgcaccacctctatatcgtcgtaaatagtaggtggtgagtatatagtagtagtagtacgacgacaacatcctagccgccgtcgtcgataatcataatttgctcctacaatgatgatgatcatg

SEQ ID NO: 547969 - DNA, 446 bp, Homo sapiens
ggaatctatattatatcgtaacaactggacttccttagaatcacataagtagtaacacactaaagccagcatacatgattcacacataggagtcaactagcaatagacattcctgtactccaatgattttaacaccacatttttctacgaacctcatagacacctccagagaacaacttgtcttagttactgtttatatctcatattttagaggctccaaccacatgaaacgtctccagggtattgtcaaacacactatgcaaccttcaagtggtctctgagaagcttgttttgaaattgcattgtatcactttgctcaggctactgtcagttttcaaatacaggaaatcacccaatggatcacaggctgcagctgatgtctgcctgacctcatggcttcagtttcctaactgacaacatctatacagaggcagatctcatacaag

SEQ ID NO: 547970 - DNA, 343 bp, Homo sapiens
gtatgtataaataagaactcccttaaaaaaaaaaaaaatagggccaggcgcagaaccccacgcctacaatcccagcaccttgggaggccgaggcgggtggataaaccgagatcaggagttcgagaccagcccggccaacacggaaaaaccccatctccaccaaaaatacaaaaaaaaaatttagacgggcttcctcataaggaaaggttaaaaaaagtaaaaggaactcggcaaatcttaccccgcctgtttaccaaaaacatcacctctagcatcaccagtatatggatacggagtacaaaacggcccttggatgatggagtaggtaaccagtgagggcctg

SEQ ID NO: 547971 - DNA, 186 bp, Homo sapiens
  misc_feature (49)..(49): n is a, c, g, or t
tttacaactatctcggaacatgagggaatcttaggaatgcattattagngctgagatagaagggagaaaaaggagcctagtgtccctaaagacattgtgaaggtaccattatagaactttgtaactacattacatcacaactatctctataaattaataaaaaaatagttaacgtgcctattcttt

SEQ ID NO: 547972 - DNA, 126 bp, Homo sapiens
  misc_feature (88)..(88): n is a, c, g, or t
gttgaggatcctagcacagaggaggaacagaaacaacccaggttcatcatgggtagcatcacgcccacggactacaccctctccaagntgctacctccctgtgctgtccacctcctctggtgcggt

SEQ ID NO: 547973 - DNA, 159 bp, Homo sapiens
  misc_feature (9)..(9): n is a, c, g, or t
  misc_feature (22)..(22): n is a, c, g, or t
  misc_feature (39)..(39): n is a, c, g, or t
  misc_feature (66)..(66): n is a, c, g, or t
  misc_feature (113)..(113): n is a, c, g, or t
  misc_feature (152)..(152): n is a, c, g, or t
ccctgccancctgaaatcaaantgttgtactatgatcanagtccctgtgccatccttttccaagantggggctcaaaccatgtttttgaatgagaatccctgctggttgaganttttgcttccacttgtttccttggagatgtttttccaangagcata

SEQ ID NO: 547974 - DNA, 7157 bp, Homo sapiens
ttggctactagtctacgctggaatacgattgctccacggttggctactagtccacaggttggctaaacctagccccaaacccactccaccttactaccagacaaccttagccaaaccatttacccaaataaagtataggcgatagaaattgaaacctggcgcaatagatatagtaccgcaagggaaagatgaaaaattataaccaagcataatatagcaaggactaacccctataccttctgcataatgaattaactagaaataactttgcaaggagagccaaagctaagacccccgaaaccagacgagctacctaagaacagctaaaagagcacacccgtctatgtagcaaaatagtgggaagatttataggtagaggcgacaaacctaccgagcctggtgatagctggttgtccaagatagaatcttagttcaactttaaatttgcccacagaaccctctaaatccccttgtaaatttaactgttagtccaaagaggaacagctctttggacactaggaaaaaaccttgtagagagagtaaaaaatttaacacccatagtaggcctaaaagcagccaccaattaagaaagcgttcaagctcaacacccactacctaaaaaatcccaaacatataactgaactcctcacacccaattggaccaatctatcaccctatagaagaactaatgttagtataagtaacatgaaaacattctcctccgcataagcctgcgtcagattaaaacactgaactgacaattaacagcccaatatctacaatcaaccaacaagtcattattaccctcactgtcaacccaacacaggcatgctcataaggaaaggttaaaaaaagtaaaaggaactcggcaaatcttaccccgcctgtttaccaaaaacatcacctctagcatcaccagtattagaggcaccgcctgcccagtgacacatgtttaacggccgcggtaccctaaccgtgcaaaggtagcataatcacttgttccttaattagggacctgtatgaatggctccacgagggttcagctgtctcttacttttaaccagtgaaattgacctgcccgtgaagaggcgggcatgacacagcaagacgagaagaaaggcaaagaaggcttcaactctgattgaaaatgagtggagaatcaaacaaagttgagaacagatatgatataggtacagtgagatacttgaaactagaatttgatagttgatagttatagaagctcaattaaatcatcttgaagtggaattagacaaagcatctacattttaatggagaaccagtattacagtgaccaggtaactcggcatggtattatcacttaaaaatttttcctaaataccatgaagtcggtagaagacctttgcatcagaccatgttctttgaagcttaaaaaagtccctgactgactaggaaagacagcacagtgctccaaaaagaaaccctgcagagatgtattaataccaaaaactccatttgaccctggacaggcccaggattcgggattcttcacaatgaggggaatggaccaggtttcttccaagcaaaacattctatcgttttgttgacaatgaattaaattgaaattgtttagaacaatcccaattttggtggggaaggaaaggaggataagttaagcaagataaagaaagctcacagaaacttcatgcagaggtacagcattaaagttctttgtttcctaattaatgttgtatgcagaagtattctgtaaactaaattttcctgacagaaaagttcccacatcctcaacagatgagaatgattgcattatttgggatccttgatcaatacgaaccacatactgtcccttctcaaagactaagttccttatttttcacccaaatcctatatattgaaagacaaccaaggtgctaaatgttaaccactagtcaagttaggaatgtctgaagaaaatatattaaccttgacataaagaagatgtttttggtcaaatttcagacatgtattattataaattaataactggctccatccaccaggttaaagatgaagggagggcctaagatgtctctagagtttatatacacacaagtgagtgtcactgttttgttttgtttttgacctagttttattaaatattgcttccttggggtgtgtttataacaactcccagaacatttcatgtaaggattcaaagcggtcatattaaaatacagcttcaatataaagtttatcacagttttacagtattcaaaaatgacagacctgccttaaaaaacaaaacaaaaaccaaaaaaggactattacacccaaaacataagaaaacaattaaataaacaagtttggcattttcataactttatagtataaaacagaatattaaatttattactggcaaacggacactgatttatttcctttgaaatgtgtcccatttaaacacactatacaagttcattatacaaaagatggatgatcattttgatgaaagaagtgcaccctgaaaatttttgccagtttagaatatttagctcttaaagtttaaaaaaaaagtccttttccttttttaaactgaaggctgaattcagattttttttgttgtctcatctgtcagccttcctggtttaaaaacaatagtgtctatggacgcccaccagggggcagtgtaagattagccattaaatcacgaacagctgcaaatattgtgcattcaccttgtcgtggtggattcatctctgcaaacctcttcagaatgttgctgaccatcatgggagcagcaacagaagagttctgctgtctgggaatgtctgcctgctgggttgtacctgaagccatgtcataaatgattggaactataatactaacaggttcttggggagggaccgatgttttctgagttagttgaagaaaaaatagcattttggatttcagcaccacagcaggcgtcccaggaggtgcaatcggcggcgcgctgggagggatcgtcaggcaaaactgaacattccattttagctgtgttgcttggtcagggaacagctccagcttcataatgtgcacacaatccctgaggatgtgtgtaggagctcctaatagcttggtgaaggctattaacgtattagctttaaatggtggtcctgcaactcttgtttcaaagaatttctccaaaacttgaagttcatcaggtttccactgtcctgcattttcaggtgtcacttttagctgaagcgtttggttggttttgggactaagagctactctgcatttcagtgcatcagtcttaaacatgatcactccgggttcattagaatttatcagctgcagcgtttcttgttgaataattctttgaagatgtcgtctcatgatgactgatccaaggaatctctcaagtggagaacaaaggtaactacctgccaggccgggcacaaggcctggagttggagagggcagcagtaaaatgttcaaggcactgtgagtgaggatggtaggtatggatgccgcccaagagcgctgaggtagtttacgaggtggaggcatgtttgttggcattgtttgagaacttgttccagctcgaggggaatgagaagcatctggaaccggagaatgtagtgaggggttggctggtgacattccaggcatgcgtgctgctggtgaggggccagacacttgaggagatcctggccagttccctgctcgtccacttggtgacaccatagtgtatggggaactagggtcaagagttccatgtggactagcaaaactggcccctggtcctattgagattccatgcgaggatgggggaggagttggaacaaatgacgctggtgatggggctctcaaagccccactgggggagctggcagcatgcagatttcctggagactgtgtgtgcatcattgagggagactgattgactgtgctatgataagatgtagggggtgaagtaagaggataagcacctgatgttcctggctgctttggaaatggctgttgctggggtggtggctggagctgcgatattaaagaatccatcatatctcctcctataggagaagggggattatcgtcctcatttacagaccttcttcgagcatcctgattgctgtcaacaaacatattcaggaacgtctttagtcctggtgcaggatagaaaccttcaactagtttgctgttatcaaaaagactataggcaccatcccgtattgccacaacacctcgactccggcagtatatatcaatgcaatacatgttcctgaaggccagtctgatgtgggtggacgactgtggcagaatggagaagcactggtaggcagtattggttctctgggtcaagcccaacatcggcacagtggggagtttgttgatggcatttaatggagcctgagtatcaaacagtacctgtaataactgaaccacatttggtgttttgttgaacatttcttgaagctgatggagaatggtattgtgacagttactgcaacctgagtttgggccaacagttcccaaagaaatgtggaatttttgatggatcgaattccattggatactaattgagcttcccttggtggttccataacacaagataagttttcggtaattataaacacgaacttctgagaaaatatttagatgagcaggtatgtctggtagagaacgtgcaaattccaacacacactcatataatcgtgcaatgctattccagtcattaagaaacatttcaaccacctttctaccaccaacaggctcagacaacagattttcatatgtcaggtaaacgtgccgggatggtccttgctccctagtagaagtgccattaagtggacaatttgcaaacactaactctgctacccaagtgcggttatttctaccttgtaatcggaaagtgcaatcaagaagagagcggtccagagccttttgggtttcctcagttatacccttacagggaggaatttttaataagcgaattgcatggctgaagccatcaccttccacttgcactccttgatgtggaatctccagattggacaactccaaccgaagtcctacaaatggcatatttgtatcacacatagcgacgaagtgggctaaaactttattgaaggcacacatttctcctgctcgttttgttttcttggattctactggacatggatcatcagacaacttgcgcttggcattggttctggtctgtttcccggtttttgtacgaaaaaccaagtcctgaatgttttccttgaactgctgcagcagcaatgccattgcagggctgtcttcacgatctgcagcattcacagacataaagtagtacttgtacgacagttgtgtgggtttattgggaacctccaacatctccacaacaatgtagtattgtggaaggcgggtaagtttaatgaacagtttattcttagaaaggtttccaataggatgagttgagtaattggaaagctgcaatgtttcactgcttatcgtaggcagatgttttatagactgcttgcaacgctgttgtccaagccaaaacttaagttgctgaatccagggtatgattcgtttcatatcatcattcacagacttctccatgtcatccagagtggcctggtcaagtccataaagcatcaattgaaacattccagaatgtaaatctacaaaaatgtgcagacactctgaattaccacagggctccaagatgggaacaacaagagctgggagtgcagtctctatggaagagttttcattggcattgaagcctctaagaatggccttcagttcttggagcttctgatgagctcttgcatggacactgtcaatcaggagtttttctattgataagtggtcgatcttcatggctctttctactaatttggaatcagaagctggcaaaggaggatcgtgaaaaatctgtaaaggcttggagacatcattctcatcaattttaattgtaactttgtgaacagatgctgttccagtttttctcccaagaacctgttgattccaaactgaaagggagaggcactttccagcatgatacctttccacctgcacaaggtctccccaccgttctcggattaacattagagtttgggaatgtaacacttctaactgaagtgataaacagaaagaatgtaggcagttgtacatatcctgaagaggtttctcatcagcaaagagcctagactgcaccagttgatggatgaagctgatttgcatgctatgaaccaaagctcgcccatctcctgtttccttatcctcaactagaatttctagcttgagaagacgccatggaacatcagggtcatctcccatcacagtcaaggtggcttcaaattctccttcaacacgaaacttcacccggccatttgcaactgtaagatttgctaactgaggaggaagatctgtggttacaagccgatgtctaagaatctgattcagctgatggagtgtggcttgtttttcaattttggtaattgggtctggaggaataattttatccctaatgcaggttggcagccgtgggtaagatccagtagttagtacatcaatggcatatgggatggcaaaactaggcaggcgtgcatggaccagagcatctctagctaacgaggccaggcgatcagcagtgtccacaaacaggatggcttgctgatctaaaaagcttgaaatcatcgcacatttttccactttgccagcattattagcccatttcactaaagctaataatcgaacgaagagttggcgtgtccggctagcaaactgcactatttctattttcctttccacatcagatttccttggcagtaggtccgtcaacaccataagctccgagtaggcccggtgcagcagaaattcaatgagggtgctcagccggtagcccgggctagccgcagctgcagcggccgccgccacggcggctcccgggggaggaggggctggggctgacgggggtccgccgctgcccccgccgccgcctccgggcgggaccagctggtggttctccagctgcactggggccatggcggcgcaggaccgggcttggcgcaacggcacacgatgcggtcctcgagcctcccgggcgctcggtcaccgcgccgaaacgggagcgggcagagtcgccaccgcctaccgccggcaaccctcggccgattaaaccagcctcgtactagcta

SEQ ID NO: 547975 - DNA, 593 bp, Homo sapiens
attttattttaatttgagaaataaagatttcctccaagccacatgaggactctggcacccacccacaaagcaagacctgtatttataagccgagggctcagggagcctaactgcgggacccgtcagggccccgtgacccatccccgtcccacccacccactccacgactgggaaccatcagtgtgtgttggggggatgcttaggaaagctggtgtgtgaggagacaacaaaactcgggaactggagccagagcatgccggctgactgacgctttgatgctcacgggaaatttctgacccaggatctcagccacacaggactggtatgtatggctacacaatctctctcaacattgtaattaattttggatgacgaaaacgctgacaggagcattcgctcacaactccgccatccaacaaacttatgcaatcatactccacgtaagatgttcacacaatccccctttgacacacaacataggacactcgggagcaggccagaactcagcctgcgccacgagttctttgtacactacaccaggcccactaatcaaggtcctgcctgtcccaggccatatacgctagctacaagtg

SEQ ID NO: 547976 - DNA, 7018 bp, Homo sapiens
ttggctactagtctacgctggaatacgattgctccacggttggctactagtccacaggttggctaaacctagccccaaacccactccaccttactaccagacaaccttagccaaaccatttacccaaataaagtataggcgatagaaattgaaacctggcgcaatagatatagtaccgcaagggaaagatgaaaaattataaccaagcataatatagcaaggactaacccctataccttctgcataatgaattaactagaaataactttgcaaggagagccaaagctaagacccccgaaaccagacgagctacctaagaacagctaaaagagcacacccgtctatgtagcaaaatagtgggaagatttataggtagaggcgacaaacctaccgagcctggtgatagctggttgtccaagatagaatcttagttcaactttaaatttgcccacagaaccctctaaatccccttgtaaatttaactgttagtccaaagaggaacagctctttggacactaggaaaaaaccttgtagagagagtaaaaaatttaacacccatagtaggcctaaaagcagccaccaattaagaaagcgttcaagctcaacacccactacctaaaaaatcccaaacatataactgaactcctcacacccaattggaccaatctatcaccctatagaagaactaatgttagtataagtaacatgaaaacattctcctccgcataagcctgcgtcagattaaaacactgaactgacaattaacagcccaatatctacaatcaaccaacaagtcattattaccctcactgtcaacccaacacaggcatgctcataaggaaaggttaaaaaaagtaaaaggaactcggcaaatcttaccccgcctgtttaccaaaaacatcacctctagcatcaccagtattagaggcaccgcctgcccagtgacacatgtttaacggccgcggtaccctaaccgtgcaaaggtagcataatcacttgttccttaattagggacctgtatgaatggctccacgagggttcagctgtctcttacttttaaccagtgaaattgacctgcccgtgaagaggcgggcatgacacagcaagacgagaagaaaggcaaagaaggcttcaactctgattgaaaatgagtggagaatcaaacaaagttgagaacagatatgatataggtacagtgagatacttgaaactagaatttgatagttgatagttatagaagctcaattaaatcatcttgaagtggaattagacaaagcatctacattttaatggagaaccagtattacagtgaccaggtaactcggcatggtattatcacttaaaaatttttcctaaataccatgaagtcggtagaagacctttgcatcagaccatgttctttgaagcttaaaaaagtccctgactgactaggaaagacagcacagtgctccaaaaagaaaccctgcagagatgtattaataccaaaaactccatttgaccctggacaggcccaggattcgggattcttcacaatgaggggaatggaccaggtttcttccaagcaaaacattctatcgttttgttgacaatgaattaaattgaaattgtttagaacaatcccaattttggtggggaaggaaaggaggataagttaagcaagataaagaaagctcacagaaacttcatgcagaggtacagcattaaagttctttgtttcctaattaatgttgtatgcagaagtattctgtaaactaaattttcctgacagaaaagttcccacatcctcaacagatgagaatgattgcattatttgggatccttgatcaatacgaaccacatactgtcccttctcaaagactaagttccttatttttcacccaaatcctatatattgaaagacaaccaaggtgctaaatgttaaccactagtcaagttaggaatgtctgaagaaaatatattaaccttgacataaagaagatgtttttggtcaaatttcagacatgtattattataaattaataactggctccatccaccaggttaaagatgaagggagggcctaagatgtctctagagtttatatacacacaagtgagtgtcactgttttgttttgtttttgacagacctgccttaaaaaacaaaacaaaaaccaaaaaaggactattacacccaaaacataagaaaacaattaaataaacaagtttggcattttcataactttatagtataaaacagaatattaaatttattactggcaaacggacactgatttatttcctttgaaatgtgtcccatttaaacacactatacaagttcattatacaaaagatggatgatcattttgatgaaagaagtgcaccctgaaaatttttgccagtttagaatatttagctcttaaagtttaaaaaaaaagtccttttccttttttaaactgaaggctgaattcagattttttttgttgtctcatctgtcagccttcctggtttaaaaacaatagtgtctatggacgcccaccagggggcagtgtaagattagccattaaatcacgaacagctgcaaatattgtgcattcaccttgtcgtggtggattcatctctgcaaacctcttcagaatgttgctgaccatcatgggagcagcaacagaagagttctgctgtctgggaatgtctgcctgctgggttgtacctgaagccatgtcataaatgattggaactataatactaacaggttcttggggagggaccgatgttttctgagttagttgaagaaaaaatagcattttggatttcagcaccacagcaggcgtcccaggaggtgcaatcggcggcgcgctgggagggatcgtcaggcaaaactgaacattccattttagctgtgttgcttggtcagggaacagctccagcttcataatgtgcacacaatccctgaggatgtgtgtaggagctcctaatagcttggtgaaggctattaacgtattagctttaaatggtggtcctgcaactcttgtttcaaagaatttctccaaaacttgaagttcatcaggtttccactgtcctgcattttcaggtgtcacttttagctgaagcgtttggttggttttgggactaagagctactctgcatttcagtgcatcagtcttaaacatgatcactccgggttcattagaatttatcagctgcagcgtttcttgttgaataattctttgaagatgtcgtctcatgatgactgatccaaggaatctctcaagtggagaacaaaggtaactacctgccaggccgggcacaaggcctggagttggagagggcagcagtaaaatgttcaaggcactgtgagtgaggatggtaggtatggatgccgcccaagagcgctgaggtagtttacgaggtggaggcatgtttgttggcattgtttgagaacttgttccagctcgaggggaatgagaagcatctggaaccggagaatgtagtgaggggttggctggtgacattccaggcatgcgtgctgctggtgaggggccagacacttgaggagatcctggccagttccctgctcgtccacttggtgacaccatagtgtatggggaactagggtcaagagttccatgtggactagcaaaactggcccctggtcctattgagattccatgcgaggatgggggaggagttggaacaaatgacgctggtgatggggctctcaaagccccactgggggagctggcagcatgcagatttcctggagactgtgtgtgcatcattgagggagactgattgactgtgctatgataagatgtagggggtgaagtaagaggataagcacctgatgttcctggctgctttggaaatggctgttgctggggtggtggctggagctgcgatattaaagaatccatcatatctcctcctataggagaagggggattatcgtcctcatttacagaccttcttcgagcatcctgattgctgtcaacaaacatattcaggaacgtctttagtcctggtgcaggatagaaaccttcaactagtttgctgttatcaaaaagactataggcaccatcccgtattgccacaacacctcgactccggcagtatatatcaatgcaatacatgttcctgaaggccagtctgatgtgggtggacgactgtggcagaatggagaagcactggtaggcagtattggttctctgggtcaagcccaacatcggcacagtggggagtttgttgatggcatttaatggagcctgagtatcaaacagtacctgtaataactgaaccacatttggtgttttgttgaacatttcttgaagctgatggagaatggtattgtgacagttactgcaacctgagtttgggccaacagttcccaaagaaatgtggaatttttgatggatcgaattccattggatactaattgagcttcccttggtggttccataacacaagataagttttcggtaattataaacacgaacttctgagaaaatatttagatgagcaggtatgtctggtagagaacgtgcaaattccaacacacactcatataatcgtgcaatgctattccagtcattaagaaacatttcaaccacctttctaccaccaacaggctcagacaacagattttcatatgtcaggtaaacgtgccgggatggtccttgctccctagtagaagtgccattaagtggacaatttgcaaacactaactctgctacccaagtgcggttatttctaccttgtaatcggaaagtgcaatcaagaagagagcggtccagagccttttgggtttcctcagttatacccttacagggaggaatttttaataagcgaattgcatggctgaagccatcaccttccacttgcactccttgatgtggaatctccagattggacaactccaaccgaagtcctacaaatggcatatttgtatcacacatagcgacgaagtgggctaaaactttattgaaggcacacatttctcctgctcgttttgttttcttggattctactggacatggatcatcagacaacttgcgcttggcattggttctggtctgtttcccggtttttgtacgaaaaaccaagtcctgaatgttttccttgaactgctgcagcagcaatgccattgcagggctgtcttcacgatctgcagcattcacagacataaagtagtacttgtacgacagttgtgtgggtttattgggaacctccaacatctccacaacaatgtagtattgtggaaggcgggtaagtttaatgaacagtttattcttagaaaggtttccaataggatgagttgagtaattggaaagctgcaatgtttcactgcttatcgtaggcagatgttttatagactgcttgcaacgctgttgtccaagccaaaacttaagttgctgaatccagggtatgattcgtttcatatcatcattcacagacttctccatgtcatccagagtggcctggtcaagtccataaagcatcaattgaaacattccagaatgtaaatctacaaaaatgtgcagacactctgaattaccacagggctccaagatgggaacaacaagagctgggagtgcagtctctatggaagagttttcattggcattgaagcctctaagaatggccttcagttcttggagcttctgatgagctcttgcatggacactgtcaatcaggagtttttctattgataagtggtcgatcttcatggctctttctactaatttggaatcagaagctggcaaaggaggatcgtgaaaaatctgtaaaggcttggagacatcattctcatcaattttaattgtaactttgtgaacagatgctgttccagtttttctcccaagaacctgttgattccaaactgaaagggagaggcactttccagcatgatacctttccacctgcacaaggtctccccaccgttctcggattaacattagagtttgggaatgtaacacttctaactgaagtgataaacagaaagaatgtaggcagttgtacatatcctgaagaggtttctcatcagcaaagagcctagactgcaccagttgatggatgaagctgatttgcatgctatgaaccaaagctcgcccatctcctgtttccttatcctcaactagaatttctagcttgagaagacgccatggaacatcagggtcatctcccatcacagtcaaggtggcttcaaattctccttcaacacgaaacttcacccggccatttgcaactgtaagatttgctaactgaggaggaagatctgtggttacaagccgatgtctaagaatctgattcagctgatggagtgtggcttgtttttcaattttggtaattgggtctggaggaataattttatccctaatgcaggttggcagccgtgggtaagatccagtagttagtacatcaatggcatatgggatggcaaaactaggcaggcgtgcatggaccagagcatctctagctaacgaggccaggcgatcagcagtgtccacaaacaggatggcttgctgatctaaaaagcttgaaatcatcgcacatttttccactttgccagcattattagcccatttcactaaagctaataatcgaacgaagagttggcgtgtccggctagcaaactgcactatttctattttcctttccacatcagatttccttggcagtaggtccgtcaacaccataagctccgagtaggcccggtgcagcagaaattcaatgagggtgctcagccggtagcccgggctagccgcagctgcagcggccgccgccacggcggctcccgggggaggaggggctggggctgacgggggtccgccgctgcccccgccgccgcctccgggcgggaccagctggtggttctccagctgcactggggccatggcggcgcaggaccgggcttggcgcaacggcacacgatgcggtcctcgagcctcccgggcgctcggtcaccgcgccgaaacgggagcgggcagagtcgccaccgcctaccgccggcaaccctcggccgattaaaccagcctcgtactagcta

SEQ ID NO: 547977 - DNA, 7099 bp, Homo sapiens
ttggctactagtctacgctggaatacgattgctccacggttggctactagtccacaggttggctaaacctagccccaaacccactccaccttactaccagacaaccttagccaaaccatttacccaaataaagtataggcgatagaaattgaaacctggcgcaatagatatagtaccgcaagggaaagatgaaaaattataaccaagcataatatagcaaggactaacccctataccttctgcataatgaattaactagaaataactttgcaaggagagccaaagctaagacccccgaaaccagacgagctacctaagaacagctaaaagagcacacccgtctatgtagcaaaatagtgggaagatttataggtagaggcgacaaacctaccgagcctggtgatagctggttgtccaagatagaatcttagttcaactttaaatttgcccacagaaccctctaaatccccttgtaaatttaactgttagtccaaagaggaacagctctttggacactaggaaaaaaccttgtagagagagtaaaaaatttaacacccatagtaggcctaaaagcagccaccaattaagaaagcgttcaagctcaacacccactacctaaaaaatcccaaacatataactgaactcctcacacccaattggaccaatctatcaccctatagaagaactaatgttagtataagtaacatgaaaacattctcctccgcataagcctgcgtcagattaaaacactgaactgacaattaacagcccaatatctacaatcaaccaacaagtcattattaccctcactgtcaacccaacacaggcatgctcataaggaaaggttaaaaaaagtaaaaggaactcggcaaatcttaccccgcctgtttaccaaaaacatcacctctagcatcaccagtattagaggcaccgcctgcccagtgacacatgtttaacggccgcggtaccctaaccgtgcaaaggtagcataatcacttgttccttaattagggacctgtatgaatggctccacgagggttcagctgtctcttacttttaaccagtgaaattgacctgcccgtgaagaggcgggcatgacacagcaagacgagaagaaaggcaaagaaggcttcaactctgattgaaaatgagtggagaatcaaacaaagttgagaacagatatgatataggtacagtgagatacttgaaactagaatttgatagttgatagttatagaagctcaattaaatcatcttgaagtggaattagacaaagcatctacattttaatggagaaccagtattacagtgaccaggtaactcggcatggtattatcacttaaaaatttttcctaaataccatgaagtcggtagaagacctttgcatcagaccatgttctttgaagcttaaaaaagtccctgactgactaggaaagacagcacagtgctccaaaaagaaaccctgcagagatgtattaataccaaaaactccatttgaccctggacaggcccaggattcgggattcttcacaatgaggggaatggaccaggtttcttccaagcaaaacattctatcgttttgttgacaatgaattaaattgaaattgtttagaacaatcccaattttggtggggaaggaaaggaggataagttaagcaagataaagaaagctcacagaaacttcatgcagaggtacagcattaaagttctttgtttcctaattaatgttgtatgcagaagtattctgtaaactaaattttcctgacagaaaagttcccacatcctcaacagatgagaatgattgcattatttgggatccttgatcaatacgaaccacatactgtcccttctcaaagactaagttccttatttttcacccaaatcctatatattgaaagacaaccaaggtgctaaatgttaaccactagtcaagttaggaatgtctgaagaaaatatattaaccttgacataaagaagatgtttttggtcaaatttcagacatgtattattataaattaataactggctccatccaccaggttaaagatgaagggagggcctaagatgtctctagagtttatatacacacaagtgagtgtcactgttttgttttgtttttgacctagttttattaaatattgcttccttggggtgtgtttataacaactcccagaacatttcatgtaaggattcaaagcggtcatattaaaatacagcttcaatataaagtttatcacagttttacagtattcaaaaatgacagacctgccttaaaaaacaaaacaaaaaccaaaaaaggactattacacccaaaacataagaaaacaattaaataaacaagtttggcattttcataactttatagtataaaacagaatattaaatttattactggcaaacggacactgatttatttcctttgaaatgtgtcccatttaaacacactatacaagttcattatacaaaagatggatgatcattttgatgaaagaagtgcaccctgaaaatttttgccagtttagaatatttagctcttaaagtttaaaaaaaaagtccttttccttttttaaactgaaggctgaattcagattttttttgttgtctcatctgtcagccttcctggtttaaaaacaatagtgtctatggacgcccaccagggggcagtgtaagattagccattaaatcacgaacagctgcaaatattgtgcattcaccttgtcgtggtggattcatctctgcaaacctcttcagaatgttgctgaccatcatgggagcagcaacagaagagttctgctgtctgggaatgtctgcctgctgggttgtacctgaagccatgtcataaatgattggaactataatactaacaggttcttggggagggaccgatgttttctgagttagttgaagaaaaaatagcattttggatttcagcaccacagcaggcgtcccaggaggtgcaatcggcggcgcgctgggagggatcgtcaggcaaaactgaacattccattttagctgtgttgcttggtcagggaacagctccagcttcataatgtgcacacaatccctgaggatgtgtgtaggagctcctaatagcttggtgaaggctattaacgtattagctttaaatggtggtcctgcaactcttgtttcaaagaatttctccaaaacttgaagttcatcaggtttccactgtcctgcattttcaggtgtcacttttagctgaagcgtttggttggttttgggactaagagctactctgcatttcagtgcatcagtcttaaacatgatcactccgggttcattagaatttatcagctgcagcgtttcttgttgaataattctttgaagatgtcgtctcatgatgactgatccaaggaatctctcaagtggagaacaaaggtaactacctgccaggccgggcacaaggcctggagttggagagggcagcagtaaaatgttcaaggcactgtgagtgaggatggtaggtatggatgccgcccaagagcgctgaggtagtttacgaggtggaggcatgtttgttggcattgtttgagaacttgttccagctcgaggggaatgagaagcatctggaaccggagaatgtagtgaggggttggctggtgacattccaggcatgcgtgctgctggtgaggggccagacacttgaggagatcctggccagttccctgctcgtccacttggtgacaccatagtgtatggggaactagggtcaagagttccatgtggactagcaaaactggcccctggtcctattgagattccatgcgaggatgggggaggagttggaacaaatgacgctggtgatggatgaagctgatttgcatgctatgaaccaaagctcgcccatctcctgtttccttatcctcaactagaatttctagcttgagaagacgccatggaaatggctgttgctggggtggtggctggagctgcgatattaaagaatccatcatatctcctcctataggagaagggggattatcgtcctcatttacagaccttcttcgagcatcctgattgctgtcaacaaacatattcaggaacgtctttagtcctggtgcaggatagaaaccttcaactagtttgctgttatcaaaaagactataggcaccatcccgtattgccacaacacctcgactccggcagtatatatcaatgcaatacatgttcctgaaggccagtctgatgtgggtggacgactgtggcagaatggagaagcactggtaggcagtattggttctctgggtcaagcccaacatcggcacagtggggagtttgttgatggcatttaatggagcctgagtatcaaacagtacctgtaataactgaaccacatttggtgttttgttgaacatttcttgaagctgatggagaatggtattgtgacagttactgcaacctgagtttgggccaacagttcccaaagaaatgtggaatttttgatggatcgaattccattggatactaattgagcttcccttggtggttccataacacaagataagttttcggtaattataaacacgaacttctgagaaaatatttagatgagcaggtatgtctggtagagaacgtgcaaattccaacacacactcatataatcgtgcaatgctattccagtcattaagaaacatttcaaccacctttctaccaccaacaggctcagacaacagattttcatatgtcaggtaaacgtgccgggatggtccttgctccctagtagaagtgccattaagtggacaatttgcaaacactaactctgctacccaagtgcggttatttctaccttgtaatcggaaagtgcaatcaagaagagagcggtccagagccttttgggtttcctcagttatacccttacagggaggaatttttaataagcgaattgcatggctgaagccatcaccttccacttgcactccttgatgtggaatctccagattggacaactccaaccgaagtcctacaaatggcatatttgtatcacacatagcgacgaagtgggctaaaactttattgaaggcacacatttctcctgctcgttttgttttcttggattctactggacatggatcatcagacaacttgcgcttggcattggttctggtctgtttcccggtttttgtacgaaaaaccaagtcctgaatgttttccttgaactgctgcagcagcaatgccattgcagggctgtcttcacgatctgcagcattcacagacataaagtagtacttgtacgacagttgtgtgggtttattgggaacctccaacatctccacaacaatgtagtattgtggaaggcgggtaagtttaatgaacagtttattcttagaaaggtttccaataggatgagttgagtaattggaaagctgcaatgtttcactgcttatcgtaggcagatgttttatagactgcttgcaacgctgttgtccaagccaaaacttaagttgctgaatccagggtatgattcgtttcatatcatcattcacagacttctccatgtcatccagagtggcctggtcaagtccataaagcatcaattgaaacattccagaatgtaaatctacaaaaatgtgcagacactctgaattaccacagggctccaagatgggaacaacaagagctgggagtgcagtctctatggaagagttttcattggcattgaagcctctaagaatggccttcagttcttggagcttctgatgagctcttgcatggacactgtcaatcaggagtttttctattgataagtggtcgatcttcatggctctttctactaatttggaatcagaagctggcaaaggaggatcgtgaaaaatctgtaaaggcttggagacatcattctcatcaattttaattgtaactttgtgaacagatgctgttccagtttttctcccaagaacctgttgattccaaactgaaagggagaggcactttccagcatgatacctttccacctgcacaaggtctccccaccgttctcggattaacattagagtttgggaatgtaacacttctaactgaagtgataaacagaaagaatgtaggcagttgtacatatcctgaagaggtttctcatcagcaaagagcctagactgcaccagttgatggatgaagctgatttgcatgctatgaaccaaagctcgcccatctcctgtttccttatcctcaactagaatttctagcttgagaagacgccatggaacatcagggtcatctcccatcacagtcaaggtggcttcaaattctccttcaacacgaaacttcacccggccatttgcaactgtaagatttgctaactgaggaggaagatctgtggttacaagccgatgtctaagaatctgattcagctgatggagtgtggcttgtttttcaattttggtaattgggtctggaggaataattttatccctaatgcaggttggcagccgtgggtaagatccagtagttagtacatcaatggcatatgggatggcaaaactaggcaggcgtgcatggaccagagcatctctagctaacgaggccaggcgatcagcagtgtccacaaacaggatggcttgctgatctaaaaagcttgaaatcatcgcacatttttccactttgccagcattattagcccatttcactaaagctaataatcgaacgaagagttggcgtgtccggctagcaaactgcactatttctattttcctttccacatcagatttccttggcagtaggtccgtcaacaccataagctccgagtaggcccggtgcagcagaaattcaatgagggtgctcagccggtagcccgggctagccgcagctgcagcggccgccgccacggcggctcccgggggaggaggggctggggctgacgggggtccgccgctgcccccgccgccgcctccgggcgggaccagctggtggttctccagctgcactggggccatggcggcgcaggaccgggcttggcgcaacggcacacgatgcggtcctcgagcctcccgggcgctcggtcaccgcgccgaaacgggagcgggcagagtcgccaccgcctaccgccggcaaccctcggccgattaaaccagcctcgtactagcta

SEQ ID NO: 547978 - DNA, 380 bp, Homo sapiens
  misc_feature (1)..(1): n is a, c, g, or t
  misc_feature (94)..(94): n is a, c, g, or t
  misc_feature (109)..(109): n is a, c, g, or t
  misc_feature (112)..(112): n is a, c, g, or t
  misc_feature (117)..(117): n is a, c, g, or t
  misc_feature (120)..(120): n is a, c, g, or t
  misc_feature (124)..(124): n is a, c, g, or t
  misc_feature (131)..(132): n is a, c, g, or t
  misc_feature (136)..(136): n is a, c, g, or t
  misc_feature (139)..(140): n is a, c, g, or t
  misc_feature (154)..(154): n is a, c, g, or t
  misc_feature (172)..(172): n is a, c, g, or t
  misc_feature (180)..(180): n is a, c, g, or t
  misc_feature (191)..(191): n is a, c, g, or t
  misc_feature (193)..(193): n is a, c, g, or t
  misc_feature (196)..(196): n is a, c, g, or t
  misc_feature (200)..(200): n is a, c, g, or t
  misc_feature (207)..(207): n is a, c, g, or t
  misc_feature (214)..(214): n is a, c, g, or t
  misc_feature (229)..(229): n is a, c, g, or t
  misc_feature (236)..(236): n is a, c, g, or t
  misc_feature (239)..(240): n is a, c, g, or t
  misc_feature (242)..(242): n is a, c, g, or t
  misc_feature (263)..(263): n is a, c, g, or t
  misc_feature (274)..(274): n is a, c, g, or t
  misc_feature (276)..(277): n is a, c, g, or t
  misc_feature (289)..(289): n is a, c, g, or t
  misc_feature (291)..(291): n is a, c, g, or t
  misc_feature (293)..(293): n is a, c, g, or t
  misc_feature (295)..(295): n is a, c, g, or t
  misc_feature (314)..(314): n is a, c, g, or t
  misc_feature (318)..(318): n is a, c, g, or t
  misc_feature (352)..(352): n is a, c, g, or t
nggagaggaaaggggcagtcgagtaagacggctaagggaactgagaagcctgaggtgatgggggctctgccttaggcctcctcttcggcctccncaccgaaatcctccnccnctccngcngcgncatcccnncacnccnnacacccacagaccnggccgtccatctcccccncaccctcnctgaaccccancnccnccanccccccncctctcncccactcgaggaagncctcccnccnnancacccgcactcaacccccccnacacgccgccncnncacctccccgancncncncccatccccaaccaagggnagcngccaccccgaggccacgaccgcggggtgtcacanacggcgtgtcttgacatttgttggggat

SEQ ID NO: 547979 - DNA, 154 bp, Homo sapiens
gaagtgattggtcgtgaacaatgaagcagctcaggaagagcacaaggagaagacagaaatatcagagagtctcaagaacctttgaatgaagtaaacagtttcccacaagaaaatcagcgtatacacagagtttctcagtccttgcggagtgggt

SEQ ID NO: 547980 - DNA, 546 bp, Homo sapiens
  misc_feature (73)..(73): n is a, c, g, or t
  misc_feature (87)..(87): n is a, c, g, or t
  misc_feature (100)..(100): n is a, c, g, or t
  misc_feature (105)..(105): n is a, c, g, or t
  misc_feature (118)..(118): n is a, c, g, or t
  misc_feature (138)..(138): n is a, c, g, or t
  misc_feature (159)..(159): n is a, c, g, or t
  misc_feature (174)..(174): n is a, c, g, or t
  misc_feature (228)..(228): n is a, c, g, or t
  misc_feature (236)..(236): n is a, c, g, or t
  misc_feature (376)..(377): n is a, c, g, or t
  misc_feature (385)..(385): n is a, c, g, or t
  misc_feature (407)..(407): n is a, c, g, or t
  misc_feature (438)..(438): n is a, c, g, or t
  misc_feature (449)..(449): n is a, c, g, or t
  misc_feature (451)..(451): n is a, c, g, or t
  misc_feature (459)..(459): n is a, c, g, or t
  misc_feature (461)..(461): n is a, c, g, or t
  misc_feature (477)..(477): n is a, c, g, or t
  misc_feature (485)..(485): n is a, c, g, or t
  misc_feature (487)..(487): n is a, c, g, or t
  misc_feature (511)..(511): n is a, c, g, or t
  misc_feature (520)..(520): n is a, c, g, or t
atggccagcaaggccagctatgttctgtaaaaacaagaagctcaactggggcaccccacaaggatgtagaggngggcgctttgaggnttgcccctccccnccagntgccccatccttnaggcagcgctccatgggggnatggttttgtcactgcccagncctagcagtgacatntcattgtccccagcccagtgggcattggaggtgccaggggagtcagggttgtanccaaaacncccccgcccggggagggttgggaagggggggcaggaagctcaacccctttgggccccaaccctgcattgcaggttggccccttacttccctgggatccccaaagttggtccaaggagggagagtgggttctcaatccggnnccaaaaanataatcccctaggtttccaaanatttttaggactcccgttaactcccatttanacagcaaaaangntattttgnangctgttaagtttttcnatctgggncntttttttaagggaaaaattttaanattaaaccnggggcttctccctcccaaaaacccca

SEQ ID NO: 547981 - DNA, 287 bp, Homo sapiens
  misc_feature (6)..(6): n is a, c, g, or t
  misc_feature (13)..(13): n is a, c, g, or t
  misc_feature (48)..(48): n is a, c, g, or t
  misc_feature (75)..(75): n is a, c, g, or t
  misc_feature (110)..(110): n is a, c, g, or t
  misc_feature (141)..(141): n is a, c, g, or t
  misc_feature (169)..(169): n is a, c, g, or t
  misc_feature (177)..(177): n is a, c, g, or t
  misc_feature (244)..(244): n is a, c, g, or t
aggtanccagatntcccctggttgtatcccaacctgcaatacaatttncacagtgcatgcagaccacagggcacntctgcatggtccctgaaccaactaagcactatgtncagcatgtccaccgtgcctgcaattatgacnaccatgtaaaccagttgttaaattgggntaattttntgtccttgctcaagtccactttttcatctgatttggttcctccaggacagctagaaactggtgttcncatattaatgagacaaagcgcacatcgaggaagtggttttcga

SEQ ID NO: 547982 - DNA, 1178 bp, Homo sapiens
  misc_feature (15)..(15): n is a, c, g, or t
  misc_feature (72)..(72): n is a, c, g, or t
  misc_feature (87)..(87): n is a, c, g, or t
  misc_feature (114)..(114): n is a, c, g, or t
  misc_feature (124)..(124): n is a, c, g, or t
  misc_feature (136)..(136): n is a, c, g, or t
  misc_feature (148)..(148): n is a, c, g, or t
  misc_feature (154)..(154): n is a, c, g, or t
  misc_feature (174)..(174): n is a, c, g, or t
  misc_feature (259)..(259): n is a, c, g, or t
  misc_feature (261)..(261): n is a, c, g, or t
  misc_feature (277)..(277): n is a, c, g, or t
  misc_feature (279)..(279): n is a, c, g, or t
  misc_feature (281)..(281): n is a, c, g, or t
  misc_feature (299)..(300): n is a, c, g, or t
  misc_feature (306)..(306): n is a, c, g, or t
  misc_feature (363)..(363): n is a, c, g, or t
  misc_feature (408)..(408): n is a, c, g, or t
  misc_feature (591)..(591): n is a, c, g, or t
  misc_feature (593)..(593): n is a, c, g, or t
  misc_feature (792)..(792): n is a, c, g, or t
  misc_feature (824)..(824): n is a, c, g, or t
  misc_feature (921)..(921): n is a, c, g, or t
  misc_feature (941)..(941): n is a, c, g, or t
  misc_feature (953)..(953): n is a, c, g, or t
  misc_feature (964)..(964): n is a, c, g, or t
  misc_feature (991)..(991): n is a, c, g, or t
acgccctttcaaaancaaacacttgtctacagtaagcgctcaggaaaaccccgttgctatccttcatcgagnacgaacacgagcaanacatgaatccgctaaaaaaaacgcagntggcaagaanattgatggcagnaggtccttgtgnacgtgnagagggccgaaccgtgaagngctggaggccccggcggctaggaggaggcctcggtggtaccagaagaggaggggctgatgtgaacatccggcattcaggccgcgntnacacctcccgctacgntnanaggcccggcccctccccnnttccgnacagggaccgggaccgggaccgtgagcgggagcgcagagagcggagccgggagcganacaaggagcgagaacggcgaagctcccgctcccgggaaccggcgnaggcgctcacgaagtcgcagacaaggaggagcggaaggcgctccagggagcggagcaagaacaaggaccgggaccggaagcaggcgaagcagccgaagtcgggagcgaggcccggcgggagcgggagcgcaaggaggagctgcgtggcggcggtggcgacatggcggagccctccgaggcggntnacgcgccccctgatgatgggcctccaggggaggcactccctaacggccctgacggtccagaggaaaagggccgggatcgtgaccgggagcgacggcggagccaccggagcgagcgcgagcggcgccgggaccgggatcgtgaccgtgaccgtgaccgcgagcacaaacggggggagcggggcagtgagcggggcagggntaaggcccgaggtgggggcggtggccaggacnacgggctggagggtctgggcaacgacagccgagacatgtacatggagtctgagggcggcgacggctacctggctccgagagatgggtatttgatggnagtgcgccggagtgaagagntcgtcctctccntctgctgtgtntcggacgcgttcctgcaccagcccctngctgtcatcccctcccccaaccttggccacttgagtttgtcctccaagggtaggtgtctcatttgttctggccccttggatttaaaaataaaattaatttcctgttgataaaaaaaaaaacacaacaacaaaagaaaaagaacaagcccacacaacataacctacaaaatgtaaaaatagaaaaaaa

SEQ ID NO: 547983 - DNA, 135 bp, Homo sapiens
ggccttatttaggagaggcgcgcctgccttccccatctgttctatctatctggctggcaggcaaggaaagaacttgcatgttggtgcaaggaagaacgtggggtggaagaagtgcgggtgggacgacagtgaaat

SEQ ID NO: 547984 - DNA, 1056 bp, Homo sapiens
  misc_feature (6)..(6): n is a, c, g, or t
  misc_feature (66)..(66): n is a, c, g, or t
  misc_feature (69)..(69): n is a, c, g, or t
  misc_feature (78)..(78): n is a, c, g, or t
  misc_feature (80)..(80): n is a, c, g, or t
  misc_feature (90)..(90): n is a, c, g, or t
  misc_feature (95)..(95): n is a, c, g, or t
  misc_feature (106)..(106): n is a, c, g, or t
  misc_feature (108)..(108): n is a, c, g, or t
  misc_feature (119)..(119): n is a, c, g, or t
  misc_feature (135)..(135): n is a, c, g, or t
  misc_feature (156)..(156): n is a, c, g, or t
  misc_feature (163)..(164): n is a, c, g, or t
  misc_feature (167)..(167): n is a, c, g, or t
  misc_feature (191)..(191): n is a, c, g, or t
  misc_feature (202)..(202): n is a, c, g, or t
  misc_feature (222)..(222): n is a, c, g, or t
  misc_feature (234)..(234): n is a, c, g, or t
  misc_feature (251)..(251): n is a, c, g, or t
  misc_feature (263)..(263): n is a, c, g, or t
  misc_feature (286)..(286): n is a, c, g, or t
  misc_feature (469)..(469): n is a, c, g, or t
  misc_feature (471)..(471): n is a, c, g, or t
  misc_feature (670)..(670): n is a, c, g, or t
  misc_feature (702)..(702): n is a, c, g, or t
  misc_feature (799)..(799): n is a, c, g, or t
  misc_feature (819)..(819): n is a, c, g, or t
  misc_feature (831)..(831): n is a, c, g, or t
  misc_feature (842)..(842): n is a, c, g, or t
  misc_feature (869)..(869): n is a, c, g, or t
aaaganctggaagcccccggccggcttaggagaaggcctccggtggttaccaagaaagaggaaggngcntgaatgtgnancatcccggcnatccnaggccagcgantnactccctcccngcttacggatcaagangccccggccccctccccccgnttcccgnnacnaggggaccgggaaccgggaacctntgcagcggggngcgccagagcagcggtagcncgggcagcgaanaccaaggaagcggaganacgggcggtagntccccgctcccgggaaccggcgnaggcgctcacgaagtcgcagacaaggaggagcggaaggcgctccagggagcggagcaagaacaaggaccgggaccggaagcaggcgaagcagccgaagtcgggagcgaggcccggcgggagcgggagcgcaaggaggagctgcgtggcggcggtggcgacatggcggagccctccgaggcggntnacgcgccccctgatgatgggcctccaggggaggcactccctaacggccctgacggtccagaggaaaagggccgggatcgtgaccgggagcgacggcggagccaccggagcgagcgcgagcggcgccgggaccgggatcgtgaccgtgaccgtgaccgcgagcacaaacggggggagcggggcagtgagcggggcagggntaaggcccgaggtgggggcggtggccaggacnacgggctggagggtctgggcaacgacagccgagacatgtacatggagtctgagggcggcgacggctacctggctccgagagatgggtatttgatggnagtgcgccggagtgaagagntcgtcctctccntctgctgtgtntcggacgcgttcctgcaccagcccctngctgtcatcccctcccccaaccttggccacttgagtttgtcctccaagggtaggtgtctcatttgttctggccccttggatttaaaaataaaattaatttcctgttgataaaaaaaaaaacacaacaacaaaagaaaaagaacaagcccacacaacataacctacaaaatgtaaaaatagaaaaaaa

SEQ ID NO: 547985 - DNA, 1342 bp, Homo sapiens
ctggctccgcgtcggccggtcggtttggtcggttgtagtggcctcgccgcccggtccgctgtcgcagcgctcatccgcgccgggagcccttggctgcgtcgcccggcagccgcgggagcatttcctgaagacgtagtcatgcagcacgtcagcagctcccagagcagccagcgccatgtccagtggcctggggcctgccccggcgcgggcgaggagcagccagcgtgctcccagccgtccctgcccctcacactgccatcccccagccaccaactacagcagctgatggtccagacccagagtcccacgcagcccagtccggggccggggcaggccttgcagaatgtgcgtgcaggtgcccctggccctgggctgggcctctgcagcagcagccctacaggggacttcgtggatgccagcgtgctggtgaggcagatcagcttgagcccctccagtggtggacactttgtgtttcaggatgggtcagggctcacccagatcgcccagggagcccaggttcagctccagcacccgggtacgcccatcacagtccgagagcggagaccctcccagccccacacacagtcagggggcaccatccaccacctgggaccccagagccctgcagccgcgggtggggccggcctgcagcccctggccagcccaagccacatcaccacggctaacttgccaccgcagatcagcagcatcatccagggccagctggttcagcagcagcaggtgctgcaggggccgccgctgccccggcccctgggcttcgagaggacgcccggcgtgctgctccccggggctgggggcgcagcggggtttgggatgacgtccccacccccgcccaccagcccttccaggactgccgtgcccccaggcctttccagcctcccactcacgtctgtggggaacacgggaatgaagaaggttcccaagaagttagaggagattcccccagcctctccggagatggcacagatgaggaagcagtgcctggactatcattaccaggagatgcaggctctgaaggaggtcttcaaggagtatttgattgaactgtttttcttgcaacactttcaagggaacatgatggatttcttagctttcaaggagagactgtatggaccattacaagcatatcttaggcagaatgatttggacattgaagaagaggaggaggaggaggaagaggaggaagaaaaatctgaggttatcaatgacgaggtaagaaaacggagttaatttgtttagtacaaatcttctagatgatcagagtctatgcgacaatgaataagtaataatttattgagcctcgaacctatgagggatcctc

SEQ ID NO: 547986 - DNA, 252 bp, Homo sapiens
  misc_feature (31)..(31): n is a, c, g, or t
gacaggtggatgagcgcccgcgaacgacggncctcaggcagccatgctcaccccgattgcttccaccagctcaggctgcatggtttcgacaagaggaatttgtttctcatagttggggaggggggaattccaagatcaagcagggcctatgaccatgtctgatgttcagggaatgaagaagtgaagaaagcaggaatgaatgaaggaaggaagcagccccagcaattggttcccacgcgagaagctggtggg

SEQ ID NO: 547987 - DNA, 128 bp, Homo sapiens
tgtgtatcacaagtgtgcaccaccacacccagccagttgggaaaatcttattggagaaacgaggactatgctgtgttgcccaggctggtctcaaactcctggccccaagcattctccccgctatgagt

SEQ ID NO: 547988 - DNA, 864 bp, Homo sapiens
ctggctccgcgtcggccggtcggtttggtcggttgtagtggcctcgccgcccggtccgctgtcgcagcgctcatccgcgccgggagcccttggctgcgtcgcccggcagccgcgcctcgcgagaccgctgtctacggcgctgacgccgcctctgcctcttgaccccttggccccgctgtcctgatccctgaggtcggggcctggtctgcactccaggaaagacgagtgcgcttagtgtgcgctgcacgtgagcagtgaagttgattccacgcgctgcgctgctcggcagctgtcccagaactgaccacggacccctccgcgggtcctgctcctgacaagggccttccggcactgggagttttgtgttagtggaaaggaagaatctaataataccaccacctttacagtaaagacgctgcgaattgacgccttttataataaagacacttatcttgcccaagagctgggggcaggctgattggcgctggtttccatctgtcagattggacagcagtaccactggctgttgggggctcacgaccagatagagtcttgtctgggaaccacaagtgagtgttgttaccacagctctgcagcagtgagggcacctctcaatccacgtgcagtcgccccaccttatcttcaggggatacggtccaacaccctcaatggatgcctgaaatcaaggatagtagtgaacactatatacactgttttgttatgcatccttccatatctacgataaagtttaattcataaactaggcacaggaagagattaataacagctaataataaaatagaacagtcgtaacaatatactgtaataaaagtcatgtgaaagtgatgtctctctcctaaaaaa

SEQ ID NO: 547989 - DNA, 838 bp, Homo sapiens
gccgagagcgccggtggagccaccagaattgtgataccagggtgtggattggacgccaggaagtcgcgccacgagggcacaaggaggtgggcccccgaaagggcgaagaggggtacgggccagcgagtgaaacagcgagcccgttgcagggggcatgcgagcggagtgagcaagagtgtgttaacggggaacaggcagagagcaacaaccgatacgccgtccggcgccccctgggggggccgctgcttgtgcccccccccgccgctggtcgagggaatgaagataagggcgagcccgcttttcggggaacaaatttggcgggccccaaatgtggcgacagaagttcttaagcgaagagagatctttcggaaaagttaaatgttttccccggggggggacaccatccacttgtgcaccacgaagccctcgcgtgaagcgccaaaccttcataggtgggcggcgcaaagtaggaaatagaacgcgcgcgaatgttttccacggtgggcggccaccactgttggcacgcacagaaagtaaaacgccagacttgtttacaatttctcttgcgcataaagtcagaatggggcgcccaatagagggcaatatagaaggccagtcaattcgctccgccttcattgatctctttgagaatgtttcattgatgtcgtgcgtgacactatatggagcaccaagggttttagttaaacgagggtgctgtcaccgtgcgaattcaatcaaaaggaggccgaattgcgaggaaaaatgttggcggaggctccatctttaaaagcttttagtctttggtttttaaaaaaaaaaaatccaagaacacaagaca

SEQ ID NO: 547990 - DNA, 460 bp, Homo sapiens
aagggcttcagttttccactttgcctagacttaggcagaataatttggacatttaataagaggaagagagagcaactttgaacgtcgattaagtgatgaaggttaaaagagttgtgggccaagagtggccagaaagcacgggcagcctgggactcctgttgccatagcaacccagctaccgccgaggacttctgcggcttttccagcccagcagcagccgctccaggtactttctgatggctccacagtgcagctccccagactttcctcactcggatttgaggactcgatgtgctgaggcaggacccagaggggtcccaagagcctgtcctcttttgttcaaaatacatcttgaaacgtctttgtgaaggctcttagttttaatgcatggatgctgttatttttccctactgttactgaaattaaaaagtgtttgtctctgaaaacaacaaaaaaaaaa

SEQ ID NO: 547991 - DNA, 2878 bp, Homo sapiens
caaactcacagccctctccaaactggctggggctgctgggagactcccaaggaactcgtcaggaaggcaggagacaggagacgggacctctacagggagacggtgggccggcccttgggggggctgatgtggccccaaggctgagtcccgtcagggtctggcctcggcctcaggcccccaaggagccggccctacaccccatgggtttgtcactgcccaaggagaaagggctaattctctgcctatggagcaagttctgcagatggttccagagacgggagtcctgggcccagagccgagatgagcagaacctgctgcagcagaagaggatctgggagtctcctctccttctagctgccaaagataatgatgtccaggccctgaacaagttgctcaagtatgaggattgcaaggtgcaccagagaggagccatgggggaaacagcgctacacatagcagccctctatgacaacctggaggccgccatggtgctgatggaggctgccccggagctggtctttgagcccatgacatctgagctctatgagggtcagactgcactgcacatcgctgttgtgaaccagaacatgaacctggtgcgagccctgcttgcccgcagggccagtgtctctgccagagccacaggcactgccttccgccgtagtccctgcaacctcatctactttggggagcaccctttgtcctttgctgcctgtgtgaacagtgaggagatcgtgcggctgctcattgagcatggagctgacatccgggcccaggactccctgggaaacacagtgttacacatcctcatcctccagcccaacaaaacctttgcctgccagatgtacaacctgttgctgtcctacgacagacatggggaccacctgcagcccctggacctcgtgcccaatcaccagggtctcacccctttcaagctggctggagtggagggtaacactgtgatgtttcagcacctgatgcagaagcggaagcacacccagtggacgtatggaccactgacctcgactctctatgacctcacagagatcgactcctcaggggatgagcagtccctgctggaacttatcatcaccaccaagaagcgggaggctcgccagatcctggaccagacgccggtgaaggagctggtgagcctcaagtggaagcggtacgggcggccgtacttctgcatgctgggtgccatatatctgctgtacatcatctgcttcaccatgtgctgcatctaccgccccctcaagcccaggaccaataaccgcacgagcccccgggacaacaccctcttacagcagaagctacttcaggaagcctacatgacccctaaggacgatatccggctggtcggggagctggtgactgtcattggggctatcatcatcctgctggtagaggttccagacatcttcagaatgggggtcactcgcttctttggacagaccatccttgggggcccattccatgtcctcatcatcacctatgccttcatggtgctggtgaccatggtgatgcggctcatcagtgccagcggggaggtggtacccatgtcctttgcactcgtgctgggctggtgcaacgtcatgtacttcgcccgaggattccagatgctaggccccttcaccatcatgattcagaagatgatttttggcgacctgatgcgattctgctggctgatggctgtggtcatcctgggctttgcttcagccttctatatcatcttccagacagaggaccccgaggagctaggccacttctacgactaccccatggccctgttcagcaccttcgagctgttccttaccatcatcgatggcccagccaactacaacgtggacctgcccttcatgtacagcatcacctatgctgcctttgccatcatcgccacactgctcatgctcaacctcctcattgccatgatgggcgacactcactggcgagtggcccatgagcgggatgagctgtggagggcccagattgtggccaccacggtgatgctggagcggaagctgcctcgctgcctgtggcctcgctccgggatctgcggacgggagtatggcctgggagaccgctggttcctgcgggtggaagacaggcaagatctcaaccggcagcggatccaacgctacgcacaggccttccacacccggggctctgaggatttggacaaagactcagtggaaaaactagagctgggctgtcccttcagcccccacctgtcccttcctatgccctcagtgtctcgaagtacctcccgcagcagtgccaattgggaaaggcttcggcaagggaccctgaggagagacctgcgtgggataatcaacaggggtctggaggacggggagagctgggaatatcagatctgactgcgtgttctcacttcgcttcctggaacttgctctcattttcctgggtgcatcaaacaaaacaaaaaccaaacacccagaggtctcatctcccaggccccaggggagaaagaggagtagcatgaacgccaaggaatgtacgttgagaatcactgctccaggcctgcattactccttcagctctggggcagaggaagcccagcccaagcacggggctggcagggcgtgaggaactctcctgtggcctgctcatcacccttccgacaggagcactgcatgtcagagcactttaaaaacaggccagcctgcttgggcgctcggtctccaccccagggtcataagtggggagagagcccttcccagggcacccaggcaggtgcagggaagtgcagagcttgtggaaagcgtgtgagtgagggagacaggaacggctctgggggtgggaagtggggctaggtcttgccaactccatcttcaataaagtcgttttcggatccctg

SEQ ID NO: 547992 - DNA, 102 bp, Homo sapiens
tccaggttggcctggtgggcatgtcgcctgaccgcagcactcctctgtctctgctctatgcctgcacccttccatcctcctttgcctaggaggccttctcgc

SEQ ID NO: 547993 - DNA, 942 bp, Homo sapiens
ctggctccgcgtcggccggtcggtttggtcggttgtagtggcctcgccgcccggtccgctgtcgcagcgctcatccgcgccgggagcccttggctgcgtcgcccggcagccgcgcctcgcgagaccgctgtctacggcgctgacgccgcctctgcctcttgaccccttggccccgctgtcctgatccctgaggtcggggcctggtctgcactccaggaaagacgagtgcgcttagtgtgcgctgcacgtgagcagtgaagttgattccacgcgctgcgctgctcggcagctgtcccagaactgaccacggacccctccgcgggtcctgctcctgacaagggccttccggcactgggagttttgtgttagtggaaaggaagaatctaataataccaccacctttacagtaaagacgctgcgaattgacgccttttataataaagacacttatcttgcccaagagctgggtgagtatttcctccttaccaaaaagttggtttacttacagttaactggctgaaagtttgagtcttaggcttatttgtgccgctccaggcaggctgattggcgctggtttccatctgtcagattggacagcagtaccactggctgttgggggctcacgaccagatagagtcttgtctgggaaccacaagtgagtgttgttaccacagctctgcagcagtgagggcacctctcaatccacgtgcagtcgccccaccttatcttcaggggatacggtccaacaccctcaatggatgcctgaaatcaaggatagtagtgaacactatatacactgttttgttatgcatccttccatatctacgataaagtttaattcataaactaggcacaggaagaatcagctttttttgatatcagttggtagttggaaagactatatactattttatctgaggcatgcgtgagtgaaaaaaaagc

SEQ ID NO: 547994 - DNA, 728 bp, Homo sapiens
  misc_feature (258)..(258): n is a, c, g, or t
  misc_feature (264)..(264): n is a, c, g, or t
tttattttctccaggaatatatattgatattctaagtgggatgtttatatttataagtggcctttatgtctgtagggtcaaaatatctgggagcccttaaaagccctttctatttgctttctctggtgcctgtgctcctgggaatggggcttctgcttcctgtctttctcctgcctctggcctggctgcgtcatggatgttgggtcattgggtaaagaattgttggtctcaagctctatcaactctctcccactgaanaaggtnaacaaaggctgccctacccctacctctgtctgcgcccagcctcatctctgacttctccttttgttcccatacgcagattgtggccaccacggtgatgctggagcggaagctgcctcgctgcctgtggcctcgctccgggatctgcggacgggagtatggcctgggagaccgctggttcctgcggtgagtgatatgcgggggtaggtgtcccctgagaagcctcatcggcagggtatccccctgctcagacagcttccggctcctgggttccctgtggaggcctgtgtgctccctaggctctatgcttgttgattgagctggtgaggaaggggtcccgtttggagctcagacttcccaaagcatccagggagtctgtggcagagcctgctgctttctgaggcctagctgccaaggggccagtgacccaggcatccaccatggctgcagaaaagggaaaaggccag

SEQ ID NO: 547995 - DNA, 460 bp, Homo sapiens
gatcttagaggatcccccagttacaacagctgaagaagttttgagaacactctgtagcaaatgatcagtctgttgctacttgtaactgatagtgcagctaagtgctcagatcgacaagacagcgatgccactgtctctcaaaaagaatgtcatgggaacatactgaaattttcctctgccgtaaacataccatcataacctgatctcccgagacatgctctatgaatacctacggtaatactgtcagatcattcagtacagagaggactcagatcatggtgaagtgccaatgccatctcaggtacctgtcgtccattttattaaataaaagtgtgtctagagtttaactgtatgggcttttctttaaaaacttttaaatgagtatggcttgttagcattttttattttttgagtttgattatcattttgttttatcaggctagcctagatcaaggaaaga

SEQ ID NO: 547996 - DNA, 159 bp, Homo sapiens
gtactttgccacaggggaggtccatagatactgctgaaacaggaaaaccaacgaggtatcaatagagaatgatacttagtgatgagcagagcaataccaataagaagaagcttaaagagagatgaaatggtgtgcctcagtggaacaggcaaatagtgc

SEQ ID NO: 547997 - DNA, 479 bp, Homo sapiens
aacagagataccctcaacagggggccgaactttgctgaagaggcggagagctagctgtcgcccagactggcaggagctctggggccgcagtactacctgtaggatagagagtaaagaagagcccaacccaatgtccttcctgccataaagcaacccacaaatcctctgcagaatgagaggagaagcaatggtactgttaagctgggcaagctttcaccctgtcagatcaccacattgttttccatagtggatttatactgaagggccgttataaatgcgccatgctaaaatcatacaaatgcattaggaaaggggaaataagcctcacctgatatccaggtgttagtaatagggtattaaaggttaaccagggcaactacagatgatgttaggcatgtgtcataaaacttattctcatataaagacagattttgccccatatagtataataaacctttcccaaaagtttaaaaaaaaaa

SEQ ID NO: 547998 - DNA, 623 bp, Homo sapiens
  misc_feature (569)..(569): n is a, c, g, or t
ctggctccgcgtcggccggtcggtttggtcggttgtagtggcctcgccgcccggtccgctgtcgcagcgctcatccgcgccgggagcccttggctgcgtcgcccggcagccgcgcctcgcgagaccgctgtctacggcgctgacgccgcctctgcctcttgaccccttggccccgctgtcctgatccctgaggtcggggcctggtctgcactccaggaaagacgagtgcgcttagtgtgcgctgcacgtgagcagtgaagttgattccacgcgctgcgctgctcggcagctgtcccagaactgaccacggacccctccgcgggtcctgctcctgacaagggccttccggcactgggagttttgtgttagtggaaaggaagaatctaataataccaccacctttacagtaaagacgctgcgaattgacgccttttataataaagacacttatcttgcccaagagctgggatctgggtttcctgcattacttattaagaagctttcaccacctcgcagttgtagagatagtccccgaaatattattccaataaagtgttttcctcctttcntccctgcctcctcttccttccttccaggataacatttagttctttattctgact

SEQ ID NO: 547999 - DNA, 786 bp, Homo sapiens
  misc_feature (566)..(566): n is a, c, g, or t
  misc_feature (576)..(576): n is a, c, g, or t
caaactcacagccctctccaaactggctggggctgctgggagactcccaaggaactcgtcaggaaggcaggagacaggagacgggacctctacagggagacggtgggccggcccttgggggggctgatgtggccccaaggctgagtcccgtcagggtctggcctcggcctcaggcccccaaggagccggccctacaccccatgggtttgtcactgcccaaggagaaagggctaattctctgcctatggagcaagttctgcagatggttccagagacgggagtcctgggcccagagccgagatgagcagaacctgctgcagcagaagaggatctgggagtctcctctccttctagctgccaaagataatgatgtccaggccctgaacaagttgctcaagtatgaggattgcaaggtgcaccagagaggtaagaagcacaaatgcagcatgatctcctaggtgagccccacacatggggcctcccaggagtgcccaggacctcgtgctgttggcctctgaatctatcgtctccaatccgctgtcccacagaagccatataacccaccnctctgtaaangccaggagccatgggggaaacagcgctacacatagcagccctctatgacaacctggaggccgccatggtgctgatggaggctgccccggagctggtctttgagcccatgacatctgagctctatgagggtgagggccacgggtctggggtgaagagcaggagtgactggttgggtatctcaaggcagttctccgtgatggatattattag

SEQ ID NO: 548000 - DNA, 2634 bp, Homo sapiens
tgatggataatttgggaaagacacaggggatctgagcctcctactctttttttctcttctctgtctcccttccgtgtcagtcctgactgcccatcacttgaacgcctgccccctgaaatgccaggggcctagagaagaggaagagatgggcagcagctggatcccctgggaatcctgaacacccgagagctccctgttctccatcccaggctacccctgagggaaagagactggggtgcatatgggagggaccccctgcaggatcctggggacagacccgtgactgacagctgtctctgggccaggtcagactgcactgcacatcgctgttgtgaaccagaacatgaacctggtgcgagccctgcttgcccgcagggccagtgtctctgccagagccacaggcactgccttccgccgtagtccctgcaacctcatctactttggggagcaccctttgtcctttgctgcctgtgtgaacagtgaggagatcgtgcggctgctcattgagcatggagctgacatccgggcccaggactccctgggaaacacagtgttacacatcctcatcctccagcccaacaaaacctttgcctgccagatgtacaacctgttgctgtcctacgacagacatggggaccacctgcagcccctggacctcgtgcccaatcaccagggtctcacccctttcaagctggctggagtggagggtaacactgtgatgtttcagcacctgatgcagaagcggaagcacacccagtggacgtatggaccactgacctcgactctctatgacctcacagagatcgactcctcaggggatgagcagtccctgctggaacttatcatcaccaccaagaagcgggaggctcgccagatcctggaccagacgccggtgaaggagctggtgagcctcaagtggaagcggtacgggcggccgtacttctgcatgctgggtgccatatatctgctgtacatcatctgcttcaccatgtgctgcatctaccgccccctcaagcccaggaccaataaccgcacgagcccccgggacaacaccctcttacagcagaagctacttcaggaagcctacatgacccctaaggacgatatccggctggtcggggagctggtgactgtcattggggctatcatcatcctgctggtagaggttccagacatcttcagaatgggggtcactcgcttctttggacagaccatccttgggggcccattccatgtcctcatcatcacctatgccttcatggtgctggtgaccatggtgatgcggctcatcagtgccagcggggaggtggtacccatgtcctttgcactcgtgctgggctggtgcaacgtcatgtacttcgcccgaggattccagatgctaggccccttcaccatcatgattcagaagatgatttttggcgacctgatgcgattctgctggctgatggctgtggtcatcctgggctttgcttcagccttctatatcatcttccagacagaggaccccgaggagctaggccacttctacgactaccccatggccctgttcagcaccttcgagctgttccttaccatcatcgatggcccagccaactacaacgtggacctgcccttcatgtacagcatcacctatgctgcctttgccatcatcgccacactgctcatgctcaacctcctcattgccatgatgggcgacactcactggcgagtggcccatgagcgggatgagctgtggagggcccagattgtggccaccacggtgatgctggagcggaagctgcctcgctgcctgtggcctcgctccgggatctgcggacgggagtatggcctgggagaccgctggttcctgcgggtggaagacaggcaagatctcaaccggcagcggatccaacgctacgcacaggccttccacacccggggctctgaggatttggacaaagactcagtggaaaaactagagctgggctgtcccttcagcccccacctgtcccttcctatgccctcagtgtctcgaagtacctcccgcagcagtgccaattgggaaaggcttcggcaagggaccctgaggagagacctgcgtgggataatcaacaggggtctggaggacggggagagctgggaatatcagatctgactgcgtgttctcacttcgcttcctggaacttgctctcattttcctgggtgcatcaaacaaaacaaaaaccaaacacccagaggtctcatctcccaggccccaggggagaaagaggagtagcatgaacgccaaggaatgtacgttgagaatcactgctccaggcctgcattactccttcagctctggggcagaggaagcccagcccaagcacggggctggcagggcgtgaggaactctcctgtggcctgctcatcacccttccgacaggagcactgcatgtcagagcactttaaaaacaggccagcctgcttgggcgctcggtctccaccccagggtcataagtggggagagagcccttcccagggcacccaggcaggtgcagggaagtgcagagcttgtggaaagcgtgtgagtgagggagacaggaacggctctgggggtgggaagtggggctaggtcttgccaactccatcttcaataaagtcgttttcggatccctg

SEQ ID NO: 548001 - DNA, 2911 bp, Homo sapiens
  misc_feature (444)..(444): n is a, c, g, or t
  misc_feature (454)..(454): n is a, c, g, or t
caaactcacagccctctccaaactggctggggctgctgggagactcccaaggaactcgtcaggaaggcaggagacaggagacgggacctctacagggagacggtgggccggcccttgggggggctgatgtggccccaaggctgagtcccgtcagggtctggcctcggcctcaggcccccaaggagccggccctacaccccatgggtttgtcactgcccaaggagaaagggctaattctctgcctatggagcaagttctgcagatggttccagagacgggagtcctgggcccagagccgagatgagcagaacctgctgcagcagaagaggatctgggagtctcctctccttctagctgccaaagataatgatgtccaggccctgaacaagttgctcaagtatgaggattgcaaggtgcaccagagagaagccatataacccaccnctctgtaaangccaggagccatgggggaaacagcgctacacatagcagccctctatgacaacctggaggccgccatggtgctgatggaggctgccccggagctggtctttgagcccatgacatctgagctctatgagggtcagactgcactgcacatcgctgttgtgaaccagaacatgaacctggtgcgagccctgcttgcccgcagggccagtgtctctgccagagccacaggcactgccttccgccgtagtccctgcaacctcatctactttggggagcaccctttgtcctttgctgcctgtgtgaacagtgaggagatcgtgcggctgctcattgagcatggagctgacatccgggcccaggactccctgggaaacacagtgttacacatcctcatcctccagcccaacaaaacctttgcctgccagatgtacaacctgttgctgtcctacgacagacatggggaccacctgcagcccctggacctcgtgcccaatcaccagggtctcacccctttcaagctggctggagtggagggtaacactgtgatgtttcagcacctgatgcagaagcggaagcacacccagtggacgtatggaccactgacctcgactctctatgacctcacagagatcgactcctcaggggatgagcagtccctgctggaacttatcatcaccaccaagaagcgggaggctcgccagatcctggaccagacgccggtgaaggagctggtgagcctcaagtggaagcggtacgggcggccgtacttctgcatgctgggtgccatatatctgctgtacatcatctgcttcaccatgtgctgcatctaccgccccctcaagcccaggaccaataaccgcacgagcccccgggacaacaccctcttacagcagaagctacttcaggaagcctacatgacccctaaggacgatatccggctggtcggggagctggtgactgtcattggggctatcatcatcctgctggtagaggttccagacatcttcagaatgggggtcactcgcttctttggacagaccatccttgggggcccattccatgtcctcatcatcacctatgccttcatggtgctggtgaccatggtgatgcggctcatcagtgccagcggggaggtggtacccatgtcctttgcactcgtgctgggctggtgcaacgtcatgtacttcgcccgaggattccagatgctaggccccttcaccatcatgattcagaagatgatttttggcgacctgatgcgattctgctggctgatggctgtggtcatcctgggctttgcttcagccttctatatcatcttccagacagaggaccccgaggagctaggccacttctacgactaccccatggccctgttcagcaccttcgagctgttccttaccatcatcgatggcccagccaactacaacgtggacctgcccttcatgtacagcatcacctatgctgcctttgccatcatcgccacactgctcatgctcaacctcctcattgccatgatgggcgacactcactggcgagtggcccatgagcgggatgagctgtggagggcccagattgtggccaccacggtgatgctggagcggaagctgcctcgctgcctgtggcctcgctccgggatctgcggacgggagtatggcctgggagaccgctggttcctgcgggtggaagacaggcaagatctcaaccggcagcggatccaacgctacgcacaggccttccacacccggggctctgaggatttggacaaagactcagtggaaaaactagagctgggctgtcccttcagcccccacctgtcccttcctatgccctcagtgtctcgaagtacctcccgcagcagtgccaattgggaaaggcttcggcaagggaccctgaggagagacctgcgtgggataatcaacaggggtctggaggacggggagagctgggaatatcagatctgactgcgtgttctcacttcgcttcctggaacttgctctcattttcctgggtgcatcaaacaaaacaaaaaccaaacacccagaggtctcatctcccaggccccaggggagaaagaggagtagcatgaacgccaaggaatgtacgttgagaatcactgctccaggcctgcattactccttcagctctggggcagaggaagcccagcccaagcacggggctggcagggcgtgaggaactctcctgtggcctgctcatcacccttccgacaggagcactgcatgtcagagcactttaaaaacaggccagcctgcttgggcgctcggtctccaccccagggtcataagtggggagagagcccttcccagggcacccaggcaggtgcagggaagtgcagagcttgtggaaagcgtgtgagtgagggagacaggaacggctctgggggtgggaagtggggctaggtcttgccaactccatcttcaataaagtcgttttcggatccctg

SEQ ID NO: 548002 - DNA, 120 bp, Homo sapiens
ggtgtcatcgatgcataagccagttttttgggtgtgtggtttctttttttaattttcacaggcacaggatctgctgtgcccaggctggtctcaaactccaggcctcaagcagttctccca

SEQ ID NO: 548003 - DNA, 3191 bp, Homo sapiens
caaactcacagccctctccaaactggctggggctgctgggagactcccaaggaactcgtcaggaaggcaggagacaggagacgggacctctacagggagacggtgggccggcccttgggggggctgatgtggccccaaggctgagtcccgtcagggtctggcctcggcctcaggcccccaaggagccggccctacaccccatgggtttgtcactgcccaaggagaaagggctaattctctgcctatggagcaagttctgcagatggttccagagacgggagtcctgggcccagagccgagatgagcagaacctgctgcagcagaagaggatctgggagtctcctctccttctagctgccaaagataatgatgtccaggccctgaacaagttgctcaagtatgaggattgcaaggtgcaccagagaggagccatgggggaaacagcgctacacatagcagccctctatgacaacctggaggccgccatggtgctgatggaggctgccccggagctggtctttgagcccatgacatctgagctctatgagggtcagactgcactgcacatcgctgttgtgaaccagaacatgaacctggtgcgagccctgcttgcccgcagggccagtgtctctgccagagccacaggcactgccttccgccgtagtccctgcaacctcatctactttggggagcaccctttgtcctttgctgcctgtgtgaacagtgaggagatcgtgcggctgctcattgagcatggagctgacatccgggcccaggactccctgggaaacacagtgttacacatcctcatcctccagcccaacaaaacctttgcctgccagatgtacaacctgttgctgtcctacgacagacatggggaccacctgcagcccctggacctcgtgcccaatcaccagggtctcacccctttcaagctggctggagtggagggtaacactgtgatgtttcagcacctgatgcagaagcggaagcacacccagtggacgtatggaccactgacctcgactctctatgacctcacagagatcgactcctcaggggatgagcagtccctgctggaacttatcatcaccaccaagaagcgggaggctcgccagatcctggaccagacgccggtgaaggagctggtgagcctcaagtggaagcggtacgggcggccgtacttctgcatgctgggtgccatatatctgctgtacatcatctgcttcaccatgtgctgcatctaccgccccctcaagcccaggaccaataaccgcacgagcccccgggacaacaccctcttacagcagaagctacttcaggaagcctacatgacccctaaggacgatatccggctggtcggggagctggtgactgtcattggggctatcatcatcctgctggtagaggttccagacatcttcagaatgggggtcactcgcttctttggacagaccatccttgggggcccattccatgtcctcatcatcacctatgccttcatggtgctggtgaccatggtgatgcggctcatcagtgccagcggggaggtggtacccatgtcctttgcactcgtgctgggctggtgcaacgtcatgtacttcgcccgaggattccagatgctaggccccttcaccatcatgattcagaagatgatttttggcgacctgatgcgattctgctggctgatggctgtggtcatcctgggctttgcttcagccttctatatcatcttccagacagaggaccccgaggagctaggccacttctacgactaccccatggccctgttcagcaccttcgagctgttccttaccatcatcgatggcccagccaactacaacgtggacctgcccttcatgtacagcatcacctatgctgcctttgccatcatcgccacactgctcatgctcaacctcctcattgccatgatgggcgacactcactggcgagtggcccatgagcgggatgagctgtggagggcccagattgtggccaccacggtgatgctggagcggaagctgcctcgctgcctgtggcctcgctccgggatctgcggacgggagtatggcctgggagaccgctggttcctgcgggtggaagacaggcaagatctcaaccggcagcggatccaacgctacgcacaggccttccacacccggggctctgaggatttggacaaagactcagtggaaaaactagagctgggctgtcccttcagcccccacctgtcccttcctatgccctcagtgtctcgaagtacctcccgcagcagtgccaattgggaaaggcttcggcaagggaccctgaggagagacctgcgtgggataatcaacaggggtctggaggacggggagagctgggaatatcagatctgactgcgtgttctcacttcgcttcctggaacttgctctcattttcctgggtgcatcaaacaaaacaaaaaccaaacacccagaggtctcatctcccaggccccaggggagaaagaggagtagcatgaacgccaaggaatgtacgttgagaatcactgctccaggcctgcattactccttcagctctggggcagaggaagcccagcccaagcacggggctggcagggcgtgaggaactctcctgtggcctgctcatcacccttccgacaggagcactgcatgtcagagcactttaaaaacaggccagcctgcttgggcgctcggtctccaccccagggtcataagtggggagagagcccttcccagggcacccaggcaggtgcagggaagtgcagagcttgtggaaagcgtgtgagtgagggagacaggaacggctctgggggtgggaagtggggctaggtcttgccaactccatcttcaataaagtcgttttcggatccctgcccaaaaaaaaaaaaagaaacacgataacaaacgaaagacaagcagagaaccaagcagccatacgaagagccacaaccaacgccgaaccagaacaaactgcaagaccatcaacaaggcggcgcgcggccgcataatgaatcaaccagcgggggaggcagggaggcggccgccccagtctcagaagcaacagggcgccccacgggaggcggataataagaagcacaggggcacataaaaaagccgggagagcaacacgcgtgggcgtgagaagacaccgcgggcggggacaagagacacccacgaaagagaccg

SEQ ID NO: 548004 - DNA, 1230 bp, Homo sapiens
  misc_feature (258)..(258): n is a, c, g, or t
  misc_feature (264)..(264): n is a, c, g, or t
tttattttctccaggaatatatattgatattctaagtgggatgtttatatttataagtggcctttatgtctgtagggtcaaaatatctgggagcccttaaaagccctttctatttgctttctctggtgcctgtgctcctgggaatggggcttctgcttcctgtctttctcctgcctctggcctggctgcgtcatggatgttgggtcattgggtaaagaattgttggtctcaagctctatcaactctctcccactgaanaaggtnaacaaaggctgccctacccctacctctgtctgcgcccagcctcatctctgacttctccttttgttcccatacgcagattgtggccaccacggtgatgctggagcggaagctgcctcgctgcctgtggcctcgctccgggatctgcggacgggagtatggcctgggagaccgctggttcctgcgggtggaagacaggcaagatctcaaccggcagcggatccaacgctacgcacaggccttccacacccggggctctgaggatttggacaaagactcagtggaaaaactagagctgggctgtcccttcagcccccacctgtcccttcctatgccctcagtgtctcgaagtacctcccgcagcagtgccaattgggaaaggcttcggcaagggaccctgaggagagacctgcgtgggataatcaacaggggtctggaggacggggagagctgggaatatcagatctgactgcgtgttctcacttcgcttcctggaacttgctctcattttcctgggtgcatcaaacaaaacaaaaaccaaacacccagaggtctcatctcccaggccccaggggagaaagaggagtagcatgaacgccaaggaatgtacgttgagaatcactgctccaggcctgcattactccttcagctctggggcagaggaagcccagcccaagcacggggctggcagggcgtgaggaactctcctgtggcctgctcatcacccttccgacaggagcactgcatgtcagagcactttaaaaacaggccagcctgcttgggcgctcggtctccaccccagggtcataagtggggagagagcccttcccagggcacccaggcaggtgcagggaagtgcagagcttgtggaaagcgtgtgagtgagggagacaggaacggctctgggggtgggaagtggggctaggtcttgccaactccatcttcaataaagtcgttttcggatccctg

SEQ ID NO: 548005 - DNA, 183 bp, Homo sapiens
agtgagggtcatacgtttaatcccgtgcgacgttgggaggcaagggaggaggatgagtgaggccaggagttttgagagggggtctctacaaaaaataaaaataaaattagcagggtgtagtagtgcatgcttgtattcccagctactgaggaggctgagaagggaggattgcttgttccgctg

SEQ ID NO: 548006 - DNA, 2048 bp, Homo sapiens
tgatggataatttgggaaagacacaggggatctgagcctcctactctttttttctcttctctgtctcccttccgtgtcagtcctgactgcccatcacttgaacgcctgccccctgaaatgccaggggcctagagaagaggaagagatgggcagcagctggatcccctgggaatcctgaacacccgagagctccctgttctccatcccaggctacccctgagggaaagagactggggtgcatatgggagggaccccctgcaggatcctggggacagacccgtgactgacagctgtctctgggccaggtcagactgcactgcacatcgctgttgtgaaccagaacatgaacctggtgcgagccctgcttgcccgcagggccagtgtctctgccagagccacaggcactgccttccgccgtagtccctgcaacctcatctactttggggagcaccctttgtcctttgctgcctgtgtgaacagtgaggagatcgtgcggctgctcattgagcatggagctgacatccgggcccaggactccctgggaaacacagtgttacacatcctcatcctccagcccaacaaaacctttgcctgccagatgtacaacctgttgctgtcctacgacagacatggggaccacctgcagcccctggacctcgtgcccaatcaccagggtctcacccctttcaagctggctggagtggagggtaacactgtgatgtttcagcacctgatgcagaagcggaagcacacccagtggacgtatggaccactgacctcgactctctatgacctcacagagatcgactcctcaggggatgagcagtccctgctggaacttatcatcaccaccaagaagcgggaggctcgccagatcctggaccagacgccggtgaaggagctggtgagcctcaagtggaagcggtacgggcggccgtacttctgcatgctgggtgccatatatctgctgtacatcatctgcttcaccatgtgctgcatctaccgccccctcaagcccaggaccaataaccgcacgagcccccgggacaacaccctcttacagcagaagctacttcaggaagcctacatgacccctaaggacgatatccggctggtcggggagctggtgactgtcattggggctatcatcatcctgctggtagaggttccagacatcttcagaatgggggtcactcgcttctttggacagaccatccttgggggcccattccatgtcctcatcatcacctatgccttcatggtgctggtgaccatggtgatgcggctcatcagtgccagcggggaggtggtacccatgtcctttgcactcgtgctgggctggtgcaacgtcatgtacttcgcccgaggattccagatgctaggccccttcaccatcatgattcagaagatgatttttggcgacctgatgcgattctgctggctgatggctgtggtcatcctgggctttgcttcagccttctatatcatcttccagacagaggaccccgaggagctaggccacttctacgactaccccatggccctgttcagcaccttcgagctgttccttaccatcatcgatggcccagccaactacaacgtggacctgcccttcatgtacagcatcacctatgctgcctttgccatcatcgccacactgctcatgctcaacctcctcattgccatgatgggcgacactcactggcgagtggcccatgagcgggatgagctgtggagggcccagattgtggccaccacggtgatgctggagcggaagctgcctcgctgcctgtggcctcgctccgggatctgcggacgggagtatggcctgggagaccgctggttcctgcggcctgcttgggcgctcggtctccaccccagggtcataagtggggagagagcccttcccagggcacccaggcaggtgcagggaagtgcagagcttgtggaaagcgtgtgagtgagggagacaggaacggctctgggggtgggaagtggggctaggtcttgccaactccatcttcaataaagtcgttttcggatccctg

SEQ ID NO: 548007 - DNA, 173 bp, Homo sapiens
ggtccaattcttacaggaaaagaagttgtgaacagagtaaactgacaacctacaggatgggagaaactattcacaaactatgcatccaacaaaggtctagtacccagaatctacaacttaattcaataagcaaaaaacaaccccattaaaaagtggtcagtgtagaaattgaa

SEQ ID NO: 548008 - DNA, 362 bp, Homo sapiens
tctgggagaaacacccaagaatgatcaataaaaaaataaaaaaaaaaaaaaaaaactcgaggccttctccccctactccagtggggtaaagctggatggaatggactgattgacagcctgactcagaggcccagaggaggaagcccttttctttttcctaagggagggttgagaggtccgaagactgaggaacaaggagagaaggcagaagctccctgaggcacactctaagtggacatgctacggccacgctagaggacagctccagatgggtctgcaccatcatctggacatcaagtgctttataatctcatgaagatttacagtttctacaattatcccaaaataaaaagtttactcac

SEQ ID NO: 548009 - DNA, 2132 bp, Homo sapiens
tgatggataatttgggaaagacacaggggatctgagcctcctactctttttttctcttctctgtctcccttccgtgtcagtcctgactgcccatcacttgaacgcctgccccctgaaatgccaggggcctagagaagaggaagagatgggcagcagctggatcccctgggaatcctgaacacccgagagctccctgttctccatcccaggctacccctgagggaaagagactggggtgcatatgggagggaccccctgcaggatcctggggacagacccgtgactgacagctgtctctgggccaggtcagactgcactgcacatcgctgttgtgaaccagaacatgaacctggtgcgagccctgcttgcccgcagggccagtgtctctgccagagccacaggcactgccttccgccgtagtccctgcaacctcatctactttggggagcaccctttgtcctttgctgcctgtgtgaacagtgaggagatcgtgcggctgctcattgagcatggagctgacatccgggcccaggactccctgggaaacacagtgttacacatcctcatcctccagcccaacaaaacctttgcctgccagatgtacaacctgttgctgtcctacgacagacatggggaccacctgcagcccctggacctcgtgcccaatcaccagggtctcacccctttcaagctggctggagtggagggtaacactgtgatgtttcagcacctgatgcagaagcggaagcacacccagtggacgtatggaccactgacctcgactctctatgacctcacagagatcgactcctcaggggatgagcagtccctgctggaacttatcatcaccaccaagaagcgggaggctcgccagatcctggaccagacgccggtgaaggagctggtgagcctcaagtggaagcggtacgggcggccgtacttctgcatgctgggtgccatatatctgctgtacatcatctgcttcaccatgtgctgcatctaccgccccctcaagcccaggaccaataaccgcacgagcccccgggacaacaccctcttacagcagaagctacttcaggaagcctacatgacccctaaggacgatatccggctggtcggggagctggtgactgtcattggggctatcatcatcctgctggtagaggttccagacatcttcagaatgggggtcactcgcttctttggacagaccatccttgggggcccattccatgtcctcatcatcacctatgccttcatggtgctggtgaccatggtgatgcggctcatcagtgccagcggggaggtggtacccatgtcctttgcactcgtgctgggctggtgcaacgtcatgtacttcgcccgaggattccagatgctaggccccttcaccatcatgattcagaagatgatttttggcgacctgatgcgattctgctggctgatggctgtggtcatcctgggctttgcttcagccttctatatcatcttccagacagaggaccccgaggagctaggccacttctacgactaccccatggccctgttcagcaccttcgagctgttccttaccatcatcgatggcccagccaactacaacgtggacctgcccttcatgtacagcatcacctatgctgcctttgccatcatcgccacactgctcatgctcaacctcctcattgccatgatgggcgacactcactggcgagtggcccatgagcgggatgagctgtggagggcccagattgtggccaccacggtgatgctggagcggaagctgcctcgctgcctgtggcctcgctccgggatctgcggacgggagtatggcctgggagaccgctggttcctgcggtgagtgatatgcgggggtaggtgtcccctgagaagcctcatcggcagggtatccccctgctcagacagcttccggctcctgggttccctgtggaggcctgtgtgctccctaggctctatgcttgttgattgagctggtgaggaaggggtcccgtttggagctcagacttcccaaagcatccagggagtctgtggcagagcctgctgctttctgaggcctagctgccaaggggccagtgacccaggcatccaccatggctgcagaaaagggaaaaggccag

SEQ ID NO: 548010 - DNA, 250 bp, Homo sapiens
acgtgcttgagaggctgaggcagaataatctcttggcccggaaggcggaggttgcagtgagctgagatcgtgccactgcactccagcctgagtgacaggagttaagccctgtctcagaaaaaaaaaaaacaaaatcccaaaaagtacttaaagtttcattaacttaggctaggagaaagacttggttctcaaaataatacactttaagattaatttgggtagaattagagttccaccctttattcatttg

SEQ ID NO: 548011 - DNA, 162 bp, Homo sapiens
aatttacctcttgaaattgcatgctctatcatatatcccttaagtggacacatacagtgccatgttgatgtgcctctcagtcttattgaaaggctgccccacagccatgcctcctggtctctgcaatgcctcaagggagtagctctcaaccacagatagctg

SEQ ID NO: 548012 - DNA, 315 bp, Homo sapiens
cctagaggatccccagaggcacaaggaggttagagaaagaccatctggtgggggcaggatagtgtgtctgagctcagactccttgggcagggcttgctgtggcctctgggcgatgggagtggtggttaacaggccaatggagttacgttctaagggagattatggctgcctctgctgcttcatacacatcaccagggaaataggggaaagccggcagtgacagaccacagccagcaaggccagtctcactcctgcagtgcttccccaacagccaacagaaccaaatttatatccatgcctccttggtgcctctgg

SEQ ID NO: 548013 - DNA, 777 bp, Homo sapiens
atggtaacaaaacactgtaactctggtaaatgtttctgtcgtgatggttaacattccacagattctacctttggtgtttgttttttttttttacaatggtttaaagccatttcatgtcccagttgtaagataaggaactgtgataatagcggttcatcatggtcttcaggagagctttccagagtggatcatttcctctcatggtactctgtcagtgtggccacgtaggtttcggtcggttggaagtgctttcttgtggagacggagtctcatctcggttaacccaggctgcaatgcagtgcgcaattcttggtcagttaaacctcacatttccgtggtatcaaggcgaattcccagtgctgtgcctcccgagatagctgggatcacggcgcacacgaccaccacgcccagctagtctgggattcaacgagagacggggttcaccgggcaggcccagtggccaggtaggcttcacacgcagggggcgtgaacaaggcacagcgaggtatgaggtcgacccggggaagtcatcggctaaatagacggggcataaagttccaagcaaggctgcgtcattctcttctggaccttcgtcttcagccggtaacatatcagtgttcgatgccagttgattttacacaatctgttgtcccgtggaatttaccttaaccctataaactgggacaattttcggctgcctccaccgggggacaggggagagccacctccacagggggccccgttcaaactcattataatttgcaaccgcctgaccgc

SEQ ID NO: 548014 - DNA, 846 bp, Homo sapiens
cggtttcctgcttcaacagtgcttgaacggaacccggtgctcgacccctccgacccccgccggccgcttcgagcctgagccctttgcaacttcgtcgttccgccgctccagcgtcgccaccgcgcctcgccccgccgccaccatgaccaccgcgtctccctcgcaagtgcgccagaactaccaccaggacgcggaggctgccatcaaccgccagatcaacctggagttgtatgcctcctacgtctatctgtctatgtcttgttattttgaccgagatgatgtggctctgaagaactttgccaaatactttctccaccaatctcatgaggagagggagcatgccgagaaactgatgaagctgcagaaccagcgaggtggccgaatcttcctgcaggatataaagaaaccagaccgtgatgactgggagagcgggctgaatgcaatggagtgtgcactgcacttggaaaagagtgtgaatcagtcactactggaactgcacaaactggctactgacaagaatgatccccacttatgtgacttcattgagacgtattatctgagtgaacaggtgaaatccattaaagaactgggtgaccacgtgaccaacttacgcaagatgggtgcccctgaagctggcatggcagaatatctctttgacaagcacaccctgggacacggtgatgagagctaagctgacttccccaaagccacgtgactttactggtcactgaggcagtgcatgcatgtcaggctgccttcatcttttctataagttgcaccaaaacatctgcttaagttctttaatttgtaccatttcttcaaataaagaattttggtacccaagaa

SEQ ID NO: 548015 - DNA, 545 bp, Homo sapiens
cagaggaccgccagtaagatgatgagaagtataggcactggtgcatcatatagcatattctctctgctgctaacacaatctgctattgtaagcatgctgtatccccttatgtttattgatagcctaaacctcggtattactactgcgcctccaagaatgggcattgaagaaaggcacctgctcactctgcacatttgctcctgtagtgagaagtctcctgttacacatattctgaagcagaatatgtgtgcctttttacaagagaagagctgagagacaggaactggtcctagaatattatactccagattcttttacacattatttctcttttaaggattagtgtcttgtatctgaaggctttgtttcccataaatgaggtatttacttactcagttaacttattccctggcagagaatattttgaatttacttttgataggcagtgcataaaacttctggtcctttttcacattctcactttccttatagtgatcagcaaggagtctttgttgactctttttgaatttcttggacataggtca

SEQ ID NO: 548016 - DNA, 252 bp, Homo sapiens
  misc_feature (129)..(129): n is a, c, g, or t
  misc_feature (143)..(143): n is a, c, g, or t
ttagagatcctgttgctagctggtatatgtactttaaaatatgttctggcggcagatggtcatgctgtatccagcattgggaggcgaggaggcagatcactgaggtcgggggttcgagaacatgctgancaacatgaagaaancccatctctactaaaaatacaaaaaaattaaccaggcgtggtggcacatgcctgtaatcccagctactcaggatgctgaggcaggataatcgcttgatcccgggaggcg

SEQ ID NO: 548017 - DNA, 363 bp, Homo sapiens
  misc_feature (90)..(90): n is a, c, g, or t
  misc_feature (148)..(148): n is a, c, g, or t
  misc_feature (158)..(158): n is a, c, g, or t
  misc_feature (349)..(350): n is a, c, g, or t
  misc_feature (352)..(352): n is a, c, g, or t
  misc_feature (362)..(362): n is a, c, g, or t
gcttgccttggtgggaccctgaacgaagttggtggcatgggaaggatgtgggtctcctagtgccttgccctggcttagctgcaggagaanatggctgctttcacttccccccattgagctctgctccctctgagccctggtcttttgnccttttttantttggtctcccaagatgaatgctcatctttggagggtgcccaggtagaagctagggaggggagtgtcttctctctcccaggtttcaccttccagtgtgcagaagttagaagggtctggcgggggcagtgccttacacatgcttgattcccacgctaccccctgcctgggaggtgtgtggaataaattatanntncttcaaggcna

SEQ ID NO: 548018 - DNA, 391 bp, Homo sapiens
  misc_feature (226)..(226): n is a, c, g, or t
  misc_feature (281)..(281): n is a, c, g, or t
  misc_feature (294)..(294): n is a, c, g, or t
  misc_feature (307)..(307): n is a, c, g, or t
  misc_feature (322)..(322): n is a, c, g, or t
  misc_feature (383)..(383): n is a, c, g, or t
aacaagaaacgaataaatctctgccataggagttttagccaattcagaggacttgctgcctacaatttggaaaattcctttggatttgaccaaaatcaggaagagacgggagaaaagtgaaacaacaataaagccccaggcataaacaaacaaaaagagttaagcaaaacaagaaatgcacaattcatatgattactgagtgttctaatggtaaggagaaactaanagcagaaattaaaagcagctggtgagtaatcttaaatttttaggtcatttaaggnaaaatttttaagnccaaacctctaanttccggctaccttancctgggaaaccaaggctccaggcttggtgattcggtcctctggccatcctttagaaggctnggaaacca

SEQ ID NO: 548019 - DNA, 390 bp, Homo sapiens
gccccgtgatgcttacagtgtactgtggatacgggggattccctttccccattcagttgactatgtctctctgcattggctgtaaactattcttggtgaggactacttttgccaagtgtactctttccccagtctcattattgtctaatgaatgatccattactgttgcccttttccttgactattacactgtctgtaggatacgcatagaatgcttgtcttgtacttcattcgctaagcctcaatagagagtatacagtcctcaagaattcctctttttgttcatgatctcattgattacccccaggtattgtcttttgacgatccagcagtctaaggtattgagaggtattactggaatttcgagatcttactataattcagaactaa

SEQ ID NO: 548020 - DNA, 145 bp, Homo sapiens
gaatattccgatggggatggagactatgtgatgagctgttgccgtaatgatgagactctgactaaaggcataatacggtggatgggggtgggaaaacacaggatttctgcaattccttctcaaagccattaacaataaacacaga

SEQ ID NO: 548021 - DNA, 6887 bp, Homo sapiens
ttggctactagtctacgctggaatacgattgctccacggttggctactagtccacaggttggctaaacctagccccaaacccactccaccttactaccagacaaccttagccaaaccatttacccaaataaagtataggcgatagaaattgaaacctggcgcaatagatatagtaccgcaagggaaagatgaaaaattataaccaagcataatatagcaaggactaacccctataccttctgcataatgaattaactagaaataactttgcaaggagagccaaagctaagacccccgaaaccagacgagctacctaagaacagctaaaagagcacacccgtctatgtagcaaaatagtgggaagatttataggtagaggcgacaaacctaccgagcctggtgatagctggttgtccaagatagaatcttagttcaactttaaatttgcccacagaaccctctaaatccccttgtaaatttaactgttagtccaaagaggaacagctctttggacactaggaaaaaaccttgtagagagagtaaaaaatttaacacccatagtaggcctaaaagcagccaccaattaagaaagcgttcaagctcaacacccactacctaaaaaatcccaaacatataactgaactcctcacacccaattggaccaatctatcaccctatagaagaactaatgttagtataagtaacatgaaaacattctcctccgcataagcctgcgtcagattaaaacactgaactgacaattaacagcccaatatctacaatcaaccaacaagtcattattaccctcactgtcaacccaacacaggcatgctcataaggaaaggttaaaaaaagtaaaaggaactcggcaaatcttaccccgcctgtttaccaaaaacatcacctctagcatcaccagtattagaggcaccgcctgcccagtgacacatgtttaacggccgcggtaccctaaccgtgcaaaggtagcataatcacttgttccttaattagggacctgtatgaatggctccacgagggttcagctgtctcttacttttaaccagtgaaattgacctgcccgtgaagaggcgggcatgacacagcaagacgagaagaaaggcaaagaaggcttcaactctgattgaaaatgagtggagaatcaaacaaagttgagaacagatatgatataggtacagtgagatacttgaaactagaatttgatagttgatagttatagaagctcaattaaatcatcttgaagtggaattagacaaagcatctacattttaatggagaaccagtattacagtgaccaggtaactcggcatggtattatcacttaaaaatttttcctaaataccatgaagtcggtagaagacctttgcatcagaccatgttctttgaagcttaaaaaagtccctgactgactaggaaagacagcacagtgctccaaaaagaaaccctgcagagatgtattaataccaaaaactccatttgaccctggacaggcccaggattcgggattcttcacaatgaggggaatggaccaggtttcttccaagcaaaacattctatcgttttgttgacaatgaattaaattgaaattgtttagaacaatcccaattttggtggggaaggaaaggaggataagttaagcaagataaagaaagctcacagaaacttcatgcagaggtacagcattaaagttctttgtttcctaattaatgttgtatgcagaagtattctgtaaactaaattttcctgacagaaaagttcccacatcctcaacagatgagaatgattgcattatttgggatccttgatcaatacgaaccacatactgtcccttctcaaagactaagttccttatttttcacccaaatcctatatattgaaagacaaccaaggtgctaaatgttaaccactagtcaagttaggaatgtctgaagaaaatatattaaccttgacataaagaagatgtttttggtcaaatttcagacatgtattattataaattaataactggctccatccaccaggttaaagatgaagggagggcctaagatgtctctagagtttatatacacacaagtgagtgtcactgttttgttttgtttttgacctagttttattaaatattgcttccttggggtgtgtttataacaactcccagaacatttcatgtaaggattcaaagcggtcatattaaaatacagcttcaatataaagtttatcacagttttacagtattcaaaaatgacagacctgccttaaaaaacaaaacaaaaaccaaaaaaggactattacacccaaaacataagaaaacaattaaataaacaagtttggcattttcataactttatagtataaaacagaatattaaatttattactggcaaacggacactgatttatttcctttgaaatgtgtcccatttaaacacactatacaagttcattatacaaaagatggatgatcattttgatgaaagaagtgcaccctgaaaatttttgccagtttagaatatttagctcttaaagtttaaaaaaaaagtccttttccttttttaaactgaaggctgaattcagattttttttgttgtctcatctgtcagccttcctggtttaaaaacaatagtgtctatggacgcccaccagggggcagtgtaagattagccattaaatcacgaacagctgcaaatattgtgcattcaccttgtcgtggtggattcatctctgcaaacctcttcagaatgttgctgaccatcatgggagcagcaacagaagagttctgctgtctgggaatgtctgcctgctgggttgtacctgaagccatgtcataaatgattggaactataatactaacaggttcttggggagggaccgatgttttctgagttagttgaagaaaaaatagcattttggatttcagcaccacagcaggcgtcccaggaggtgcaatcggcggcgcgctgggagggatcgtcaggcaaaactgaacattccattttagctgtgttgcttggtcagggaacagctccagcttcataatgtgcacacaatccctgaggatgtgtgtaggagctcctaatagcttggtgaaggctattaacgtattagctttaaatggtggtcctgcaactcttgtttcaaagaatttctccaaaacttgaagttcatcaggtttccactgtcctgcattttcaggtgtcacttttagctgaagcgtttggttggttttgggactaagagctactctgcatttcagtgcatcagtcttaaacatgatcactccgggttcattagaatttatcagctgcagcgtttcttgttgaataattctttgaagatgtcgtctcatgatgactgatccaaggaatctctcaagtggagaacaaaggtaactacctgccaggccgggcacaaggcctggagttggagagggcagcagtaaaatgttcaaggcactgtgagtgaggatggtaggtatggatgccgcccaagagcgctgaggtagtttacgaggtggaggcatgtttgttggcattgtttgagaacttgttccagctcgaggggaatgagaagcatctggaaccggagaatgtagtgaggggttggctggtgacattccaggcatgcgtgctgctggtgaggggccagacacttgaggagatcctggccagttccctgctcgtccacttggtgacaccatagtgtatggggaactagggtcaagagttccatgtggactagcaaaactggcccctggtcctattgagattccatgcgaggatgggggaggagttggaacaaatgacgctggtgatggggctctcaaagccccactgggggagctggcagcatgcagatttcctggagactgtgtgtgcatcattgagggagactgattgactgtgctatgataagatgtagggggtgaagtaagaggataagcacctgatgttcctggctgctttggaaatggctgttgctggggtggtggctggagctgcgatattaaagaatccatcatatctcctcctataggagaagggggattatcgtcctcatttacagaccttcttcgagcatcctgattgctgtcaacaaacatattcaggaacgtctgtaataactgaaccacatttggtgttttgttgaacatttcttgaagctgatggagaatggtattgtgacagttactgcaacctgagtttgggccaacagttcccaaagaaatgtggaatttttgatggatcgaattccattggatactaattgagcttcccttggtggttccataacacaagataagttttcggtaattataaacacgaacttctgagaaaatatttagatgagcaggtatgtctggtagagaacgtgcaaattccaacacacactcatataatcgtgcaatgctattccagtcattaagaaacatttcaaccacctttctaccaccaacaggctcagacaacagattttcatatgtcaggtaaacgtgccgggatggtccttgctccctagtagaagtgccattaagtggacaatttgcaaacactaactctgctacccaagtgcggttatttctaccttgtaatcggaaagtgcaatcaagaagagagcggtccagagccttttgggtttcctcagttatacccttacagggaggaatttttaataagcgaattgcatggctgaagccatcaccttccacttgcactccttgatgtggaatctccagattggacaactccaaccgaagtcctacaaatggcatatttgtatcacacatagcgacgaagtgggctaaaactttattgaaggcacacatttctcctgctcgttttgttttcttggattctactggacatggatcatcagacaacttgcgcttggcattggttctggtctgtttcccggtttttgtacgaaaaaccaagtcctgaatgttttccttgaactgctgcagcagcaatgccattgcagggctgtcttcacgatctgcagcattcacagacataaagtagtacttgtacgacagttgtgtgggtttattgggaacctccaacatctccacaacaatgtagtattgtggaaggcgggtaagtttaatgaacagtttattcttagaaaggtttccaataggatgagttgagtaattggaaagctgcaatgtttcactgcttatcgtaggcagatgttttatagactgcttgcaacgctgttgtccaagccaaaacttaagttgctgaatccagggtatgattcgtttcatatcatcattcacagacttctccatgtcatccagagtggcctggtcaagtccataaagcatcaattgaaacattccagaatgtaaatctacaaaaatgtgcagacactctgaattaccacagggctccaagatgggaacaacaagagctgggagtgcagtctctatggaagagttttcattggcattgaagcctctaagaatggccttcagttcttggagcttctgatgagctcttgcatggacactgtcaatcaggagtttttctattgataagtggtcgatcttcatggctctttctactaatttggaatcagaagctggcaaaggaggatcgtgaaaaatctgtaaaggcttggagacatcattctcatcaattttaattgtaactttgtgaacagatgctgttccagtttttctcccaagaacctgttgattccaaactgaaagggagaggcactttccagcatgatacctttccacctgcacaaggtctccccaccgttctcggattaacattagagtttgggaatgtaacacttctaactgaagtgataaacagaaagaatgtaggcagttgtacatatcctgaagaggtttctcatcagcaaagagcctagactgcaccagttgatggatgaagctgatttgcatgctatgaaccaaagctcgcccatctcctgtttccttatcctcaactagaatttctagcttgagaagacgccatggaacatcagggtcatctcccatcacagtcaaggtggcttcaaattctccttcaacacgaaacttcacccggccatttgcaactgtaagatttgctaactgaggaggaagatctgtggttacaagccgatgtctaagaatctgattcagctgatggagtgtggcttgtttttcaattttggtaattgggtctggaggaataattttatccctaatgcaggttggcagccgtgggtaagatccagtagttagtacatcaatggcatatgggatggcaaaactaggcaggcgtgcatggaccagagcatctctagctaacgaggccaggcgatcagcagtgtccacaaacaggatggcttgctgatctaaaaagcttgaaatcatcgcacatttttccactttgccagcattattagcccatttcactaaagctaataatcgaacgaagagttggcgtgtccggctagcaaactgcactatttctattttcctttccacatcagatttccttggcagtaggtccgtcaacaccataagctccgagtaggcccggtgcagcagaaattcaatgagggtgctcagccggtagcccgggctagccgcagctgcagcggccgccgccacggcggctcccgggggaggaggggctggggctgacgggggtccgccgctgcccccgccgccgcctccgggcgggaccagctggtggttctccagctgcactggggccatggcggcgcaggaccgggcttggcgcaacggcacacgatgcggtcctcgagcctcccgggcgctcggtcaccgcgccgaaacgggagcgggcagagtcgccaccgcctaccgccggcaaccctcggccgattaaaccagcctcgtactagcta

SEQ ID NO: 548022 - DNA, 291 bp, Homo sapiens
ggcggaccgccgagggtcttactcgcagaaaagtcccgatggacgaagttgtagagatcgttatggacgaagttgtgaacaacttcgtccaccccgattgcccagtagtatggagattcggcgtgtgcatgcacacgccgaggaaccagaccaaaccaaattagccaggtgtggtggctggcacctgtgttccaactacttgggagactcatgtgacaggaagatcacttgagcccaggagttagaagctgcagtgagccatgatcttgccactgcactccagtgtggacg

SEQ ID NO: 548023 - DNA, 1719 bp, Homo sapiens
ttggctactagtctacgctggaatacgattgctccacggttggctactagtccacaggttggctaaacctagccccaaacccactccaccttactaccagacaaccttagccaaaccatttacccaaataaagtataggcgatagaaattgaaacctggcgcaatagatatagtaccgcaagggaaagatgaaaaattataaccaagcataatatagcaaggactaacccctataccttctgcataatgaattaactagaaataactttgcaaggagagccaaagctaagacccccgaaaccagacgagctacctaagaacagctaaaagagcacacccgtctatgtagcaaaatagtgggaagatttataggtagaggcgacaaacctaccgagcctggtgatagctggttgtccaagatagaatcttagttcaactttaaatttgcccacagaaccctctaaatccccttgtaaatttaactgttagtccaaagaggaacagctctttggacactaggaaaaaaccttgtagagagagtaaaaaatttaacacccatagtaggcctaaaagcagccaccaattaagaaagcgttcaagctcaacacccactacctaaaaaatcccaaacatataactgaactcctcacacccaattggaccaatctatcaccctatagaagaactaatgttagtataagtaacatgaaaacattctcctccgcataagcctgcgtcagattaaaacactgaactgacaattaacagcccaatatctacaatcaaccaacaagtcattattaccctcactgtcaacccaacacaggcatgctcataaggaaaggttaaaaaaagtaaaaggaactcggcaaatcttaccccgcctgtttaccaaaaacatcacctctagcatcaccagtattagaggcaccgcctgcccagtgacacatgtttaacggccgcggtaccctaaccgtgcaaaggtagcataatcacttgttccttaattagggacctgtatgaatggctccacgagggttcagctgtctcttacttttaaccagtgaaattgacctgcccgtgaagaggcgggcatgacacagcaagacgagaagaccctatggagctttaatttattaatgcaaacagtacctaacaaacccacaggtcctaaactaccaaacctgcattaaaaatttcggttggggcgacctcggagcagaacccaacctccgagcagtacatgctaagacttcaccagtcaaagcgaactactatactcaattgatccaataacttgaccaacggaacaagttaccctagggataacagcgcaatcctattctagagtccatatcaacaatagggtttacgacctcgatgttggatcaggacatcccgatggtgcagccgctattaaaggttcgtttgttcaacgattaaagtcctacgtgatctgagttcagaccggagtaatccaggtcggtttctatctacttcaaattcctccctgtacgaaaggacaagagaaataaggcctacttcacaaagcgccttcccccgtaaatgatatcatctcaacttagtattatacccacacccaccccaagaacagggtttgtttaaaaaaaaaaaaaaaaaaaaaagtgcgagagcatcataagacgaggggagagaaaaggtacgaaagaggcacaggccacacggggtcactgccga

SEQ ID NO: 548024 - DNA, 669 bp, Homo sapiens
  misc_feature (115)..(115): n is a, c, g, or t
  misc_feature (164)..(164): n is a, c, g, or t
gggtgatctagaggatccggcgaggtgatggtaatccctgtatgtcctgactataggatggaaaagtgacatcagaggagtacattacttcgttcagaaccatttcacaagtgcnagaatggctttgatatggactatggtgtgacgtcatcctagttctaaangcaagttgctagaacagtattctcaatcatagaggggtgggcttaggtttatctaggtagcacaaggccaacataccgtaggaggtcgaaataccgagcaacagaatggacgacgagtcttgcaccatagctgtcttttgtacgcacgaaagtgctgtctgcgtggaagtgcagagcgcaaatgcatttaagagttcttcagtcatgtcctcggttgctgggccacatgtcaagaggggcagcaacaccaccagccatctgcaccaggctgttgccaaggcaactcagcagccatttgatgtttctgcatttaatgccagttactcagattctggactcttagggatttatactatctcccaggccacagctgctggagatgtaatcaaggctgcctataatcgagtaaaaacaatagctcacggaaacccttccaacacagatttcccagctgccaagaacaagctgaaagctggatactaatgtcagtggagtctctgagtgt

SEQ ID NO: 548025 - DNA, 141 bp, Homo sapiens
tcgtgtaacacggcagtatagctgtttctgattgtaaacgacggcagtatagctgattcctgattgtcacaggactggcgagtcataactgatttcctgatctgtaccggcgggtgagtcattaactgttacctgattgta

SEQ ID NO: 548026 - DNA, 327 bp, Homo sapiens
ctgatcagtatctgttgtgtagtgataagggtggagaggttaacaggagccacttattagtcactgttgattagtcgaatgactggctcgggtgacttcatatgagattgtttgggcgactgctcgcagtgcgcccgatcagggcgtagttcgagtttgatgctcaccctcatcagaggattgagtaaacagctaggctaagaggttgctagaataaataggcaggcctaggttgaggttgaccagggtgttgggtattgggaggggggttcatagtacaatagcgatggtcagagctaaggtcggggccgtcgctgaaaatgctga

SEQ ID NO: 548027 - DNA, 1924 bp, Homo sapiens
  misc_feature (1652)..(1652): n is a, c, g, or t
  misc_feature (1658)..(1658): n is a, c, g, or t
  misc_feature (1664)..(1664): n is a, c, g, or t
  misc_feature (1669)..(1669): n is a, c, g, or t
  misc_feature (1671)..(1671): n is a, c, g, or t
ttggctactagtctacgctggaatacgattgctccacggttggctactagtccacaggttggctaaacctagccccaaacccactccaccttactaccagacaaccttagccaaaccatttacccaaataaagtataggcgatagaaattgaaacctggcgcaatagatatagtaccgcaagggaaagatgaaaaattataaccaagcataatatagcaaggactaacccctataccttctgcataatgaattaactagaaataactttgcaaggagagccaaagctaagacccccgaaaccagacgagctacctaagaacagctaaaagagcacacccgtctatgtagcaaaatagtgggaagatttataggtagaggcgacaaacctaccgagcctggtgatagctggttgtccaagatagaatcttagttcaactttaaatttgcccacagaaccctctaaatccccttgtaaatttaactgttagtccaaagaggaacagctctttggacactaggaaaaaaccttgtagagagagtaaaaaatttaacacccatagtaggcctaaaagcagccaccaattaagaaagcgttcaagctcaacacccactacctaaaaaatcccaaacatataactgaactcctcacacccaattggaccaatctatcaccctatagaagaactaatgttagtataagtaacatgaaaacattctcctccgcataagcctgcgtcagattaaaacactgaactgacaattaacagcccaatatctacaatcaaccaacaagtcattattaccctcactgtcaacccaacacaggcatgctcataaggaaaggttaaaaaaagtaaaaggaactcggcaaatcttaccccgcctgtttaccaaaaacatcacctctagcatcaccagtattagaggcaccgcctgcccagtgacacatgtttaacggccgcggtaccctaaccgtgcaaaggtagcataatcacttgttccttaattagggacctgtatgaatggctccacgagggttcagctgtctcttacttttaaccagtgaaattgacctgcccgtgaagaggcgggcatgacacagcaagacgagaagaccctatggagctttaatttattaatgcaaacagtacctaacaaacccacaggtcctaaactaccaaacctgcattaaaaatttcggttggggcgacctcggagcagaacccaacctccgagcagtacatgctaagacttcaccagtcaaagcgaactactatactcaattgatccaataacttgaccaacggaacaagttaccctagggataacagcgcaatcctattctagagtccatatcaacaatagggtttacgacctcgatgttggatcaggacatcccgatggtgcagccgctattaaaggttcgtttgttcaacgattaaagtcctacgtgatctgagttcagaccggagtaatccaggtcggtttctatctacttcaaattcctccctgtacgaaaggacaagagaaataaggcctacttcacaaagcgccttcccccgtaaatgatatcatctcaacttagtattatacccacacccaccccaagaacagggtttgttaagatggcagagcccggtaatcgcataanacttanaacttnacagncngaggttcaattcctcttcttaacaacaatacccatggacaaactcctactccctcattgtaaccattctaatcgcaatgggaattctaatgctaaccgaagaaaaattctaggctatataaactacgcaaaggcccaagtagtaagacctaagggctatacaacctttgctgacgcataaaatctaacaaaagcctaaaaccgcaactacatacataaatcacgaccgactagtttacatgaaataatagaac

SEQ ID NO: 548028 - DNA, 97 bp, Homo sapiens
gcaccctagagcaaagcgaccaacttcgctcctgcatgcagactttccactcattctttccattgcctatcttttagataaatggttgcaaaaaaga

SEQ ID NO: 548029 - DNA, 896 bp, Homo sapiens
ggggggtgtctcctccgccggttgtgttcctgcggcccttgttgtgttgtcttgagagaccgctgttgtggttccggaggtccccgcgattgtgccgctggcttgtccaccgggttggcaaccctgtcgggggccatgacgccctaccccttggggtgggaattgcccccctcgcccttccgcgcgcatatggttgcctgccctctgggggggacctccggtggcccgcagtagtctcaacttggcgcacgcatggcgtttggaaaagcgcggggattcggcgccgcctcttgtccggtttgatctggtgggtcgttccccctctcccgccggggggctcccagcgccccaggcgcctggaaaaatgtttcttccggggccccccaaggtggggcggggaaatggtccccgtcctccgcccgatgatgttcttcacgccgggtgttattacctccaccacgccgccctcaaagaggggcgtattcaattactccaccggggcggagttagggctggacgccccaatttttgggaatgtctcaactcttgggcggtgatactcattccccggggctttctggacggccgcagttaacaccggtgcgccgaaaattcttccgtaatatcacatctgaagcggtgtaggacccccagaaaatgtcaggatcatccagctgataacaagtggggtgtataacaacagactacacctctccccacttaggttgtcatactgtaggaccgggtaccaaaaagaccccaccaaagcgcactgacaccaggcggttcaccatccgtgcttcaaaccatggtgaatacgtgccatcttgacggctccgccttctgggacttttgaatacttcctaaaaaaaccccccaatccccgcaacaaaaca

SEQ ID NO: 548030 - DNA, 786 bp, Homo sapiens
  misc_feature (35)..(35): n is a, c, g, or t
  misc_feature (135)..(135): n is a, c, g, or t
  misc_feature (177)..(177): n is a, c, g, or t
  misc_feature (233)..(233): n is a, c, g, or t
  misc_feature (261)..(261): n is a, c, g, or t
  misc_feature (281)..(281): n is a, c, g, or t
  misc_feature (284)..(284): n is a, c, g, or t
  misc_feature (297)..(297): n is a, c, g, or t
  misc_feature (342)..(342): n is a, c, g, or t
  misc_feature (364)..(364): n is a, c, g, or t
  misc_feature (399)..(399): n is a, c, g, or t
  misc_feature (402)..(402): n is a, c, g, or t
  misc_feature (447)..(447): n is a, c, g, or t
  misc_feature (457)..(457): n is a, c, g, or t
  misc_feature (464)..(464): n is a, c, g, or t
  misc_feature (466)..(466): n is a, c, g, or t
  misc_feature (474)..(474): n is a, c, g, or t
  misc_feature (656)..(656): n is a, c, g, or t
  misc_feature (705)..(705): n is a, c, g, or t
  misc_feature (726)..(726): n is a, c, g, or t
  misc_feature (781)..(781): n is a, c, g, or t
gtcgtagatgtggggttatagtaattgctaaagcnggttaaaggcacatgacaacataattcctttatacacatccagtcattttatacaagggactgctatcccttaaatggaagagtgaactacttgtttaanatattaacagtgccctatgtacctacaatgaaaccactttcnccaaagactcaaacagattaacattgcaaaatagtacttctgtatcactgacttcngaaaattttaataatttatgcatatgcnagtgaaatataatttattcnggnttcaacaacagtnatacaaagtcccaattttccccagggaaccattcacttcatagcngcaaaaacaccctgtggcgttncgggggggggcggccaggcgttcggcgggcggggngtntaaccattcccgtcaaatttacatgtccggccgggcacggtggtntgggcctgtngtccctncntcttcggnggctgaggcaggaggatcacttgatcccaggagttcaaagacagcctgggcaacatagaagaaccctgtctcttcggaaatcatccaaggagtgtgataaacatgacaacccccataaactgggtaaacaacaacaatggagtgaaaaacgaccacacatgccataaagcaatgttgaagcnaattcctgctgcaataaaggaggcagtggtaatgggtatcaaggctggntacttgacatcatattctccnattccacaataccattccaggtagactatgcagttaaatgcaattgataaactgncaagc

SEQ ID NO: 548031 - DNA, 1675 bp, Homo sapiens
ttggctactagtctacgctggaatacgattgctccacggttggctactagtccacaggttggctaaacctagccccaaacccactccaccttactaccagacaaccttagccaaaccatttacccaaataaagtataggcgatagaaattgaaacctggcgcaatagatatagtaccgcaagggaaagatgaaaaattataaccaagcataatatagcaaggactaacccctataccttctgcataatgaattaactagaaataactttgcaaggagagccaaagctaagacccccgaaaccagacgagctacctaagaacagctaaaagagcacacccgtctatgtagcaaaatagtgggaagatttataggtagaggcgacaaacctaccgagcctggtgatagctggttgtccaagatagaatcttagttcaactttaaatttgcccacagaaccctctaaatccccttgtaaatttaactgttagtccaaagaggaacagctctttggacactaggaaaaaaccttgtagagagagtaaaaaatttaacacccatagtaggcctaaaagcagccaccaattaagaaagcgttcaagctcaacacccactacctaaaaaatcccaaacatataactgaactcctcacacccaattggaccaatctatcaccctatagaagaactaatgttagtataagtaacatgaaaacattctcctccgcataagcctgcgtcagattaaaacactgaactgacaattaacagcccaatatctacaatcaaccaacaagtcattattaccctcactgtcaacccaacacaggcatgctcataaggaaaggttaaaaaaagtaaaaggaactcggcaaatcttaccccgcctgtttaccaaaaacatcacctctagcatcaccagtattagaggcaccgcctgcccagtgacacatgtttaacggccgcggtaccctaaccgtgcaaaggtagcataatcacttgttccttaattagggacctgtatgaatggctccacgagggttcagctgtctcttacttttaaccagtgaaattgacctgcccgtgaagaggcgggcatgacacagcaagacgagaagaccctatggagctttaatttattaatgcaaacagtacctaacaaacccacaggtcctaaactaccaaacctgcattaaaaatttcggttggggcgacctcggagcagaacccaacctccgagcagtacatgctaagacttcaccagtcaaagcgaactactatactcaattgatccaataacttgaccaacggaacaagttaccctagggataacagcgcaatcctattctagagtccatatcaacaatagggtttacgacctcgatgttggatcaggacatcccgatggtgcagccgctattaaaggttcgtttgttcaacgattaaagtcctacgtgatctgagttcagaccggagtaatccaggtcggtttctatctacttcaaattcctccctgtacgaaaggacaagagaaataaggcctacttcacaaagcgccttcccccgtaaatgatatcatctcaacttagtattatacccacacccaccccaagaacagggtttgttaattgtcagttcagtgttttaatctgccgcaggcttatgcgcaggctcgcac

SEQ ID NO: 548032 - DNA, 497 bp, Homo sapiens
  misc_feature (274)..(274): n is a, c, g, or t
tgcaggctctctaacttggacaggctaggcagtcaccaaccgccggtccttgcgggtacccccaaaacctttcacctccccttcgcccttgcttaaccgacgacggggaacctggcctttatcccagtcctccaaagtccagcctcctcggagtggcaataactttctcagaaggtgaacacggtgcagtttaatgaagaggccacagttatccggtccggtgagtctggggcctaagcaggggggcccagggtgctgccctccccctcaaaanttgagctcagcatcatgctggcctcacaggctctatggattccagtatccgctgtggggatggccgctcacggaggcctgagccattgcagacgctggatgaggccagagatggcgtgtccagggtgaaggtgtcagaccacgagatccgggcggggtgagtggagccaggaccgggtctcaccccaggtgctacggggaatcatagctggccccatgctcag

SEQ ID NO: 548033 - DNA, 1568 bp, Homo sapiens
ttggctactagtctacgctggaatacgattgctccacggttggctactagtccacaggttggctaaacctagccccaaacccactccaccttactaccagacaaccttagccaaaccatttacccaaataaagtataggcgatagaaattgaaacctggcgcaatagatatagtaccgcaagggaaagatgaaaaattataaccaagcataatatagcaaggactaacccctataccttctgcataatgaattaactagaaataactttgcaaggagagccaaagctaagacccccgaaaccagacgagctacctaagaacagctaaaagagcacacccgtctatgtagcaaaatagtgggaagatttataggtagaggcgacaaacctaccgagcctggtgatagctggttgtccaagatagaatcttagttcaactttaaatttgcccacagaaccctctaaatccccttgtaaatttaactgttagtccaaagaggaacagctctttggacactaggaaaaaaccttgtagagagagtaaaaaatttaacacccatagtaggcctaaaagcagccaccaattaagaaagcgttcaagctcaacacccactacctaaaaaatcccaaacatataactgaactcctcacacccaattggaccaatctatcaccctatagaagaactaatgttagtataagtaacatgaaaacattctcctccgcataagcctgcgtcagattaaaacactgaactgacaattaacagcccaatatctacaatcaaccaacaagtcattattaccctcactgtcaacccaacacaggcatgctcataaggaaaggttaaaaaaagtaaaaggaactcggcaaatcttaccccgcctgtttaccaaaaacatcacctctagcatcaccagtattagaggcaccgcctgcccagtgacacatgtttaacggccgcggtaccctaaccgtgcaaaggtagcataatcacttgttccttaattagggacctgtatgaatggctccacgagggttcagctgtctcttacttttaaccagtgaaattgacctgcccgtgaagaggcgggcatgacacagcaagacgagaagaccctatggagctttaatttattaatgcaaacagtacctaacaaacccacaggtcctaaactaccaaacctgcattaaaaatttcggttggggcgacctcggagcagaacccaacctccgagcagtacatgctaagacttcaccagtcaaagcgaactactatactcaattgatccaataacttgaccaacggaacaagttaccctagggataacagcgcaatcctattctagagtccatatcaacaatagggtttacgacctcgatgttggatcaggacatcccgatggtgcagccgctattaaaggttcgtttgttcaacgattaaagtcctacgtgatctgagttcagaccggagtaatccaggtcggtttctatctacttcaaattcctccctgtacgaaaggacaagagaagaccctatggagctttaatttattaatgcttccgtaa

SEQ ID NO: 548034 - DNA, 361 bp, Homo sapiens
cttaaccacccaagtagctggggccagagatgtgcaccaacacatttggataattaatactttaatcgctttttgatacagagtctcagtctgtcacccaagctgcagtgcaatggttcaatcatggctcactgcagcctcaaagcttcccaggttcaggtgatcttcccacctacagcctcctgagtagctgggactaccgctgctcacaactcacccagttaccttctgtatttattgtagagatggggtctcaccatgttgcccaggctggtctcagagtcctaggcaacatggtgagaccccatctctacaaaacaatacagcaattagctggaattacaggcacataccaccatgc

SEQ ID NO: 548035 - DNA, 175 bp, Homo sapiens
cgtgtgtatctagaggatcctggtcactttctacgcacacccacctgcaaccatcactagttacatgccaggaaaaaaagcctactgatcagtgtatcttagtcacaaaacctgtctataagaaggacctgcccaccccgagaaactgacaaggcccttatcagtgcattctagt

SEQ ID NO: 548036 - DNA, 180 bp, Homo sapiens
agtcgctaccctttactttcattctaacttgcattacagaagccgcggatccagggtcaagtccaggcatctggaaagtgagtcactgtggagagacccacttcaccactctgattcctctgtcttcccagtcctaaccagactcgggaatcatgtgtgatccactcacggagcttttat

SEQ ID NO: 548037 - DNA, 1827 bp, Homo sapiens
ttggctactagtctacgctggaatacgattgctccacggttggctactagtccacaggttggctaaacctagccccaaacccactccaccttactaccagacaaccttagccaaaccatttacccaaataaagtataggcgatagaaattgaaacctggcgcaatagatatagtaccgcaagggaaagatgaaaaattataaccaagcataatatagcaaggactaacccctataccttctgcataatgaattaactagaaataactttgcaaggagagccaaagctaagacccccgaaaccagacgagctacctaagaacagctaaaagagcacacccgtctatgtagcaaaatagtgggaagatttataggtagaggcgacaaacctaccgagcctggtgatagctggttgtccaagatagaatcttagttcaactttaaatttgcccacagaaccctctaaatccccttgtaaatttaactgttagtccaaagaggaacagctctttggacactaggaaaaaaccttgtagagagagtaaaaaatttaacacccatagtaggcctaaaagcagccaccaattaagaaagcgttcaagctcaacacccactacctaaaaaatcccaaacatataactgaactcctcacacccaattggaccaatctatcaccctatagaagaactaatgttagtataagtaacatgaaaacattctcctccgcataagcctgcgtcagattaaaacactgaactgacaattaacagcccaatatctacaatcaaccaacaagtcattattaccctcactgtcaacccaacacaggcatgctcataaggaaaggttaaaaaaagtaaaaggaactcggcaaatcttaccccgcctgtttaccaaaaacatcacctctagcatcaccagtattagaggcaccgcctgcccagtgacacatgtttaacggccgcggtaccctaaccgtgcaaaggtagcataatcacttgttccttaattagggacctgtatgaatggctccacgagggttcagctgtctcttacttttaaccagtgaaattgacctgcccgtgaagaggcgggcatgacacagcaagacgagaagaccctatggagctttaatttattaatgcaaacagtacctaacaaacccacaggtcctaaactaccaaacctgcattaaaaatttcggttggggcgacctcggagcagaacccaacctccgagcagtacatgctaagacttcaccagtcaaagcgaactactatactcaattgatccaataacttgaccaacggaacaagttaccctagggataacagcgcaatcctattctagagtccatatcaacaatagggtttacgacctcgatgttggatcaggacatcccgatggtgcagccgctattaaaggttcgtttgttcaacgattaaagtcctacgtgatctgttttctgcctcgtgttctccacggcggtctcctacctatgccgcctcccgtcccgtccgatgggccatgtcaaatttggtctgctgatgatagcggcgacatctcggcctcgcatcactctgacccgtacctcccgcgcgccgcgagcgcagggaatgggtggggtgcagaacagacgatccgtggccatccagtggaggcgtcgctctgtttacagactaatgttatgtcttttcctatatatccgttcgaatttattagtgttttccttactcccctcgctttaggtagttgcagagacggtggtccgttgcctttatcataatcggagatgaagtttattttcttaacttgtactcacccccacg

SEQ ID NO: 548038 - DNA, 7160 bp, Homo sapiens
ttggctactagtctacgctggaatacgattgctccacggttggctactagtccacaggttggctaaacctagccccaaacccactccaccttactaccagacaaccttagccaaaccatttacccaaataaagtataggcgatagaaattgaaacctggcgcaatagatatagtaccgcaagggaaagatgaaaaattataaccaagcataatatagcaaggactaacccctataccttctgcataatgaattaactagaaataactttgcaaggagagccaaagctaagacccccgaaaccagacgagctacctaagaacagctaaaagagcacacccgtctatgtagcaaaatagtgggaagatttataggtagaggcgacaaacctaccgagcctggtgatagctggttgtccaagatagaatcttagttcaactttaaatttgcccacagaaccctctaaatccccttgtaaatttaactgttagtccaaagaggaacagctctttggacactaggaaaaaaccttgtagagagagtaaaaaatttaacacccatagtaggcctaaaagcagccaccaattaagaaagcgttcaagctcaacacccactacctaaaaaatcccaaacatataactgaactcctcacacccaattggaccaatctatcaccctatagaagaactaatgttagtataagtacatgaaacatctctctcgcataagcctgcgtagatgtcagattaaaacactgaactgacaattaacagcccaatatctacaatcaaccaacaagtcattattaccctcactgtcaacccaacacaggcatgctcataaggaaaggttaaaaaaagtaaaaggaactcggcaaatcttaccccgcctgtttaccaaaaacatcacctctagcatcaccagtattagaggcaccgcctgcccagtgacacatgtttaacggccgcggtaccctaaccgtgcaaaggtagcataatcacttgttccttaattagggacctgtatgaatggctccacgagggttcagctgtctcttacttttaaccagtgaaattgacctgcccgtgaagaggcgggcatgacacagcaagacgagaagaaaggcaaagaaggcttcaactctgattgaaaatgagtggagaatcaaacaaagttgagaacagatatgatataggtacagtgagatacttgaaactagaatttgatagttgatagttatagaagctcaattaaatcatcttgaagtggaattagacaaagcatctacattttaatggagaaccagtattacagtgaccaggtaactcggcatggtattatcacttaaaaatttttcctaaataccatgaagtcggtagaagacctttgcatcagaccatgttctttgaagcttaaaaaagtccctgactgactaggaaagacagcacagtgctccaaaaagaaaccctgcagagatgtattaataccaaaaactccatttgaccctggacaggcccaggattcgggattcttcacaatgaggggaatggaccaggtttcttccaagcaaaacattctatcgttttgttgacaatgaattaaattgaaattgtttagaacaatcccaattttggtggggaaggaaaggaggataagttaagcaagataaagaaagctcacagaaacttcatgcagaggtacagcattaaagttctttgtttcctaattaatgttgtatgcagaagtattctgtaaactaaattttcctgacagaaaagttcccacatcctcaacagatgagaatgattgcattatttgggatccttgatcaatacgaaccacatactgtcccttctcaaagactaagttccttatttttcacccaaatcctatatattgaaagacaaccaaggtgctaaatgttaaccactagtcaagttaggaatgtctgaagaaaatatattaaccttgacataaagaagatgtttttggtcaaatttcagacatgtattattataaattaataactggctccatccaccaggttaaagatgaagggagggcctaagatgtctctagagtttatatacacacaagtgagtgtcactgttttgttttgtttttgacctagttttattaaatattgcttccttggggtgtgtttataacaactcccagaacatttcatgtaaggattcaaagcggtcatattaaaatacagcttcaatataaagtttatcacagttttacagtattcaaaaatgacagacctgccttaaaaaacaaaacaaaaaccaaaaaaggactattacacccaaaacataagaaaacaattaaataaacaagtttggcattttcataactttatagtataaaacagaatattaaatttattactggcaaacggacactgatttatttcctttgaaatgtgtcccatttaaacacactatacaagttcattatacaaaagatggatgatcattttgatgaaagaagtgcaccctgaaaatttttgccagtttagaatatttagctcttaaagtttaaaaaaaaagtccttttccttttttaaactgaaggctgaattcagattttttttgttgtctcatctgtcagccttcctggtttaaaaacaatagtgtctatggacgcccaccagggggcagtgtaagattagccattaaatcacgaacagctgcaaatattgtgcattcaccttgtcgtggtggattcatctctgcaaacctcttcagaatgttgctgaccatcatgggagcagcaacagaagagttctgctgtctgggaatgtctgcctgctgggttgtacctgaagccatgtcataaatgattggaactataatactaacaggttcttggggagggaccgatgttttctgagttagttgaagaaaaaatagcattttggatttcagcaccacagcaggcgtcccaggaggtgcaatcggcggcgcgctgggagggatcgtcaggcaaaactgaacattccattttagctgtgttgcttggtcagggaacagctccagcttcataatgtgcacacaatccctgaggatgtgtgtaggagctcctaatagcttggtgaaggctattaacgtattagctttaaatggtggtcctgcaactcttgtttcaaagaatttctccaaaacttgaagttcatcaggtttccactgtcctgcattttcaggtgtcacttttagctgaagcgtttggttggttttgggactaagagctactctgcatttcagtgcatcagtcttaaacatgatcactccgggttcattagaatttatcagctgcagcgtttcttgttgaataattctttgaagatgtcgtctcatgatgactgatccaaggaatctctcaagtggagaacaaaggtaactacctgccaggccgggcacaaggcctggagttggagagggcagcagtaaaatgttcaaggcactgtgagtgaggatggtaggtatggatgccgcccaagagcgctgaggtagtttacgaggtggaggcatgtttgttggcattgtttgagaacttgttccagctcgaggggaatgagaagcatctggaaccggagaatgtagtgaggggttggctggtgacattccaggcatgcgtgctgctggtgaggggccagacacttgaggagatcctggccagttccctgctcgtccacttggtgacaccatagtgtatggggaactagggtcaagagttccatgtggactagcaaaactggcccctggtcctattgagattccatgcgaggatgggggaggagttggaacaaatgacgctggtgatggggctctcaaagccccactgggggagctggcagcatgcagatttcctggagactgtgtgtgcatcattgagggagactgattgactgtgctatgataagatgtagggggtgaagtaagaggataagcacctgatgttcctggctgctttggaaatggctgttgctggggtggtggctggagctgcgatattaaagaatccatcatatctcctcctataggagaagggggattatcgtcctcatttacagaccttcttcgagcatcctgattgctgtcaacaaacatattcaggaacgtctttagtcctggtgcaggatagaaaccttcaactagtttgctgttatcaaaaagactataggcaccatcccgtattgccacaacacctcgactccggcagtatatatcaatgcaatacatgttcctgaaggccagtctgatgtgggtggacgactgtggcagaatggagaagcactggtaggcagtattggttctctgggtcaagcccaacatcggcacagtggggagtttgttgatggcatttaatggagcctgagtatcaaacagtacctgtaataactgaaccacatttggtgttttgttgaacatttcttgaagctgatggagaatggtattgtgacagttactgcaacctgagtttgggccaacagttcccaaagaaatgtggaatttttgatggatcgaattccattggatactaattgagcttcccttggtggttccataacacaagataagttttcggtaattataaacacgaacttctgagaaaatatttagatgagcaggtatgtctggtagagaacgtgcaaattccaacacacactcatataatcgtgcaatgctattccagtcattaagaaacatttcaaccacctttctaccaccaacaggctcagacaacagattttcatatgtcaggtaaacgtgccgggatggtccttgctccctagtagaagtgccattaagtggacaatttgcaaacactaactctgctacccaagtgcggttatttctaccttgtaatcggaaagtgcaatcaagaagagagcggtccagagccttttgggtttcctcagttatacccttacagggaggaatttttaataagcgaattgcatggctgaagccatcaccttccacttgcactccttgatgtggaatctccagattggacaactccaaccgaagtcctacaaatggcatatttgtatcacacatagcgacgaagtgggctaaaactttattgaaggcacacatttctcctgctcgttttgttttcttggattctactggacatggatcatcagacaacttgcgcttggcattggttctggtctgtttcccggtttttgtacgaaaaaccaagtcctgaatgttttccttgaactgctgcagcagcaatgccattgcagggctgtcttcacgatctgcagcattcacagacataaagtagtacttgtacgacagttgtgtgggtttattgggaacctccaacatctccacaacaatgtagtattgtggaaggcgggtaagtttaatgaacagtttattcttagaaaggtttccaataggatgagttgagtaattggaaagctgcaatgtttcactgcttatcgtaggcagatgttttatagactgcttgcaacgctgttgtccaagccaaaacttaagttgctgaatccagggtatgattcgtttcatatcatcattcacagacttctccatgtcatccagagtggcctggtcaagtccataaagcatcaattgaaacattccagaatgtaaatctacaaaaatgtgcagacactctgaattaccacagggctccaagatgggaacaacaagagctgggagtgcagtctctatggaagagttttcattggcattgaagcctctaagaatggccttcagttcttggagcttctgatgagctcttgcatggacactgtcaatcaggagtttttctattgataagtggtcgatcttcatggctctttctactaatttggaatcagaagctggcaaaggaggatcgtgaaaaatctgtaaaggcttggagacatcattctcatcaattttaattgtaactttgtgaacagatgctgttccagtttttctcccaagaacctgttgattccaaactgaaagggagaggcactttccagcatgatacctttccacctgcacaaggtctccccaccgttctcggattaacattagagtttgggaatgtaacacttctaactgaagtgataaacagaaagaatgtaggcagttgtacatatcctgaagaggtttctcatcagcaaagagcctagactgcaccagttgatggatgaagctgatttgcatgctatgaaccaaagctcgcccatctcctgtttccttatcctcaactagaatttctagcttgagaagacgccatggaacatcagggtcatctcccatcacagtcaaggtggcttcaaattctccttcaacacgaaacttcacccggccatttgcaactgtaagatttgctaactgaggaggaagatctgtggttacaagccgatgtctaagaatctgattcagctgatggagtgtggcttgtttttcaattttggtaattgggtctggaggaataattttatccctaatgcaggttggcagccgtgggtaagatccagtagttagtacatcaatggcatatgggatggcaaaactaggcaggcgtgcatggaccagagcatctctagctaacgaggccaggcgatcagcagtgtccacaaacaggatggcttgctgatctaaaaagcttgaaatcatcgcacatttttccactttgccagcattattagcccatttcactaaagctaataatcgaacgaagagttggcgtgtccggctagcaaactgcactatttctattttcctttccacatcagatttccttggcagtaggtccgtcaacaccataagctccgagtaggcccggtgcagcagaaattcaatgagggtgctcagccggtagcccgggctagccgcagctgcagcggccgccgccacggcggctcccgggggaggaggggctggggctgacgggggtccgccgctgcccccgccgccgcctccgggcgggaccagctggtggttctccagctgcactggggccatggcggcgcaggaccgggcttggcgcaacggcacacgatgcggtcctcgagcctcccgggcgctcggtcaccgcgccgaaacgggagcgggcagagtcgccaccgcctaccgccggcaaccctcggccgattaaaccagcctcgtactagcta

SEQ ID NO: 548039 - DNA, 7156 bp, Homo sapiens
  misc_feature (725)..(725): n is a, c, g, or t
ttggctactagtctacgctggaatacgattgctccacggttggctactagtccacaggttggctaaacctagccccaaacccactccaccttactaccagacaaccttagccaaaccatttacccaaataaagtataggcgatagaaattgaaacctggcgcaatagatatagtaccgcaagggaaagatgaaaaattataaccaagcataatatagcaaggactaacccctataccttctgcataatgaattaactagaaataactttgcaaggagagccaaagctaagacccccgaaaccagacgagctacctaagaacagctaaaagagcacacccgtctatgtagcaaaatagtgggaagatttataggtagaggcgacaaacctaccgagcctggtgatagctggttgtccaagatagaatcttagttcaactttaaatttgcccacagaaccctctaaatccccttgtaaatttaactgttagtccaaagaggaacagctctttggacactaggaaaaaaccttgtagagagagtaaaaaatttaacacccatagtaggcctaaaagcagccaccaattaagaaagcgttcaagctcaacacccactacctaaaaaatcccaaacatataactgaactcctcacacccaattggaccaatctatcaccctatagaagaactaatgttagtataagtaacatgaaacatttctcctccgnataagcctggtcagattaaaacactgaactgacaattaacagcccaatatctacaatcaaccaacaagtcattattaccctcactgtcaacccaacacaggcatgctcataaggaaaggttaaaaaaagtaaaaggaactcggcaaatcttaccccgcctgtttaccaaaaacatcacctctagcatcaccagtattagaggcaccgcctgcccagtgacacatgtttaacggccgcggtaccctaaccgtgcaaaggtagcataatcacttgttccttaattagggacctgtatgaatggctccacgagggttcagctgtctcttacttttaaccagtgaaattgacctgcccgtgaagaggcgggcatgacacagcaagacgagaagaaaggcaaagaaggcttcaactctgattgaaaatgagtggagaatcaaacaaagttgagaacagatatgatataggtacagtgagatacttgaaactagaatttgatagttgatagttatagaagctcaattaaatcatcttgaagtggaattagacaaagcatctacattttaatggagaaccagtattacagtgaccaggtaactcggcatggtattatcacttaaaaatttttcctaaataccatgaagtcggtagaagacctttgcatcagaccatgttctttgaagcttaaaaaagtccctgactgactaggaaagacagcacagtgctccaaaaagaaaccctgcagagatgtattaataccaaaaactccatttgaccctggacaggcccaggattcgggattcttcacaatgaggggaatggaccaggtttcttccaagcaaaacattctatcgttttgttgacaatgaattaaattgaaattgtttagaacaatcccaattttggtggggaaggaaaggaggataagttaagcaagataaagaaagctcacagaaacttcatgcagaggtacagcattaaagttctttgtttcctaattaatgttgtatgcagaagtattctgtaaactaaattttcctgacagaaaagttcccacatcctcaacagatgagaatgattgcattatttgggatccttgatcaatacgaaccacatactgtcccttctcaaagactaagttccttatttttcacccaaatcctatatattgaaagacaaccaaggtgctaaatgttaaccactagtcaagttaggaatgtctgaagaaaatatattaaccttgacataaagaagatgtttttggtcaaatttcagacatgtattattataaattaataactggctccatccaccaggttaaagatgaagggagggcctaagatgtctctagagtttatatacacacaagtgagtgtcactgttttgttttgtttttgacctagttttattaaatattgcttccttggggtgtgtttataacaactcccagaacatttcatgtaaggattcaaagcggtcatattaaaatacagcttcaatataaagtttatcacagttttacagtattcaaaaatgacagacctgccttaaaaaacaaaacaaaaaccaaaaaaggactattacacccaaaacataagaaaacaattaaataaacaagtttggcattttcataactttatagtataaaacagaatattaaatttattactggcaaacggacactgatttatttcctttgaaatgtgtcccatttaaacacactatacaagttcattatacaaaagatggatgatcattttgatgaaagaagtgcaccctgaaaatttttgccagtttagaatatttagctcttaaagtttaaaaaaaaagtccttttccttttttaaactgaaggctgaattcagattttttttgttgtctcatctgtcagccttcctggtttaaaaacaatagtgtctatggacgcccaccagggggcagtgtaagattagccattaaatcacgaacagctgcaaatattgtgcattcaccttgtcgtggtggattcatctctgcaaacctcttcagaatgttgctgaccatcatgggagcagcaacagaagagttctgctgtctgggaatgtctgcctgctgggttgtacctgaagccatgtcataaatgattggaactataatactaacaggttcttggggagggaccgatgttttctgagttagttgaagaaaaaatagcattttggatttcagcaccacagcaggcgtcccaggaggtgcaatcggcggcgcgctgggagggatcgtcaggcaaaactgaacattccattttagctgtgttgcttggtcagggaacagctccagcttcataatgtgcacacaatccctgaggatgtgtgtaggagctcctaatagcttggtgaaggctattaacgtattagctttaaatggtggtcctgcaactcttgtttcaaagaatttctccaaaacttgaagttcatcaggtttccactgtcctgcattttcaggtgtcacttttagctgaagcgtttggttggttttgggactaagagctactctgcatttcagtgcatcagtcttaaacatgatcactccgggttcattagaatttatcagctgcagcgtttcttgttgaataattctttgaagatgtcgtctcatgatgactgatccaaggaatctctcaagtggagaacaaaggtaactacctgccaggccgggcacaaggcctggagttggagagggcagcagtaaaatgttcaaggcactgtgagtgaggatggtaggtatggatgccgcccaagagcgctgaggtagtttacgaggtggaggcatgtttgttggcattgtttgagaacttgttccagctcgaggggaatgagaagcatctggaaccggagaatgtagtgaggggttggctggtgacattccaggcatgcgtgctgctggtgaggggccagacacttgaggagatcctggccagttccctgctcgtccacttggtgacaccatagtgtatggggaactagggtcaagagttccatgtggactagcaaaactggcccctggtcctattgagattccatgcgaggatgggggaggagttggaacaaatgacgctggtgatggggctctcaaagccccactgggggagctggcagcatgcagatttcctggagactgtgtgtgcatcattgagggagactgattgactgtgctatgataagatgtagggggtgaagtaagaggataagcacctgatgttcctggctgctttggaaatggctgttgctggggtggtggctggagctgcgatattaaagaatccatcatatctcctcctataggagaagggggattatcgtcctcatttacagaccttcttcgagcatcctgattgctgtcaacaaacatattcaggaacgtctttagtcctggtgcaggatagaaaccttcaactagtttgctgttatcaaaaagactataggcaccatcccgtattgccacaacacctcgactccggcagtatatatcaatgcaatacatgttcctgaaggccagtctgatgtgggtggacgactgtggcagaatggagaagcactggtaggcagtattggttctctgggtcaagcccaacatcggcacagtggggagtttgttgatggcatttaatggagcctgagtatcaaacagtacctgtaataactgaaccacatttggtgttttgttgaacatttcttgaagctgatggagaatggtattgtgacagttactgcaacctgagtttgggccaacagttcccaaagaaatgtggaatttttgatggatcgaattccattggatactaattgagcttcccttggtggttccataacacaagataagttttcggtaattataaacacgaacttctgagaaaatatttagatgagcaggtatgtctggtagagaacgtgcaaattccaacacacactcatataatcgtgcaatgctattccagtcattaagaaacatttcaaccacctttctaccaccaacaggctcagacaacagattttcatatgtcaggtaaacgtgccgggatggtccttgctccctagtagaagtgccattaagtggacaatttgcaaacactaactctgctacccaagtgcggttatttctaccttgtaatcggaaagtgcaatcaagaagagagcggtccagagccttttgggtttcctcagttatacccttacagggaggaatttttaataagcgaattgcatggctgaagccatcaccttccacttgcactccttgatgtggaatctccagattggacaactccaaccgaagtcctacaaatggcatatttgtatcacacatagcgacgaagtgggctaaaactttattgaaggcacacatttctcctgctcgttttgttttcttggattctactggacatggatcatcagacaacttgcgcttggcattggttctggtctgtttcccggtttttgtacgaaaaaccaagtcctgaatgttttccttgaactgctgcagcagcaatgccattgcagggctgtcttcacgatctgcagcattcacagacataaagtagtacttgtacgacagttgtgtgggtttattgggaacctccaacatctccacaacaatgtagtattgtggaaggcgggtaagtttaatgaacagtttattcttagaaaggtttccaataggatgagttgagtaattggaaagctgcaatgtttcactgcttatcgtaggcagatgttttatagactgcttgcaacgctgttgtccaagccaaaacttaagttgctgaatccagggtatgattcgtttcatatcatcattcacagacttctccatgtcatccagagtggcctggtcaagtccataaagcatcaattgaaacattccagaatgtaaatctacaaaaatgtgcagacactctgaattaccacagggctccaagatgggaacaacaagagctgggagtgcagtctctatggaagagttttcattggcattgaagcctctaagaatggccttcagttcttggagcttctgatgagctcttgcatggacactgtcaatcaggagtttttctattgataagtggtcgatcttcatggctctttctactaatttggaatcagaagctggcaaaggaggatcgtgaaaaatctgtaaaggcttggagacatcattctcatcaattttaattgtaactttgtgaacagatgctgttccagtttttctcccaagaacctgttgattccaaactgaaagggagaggcactttccagcatgatacctttccacctgcacaaggtctccccaccgttctcggattaacattagagtttgggaatgtaacacttctaactgaagtgataaacagaaagaatgtaggcagttgtacatatcctgaagaggtttctcatcagcaaagagcctagactgcaccagttgatggatgaagctgatttgcatgctatgaaccaaagctcgcccatctcctgtttccttatcctcaactagaatttctagcttgagaagacgccatggaacatcagggtcatctcccatcacagtcaaggtggcttcaaattctccttcaacacgaaacttcacccggccatttgcaactgtaagatttgctaactgaggaggaagatctgtggttacaagccgatgtctaagaatctgattcagctgatggagtgtggcttgtttttcaattttggtaattgggtctggaggaataattttatccctaatgcaggttggcagccgtgggtaagatccagtagttagtacatcaatggcatatgggatggcaaaactaggcaggcgtgcatggaccagagcatctctagctaacgaggccaggcgatcagcagtgtccacaaacaggatggcttgctgatctaaaaagcttgaaatcatcgcacatttttccactttgccagcattattagcccatttcactaaagctaataatcgaacgaagagttggcgtgtccggctagcaaactgcactatttctattttcctttccacatcagatttccttggcagtaggtccgtcaacaccataagctccgagtaggcccggtgcagcagaaattcaatgagggtgctcagccggtagcccgggctagccgcagctgcagcggccgccgccacggcggctcccgggggaggaggggctggggctgacgggggtccgccgctgcccccgccgccgcctccgggcgggaccagctggtggttctccagctgcactggggccatggcggcgcaggaccgggcttggcgcaacggcacacgatgcggtcctcgagcctcccgggcgctcggtcaccgcgccgaaacgggagcgggcagagtcgccaccgcctaccgccggcaaccctcggccgattaaaccagcctcgtactagcta

SEQ ID NO: 548040 - DNA, 1410 bp, Homo sapiens
ttggctactagtctacgctggaatacgattgctccacggttggctactagtccacaggttggctaaacctagccccaaacccactccaccttactaccagacaaccttagccaaaccatttacccaaataaagtataggcgatagaaattgaaacctggcgcaatagatatagtaccgcaagggaaagatgaaaaattataaccaagcataatatagcaaggactaacccctataccttctgcataatgaattaactagaaataactttgcaaggagagccaaagctaagacccccgaaaccagacgagctacctaagaacagctaaaagagcacacccgtctatgtagcaaaatagtgggaagatttataggtagaggcgacaaacctaccgagcctggtgatagctggttgtccaagatagaatcttagttcaactttaaatttgcccacagaaccctctaaatccccttgtaaatttaactgttagtccaaagaggaacagctctttggacactaggaaaaaaccttgtagagagagtaaaaaatttaacacccatagtaggcctaaaagcagccaccaattaagaaagcgttcaagctcaacacccactacctaaaaaatcccaaacatataactgaactcctcacacccaattggaccaatctatcaccctatagaagaactaatgttagtataagtaacatgaaaacattctcctccgcataagcctgcgtcagattaaaacactgaactgacaattaacagcccaatatctacaatcaaccaacaagtcattattaccctcactgtcaacccaacacaggcatgctcataaggaaaggttaaaaaaagtaaaaggaactcggcaaatcttaccccgcctgtttaccaaaaacatcacctctagcatcaccagtattagaggcaccgcctgcccagtgacacatgtttaacggccgcggtaccctaaccgtgcaaaggtagcataatcacttgttccttaattagggacctgtatgaatggctccacgagggttcagctgtctcttacttttaaccagtgaaattgacctgcccgtgaagaggcgggcatgacacagcaagacgagaagaccctatggagctttaatttattaatgcaaacagtacctaacaaacccacaggtcctaaactaccaaacctgcattaaaaatttcggttggggcgacctcggagcagaacccaacctccgagcagtacatgctaagacttcaccagtcaaagcgaactactatactcaattgatccaataacttgaccaacggaacaagttaccctagggataacagcgcaatcctttttggggccattcacattggggttcggcctgttttgggacaggcaccgtttggccacgttttaggtcg

SEQ ID NO: 548041 - DNA, 1440 bp, Homo sapiens
ttggctactagtctacgctggaatacgattgctccacggttggctactagtccacaggttggctaaacctagccccaaacccactccaccttactaccagacaaccttagccaaaccatttacccaaataaagtataggcgatagaaattgaaacctggcgcaatagatatagtaccgcaagggaaagatgaaaaattataaccaagcataatatagcaaggactaacccctataccttctgcataatgaattaactagaaataactttgcaaggagagccaaagctaagacccccgaaaccagacgagctacctaagaacagctaaaagagcacacccgtctatgtagcaaaatagtgggaagatttataggtagaggcgacaaacctaccgagcctggtgatagctggttgtccaagatagaatcttagttcaactttaaatttgcccacagaaccctctaaatccccttgtaaatttaactgttagtccaaagaggaacagctctttggacactaggaaaaaaccttgtagagagagtaaaaaatttaacacccatagtaggcctaaaagcagccaccaattaagaaagcgttcaagctcaacacccactacctaaaaaatcccaaacatataactgaactcctcacacccaattggaccaatctatcaccctatagaagaactaatgttagtataagtaacatgaaaacattctcctccgcataagcctgcgtcagattaaaacactgaactgacaattaacagcccaatatctacaatcaaccaacaagtcattattaccctcactgtcaacccaacacaggcatgctcataaggaaaggttaaaaaaagtaaaaggaactcggcaaatcttaccccgcctgtttaccaaaaacatcacctctagcatcaccagtattagaggcaccgcctgcccagtgacacatgtttaacggccgcggtaccctaaccgtgcaaaggtagcataatcacttgttccttaattagggacctgtatgaatggctccacgagggttcagctgtctcttacttttaaccagtgaaattgacctgcccgtgaagaggcgggcatgacacagcaagacgagaagaccctatggagctttaatttattaatgcaaacagtacctaacaaacccacaggtcctaaactaccaaacctgcattaaaaatttcggttggggcgacctcggagcagaacccaacctccgagcagtacatgctaagacttcaccagtcaaagcgaactactatactcaattgatccaataacttgaccaacggaacaagttaccctagggataacagcgcaatcctactcgagagtccatatcgacgatcaggtccaagacctcaatcctgcagcaggacattacaatagtcccagccgctaatataggatcagtagctctacga

SEQ ID NO: 548042 - DNA, 510 bp, Homo sapiens
cctaaccagtttgcatgtaacaaggctgtcggtgtatatctgtggaaatgaattggtcatcagtgatagcactgcaatatgatgtaattgatacaattcacttatctcacaaaataagttgctgtttctcctggggggccagggtggttgtatggatcagatctgactttgtccacgtcttctctctgctcaacaaagtgaaggaatcaagccttgtgtgatcaccacagtctgctgtatccagcacgttctcttgtacacgctgggtgcccagtacatccttgcagatgagtgaatggcctgcctttccgtaatacaggctggcgaaagcttccctgcgctcatgtctcagaagagatgctctctgctcccctgcaagttggaatcgtctcccttgggagtagtcgagaggtgacagaggctgctgtgagtggctagaccaaagtctccctgtgaagccacgtgatgactccaccgctccccagagctgcacatggtcgctcagaaagc

SEQ ID NO: 548043 - DNA, 1612 bp, Homo sapiens
  misc_feature (619)..(619): n is a, c, g, or t
  misc_feature (1364)..(1364): n is a, c, g, or t
tccattctacaacacattttttggtccaacccaaaaacttagccaggaccaaaatttagcagcaatgtgctgtgaaacatttcacgtggcagctttggcctttctatacccttagaggctcaaagtatactttgaaaacattgtgccgtgtgtgtgtgccatagagggaggcttccaccacagaggaagagccccaaccgccctatacttctccttctcattctgtggagcacaagagcgacacctgtgtgttatcacgtgtgccacgaggtgtcttataggtgggtgtggagactctctctccagagaggcgagtgtggacaaatttcatctctttataaacctataaatattactatcacagagcgctctgtgcggtctcacaccgacagtgcgcccaaaatatgtgacagaggcgtggccccagtgaatattcacacgctgtggtgtatctctctctggtggacacacatatctcccctttctcagaagagagagccccccacacacactgttgtgtctcaccacacactttctcagatgtgccgccccaagatgagggggacatctccagaggtgtgtctctctgtgggagagatgtgtctcttatcaccctgtnggaaaatataccatttctctttgtggcctctcccttttctcctataagggataagtgacgaccctcccagagtataaaccccacctgggggggagtcgtttgtgaaaacactcccacagagtctcagaggatcactctctcttgggcgtctcacaagagttgggggcccaaagtgtggccaagacttgagagaatattcccataaatatctccccaaacaaaagctctcatatcggggggaaagattaaaaaggtttcaacgagggagggcatatttcgccaaaagatgtttctccccccgacaaatgtgtggtgcaaacaccgaagagtgttccccccggagggtgtaataacatcgtgacctctttccgaggaacgcacaaagaattttttttgtccccccccttttttatctcgtgtagagagacaaaagaaggggtcctaaaggaaatttctttgggagggcaacggggggtgtctcattacccccgagaatgtgttctttcctccccacacaccaaaagagaagtgactactcacccagagaaaaaaggggcgatccacggagctttatacccccaaagttagccgttctagtttgtgagagcccacttctgtgggggcaccgcggcgtatcatgagtgtgacaccacacacgcccccgagtaggggagttgtggtccctcataagagagaaagagaagaacagccccaacggagcgcgggattcttcccacacaagagngatctgtaggaatatctcccagtttgttgaagaaccacaacgtgccgccggcaattaaaggtggtggtcccggaaaagaagaacaaaggacggaggaccacaacttccactcttctgcgagacagagcccccgcgagagagacccccgatgcaaccactcaagagattagtgggagagaccaccagacaagtaactcgaatattgtaggtgaaccccccaacaagccccaggagaggggaggagtgta

SEQ ID NO: 548044 - DNA, 443 bp, Homo sapiens
atgaggcgcgtctgcgtcatgcaggcctgggcacagtggctcatgcctgttatcccagctaattttcggaggctgatcgtgggagagattactttatctcaggagcttgagaccagcctgggctacatagcataacctcctctctacaaataaaaaaaagtagtcgattgtggtggcatatgcctgtagtcccagctactgggaggcagagataggaggattgcttgaccccaggaggtcgaggctgcagtgagccaagattgctccactgcactccagcctgggttacagagcctgaccctgtcttaaaaagcttaagcaaccacaaaaaaatataaaaaaaaaataaacattttttcgccccccaaaagggggcaaaagctttaagggtttccccttaaaaaaggcccctcccaaaagccccttaagggtaaccgccccat

SEQ ID NO: 548045 - DNA, 901 bp, Homo sapiens
gcctcttttccgggctggaaccatggagggtgtggaatagaagaagaaggaggtcctgctgtgccaaagacccttaagaactacgcgaaggaattgcgcatgagtgaaaattaagcgcctgtagaaatgaagtttgaccaaagaagatgcttcgaattggcaaggatggaggcttttctatgaagtggagctaatgcatgtatctacaaggagatataggtagatgtgacagaactgaaatgcgaatggggaggatgggaatgaaaagctgggaatttctatgtaccctgcagaacccaaattgggttgtcatcagcaatcgatagggtatcacatggatgtgagatgcaagaggttcggaaaggtgttgacagtcatttcgttcgcacttcggtgaaatcttacaagggggcatccttttgttgaagcttaaagaaaggctacgattaagcatgctgaggattgtgcgagaccatatgttgccatggggggtaacccgaatcttgaagtgcagtaagatgaactaatctacaagcgtggttttggcacatcatcgttcagaagggaatggtttgaaggatacgcttgtgattgctcgatcgctgagaaatacgggattatctgatgcgaggtgtgattcgtgagattatactgtggaaacgctccaagaggcgatactgactggggcctcaagttgtctctccacgagtgatggacaacaggcccctaggaacggcgaactggacaagggagccgacacaggttaaaaagatagggaccaggatttcaaaggaggaaaaagacggccaaaaacagagaatgggcgccaaacaacaagggcgcaggaaaataaacaggcatcgacaaccggcagcacgggaacgaccacgacgacagtaaa

SEQ ID NO: 548046 - DNA, 903 bp, Homo sapiens
  misc_feature (8)..(8): n is a, c, g, or t
  misc_feature (107)..(107): n is a, c, g, or t
  misc_feature (112)..(112): n is a, c, g, or t
  misc_feature (116)..(116): n is a, c, g, or t
  misc_feature (120)..(120): n is a, c, g, or t
  misc_feature (164)..(164): n is a, c, g, or t
  misc_feature (173)..(173): n is a, c, g, or t
  misc_feature (176)..(176): n is a, c, g, or t
  misc_feature (181)..(181): n is a, c, g, or t
  misc_feature (211)..(213): n is a, c, g, or t
  misc_feature (215)..(217): n is a, c, g, or t
  misc_feature (229)..(229): n is a, c, g, or t
  misc_feature (231)..(232): n is a, c, g, or t
  misc_feature (236)..(236): n is a, c, g, or t
  misc_feature (238)..(239): n is a, c, g, or t
  misc_feature (241)..(241): n is a, c, g, or t
  misc_feature (243)..(243): n is a, c, g, or t
  misc_feature (253)..(253): n is a, c, g, or t
  misc_feature (256)..(256): n is a, c, g, or t
  misc_feature (258)..(258): n is a, c, g, or t
  misc_feature (270)..(270): n is a, c, g, or t
  misc_feature (275)..(275): n is a, c, g, or t
  misc_feature (286)..(286): n is a, c, g, or t
  misc_feature (292)..(292): n is a, c, g, or t
  misc_feature (302)..(302): n is a, c, g, or t
  misc_feature (307)..(307): n is a, c, g, or t
  misc_feature (310)..(310): n is a, c, g, or t
  misc_feature (313)..(313): n is a, c, g, or t
  misc_feature (315)..(316): n is a, c, g, or t
  misc_feature (320)..(320): n is a, c, g, or t
  misc_feature (324)..(325): n is a, c, g, or t
  misc_feature (330)..(330): n is a, c, g, or t
  misc_feature (336)..(336): n is a, c, g, or t
  misc_feature (339)..(339): n is a, c, g, or t
  misc_feature (341)..(342): n is a, c, g, or t
  misc_feature (345)..(345): n is a, c, g, or t
  misc_feature (354)..(354): n is a, c, g, or t
  misc_feature (360)..(360): n is a, c, g, or t
  misc_feature (366)..(366): n is a, c, g, or t
  misc_feature (368)..(369): n is a, c, g, or t
  misc_feature (387)..(388): n is a, c, g, or t
  misc_feature (391)..(391): n is a, c, g, or t
  misc_feature (394)..(394): n is a, c, g, or t
  misc_feature (402)..(402): n is a, c, g, or t
  misc_feature (404)..(405): n is a, c, g, or t
  misc_feature (411)..(411): n is a, c, g, or t
  misc_feature (432)..(433): n is a, c, g, or t
  misc_feature (484)..(484): n is a, c, g, or t
  misc_feature (521)..(521): n is a, c, g, or t
  misc_feature (528)..(528): n is a, c, g, or t
  misc_feature (707)..(707): n is a, c, g, or t
  misc_feature (725)..(725): n is a, c, g, or t
  misc_feature (810)..(810): n is a, c, g, or t
  misc_feature (876)..(876): n is a, c, g, or t
ttgaaganggagatattcagaacccttcaccagattccccccaacttgattatagtggattaatggtgtgctttgtggatgtggttagtaaatgacaccagcttganggatntttntttntgcaccaaaccccattgagttatctggtccccttggctgacgangaaccattnggnggggngcactggcatcatccagagtgtttttcttnnngnnnttgtccaaccgntnnggtngnngngntgcaacagcnttngngccctctcagtntcgcnaaacatttttngtgttntttttttttntttgntgnttntnntttnttgnnatttncacctnatntnntgnttgttgttnaatgcnatcttnanntttttttacatggtaaannagnttnttgttatntnntatttnatagttaatgttgccaaactnntttttcacacattccactgtggccctgcgcaggggtgtgatgttgttagcnatagtttgtgcattttggcccaggacacacaattggnacttgangctctcccctttctgcaggcaatcccctttgttggccatcccaacgatgccaaatggatagacctcacctttcatatcgccctcctccacaatctcaatcattccttggtactcagtctgtgttggatcaacactcctcagggggcgaattactttgccagagtaaatggtgggatcancttcctcagtaatgccantcactgagtgtgttttgttcactttttctgcactgactttgttgcctttgcctttggacaagctatactcgaccatgtcccccanttccaggctatcaacatcaccagagaactcactgtaatggaaaaagatttctttatcatgattggntgtttcaataaatccaaaatattcttt

SEQ ID NO: 548047 - DNA, 446 bp, Homo sapiens
  misc_feature (5)..(5): n is a, c, g, or t
  misc_feature (57)..(57): n is a, c, g, or t
  misc_feature (66)..(66): n is a, c, g, or t
aaaanggtttcctacacaggttaagcatttactcccctcactacttcccaaaagganttgaagatnaccttaaaataaaatgccagattctaaaaacacaagaatttagacaagaaggaaaaggaaagtgaattagaagcccctaaataggcccaagtgcagtggcctcacgtctgtaatcctcagcactttgggaggataatgcggacgggtgacttgaggtcaggagttctagatcaacctgggtgacatagcaagaccacttccctacaaaaaagaatttttttttttaattagcccagtgtggtggtgagtgcctgtagtcccagtcaggagaatgaggtaggggttgatcccaggaggtggaggctgcagcgagctgtgatggtatcactgcattccaacctgggtgacgatgagatcccccatctctattaaaaaaaaaa

SEQ ID NO: 548048 - DNA, 685 bp, Homo sapiens
agcggatcgcaccgagtggacatcccggtctttgtccgtgggtcagtacggcccctggctccaggtgggcgaacattactatgatcctctgtggaagcaaagaagaccagtgtatggcaggaagaaagaatctgaggaaggatctgccgcggaacaaacgcctgataatgatcatgcactacgatagatatggcagcagagactctgacgaggcaccaggcacttgggatggcatgtcgatccgatcatccaggacgagactgaagaaatgagaacattgaatactttagagccgagaaggtacgttcccctcgtgtgacttcgacactcggatagtgctgagatagtaaacgcgacaacgacacttgatgggacaacctagttcccggtgatgaataagcaccaatgacgtgcgatctgagatagtcagtgaagaggaatagttagctggtaagggagaaatgaaggtcaaatacaaaaggatgacctataggaattggaggaaaacatttcatactattactagtaaaggcatgtgagatacactttagagagtaaatttaaaagaccacccattaaataaagatgttaaacttgatcgtttagagaagaaagtagacattttgatagcgcatcacataaatgcaattacccacaaggtagtaacccatacctggaagataca

SEQ ID NO: 548049 - DNA, 219 bp, Homo sapiens
atccagactcgcagcagaagactaataagtatctcagtctatagaactgatttgaatcaaaatctacatatattttgaggtcaatcattccacgcatccccaactgcgctggttatgaaaatatttgaatcatcagacccaagaactgcaaggactgacccttttctgagacaattcctcatccttgggaatgaggaactgtcagaaaaaatacaattt

SEQ ID NO: 548050 - DNA, 415 bp, Homo sapiens
tatgtggttgtcgtccaggtaaaggcttactaaaagtcgtgaaaacttaggcttggattaaggcaacagcgatttccaagagaatagtccagtaaaattcaacaatgtgtgcaagaatgaataagctgttcaagggaaaggtttaagtggctgaatatggcctagggtggccgccttccaatttggctgccatgaactagggtggacctgccagaaagtgtcagccggtataaggcgtgtacggcacaagggcatattgagggcttagaaagtgaagttagggcctgagtggtttctcgaaataatataaccatagaatagtggggaaataaaggggtttttaagctgcttccatgtgaggcaaaaaaaatggggacacacgcgaatttaaaactcctaaaaacgaaaacctatc

SEQ ID NO: 548051 - DNA, 874 bp, Homo sapiens
ggtaggagcctgggccgaggccgcggtgagatgccgcggctggtactgggagggtggcagggagggacggggaaggaagatggcgacgtcgggggcgaacgggcctggttcggccacggcctcggattccattccgcgcaaatttagtgagaagatggcagctgctatgaagcagcgaatcaggccgatggagactggcggtccttcgaggaggtgatcgatggacatcggctccaccccggttacaggccctaaaaaactgcgactggccatacacaaggcagctctcattcatgcgtagggtactactgcccaaatgttaaccgagattggcctctgagccctggaccgagtttccgaggaggccacccctaccactcaacccttttggcattccatctcgagagccacctcggacacccattgggctaggtggaaacccgggtgcacgccgagatccgtcgaagacctggtgctacccatacttcgccggattaccaccccgaccacaaatttgacacgcctcatcccttataagtccatgccctacattatcttccttccccccaagaagttcttagctgggccgaaagcgcaccggtagggcccttgcggcgccaagttctccacttgccagcacgacaaggggggcaacgattgatatatctgagcttacgcattcgatgacacaacctattacaccaggggcaccaaaggcacttcttgaaacctccgtggcccccttttcaacttcacacacgcctggatgaacttgaacagccccacaaggttacccccatgagtaagtagccgctataaccgcaggggacccaccaaacaacccatcacgcagggacattacacttggactcca

SEQ ID NO: 548052 - DNA, 410 bp, Homo sapiens
ggattatgacggatgtggtctacagcactgcagttactggtctgcttccacaggaggaaatgagggtcccggtgccaccccctcccggggatgtagtagagagtcctcgagccccaaacaagctagatggggctgcgtctgcagtgtgacctgtgccccagtgaacaggctgggggcccaacttctccggaacctcagcctccgccgatgttgcaaactctccttcccctgctgggcctcagcaggaactgagctgggcttttccagctccggccaatcctgtgacctgcagtccccacccagcctggaactcagagcagagaggagtcagaaccacagggaggcaggtgacagggtcgtctgcatgtcccttggcttccgcatccagacaaagggcagatctgtgtaca

SEQ ID NO: 548053 - DNA, 329 bp, Homo sapiens
atttttaaaaaaaaaaaccttttttccccccttttgaaagggggggcccccggtttgggtttaccgggttaaaaaaaccccccggggaaaaggtggggggggccccccccccccccccccaagggggggggccccgggggttaaaagggtaaaaaaaaaaaagggggggggggacccccccccttgaaaacccccaaagattaaccggcccggccccggaaagcccctttttagggggggcttggggccccccccaagggaaaagggggggggtttttttttccccccccaaaaaggggaaaaaaccggggggggggggggttttccca

SEQ ID NO: 548054 - DNA, 142 bp, Homo sapiens
cacgaggagctctcggggctcctcacgctgcgggtctgcgctcgccctcgctctccacgccctccgctccggacccggccccgctcccgccatggagaatactgagctgagttagaaggccaaactggccgatcaagccgag

SEQ ID NO: 548055 - DNA, 570 bp, Homo sapiens
agttaccacgtggaattcactggatacgatccaagctccaagagttggtacattggatacataaggaaatgcaaactacaaagaaaaaagtgaaatattcaatccaaaattcaatcccttggtcactgttatctataatggctaaaattgaaagtacaagagggtgctggataaggacttgaggctggacccagctcaaaatgtgggtgcgagctcaggccaccagcctcaaagtcacccacaaagcagagaattatgcaagggacaacagaaaatatttctaagtcctgtggttaccaagaaggtagtcaatgtgggggaagggcaaaaccaagtaactactgaaaccaaagggtgtagcttgtcaaggaatggttccatcttatagactggtatcatcagtttcctggggaacctttgctaaagtggactatgaaagtgatcaattaaggggcagaatcttagagtttaaatgctacagagtggaagagcatgttcgggttgatgcaggacccacagctcactattgaacaatcgtgggtggggatatataatccagacacacggaga

SEQ ID NO: 548056 - DNA, 637 bp, Homo sapiens
  misc_feature (637)..(637): n is a, c, g, or t
gggcccaaaaatcctttttaataatgcagggggccaacattggtgcaatcagtataaaaacaaagttattcctgattttgtataaaggaacacgtcgggggtcaggattttaaagcatcaagatacaagtcccaaggggggggaccaaagacaactcacagtgaagagaaacgcttgagaacaagaaatgtcagagttgtaggacgtggtaacaacccagggtgctgaaacggtcagaggtgcaggtgcagacccaggcttctgcctttgcaagggcaagggggccgttggtggctggctgcaaaggaccagtgccaggcagcggggcaaagagcaccaggggtctcgactttgcagattgggctttgcagaggatttctgttttccacctccccacccctctgacagagactgaggagaccacacacgttgacctcctcttcatagccaggcatatttccactccaacattctgttggggtgtcattcttgaaaaaaaatccttggtggtccttgctcctttcaaacacagtttgcttgttagacccctttcaaaaatgacaggttggtcaggagggcccttaaaggtaggaccacacccagatctgggcctttggggggttatgaatggtatatn

SEQ ID NO: 548057 - DNA, 140 bp, Homo sapiens
aaagaaaacaagttttatttttatcatcagaacattctaataaaaatattatgatgagattagctactttacttctctgagccttgactctgctctgtgaccaggcctgcctgagctgactgcacgatcagctctgagag

SEQ ID NO: 548058 - DNA, 669 bp, Homo sapiens
  misc_feature (296)..(296): n is a, c, g, or t
  misc_feature (359)..(359): n is a, c, g, or t
agccctgggaataaagtcccaggtttacactcgcacccccaccctatatttggacttccaattggaccccggggcccgacattccccacctatccctaaaagggtggaccagcttcactttacccgatatctcggagatcgtgtatatatgggccgcgatgatgccacccacccaaaaattagaaccttccatccaccaccagccagtgctatggagaagagtgcaccagatgtcccaagtggagaaccaggatccccagaggaagcccacatttgtcttaatatgcttgggggancccatttaagagagacccagtttatccccaccatggtgccctattgctgatgagaccacccantgaagagatttcttccagctattcttgagtttccagaaaccgccacaaaatggggtttgaaaagggcccaaaaccctggagaatccaaagattgggaactaagtggaaagccggaagacgccggtcttgatgtgtcctagaattttgccctttctgagattgagcccttgaaggccttccctttctaaagcttatttagccggtgctttctaaagagattcccccctaacgtgataacctggtcttttgtaaccataaatgtaggatatttcctggcacctgccaataaacctaatccttggttccttta

SEQ ID NO: 548059 - DNA, 349 bp, Homo sapiens
cgcatctgcacatccggcatgccactggacacatgacacatagtagcctccatcgcaatcatataccaaatctctgcctcacgaggcataagcctcctcctcagacactcagtcaaatccctcatagcaggcagatgacgtggactaaactagacgcagctacgcaaaatctaagatatattcctcaatgagctcgacataggatgcatttatagctgtacgaccgatacaaagcctgaacgtaaccagccttattaaacctatatatattatcctgaactagaatcgtctaccatactactcaatttaaactccagcagcacgatcctactagtatctctcacttgag

SEQ ID NO: 548060 - DNA, 369 bp, Homo sapiens
agattctaggagtttatataagaggctagtatgttttcattttgagtcagacattcttttctcattctcaaatctgttttaaatgctccaattttaaaaatgccaaataaaattttatcatgcttattgtagtatgcctattgcagttatctttgaatttaggaaaacagttttgtatgatgaaatattgtgcagaatctgtaaatacggtagcttaaaaataaaaaaaaaagtattaattagtatatgattaatccttaaaatgtagaaactatagattgtgttgagtcagaactgttatgtttgtatccaggtttctattcaccacatataccatcttagaatacacacatatctgggagttataat

SEQ ID NO: 548061 - DNA, 796 bp, Homo sapiens
gccccctagcgagaaaaaatttcctgtgaaacgctacaactccccttgggggttgcgcacacacaatgcgggccgggacggccccccgcacactcaaggggagtaaccaaaccgtgagtgggtgcagaaagaaccccccgtcgggaactctcacagacggagatgttagagccactcaccgccgcgctagggcctcacaacgcggaccgagtgaaccctcgcgcccacgcctccatggttaaggtggcctcgtacacccacacacccatgcctgccgcgtggaggtgcagcgcccgtggctcacactccccgcgaagtggggccccagcgcacagctgagctaagccacctctcggctctgcatcgcaccaggcggctgctccgcgtgaggcagccgcagaaaagaggtctcgcacgtcagacacacgccgcgaggcggagggggagaggagggactggaacgggtacgcgcacacgaggactctcagacccccccctacagggctctcccacggcgcacggcgggggacacacacacaaaggacaacgtctgtgggctgtcacacagaaatacacacacaggacccctctatgtgacccatagagaacaaccgcgcgaatcattcacggggacgaaatgggtgcggcaccaccggcaggtaccaccgcctcccgcgcggggggaatcgccggttcacgtgcgacacacccccgaggaagaacaaaagggggggggcacgacctctccacgatgacggatggattcctcacaaaaagaaaccgacccacatagaca

SEQ ID NO: 548062 - DNA, 251 bp, Homo sapiens
tcaaactggaagggatgtctccgagtcccctgcgagaaagatcttatccttaggtctgcggttactagttacgttacgttacgttacgttacgttacgttacgttacgttacgttacgttacgttacgttacgttactttttgagaacaagtctcgctctgttgccgaggctggagtgctttggtgtgaccctggctcactgcaacctccgcctcccggattcaggcggttctcctgcctccctcccacaa

SEQ ID NO: 548063 - DNA, 236 bp, Homo sapiens
tccttcatcatactaccttctccttttctttctccttcttcctttcctcttctccttcttttcttctccttctcccttcttctttcttcttctccttgtacttctcctcctccttctttcctcttttcttcgttcttcttcctcttccctcttttctttcttttcttctgctttcttcttccttttttttttcttcttccttattcttttcttcttggtaggtatgatgaaggacg

SEQ ID NO: 548064 - DNA, 7100 bp, Homo sapiens
  misc_feature (669)..(669): n is a, c, g, or t
ttggctactagtctacgctggaatacgattgctccacggttggctactagtccacaggttggctaaacctagccccaaacccactccaccttactaccagacaaccttagccaaaccatttacccaaataaagtataggcgatagaaattgaaacctggcgcaatagatatagtaccgcaagggaaagatgaaaaattataaccaagcataatatagcaaggactaacccctataccttctgcataatgaattaactagaaataactttgcaaggagagccaaagctaagacccccgaaaccagacgagctacctaagaacagctaaaagagcacacccgtctatgtagcaaaatagtgggaagatttataggtagaggcgacaaacctaccgagcctggtgatagctggttgtccaagatagaatcttagttcaactttaaatttgcccacagaaccctctaaatccccttgtaaatttaactgttagtccaaagaggaacagctctttggacactaggaaaaaaccttgtagagagagtaaaaaatttaacacccatagtaggcctaaaagcagccaccaattaagaaagcgttcaagctcaacacccactacctaatatagaagaactaatgttagtataagtaacatgaaacatttctcctccgnataagcctggtcagattaaaacactgaactgacaattaacagcccaatatctacaatcaaccaacaagtcattattaccctcactgtcaacccaacacaggcatgctcataaggaaaggttaaaaaaagtaaaaggaactcggcaaatcttaccccgcctgtttaccaaaaacatcacctctagcatcaccagtattagaggcaccgcctgcccagtgacacatgtttaacggccgcggtaccctaaccgtgcaaaggtagcataatcacttgttccttaattagggacctgtatgaatggctccacgagggttcagctgtctcttacttttaaccagtgaaattgacctgcccgtgaagaggcgggcatgacacagcaagacgagaagaaaggcaaagaaggcttcaactctgattgaaaatgagtggagaatcaaacaaagttgagaacagatatgatataggtacagtgagatacttgaaactagaatttgatagttgatagttatagaagctcaattaaatcatcttgaagtggaattagacaaagcatctacattttaatggagaaccagtattacagtgaccaggtaactcggcatggtattatcacttaaaaatttttcctaaataccatgaagtcggtagaagacctttgcatcagaccatgttctttgaagcttaaaaaagtccctgactgactaggaaagacagcacagtgctccaaaaagaaaccctgcagagatgtattaataccaaaaactccatttgaccctggacaggcccaggattcgggattcttcacaatgaggggaatggaccaggtttcttccaagcaaaacattctatcgttttgttgacaatgaattaaattgaaattgtttagaacaatcccaattttggtggggaaggaaaggaggataagttaagcaagataaagaaagctcacagaaacttcatgcagaggtacagcattaaagttctttgtttcctaattaatgttgtatgcagaagtattctgtaaactaaattttcctgacagaaaagttcccacatcctcaacagatgagaatgattgcattatttgggatccttgatcaatacgaaccacatactgtcccttctcaaagactaagttccttatttttcacccaaatcctatatattgaaagacaaccaaggtgctaaatgttaaccactagtcaagttaggaatgtctgaagaaaatatattaaccttgacataaagaagatgtttttggtcaaatttcagacatgtattattataaattaataactggctccatccaccaggttaaagatgaagggagggcctaagatgtctctagagtttatatacacacaagtgagtgtcactgttttgttttgtttttgacctagttttattaaatattgcttccttggggtgtgtttataacaactcccagaacatttcatgtaaggattcaaagcggtcatattaaaatacagcttcaatataaagtttatcacagttttacagtattcaaaaatgacagacctgccttaaaaaacaaaacaaaaaccaaaaaaggactattacacccaaaacataagaaaacaattaaataaacaagtttggcattttcataactttatagtataaaacagaatattaaatttattactggcaaacggacactgatttatttcctttgaaatgtgtcccatttaaacacactatacaagttcattatacaaaagatggatgatcattttgatgaaagaagtgcaccctgaaaatttttgccagtttagaatatttagctcttaaagtttaaaaaaaaagtccttttccttttttaaactgaaggctgaattcagattttttttgttgtctcatctgtcagccttcctggtttaaaaacaatagtgtctatggacgcccaccagggggcagtgtaagattagccattaaatcacgaacagctgcaaatattgtgcattcaccttgtcgtggtggattcatctctgcaaacctcttcagaatgttgctgaccatcatgggagcagcaacagaagagttctgctgtctgggaatgtctgcctgctgggttgtacctgaagccatgtcataaatgattggaactataatactaacaggttcttggggagggaccgatgttttctgagttagttgaagaaaaaatagcattttggatttcagcaccacagcaggcgtcccaggaggtgcaatcggcggcgcgctgggagggatcgtcaggcaaaactgaacattccattttagctgtgttgcttggtcagggaacagctccagcttcataatgtgcacacaatccctgaggatgtgtgtaggagctcctaatagcttggtgaaggctattaacgtattagctttaaatggtggtcctgcaactcttgtttcaaagaatttctccaaaacttgaagttcatcaggtttccactgtcctgcattttcaggtgtcacttttagctgaagcgtttggttggttttgggactaagagctactctgcatttcagtgcatcagtcttaaacatgatcactccgggttcattagaatttatcagctgcagcgtttcttgttgaataattctttgaagatgtcgtctcatgatgactgatccaaggaatctctcaagtggagaacaaaggtaactacctgccaggccgggcacaaggcctggagttggagagggcagcagtaaaatgttcaaggcactgtgagtgaggatggtaggtatggatgccgcccaagagcgctgaggtagtttacgaggtggaggcatgtttgttggcattgtttgagaacttgttccagctcgaggggaatgagaagcatctggaaccggagaatgtagtgaggggttggctggtgacattccaggcatgcgtgctgctggtgaggggccagacacttgaggagatcctggccagttccctgctcgtccacttggtgacaccatagtgtatggggaactagggtcaagagttccatgtggactagcaaaactggcccctggtcctattgagattccatgcgaggatgggggaggagttggaacaaatgacgctggtgatggggctctcaaagccccactgggggagctggcagcatgcagatttcctggagactgtgtgtgcatcattgagggagactgattgactgtgctatgataagatgtagggggtgaagtaagaggataagcacctgatgttcctggctgctttggaaatggctgttgctggggtggtggctggagctgcgatattaaagaatccatcatatctcctcctataggagaagggggattatcgtcctcatttacagaccttcttcgagcatcctgattgctgtcaacaaacatattcaggaacgtctttagtcctggtgcaggatagaaaccttcaactagtttgctgttatcaaaaagactataggcaccatcccgtattgccacaacacctcgactccggcagtatatatcaatgcaatacatgttcctgaaggccagtctgatgtgggtggacgactgtggcagaatggagaagcactggtaggcagtattggttctctgggtcaagcccaacatcggcacagtggggagtttgttgatggcatttaatggagcctgagtatcaaacagtacctgtaataactgaaccacatttggtgttttgttgaacatttcttgaagctgatggagaatggtattgtgacagttactgcaacctgagtttgggccaacagttcccaaagaaatgtggaatttttgatggatcgaattccattggatactaattgagcttcccttggtggttccataacacaagataagttttcggtaattataaacacgaacttctgagaaaatatttagatgagcaggtatgtctggtagagaacgtgcaaattccaacacacactcatataatcgtgcaatgctattccagtcattaagaaacatttcaaccacctttctaccaccaacaggctcagacaacagattttcatatgtcaggtaaacgtgccgggatggtccttgctccctagtagaagtgccattaagtggacaatttgcaaacactaactctgctacccaagtgcggttatttctaccttgtaatcggaaagtgcaatcaagaagagagcggtccagagccttttgggtttcctcagttatacccttacagggaggaatttttaataagcgaattgcatggctgaagccatcaccttccacttgcactccttgatgtggaatctccagattggacaactccaaccgaagtcctacaaatggcatatttgtatcacacatagcgacgaagtgggctaaaactttattgaaggcacacatttctcctgctcgttttgttttcttggattctactggacatggatcatcagacaacttgcgcttggcattggttctggtctgtttcccggtttttgtacgaaaaaccaagtcctgaatgttttccttgaactgctgcagcagcaatgccattgcagggctgtcttcacgatctgcagcattcacagacataaagtagtacttgtacgacagttgtgtgggtttattgggaacctccaacatctccacaacaatgtagtattgtggaaggcgggtaagtttaatgaacagtttattcttagaaaggtttccaataggatgagttgagtaattggaaagctgcaatgtttcactgcttatcgtaggcagatgttttatagactgcttgcaacgctgttgtccaagccaaaacttaagttgctgaatccagggtatgattcgtttcatatcatcattcacagacttctccatgtcatccagagtggcctggtcaagtccataaagcatcaattgaaacattccagaatgtaaatctacaaaaatgtgcagacactctgaattaccacagggctccaagatgggaacaacaagagctgggagtgcagtctctatggaagagttttcattggcattgaagcctctaagaatggccttcagttcttggagcttctgatgagctcttgcatggacactgtcaatcaggagtttttctattgataagtggtcgatcttcatggctctttctactaatttggaatcagaagctggcaaaggaggatcgtgaaaaatctgtaaaggcttggagacatcattctcatcaattttaattgtaactttgtgaacagatgctgttccagtttttctcccaagaacctgttgattccaaactgaaagggagaggcactttccagcatgatacctttccacctgcacaaggtctccccaccgttctcggattaacattagagtttgggaatgtaacacttctaactgaagtgataaacagaaagaatgtaggcagttgtacatatcctgaagaggtttctcatcagcaaagagcctagactgcaccagttgatggatgaagctgatttgcatgctatgaaccaaagctcgcccatctcctgtttccttatcctcaactagaatttctagcttgagaagacgccatggaacatcagggtcatctcccatcacagtcaaggtggcttcaaattctccttcaacacgaaacttcacccggccatttgcaactgtaagatttgctaactgaggaggaagatctgtggttacaagccgatgtctaagaatctgattcagctgatggagtgtggcttgtttttcaattttggtaattgggtctggaggaataattttatccctaatgcaggttggcagccgtgggtaagatccagtagttagtacatcaatggcatatgggatggcaaaactaggcaggcgtgcatggaccagagcatctctagctaacgaggccaggcgatcagcagtgtccacaaacaggatggcttgctgatctaaaaagcttgaaatcatcgcacatttttccactttgccagcattattagcccatttcactaaagctaataatcgaacgaagagttggcgtgtccggctagcaaactgcactatttctattttcctttccacatcagatttccttggcagtaggtccgtcaacaccataagctccgagtaggcccggtgcagcagaaattcaatgagggtgctcagccggtagcccgggctagccgcagctgcagcggccgccgccacggcggctcccgggggaggaggggctggggctgacgggggtccgccgctgcccccgccgccgcctccgggcgggaccagctggtggttctccagctgcactggggccatggcggcgcaggaccgggcttggcgcaacggcacacgatgcggtcctcgagcctcccgggcgctcggtcaccgcgccgaaacgggagcgggcagagtcgccaccgcctaccgccggcaaccctcggccgattaaaccagcctcgtactagcta

SEQ ID NO: 548065 - DNA, 1352 bp, Homo sapiens
ttggctactagtctacgctggaatacgattgctccacggttggctactagtccacaggttggctaaacctagccccaaacccactccaccttactaccagacaaccttagccaaaccatttacccaaataaagtataggcgatagaaattgaaacctggcgcaatagatatagtaccgcaagggaaagatgaaaaattataaccaagcataatatagcaaggactaacccctataccttctgcataatgaattaactagaaataactttgcaaggagagccaaagctaagacccccgaaaccagacgagctacctaagaacagctaaaagagcacacccgtctatgtagcaaaatagtgggaagatttataggtagaggcgacaaacctaccgagcctggtgatagctggttgtccaagatagaatcttagttcaactttaaatttgcccacagaaccctctaaatccccttgtaaatttaactgttagtccaaagaggaacagctctttggacactaggaaaaaaccttgtagagagagtaaaaaatttaacacccatagtaggcctaaaagcagccaccaattaagaaagcgttcaagctcaacacccactacctaaaaaatcccaaacatataactgaactcctcacacccaattggaccaatctatcaccctatagaagaactaatgttagtataagtaacatgaaaacattctcctccgcataagcctgcgtcagattaaaacactgaactgacaattaacagcccaatatctacaatcaaccaacaagtcattattaccctcactgtcaacccaacacaggcatgctcataaggaaaggttaaaaaaagtaaaaggaactcggcaaatcttaccccgcctgtttaccaaaaacatcacctctagcatcaccagtattagaggcaccgcctgcccagtgacacatgtttaacggccgcggtaccctaaccgtgcaaaggtagcataatcacttgttccttaattagggacctgtatgaatggctccacgagggttcagctgtctcttacttttaaccagtgaaattgacctgcccgtgaagaggcgggcatgacacagcaagacgagaagaccctatggagctttaatttattaatgcaaacagtacctaacaaacccacaggtcctaaactaccaaacctgcattaaaaatttcggttggggcgacctcggagcagaacccaacctccgagcagtacatgctaagacttcaccagtcaaagcgaactcctcttatactactactattcctctaatctcttaccaccagcggcacgatgatatcatggggtcatcagcagcagcact

SEQ ID NO: 548066 - DNA, 3280 bp, Homo sapiens
ttggctactagtctacgctggaatacgattgctccacggttggctactagtccacaggttggctaaacctagccccaaacccactccaccttactaccagacaaccttagccaaaccatttacccaaataaagtataggcgatagaaattgaaacctggcgcaatagatatagtaccgcaagggaaagatgaaaaattataaccaagcataatatagcaaggactaacccctataccttctgcataatgaattaactagaaataactttgcaaggagagccaaagctaagacccccgaaaccagacgagctacctaagaacagctaaaagagcacacccgtctatgtagcaaaatagtgggaagatttataggtagaggcgacaaacctaccgagcctggtgatagctggttgtccaagatagaatcttagttcaactttaaatttgcccacagaaccctctaaatccccttgtaaatttaactgttagtccaaagaggaacagctctttggacactaggaaaaaaccttgtagagagagtaaaaaatttaacacccatagtaggcctaaaagcagccaccaattaagaaagcgttcaagctcaacacccactacctaaaaaatcccaaacatataactgaactcctcacacccaattggaccaatctatcaccctatagaagaactaatgttagtataagtaacatgaaaacattctcctccgcataagcctgcgtcagattaaaacactgaactgacaattaacagcccaatatctacaatcaaccaacaagtcattattaccctcactgtcaacccaacacaggcatgctcataaggaaaggttaaaaaaagtaaaaggaactcggcaaatcttaccccgcctgtttaccaaaaacatcacctctagcatcaccagtattagaggcaccgcctgcccagtgacacatgtttaacggccgcggtaccctaaccgtgcaaaggtagcataatcacttgttccttaattagggacctgtatgaatggctccacgagggttcagctgtctcttacttttaaccagtgaaattgacctgcccgtgaagaggcgggcatgacacagcaagacgagaagaaaggcaaagaaggcttcaactctgattgaaaatgagtggagaatcaaacaaagttgagaacagatatgatataggtacagtgagatacttgaaactagaatttgatagttgatagttatagaagctcaattaaatcatcttgaagtggaattagacaaagcatctacattttaatggagaaccagtattacagtgaccaggtaactcggcatggtattatcacttaaaaatttttcctaaataccatgaagtcggtagaagacctttgcatcagaccatgttctttgaagcttaaaaaagtccctgactgactaggaaagacagcacagtgctccaaaaagaaaccctgcagagatgtattaataccaaaaactccatttgaccctggacaggcccaggattcgggattcttcacaatgaggggaatggaccaggtttcttccaagcaaaacattctatcgttttgttgacaatgaattaaattgaaattgtttagaacaatcccaattttggtggggaaggaaaggaggataagttaagcaagataaagaaagctcacagaaacttcatgcagaggtacagcattaaagttctttgtttcctaattaatgttgtatgcagaagtattctgtaaactaaattttcctgacagaaaagttcccacatcctcaacagatgagaatgattgcattatttgggatccttgatcaatacgaaccacatactgtcccttctcaaagactaagttccttatttttcacccaaatcctatatattgaaagacaaccaaggtgctaaatgttaaccactagtcaagttaggaatgtctgaagaaaatatattaaccttgacataaagaagatgtttttggtcaaatttcagacatgtattattataaattaataactggctccatccaccaggttaaagatgaagggagggcctaagatgtctctagagtttatatacacacaagtgagtgtcactgttttgttttgtttttgacctagttttattaaatattgcttccttggggtgtgtttataacaactcccagaacatttcatgtaaggattcaaagcggtcatattaaaatacagcttcaatataaagtttatcacagttttacagtattcaaaaatgacagacctgccttaaaaaacaaaacaaaaaccaaaaaaggactattacacccaaaaaaaaaaaaaaaaaaaaaaaaaaaaaaaaaaaaaaaaaaaaaaaagagagagagagagagagagagagagaaagaagaagagaagaagagagagggaggaggagagagagaagaggggagggggggggaggaaaaataaaaataatacatatataaatataataaaaacaacacaacaaccatacaaactacactaaaacacacataaaaaatacataacacaatcaataatataaaactgacacaacatcacatacaaacacacactctatcacatatccagacacatcaatactcaagacaaaaatcaataactactccctacacgaaaatatcactcttctcaccatacaatctaatctacttattaccactccacacacgctactaatcaagcacaacaatacactaatcataagaacggagagagcaagcatgcgggcgcaaccaattagcgatacggcggggaaagacggaagaagagtgatccgcgcaggagacagaagccacaagcgagaggagaagacagagagtgaagagagagaagaagaaaaagcgagggaaaggaaaaaagaataaaggcaacgagcagggagcactataggacggagaccaagatcggaagagagcagaagagagacgtcgaaaaataaacggactacagccagcacaagagaagaggagagcgaaagcagaaagcagaggagccaggaggaacaggacaacaaggcgagcaccgacggccggaaacggaccaagacgacgagggagacatcaaagagggcggagcaaggtaacgacacgcgcgacaatagcgagagacaagagagaacggcacagatacacactaacaatcacaatgaagaaaggggcaaaggcaaacaggacaagcgcatagaaagaaacagaagaacaagccgaaaatgaagagcagacaagacgacgcgcgcgatagacaacagaggt

SEQ ID NO: 548067 - DNA, 7157 bp, Homo sapiens
  misc_feature (606)..(606): n is a, c, g, or t
ttggctactagtctacgctggaatacgattgctccacggttggctactagtccacaggttggctaaacctagccccaaacccactccaccttactaccagacaaccttagccaaaccatttacccaaataaagtataggcgatagaaattgaaacctggcgcaatagatatagtaccgcaagggaaagatgaaaaattataaccaagcataatatagcaaggactaacccctataccttctgcataatgaattaactagaaataactttgcaaggagagccaaagctaagacccccgaaaccagacgagctacctaagaacagctaaaagagcacacccgtctatgtagcaaaatagtgggaagatttataggtagaggcgacaaacctaccgagcctggtgatagctggttgtccaagatagaatcttagttcaactttaaatttgcccacagaaccctctaaatccccttgtaaatttaactgttagtccaaagaggaacagctctttggacactaggaaaaaaccttgtagagagagtaaaaaatttaacacccatagtaggcctaaaagcagccaccaattaagaaagcgttcaagctcaanacccactacctaaaaaatcccaaacatataactgaactcctcacacccaattggaccaatctatcaccctatagaagaactaatgttagtataagtaacatgaaaacattctcctccgcataagcctgcgtcagattaaaacactgaactgacaattaacagcccaatatctacaatcaaccaacaagtcattattaccctcactgtcaacccaacacaggcatgctcataaggaaaggttaaaaaaagtaaaaggaactcggcaaatcttaccccgcctgtttaccaaaaacatcacctctagcatcaccagtattagaggcaccgcctgcccagtgacacatgtttaacggccgcggtaccctaaccgtgcaaaggtagcataatcacttgttccttaattagggacctgtatgaatggctccacgagggttcagctgtctcttacttttaaccagtgaaattgacctgcccgtgaagaggcgggcatgacacagcaagacgagaagaaaggcaaagaaggcttcaactctgattgaaaatgagtggagaatcaaacaaagttgagaacagatatgatataggtacagtgagatacttgaaactagaatttgatagttgatagttatagaagctcaattaaatcatcttgaagtggaattagacaaagcatctacattttaatggagaaccagtattacagtgaccaggtaactcggcatggtattatcacttaaaaatttttcctaaataccatgaagtcggtagaagacctttgcatcagaccatgttctttgaagcttaaaaaagtccctgactgactaggaaagacagcacagtgctccaaaaagaaaccctgcagagatgtattaataccaaaaactccatttgaccctggacaggcccaggattcgggattcttcacaatgaggggaatggaccaggtttcttccaagcaaaacattctatcgttttgttgacaatgaattaaattgaaattgtttagaacaatcccaattttggtggggaaggaaaggaggataagttaagcaagataaagaaagctcacagaaacttcatgcagaggtacagcattaaagttctttgtttcctaattaatgttgtatgcagaagtattctgtaaactaaattttcctgacagaaaagttcccacatcctcaacagatgagaatgattgcattatttgggatccttgatcaatacgaaccacatactgtcccttctcaaagactaagttccttatttttcacccaaatcctatatattgaaagacaaccaaggtgctaaatgttaaccactagtcaagttaggaatgtctgaagaaaatatattaaccttgacataaagaagatgtttttggtcaaatttcagacatgtattattataaattaataactggctccatccaccaggttaaagatgaagggagggcctaagatgtctctagagtttatatacacacaagtgagtgtcactgttttgttttgtttttgacctagttttattaaatattgcttccttggggtgtgtttataacaactcccagaacatttcatgtaaggattcaaagcggtcatattaaaatacagcttcaatataaagtttatcacagttttacagtattcaaaaatgacagacctgccttaaaaaacaaaacaaaaaccaaaaaaggactattacacccaaaacataagaaaacaattaaataaacaagtttggcattttcataactttatagtataaaacagaatattaaatttattactggcaaacggacactgatttatttcctttgaaatgtgtcccatttaaacacactatacaagttcattatacaaaagatggatgatcattttgatgaaagaagtgcaccctgaaaatttttgccagtttagaatatttagctcttaaagtttaaaaaaaaagtccttttccttttttaaactgaaggctgaattcagattttttttgttgtctcatctgtcagccttcctggtttaaaaacaatagtgtctatggacgcccaccagggggcagtgtaagattagccattaaatcacgaacagctgcaaatattgtgcattcaccttgtcgtggtggattcatctctgcaaacctcttcagaatgttgctgaccatcatgggagcagcaacagaagagttctgctgtctgggaatgtctgcctgctgggttgtacctgaagccatgtcataaatgattggaactataatactaacaggttcttggggagggaccgatgttttctgagttagttgaagaaaaaatagcattttggatttcagcaccacagcaggcgtcccaggaggtgcaatcggcggcgcgctgggagggatcgtcaggcaaaactgaacattccattttagctgtgttgcttggtcagggaacagctccagcttcataatgtgcacacaatccctgaggatgtgtgtaggagctcctaatagcttggtgaaggctattaacgtattagctttaaatggtggtcctgcaactcttgtttcaaagaatttctccaaaacttgaagttcatcaggtttccactgtcctgcattttcaggtgtcacttttagctgaagcgtttggttggttttgggactaagagctactctgcatttcagtgcatcagtcttaaacatgatcactccgggttcattagaatttatcagctgcagcgtttcttgttgaataattctttgaagatgtcgtctcatgatgactgatccaaggaatctctcaagtggagaacaaaggtaactacctgccaggccgggcacaaggcctggagttggagagggcagcagtaaaatgttcaaggcactgtgagtgaggatggtaggtatggatgccgcccaagagcgctgaggtagtttacgaggtggaggcatgtttgttggcattgtttgagaacttgttccagctcgaggggaatgagaagcatctggaaccggagaatgtagtgaggggttggctggtgacattccaggcatgcgtgctgctggtgaggggccagacacttgaggagatcctggccagttccctgctcgtccacttggtgacaccatagtgtatggggaactagggtcaagagttccatgtggactagcaaaactggcccctggtcctattgagattccatgcgaggatgggggaggagttggaacaaatgacgctggtgatggggctctcaaagccccactgggggagctggcagcatgcagatttcctggagactgtgtgtgcatcattgagggagactgattgactgtgctatgataagatgtagggggtgaagtaagaggataagcacctgatgttcctggctgctttggaaatggctgttgctggggtggtggctggagctgcgatattaaagaatccatcatatctcctcctataggagaagggggattatcgtcctcatttacagaccttcttcgagcatcctgattgctgtcaacaaacatattcaggaacgtctttagtcctggtgcaggatagaaaccttcaactagtttgctgttatcaaaaagactataggcaccatcccgtattgccacaacacctcgactccggcagtatatatcaatgcaatacatgttcctgaaggccagtctgatgtgggtggacgactgtggcagaatggagaagcactggtaggcagtattggttctctgggtcaagcccaacatcggcacagtggggagtttgttgatggcatttaatggagcctgagtatcaaacagtacctgtaataactgaaccacatttggtgttttgttgaacatttcttgaagctgatggagaatggtattgtgacagttactgcaacctgagtttgggccaacagttcccaaagaaatgtggaatttttgatggatcgaattccattggatactaattgagcttcccttggtggttccataacacaagataagttttcggtaattataaacacgaacttctgagaaaatatttagatgagcaggtatgtctggtagagaacgtgcaaattccaacacacactcatataatcgtgcaatgctattccagtcattaagaaacatttcaaccacctttctaccaccaacaggctcagacaacagattttcatatgtcaggtaaacgtgccgggatggtccttgctccctagtagaagtgccattaagtggacaatttgcaaacactaactctgctacccaagtgcggttatttctaccttgtaatcggaaagtgcaatcaagaagagagcggtccagagccttttgggtttcctcagttatacccttacagggaggaatttttaataagcgaattgcatggctgaagccatcaccttccacttgcactccttgatgtggaatctccagattggacaactccaaccgaagtcctacaaatggcatatttgtatcacacatagcgacgaagtgggctaaaactttattgaaggcacacatttctcctgctcgttttgttttcttggattctactggacatggatcatcagacaacttgcgcttggcattggttctggtctgtttcccggtttttgtacgaaaaaccaagtcctgaatgttttccttgaactgctgcagcagcaatgccattgcagggctgtcttcacgatctgcagcattcacagacataaagtagtacttgtacgacagttgtgtgggtttattgggaacctccaacatctccacaacaatgtagtattgtggaaggcgggtaagtttaatgaacagtttattcttagaaaggtttccaataggatgagttgagtaattggaaagctgcaatgtttcactgcttatcgtaggcagatgttttatagactgcttgcaacgctgttgtccaagccaaaacttaagttgctgaatccagggtatgattcgtttcatatcatcattcacagacttctccatgtcatccagagtggcctggtcaagtccataaagcatcaattgaaacattccagaatgtaaatctacaaaaatgtgcagacactctgaattaccacagggctccaagatgggaacaacaagagctgggagtgcagtctctatggaagagttttcattggcattgaagcctctaagaatggccttcagttcttggagcttctgatgagctcttgcatggacactgtcaatcaggagtttttctattgataagtggtcgatcttcatggctctttctactaatttggaatcagaagctggcaaaggaggatcgtgaaaaatctgtaaaggcttggagacatcattctcatcaattttaattgtaactttgtgaacagatgctgttccagtttttctcccaagaacctgttgattccaaactgaaagggagaggcactttccagcatgatacctttccacctgcacaaggtctccccaccgttctcggattaacattagagtttgggaatgtaacacttctaactgaagtgataaacagaaagaatgtaggcagttgtacatatcctgaagaggtttctcatcagcaaagagcctagactgcaccagttgatggatgaagctgatttgcatgctatgaaccaaagctcgcccatctcctgtttccttatcctcaactagaatttctagcttgagaagacgccatggaacatcagggtcatctcccatcacagtcaaggtggcttcaaattctccttcaacacgaaacttcacccggccatttgcaactgtaagatttgctaactgaggaggaagatctgtggttacaagccgatgtctaagaatctgattcagctgatggagtgtggcttgtttttcaattttggtaattgggtctggaggaataattttatccctaatgcaggttggcagccgtgggtaagatccagtagttagtacatcaatggcatatgggatggcaaaactaggcaggcgtgcatggaccagagcatctctagctaacgaggccaggcgatcagcagtgtccacaaacaggatggcttgctgatctaaaaagcttgaaatcatcgcacatttttccactttgccagcattattagcccatttcactaaagctaataatcgaacgaagagttggcgtgtccggctagcaaactgcactatttctattttcctttccacatcagatttccttggcagtaggtccgtcaacaccataagctccgagtaggcccggtgcagcagaaattcaatgagggtgctcagccggtagcccgggctagccgcagctgcagcggccgccgccacggcggctcccgggggaggaggggctggggctgacgggggtccgccgctgcccccgccgccgcctccgggcgggaccagctggtggttctccagctgcactggggccatggcggcgcaggaccgggcttggcgcaacggcacacgatgcggtcctcgagcctcccgggcgctcggtcaccgcgccgaaacgggagcgggcagagtcgccaccgcctaccgccggcaaccctcggccgattaaaccagcctcgtactagcta

SEQ ID NO: 548068 - DNA, 7109 bp, Homo sapiens
ttggctactagtctacgctggaatacgattgctccacggttggctactagtccacaggttggctaaacctagccccaaacccactccaccttactaccagacaaccttagccaaaccatttacccaaataaagtataggcgatagaaattgaaacctggcgcaatagatatagtaccgcaagggaaagatgaaaaattataaccaagcataatatagcaaggactaacccctataccttctgcataatgaattaactagaaataactttgcaaggagagccaaagctaagacccccgaaaccagacgagctacctaagaacagctaaaagagcacacccgtctatgtagcaaaatagtgggaagatttataggtagaggcgacaaacctaccgagcctggtgatagctggttgtccaagatagaatcttagttcaactttaaatttgcccacagaaccctctaaatccccttgtaaatttaactgttagtccaaagaggaacagctctttggacactaggaaaaaaccttgtagagagagtaaaaaatttaacacccatagtaggcctaaaatcccaaacatataactgaactcctcacacccaattggaccaatctatcaccctatagaagaactaatgttagtataagtacatgaaacatctctctcgcataagcctgcgtagatgtcagattaaaacactgaactgacaattaacagcccaatatctacaatcaaccaacaagtcattattaccctcactgtcaacccaacacaggcatgctcataaggaaaggttaaaaaaagtaaaaggaactcggcaaatcttaccccgcctgtttaccaaaaacatcacctctagcatcaccagtattagaggcaccgcctgcccagtgacacatgtttaacggccgcggtaccctaaccgtgcaaaggtagcataatcacttgttccttaattagggacctgtatgaatggctccacgagggttcagctgtctcttacttttaaccagtgaaattgacctgcccgtgaagaggcgggcatgacacagcaagacgagaagaaaggcaaagaaggcttcaactctgattgaaaatgagtggagaatcaaacaaagttgagaacagatatgatataggtacagtgagatacttgaaactagaatttgatagttgatagttatagaagctcaattaaatcatcttgaagtggaattagacaaagcatctacattttaatggagaaccagtattacagtgaccaggtaactcggcatggtattatcacttaaaaatttttcctaaataccatgaagtcggtagaagacctttgcatcagaccatgttctttgaagcttaaaaaagtccctgactgactaggaaagacagcacagtgctccaaaaagaaaccctgcagagatgtattaataccaaaaactccatttgaccctggacaggcccaggattcgggattcttcacaatgaggggaatggaccaggtttcttccaagcaaaacattctatcgttttgttgacaatgaattaaattgaaattgtttagaacaatcccaattttggtggggaaggaaaggaggataagttaagcaagataaagaaagctcacagaaacttcatgcagaggtacagcattaaagttctttgtttcctaattaatgttgtatgcagaagtattctgtaaactaaattttcctgacagaaaagttcccacatcctcaacagatgagaatgattgcattatttgggatccttgatcaatacgaaccacatactgtcccttctcaaagactaagttccttatttttcacccaaatcctatatattgaaagacaaccaaggtgctaaatgttaaccactagtcaagttaggaatgtctgaagaaaatatattaaccttgacataaagaagatgtttttggtcaaatttcagacatgtattattataaattaataactggctccatccaccaggttaaagatgaagggagggcctaagatgtctctagagtttatatacacacaagtgagtgtcactgttttgttttgtttttgacctagttttattaaatattgcttccttggggtgtgtttataacaactcccagaacatttcatgtaaggattcaaagcggtcatattaaaatacagcttcaatataaagtttatcacagttttacagtattcaaaaatgacagacctgccttaaaaaacaaaacaaaaaccaaaaaaggactattacacccaaaacataagaaaacaattaaataaacaagtttggcattttcataactttatagtataaaacagaatattaaatttattactggcaaacggacactgatttatttcctttgaaatgtgtcccatttaaacacactatacaagttcattatacaaaagatggatgatcattttgatgaaagaagtgcaccctgaaaatttttgccagtttagaatatttagctcttaaagtttaaaaaaaaagtccttttccttttttaaactgaaggctgaattcagattttttttgttgtctcatctgtcagccttcctggtttaaaaacaatagtgtctatggacgcccaccagggggcagtgtaagattagccattaaatcacgaacagctgcaaatattgtgcattcaccttgtcgtggtggattcatctctgcaaacctcttcagaatgttgctgaccatcatgggagcagcaacagaagagttctgctgtctgggaatgtctgcctgctgggttgtacctgaagccatgtcataaatgattggaactataatactaacaggttcttggggagggaccgatgttttctgagttagttgaagaaaaaatagcattttggatttcagcaccacagcaggcgtcccaggaggtgcaatcggcggcgcgctgggagggatcgtcaggcaaaactgaacattccattttagctgtgttgcttggtcagggaacagctccagcttcataatgtgcacacaatccctgaggatgtgtgtaggagctcctaatagcttggtgaaggctattaacgtattagctttaaatggtggtcctgcaactcttgtttcaaagaatttctccaaaacttgaagttcatcaggtttccactgtcctgcattttcaggtgtcacttttagctgaagcgtttggttggttttgggactaagagctactctgcatttcagtgcatcagtcttaaacatgatcactccgggttcattagaatttatcagctgcagcgtttcttgttgaataattctttgaagatgtcgtctcatgatgactgatccaaggaatctctcaagtggagaacaaaggtaactacctgccaggccgggcacaaggcctggagttggagagggcagcagtaaaatgttcaaggcactgtgagtgaggatggtaggtatggatgccgcccaagagcgctgaggtagtttacgaggtggaggcatgtttgttggcattgtttgagaacttgttccagctcgaggggaatgagaagcatctggaaccggagaatgtagtgaggggttggctggtgacattccaggcatgcgtgctgctggtgaggggccagacacttgaggagatcctggccagttccctgctcgtccacttggtgacaccatagtgtatggggaactagggtcaagagttccatgtggactagcaaaactggcccctggtcctattgagattccatgcgaggatgggggaggagttggaacaaatgacgctggtgatggggctctcaaagccccactgggggagctggcagcatgcagatttcctggagactgtgtgtgcatcattgagggagactgattgactgtgctatgataagatgtagggggtgaagtaagaggataagcacctgatgttcctggctgctttggaaatggctgttgctggggtggtggctggagctgcgatattaaagaatccatcatatctcctcctataggagaagggggattatcgtcctcatttacagaccttcttcgagcatcctgattgctgtcaacaaacatattcaggaacgtctttagtcctggtgcaggatagaaaccttcaactagtttgctgttatcaaaaagactataggcaccatcccgtattgccacaacacctcgactccggcagtatatatcaatgcaatacatgttcctgaaggccagtctgatgtgggtggacgactgtggcagaatggagaagcactggtaggcagtattggttctctgggtcaagcccaacatcggcacagtggggagtttgttgatggcatttaatggagcctgagtatcaaacagtacctgtaataactgaaccacatttggtgttttgttgaacatttcttgaagctgatggagaatggtattgtgacagttactgcaacctgagtttgggccaacagttcccaaagaaatgtggaatttttgatggatcgaattccattggatactaattgagcttcccttggtggttccataacacaagataagttttcggtaattataaacacgaacttctgagaaaatatttagatgagcaggtatgtctggtagagaacgtgcaaattccaacacacactcatataatcgtgcaatgctattccagtcattaagaaacatttcaaccacctttctaccaccaacaggctcagacaacagattttcatatgtcaggtaaacgtgccgggatggtccttgctccctagtagaagtgccattaagtggacaatttgcaaacactaactctgctacccaagtgcggttatttctaccttgtaatcggaaagtgcaatcaagaagagagcggtccagagccttttgggtttcctcagttatacccttacagggaggaatttttaataagcgaattgcatggctgaagccatcaccttccacttgcactccttgatgtggaatctccagattggacaactccaaccgaagtcctacaaatggcatatttgtatcacacatagcgacgaagtgggctaaaactttattgaaggcacacatttctcctgctcgttttgttttcttggattctactggacatggatcatcagacaacttgcgcttggcattggttctggtctgtttcccggtttttgtacgaaaaaccaagtcctgaatgttttccttgaactgctgcagcagcaatgccattgcagggctgtcttcacgatctgcagcattcacagacataaagtagtacttgtacgacagttgtgtgggtttattgggaacctccaacatctccacaacaatgtagtattgtggaaggcgggtaagtttaatgaacagtttattcttagaaaggtttccaataggatgagttgagtaattggaaagctgcaatgtttcactgcttatcgtaggcagatgttttatagactgcttgcaacgctgttgtccaagccaaaacttaagttgctgaatccagggtatgattcgtttcatatcatcattcacagacttctccatgtcatccagagtggcctggtcaagtccataaagcatcaattgaaacattccagaatgtaaatctacaaaaatgtgcagacactctgaattaccacagggctccaagatgggaacaacaagagctgggagtgcagtctctatggaagagttttcattggcattgaagcctctaagaatggccttcagttcttggagcttctgatgagctcttgcatggacactgtcaatcaggagtttttctattgataagtggtcgatcttcatggctctttctactaatttggaatcagaagctggcaaaggaggatcgtgaaaaatctgtaaaggcttggagacatcattctcatcaattttaattgtaactttgtgaacagatgctgttccagtttttctcccaagaacctgttgattccaaactgaaagggagaggcactttccagcatgatacctttccacctgcacaaggtctccccaccgttctcggattaacattagagtttgggaatgtaacacttctaactgaagtgataaacagaaagaatgtaggcagttgtacatatcctgaagaggtttctcatcagcaaagagcctagactgcaccagttgatggatgaagctgatttgcatgctatgaaccaaagctcgcccatctcctgtttccttatcctcaactagaatttctagcttgagaagacgccatggaacatcagggtcatctcccatcacagtcaaggtggcttcaaattctccttcaacacgaaacttcacccggccatttgcaactgtaagatttgctaactgaggaggaagatctgtggttacaagccgatgtctaagaatctgattcagctgatggagtgtggcttgtttttcaattttggtaattgggtctggaggaataattttatccctaatgcaggttggcagccgtgggtaagatccagtagttagtacatcaatggcatatgggatggcaaaactaggcaggcgtgcatggaccagagcatctctagctaacgaggccaggcgatcagcagtgtccacaaacaggatggcttgctgatctaaaaagcttgaaatcatcgcacatttttccactttgccagcattattagcccatttcactaaagctaataatcgaacgaagagttggcgtgtccggctagcaaactgcactatttctattttcctttccacatcagatttccttggcagtaggtccgtcaacaccataagctccgagtaggcccggtgcagcagaaattcaatgagggtgctcagccggtagcccgggctagccgcagctgcagcggccgccgccacggcggctcccgggggaggaggggctggggctgacgggggtccgccgctgcccccgccgccgcctccgggcgggaccagctggtggttctccagctgcactggggccatggcggcgcaggaccgggcttggcgcaacggcacacgatgcggtcctcgagcctcccgggcgctcggtcaccgcgccgaaacgggagcgggcagagtcgccaccgcctaccgccggcaaccctcggccgattaaaccagcctcgtactagcta

SEQ ID NO: 548069 - DNA, 200 bp, Homo sapiens
aaaaaattccccccggggacctttaacccccgggggggttttccccttttccctttttaaaaaacccccccggggggggggggggggggcggcccccccccccgggggggaaatttggttttcccccggccgggttttgggggatgggggtttttttttttgggggggggttttttttttttaagggcccccccccccca

SEQ ID NO: 548070 - DNA, 405 bp, Homo sapiens
  misc_feature (405)..(405): n is a, c, g, or t
ctcattggaggacatgttactgccggtgaacgggctgatggtactgtacgtggacctgtcctgattcatgggcctcaagcggctcaagcttggccagaacggactgaggcaccttgccgcctggacactggctgagtcactggaggagctggacctgcgagtgaacaggtttagccttgcgccagaccgtgacttgggtggcccggagaccagcctccggcgcctctacgtgctgcgggatccactcaagtcctgcgccaatgactagctggctgaccagctggaccaaggccgtgaagacgtggacgccacccatgacctgaactggcggttcagctgccagtacgaggtgcacctgagtcacgggcgtgccgagcactgacaggaggggatagctggcctgcn

SEQ ID NO: 548071 - DNA, 7106 bp, Homo sapiens
ttggctactagtctacgctggaatacgattgctccacggttggctactagtccacaggttggctaaacctagccccaaacccactccaccttactaccagacaaccttagccaaaccatttacccaaataaagtataggcgatagaaattgaaacctggcgcaatagatatagtaccgcaagggaaagatgaaaaattataaccaagcataatatagcaaggactaacccctataccttctgcataatgaattaactagaaataactttgcaaggagagccaaagctaagacccccgaaaccagacgagctacctaagaacagctaaaagagcacacccgtctatgtagcaaaatagtgggaagatttataggtagaggcgacaaacctaccgagcctggtgatagctggttgtccaagatagaatcttagttcaactttaaatttgcccacagaaccctctaaatccccttgtaaatttaactgttagtccaaagaggaacagctctttggacactaggaaaaaaccttgtagagagagtaaaaaatttaacacccatagtaggcctaaaagcagccaccaattaagaaagcgttcaagctcaacacccactacctaggaaaatccacacatagtactgtataagtaacatgaaacatctctctcgcataagcctgcgtagatgtcagattaaaacactgaactgacaattaacagcccaatatctacaatcaaccaacaagtcattattaccctcactgtcaacccaacacaggcatgctcataaggaaaggttaaaaaaagtaaaaggaactcggcaaatcttaccccgcctgtttaccaaaaacatcacctctagcatcaccagtattagaggcaccgcctgcccagtgacacatgtttaacggccgcggtaccctaaccgtgcaaaggtagcataatcacttgttccttaattagggacctgtatgaatggctccacgagggttcagctgtctcttacttttaaccagtgaaattgacctgcccgtgaagaggcgggcatgacacagcaagacgagaagaaaggcaaagaaggcttcaactctgattgaaaatgagtggagaatcaaacaaagttgagaacagatatgatataggtacagtgagatacttgaaactagaatttgatagttgatagttatagaagctcaattaaatcatcttgaagtggaattagacaaagcatctacattttaatggagaaccagtattacagtgaccaggtaactcggcatggtattatcacttaaaaatttttcctaaataccatgaagtcggtagaagacctttgcatcagaccatgttctttgaagcttaaaaaagtccctgactgactaggaaagacagcacagtgctccaaaaagaaaccctgcagagatgtattaataccaaaaactccatttgaccctggacaggcccaggattcgggattcttcacaatgaggggaatggaccaggtttcttccaagcaaaacattctatcgttttgttgacaatgaattaaattgaaattgtttagaacaatcccaattttggtggggaaggaaaggaggataagttaagcaagataaagaaagctcacagaaacttcatgcagaggtacagcattaaagttctttgtttcctaattaatgttgtatgcagaagtattctgtaaactaaattttcctgacagaaaagttcccacatcctcaacagatgagaatgattgcattatttgggatccttgatcaatacgaaccacatactgtcccttctcaaagactaagttccttatttttcacccaaatcctatatattgaaagacaaccaaggtgctaaatgttaaccactagtcaagttaggaatgtctgaagaaaatatattaaccttgacataaagaagatgtttttggtcaaatttcagacatgtattattataaattaataactggctccatccaccaggttaaagatgaagggagggcctaagatgtctctagagtttatatacacacaagtgagtgtcactgttttgttttgtttttgacctagttttattaaatattgcttccttggggtgtgtttataacaactcccagaacatttcatgtaaggattcaaagcggtcatattaaaatacagcttcaatataaagtttatcacagttttacagtattcaaaaatgacagacctgccttaaaaaacaaaacaaaaaccaaaaaaggactattacacccaaaacataagaaaacaattaaataaacaagtttggcattttcataactttatagtataaaacagaatattaaatttattactggcaaacggacactgatttatttcctttgaaatgtgtcccatttaaacacactatacaagttcattatacaaaagatggatgatcattttgatgaaagaagtgcaccctgaaaatttttgccagtttagaatatttagctcttaaagtttaaaaaaaaagtccttttccttttttaaactgaaggctgaattcagattttttttgttgtctcatctgtcagccttcctggtttaaaaacaatagtgtctatggacgcccaccagggggcagtgtaagattagccattaaatcacgaacagctgcaaatattgtgcattcaccttgtcgtggtggattcatctctgcaaacctcttcagaatgttgctgaccatcatgggagcagcaacagaagagttctgctgtctgggaatgtctgcctgctgggttgtacctgaagccatgtcataaatgattggaactataatactaacaggttcttggggagggaccgatgttttctgagttagttgaagaaaaaatagcattttggatttcagcaccacagcaggcgtcccaggaggtgcaatcggcggcgcgctgggagggatcgtcaggcaaaactgaacattccattttagctgtgttgcttggtcagggaacagctccagcttcataatgtgcacacaatccctgaggatgtgtgtaggagctcctaatagcttggtgaaggctattaacgtattagctttaaatggtggtcctgcaactcttgtttcaaagaatttctccaaaacttgaagttcatcaggtttccactgtcctgcattttcaggtgtcacttttagctgaagcgtttggttggttttgggactaagagctactctgcatttcagtgcatcagtcttaaacatgatcactccgggttcattagaatttatcagctgcagcgtttcttgttgaataattctttgaagatgtcgtctcatgatgactgatccaaggaatctctcaagtggagaacaaaggtaactacctgccaggccgggcacaaggcctggagttggagagggcagcagtaaaatgttcaaggcactgtgagtgaggatggtaggtatggatgccgcccaagagcgctgaggtagtttacgaggtggaggcatgtttgttggcattgtttgagaacttgttccagctcgaggggaatgagaagcatctggaaccggagaatgtagtgaggggttggctggtgacattccaggcatgcgtgctgctggtgaggggccagacacttgaggagatcctggccagttccctgctcgtccacttggtgacaccatagtgtatggggaactagggtcaagagttccatgtggactagcaaaactggcccctggtcctattgagattccatgcgaggatgggggaggagttggaacaaatgacgctggtgatggggctctcaaagccccactgggggagctggcagcatgcagatttcctggagactgtgtgtgcatcattgagggagactgattgactgtgctatgataagatgtagggggtgaagtaagaggataagcacctgatgttcctggctgctttggaaatggctgttgctggggtggtggctggagctgcgatattaaagaatccatcatatctcctcctataggagaagggggattatcgtcctcatttacagaccttcttcgagcatcctgattgctgtcaacaaacatattcaggaacgtctttagtcctggtgcaggatagaaaccttcaactagtttgctgttatcaaaaagactataggcaccatcccgtattgccacaacacctcgactccggcagtatatatcaatgcaatacatgttcctgaaggccagtctgatgtgggtggacgactgtggcagaatggagaagcactggtaggcagtattggttctctgggtcaagcccaacatcggcacagtggggagtttgttgatggcatttaatggagcctgagtatcaaacagtacctgtaataactgaaccacatttggtgttttgttgaacatttcttgaagctgatggagaatggtattgtgacagttactgcaacctgagtttgggccaacagttcccaaagaaatgtggaatttttgatggatcgaattccattggatactaattgagcttcccttggtggttccataacacaagataagttttcggtaattataaacacgaacttctgagaaaatatttagatgagcaggtatgtctggtagagaacgtgcaaattccaacacacactcatataatcgtgcaatgctattccagtcattaagaaacatttcaaccacctttctaccaccaacaggctcagacaacagattttcatatgtcaggtaaacgtgccgggatggtccttgctccctagtagaagtgccattaagtggacaatttgcaaacactaactctgctacccaagtgcggttatttctaccttgtaatcggaaagtgcaatcaagaagagagcggtccagagccttttgggtttcctcagttatacccttacagggaggaatttttaataagcgaattgcatggctgaagccatcaccttccacttgcactccttgatgtggaatctccagattggacaactccaaccgaagtcctacaaatggcatatttgtatcacacatagcgacgaagtgggctaaaactttattgaaggcacacatttctcctgctcgttttgttttcttggattctactggacatggatcatcagacaacttgcgcttggcattggttctggtctgtttcccggtttttgtacgaaaaaccaagtcctgaatgttttccttgaactgctgcagcagcaatgccattgcagggctgtcttcacgatctgcagcattcacagacataaagtagtacttgtacgacagttgtgtgggtttattgggaacctccaacatctccacaacaatgtagtattgtggaaggcgggtaagtttaatgaacagtttattcttagaaaggtttccaataggatgagttgagtaattggaaagctgcaatgtttcactgcttatcgtaggcagatgttttatagactgcttgcaacgctgttgtccaagccaaaacttaagttgctgaatccagggtatgattcgtttcatatcatcattcacagacttctccatgtcatccagagtggcctggtcaagtccataaagcatcaattgaaacattccagaatgtaaatctacaaaaatgtgcagacactctgaattaccacagggctccaagatgggaacaacaagagctgggagtgcagtctctatggaagagttttcattggcattgaagcctctaagaatggccttcagttcttggagcttctgatgagctcttgcatggacactgtcaatcaggagtttttctattgataagtggtcgatcttcatggctctttctactaatttggaatcagaagctggcaaaggaggatcgtgaaaaatctgtaaaggcttggagacatcattctcatcaattttaattgtaactttgtgaacagatgctgttccagtttttctcccaagaacctgttgattccaaactgaaagggagaggcactttccagcatgatacctttccacctgcacaaggtctccccaccgttctcggattaacattagagtttgggaatgtaacacttctaactgaagtgataaacagaaagaatgtaggcagttgtacatatcctgaagaggtttctcatcagcaaagagcctagactgcaccagttgatggatgaagctgatttgcatgctatgaaccaaagctcgcccatctcctgtttccttatcctcaactagaatttctagcttgagaagacgccatggaacatcagggtcatctcccatcacagtcaaggtggcttcaaattctccttcaacacgaaacttcacccggccatttgcaactgtaagatttgctaactgaggaggaagatctgtggttacaagccgatgtctaagaatctgattcagctgatggagtgtggcttgtttttcaattttggtaattgggtctggaggaataattttatccctaatgcaggttggcagccgtgggtaagatccagtagttagtacatcaatggcatatgggatggcaaaactaggcaggcgtgcatggaccagagcatctctagctaacgaggccaggcgatcagcagtgtccacaaacaggatggcttgctgatctaaaaagcttgaaatcatcgcacatttttccactttgccagcattattagcccatttcactaaagctaataatcgaacgaagagttggcgtgtccggctagcaaactgcactatttctattttcctttccacatcagatttccttggcagtaggtccgtcaacaccataagctccgagtaggcccggtgcagcagaaattcaatgagggtgctcagccggtagcccgggctagccgcagctgcagcggccgccgccacggcggctcccgggggaggaggggctggggctgacgggggtccgccgctgcccccgccgccgcctccgggcgggaccagctggtggttctccagctgcactggggccatggcggcgcaggaccgggcttggcgcaacggcacacgatgcggtcctcgagcctcccgggcgctcggtcaccgcgccgaaacgggagcgggcagagtcgccaccgcctaccgccggcaaccctcggccgattaaaccagcctcgtactagcta

SEQ ID NO: 548072 - DNA, 7156 bp, Homo sapiens
ttggctactagtctacgctggaatacgattgctccacggttggctactagtccacaggttggctaaacctagccccaaacccactccaccttactaccagacaaccttagccaaaccatttacccaaataaagtataggcgatagaaattgaaacctggcgcaatagatatagtaccgcaagggaaagatgaaaaattataaccaagcataatatagcaaggactaacccctataccttctgcataatgaattaactagaaataactttgcaaggagagccaaagctaagacccccgaaaccagacgagctacctaagaacagctaaaagagcacacccgtctatgtagcaaaatagtgggaagatttataggtagaggcgacaaacctaccgagcctggtgatagctggttgtccaagatagaatcttagttcaactttaatttgcccacagaaccctctaaatccccttgtaaatttaactgttagtccaaagaggaacagctctttggacactaggaaaaaaccttgtagagagagtaaaaaatttaacacccatagtaggcctaaaagcagccaccaattaagaaagcgttcaagctcaacacccactacctaaaaaatcccaaacatataactgaactcctcacacccaattggaccaatctatcaccctatagaagaactaatgttagtataagtaacatgaaaacattctcctccgcataagcctgcgtcagattaaaacactgaactgacaattaacagcccaatatctacaatcaaccaacaagtcattattaccctcactgtcaacccaacacaggcatgctcataaggaaaggttaaaaaaagtaaaaggaactcggcaaatcttaccccgcctgtttaccaaaaacatcacctctagcatcaccagtattagaggcaccgcctgcccagtgacacatgtttaacggccgcggtaccctaaccgtgcaaaggtagcataatcacttgttccttaattagggacctgtatgaatggctccacgagggttcagctgtctcttacttttaaccagtgaaattgacctgcccgtgaagaggcgggcatgacacagcaagacgagaagaaaggcaaagaaggcttcaactctgattgaaaatgagtggagaatcaaacaaagttgagaacagatatgatataggtacagtgagatacttgaaactagaatttgatagttgatagttatagaagctcaattaaatcatcttgaagtggaattagacaaagcatctacattttaatggagaaccagtattacagtgaccaggtaactcggcatggtattatcacttaaaaatttttcctaaataccatgaagtcggtagaagacctttgcatcagaccatgttctttgaagcttaaaaaagtccctgactgactaggaaagacagcacagtgctccaaaaagaaaccctgcagagatgtattaataccaaaaactccatttgaccctggacaggcccaggattcgggattcttcacaatgaggggaatggaccaggtttcttccaagcaaaacattctatcgttttgttgacaatgaattaaattgaaattgtttagaacaatcccaattttggtggggaaggaaaggaggataagttaagcaagataaagaaagctcacagaaacttcatgcagaggtacagcattaaagttctttgtttcctaattaatgttgtatgcagaagtattctgtaaactaaattttcctgacagaaaagttcccacatcctcaacagatgagaatgattgcattatttgggatccttgatcaatacgaaccacatactgtcccttctcaaagactaagttccttatttttcacccaaatcctatatattgaaagacaaccaaggtgctaaatgttaaccactagtcaagttaggaatgtctgaagaaaatatattaaccttgacataaagaagatgtttttggtcaaatttcagacatgtattattataaattaataactggctccatccaccaggttaaagatgaagggagggcctaagatgtctctagagtttatatacacacaagtgagtgtcactgttttgttttgtttttgacctagttttattaaatattgcttccttggggtgtgtttataacaactcccagaacatttcatgtaaggattcaaagcggtcatattaaaatacagcttcaatataaagtttatcacagttttacagtattcaaaaatgacagacctgccttaaaaaacaaaacaaaaaccaaaaaaggactattacacccaaaacataagaaaacaattaaataaacaagtttggcattttcataactttatagtataaaacagaatattaaatttattactggcaaacggacactgatttatttcctttgaaatgtgtcccatttaaacacactatacaagttcattatacaaaagatggatgatcattttgatgaaagaagtgcaccctgaaaatttttgccagtttagaatatttagctcttaaagtttaaaaaaaaagtccttttccttttttaaactgaaggctgaattcagattttttttgttgtctcatctgtcagccttcctggtttaaaaacaatagtgtctatggacgcccaccagggggcagtgtaagattagccattaaatcacgaacagctgcaaatattgtgcattcaccttgtcgtggtggattcatctctgcaaacctcttcagaatgttgctgaccatcatgggagcagcaacagaagagttctgctgtctgggaatgtctgcctgctgggttgtacctgaagccatgtcataaatgattggaactataatactaacaggttcttggggagggaccgatgttttctgagttagttgaagaaaaaatagcattttggatttcagcaccacagcaggcgtcccaggaggtgcaatcggcggcgcgctgggagggatcgtcaggcaaaactgaacattccattttagctgtgttgcttggtcagggaacagctccagcttcataatgtgcacacaatccctgaggatgtgtgtaggagctcctaatagcttggtgaaggctattaacgtattagctttaaatggtggtcctgcaactcttgtttcaaagaatttctccaaaacttgaagttcatcaggtttccactgtcctgcattttcaggtgtcacttttagctgaagcgtttggttggttttgggactaagagctactctgcatttcagtgcatcagtcttaaacatgatcactccgggttcattagaatttatcagctgcagcgtttcttgttgaataattctttgaagatgtcgtctcatgatgactgatccaaggaatctctcaagtggagaacaaaggtaactacctgccaggccgggcacaaggcctggagttggagagggcagcagtaaaatgttcaaggcactgtgagtgaggatggtaggtatggatgccgcccaagagcgctgaggtagtttacgaggtggaggcatgtttgttggcattgtttgagaacttgttccagctcgaggggaatgagaagcatctggaaccggagaatgtagtgaggggttggctggtgacattccaggcatgcgtgctgctggtgaggggccagacacttgaggagatcctggccagttccctgctcgtccacttggtgacaccatagtgtatggggaactagggtcaagagttccatgtggactagcaaaactggcccctggtcctattgagattccatgcgaggatgggggaggagttggaacaaatgacgctggtgatggggctctcaaagccccactgggggagctggcagcatgcagatttcctggagactgtgtgtgcatcattgagggagactgattgactgtgctatgataagatgtagggggtgaagtaagaggataagcacctgatgttcctggctgctttggaaatggctgttgctggggtggtggctggagctgcgatattaaagaatccatcatatctcctcctataggagaagggggattatcgtcctcatttacagaccttcttcgagcatcctgattgctgtcaacaaacatattcaggaacgtctttagtcctggtgcaggatagaaaccttcaactagtttgctgttatcaaaaagactataggcaccatcccgtattgccacaacacctcgactccggcagtatatatcaatgcaatacatgttcctgaaggccagtctgatgtgggtggacgactgtggcagaatggagaagcactggtaggcagtattggttctctgggtcaagcccaacatcggcacagtggggagtttgttgatggcatttaatggagcctgagtatcaaacagtacctgtaataactgaaccacatttggtgttttgttgaacatttcttgaagctgatggagaatggtattgtgacagttactgcaacctgagtttgggccaacagttcccaaagaaatgtggaatttttgatggatcgaattccattggatactaattgagcttcccttggtggttccataacacaagataagttttcggtaattataaacacgaacttctgagaaaatatttagatgagcaggtatgtctggtagagaacgtgcaaattccaacacacactcatataatcgtgcaatgctattccagtcattaagaaacatttcaaccacctttctaccaccaacaggctcagacaacagattttcatatgtcaggtaaacgtgccgggatggtccttgctccctagtagaagtgccattaagtggacaatttgcaaacactaactctgctacccaagtgcggttatttctaccttgtaatcggaaagtgcaatcaagaagagagcggtccagagccttttgggtttcctcagttatacccttacagggaggaatttttaataagcgaattgcatggctgaagccatcaccttccacttgcactccttgatgtggaatctccagattggacaactccaaccgaagtcctacaaatggcatatttgtatcacacatagcgacgaagtgggctaaaactttattgaaggcacacatttctcctgctcgttttgttttcttggattctactggacatggatcatcagacaacttgcgcttggcattggttctggtctgtttcccggtttttgtacgaaaaaccaagtcctgaatgttttccttgaactgctgcagcagcaatgccattgcagggctgtcttcacgatctgcagcattcacagacataaagtagtacttgtacgacagttgtgtgggtttattgggaacctccaacatctccacaacaatgtagtattgtggaaggcgggtaagtttaatgaacagtttattcttagaaaggtttccaataggatgagttgagtaattggaaagctgcaatgtttcactgcttatcgtaggcagatgttttatagactgcttgcaacgctgttgtccaagccaaaacttaagttgctgaatccagggtatgattcgtttcatatcatcattcacagacttctccatgtcatccagagtggcctggtcaagtccataaagcatcaattgaaacattccagaatgtaaatctacaaaaatgtgcagacactctgaattaccacagggctccaagatgggaacaacaagagctgggagtgcagtctctatggaagagttttcattggcattgaagcctctaagaatggccttcagttcttggagcttctgatgagctcttgcatggacactgtcaatcaggagtttttctattgataagtggtcgatcttcatggctctttctactaatttggaatcagaagctggcaaaggaggatcgtgaaaaatctgtaaaggcttggagacatcattctcatcaattttaattgtaactttgtgaacagatgctgttccagtttttctcccaagaacctgttgattccaaactgaaagggagaggcactttccagcatgatacctttccacctgcacaaggtctccccaccgttctcggattaacattagagtttgggaatgtaacacttctaactgaagtgataaacagaaagaatgtaggcagttgtacatatcctgaagaggtttctcatcagcaaagagcctagactgcaccagttgatggatgaagctgatttgcatgctatgaaccaaagctcgcccatctcctgtttccttatcctcaactagaatttctagcttgagaagacgccatggaacatcagggtcatctcccatcacagtcaaggtggcttcaaattctccttcaacacgaaacttcacccggccatttgcaactgtaagatttgctaactgaggaggaagatctgtggttacaagccgatgtctaagaatctgattcagctgatggagtgtggcttgtttttcaattttggtaattgggtctggaggaataattttatccctaatgcaggttggcagccgtgggtaagatccagtagttagtacatcaatggcatatgggatggcaaaactaggcaggcgtgcatggaccagagcatctctagctaacgaggccaggcgatcagcagtgtccacaaacaggatggcttgctgatctaaaaagcttgaaatcatcgcacatttttccactttgccagcattattagcccatttcactaaagctaataatcgaacgaagagttggcgtgtccggctagcaaactgcactatttctattttcctttccacatcagatttccttggcagtaggtccgtcaacaccataagctccgagtaggcccggtgcagcagaaattcaatgagggtgctcagccggtagcccgggctagccgcagctgcagcggccgccgccacggcggctcccgggggaggaggggctggggctgacgggggtccgccgctgcccccgccgccgcctccgggcgggaccagctggtggttctccagctgcactggggccatggcggcgcaggaccgggcttggcgcaacggcacacgatgcggtcctcgagcctcccgggcgctcggtcaccgcgccgaaacgggagcgggcagagtcgccaccgcctaccgccggcaaccctcggccgattaaaccagcctcgtactagcta

SEQ ID NO: 548073 - DNA, 119 bp, Homo sapiens
tctagaggactgtatacactacacactgcaaatctgtctggattagctcttcttccttagcattcggtctttcttcatggtcccatgaatgctttcttctcctccatggtctggaagcg

SEQ ID NO: 548074 - DNA, 1761 bp, Homo sapiens
  misc_feature (841)..(841): n is a, c, g, or t
ttggctactagtctacgctggaatacgattgctccacggttggctactagtccacaggttggctaaacctagccccaaacccactccaccttactaccagacaaccttagccaaaccatttacccaaataaagtataggcgatagaaattgaaacctggcgcaatagatatagtaccgcaagggaaagatgaaaaattataaccaagcataatatagcaaggactaacccctataccttctgcataatgaattaactagaaataactttgcaaggagagccaaagctaagacccccgaaaccagacgagctacctaagaacagctaaaagagcacacccgtctatgtagcaaaatagtgggaagatttataggtagaggcgacaaacctaccgagcctggtgatagctggttgtccaagatagaatcttagttcaactttaaatttgcccacagaaccctctaaatccccttgtaaatttaactgttagtccaaagaggaacagctctttggacactaggaaaaaaccttgtagagagagtaaaaaatttaacacccatagtaggcctaaaagcagccaccaattaagaaagcgttcaagctcaacacccactacctaaaaaatcccaaacatataactgaactcctcacacccaattggaccaatctatcaccctatagaagaactaatgttagtataagtaacatgaaaacattctcctccgcataagcctgcgtcagattaaaacactgaactgacaattaacagcccaatatctacaatcaaccaacaagtcattattaccctcactgtcaacctttccttatgagcatgcctgtgntgggttgacagtgagggtacaacacaggcatgctcataaggaaaggttaaaaaaagtaaaaggaactcggcaaatcttaccccgcctgtttaccaaaaacatcacctctagcatcaccagtattagaggcaccgcctgcccagtgacacatgtttaacggccgcggtaccctaaccgtgcaaaggtagcataatcacttgttccttaattagggacctgtatgaatggctccacgagggttcagctgtctcttacttttaaccagtgaaattgacctgcccgtgaagaggcgggcatgacacagcaagacgagaagaccctatggagctttaatttattaatgcaaacagtacctaacaaacccacaggtcctaaactaccaaacctgcattaaaaatttcggttggggcgacctcggagcagaacccaacctccgagcagtacatgctaagacttcaccagtcaaagcgaactactatactcaattgatccaataacttgaccaacggaacaagttaccctagggataacagcgcaatcctattctagagtccatatcaacaatagggtttacgacctcgatgttggatcaggacatcccgatggtgcagccgctattaaaggttcgtttgttcaacgattaaagtcctacgtgatctgagttcagaccggagtaatccaggtcggtttctatctacttcaaattcctccctgtacgaaaggacaagagaaataaggcctacttcacaaagcgccttcccccgtaaatgatatcatctcaacttagtattatacccacacccaccccaagaacagggtttgtttaaaaaaaaaaaaaaaaaaaaaagtgcgagagcatcataagacgaggggagagaaaaggtacgaaagaggcacaggccacacggggtcactgccga

SEQ ID NO: 548075 - DNA, 7106 bp, Homo sapiens
ttggctactagtctacgctggaatacgattgctccacggttggctactagtccacaggttggctaaacctagccccaaacccactccaccttactaccagacaaccttagccaaaccatttacccaaataaagtataggcgatagaaattgaaacctggcgcaatagatatagtaccgcaagggaaagatgaaaaattataaccaagcataatatagcaaggactaacccctataccttctgcataatgaattaactagaaataactttgcaaggagagccaaagctaagacccccgaaaccagacgagctacctaagaacaggttaaagagcacacccgtctatgtagcagctgttgtgtgtccaagatagaatcttagttcaactttaaatttgcccacagaaccctctaaatccccttgtaaatttaactgttagtccaaagaggaacagctctttggacactaggaaaaaaccttgtagagagagtaaaaaatttaacacccatagtaggcctaaaagcagccaccaattaagaaagcgttcaagctcaacacccactacctaaaaaatcccaaacatataactgaactcctcacacccaattggaccaatctatcaccctatagaagaactaatgttagtataagtaacatgaaaacattctcctccgcataagcctgcgtcagattaaaacactgaactgacaattaacagcccaatatctacaatcaaccaacaagtcattattaccctcactgtcaacccaacacaggcatgctcataaggaaaggttaaaaaaagtaaaaggaactcggcaaatcttaccccgcctgtttaccaaaaacatcacctctagcatcaccagtattagaggcaccgcctgcccagtgacacatgtttaacggccgcggtaccctaaccgtgcaaaggtagcataatcacttgttccttaattagggacctgtatgaatggctccacgagggttcagctgtctcttacttttaaccagtgaaattgacctgcccgtgaagaggcgggcatgacacagcaagacgagaagaaaggcaaagaaggcttcaactctgattgaaaatgagtggagaatcaaacaaagttgagaacagatatgatataggtacagtgagatacttgaaactagaatttgatagttgatagttatagaagctcaattaaatcatcttgaagtggaattagacaaagcatctacattttaatggagaaccagtattacagtgaccaggtaactcggcatggtattatcacttaaaaatttttcctaaataccatgaagtcggtagaagacctttgcatcagaccatgttctttgaagcttaaaaaagtccctgactgactaggaaagacagcacagtgctccaaaaagaaaccctgcagagatgtattaataccaaaaactccatttgaccctggacaggcccaggattcgggattcttcacaatgaggggaatggaccaggtttcttccaagcaaaacattctatcgttttgttgacaatgaattaaattgaaattgtttagaacaatcccaattttggtggggaaggaaaggaggataagttaagcaagataaagaaagctcacagaaacttcatgcagaggtacagcattaaagttctttgtttcctaattaatgttgtatgcagaagtattctgtaaactaaattttcctgacagaaaagttcccacatcctcaacagatgagaatgattgcattatttgggatccttgatcaatacgaaccacatactgtcccttctcaaagactaagttccttatttttcacccaaatcctatatattgaaagacaaccaaggtgctaaatgttaaccactagtcaagttaggaatgtctgaagaaaatatattaaccttgacataaagaagatgtttttggtcaaatttcagacatgtattattataaattaataactggctccatccaccaggttaaagatgaagggagggcctaagatgtctctagagtttatatacacacaagtgagtgtcactgttttgttttgtttttgacctagttttattaaatattgcttccttggggtgtgtttataacaactcccagaacatttcatgtaaggattcaaagcggtcatattaaaatacagcttcaatataaagtttatcacagttttacagtattcaaaaatgacagacctgccttaaaaaacaaaacaaaaaccaaaaaaggactattacacccaaaacataagaaaacaattaaataaacaagtttggcattttcataactttatagtataaaacagaatattaaatttattactggcaaacggacactgatttatttcctttgaaatgtgtcccatttaaacacactatacaagttcattatacaaaagatggatgatcattttgatgaaagaagtgcaccctgaaaatttttgccagtttagaatatttagctcttaaagtttaaaaaaaaagtccttttccttttttaaactgaaggctgaattcagattttttttgttgtctcatctgtcagccttcctggtttaaaaacaatagtgtctatggacgcccaccagggggcagtgtaagattagccattaaatcacgaacagctgcaaatattgtgcattcaccttgtcgtggtggattcatctctgcaaacctcttcagaatgttgctgaccatcatgggagcagcaacagaagagttctgctgtctgggaatgtctgcctgctgggttgtacctgaagccatgtcataaatgattggaactataatactaacaggttcttggggagggaccgatgttttctgagttagttgaagaaaaaatagcattttggatttcagcaccacagcaggcgtcccaggaggtgcaatcggcggcgcgctgggagggatcgtcaggcaaaactgaacattccattttagctgtgttgcttggtcagggaacagctccagcttcataatgtgcacacaatccctgaggatgtgtgtaggagctcctaatagcttggtgaaggctattaacgtattagctttaaatggtggtcctgcaactcttgtttcaaagaatttctccaaaacttgaagttcatcaggtttccactgtcctgcattttcaggtgtcacttttagctgaagcgtttggttggttttgggactaagagctactctgcatttcagtgcatcagtcttaaacatgatcactccgggttcattagaatttatcagctgcagcgtttcttgttgaataattctttgaagatgtcgtctcatgatgactgatccaaggaatctctcaagtggagaacaaaggtaactacctgccaggccgggcacaaggcctggagttggagagggcagcagtaaaatgttcaaggcactgtgagtgaggatggtaggtatggatgccgcccaagagcgctgaggtagtttacgaggtggaggcatgtttgttggcattgtttgagaacttgttccagctcgaggggaatgagaagcatctggaaccggagaatgtagtgaggggttggctggtgacattccaggcatgcgtgctgctggtgaggggccagacacttgaggagatcctggccagttccctgctcgtccacttggtgacaccatagtgtatggggaactagggtcaagagttccatgtggactagcaaaactggcccctggtcctattgagattccatgcgaggatgggggaggagttggaacaaatgacgctggtgatggggctctcaaagccccactgggggagctggcagcatgcagatttcctggagactgtgtgtgcatcattgagggagactgattgactgtgctatgataagatgtagggggtgaagtaagaggataagcacctgatgttcctggctgctttggaaatggctgttgctggggtggtggctggagctgcgatattaaagaatccatcatatctcctcctataggagaagggggattatcgtcctcatttacagaccttcttcgagcatcctgattgctgtcaacaaacatattcaggaacgtctttagtcctggtgcaggatagaaaccttcaactagtttgctgttatcaaaaagactataggcaccatcccgtattgccacaacacctcgactccggcagtatatatcaatgcaatacatgttcctgaaggccagtctgatgtgggtggacgactgtggcagaatggagaagcactggtaggcagtattggttctctgggtcaagcccaacatcggcacagtggggagtttgttgatggcatttaatggagcctgagtatcaaacagtacctgtaataactgaaccacatttggtgttttgttgaacatttcttgaagctgatggagaatggtattgtgacagttactgcaacctgagtttgggccaacagttcccaaagaaatgtggaatttttgatggatcgaattccattggatactaattgagcttcccttggtggttccataacacaagataagttttcggtaattataaacacgaacttctgagaaaatatttagatgagcaggtatgtctggtagagaacgtgcaaattccaacacacactcatataatcgtgcaatgctattccagtcattaagaaacatttcaaccacctttctaccaccaacaggctcagacaacagattttcatatgtcaggtaaacgtgccgggatggtccttgctccctagtagaagtgccattaagtggacaatttgcaaacactaactctgctacccaagtgcggttatttctaccttgtaatcggaaagtgcaatcaagaagagagcggtccagagccttttgggtttcctcagttatacccttacagggaggaatttttaataagcgaattgcatggctgaagccatcaccttccacttgcactccttgatgtggaatctccagattggacaactccaaccgaagtcctacaaatggcatatttgtatcacacatagcgacgaagtgggctaaaactttattgaaggcacacatttctcctgctcgttttgttttcttggattctactggacatggatcatcagacaacttgcgcttggcattggttctggtctgtttcccggtttttgtacgaaaaaccaagtcctgaatgttttccttgaactgctgcagcagcaatgccattgcagggctgtcttcacgatctgcagcattcacagacataaagtagtacttgtacgacagttgtgtgggtttattgggaacctccaacatctccacaacaatgtagtattgtggaaggcgggtaagtttaatgaacagtttattcttagaaaggtttccaataggatgagttgagtaattggaaagctgcaatgtttcactgcttatcgtaggcagatgttttatagactgcttgcaacgctgttgtccaagccaaaacttaagttgctgaatccagggtatgattcgtttcatatcatcattcacagacttctccatgtcatccagagtggcctggtcaagtccataaagcatcaattgaaacattccagaatgtaaatctacaaaaatgtgcagacactctgaattaccacagggctccaagatgggaacaacaagagctgggagtgcagtctctatggaagagttttcattggcattgaagcctctaagaatggccttcagttcttggagcttctgatgagctcttgcatggacactgtcaatcaggagtttttctattgataagtggtcgatcttcatggctctttctactaatttggaatcagaagctggcaaaggaggatcgtgaaaaatctgtaaaggcttggagacatcattctcatcaattttaattgtaactttgtgaacagatgctgttccagtttttctcccaagaacctgttgattccaaactgaaagggagaggcactttccagcatgatacctttccacctgcacaaggtctccccaccgttctcggattaacattagagtttgggaatgtaacacttctaactgaagtgataaacagaaagaatgtaggcagttgtacatatcctgaagaggtttctcatcagcaaagagcctagactgcaccagttgatggatgaagctgatttgcatgctatgaaccaaagctcgcccatctcctgtttccttatcctcaactagaatttctagcttgagaagacgccatggaacatcagggtcatctcccatcacagtcaaggtggcttcaaattctccttcaacacgaaacttcacccggccatttgcaactgtaagatttgctaactgaggaggaagatctgtggttacaagccgatgtctaagaatctgattcagctgatggagtgtggcttgtttttcaattttggtaattgggtctggaggaataattttatccctaatgcaggttggcagccgtgggtaagatccagtagttagtacatcaatggcatatgggatggcaaaactaggcaggcgtgcatggaccagagcatctctagctaacgaggccaggcgatcagcagtgtccacaaacaggatggcttgctgatctaaaaagcttgaaatcatcgcacatttttccactttgccagcattattagcccatttcactaaagctaataatcgaacgaagagttggcgtgtccggctagcaaactgcactatttctattttcctttccacatcagatttccttggcagtaggtccgtcaacaccataagctccgagtaggcccggtgcagcagaaattcaatgagggtgctcagccggtagcccgggctagccgcagctgcagcggccgccgccacggcggctcccgggggaggaggggctggggctgacgggggtccgccgctgcccccgccgccgcctccgggcgggaccagctggtggttctccagctgcactggggccatggcggcgcaggaccgggcttggcgcaacggcacacgatgcggtcctcgagcctcccgggcgctcggtcaccgcgccgaaacgggagcgggcagagtcgccaccgcctaccgccggcaaccctcggccgattaaaccagcctcgtactagcta

SEQ ID NO: 548076 - DNA, 141 bp, Homo sapiens
agatcggattcatatcaaaaatgcgtgtaatcagctgtcaaagtaacaagaaaaaagaaaagaaaaaagccaaagactgtggaagttgaactgcaacaacacacaaatcaaaacagcctggccagggatactccagaattc

SEQ ID NO: 548077 - DNA, 7140 bp, Homo sapiens
  misc_feature (552)..(554): n is a, c, g, or t
  misc_feature (570)..(570): n is a, c, g, or t
ttggctactagtctacgctggaatacgattgctccacggttggctactagtccacaggttggctaaacctagccccaaacccactccaccttactaccagacaaccttagccaaaccatttacccaaataaagtataggcgatagaaattgaaacctggcgcaatagatatagtaccgcaagggaaagatgaaaaattataaccaagcataatatagcaaggactaacccctataccttctgcataatgaattaactagaaataactttgcaaggagagccaaagctaagacccccgaaaccagacgagctacctaagaacagtctatgtagcaaaatagtgggaagatttataggtagaggcgacaaacctaccgagcctggtgatagctggttgtccaagatagaatcttagttcaactttaaatttgcccacagaaccctctaaatccccttgtaaatttaactgttagtccaaagaggaacagctctttggacactaggaaaaaaccttgtagagagagtaaaaaatttaacacccatagtaggcctnnnagcagccaccaattangaaagcgttcaagctcaacacccactacctaaaaaatcccaaacatataactgaactcctcacacccaattggaccaatctatcaccctatagaagaactaatgttagtataagtaacatgaaaacattctcctccgcataagcctgcgtcagattaaaacactgaactgacaattaacagcccaatatctacaatcaaccaacaagtcattattaccctcactgtcaacccaacacaggcatgctcataaggaaaggttaaaaaaagtaaaaggaactcggcaaatcttaccccgcctgtttaccaaaaacatcacctctagcatcaccagtattagaggcaccgcctgcccagtgacacatgtttaacggccgcggtaccctaaccgtgcaaaggtagcataatcacttgttccttaattagggacctgtatgaatggctccacgagggttcagctgtctcttacttttaaccagtgaaattgacctgcccgtgaagaggcgggcatgacacagcaagacgagaagaaaggcaaagaaggcttcaactctgattgaaaatgagtggagaatcaaacaaagttgagaacagatatgatataggtacagtgagatacttgaaactagaatttgatagttgatagttatagaagctcaattaaatcatcttgaagtggaattagacaaagcatctacattttaatggagaaccagtattacagtgaccaggtaactcggcatggtattatcacttaaaaatttttcctaaataccatgaagtcggtagaagacctttgcatcagaccatgttctttgaagcttaaaaaagtccctgactgactaggaaagacagcacagtgctccaaaaagaaaccctgcagagatgtattaataccaaaaactccatttgaccctggacaggcccaggattcgggattcttcacaatgaggggaatggaccaggtttcttccaagcaaaacattctatcgttttgttgacaatgaattaaattgaaattgtttagaacaatcccaattttggtggggaaggaaaggaggataagttaagcaagataaagaaagctcacagaaacttcatgcagaggtacagcattaaagttctttgtttcctaattaatgttgtatgcagaagtattctgtaaactaaattttcctgacagaaaagttcccacatcctcaacagatgagaatgattgcattatttgggatccttgatcaatacgaaccacatactgtcccttctcaaagactaagttccttatttttcacccaaatcctatatattgaaagacaaccaaggtgctaaatgttaaccactagtcaagttaggaatgtctgaagaaaatatattaaccttgacataaagaagatgtttttggtcaaatttcagacatgtattattataaattaataactggctccatccaccaggttaaagatgaagggagggcctaagatgtctctagagtttatatacacacaagtgagtgtcactgttttgttttgtttttgacctagttttattaaatattgcttccttggggtgtgtttataacaactcccagaacatttcatgtaaggattcaaagcggtcatattaaaatacagcttcaatataaagtttatcacagttttacagtattcaaaaatgacagacctgccttaaaaaacaaaacaaaaaccaaaaaaggactattacacccaaaacataagaaaacaattaaataaacaagtttggcattttcataactttatagtataaaacagaatattaaatttattactggcaaacggacactgatttatttcctttgaaatgtgtcccatttaaacacactatacaagttcattatacaaaagatggatgatcattttgatgaaagaagtgcaccctgaaaatttttgccagtttagaatatttagctcttaaagtttaaaaaaaaagtccttttccttttttaaactgaaggctgaattcagattttttttgttgtctcatctgtcagccttcctggtttaaaaacaatagtgtctatggacgcccaccagggggcagtgtaagattagccattaaatcacgaacagctgcaaatattgtgcattcaccttgtcgtggtggattcatctctgcaaacctcttcagaatgttgctgaccatcatgggagcagcaacagaagagttctgctgtctgggaatgtctgcctgctgggttgtacctgaagccatgtcataaatgattggaactataatactaacaggttcttggggagggaccgatgttttctgagttagttgaagaaaaaatagcattttggatttcagcaccacagcaggcgtcccaggaggtgcaatcggcggcgcgctgggagggatcgtcaggcaaaactgaacattccattttagctgtgttgcttggtcagggaacagctccagcttcataatgtgcacacaatccctgaggatgtgtgtaggagctcctaatagcttggtgaaggctattaacgtattagctttaaatggtggtcctgcaactcttgtttcaaagaatttctccaaaacttgaagttcatcaggtttccactgtcctgcattttcaggtgtcacttttagctgaagcgtttggttggttttgggactaagagctactctgcatttcagtgcatcagtcttaaacatgatcactccgggttcattagaatttatcagctgcagcgtttcttgttgaataattctttgaagatgtcgtctcatgatgactgatccaaggaatctctcaagtggagaacaaaggtaactacctgccaggccgggcacaaggcctggagttggagagggcagcagtaaaatgttcaaggcactgtgagtgaggatggtaggtatggatgccgcccaagagcgctgaggtagtttacgaggtggaggcatgtttgttggcattgtttgagaacttgttccagctcgaggggaatgagaagcatctggaaccggagaatgtagtgaggggttggctggtgacattccaggcatgcgtgctgctggtgaggggccagacacttgaggagatcctggccagttccctgctcgtccacttggtgacaccatagtgtatggggaactagggtcaagagttccatgtggactagcaaaactggcccctggtcctattgagattccatgcgaggatgggggaggagttggaacaaatgacgctggtgatggggctctcaaagccccactgggggagctggcagcatgcagatttcctggagactgtgtgtgcatcattgagggagactgattgactgtgctatgataagatgtagggggtgaagtaagaggataagcacctgatgttcctggctgctttggaaatggctgttgctggggtggtggctggagctgcgatattaaagaatccatcatatctcctcctataggagaagggggattatcgtcctcatttacagaccttcttcgagcatcctgattgctgtcaacaaacatattcaggaacgtctttagtcctggtgcaggatagaaaccttcaactagtttgctgttatcaaaaagactataggcaccatcccgtattgccacaacacctcgactccggcagtatatatcaatgcaatacatgttcctgaaggccagtctgatgtgggtggacgactgtggcagaatggagaagcactggtaggcagtattggttctctgggtcaagcccaacatcggcacagtggggagtttgttgatggcatttaatggagcctgagtatcaaacagtacctgtaataactgaaccacatttggtgttttgttgaacatttcttgaagctgatggagaatggtattgtgacagttactgcaacctgagtttgggccaacagttcccaaagaaatgtggaatttttgatggatcgaattccattggatactaattgagcttcccttggtggttccataacacaagataagttttcggtaattataaacacgaacttctgagaaaatatttagatgagcaggtatgtctggtagagaacgtgcaaattccaacacacactcatataatcgtgcaatgctattccagtcattaagaaacatttcaaccacctttctaccaccaacaggctcagacaacagattttcatatgtcaggtaaacgtgccgggatggtccttgctccctagtagaagtgccattaagtggacaatttgcaaacactaactctgctacccaagtgcggttatttctaccttgtaatcggaaagtgcaatcaagaagagagcggtccagagccttttgggtttcctcagttatacccttacagggaggaatttttaataagcgaattgcatggctgaagccatcaccttccacttgcactccttgatgtggaatctccagattggacaactccaaccgaagtcctacaaatggcatatttgtatcacacatagcgacgaagtgggctaaaactttattgaaggcacacatttctcctgctcgttttgttttcttggattctactggacatggatcatcagacaacttgcgcttggcattggttctggtctgtttcccggtttttgtacgaaaaaccaagtcctgaatgttttccttgaactgctgcagcagcaatgccattgcagggctgtcttcacgatctgcagcattcacagacataaagtagtacttgtacgacagttgtgtgggtttattgggaacctccaacatctccacaacaatgtagtattgtggaaggcgggtaagtttaatgaacagtttattcttagaaaggtttccaataggatgagttgagtaattggaaagctgcaatgtttcactgcttatcgtaggcagatgttttatagactgcttgcaacgctgttgtccaagccaaaacttaagttgctgaatccagggtatgattcgtttcatatcatcattcacagacttctccatgtcatccagagtggcctggtcaagtccataaagcatcaattgaaacattccagaatgtaaatctacaaaaatgtgcagacactctgaattaccacagggctccaagatgggaacaacaagagctgggagtgcagtctctatggaagagttttcattggcattgaagcctctaagaatggccttcagttcttggagcttctgatgagctcttgcatggacactgtcaatcaggagtttttctattgataagtggtcgatcttcatggctctttctactaatttggaatcagaagctggcaaaggaggatcgtgaaaaatctgtaaaggcttggagacatcattctcatcaattttaattgtaactttgtgaacagatgctgttccagtttttctcccaagaacctgttgattccaaactgaaagggagaggcactttccagcatgatacctttccacctgcacaaggtctccccaccgttctcggattaacattagagtttgggaatgtaacacttctaactgaagtgataaacagaaagaatgtaggcagttgtacatatcctgaagaggtttctcatcagcaaagagcctagactgcaccagttgatggatgaagctgatttgcatgctatgaaccaaagctcgcccatctcctgtttccttatcctcaactagaatttctagcttgagaagacgccatggaacatcagggtcatctcccatcacagtcaaggtggcttcaaattctccttcaacacgaaacttcacccggccatttgcaactgtaagatttgctaactgaggaggaagatctgtggttacaagccgatgtctaagaatctgattcagctgatggagtgtggcttgtttttcaattttggtaattgggtctggaggaataattttatccctaatgcaggttggcagccgtgggtaagatccagtagttagtacatcaatggcatatgggatggcaaaactaggcaggcgtgcatggaccagagcatctctagctaacgaggccaggcgatcagcagtgtccacaaacaggatggcttgctgatctaaaaagcttgaaatcatcgcacatttttccactttgccagcattattagcccatttcactaaagctaataatcgaacgaagagttggcgtgtccggctagcaaactgcactatttctattttcctttccacatcagatttccttggcagtaggtccgtcaacaccataagctccgagtaggcccggtgcagcagaaattcaatgagggtgctcagccggtagcccgggctagccgcagctgcagcggccgccgccacggcggctcccgggggaggaggggctggggctgacgggggtccgccgctgcccccgccgccgcctccgggcgggaccagctggtggttctccagctgcactggggccatggcggcgcaggaccgggcttggcgcaacggcacacgatgcggtcctcgagcctcccgggcgctcggtcaccgcgccgaaacgggagcgggcagagtcgccaccgcctaccgccggcaaccctcggccgattaaaccagcctcgtactagcta

SEQ ID NO: 548078 - DNA, 142 bp, Homo sapiens
aagaccagaaaaaagtgatccagataataaagagacagatgagtatcttacgatgtatatctttaataacaaagttaaaaggtcagagtaaagactaccaaatattcgtttagttcactcagcgaaagcatgtatttatctt

SEQ ID NO: 548079 - DNA, 341 bp, Homo sapiens
gactgggaaacagagtgagactccatctcccacgctggagtacagtggggcacgatctcagctcactgcaacctccatctcccaggcccaagtgattctcctgccccagcctcccaagtagctgggactacaggcgcccaccaccaccatacccagcaaatttttgtattttagtagagacagcgtttcatcatgttggtcaggctggtctcgaactcctaacctcaggtagtcgacccacctcggcctcccacagtgctgagattacaggcatgagccaccacgccctgctaggagttcacgctttagttggggaaaatatacaataagcaaggtcgacg

SEQ ID NO: 548080 - DNA, 749 bp, Homo sapiens
ctattctccaaccagtcccgactatagtcgcacatgacccgagctattcgccaacgtcacccagctactcaccgagctctcccagctactcacccacctctcccagctactcgcccggctctctgccgagctactcgtcccacgctcgtcccgtgctactcgaccgcacttccccgtaggatatctcgccgaattgccctctagtctgactacggcttactggtctcctcaagctgctcggccgaccatctcctcagttctactacgcgaaaatcagccgagctaattcgtccgcagttgtctcccaagtgtactcaacgctaacactctcaaaagttgattcacctcgacacgtacccgcccagctgtctcaacagcactttgccccgagaggttactcgatcctcgccgagcctctgatacaattctcgaagcagtcccagtgatgcccacagcatcacgcagtctccagcccgaggtccggcacagctatctacaaacatatctagtcaccaaaatacagcaaccttacgcagacggctggattcacagccctcaaagctcgtaccataggcttagtactcccaatgattcgaggcgcagtctaatgtccccgaggtccaccgaagttaactaacctgtaggaagcaccaaagataccatcaccccgaggtctctcgaaaacttgtatgcccaccgtgtgccccgatcgttcagggcgagtatgccaccgtgtaggtgcctgacct

SEQ ID NO: 548081 - DNA, 256 bp, Homo sapiens
gacgcgcagcgaaaaagggttctcttttcaagtcattttcttcagatggcatttaaatcctttagaaacacgcaatttatacggagattcatggtgtcccttaatatgccacattccgtgaagtcagatgtgcgccgtccttcatggtggctggagttgtcattcatgatctacctcaggtctccagtaaaagacactttctccgtctaccttcctattatgatcctgtattgctatagaaacttctaaaactagg

SEQ ID NO: 548082 - DNA, 246 bp, Homo sapiens
ggatgatggctgccatggccgaaaatgggctgtcgagtgcaatatattagagactggagacttttgcgcgatctgcaatgagatgatggtctgatgattcgcttatttcaggcttgctgtcattctccgtgtccacccttctctctggcactcctgctctagtttgcaaatcctactcatgagttcagaacctgactcatctgccatcagcccacccacagacccatgcgcgttgtccgatcgtgt

SEQ ID NO: 548083 - DNA, 498 bp, Homo sapiens
  misc_feature (400)..(400): n is a, c, g, or t
  misc_feature (486)..(486): n is a, c, g, or t
aaattatcttccctacccagaaggcgtcctttgaccatttcccatgaataatcagtctcattataggaataggggatgatacagaaatccaaagtattccagttgcactgcatttgcatgcgatgttcgagactcaccacccaatctccaagccaaataacagactgtcttaaatcattaatttgattagcttgtgtccatcccttaagggcactgagtttccctgggctgtgggtaggtccagagattctgtccagggagccagggcctgggagttggaaaccttaggaataatcctgggtgctctgttttactgtggctgagctgggcacccagggttacaagacagcattcctttcccatttctttccctccccttttttccagggcagatggattnttttccccgtgttccaccattaccacaggcccacaaggagtttttttcagggtaccacaaatgtttactttaaggcccaagggttntttcattcagtt

SEQ ID NO: 548084 - DNA, 1099 bp, Homo sapiens
gggcgaggtctgagatgtcactggagctaccaggaagcatcatgggtgccctgtgggagatgccagagctcctggtgtggctgccccgaggcggtagcttcagagcctccagtgcctgtgggtgctggaggtgaagttgggggccctgtgtgctgctgctggtgctcaccctcctctgcagcctggtgcccatctgtgtgctgctgcctggaacaggagctaaccatgaaggctcagcttcccgccagaaagccctgagcctagtaagctgtttcgctggtggatggcgtcttttatggccactatgtctcctggacctgctgcctgactacctggactgcgcatagatgaggcccctggcgcagcttgccacgtgacgcatccaggttcccagctgccaaggaggtacatccttggcaccattgggagcattcgttccctgcgctcctgggctgatcggcacgcaggactcacacctgggacttagcaaagggaggccatggtcaaggggcacggtacaacccttcttgggacgtgaacacaaagtgagccttcttgtactgtcgaaaccatcggtggaaaattgggtgggtgcccagcatacaccaattaggggcacgtgcaattggagatgcacaatgagggtagatcgcctaacaagggtgacgcacgctgggcaagtggcccacaaggcaaagactccccaccttcaaagtggcaccttattggcagagtatggaccccgttgcgatttgcttaacccattggggagctatagggttagcctatagccccaaggttggcgacacaccgcatcaccgaaagttttcggccggtatgcggatttaccagtgcaacgtaggaggtgaccattagcgtaccggtggtgaactatgtggccgacctttgggcgcaacgtgccggaaaaggaaaaccaatgggtagcggccgagttcacgaggagggcgcaccgaaaatgtagagggacagcgcccattggtattctgccacccttgtgctggccacatttcaatacgcgacattgggaaagcatccgccaaacacgaagcatggggggtgcacaaatatccccaacttg

SEQ ID NO: 548085 - DNA, 1416 bp, Homo sapiens
ggcaacagatctaacttggtacgcgaagatcaccaatgacttgcttggagccgagagcgaccaagatggtgaagatgatagccacgcgcatgttaaatacgtggatggtctgggctagttgtacctgctggtgacgtggttcccagacgatcgacaatggctgcgcatctgacagccagtcaagatcaaagcagtagccatcgcacgttgagtaggatatgtggagctcgcactgggactctcaatgtgttggcgtcagggtacacagaccattcacagattgtaggtgccctggagggaggaccctgagtcctcattgttcaccagtgaccagcatgtagagtgcaatgccgtgaagactcaatagcaactagctctcactatgcggtgaagcgctcatggtcgcatcggcacttgagggatctactgaagatatggatcgtgcagtgtgtcatggccagacaagggattgccttgtggtgtccacatgcgctacccgttttgatggcgaagggggcgatttccgtgtggacattagttcgagggtggaaacctaacaaagttgggggccgaatgagttacaggggactatgaggatgtgggatcacaacgaatagctaccggaatatgagacgggattgagccagtaccggtccgattgccctgtagtagggaccagaaacagtacgcaatatgggggctcgaaaaggcaatcgatcacaagattgaatcggccccatactttacacgtgccaggtaagaaggcacatacgattgagggcggaggcaacgcgataagaaattccgtgggcacaaagggccgcggctacaaaaaagacgatggattctccctggggtcctaacggggtatggtcaactaatggggaccaagggaatgtgatatggagcttcaattgacttgtcgcgttgggtataacagggcgcgttctaagtagcctctgtggaaagaatcgctcagatgggggtccacctaggagatgaaatacaggataatatcgcggaaacaccccatggcgtgcacccattaaaggcaaacagcctgtggccagttccgactggcacgttgggacctgtggggcatacatccgacgttgaaacgatgggcataaatcaccccgtacaaagatcgcccgggaggaagtggggatacatgacgcaatcacctttgtggtcaaatcataaagtggcaaaatggcacccacaccctattataacttgccccaattatactaaacagaaacctaaataagcttaacccctatgaaaccaccacgaaaccacttcattgaaacacgacgaatcacattgaacattaccacaccaaagattttatccgcataattcaagagaagtatcacttatcaaccacaccatcagtatcaaaagaatcccaag

SEQ ID NO: 548086 - DNA, 927 bp, Homo sapiens
gtgtgagaaagtgtccttgggccccctgaataattgagtggacggcgagtagaaacttcttggggggatatcctatcttctcaggagggagggtagcccccggaagacgaacttgtttggcgttccggccaggaattaactgtgcgggagcccgcctttgccgtgagcggggttgtgagacgcacccccgggagcatctggagacctaccacgcggtgaagatattaagaacgcgcgttcggcctagacagtaaataacagtttgaccctcggagaaagtggtagccccgcccccgcttacatgactcaagacgtcgtctccagggcaagggggatgtagggcgaggcatgacacccacgccgctggagaggttagctggtggtggacagaaaagacgatgttagattctatttgtgtgtggagaactaattcatggagataactgcgattgatcggtggtacagttggggtgacagatgtttttacgtcacatcggctagattggtaacattggtgtagccgttcctatatacagaggtgtttcgccccgcacccccagacatattgattgacagccacacacacagacagttccggtacgcgctacgcgccaatggtatgtatcgacatagttctctttccgcgaccgatgtgttataataggtgtcgctcgcgccgctacctctacgcgctcttttttgacgagggaccgcttggttggcaccacaaaaggtgttctatagataggatagacgtggggcgtgcatatacaaaaatcgtggcgaataatataatgagagaacaatgcgagctgctggtttcaccaattccctcactgagatgctgtgccccaaatctgaaatgccgcaaaaaactggggaaaaatgggccataaaagaaaaaaatcaataaccccgacaaaaaca

SEQ ID NO: 548087 - DNA, 246 bp, Homo sapiens
ctttcgcgcctcagcgtcagtgttggtccagttggccgccttcgccactggtgttcttgcgaatatctacgaatttcacctctacactcgcagttccaccaacctctaccaaactcaagccaaacagtatcgaaggcaattctgtggttgagccacaggctttcacccccgacttgaatggccgcctacgcgccctttacgcccagtgattccgagcaacgctagccccttcgtattaccagggag

SEQ ID NO: 548088 - DNA, 1438 bp, Homo sapiens
  misc_feature (139)..(139): n is a, c, g, or t
  misc_feature (146)..(146): n is a, c, g, or t
  misc_feature (153)..(154): n is a, c, g, or t
  misc_feature (895)..(895): n is a, c, g, or t
  misc_feature (1013)..(1014): n is a, c, g, or t
  misc_feature (1017)..(1017): n is a, c, g, or t
  misc_feature (1098)..(1098): n is a, c, g, or t
  misc_feature (1117)..(1117): n is a, c, g, or t
  misc_feature (1341)..(1341): n is a, c, g, or t
  misc_feature (1379)..(1379): n is a, c, g, or t
  misc_feature (1395)..(1395): n is a, c, g, or t
  misc_feature (1423)..(1423): n is a, c, g, or t
ctgcggtcagagtcggattgtgggggaggttcactggcagagaaggttaagagagaggattatctccgtgtgggccggtggccatatttggcgtctccaggaatgaatctgtgcgatattgagagtccagtgactcggnggagaanatgcganngggtgggatgaggccgagcaagatggaattggggaggaggtgctcaacgatgtccacgcgaggagatcatccagcgcacacggctgctggacagtgagatcaagatcatgaagagtgaagtgttgagagtcacccatgagctccaagccatgaaggacaagataaaagagaacagtgagaaaatcaaagtgaacaagaccctgccgtaccttgtctgccaagcgtcatcgagctcctggatgttgatcctaatgaccaatgaggaggatggtgccaatattgacctggactcccagaggcaaggggcaaggtgtgctgtgatcaaaacctctacacgacagacgtacttccttcctgtgattgggttggtggatgctgaaaagctaaagccaggagacctggtgggtgtgaacaagagactcctatctgatcctggagacgctgcccacagagtatgactcgcgggtgaaggccatggaggtagacgagaggcccacggagcaatacagtgacattgggggtttggacaagcagatccaggagctggtggaggccattgtcttgccaatgaaccacaaggagaagtttgagaacttggggatccaactccaaaaggggtgctgatgtatgggcccccagggcacggggaagaccctcctggcccgggcctgtgccgcacagactaaggccaccttcctaaagctggctggccccccagctggtgcagatgttcattggagnatggtgccaagctagtccgggatgcctttgccctggccaatggagaaagcgccctctatcatcttcacttgatgagttggatgccatcggcaccaagcgctttgacagtgagaaggcnnggngaccgggaggtgcagaggacaatgctggagcttctgaaccagctggatggcttccagcccaacacccaagttaaggtaatngcagccacaaacagggtgnacatcctggaccccgccctcctccgctcgggccgccttgaccgcaagatagagttcccgatgcccaatgaggaggcccgggccagaatcatgcagatccactcccgaaagatgaatgtcagtcctgacgtgaactacgaggagctggcccgctgcacagatgacttcaatggggcccagtgcaaggctgtgtgtgtggaggcgggcatgatcgcactgcgcagnggtgtccacggagctcacccacgaggactacatggaangcatcctggaggtgcnggccagaagaaagccaacctacaatacnacgctgggcacacag

SEQ ID NO: 548089 - DNA, 554 bp, Homo sapiens
  misc_feature (277)..(277): n is a, c, g, or t
  misc_feature (286)..(286): n is a, c, g, or t
agaaacgatcggtactggtggcagacgctcctgatggaactctccgcagaggggtggctatggatgcatgttgatttccagtcctcactcaccccctggggaaaatcggtgttacggtttgtcctcacacaatgccccacgagacccagccttgtccccttggatgcttgaaggggatgattctggagacccccaagaggcctcctgagcggagctggtgggttccttttccttctccggcaggacgttagagccgcattgatccacgtttcaaaanccaggctcncttttgatacacgtagaacccttccacaccctttttttcatatgtgacttgaagtttcaaaacaatattgtgtgtttgaaaaaagcgggcgtgacgttgaacagcccgtctttgggccctgggggttctgactgcccccacagcccctcagaggtgacggtgcaaccggtggtggccatggcgagccattggcggaaaagagctcgtgagggactcgcctggcctcttgtggttgacattctgaattcataaccaggtgggctggtcc

SEQ ID NO: 548090 - DNA, 179 bp, Homo sapiens
gagctgcttctggagcgtttgcaggaggtgggggagggcgaagcgcagggccctggcaggtttctcagcagcctgtgggagcgcgttccccagaacaacttcctgaaggtgatagcggccgcgctcttgcttcccccgtcgtctccctggctccaaggagaggaattggaaccgggcag

SEQ ID NO: 548091 - DNA, 1382 bp, Homo sapiens
  misc_feature (139)..(139): n is a, c, g, or t
  misc_feature (146)..(146): n is a, c, g, or t
  misc_feature (153)..(154): n is a, c, g, or t
  misc_feature (957)..(958): n is a, c, g, or t
  misc_feature (961)..(961): n is a, c, g, or t
  misc_feature (1042)..(1042): n is a, c, g, or t
  misc_feature (1061)..(1061): n is a, c, g, or t
  misc_feature (1285)..(1285): n is a, c, g, or t
  misc_feature (1323)..(1323): n is a, c, g, or t
  misc_feature (1339)..(1339): n is a, c, g, or t
  misc_feature (1367)..(1367): n is a, c, g, or t
ctgcggtcagagtcggattgtgggggaggttcactggcagagaaggttaagagagaggattatctccgtgtgggccggtggccatatttggcgtctccaggaatgaatctgtgcgatattgagagtccagtgactcggnggagaanatgcganngggtgggatgaggccgagcaagatggaattggggaggaggtgctcaacgatgtccacgcgaggagatcatccagcgcacacggctgctggacagtgagatcaagatcatgaagagtgaagtgttgagagtcacccatgagctccaagccatgaaggacaagataaaagagaacagtgagaaaatcaaagtgaacaagaccctgccgtaccttgtctgccaagcgtcatcgagctcctggatgttgatcctaatgaccaatgaggaggatggtgccaatattgacctggactcccagaggcaaggggcaaggtgtgctgtgatcaaaacctctacacgacagacgtacttccttcctgtgattgggttggtggatgctgaaaagctaaagccaggagacctggtgggtgtgaacaagagactcctatctgatcctggagacgctgcccacagagtatgactcgcgggtgaaggccatggaggtagacgagaggcccacggagcaatacagtgacattgggggtttggacaagcagatccaggagctggtggaggccattgtcttgccaatgaaccacaaggagaagtttgagaacttggggatccaactccaaaaggggtgctgatgtatgggcccccagggcacggggaagaccctcctggcccgggcctgtgccgcacagactaaggccaccttcctagtccgggatgcctttgccctggccaatggagaaagcgccctctatcatcttcacttgatgagttggatgccatcggcaccaagcgctttgacagtgagaaggcnnggngaccgggaggtgcagaggacaatgctggagcttctgaaccagctggatggcttccagcccaacacccaagttaaggtaatngcagccacaaacagggtgnacatcctggaccccgccctcctccgctcgggccgccttgaccgcaagatagagttcccgatgcccaatgaggaggcccgggccagaatcatgcagatccactcccgaaagatgaatgtcagtcctgacgtgaactacgaggagctggcccgctgcacagatgacttcaatggggcccagtgcaaggctgtgtgtgtggaggcgggcatgatcgcactgcgcagnggtgtccacggagctcacccacgaggactacatggaangcatcctggaggtgcnggccagaagaaagccaacctacaatacnacgctgggcacacag

SEQ ID NO: 548092 - DNA, 400 bp, Homo sapiens
acgagcccggcgatcatgagggcggggtgttcccgggctacctcggcgctcacctggccggtgtcgacgagttcagcgaccaggtctgtccactcggtgcgcagcacgtccaggccggtgatctgtccgtcaccgccgatgacgacgagacgatcgatcccgtgttcgaggagatttctgacagctttcaggcgccccggacgttcgcgcatccccttgcaacggaaggttccgatcacggtgccgccacggttgaggatcgagccgacgtcgtcccacccgaacctacggatgccatcgccaccatcgatcattccctggtagccctcgtatatcgcatagacctcggctcccacacttagtgcagagcgcaccacagcccgcacagcggcgttcatgc

SEQ ID NO: 548093 - DNA, 302 bp, Homo sapiens
taggccggaccctcctcagctcccaaagtgctgggatagagacatgagccactatgcctggctgtagttattattttgatgggtttgtcttttaggtctttctactcaagatattagtagtttaaacatcgcaattataatgttatactatcctgcgtttctctgcatatttactatcatcagtgagtttggtatttttaattgattcttattgctcattaatgtccttttcttaagaaatccctttagcatttcttataggacaggtctgttgttgatgacatatcaacttttgcttgtct

SEQ ID NO: 548094 - DNA, 144 bp, Homo sapiens
tgctgctaaaggggtagagagagaacgagatctcgtaggccccatctccctgcctgaatgcctacttcacaatgctccttcccggggtgccccagactctcccttgcgcctcaccctgtgtctggtgatgagtgagaggaagca

SEQ ID NO: 548095 - DNA, 486 bp, Homo sapiens
tgcaggcctgtttcgaagggcagctcttcctgcgaccagccgcgttctcgcccggtaacggatgagattggttgccaagatggaccgtgcgcttcgctcgcccgacgctggtttatgggcgacggaagacatgcgaaaagtcttccgccatgctgcttttacgtcagccgcctttaagtcacaatttttcaggttggcacaggtaagacgagggatggcatgacgcaaaaactccggtccagactcgcatcgacgttggtggcaacgagcgcgttgctcgcgacgaatggatcttgggcggccaccctgtttgggtggggtgacggacgattccgtgtgcgatgtgggcagcacggagcagcgcaagggagggggctttggccccccagggagttcatcgagcgccagtgcaggaacgggcagctgctggtcggcgtgggcgtgtttgccgccgggggaatgtcggagcctctcatcacggcgctg

SEQ ID NO: 548096 - DNA, 191 bp, Homo sapiens
  misc_feature (95)..(95): n is a, c, g, or t
gtacaggccgagagtacatctccaactgaccctgatcaacgaagagggattcatgtgtctgtctcacgttggttccaaatgaaaccagggagcanggggagttagtgaatcgtaacacctagtcatgccttactggttcttctgctacgagaggccaatacgcctgtgccgctccacgtcatctgtgattt

SEQ ID NO: 548097 - DNA, 141 bp, Homo sapiens
ggtgcgactgagaaaagattgatttttcttgtttgtttcgtgtcgcagattccaaccccaaaaatattccaggacaagatagggggtcaggactgggctggattcttgctgtcaatgtggcttgttgccgccagagggagg

SEQ ID NO: 548098 - DNA, 494 bp, Homo sapiens
  misc_feature (494)..(494): n is a, c, g, or t
gaggctgaggcatgaggcaggagaatcgctcaaacccagaaggcagaggtttcagtgagccgagatcacgccatgcactccagcctggtgacacagtggggactcccatctcaaaaaaaaaaaacaaaaaaaaaaaaacatttttgggccgccttgggcccttagaaaaagtttttgacgaaccaatttgtgttgtgtgggcggggccccggatataggttaaggggaacagtgggccaaaggggggtacccaaagggagaaccggggggcaaaggaaccaagtggtagtgggaatatcatcacaccaagaaaaaaaaggcgcccgggggaacaacgcaggagtcgttttgtgaaaacacaatctcccagaagaggagagatccgagggaggacacaacacggggggactcactacacaccaagggggacgcaccacaaggaggaagcacgggagataacacaagataacggcccccctgaccggggggatgtn

SEQ ID NO: 548099 - DNA, 116 bp, Homo sapiens
gccttggcggatgatctggttggtgagcttcggctcacgctccttgtgtggcagaacaatcgagttcatggctgagcacctcgtgcagggatcctggactcgtgcagcccagtgat

SEQ ID NO: 548100 - DNA, 409 bp, Homo sapiens
  misc_feature (77)..(77): n is a, c, g, or t
cggcccatgcgggagcggactgctgtccagggccagtacctgacagtggagcagctcacactagacttcaatatgtnaaccctaccctcatccagaccccctcccctctgtgtgtaccatgtaagtatattcagcgcagtatgtcatcgtcattcctggaggtgggcccagggtgcaatcagagtcctatcaatcatttgctaaatgctacgggcattcgcgtcgtccaatcaggaggggcacctcctaccacagacactatcactccagtcctcaaggtggccatggtccactccctccatggatccaccatgcaggtcagtgtagagtggatagagttaggtcatatgtcagttcacccacagagtatggagctcgtacagccatacgtgcgagaacatggtcacat

SEQ ID NO: 548101 - DNA, 161 bp, Homo sapiens
  misc_feature (112)..(112): n is a, c, g, or t
gtctcactggccaagaaaattgcctttaaaactcgaaaataaggccaggtgtggtgactcacacttgtagtcccagcaatttgggaggctgagacaggaggattgcctgagncaggagtttgacaccagcctgggcaacatagtgagaccttgtctctaca

SEQ ID NO: 548102 - DNA, 1376 bp, Homo sapiens
tctgcgggacggggggctccgggtgggagcgtcactgtactccgtgaggcggcggctcctccgtgcggtggtgctctggctgtttctccacgcggtggtgggctggctccgtgctgcttctcctccgtgtggcggctggctcctccgagggtgcggctccgtgctgcttctccatgctggtgggtgggctggctcctccaggtgggctggctcctgtgcttgcttcatcctcctgagcgagcaggctgtgctttctctgtggccatgtgctgtgtccaatggttgccaggacgcatactggagtgctgtctcatacgcgtgcgggatcctcctggtggggtgtgctcccgagtttgcttcatccaatgacagtgacggaggggccaggcatggcattcattgatcatgcacgaggcataacatctagtgcaggctggcatcatgggcgagaagtgaaatcttgggattgacagtgaagtcacgtgcataccattaaagagactgagaaagccggacatcccaggtgcataccaatctcaatacgccacaacacagatacaacatccagaaacactcagtataccgacagcccaccaagaaacggaggattaacgagcaaggaggagggatacgaaccagaacagagacagagagggacaaggcgagagagacaaaacgagaccatgacataacttccaaatcgaggcagagaggaggccaagacggagaagcaatcccggacatagcaggaaggagcgagactacccaatccgaggaaataagagcaaaggcgagacagggaatcaaatcaaatgatgagccacgaagaagagcaacgcagaaaataggccgggacagagtagggaaacccaacaatagaaaaaggcacagagcaggagcaggagaagagcaaccacaatcaccagagagaggatgagaaacccaggagaaagctaggacaaacgaggaggtacccaagacaacctagcacacacaaaaaaaaacaccaagacaagaaaaagacaaaggcagccacaaaaaacctaggacaccagaccacaacatataaggaatacagcacataggagggttaaaccacagaaaaggagcaaagggaagatatgagagcggataggattaatacacaagttagataaactgaaatgagtgaattagaataaagccatcattcagatgagttgataagcaccggaaaggtattatgagaaagtcaagttgaagatgatttatatagagcatacagcattggaaaagagaataagcgaatttgaatggtaatccagtgagatggaatataaatgatcctataggatgagtttaaatacacgagtcaataggtggattacgtgcatgaa

SEQ ID NO: 548103 - DNA, 874 bp, Homo sapiens
ttggctactagtctacgctggaatacgattgctccacggttggctactagtccacaggttggctaaacctagccccaaacccactccaccttactaccagacaaccttagccaaaccatttacccaaataaagtataggcgatagaaattgaaacctggcgcaatagatatagtaccgcaagggaaagatgaaaaattataaccaagcataatatagcaaggactaacccctataccttctgcataatgaattaactagaaataactttgcaaggagagccaaagctaagacccccgaaaccagacgagctacctaagaacagctaaaagagcacacccgtctatgtagcaaaatagtgggaagatttataggtagaggcgacaaacctaccgagcctggtgatagctggttgtccaagatagaatcttagttcaactttaaatttgcccacagaaccctctaaatccccttgtaaatttaactgttagtccaaagaggaacagctctttggacactaggaaaaaaccttgtagagagagtaaaaaatttaacacccatagtaggcctaaaagcagccaccaattaagaaagcgttcaagctcaacacccactacctaaaaaatcccaaacatataactgaactcctcacacccaattggaccaatctatcaccctatagaagaactaatgttagtataagtaacatgaaaacattctcctccgcataagcctgcgtcagattaaaacactgaactgacaattaacagcccaatatctacaatcaaccaacaagtcattattaccctcactgtcaaccgcctatagccggcatgctcctaaggcgagcgggacctgagtcgggagggactcggc

SEQ ID NO: 548104 - DNA, 1058 bp, Homo sapiens
  misc_feature (820)..(820): n is a, c, g, or t
  misc_feature (860)..(860): n is a, c, g, or t
  misc_feature (885)..(885): n is a, c, g, or t
  misc_feature (894)..(894): n is a, c, g, or t
  misc_feature (1006)..(1006): n is a, c, g, or t
  misc_feature (1018)..(1018): n is a, c, g, or t
  misc_feature (1024)..(1024): n is a, c, g, or t
  misc_feature (1027)..(1027): n is a, c, g, or t
  misc_feature (1029)..(1030): n is a, c, g, or t
ttggctactagtctacgctggaatacgattgctccacggttggctactagtccacaggttggctaaacctagccccaaacccactccaccttactaccagacaaccttagccaaaccatttacccaaataaagtataggcgatagaaattgaaacctggcgcaatagatatagtaccgcaagggaaagatgaaaaattataaccaagcataatatagcaaggactaacccctataccttctgcataatgaattaactagaaataactttgcaaggagagccaaagctaagacccccgaaaccagacgagctacctaagaacagctaaaagagcacacccgtctatgtagcaaaatagtgggaagatttataggtagaggcgacaaacctaccgagcctggtgatagctggttgtccaagatagaatcttagttcaactttaaatttgcccacagaaccctctaaatccccttgtaaatttaactgttagtccaaagaggaacagctctttggacactaggaaaaaaccttgtagagagagtaaaaaatttaacacccatagtaggcctaaaagcagccaccaattaagaaagcgttcaagctcaacacccactacctaaaaaatcccaaacatataactgaactcctcacacccaattggaccaatctatcaccctatagaagaactaatgttagtataagtacatgaaacatctctctcgcataagcctgcgtagattaaaacactgactgacaattacagcccatattacatcaaccacaggcattataccctactgcaaccacacagcatgctatanggaaggtaaaaaaaaaaaaactgagggggcccgaccaatnggctatatgagcgatacaatactgncgcgtttanacgtctgactggaaacctgcgtaccaactaatgctgagaaatcccctttgcagtgcgaataaaaaagccgaccatgcttcaacattgcaactatggaaggaattagcgtaanttgtaaatccgnaatttnaanannctttaacaagcaatggaaacttaattaa

SEQ ID NO: 548105 - DNA, 171 bp, Homo sapiens
tcatcgagctcggcccgaattaagagaagaaggaaggaaggaaagacggatgaaggaaggaaggaaggaagggagggagaaatacagacagtgagcttatatttctcatttccttttcactatccagcttaattggtcttccttttatcccactttattgaaaactttttg

SEQ ID NO: 548106 - DNA, 502 bp, Homo sapiens
  misc_feature (502)..(502): n is a, c, g, or t
tggcgtgctgtgctcttctagggagaggcttgaaggctagcagcaggcaagcaccagtttccaggcaagcagcagcttcaggtggcaggcacttgaaggctgggtaacagcaaataataatcatgtaatcaacataatgcatgcatatactttttaaaaatcccaggagcactaacaggcttataatgtatcacagtaacactttacttagtcttattataaccccaatctcactgatactcctttttaaagcaggattcttttggtattcatattgatgactctaaacatgcttatttagctctcttgtgattcatcggttttaggcattcatttaatgaattacgctatctgttggtacaccagtatctgctcttctcactggctactatccctcccctcctgagtccccattttttcgttaaatttacattccccgtttatgatattatgaacatgcacatattctcggctgaataaaatatgtattatgaccctcagn

SEQ ID NO: 548107 - DNA, 1055 bp, Homo sapiens
  misc_feature (817)..(817): n is a, c, g, or t
  misc_feature (857)..(857): n is a, c, g, or t
  misc_feature (882)..(882): n is a, c, g, or t
  misc_feature (891)..(891): n is a, c, g, or t
  misc_feature (1003)..(1003): n is a, c, g, or t
  misc_feature (1015)..(1015): n is a, c, g, or t
  misc_feature (1021)..(1021): n is a, c, g, or t
  misc_feature (1024)..(1024): n is a, c, g, or t
  misc_feature (1026)..(1027): n is a, c, g, or t
ttggctactagtctacgctggaatacgattgctccacggttggctactagtccacaggttggctaaacctagccccaaacccactccaccttactaccagacaaccttagccaaaccatttacccaaataaagtataggcgatagaaattgaaacctggcgcaatagatatagtaccgcaagggaaagatgaaaaattataaccaagcataatatagcaaggactaacccctataccttctgcataatgaattaactagaaataactttgcaaggagagccaaagctaagacccccgaaaccagacgagctacctaagaacagctaaaagagcacacccgtctatgtagcaaaatagtgggaagatttataggtagaggcgacaaacctaccgagcctggtgatagctggttgtccaagatagaatcttagttcaactttaaatttgcccacagaaccctctaaatccccttgtaaatttaactgttagtccaaagaggaacagctctttggacactaggaaaaaaccttgtagagagagtaaaaaatttaacacccatagtaggcctaaaagcagccaccaattaagaaagcgttcaagctcaacacccactacctaaaaaatcccaaacatataactgaactcctcacacccaattggaccaatctatcaccctatagaagaactaatgttagtataagtaacatgaaaacattctcctccgcataagcctgctaaaacactgactgacaattacagcccatattacatcaaccacaggcattataccctactgcaaccacacagcatgctatanggaaggtaaaaaaaaaaaaactgagggggcccgaccaatnggctatatgagcgatacaatactgncgcgtttanacgtctgactggaaacctgcgtaccaactaatgctgagaaatcccctttgcagtgcgaataaaaaagccgaccatgcttcaacattgcaactatggaaggaattagcgtaanttgtaaatccgnaatttnaanannctttaacaagcaatggaaacttaattaa

SEQ ID NO: 548108 - DNA, 787 bp, Homo sapiens
ttggctactagtctacgctggaatacgattgctccacggttggctactagtccacaggttggctaaacctagccccaaacccactccaccttactaccagacaaccttagccaaaccatttacccaaataaagtataggcgatagaaattgaaacctggcgcaatagatatagtaccgcaagggaaagatgaaaaattataaccaagcataatatagcaaggactaacccctataccttctgcataatgaattaactagaaataactttgcaaggagagccaaagctaagacccccgaaaccagacgagctacctaagaacagctaaaagagcacacccgtctatgtagcaaaatagtgggaagatttataggtagaggcgacaaacctaccgagcctggtgatagctggttgtccaagatagaatcttagttcaactttaaatttgcccacagaaccctctaaatccccttgtaaatttaactgttagtccaaagaggaacagctctttggacactaggaaaaaaccttgtagagagagtaaaaaatttaacacccatagtaggcctaaaagcagccaccaattaagaaagcgttcaagctcaacacccactacctaaaaaatcccaaacatataactgaactcctcacacccaattggaccaatctatcaccctatagaagaactaatgttagtataagtaacatgaaaacattctcctccgcataagcctgcaaacaaaaaacacaaacaaaacaaataaacaaaaaaaacaaaacaaacatga

SEQ ID NO: 548109 - DNA, 775 bp, Homo sapiens
  misc_feature (1)..(1): n is a, c, g, or t
ncccccccggggggggggtatattttggtattgttgtgggccgtcttgctctgtgtgatgcccctctcgtggtgatgtagtgaggcccccttcgtgatgttttctcctcctccgatgtttccctctcgtcgtgggggttgtttttctgccagacaagtccgtttgcgttgttcctccctccggcgcggtgtttttttttttactgtgggtgggtggtgcttctctcaccgcgccttgttctcttgtgccccgggtgtcgttctcgtggggagcccttgcacagaggtgcagcaacatgtggggccccgcgccgcccacaccaacggtgtgtttttaaaaaatttctttcggggggcggacggggcgccgcgcgcacaaagttgttgtttttttgtttgtttttttttttgttgttgtgcgccgctttttattttttttttttttgttttttttttttaattgttttctttttttaatgaaactagatcactgcttacaaaaccctgcacaagccctcctgcccatccccctcacagtttccttgggtcgagctctcctgtctcacaggaagtgcaacaaaatgggtgtgggacaggcaccaccacgtccattgtatgataggaagggggaggggctgggctccgaccccgggccttaagagggtgaaagttcttccttccacaaccgtttcccatggggcctggagttgcatggatgagggtggtccatgccaccatgattctcaggccaccactcagaccagagtgaaacctcc

SEQ ID NO: 548110 - DNA, 872 bp, Homo sapiens
ttggctactagtctacgctggaatacgattgctccacggttggctactagtccacaggttggctaaacctagccccaaacccactccaccttactaccagacaaccttagccaaaccatttacccaaataaagtataggcgatagaaattgaaacctggcgcaatagatatagtaccgcaagggaaagatgaaaaattataaccaagcataatatagcaaggactaacccctataccttctgcataatgaattaactagaaataactttgcaaggagagccaaagctaagacccccgaaaccagacgagctacctaagaacagctaaaagagcacacccgtctatgtagcaaaatagtgggaagatttataggtagaggcgacaaacctaccgagcctggtgatagctggttgtccaagatagaatcttagttcaactttaaatttgcccacagaaccctctaaatccccttgtaaatttaactgttagtccaaagaggaacagctctttggacactaggaaaaaaccttgtagagagagtaaaaaatttaacacccatagtaggcctaaaagcagccaccaattaagaaagcgttcaagctcaacacccactacctaaaaaatcccaaacatataactgaactcctcacacccaattggaccaatctatcaccctatagaagaactaatgttagtataagtaacatgaaaacattctcctccgcataagcctgcgtcagattaaaacactgaactgacaattaacaaccaggtatgccagaaggtccaggtattccagaaggtccaggtatgccagaaggtccaggtatgccagaagtccaggtatgccagaagtccagtatgccgggtcc

SEQ ID NO: 548111 - DNA, 788 bp, Homo sapiens
ttggctactagtctacgctggaatacgattgctccacggttggctactagtccacaggttggctaaacctagccccaaacccactccaccttactaccagacaaccttagccaaaccatttacccaaataaagtataggcgatagaaattgaaacctggcgcaatagatatagtaccgcaagggaaagatgaaaaattataaccaagcataatatagcaaggactaacccctataccttctgcataatgaattaactagaaataactttgcaaggagagccaaagctaagacccccgaaaccagacgagctacctaagaacagctaaaagagcacacccgtctatgtagcaaaatagtgggaagatttataggtagaggcgacaaacctaccgagcctggtgatagctggttgtccaagatagaatcttagttcaactttaaatttgcccacagaaccctctaaatccccttgtaaatttaactgttagtccaaagaggaacagctctttggacactaggaaaaaaccttgtagagagagtaaaaaatttaacacccatagtaggcctaaaagcagccaccaattaagaaagcgttcaagctcaacacccactacctaaaaaatcccaaacatataactgaactcctcacacccaattggaccaatctatcaccctatagaagaactaatgttagtataagtaccagaaaccactttctccggccggggagagtccttgaccgcaattaaccggccattttaccattccacaggcattttccctccgg

SEQ ID NO: 548112 - DNA, 800 bp, Homo sapiens
  misc_feature (17)..(17): n is a, c, g, or t
  misc_feature (58)..(58): n is a, c, g, or t
  misc_feature (103)..(103): n is a, c, g, or t
  misc_feature (124)..(125): n is a, c, g, or t
  misc_feature (139)..(139): n is a, c, g, or t
  misc_feature (176)..(176): n is a, c, g, or t
  misc_feature (474)..(474): n is a, c, g, or t
  misc_feature (476)..(476): n is a, c, g, or t
  misc_feature (616)..(616): n is a, c, g, or t
  misc_feature (635)..(635): n is a, c, g, or t
  misc_feature (642)..(642): n is a, c, g, or t
  misc_feature (662)..(662): n is a, c, g, or t
  misc_feature (681)..(681): n is a, c, g, or t
  misc_feature (734)..(734): n is a, c, g, or t
agcgggctcctcctgcncacctccctcgctctcccacaccactggcaccaggccccgnacacccgctctgctgcaggagaatggctactcatcacacgctgtngatgggactggccctgctggnngtgtgctgggcganctgcaggcagcaccggatggcccaggtctccgtgcancccaacttccatcaggacaagttcctggggcgctggttcagcgcgggcctcgcctccaactcgaagctggctcacggagaagaaggcggcgttgtccatgtgcaagtctgtggtggcccctgccacggcatggtggcctcaacctgacctccgaccttcctctaggaaaagaccatgtgtgagacccgaaccatgctgctgcagcccgcggggtccctcggctcctacagctaaccggagtccccactggcggcagcacctactaccgtagtcagtggtggagaccgactacgaccangnacgcgctgctgtacgagccagggcagcaagggccctggacgaggacttccgcatggccaccctctacagccgaacccagacccccagggctgagttggtcggaggaaagttcaccgccttctgcaagggcccagggactngcacagagcgataccaatngtcgttncctgccccagaaccgatganagtgcatgaccggaacaantaggactccccaggggctgaagctgggatcccggccagccaggtgacccccangctctggatgtctctgctctgttccttccccgagcacctgcccggctcccaaccgcatcacccgtt

SEQ ID NO: 548113 - DNA, 616 bp, Homo sapiens
  misc_feature (520)..(520): n is a, c, g, or t
tactactactaaattcgcggccgcgtcgactttttttttgtatttttagtagagacagggtttcaccatgttggtcaggctggtcttgaactcctgacctcattatccgcctgactcggccttcaaagtgctgggattacaggcgtgagccaccgcgcctggccatcaaaagtcttttttattgctctgtaatagttatacatatttatgggctacatgtgacatttgatatattgtataatgtgtaatgatcaaatcagggtaattagaatatccatcacctcaaacatttatcatgtctttgttttgggaactttccggttcttctcttctagctattttgaaatatacaatgaattattgttaacagtagtcactctactgtgctatcaaacactagcacttattccatctgtaactgtatttttgtacctattaaccaacctctcatccctgtccttccacccttctcagcctctgggaatcatcactctactttcttcctccatgagattgactntttaaacatatgaatgaaaaacctgctattatttgaaatctttgacagcacaaagtaattgctgggagacccaaaatatttattacacacaatgta

SEQ ID NO: 548114 - DNA, 795 bp, Homo sapiens
  misc_feature (635)..(635): n is a, c, g, or t
ttggctactagtctacgctggaatacgattgctccacggttggctactagtccacaggttggctaaacctagccccaaacccactccaccttactaccagacaaccttagccaaaccatttacccaaataaagtataggcgatagaaattgaaacctggcgcaatagatatagtaccgcaagggaaagatgaaaaattataaccaagcataatatagcaaggactaacccctataccttctgcataatgaattaactagaaataactttgcaaggagagccaaagctaagacccccgaaaccagacgagctacctaagaacagctaaaagagcacacccgtctatgtagcaaaatagtgggaagatttataggtagaggcgacaaacctaccgagcctggtgatagctggttgtccaagatagaatcttagttcaactttaaatttgcccacagaaccctctaaatccccttgtaaatttaactgttagtccaaagaggaacagctctttggacactaggaaaaaaccttgtagagagagtaaaaaatttaacacccatagtaggcctaaaagcagccaccaattaagaaagcgttcaagctcaacacccactacctaaaaaaaaaaaaaaatanaaaaaaacggccttccacccccgtcgcctccgccaagcacactataatctaaacaaagaatatccttccaatactaaatatggagttaatattaccaattttccccatattatacctcaacaaacaaccgagtcctattactaaacatatcaaacactca

SEQ ID NO: 548115 - DNA, 824 bp, Homo sapiens
  misc_feature (255)..(255): n is a, c, g, or t
tgcgctggcgaacgtcatcattatgctgtgcatgaccgtctgggcgttgtacctgatctttcgtaataaaaaagagattacccagcatttgctcaacttcgcggagcattcgctggcctttttcagcctgtttaatgcggcctttgcgctggtgtggcactggctggcaagcgcctattttatcgtgctgtttttcttttcgttgttcgatccgggcaacagcctgaaatttatgatgggtgcacggtgcgcacntggcgattattggtatcgcagcgtttgtttccggtatgttttcccgctggctggcgaaaaccatcactctctcgccacatactcagcgtaactatccggagctgcaaaaacggttgaatggctggctgtcggcggcgctgaaaacggcgcgtattctgacagtctgcgtggcggtaatgttgctgttgagcgcatggggattgttcgatttctggaactggctgcaaaacggcgcggggcagaaaaccgtagatatcctgatccgtatcgcactcattcttttcttctcggcggttggctggacggtgctcgccagtttgatcgaaaaccggctggcttcggatattcatggccgcccgctacccagcgcccgcacgcgtaccctgcttacgctgtttcgtaacgcgctggcggtgattatcagtaccatcaccatcatgattgtgttgtcggaaatcggcgtcaatatcgcgccattgctggcaggtgccggggcattaggtctggctatctcgtttggttcgcaaacgctggtgaaagatattatcaccggggtatttattcagttt

SEQ ID NO: 548116 - DNA, 695 bp, Homo sapiens
gcaaaagctggagctacctctgagggggaaatcggttccaggcctgcgtgatcttacgggcttcagaattccgctgaacacagtttaaaatagtcttagatatcgaccagctttcccgaacgttggtctcccatttcctcaggggcacaaagccgtttttggaagcttggtttatttatcaagcccactgtttaaggggacgagctgctcctcatcaagattgccaaagctctgtttgtgtggcatgagcagcacctgttcaattgcaagaaggtttacaaggtggttgagaatgccaacgacaccaggtatggactggctccgtatgtgttcgcctaggatatagtcaaggccatgtaattcgtggaggcactccagttcgggtgcgtgggagtagacagttcctatattgtcacctaccattcaccatttgaatggtttaagccatttgtagtcggcagggggttggttagaatggagttggggccaacacataggtagaggcggtcgtcatcaaggttcatcagcagcacatcgtaggaacatgtgtcagggaggcctatgtcacagtcccgtctatcccactgccgcccttggctcaaggcgtgcctacatgttttgaagccaagaactccatttgtgtgttcccactcgactggtacaaaaaactccactaatacagcagttccatcaaa

SEQ ID NO: 548117 - DNA, 827 bp, Homo sapiens
  misc_feature (716)..(716): n is a, c, g, or t
  misc_feature (718)..(718): n is a, c, g, or t
  misc_feature (734)..(734): n is a, c, g, or t
  misc_feature (748)..(748): n is a, c, g, or t
  misc_feature (791)..(791): n is a, c, g, or t
ttggctactagtctacgctggaatacgattgctccacggttggctactagtccacaggttggctaaacctagccccaaacccactccaccttactaccagacaaccttagccaaaccatttacccaaataaagtataggcgatagaaattgaaacctggcgcaatagatatagtaccgcaagggaaagatgaaaaattataaccaagcataatatagcaaggactaacccctataccttctgcataatgaattaactagaaataactttgcaaggagagccaaagctaagacccccgaaaccagacgagctacctaagaacagctaaaagagcacacccgtctatgtagcaaaatagtgggaagatttataggtagaggcgacaaacctaccgagcctggtgatagctggttgtccaagatagaatcttagttcaactttaaatttgcccacagaaccctctaaatccccttgtaaatttaactgttagtccaaagaggaacagctctttggacactaggaaaaaaccttgtagagagagtaaaaaatttaacacccatagtaggcctaaaagcagccaccaattaagaaagcgttcagctcaacaccactacctaaaaatccaacatatactgactctacaccaattggccatctatcacctatagagactatgtagttagtacatgaaacatctctcgatagctgcgtcagtancntgctgcatacgccatnttcatcaccacagnattttcctaattttaccacaaggctgtctaggaggtaaaaaanaaaatgggggggcccgtccattgccttggggggttt

SEQ ID NO: 548118 - DNA, 264 bp, Homo sapiens
  misc_feature (255)..(255): n is a, c, g, or t
acggcttgaaagggggtacaaggaaggcataagacaggaagggaatctagagtttaacctcctaacccttctgctagccctcaaggcttcacaatggtgactggggagctagaaaccttctatgactcaggctgaaggcttggggaaagccaagtttagatggttccttcttcctccaccccgatagtaccagttatccatggtctctcagagggtattcctatgctacccctagccctcaaagcataccatgtngctcaggag

SEQ ID NO: 548119 - DNA, 1004 bp, Homo sapiens
  misc_feature (766)..(766): n is a, c, g, or t
  misc_feature (806)..(806): n is a, c, g, or t
  misc_feature (831)..(831): n is a, c, g, or t
  misc_feature (840)..(840): n is a, c, g, or t
  misc_feature (952)..(952): n is a, c, g, or t
  misc_feature (964)..(964): n is a, c, g, or t
  misc_feature (970)..(970): n is a, c, g, or t
  misc_feature (973)..(973): n is a, c, g, or t
  misc_feature (975)..(976): n is a, c, g, or t
ttggctactagtctacgctggaatacgattgctccacggttggctactagtccacaggttggctaaacctagccccaaacccactccaccttactaccagacaaccttagccaaaccatttacccaaataaagtataggcgatagaaattgaaacctggcgcaatagatatagtaccgcaagggaaagatgaaaaattataaccaagcataatatagcaaggactaacccctataccttctgcataatgaattaactagaaataactttgcaaggagagccaaagctaagacccccgaaaccagacgagctacctaagaacagctaaaagagcacacccgtctatgtagcaaaatagtgggaagatttataggtagaggcgacaaacctaccgagcctggtgatagctggttgtccaagatagaatcttagttcaactttaaatttgcccacagaaccctctaaatccccttgtaaatttaactgttagtccaaagaggaacagctctttggacactaggaaaaaaccttgtagagagagtaaaaaatttaacacccatagtaggcctaaaagcagccaccaattaagaaagcgttcaagctcaacacccactacctaggaaaatccacacatagtactgtataagtaacatgaaacatctctctcgcataagcctgcgtagattaaaacactgactgacaattacagcccatattacatcaaccacaggcattataccctactgcaaccacacagcatgctatanggaaggtaaaaaaaaaaaaactgagggggcccgaccaatnggctatatgagcgatacaatactgncgcgtttanacgtctgactggaaacctgcgtaccaactaatgctgagaaatcccctttgcagtgcgaataaaaaagccgaccatgcttcaacattgcaactatggaaggaattagcgtaanttgtaaatccgnaatttnaanannctttaacaagcaatggaaacttaattaa

SEQ ID NO: 548120 - DNA, 942 bp, Homo sapiens
  misc_feature (821)..(821): n is a, c, g, or t
  misc_feature (829)..(829): n is a, c, g, or t
  misc_feature (860)..(860): n is a, c, g, or t
  misc_feature (867)..(868): n is a, c, g, or t
  misc_feature (889)..(889): n is a, c, g, or t
  misc_feature (914)..(914): n is a, c, g, or t
ttggctactagtctacgctggaatacgattgctccacggttggctactagtccacaggttggctaaacctagccccaaacccactccaccttactaccagacaaccttagccaaaccatttacccaaataaagtataggcgatagaaattgaaacctggcgcaatagatatagtaccgcaagggaaagatgaaaaattataaccaagcataatatagcaaggactaacccctataccttctgcataatgaattaactagaaataactttgcaaggagagccaaagctaagacccccgaaaccagacgagctacctaagaacagctaaaagagcacacccgtctatgtagcaaaatagtgggaagatttataggtagaggcgacaaacctaccgagcctggtgatagctggttgtccaagatagaatcttagttcaactttaaatttgcccacagaaccctctaaatccccttgtaaatttaactgttagtccaaagaggaacagctctttggacactaggaaaaaaccttgtagagagagtaaaaaatttaacacccatagtaggcctaaaagcagccaccaattaagaaagcgttcaagctcaacacccactacctaaaaatcccaaacatataactgaactcctcacacccaattggaccaatctatcaccctatagaagaactaatgttagtataagtaacatgaaaacattctcctccgcataagcctgcgtcagattaaaacactgaactgacaattaacagcccaatatctacaatcaaccaacaagtcattattaccctcactgtcaaccccanccacaggnatgcttctttagggaagggttagaaaaagangaaaaannacctcgggggggggggcccgnttcccatttggccctttggtggggnggttttccatttccttggcgggggtttt

SEQ ID NO: 548121 - DNA, 215 bp, Homo sapiens
tgcgaaaatgttaaaatttcgggcattgccgatcccggagggccagcccccttcctgatcggccccgggaatgggaaagcgggttcaggcagggcccgcaagcggatcacccgattcccgggcaccgctttttttaaacgactccggattcccgtccccgaaaagccatgaataccgcacaccgcaagaagctccccggcacctcattcgattat

SEQ ID NO: 548122 - DNA, 359 bp, Homo sapiens
  misc_feature (104)..(104): n is a, c, g, or t
ccggaaaatataaaggggcccccccccccccccgttttttttttttctcccgggcgaaaaattttatagggatgtgttgggggccgggggaaggaaatatcttngaaaatgggtggggaaaaaaaaaaattcccccccccccctgcccccccaagggggggtcccccccgggggtttttttgggaaaccccccccccaggtttttttttttggggttgggaaagggcccaacccccccccccccctttgggggcccccccccccttttttaaggggggggggccccccggatttttgtttttaccctttttttgccccccccccgggggtttttaaagcccgaaacccggggcccctta

SEQ ID NO: 548123 - DNA, 165 bp, Homo sapiens
acagcagagggtggtttcacggaaatagtgctacttctagatactttaagtagatatttcaacgctgtaataatattttataacataaactggaaagttaaagaataagcttttacaatagtcctcatacgtcaaggtcacagttccgaaagttacctgattcca

SEQ ID NO: 548124 - DNA, 421 bp, Homo sapiens
  misc_feature (221)..(221): n is a, c, g, or t
  misc_feature (375)..(375): n is a, c, g, or t
tctcttgaaacctatttcatctgatataagtatagctactcctgctctttttttgttttcattggcatgaaatatctttttccattcatttattttcagtctatttgtatctttataaatgaagtgtgtttcttttaggcaacagctcattgggccttgcatttttatccattcagcctctccatgtctttgtgttgtgtgtcacccaggccgaagtgcangtggttcaatctcagctcactgcaacttctgcctcctgggcttaagtgatccttttcttcagccttccaagtaaagtagctgggactacaggtgtatgccaccatgcccagctaatttttgtattttttgtaaagacaggggtttccctgttgnttgcccaggggtgggtcttgaactcccgtgctcaagcaatctgctt

SEQ ID NO: 548125 - DNA, 321 bp, Homo sapiens
gcgctctgaatcccaccctgtattgcttcacgaattcaaaacctttacctggttcttgcggttcgatcttcagaacaacgtgaccgtactgaccgcgaccacccgactgcttaacgaatttaccttcgatttcttcgcatgttttgcggattgtttcgcggtacgcaacctgtggcttaccaacagttgcttccacgttgaattcgcgcttcatacggtcaacaataatttccaggtgcagctcacccataccgccgatgatcgtctgaccggattcttcgtcagtttttacgcggaaagaaggatcttcctgcgccagac

SEQ ID NO: 548126 - DNA, 510 bp, Homo sapiens
  misc_feature (153)..(153): n is a, c, g, or t
catacaggtcccctggccatggcctcggtccagggatcccctttagggggttagggtccagttctcagtggaaaaacaggcccgaaaaagtgcgtgcccaacttaggcagatgtttccccagtggccccaaagccctggggtatagttttttncccccccaaagaaaaaccccctttttgggacatgggttggagggcaggacctaaaggccccaaaggaaggccccctttcgggggtgtttccccaggaggaaaggaaagggctttttgttcccccccgaaggaaaggggccttagttttggggttaaaccccccttttcgtgttttcccccccaaatggaaggtccccaaggttccctttcagttccctttccttaaccctgggggggcctttccgcccacccccccaaaggaccccccccccccttggagtgtgttcaggagttccgggcagggtgggcattttttcccaaggggggaaaattttccataaagggtttggcccttta

SEQ ID NO: 548127 - DNA, 207 bp, Homo sapiens
  misc_feature (26)..(26): n is a, c, g, or t
cctgcacagtccactctataggatancccaaatgtttagtgtgtggtgaaattcttgagagtaagtatcagcataactttgtgagttgtaattgcaagaaccagacgtttactgatggtggattggtatacaatcgtgtgggagcagttgatttagacttagttgagaatctatgcgaatatgctgaaatgactcgtggtgagcatt

SEQ ID NO: 548128 - DNA, 359 bp, Homo sapiens
ctctggaagtaagttgccctgaggagtgtgatccaacacagactgagtaccaaggaatgatgagatgtggaggagggcggtatgaaaggtgaggtctatccattggcatcgttgggatggccaacaaaggggatagcctgcagaaaaggggagagcgtcaagttccaattgtgtgtcctgggccaaacatgcacaacactactggcttacaaacatcacaccccctgcgcacgggccaccagtggacactgtgctgacacgatcagctttgcgcttcacttaacctatgaacgtaggcagactagcacagaagctctcttttccactgctgaacaccgcacgcctccagcgatggcact

SEQ ID NO: 548129 - DNA, 410 bp, Homo sapiens
  misc_feature (121)..(121): n is a, c, g, or t
aaactgcaggcatcagtacgtggtcccctcaagtccaagaaggaggagtaaaggcttggtgtttccctgccctccgctggcttctaacctgacccaatgcttactgcttccttggagcccnagactatccctctggtacttgggtttattccctacttccccaattttcttccatggcttatagatcattattttggcaccattacacatactgctcttataccaaaagggacctgattgttgtttattcagagtacttttgccactgttctgcctggctagggcactttccactcctggaagtgtagaaaagcactggtgacctggcctgcagtttgaacccctttttattttgcaatgtaccctaaaggaggctgctgtgaagcaggtcaactgttttatcctgaggg

SEQ ID NO: 548130 - DNA, 670 bp, Homo sapiens
ttgtccaacaataaacaggaattttattttgctgagttgttctaacaaaaaaaaaaaaaaaaaaaaaaaaaaaaaaaaaaaaaaaaaaaaaaaaaaaaaaaaaaaaaaaaaaaaaaaaaaaaaaaaaaaaaaaaaaaaaaaaaaaaacccaaaaaaaaaaaaaaaaaaaaaaaaaaaaagagaaaaaaaaaaaaaaaaaaaaaaaaaaaaaaaatttggggcctatttgccccgacgacctttaattttcgaaatgttttccactgccgccgaatttagggctcttttggcaaaatccccctatggggggggtctttaaaatgaatgggccggcttttaaaaacttagggttgggaaaaacctggggtggcccaaataaaatcgcttttagaaaatatccctttttgcaaagtgggttaaagccaaaagggcccccacgcggtggcttttcaaaaaattggccaaccctgaaggggaaaggaaaatttgccgggttaaattttgggaaaaatccgggtaaaatttttgtaaaaacccttatttttttaacaaatgggccaaaaggggaaaacccccttatagaataaaagatttaccccaaaaggggtttgtgtttatcccttttggaatggcccctttatgacggtggttctcaacatcgcgctttggg

SEQ ID NO: 548131 - DNA, 334 bp, Homo sapiens
agcaaccgtgcaatcactgaactcccaacaacaccaacaaacctcagggagtcactcgctacgaaatggaaaaaataagctcaatatcacaaccgaaaagtgacacaagatccataaaaaaaaaaccacatagaagaaatgcttgcattcttacagattcaagaggatcgtggggaaaaatccaaatcattttataagcatcataaacgtcacataaaaacaacctcatcatccaaaacaacccgggaaaacagagccgaatgaagtggtatatctgaaatgatgggcacacgtagcacagcatgccatatcaccatcccatatataatgtcac

SEQ ID NO: 548132 - DNA, 381 bp, Homo sapiens
tcaccagcatctctgctgttgactatggctctctggccaacagcgcttcatctagaggacagcttcacttggtacaacaacaagcttaccagagtacctggtgggctggcagagcataagtacatccaggtagtctaccttcataacaacgatatctctgtagttggatcaagtgacttctgcccacctggacacaacaccaaaaaggcttcttattcggttatgattcttttcatcaaccctgtccagtactgagagatacagccatccacctttagatttgtctacctgcgctctgccattcaactcgtaaactattagtaattctccagaaagccctcatttttataaactggcaaaatcttgttcattttctttgct

SEQ ID NO: 548133 - DNA, 221 bp, Homo sapiens
  misc_feature (22)..(22): n is a, c, g, or t
  misc_feature (54)..(54): n is a, c, g, or t
  misc_feature (64)..(65): n is a, c, g, or t
atgttatagaatagaatagatngaatagaacagaatagaatagatcagaacagnagagaacagnntagaatagaatagaatagaaacgaacagagtagaatagattagaaaagaatagaatagaacagaatagaatagaataggacagaaaagaatacaatagaataggatagaacacaaaagaacataatagaatagtatagaatagaatagacctcgtt

SEQ ID NO: 548134 - DNA, 270 bp, Homo sapiens
ctcgggagttcctaatgcttaaatacattttagttgctgccctcgcctgcaccgcctctttgctcgccgctagggacaccgcccaagcctcttggcattaccaaccccaaggcaaacgcatcaccatccagcaagccgccgccaacatcgctgccggcacgcagccgagcgaaatcactttcgccgagaaccagatgtttgtggagttcaccgattataaaactcccgccaactccacctacgggctgaccaccaccgtggccgccttcg

SEQ ID NO: 548135 - DNA, 309 bp, Homo sapiens
ggcacgagcacagtggaagaagacagcactgatgaccaaagagaagacactcatatttaagcctatttataatgcaaatttccatgccattcagggatttctgagtgtgggggccattaacgtcacttatgcccaaaaacccaaactgtcaagtggtactgctacaatggcagcatctgtgaggacgtcaccctcatgaaattgacaccactctgcctacattcttttctattagcagcagaggatagactacgaacaatttctgccaaagattagtggcaaaagatggcagacacaagcagtatggat

SEQ ID NO: 548136 - DNA, 408 bp, Homo sapiens
aggcgccgcgacctaccccatctccctccacgcttgtgggggagtgagtggggaaggggctttgggaaaggcggcgcgcgggcacttaggtgcattgtgagctttccggacttgacagcatcaaaggaaaattctggcgagcagccagggccagcgagcgaccccaacaacaaggaagcggccgttcgaaagcttccggacaagccaaggggattccaagggaacaagctctggcccacgggccacgggcgatgcacggagtggaaaagtgaacgtggtctacaggatttctgtccggaaggtggagagcgctacaggggaatctcctcgattcctgtccgtctcgtaacttggcaaaagctcgcgccactgccctccggcctgggcgacagagcaagactccgtctc

SEQ ID NO: 548137 - DNA, 684 bp, Homo sapiens
agggccttcaaggctctcatcgctgctcagtacagcggggctcagtgtcctgcgtgctctccgcaccaccccacttccatttttgtgccaaaccaacctgcacccctgaatttctccgcaaatttcctgcctggcaatggtcccatgcatttgatgtgtgtgatgattgtgattcttgtagtgttttgatgatgccaactgcctatttgccctaacatattgttgatgcaattgatgtgatgcttgctgtgtggaatgtacatccatgatgtgcatgcatgcccatgtgttggttgcatgttggtgtgatgcttttgcttgattcctgatatatgtgcccccagccatgtacctggtgtgttccccaccttgggcatcatgcaccacaacaaacagtgccactgatgaatgcaaatgtgaggaagttgaggcgaattcttgggtgctgcttggatgcttacttgaagacgatggactatttctggttggtgctgaactgagtgacattggcttgacatcacagttgtcttgcaccctgttgtgtgctctataagcagtgttctagatgccttctttcctgccagggcctttcccaataccaacctgctggttcctcacctgcattaaccagccccagttctgggcttgtcttgggcgaaggtgaactgtgtgagaagatggcca

SEQ ID NO: 548138 - DNA, 168 bp, Homo sapiens
  misc_feature (24)..(24): n is a, c, g, or t
gctgccatggggttgtagccccangatcttgccagtctgtatgcttccctagaggtttgagcagcggagtactaaagaagcaagccacacccccactccacctcctgtgagggggacaaggaaacttttcccatttcaactggtggctcgtctgggatctcggaagat

SEQ ID NO: 548139 - DNA, 207 bp, Homo sapiens
ctggaacacacgaacagtgaaggacagaaccttggaccacaggccattcctcaggatggcagtataacacatcagatttctagtgccgtaatcctccaaatttctggtccaggctttgtcaatagattcacagcgataaagcagtatgacagagtggctccagcgagacccaacatgctgcttcaacatgcacgcatgaagctatct

SEQ ID NO: 548140 - DNA, 2220 bp, Homo sapiens
cagttttagttgtttttaatgagctttctgagcttggaaaacatgtcaaaattgtgtgtagttaaaagcctctgaggaaagagtctaaacattaaaccttcccgactgtggttcacagcaaaaatgtccagtgtttaggagcactagctcagactcaaactgccccttcttagcagtttgatcttaagcaaccttaatttgatctcaggcaaattacatttctctgggcctccatttactcatttttaagaagaggatatcaataacctaccacattgggttgttgtgaggattaaatacacattgaaatattaagaaaatgcctagcacacagtaagctctcagtaaatacttgctattattttatattgacctaaatatgccctttcatcaatcagttatattcttgggcaaggtattttaacaaatcactggccacttggaagtggaggcaacttgcagaaaattgtgagcataccatggagttcctggagttgtgcagcacagtgctggctggcctctgctaactttgtcttaataacctcaatgctaaatccatcctaagtaaatttaaatcacatccttagacacactgtccattctcaaaccgaatgaaaaaaaaattccacaagaaacaatgaaatacacattaacattttccctctatgtcccttgaatgtaagttctcttaaaattttctgtatactgattttatatcaagaacacttggatgataaataaacattaaggtaaaatgtaataggcacttcttttggggggaaaaactatgaaaggaacaactttttatattgaaattgcatcagaatccagggtagcaaagttataacttcttgaagttatcaaattaaccacagtccaaagaatggctgttagtatcctttggctgaacagattactgtgttaattagaacacagttattagtggttcttaaattcaaagtcatataaattttagtttatgcttgcacttaactcactcagttaattttcaaacataaggttcgactcctgttattagcgacttgacacgttctgctgaagctctcacttttcttctaattctgaaagtacttttatacattctgaaatggcatttcagcagatggaaaaatgaaggtggcaaatcaggaccaatttcttatttcaaggttaaattaatactaaaccagactattaatgaaaacatcttcatcaaaattaactagagagttggtagttctctgaaactttgtataaattttatttattactgtaaatactaaaatcacattgaaaacaccttaaagttaagtcccaacccgattattagagaaaatcacttgggcatccagtccccttgatcgaacctgggtaacaaaagaggcaaaagacatgatttgtgatgaaacttactattcaaatgctaaatgttttcaagctttaataaggtatatatcaattccaagtaccaagcataatataaaaattcaaattcatgggtttactcttaataagcatcaaaagcaaattttgcgcactgaatcctatcttactcttgattggcacaatgcattcagagatgagttataattaggaaaaaagagtgtccactgaatgcatcatgtgtaaaaatgcaattaacatttcaaaaccacattaaaagggaaaatacctaaaaagttaactcttaataaaattatttgaaacaatattatcctgcagataaaaatacatttcttgtatatacatgtagatttctacatgaaagaaaagattcagctccaaatagaaaagggctgacccttgataaagacatcttagattgccaaactgatgtgattaccactgtaagaactaaaaacagaaggataaaaagattaagttaaaggaaggataaaagtttagtcaactgctcctgaacagtggcagagttgggtgagaagtgggagatgaaggcagaaataagacaaagaagaaaggcaaagaaggcttcaactctgattgaaaatgagtggagaatcaaacaaagttgagaacagatatgatataggtacagtgagatacttgaaactagaatttgatagttgatagttatagaagctcaattaaatcatcttgaagtggaattagacaaagcatctacattttaatggagaaccagtattacagtgaccaggtaactcggacaactcgtcggggatcctctaggtcacccagcac

SEQ ID NO: 548141 - DNA, 755 bp, Homo sapiens
ttggctactagtctacgctggaatacgattgctccacggttggctactagtccacaggttggctaaacctagccccaaacccactccaccttactaccagacaaccttagccaaaccatttacccaaataaagtataggcgatagaaattgaaacctggcgcaatagatatagtaccgcaagggaaagatgaaaaattataaccaagcataatatagcaaggactaacccctataccttctgcataatgaattaactagaaataactttgcaaggagagccaaagctaagacccccgaaaccagacgagctacctaagaacagctaaaagagcacacccgtctatgtagcaaaatagtgggaagatttataggtagaggcgacaaacctaccgagcctggtgatagctggttgtccaagatagaatcttagttcaactttaaatttgcccacagaaccctctaaatccccttgtaaatttaactgttagtccaaagaggaacagctctttggacactaggaaaaaaccttgtagagagagtaaaaaatttaacacccatagtaggcctaaagccgccccaagttagaaagcggtcaaggtcataacctcttactaatccaacacatgactggacatctacaacccattgtaccaagtttacacttatagaaacataggtggttaaagacatggaacactcttctcccgttaggcccggtcgaatcacatgaacgggggttccctgccctttcctt

SEQ ID NO: 548142 - DNA, 94 bp, Homo sapiens
ggacttccggcgagcgggcaagcgggaaccaggtggccacccggtgtcggtttcattttcctttggaatttctgcttttcttttctaacaaggg

SEQ ID NO: 548143 - DNA, 775 bp, Homo sapiens
ttggctactagtctacgctggaatacgattgctccacggttggctactagtccacaggttggctaaacctagccccaaacccactccaccttactaccagacaaccttagccaaaccatttacccaaataaagtataggcgatagaaattgaaacctggcgcaatagatatagtaccgcaagggaaagatgaaaaattataaccaagcataatatagcaaggactaacccctataccttctgcataatgaattaactagaaataactttgcaaggagagccaaagctaagacccccgaaaccagacgagctacctaagaacagctaaaagagcacacccgtctatgtagcaaaatagtgggaagatttataggtagaggcgacaaacctaccgagcctggtgatagctggttgtccaagatagaatcttagttcaactttaaatttgcccacagaaccctctaaatccccttgtaaatttaactgttagtccaaagaggaacagctctttggacactaggaaaaaaccttgtagagagagtaaaaaatttaacacccatagtaggcctaaaagcagccaccaattaagaaagcgttcaggagggtacagccaacgacgacgaagatcccagacagacaacgtgaacgcctgaaagccaactggacgcaatctagtcagacctactagaagaacaaaatgtctagaagaaggaaagcatgtgaacagttttgactcgtgaagagatgattgcgatcatgattggtagattgtagat

SEQ ID NO: 548144 - DNA, 473 bp, Homo sapiens
tataaccctaatcgcgggcgatccctgtgattcctggtacgctgctgttgttccagctgtaccgcgtacagaccagcagcagggtggtgatgaaggcgaccgcattgacggcccagaatttgtatttgagcgagatattgctaagccaggcacccatggaaggttttctctgatagcggaaacggtattggcaaggtgccattattgtgccgctattcagaacagcgcttttgatatgggtcaatgcgccgcatcaatcgatggcaggcaagccgaaaaagcgccgggcgcacgcggtgttgtgcagcgcctggtcttccattgtttcgttaccggtgcaaggccacttccgcgcagtacttcgggcaggtaagcgggttcattgcgaccattcttcgggcttggggcgcagggtgcgtggaagcaggattagggcgcatcgtttcccagcattcaaagggcctcggggaata

SEQ ID NO: 548145 - DNA, 504 bp, Homo sapiens
ccagtgatgggtgcaaaaaggtaggaaaccgctgttattgtgtctattgctcaggctgctattaagatatttcccattagactgggtgtggaggttcatgaagcctgtagtctcagactactatgggaggcctgaggtaggaggatcacattgagcgtaggagtagcacgatctcggctcactggaacctccagctcccaggttgaagtgattctcctgccttggcctcccaaattgctgggattacaggtgcccaccaccacacctggctaattttttgtatttttagtagagacaggattttgccatgtaggccaggctggtctcaaactcctgacctcaggtaatccacccgcctcagcctcccacagtgctgggattacaggcttgagccactgggcccagccgctcactttatactatagctcttagcacatgtggaatatagtggtaataacttctcaagtgtctttacagattctataattcgtatcatttatcagt

SEQ ID NO: 548146 - DNA, 660 bp, Homo sapiens
ttggctactagtctacgctggaatacgattgctccacggttggctactagtccacaggttggctaaacctagccccaaacccactccaccttactaccagacaaccttagccaaaccatttacccaaataaagtataggcgatagaaattgaaacctggcgcaatagatatagtaccgcaagggaaagatgaaaaattataaccaagcataatatagcaaggactaacccctataccttctgcataatgaattaactagaaataactttgcaaggagagccaaagctaagacccccgaaaccagacgagctacctaagaacagctaaaagagcacacccgtctatgtagcaaaatagtgggaagatttataggtagaggcgacaaacctaccgagcctggtgatagctggttgtccaagatagaatcttagttcaactttaaatttgcccacagaaccctctaaatccccttgtaaatttaactgttagtccaaagaggaacagctctttggacactaggaaaaaaccttgtagagagagtaaaaatgcaaaagtgcactcttctatatctacctttgctcagtgaagatgataataacctatggtatgttcattcctgttgtagaataaaagtttcaatctttccaagaatttttggtg

SEQ ID NO: 548147 - DNA, 729 bp, Homo sapiens
  misc_feature (68)..(68): n is a, c, g, or t
  misc_feature (140)..(141): n is a, c, g, or t
  misc_feature (191)..(191): n is a, c, g, or t
  misc_feature (206)..(207): n is a, c, g, or t
  misc_feature (271)..(271): n is a, c, g, or t
  misc_feature (283)..(283): n is a, c, g, or t
  misc_feature (309)..(309): n is a, c, g, or t
  misc_feature (313)..(313): n is a, c, g, or t
  misc_feature (341)..(342): n is a, c, g, or t
  misc_feature (367)..(367): n is a, c, g, or t
  misc_feature (382)..(383): n is a, c, g, or t
  misc_feature (416)..(416): n is a, c, g, or t
  misc_feature (441)..(441): n is a, c, g, or t
  misc_feature (462)..(462): n is a, c, g, or t
  misc_feature (620)..(621): n is a, c, g, or t
ggacgttccgggagcgcggtgttagcgtcggcggtttgggcatggcgactttttctggcccggtggcnaatcctgtcgcttaatccgagaaagatgtcgagttcaaaaggaggtggcgcaggttcgcaagcgcataaccnnagcgaaaaaaacaagaacaatttactcctggagtagtctatgtgcgccanctacctaacctattnngaggaaaccagatctttcatatttctcccagtgtgcactgtgacacggttcaggctgtccagangtaaaaggatgnaaatagcaaaggctatgcatttgtgnagtngagtctgaggatgtggccaaaataggtnntgaaacaatgaacaactacctgttnggtgaaagactctgnngagtgtcattttatgccactgaaaaagtacatnaaagaatctttaaagactgaatatnccatttaagcagcatcatatncatcagtgaaacggtataatccggaatcggacactaacacaaaagctaggatggaggagcgatttacaagaaagaaagattactcagggaagaagtagttaaaaaggaatggactatgattttccttcttggattaacgaaaggaagtatttaaaaanntaatcgtcagacgtctacaaaggccgtttcgtagaggaggaaaaggtttcggatctcttggatctgtgaaatgtggtggcagggcccacacgtgggtccccatttttg

SEQ ID NO: 548148 - DNA, 673 bp, Homo sapiens
gggagcttgtacgtgatgagagcagcttcgccaacccctgcaaagtgactctgaagaagacgacaagccctgctccagtcacacccagaagctgactggtccacgcatggccgaagcatgaggaaactcatcgcagaactcattttccttaaaatttggacttgtatagtaaggacttcaactgaccttcctcagaccgaaggctgttcccagtgtatacatcaagtcactgaggtaggatgaaaggttgctacggtcctattattttacggttattataagtgtacgagaactctaaaaaaacttatttgtataatgttattctatacaaggtatgtagcccaggaaatgaccaacctgatgtgttttatgactcatctgagcctcccatgaccacagtttttaaaataagattaaagatctcataagtgggatctaattaaactaaagagcttctgcacaggaaaagaaactatcatcagagtgaacaggcaacctacagaatgggagaaattttttgcaatctgcctgtctgacaaaggtttaatatccagaatttacaaggaacttaaacaaatttacaagaggaaaacaaacactccatcgagaagtgggcaaggatatgaacagaacttccccaagaagactttgctgacaaaaacatgaaaagtca

SEQ ID NO: 548149 - DNA, 700 bp, Homo sapiens
  misc_feature (525)..(525): n is a, c, g, or t
  misc_feature (533)..(533): n is a, c, g, or t
ttggctactagtctacgctggaatacgattgctccacggttggctactagtccacaggttggctaaacctagccccaaacccactccaccttactaccagacaaccttagccaaaccatttacccaaataaagtataggcgatagaaattgaaacctggcgcaatagatatagtaccgcaagggaaagatgaaaaattataaccaagcataatatagcaaggactaacccctataccttctgcataatgaattaactagaaataactttgcaaggagagccaaagctaagacccccgaaaccagacgagctacctaagaacagctaaaagagcacacccgtctatgtagcaaaatagtgggaagatttataggtagaggcgacaaacctaccgagcctggtgatagctggtgtccagatagatctagttcactttaattgccacagacctctaatccctgtaattactgtagtcaagggacagcttttgacactagaaaacctgttaggagtaaaatttacaccntgtggctnaagcgccccattaaaaggtttagttaaaccccttctaaaaattccacatatattgattctaaccccttgggccaattaacctatataaacctagttggtaaggactgtaaacactttttccataaactttgtagataaaacacttaatggcatacaacccaaatttc

SEQ ID NO: 548150 - DNA, 163 bp, Homo sapiens
ctgcactctatcttcatgtatttaggcatctagtgatcccatatctattgtgaacagtgctgcagtaaacatgggtgtgtaatgtttcttcaatactgacttcctttccttttgataaagtacccagtaaggagacagctggctcatacagtagttctatttg

SEQ ID NO: 548151 - DNA, 697 bp, Homo sapiens
  misc_feature (378)..(380): n is a, c, g, or t
  misc_feature (382)..(384): n is a, c, g, or t
  misc_feature (389)..(389): n is a, c, g, or t
  misc_feature (407)..(407): n is a, c, g, or t
  misc_feature (410)..(411): n is a, c, g, or t
  misc_feature (427)..(428): n is a, c, g, or t
  misc_feature (435)..(435): n is a, c, g, or t
  misc_feature (438)..(438): n is a, c, g, or t
  misc_feature (441)..(441): n is a, c, g, or t
  misc_feature (538)..(539): n is a, c, g, or t
  misc_feature (546)..(547): n is a, c, g, or t
ttggctactagtctacgctggaatacgattgctccacggttggctactagtccacaggttggctaaacctagccccaaacccactccaccttactaccagacaaccttagccaaaccatttacccaaataaagtataggcgatagaaattgaaacctggcgcaatagatatagtaccgcaagggaaagatgaaaaattataaccaagcataatatagcaaggactaacccctataccttctgcataatgaattaactagaaataactttgcaaggagagccaaagctaagacccccgaaaccagacgagctacctaagaacagctaaaagagcacacccgtctatgtagcaaaatagtgggaagatttataggctagnnngnnnacaanaccctcccgaggcctggntgnntagctgggttggtccnncgaatanaantcnttagcttcaagcttttagaatgttgccctagcagaacccgtcttagaatcgcccattgttaacatttatactggttagctcccaaacgaggcaacanngctcttnntggacacgtaggaaaagaacccttgctagcagcagagtaaaacaatttaacaacccattagtaggcgctgcagccaccaaattacagaaagcgttcaaggctcaactaaccgactaccttcttatcagcccttatacgaagctttggttg

SEQ ID NO: 548152 - DNA, 557 bp, Homo sapiens
tgacgccgttgtggctccgtgacacggatacttcctctccatggagacgatgacaaggggcgcctcatcggctggacgcgggctcccataagaccgtgcgcagtgccgtctggacctgactggcagtggcgggcacaggttccaagcccagcgccgagatgagctctaggtccaggtgatcgactgcgaaggaggtccatggacaggacagtacttgcccagagagcagagcgaggagcgttgtgggcagggactgcgagatccgtgtcgagacttggctagcaatcttggtgatggcctgtctgctctctggagctgtctgtcatcgggagaaacacgtcgggagatggatcccattccctaaaggtctcacagcaaaggagcaggactcccaggcccctgtaccctgcctggcctgattcagggccttgtggcccccagcttctgttttaagctgggcagaccccaggatcccttccctccctaaggactcagctgaggggcccctctgcccccttctaactccacctcagaacccccccccggcataaggtggg

SEQ ID NO: 548153 - DNA, 778 bp, Homo sapiens
  misc_feature (618)..(618): n is a, c, g, or t
ttggctactagtctacgctggaatacgattgctccacggttggctactagtccacaggttggctaaacctagccccaaacccactccaccttactaccagacaaccttagccaaaccatttacccaaataaagtataggcgatagaaattgaaacctggcgcaatagatatagtaccgcaagggaaagatgaaaaattataaccaagcataatatagcaaggactaacccctataccttctgcataatgaattaactagaaataactttgcaaggagagccaaagctaagacccccgaaaccagacgagctacctaagaacagtctatgtagcaaaatagtgggaagatttataggtagaggcgacaaacctaccgagcctggtgatagctggttgtccaagatagaatcttagttcaactttaaatttgcccacagaaccctctaaatccccttgtaaatttaactgttagtccaaagaggaacagctctttggacactaggaaaaaaccttgtagagagagtaaaaaatttaacacccatagtaggcctaaaagcagccaccaattaagaaagcgttcaagctcaacacccactacctaaaaaaaaaaaaaaatanaaaaaaacggccttccacccccgtcgcctccgccaagcacactataatctaaacaaagaatatccttccaatactaaatatggagttaatattaccaattttccccatattatacctcaacaaacaaccgagtcctattactaaacatatcaaacactca

SEQ ID NO: 548154 - DNA, 693 bp, Homo sapiens
  misc_feature (552)..(552): n is a, c, g, or t
  misc_feature (584)..(584): n is a, c, g, or t
  misc_feature (606)..(606): n is a, c, g, or t
  misc_feature (629)..(629): n is a, c, g, or t
  misc_feature (638)..(638): n is a, c, g, or t
  misc_feature (648)..(648): n is a, c, g, or t
  misc_feature (679)..(679): n is a, c, g, or t
  misc_feature (682)..(682): n is a, c, g, or t
ttggctactagtctacgctggaatacgattgctccacggttggctactagtccacaggttggctaaacctagccccaaacccactccaccttactaccagacaaccttagccaaaccatttacccaaataaagtataggcgatagaaattgaaacctggcgcaatagatatagtaccgcaagggaaagatgaaaaattataaccaagcataatatagcaaggactaacccctataccttctgcataatgaattaactagaaataactttgcaaggagagccaaagctaagacccccgaaaccagacgagctacctaagaacagtctatgtagcaaaatagtgggaagatttataggtagaggcgacaaacctaccgagcctggtgatagctggttgtccaagatagaatcttagttcaactttaaatttgcccacagaaccctctaaatccccttgtaaatttaactgttagtccaaagaggaacagctctttggacactaggaaaaaaccttgtagagagagtaaaaaatttaacacccatagtaggcctnaaaagcagcaccaataaggaaaggcgtcaagntcaacacccactacctaaaaanttcccaaaccattttaccttggncttccttanacccaatttnggcccatttttttaccctttttgggggcctnatnttaggttaggt

SEQ ID NO: 548155 - DNA, 415 bp, Homo sapiens
taccgtttatttgtgttggtacaggaagaaatgagcttcaataatcattagagtgacgagcagtgattactttaaaatctgagttctggccaggactcacgcctgtaatccccgcactttgggaggctgaaacgggcagatcatttgaggtcaggagttcgacgaccagcctggcctacattgtgaaatcctgtctctactacatacaaaaatcacgctcctgtaattccagcactttgggatgccaaggtgaatggatcacttcaggtcaagagttcatgaccagcctggccaacgtggtgaaaccccgtttctgggaggtggaggctgtagtgaactcagactgcgccactgtactccagcctgggccacacagtgagactgcaggccactgcgtgctgactctctcaccatg

SEQ ID NO: 548156 - DNA, 484 bp, Homo sapiens
gcccgttccgggtgctgaagggcgagctggagctggcccgcaatgacatgatctcgtcagtcggacctgcattatgaatcggcagggtgaggatctcgagtacggtccaagacggaggacgggctggcaggacgggacgcacgacgcaaaggtatgtatacggacccagcgcagaggatgaaaggtgcgcgcaagagagcgactcacgacagatggcggtatggactgatgcagcggaaggaaactccggggcatgggatgcgcctggttacgcctgcagagtccgaagccatgctaagtgcatacctggatagcatgaacggcatcgacgacgctgggtgacccgcagaggtaacacgaggtagccctctaggactacgtcacgcgcaccacacgcagcaaaggccagcgcttagtcccgagtatacaggctgtgacacaaatctcactggacggcacgcggccacagcgaggatcgcagaac

SEQ ID NO: 548157 - DNA, 373 bp, Homo sapiens
tttcacggaaaacatttaaacatcataaaagatgtttgagccgacataaaaatagacagaagtatcttattaggcaaattcaaatttataaccagaaaataattgtggagacttatttttggactctgtagttattggtgtatcatacacaagccaacatttctgaccactagtttctttatctgtgagcagaaatgcctccataagatacaaagaggactcctttgaaagactgacagcttgttatttgatgggtggttggaccttacacagtaatttactgggctttggacattgttcgagggacaaaactcttggggcttatgatccacacctccccacatttttggaattcttttttaaaaacggaaat

SEQ ID NO: 548158 - DNA, 316 bp, Homo sapiens
gctcgacgctggagtcagttacaatcaaggaaaactcagttttttggcctgagaactggaaggatggagttaccataaacgaataactgcaatgaggaaggccaaagtggattaaattgtcctggccaacatagtgaaaccccatctctactaaaaatacaaaaaattagctgggcgtggtggcgggcacctgtaattccagctgctcaggaggctgaggcaggagaatcgcttgaacccgggaggcagagattgcaatgagccaagattgcaccattgcactacaacctgagcgacaagagtgaaactccatctc

SEQ ID NO: 548159 - DNA, 492 bp, Homo sapiens
  misc_feature (16)..(16): n is a, c, g, or t
  misc_feature (28)..(28): n is a, c, g, or t
  misc_feature (123)..(123): n is a, c, g, or t
  misc_feature (264)..(264): n is a, c, g, or t
  misc_feature (283)..(283): n is a, c, g, or t
  misc_feature (327)..(327): n is a, c, g, or t
  misc_feature (346)..(346): n is a, c, g, or t
  misc_feature (355)..(355): n is a, c, g, or t
  misc_feature (374)..(374): n is a, c, g, or t
  misc_feature (396)..(396): n is a, c, g, or t
  misc_feature (406)..(406): n is a, c, g, or t
  misc_feature (464)..(464): n is a, c, g, or t
atctgagcaacagcanttaaccctagancttctgtctgacagagcctacccaaatgagaagaaaccagaaaatcaactctggtaatatgacaaaacaaggttctttaacacccccaaaaaatnacactagctcatgagcaatggatccaaaccaagaagaaatctctgatttacctgaaaaagaatacaggaggttagttattaagctaatcagggagtcaccagagaaaggtaaagctcaatgtaaggaaataaaaaaaacantcaaaacttcaggaaacantggacacacttatagaaatgcaaaatgctctggaaagtctcagnaatagaatggaacaagtanaagaaaganattcaaagcttgaagacanggtctttggattaaaccaatcnaacaaagacnaaaaacaacaacaacaaaaaagtatgaacaaagtccaaagaagtctgggattatgttnaatgacccctaagaatattggtggttct

SEQ ID NO: 548160 - DNA, 116 bp, Homo sapiens
atgtatcatcgcgttagaagtatatactttggaagtctcaatgaagagcaaatttaaatattatgtgcattgtaaatacagtagctataaaattttccatacttctaacgcgatga

SEQ ID NO: 548161 - DNA, 276 bp, Homo sapiens
ggtaccacagcctgcttgctcagtgtcttgcttttgacaaacgagggaggacaaaggcgaaagtgtctttgtgctcctgtcctcctggagaactgtccttgtctttctgggggacctgtccttgtcctacctgctgggccaggtgagctgcccattgcgacgttgaggctgggcccccaacactggcacaggtggcattggcttgggtcctgagggctgtggtgtttatctcggccgctcctccggaatcccttctccaagggtacccacagcctg

SEQ ID NO: 548162 - DNA, 163 bp, Homo sapiens
gcttactgcttgctctttcaaccggctcttcttcacagccatgttgttcctctctcggcgttgcccatactcgtcaatatatcgatccatgggcgaactctttaagctctgcttgctgggagccacagctttgcctcctcccccagaggccagcatggcacca

SEQ ID NO: 548163 - DNA, 151 bp, Homo sapiens
ttttctatagtgtcttctaacaagattaattccacaaagtgatttgaagttaaaagatacgtgatatcttctgtggctctcatcatactaagtacatagattaattacttgttgactgctttgagactatcagtattatgggggtatagaa

SEQ ID NO: 548164 - DNA, 345 bp, Homo sapiens
aagaggcatttatttataaatacccttgccccccattactatcttaagaaaagcagttctaggccaggcaccaggtgctcatgcctataatcccagcactttgggagtctaaggtgggaggatcgacttgagcccaagaggtcgagatccagcctgggcaacatagttagacccattgcagcaaaaaatatatatattagctgggtgtggtcgatacgcctatggtaccagctacttgggaggctgaggtgggaggatctcttgagcctagaggttgaagagccatgattgctgtgatcgcaccactgcactccagcccagacgacagagcaagaccctttctca

SEQ ID NO: 548165 - DNA, 1079 bp, Homo sapiens
  misc_feature (772)..(772): n is a, c, g, or t
cgtgttggctgccagctcgccgcctgcagggcctgccacctgccgcgctgctgcctggccctcgtggtggcttgcctgccacctcctgaccctcgcctgcctgtgtgcttcactgcttgcctgcctgcctgtgtgatgtgcatgcctgtgtgctgcctgtgcaccgatgtactgagtcagaacgttctggaactgtgaccccctgtgtggctagcaagcctgccatgctgccatcatgtggtgcctgcctgatgtgagttgtgtgtgctcttgcatgatgcattgccttgcccgaacacctgtgtgcagcattcagacagtgacgatgcacacctgtgaccagtgcaatgtgatgcttgttatcacccatttcacgactggatgtggttgtccaagagctcacatggtcaaacaaacgtggtcatgatgtaaacacaagatatattacatgggttcaagccaacgaacacagttatggcccatacaagacaacaaagtctgaggggatgtcccaaacaataacacaagcttcagtgggagtcagccattaattggttgtgcgggaccaaaatggcatggcttggaagggttccccaagccaagaatggtgccgttttcccccccttagctaacagtttgagtgtcgcgtagttcgaaccaattggagaagcaaagaactgtcgtggcagggtccttcagagctgcatacaaagatgttcaagttccaaaccccatgccctcggtgcccccccggtggttctccaacgctggnccccagagacacattggggcacagtaccccgaaggagacacccaaagaccaaagattctcaacaacgttacattgtttgaccaacctcggggctcagtcagttgggcgagccagagcgcaggacgggatcagtacccgaggggggcctccttggacacttatcccaacacatgactacaggacgcggtgcacaaccccccatgtgtgtgaggaaagaccccccacagccaaccagtttcccctcagagttgggcagtctacacagaggcaagtcccctaccgagtaaggactcccaattaatcatcc

SEQ ID NO: 548166 - DNA, 354 bp, Homo sapiens
caaactcctctcttaccacccgcagctgaactcctctcagcgttcaggtgttcctcatcttctcactttctctgccatgccgttctgctgtttgactgcttttctcttcatctcttcatctgctcctggagcctggggtttggggtttatatgggtacaggatacgggggtgtggtgggccaaagggcaactttttgggtacgaaaacagaaatgcctgttcccagttagggccatgggtctccaggcttgagggtggggcctttgctggggagccgccctcttctatgcagtatttccctgtctcttttctatatcaatacctcaataaaatttagttttaaaaaataaaaaa

SEQ ID NO: 548167 - DNA, 161 bp, Homo sapiens
  misc_feature (21)..(21): n is a, c, g, or t
  misc_feature (94)..(94): n is a, c, g, or t
  misc_feature (111)..(111): n is a, c, g, or t
  misc_feature (132)..(132): n is a, c, g, or t
  misc_feature (136)..(136): n is a, c, g, or t
gaggcaggagaatcgcttgancccaggaggcggaggttgcagtgagctgagatcatgccattgcactccagcctgggtgacaagagcgaaactntgcctcaaaaaaagggngggggggcaatgggaaaccantgantcgtttttagcaggtggtctgattt

SEQ ID NO: 548168 - DNA, 396 bp, Homo sapiens
atggcagacagcggtatgcgagctacgccaatggatccgccgcttcgctccaaagatgcgataatagctggtacgatcgcactcgtcgcaggagtgacagcgggcggcacagggctcgtcggtgaaggagtcggagtaggagagggcgcaggtgtcggcgtgggcgttggagtgccgccaccaatcccgccgcctacgccgccgtcatcatctcgtgctgcggttaggctcattggatgtcacctactgggtcactagaagtctgcgtttgcactgaacctgtattagcggtgtcagagccagcggctgtctgactgctagtgtaagctacttttgcggtctggcgtacttccctcaagccaatttcaacagtcaacatgcttgcgccttttgacg

SEQ ID NO: 548169 - DNA, 318 bp, Homo sapiens
gaggtcccctcacgcttcagcttaagaacacctctttccaggtgggcgtggggactcaggcctgtaatccaagcactttgggaggccacggcaggcagatcatgaggtcaagagatcgagaccatcctggccaatatggtgaaaccccgtctctactaagaatataaaaattagctgggcacggtggcacgtgcctgtggtcccagccattcaggtggctgaggtgggagaatcccttgaacctgggaggtggaggttgcagtgagccgagatcacgccactgccctccagcctggcgacggagcaagactccgtctc

SEQ ID NO: 548170 - DNA, 199 bp, Homo sapiens
tagaggatccccccgcgtgatgcagcgtgcgcggtcttttctttcaattggcggagggagaaatgatcgaggtgagcataggtgtggataatgctcaccaacttcagtcccagctgcatcaaaggcgcgcaaggatcaactcgtgattgcaccggggtcgaccacgatggctatattaagtgatcgggtcgccaaatga

SEQ ID NO: 548171 - DNA, 713 bp, Homo sapiens
ggggacagctgcggcagccggcggggggcgtcctgagttggcggtcgagggcgctgccagctcccgaggggccgctcgggccccttccggcccgggtctggttgggccgcaggagcagggcgggctgcggcgcccgggtctggccctggcctacgggctaagcgcccggccccggggccgcggatccggcagccatgtgtggattcttgaagcgccatgtggtcttctgaacgcgcatttgaacagattcgtacaagcggccttcagtattgcaagactgatcaaagctgcttcgtagccccggaagcgcttaggcatctccgaagtagcgctgggcaaagtgaaggcttcctgatctcagaagcacgttgtgggcttggcaaacccgacgcgcagcccatattcaggtttcaaaaattaacacatgggcattccgcttttggactttctccaacacggttaggcatctctgaaaccttgagaactgtgcatgggcagtggaacgaagagggaaaggtgcccatggcgtccgagcaagagcaggtcaagcacaacaggaagcaagaacagacagagaaacgaggatggtaccccacacgaacaatacagtcctgacccacaaaggcgcaaatatgaggcaccacccctatatacccaccgacagacgaacaggcacccctatgatggaaccagatagggaccccacccagacc

SEQ ID NO: 548172 - DNA, 473 bp, Homo sapiens
  misc_feature (439)..(439): n is a, c, g, or t
  misc_feature (467)..(467): n is a, c, g, or t
gtcgacgggaagatggagcctccgttttgaacatacctggctcccaggtagcccttttctgttggcacagctgctggcattcacccgtgcaagcttccagcttgcttgtctatgtttgcagctcgatttttcaggctgctctttgttagaaaagaataacttcttgggctactttttgttagaaaggaagccttgccaaggactcttctaccctcactatctgcctaatttctttctatctcctgtatcaaaaaggtgaaagttcttgatttgataaggaaagaaaaaaaatccatatgctgaggttgctatgttctctggtaaggacgaatctgctgggtgtgatggtgctcgcctgcagtcccagacactcaggaggctgaggcgggaggatcccttctgcccaggagttcaggtccaacagacaacattgagaccncatgtctggaaagaagtaaataaatganataaca

SEQ ID NO: 548173 - DNA, 243 bp, Homo sapiens
atgcagaaaaccaagatattaatagacagcatgaaggtgctgcacaaagaatatcatctgtgtaatgaataacataacattggggaaattaatctcttactggctttaatatgcatcccacataatattgacaaatgtagggctattaagcatacttgaggtaggactttcaatggtaagcgtcgtcaggagtgatgttgttagggctgacagcagcaaattttcaagtctgagggcacgatg

SEQ ID NO: 548174 - DNA, 245 bp, Homo sapiens
  misc_feature (41)..(41): n is a, c, g, or t
  misc_feature (160)..(160): n is a, c, g, or t
  misc_feature (197)..(197): n is a, c, g, or t
caacctccaatattaccccactacagcaaaggggaagacanaccccgcctatggtacactgtctatgtaagcacaacttagaaacaacttaactgcctgcagcatcagaccaagttcctggatcataagttggaaaggggcttccaaataacacttctanatatttccaataatatctactaatttctgttaaccanctatgtttcaactccacttcaataaaaacagccaaatttctctcctgg

SEQ ID NO: 548175 - DNA, 277 bp, Homo sapiens
tgatatttttttcgtatcaggtcatctcgttcgttgctgtgatcttatttagtcacgtagtgtgtggggcgacattgtgcataagcttggggatactgagctcgaatttttggtcattgtctttgacttgtttcctgtgttgaacattgtcatcctgcaagtgtagtgttgagcagtgatggtaataatgacttgttggctgagtgtagatcttgggctgtcaattgtcagttcagtgtaataatctgacgcaggcttatgcggacacgaatgttca

SEQ ID NO: 548176 - DNA, 197 bp, Homo sapiens
tctcccctgcgctgcgaccctccggaaccgctgtttggctcctctctttcggctcagctctcggtcggagtttccttatcagtatgacttttctcgcaactctaggataggctgtgggagttcagggacatgtccatagctacttattgttaatgcctttaacgagaagttaactcttaggttgagcacggaccgga

SEQ ID NO: 548177 - DNA, 565 bp, Homo sapiens
cgtcatctgggtgacgacaaaagggtgtcgtccggcacgcgccatccgggtagatgcgcaccactttaccttgcagcttgtcaggtcctgggccgtggggcggtcgttgttctccccgagagtcacgaacaggtagccatcacggtcgaaggccaggcgcgagccgaagtggttgccagtagacagcttgggctcctggcgcagtatcaccttgaagtcttccaagccgctcaagtcggccgccaaacgcccgcgccctacggctgtaccggccttgcggccctcgccagcgccttcggcgtacgacaggtaaaccaggcggtcttgcttgaagtctggcgacagcaccacatccagcaacccaccctgcccttgggcccatacctgcggcacgcccttcaggggcgcagacagcttgccgtccggggcacacaaaacgcaggttcccaggcagtgcggtcaccaggaaaccttgcgggtccggcaaaaacgccagtgcccacggatggtcaaggccctgggcaaccggcgtggcggagatgctgccttgcccgctggggaactg

SEQ ID NO: 548178 - DNA, 90 bp, Homo sapiens
caaagggagcaaaggcacctgcctttattgggggccatgggctgcctgatttcattcaaaggccacacatctgatcacgacctgccagtc

SEQ ID NO: 548179 - DNA, 163 bp, Homo sapiens
catcacaatatattacatcaatcatgtgtcatgtcatgtatatattatcttttatatagtaacataagaatttacatacacaacatttattaaaatataaatatatatggaaaatagctattagttctttttctaatctgggtagtcacagactgggtagtca

SEQ ID NO: 548180 - DNA, 613 bp, Homo sapiens
  misc_feature (47)..(47): n is a, c, g, or t
  misc_feature (150)..(150): n is a, c, g, or t
atcccatgcccaaaacgttgtaaccaaattttgccccaaaaagattntcccaggcttagccaccgccatacgccggagaaccgtgcttaagaggcccactatggggggaaaccatttcattctcaaaaaaaatttttttttcctcttctncctgtttatcagtagttctgaatgttagatattttttccatggggtcaaaggtacctaagtatatgattgcgagtggaaacataggggacagaatcaggtattggcgtttctccacgttcatttgtgtgtgaatttttaatataaatgcaagatggaaagcattaatgcaagcaaaatgtttcagtgaacacatttcaacagttcaactttataacaattataaataaacctgttaaaattttctggacaatgccagcatttggatttttttaaaataagtaaatttcttattgacggcaactaaatggtgtttgtagcatttttatcacacagtagattccatccattcactatacttttctaactgagttgtcctacatacaagtacatgtttttaatgttgtcagtcttctgtgctgttcctgtaagtttgctattaaaatacattaaactataaaaaaa

SEQ ID NO: 548181 - DNA, 196 bp, Homo sapiens
cgacactgccgatgggtggggttcggtccagtccttcagagacgtcttttgtttgttgggttccatggaattgaactgctcacagaggtctccatcaagtcacacttcttcacagggtaagtagtacggagcgaaagtctgagagtggtccctgcccacagtagagggggactgttcagaaccgcagggtagcatt

SEQ ID NO: 548182 - DNA, 154 bp, Homo sapiens
gtctagagatcccccttctctgcccggccgcacagcttctcctaaagtggtttcagacttataagaaagttgcaatggcaccgactacagacatttctagtgtggctttatttacatcacagctaccctgtatccgaaccaggacggtggacag

SEQ ID NO: 548183 - DNA, 276 bp, Homo sapiens
atccccctctctccacacttctcttcacactggcacattctctctcggtgcttccctcaagcctctctattgtcttatctggaaataggagcatgttcattctcatccccaggtgtatcgagatacttgtcatcggcatcaggcgtactgcctgctgttagacaaatggcgctgccacacacggccatgcagtactcttctgtgtcaaagttgttccggttgccgccacatccgccgtaaaagaatggggcacacttcccttcagtcacatcaaag

SEQ ID NO: 548184 - DNA, 1021 bp, Homo sapiens
  misc_feature (37)..(37): n is a, c, g, or t
gaacggctaggtacgaggctgggtgtgtaatcggccngatggagtgagcccaaaggttcgaaaggtgttgcagcttcttcgccttcgtcaaatcttcaatggaacctttgtgaagctcaacaaggcttcgattaacatgctgaggattgtagagccatatattgcatgggggtaccccaatctgaagtcagtaaatgaactaatctacaagcgtggttatggcaaaatcaataagaagcgaattgctttgacagataacgctttgattgctcgatctcttggtaaatacggcatcatctgcatggaggatttgattcatgagatctatactgttggaaaacgcttcaaagaggcaaataacttcctgtggcccttcaaattgtcttctccacgaggtggaatgaagaaaaagaccacccattttgtagaaggtggagatgctggcaacagggaggaccagatcaacaggcttattagaagaatgaactaaggtgtctaccatgattatttttctaagctggttggttaataaacagtacctgctctcgaaaaaaaaaaaaaaaaaaaaaaaaaaaaaaaaaaaaaaaaaaaaaaaaaaaaaaaaaaaaaaaaaaaaaaaaaaaaaaggggggagagcgaataaaagacaaccccaggaggaggacacgaacacatgacggccgacccaacgacagttgtcgtgttaagcaaaaagaaggagtcagcgccacagaagagagataggaccgactgaatcaaataggaggaaggagggagagccaaagtaaaaacacaggagcaggggagagagaaacaaagaggcatcgagcggagccatctgtgggccgaagaagacaaacactcacattgcgaaggtagcacaaaacatgggcgaaacaacacaccgaagggaaaagtaccgagcacgcagggacgacaaataaaccaaacggcgcgagataagagggaaacaccaacgcgaacaagagcgaccagcaagacgactgcgatgaagagacat

SEQ ID NO: 548185 - DNA, 952 bp, Homo sapiens
  misc_feature (844)..(844): n is a, c, g, or t
  misc_feature (848)..(848): n is a, c, g, or t
  misc_feature (851)..(851): n is a, c, g, or t
aacacgcaaggtaaatgaagctgaggtcgcggtcgtgcttatttcaggggtgtcttattgcgccctcgaccgctgaggccgtgtctcgtcaggcgtgatgaggtgctccccggggggtccgccctgtgggtttttccgaggtgtcagaattcatgggttaacaatccgccgggggcgtcccggtttgggggagtttacagcttatatgcccggcccttcccgccaacgccttcccaccaagagggccaggagctcgtccgaattcggccacgagctaggtacctgcagaacccaaattggcgtttgtcatcagaatcagaggtatcaatggagtgagcccaaaggttcgaaaggtgttgcagcttcttcgccttcgtcaaatcttcaatggaacctttgtgaagctcaacaaggcttcgattaacatgctgaggattgtagagccatatattgcatgggggtaccccaatctgaagtcagtaaatgaactaatctacaagcgtggttatggcaaaatcaataagaagcgaattgctttgacagataacgctttgattgctcgatctcttggtaaatacggcatcatctgcatggaggatttgattcatgagatctatactgttggaaaacgcttcaaagaggcaaataacttcctgtggcccttcaaattgtcttctccacgaggtggaatgaagaaaaagaccacccattttgtagaaggtggagatgctggcaacagggaggaccagatcaacaggcttattagaagaatgaactaaggtgtctaccatgattatttttctaagctggttggttaataaacagtacctgctctcgaaaaaanaaanaanaaacccaaaaaaactttttggggcccgctggggcccccggaagaaggtttttagaaaccttgggttgggcgccggggccccagtggtatacgggcccctgg

SEQ ID NO: 548186 - DNA, 362 bp, Homo sapiens
  misc_feature (106)..(106): n is a, c, g, or t
aagtagagagacatgatctgacctacattttcaaaagcttactctggctattgtgtggaagtagaagcaaaaagaaattcagtcttcccttatgatatttgcactntaaatagaaaaaaaaaaaaaaaaaaagccccaaaggggcggattggcccagggccttgcgggtaaaaatcctgggggcgggaacatactctccattgtcagtctgacaataagttcggcacggtctatatttcacccccatttgcctagaggtgctggatggcccattattagattcccatgggacacagtcagctctttcggagaaagggcagcccagcatttcccattgagacccgcgcttcttttggcaaaaa

SEQ ID NO: 548187 - DNA, 553 bp, Homo sapiens
cgacccacgcgtccgcggacgcgtgggtcgacccacgcgtccgaatggagtgagcccaaaggttcgaaaggtgttgcagcttcttcgccttcgtcaaatcttcaatggaacctttgtgaagctcaacaaggcttcgattaacatgctgaggattgtagagccatatattgcatgggggtaccccaatctgaagtcagtaaatgaactaatctacaagcgtggttatggcaaaatcaataagaagcgaattgctttgacagataacgctttgattgctcgatctcttggtaaatacggcatcatctgcatggaggatttgattcatgagatctatactgttggaaaacgcttcaaagaggcaaataacttcctgtggcccttcaaattgtcttctccacgaggtggaatgaagaaaaagaccacccattttgtagaaggtggagatgctggcaacagggaggaccagatcaacaggcttattagaagaatgaactaaggtgtctaccatgattatttttctaagctggttggttaataaacagtacctgctctc

SEQ ID NO: 548188 - DNA, 756 bp, Homo sapiens
gcggccgcctactactactaaattcgcggccgcgtcgacggttatcaaatcttcaatggaacctttgtgaagctcaacaaggcttcgattaacatgctgaggattgtagagccatatattgcatgggggtaccccaatctgaagtcagtaaatgaactaatctacaagcgtggttatggcaaaatcaataagaagcgaattgctttgacagataacgctttgattgctcgatctcttggtaaatacggcatcatctgcatggaggatttgattcatgagatctatactgttggaaaacgcttcaaagaggcaaataacttcctgtggcccttcaaattgtcttctccacgaggtggaatgaagaaaaagaccacccattttgtagaaggtggagatgctggcaacagggaggaccagatcaacaggcttattagaagaatgaactaaggtgtctaccatgattatttttctaagctggttggttaataaacagtacctgctctcaaatagaccaacaaccaacaccagaccaagcgcccagccacacccgccccacaccaccgaccgccacccaccacacctcacaccgccaaacacaccaccgctcgcggcgccaccccggcaccccgcacgacgactcacacacacacccgaggggcggcgcgccgaccaagtgtacacaagaccgcgcgcacgacgcgggcccaagcacaccccgcgccaacaccgcgggggccctcccgaaacagcgccggg

SEQ ID NO: 548189 - DNA, 869 bp, Homo sapiens
gcggccgcctactactactaaattcgcggccgcgtcgacggttagaactaatctacaagcgtggttatggcaaaatcaataagaagcgaattgctttgacagataacgctttgattgctcgatctcttggtaaatacggcatcatctgcatggaggatttgattcatgagatctatactgttggaaaacgcttcaaagaggcaaataacttcctgtggcccttcaaattgtcttctccacgaggtggaatgaagaaaaagaccacccattttgtagaaggtggagatgctggcaacagggaggaccagatcaacaggcttattagaagaatgaactaaggtgtctaccatgattatttttctaagctggttggttaataaacagtacctgctctcgaaaaaaaaaaaaaaaaaaaaaaaaaaaaaaaaaaaaaaaaaaaaaaaaaaaaaaaaaaaaaaaaaaaaaaaaaaaaaaggggggagagcgaataaaagacaaccccaggaggaggacacgaacacatgacggccgacccaacgacagttgtcgtgttaagcaaaaagaaggagtcagcgccacagaagagagataggaccgactgaatcaaataggaggaaggagggagagccaaagtaaaaacacaggagcaggggagagagaaacaaagaggcatcgagcggagccatctgtgggccgaagaagacaaacactcacattgcgaaggtagcacaaaacatgggcgaaacaacacaccgaagggaaaagtaccgagcacgcagggacgacaaataaaccaaacggcgcgagataagagggaaacaccaacgcgaacaagagcgaccagcaagacgactgcgatgaagagacat

SEQ ID NO: 548190 - DNA, 395 bp, Homo sapiens
gcggccgcctactactactaaattcgcggccgcgtcgacggttagaactaatctacaagcgtggttatggcaaaatcaataagaagcgaattgctttgacagataacgctttgattgctcgatctcttggtaaatacggcatcatctgcatggaggatttgattcatgagatctatactgttggaaaacgcttcaaagaggcaaataacttcctgtggcccttcaaattgtcttctccacgaggtggaatgaagaaaaagaccacccattttgtagaaggtggagatgctggcaacagggaggaccagatcaacaggcttattagaagaatgaactaaggtgtctaccatgattatttttctaagctggttggttaataaacagtacctgctctc

SEQ ID NO: 548191 - DNA, 170 bp, Homo sapiens
ggatttttttcccctaaagcaattttttttttttggattaaaagaggaatggcaaggggaacccggtttgccaaaaaagagggtcgagttgatttgaagggggggcggccggatttaaacccaacccctgaccccttttaaagaccaataaaacattttttcccggccca

SEQ ID NO: 548192 - DNA, 420 bp, Homo sapiens
gcagccacctggcactcccacttctaagcttacgcccctgatcggcgcactgcgatgcgctagcccaaagcatctcttatgacgtcaccctagccatcattctactatcgtcattactaataagtggctccttttccctctccacccttgtcacgacacaatgaacacctctgattgactcctgccatcatgacccttggccattcagtatgattcatctccacactcacgcagagcaccatccgaacccccttcgaccttgccgaaggggagtcggaacgactctcaggcttctacatctaatacgccgcatgccccttcgccctattcttcatagcctactacactatccttattctcaccagacctcctaggcgacccagacgcttataccctagcctaccccttgtacacccctcc

SEQ ID NO: 548193 - DNA, 365 bp, Homo sapiens
gcggccgcctactactactaaattcgcggccgcgtcgacggttaaatcaaagcgttatctgtcaaagcaattataacgctttgattgctcgatctcttggtaaatacggcatcatctgcatggaggatttgattcatgagatctatactgttggaaaacgcttcaaagaggcaaataacttcctgtggcccttcaaattgtcttctccacgaggtggaatgaagaaaaagaccacccattttgtagaaggtggagatgctggcaacagggaggaccagatcaacaggcttattagaagaatgaactaaggtgtctaccatgattatttttctaagctggttggttaataaacagtacctgctctc

SEQ ID NO: 548194 - DNA, 1146 bp, Homo sapiens
agcccggggcggcgttcccccggcggtttgagtaggcggccgggggggatacccgtttttctcccgggtgcgcgtgttggcaccccctggcccttgtttggggggcgccttatgtgaccccgtgggtgccccccgcacaaccgggcgtgtgtcgcctcctccggcgttttccccgcggggtattttggggaggcccagcgggcgtgtgcgagcgctcttgcgggtgtgtgcccccctcctctagagggcgctttttgccctcttgggggggtgtgtaggtgtcctcggtggaccgccgctgtttgcggaacaccctcgcgccccccgcctcgattgtttgtgttttgtgcaccctttttttggccgccctctcggggagtaatttgaccccctgtgtgtgaggtgtttcttgttgtccccgccgcacctctgtctctctgttggctcttcttttttgccccccctcacccctctctctctcttggcgcgctccttttgtcacatgtactacacaccgcgaggtgtgtgcaccgtgattcctctcctcctctttccgcctcccactctcccttgtggcgcccccccgcggtgttgttgagcctctctcgggggtgaccccgcgcttcgcgcggcggggtgatatttttttcaccctcctcccacaaatttcccccctctttttttttctgtgagccccgcgcggcgacgccgcggagactccctctctgtgcctgtgtcccacctcgcggtgggtgagttctcccgcgctttgtagaccccccctctcttcgtatataaataataacctcctcccacaaatactttttgcacctctctcatgtgggggtggtccccccacactgtgagggtgttataaaacacacaagagccactttctcccgcggcgtctttataacaccacacaccacctcttttcccgctcacacaccgccccgcggggggaataatgcgcgtgtccaatagttttgtgataatattgtgggggcgcacacaccacccgtttttatagagcccctctgtgtctcctgagagaggagaatattcccctctcaaatatattttgtaaatagagggcccgctttttttccctcatgtggccccccctttcccccttttggggccaca

SEQ ID NO: 548195 - DNA, 301 bp, Homo sapiens
  misc_feature (299)..(299): n is a, c, g, or t
gcggccgcctactactactaaattcgcggccgcgtcgacggttaaaagaggcaaataacttcctgtggcccttcaaattgtcttctccacgaggtggaatgaagaaaaagaccacccattttgtagaaggtggagatgctggcaacagggaggaccagatcaacaggcttattagaagaatgaactaaggtgtctaccatgattatttttctaagctggttggttaataaacagtacctgctctcaaattgaaaaaaggaaaaaaagtcgacgcggccgcgaatttagtagtagtagtnga

SEQ ID NO: 548196 - DNA, 864 bp, Homo sapiens
ggctcgggccccccccgatgccggtggccctctttccacctggccccgtcaatgaactcgcccatggcaacgccatggggacggccctgggtttccacagacttcccgaatctaaccgtagggcagacccggtgtggcagccctgggccgcgccatgctcttcagcaatccatagtactaggacggaatggctcgcatggatgagccatggatgtgtacagagctgttcctcacacttctccagtcctgcatcgtgcatgcgcgcacggtggatgccggactgctgctgcatgcgctacccgggtcccatgacgtgcagcgcgagggctcaagtgaggaccatggtaccacacgctgcgctctcagagacgtgtttgagggcctctggctccctgaactccacgctgtgcgcagtgtctagctctttgaatcaggacgcagggcaacagcaccttgaccccacccgtgtcccgcgtgggccgtggctatggcctacaccccaccccacttctcccccaaaaccagagccacctgccagcctcagctgggacagggctggccgtagccgagaccccaagcctggcccattggtccgcctctctggcatctgtgggtccctgggctctggacaagcacatgggggacgtagccgctccagtagccacccacattctcgagtcaccataacggctagtttccctgccccctgacgtctgatgattcgggctgtggccatccacgtatttatgcagtacagtctgccgtgacgaccagcccgtgcactctgggacctggggggtgggctgtagaagagttgttggggaaggagggagctgaggataagcattctgcgcacttctccct

SEQ ID NO: 548197 - DNA, 701 bp, Homo sapiens
ggcacatgaatgccttccactgaaccgaggcactgttatagaaagaatggaacgaattgatacagattatacgaatcaggttgacgtgtctgtgtgtgtgtctttaactgatcacgttggagttgcatggcgctataatagagctcagccaagtgacttgtatttgttaattgatgattgatgaacagggacagttagttaataagaccatcgatgagcctattttcaagattagtgaagatacaacttgagccaacataagttttcccaagaaaccagaactagatcttcaagatctgtccttagaagatggaagaaaccaagaagttcatactttgacttgaacgtacactgatggtgaccaataactcatcagtctggtccagaaagaggaggatactagtcgttgatggaacttccaaatgtgagcgaaaaagctgatgttttaagctccttttgggatgagaaaagactcatgcagtcactggaatcaatttttggccttgtgaatggtaacgagagcaacgtggccttgctaaacacgagagctaaattgggactacccttcctgaattctcaatagggcaagaatcctttgaacaaaaaccagaagggctaagtttaccaccagtgcccattaaggcagaaaattttcccattttttaggtaacctggtaggacacaaccgtggacattggtgt

SEQ ID NO: 548198 - DNA, 984 bp, Homo sapiens
  misc_feature (392)..(392): n is a, c, g, or t
tcccctcgggtttgtttccaatcgagccccgagttttctcccagaggggtggtttcgtggtgttcaaaaacatcttcccagtgtggcaaataacggtttctgtcgtatgacttcagactttccggcctgctatctttctgctgcgcccgcccatattgccgcggtgtccagttggtccccgaccccttattgcgttgtctggcgtgacccgaccaggcgctgttctaccaccagtgcttcgacggcgaaaaacacagagcttcgcccgtgggcccacatgcggctgccccccacagagagggctccccaacgtcgataggaaacactccgggggtaaaccaccaaatagatggggccacccacaaatgtcttttgctgagagaccccccggntaacgcccaccccaacttcccaccttcggcggcgatgataacaaggttcacggccacccccacgtttgggagacaagaattggttgcagcagacaaacagaacaatagcttgttctctgttccgcgcaattatactgagggaactccctcatcgcactctcatgaaaaactgtttcacacagggcgcacctctctcctcttaccccacactggatgtcgccacttttccccctggaatgttatagcttcccgggataatttggatatttgaggggtacatttcacagattgggttagaagtacaatatgggaagtaaaacccagggtgagtcaccaccccacctgtatcactacagaggtcggaggagcaactccacacgacttcttatctggtgaagtccacaatgtgttcggtggaaggcacgtctgcacactgttggcatggtccggacgtaccccctacgcgagaggagaagttttggtcacccctggaccccccgcatgacatgaggagacacgacgtgcaatagttggcccgccatgaattgagcattttaaaacaaaatttcgtcggggaagccacaacaaaaca

SEQ ID NO: 548199 - DNA, 176 bp, Homo sapiens
ccgatcctgcgcgaggacgtatttgcgtgaccgcctcatcgtaccgcatcggccgctgggtgagcgcggtctggacatctactgcgccggtggtctggttgacgcgaataacataggggacgacagtcttgagaggcgttagagcctttccctgtgtgagatcgatgctgcggcca

SEQ ID NO: 548200 - DNA, 399 bp, Homo sapiens
tatattccttgtgatagtgctttgctttttcatagataagcttcctccttgcctttcgaagcatcttttgggcaaacttctttctcaggcgcttgatcttcagctctgcgagattccttcgctttttcttaagggtttctggcacagcaggaacctccttcttcttctcttctacaccctccatggttccagccggaaaaagaggcaaataacttcctgtggcccttcaaattgtcttctccacgaggtggaatgaagaaaaagaccacccattttgtagaaggtggagatgctggcaacagggaggaccagatcaacaggcttattagaagaatgaactaaggtgtctaccatgattatttttctaagctggttggttaataaacagtacctgctctc

SEQ ID NO: 548201 - DNA, 905 bp, Homo sapiens
  misc_feature (37)..(37): n is a, c, g, or t
gaaacataggaacatatgtaggtgaaacatgggggcnctttttccggctggaaccatggagggtgtagaagagaagaagaaggaggttcctgctgtgccagaaacccttaagaaaaagcgaaggaatttcgcagagctgaagatcaagcgcctgagaaagaagtttgcccaaaagatgcttcgaaaggcaaggaggaagcttatctatgaaaaagcaaagcactatcacaaggaatataggcagatgtacagaactgaaattcgaatggcgaggatggcaagaaaagctggcaacttctatgtacctgcagaacccaaattggcgtttgtcatcagaatcagaggtatcaatggagtgagcccaaaggttcgaaaggtgttgcagcttcttcgccttcgtcaaatcttcaatggaacctttgtgaagctcaacaaggcttcgattaacatgctgaggattgtagagccatatattgcatgggggtaccccaatctgaagtcagtaaatgaactaatctacaagcgtggttatggcaaaatcaataagaagcgaattgctttgacagataacgctttgattgctcgatctcttggtaaatacggcatcatctgcatggaggatttgattcatgagatctatactgttggaaaacgcttcaaagaggcaaataacttcctgtggcccttcaaattgtcttctccacgagaaagaccaccatttgtagaagtggagatgctggcacagggagagacagatcacaggttattagaagatgactagtgtgtaccggatattttctagcggtgggtataaaagtctgtctcatgaaaaaaaaaaaaggggttttgggggaaaggtaaagggggtgttgcctttgtgaagggatcggccaagggtatgaaga

SEQ ID NO: 548202 - DNA, 766 bp, Homo sapiens
aacatggtagaccttccgactgacgcgttcgctaccagatagcgtaaggtgacattggtcataactgtaatcatagtgcagtatctcgtggatcatagatgtacgtggttgagaattctcagcgaattatacaaagacccatggggtctggcgcgttcgatgtatgcacacaagagtacacagtatgtgaaggtgcctgcacgtgaatcattgacactgaggaatcattagttccaccctatgcgagttgcctaaagtcgtaggtctcagtatcatacgagaaacttgactgccctcctgctgcgtgatgggtagaccaaagatgaaagattggcagagggacccatttgttcatcccgccgaggacctattctgccactaacatcccgcaaagttacaaaccgctttcggagaaagcagccacgaagaagcatgtcgtgtacacactgtcccccatgcttcacgggacgtccacgatcgagtgacaatcgtcaacagttgggcagagtgccggcactcttgagcacagacagttgctgcttcaaacggttgcttcaagtgtcacccaagggctgccgagcaccaatgaagcaggttccacgaagtttctgaaggctggaacatcgagccgaatccaccacaaatgaacactaaagttattttctcagttccccaaaaaaaattagaaaacatataagaacaaaaaaaacacatttttaagtgggcagaactataggaagcacacttcaaaaaagagtttaaaaaa

SEQ ID NO: 548203 - DNA, 1165 bp, Homo sapiens
  misc_feature (15)..(15): n is a, c, g, or t
  misc_feature (36)..(36): n is a, c, g, or t
  misc_feature (454)..(454): n is a, c, g, or t
  misc_feature (616)..(616): n is a, c, g, or t
cagtacctccttcanctcaacaacctggccgaccgnagctgcaacgacctctcccagtaccctgtgtttccatggataatacatgattattccagctcagaactagatttgtcaaatccaggaaccttccgggatctcagtaagccagtaggggccctaaataaggaacggctggagagactactgacacgctaccaggaaatgcctgaaccaaagttcatgtatgggagtcactactcttccccgggttatgtacttttttatcttgttaggattgcaccagagtatatgctgtgcctgcagaatggaagatttgataatgcagatagaatgttcaacagtattgcagaaacttggaaaaactgtctggatggtgcaacggattttaaagagttaattccagaattctatggtgatgatgtgagctttctagtcaatagcctgaagttggatntgggaaagagacaaggaggacagatggttgacgatgtggagcttcccccttgggcttccagtcccgaggactttctccagaagagcaaagatgcattggaaagcaattatgtgtctgaacaccttcacgagtggattgatctaatatttggctacaaacaanaaagggagtgatgcagttggggcccataatgtatttcatcccctgacctatgaaggaggtgtagacttgaacagcatccaggatcctgatgagaaggtagccaatgcttacgcaacatcttggaatttgggcagacaccaaaacaactatttgtgacaccacatcctcggaaggatcaccccaaagtttaacaagtagtccaagagctccagttataatgcttctatggcagatccccaggtgaagagtcttctagaagaacctgagcggaggaagagcaacaacactgacctggacataatatcaccaaaagcttgcaggtacaacgagcacgtacttcaaatccactacagaagcaagtacatggtatcacgggtctctcgcaaggatcttcaagtattcagaaattccaaggattcacttgaaaatgtttctaaagaatcgaatgatacaccgagttattcatctcaacgatgtgtactgcttgtaactttacacggaatcgcctgaataaattcagggaacaggacatttatgcaagctggagaa

SEQ ID NO: 548204 - DNA, 120 bp, Homo sapiens
cacagcggtccatcagcacaccagtagcttgagcaggcacggctcatgaagtaaatggtgcccaagcgcttaaagggcagcacgcaggtgttgcgatcgaaacgaatctggcgaagcaca

SEQ ID NO: 548205 - DNA, 177 bp, Homo sapiens
gaacgagtttataatgggggagtggggtctcactagtggcgcccaggtatgctcggcgaaactcgcaggtctacaagtggatcctcctgacctcaggctcccaaagtgctggtgattacaggcatcgagccagcagcatctgtgccgtcttttacgtatgtttcaaacaacacttat

SEQ ID NO: 548206 - DNA, 403 bp, Homo sapiens
  misc_feature (27)..(27): n is a, c, g, or t
  misc_feature (32)..(32): n is a, c, g, or t
  misc_feature (45)..(45): n is a, c, g, or t
  misc_feature (344)..(344): n is a, c, g, or t
  misc_feature (352)..(352): n is a, c, g, or t
  misc_feature (364)..(364): n is a, c, g, or t
  misc_feature (379)..(379): n is a, c, g, or t
  misc_feature (382)..(382): n is a, c, g, or t
actcttaagtgtaatttgccctcctgntctangtgaccttgaganaatcacttgatttcccggggctcaatgtgtattccctctaaacgtggaggagttctacataaatctgtggaaatcccatttaattctatgatttcaacatattaataaagaaatacttctcaatgggacagttttgccaggctaaactgtagtaagtatgtagtaagtaaatcacagtatgtagtaagtaaatcacagttcaagactccaatcaggacttttacacacaatttgattccaggtttacttatttacccttttaactttttttttttttttttgggaaagggagtcggctnttaacccngggcggaagggngggggggcaatcaangcncagggcaggccccacccccaa

SEQ ID NO: 548207 - DNA, 332 bp, Homo sapiens
ctgagattggtgtgcaatggtgtgatcatagctcactgtatcctcaaactccctggctcaagggatccgcccacccagcctcccgagtagctaggactgcagatgcatgccaccgtgcttggctggttttttcatctttttgtagagatggggtctcactatgtttcccagggtggtctcgaactcttgggttcaagtgatccttctatcttgggtgtcccaaagtgtaggggattactgtgagggactagtaatttttttttttttttgagataagtctcactctgtcgcccagtctgggagtgcagtgagctgagatcgcgccactgcac

SEQ ID NO: 548208 - DNA, 415 bp, Homo sapiens
gaggtaaggaccaggacaagaacaggcattaaaggcaagaaaaggcaaggcaaggttatagggaacagaaaatactcatgagggctctaacaaagggctggtagggtggggattcagggggggccttccaggctacactaaataaccagcacggtcaggggaagtcacggatagtttttaaaggcaccatcagttctggtgtttaatttccccctgggcataaaatttgcctggaggctggtctggtggctcccaccttctctccctggctttggcctggctctggttcctgcttgggtcccaaagagcagcagccggagcctcctcggggatcctccctaagcataaatttcccaaacagtccacaggtcccatggcccacttggcgtctggcacggtgatcgtgacaaatctt

SEQ ID NO: 548209 - DNA, 629 bp, Homo sapiens
tcgccctctaaatgttcaaaggccacgtgaataatccaattaaaggggtgaccccactaggcggaaatgggactggtcgccccttttaaatttttaaaacctgaaaaagaaatccttggtttcttttttaagcgaaagatcgcttttaatgtttgccctgatttagttgcatgattagtcagaaaccgccatttgaaaaagttatttttataccggccaaaaaaaaaaaaaaaagaatccggttaaatgttttatacataattttggacccaaagaggccaccagatcagttttaattttattagccggtgaggccatttgaaatgaggtggacgttttgagcagtcccttgagtggcctgccaacgtttcagggtatgaatggattttgtttattcggtttgaggggttttttccacccttacccccccaaaaggtagagtaaaaatgactatgatagaatgcgggggggtacccttaaatcctcatttttatgtttatttaataaagctccccttagattttgtttcataataatttaaacccaaccaattttcccatagacttgctgttaaagtattgtacgtttgggtccagtttaaaaaaataaaagattgagggccccgggca

SEQ ID NO: 548210 - DNA, 301 bp, Homo sapiens
ggagtaagtcggcagctgtgcaattatgagggcggtttctcagagtttcatagccggtattggctgaactggaatctggtaatttttggactcggtcctggtcaactctaaaatttctctcatggtctcatccttttctcttctggctggtggtaaattagcagtgagcggggtaataatgccatctcttggtttaagggcagcttcaaatcctggtaactggctggcagtccttcagtcccataggtaaccctcatttcttccagctctcggtttagctctccaaggggtcacgagctcg

SEQ ID NO: 548211 - DNA, 162 bp, Homo sapiens
gggggggccccccccccaaaattttttttgggggggccccccaagggggccaaaaagggttccttttttttttccccccccccccccttggggggttttttttcccccgggggccccttttcccccccccccccaaaaaggggggggggggggtttttttta

SEQ ID NO: 548212 - DNA, 127 bp, Homo sapiens
  misc_feature (7)..(7): n is a, c, g, or t
  misc_feature (42)..(42): n is a, c, g, or t
  misc_feature (45)..(45): n is a, c, g, or t
  misc_feature (87)..(87): n is a, c, g, or t
  misc_feature (102)..(102): n is a, c, g, or t
agcccgntcccccccgcggacccagcatccccgcagcaccangcngccggcctgcccccttgctgagcacccctgctcccgaggccncggccgtgatcgggncctggggctgtgagaccccgaccct

SEQ ID NO: 548213 - DNA, 419 bp, Homo sapiens
aatattaatgtcatagatgacattccactgaaggcacagggatagatgaacacgctgagagcactggacaagcctttgtgcttgacgtggcgcagagccaccatcaagtctcaaaccacaaaagcctgacgtacaaagacacctgggcattctggtgacccagggctccctgccacaagaagtgctgttggatctcttagaatcaataattggcactgagaaaattggcattgcatctcctgcagtttcagtctgttcttggagcatattatgatgagtagagctcacgtggatgaatctgttagaagaaaatgaagtgtttaaccatctttttttttcaaaaaatgaaagccttcccaatgctgatggagttggttcgttgcctatcagagcataaactgtaaataaatattgctaaa

SEQ ID NO: 548214 - DNA, 850 bp, Homo sapiens
cggcagtgcaggttcgggggtggattccttgggccgtctgggcaatggcggctgagacctggcccgggccagcgagccgaggacagcatgggcgtcgcggtacgggtccgggtccgcagccccggccgcttgtctgactcccgccatggacccgttcctggctgctgctgcactcgcgttgtctgtccagctctgtcgagcagcgagctgacctgagctccagttccgtatgcctcgggctgcgtggtgccagctgcaagctggagcgcgtgcacgagcggcctagacctcttctccatgctgctggagcagaacgacctggagcccgggcacaccgagctccatgcgcgtagctgcttcgtcctccctgctggtcgccacgactcgtgctgcggcgcgtcgtacgacttcgaggacgggggtcgtgcggccgtgggtccgtcgcctggggaagacgtacctgtgtgcagcatttaacgtcatatgtgataagtgtggggaaagattggagaaggctggctcgtcagctcaacagtctcagacgaccaacgtatcgagcagcatcgacggacacgatatcccccgctaacctgacagagctgtgtgcgggatgtcactgagaatctggaagaacacagatgaaggagaacgcaacagtggtcccacctgtgttgggggctctcagtgtcctgtccagatgacacctggtggctgacctggtacaagaggttcagcaggcccgtgacctccagaacaggagtggggccattgtccccgactgtcatggatactcagacgcgtctacctccgaaggcgtcctgatgggccgtgctttgcgcttggtggacca

SEQ ID NO: 548215 - DNA, 107 bp, Homo sapiens
  misc_feature (89)..(89): n is a, c, g, or t
ttttttcccttttttttttttgtcctttttcccccataaaacatggagccaaaaaaaaccataatgggtctaataaaaactccctaggngtttcctgtccgatttta

SEQ ID NO: 548216 - DNA, 170 bp, Homo sapiens
tacgtgcgcaccgtcgtgtctgtgctatctcgttccgaggtgttctactccaaacgttcctcagcttcctcttgctccattttcactggccacgtgttcaaatgttcttgaggttggagttccatcatcatggacttcttccactgaaatgtacgcttctgtaggcagcc

SEQ ID NO: 548217 - DNA, 601 bp, Homo sapiens
ttccagctactcgggaggctaagggaggagaatcgcttgaacccaagaggcggaggttgcggtgagccgagatctcactattgcactccagcctgggcaacaagaaaaaaaaaaaagtttatcccaagttgagaaggcaaggttagtaacctaggtaacctatgttcttggctggagaatcaaagaatgtcgagttagggcactcggatacaacccaattttattcctaaactaccgtgggctaattataccctacgggtatgattgtatacagctctctgtatcttccaatcttacatgtcacaatttatgatagaaactgggccaggtgcggtggcccacacctgtaatcccagcactttgggaggccaaggcagggggaccacttgaggtcagacagttcgagactagcctgccaacatggcaaaaccccatctccatgaaagatacaaacattagctgggcgtggtggtgggccctgtatctggcctcttgggaggctgaaacagaagaatcactcgaacccaggaggcagaggttgcagctgaactgagatgtgccatggcctccaacctgggtgacaagagggagaatccatgtc

SEQ ID NO: 548218 - DNA, 156 bp, Homo sapiens
  misc_feature (107)..(107): n is a, c, g, or t
  misc_feature (136)..(136): n is a, c, g, or t
attccccctctgtgagaaacacccaagaatgatcaataaaaataaaataaaataaaataaaataaagactagtgtgaacatgcaatgttttaatgtggcctcctggnctatttatgattacctaacaatgggcccnctaaatgaatatcgtttctt

SEQ ID NO: 548219 - DNA, 465 bp, Homo sapiens
ggaccagattacgctctagacggagtcttgctttgtcacccagtggagtgctgtagcactatctcggctcactgcaacctccgcctcccaggttcaaacaattcttccgcctcagactccagagtagcaggtataacaggcacctgccaccacacccagctaatttttacacttttagtagaggaggtttcaccactgttggccaggctagtctcaaactcccgacctcatgatctgctacctccatctcccaaagtgctgggattacaggcgtgaggcaccatgctggcctctattgggttttttttaaaaaaagtttttgatccttagttggttgaatccatagatatggaacccacggatacgaatggctgactgtatttttccacgtgactcatgtatcacctggaatacaccagcaacacatctcagaaatgtccaccttttgccgtctaggagcgtaat

SEQ ID NO: 548220 - DNA, 290 bp, Homo sapiens
  misc_feature (224)..(224): n is a, c, g, or t
gaaagacccgcataacaggcagagacgggcacaggctgaagcagccaaggatgttacccccacgggcaaagctggagactcaggaacaggaaacagttttttctctttctctttttctttttctttctggagacagagctctcgctctgttgcccaggctggagtgcagtggcagcccatcaacggctcactgcccctgacccttccaagactcaggtgatccnccacctcagcctcctgggtagcagggactgcaggtgccgcaccaccacattgcaactaattttttt

SEQ ID NO: 548221 - DNA, 1161 bp, Homo sapiens
  misc_feature (844)..(845): n is a, c, g, or t
  misc_feature (1161)..(1161): n is a, c, g, or t
cgacccacgcgtccgcggacgcgtgggtcgacccacgcgtccgaagaagaaggaggttcctgctgtgccagaaacccttaagaaaaagcgaaggaatttcgcagagctgaagatcaagcgcctgagaaagaagtttgcccaaaagatgcttcgaaaggcaaggaggaagcttatctatgaaaaagcaaagcactatcacaaggaatataggcagatgtacagaactgaaattcgaatggcgaggatggcaagaaaagctggcaacttctatgtacctgcagaacccaaattggcgtttgtcatcagaatcagaggtatcaatggagtgagcccaaaggttcgaaaggtgttgcagcttcttcgccttcgtcaaatcttcaatggaacctttgtgaagctcaacaaggcttcgattaacatgctgaggattgtagagccatatattgcatgggggtaccccaatctgaagtcagtaaatgaactaatctacaagcgtggttatggcaaaatcaataagaagcgaattgctttgacagataacgctttgattgctcgatctcttggtaaatacggcatcatctgcatggaggatttgattcatgagatctatactgttggaaaacgcttcaaagaggcaaataacttcctgtggcccttcaaattgtcttctccacgaggtggaatgaagaaaaagaccacccattttgtagaaggtggagatgctggcaacagggaggaccagatcaacaggcttattagaagaatgaactaaggtgtctaccatgattatttttctaagctggttggttaataaacagtacctgctctcaatgcacacaaaaanncacaacacagggggacagataaaaatccccgagggccccagataagcgaacccacatcgggccaaggggccccaagggaacacgatatacgcaggccggcagacccccacaccgcgtgcaggaaaagcgcaggagaaccgacagaccacaccagggggacacacgaaaagcccggaacggacggcagcaaacaaagtacggagaccacataccggagaggaacgtgatatcgtcaacgaccgacgacaccagccaacgaaccacacagcaagcagaccagcagcacgataccgacgccacacaacgacgaaagcan

SEQ ID NO: 548222 - DNA, 643 bp, Homo sapiens
  misc_feature (588)..(588): n is a, c, g, or t
  misc_feature (593)..(594): n is a, c, g, or t
  misc_feature (608)..(608): n is a, c, g, or t
  misc_feature (619)..(619): n is a, c, g, or t
tgtggaggctcgtctgggaacactatggggatggaacggagctaatcctgtcagcgcagctggggattaggacccggagttgccaagagagaagaagaaggaggttcctgctgtgccagaaacccttaagaaaaagcgaaggaatttcgcagagctgaagatcaagcgcctgagaaagaagtttgcccaaaagatgcttcgaaaggcaaggaggaagcttatctatgaaaaagcaaagcactatcacaaggaatataggcagatgtacagaactgaaattcgaatggcgaggatggcaagaaaagctggcaacttctatgtacctgcagaacccaaattggcgtttgtcatcagaatcagaggtatcaatggagtgagcccaaaggttcgaaaggtgttgcagcttcttcgccttcgtcaaatcttcaatggaacctttgtgaagctcaacaaggcttcgattaacatgctgaggattgtagagccatatatgcatgggggtaccccaatctgaagtcagtaaatgaactaatctacaagcgtggttatggcaaaatcaataagaagcgaattgctttgacagataangcttnnatgggtcgatctcntggtaaatacngcatgcttcttgagtaaagcgcag

SEQ ID NO: 548223 - DNA, 244 bp, Homo sapiens
ccacatggctgggtatgatggcacatgcctctaatcccagctactgggaggctgaggcatgagaatcgcttaaacctgggaggcgggtttgcagtgagccaagatagcaccactgcactccagcctgggtaacagattgagactctgtcaaaaaaaaaaagatgttaaaggaaaaatctgaggcgccattcatgaagttaagtgtcccagtggcaaaatgtcacaggcaagtatttatggggaa

SEQ ID NO: 548224 - DNA, 843 bp, Homo sapiens
actgatccgaggatccctcctacgagcgaattccgccagaaacccttaagaaaaagcgaaggaatttcgcagagctgaagatcaagcgcctgagaaagaagtttgcccaaaagatgcttcgaaaggcaaggaggaagcttatctatgaaaaagcaaagcactatcacaaggaatataggcagatgtacagaactgaaattcgaatggcgaggatggcaagaaaagctggcaacttctatgtacctgcagaacccaaattggcgtttgtcatcagaatcagaggtatcaatggagtgagcccaaaggttcgaaaggtgttgcagcttcttcgccttcgtcaaatcttcaatggaacctttgtgaagctcaacaaggcttcgattaacatgctgaggattgtagagccatatattgcatgggggtaccccaatctgaagtcagtaaatgaactaatctacaagcgtggttatggcaaaatcaataagaagcgaattgctttgacagataacgctttgattgctcgatctcttggtaaatacggcatcatctgcatggaggatttgattcatgagatctatactgttggaaaacgcttcaaagaggcaaataacttcctgtggcccttcaaattgtcttctccacgagaaagaccaccatttgtagaagtggagatgctggcacagggagagacagatcacaggttattagaagatgactagtgtgtaccggatattttctagcggtgggtataaaagtctgtctcatgaaaaaaaaaaaaggggttttgggggaaaggtaaagggggtgttgcctttgtgaagggatcggccaagggtatgaaga

SEQ ID NO: 548225 - DNA, 1084 bp, Homo sapiens
aagtctttaagtggacagtacgcatgcgccaacttcctctttttccggctggaaccatggagggtgtagaagagaagaagaaggaggttcctgctgtgccagaaacccttaagaaaaagcgaaggaatttcgcagagctgaagatcaagcgcctgagaaagaagtttgcccaaaagatgcttcgaaaggcaaggaggaagcttatctatgaaaaagcaaagcactatcacaaggaatataggcagatgtacagaactgaaattcgaatggcgaggatggcaagaaaagctggcaacttctatgtacctgcagaacccaaattggcgtttgtcatcagaatcagaggtatcaatggagtgagcccaaaggttcgaaaggtgttgcagcttcttcgccttcgtcaaatcttcaatggaacctttgtgaagctcaacaaggcttcgattaacatgctgaggattgtagagccatatattgcatgggggtaccccaatctgaagtcagtaaatgaactaatctacaagcgtggttatggcaaaatcaataagaagcgaattgctttgacagataacgctttgattgctcgatctcttggtaaatacggcatcatctgcatggaggatttgattcatgagatctatactgttggaaaacgcttcaaagaggcaaataacttcctgtggcccttcaaattgtcttctccacgaggtggaatgaagaaaaagaccacccattttgtagaaggtggagatgctggcaacagggaggaccagatcaacaggcttattagaagaatgaactaaggtgtctaccatgattatttttctaagctggttggttaataaacagtacctgctctcaaattgaaaaaaaaaaagaaaacacaacagagcaaaaaaaaaaaaaaccccgggggccttcttttggcggggggggcggcacaaaggcggggtcagagacaggggccccaggggccaaaggggtgttccgggcccccatttctttggtccacaagggggaaaatcgcggcgggccccccaaaagaggaggggaaaaaaatggaaaagaccgggtaaccgttaag

SEQ ID NO: 548226 - DNA, 1466 bp, Homo sapiens
aagtctttaagtggacagtacgcatgcgccaacttcctctttttccggctggaaccatggagggtgtagaagagaagaagaaggaggttcctgctgtgccagaaacccttaagaaaaagcgaaggaatttcgcagagctgaagatcaagcgcctgagaaagaagtttgcccaaaagatgcttcgaaaggcaaggaggaagcttatctatgaaaaagcaaagcactatcacaaggaatataggcagatgtacagaactgaaattcgaatggcgaggatggcaagaaaagctggcaacttctatgtacctgcagaacccaaattggcgtttgtcatcagaatcagaggtatcaatggagtgagcccaaaggttcgaaaggtgttgcagcttcttcgccttcgtcaaatcttcaatggaacctttgtgaagctcaacaaggcttcgattaacatgctgaggattgtagagccatatattgcatgggggtaccccaatctgaagtcagtaaatgaactaatctacaagcgtggttatggcaaaatcaataagaagcgaattgctttgacagataacgctttgattgctcgatctcttggtaaatacggcatcatctgcatggaggatttgattcatgagatctatactgttggaaaacgcttcaaagaggcaaataacttcctgtggcccttcaaattgtcttctccacgaggtggaatgaagaaaaagaccacccattttgtagaaggtggagatgctggcaacagggaggaccagatcaacaggcttattagaagaatgaactaaggtgtctaccatgattatttttctaagctggttggttaataaacagtacctgctctcaaattgaaaaaaaaaaagaaaaaaaaaaaactctccgagagggcattcttatattgccgggtgtgcgcgggaaaaagagggtgtcatagaaaatatggcgcaattatgggccataaaagagctgtgtacccatggaccccaggtattttttttgtgtcaccacagggggtgacaaatattgacgcaaggagttccccccatatatagggaggaggccgcgataattataaatcttcgcgagatattagagccccccaggtgtttatacccccggtcgcgtctttataaataggactcctctcgcgcgcgaaagaaaaatgaccacccaggcgagaaagatgtgataatatacgaacgcccccggcggaccggactctatcagatcagaagagcgcacgggggagagcgagtttcatacagttatagaggagatgtacagcacgaacgagaggagtagatactctctcagagcgcggagaacatacctacgccaatgatcgagatggctagtcgagggacgagacgatataacactcggtgggagagtgttgatatcgcacacaccaacaagcagaaaaaacaacacccacgcggcgatatacaccg

SEQ ID NO: 548227 - DNA, 754 bp, Homo sapiens
agtggtggttcgtgcctataaacccagcacttgggcaggccgaagcaggaggatggcctgagctcaggagttgagaccaccctgggcaacagagtgagaacctgtctacaaaaaatacaaaaattagctgggtgtggctgagtgcgcctgtagtcctagctactggggaggctgaggtggaaggatcacttgagcccaggaggcggaggtgtgcagtgagccaagatgacaccatgtgcactccaccctgtggcaaatgaacgataccctgtctcaaaaaaaaaaaaaagggtggaaggtaaagggcttttttcttcctcttgagagaaacattagtatagtcctgtggcaataatacttcgcgggtccgtggtaaagaggccataagtggggaagcttggctattaaaccatttcaccaaaaaaaaccttcccaggaaaggaaaaaaaagggtgattggagaccttgtggagatatgattggccacacctgtgtggttatccagatgtgggactataagattagtgccacatctaaaaaaaaaaaaaaaaaaaaacattgtgggggcgcggctgggcacgagaaaaagttttctcaacccctctgtgggcgccgggccccatagtgttatcaacctgggcacactcgccaagagaccctgggcagatagggtggtccccacaataaaacgcgggaccgggtgctgcaaccaagggtcaggctcggctaccaggcaggacgacccccggggggg

SEQ ID NO: 548228 - DNA, 322 bp, Homo sapiens
  misc_feature (322)..(322): n is a, c, g, or t
tcgagctcggcccgcttatccgcttaagcaagggacttgacgctttgtgcaagcttggagaagtgtactggactcataggaagcttataacaagaatggaagattcttaaactaactcacgtcttcttgggtatccagtaacagtagatgttcaacaatatgtagcatgattaataccagccattgtgaacgctgtacaaccttgggggttattactaagcaaggttactacgtagcttctgaaaagtaggcttcatagattaactgttatgtatacaactgcggttccatgactttgacttgagccttagaggggatcagn

SEQ ID NO: 548229 - DNA, 1112 bp, Homo sapiens
tttccaacatatacgaagtatcagtcgcggtaccgacatatgccggaatcggccatacgccgggctctttttccggctggaaccatggagggtgtagaagagaagaagaaggaggttcctgctgtgccagaaacccttaagaaaaagcgaaggaatttcgcagagctgaagatcaagcgcctgagaaagaagtttgcccaaaagatgcttcgaaaggcaaggaggaagcttatctatgaaaaagcaaagcactatcacaaggaatataggcagatgtacagaactgaaattcgaatggcgaggatggcaagaaaagctggcaacttctatgtacctgcagaacccaaattggcgtttgtcatcagaatcagaggtatcaatggagtgagcccaaaggttcgaaaggtgttgcagcttcttcgccttcgtcaaatcttcaatggaacctttgtgaagctcaacaaggcttcgattaacatgctgaggattgtagagccatatattgcatgggggtaccccaatctgaagtcagtaaatgaactaatctacaagcgtggttatggcaaaatcaataagaagcgaattgctttgacagataacgctttgattgctcgatctcttggtaaatacggcatcatctgcatggaggatttgattcatgagatctatactgttggaaaacgcttcaaagaggcaaataacttcctgtggcccttcaaattgtcttctccacgaggtggaatgaagaaaaagaccacccattttgtagaaggtggagatgctggcaacagggaggaccagatcaacaggcttattagaagaatgaactaaggtgtctaccatgattatttttctaagctggttggttaataaacagtacctgctctcaaattgaaaaaaaaaaagaaaacacaacagagcaaaaaaaaaaaaaaccccgggggccttcttttggcggggggggcggcacaaaggcggggtcagagacaggggccccaggggccaaaggggtgttccgggcccccatttctttggtccacaagggggaaaatcgcggcgggccccccaaaagaggaggggaaaaaaatggaaaagaccgggtaaccgttaag

SEQ ID NO: 548230 - DNA, 310 bp, Homo sapiens
gacccccacctgattgctgcatatcctagagggatatttgatcaggataacgtggttactaacacagagagttctcccagtaggttaatagtggggggtaaggggaggttaccgaggcttgctagatgtcttcaaaaagctattagtgggattagagtttgaagtccttgaaagaggattatgatgcgactgtgagtgcttccgtagtttgagtttgctaggcagaatactaatgaggatgtaagtccttgggcgattatgaaaatgactgccccggtgaacactcacttggtgtgactcaggtgatgtg

SEQ ID NO: 548231 - DNA, 112 bp, Homo sapiens
aattgtctcagtattagtattatcaaactccttttcttcctgtctgtagtagcttgctagtccatatgatttacctagttttgtgaatcttttattattatgtaccaggctt

SEQ ID NO: 548232 - DNA, 1076 bp, Homo sapiens
aaacaataggctaggtacgaggcctggtgttaatcggccgagggaaccatggagggtgtagaagagaagaagaaggaggttcctgctgtgccagaaacccttaagaaaaagcgaaggaatttcgcagagctgaagatcaagcgcctgagaaagaagtttgcccaaaagatgcttcgaaaggcaaggaggaagcttatctatgaaaaagcaaagcactatcacaaggaatataggcagatgtacagaactgaaattcgaatggcgaggatggcaagaaaagctggcaacttctatgtacctgcagaacccaaattggcgtttgtcatcagaatcagaggtatcaatggagtgagcccaaaggttcgaaaggtgttgcagcttcttcgccttcgtcaaatcttcaatggaacctttgtgaagctcaacaaggcttcgattaacatgctgaggattgtagagccatatattgcatgggggtaccccaatctgaagtcagtaaatgaactaatctacaagcgtggttatggcaaaatcaataagaagcgaattgctttgacagataacgctttgattgctcgatctcttggtaaatacggcatcatctgcatggaggatttgattcatgagatctatactgttggaaaacgcttcaaagaggcaaataacttcctgtggcccttcaaattgtcttctccacgaggtggaatgaagaaaaagaccacccattttgtagaaggtggagatgctggcaacagggaggaccagatcaacaggcttattagaagaatgaactaaggtgtctaccatgattatttttctaagctggttggttaataaacagtacctgctctcaaattgaaaaaaaaaaagaaaacacaacagagcaaaaaaaaaaaaaaccccgggggccttcttttggcggggggggcggcacaaaggcggggtcagagacaggggccccaggggccaaaggggtgttccgggcccccatttctttggtccacaagggggaaaatcgcggcgggccccccaaaagaggaggggaaaaaaatggaaaagaccgggtaaccgttaag

SEQ ID NO: 548233 - DNA, 204 bp, Homo sapiens
tgacgtgtattcagctactgcggtgcatgcatccctggacaagtacctgtcgagactgtgagcaccgttgctgacctccagatatctgttaagctggagccatggtcgacgtgtattcaccactgcggtgcatgcctccctgtacaagttcctgtcgacacgtgagcactgtgctgacctccaaatatcgtcaagctggagcct

SEQ ID NO: 548234 - DNA, 1081 bp, Homo sapiens
gtatcaacgcagagtgcccattacggccggggcctctttttccggctggaaccatggagggtgtagaagagaagaagaaggaggttcctgctgtgccagaaacccttaagaaaaagcgaaggaatttcgcagagctgaagatcaagcgcctgagaaagaagtttgcccaaaagatgcttcgaaaggcaaggaggaagcttatctatgaaaaagcaaagcactatcacaaggaatataggcagatgtacagaactgaaattcgaatggcgaggatggcaagaaaagctggcaacttctatgtacctgcagaacccaaattggcgtttgtcatcagaatcagaggtatcaatggagtgagcccaaaggttcgaaaggtgttgcagcttcttcgccttcgtcaaatcttcaatggaacctttgtgaagctcaacaaggcttcgattaacatgctgaggattgtagagccatatattgcatgggggtaccccaatctgaagtcagtaaatgaactaatctacaagcgtggttatggcaaaatcaataagaagcgaattgctttgacagataacgctttgattgctcgatctcttggtaaatacggcatcatctgcatggaggatttgattcatgagatctatactgttggaaaacgcttcaaagaggcaaataacttcctgtggcccttcaaattgtcttctccacgaggtggaatgaagaaaaagaccacccattttgtagaaggtggagatgctggcaacagggaggaccagatcaacaggcttattagaagaatgaactaaggtgtctaccatgattatttttctaagctggttggttaataaacagtacctgctctcaaattgaaaaaaaaaaagaaaacacaacagagcaaaaaaaaaaaaaaccccgggggccttcttttggcggggggggcggcacaaaggcggggtcagagacaggggccccaggggccaaaggggtgttccgggcccccatttctttggtccacaagggggaaaatcgcggcgggccccccaaaagaggaggggaaaaaaatggaaaagaccgggtaaccgttaag

SEQ ID NO: 548235 - DNA, 1078 bp, Homo sapiens
  misc_feature (18)..(18): n is a, c, g, or t
gggggggggggaaaaacnataggctaggtacaggctgggtggctggaaccatggagggtgtagaagagaagaagaaggaggttcctgctgtgccagaaacccttaagaaaaagcgaaggaatttcgcagagctgaagatcaagcgcctgagaaagaagtttgcccaaaagatgcttcgaaaggcaaggaggaagcttatctatgaaaaagcaaagcactatcacaaggaatataggcagatgtacagaactgaaattcgaatggcgaggatggcaagaaaagctggcaacttctatgtacctgcagaacccaaattggcgtttgtcatcagaatcagaggtatcaatggagtgagcccaaaggttcgaaaggtgttgcagcttcttcgccttcgtcaaatcttcaatggaacctttgtgaagctcaacaaggcttcgattaacatgctgaggattgtagagccatatattgcatgggggtaccccaatctgaagtcagtaaatgaactaatctacaagcgtggttatggcaaaatcaataagaagcgaattgctttgacagataacgctttgattgctcgatctcttggtaaatacggcatcatctgcatggaggatttgattcatgagatctatactgttggaaaacgcttcaaagaggcaaataacttcctgtggcccttcaaattgtcttctccacgaggtggaatgaagaaaaagaccacccattttgtagaaggtggagatgctggcaacagggaggaccagatcaacaggcttattagaagaatgaactaaggtgtctaccatgattatttttctaagctggttggttaataaacagtacctgctctcaaattgaaaaaaaaaaagaaaacacaacagagcaaaaaaaaaaaaaaccccgggggccttcttttggcggggggggcggcacaaaggcggggtcagagacaggggccccaggggccaaaggggtgttccgggcccccatttctttggtccacaagggggaaaatcgcggcgggccccccaaaagaggaggggaaaaaaatggaaaagaccgggtaaccgttaag

SEQ ID NO: 548236 - DNA, 356 bp, Homo sapiens
gtgtcttggagcttccacaaacttcaaggtgtcaacgacattgaggagggtttcttcagtgcccgaggtcatcgaccccttgacaagaagagagaagaggctcccagcctgaggcctgccccaccgcccatcagtggaagtgcatatcggactcgttcagcctaagcagctgtcactcataagatagtagaaagagaagcccctgatgctggaggctgtcttcacgctgacccacacctgtatgcgctgtgtcctacaggatgtcagtctgcatgaggctctgctacaacacgggccaatcatacatagtgctgatgagttaatattcaatgtggaagctgtccagcctgctcttc

SEQ ID NO: 548237 - DNA, 1072 bp, Homo sapiens
  misc_feature (37)..(37): n is a, c, g, or t
gaacggctaggtacgaggctgggtgtgtaatcggccngggaaccatggagggtgtagaagagaagaagaaggaggttcctgctgtgccagaaacccttaagaaaaagcgaaggaatttcgcagagctgaagatcaagcgcctgagaaagaagtttgcccaaaagatgcttcgaaaggcaaggaggaagcttatctatgaaaaagcaaagcactatcacaaggaatataggcagatgtacagaactgaaattcgaatggcgaggatggcaagaaaagctggcaacttctatgtacctgcagaacccaaattggcgtttgtcatcagaatcagaggtatcaatggagtgagcccaaaggttcgaaaggtgttgcagcttcttcgccttcgtcaaatcttcaatggaacctttgtgaagctcaacaaggcttcgattaacatgctgaggattgtagagccatatattgcatgggggtaccccaatctgaagtcagtaaatgaactaatctacaagcgtggttatggcaaaatcaataagaagcgaattgctttgacagataacgctttgattgctcgatctcttggtaaatacggcatcatctgcatggaggatttgattcatgagatctatactgttggaaaacgcttcaaagaggcaaataacttcctgtggcccttcaaattgtcttctccacgaggtggaatgaagaaaaagaccacccattttgtagaaggtggagatgctggcaacagggaggaccagatcaacaggcttattagaagaatgaactaaggtgtctaccatgattatttttctaagctggttggttaataaacagtacctgctctcaaattgaaaaaaaaaaagaaaacacaacagagcaaaaaaaaaaaaaaccccgggggccttcttttggcggggggggcggcacaaaggcggggtcagagacaggggccccaggggccaaaggggtgttccgggcccccatttctttggtccacaagggggaaaatcgcggcgggccccccaaaagaggaggggaaaaaaatggaaaagaccgggtaaccgttaag

SEQ ID NO: 548238 - DNA, 338 bp, Homo sapiens
  misc_feature (15)..(15): n is a, c, g, or t
  misc_feature (264)..(264): n is a, c, g, or t
tgttgtgtgaaagantcaattcatcaactgcagtagccgcatggtgagtaatcatgtggctggtagatcctgtattagcacagagaaatggcacatttccatcacaacaggaagttctggtggacagccctgagttagaatattttcaatctgctcgtcctcaattaagccctgttgttcatggtgatgtcctcagtggatgggtcataatgttccatgaaacctctcaaggacacaattgcatgatccttgtaacccttaccncctatatctcgctctggtgagttctctttcagctacctataaagtttgacttcctagtccgtgtaaaaaaaaaa

SEQ ID NO: 548239 - DNA, 183 bp, Homo sapiens
cagcaacgggttcggttcagtatgtttctcctccccagaagaagccactaaagcagtctcagaaatgaccggtagaattgtggccacaaagccatcgtatgtagctttagctcagcgcaaagaagagcgccagggtcacctcactaaccagtatatgcagagaatggcacgtgaacgagctgt

SEQ ID NO: 548240 - DNA, 190 bp, Homo sapiens
agtagaagtaaaacacaatggataatggggtgtggcagaatccatgccacttggtcccatagacagatctctctcatgcttggtcagattccactttggagagacatgggctcgtagggacagggatggcctgggtgcagggaacacagtgtactaactggtaccagtttcgctgaacacttcaccactt

SEQ ID NO: 548241 - DNA, 161 bp, Homo sapiens
aagagaaaacaggaggtgggaggagtgatacacctatgggaacacgcgctcgcgtctgaaatcattcatcacgcagagcctggtgctccgccatgcatgagagatatgcttcaatgttcagtcacctccctccaggcccccacatccaacactggggattc

SEQ ID NO: 548242 - DNA, 226 bp, Homo sapiens
cggcatcactacaatcaacaatgtggcttgtcttctatggagagggcaaagcattgaacgggctcttatttatggaagtgacacatgggatatgcatttcaggatgtgcaccctgtcttcagtgaggatagattagtgcgtctgcagaatagatcccactaatcagttagaaagataggctatgacacagtgttgcagtgtccaccatcaactctttctctcccta

SEQ ID NO: 548243 - DNA, 149 bp, Homo sapiens
ccccccgggggccccccaaaattttttttttttaaaaaatttcccaaatcgcgggaaaaaataaaataaaagcccccgggcccccccccccccttttttccccatttgggtttggttttttaaaaaaaaaaaggggtcccctttgggga

SEQ ID NO: 548244 - DNA, 338 bp, Homo sapiens
aaaaaaaaaaaaaaaagaagaagaaggaggaggaaagaaatcccagacttccggttttttacccaaaaaaaaaaaaaaaaagaagcagcagcaaaagatctaggcacacatttcccacaacagaacaataggctggagctgaatgggactgccccctccaccaatgccttcctcttctaagctggtccccacctggtcactcgtttacagcacttgcctggctcctccagacatttgaatcaatgactcctgttgtagatcacagggagggatgttggttgcttgctccttttagaaactgccctcttgaatgaatggacttattcaggaaaaaaaaa

SEQ ID NO: 548245 - DNA, 713 bp, Homo sapiens
gatggtgcagctgggcatctgtgccttccgctcaaatgggactgatcaataggacgcatcacacatcgccctgctggacatccagctcgagtggccgagccaaaggagcttctgggccagggcctgctgctgcgcacctgcaggatcgcaaccaggagcaggacaaggtggagcggcggcgtcaggttcccctttccacgctgtcacatcaatcctggagctgctgtgagttgtgtcgtaccgtggtgtctgccagtgctcctggtagatcccctacatggccgccatgagagcgatgcccgctcgatcgcatgatcagcaagcagttccatcaccagcatgcgcgtgggcgagctgatagcccctgctgggtccccctgagtccatgcggagaacagtgtggtcgctgcctccataggccatgaagatgggtgactggaagacctgtcacatgttttatcatcaatgagaacgatgaatgggaaacgtgtgggaccttttccccggtacgctgaccaagtccgaagccatgctggttacgcgaagagtccatgaagacgtcactgagagacctagctctttactacccgtagtgtctatgacctccatctagggtgtgagacgctgccaggacatgtttgatgcaggagtctggccactgtggctccatcatcagctgatagtgatcattatgaggagctgatgcctcccgc

SEQ ID NO: 548246 - DNA, 210 bp, Homo sapiens
tctcttatcacagtgcaaggctcagctagtgctgtctcccctgagaccctggtcgcgcgtatctgggcagccatctgggcctcaacaggtggagctcccagatctctgacaactttaaagctgcaggtagaccagcgataaccctgaaaactttccatgtaacccccagggcgctggccagtccaagagcagcttgcacatcaggctggt

SEQ ID NO: 548247 - DNA, 194 bp, Homo sapiens
accgctcctgttacaacagcacagacagaaagtaccactcagctattagaagaaacatctatatgggaaggaaaaatatcccccagatatacaacagcccagttacaacagacattcaattgatcattcattagatcaatcatattttcaatatccatgcattgaaatgatggatgaactaccatcgacatgca

SEQ ID NO: 548248 - DNA, 887 bp, Homo sapiens
  misc_feature (640)..(640): n is a, c, g, or t
agcgggctggctccgacggtcgccggctcccagacgcaatgcggagggcggcaggggatggggcatggcggcgcccgggagggaggcaccgggtccgctgggccaagccgtaccggggcgtcacaatttgggtctgcagcagaaatgctttcaggaacagacagcagcgctgggagacaatgcatgggaatcaatgaatgtacagctggtatggacgcagagccccaggtggcaaaggggaagccaggaagagcgggcatggagaacagtaccaggacctctggtagcacctgtgctgtgaccttgaagaggagccacagtgcccttcaggagaaggctcatgtctgctccctgggttcctgcaattccccaggaggggaacactggagactgggagatggcagcatgcagcttcttgtcggctggatcagcagggcctggtaaccatcaaggatgtgtcactgtgcttctctcatggaggagtggcggactcctggacccctctcagacagactttcatggagaatatgtcatgcaggaacaactgtgggatagtagtctctcgtgagatttccaattcccaaacgtggacagtgctttctcaacgtagaaggaggagaagaaccaatgggtccctganccccaggacttagaggagagggacattctgagggtcacatatacaggagatggaagtgaacatgcacggggataccccatgaacctagaagcagaaccttcacagaattgtttatccagccgtgttttgaaagatacttggttctcttggaacccggagcatgattgagaggtggggattccatggccctggaaaggtccagagggaatgctcctgggggccccctttttttccagggaagaatatg

SEQ ID NO: 548249 - DNA, 888 bp, Homo sapiens
tacatatgcatgcttatataagctggcaaatggttagttctggtgatttcttgatggttggaagtctatgctgggaataaattccatcactacactattcatgcttcataataggagctggggatctgttagtttgtttttgcaaattgcttgcccctactttacaacaatttgctatgttagttgtgaagaactaaggtggggagcgagtgactacaagttgagtaatggtatgagtatataccagtaattctgattggctagccagttttattgaatcagaataacacttggtttatggaagtgactaatgctgaaaaattggattattttgattagataatttctctagctatagacttaaactgtcaatttgctctagttgtcttattagttaaactttgtaaaaatatatatatacttgttggtccattgtatgcaagtttggaagaagatagatgtaccatttcatctgttgtatgttggattatgtatggaaatgtttgtgtacgattgacataatgtaatgcgatgatatgattgatttattcaaataatttaggcctttcttagaaatgtggaatcacaaactaatgcaaatcttaaagggccatttaagagtgctgctggttcgtgggctgactttcccaaattccttgtgattcacattatgcgtcctgtgatgttgtcccactaatcgtatcacgttagaaattgaacatgagtgaccttgccataaaactaaggtccggaccaatctcctcattcaaatggtgccatcatcctcactgcggctggcaccgcgagtcccactcatgatatacccgcgcataaagttgggtccatcgcaacccacagccactggcggccacccccctcagctactcc

SEQ ID NO: 548250 - DNA, 383 bp, Homo sapiens
tgttctgagggtacccggaaggtcggacccaccgctgactcgggaatccagaactagggcagagctaacaagcattgtatgcggaacagcggcaggcatgtttatatcttatcataaggggctgtagcaaacatatgaactgaaaaaacacgcatttagtaatccaaatatggatattctttacaccaagccatcaggctccttttatcagatagcattcagagtatttgaatgtccaccagacaccagccccggggggcacagagagaacaacattcctctctgtcaacatcgagaggctggtccttgacactttgaacaatggccacaaatgcatccctgacatccccagacatctccttcttggtgggtcagaacataag

SEQ ID NO: 548251 - DNA, 447 bp, Homo sapiens
tcacaaatgttgacctctagtgacactggctgttcgacgagtgtaaaatgtggtcggaaacaccgtggcttgtagatgcagagagaagctataggaagaccagataccgaccctggtcgtgttctgacgagacgatcgttcataaggcacagcacatcgcagagatgagacagttgttaataagagctgtggctggaaacatggctgttaggaacagcgtcaaggaaccttggagttcatatttgcacaaatacttaataaactatagagtccaggagctgtcagccctaagtctgtaggagcagacaccttctgacttgaccaaacaggcatatgggtttaggttggctcgtcagatgtcatatgtctctgatggggctgcaagtgctacctcgcgcttgtacactgtctgctgtggggctccgagcatggcggtgaagagctgca

SEQ ID NO: 548252 - DNA, 316 bp, Homo sapiens
  misc_feature (123)..(123): n is a, c, g, or t
gggttttgttcttattgcccaggctggagtgcagtggcacaatcttggctcaccgcaacccccgcctcccgggttcaagcaattctcctgcctcagcctccagagaagccggggttgcaggcnctcaccgccacaccagactaatatttttatttttgtagagacggggtttcaccatgttggccaggctggtcttcaactcctgacctcagataatacacccacctcagcctcctaaatgctggcattacaggcgtgcagaccaggagcattctctagtaacattgctgagtcttcaaagattcaactgtatcag

SEQ ID NO: 548253 - DNA, 520 bp, Homo sapiens
  misc_feature (423)..(423): n is a, c, g, or t
cacgaggccgcatatgactttttttttaagtgcaaagtccagaggggaaaaatggactatgcacttaaaaaaaaaatagcataagggcaggcacgatggcccacgcctgtaatcccagcactttgggaggctgaggtgggcagatcacctgaggtcaggggttcgagaccagcctggtggtccaggtgaccagcatggtgaaatcctgtctctactaaaaataaaaattagctgggtgtggtggcgggtgcctgtaatcccagctgctccagaggctgaggcaggagaatcgcttgaacctgggaggcggaggttgcagtgggctgagatcacgccattgcactctagcctaggtgatacagtaagactctgtctcaaatttcaaaaggatatatatagacttgtacatacatacacacatantatatgcatatatgtctacatatatatgcacgtatatgtgcacacatatgtgtgtacatgtatacatatatgttcacatatatacatatgtgtgtgt

SEQ ID NO: 548254 - DNA, 809 bp, Homo sapiens
gcgagcatgaggcgccagtcatggcgagtggacatccgccatagacagtggaccgaaaaggttcggcgacaaggagccccaagagccagagatatctatcctgaaggctgtattggtcatgcttatacaaggttaactgtccagaagtaaccaattccactattcaaccaggattgtagttgaataaggttagtaatcatgaagtaagcaccaaccggacacgcacgtctgctcgcctttcccgtgattgatccggatagatgaagctttctctgggtgctgggaaaatcaattacggccgtggttgtggggaccatattctgactgaatggtgcgcggtatcaaggaggtacccgatactgaaaggtatgtgcactgcagcgatgagcagtcgtgtgccgcatgcggcatcctcagggcaagggggcaagatcctcactttcgaccagtctggcccctggactcccctaatgggtctgtggacactgtcctgctctccggtcctcgtcatgggtccgagaggtgtaccggtcatttcggcaaggccccaggaaaccccgatcagcagcaccaaacctacgtccgctccaagggccggaagtgcgagcgtgccagaggtcgacgggcagccgaggctacaaaaagtaaccctggatcctactctcttattaagaaagatcttgtgtcgaggaacacaagacggggacatcgacggcctgatccgggctgggccacacaaggtatgaacggggacatggactaggttggtcccgacccggtgtcctttccagggggaagatgcgcggtcc

SEQ ID NO: 548255 - DNA, 910 bp, Homo sapiens
ggaagtcggcggtcccgcgggtctgtctctttgcttcaacagtgttgggacggaacaagatcgggggactctcttccagcctccgaccgcctccgatttcctctcggctatgaactttccgggaccatcttctcggcatctcctgcttctgggaccggccagcaccgtttggtggttagctccttctgtgccaaaccaaccatgagctcccagattcgtcagaattatcccaccgacgtgaagcgcagccgtcaacagccgtggtcaaattggttacctgcaggcctcctacagccataacccctttctctccttggggcttacaaatttcagacccgcgacaatgactgttgggctcttggaaaggccgtcgagcccaacttttctcccgcggcgcaattggggccccgaaggaagaaaaggccacggagggtgctacacagacgccgtactccttggaaggattgccacacacaccaatgctaggttgtgggcaccagcgcgcggtcctattttccaggggactattcaaagacaggccccagctgtgaaacgcactgaggggggggataacacccccaagaagggcccaatggaacacggttgccaaagggccctggggacacaaaaacgaacggtgacgaacccgggccacgttgtgggcaatcctgcaagggccagggagttcctaggccaggagaggagaccccacatcatggtggcggaactccgtgggggaactacattcccttacgatggcaggcaggtcgccccctcatcccaagaacgactgggttcgccacgctgggaccaacttgccacagggcaggagagggcccggaagacaggacacggcagaacaacatctaacagaaaagcgtcaccctccaagccagcatgaacaagcttg

SEQ ID NO: 548256 - DNA, 488 bp, Homo sapiens
actaacgtattactagtaccattggtgcgcggcgccggcccaggttagggtaaagtgtagctactggtcattatgctccgtagcgcatagtcagtagtcctgtgatcatatgatcgtatgtgtgcttgggtcatccatcatcacaaataaagcacaggccgctgagcggaaccggtatcctgatatctgaatccaagttctcgagatgcaagatcgttgagtgtctgtgactcgtgtctctatggagacatggaaaggtccggaagggctcgaaaggcttctgaaataatttagaagccttaactggcccccctgccccctgtggaacgacgcacacacgacccacgcaacagagaccaaacgagcctcgcgcgccacacgaaaccaaacagcggagagcaaagccacaggaacacagaaacacacgcataacggccatcgggccacagacaaaacgacaaaacccacgcgaacacaaccacaggacg

SEQ ID NO: 548257 - DNA, 354 bp, Homo sapiens
  misc_feature (13)..(13): n is a, c, g, or t
  misc_feature (35)..(35): n is a, c, g, or t
  misc_feature (299)..(299): n is a, c, g, or t
  misc_feature (310)..(310): n is a, c, g, or t
gacatgacaaagngaccacctcagaaacgaaagcnccgtggctactatgagcaactttgtaggccaataaattggaaaatctagaggaaatggatccattcctaggcacatacaacctacaaagattgaaccattaagaaatcaaaaacctgaacagaccagtaaaaagtaatgacataaaagccgtaataaaacattgcccagcaaagaaaagcctgcgccctagttgcttcactgctgaattctactgaacatttaaagaagtaataccaatcctcactgaaatcagaaaaatgagnatgaggaggtnaatcattcccaaatcattccatgaggttacccaataccaaaacc

SEQ ID NO: 548258 - DNA, 188 bp, Homo sapiens
caggtcgccacgttcgaacgcgactctatttcaccagtgagagccatgtctcactctctgctcaggcctacaaaagagtgttttttaatagccagttagtggtgcagacacctgtggtcccctctacttggtagggtgaggctcacttgtgcccaggtggcggaggatgcgatgagctgtgatcagca

SEQ ID NO: 548259 - DNA, 284 bp, Homo sapiens
  misc_feature (204)..(204): n is a, c, g, or t
  misc_feature (269)..(269): n is a, c, g, or t
ccagaggcacaagggaggcacagcaactctgtctggtaggtatctctggtcagcttcccctcttgtgagtctcgcagggtcgctcacccatccagaccttaaggccggaggcttgccagtctctggacggtacagggtaaggggggcaggcacaatctccgggggcagatgaaggtaatcacggagatactgggataccctcantgggtaaggtaccaagtggaaatgtctccaggcaaactggttccttcactgtagcctccgggacntggaggagactggca

SEQ ID NO: 548260 - DNA, 506 bp, Homo sapiens
cagggcttccagggctggctcacgccatggtgagttcggagagaagggagaccagggattctggaatcagaaaagtcgcccaggccatggctaaaggtggccagggcctggagcccaggcccaaaggtgaatcgggagactacaaggccacccagaaaatcgccttctctgccacaagaaccatcaacgtcccccctgcgccggggaccagaccattcgcttcggacacgtgatcaccaacatgaacaaacattatgagcccggagtgggaagttcacctgcaagtggcccggtctctactacttcacctaacacggccagctctcgagggaacctgtgagtggaactcatgcgtgtgctggagcgtgcacagaaggtggtcaccttctgtgacttatgccttaaaacacgtgtcagggtcaccaccgtgggcatggtcttcaagctggagaggggggagaacgtcttcctgtagggcaccgaaaaaactaactaatggggcatgg

SEQ ID NO: 548261 - DNA, 290 bp, Homo sapiens
gaggatccgacgcatccctaaccagagagagaatgctaatgggaagataaggagaagattgggcagggttttagtatgtatgagggcaggaaaataagggaatagaattacagagaatctttacttcggggttctggtgtacaaaagtaatgggtagatagagattgccttatgtttttctcccaagtgggcattatagctctagggctggtattaaattacatgtttggtttggtaggtagagacagagtctcacactggtcatgcaggcccgagtacaggggtacgat

SEQ ID NO: 548262 - DNA, 1065 bp, Homo sapiens
aagtataggctaggtagcgaggctggggttgggaaccatggagggtgtagaagagaagaagaaggaggttcctgctgtgccagaaacccttaagaaaaagcgaaggaatttcgcagagctgaagatcaagcgcctgagaaagaagtttgcccaaaagatgcttcgaaaggcaaggaggaagcttatctatgaaaaagcaaagcactatcacaaggaatataggcagatgtacagaactgaaattcgaatggcgaggatggcaagaaaagctggcaacttctatgtacctgcagaacccaaattggcgtttgtcatcagaatcagaggtatcaatggagtgagcccaaaggttcgaaaggtgttgcagcttcttcgccttcgtcaaatcttcaatggaacctttgtgaagctcaacaaggcttcgattaacatgctgaggattgtagagccatatattgcatgggggtaccccaatctgaagtcagtaaatgaactaatctacaagcgtggttatggcaaaatcaataagaagcgaattgctttgacagataacgctttgattgctcgatctcttggtaaatacggcatcatctgcatggaggatttgattcatgagatctatactgttggaaaacgcttcaaagaggcaaataacttcctgtggcccttcaaattgtcttctccacgaggtggaatgaagaaaaagaccacccattttgtagaaggtggagatgctggcaacagggaggaccagatcaacaggcttattagaagaatgaactaaggtgtctaccatgattatttttctaagctggttggttaataaacagtacctgctctcaaattgaaaaaaaaaaagaaaacacaacagagcaaaaaaaaaaaaaaccccgggggccttcttttggcggggggggcggcacaaaggcggggtcagagacaggggccccaggggccaaaggggtgttccgggcccccatttctttggtccacaagggggaaaatcgcggcgggccccccaaaagaggaggggaaaaaaatggaaaagaccgggtaaccgttaag

SEQ ID NO: 548263 - DNA, 860 bp, Homo sapiens
aagtctttaagtggacagtacgcatgcgccaacttcctctttttccggctggaaccatggagggtgtagaagagaagaagaaggaggttcctgctgtgccagaaacccttaagaaaaagcgaaggaatttcgcagagctgaagatcaagcgcctgagaaagaagtttgcccaaaagatgcttcgaaaggcaaggaggaagcttatctatgaaaaagcaaagcactatcacaaggaatataggcagatgtacagaactgaaattcgaatggcgaggatggcaagaaaagctggcaacttctatgtacctgcagaacccaaattggcgtttgtcatcagaatcagaggtatcaatggagtgagcccaaaggttcgaaaggtgttgcagcttcttcgccttcgtcaaatcttcaatggaacctttgtgaagctcaacaaggcttcgattaacatgctgaggattgtagagccatatattgcatgggggtaccccaatctgaagtcagtaaatgaactaatctacaagcgtggttatggcaaaatcaataagaagcgaattgctttgacagataacgctttgattgctcgatctcttggtaaatacggcatcatctgcatggaggatttgattcatgagatctatactgttggaaaacgcttcaaagaggcaaataacttcctgtggcccttcaaattgtcttctccacgaggtggaatgaagaaaaagaccacccattttgtagaaggtggagatgctggcaacagggaggaccagatcaacaggcttattagaagaatgaactaaggtgtctaccatgattatttttctaagctggttggttaataaacagtacctgctctc

SEQ ID NO: 548264 - DNA, 1066 bp, Homo sapiens
aagtctttaagtggacagtacgcatgcgccaacttcctctttttccggctggaaccatggagggtgtagaagagaagaagaaggaggttcctgctgtgccagaaacccttaagaaaaagcgaaggaatttcgcagagctgaagatcaagcgcctgagaaagaagtttgcccaaaagatgcttcgaaaggcaaggaggaagcttatctatgaaaaagcaaagcactatcacaaggaatataggcagatgtacagaactgaaattcgaatggcgaggatggcaagaaaagctggcaacttctatgtacctgcagaacccaaattggcgtttgtcatcagaatcagaggtatcaatggagtgagcccaaaggttcgaaaggtgttgcagcttcttcgccttcgtcaaatcttcaatggaacctttgtgaagctcaacaaggcttcgattaacatgctgaggattgtagagccatatattgcatgggggtaccccaatctgaagtcagtaaatgaactaatctacaagcgtggttatggcaaaatcaataagaagcgaattgctttgacagataacgctttgattgctcgatctcttggtaaatacggcatcatctgcatggaggatttgattcatgagatctatactgttggaaaacgcttcaaagaggcaaataacttcctgtggcccttcaaattgtcttctccacgaggtggaatgaagaaaaagaccacccattttgtagaaggtggagatgctggcaacagggaggaccagatcaacaggcttattagaagaatgaactaaggtgtctaccatgattatttttctaagctggttggttaataaacagtacctgctctccaattgcaaacacacacaacaaaatcaaacaccacacgggtgccacagaacacaaaaaaaaaactttggggggccggcccaagaaattaacaaacctcggggggcggcccaaataaaaggatcagggcaagaacgcgcgaagggggggccacaaacacggggggggggacaacacgcggggttgtctacagcccaaccccgccaga

SEQ ID NO: 548265 - DNA, 235 bp, Homo sapiens
gggggtagagatcgacgtatgtattcgagtcgcgggcggcacgatccttgaccccgaagacggtgcagcgcgggtggctgccagatccgcacagaactggacttggagtgggtaccacccacacgttccggaagtcggtggcgacgatcctcgatggcgagggactgtccgcgagctaggctggtaccaactcgggccgcgccggtttcgatcacgccaggatgtctactacggt

SEQ ID NO: 548266 - DNA, 1248 bp, Homo sapiens
aagtctttaagtggacagtacgcatgcgccaacttcctctttttccggctggaaccatggagggtgtagaagagaagaagaaggaggttcctgctgtgccagaaacccttaagaaaaagcgaaggaatttcgcagagctgaagatcaagcgcctgagaaagaagtttgcccaaaagatgcttcgaaaggcaaggaggaagcttatctatgaaaaagcaaagcactatcacaaggaatataggcagatgtacagaactgaaattcgaatggcgaggatggcaagaaaagctggcaacttctatgtacctgcagaacccaaattggcgtttgtcatcagaatcagaggtatcaatggagtgagcccaaaggttcgaaaggtgttgcagcttcttcgccttcgtcaaatcttcaatggaacctttgtgaagctcaacaaggcttcgattaacatgctgaggattgtagagccatatattgcatgggggtaccccaatctgaagtcagtaaatgaactaatctacaagcgtggttatggcaaaatcaataagaagcgaattgctttgacagataacgctttgattgctcgatctcttggtaaatacggcatcatctgcatggaggatttgattcatgagatctatactgttggaaaacgcttcaaagaggcaaataacttcctgtggcccttcaaattgtcttctccacgaggtggaatgaagaaaaagaccacccattttgtagaaggtggagatgctggcaacagggaggaccagatcaacaggcttattagaagaatgaactaaggtgtctaccatgattatttttctaagctggttggttaataaacagtacctgctctcaaattgaacaaacaaaaaaaaaaaaaaaaaaaaaaaaaaaaaagggggggggccaaaaaattcccccggggggccccttttctcccctttttttttacaaggggcccctaaggggctatataaagcaaaggccggcgcggtttaaccccgtcggcgggaaaccggctcgccgggcgctcttggggagaccgcctcctcgggcgcgtctccctctttggcccctccccggggattacgcctggaaatttaacttcggttttgtgtgctacccggctgctcccggtgaaatttgtccggctttgagtcgcggcgcgatacagtcgagggcgcgtgggcgtccacgttaaggctacatccgccacctgtctctttcgccgccatcctctac

SEQ ID NO: 548267 - DNA, 204 bp, Homo sapiens
gtcaaggctgctctctgccaggatccatctaaacgggagtgatggtaagcagacccagctaagagtcctcctttctttctaaagcccttatgctctgggaaggaagtcctctaagcttcagcttcaactcacagctctctccaagacatcacccgtgggagttccctggagggtttcctcataaaatggagggcggcacatagg

SEQ ID NO: 548268 - DNA, 916 bp, Homo sapiens
  misc_feature (914)..(914): n is a, c, g, or t
aagtctttaagtggacagtacgcatgcgccaacttcctctttttccggctggaaccatggagggtgtagaagagaagaagaaggaggttcctgctgtgccagaaacccttaagaaaaagcgaaggaatttcgcagagctgaagatcaagcgcctgagaaagaagtttgcccaaaagatgcttcgaaaggcaaggaggaagcttatctatgaaaaagcaaagcactatcacaaggaatataggcagatgtacagaactgaaattcgaatggcgaggatggcaagaaaagctggcaacttctatgtacctgcagaacccaaattggcgtttgtcatcagaatcagaggtatcaatggagtgagcccaaaggttcgaaaggtgttgcagcttcttcgccttcgtcaaatcttcaatggaacctttgtgaagctcaacaaggcttcgattaacatgctgaggattgtagagccatatattgcatgggggtaccccaatctgaagtcagtaaatgaactaatctacaagcgtggttatggcaaaatcaataagaagcgaattgctttgacagataacgctttgattgctcgatctcttggtaaatacggcatcatctgcatggaggatttgattcatgagatctatactgttggaaaacgcttcaaagaggcaaataacttcctgtggcccttcaaattgtcttctccacgaggtggaatgaagaaaaagaccacccattttgtagaaggtggagatgctggcaacagggaggaccagatcaacaggcttattagaagaatgaactaaggtgtctaccatgattatttttctaagctggttggttaataaacagtacctgctctcaaattgaaaaaaggaaaaaaagtcgacgcggccgcgaatttagtagtagtagtnga

SEQ ID NO: 548269 - DNA, 525 bp, Homo sapiens
aaattccagtactgcaggacacaacaggtgcctgtgccacagttatttgcactggagagactgtgtccatgtgaacggggcctgatcagtaaactcgttgactatggaagcatcccgagagccaagttcccagagtgccagccacgggccatctgacctgtttcgaatctcaatttcctgatacagagaacaaatggtagggcataattgatttttacagacgttaccccgtgatcctgctctctagtccccagatttttccagggcttttgtgcactaggtgtttcccgtttgtaaaccccttggtggttaggttttatgggattttacaggacagatggcagctgcaggagtcttgtactgtccctgacttgggtcatcccataggccctggcaccatcctcctgcccttcctggctctcctgtctgtttctgctcctgcatccgaaagtgatcataggctgcctgtgcctaggtcattgatagtgcagggagaggaacgctgaaagaggttgtccccgtgta

SEQ ID NO: 548270 - DNA, 924 bp, Homo sapiens
aagtctttaagtggacagtacgcatgcgccaacttcctctttttccggctggaaccatggagggtgtagaagagaagaagaaggaggttcctgctgtgccagaaacccttaagaaaaagcgaaggaatttcgcagagctgaagatcaagcgcctgagaaagaagtttgcccaaaagatgcttcgaaaggcaaggaggaagcttatctatgaaaaagcaaagcactatcacaaggaatataggcagatgtacagaactgaaattcgaatggcgaggatggcaagaaaagctggcaacttctatgtacctgcagaacccaaattggcgtttgtcatcagaatcagaggtatcaatggagtgagcccaaaggttcgaaaggtgttgcagcttcttcgccttcgtcaaatcttcaatggaacctttgtgaagctcaacaaggcttcgattaacatgctgaggattgtagagccatatattgcatgggggtaccccaatctgaagtcagtaaatgaactaatctacaagcgtggttatggcaaaatcaataagaagcgaattgctttgacagataacgctttgattgctcgatctcttggtaaatacggcatcatctgcatggaggatttgattcatgagatctatactgttggaaaacgcttcaaagaggcaaataacttcctgtggcccttcaaattgtcttctccacgaggtggaatgaagaaaaagaccacccattttgtagaaggtggagatgctggcaacagggaggaccagatcaacaggcttattagaagaatgaactaaggtgtctaccatgattatttttctaagctggttggttaataaacagtacctgctctcaatggcacaacaaagggggccgctaaagacccaaggccaattaaggccaagtatgaaagggcct

SEQ ID NO: 548271 - DNA, 191 bp, Homo sapiens
tggccctccgtgtgctccccctggtcgtggtgggacagacgggctgcgtggtacgtacgtggtgaccaaggtccagttggccgaactggagacgtaggtgcagttggtcccccttgcttcgctggtgagaagggtccctctggaagaggcaggtactagctgcaactcctgtagcactccaggtcctacag

SEQ ID NO: 548272 - DNA, 175 bp, Homo sapiens
cagtaatcgacattccaccttaagagagacatatcttcctccacagacggctatagtacgtcgagtgtcatagggcactcgctagatagagacctgatctcaatctatgcacacaataacaccagctcagtcagcatttcattgttactctagaggatcatcattcggacgatca

SEQ ID NO: 548273 - DNA, 444 bp, Homo sapiens
  misc_feature (127)..(127): n is a, c, g, or t
ccggcgacgggataatggtactacacacgctgctattcaagttatctgactgaacttctggtactgaggctctacacactaagtcttgctcatacaggtgatcctatcaaaacctttctgttaatancaggaccaatccatctgtgtactcaggatgttcacatcctgaaatagtatgaaataaaaataggacacacttacattgatgcctatgttaatttctttccttgactgtgtctgaatataatgttgaagtgtgatagaaacaatcctttatctttctaagctaagcagaggccgaagtttcacttgcactggtcaggattatacaggcaagccttactttttcaggaagtaggtaatgtttggatttagattagtgacacatgaataactctgtctatgactcaccttccccccaatccccggtcggggtaccgagct

SEQ ID NO: 548274 - DNA, 976 bp, Homo sapiens
  misc_feature (868)..(868): n is a, c, g, or t
  misc_feature (872)..(872): n is a, c, g, or t
  misc_feature (875)..(875): n is a, c, g, or t
aagtctttaagtggacagtacgcatgcgccaacttcctctttttccggctggaaccatggagggtgtagaagagaagaagaaggaggttcctgctgtgccagaaacccttaagaaaaagcgaaggaatttcgcagagctgaagatcaagcgcctgagaaagaagtttgcccaaaagatgcttcgaaaggcaaggaggaagcttatctatgaaaaagcaaagcactatcacaaggaatataggcagatgtacagaactgaaattcgaatggcgaggatggcaagaaaagctggcaacttctatgtacctgcagaacccaaattggcgtttgtcatcagaatcagaggtatcaatggagtgagcccaaaggttcgaaaggtgttgcagcttcttcgccttcgtcaaatcttcaatggaacctttgtgaagctcaacaaggcttcgattaacatgctgaggattgtagagccatatattgcatgggggtaccccaatctgaagtcagtaaatgaactaatctacaagcgtggttatggcaaaatcaataagaagcgaattgctttgacagataacgctttgattgctcgatctcttggtaaatacggcatcatctgcatggaggatttgattcatgagatctatactgttggaaaacgcttcaaagaggcaaataacttcctgtggcccttcaaattgtcttctccacgaggtggaatgaagaaaaagaccacccattttgtagaaggtggagatgctggcaacagggaggaccagatcaacaggcttattagaagaatgaactaaggtgtctaccatgattatttttctaagctggttggttaataaacagtacctgctctcgaaaaaanaaanaanaaacccaaaaaaactttttggggcccgctggggcccccggaagaaggtttttagaaaccttgggttgggcgccggggccccagtggtatacgggcccctgg

SEQ ID NO: 548275 - DNA, 184 bp, Homo sapiens
tgtaaggattcatagacccactttcattaaatagtcccagaagatatctaactaacatgtgttcagatagaacctcacactgcataggtggataacaaacaaacctaagatatgctgacagaaatcacattgagttcgcaagcactcaaatagaaaacccaagacctccggcaacaaattagaa

SEQ ID NO: 548276 - DNA, 1334 bp, Homo sapiens
aagtctttaagtggacagtacgcatgcgccaacttcctctttttccggctggaaccatggagggtgtagaagagaagaagaaggaggttcctgctgtgccagaaacccttaagaaaaagcgaaggaatttcgcagagctgaagatcaagcgcctgagaaagaagtttgcccaaaagatgcttcgaaaggcaaggaggaagcttatctatgaaaaagcaaagcactatcacaaggaatataggcagatgtacagaactgaaattcgaatggcgaggatggcaagaaaagctggcaacttctatgtacctgcagaacccaaattggcgtttgtcatcagaatcagaggtatcaatggagtgagcccaaaggttcgaaaggtgttgcagcttcttcgccttcgtcaaatcttcaatggaacctttgtgaagctcaacaaggcttcgattaacatgctgaggattgtagagccatatattgcatgggggtaccccaatctgaagtcagtaaatgaactaatctacaagcgtggttatggcaaaatcaataagaagcgaattgctttgacagataacgctttgattgctcgatctcttggtaaatacggcatcatctgcatggaggatttgattcatgagatctatactgttggaaaacgcttcaaagaggcaaataacttcctgtggcccttcaaattgtcttctccacgaggtggaatgaagaaaaagaccacccattttgtagaaggtggagatgctggcaacagggaggaccagatcaacaggcttattagaagaatgaactaaggtgtctaccatgattatttttctaagctggttggttaataaacagtacctgctctcgaaaaaaaaaaaaaaaaaaaaaaaaaaaaaaaaaaaaaaaaaaaaaaaaaaaaaaaaaaaaaaaaaaaaaaaaaaaaaaggggggagagcgaataaaagacaaccccaggaggaggacacgaacacatgacggccgacccaacgacagttgtcgtgttaagcaaaaagaaggagtcagcgccacagaagagagataggaccgactgaatcaaataggaggaaggagggagagccaaagtaaaaacacaggagcaggggagagagaaacaaagaggcatcgagcggagccatctgtgggccgaagaagacaaacactcacattgcgaaggtagcacaaaacatgggcgaaacaacacaccgaagggaaaagtaccgagcacgcagggacgacaaataaaccaaacggcgcgagataagagggaaacaccaacgcgaacaagagcgaccagcaagacgactgcgatgaagagacat

SEQ ID NO: 548277 - DNA, 755 bp, Homo sapiens
gctttcgatcaggcccgtgggggccgacgggatgggcaagtgtcgtggactgcgtatctgctaggaagctccggtagttcagcgtacgagatcagacgtggcattgataaacagttataagaagagctcatttgggcagcagcgctctaagaggccaatcccttttggagtgtgcgttcgtccatgcacatgaggacatcgtgctgggaaaacacggtagggaggttggaaagccaaaacggccaagatccgtgccgagttgagagagatgtgctgataagggtgctccacgctagactcacagcagtcggcccagaacactcacagacctgttgataccacaagtggacggctatgcctctgaaacctttactacgcaggacaacatgcatgaacgttcctggttgctaggcattacggtcgcagaagcgtcatggctgtcaggtggatatctcctgcgagtccgcattatcaaggttgtcaaaggtagccaaatgttcaactctattaggggaccctcatacacaaggccaagacaggacaagacccaacaggcatccacgtcacaacattagtttaacatcggggtggacagaaaccagctgggtcaggtacactacgcgtcgtgcgccaattattggcccagggacaacaagagcgaagagacggacacggacacacagaggcacgcacgaccggcgcgggcggcgcgcacagggcgccagcaacggacgcagtcgagcaggcaccagggc

SEQ ID NO: 548278 - DNA, 158 bp, Homo sapiens
cgtctgagcatgttagcctgcccatccttgatgagtcactaaccctataccccgtatctcactgtgtgcgggccttgtcatatcctgtccttcacggtcacaaccacctaggctcgggcactcttggtgttggagcctctgacctaagcaagccaagc

SEQ ID NO: 548279 - DNA, 1345 bp, Homo sapiens
aagtctttaagtggacagtacgcatgcgccaacttcctctttttccggctggaaccatggagggtgtagaagagaagaagaaggaggttcctgctgtgccagaaacccttaagaaaaagcgaaggaatttcgcagagctgaagatcaagcgcctgagaaagaagtttgcccaaaagatgcttcgaaaggcaaggaggaagcttatctatgaaaaagcaaagcactatcacaaggaatataggcagatgtacagaactgaaattcgaatggcgaggatggcaagaaaagctggcaacttctatgtacctgcagaacccaaattggcgtttgtcatcagaatcagaggtatcaatggagtgagcccaaaggttcgaaaggtgttgcagcttcttcgccttcgtcaaatcttcaatggaacctttgtgaagctcaacaaggcttcgattaacatgctgaggattgtagagccatatattgcatgggggtaccccaatctgaagtcagtaaatgaactaatctacaagcgtggttatggcaaaatcaataagaagcgaattgctttgacagataacgctttgattgctcgatctcttggtaaatacggcatcatctgcatggaggatttgattcatgagatctatactgttggaaaacgcttcaaagaggcaaataacttcctgtggcccttcaaattgtcttctccacgaggtggaatgaagaaaaagaccacccattttgtagaaggtggagatgctggcaacagggaggaccagatcaacaggcttattagaagaatgaactaaggtgtctaccatgattatttttctaagctggttggttaataaacagtacctgctctcgaaacaaaaaaaaaaaaaaaatctcgagacatagtatctcatttcttcatcttccatcggtgccgaatttcggacaggaggccttccagactcgaagaacattccgtgcaaaatggcaagaaccaagcaagcctcgagaccccagggttgtgggagtgaggcgcttgaccccggtctgaccatcattgtgcatcgtgagacaaacgtgggggcaaccgaacaactgcactgcaccccgaaatgaaagggggcaacaggatacctatagagggagccaccttaaaagtaaagggccttggggccaaaacagaaagacccaacaaaacattctcaaaagggcgccggcaccctaaggagatacgtgaaagattggaaattggcatacccagagagggcgtgtcgccaaatgacatacaggggaacccgggaaggaactagagagagacgcaggcagggcaacaaagacgcggggggcacaaaagaga

SEQ ID NO: 548280 - DNA, 112 bp, Homo sapiens
tgcggcgccgcgtgctgcttcttgggcttgctcttgttgctacccagtgtcctggtagaaggcaggggctgtcccagaggacctgggaggcagcctgggggcgggcagaggg

SEQ ID NO: 548281 - DNA, 136 bp, Homo sapiens
atttattgtagcagcgagtcatatgggcactgcagtgctcagcactactctataaccgccagcggaagatcaatgaaatacagactacaacaggcccaaaaagggacccccatgaaacctgaacacacaagccacg

SEQ ID NO: 548282 - DNA, 811 bp, Homo sapiens
ttgaaaaaaaaaaaaaaaggttcaaacagcaatttaagggctgggcacggtggctcatgcctgttaatcccggcattttggaaggctgaggtgggcaaatcacctgaggtcaggattttgaaaccaggcctgaccgacatgtggttgaaaagttaaaaattacaaaaattaaaaaaatttagcttgggttgttggtgtggttgttgcacctgtgttagctcccttacaaaaattacaaaaaatttagcttgggttgttggtggttgttgcaccttgttagctcccagcttactcgggaggctgaggcaggagaactcgcttgtggaacccaggaggttggaggcttgcagttgagcccaagaattcacgcccatttgcacttccagcccttgggttgacagagccaagacttccaatcttcaacaacaacaacaaaaaggaatttaaggaggaagccaccgtggctttcctaagaattagactttatggcttaagtgggatttatatttaagctggtttaagtccaggaccccttaccaggaagaactgaggttccatatttggaggttggtctcacccttttgggcattttggtcctactaattaataaatttggctgtaaaaaagcctcattaaggagatggactgtgtgaacagagatgagagagcaggcctgtttgcaaggctggcccttgggtggctttgaaagttggattcagggaggtcccatactcctaatgataaagtgtcctgtcctaatgtcgtcacatgtggtgccaattgtctcgggtcattcattttggagatggaa

SEQ ID NO: 548283 - DNA, 1387 bp, Homo sapiens
aagtctttaagtggacagtacgcatgcgccaacttcctctttttccggctggaaccatggagggtgtagaagagaagaagaaggaggttcctgctgtgccagaaacccttaagaaaaagcgaaggaatttcgcagagctgaagatcaagcgcctgagaaagaagtttgcccaaaagatgcttcgaaaggcaaggaggaagcttatctatgaaaaagcaaagcactatcacaaggaatataggcagatgtacagaactgaaattcgaatggcgaggatggcaagaaaagctggcaacttctatgtacctgcagaacccaaattggcgtttgtcatcagaatcagaggtatcaatggagtgagcccaaaggttcgaaaggtgttgcagcttcttcgccttcgtcaaatcttcaatggaacctttgtgaagctcaacaaggcttcgattaacatgctgaggattgtagagccatatattgcatgggggtaccccaatctgaagtcagtaaatgaactaatctacaagcgtggttatggcaaaatcaataagaagcgaattgctttgacagataacgctttgattgctcgatctcttggtaaatacggcatcatctgcatggaggatttgattcatgagatctatactgttggaaaacgcttcaaagaggcaaataacttcctgtggcccttcaaattgtcttctccacgaggtggaatgaagaaaaagaccacccattttgtagaaggtggagatgctggcaacagggaggaccagatcaacaggcttattagaagaatgaactaaggtgtctaccatgattatttttctaagctggttggttaataaacagtacctgctctcgaaaaaaaaacacaaaacaacaaacacaaaaaaaaaatttggacgcgagccatggagcccgcgaagaaacgctcgtcaaacacaccagcgcttgaggagcgcaggggcaccaaagaagctaaaggaacacggtggcaaacaagcagagaccaaagggagaccccgggaccaaaaaagggcggcgggagcatactcccaccagaaggaaaaacaacgcccgcgcggagggaacacacagagcgggtccagacgagaataacccgcaggagtggagagccaggaaaggccgcaaaacacggggaccatacaacgaacaaaagggggagcccaagaggagagccgccagcgagaagaaaaaaagaaaaagggcccagccaaaagggaggacaacgagggaggcaagaacggcctaacagcagcaacccagcgcgagaaggaggcgcaagcagcgacgacagcagcgacactacacacaaaaagaaaagacatgcaaggacacagaaccagacaaaaccgactagaccgga

SEQ ID NO: 548284 - DNA, 343 bp, Homo sapiens
tcctcctccctccccacccctgtcgcatccacgtgcgacctggaggactggtcagaaccgttactgtgaatgagtgaagatcctggaggaccctgggccccaggccagctcccatcattggggaaacggtaaacccccatgtgttcgtgggggagggggggggaggcaaaaaaaaaaaaaaacctcaaaagtttttttaaagtgggggaaaaacatccaagcactttaattccaatgtaccaggtgaactgacggagctcagaagttttcctttacaccaactgtcaatgccggaattttgtattctgttttgtaaagatttaataaaagtcaaaaaacttgc

SEQ ID NO: 548285 - DNA, 1825 bp, Homo sapiens
  misc_feature (1)..(1): n is a, c, g, or t
  misc_feature (388)..(388): n is a, c, g, or t
  misc_feature (728)..(728): n is a, c, g, or t
nttgctcgtaggtgcgcgttgtcttgtgttcttctgtcgttcgttcctgtgtaggtgtctctactgaagtcgtcgtgactctgtatggtgtggtccggttccagtcaagtctgtgtttgctgttgttgttagccgtcgttgaggggattttcatctttttccgtcgcgcccctcgtcgtgttgtggtcgctctcaccccttgggcgccttttggattgtgtggggagccgtcctttgttagtactgccttagcgtggtcctctttggtgggctcttctcactgtttctgtgtatcaccacgagagtggttgtatgtggcgcgctgcactgagttgtcccccctatcacaacttatgttgagatgttgttaatctcccctcttgctggntgtgttgctgcggtgaataggtagtttggtcacccaaaggcgccccgcttggtacaaccacctgtggggggtgttgtgtgaggccgccattttttcgttgtgatgttgactcagcgcccgtgttgtttgtagcgctccctctccttgcgtggaggtcgtttgtgtggcgatgctatacaggctcccaggggggcccgtctattgtgctcctggtccatcagtgttgagcagcccctcctttgtgattgctccatcacggtaagttgtgggtgtccgctcccccgcgactggttttgtttgtgatgagagcgcctctttttgtttgtggggcccacacagngtgttaattgccccttgttgctctgctctctgcgtgcgcaaggagggatgttgtgtgtttgtgcccgaggcctccttgtggccacagaggggtgtgccccgttttggggtcaccagtgtgaggttcctttggtgggcgccccttgttcgtttatgtgagcaaagatgctccccccttgtgtttcgtgtacacgacagggggtcgctcgtggggattctcacccgtgtgctccccgctcgccacgttctgtggccgttcctcggttgtttgcgccgcgcctccttggtgctctgctccggaggatttttcttcatagaagactgtctcccacagcacacacctttttttaataaagacgtctctctcctcctttgcaaaggggcacacagaaaatgagcacgtctttctctctctcccctttcatacagtcctccccacaattttcgtcacacgcctctccacacattctttgtggagagaacccacactgtgatgagagccacgctttaacactcctttcactcctctcgtgagagagacaccctttgtcgcatccacagcttctgccttctgtgttgtgtacacaccagaggtcgtggagagtcctgtgtgcccaccctctctctgcgcgcccacggcgtctgagagagtgtgtggacacagagattctctttgtgtgtcacagcgtaagactctctgagtgtgtgtcctcttggcgcccacactagccacacacagccttgtgctctcacagggcgcacacgtgtcacatagtctctctgtgatgtcccactcttcttgtccacgagaggcggaccacgagaccacactgtgttctgttttaaactggatccctgtccctgtccctcaagagattgtcctgtgtctcccgcgggagaggttaatgcactttacaccccccgttggggagatttgaggttatatacgaaattgggatctttctgaggagtcccctcggaggggtatgaattgggaggggaaagcttcaaacagaatgtcccttttgtgaagagagggagatggaaattgttttttttcatttgttaaattagtggagttaagattttataaatcca

SEQ ID NO: 548286 - DNA, 534 bp, Homo sapiens
  misc_feature (14)..(14): n is a, c, g, or t
  misc_feature (26)..(26): n is a, c, g, or t
  misc_feature (54)..(54): n is a, c, g, or t
  misc_feature (93)..(93): n is a, c, g, or t
  misc_feature (159)..(159): n is a, c, g, or t
tatggcctgcaaanttagaggctttngttaagaaaggaaaacttaaataaaaangggctgttcgtgtggatgtactcgcagcccccctccagngactaatatgtataaatgttaaatgatattaaatatgaacattagaatttaaaaaaaacacccacnccaacatcacctttcactcctctttaaccaactctccccaaaaaaccccaaatattttccaccccccattccgcccgggattgtctttggcccctttttttaaaaaaaccctcggggccaaccccccggcccataattttccccccgcttggaaaaagccttacactttataatgaggttttcccaaagtccttcttttataagggggattttccactccccccctcgggacccccccctaaaaaaattgttacgccccccctgtctcccacaaatataccaaaaaaacccggccccccccctctcttaaaaaggcttcatttctacacctctccggggcgactaactctcccccaaggttccctacttctctcg

SEQ ID NO: 548287 - DNA, 1725 bp, Homo sapiens
  misc_feature (416)..(416): n is a, c, g, or t
  misc_feature (420)..(420): n is a, c, g, or t
  misc_feature (579)..(579): n is a, c, g, or t
  misc_feature (1558)..(1558): n is a, c, g, or t
gcgtgcccctgagctctccgatgtcctcccgtaccgcctaaccgaggcgagctcagtatgcccaggctcctgctgggaccctagccacgcagcggccgcagagctatgtcccgacgctagtcacgcggcctatgtgaccgggcttgtgaagcgcgctacactctgacaaccttcatggcaggagcagggcacctagtcaggcagcgcggatcattccgctagtgcgactcacctacatggcacttcagccccgctccccggtaccttgtgtgcgctgttctgctaccccactgcgggcatacatatcgttatcctgattcgacaaccacttccacctgccccacgcctttgacgcgctaggcgctgctccgttgtgctattggcctaccaacgacccagtggtaccatacgctttnattntaaactgatacgtcacagtcgcgacgccttgcatcaagccttttgagcagggcgcccacacggaaatacttcgtttaccccgtgcttggaattccccggggaggaccgtacgaaccttgggccattggcccactgcgcactggcgctgcagcaaacttntcttaaggccacttgtggcattcgtatacaggctaaacaccaacaggctaagccaaccccggcggttgtggggtgccccccacagacccgatttcgtacatttggttcataacagtggttacatacacattataagtaacttttgcacccacaaggcacgtggctttcaagtccacctttgcgttttgaaattgcgcgggcccaaaacgcgccaatgcgcggtcgggtacccaagccgtgtggattggaggattactaatgagaaaataccaaacaaaccaagaacgcgaaaaccacttgtggttgtcacgtgcggaacaacaacttggtggggccctttacccaccaaacatcgattttccctggcgggcgagggtcttcacaccaatgggttaactatatggaacccccattccgggtttccttgggtccgccctttttcccccccacgttttccaagaccgcgtggccctaccccgcccaacgcgaaaggccttttattggccgatcccgacgcagttatttaccacctgttcgccccgacaactttaaccagcgcatcacacctgaaatacgcaccaactcctatctaacgtttctattactgtagcgaggtggcccacacgtatatagcgcgcccgaaaattaaaccgcccccacgtttaacgtttatggccgttgggtcccccacaactaaagaccccagaccacattggggcggccttgggacgggggggtgcccgtaatggggtccttggggcacattgcgcgcaacctagtccagctacgcatttaccccgcgcgcgtttaaactccgatattattccccgttccccccggatggtatggctgggccttcggggctaaaacaacgtttttatgtggctctatatgaggagagagaacaatacgctatgtggtctccctggacaaagctaaccaaccaaagcagcaaatcattcacacacaccacaacagnatcagcaacaccaacccaccatcaccagatcgcaaccacacacacacacacagcaccacccagcacacataacacacaaatagcggcgagcgcgacccacatcaagcacagcatcgaccctaccacggcacagcgccagcccacacatcatcatccagctgcatcct

SEQ ID NO: 548288 - DNA, 980 bp, Homo sapiens
  misc_feature (567)..(567): n is a, c, g, or t
  misc_feature (667)..(667): n is a, c, g, or t
  misc_feature (915)..(915): n is a, c, g, or t
  misc_feature (931)..(931): n is a, c, g, or t
cattttgaggccaagcatcccagcccccttctcacatgggattcccctctgcccagagatccctctttccagattcacagaaaatgcctgcccctccaagattaaagcgctttgtcactctctctccctttcccactatgaatattaggtatttcctgcaggtaacttttttgtctgcgcaacagaacttctttggactgccagcaccggccttgagcagcttggccctgcagaaagctcatgatgggatctctgctgagttaagcttattgcattaggaactggactaccggggcctgtcttaggtctgctctggaggcatcacgggagaattttcctagggagactccatatacagcgtgaataaaagagcaggaatatcttgccccctctcacctcacctttttaagagagctgtgagccccaagcatatccaggtttaaatgttatgcttttacctgaagttaaaatattagatacttagccctggatgcacccccctcaccgccgcggtctctggaataaacgattagtcaacttgttctttgttatgttcctgaaacaccnctatttcctctcttgaaggtttccctgatgatctgttcccgtagctcctcctcccatcccccttacccggcacattggtcagtctctgctgattctctgntcttgccagtttgagctggcactgagcctgtaaagatgttctgctttttaaaaaacaaatggtgttgaggctgcagccctgtgcgccctccagtctctgattttgagcagttccattggaatcaaacccgactggatcgcagcatatgctatgcctcgagagagccttttcaaacaaagctcgaggtgaaagactgggaatgtatcttatttaaggaaaacttaattcctcttctttattttaatatnaaactttttacatatnacagggagagaatgggtgagtcacggggggcatgggattggaaaggttt

SEQ ID NO: 548289 - DNA, 248 bp, Homo sapiens
  misc_feature (95)..(95): n is a, c, g, or t
  misc_feature (161)..(161): n is a, c, g, or t
agagattccctgtgtgaacctaggcaggtcccatcttccctctggaccaagtactcagtctctttgttgacgaaagggaataaatgactgacctnactggggactgactgagacagatccaggaccacagactatgacgaacactacttacttaaacaganctgacactgacactggggtttgaaccaacaaaaccaaaccaaaccaaaagaaaaaaaaagtttgtgttcaactatgttgcaacagag

SEQ ID NO: 548290 - DNA, 527 bp, Homo sapiens
gatggcagattcttcttctgagatgatgattggaactcatgaaacatgacacatttagacagcccagcgttgatgattagaaggcgatactttcggttggagttgagaaaagaatggtccccgtgcagcagcttctcagatcctgagtcagagaaaagaaacacctgtgtgttgagagaaccaatcgtggctcagtaccccgagttgacaagagaaagtgaaaaaatcattgcaaacttcaagaaaaaaatgaaagttaaaaactggggaacattatttgaattgcatagaacaacgtttgggaaagtaaccaaaaattcttcttccgattaaggtagtgaaacttcttgtacgtctcagtgactcagttgggtacttattctgggacagtgcaactacgggttacgccacctgctttgtttttaaaggattggtcattttaacttggtcggcatggtatagatagcattgtgggagacggaataagagccagtaagtgggccaccactattggtcactgtgtaagg

SEQ ID NO: 548291 - DNA, 1069 bp, Homo sapiens
  misc_feature (297)..(297): n is a, c, g, or t
ttactatcgactttcatactctctgactgccgtggaactgctacaacctttatacacagacctgtaacctgtctgatcactcctgcccttctgcccctttgcccattggatgattcaatgtatctttcgacgcagttaaacgattatactcaacctcgaggagcccgcttcgatctagacggcatggctattctaccgtagtcgcttatgactcccactcaaaatactgccgtggagccccgtcgtgcgctttcctggtatcatcattttacctgaactcctcatttattaattaanaccaccacccttcatctcatgtgatcaaatacttagcactcacgcgcatacaatcatagtgaccagctaattgtaccctatgaaaggtcatataaactatgatactattcagcgtccaagaattcctaatggcataaccagacgtgttcattttaaaatttcagtaaccagtaatttccccgtccatgccagttcaccgattcggaacttcattacacctacctgagtgcagagaacagactttcctaatccatctccatcccgctgaggcgactccaactgtatattgacgattgtccttcgcattaccccagttaacaaatgctgcgcacggcattccgcgcgcattccacgaacctcataaagccactaaggcaacagggcccgacgttaaacaaacgttcgcagaacttggaaaaaacactgctaaaccatggggggaatcttgttaaaagagcaacctttagtggcggcgggtggtgcccattagtttgggccaaactttatgcttacacagaggatttgtacaccgcctcttaaggggtacaatattaaaacagtgcaacacggtggtatacgtgtggtaccacccacgctgcaatatgctaggaatgttggaacaggttagtcttactggaggatgactactgagcacggttgtatacccagaggggagataaaccaaaatatacccctcaggccgataaaacacacggtatatgtgaaccacacgtaatatacaaagaagagagtaaaacgataaaaaaaacac

SEQ ID NO: 548292 - DNA, 159 bp, Homo sapiens
gggtatatacacatatgtagcataaaatgcgtcagaaatttgatctattcttgatctgtactcttcgcatggactgggaagttcttttaacatcattaaatattaagacgaccatctcttctattaaagttacacgtacagtgttcggatccagtttcg

SEQ ID NO: 548293 - DNA, 252 bp, Homo sapiens
  misc_feature (118)..(118): n is a, c, g, or t
  misc_feature (126)..(126): n is a, c, g, or t
accccccgatatgcttttttggaatagccaaaaatgaagtttaaaaaaacgttttccacatgcctcggcgtcctgggtaaccggtggtcaggcaaagctccctctccctggggggtgngggggggntccgccccaggaggctcccgcccctcccagatcccagcccctgacccccgcccttcccgggccgttgggctccctgttttcaaataatccaccaggtccaaaaacaccaggtggatgttttggcta

SEQ ID NO: 548294 - DNA, 197 bp, Homo sapiens
ctcatctccagtgtcacgtcatgggggcaggtaagttgggcgaggcatgaagtgcagagggtgtcacccctgcctgtatggaggtagaatatacataacataaattatgcattctaagtgtacatttcgtcagttgtagacatatttatacacccatgaaacgaccacaatcacggtacccatcaggtatcacagcc

SEQ ID NO: 548295 - DNA, 871 bp, Homo sapiens
  misc_feature (212)..(212): n is a, c, g, or t
  misc_feature (703)..(703): n is a, c, g, or t
ggtagtctgagcgctacccggttgctgctgcccaaggagcgcggagtcggacgcaggcagaccatgtggaccctggtgagctgggtgggcttaacagtagggctggtggctggaacgcggtgcccagatggtcagttctgcccgtgtggcctgctgcctggaccccggaggagccagctacagctgctgccgtccccttctggacaaatggnccacaacactgagcaggcatctgggtggcccctgccaggttgatgcccactgctctgccggccactcctgcatctttaccgtctcagggacttccagttgctgccccttcccagaggccgtggcatgcggggatggccatcactgctgcccacggggcttccactgcagtgcagacgggcgatcctgcttccaaagatcaggtaacaactccgtgggtgccatccagtgccctgatagtcagttcgaatgcccggacttctccacgtgctgtgttatggtcgatggctcctgggggtgctgccccatgccccaggcttcctgctgtgaagacagggtgcactgctgtccgcacggtgccttctgcgacctggttcacacccgctgcatcacacccacgggcacccaccccctggcaaagaagctccctgcccagaggactaacagggcagtggccttgtccagctcggcatgtgtccggacgcacgggccnggtgcctgatggttctacctgcttgtgagcttgccaagggggaacgtatggctggtgacccaatagccaaacggccacttgctgggtccgatcacctggcactgtggccccaagaacactgtgtgtgacctggatccaggaataacgtgcctctccaagggagaactg

SEQ ID NO: 548296 - DNA, 464 bp, Homo sapiens
agaggacaccggtcagtaaggtgtgccacggaagtgtgtgtacactcgctgtgtgcccctcacagagataagatacacagagggctacgtgcaaagtatcctcccggccccccacatacagacaggggtaccattccagatcaagggaggcatatccccagcagtgagcatgtcccctcataaacaagtatccctccaaaagacaggcacttcttccaaaggcatccatctctcatatacacgtgcatgtacacacacacacacgtaatagcattttttttaacaaggaatgtgatattgatgtctcagaaacgggttgttactaaaatctctataacctttgggtgtccaatgaaaaggttaccagaaagaaaagcctgtaatttgggaagctcttttacaattattttcctgttgtgctgaagtaatttggcttttcacctttcttaaccctactataatat

SEQ ID NO: 548297 - DNA, 223 bp, Homo sapiens
acaaaggtataatacacatatgaaccctgggaataatgcaagcaacaactagaggaaaactctgtaaggtggtaaaaggctggctaactggtttaggatcccagtattggataaatagcacagtagcagggtgtcttatgatcctccccctatccaacagaacaaggtgacacagacccagcatttcctgatccctgacagaacagcagatggcagcccaggt

SEQ ID NO: 548298 - DNA, 842 bp, Homo sapiens
  misc_feature (183)..(183): n is a, c, g, or t
  misc_feature (674)..(674): n is a, c, g, or t
aaggctgtgcggcggatttgagagtgatggacgcggcagactattgcgcctcgtgagcgttgggtgcgttacagcggtctgatgttgacacacaggcccatatggtcattctgtaatgtagctgctgcctggaccccggaggagccagctacagctgctgccgtccccttctggacaaatggnccacaacactgagcaggcatctgggtggcccctgccaggttgatgcccactgctctgccggccactcctgcatctttaccgtctcagggacttccagttgctgccccttcccagaggccgtggcatgcggggatggccatcactgctgcccacggggcttccactgcagtgcagacgggcgatcctgcttccaaagatcaggtaacaactccgtgggtgccatccagtgccctgatagtcagttcgaatgcccggacttctccacgtgctgtgttatggtcgatggctcctgggggtgctgccccatgccccaggcttcctgctgtgaagacagggtgcactgctgtccgcacggtgccttctgcgacctggttcacacccgctgcatcacacccacgggcacccaccccctggcaaagaagctccctgcccagaggactaacagggcagtggccttgtccagctcggcatgtgtccggacgcacgggccnggtgcctgatggttctacctgcttgtgagcttgccaagggggaacgtatggctggtgacccaatagccaaacggccacttgctgggtccgatcacctggcactgtggccccaagaacactgtgtgtgacctggatccaggaataacgtgcctctccaagggagaactg

SEQ ID NO: 548299 - DNA, 270 bp, Homo sapiens
  misc_feature (159)..(159): n is a, c, g, or t
cgcatcgggtatgggtggggggatcatatagtcactccaggtttatggagggtcttctactattaggacttttcgttcgaagcgaggttctcaaatcatgaaaattattaatattactgctgttagagaaatgaatgtgcctacagatgataggatgtntcatgtggtgtatgcatcggggtagtccgtgtaacgtcggggcattccggataggccgaggaagtgttgtgggaagaaagttagatttacgccgatgcggggggtaccgag

SEQ ID NO: 548300 - DNA, 305 bp, Homo sapiens
  misc_feature (22)..(22): n is a, c, g, or t
cccccccaaacggggggggggnacaccccccccaacttttgggtggggggggggggaaaaaaaaaacaaccccggcccgttaagggagagattcacccctctcccaggagcaaagccacccaccccgacatgactcttttggcggaggtggccctcagaccccctctgcaaacaagggcctgacccccgggcccctccccaggctcaggggctttggggccaaatccaaaaaaatttgctctgctgccctgaactcttccggcaatttaggtttttccttttttttttctttttccatatggcca

SEQ ID NO: 548301 - DNA, 1112 bp, Homo sapiens
aagtctttaagtggacagtacgcatgcgccaacttcctctttttccggctggaaccatggagggtgtagaagagaagaagaaggaggttcctgctgtgccagaaacccttaagaaaaagcgaaggaatttcgcagagctgaagatcaagcgcctgagaaagaagtttgcccaaaagatgcttcgaaaggcaaggaggaagcttatctatgaaaaagcaaagcactatcacaaggaatataggcagatgtacagaactgaaattcgaatggcgaggatggcaagaaaagctggcaacttctatgtacctgcagaacccaaattggcgtttgtcatcagaatcagaggtatcaatggagtgagcccaaaggttcgaaaggtgttgcagcttcttcgccttcgtcaaatcttcaatggaacctttgtgaagctcaacaaggcttcgattaacatgctgaggattgtagagccatatattgcatgggggtaccccaatctgaagtcagtaaatgaactaatctacaagcgtggttatggcaaaatcaataagaagcgaattgctttgacagataacgctttgattgctcgatctcttggtaaatacggcatcatctgcatggaggatttgattcatgagatctatactgttggaaaacgcttcaaagaggcaaataacttcctgtggcccttcaaattgtcttctccacgaggtggaatgaagaaaaagaccacccattttgtagaaggtggagatgctggcaacagggaggaccagatcaacaggcttattagaagaatgaactaaggtgtctaccatgattatttttctaagctggttggttaataaacagtacctgctctcaaatagaccaacaaccaacaccagaccaagcgcccagccacacccgccccacaccaccgaccgccacccaccacacctcacaccgccaaacacaccaccgctcgcggcgccaccccggcaccccgcacgacgactcacacacacacccgaggggcggcgcgccgaccaagtgtacacaagaccgcgcgcacgacgcgggcccaagcacaccccgcgccaacaccgcgggggccctcccgaaacagcgccggg

SEQ ID NO: 548302 - DNA, 518 bp, Homo sapiens
  misc_feature (4)..(4): n is a, c, g, or t
  misc_feature (62)..(62): n is a, c, g, or t
  misc_feature (174)..(174): n is a, c, g, or t
  misc_feature (176)..(176): n is a, c, g, or t
  misc_feature (200)..(200): n is a, c, g, or t
  misc_feature (214)..(214): n is a, c, g, or t
  misc_feature (221)..(221): n is a, c, g, or t
  misc_feature (240)..(240): n is a, c, g, or t
  misc_feature (244)..(244): n is a, c, g, or t
  misc_feature (304)..(304): n is a, c, g, or t
  misc_feature (331)..(331): n is a, c, g, or t
  misc_feature (343)..(343): n is a, c, g, or t
  misc_feature (350)..(350): n is a, c, g, or t
  misc_feature (353)..(353): n is a, c, g, or t
  misc_feature (360)..(360): n is a, c, g, or t
  misc_feature (368)..(368): n is a, c, g, or t
  misc_feature (403)..(404): n is a, c, g, or t
  misc_feature (441)..(441): n is a, c, g, or t
  misc_feature (475)..(475): n is a, c, g, or t
  misc_feature (482)..(482): n is a, c, g, or t
ccgngctgtctccctcctccagggccaaggagcgggccccgcgcgcgcggcccgccagcacntctccgtccccgggcgcgcacggccggcgcggcggcccagaagggaagagctcgtcgcgcagcccggcccgcacccccgctcctggagttccagccgctcgccctctaaatntngctcgcgctctgggagaagcggcnccacagccccagcngctcgcngtcgcccaagaagcccctnagcngggacaaggacggcgagggccgcgcaaggcactctgaggccgagggcacccgcgcccggngccgctcccgcagctactcgcccatcngcaagcggcgcngggattngtnaagcttnatggagcngcggcgcatcaccagcgcccgcaagcgccctattnnatattaatgggtcagctcctttttttttttcagctgnttgagcagcgaatattcgaatcggagctatagcngcagccncagccccggctacagctacgggagctacagcagttg

SEQ ID NO: 548303 - DNA, 358 bp, Homo sapiens
  misc_feature (358)..(358): n is a, c, g, or t
agagaaacatgagattgagttttaaaatctataaaaaacatattaatcatgctctcctctatagcagaatcagatatttagacacagaacaggattttatgtaaattgctttaaggttggggaggtggaacagggtatcttttcatcaattagaaggaaaggttgaaacttctgaatacctttataggggtttctcttactaatcggctcttgctagaactggtccaacccaacttgctcagagatctcatattgaagcaacatacaggcaatccacatctttctttccctttgaagcatagccattggatgggatgagaggacacaggctgttggggtcacacaggcttgcctgtgn

SEQ ID NO: 548304 - DNA, 1354 bp, Homo sapiens
aagtctttaagtggacagtacgcatgcgccaacttcctctttttccggctggaaccatggagggtgtagaagagaagaagaaggaggttcctgctgtgccagaaacccttaagaaaaagcgaaggaatttcgcagagctgaagatcaagcgcctgagaaagaagtttgcccaaaagatgcttcgaaaggcaaggaggaagcttatctatgaaaaagcaaagcactatcacaaggaatataggcagatgtacagaactgaaattcgaatggcgaggatggcaagaaaagctggcaacttctatgtacctgcagaacccaaattggcgtttgtcatcagaatcagaggtatcaatggagtgagcccaaaggttcgaaaggtgttgcagcttcttcgccttcgtcaaatcttcaatggaacctttgtgaagctcaacaaggcttcgattaacatgctgaggattgtagagccatatattgcatgggggtaccccaatctgaagtcagtaaatgaactaatctacaagcgtggttatggcaaaatcaataagaagcgaattgctttgacagataacgctttgattgctcgatctcttggtaaatacggcatcatctgcatggaggatttgattcatgagatctatactgttggaaaacgcttcaaagaggcaaataacttcctgtggcccttcaaattgtcttctccacgaggtggaatgaagaaaaagaccacccattttgtagaaggtggagatgctggcaacagggaggaccagatcaacaggcttattagaagaatgaactaaggtgtctaccatgattatttttctaagctggttggttaataaacagtacctgctctcgaaacaaaaaaaaaaaaaacgaaaaaaaaaaaaaaaaaaaaaaaaaaaaaaaaaaaaaaaaaaaaaaaaaaaaaaaaaaaaaaaaaaaaaaaaaaaaaaggggggagagcgaataaaagacaaccccaggaggaggacacgaacacatgacggccgacccaacgacagttgtcgtgttaagcaaaaagaaggagtcagcgccacagaagagagataggaccgactgaatcaaataggaggaaggagggagagccaaagtaaaaacacaggagcaggggagagagaaacaaagaggcatcgagcggagccatctgtgggccgaagaagacaaacactcacattgcgaaggtagcacaaaacatgggcgaaacaacacaccgaagggaaaagtaccgagcacgcagggacgacaaataaaccaaacggcgcgagataagagggaaacaccaacgcgaacaagagcgaccagcaagacgactgcgatgaagagacat

SEQ ID NO: 548305 - DNA, 126 bp, Homo sapiens
ctgctacgggggaagtgtaaagccttttctgcttgataagagaactggccaaggtgccgggctgagggaaatgaatgcccaatccctgcaggatgcagcgcagggaggaggaacctccgttgcagg

SEQ ID NO: 548306 - DNA, 150 bp, Homo sapiens
ccgtactgcagccgggttcatacacatataccacacattggggtctgtaccaaacattctattactctgccatttctaccaacttgtcagtttaaaactttattaaggctgtaatttgtccctactcagttgcaccatgaagagaaaata

SEQ ID NO: 548307 - DNA, 103 bp, Homo sapiens
ggatccaccccgatgagccaacaaaccaggactctgccccttctgtttccattttaatcatgtgggatagtcagctgtaccaagcgcccttggcccttatcga

SEQ ID NO: 548308 - DNA, 1192 bp, Homo sapiens
  misc_feature (875)..(876): n is a, c, g, or t
  misc_feature (1192)..(1192): n is a, c, g, or t
aagtctttaagtggacagtacgcatgcgccaacttcctctttttccggctggaaccatggagggtgtagaagagaagaagaaggaggttcctgctgtgccagaaacccttaagaaaaagcgaaggaatttcgcagagctgaagatcaagcgcctgagaaagaagtttgcccaaaagatgcttcgaaaggcaaggaggaagcttatctatgaaaaagcaaagcactatcacaaggaatataggcagatgtacagaactgaaattcgaatggcgaggatggcaagaaaagctggcaacttctatgtacctgcagaacccaaattggcgtttgtcatcagaatcagaggtatcaatggagtgagcccaaaggttcgaaaggtgttgcagcttcttcgccttcgtcaaatcttcaatggaacctttgtgaagctcaacaaggcttcgattaacatgctgaggattgtagagccatatattgcatgggggtaccccaatctgaagtcagtaaatgaactaatctacaagcgtggttatggcaaaatcaataagaagcgaattgctttgacagataacgctttgattgctcgatctcttggtaaatacggcatcatctgcatggaggatttgattcatgagatctatactgttggaaaacgcttcaaagaggcaaataacttcctgtggcccttcaaattgtcttctccacgaggtggaatgaagaaaaagaccacccattttgtagaaggtggagatgctggcaacagggaggaccagatcaacaggcttattagaagaatgaactaaggtgtctaccatgattatttttctaagctggttggttaataaacagtacctgctctcaatgcacacaaaaanncacaacacagggggacagataaaaatccccgagggccccagataagcgaacccacatcgggccaaggggccccaagggaacacgatatacgcaggccggcagacccccacaccgcgtgcaggaaaagcgcaggagaaccgacagaccacaccagggggacacacgaaaagcccggaacggacggcagcaaacaaagtacggagaccacataccggagaggaacgtgatatcgtcaacgaccgacgacaccagccaacgaaccacacagcaagcagaccagcagcacgataccgacgccacacaacgacgaaagcan

SEQ ID NO: 548309 - DNA, 866 bp, Homo sapiens
aagtctttaagtggacagtacgcatgcgccaacttcctctttttccggctggaaccatggagggtgtagaagagaagaagaaggaggttcctgctgtgccagaaacccttaagaaaaagcgaaggaatttcgcagagctgaagatcaagcgcctgagaaagaagtttgcccaaaagatgcttcgaaaggcaaggaggaagcttatctatgaaaaagcaaagcactatcacaaggaatataggcagatgtacagaactgaaattcgaatggcgaggatggcaagaaaagctggcaacttctatgtacctgcagaacccaaattggcgtttgtcatcagaatcagaggtatcaatggagtgagcccaaaggttcgaaaggtgttgcagcttcttcgccttcgtcaaatcttcaatggaacctttgtgaagctcaacaaggcttcgattaacatgctgaggattgtagagccatatattgcatgggggtaccccaatctgaagtcagtaaatgaactaatctacaagcgtggttatggcaaaatcaataagaagcgaattgctttgacagataacgctttgattgctcgatctcttggtaaatacggcatcatctgcatggaggatttgattcatgagatctatactgttggaaaacgcttcaaagaggcaaataacttcctgtggcccttcaaattgtcttctccacgaggtggaatgaagaaaaagaccacccattttgtagaaggtggagatgctggcaacagggaggaccagatcaacaggcttattagaagaatgaactaaggtgtctaccatgattatttttcaatttgagagcaggtactatttattaaccaaccagcttag

SEQ ID NO: 548310 - DNA, 472 bp, Homo sapiens
aacggttgccgggataacggcgggcgtcaaactcactctaatcagcttagtggcgaactgactgccttgtagggagtcgaagctccacattttcacctttcctcgatttatgaaggacacacatgtcgcttttaaaaatcgcctccgtggcctgtatcgccttgagcctgggtgcttgccagagcctgttccaaccggcctacctgaagccgctggacaccaccgccgacgcctccgagcagatcaaacccggctgcagcagtccggattgcccgctggtaaatatcgatactgtgcacttcccgtccgagccgcagttggaccagatcatcgaacagcgcctgctgcagatggcccgcacttcacctggccaggccatgcccgacaccctgaacgcctaccgcgacaagttcttgcgtgagtccccggaccgcaacagcatgtacttgcaggccaaggtacgtgagcagca

SEQ ID NO: 548311 - DNA, 390 bp, Homo sapiens
ggtcacaccattctcctgtctcagactcccgagcagatgtgactacaggtgcctgccaccacgcccggctaattattttatatttttagtagagatggggtttcacatgtgttagtcaggaagggctcgatctcctgatctcgtgatccacccacctcggcctcccaaagtgctagggttacaggcatgagccaccacgcctagcttcttgagtggttttgtcatggggtgctgaattttgtcagatgctttttctgtgtcagttgagaagatacgtgttttatgtggttttttccccttcatatctgttaatgtgctgtggtacattgattgatttcatatgttgaactatccttgcattccagggagataccacttgctggtggtgtt

SEQ ID NO: 548312 - DNA, 860 bp, Homo sapiens; identical to SEQ ID NO: 548263

SEQ ID NO: 548313 - DNA, 1234 bp, Homo sapiens
aagtctttaagtggacagtacgcatgcgccaacttcctctttttccggctggaaccatggagggtgtagaagagaagaagaaggaggttcctgctgtgccagaaacccttaagaaaaagcgaaggaatttcgcagagctgaagatcaagcgcctgagaaagaagtttgcccaaaagatgcttcgaaaggcaaggaggaagcttatctatgaaaaagcaaagcactatcacaaggaatataggcagatgtacagaactgaaattcgaatggcgaggatggcaagaaaagctggcaacttctatgtacctgcagaacccaaattggcgtttgtcatcagaatcagaggtatcaatggagtgagcccaaaggttcgaaaggtgttgcagcttcttcgccttcgtcaaatcttcaatggaacctttgtgaagctcaacaaggcttcgattaacatgctgaggattgtagagccatatattgcatgggggtaccccaatctgaagtcagtaaatgaactaatctacaagcgtggttatggcaaaatcaataagaagcgaattgctttgacagataacgctttgattgctcgatctcttggtaaatacggcatcatctgcatggaggatttgattcatgagatctatactgttggaaaacgcttcaaagaggcaaataacttcctgtggcccttcaaattgtcttctccacgaggtggaatgaagaaaaagaccacccattttgtagaaggtggagatgctggcaacagggaggaccagatcaacaggcttattagaagaatgaactaaggtgtctaccatgattatttttctaagctggttggttaataaacagtacctgctctcaaattgaaaaaaaaaaagaaaaaaaacaaaaaaaactttggtttggcgccggctctcgggcccttcgagaaaaggttttcataaaacaattctcggtttgggcgcgcggggggcgcccatgtatgggtaagttagaactggggcacgaatgagtggttcccgtaggaaagactccggcgctcattaggacacggttggcttggagttcctccttacacaaataaaaaaaccggccggggggaaaccgagagcgcggttcttggaacaaaatctccaaaaatgagagtctcggaggggcaccataacgtggggactcaactaaacagggagtcacacggaagcccagaatttcaattatagccccgggctagtgc

SEQ ID NO: 548314 - DNA, 208 bp, Homo sapiens
accaggcagcctgaccgcgatgatcagtgataaacctctggcaagttaatgatctctacagcctggcaatggtactctgttggggttcaatgtgcgggtgtatcggctgtcagatcgagggtctcagcctggcggtgcaggctggagagctcactgcagcctcgacttcccgggctcaagtcttcctccagccccagcatctcaagaa

SEQ ID NO: 548315 - DNA, 860 bp, Homo sapiens; identical to SEQ ID NO: 548263

SEQ ID NO: 548316 - DNA, 689 bp, Homo sapiens
gcagccatgcacctgatgactgggtacatcgtgatactcgatcaatgtggcgcgtccttgctggtctcgtgtgtgggcaatcgctgccctggcatgtgtgacgactcctgatgacttggactcctcgaggtcccccactcgattcctcccccatgtggcttgtaggcgaattctcgcccaaggggagaagcaatgacgttgccacccagtacagcatctaggtactagcgactgcacgcatcacgagtagcaattcaagcgcaatacctaacacctcaaaaacgctctatagagcctatcccgaagtccatcgaacccaccaaaccgacgatcagagacaatccgcacgctttccaagcgctcctcctccagtgcacctctatatatcgccagtcgcactccctatgtgtctatccaagccacaaacccgctcgagaagcgattcgccaacaccctaaaaatacctctgtcctacagtctcgatcccacccctaggggccatggtcatgtgcgagcgtccgtcccacgttaaacttaatgtcccacactcatctgttccgaccaggctgagccttctcagtccaccacccttgcggactgcgcacaaccgcccaactattggcgcagacacttgtaaatactacatcactggtcccaaacgcgtgactcttgaccattaacaaccctcc

SEQ ID NO: 548317 - DNA, 914 bp, Homo sapiens
  misc_feature (872)..(873): n is a, c, g, or t
aagtctttaagtggacagtacgcatgcgccaacttcctctttttccggctggaaccatggagggtgtagaagagaagaagaaggaggttcctgctgtgccagaaacccttaagaaaaagcgaaggaatttcgcagagctgaagatcaagcgcctgagaaagaagtttgcccaaaagatgcttcgaaaggcaaggaggaagcttatctatgaaaaagcaaagcactatcacaaggaatataggcagatgtacagaactgaaattcgaatggcgaggatggcaagaaaagctggcaacttctatgtacctgcagaacccaaattggcgtttgtcatcagaatcagaggtatcaatggagtgagcccaaaggttcgaaaggtgttgcagcttcttcgccttcgtcaaatcttcaatggaacctttgtgaagctcaacaaggcttcgattaacatgctgaggattgtagagccatatattgcatgggggtaccccaatctgaagtcagtaaatgaactaatctacaagcgtggttatggcaaaatcaataagaagcgaattgctttgacagataacgctttgattgctcgatctcttggtaaatacggcatcatctgcatggaggatttgattcatgagatctatactgttggaaaacgcttcaaagaggcaaataacttcctgtggcccttcaaattgtcttctccacgaggtggaatgaagaaaaagaccacccattttgtagaaggtggagatgctggcaacagggaggaccagatcaacaggcttattagaagaatgaactaaggtgtctaccatgattatttttctaagctggttggttaataaacagtacctgctctcggttcattcatnnaaataagcctgttgatctggtcctccctgttgccagcatct

SEQ ID NO: 548318 - DNA, 129 bp, Homo sapiens
  misc_feature (44)..(44): n is a, c, g, or t
  misc_feature (77)..(77): n is a, c, g, or t
cacagactcagagagaacccaccatggtgctgtctcctgccganaagaccaacgttaaggccgcctggggtaaggtnggtctgtacgtggcgagtatggtgcggaggcctggagaggatgttcctgtcc

SEQ ID NO: 548319 - DNA, 303 bp, Homo sapiens
ggggcgggttaccattttcccccgggaaccgcttttgccctttggccctttttggtggccccattggaccaggttggcccaaaagccggctgggtccgggtcgggatttcccggatttcggtcccaggttttaccttttttttttaagccttccggtttgctttccattttttgggcctttgtttttggtttggcccgccgatggggccattttgtttctttttttgttttggcccttatcctggtttttagcctttattgttttttgtattttgttaattataaaaaccctggacaaaggga

SEQ ID NO: 548320 - DNA, 340 bp, Homo sapiens
  misc_feature (1)..(1): n is a, c, g, or t
  misc_feature (111)..(111): n is a, c, g, or t
  misc_feature (129)..(129): n is a, c, g, or t
  misc_feature (131)..(131): n is a, c, g, or t
  misc_feature (157)..(157): n is a, c, g, or t
  misc_feature (159)..(159): n is a, c, g, or t
  misc_feature (165)..(165): n is a, c, g, or t
  misc_feature (172)..(173): n is a, c, g, or t
  misc_feature (180)..(180): n is a, c, g, or t
  misc_feature (191)..(191): n is a, c, g, or t
  misc_feature (201)..(201): n is a, c, g, or t
  misc_feature (205)..(205): n is a, c, g, or t
  misc_feature (211)..(211): n is a, c, g, or t
  misc_feature (226)..(226): n is a, c, g, or t
  misc_feature (229)..(229): n is a, c, g, or t
  misc_feature (267)..(268): n is a, c, g, or t
  misc_feature (271)..(271): n is a, c, g, or t
  misc_feature (275)..(275): n is a, c, g, or t
  misc_feature (287)..(287): n is a, c, g, or t
nacccatcccaccgcttcaagggagaggaatcggggtgggggcgcccgcagcaggggagagacactacacagggcctgggaccgccaagcacaccagctgcgagctcctgnagggcagacacatggacncncggacactgaaaccacgagcacggcncngccacngggaggnntggtggngctggaggccngacctcggcngctnctgccncctgctgccctcttntgncacgagttccttggcgaggagccttgtccgtgttactnnagngccncgtgactttatntgatggcagaacgtctcgctttctgcatctgtaagctgggccagtacaccgta

SEQ ID NO: 548321 - DNA, 906 bp, Homo sapiens
aagtctttaagtggacagtacgcatgcgccaacttcctctttttccggctggaaccatggagggtgtagaagagaagaagaaggaggttcctgctgtgccagaaacccttaagaaaaagcgaaggaatttcgcagagctgaagatcaagcgcctgagaaagaagtttgcccaaaagatgcttcgaaaggcaaggaggaagcttatctatgaaaaagcaaagcactatcacaaggaatataggcagatgtacagaactgaaattcgaatggcgaggatggcaagaaaagctggcaacttctatgtacctgcagaacccaaattggcgtttgtcatcagaatcagaggtatcaatggagtgagcccaaaggttcgaaaggtgttgcagcttcttcgccttcgtcaaatcttcaatggaacctttgtgaagctcaacaaggcttcgattaacatgctgaggattgtagagccatatattgcatgggggtaccccaatctgaagtcagtaaatgaactaatctacaagcgtggttatggcaaaatcaataagaagcgaattgctttgacagataacgctttgattgctcgatctcttggtaaatacggcatcatctgcatggaggatttgattcatgagatctatactgttggaaaacgcttcaaagaggcaaataacttcctgtggcccttcaaattgtcttctccacgagaaagaccaccatttgtagaagtggagatgctggcacagggagagacagatcacaggttattagaagatgactagtgtgtaccggatattttctagcggtgggtataaaagtctgtctcatgaaaaaaaaaaaaggggttttgggggaaaggtaaagggggtgttgcctttgtgaagggatcggccaagggtatgaaga

SEQ ID NO: 548322 - DNA, 829 bp, Homo sapiens
aagtctttaagtggacagtacgcatgcgccaacttcctctttttccggctggaaccatggagggtgtagaagagaagaagaaggaggttcctgctgtgccagaaacccttaagaaaaagcgaaggaatttcgcagagctgaagatcaagcgcctgagaaagaagtttgcccaaaagatgcttcgaaaggcaaggaggaagcttatctatgaaaaagcaaagcactatcacaaggaatataggcagatgtacagaactgaaattcgaatggcgaggatggcaagaaaagctggcaacttctatgtacctgcagaacccaaattggcgtttgtcatcagaatcagaggtatcaatggagtgagcccaaaggttcgaaaggtgttgcagcttcttcgccttcgtcaaatcttcaatggaacctttgtgaagctcaacaaggcttcgattaacatgctgaggattgtagagccatatattgcatgggggtaccccaatctgaagtcagtaaatgaactaatctacaagcgtggttatggcaaaatcaataagaagcgaattgctttgacagataacgctttgattgctcgatctcttggtaaatacggcatcatctgcatggaggatttgattcatgagatctatactgttggaaaacgcttcaaagaggcaaataacttcctgtggcccttcaaattgtcttctccacgagaaagaccacccattttgtagaaggtggagatgctggcaacaggcttattagaagaatgaactaaggtgtctaccatgattatttttctaagctggttggttaataaacagtacctgctctc

SEQ ID NO: 548323 - DNA, 161 bp, Homo sapiens
gactatagcatgtttcttgtatgcggaagtctctgaaatcagatagcgccagatccgcaaaagcgaggaaacccgatgtgtccggcggaaggaaccgccagtacaacggccctgaggcgagaaagagattggtcactgaaagaactcaaagaagtcctgtg

SEQ ID NO: 548324 - DNA, 167 bp, Homo sapiens
  misc_feature (75)..(75): n is a, c, g, or t
tgctccaccgctccaagatggaaagttacgcaacttatgggacgtttcagtcactggaataagaacttgaagatngatatgacatgatctaatttagatttttaaaagctcattcgtatagctctgtggagaacagggtatggctagaaggagcggtgagctatcgg

SEQ ID NO: 548325 - DNA, 208 bp, Homo sapiens
tcagcttctttctgatgtcgacactagaggagtccccccatggtagacacacaccaagtagcactcctagcccgtgaatataggaaccagcccgaacccgaggttatctgatttttggttcctctgaaaattagcttttgctggatgctagattcagttctggacttactgagtagtctctgggtttttgacattgttaggctacctg

SEQ ID NO: 548326 - DNA, 834 bp, Homo sapiens
ctctagacgatcccttgtctttactagatgccctgtacataccaagatgattttttattctcccttctccccatgtggtttcttctgcatagagagtcctattgatcagtctgacccatggtatttagaattgcgatccctactgtttcattattcctttttctcccccatgttgaaaaaaataaatgtcctgagatgcaagatcagggacactggagcactgacatttagttcagtgcaggaactgaaggcagatgtaattcttaagaagcgtacctgttattatgaaccatcctcaacaaattgtagtggatcttgttttctcatagatacagcagttaaattttttaataaaagtaactaagagttatttggatgtattttagcatgcactgagcggaaagtacgacatttcttcattgggtaagtcctgattctttatgatcctcacttggttccagggccccatgcatctaagggtgtctcagagcatcctgcagtgctccagcatgatcgcagggaaagctataggaggaaagagtcaataaagtttagtttctcacctccacctcacccatatatgacagctggttatcatgagacacgtgcacaccccacacgccctgtacatgtttactcattgggatagcatgtcaggccagaaggctccatggtcatttctatgaaggtactttagcaggtcttcaagaaggcaagtggcctgggtccctgcctccccaaattgcaagctccctgctttatgtaggagacctatgtgtatattacagttctgtgtaagattattttgttattcttacccccacacccaccccc

SEQ ID NO: 548327 - DNA, 471 bp, Homo sapiens
  misc_feature (1)..(1): n is a, c, g, or t
  misc_feature (136)..(136): n is a, c, g, or t
  misc_feature (162)..(162): n is a, c, g, or t
  misc_feature (190)..(190): n is a, c, g, or t
  misc_feature (202)..(202): n is a, c, g, or t
  misc_feature (217)..(217): n is a, c, g, or t
  misc_feature (230)..(230): n is a, c, g, or t
  misc_feature (242)..(242): n is a, c, g, or t
  misc_feature (250)..(250): n is a, c, g, or t
  misc_feature (338)..(338): n is a, c, g, or t
  misc_feature (348)..(348): n is a, c, g, or t
  misc_feature (381)..(381): n is a, c, g, or t
  misc_feature (385)..(385): n is a, c, g, or t
  misc_feature (413)..(413): n is a, c, g, or t
nctactctcggaagtcagaagctgaaattgatatggaactatttcatcagaatcatcttattgtgaaggttcctccctatcatgaccaacatataacttggcctgtgtcagtgggaatatatgtagtgaaaaatgntggaagatctcatgatgtccacccantcacttacactccagacccagcagcagntggtgcttggantgtaaatgtgaaganggaaatatctagnccagcaagaccnggctcttnggaggaggccatgaaagcaatgaaaactactggatgtaatttagataaggtaaatattatccctaatgccctgatgactccactcatnccaagcagtntgattaagagtgaggatggttactccaatggangtancgggagaaaaagatcttccactattttnaagatacaaggctttggggctcaactcaggaaacattaggaacatctcaaacatggag

SEQ ID NO: 548328 - DNA, 665 bp, Homo sapiens
gtactatttatttgtgcttttagagccagaagatgggtattcttcaaactatcattgatttctgatgtctcctgagatgctattatttaccataaattcctaaggagttcgattaatacagtgcgcattatctccagaccctatattaggaatgaagtccaaatgttcacagcagaggtagtttggactgtggggagctcattgaattgagacgaactttatatgtcatgtttacccaggctctggacttaaatgaagcgggtttaatacctggatggttttctccgacatgtcttaaagatgcaacatacggggggaatacttgagctgagaggctattgcggcttattatctgtgttgaaggaacagatgctggctttcaacccgacaagtagaggaacccgtgcagatctgccgtggttcagctccttgctcttttgctagatgccaccagcgctagggggtatcgatcacatagtactccctgcggcaacctgacttgggcctctaggcctttcacatgcccgtcaatgaaatgtgacagccctcatgatggaagaggcctaggcacttgctgctccatagaaatgcccgttcaggccggacatttcagaacaacttttcaacgtttatattcgggcagccttgaaatcttcatgtggtat

SEQ ID NO: 548329 - DNA, 424 bp, Homo sapiens
  misc_feature (33)..(33): n is a, c, g, or t
  misc_feature (405)..(405): n is a, c, g, or t
  misc_feature (417)..(418): n is a, c, g, or t
  misc_feature (420)..(420): n is a, c, g, or t
ccctaaagatatgggtagccttataaaaaattnccttaatagtaaatgggacatgaaaaaggtcatttgccttacatctcctaaattcattttgatgggaaaaatagtggaaaaatgtttgccagatacccttttgtttgtttgtttttttccataatagataattgccactaaaattgaagaatggcccaggtccgttggctcatgcctgtaatcccagcactttgggaggccaaggcgggtggattacttaagctcaggagttcaagattaacctggccaacatggcaaaaccccgtctctactaaaaatacaaaaaattagccaggtgtggtggtgcacacgcctgttgtcccagctacttgggtgactgaggcatgagaatcacatgagcctgggcaacanggtgagactctnngnccaa

SEQ ID NO: 548330 - DNA, 237 bp, Homo sapiens
  misc_feature (99)..(99): n is a, c, g, or t
tgggtcagtctagagatcccgccacggtagattgagccacaatatattgtttggagatgaggggcagcagttttaatggacttggggtacatgaatcangcatgcatcatgtggagggctccgccagctctgacctgcaggactggcagccagtggtgcacatctccctaccgagcccagagctcttctctgtgcagagtcactgtgtcatcgatgagcggactgatgtcttgtccc

SEQ ID NO: 548331 - DNA, 89 bp, Homo sapiens
tggccaagcttttcatctttgtgtctgcagagctctgaagcaactcttgcgtcgcggggtctccctcctgttgctttcctaaaccactc

SEQ ID NO: 548332 - DNA, 198 bp, Homo sapiens
ctctcctctaatggctcagttcttgtactcagagggctctagcattccatgtgcaacctgaggtggcactgaagagaggacagaactagaggagatggacttaattttacagcaggagggctggcacgttagacctcacacgaggaactccctggtgctggcgctgctatacgtgctcgctgagggactcctctagag

SEQ ID NO: 548333 - DNA, 391 bp, Homo sapiens
gcgaggccttgtctctcatccatcgtcggagggcaacatctcagcacctggtgccgaaggaggtggggtgggtcctccttagcccgccctgccccggctcaggccccagccgtcagccctggggcaggcctgggatccccatggttgcccgggcagcacatagcaaggctcaaggaagagcaggctgatccctgaaccctgactcaggacttggacgccatagtggcccgggaccgagaccttcagcagttgaggctggggctagtggtcccagcagcccagcccccaccctcctggcagcagcgccaggaaggctttgacaattacctccgtctgatctacggctctggcctgctgggcatgcagtctggaagggggtcccagcagtgga

SEQ ID NO: 548334 - DNA, 387 bp, Homo sapiens
  misc_feature (265)..(265): n is a, c, g, or t
cggtcaccatgcccatattttttggtatcttgggtagagatggggtttcaccatgtgggccaggcgggtctcgaactcttgacctcatgatccacccgcctcggcctcccagagtgctgggataacaggcgtgagccattgcgcctggccaatgtctagtttttctaagagctcttagtgaagtagggggttcagactttaaataatagggcatggtgataagtaccgtgatagggcacttgtgagtggtaaaagagcatagggnagcagaataatatatcctttcctatttccacggctaataatttgaagttcaaagaacctgtaatttatggagcacccattagggggcttgcttttaaaaaacaagaagggtgcatgggggac

SEQ ID NO: 548335 - DNA, 187 bp, Homo sapiens
gggctcgactcctctaacacacactgtctccctctttccaacgggccgctatgggcagctgtgtaagcaggcttcaggggtggcaccgtgtagcgatgacaactacgtctgttggtaaccttttcactaccatgtgccttggtgcctggattacgtgtggatgattacatcacgtcacgatctgcca

SEQ ID NO: 548336 - DNA, 320 bp, Homo sapiens
  misc_feature (154)..(154): n is a, c, g, or t
tcactatctgccagctcggctggtccagccagggatgctctgtgcatttccactgtcattttaatgttgcaatctgtcacgacagcagcacacttggcatggtgcattcaaccagcaacactcaaccattcttgtgcaaacagtttcccacatntggcagccatcattgcacattttccaccctcagtcccagccagctcctgcgtgcctccagttcaacatcacagcatgcaatgcaagcacccccattctggcacaagcacacttgtgccctgctggtcccagcagctgcatgccatgtgcccattgcatggcagtca

SEQ ID NO: 548337 - DNA, 407 bp, Homo sapiens
  misc_feature (143)..(143): n is a, c, g, or t
  misc_feature (191)..(191): n is a, c, g, or t
  misc_feature (244)..(244): n is a, c, g, or t
  misc_feature (274)..(274): n is a, c, g, or t
  misc_feature (380)..(380): n is a, c, g, or t
  misc_feature (394)..(394): n is a, c, g, or t
gagtttcaccgtggtagccaggatggtctcgatctcctgacctcatgatccgcccgcctcagcctctcaaagtgctggaattacaggcgtgagccaccgtgcccgggctcttttcaatctttttcatgttggttcctccttgngatcattttgataacgctcgtcagctcccagtgtccccttttccttgntcttaaatttccttgccctgcataactctgtggagcaatgagataaaataganaataaataataaccgttcaaccacaaaaanggaccttttttactttcttctgggcccaggattattttatttcgggtaccttccatgctctaatggcccatgattggccacccatcggtaatttctttccaccttntaccaaccaactgnagctacttggggg

SEQ ID NO: 548338 - DNA, 243 bp, Homo sapiens
gacaacgacgctggacgctgtgtggagaaaacgctgtacccactcagagaagaccaacaggaaccatagctatcggactggcttgaagatcaccagccttaccgggatagagtgtgggtaagacttgtgcaaccagggcaactctggccgggctgtcacctatacccgaagccgttacctcgaatgcgttcctctagctcatcagacatcagctgtgagaggggccggcaccagaggctagca

SEQ ID NO: 548339 - DNA, 367 bp, Homo sapiens
  misc_feature (241)..(241): n is a, c, g, or t
agttcggcacgcaggggtggacaccatataatcagctgctagtgtggctaggataaaattgggcagcggaacttggaaagactagactggctgagtcttctggctttcatctttctcccaagctgggtgcttcctgccctcgagcattggacttcaagttcttcagcttttggactcttgggcttacaccagtggtttgccaggggctcttgggtctttggccacagactgagcgcagacnttcggcctccctgcttctgaggttttgggactcagactggcttcctttctcctcagcttacagatggcctagtttaggacttcacctagtgatcctgtccgtctagagaaccctgactaatacaga

SEQ ID NO: 548340 - DNA, 474 bp, Homo sapiens
  misc_feature (70)..(70): n is a, c, g, or t
  misc_feature (243)..(243): n is a, c, g, or t
atctgcaacacaaaaaaaccctaggccacagctccattcctccttttaagaaaaaaaaaaaagtaggcancaatctgaaaaagaggaaagacaagaatgatccactttgaggtgccgtgttagttttagggtgcctctctttgcaagtgtttgtgcaaaatgaaaaagtttgagggcatgccaggtttactagtacccaaactagttacatattatggtctgttttgcacattttaagctaanaggcaaattacatcaaagaaaaattcatagcccaaaggtcaatctgcaactcaagagttcctaagttctctacttctctattttcttttctgcctgctttaaatctgctgttacttttctactgagacaaaacccactgtttagatccaatcttcttcctttctgtaaaccagtgagtttgtattaatatcttatggcttaagttctgaaataaaaaatgggatctttcta

SEQ ID NO: 548341 - DNA, 177 bp, Homo sapiens
gcccgtaccgatcagcctacgcagcacttctcccactttggcccaatctccttctcccccagctagggggacagggactggcaactccctgactggtgtgctgaggcatagtgactcttatatctgtgtgtctttggctaaatatgcccttttcatattaataaaagatgatttgga

SEQ ID NO: 548342 - DNA, 902 bp, Homo sapiens
  misc_feature (777)..(777): n is a, c, g, or t
  misc_feature (785)..(785): n is a, c, g, or t
  misc_feature (800)..(800): n is a, c, g, or t
  misc_feature (840)..(840): n is a, c, g, or t
  misc_feature (851)..(851): n is a, c, g, or t
  misc_feature (854)..(854): n is a, c, g, or t
  misc_feature (863)..(863): n is a, c, g, or t
  misc_feature (870)..(870): n is a, c, g, or t
aagtctttaagtggacagtacgcatgcgccaacttcctctttttccggctggaaccatggagggtgtagaagagaagaagaaggaggttcctgctgtgccagaaacccttaagaaaaagcgaaggaatttcgcagagctgaagatcaagcgcctgagaaagaagtttgcccaaaagatgcttcgaaaggcaaggaggaagcttatctatgaaaaagcaaagcactatcacaaggaatataggcagatgtacagaactgaaattcgaatggcgaggatggcaagaaaagctggcaacttctatgtacctgcagaacccaaattggcgtttgtcatcagaatcagaggtatcaatggagtgagcccaaaggttcgaaaggtgttgcagcttcttcgccttcgtcaaatcttcaatggaacctttgtgaagctcaacaaggcttcgattaacatgctgaggattgtagagccatatattgcatgggggtaccccaatctgaagtcagtaaatgaactaatctacaagcgtggttatggcaaaatcaataagaagcgaattgctttgacagataacgctttgattgctcgatctcttggtaaatacggcatcatctgcatggaggatttgattcatgagatctatactgttggaaaacgcttcaaagaggcaaataacttcctgtggcccttcaaattgtcttctccacgagtggatgagaaaagacccccatttgtagagggggatgctggcacgggggccgatcacaggtttgaagagnctagggtnccgatattcctacgnggaaaaagacgtcataaaaaaaaaaaattgggcgcccaanttaactggggnccngagagaagnagaggangggcaaacgggggacatggtgtacaaccgacg

SEQ ID NO: 548343 - DNA, 255 bp, Homo sapiens
  misc_feature (179)..(179): n is a, c, g, or t
  misc_feature (208)..(208): n is a, c, g, or t
  misc_feature (242)..(242): n is a, c, g, or t
tttccccgggaattcaccttgaattgatttctattggagatagatatccaatctaatttgcctcatatggataaccacttgtcctattactgctgtaacaaatttctacaaactaagtggcctaaaataacacaaacttgtcatcttacactgtacacaagtcagaaatcaggcatganttttagtggactaaaatcaagtttgtcgncaggcatgtttctttatggcggctagggtagaanccatatcctgggc

SEQ ID NO: 548344 - DNA, 625 bp, Homo sapiens
acgcgctgcacgtctgggctcggtgctgatctcgtcccttcgttggctccctcagaaactgcgcttcttctctcgtcctgccatcagtgacgcagagtgacccttcgtggcaccctccagggtcgcgcctggctgggtaacccacatcgctactaccccgacagttcccggatcatgatccttctcctgcttctcgtagatacgaccgatctagtcatgttggatagagctgatccagggatgagatccaactatggaattccacagcgtgctctgcggagcgttcactcccactgtttgttacgtgatgtggttactctcctcatgtattggccagttttgcgcctcttctaggctccttgggtatggaatcctctgcgcctcgtgggatctcacagacgggcagccaccactgatggcgactttgtgtggccattaccaaggatgatgctgagtgtggccttctcctctgagcaaccggcagattgtctctggatctcgagataaaaccatcaagctatggaataccctgggtgtgtgcaaatacactgtccatggattgatgagccactcagagttgggtgtcttgtgtcctgcttctcgcccaacagcagcaaccctatca

SEQ ID NO: 548345 - DNA, 358 bp, Homo sapiens
ataagaaaagaggaaggtagtaaaaggaagaaataaagaaagttataaccatgaaagggggtgggtgatagagaacaaaagggaaagaggaaatcgagtaagaaaatagaatttattagtataaccgcaggacaaatatacatactaatttaatagaagacataccagtgtcacaaaagactgttcctctaagaactaacagataaatttacaaggggatttagaggtttcaataggcaaatttaaagttgaactaagattctatcttggacaaccagctatcagggggctgggtaggtttgtcgactctacctataaatcttcccactattttgctacatagaaaggtgaatctttt

SEQ ID NO: 548346 - DNA, 1009 bp, Homo sapiens
  misc_feature (18)..(18): n is a, c, g, or t
gggggggggggaaaaacnataggctaggtacaggctgggtggctggaaccatggagggtgtagaagagaagaagaaggaggttcctgctgtgccagaaacccttaagaaaaagcgaaggaatttcgcagagctgaagatcaagcgcctgagaaagaagtttgcccaaaagatgcttcgaaaggcaaggaggaagcttatctatgaaaaagcaaagcactatcacaaggaatataggcagatgtacagaactgaaattcgaatggcgaggatggcaagaaaagctggcaacttctatgtacctgcagaacccaaattggcgtttgtcatcagaatcagaggtatcaatggagtgagcccaaaggttcgaaaggtgttgcagcttcttcgccttcgtcaaatcttcaatggaacctttgtgaagctcaacaaggcttcgattaacatgctgaggattgtagagccatatattgcatgggggtaccccaatctgaagtcagtaaatgaactaatctacaagcgtggttatggcaaaatcaataagaagcgaattgctttgacagataacgctttgattgctcgatctcttggtaaatacggcatcatctgcatggaggatttgattcatgagatctatactgttggaaaacgcttcaaagaggcaaataacttcctgtggcccttcaaattgtcttctccacgagacaggcttattagaagaatgaactaaggtgtctaccatgattatttttctaagctggttggttaataaacagtacctgctctcaaattgaaaaaaaaaaagaaaacacaacagagcaaaaaaaaaaaaaaccccgggggccttcttttggcggggggggcggcacaaaggcggggtcagagacaggggccccaggggccaaaggggtgttccgggcccccatttctttggtccacaagggggaaaatcgcggcgggccccccaaaagaggaggggaaaaaaatggaaaagaccgggtaaccgttaag

SEQ ID NO: 548347 - DNA, 996 bp, Homo sapiens
ggtggccattttcgttgcgtggtgttcaagttgtaggcgcgttgcatggctctagataacagccaagatgctgcggaatctgtctggctcttcgtcagcattgggcagaggacgataagcactgcttcccgcaggcattgtaaaaataaagttccggagaagcaaaaactgttccaggaggatgatgaactttgccactgtatctagaagggtggggtagtcgtgatgccctcctgtatagagtccaccatgatatcttacagataggtggaacaagatatgccatatatgaggctggctgtggcttcatttacccaagaagcaggagtgacttcagtcatcccagctaatcgcttggtatcagtttcattcagctctctatggaccagtaatctgatagataaccgagctcttcttaggggatcaatatttattgacttgtaggtaactgccgaccaagtaagacgcagttctcttgaccataaggaatagacaaaaggtatcagtatcaaaatgaaggctagtaatgagtgaaaatcgggccccggagaaaggaggccgagacaagcactgcagcttgggccagggagcccccggggaggacgccggtacgcaacgagtcccaacacaagcgtggccctgcagaggcaagcacacgcgcgcaggcacgggcggacggcacgacacgagcgacctcctcagcccatatggaaggaactcgccccgccgctaaaacacacgcgcagtaacagggaacccaacgcccgcggaggtgagggtccgtcgaaggcgaacaaacagcaggggacgactgattgcaaacagcagggatacccccgacgagccaaccaaagagacaaacagtgaagcccacggacgaccaggggaaaccaacgaccaaacgagcgacaacaaaaccattgcacgcacccgcacagcaaccaccacactggctgaagcgagaagacgcaaaaacggcgagagtgcgaaaagaca

SEQ ID NO: 548348 - DNA, 139 bp, Homo sapiens
gttcatcgagctcggtccatttcatatttagcagtagagaggtagttgatgtctgcatattcagaactactgcctgctgatgagaaccaataagctcgaaactgatgtccacataatatgttctatgttctgattttta

SEQ ID NO: 548349 - DNA, 826 bp, Homo sapiens
  misc_feature (25)..(25): n is a, c, g, or t
  misc_feature (105)..(105): n is a, c, g, or t
  misc_feature (112)..(112): n is a, c, g, or t
  misc_feature (117)..(117): n is a, c, g, or t
  misc_feature (138)..(138): n is a, c, g, or t
  misc_feature (182)..(182): n is a, c, g, or t
  misc_feature (206)..(206): n is a, c, g, or t
  misc_feature (230)..(230): n is a, c, g, or t
  misc_feature (258)..(258): n is a, c, g, or t
  misc_feature (264)..(264): n is a, c, g, or t
  misc_feature (324)..(324): n is a, c, g, or t
  misc_feature (448)..(448): n is a, c, g, or t
  misc_feature (453)..(453): n is a, c, g, or t
  misc_feature (460)..(460): n is a, c, g, or t
  misc_feature (530)..(530): n is a, c, g, or t
  misc_feature (569)..(569): n is a, c, g, or t
  misc_feature (575)..(575): n is a, c, g, or t
  misc_feature (599)..(599): n is a, c, g, or t
  misc_feature (601)..(601): n is a, c, g, or t
  misc_feature (608)..(608): n is a, c, g, or t
  misc_feature (621)..(621): n is a, c, g, or t
  misc_feature (822)..(822): n is a, c, g, or t
gtccccacctccccaagacgggganaaggaggtctcattccaacagcttcaactcctttcacctcccattcaaggctcaaggctcaaccagaggggaggggatangcaaacnggganggggaacctccttaggctcanacacttctttcttctcccttctccccattcccttcccttcccancagaaccttgctggcccttggcanaccttaggcccaggaccagcttanaggaggttgattgggacagagcaccaangggaangggccctcggcccaaggggggaggaacctaccccccacccccctacagctccccacttanttcacagcacagagaacacctctcccccaacaactccacatggaggtataccaattccaggggtcaaaggagcaggtgggttacaaattggcaggggcatttaagatgacagcaggctcacgangggantttgcanaaacttcctcctacccattggaggagacgattgggccacttttattcctttttgtggtcattgcattcanctcccacctgatatcattaggcaaacaggacttgtctantttatncttaatcacggccattttgcacanantcttcanactagggctaaantccaaaatgtgtaagtcagaatgatctataaggtcaaattcatctcccaggccttcctcaggagatggactggtaccccaaagaggacaatcttgtcaccaacaatacagcagcactggcgccggcggggacatggccccttccccttcggttcaatctttttccaggtaaaggacacaggattaaacttccaaaggtcangaaa

SEQ ID NO: 548350 - DNA, 667 bp, Homo sapiens
aagtctttaagtggacagtacgcatgcgccaacttcctctttttccggctggaaccatggagggtgtagaagagaagaagaaggaggttcctgctgtgccagaaacccttaagaaaaagcgaaggaatttcgcagagctgaagatcaagcgcctgagaaagaagtttgcccaaaagatgcttcgaaaggcaaggaggaagcttatctatgaaaaagcaaagcactatcacaaggaatataggcagatgtacagaactgaaattcgaatggcgaggatggcaagaaaagctggcaacttctatgtacctgcagaacccaaattggcgtttgtcatcagaatcagaggtatcaatggagtgagcccaaaggttcgaaaggtgttgcagcttcttcgccttcgtcaaatcttcaatggaacctttgtgaagctcaacaaggcttcgattaacatgctgaggattgtagagccatatattgcatgggggtaccccaatctgaagtcagtaaatgaactaatctacaagcgtggttatggcaaaatcaataagaagcgaattgctttgacagcagataacagctagaacgatgaatatgaatgtcgaatatcggtactccttcgcatacaggatatgatacatgatatcgacatactggataacgttcgcga

SEQ ID NO: 548351 - DNA, 1363 bp, Homo sapiens
cgctcggggaccctgtgagcctgctgttggcgcctggtgattgatgttgctgccaaggggctgggggagcgggtgcgtgcgtgtgttgtgcggatgtgcgaatgcgaggtgagtgccggccttgagtgaaacctggagctacaaagaaggggagagtccgggatgcgggatggggctgcgatggtgagtgatgcttgctgggctgcctgtgggcatgctcctgactgcacctccctgctgggggatgggagccccctgtgggtgcctgctgagtgcctcctgactgctgggggccctggccctcggctctgcctgtcccctgtgctcctgggctcggctggtgaattgatcgaatgaaggaaaccaaatttccctggccaatggctgggtggaccgtcagtgattgggaaaaccaaggcaagcccttggcaaccaggccctgaggaagtgggtcagtggataggtgatccccgggacagcatttcatggcgggggaaaacgcggggactttacgcgagcgtgggaggcatttcgggagagagggcctgcagtatgtcgagttgcatgcacacaggggggtggagcaccagggctccatagcaaagtcgtccttgaagggagaggggaggggttagacaaggcaactgcgggaagacaggagctacctctcaaacgaaggggctagttttggacccccttgacgattgcaacttattgcagaaaaggctgtagaacgagaaggctccgcgggcacgctcccgaagcaaggcgtgggtagggccaaaggaagacggagctccaattagccacgcaggctatcgcttcgatatggccccgaacgttccgagatagcaaggtccgccgggttaaggcagcggggcgcaccccaagaccctgaagtactatcgcgtggggcacgcgtgtgaggttcgaaagcaacggagggagcggtgaaagcaggtatgggagatccaaatgccaccattcagacctaattgacgctatcgaggcggggagggcgaaaggaaaagctcggttagttctcttgggcactggaacggatcgacccgtgttatgcatgggaagggcaaacggctagatcgcttgggcggatacccgcaggcttcggggagcaggggcacaaagaattccatgacagatcccgcggtgcggcacccccctaaccgaagggggggacgcccattactggtcgatggtggctgtcgcgggtattctaagcactccgcgactggtgcattgcctcagaccgcttcagccccattgcttccacgtggataggcgtagatcgcctttccgaccttggggtgacgctcgccgtggatatggagcatgaaagatagtg

SEQ ID NO: 548352 - DNA, 413 bp, Homo sapiens
cagctccacactttctgcggtctggctggaggctctactccagattctgtttgcctgcggtatcaccagtggagtgctgcagaagagcaaagattgctgcctgttcctttctctggaatcttcgtcccagaggggcacccaccagattccagccggtgctctccagtaagaggtgtctgtcgacccctcctgggtgaggaatgccccatcctgcttctggggtgtccctcggtgggctgtaccctctgtcttagcagcccctctgccatgagctgggtacctcagttagaaatgcagaagtcacccgccttctgcattggtttcactggttgctgcagactgtaactgttccttttcagccttcttgccccgaatccaggaagaggactttataagttagagtctcttatagg

SEQ ID NO: 548353 - DNA, 160 bp, Homo sapiens
accgacgttagggcgacccatttaggacacagaatatccagttgatcaatactaaaacaacatacaccaacattagaaggtatgtttgctgttgggcttaagggaagctttgttttacttttaaaacgatagtcctaaggaaaggttctaagtggccaga

SEQ ID NO: 548354 - DNA, 841 bp, Homo sapiens
ggtcggggggcaagatgggcaaatcacttgagtctaggagttcaagaccagcctggccaatatggcaaaaccctgtctctactaaaaatataaaatcagccaggcatggttggcgcacaccttataatctcagctactcaggaggctgaggcacgagaatcgttgagcctgggaggcagaggttgcagtgagcctgagatcttgccactgaacaccagcctgggcaacacagcaagactcttgtctcaaaaataagtgacctaaaaataaaaacctgccaccaaatatttctgggaattctcttcactaatctttttttccttttttggtccttttttccatttctagattccattttcaaagtcttggatatattcttgtgaaaaatgagtagtatggaatattaagattattgttcccttatactcagaatacttttaatgagctctctgtggtttattgttactattaattcccttgaaaaaaaagagaaaatatctacaaaaatgttcatcgtgtcatgtaattttttcttgcttggttaccaattgaacttttgccctgttgtggtttggggggatccagcaggattcctacagtgtccatccattattgtaggtcatgattgctgagcgtttcgctttggatttcaatacctataaagtccatcttgagttggtccgagaacggtgaattactcctaattaagcgactccgaaccgcgcgcttgctcattcggtaccacccttattcacaggacaactttttcttggcaacctacaccctttccggtttctttcaagaacagactgtgccacccgccaggtgggatttcggggaa

SEQ ID NO: 548355 - DNA, 1526 bp, Homo sapiens
  misc_feature (351)..(351): n is a, c, g, or t
aagtctttaagtggacagtacgcatgcgccaacttcctctttttccggctggaaccatggagggtgtagaagagaagaagaaggaggttcctgctgtgccagaaacccttaagaaaaagcgaaggaatttcgcagagctgaagatcaagcgcctgagaaagaagtttgcccaaaagatgcttcgaaaggcaaggaggaagcttatctatgaaaaagcaaagcactatcacaaggaatataggcagatgtacagaactgaaattcgaatggcgaggatggcaagaaaagctggcaacttctattaacattgctatagtagccctcgcttagaaatcctcacatatttagtgnctggttctgctctatcctgacatcctacgaggtagtcgagactggatagtgacgccgcattacagtgttctgaaacggctgttgcacgtcgttcttctgccttctgtctcaaatcttcaatggaacctttgtgaagctcaacaaggcttcgattaacatgctgaggattgtagagccatatatgcatgggggtaccccaatctgatagtcagtcaaatgaactaatctacaagcgtggttatggcaaaatcaataagaagcgaattgctttgacagataacgctttgattgctcgatctcttggtaaatacggcatcatctgcatggaggatttgattcatgagatctatactgttggaaaacgcttcaaagaggcaaataacttcctgtggcccttcaaattgtcttctccacgaggtggaatgaagaaaaagaccacccattttgtagaaggtggagatgctggcaacagggaggaccagatcaacaggcttattagaagaatgaactaaggtgtctaccatgattatttttctaagctggttggttaataaacagtacctgctctcaaattgaaaaaaaaaaagaaaaaaaaaaaactctccgagagggcattcttatattgccgggtgtgcgcgggaaaaagagggtgtcatagaaaatatggcgcaattatgggccataaaagagctgtgtacccatggaccccaggtattttttttgtgtcaccacagggggtgacaaatattgacgcaaggagttccccccatatatagggaggaggccgcgataattataaatcttcgcgagatattagagccccccaggtgtttatacccccggtcgcgtctttataaataggactcctctcgcgcgcgaaagaaaaatgaccacccaggcgagaaagatgtgataatatacgaacgcccccggcggaccggactctatcagatcagaagagcgcacgggggagagcgagtttcatacagttatagaggagatgtacagcacgaacgagaggagtagatactctctcagagcgcggagaacatacctacgccaatgatcgagatggctagtcgagggacgagacgatataacactcggtgggagagtgttgatatcgcacacaccaacaagcagaaaaaacaacacccacgcggcgatatacaccg

SEQ ID NO: 548356 - DNA, 634 bp, Homo sapiens
aagtctttaagtggacagtacgcatgcgccaacttcctctttttccggctggaaccatggagggtgtagaagagaagaagaaggaggttcctgctgtgccagaaacccttaagaaaaagcgaaggaatttcgcagagctgaagatcaagcgcctgagaaagaagtttgcccaaaagatgcttcgaaaggcaaggaggaagcttatctatgaaaaagcaaagcactatcacaaggaatataggcagatgtacagaactgaaattcgaatggcgaggatggcaagaaaagctggcaacttctatgtacctgcagaacccaaattggcgtttgtcatcagaatcagaggtatcaatggagtgagcccaaaggttcgaaaggtgttgcagcttcttcgccttcgtcaaatcttcaatggaacctttgtgaagctcaacaaggcttcgattaacatgctgaggattgtagagccatatattgcatgggggtaccccaatctgaagtcagtaaatgaactaacctacaagcgtgcgtttggcctctcttgttatattcggctcacctgcacggtggcatcgccttaatggacctattctgtatctaaacccttcatgtggcattgattctcgtgggcctt

SEQ ID NO: 548357 - DNA, 839 bp, Homo sapiens
aagtctttaagtggacagtacgcatgcgccaacttcctctttttccggctggaaccatggagggtgtagaagagaagaagaaggaggttcctgctgtgccagaaacccttaagaaaaagcgaaggaatttcgcagagctgaagatcaagcgcctgagaaagaagtttgcccaaaagatgcttcgaaaggcaaggaggaagcttatctatgaaaaagcaaagcactatcacaaggaatataggcagatgtacagaactgaaattcgaatggcgaggatggcaagaaaagctggcaacttctatgtacctgcagaacccaaattggcgtttgtcatcagaatcagaggtatcaatggagtgagcccaaaggttcgaaaggtgttgcagcttcttcgccttcgtcaaatcttcaatggaacctttgtgaagctcaacaaggcttcgattaacatgctgaggattgtagagccatatatgcatgggggtaccccaatctgaagtcagtaaatgaactaatctacaaggcgtgggttatggagaaaacaaaaaacgaaaaaaaaaaaaaaatgttgttgggccgcgcctggggcccggagaaaggttttctaaaaacccatgggttgggggccggggggggccgccgatagggttaaggtgaactggtgggcaacaagtgtgttctcaaagagagaactcgggccatgaacaggggcttgggatttcccgccaaataaagaaagccgcgggggaacccacagcgttttggaaaccaatccaagaggggagtccggagggcaagagggggctcatcccggggagtccaggcaagtcgtattcatc

SEQ ID NO: 548358 - DNA, 626 bp, Homo sapiens
  misc_feature (571)..(571): n is a, c, g, or t
  misc_feature (576)..(577): n is a, c, g, or t
  misc_feature (591)..(591): n is a, c, g, or t
  misc_feature (602)..(602): n is a, c, g, or t
aagtctttaagtggacagtacgcatgcgccaacttcctctttttccggctggaaccatggagggtgtagaagagaagaagaaggaggttcctgctgtgccagaaacccttaagaaaaagcgaaggaatttcgcagagctgaagatcaagcgcctgagaaagaagtttgcccaaaagatgcttcgaaaggcaaggaggaagcttatctatgaaaaagcaaagcactatcacaaggaatataggcagatgtacagaactgaaattcgaatggcgaggatggcaagaaaagctggcaacttctatgtacctgcagaacccaaattggcgtttgtcatcagaatcagaggtatcaatggagtgagcccaaaggttcgaaaggtgttgcagcttcttcgccttcgtcaaatcttcaatggaacctttgtgaagctcaacaaggcttcgattaacatgctgaggattgtagagccatatatgcatgggggtaccccaatctgaagtcagtaaatgaactaatctacaagcgtggttatggcaaaatcaataagaagcgaattgctttgacagataangcttnnatgggtcgatctcntggtaaatacngcatgcttcttgagtaaagcgcag

SEQ ID NO: 548359 - DNA, 527 bp, Homo sapiens
aagtctttaagtggacagtacgcatgcgccaacttcctctttttccggctggaaccatggagggtgtagaagagaagaagaaggaggttcctgctgtgccagaaacccttaagaaaaagcgaaggaatttcgcagagctgaagatcaagcgcctgagaaagaagtttgcccaaaagatgcttcgaaaggcaaggaggaagcttatctatgaaaaagcaaagcactatcacaaggaatataggcagatgtacagaactgaaattcgaatggcgaggatggcaagaaaagctggcaacttctatgtacctgcagaacccaaattggcgtttgtcatcagaatcagaggtatcaatggagtgagcccaaaggttcgaaaggtgttgcagcttcttcgccttcgtcaaatcttcaatggaacctttgtgaagctcaacaaggcttcgattaacatgctgaggattgtagagccatatatgcctgtggggtaccccgctctgtgtccgtggatggctgatcccgctacgtgt

SEQ ID NO: 548360 - DNA, 1119 bp, Homo sapiens
aaacaataggctaggtacgaggcctggtgttaatcggccgagggaaccatggagggtgtagaagagagtacctgcagaacccaaattggcgtttgtcatcagaatcagaggtatcaatggagtgagcccaaaggttcgaaaggtgttgcagcttcttcgccttcgtcaaatcttcaatggaacctttgtgaagctcaacaaggcttcgattaacatgctgaggattgtagagccatatattgcatgggggtaccccaatctgaagtcagtaaatgaactaatctacaagcgtggttatggcaaaatcaataagaagcgaattgctttgacagataacgctttgattgctcgatctcttggtaaatacggcatcatctgcatggaggatttgattcatgagatctatactgttggaaaacgcttcaaagaggcaaataacttcctgtggcccttcaaattgtcttctccacgaggtggaatgaagaaaaagaccacccattttgtagaaggtggagatgctggcaacagggaggaccagatcaacaggcttattagaagaatgaactaaggtgtctaccatgattatttttctaagctggttggttaataaacagtacctgctctcgaaacaaaaaaaaaaaaaacgaaaaaaaaaaaaaaaaaaaaaaaaaaaaaaaaaaaaaaaaaaaaaaaaaaaaaaaaaaaaaaaaaaaaaaaaaaaaaaggggggagagcgaataaaagacaaccccaggaggaggacacgaacacatgacggccgacccaacgacagttgtcgtgttaagcaaaaagaaggagtcagcgccacagaagagagataggaccgactgaatcaaataggaggaaggagggagagccaaagtaaaaacacaggagcaggggagagagaaacaaagaggcatcgagcggagccatctgtgggccgaagaagacaaacactcacattgcgaaggtagcacaaaacatgggcgaaacaacacaccgaagggaaaagtaccgagcacgcagggacgacaaataaaccaaacggcgcgagataagagggaaacaccaacgcgaacaagagcgaccagcaagacgactgcgatgaagagacat

SEQ ID NO: 548361 - DNA, 483 bp, Homo sapiens
aagtctttaagtggacagtacgcatgcgccaacttcctctttttccggctggaaccatggagggtgtagaagagaagaagaaggaggttcctgctgtgccagaaacccttaagaaaaagcgaaggaatttcgcagagctgaagatcaagcgcctgagaaagaagtttgcccaaaagatgcttcgaaaggcaaggaggaagcttatctatgaaaaagcaaagcactatcacaaggaatataggcagatgtacagaactgaaattcgaatggcgaggatggcaagaaaagctggcaacttctatgtacctgcagaacccaaattggcgtttgtcatcagaatcagaggtatcattgagttagcccagagtcgaaggtttcagctctcgcctcgtcaatcttcatgaccttgtgagtcacagctcgtacatgctgaggtgtagggcatatattgcatggggtcactctagtcagtatactatctca

SEQ ID NO: 548362 - DNA, 299 bp, Homo sapiens
catcatgcccctgtgccaattttcttgcccatgcacccaggcagccagcaggtccatttacactcatcaattgcgtccagccccccagcagcatcagcaaccacttggcagtgccacagcacacactcaatcacatttcagatcaaccagtagcacagactcccagatgtgttgcatttcaccatccattgtgttgtcaacacatccagcagtgtttgcatccttgcattgtgtagcagccaacaaatggtgttgcctctcagcattgtgtcatcagcatgcagcagcagcagcacagc

SEQ ID NO: 548363 - DNA, 566 bp, Homo sapiens
  misc_feature (1)..(1): n is a, c, g, or t
  misc_feature (74)..(74): n is a, c, g, or t
  misc_feature (103)..(103): n is a, c, g, or t
  misc_feature (197)..(197): n is a, c, g, or t
  misc_feature (211)..(211): n is a, c, g, or t
  misc_feature (223)..(224): n is a, c, g, or t
  misc_feature (232)..(232): n is a, c, g, or t
  misc_feature (274)..(274): n is a, c, g, or t
  misc_feature (298)..(298): n is a, c, g, or t
  misc_feature (318)..(318): n is a, c, g, or t
  misc_feature (320)..(320): n is a, c, g, or t
  misc_feature (343)..(343): n is a, c, g, or t
  misc_feature (412)..(412): n is a, c, g, or t
  misc_feature (434)..(434): n is a, c, g, or t
  misc_feature (439)..(439): n is a, c, g, or t
  misc_feature (557)..(557): n is a, c, g, or t
naaggaacaaaaataagtacaaaaagtaggcttagtttagttcacaatataaatcccgtgaaaacacatttttnatctctgctgttttataatactctacgtntatgaatttaaagcagtgaaagcgagacatttgagaattaaattggtaaaaaaaaattgtaattgaattcagacttcagaaaattgtgaagtgnaaggccatgatggngagatattaagnntctgtagnattactaaactgtcacagtattattttcgctttacaaaagcntctcagtgaaacaaaaactacagngaacgcaaagtaaaatcagngnttttggtttagtactttccctgngtctcttgttttaaaaatcaaagtgaggccagttcaaaattgacccacaggtcttgcctcctccatgcngccatggggggtgcatttaagncaagnggctacgcatgtgggggtggtcccagggctttattcaaatgccaatttgcccgtgtcactgccacagggttatctgacccactgctgcgtgtgggcttgaagagctgtcaaaattctntcttggcct

SEQ ID NO: 548364 - DNA, 278 bp, Homo sapiens
ctcggcaatctagcaaccttagccaagaccatttactccaataaagtataggctatagaaattgaaacctggcgcaatagatatagtaccgcaatggcaaagatgaacaattataacccagcataactatagcatggactaacccctataccttctgcattatgaattaactaggaatcactttgccaggagagccaaagcttagatccccgaaagcagacgagctacctgagaacagctaatagagcacacccgtctatgtagcagaatagtgagaa

SEQ ID NO: 548365 - DNA, 798 bp, Homo sapiens
tggccgacgaagagttcctaatctgtgtacgacggacctctttgaggggggcccctcttggtggtggggggccgtgtttggagattacgtctttcttgtcctcgttcataattcttcttcttcttagcaactaagaggtagataaacaggctggagctatgatgtacgaggtgcagcaacatcccctcctgtggctgcagtatgcttgacctccaataatctcctcttgtgttctgtgtttttttttggctctcgctccttgtggttctgttctactctggctgcgcgttttggcgtcttcgcctttgggggcgtggttgttttgagcgctgcgtcgtggagccttgtgtgttggggatttctgtatgacacatcttgtgttgagaatatcttaaggagtctttggcggaaacttttacgctcattgtgtattaatctctctctgtgtctctactagaactatggttgaattatcttgatcacgtgtgtcatgtatctcatgtacttatttacgtatacatttcccagtagtgtaggggatgactagacacgtagatgggcggcttctggttaagagaaagaggggatcacaacaagagactggttagaagaggcccccctgggcatccaggcctgtccatcaggaagtaaattttagcagggcaccaagctttgcccccctataatccctcaggtgttctttgttcatgacaggcaggtgttcatgccgcatttgatgtggaggcagtgaagggcttgccctgctggcctctcatccccctaattcccacaccttgg

SEQ ID NO: 548366 - DNA, 993 bp, Homo sapiens
accaatggaccaatatggaaaaggctggaaagagacttatccaatccagtgctgctggtggaatagatgggaagggagaagagctgagatggagtttgaagaactggggtcgtaatccaggaaattgccaacatactcacagaatcctgctcggctgcaaagaggagacagagtaatggtgatactgcccaagatcccagagtgtgtggctttgcatagtgtggccgtgtctggcgaacagggaccgagttgttaaattccaggaaccactcagtctgacccgagatagagacatcctctatagacgtacaatctttcgaaaagctacgtgcattattaccgatgatactttggccccagcagtagatgccgtggcagttaaagtgtgaaaatctccactccaaattaatgtgtctcagcactccagagaaggctgggggaacctcgaggagatgatgaaatatgccagtgacgaagccacacttgtgtggacacaaaaacgagcgacgagatgatggtcagtctacttcaccagtgggacaagctgggcctcctaagatgatggacagacccagagcagcttggtaaggatggtctgtccatggaaggttctgggctggattggatagcctccgatgtgatgtgggaatacttcagataccaggctgggcaaagtctagcatggagtagtggtaatgtctcccatggacgcaaggagctggtgtgtggcacactaatgccccgattgaatcacttccatctggaacctgtccaagttcccatcaatgttgttggcttgaccagtgcttacggatgttgtccaaaaagactggcgtttacgtcacacggtgaagactggtgggctgagaaccattacccggggggggagcacggcaaaaagagaggcagaatataagttggcaagaacagggatggaaagaggaaacagcagcacagaatcgcggcggagaaaaaaagagtcgctgaggaaac

SEQ ID NO: 548367 - DNA, 260 bp, Homo sapiens
caagctcttctgaagtctcgtgagatgactgaatatgaaccaaagctgcactgcgctgtacttctcagcttcaacagggaatactcttccaaggataacagcagctccagtccctgaaggcgtgcgtgccaccagcacagcggtacactgccttctctaacccagttcgctcactagtactatagcatctgtggacacaatcttagaaaaaaagatctactcccccaccctcctctcttcctttgtaaagaccatcccaa

SEQ ID NO: 548368 - DNA, 102 bp, Homo sapiens
gtgatgtcggtctcataagggtcttcttatataggctcctctcatttcaccaccagctttggggcccaaggtcctaaggtagtgttctgaagccaaattccc

SEQ ID NO: 548369 - DNA, 325 bp, Homo sapiens
  misc_feature (51)..(51): n is a, c, g, or t
  misc_feature (74)..(74): n is a, c, g, or t
  misc_feature (251)..(251): n is a, c, g, or t
  misc_feature (307)..(307): n is a, c, g, or t
cagaggagcagtgtccggccagagcgcgcgcgcagcttgggagctaggcanggcctggcgctggggtcgggctngcgtcatgcgtgccacgtctcctctacgcgccggaccctgggatgctcttcggccgcatcccgctgcgctacgccatactgatgcagatgcgcttcgatggacgcctgggcttccccggcggattcgtggacacgcaggacagaagcctagaggacgggctgaaccgcgagctgcgnagggagctgggcaaagggcttgccgtttccgcgttgagccaacttgactaccgcancttcccacgttcgggttc

SEQ ID NO: 548370 - DNA, 844 bp, Homo sapiens
gtgtccacgaacctttctcagctccgagttggtgtgtgttcgcccggggtgggccagaccctgtgggcttgttgagggacccaccccgcctgtctcacctctggggcgcggtcgccacacaagggttgtttatttggcgcagaccccccgccttgctgttgtgtaacaaaaccagctgggggttggcccgaccgactcctaaaaaaaccgcgggccaaaacacaaaacggggggggtaacacgcacgttctgagaatattttctggaagggaggtatggcgcctctgtatttattaatgtcttttaggaggatgagacctccctcgtcctggttcacaactccaaggtgggctgcccagaagtcaagatatttcttggcttattccattatgcctcttgcaccatcccccctaggtctccacgacctaatttgttgttcgctcgttggtcccgcccccacaacgtgctgcgggtttatatacaagcccacacccccccacccagccccggggtcaagaagtcagtgttcttcaatttcccacggggtagtcatccccccccaatattggaacattgtctaacagtccttgttctccacagagggtggtattgtgaacggtgtggtatcatagggcggtctaccacgaaggagagaagtctgtatgcatatattctggtgcgaattcttgaaacggtaaagtttacgtcgccggtcgtgataccgcgtggagaacaactctttaatacgatacggtaccaaaactcatgcacccgaccccgcccgtcgtctgcccccccgcagtcttaaccgattaaaattaaaaagaaaatttcccaaaaaaca

SEQ ID NO: 548371 - DNA, 211 bp, Homo sapiens
gttgcacgttactctccaaccacgcccagattccagctggagatcaggtgcttgtgatgccgataatgaccgacgaaacgtcatcaattacactcgattactttcaagtctctctcaggtcttcaccggccatcagggactctgccgtctgtcccaggtactctccaaccacgcccacatttcagctggagtccgttcgaggcaccccgga

SEQ ID NO: 548372 - DNA, 226 bp, Homo sapiens
ccgagaggatcacggatatgggtgagccactgtgggcgaaaagaacacacaactctgtacaacaaaagaacggtagtacaaatctttccttcaattaaaaccaatcagacttggctgtgttttaaccccaaggtaaaccaaaaccgggaaaagacggaacccggggagcaatccgggtcccaaacccttccggccggtcctttacccgggaggctacccaccggaa

SEQ ID NO: 548373 - DNA, 466 bp, Homo sapiens
ggcgtcatgctgaggcgactctcagaggatccctcttcccgaaaggacattaatgaaaagtccccagatggcatacaaagtatccccggtacacatatattcattgggagtttggatatagaggcacattatctaaaacattttgtagttcccaaaaaccatcttaatttcttgagttcctgaattttgaacaggattacctggagcctggagccactttaagttgtacttctgactaaactggaattatgagtgaggaagagtgtttactaaataaatgactggggcaagcaaaatggaggaggaaattagaaactgtttgacaaactttaagagctacttgaaataacagaagtcttgattaatatgcaaataatggctagaaagtatggtttaactggaccctattatgccttttaaaaataatttcagtaacccataaatacatgttgcctttcggagaaga

SEQ ID NO: 548374 - DNA, 220 bp, Homo sapiens
gctgttaatcgcaagtactgtggagtcgaggtggcagaatcgcctgaacccaagaagcggatgtgtcagtgatgcagagatggtgccactgtagcccagtcctgggcgacaaagcaagactccatcccaataaataaaaaataaacacaacggggactggtgcagtgggtcatgcctgtaatctttttttttttttggagacggagtctcgctcttgtgg

SEQ ID NO: 548375 - DNA, 1116 bp, Homo sapiens
  misc_feature (477)..(477): n is a, c, g, or t
  misc_feature (511)..(511): n is a, c, g, or t
  misc_feature (562)..(562): n is a, c, g, or t
ctgttcttgaactcctgacctcaagtgatccgctgacctcggcctcccaaagtgctgggattgtaggtgtagaccattgcacctggccgtgataacttttaacaatttatctaaatatttttgcattgatcttcatattcaatctgcacagctcttcgaagttcattttacagctgagtgaactgagaaaagtcaagcaagcaatccatctgcttcagcctcccaaagtgctgggactacaggcgtgagccaccgcacctgtcctggaaaggaagcctttttatatgagttgttttctacacagtaagtacagaacaacgtctatgaccatgactgtataatatttctattaattcctgtaacttaaaacatgtagtttgtaacatgacgagaccaaggagtgccacaaaaacatgagatgcatgtggttaaatccatttcatggtgctagttcctagccattcacttacaggtggnggtgaccattctttggcatttgaatgactcattntctcttctttcagtgcacttaggtggacatcaagaacttctggacttatgnttcttagaacaacatgtcttttataattctttatagggcatgaagctctctgtacctatggtcttttttcatgattttcatcctttgccttggactatagatttttgcttgtaaaataaagggtaggtttgaagttgccagcttagcaagtgcctgatggaattgcattcggagcatgtttgacttgggcatttataatccatgccttgataccggccttaaaggggtggttaattcaaagggtaaggacactcatttaaagggaaattgttatgcccccaggctcttaaaataaaccccgaagaaaaaactgtgccccttgccaggacttaatcgcaacttttatcggccaatcgggctattggcattcccctaagggctcgtaaaattggcccgtttacacgggatcgggaacacgggtcaccattaacctttgccctttcgcacggcctatcaagccccccatgctttccaaatgtccctcctggcaagatatgggcctcatttttccgcaatttgttaaccctttttaacaccgcggtgcactcttttcc

SEQ ID NO: 548376 - DNA, 967 bp, Homo sapiens
  misc_feature (518)..(518): n is a, c, g, or t
aaacaataggctaggtacgaggcctggtgttaatcggccgagggaaccatggagggtgtagaagagaagaagaaggaggttcctgctgtgccagaaacccttaagaaaaagcgaaggaatttcgcagagctgtgaagatcgaatgcgcctagagaaagaaggtttgccctaagaagagtgcttcgcaaaggctaggagggaagcttcatgtatgtaaaaagcaatagctagctatcaacgaagggaagtcataggctaacgatgtgactagaagctgaggattcgatatggtcgaggattggccaagaaaagctggcagacttcatagtgttactcgtgcgatgaagaccctatatagttgtgcgctttggtccatcgacgtatagtctagcatgtgtatccaactaggaaggtgagacccaacatgcgttacgaaccaaggtgattgacagacgtgtcattcggcacttgcgatcaaagtcgttcacagtggaagccatattgatgaatgcatcaancataggccttcgaattaagcactgctgagggaatgggtagaagccagtatatgtgcatgaggggtaccccagatcgtgcaaggtcagtcacaatgagactcaatctcaccaaggcgtggattatgggcgaacacatccacaaatcaataagaagcgaattgctttgacagataacgctttgattgctcgatctcttggtaaatacggcatcatctgcatggaggatttgattcatgagatctatactgttggaaaacgcttcaaagaggcaaataacttcctgtggcccttcaaattgtcttctccacgagaaagaccaccatgtggtagaaagtggagatgctggcaaaagggaggaccagatcaacaggcttattagaagaatgaactaaggtgtctaccatgattatttttctaagctggttggttaataaacagtacctgctctc

SEQ ID NO: 548377 - DNA, 615 bp, Homo sapiens
aaacaataggctaggtacgaggcctggtgttaatcggccgagggaaccatggagggtgtagaagagaagaagaaggaggttcctgctgtgccagaaacccttaagaaaaagcgaaggaatttcgcagagctgaagatcaagcgcctgagaaagaagtttgcccaaaagatgcttcgaaaggcaaggaggaagcttatctatgaaaaagcaaagcactatcacaaggaatataggcaaaatcaataagaagcgaattgctttgacagataacgctttgattgctcgatctcttggtaaatacggcatcatctgcatggaggatttgattcatgagatctatactgttggaaaacgcttcaaagaggcaaataacttcctgtggcccttcaaattgtcttctccacgaggtggaatgaagaaaaagaccacccattttgtagaaggtggagatgctggcaacagggaggaccagatcaacaggcttattagaagaatgaactaaggtgtctaccatgattatttttctaagctggttggttaataaacagtacctgctctctaaaatggaaaaaaaaagtctggtatcttttatctaaagtaaaaaccttggggggg

SEQ ID NO: 548378 - DNA, 321 bp, Homo sapiens
aggccccccccttccgttccccggttccctttttaagggggaatgacccctttcaattttttttggggccggccaaaatttttgttttcttcaatttcccccttggtaccctgtttttggtgcttgggggtgttaccttagaaaaatttggtgtgttcccccccaaaaagggccccccgggttttttttcgggggttcccgtaaaaaatcccaagggcaacatttttccccctcgcttttccaccttttttttttttggcaggggccccaacccttgttttttttttccccaagaaaagggtttcccccccccccttttta

SEQ ID NO: 548379 - DNA, 365 bp, Homo sapiens
ccccgaattatgggccgtttactctatcctctgatcaggatgagcatcatactcaagactacgccctgatcggcgcactgcgagcagtgagcccagacaatctcatctgaagtcaccctatgccatcattctacgatcaacattacataattaagtggctccatttaaacatcatccacccattatcacaaacacaagaacacactcatgaatatacatccatgacaatcatgaaccctagagccaataatagtgaatatatcatcacacactaagacagagaccaaaccgagaccccccattcgaaccattgcagaaagggagagtccgaacctagatctcagagcttcaaacatcgaaatacg

SEQ ID NO: 548380 - DNA, 140 bp, Homo sapiens
tgttgttcatgcatagatcattcgtttgttacgaatcccagtgtggctgatttgttaccgttctagaggctgaactgtatgaagacctcaactaccattcacaaggtgcagttaagagacttttggacagttcacagtgt

SEQ ID NO: 548381 - DNA, 886 bp, Homo sapiens
  misc_feature (31)..(31): n is a, c, g, or t
  misc_feature (228)..(228): n is a, c, g, or t
  misc_feature (339)..(339): n is a, c, g, or t
  misc_feature (363)..(363): n is a, c, g, or t
  misc_feature (439)..(439): n is a, c, g, or t
  misc_feature (522)..(522): n is a, c, g, or t
  misc_feature (534)..(534): n is a, c, g, or t
  misc_feature (699)..(699): n is a, c, g, or t
  misc_feature (714)..(715): n is a, c, g, or t
  misc_feature (718)..(718): n is a, c, g, or t
  misc_feature (720)..(720): n is a, c, g, or t
  misc_feature (724)..(724): n is a, c, g, or t
  misc_feature (730)..(730): n is a, c, g, or t
  misc_feature (735)..(735): n is a, c, g, or t
  misc_feature (742)..(743): n is a, c, g, or t
  misc_feature (760)..(760): n is a, c, g, or t
  misc_feature (765)..(765): n is a, c, g, or t
  misc_feature (768)..(768): n is a, c, g, or t
  misc_feature (774)..(774): n is a, c, g, or t
  misc_feature (783)..(783): n is a, c, g, or t
  misc_feature (791)..(792): n is a, c, g, or t
  misc_feature (794)..(794): n is a, c, g, or t
  misc_feature (797)..(797): n is a, c, g, or t
  misc_feature (802)..(803): n is a, c, g, or t
  misc_feature (810)..(810): n is a, c, g, or t
  misc_feature (885)..(885): n is a, c, g, or t
ctcttttctcatagaaatagattattttttntaatacaaaaaaagaccaaaaaacaaaacaaaacaaaacatcaacagcaacaagcccgtaggaacatctttaagcgattactcagggcccggctgacagttacacgtgggttgcgtcagtcccgtgtacacacgcgttcagccatgtttaaaccgattgcatcaacttcgaaaccggcccgcccgccggcgcctggngaggggcagagggagaagcagagagtttatcattcatctgtacacatagacgtttcttctttaaataacaccacgggcgggagccccatctgcatgtgcggttggtttggncaaaaatatagatatatatatatnatagggtattaaaattaccgacgggctccccgcgctgccaagtgccccagtgccaaagttttgccggcgccgccgngggcgggggcgagggcgcgggcgcgggcgctccccggggtctcagccccggccggcagggggacgcgcgcgggggccgcgctngcagtggccggnggaggcgagcgggggctcgggcagctgcttgaacaagttccgcagggtgctgagctcgcgcgacacctgctccaccttcttctgcagccgctcgttctcggccgtgagctccaggaacttgtgctgcgtctccaggttgcgcatcttggccttgtcgcggctctngcgcacggcgatgtnntgncnctcnccccgnatctngtgctcnncgctgtgcttgtccacngtctnctnggcctngctctgganctgcgagnncnccngcgcnnccccgcntacaggcgggtcgggggcgcttggctgcacggggctccgcgtgccgggcggctggacgaggagactggagagctnc

SEQ ID NO: 548382 - DNA, 100 bp, Homo sapiens
ctcactgttatgatgaggttacggtgtatttgctatcatcatgtctgttactatgatcaaggctcttccctgagacttctatgccattaagcttctaaca

SEQ ID NO: 548383 - DNA, 2284 bp, Homo sapiens
gatgccaagtatcaaccagatgatccagaagccattgatccgatgacggacttcttgggcaccactgctttaatgagtgatttggatgactttgaagaaggcgacggcgcggtgacattgatgacgttacatgcagccaaaggcttggagttccctgttgtctttttggtgggcatggaagaaggcatcttccccttgtcacgcgcgttgatggctgaagatcagcttgaagaagaacgacgcttggcgtatgttgggattacccgcgccatgaaaaaactgttcttaaccaatgccttttcgcgtttgttgtatggtcgaacacaatctaatgaggcttctcgctttattaatgaaatttctccagccttacttgagaccgaatatggtcaaaatacacgggtaacaccacgtcgtgatttgccgtttgatcggaaaaaccagcgcgcgcaagcaacaacttatcgtgcgaccccagtgactaaaacaactagtggcacgactggtggggatcaaatcacgtgggcgccaggcgataaagtctctcacaaaaagtgggggattgggacagtggttgccgttagtggtgatcgttcggaccaagaacttaaagtggccttcccatcggaaggggtgaagcagttactggccgcctttgcaccgattacaaaggttaactaaccaagtaagtgcgactttaatatgagattaggaaaataggatgttaccagaatttacaccaattgaacaattgtctacgtcagcagcacaacaagaagttgcccagttgcaagctgatctcactgaatatggggtcgcctactatgaacaagatgccccgctggttgaagatcatgtctatgatgcgctttatgcgcgattagtggcgctagaatcagcttttccacagtttgtgacgcaagattccccaacccaaaatgttggtggtgccttgacaaaatctggcttagccaaagtggaacatccggcaccaatgttatctttgggggatgtttttagcttagaagagttagcagcttgggatgaacggacgaccaaaagtctcggttttcaatcgccttataaccttgaattaaaaattgatgggttagcggtggcgttgacttatgttgatggccggcttgtccaagcgtcaacccgtgggaatgggacaattggcgaggatgtcacgcgtaacgtcaaaacgattaaggctattccacaacaattaacggaacccttaaccattgaagtacgtggcgaaatttatatgcctaaaaagagttttgccgctttgaatgtacaacgtgaagccgatggcttggaaccgtttgctaatcctagaaatgcggcggctggctcattgcggcaacttgacgcacaggtgacgaaacaacgcgaattatcagcctttgtgtactatacggctgaaccagaggtacttggtgttactacccaaagtggcgcgttggcccgttttgccgagcttggtttgccgactgatacgcataatcaagtgattgaaaaaatggctgatattgctgattttatcgccacctatacagctaaacgtgacacgttggcctatggaattgacggggtggtggtgaaagtcaatgcgctggataatcaagtggagcttggtaatacggtgaaaattccgcgctgggcgattgcctataagttcccaccagaagaagccttaacggtggttcgcgatattgaatggaccgtgggtcggacaggtgccgtcacaccaacggctatcatggatcctgttcaactagctggaaccacagtgcaacgtgcgagtttgcacaatcctgattatttgcaacaaaaagatattcgcatcggggatacggtcacgttgcataaggctggggatattattccggaagttggccaagtgattttatctcagcgaccagccgatagtatcgcatatccgataccagttgcctgtccagcgtgtgggtcagaattagtccacatctcaggcgaagtggcgttacgttgtattaaccctttctgtgcggcacaaatccaagaagggttgacgcatttgcttcacgtaatgcgatgaatatcgccggtatggggccacgcgtgattgaccaattattaaaagccaactatatcaaggatgtggcgtcaatttatcgcttagatatgacgcaattattgtctctggataagtttcaagagaaatcagcggctaatttgttagccgctattacgcaatcaaaagaaaattcgttagaacggttattatttggtctag

SEQ ID NO: 548384 - DNA, 760 bp, Homo sapiens
  misc_feature (275)..(275): n is a, c, g, or t
  misc_feature (278)..(278): n is a, c, g, or t
  misc_feature (292)..(292): n is a, c, g, or t
  misc_feature (301)..(301): n is a, c, g, or t
tacggggtgtcgatccagccctcgctccatgcgaggggcccagcagtatctccagtcagcactagaggacattgggaaagctagaagaagaacacatggtgatatgtcatcgtcagagacactgcctagcccaagcctgtctttcccagcgtcatgtttgtgtcacaaaagcagttattttaaaatctgatcccctctctacccgtaccactttggctttgaattatctcctgggttattttggttcatttgggtggggatcaaagtcctgtccnccnccaaaactaagttnttagatttngggggatttttttttttaaacgatgagaagggaatccggttatgttgactattcatagcttgtacaacgactacatgtctgcatgatggcattcatgatactattatactctaacttatttttgacccacactgactatggacaagtctgctcagataaaaaccctttgacagaggatggaatttttcaaacctgttcagagtcctggtttaatcaatcaagctaagaagaagtcgaagacatccctagtgcatgtacacgaatgccctacgatcatccattccagcaccactgcatgcatgggtcacctctcggactctcaaattcttcaggctcagtctggactcatacttatttacactcatttacatcttggcatgacagcaggcaagcttcagatggggctgtggaacgtggcacacaacgcctgagtacgagacacatgcaaaggaagggatg

SEQ ID NO: 548385 - DNA, 455 bp, Homo sapiens
  misc_feature (275)..(275): n is a, c, g, or t
  misc_feature (278)..(278): n is a, c, g, or t
  misc_feature (292)..(292): n is a, c, g, or t
  misc_feature (301)..(301): n is a, c, g, or t
tacggggtgtcgatccagccctcgctccatgcgaggggcccagcagtatctccagtcagcactagaggacattgggaaagctagaagaagaacacatggtgatatgtcatcgtcagagacactgcctagcccaagcctgtctttcccagcgtcatgtttgtgtcacaaaagcagttattttaaaatctgatcccctctctacccgtaccactttggctttgaattatctcctgggttattttggttcatttgggtggggatcaaagtcctgtccnccnccaaaactaagttnttagatttngggggatttttttttttaaacgatgagaagggaatccggttatgttgatttttagtggacaaaaaactgtctgcgggggttctggatttttttattttttgcccacctgtatggaaagttgtcagtaaaacctttgccaaaggatggattttta

SEQ ID NO: 548386 - DNA, 169 bp, Homo sapiens
ttgaagggtagcaattcagtcagccactggagtagtatcacatgaagtgagaagaaaagctgagatggagtttgtagggcagctggagttcaagcatctctcctcacagtcctcttcttgttccagcatcatttttgtcacctttcacctgtcatttccaccagggtcc

SEQ ID NO: 548387 - DNA, 173 bp, Homo sapiens
tgaaatgggcctaattccctgaggtcatcatatctggcagaagcacaggactttgttcatgtcctctgacctaacagtaactaatgtgggttcgaggaagaaaggaaaagaaggaaccaggtaaagtctctacgtgactctgatggaaccctcttatgacaggcagagtatca

SEQ ID NO: 548388 - DNA, 361 bp, Homo sapiens
agggtgacagttagtacaatatttttaagacgcttcaaaatcttttaccactaatctagaagaatcatctcttcagtgtaagaaagaaagccctaacagaaagacgtttaaactaagctgatgttcaatcctcttagaacacacaaaatgaaaaataatggttgattagctaagctttgtgctataatcaatctaattaattacagtgattctaaatggcaacagcccatctgtctggacagcttgacagttcagaatgcttttgcaatgattttttagcgcaaagacgctaaaatgatccggtcacgcaatgttcctcatatgcactctgcatctctgtgccaatcttgtaggtaaggat

SEQ ID NO: 548389 - DNA, 194 bp, Homo sapiens
tcgatctcattgccactgcagcctccgcccgacatgtttacgtcggattctcctgcgttagcctccctagtaggtgggcttacatgcgcgtggtaccacgccctagctaattttttgtatttttagtagagacagtgggtatcaccatgttggccaggctggtgttgaactcctgacctcaggtgatccactca

SEQ ID NO: 548390 - DNA, 434 bp, Homo sapiens
cagattccccggccgtcacagcttgtcacgccacggaggatcacgatgcacgctgatcatccattgaaactgacactgacactgctgacaccacgttgttgccaacaacgtaacccccgctgacaccagcctcattgacctatggcctgtccacggggaacgggcctccacactccaggatgagcccagggtcgcccacgccaccctcgggtactgaggtcaccctggcagaggtgcccctgctggattaggtggctccggagccactgtctgccagcaggcgaaggctgtgccacccttctcaactttgatgagctgccttatgccgccagccaccttctgtgacccagaggaagtggaaggggagcccctggttgccccccagaccccaactctgccctcagccccttgaggagctggagcaagagctggag

SEQ ID NO: 548391 - DNA, 102 bp, Homo sapiens
gtagcgcttgagatggtgacaactgactgagagcagattgcagaatacaaagaagctttttcactcatttgacaaagatggtgatggaactataacaacaat

SEQ ID NO: 548392 - DNA, 162 bp, Homo sapiens
  misc_feature (50)..(50): n is a, c, g, or t
ccccccacacttcccgcagtccccacacttgtaacacttcatgtggaagnttttgtccagggcgaccactcgcacagtcgcatctcggccaggctcaggcatggggctcagagcagacggagcacctcggggcgtactgcttgtggtagtcggggacacagt

SEQ ID NO: 548393 - DNA, 350 bp, Homo sapiens
gcgtcgcctactactactaaattcgcggttgtgtcttttctgaaagggctttaaaagttaggatgtagactgggcatggtggctcatgcctgtaatccctgcattttgggatgctgaggcaggtgggttgtttgaactcaggagttcaagaccatcctgggcaacatggtaaaatcccatctttattaaaaatatagaaattagccaggtgtggtggcactcacctgtggttccaggtactcaggaggctgaggtgggagaatttcttgagcccaggaggcagaggctgcagtaagcagaaatcataccattgcactccagcctggatgacagaacaaggaccttgtctc

SEQ ID NO: 548394 - DNA, 183 bp, Homo sapiens
ttccagcagttggaggttgcagtgagctatggttacaccctggatagcccctgaactccagcctgggcagacagctgaccctgtctcaaaaaaaaacaaaacggaacaaaacaaaaacccaaaccaaaaacagtggaagagggaggcagaagtggagagccagagggaaggaaacccacagca

SEQ ID NO: 548395 - DNA, 878 bp, Homo sapiens
  misc_feature (1)..(1): n is a, c, g, or t
  misc_feature (121)..(121): n is a, c, g, or t
  misc_feature (878)..(878): n is a, c, g, or t
nctggccggcatcggtgtttattttttgttgatttttttcaatcaaatggaattgcttaattaaaaaaaacttatctcttttgtggggtagggtggtacagacaacctcattttatcgcancagacacctaggaacaaaacactggacccaccagagaaaactgggcaataaaagcatcagaagttcaagtcaactatggaagaattactgttagctggcagctttcaattctaaacagaaggggggggacctattgggcttgacaaaagtttcttagaactggggagctgggaatgttggactccttttaattctattccaatcatttcctgtatagggaaattaaagtcaatgcatcaaatgaagacccaaagaaacatttaaaaacttggttgactagtattcagtatgtgagattattaagtaataacttggccacctagttaaccttggtctggaatatatataggggatttggagccgccactggtataatattttcttgaaggatgccaagctgtatgcaggatctttttgctaaaggccagaactgggggcactgagtttgggttttcctccgtttgccccccaaacacactttttggggggttggaggataaccccggagcttggcgtttttcccttcgaagcctaaaggggaacataacccttgggggtttttgtgcgaacattcagagaaagtttgtgtgaggggcggtggaataatgaccctgtggggagcccttgcaccacgcctcgaattgtgtaaagatggggggttttcataagagggaaaacggttggtgcaggaggaacataaacctggggaaactgggggggggggtttcattattgaggagccagagttggacaaggn

SEQ ID NO: 548396 - DNA, 1478 bp, Homo sapiens
  misc_feature (44)..(45): n is a, c, g, or t
  misc_feature (51)..(51): n is a, c, g, or t
  misc_feature (65)..(65): n is a, c, g, or t
  misc_feature (71)..(71): n is a, c, g, or t
  misc_feature (84)..(84): n is a, c, g, or t
  misc_feature (87)..(87): n is a, c, g, or t
  misc_feature (94)..(94): n is a, c, g, or t
  misc_feature (98)..(98): n is a, c, g, or t
  misc_feature (120)..(120): n is a, c, g, or t
ccaccccatgcccaacaagccatattgtcaataaataaggaatnnctgaanccagaccctttagnaagagncagaaattccatnacncaggaanccantcagtgaagatgctgatagttntgatatgttcttatgccctgcccccttcccccaaaaaaccacctgcagaaccaaatgtttctcctcaaagcccatcagcacagattgataataatatcactatcaagccagggctagtgcttctctacatactgtactgtcacaggtacaaagcaagccctggacagatactgtctccctgcccccacaaatccagggagaaaaagaccaggaagcttgatttccttggatttaaacctcatgttcaaaaaggataataaaggtgctcgtacttgtatcttcttccctcccccaccatcaggaattctgacattttggaagtaccaatcagaataacactggaaaggaagagccttgttttcaaaacatagtgccagctcctctgcaactatttcttccaggaaaccaagcctccacctcctgagtttttcactggagccagggaagctgaaaatcccatcccccacccaatgggagctaaattcccagccagctccccactctatggatatgaaacactcgagaacactgactgggaagaacatccggctcttatcagaatccctagttaggactctaccaggattccttttagaaagttaggggcaggcccaaggaatctaggaaacacgctatggaaatgggattgccatcactcaaagaaaccagacaccctgcacacaacaccccacccccaggccaagtggaggagcctgatccaaggcctagctcctacccaggccctggcaggccagttggctcctctctccacctgcctctcatacagccaggcccctcaaattaccaacacgctaagcaagggccctggagacaagcaagcctgttttgccacttaggaagctggaaagaattttcgagtcaagttaacccaaccccctcttcttttcacatgtaagcacactggctcagccagaactcaggtctttcaacctcacagttggtgaagactcttacatgttggttccaagttgctcaactctcagggctcagcctacaaaagactcgcgcatttcgaccagctcagtccagaggactccagagaatgactgctgagaccaacccactttccaacccccactacagacacacaaaaagaacagaaaacacaaagtctatctcacataccccttgagtggggttgggtgtagggtcttctctgctcccctccaacccctgtgcttcatccctgacctctctcaatactgcatctatcctcaagcaaacaacgggcctttggccacaagtaaccacctttggatccagaactccccgggtctaaatccggctccaactcctcagtcccgagggctgggtacacaacatggggtgcacagggg

SEQ ID NO: 548397 - DNA, 488 bp, Homo sapiens
tgaatgtgtataaattaagatgcatatacccctaaacatataatatgaaactaaaatgaacacagtaagtatatatctaggtttgcagggatttttgtttttgatattgtgttttcttccttttatatggaagaaactcagtacctaacaagggtaaacaaaggatagtagtaactgaactaccatgtactcatgcaccttccttcaataattagccaatttatggccataccgttgttgtcatctatatccccacccactcccccactgcacatcattgttggatacaatccaatgtcgtgatctatttcattctgcactctgtaaattatttcagtctacatctctgagtaataaccacaatataattatcacagtctaacgattgaagcaattagatgacgcttaagtagctctatgatcgtccgatggtttagaagtacatatcaagtgacagctcatgaatttctactataagcaagtgcatc

SEQ ID NO: 548398 - DNA, 493 bp, Homo sapiens
gaagcagctgatgagcatatcacagagttatgatgataccaaggggaaagtaaagagcttagcttcgaagacacagaggattccttttgtagactggaaggaaaagaggaggagctaattggaacaatacaagagaaataaatgctagttgacagaaataagatgcacataaagtggatgacagcaactatttttaaaggcaggctgcctgcacagagggagttcagcaaggcaagactttatgaaagggttcgcagttcttgcattgattgcaagaagtccaagaagcgagggaaggaggaatagggaccatcacagggaacacatggatgtgagtgactctttctcacggtgagccgagtcttgaaaagcgattgccagatgatctccagaagtttcttatagaattgttattcaggattctatggcttctggatgagaacatctcattgacaataggatggatcctagctccacaacttctaaggttaag

SEQ ID NO: 548399 - DNA, 723 bp, Homo sapiens
  misc_feature (178)..(178): n is a, c, g, or t
  misc_feature (380)..(380): n is a, c, g, or t
  misc_feature (407)..(407): n is a, c, g, or t
  misc_feature (430)..(430): n is a, c, g, or t
  misc_feature (462)..(463): n is a, c, g, or t
  misc_feature (488)..(488): n is a, c, g, or t
  misc_feature (528)..(528): n is a, c, g, or t
  misc_feature (558)..(559): n is a, c, g, or t
  misc_feature (593)..(593): n is a, c, g, or t
agttcagaagaatcaaccctagagagccttaaataacaataccgaaatgggacatatgccattaaatctgtccctaacttaaaaatgtttaactagatgctacaaaaaaaaaaagtaatacttggctaatactttccagaaagaaggatggaggggagaaaataaatacacgtaaaanaggactccttggatcttttccagtaatggtgggaatggctcactttaatgggaactatgattcaaacggcacctataagaaccaggatcaagatctacatgttcaaatggttgggaaattttctgaaaacatctaattaggtctggaaaattttcaaacatatgattagctctggttcccaattcttataggtggcagtttngttatagtaccgttaagtcagaatatntgaaacttcagttagaagggaantaaggttcaagagatctatgggaaaacagggnngactatagttaataacaggtatggngttcttgaaagtggttaagagagtagattttaaatattcnggcaacaaagaataagttatatttcatatnnataaaatatatattcataataatacatatgttanttaccccaattgaaccattccataaggtatacatggtttcacaaatatgtggtatgcaatacaaaacaagttatatcaggtggtgcaaaagcaacggtggtcttcgcattaacagttacgggtaactata

SEQ ID NO: 548400 - DNA, 129 bp, Homo sapiens
taaagagagagacagacagacagaaaaagacagagacggacagagagagacagagaaacagagagaaagagagaaagacagagagagcgagagagggagagagagagaaacagaaaaaagtcgtatcga

SEQ ID NO: 548401 - DNA, 428 bp, Homo sapiens
  misc_feature (201)..(201): n is a, c, g, or t
  misc_feature (204)..(204): n is a, c, g, or t
  misc_feature (420)..(420): n is a, c, g, or t
  misc_feature (426)..(426): n is a, c, g, or t
gcaaatcagcacacacagtgctttgcgagcccatacgccccctgggtctatgtccgattgtgttgtcatgtgttgctttatggttctctgaaggcttcttgcttcagcttcaatacaggttttaacaaataataaataaagggttgcgaacccacgttaatgtcaacttcagcggtcatgcccggtgaaatgcgcagggcnatncagaggcatgccaaaaaatgccttgtctgtgctcacaatcaagcggtaataggggccggtttcttccgtaccagggtcagtgtcagctgcaatttgggtcaccttgccgggcaaagtgccatagcgcaaaaagtcataggcagacaccttcacttccgaagtttgatccatgcttacataaccgcggtctgcgggtgaaagtcgggtttcaaccancaacanct

SEQ ID NO: 548402 - DNA, 257 bp, Homo sapiens
ctggcacttctggagcatctagaacgagctgcgcggtactcctcggcggcgcccgctcttccggcaaaggtatgatttaagcttggatgaaatgagagctttgacagttcagagagtgaagtttgccatggacctgcctctgttaaaacgtgcaggtcaggatctggcagagaaaacaaagaattttgtcagccgaagccttgtcataggagaagtcctctccatggcggacattgccacagaagtgcgcctgggtg

SEQ ID NO: 548403 - DNA, 115 bp, Homo sapiens
ctcccacatcacgtctagcatacagggccttgccaccattcacgcctacaataaagggcaggagtttctgcacagataccaggagctgctggatgacaaccaagctcgtcatacg

SEQ ID NO: 548404 - DNA, 235 bp, Homo sapiens
aaagttacccttagcggatgacagcgcaatcctgatttctagagtccatatcaactcatagggtttactacctcatatgttgcgatcaggacatcccgatgcgtgcagccgctattaaaggttcgtttgttcaccgattaaagtcctacgagatctgagttcagaccggagttaatccaggtcgttttctatctacttcatattcctccctttttgaaatgactctactcgtaca

SEQ ID NO: 548405 - DNA, 87 bp, Homo sapiens
aaaagcccaaaattaaggaatgttaaattgcaactaagagcaaaatttggcattgtaccagcctggcaacagagcgagactctgtct

SEQ ID NO: 548406 - DNA, 370 bp, Homo sapiens
  misc_feature (21)..(21): n is a, c, g, or t
  misc_feature (26)..(27): n is a, c, g, or t
  misc_feature (29)..(29): n is a, c, g, or t
  misc_feature (33)..(33): n is a, c, g, or t
  misc_feature (46)..(46): n is a, c, g, or t
  misc_feature (55)..(55): n is a, c, g, or t
  misc_feature (66)..(66): n is a, c, g, or t
  misc_feature (71)..(72): n is a, c, g, or t
atggtctgacactatgtggantccanntngggnttagtgtggcccnggcgtccgnttcctcagcgnatgtnngcagccccgagccatggctctcgccgtccgagtcgtttattgtggcgcttgaggctacaagtccaagtatcttcagctcaagaagaagttagaagatgagttccccgccgcctggacatctgcggcgagggaactcccaggccaccggttctttgagtcatggtagccggagttgattcactctaagaagaaggcgatgctacgtgacacagaaagcaagtatctgaagttggtggccccataaagccccttggtcagggtattgccctaaggagagtcaggactttaccacctttta

SEQ ID NO: 548407 - DNA, 103 bp, Homo sapiens
acgaagttagtggccataccatacccatagtaggtggtgttatcctggacatagccttagccagtagtcatagcccctggtagcctcgtatttgctcccagag

SEQ ID NO: 548408 - DNA, 301 bp, Homo sapiens
aggcgaagactgtggaatatcagtattgtaacatgctgtacaggtttgaatgccgtaggagcagataggctataccatatagcctagaggtgtaggagcctataccatctaggtacaagtatgccattttggtgtaagcatgctgtatgatgttcacacaatgatgaaatggcctaatgatgcagtttctcagaacatattcctgtcatgaggcaacatatgactgtaatccagtggtttcgaggtcgggagattgtgcaatcatcaccacaggtcttcgcctgatgggtaccgaggctcg

SEQ ID NO: 548409 - DNA, 587 bp, Homo sapiens
  misc_feature (292)..(292): n is a, c, g, or t
cagcgcgaggtgcgtggaaggcgcacctgtggtgtgcatgtcgtgcgtgcggggacatgtcggacggcgtgctcaaggagggcttgctgttcaagaggggccacattgtgcacaactggaaggcgcgatggttcattcttcggcagaacacagctgtggtactacaagcttgaggggggtctggagagttagcccctctcaagggccggatcctcctggatggctgcaccatgatctgccactgactggaatatgctggaggaccgtgctctgagaggagcgggatgactgngcctttgagataacacgggctattcatgcacggcaaccggggaaagttcaggagctgcacaggctgagaaactcctttaaggtgtcccgcacataagactggtcgcattgtggacaagatggaccgtggaacaccgggattccttaaagtccaacattgagcatggtagcacctatatgagctttcttggctactacctgtgggactggctcatattcaacagatttacgggcaggcgtctggaagggagacactggactccatgctcatggaggagcttctcggcctgtggggg

SEQ ID NO: 548410 - DNA, 343 bp, Homo sapiens
aggctctggtgtgctctcgtgtataagcgtatcatgcgcctaaacccagtgccctgtaaaccttctttgcggagcatctgtggacaggggttctggaacatgctctgggagacatgtgactttgcagtttgtggcagaccccaagcctgtgtgcttagatctggcaagggaaaggcaagtctttggtggagatgtatatgcttgaaaggggcccctcttctaggaaaagacacagttccttaggcattcttagcagggagaagacacatggcagagtggagatagctggtcaagttgcttagcagatcatttgcagttgctttcctagtgctctgtgctgttg

SEQ ID NO: 548411 - DNA, 198 bp, Homo sapiens
gaccatatgcaatgatcttgctgcagtgctctgaagccctaggattcatctttactatatacaccgtaggtagcctggactggcttcggactaatcacccatatatgtaagctaactactccggaaaaaaagaaccatttgggtacatatgtatgtgtctgagctcatatatatccattgggttccctaagggtttat

SEQ ID NO: 548412 - DNA, 122 bp, Homo sapiens
  misc_feature (45)..(45): n is a, c, g, or t
  misc_feature (48)..(48): n is a, c, g, or t
tagtcagcagtgataggtgcacaacatggatggtacatatctcanaanaaattctactgagtgaggccaggcaaggtggatcttatctgtaatcctagcactttgggattaccggcatgagc

SEQ ID NO: 548413 - DNA, 509 bp, Homo sapiens
agcggtcctttcttactaacggtgttctgggtatagcttggcatgccaaagcgtagtacccaatagtaattcaggagcaggttgttcagtttccatgtagttgagtggttttgagtgagattcttaatcctgagttctagtttgattgtactgtggtctgagagatagtttgttataatttctgttcttttacatttgctgaggagagctttacttccaagtatgtggtcaattttggaataggtgtggtgtggtgctgaaaagaatgtatattctgttgatttggggtggagagttctgtagatgtctattaggtctgcttggtgcagagctgagttcaattcctgggtatccttgttgactttctgtctcactgatctgtcaaatgttgacagtggggtgttaaagtctcccattattattgtgtaggagtctaagtctctttgtaggtctctaaggacttgctttatgaatctgggtgctcctgtattgggtactacgctttggca

SEQ ID NO: 548414 - DNA, 279 bp, Homo sapiens
ctattctgctaaaaaaaaaaatacaaaaattagctgggcatggtggcgggcgcctgtaatctcagctactcaggaggctgaggcaggagaatcactcactgtagcgttgacctcctgggctgaagtgattctcccatctcagcctcatgagtagctaggactacagaagtacatcaacacacccaggtaattaaaaatttggttggtttgtctgtctgttggttattgagacggagtcttgctctgtctcccaggctggagtgcagtggccgattttgg

SEQ ID NO: 548415 - DNA, 122 bp, Homo sapiens
gacatcgatacgacttttttttttccccttcatcttcctcctctccatcctcggcagtttcttcttcttcctcctcagccccgttctcctcctcctccaccacttccttctgtcgtcttctc

SEQ ID NO: 548416 - DNA, 147 bp, Homo sapiens
taaaggttctgacaagtatttattaagtgccacatggtcgttataagctgatggacagttttcttcaaaatggtgtgatttttcattatatattttggcaacacaagtaaaacgttggtcctgtaaaaaaatgagaatattcacatt

SEQ ID NO: 548417 - DNA, 447 bp, Homo sapiens
tccttaagaagtcatgaagatattaactatgtctttgaataatgatttactgattaagaattattaaccggctgggcatggtgtctgttcttaatcactgttagttttgctcaaaaaattttttattttacatgaaggagagggaaagtgtgctgaattctccaaaatattgggaaattttcaagtatgaatgcgacttaataataacaatgaggctgggtgcagtggctcatgcctgtaatcccagaactttgggaggcccaggcaggcagatcacgtgaggtcaggagttcgagaccagcctggccaacatggtgaaatcccatctctactaaaaatacaaaaattagcggggcatggtgaagcacgcctgcagtcccaggttgcagcgagctgaaatcacgcaactgcgctccagcctgggcaacagagtgagactctgtctca

SEQ ID NO: 548418 - DNA, 647 bp, Homo sapiens
  misc_feature (123)..(123): n is a, c, g, or t
  misc_feature (246)..(246): n is a, c, g, or t
  misc_feature (273)..(273): n is a, c, g, or t
  misc_feature (384)..(385): n is a, c, g, or t
  misc_feature (485)..(485): n is a, c, g, or t
ctacttctttctttacttggcgtagagcgagagcaataccagtcaacctatgttacacggtgagtttaaaaccaagttcttcccgcattttttgtccttatttttcttgcgtgcccacattgngccttcattttatgagccccaggtttctggccttagatgaaaaaaaaatttaagtcgggggggggcatttagaaagctcctgttcttgatataaaaagccatacactttaaaaaaatgaaagnctttttccaggaaaatatattgtaatnatgctgctgagcctctattatctttctttgaatggtcgattcaggatccctacatcataaatgtttagtattaaacacgcccctgacgcactctaagcccctaaactgctnnaaagcgtatcacactctctcgttcgcccctattataagtgcatccccaaacgttcaactcggcgcttctctactctcgcaatttggttcgccaccccganaggtatgcattttcatttaatgttttcaccactacccatcccccccatctttgtttatattcaaaacacctgtttacatacacccccactcccctctttccttctccctccctttcccttccccccttcctctcacccccctttcatccacttgtgagttat

SEQ ID NO: 548419 - DNA, 754 bp, Homo sapiens
ggttcatcaacgaacactttgctgaggtgatctaccggacctttcttacgccccaaactccaacatcagaagcttcaacctcaaccacaaattgacgggccggatccggatggataaggatgggggctgtggtgaaccaatgtttcagttccacaaaggctctgtcgaccgctggagaccatgtgaacggtaccttgggagagatgagtgcagagaggagggccgccagggtgatgtaaccccaaatgaaaggcggtagaagttagcaaaacccaggaaacgtttcaactggacgtaggttgaggccaatccaccgctgctttcaccaggatccatctggacatttccctcagcgatgatatatcccagaaaggagattgtagagcggtggaacttacacttctcggctttcacgaaagttggttctcgaggaggtgctgaaggacctgtctgacatgaagaacgtgttcttgggcagaccgggaaaaaaatcaggatgtcgtcaaggtagatgaacacaaaacggttgagcatgtcccggagcacatcgtttacctggaagacggtatccgaaccaggtggtaggtctagcttggaaaaaatggtgaccctctggagaggttcaaaagctgaggagagagtgttatggggtaacgattcttaaccataatgtaatttagaccccggtaggcatgcatggattgagttggggcgtaagaaggtacgagcgcgacctcagcatcacctagctttc

SEQ ID NO: 548420 - DNA, 167 bp, Homo sapiens
  misc_feature (62)..(62): n is a, c, g, or t
cgcccgcaggctggggcttggacgccggacagttgatgatgcggttctgcgatcaatgttgngtgatgcgcgcttccagctcgtcacccacattgagcacctgggaggcatcggcaacgcgatcgcggctgatctcgctggcgcgcagggtaccttccacattttcc

SEQ ID NO: 548421 - DNA, 947 bp, Homo sapiens
aagattggaaatttctattgtacgaggtacccaaaagggatgcaaagctgaatgggtgatcttctgaaatacatacctgtgtttgaagattgcttgagccaaacctttaaccattggaaatgtgacaacaatgatttccaggtgaaataattccagtttgtgatataaataccacaaatgaatctgtttagcaacagggtacaaatagtctgttttttccttgtagtgcatgtggcaagtaggtgtgttctggtaataagaaagcatagatctgcgatattgaatgaaacagtagctctgcatattgtgtctggggaaaattagcattctgtgaacaaagtcaacaatgtatctggcgctcgcgattagtgttttcctatgataattaaaacttagtttggccaggcgtggttggtcatgactgtgaaatcgcccgcaatttgggaggccgaagcaggcggatcacggggccaggaggtcgagaccatccctggctagcatggtgaaaccgccgtctgctactaaaaatactaaagaaaaaaaagaattagtaggtgtggtggtgggcagccggtgtagtcccaggtactcaggaggcgtgaggcaggagaatgggtgaacctgggaggcggagtttgcagggagctgagatcaaaccaatggattcctagcctggatgacagaagtgaaatctgtctaaaaagtacacatgcatgagtatctgcaatagactttagtctgacaagtttctggtgtcagtttcaacgtttaatatacagttaaaacgtgcttatgagagagaaatagcgaaaggaaaaagaccaaagctctaatcgtgaataggggaagagggggggagaaggtgatcctgcataaggaaaagtgtggaagaacttaatatattcaagtgagaacatagacaggggtaagcagaattggaaacaaaa

SEQ ID NO: 548422 - DNA, 569 bp, Homo sapiens
aaacttcaggcgactaggctaacactgctgacgagcaggctcccaggctctatcatcatggaccttacaggagacctcgatgcactgaacaaccaggtgtttgcctgacaggagggcatcgaatacacggtgaagatcacctccaaggtcaacaaggagatcgtcagtggcctcaaatgtctgcatcacacctatcgtcggggactgcgtgtggacaaggccatcttcatggtgggaagctacggccccagagcccaggagtatgaatttgtgacttcagtggaggaagcaccaagaggagcattggcacgtggcctctacgtggtcaggtccctcttcactgatgacgacaggctgaaccacctgtcctgggagtggcacctccatgtctgccaggactggaaggactgaaccccacttggggtctgtattcccaatttcttgtcagttgcagagacctgcaagcattccctagacctcccagttggtgaccagatgtcccccactctctgctgtgtcccccctgcctggtgcctattaaatgttaccttgtcttgcaaaaaaaaaaa

SEQ ID NO: 548423 - DNA, 466 bp, Homo sapiens
ggaaactggccaagaagcggaaagagaccatgagcagcacccgacaggagatgactgtgatggtgaactcaatggacaagagctatgctgagcagggcacaaactgcgacgaggctttctcattcatggacacgcacaatctgaatgggagatctgtgtcttcaccatcgtccttcacaatgaaaacaaatacactgagcacatcggtgcctaattcctattacccagacccatttgtgccaactgcaattttagccacgttgtagtgatccaggtgccatttcagcaacagcaacatagctacacacttgtgtaccacctttcataccatgcatccccaggtgctttgcgatgcagatagaagtgaggttcccaaaccaggccctgctcatcaagcacccttggactaaattttcttcagagctgaacttctccgtaaaaaataaataacatatgaataactaaa

SEQ ID NO: 548424 - DNA, 330 bp, Homo sapiens
gggtgaattcggccgaggaggcggaggagcaagccaacaccaacctgtccaagttccgcaaggtgcagcacgagctggatgaggagtagctttgccacattttgatctgctcatccagctcgtgctgcaccttgcggatgaggcagaggagcgggcggacatcgccgagtcccaggtcaacaagctgcgggccaagagccgtgacattggcacgggtggcttgaatgaggagtagctttgccacatcttgatctgctcagccctggaggtgccagcaaagccccatgctggagcctgtgtaacagctccttgggaggaagcagaataaag

SEQ ID NO: 548425 - DNA, 292 bp, Homo sapiens
ggcaaacggattcatcgatgacaggaacgagcatccggcagtcgccaataacaggctggccgacagtacttttaatgcgattcgatacttctgcatttcttttcctttgagcttttaggctgcttttttggccggtgcaccaccgatggcatccagtttgatctggatcagctggcgcgcaggattctttgcatcggttttttcgagcgcaagctggtaggccgcacgtgcttcatccagcttgttttgcgccaccaggatgtcgcctttacgatcactgactacattagcg

SEQ ID NO: 548426 - DNA, 347 bp, Homo sapiens
cagcgccaccttgccagctaattttaaaatttcttgtagaggtggggtcttgcttatgttgctcagactggtctcgaactcataggcccaaagtgatcctcccacctcagcctcccaaagcactaggattacaagtgtgagctaccatgcccagcaggattttgttttaaaatgattgaataaaaattgaaagcagaataacatttgtgaccctggaaaatgatatggaattccagtttcagtgtccacaaatagagttttgtttgtttgttttgtgagatagggtcttgctctgttgcccaggctggaatgcagtggtgctatctcagctcactgcagcctccacc

SEQ ID NO: 548427 - DNA, 246 bp, Homo sapiens
  misc_feature (17)..(17): n is a, c, g, or t
  misc_feature (34)..(34): n is a, c, g, or t
  misc_feature (77)..(77): n is a, c, g, or t
  misc_feature (155)..(155): n is a, c, g, or t
  misc_feature (159)..(159): n is a, c, g, or t
aggatctctctcaacanactgaccccagccgggntgccgcccgcttcccggaagctccagcctgaaccatgtttttnacttgtggcccaaatgaggccatggtggtctccgggttctgccgaagccccccagtcatggtggctggagggcgtgtntttntcctgccctgcatccaacagatcgagatggccaaggcacagagagattacggactgaagaaggccgcctatgacatcgaggtcaaca

SEQ ID NO: 548428 - DNA, 196 bp, Homo sapiens
  misc_feature (120)..(120): n is a, c, g, or t
gtgttacctttctggttcatgttgctgagagtgaaactaaccattccctcctgcctacctttttggccactgggcggcagagaatggcgctatgtgcagttgggcccccggaccatgggnctttgctgcctgctgcagagtagcctgcctgggagtctccaggactagcagggcatctgtggcaggctgagagaat

SEQ ID NO: 548429 - DNA, 292 bp, Homo sapiens
ccctctcctcttccaccctcagtggatgatagtctcaagactcctcccttagctactcaggaggccgagtcgtaaaacccatcctatccacagaggtgtagggtgtattcggtggcccaatctccaaaagccaataggcgtagggcgcatatggtggacccatcggcctacccctagaggcacaggtaggcggaggctcttcggtttcccaaacccgataggcggaggttgagttatttgaccccccgccctttctttcaagcctgggcagttgcaatcaatccgtgggtcg

SEQ ID NO: 548430 - DNA, 580 bp, Homo sapiens
actgagcgtgcctaccagtagagcatgtcgaccatcttttgcaaaacaagaagagggtcctgctgggagaaactggcgaggagaagctcccggcggtacctacaagaagatcggtctgggcttcaagacacccaggggaggctatggagggctaacctacatcgacaagaaatgcgcccttcacctggtagatgtgtccactctcgagggtcggactccatctctggacgtggtgaccaagatgaagatgcagaggagcatgtcatccgctcgagactatctgcatctacatccggaagttacaaccgcgcttggagagagcgccacaagaagcatgtctgtacaggctgtccacccatgtctgtcagggaccgctcgcagatcggatgacaatcgctcacagtgggccgacggggccggccctcatgagcaagacagtgcgcattcaacgtgcttcaaggtccaccgaaggcgtgccggcaccaagaagcagtaccagaaggtactgaggcgtggagcatcggaccgctccccacaatgagagacagcttataggcgtcatgtaccccagaaaaacaca

SEQ ID NO: 548431 - DNA, 391 bp, Homo sapiens
cggctttatttcattagtaggctatagtaacaagcaagttcggggctgcattttgtccctcgaaagatcttataaggcatgggatccttgctgcagattagctagcagaaagattatttctcaggtgatgagaggctggataactgtagtaatgctcttgactgtctcctacaggctcctacccagagattctacccagtgaaactcccacagcaacgcaggtagatggggctgacctggcctctccaatgtctcctcgaactagcaatagccgcatgtccatgaagctgcgtcgttcctctggctcagccaataaatcctaaggagacaagcagcccagcagtgatcagcagtagccaccttagcacgaacatagggttaaccctttcag

SEQ ID NO: 548432 - DNA, 194 bp, Homo sapiens
tgagatgccacagctaagctatcatgctgacttatttagctacccgagtccagtctcctctaccagatttcatcccagtgaaactcgagtacttgttgacctaaagaggagaaatggcaaggacttaagagaatacatggttgcaacacatttacccaacaaatacctggatccacctgacaagaacccattct

SEQ ID NO: 548433 - DNA, 1193 bp, Homo sapiens
gcgccatggcgccctccaggaagttcttcgttgggggaaactggaagatgaactgggcggaatgcagacgtctggtggtgagctcatctggcactctgaactgcggccaacggtgcctggccgacaccgacggtggtttgtgctccccctactgcctatatcgacttcgcccgtgcagaagctagatcccaagattgctgtgtgctgcgcagaactgctacaaagtgactaatggggcttttactggaggagatcagccctgtgcatgatcaaagactgcggagccacgtgggtggtcctggggcactcagcagagcaaggccatgtcttctggggcagtccagatgcagctgattgggcagcaaagtggcccatgctctggcagagggactcggagtaatcgcctgcatttgggtgcgaagctagatgaaagggacggctggcatacactgcgaaggttgtattcgagcagacaaaggtcatcgcagataacgtgaaggactggagcacggctcgtcctggcctatgagcctcgcgtgggccatagggtactggcacgactgcacacagcccaaaagggcccaggacagtacaccgaagaagcacacgaggcatggctcgcagtcccaacacgtctctgatgccggtgcctcagagcacccccggaatccaatttattgcgcgcgctctgttgacctggggtcgcacaacttggcaggtgagatgaactgcacaggcatgatagatggattgggataccctatggtggacatggtagctacacttacagccaccgaataacgtcgaatacaatcacggcaaaacaaagagccacaatcaacgatcccgtacactatagtggtgacgagcaacggcagaacgcaagaccagagaacccggacattagccaacacacgacaatatgctacacgaagggagacgcacggcaacgccccagggagcgcaacacacaaactgcgaacacaaaaacggcaagacgcaacccctgaacgtcggtcagcacaccggcagccgaccacacagtcaaatagggggacagacagcacacggggcccacctcagcaacgagaaagcagtgacgagtacacctgacacaccccgagacacgacacagcccacgcaacgccgacccacacgagacgagagcgacgaaatagagcagcaggagccag

SEQ ID NO: 548434 - DNA, 169 bp, Homo sapiens
tgaccacgcttactaggacagtctggggacatgacagcagagaggagtgctttggaaattgtcggttaataaaaaatgaaagggggtaaatatgtttactttttcaaatatgtagtatttttagagaaacattccctgagctatttatccaaagtgcctcgttaagctt

SEQ ID NO: 548435 - DNA, 488 bp, Homo sapiens
atagctaacccttgcctagcattttctatgtgccaggcactgttctaagcacctcgattctatgatgtcggtagcatttattccattttacagatgaggagactgaggcccagggcagtttggtaactggccacaggtctcaaagtaaaaggatggcttatgtgagactagtaggagtctggggtcagaagtggggtgatggacccagtcagaggaaatggctcttttattattactgttgttattgtttgagacggggtctcattcagtcacccaagctgtagtgcagtgagccatgactgcaccactgtactccagcctgggcaacagagagagaccctgtctcaaaaaacaaaaacaggccaggcgtggtggatcatgcctgtaatcccagcactttgggaggctgaggcgggcggatcacttgagcccaggagttcgattcctccctgggcaacatggggagacctcatctctacaaaaaaaaa

SEQ ID NO: 548436 - DNA, 1294 bp, Homo sapiens
ggtggcaagaagaagccacgtgaaacagcccaaggaagcaggccaagggagatggacgaggaagatacggctttcattgccagtaacacaacaatagaggagcagaagacaactcgaggcagcgtaacaagcgagatggccgcggggaagtgggcccattggctacaggtggacttatgaaatctgggcaaggaagtagagctgtctccttgtgcctgaggcagcatggtgaccctttatttcatctgtattgaaacctctctattccctggcgtacacatcttttgccaggtatagctaggaaattaacgtgtcagtacttggaagctgttggtacagttgaaatgaattagaacgtggtgtaagaagaagatgaaaaagatctctgacgttggactctatcgatgcgtcttgtagatgtgtggcccatcgtaaggtcgtgaccatactcagtaactcgtgaattgtacacagtagaaaccaagctcatgaagtctggcccagagtcgtgtcctctgggtccatatgtcctaccactaaagcttagtattcatgctgaagatttaataccgaaaatcagtttgagaagggacagagagggaagaagaaagaatagggtaataggcgggaagataaggacgacatacactgagaagataacaccgatagaacggtgacgacagctggacaaaaaaacaatggctaagcaagatgtgggaacgcacaggaagaacgagggagaagaccgagccgaaagggatggacaacagtgcaagaagaaggtggtcgatgaattagacagcagggaccatgtacagaacatggccaggaacgggacacacgggaagcacatgttgaaaacaagcaattttccaagagtgtaggggtaatatacaaaaggaagaggtataggtggaaggagtacaaatcagtcgtggaaaggagagaaacacaaattagtaagtatcaaggggtggtaaggacgatgaagaacacatgctagtagtgtacgtgcaaagaaaaacggatagtcacaatagagtagtgactattaggacaaaatgatatggtatgcagagaagggggttaaatagcgaaagcattatttagcaaggaaggagcatatgtgtggggtaaacaagaaagaaaaggtggaataaaatagtcagcgtattgggcatgagacttatcagaggagattgaaaagaataatatgttacagaacaagccattttctaacgggggagacgacgaatgaatagatatacatatgaagaggaaggaaagaaaattg

SEQ ID NO: 548437 - DNA, 769 bp, Homo sapiens
cgcgtgtgttgtttgatctgggcgtgctgctgtctcccctcactctgcccgtctcgtcacgaggtacgacgggcatcactggacgtactcagtgggcagcatgtgcgctgggagcatggattgtgcctttgcggccggggcaggagcaacaggctctgaagtggggagcagcagcgggttaggccagtggtgcttctcacgggcgatacagcaggcatcggttgctggtaaccgacaagagacaccttcgaattaagcacagttcctcgattccaggcaaagcgagcgcaagcatgatcgaaatgagcttcctgagccgcgaggtgttggtgggggacttgatgtccccctttcgagccgtcgggttagggggctgaacgaaagcctaggtctcttagatgattacctggaggaggccaatgcacttcaaacctcatgggttctccatgcgacgaggctaaggcgggctcctccgaatggctggctgtggatgggttggatcagtccctccaagcaagcagcaaggaggatgccttctccgggacagattggactgtggacgaaaatggatttgaaggagttcgacttggatgccctgttgggtatagatgacctggcaaaccatgccagatgaccttctgaccacgtgtggatgacacttgtgatctctttgaccccctagtccaaggagacctaataagcaggcccccagacggttgaaccaaatggacatctcgcagaaagtttaacaaaaccgaccaggttgccc

SEQ ID NO: 548438 - DNA, 173 bp, Homo sapiens
cgaacatcgacctcgtcctcctactcaggcatcacccctgggctcttcagctcagactcccgcggagtggggctcgtacttcaaactactgctatcccctatccatgaggtccacggaggctctcctagagaacccgtggtgtcaccaccaccagtgtacggttgagcggaga

SEQ ID NO: 548439 - DNA, 800 bp, Homo sapiens
  misc_feature (12)..(12): n is a, c, g, or t
  misc_feature (42)..(42): n is a, c, g, or t
  misc_feature (59)..(59): n is a, c, g, or t
  misc_feature (110)..(110): n is a, c, g, or t
  misc_feature (128)..(128): n is a, c, g, or t
  misc_feature (162)..(162): n is a, c, g, or t
  misc_feature (611)..(611): n is a, c, g, or t
  misc_feature (625)..(625): n is a, c, g, or t
  misc_feature (711)..(711): n is a, c, g, or t
  misc_feature (715)..(715): n is a, c, g, or t
  misc_feature (727)..(728): n is a, c, g, or t
  misc_feature (731)..(731): n is a, c, g, or t
  misc_feature (740)..(741): n is a, c, g, or t
gtttaggtcgtncgtggtggagtatctgcccgttctgctcgncgattgcggctcttgtncgagcgcttccagcgtcgcctcggtctcagcaagggccccagactcggctntgggtgaaaaaaaatggnccgaaccaagcagaccgctaggaagtccaccggngggaaagccccccgcaaacagctggccaccaaggcggctcggaaaagcgcgccctctaccggcggggtgaagaagcctcaccgctacaggccaggaccgtggctctgagagagatccgtcgttaccagaaatcgactgagctgctcatccggaagctgccattccagagattggtgagggagatcgcccaggatttcaaaaccgacttgaggtttcaaagtgcagccatcggtgcccttcaggaggctagcgaagcatacctggtggggttgtttgaagataccaatctgtgtgccatccacgccaagagagtcaccatcatgcccaaagacatccagttggctcgccggatacggggggagagagcttaagttgaagcggtttttatggcatttgtagtaaattctgtaaaatacttggtttaatttgtgacttttttgtaagaaatngtttataatatgtngcatttgtacttaagtcattccatctttcactcaggatgaatgggaagagtgactgacctgttcacagacctcagtgatgtgagcnctgngggtcaggaggnnacngtggctaanngcaaaagggcagtgggggaaacaccttggcgttccagaagcaggggccggaggtaagac

SEQ ID NO: 548440 - DNA, 548 bp, Homo sapiens
  misc_feature (149)..(149): n is a, c, g, or t
  misc_feature (209)..(209): n is a, c, g, or t
  misc_feature (221)..(222): n is a, c, g, or t
  misc_feature (233)..(233): n is a, c, g, or t
  misc_feature (254)..(254): n is a, c, g, or t
  misc_feature (329)..(329): n is a, c, g, or t
  misc_feature (337)..(337): n is a, c, g, or t
  misc_feature (405)..(405): n is a, c, g, or t
  misc_feature (435)..(435): n is a, c, g, or t
  misc_feature (450)..(450): n is a, c, g, or t
tcatcgcaggtgcctggtaaatggtggatctccccacccctcctcaacacacagaaaacagggcgggcagcgggcaacactgcactgtcaatgaataactcacctctgtagtgaaccctgggagctgagcaggagggtgaaacgggaangccggtttcccactaactggcagcaaggcaaatgtgggctgtcctatggcccctctgcangtgcggaatggnngggtttgtgancccctttgttgtcgaagacanctccacggggttccggaagtgcttgctctacagacaaaattggggcagtcttgcgccccctgaaaagtttcagantaggtggncccagaagagactccaaggcatgtttggggagcactggcacagcagattaagcttggctgtgatctancaggcctcagatattggaatggcaagaganctggctgtgtaaatngggatgtaagtctggttcaagatcagcctttcattctgccctggcctggtcattaataaaatggggccaatgtgttcctttgagagacctaaaaaaaa

SEQ ID NO: 548441 - DNA, 146 bp, Homo sapiens
gacaaatattccacatctgtgatctctccagtcaaagtctttgagacgagccatcggccttggcaacggagatggatcactgactcacccactacgcggcccgcgaaagcaagttaacggcataacgctgtgactgcactcgcacg

SEQ ID NO: 548442 - DNA, 145 bp, Homo sapiens
aaaccaggtcggcctgccccccgtgacttaagcctaactctctccacccacctcccaggaagatctggcctctgtcctgtgcccacttttgattgtatctaattctcctgagtgttctccccgggatacaggggtaccgagctcg

SEQ ID NO: 548443 - DNA, 124 bp, Homo sapiens
gacctgtctatcgacgacttggcgactggtattgtgttatggcaggaggttttatattgataattgtgtgctgaaattagatggcccctaagatagaggagacacctgctaggtgtccggagaa

SEQ ID NO: 548444 - DNA, 119 bp, Homo sapiens
tacttaagcatttatcatgccccaactaaatactaccgtagtgggccaccataattcacccccatactcctatacactattacctgcaccaccccaatctaatacataattacaacact

SEQ ID NO: 548445 - DNA, 156 bp, Homo sapiens
gataataggacaagcatactttaaaatttctgaatacttaaacaaaagcgcaacatcttgaaaaccagtcttgtcatttaaacctattaattgacacttaaggtcctgggcttcttcttaaataaggagggcaccaaggctttttttagagtgaca

SEQ ID NO: 548446 - DNA, 439 bp, Homo sapiens
aggaggagaaaagtcagcctcatgataaaaggaggcctaaaggtcccacaaagaaaggaagagtgcacccggcttatgaacagatatagaagacagtcagttcaaaaatgttacgctgcaggtgatcatgatgaagaaaaagtgggtctttactggcaccatgcagaacctcccagtgaaaattccagttgcttcaaattcagtgtggaagctgagactccagtgtggatgcacagacagctaagggtgattccataagaactgcagagtgaatgtcaacaaggcccttccttcgggcacttacaattaactctaaagatgggacacctaatctggaaaagcttctaggctaggaaacctggctagaagcctgaattggatccagttctgtataccattaactgtgaagtttcaataaatcatgtaacttctgtctaaa

SEQ ID NO: 548447 - DNA, 869 bp, Homo sapiens
cgcgcccccagaccccgagaatgctcgcgagctccggcccggcggcgatggcgcggagcggtgcgcgtgctggtggacatggacggcgtctggccgacttcgaggccggcctcctgcggggcttccgccggcgcttccctgaggagcctgcacgtgccgctggagcgaacgccgcggcttccgtggcccgcgagcagtaccgtgccctgcggcccgagctggcggatagagtggccagtgtgtacgatagcccctgggtctttttcctggacctggatgctcatcccgggatgccttggacgctgtgcggagatgatgaacgagctacccggacacgcaggtcttcatctgcagcaagccccctgtctgaagtaccaccactgttaccgctgggtggacgcagcaccttggtgccccaggttcgtagacaccgaattatcctgacaagggacaagacgtgtggtctgggtggaccttgctcattgatgacaaggacacagttcgaggccaggcaggaagaccccaagctgggagcacatcttgtgcacctgcttgccacaatcggcacctggtcctgcccccgaccaaggagacgggcttgcttctccttggcagttgaacaagctgtgagggcaggatcttaggattagcaatgcgcgggagctgacgcagcgggggaattgcagcgggcgatttccctgcgaggcaagcaaggctttggacgcttaacgggaacggcgcagggcccacaggtgggacacgcgaaaagcccagagtcgagaggacggcaatcgtgcctggttcccctctggcccccgagtgagtgaagcacaggcagacacccggtaagcgctggtgaaccggggacc

SEQ ID NO: 548448 - DNA, 233 bp, Homo sapiens
gcagaatatagagacgagactcatattattctcatcagttctgcagtctcctgccctatggtcatcccactgaaggagtgtcaataatcatgtcctccagctgctgttgtcttagctcaacgccatgctgggtgccatcccactaggttcttgaccctttccaatttaactgtaattgctgttctcatatctgaactggaagctttatttatcactttctgtgcccatttcaa

SEQ ID NO: 548449 - DNA, 824 bp, Homo sapiens
  misc_feature (51)..(51): n is a, c, g, or t
  misc_feature (53)..(53): n is a, c, g, or t
  misc_feature (129)..(129): n is a, c, g, or t
  misc_feature (138)..(138): n is a, c, g, or t
  misc_feature (145)..(147): n is a, c, g, or t
  misc_feature (153)..(153): n is a, c, g, or t
  misc_feature (156)..(156): n is a, c, g, or t
  misc_feature (174)..(174): n is a, c, g, or t
  misc_feature (192)..(192): n is a, c, g, or t
  misc_feature (237)..(237): n is a, c, g, or t
  misc_feature (247)..(247): n is a, c, g, or t
  misc_feature (254)..(254): n is a, c, g, or t
  misc_feature (283)..(283): n is a, c, g, or t
  misc_feature (297)..(297): n is a, c, g, or t
  misc_feature (311)..(311): n is a, c, g, or t
  misc_feature (344)..(344): n is a, c, g, or t
  misc_feature (346)..(347): n is a, c, g, or t
  misc_feature (378)..(378): n is a, c, g, or t
  misc_feature (389)..(389): n is a, c, g, or t
  misc_feature (420)..(420): n is a, c, g, or t
  misc_feature (469)..(469): n is a, c, g, or t
  misc_feature (814)..(814): n is a, c, g, or t
cggcggcggcggcgggggactcggactcctgggacgccgacgctttctccntngaagacccagtgcggaaggtggggggcggcggcactgccggcggggaccgctgggaaggcgaggacgaggacgacnacctcaagnataactnnnatcacnatnatcatcaaaaaaaacagnaaccacaagtaaaaccanaggtaaaaatttcaaaaaaaaaaaaaatagcagagaagataaaanacaaaaaacngcaacanaagaaaaggcaagaagaaattaaaaacangttagaacaacccnaacaacctaaagtnctaacaccagaagaacaattagcagataaactncnnctaaacaaattacaggaagagtcagacctcnaattaccaaangaaacttttggtgttaataatccagtttatngaatacatcctatcaacccatcttcaacacatcactttacacagtttgnaaagttactaaaacataaaattacacaatatgaaaagtcactatattatgccagttttttggaagtcttagttcgagatgtgtgtatttcattggaaattgatgacttgaaaaaaattaccaattcactgactgtgctttgcagtgaaaaacagaagcaagaaaagcaaagcaaagccaaaaagaagaagaaaggtgtggttcctggcagggggattaaaagccaccatgaaagatgatctggcagattatggtggttatgatggaggatatgtacaagactatgaagacttcatgtgacattttatcttttcttggtgtcatctttatgttgcccacaatcccntgaacatgta

SEQ ID NO: 548450 - DNA, 217 bp, Homo sapiens
ttgtgctttgttgaggcattcagagaaattattgggcatgccactagtgatactgagggtcaggggggtagggggatgatttggttgagctagtgaggcttgttgttggtgaccattccatctgggagatgaatagttagagttgcagctgctgcttcatgtgaatggatagtctcgggggatgtatcgttctggataggggcacaaaatcccgggg

SEQ ID NO: 548451 - DNA, 661 bp, Homo sapiens
  misc_feature (380)..(380): n is a, c, g, or t
  misc_feature (446)..(446): n is a, c, g, or t
tagctctgtcacccagattggagtgcagtggtgcgatctcagcccactgcaacctctacctcccgggttcaagagattctcctgcctcagcctcccaggtagctgggattacaggtgcctgccaccatgcccagctaattttttgtatttttagtagagatggggtttcactgtgttggccaggctcgtcttgaactcctgacctcatgatccgcctgccttggcctcccaaagtgctgggattacaagcgtgagccaccatgcccggactagttttgttatttttatgcagctacaaggaggaaaatgatacatacctttcattactgaagatggaaagatgtgtaagttagataagagaaaaacagatcctgatgacnttccttccaacataaaccacctgtcagaagacggtgcagggagactcaggccaaagggaaggtatntgtcagcctctcctctgactaaaactcccctaggaggggcagaggtcagtgtaaaatatgtattttttgagacagagtctcacattgtcacccaggctggagtgcagtggtgcgatctcagctcactgcaacctttgcctcagcctccctagaagctgggattacagggcatgcaccaccatgcctggctaatttttgtatttttggtagagact

SEQ ID NO: 548452 - DNA, 541 bp, Homo sapiens
tggcagggcaactccaatcatagcagtcatataagataaagtacaaataaactattgtatcaggctcaacaggcagactgtccattagactgactatctattcactgagtcatctgcatttaagtgttctccatatcttttcatggcctgatagctcatatttaatatagtgctgaatgatattccattgtctggatgtgccacagtaatatttatccattcacctccagaagaacatcttggtagcttccaagttattgccagctatgaataaaactgttataaacatctgtgtgcaggtatacgtgtggacatgagttaaccacctcatttaggtaaatgtcctgtccttataacaatatgtattactctcttgttatatataaaactttcctcctcattttagctcctatatcactacaagatttccttagctataaacttgactcaactgaggttaaaattactgctattatggtataccatttctaagaagtataaaggataataagttatctgaacatcccttttaacagcatct

SEQ ID NO: 548453 - DNA, 104 bp, Homo sapiens
tgcccccaagtgtatataacttggcaaaaacaaaaccggccatcggttctgtgggtccagttcagcagcccccataaggtgtggccccggtcccagcatcctgt

SEQ ID NO: 548454 - DNA, 349 bp, Homo sapiens
ctgaggcttatagtactgtgtgatatggtctcagtggtggtgataaaagaactgaagctggtagtactgtgtgaggtggtcttggtgctggcaatcaccaaagtgaacctgggggtactgtgtaaggtggtcttggtggtggagatcgcaaaggtgaatctgggaggactggttgaggtggtcttggaagtggcaattgaagaagagaagccgggagtactgtgtgaagggatctcagtggtggtgcttgaagaagtgaagctgggagaactgtgtgaggtggtctcagtggtaacgatcaaagaagtgaagccaggagtactatgtgaggtcgatctggtcctggtga

SEQ ID NO: 548455 - DNA, 107 bp, Homo sapiens
ggtgactctccggatcttccggagagcttaccttccagcacgacatacttacttccatctacattccacttagaaagtctacaaatccaggagtctacttcatttat

SEQ ID NO: 548456 - DNA, 319 bp, Homo sapiens
atgttttccttagtcagttatcaaaacttcattgaggttggccatggtggttcacacctgcaatcctagcacttcgagaggccaaggcaggcggatcacctgaggtcaggagtttgagaccagactggccaacatggtgaaaccccgtctctatgaaaaacacaaaaattagccgggcatggtggcacacatctgtaatcccagctactcaggagctgaagcaggagaattgcttgaaccgggaggcagagtttgcagtgagccaagatcatgccactgcactccagcctgagagatagacgtgagactctgtctcaaa

SEQ ID NO: 548457 - DNA, 802 bp, Homo sapiens
tgggggggggggggggggggggggggggggcagcacaacaaaaaaaaaagcgcggcgggtcgtggggggcgaggacgacgcaggggggggggggggcgggggggggggggcggcgcctgaggagccgggggggtgatgaatgcaagaacacaccgccccaccacccaccgcacaccccacaaacaaccacccagcacggcgcgaggagatggggccgcgagacaagagtggcggccccaccgaacaagaaccacaagcggcagaccgcgccgcgatgcatgcagaacgccgccgcctgttgagggggccccaccagagcgggggcagcccacacaacaagcaccggcatcccaccgcggggggtggtcttgcgcataaaaaaagaccacagggggccgcggcacgccacacaaacaagcgcggcggtggtcttctccgcccacccaaacaaactgagaagtcgagagggggggcaagccatgtcacacccccgggcgagcgacgaggcagcacagcctgccggcagcggaactcgccccacggtcccggcgcccctgcgcttcgtcgtgttcccgcccggcggggggccgcacccctcgcgccagcagttgggtgggtgtgctcacctatgggcggggccccccccccgctcggcgttttgttgttttacggtcgcctcgcacgaccacctgcccttgttctcgcacacccccacccgcgcggtgtcttttttctctccgccgatacttgttcgcaccaaccccggctcggctactttcgacccgccgcgctgctttctttt

SEQ ID NO: 548458 - DNA, 171 bp, Homo sapiens
ggtccaggtcggggaactggctggaatcgaacaccggggtcttgatacccgccgcgcgctggttgtcgtagtcgttgaggatgcgcatggcaatcttgaacaggaacgccagggcgaacaggttgacgaacgcgagcatggtcatggtgatgtcggcgaaggcgggtaccg

SEQ ID NO: 548459 - DNA, 229 bp, Homo sapiens
ttcctttcctagagtcaccttttagatgataatggacactatagacttgctcattgttcaagactgatttgccccctcaacctgaaatccacctcttcttgtattcaaggctcttggggaattttcttttgacttttctttttaaggggcaggaggcattttaggttaatttgtaggtaaaaggattaggttttctctcccccctcttccctgggggcccagtaaataa

SEQ ID NO: 548460 - DNA, 358 bp, Homo sapiens
  misc_feature (209)..(209): n is a, c, g, or t
  misc_feature (229)..(229): n is a, c, g, or t
  misc_feature (280)..(280): n is a, c, g, or t
  misc_feature (314)..(314): n is a, c, g, or t
  misc_feature (331)..(331): n is a, c, g, or t
ataaaatatatgtaggtactagtctatttcatcatttactaccataaaatatatacaaatctatgataacaagttaaaatttatcaaaacatatacacactcaaaccacatggttccaccatttgcagtcataagaaatgtaaacagctgtaaagatacagtattaaatcatagctgtgtaaaattaaatatagtacgtatttaccagngtaacaatttttgtggccgncacctgtttgctattctggtgtactcaagtgtttgtgaatgtctgggaggnttgaggctacaatgagccatgattgcaccactgncactccagcctgtgcancagtttcaacagcctgtctcaaaaaaa

SEQ ID NO: 548461 - DNA, 387 bp, Homo sapiens
  misc_feature (121)..(121): n is a, c, g, or t
  misc_feature (351)..(351): n is a, c, g, or t
  misc_feature (361)..(361): n is a, c, g, or t
tgctcctctgcatgtttgtgaacagagggatgtcaaaggactgcactccagcctgggcgacagagcgaaactccatctcaaaataaataaataaataaataaataaataaataaataatanagctgtttttttgagacagacagggattgtcagaatgaataaaaaagcaagacttcctatatgctgcctacaagaaacacgctttaaacataaagacacaaatagcttaatctttttcttgtttagggaaaaaaaattgcagctcactgccagcgttcatttacttttacataaacacactctttgaggctgaggtaaatctggactggattttcaatgtggaaaattanaacataaaanctgttcttgggattattttcttaaac

SEQ ID NO: 548462 - DNA, 445 bp, Homo sapiens
agcggggtggtgggggctgtgagcctgtgtctagctgttcgggctgtgcagtggtccatcctcctctgcgcaacataagcccttgcgagaccgaggcggtcgtgagagggggtatagagtgataggcacgtgcgactcgagacggcctgcagtacactgggactgaacacacagagagaggtgcgctagtaccaatcacgacactatctgtaagtagaaaatagaagattaagtcatactagcagtcacatccaataccacggtaggcaacagaaatatacgacataagggtcagacaaaaaaaaaaataaaaaaataaatacaagaagaaaatacgaaacaaacaacaatgaaaatcactaccaaaaaaacagatcttaaacaaaaaaaacaactacataataataaccatacaaaaaaccaaacataaacatttagacataac

SEQ ID NO: 548463 - DNA, 900 bp, Homo sapiens
ggacgcgtgggtcgacccacgcgtccgggctccggcattgagcgcattggcccgttgagcctctaccacatggcctccagcattgagcgcatgggccagaccatggtagcgcattggctctggtgtggagcgcatgggtgccggatgggcttcggccttgttagcgcatggccgttcccatcgtaccgtgtgggccagaccattgagcgcatgggctctggcgtggtagcgcattgggcctcgtgccatcgagcgcatgggcctgagcatggagcgcattggtgcccgtcgaggtatgggagtcgtgagcctgtagcgcatgggccccgtgatggtatcggatggccaccggcctggagctgcatgggcgccaacatatctgcagcggatgggcctggagctgcatgggcgccaacaggctcgagcgcatggtgcctggagcgcatgggtgccattacagcctcgagcgcatgggccccggtccatgggccccggaccttgggcgctggcattgagcgcatgggcctggccatgggtggcggtggcaggtgccgtcgtttgaccgtgccagtcgagatggagcgtggcacgttcggaggaagcttcgcaggtcctttgggtggagctggaacgccatgcacctggggtgggccatgaacgcctgcagatatttgtgagaaatctgccaattcgattccacattggaagatgctaaaggaacaaattcacgagttggcggcacagtgctgtacgccgacatcaagattgagaaatagggaagtccaggggagtgtggcggttaaattccgacttgcaaagtggctaaaactgcgcataaaatggttaactaattgccgaaaaacgtccatgaaaaagcttaaacgccttttaatgtagaac

SEQ ID NO: 548464 - DNA, 102 bp, Homo sapiens
aagttcttctgccagtctggtaactaacagctccccaaaccctagccagctgctgacctccacctaggctcagacatccaactaactgccagacaaccccac

SEQ ID NO: 548465 - DNA, 235 bp, Homo sapiens
tttggcacaccgattaactaggacattgaccataacaacgcaggatcagatctatggccacatctcgctggccgtctgaaggccttggctgtgaaaagccgctggtgcagggcccggcggatagggaacagcacgactggcacagtgagggtcaccgcgagcagcacggccaggcgcacacagaggatgagcgggtccttctggctgtacatgtgcagcatctccgctttggaaa

SEQ ID NO: 548466 - DNA, 262 bp, Homo sapiens
cgtgtttcagttcactggagctccgtctcccgggtttaagtgattctcctgcgtcagcctcctgagtagctagggattacaggcacgtgccaccatacctggctaatttttgtatttctaggtaagacggggtttcaccatgttggccaggctggtctcgaactcctgacctcaggtgatccgcccgcctcagcctcccaaaagtgctgggattacaggcatgagccaccgagcccagcccgagaggatttgtttactgctt

SEQ ID NO: 548467 - DNA, 559 bp, Homo sapiens
tccctttgtgtacccatgggaaggggtctacagtgtatcatgagccaaccctcaaaggacccgtattacagtgccacgtgggaaaacgctacaggaagcatgacctatccacatctttccaaaatagacactaacatgtcatgtcccaaacattagcacggtgggggttgagctcgtgtgcagtaatcgaaatggggagaattggggcagcgcgtgagaagtgctaagctactgtgttttctcacttgagcccgggtaggctgtgtgggccctcactggggattctcagcagttacatgaaagtggtgctgataatctcttctctggtcccaattttagtcaggcagaaaagggtaacacatgagggtgctctgtgtgacttaattttggtcccagcggactaaatggcttatgttatatccccggtcagcggaggggagaatgtcattcatcaataaaccaaagccaatagcgggagaatggacgatctggttgacagtggttagggttaacatgctgtactatcctgaggaattgcgagatattgctgaggggaaca

SEQ ID NO: 548468 - DNA, 893 bp, Homo sapiens
  misc_feature (341)..(341): n is a, c, g, or t
ggcagacactgaccttcagtcgcctcgcgttccagcggccatggtggccctccaggaagttcttcgtggggggaaactggaacatgaacgggtggaaggcagagtctgggggagctcgatcgggccactctggagacgcggcccaaggtggcgggtcagcccgagcggaggtggtttgtggctccgccaccaattattgcactattatcagattctcgcccaggggcagaatgcgtagcatcccagaggattgctagtgggttgccgcagaggaattgtctcactcgagtgggattcatactggggccttgctattagggggagcatctagcaccttgtcnatgtatctaagagtcctgctggatccctcgtggtgtggttcttgggggcgctcaagacgatgacaggccattgtcttgggggggaggtcatgaatgaagctgttttgggcagaatctggtggccccattgtgtctggtcagcagcgtcacctcggcaagttaagtcgccctgtcgattgaggagagagtcggagcatgataggggaaagctgtcactcacgtgcagaaagggttgttttcgaggcatacaaaggtccttcgccaattcaactgtggaaggcgcatggaggaaaggtcgtactagcccgtagtgaggcgtgtgtgaggtcatggggtacttggcatgaacttggtatgagcccagacaggcgccgggaagtaccttgataaagttccggacgaatggtgtaatcccacgttgtttgaagcgggggcagaagcccgtataattttgggggtcctgttgctggggactcggatgagtgtccaccactttttggaggcaccttgggggggtcccaacaattggtttaggccaaggccaacttctcc

SEQ ID NO: 548469 - DNA, 613 bp, Homo sapiens
agcgggtagattggcgtgctgcaaaccagctctaggcggctctgggatcttcagcctgttaaacaagaaaacgaaaaaccccttccacacaacatacgagcattgaaagtgagaacaataaacacagccacaggagaatatgaatcatcatgtggaccgttaaacatggtggcttttgtttatataccaagagaggttgttgcttggttctgttccaaagatgaagaagcagcacaatgataagttatgacagttttattcaagtttggaaggaacttaagtttagaccaagcccttcattgatgtgtatcaggagttgctccgagatgaaacaatatgtgggctgccagagataagcaactgaagcattctgaaggcagtctagcctgtgtaaattaataaagcttcaggcgaatcaagcccgtaagtgggaagcgttcttttcccgaatgtgttccacattttgaatgggtaaaggacgaggaagcatgaaccatgttgtaattctacagcctttccagaggaaacctttccgctgttcatgacgtatatcgagccacttatgggtgatgaccaaacgttatgaacgcttttacacaggaaagaaggacca

SEQ ID NO: 548470 - DNA, 835 bp, Homo sapiens
tagcccggaaggtccagagggcaccacgcaacaaactcgcgtgaccccgagcacccacaaaatattgggtgaaggccataaaacgtggacgggggattaccaaacccgcgggatgggagacaaacagtgcacagtgttaaaaggcgacccgtgttccacccttaggggccccagcccagattgcggcccggtgggcacgaaaacgggcgcgaggtcaaatgcacaccacggggggaaaaacaaacgatctatttggaggaacaatatgagcccctctataggggcctcgccccgtggggtttttccccaaagggcgcaacttacaacgaaagctgtgtttcacgcctcccacagggggtacaccccacggggtcttaaaaaacgggagtctccaatcatccattgtgtcctgtggccataatcgtttatacagaaggcgcacgaataggcgtttcgcgctaatagatcggcggtgggaaccagcacattccaaccgtcgcccctgtgcttctgccgcacccaaagtttcttataactggcgcaacaaggttccaccgcaaccaggcctcttacaaccgggatgtgctgaccatgctctgtttgatattcgtcctgctagatctgcgatacgtttaaacagccgcggcagaaccccgcacaggtgacctaatcacccgttgcagcatggtcataggacgcaacaggcggcgtggaccgagaactccggagcgtacgagcattcatccggtcgaaatttcttctttaggagcagataaaaacacccttgatgattgtttcaacaaaaaaaacagcggcgttatttcccccaacaaac

SEQ ID NO: 548471 - DNA, 117 bp, Homo sapiens
gtttgattattgaggaagattttaattattgcactaggagtttttgctttagcgtgacttaacaaatttgtttgattgattatatgtctcgaaatctggccaatcaaagatgcagtc

SEQ ID NO: 548472 - DNA, 248 bp, Homo sapiens
ggggttgggggggtttttttttccccccggggaaaaaaaatgttttgttaaaaagggggggccccccccggggatttttgcctttggttttcccggtttggaaagaggggcccccccccggggggggggtcctatttttgaaccccccccccccccctccaaagggggcccttttggcccggccccccttgtttccccccctttcccctccctttttttttaaaaagggggggttttgggggggggta

SEQ ID NO: 548473 - DNA, 304 bp, Homo sapiens
atcaaagaccagacacatcgcagttgctcgcgaatcgtcacgttcggcaatcgccagcagtgccggcttcaagtgatttgacagaggcgcagggttgcgcaatattggccacggtttgccactgtatatcgcctggagagtagcccccccccagcaccggcaccgcgttatgggccgccgattacatccacctgtgatcaacggtcgcccttcacgggcagcccaggccagtgtttgcgcttcgtcatccaggtcgacccaatacaaacccgtggtctgtacctccggatcgacgccggttgca

SEQ ID NO: 548474 - DNA, 616 bp, Homo sapiens
tctctttgtgatagaaactgcaaatggacatttggagcgcttagaggtctaatgtggaaaaggaaatatcttcacataaaaactagacagaagaattctgagaaacttctttgtgatgtatgtgttcatctcacagatttgaaactttcttttgattgagcagtttggagggggctctttttgtagaatctgcaagtggacatttcgagtgctttgtggcctgtggtagaaaacgaaatatcttcacataaaatctagacagaagcaatctgagaaacttctttgtgatgtgcgcattcatctcccagagttgaacctttcttttgttggaccagctttaaaatactctttttgtagaatctgcaagtggacatttcgagcgtcttgagtctatggtggaaaatgaaatatcttcacataaaaactagacagaagcattctgagaaacttgtttgtgatgtgtttgttcatctcacagatttgaacctttcctttgattgagcagtttagaaacactctatttgtagaatctgcaagtggatatttggagcacgttggtggctacagtagaaagggaaattcttcacataaaatctacacagaaggcatctgagaa

SEQ ID NO: 548475 - DNA, 972 bp, Homo sapiens
cgcggccgatgcatacgggcagaggcttgtcctcgctgcgaccccttgaggcggtacacagctgcgcagagtccgccgagcagctcgcctgcgcaggccaggccgttacatgcgtatcgggtggtggacggccaccactgtgcgccggcgcgcatggtcggccatggcgggcccgcatgcgcgctcggtccagcctgcgactgcagctccagtgggcttcgcgatgtctgcgacagggaccccgtctccaccgggggaggcctgacaagcaaagctctggggtctgctcgcggggttccgccagagagacgcgggagctcgtggcaggggcgggaaacagaaggggcggactctgccatccctgttgggaagcccaggtcaagtgccccccctactgtctacaaagacccaaaccgacgttgggttaaggaccaccggcggtgccccgtcgagattcccgcttgtaaaccggaaagtcgtcccggtgaagaacgattccgtcgcgcaaggccccctggctttccggggaggggacagttgaccgcttcgccgaggcccaaagcttcgcggttccgagggaggtacctcgggcgccctgggccatcatgccgcccgtggcaagcgttataacgggaaccagcagaattcccccaggacgggactttgacatgggacgaacgcgggaagttggcttgccctggtcgttgcaaaccggacggggccaaagggctgggggcactgggggtctcaggcccgttgacgggtccatgacccgcatcaagccaagtcccccggggccaaggggagtcgtcggcccacagtgagtccttgcgttgggacctgcagtgtttgtgatcgcaactgtgttgatgcgtgtcagtcatctctggtacaccccagtcggctggcccttgcgacgcgaggacttgtttacggccagctgttgggcctgtctgcgcgccccgggaagcg

SEQ ID NO: 548476 - DNA, 896 bp, Homo sapiens
gcgctgttggctgctcgtgttgaatctagaaccgtaccagacatgggactggaggacgacgcaaaacgatgcttaccgaatccggcagatcctgaggaggaggaacgaggaagaggaggaattagtggatcccctaatcaacagtgagagagcactgcgagcagttggagaaatgtgtacgggcccgggagcggctaagctctgtgatgagcgtgtatcctctcgatcacatacagtaagaggatgcacggaggagtctcttgacttcttgtcatgcgaggtgagcattgcgtgggccacaaactctttagacaacttgtaaccataacatgtgtggagcttaattcaccccagatcttcatcatctgggcagtcagaatatttccttatggtgtttggatgtaccatttgttcttcttatctagtgtaagctgtaagattcacatgaacctcatgggtttgggttaggctggtagcttctatgtgatctcgcaagtgattccatctagactcaagaagttctatgatctgcccatggacggaaggccacgtggcttccggagactacgtgctgtgctccggggcggggtcaaacaggctgggccctcccgtagcatcgtgtaaagacacccctttggtgggggagcctagggcgggcgctcgaaaagaatgtgagtccagggcgtgggttacttgcttccgaccattgagagagtaagcccgaaaaagtgcgctcgacacgggggaggccgacaatttggaaaggggccgggttctcggtgttgtggaccgcatcctgggtctcaacagttgcccccctgcttccgccgcaaatgtggctcggtgagggaagtgtggcggaaaagagggtggttaagccgcaggtttggacgatg

SEQ ID NO: 548477 - DNA, 1912 bp, Homo sapiens
tctgctgcagacatcagtggttggggtaccgactctccttctggtggtgggttgcgatggtggtttgtctgtaatactagttgtacaaccttgtttgactccgttgtgatgtgggtgtgtgcttagtaacatgatctgacataggaggttgtggatggtttgtctacttatatactctctctgtgttgtttgtacaatacccatactatgggctggggggctctgcacgtgattgtttacgattgcattagttagtgaggggggcgaaaggcctacattatgatttataggggctgatgatctgcggtaagaggtatggttctccacttcacgtggttgtggtggggggagtgtgtgtttacggggagctgcagtatggtacgcgtgttcaggttgttgtgttgggtggtgttgttgctccttgcagtgtgtatcgcgttggcggtcggaggtgtgtgtggtggagtcgttggtttgttgtgatgtctttattacctgctttgtgtgtttgtactaagcgattaggtgataggattggtgggtggtgggtgttgattagtactcgccctccagtcaggtttgatgcctgcgtggtaatatttttgtttgttgagtgaggggggtcgatacaagaatagttgtggtagcgttaacagtatgtgagtggggctttgatatataaggggtgttgggtgggatgatattaatttgtgagttaaatggagttggttttgtgttaatagactgcggaggaagggtgttggtttagttgttctggttgtgtttgggcgtcactgatgtggttagatgggttgcatagtctagtagattagggtttgggtgtgggttggcgtgtagcataaaattgggggcgtcgctctcacgtttttgggcgtcactttttttgttttgtagattattatactatcttgtgcgtcgttgtgatgagtagtaggtcgtgtgcataatagtattgtttgccttatcatcatgttatgtatcagccgcgacaagtcacgtcgtctctgcgctgcgacgtctgccgctccgaccacttcttcgtcgtctgtctaccaacagggagggggcgaccaaaacagatgatgggcgtcacgctagcgcttcgcgcagtgcgtcacacacaccgctcgtcgctcgcgtcgctcgtcgtcgcgtgtgttgtttgatgagcacacgacatcgtcgtcatctggggtggtgttgtggggtcgctgcgtcatgtgcttcatcgttggtgcggcgccccagcacgcggccgacgtgtgtgtgtgagtgttgtgtgtggcgcgcgacacgcatcgcgcttttgtttctctctactgtgggggcgccgccgtgtggagagcgccgcgcgcactctgggggtcgtctctctctgtgggacacacagggagtatttgtctgtgagaggcgtgtctctctgtgtgtgtgtgctcctcccccgacacctgcgtgtgtgtggtgtctcgtgtgggcgcgtcgtcttagtgcgccgcgctgtgtgtgtgagtgtagtgtgtgtgtgtggtgcgcacactacagccacggcgcgtgggggtctatacacatctgtgttagtctgtctccacaccacacactgtgtggccacacaatcgtgtctgtgggagatgtgggagaggagtgttggtgtcaccacatctctccatctctcagaatatatcatccacacacacagaggccccgctgatagtgtatattctccgcgcgcactccacatatactcctaattgttgtgcttgtgtggagatgatgttggacgagttctctgttgttgtgaacaacgcggttggggatttgtgtgctcctcagggttctcctcaccccctgttttattgcttgttgggggagtgtgaataaaaataataaataa

SEQ ID NO: 548478 - DNA, 1184 bp, Homo sapiens
gaggagctggctggccgggctggctggctggccggcgggcggctgatggctggctggcgtgaggcctggtggcgactgacgcccgctgcgtgcggctgagcgcctgagcgggcacaggcgctgctggccgacgtggacacgctgctgttcgactgctgactggcgtgcttgtggctgcgtgggatgaccgcctgtgccttggctgctgcccagaggccctgcgggcgctgcggagccctgcggtaagctgcctgggcttcatcaccaacaacagcagcaatgaccctgttgctgccctactgcctgaggaatgctcgcggctgcctagggcttcgggcgtgtccctgctggggggccctggctgccaaggccttgtgcagggtctttcgggcaacgggcccttacttggtacctggcggctccttaacctttgctgcccagtcgtgccttgtgcctggtcggccccctcgatgtccccatatggccgcttaacgttgactgggggccaggcccccaaggtccccttgggcccgtcgggcaacgcttgagaggggcccgtggggcgcggtttccggcccgaggccggtatgcgcgtctttggggggccccacggatgtgcccaaccttgtgcaggcgggccagagtgcggtgttccccgtgggcggacgcttgggcctttgtcagaccggcggccgcggctttggtaggccccgccggaacgcggttgcccgtcgtcgtgcgttgggttgggctagggagcttcttggaacgcgcgggcaagcgtttcgagcgcttaacctgtttgaacagggctttgagcccatagagggggccccgatggccgcctaaccctttgcgaacgcatgccccccgggtgcattgcccttaggataccgcttttgaggggccactctaagaccgattttgggcaacctatagcgccggtggctcttttccgcggcgccctttctagggctagacccgggggccccggcgcttttccgacctttcaggcccaggggcggttacgccggggggcgtcttggcctccttgggggttccagtgtatcgggcccctgtatgcgacatagattttgcggcccgcgtcgcccatagaccgggcgccaagtagaggcgccccgggaacaatttcaatttacgtgcgtgagactcgtcccccgcga

SEQ ID NO: 548479 - DNA, 92 bp, Homo sapiens
aaatgaaggtgtattcattatgggcaaaaccattgaatttcacatgggtggtaatatggagttaaaggcggaaaacagtatcatcctaaatg

SEQ ID NO: 548480 - DNA, 395 bp, Homo sapiens
gattatgtgtaacatgctagctacttaaattacttataaaaaacatttattttgagatggagtatagtctgttgcccacgctggagtagagggcatgatcttggctcatcacaacctccgcctcccaggcacaagcgattctcctgcctcagtctcctgagtagctagactacaggcacatgccaccatgcccagccaactcttgtatctttagtagagacggggtttcactgtgttggccaggctggtcttgaacccccgacctcgtgatccacccacatcagcctcccaaagtgctggcattacaggtgtgagccaccatgcctggcccttttttttttttttctgaaatgaagtctcgctttgcccccctttttgaaaaagctttgggggcg

SEQ ID NO: 548481 - DNA, 111 bp, Homo sapiens
gtgtggtgttctagaggatccctgtgtggattttccccgttactggtgggcagtgatacaggaatgttgggcaccatggacacaggtctggccagctggatcgagagaagg

SEQ ID NO: 548482 - DNA, 444 bp, Homo sapiens
  misc_feature (404)..(404): n is a, c, g, or t
  misc_feature (416)..(416): n is a, c, g, or t
  misc_feature (439)..(439): n is a, c, g, or t
tttttttttgagacagagtcttgctttctgtcacccagcctggagtgcagtggcccaacctcagctaactgcaacttctgtctccagggctcaagcaatccacccacctcagcttcccaagtagctgggactacaggcccatgccaccatgcccagctaatttttaaatttttaaaattttgtagagacgagatctcactatattgcccgggtggtctcaaactcttggactcgagtgatccacccacctcagcctccccaagtgctagggattgctagtgtgagccaccctgcccagccaactatagttttctaaaaccaacaaattctacttattttccagcctaaggaaaggttattggggctgttgtgaatttccatcatatctgggtgttcttttgggnagtaggataggnggtaaatataggtttaaaaaatntgtag

SEQ ID NO: 548483 - DNA, 890 bp, Homo sapiens
  misc_feature (27)..(27): n is a, c, g, or t
  misc_feature (145)..(145): n is a, c, g, or t
  misc_feature (161)..(161): n is a, c, g, or t
  misc_feature (163)..(163): n is a, c, g, or t
  misc_feature (175)..(175): n is a, c, g, or t
  misc_feature (177)..(177): n is a, c, g, or t
  misc_feature (201)..(201): n is a, c, g, or t
  misc_feature (207)..(207): n is a, c, g, or t
  misc_feature (213)..(213): n is a, c, g, or t
  misc_feature (241)..(241): n is a, c, g, or t
  misc_feature (285)..(285): n is a, c, g, or t
  misc_feature (294)..(294): n is a, c, g, or t
  misc_feature (324)..(324): n is a, c, g, or t
  misc_feature (335)..(335): n is a, c, g, or t
  misc_feature (365)..(365): n is a, c, g, or t
  misc_feature (385)..(385): n is a, c, g, or t
  misc_feature (392)..(392): n is a, c, g, or t
  misc_feature (394)..(394): n is a, c, g, or t
  misc_feature (398)..(398): n is a, c, g, or t
  misc_feature (408)..(408): n is a, c, g, or t
  misc_feature (457)..(457): n is a, c, g, or t
  misc_feature (464)..(464): n is a, c, g, or t
  misc_feature (466)..(466): n is a, c, g, or t
  misc_feature (471)..(471): n is a, c, g, or t
  misc_feature (499)..(499): n is a, c, g, or t
  misc_feature (503)..(504): n is a, c, g, or t
  misc_feature (506)..(506): n is a, c, g, or t
  misc_feature (527)..(527): n is a, c, g, or t
  misc_feature (551)..(551): n is a, c, g, or t
  misc_feature (573)..(573): n is a, c, g, or t
  misc_feature (668)..(668): n is a, c, g, or t
  misc_feature (686)..(686): n is a, c, g, or t
  misc_feature (703)..(703): n is a, c, g, or t
  misc_feature (739)..(739): n is a, c, g, or t
  misc_feature (774)..(774): n is a, c, g, or t
  misc_feature (789)..(789): n is a, c, g, or t
  misc_feature (854)..(854): n is a, c, g, or t
gtgtgtcaaaaaaaaaataagggaggnctttggttaatcccctccccccaacaagatgacaaaaggaggaatgcatgtaaacaaaataacaaaaaagaccatggagggcctgaatatacagcctccctggagggacaaggaaagnggagcaagcactactntnggctaggcccancnccccccaagcaaaaacacataacncccctncccctncccccacccccacccccactgctaaggnagtaagccaggacttccccaaagaactagctctgaagcccagancctcatggntccctctagaaggggttgcattcttcagcntgcatgaagtngtaaataaagaagaggacgatcacaaagancaggaaaagcagcagctggncccagancngganctggcgatcnttgcccagcccagccccaggagcacggtttttaggccggatggtacggngggtgancnatgangaggaagatgatgaggaggacataaaanatgnngnggcggaagtaggataataggncatgtccagggagctcctggaggntgaaacagggcggtagtccgtnacgctctggtaggcactgtcccggccgtacatggggcgttccctatccttgcactcctcttcagaagaagacaaaagagcgtcatcatgcacctngtgatggaaagcgtcacnttcctgggaatgaagtnacttactggcggacagccctggacgggccggcagantcgggctccccataagtcctggtggtgaagtagcnctcttcatagtagtngtcattttagcccttgctctggtagagtaaagcgtcctctttcttgggaagatcatacatatctncatcccctctagtcgaattcaagtcagaaaagctat

SEQ ID NO: 548484 - DNA, 141 bp, Homo sapiens
ttttggggcccccttgggttttttttttgggggggggaagtttaaagtaaaaagtttttaaaaaaggaatttttaaagggaaaaaactggcccaaaaattggtccaaaaattttgagcccccttaaaaaggtttaatgaga

SEQ ID NO: 548485 - DNA, 158 bp, Homo sapiens
gtttcatagacttgttcttagatataaggttcgtgtaaatgactttacattttgtgttgtccttcgtttcgttagagggaaacaaaaagtccggtaagtggacggaggacagtcatcaccggacataatctctagtctctcaccaacacgagtccgac

SEQ ID NO: 548486 - DNA, 212 bp, Homo sapiens
accgctctcgtgaactccgtgaactacttaatgtttgtattgcataatcaattactgatactagtaatactgtccaccaagtattattatgtttgaacctgctgacagtaaaatacttatagcttctgcagctaacatttattaacatctactatgtcctatttactgtgctagaagcttaacagggattatattatataaccagtctcacg

SEQ ID NO: 548487 - DNA, 265 bp, Homo sapiens
aggggataagctgaaagggcttagcagctcatggaggcctgatttgtcctactctggagcacgcatcgggcggtgaaactgagtgactgtagtactatctgtgcctatgatggtaataaaacttacaagatgtctaatttttttttaagtaggaccaaaggaaaacaagatttagatagtctgacttagcttttgaacaacagacattgcaagtcaaaattgttgtcaaaagcaaagtcagactatctaaatcttgttttccttt

SEQ ID NO: 548488 - DNA, 1125 bp, Homo sapiens
  misc_feature (1125)..(1125): n is a, c, g, or t
aactaacagctatgtacgaggctgggatgttgctcgcactctgaacattccgccgactccgacgatcgcgtatctctgccggtcgcaatggaagaagagatcgccgcgctggtcattgacaatggctccggcatgtgcaaagctggttattgctgtgggactgactgcatcccctgatgcctgtgatttcctatccagtctgtacgtgtgctgccccatgaccaccatgtggctgtcagtgtgtgtggcatggtgccatgaatgtgactccatactgtgtgtgctgactgatgtgcccatgatgcaatgcgtggcatcctgaccctgaatgtaccccatttgagcatggcatctgtcaccaactgggactgacatggacgaagatcttggcaccacaccttctacaacgagctgcgcgtggccccggaggagcacccagtgctgctgaccgaggcccccctgaaccccaatggccaacagagagaagatgactacagataatgtatgaagacctatcaacaccaccggccatgtacgtggccatccatggccgtgctgtccctctacgcctctgaggacagcaccactggcatagatacatggactctggagacggggtcacccacacggtgcccatctacgagggctacagccctccccacacgcaatcctgcgtctggacctggctggccgggacctgaccgaactacctcatgaagatcctcactgatgcgaggtacgatgctttcacaaccacggaccgagcgggaacatctgtgcgcgacattcaggagcagctgtgctacgtcgccctgtacttcgagcagtgagatggccacggacgaatcttcctctactctgggaggagacgctaacgaagatgccctgataggcaatggacactcaagcatattgtgccaatgtagaccggtattccgggagtgatccgggaacggaagcctggttcacaaaacatatcaattccctgtgggtatatgtgtaactacgctaggcggcgacatcacagaaagaacacaccattaatgtatccattcactgtatagttgtccagttggacattcctgataacaacttgaaatcacacgacagtggtacgtagtcagn

SEQ ID NO: 548489 - DNA, 219 bp, Homo sapiens
ttttattatctttcgctaatttcactagaattgatgcagtgggaagagacgttaaatgtgtgtatggctcggccattagaaagtagagctacagagccctgtctgcgtgggtgccccctttactctattgcagccatcatggacgtaaaatgtcatcccaaagtgaatcatcagtgtacacctgtctgatcatattatataagaatatctggcctcata

SEQ ID NO: 548490 - DNA, 658 bp, Homo sapiens
taaaggcaacagactcttgattaaagggggttataaaatacatcaaaatcaagtcccgggctgtggggaatacccaagggagacaaaaaagtcctgccagggcagtcttcaaacaagtctgaggggccgggcaggggccataaggaaagcagttacggggacacgaaggcagctcctattcccccaggaggggcaagaggagcaggtgcgggctgtcccgggggtgaccacctcggtgctgtgcaaggctgggaaaggctgggggcgagcagctgaagaatcagctcagcaggcctggcgcctccccgcgtggacaccaggcaggtccaggggcctcggggtaaagccctcagggccaccgggagggggtggcggagggttaaaactaaccatgttgaccgcaaataacaggtctccgtaacagaaaggggtgccgaggagcacagacgccaggggtccagaataacccttcaggggaaacacacacgcaagaccacaatacgagcacaaaagacggctgctcggttgacccccctctaagaaaacctgggggggcacatgtgaggcctctacaggtggggaacgagggccccgtgaaacaccagttctagacatcagccagaagccgaggcccccctggagactcacccgcgagtag

SEQ ID NO: 548491 - DNA, 926 bp, Homo sapiens
ctgtaatcccagcactttgggaggctgaggcgggtggatcacctgaggtcgggagtttgagaccagcctggccaacatggtgaaaccccatcgctactaaaaatataaaaaattagctgggcatggtggcgcacgcctgtagttccagctactcaggaggctgaggcaggagaatcgcttgaacccgggaggtggaggttgcagtgagctgagatcgcaccattgcactccagcctgggcaacaagagcgaaactctgtctcaaaaaaaaaaaaaagagggggggtggataacttgaggtcagggttggaaatcagcctgaccaactgggtgaaaccctatctcttacttaaaaatattagaattagccaggcagtggtagcgcacgcctgtaatcccatcttcctggggaggctgaggcaggagaatcgctagaaccggggaggtgggaggttacagtagccgagatcgcgccacggtttccagccggggcaacaaaagcgaaactctgtctcaaaaaacgaaaaacaaagaaaaaaaagcgcgtgaccttatgaggctctccggtatggttacttagggacctataaagagtttgatttaaacattatgcagggcccctagtgtgggatttttcaaaaagcaaacggtgggtggtatccctcagtgttggttgtgcaccagcccagcctcaacagcacctatgtgtaaacccgtgctctttctgtctcgctagaacagactttggtggccccttaccggggtggtacccggggacgcgcgtggttaaacgggtgaaccacaagaagccttgatgacaagaggggtttttccacgctatgggcgaccattgccaaatgacccggggctcccggaaatattctcagggcgattccactaaaaaacacggggtcttgcgggggagac

SEQ ID NO: 548492 - DNA, 135 bp, Homo sapiens
gccgcgctacttctgctctgcgtcgaccttctgctcttctgtgaggcagtggttctcaaacttttggtcgcatcagaattaaccaagggagggtattaaaatgcgaccaaaagtttgagaaccactgcctcacag

SEQ ID NO: 548493 - DNA, 145 bp, Homo sapiens
  misc_feature (27)..(27): n is a, c, g, or t
  misc_feature (41)..(42): n is a, c, g, or t
  misc_feature (45)..(45): n is a, c, g, or t
  misc_feature (64)..(64): n is a, c, g, or t
  misc_feature (91)..(91): n is a, c, g, or t
ccacgcagcacacgaggacggataacntagagatcttcaannaangcccaagtctcttggtttnctcaaaggatgactcttcagaagcttngagggaaatgactctcatttccgtggctgaggagccatggccccgggccgaatg

SEQ ID NO: 548494 - DNA, 417 bp, Homo sapiens
  misc_feature (396)..(396): n is a, c, g, or t
aaatcgagctcgtacccctcacggattactcaatgtccctttgtcattgtcgccgtgacttgaaaattaccgaaggttcaactgtcagcgtcaactatgtttcaggttcaagtggtgaccgcattgagaaaatgttcctttcaaaacgtagtctcaaggcaggcagccgtgtcttgattgtggatgacttcttgaaaggcggaggaactgtcaacgggatgattagtctcttgcgggagttcgattcagaactggcaggtgttgcagtctttgcggacaatgcccaagaagaacgtgaaaagcagtttgactacaagtcactcttgaaggtcaccaatattgatgtcaagaatcaaaccatcgatgttgaggttggaaatatctttgacgaagatnaataagagatagaactaaagg

SEQ ID NO: 548495 - DNA, 882 bp, Homo sapiens
gcgcaacaatagtcgggctggacctattgtacaggaacctggtcaccgtggccaagggtagctaaaaggtgtacaccaggtgtattcccgactcctgtttcgggccctctccaccgcggtgcccaataacgtgcctaacaccacccaaaggggtcccctgcaacacccgagggtgcccccgcttacaaacagcgcggacgaacgctttcttaaacacccgcccccgcttggagcatattcgcccctgataatattggcccgcctctcctcctccggcaccattccaccagagacccagcttgtgtttaatccacaaaaaccacgggcgtcgttctcaagaatccgcccctagcgaactcccccagagagtgggggcgcaaattatacgcgcccgtgacatttcccacgccagttcatgtatggtgctctcccccccccagtgatgggaaagtatatccccctctggtacaaacatggcattagaaaaagatgtgttatccatctctgcgcgataacggtacaagagacccttctcctcctggtacatttgcgggatatgcagttcagattataagtcagccgtggcatgatctggtgtctaaaggagtggctttacggcagggaacccccttagcgagcccccatggaaaagtatagggtgtggcccaaccgcagaggaatgtaattaagtcgcagtcattgtccgcctctgaacagtgagtattctcaaaccatgccgctcaaccctcgagtcccgacgccgaccagtgggtgaagaaccacacgcacaacgggacccgcactttaaattttgttaaaaccctgattttttagaatccgtccacccaaaaagcgttgtaaaccccccaaaaaaaacaaaca

SEQ ID NO: 548496 - DNA, 168 bp, Homo sapiens
gatggtacgtacatatctttcaaaccctttctacaccacaaaacactttccttcctttgtcacaatgagtgcacagtgaagtagaatgttagttctcgcagctaacaatatgttttgtcagctgaaaacattctacctcatcctttttcttttttttccgttttgggg

SEQ ID NO: 548497 - DNA, 110 bp, Homo sapiens
attaaaatcccagattgcgtggacccagaagatgtggatgttgttgatcctgatgaaaggtccataatgacctatgtggacacagttttctgcaagaattccaaagatgc

SEQ ID NO: 548498 - DNA, 152 bp, Homo sapiens
  misc_feature (127)..(127): n is a, c, g, or t
  misc_feature (143)..(143): n is a, c, g, or t
tagcaaatgtggattacaagcaaatacaacaagtcgtgcccctccaacccaccacaaacttctaaacgccactcagcagatgcataggattcgttacacgcaacgattgaaataaaaataaaagctncaaatgcaatacccanactagccta

SEQ ID NO: 548499 - DNA, 206 bp, Homo sapiens
taccggtgtaatcgatgccacccgggcatggtggtcactcctgtaatcccagcattttgggagactaaggcaggcagattgcatgagctcaggagttcaagaccagcctgggcgaggtgtgcagatcctggctgtacaaaaaataaaaaattagcccggcgaggagtgcacacctgtagtcccagttactcagaaggctcaggtag

SEQ ID NO: 548500 - DNA, 233 bp, Homo sapiens
  misc_feature (3)..(3): n is a, c, g, or t
  misc_feature (26)..(26): n is a, c, g, or t
  misc_feature (44)..(44): n is a, c, g, or t
  misc_feature (80)..(80): n is a, c, g, or t
ggnggctgaggcaggcagatcatttnaagtaattcaagaccagnctggccaacatgatgaaaccccaagaccactaaaantacaaaaattagccgggcgtggtggcacatgcctgtaaccccagctcctcaggaggctaaagcaggaaaattgcttgaacccaggaaacagaggttgcagtgagccgagattgtgctactccactccagcctgggagagactccatctgaaac

SEQ ID NO: 548501 - DNA, 300 bp, Homo sapiens
  misc_feature (101)..(101): n is a, c, g, or t
  misc_feature (147)..(147): n is a, c, g, or t
  misc_feature (241)..(241): n is a, c, g, or t
  misc_feature (250)..(250): n is a, c, g, or t
gattagaggatcccctattttacgcaggcatatgggcacaaagctattgaactatggactgccactgatgtcagctatacccaggctcagaccactgcaanctatgggcaagacgctatgcaacttcttatggacagctcccactgnttatactactccaactggcccccaggcatacagccagcctgtccaggggtatggcactggtgcttaatgataccaccactgctacagtcaccancaaccaggnctcctattcagctcagtctggcttattggactcaagcctgcgaaaaagtg

SEQ ID NO: 548502 - DNA, 174 bp, Homo sapiens
  misc_feature (142)..(142): n is a, c, g, or t
tactgcgataggtgcgagagagcgaggccccaagatcagctgtccggccccgacgtcaccgccgtttgtcaattagagcgtcgcgatgggccagatcactcgactgagagtactgtagcgcccgcttccaggaggttcgagnggaggccgagtgcccagagccagaggttagtt

SEQ ID NO: 548503 - DNA, 361 bp, Homo sapiens
  misc_feature (9)..(9): n is a, c, g, or t
  misc_feature (105)..(105): n is a, c, g, or t
  misc_feature (131)..(131): n is a, c, g, or t
  misc_feature (137)..(137): n is a, c, g, or t
  misc_feature (158)..(158): n is a, c, g, or t
  misc_feature (351)..(351): n is a, c, g, or t
tcgggtaancgggtacctacctttattaaatgattttcctgttacacctgtatagtagtccctatggcaccccccacccccatgccctttcgtgcccactcccgnctcccaccgcgccccccagtgtgtantaaagnggcatttcgcccagcttgtancgtagcttgcccactcagtgaaaataataacattattatgagaaagtggacttaaccgaaatggaaccaactgacattctatcgtgttgtacatagaatgatgaagggttccactgttgttgtatgtcttaaatttatttaaaactttttttaatccagatgtagactatattctaaaaaataaaaaagcaanattgtcaact

SEQ ID NO: 548504 - DNA, 116 bp, Homo sapiens
cacgaggtcatgttcgagatgatgcagtgcatcgggcggctccaggatcccacccccagttcaggtgaccctgtagagcatgacccagcgtcgacacacatatccacacgccctgt

SEQ ID NO: 548505 - DNA, 221 bp, Homo sapiens
gtggctgacctgaggatccagcagcggacaggtcgccccaagaccagccatctcacacacaggacaggcaaagctctaggatcttcaaggcccaggagccacccttcctcctccccagaaagcctctcctctcctaggtgcacagctgtgaaggtgggacctggaaggtggaggggccggtgctctgttagttcattcttgcactgctataaagacatacc

SEQ ID NO: 548506 - DNA, 240 bp, Homo sapiens
cagctttgtacacccggcactctttaagggtacatgaaagataggccctataacttacccaagctgatgtctgaagtacccgtttggggggtgactcggaattaggaattgccgtcagataacacttggggcatcattctcactcaccctttgcacttggagtttttgttttactagtttccttaacctgtcacagctcccttaacttacgacatgtacttgcctagaaggacaggctgc

SEQ ID NO: 548507 - DNA, 697 bp, Homo sapiens
  misc_feature (16)..(16): n is a, c, g, or t
atttccaaagattccntgcaggacatcaagcagaaagtacaagataaatacagatactgtgagagcagacggagagtcctgctgcagcatgtacacgaaggctatgacaaagacctgtgggagtacatcgaggattgagattgatctccgcaccacagactctcggagagaagctccagccactagagcactgatgcaatgaccagagcagccctgaccagctgcctcctgcctggccaagccgccctgcgttgcatcacttcccctgaacagcagaaattatatttaaattagaatattacaaaataaaatattacatgctcaccagtattgtcagcagcgcaagactgagaaatccaacaaaaaggcaaaaatctcttccttttgcttgcatcgtaagatcttccccctcctcggaaacaaacgttttcctcctcctcagttacgtttgtggacgtgttctgtttgaatttattttaaatacacttttttttttggtttgttttgtgtgtgtgtgcgcgcgcgtgtgtgtgtgtggaaaatggactttggttttttttctcaaaaatggctttaataattttgaccatgtctggcaagctctgtgttgtttgggttgctgaatgttgattggttgattgttaagaaggcttctttttggcttcgtgaagaaaaaaaaagaaaaccccaaaaaaaa

SEQ ID NO: 548508 - DNA, 251 bp, Homo sapiens
gtgataatcacaagatggctgccctggaggccaaaatctgtcatcaaattgagtattattttggcgacttcaatttgccacgggacaagtttctcaaggcacagataacactggatgaaggctgggtacctttggagataatcataaaattcaacaggttgaccgtctcacaacagactttcatgtcattgtggagcatttagcaaatccaggcagaactcatggcaatcagtcagatcaactcaaatcag

SEQ ID NO: 548509 - DNA, 439 bp, Homo sapiens
gaggatccccgctgacgactcctatctttaggctgtattgggtattcacatccaatggtgagtgcaattaccccgatcattacagctcgaccgactggagtgagctagcgactcggtttccaaaaggatggcgagatcatgactactaccaatggctgcaccgttcacatatctcgaaggttttcgaaccggatgatccctacagcgactatgtcgagtacgaggacgaagaagctgggtgcctggaacagcggctttcgggattgcttgctcgcctgcagaccaaaagcgggcaaacagttgaggaattcaggcactggatgtttagtgcagtttgggtagacgtccctgcgctacgcattgttgagagctgattggcgggtgttaatgatcattatgaaaaagggcgccatgggcgcccttattcattacgctctca

SEQ ID NO: 548510 - DNA, 209 bp, Homo sapiens
attcactggttgatatgaagaatttggtgccaccttttgtcttcctaaagcagtatctattgattaacagttctaggtttacaggccagtgcataatacacactgtgggcctatacgacaggggagtgtagaatgagacatcaggtaagaataagtcgtaatggatgctcgggcctaaatactgtaggatgatgtggtatgatctagtg

SEQ ID NO: 548511 - DNA, 246 bp, Homo sapiens
atttttttccagggttcttttttccttctggggttccttttggaaaggttttaatgccaagccgtggttccaatttgtccttttatttttggcagcaccccgtttgggatttaactaattcagggaaattttcaatttccggccttttaaaaaacccttaaaactaaggtcaaattgagtctttaaaaaaacggttatgctttcctttccttttttggacaaataaaaaatagttttaatagccga

SEQ ID NO: 548512 - DNA, 532 bp, Homo sapiens
  misc_feature (61)..(61): n is a, c, g, or t
  misc_feature (111)..(111): n is a, c, g, or t
  misc_feature (462)..(462): n is a, c, g, or t
  misc_feature (528)..(528): n is a, c, g, or t
gtaaaaagtaacccccctaagtagcctttgccaaatttccccagccctgattccccccacntccattaaagttgatttaagccagaccatgtaaagtccagaagtttccancatatcccccctgtatccaaaaccattttaatagggaaacccctagtaaaatttatgaatgccctccattttgggcctttccccagacctatttgagttattccaagatagcccataatgttttaagtagcgacattcttttattaccttcctaattgcccttgtaaaatgcattgttatggcccggcacggtgggtggatcacaaggtcaggagttcaagaacagcctggccaagatggtgaaatgctgtctctactgaaaatacaaaaattagccaggtgtggtggcaggtgcctgtaatcccagctactcgggaggctgaggcagagaattgcttgaacccggccggnggaggttgcagtgagctgagatcgcaccactgcactccaccctgggcgacagagtgagactataanaaaa

SEQ ID NO: 548513 - DNA, 698 bp, Homo sapiens
gaactcccagttgccccagttccacttcaccaacagagactgcgactcgctcaaggggctctgccgcatcatgggcaacggcttcgcgggctgcatgctgttcccaccgacatctccccctgtgaggtgcagcgtgctcatgccccctgtactcgtccaagaagaagatcttcattgggcctcatcccctaagaccagagcggcttcgtcaagttgccatcccggagggtcatcaccaacccgaaagcaaggcagtgggacctggtgggtgtcaacttcatggccccaggtccagatcgtcaacaaaacaaagttttcttgggacaatggacgtggtggtcatgggagttgggaatggaggccccaaggcctttgagccccaagcaggtcagggtccaaaggcaggttgcgatgccattcccaagcgttctcactgttgaacacccaaggggggacggatccttggaggaaccgaaggccagatgggcccaatgggaaacgccttcggtcacatttgccaggattccagttccccgggaaagaaagggtttgttaggacacaaacctattagttgccctgattgtcaccgggaactccggggccttgtgtgtccgaggtttccaactttcagcaatggcgacctggtgagaacacctggaaggaggccttgttgccgggatccaatggaacaaactgg

SEQ ID NO: 548514 - DNA, 842 bp, Homo sapiens
gcggcgcgagaccctgcccttatatctttaatgtgacggaatgtattgagataacagtgggcgattgatgtgaaagtagccactggaattaatgagtaactatggagcatttcttgatactctaccgttttctttgaatgattctatttttgattgaaaatcatgacaatcaaataataacccagcaacaaaccgtaactgtgcgcccttccataaaggaactcctggtgatgccgtagatgaatccaagatgctcaataaaccgccaatcccatcgcatgcttgatgactgacctgtatgcactctgtgtgcagtaatcctcacagctggatcctgatggagtattgagtcgaaggacttgctggtgctgaatcgttcatcgtaaacatcattttggtagttgctactgcgagggacaacgacctagcacgacgtgccatacacgattgatgctggatgataactcctgcgggctggtcgtttaattatgtggccaccagtagctggggaccactggtccgaaaggtttcatcaagggacatgcacgccgatgaatacatacaacacaacccaaaaaagaatccacgctaagaaaagtcctgaatcccagtaagcccagtcccgataaacgaggcatgcgcccaggtcctggaggaatcgaccatacgccagggcaatctgcccacagccaaggctgcgaaccggtgcacacacagggagccaggcaccagcagccaggctaccagagcaagcaaccccagaccgccaggacatttcccccaacgagcactgggtccccatggaccgttacaacccatcagcgccgactacatggggcgtc

SEQ ID NO: 548515 - DNA, 339 bp, Homo sapiens
  misc_feature (204)..(204): n is a, c, g, or t
  misc_feature (209)..(209): n is a, c, g, or t
  misc_feature (223)..(225): n is a, c, g, or t
  misc_feature (228)..(228): n is a, c, g, or t
  misc_feature (231)..(233): n is a, c, g, or t
caacgatggtcctcagctgagtccagggagcagaggcctctctcgttccccggctcaacctccggccgttggcgttgggcagatacaggcatcagcttctctagctctgcaggacttatgcttctgtctagattcctcggctttttaggcacagtttgcttgctttaagaaagcgttcttgttctctagcttcctgtgctctcnagggncctcagcctttctnnnggnctnnnttttcctcctgcctctgacatcggtatcctcctcagcactcatggcactgtctaggggcttctcaaagccatgagagctgaggaccatcgttggggtaccgagctc

SEQ ID NO: 548516 - DNA, 286 bp, Homo sapiens
gtgggaggtgattggctcatgggggcagacttcccctttgctcttctcataatagtgagtgagttctcacaagatctgggtatctgataagtgtatagctcttccccactctctctctctgtctcctgttctgccatggtaagacatgctttcttccctgcgccttctgacgtgattataagttcctgaggtctcccagccatgcttcctgtaaagcgtgtggactcttgaggcaattaaactacttttcttcataaattactcagtctcaggagtcttagagcgt

SEQ ID NO: 548517 - DNA, 709 bp, Homo sapiens
tggtatccgagttaactctaaaaccaacacacagaggtgctaggaaaagacaattagaaactatttgtcttattaactggtgactaatattaacagaacttgagccaagagtaaagaattcagaaggcctgtcaggtgaagtcttcagcctccgcacagcgcagggtcccaggctatcgtccacgcgcgcccgtgggtaggtgggtccaggctcggaagaggcctcccgacggaacagccagtctctctcagaaacatccgcttccaaggtagggagcctttgtgctgcgtttctcatccttaaacttagatcaacattttgtgggttttctacgtcagtgtatcttgggcatacgcttacgacctggtcccctcatcctctatctgtcaaccccccggcgccccgaagactgtctcgtagtgaagtgttcgtgctgctcctcctggggaggtggagcggccgcgggtcccgtcccccggcgagcatctgctcggttcatgcttccttggtgtcccaggtgtggggccccgtggagggcgcccgtcagctgagtaagcacaccggcatgaacgtcaggtccattcctcgaaggtcggagccctcactctgccctgtcctgggagctggctagagggcgaacgcaccgaactcactttctagagccctgtctgttctagctcctatctgaccttgtgtgttaatacgtac

SEQ ID NO: 548518 - DNA, 486 bp, Homo sapiens
cttcgcagcttcctggagctatacaccaccatgcatgtggactggctggctggcttcctgtacctcacagagcagcagtgccgtatccagcttcttgtcttcgaacacaaaatgaacagcctagtatggaccagcggtatgtcagccctggatggtgaatttcagtcagcctcataggttgacttctacattgataaggacatgatccacatcgcgtacaccaaggtcgccaggcgttatggggatttcttcatccgtcagatcctcatatttgaggcgtttacttgcaccgctgaagaagatgggacagagaccttgatgatattcacacacattcaggaacctgttttgatgcattatcaggcaggaagtgtttttgcccgcgtgaaacctttacgtagatcagccatcagcctgtcccctcagttgacaagttaagggccggagtgtttcaagtggatctcagtaaaggatttttggagccag

SEQ ID NO: 548519 - DNA, 217 bp, Homo sapiens
gcttccttacaggccacggcttcccctggctttcctggcactgggcagtactctttgttagtcctggccctggcaggcgtggcctagaggccttctatgaagtagcagagccagacacacgagagtggtacttgtctagctcccccacatcacctacgacctcctatctctagtgcacgagcctcttggatatagcgcggattcccgagaagcactc

SEQ ID NO: 548520 - DNA, 1079 bp, Homo sapiens
  misc_feature (422)..(422): n is a, c, g, or t
  misc_feature (652)..(652): n is a, c, g, or t
agcggcgccattacactccagcctcggcaacaagagtgaaactccatctccaaaaaaaaaaaaaaaaaaaaagttttggcttcactttcacatgtggttagcttgctcaagaatgaaattgaaattagttacattattaaaatgttgttttggacacaggtgccttgaacacattagttaaagaattaaaagtgtagctatttttaacccattcattgtgtcattatctctcatccattatacgggggaacattattgaaacaagggaaaccaaactcattattcttctagccttaagaccttcttccccttaacttggcagactttgaattacgccaggtaggctctcctgttgacattttcccattttggtttggtcacaattaggacctctcaaattttgggcaattcccaggaaacanaaccctttggcggtcacccaaaaaccaagctctcctttcttggtagtcttctcccaaccttttggttaattacgcaactttcatttctctccaataagtccagggtcaaaacacttttgggagacaccctttgaattccttcccttttcccttcataaccgtatatttttaattccattgggcaaatttggagaacggcgtccccattttcaaaacactatccatttccncaaattatttcatttctcatctatttccaaaactaacttctctgaagtaaggcatggtgaactcatgcctgtaaaccctaagcactttaggaggccgtggcaggaggttccccttgatgccccggattttgagaccaaacttacctctccggtccagcaccatcatatttggcctaaagtgtgcgcgcctccaaggcgggcttccttgcctcagaaagcccctttttgtcttattttccaccccgcagggcaaagcttaccccttaagggtggaccttaaggggctttacttttgaaaccaatttccagtttaaattcccttacatgttgttaatcttcctttggacaaatattttttttccagaaagaggggttctcgttaacccggctgtggtacaggcgtgactatggccacgaaccatacccg

SEQ ID NO: 548521 - DNA, 275 bp, Homo sapiens
cactctcattcagctccctggcggctgacacgtagatgccgccgttattggcatcgagccgggagaggaggcactttgccttctgcccttttctctcctttgagccaggaagggagtagaccaggccttgacggtgtcaccgcacggctctgaaccccgtgggaaggccacatttcagacgcccctccccagccagtacccaccgtggcacctgactcccttagccctttatgctgggctggagctgtgctgtgcagtcccacgtgccgtttgtc

SEQ ID NO: 548522 - DNA, 161 bp, Homo sapiens
gtccctaaaattttaaccccaacttaaaaaatgtgtttcaaacaaaagctgggctagggttcctccagcctttttaaatttggggatgatttgaaaaaatgaaaaaatttttcccaaagggtttttttaaattattaaaaaaaaatggatataatttgtta

SEQ ID NO: 548523 - DNA, 817 bp, Homo sapiens
tggaatctgaagtctggtgtttactaatggaaaaaaaaattacagaagaggtttggttctctgggtggcccaccgcagccgggcattaaaacagcccagggctcatttctgttgggaaaaatattcttggctctttgggacatcagggctaggatgggtatcactggccagggtttccagccagctggggcacacttccccatggtttggtcagtgaactgggaagggcctgaactagtctcaaagtctcatccacagagcgggccaacaggggagggtcattcacaggtggatctggccgaaagaatacccttatcatcaatgataaaaagggcccctgaacagagatgccttcatcagcctttaagaccccataatcctgagcaagggtggcgcttggggtctggataccaagggactggtccatggggtcccagtcctcctggtttcttaggtgtatggacccatgctagatgacagacgtgagaatccacagaagcaccaatcattgggcagtggagtctctaaattcttttggcctatcactggaaagcaaggatctccggggggcaccacaagggtgacgtcaagcaggttaaaaggaagaacacaacttatgtccttggtagtcaagaaaggcgggatactcttcaactgccatgtgcataacaggtgtggttcgaatctggggacggtgccaatttaagcatttcctggaaaatttctatagctgtgccaggtttattcccgggcgggtggttatgaacctccactcggggtcaggccacgcacagggtcaatgaagttccatttcagg

SEQ ID NO: 548524 - DNA, 881 bp, Homo sapiens
agcggaaggacaaagtggagagggaggagatggagcaagtctcttatgtagatcattccgatctaagctcagcaaatgtgtcagctaacacctggttcaactgtaatgtgctcagctccgtagtaaccgtggacagcgagcatgtgccctctacgccctaaatctcagtcaaaatattatggtcctcataaatcaatgagaactttatgctcctgtctactgcatgtctagagggttcatcgtctagaccaggtgagttgataccaaacttcaccaaacggttctccggagcaagccgtttagaggaatcattaagccaagtggcgaacgaggaatcctaaggatccacatgtgattgtccctcgcggttcaactcatgctgtgctgttgctcgaagccgagggaaacctcgacgcgaacatgtagaatatatgaagctgtctggccaaaatcctggttcactcgtattgagacacgaagcagaactatcgaggagagcaggcagcgtgcttgtcgcgtgatgacgtattgatacagtcgcagccgacgttctgttgatgacatgaccgttagtgcgttctagccgatgtggctgaatcgagttgggaggaccgtgacgtccgagccagtctattgggtggccagaaaccgaggcctggtcagacgtctgatggcattgatggacagaccacgaggtactatcgaccgaaagacggaaactctgatttaccaagctcaatggggtggccagaactctcgggaattcgtgggattcgcatcgatgcctccaactggcaggaggagacaggatggggtgtgcagaatggccatgtgccctatattcttcctcatctgtgcgcaccagaatcgatacgatcgga

SEQ ID NO: 548525 - DNA, 138 bp, Homo sapiens
ctctctctctctctctctctctctctctctctctctctctctctctctctcctcattcttggcaggatggcttctcatcgtctgctcctcctcctctgccttgctggactggtatttgtgtctgaggctggccctacc

SEQ ID NO: 548526 - DNA, 1466 bp, Homo sapiens
agcgggcgatacgcgcgtggaatgaaggacaacgggaaccaggacaatagcaaatctggcctagcacagtatcagatgcctacttcatttatcatttgtaaacggaccgtaggcgtgaacgttcttggctctggaaagacagggatgggctgggccgcctggaactttctagcgacacactgtgtgaaggatcttgttacttgctagattcacgatcggacagacgggatgaatcatttcgaaagaactatcattgagagccgaccacgtgggtatctctccttgccactagtgaggaatcctcgggacccataagaagagcttggaccccataattcaaagcaaggaaagaagcctgcttacacagaacaccaggcggactcctttaagagacctcataaacgaagactcattgtacgtgtcaagttgcttgtaagaggagttacttcttgcacattgacctttctccagcaagaatagaggatacgacgttgtctttgctcacgtgagaacatccagtaagctttacaaaggaataatcatcctagttcgataagcgaacgtgttgtcctgtggcatgaattgtgcctcagtgcgagttacatgtacacggtacctggccgtatccctaattcttgcttttccgtatgcggagccttggatggcagaaatgccacgctagatttccaagtgtcatagccagaaaaacgatacgtggctcacacttatctccaaaagaagcttcgcaaagaccttgtcacttctttgaggataggacagctggggcgcttcaaattgggaggcccatgagtaggtttgacctgttgttcccccctaggtttacaccccgtattccttggtggtaactcaccgttgggggcaatgacaaaagggccagccttgaaagccgctggccgcaattgccaatggttgttccttattgcccgttggttttttggccttcctccgagccctgttcgttttaaacttttggcgtatccccaatgtgggttttccgcatatgtaacattattcccttccgggttaatggggaaaacctctttatgtacaagaccaaagagagtttttggccccaaataaagtctcattgtagacgttgcgcgcgtagtttttggtgttaatttttccccctagatgaggaaacccgtatattttaatatcctataagaacctcacactggtggaaatggtgggagtcctatcatccacacgcaaagaaacaacagtggtcacgcacttccactaggaaaacaatgatagaaagccctttctcagcgcctttacctccgcacattaaagcagccgggaacaataatcgaggaggggaggcgacgctaccccgcgttttttttaccctcttgaaggagtgagaagatctccagaggtagcataaaaagtgatcttcacagcacaccggtggaaaattataatacccccaggccaac

SEQ ID NO: 548527 - DNA, 106 bp, Homo sapiens
catagtccaaacactgcccaaagaccaaacattgcccaaattccatacagtgcccataatacaaacagggcctagcgagactttggtttattgcaaatgttttgcc

SEQ ID NO: 548528 - DNA, 893 bp, Homo sapiens
ctgcgtctatagggtcattgtaagctctggggaaaaaggagaaagtgagaggagagtgctctgtgatcctccctccttggttgtctactcgcagttgccttttaaaccacaaattctgaaccagccgtaatccgcccaggtgaggcgggacgttatggtagagtatgtctagtaacgaaagggggggaaacagaaggtcgtgatactgctctcctcgcgcttttaaagcgccgcggtcggcaaaattggtccaattcccttgggtcgtaccttggactttccgaggggcactcgttgccacgccgtttccaaaaaagggccatttcccctgtttcgcgacttgtgggggaacttcgggaaaggagaaggcgcggacttatcaactcggtatatgagacggggcgcggggccttttatttaaacacacgcgaaaagtaaatatctgtgtccgaagcaaaagatttacccattctaactgccatgaacggacaccgtctagttgcgaaacttgcgcacaattgacaattggttgtagcgtcgctattgtggatccgcttcctccccgtgtggaacgcaccattcccaccacaggtagacgttaggatccaccgcactctaacaaacacatcactagtaggaaccctttcactcgaggttagggacccccatagtgaaatagtgggtacggccccattgcatgttaggggactcaggttccaacgttgttcacgttgtggggcggccaatcaataaacagggccacattagggacgggataaaccctccctagaagaaacatggggggacactataaaaaacatacccacaattataagtattcagatcccacctttgtgacaaaacaccaaccactggccacacacaaattatta

SEQ ID NO: 548529 - DNA, 114 bp, Homo sapiens
agaccacgttctgcggaaggagcagaccctcgtccagccatggatggagttgaatactcggataaacggttcacagcgaaagcacgcaatacattccatggttggcctagagag

SEQ ID NO: 548530 - DNA, 911 bp, Homo sapiens
  misc_feature (57)..(57): n is a, c, g, or t
attacaggcgttgttatataacagcgactgggcaaccgccaatggatcttcctcgangataacaattcggggccctccccaggtgtgcggaccaactgtgcctgagccacgttagggggtgttctcccacccccggggggccccgcgcataattgttacgccacacggtgcgctgagcgtgaaaacgcgcaccgtttccaaccagcagttggccagctgggcccacatgtgttctccgggccaccatgcggatgagcctactcagtctgctccgcgtttacagtgtgtgccgacccggctcacactcccttggcaggaaagacccgtctgccgcgtttaaaaccagcgatcgtgtcgtctagccccctcgtctggcactcatttttgcggcggactccttcaaaggcgcactgtaacgaacaagaaccattcttttgagggggcccgtccctccgcccacgccgcatgtggacgcccgtcttcggcccccggctggggagtaaccactcgcgcccgcatgcgccagctactcttccatttgttcttggctgcacccaccgcgccattgttattggtgttctccgaatgaggaccggcgccctgggacggcaacaacaccaccagcgcgtgcagtgcagatacaatgccccgcggggactcgactgtcgccaagaatccccgcggggggccccttcgcggagggaggaacagacaacactgattgtaagcaataaacaggcaaaaaccccggtggcagatgaccgccccccggatgtaaagatgatctgggccacgcgccaggaatgacccccgggggggtagccagcgaagattcacgcccgtggggagatagacaccacacgtggttaaaacagggcgaaaaaacaaacaatgggggcccccccacaaac

SEQ ID NO: 548531 - DNA, 484 bp, Homo sapiens
  misc_feature (1)..(1): n is a, c, g, or t
  misc_feature (286)..(286): n is a, c, g, or t
  misc_feature (344)..(344): n is a, c, g, or t
nggatttcaccatgttggccaggatggtctcagacgatctcttgacctcatgatccaccctcctcggcctcccaaagtgctgagattataggcatgagcaccgcacccggtcccctccctacctttctttctttcctctttcctttttatttattctctgtcacccaggctggagtgcagttgtgcagtcatagcttattgtagccttgaactcctaggctcaagcagtcctcctgcctcagcctctcaagcagctaggactacaggcatgtgcctttgcacccangctaaattgctttaaaaatgttttgtagagatggggtctcactatgttgcctaggctnggagtggagctcctgtactcaagcaatatatccaccttggcctctcaaaagtgctgggattacaggcatgagccaccatgaccagccccaagaaatttagttctcacggctctggaggctggaaagtccagggtcaaggt

SEQ ID NO: 548532 - DNA, 149 bp, Homo sapiens
cccatgcacagttgtatcaagccaagaaaaaccttcattttgttttttgagacagtctcgccctgtgtccaggctggtgtacctcttttaattatttgttatgcagctacttgggaggctgaggcaggagaatggcgtgaacccgggag

SEQ ID NO: 548533 - DNA, 1976 bp, Homo sapiens
tctcccctccccgcctttacaccgatttccccttcgagaggtcgctttccccggggcagggcgcaagagccgggctctcacccccgggaactaaccagaagagcgcacagtcgcacgatagtggagaccacgcgctcagacactaacggcaggagagaataaagcagaaaaaaatccaaggcgaccgcgagcagatgcgcccgcggctgcctgcacctcccacaagcgccgcgcacaccacaccgcatctggcgcagccccacacacagcgcggagcggcaccgccgcggaggacacaccaccgccacaccacggccacgaccacccgcgactacagaaaaacggcgagcgcagcacacgcgagcgccgctgagagaacctcatagcgacgcacgacacacggcgaacaccgcagcacacagagagcccacaggccgcccaaccaaacacggggcacgcacgcccaccagcacaacaccacgacgccgcgagaacgccacggcgaccaacagaacaccccgccacaacgacgcaaccgcgcggctctgcgagacagccccccacccgcctaggacacggaacacaccgcaaccaccacaccacaacctccgccacagcagaagtccgccgcggacagacaacgaacacgccctcagcaacaccagcgccgacccgacgaggcaacacagcacgaggcacagcagagacacgacggcgacgacgccacccccacgaggcggagcagcagaggcgacaggagaacgaaacacacaaccgaacagacgactcaacaacacaaaagacacctggctagcgacataagccaacaacagccccaccaggtgaggacagcgaccgacgaacaacacacacataagagcaggagcaaagcagaggagacacagcggcgcacacgaccgatcgacgacgcggaagaacaagccatgtcagccacgcgacgcggaaagcccacagcgacagcggggcacccagccgaaaccgacgaacgcgagcgcgagcgacccacagtcacaagccagacctcagagacacgcacccaccgacaacgcatcacgacgtgagcgaagccacacagagcggtacgccccgacacaaaggccgcgagagagcgacgcacaaccaaccggagcgcggacaacacaggccgacccgaccgcaacgcaccgccagcccggacacacacaccagctcccagcgaggaggcccgcgccaacaaacagagaggccgaggacaggacccgtacaccgaagaacgcgcggagaggcgatccacgtgagcacaagagcgaagccgcgaccgcggagcacgacgagcaccggcgaagcctcactggacgacagcaagctcactgccgccctcaccacagccggcgcacacaccaaagcgctagaggaccaccccatccccagaacaagccacacagcgaaccgacaacgatcgccgaacgggaaggcaagagtagcggcagcataaacacacgcaagaggaccagacagataacacagcagcgcgagcaacgacaacaccaacatacgagttgagccagcagcatcaagatcgacgacgccccgacccgcataacgtcacgccgaacgcacgacacgcagagcttgacaagaacgcagccgcagagcaaaggaatcgcggagcccgacgctccagttcgacgagcgagctcacaacagcaactgatgaacagccagcgacagacgaccagaactagacgaagcaagacagcactcaacagagacggagcgcaagaccagacctgagaaccactctccgcgtgctaggctcatcagacaaccagcaagacgctgcggcgcacagcggtctcgctcgaccgacaagcccgactgacagagatgaattattctgaccagctctcgacggtatcatcgtcccgcagtgagagatacagcgggagtcacagcagtccgagatcgatgcacgt

SEQ ID NO: 548534 - DNA, 499 bp, Homo sapiens
ccagagattcagtgtggatagggcactggaaggtgtcgaatggctccatggttgatacagtgtggtgatctggttgtcgtacagcgatgaggaaccggacgttgcgcaggcccgtgaagctgtccttgtggatgcagctgatgcggttgttccgtagcattagggtcctcaatgccagtccaaaccccggaatcatgccgctccggatggactccagctggttggcagtcaagtgcaggtcgctcacagagcgctgagcacctcgaatagccccagtcttcaactttctgacacctatattgttgcatcatgacttgattttcttcaaattctgtaagtttattaaacatcccagtggcctccaggatggaactctcattgttattcaatcgcagttctgccgtgctcgggagaacccccccgaggatcttggtgagcttcaggctggagcactccaccacgttggcctcacagcggcacttgtggggacagaccacgt

SEQ ID NO: 548535 - DNA, 760 bp, Homo sapiens
cctggaatctgcccacccccgcatgggtgttggctgccgcctgagccgggccttgctcactgctgtcaccacgtgtcattctttgtgttggttttgggggcctatcttaatatcgtggcgaatagagagagacaagcctgtatagatgtgaaaaatttaacgtgtccagacattactggactggagcagaatggacgcttctatgttgctccgacgtgcgcacagcttgtcctccaaagcggagcgctagcgtgttgaccactgtgatcctgcctcaagaatccggatcaacggatccaccggtgcagagaggactgctgtgtgagatggctacccctcctctctgatcaacgataagccccgggcggacttgtccggtcagctgtcccagaagccatccaagcacaggaggtcaccagctgggtgtgattcaccttgcctgattcagtctctctgaccgatccaggttgctactctcaagatcgtccggaaatgtgctccttaaggaggggaaacagtgtagccaattgccgtgtctgccagacggaaacggtgattctgatacacccgactcctgcagccactgacacgtggtgtgctgtcattgccgcggagctgtactggagtggcacgcttggttccgtgcggatggcgcgttgtcttgctcagcgttgctcctccactctcggtcttgagacatcgtcgccgctcgcccctacctaccgcgagtctcactcatccgcttcttgcgcccttccca

SEQ ID NO: 548536 - DNA, 232 bp, Homo sapiens
aataaacctccctatcacagtgacctactacccgcgtgtgcttatataactaatccaggacaacccacaaaaattatagcaacacacaaacacaccgctgaccataacatgtgcgtctttcaaagatgccttatcaaccagagcgatgattactgaggatacgcaactcataaaactctacttaaagcaacagggcagacgtgcgtctgtgccagtcgtgaatgtggtgaac

SEQ ID NO: 548537 - DNA, 879 bp, Homo sapiens
  misc_feature (285)..(285): n is a, c, g, or t
agcggagctggtggctggcgctccgcaggggctcggctgttttccgcgcggcaggcgctggccatggctgcagctggtgaaagctgctcaatggagcagaatgtacgacctggcagctgagtgttgtggggtgatcatgggcaagaggctttagaatcttgctcatgtttgcctaataaatgcaacatgccacaggacactgacaattcttaaaacacttggtactaccaggtatttggttcgtcttacaattattgattggacaatcagtgtcatgctggaganagatgcttgggaacacaatcttctctccttcaaacagaacgcagttcatcggcacatgaaacctgaggcttgaatgcttgccagtgtgaactctcttacaacgaacttacaactaccgcgagtgtactcttgtgacacgctttcggttggaccactgacgtgttctaccttgtttgtacgtttgcaacctcaacgctttccttgaacacgcaccttccactaccgctataagccacgaactgtccctctgtcacactttcccaccactttccatctattacggaatctggtagggaccactactgtgacctacgcttgcgttactactgagtggatcacttcgtagaagagaaccatccatgtacatacgcaactctcatcccaggctaattgcccattcacgagtgatcttacgaacgtagtcataacagccactttcccttgacacttgcaggacgacagcacttctctcaaggtcgcctcattggatatctgcgactccactaattgcgacacaccactacggggaccccacaagctcacatacacactacgattgggactttggtgaatccactagcgcctcacactatc

SEQ ID NO: 548538 - DNA, 1028 bp, Homo sapiens
tggtatggtctgaaggacctatcaagtaacacctattactcccagaagtgccgatgcttttttgacacccagttacacctggactcctttataagacagagagtttgatcgatgtctcaatggcaactaaaagaaattttggcacaacataatgtaaagacttactgctaccaagactagtacagcaaggattcatagataaacttgccactgtccttagggtcctcgtaactgtttggccatgaagaacatgttttaaataaaaatgaagctactatctataataactttagacatggccttccacattaaaaggatagtcccattcatcttgataatgaatatgaagggtcgagagttgcgtcatgaccctagccatggtgtgccatatttcagaagagtatcctccagtcagaatactgagaaatttaacttcagcattgctatcgagtggggacagggaaacttgaattggacattccagatgatgctaaagatcttattcgacatcagcagttgggtcaaacaggactccttatgaaggaaaggtttaaacagtttgaaggactggttgatgattgtgaatataaacgaggtataaaggagactagctgtacagatctggatggattcgggatatggtatagttttcagataagaagatgtaatccaccaattcaacaatctgatcgaacttgaggaatctgggtgggcagtccataatcactttgactcttctttgaccacactgtctttgagacaaaagttgggctccggtattgccacagttaacctaaacagggtgatcctggcagcacattgcgcgcagaaaaatggctagctggccattaaaaactgcccggtgcacagaggacatttggcgggcctaattgcgcacaacgaaccatatctgcaacacacgccgagtgcgtacacacgcgttcagcacgaaatctacagtcaaacccgcgcagtctatccacgacgctagcctcttaagggccccaaaagaccctcttttgagcacg

SEQ ID NO: 548539 - DNA, 165 bp, Homo sapiens
cctttcagataccccacctgaaaagggtacacatatgaggactgtgggcacaggacacagatggaacaagtaaggaggttggaggctcctggtgtcgggtagagcagggcccccgttcaccttccataaaagctttcctggtttcattgtgctggcttttggcct

SEQ ID NO: 548540 - DNA, 907 bp, Homo sapiens
agcgggtcacgccgtcggagcggcctctggtgcaacgggaggagttcctgttgctgtcgcagactctctccctttcttacctccccaccagatcccggagatcgcccgccatggctttacttactgcgagcgccggtctcttgggaaccaagaatgcaatcttgttgcttgttacttgcctgggtcgcgggatgccacgttgcttcctcccactgtaaatttgaccgatgaacactattgcgctggaaccgtgagtacctatacgtgagctaggtccacgaacttagagaccttttttcatgcgtcagccataccatgtgctagaccggatggtggagccagaatcacgtgatggtacatagatgtactaggtcggcagtgaaacggcactgaagagggatctggctctagtgacataaccatcaagctgtctctgtaatcctgaatcgatggggcgatctccggttctccgacgcgtctattagatgatcgcctcgagattgtccatgaagatcttgctagtccgaaggtctaaccgggtgtgggaaagacatccctgctctgtaggagtcctaatctttgaggtgtcctggtaaactgtgacagttttccatcccagaggaacctggcatcttcgtgcccgtcagtacgacgtgcggcagaactgagggcaggttctggccttggccatcgtggtcaccatgctaggaggaactttaccacaagcaattctacatcctgagtgtggtgcatgctcagtgcagcttgttgacatgccctgcaacagttgaaaatgatcttggccgcggagcgatatgacacaggggtatccagccgaggtcacagtacgtggtggaagttgacttggatgaagaactctatggatctacttcggcgaaggtacctg

SEQ ID NO: 548541 - DNA, 128 bp, Homo sapiens
tataccggggttagggagaggattagggtgagggttggggtaaccccggaatacgagcatgaatccatgacagtttaccagatccccatacacagtgaacagaggaggggaaagcaccaaccatggca

SEQ ID NO: 548542 - DNA, 685 bp, Homo sapiens
ttcaaatttgctgggtacggtgtaccggcgtgggaacctaaattttacctgcaatggagattcaggtaatcagtcccgtgggcaatagagtcacagtatttgaccttaacaacaacaaatctgacacgctgcccctgtgacactcgtatacaacgtcaagtgcgtgtgggcatgtaccacctgtgatggactgcctcgctatcatcgtcgatgaatggggtggctgatgctgctgcttggtcagcctggtctagaaggtcttgttgactgcaccaacttaccacttcaatggtgctctgttgcacagatgtgtccttctcccctgatggctaggaagtttgtatgtcacaaagggtaacatttgtccagatgtatcatgcccctggtgaatgaagcgggagttcaaagcctatcgtatctggacaatgaactatatatgggacctaccgatgagaccacctggcatcgaacttggacggaatgaccaccaggtgctaagcggaagggagcaaagacatgtccacacttgtggtgttcgagagccgaagacgctgggacaacctcactctactatgcactggaggggacaataaggatgccaccgtggcctgccttcttggaaatccaacaaactgtaacctgaactccactccgccaatacggaatgctgttcaatgtgccagac

SEQ ID NO: 548543 - DNA, 744 bp, Homo sapiens
  misc_feature (15)..(15): n is a, c, g, or t
  misc_feature (18)..(18): n is a, c, g, or t
  misc_feature (42)..(42): n is a, c, g, or t
  misc_feature (44)..(44): n is a, c, g, or t
  misc_feature (53)..(53): n is a, c, g, or t
  misc_feature (58)..(58): n is a, c, g, or t
  misc_feature (60)..(60): n is a, c, g, or t
  misc_feature (68)..(68): n is a, c, g, or t
  misc_feature (70)..(70): n is a, c, g, or t
  misc_feature (72)..(72): n is a, c, g, or t
  misc_feature (76)..(76): n is a, c, g, or t
  misc_feature (94)..(94): n is a, c, g, or t
  misc_feature (96)..(96): n is a, c, g, or t
  misc_feature (113)..(114): n is a, c, g, or t
  misc_feature (127)..(127): n is a, c, g, or t
  misc_feature (136)..(136): n is a, c, g, or t
  misc_feature (138)..(138): n is a, c, g, or t
  misc_feature (141)..(141): n is a, c, g, or t
  misc_feature (148)..(148): n is a, c, g, or t
  misc_feature (160)..(160): n is a, c, g, or t
  misc_feature (166)..(166): n is a, c, g, or t
  misc_feature (170)..(170): n is a, c, g, or t
  misc_feature (174)..(174): n is a, c, g, or t
  misc_feature (176)..(176): n is a, c, g, or t
  misc_feature (184)..(184): n is a, c, g, or t
  misc_feature (198)..(198): n is a, c, g, or t
  misc_feature (202)..(202): n is a, c, g, or t
  misc_feature (213)..(213): n is a, c, g, or t
  misc_feature (225)..(225): n is a, c, g, or t
  misc_feature (234)..(234): n is a, c, g, or t
  misc_feature (238)..(238): n is a, c, g, or t
  misc_feature (240)..(240): n is a, c, g, or t
  misc_feature (245)..(245): n is a, c, g, or t
  misc_feature (249)..(249): n is a, c, g, or t
  misc_feature (256)..(256): n is a, c, g, or t
  misc_feature (298)..(299): n is a, c, g, or t
  misc_feature (328)..(329): n is a, c, g, or t
  misc_feature (333)..(333): n is a, c, g, or t
  misc_feature (349)..(349): n is a, c, g, or t
  misc_feature (352)..(352): n is a, c, g, or t
  misc_feature (355)..(355): n is a, c, g, or t
  misc_feature (358)..(359): n is a, c, g, or t
  misc_feature (367)..(367): n is a, c, g, or t
  misc_feature (376)..(376): n is a, c, g, or t
  misc_feature (386)..(387): n is a, c, g, or t
  misc_feature (394)..(394): n is a, c, g, or t
  misc_feature (396)..(397): n is a, c, g, or t
  misc_feature (402)..(402): n is a, c, g, or t
  misc_feature (408)..(409): n is a, c, g, or t
  misc_feature (431)..(431): n is a, c, g, or t
  misc_feature (445)..(445): n is a, c, g, or t
  misc_feature (467)..(467): n is a, c, g, or t
  misc_feature (471)..(471): n is a, c, g, or t
  misc_feature (478)..(478): n is a, c, g, or t
  misc_feature (480)..(480): n is a, c, g, or t
  misc_feature (482)..(483): n is a, c, g, or t
  misc_feature (486)..(486): n is a, c, g, or t
  misc_feature (490)..(490): n is a, c, g, or t
  misc_feature (498)..(498): n is a, c, g, or t
  misc_feature (500)..(500): n is a, c, g, or t
  misc_feature (510)..(510): n is a, c, g, or t
  misc_feature (555)..(555): n is a, c, g, or t
  misc_feature (558)..(558): n is a, c, g, or t
  misc_feature (590)..(590): n is a, c, g, or t
  misc_feature (620)..(620): n is a, c, g, or t
  misc_feature (625)..(625): n is a, c, g, or t
  misc_feature (627)..(627): n is a, c, g, or t
  misc_feature (629)..(629): n is a, c, g, or t
  misc_feature (632)..(632): n is a, c, g, or t
  misc_feature (639)..(639): n is a, c, g, or t
  misc_feature (657)..(657): n is a, c, g, or t
  misc_feature (677)..(677): n is a, c, g, or t
  misc_feature (682)..(682): n is a, c, g, or t
  misc_feature (684)..(684): n is a, c, g, or t
  misc_feature (737)..(737): n is a, c, g, or t
tgaaaaaaaaaaaanaantttaaaaggctttggcttaaaaananaaaaaaggnacccncncgtaaaangnanaaantcctctcttctgccccancncctgggtcctaaaaaannaatcctgagtccnaaaggggtnantgnaaggaancagggaaggganagggtnaaantttnantctgtaantataaaaaacccanggcnaaggcccaaantggcctctaaancaaaaggtnaaantntgggnaaangaggaanccgaaaaggtccctaaaaaaaaaaaatcccggtcccccggannaaaccccaacctctgcaaaactgtaaggnnaatnccccaaaacctggggnaangtnaannccctaaanctgtaaaangaaaagtaannaaaaacnannagggnaaaaannaaagggaaaaccccactctggnaaaaaaaccgcttnaagctgcaaaggtctgggaaangctnaaaaaancnannaangcanaaccgggnanagggtttgcnagggttattctttcggaatgtggccaaaacgtcggcctggaaaanatnaaagatgatttccaagcccccagacttctccnacagccgggcacctccatcaggaaggtgtnttgtntncngcncaaaaanatgctgaaggaccacggntggggagctggcctggccangactnancagcgggggtgacgggctggccccacaggtgaggggcccggcgctggctcctnttcacct

SEQ ID NO: 548544 - DNA, 278 bp, Homo sapiens
gggcacgagctggcagctcccaggtcatgagcaaatggcacccttggtagtatccctccactgctgtccaggccttcagttccacttctggtcttggaattcatgacccttgaaaaagaagaagtcatttcataaagtgctgcatagtatttccagagagctgcagggctgtgaaaacataattggagttctaaaagctggcccagtcttttataacaacaggtaaatgcagtgcccagtttatttgtggcttttggtttcccccctgcctgaaagca

SEQ ID NO: 548545 - DNA, 117 bp, Homo sapiens
  misc_feature (49)..(49): n is a, c, g, or t
tcatatagaatcgagctggtaccccacttatgcggggatgtttgttttnttgtttttttgagacagagtctcgctttgttgcccaggcatacggtgggcccacggcataagtgtggg

SEQ ID NO: 548546 - DNA, 1356 bp, Homo sapiens
ggccgtgccgctgggttctgagcctggagtggtcggtgggctgggatggaggcagaccttggagcagcacttggaagacacaactgaagaatccctccattgcttggagctcctgtgcacagcatctcacaaggcacttaactcgtgggttgccgaggagacccttgctcagcatgcagccatgctgggcagtgatatcgtgtctactagacccagccaacgccagcctaagcctagaccatctgaaccccccaccttgcatactctccatgctgcagcggtcgctctcacgcaactcaggactacctgggcgcacaccatcaattgaatcccaagacaaaccacgatctggctctcaacgcgctggacaagctgccacaaacacactgagaccatcgtctgaatggcgtccactactcgtgtttctatcaagccaagccccttgatcactagggcaccgctggactccatacccataatgctaccactataacctttcataggacaccttacctaaaacagctttaccaagctaacagctactcaggcccacgtctcaaccttcaccattgcttgccatttcagccgcgactgttctcatcgctggctccgccatcctccacaggacagcctccatattctgacacacttcctcaacagtgccctcctcgtggggcacccctgctcctaactccacccgccatccccttcaccggcttcaaacgcaacacacggcactccatctggcttcctcggccacggccaccccaaagcatcccaagaggtcccacctctggcgttacttcattccgcagcactagccggcctagtcatttcccacttcacactcccttggtccccgaccaacgcgccacaacgcaccaaccacactaccacatcatcctccccccacccaccaaccaccatcaactctccttcctgtcgcgccgcacccacattctacccttcctatgaacaacaacactttcctctacagaacccaacctactatcttatgcacacgcaacccgccctccaccgtattatattcactacgatacaactatagatacctcacggtgctgtttccacctacggcggagcaaccgacctggtcaccacccacccgactgagcgctcggctgtgccacactcacgccacttaaccacaaacccgcgcggtgcgcgtcaccgcgacagctgtttgctctggcaaaacgactccacagatgttgcagccctgcggaggccactcatgcgaggagctctcacccggcgggtgctacgacgagccagatcacaatcgacccgcctcgccacgtgggaggctcgccgctcgtccggctcgcgaccgca

SEQ ID NO: 548547 - DNA, 162 bp, Homo sapiens
  misc_feature (106)..(106): n is a, c, g, or t
  misc_feature (120)..(120): n is a, c, g, or t
ttaaggaccagcccacagatgatcagacatctcacatctgaagtataatgatgagagtggatatgaagacaggaaacagaggaacagcagaggcgcttattctcgntctacaagcaggcntgtgctagagaatggcgtatgatatggaccagaacagttcaa

SEQ ID NO: 548548 - DNA, 344 bp, Homo sapiens
gcagaaataatgatgggttgttaaactaatataggttaccaagtcaatttccctcattttttcagtgctattattatccaatatattgtggctgttatattgtgtgtctatcttctatatttctcctctacttgtcatatcttgtttgtgtgtgactatctgaaactcttgacaatattttcattttctatcttgtttctatcttccaattttcttctaagtttgtacattttgcccttagctttttgtttcctagcttgtcttttttcttctgcttcctacttttcaggtttaaatttatcttttttcttctaaaagtatgtttttatcttctaatttcccta

SEQ ID NO: 548549 - DNA, 175 bp, Homo sapiens
ccccagggggccccccccccggggggtttttccttcctttgggtttttttgggggggccggggggggggggttttggggccctttcccccggcctttggggggggccctttttttttttttttttttcggggtggggggggggggggggggtttttttttttttttgggttccca

SEQ ID NO: 548550 - DNA, 274 bp, Homo sapiens
tcaagtaccacgaagatttgcgtagcagcgattcactatagtatctatcgctaggtccgaactgatatatcctaccctgcagtattcatggatttcctcagcgtttatctagacgtgagagaatttccgtctatgcatactattacacctaaggtgttcgctttgctagtacatctgtttccaccttaagaagcgtcccgttacaccttagtagcagatgtagcacatatatacttttgtagggcacatacagtgaatccctcctcttgttgac

SEQ ID NO: 548551 - DNA, 783 bp, Homo sapiens
acccttgtcccccctctccccccatctgttggatggtcccctccccgaggtgggccgggcgcgccgcgctaacagccacgcggcggcggcttattactcgcgcgcagactttctatctcacgctgggggtttctctctcgaagtattgatctgccgcgacacacctgtcgcggggccctcctgttgggggcgtgggtgtcaccgcgagaggtgttcagccacccttgtgtgccccccgcgcgcgtggtcttcgcgcggtccatagtcccactagtgtggctgtgcgggtggtgagtttctatctcccgtcgttgttgatctggtgggagcgcgcgccgcgtgactggcgtgcatgtgctgagtaactcttctctccgccggttgttttatccgcgcgcgagaatatacaccggcgttccccccccgcgtggtggtgaccgccacacccccaggagttgtttctctcctctccccttgtcccccgagagggggcgccaccttggccgctcgggtggcccccacttcgccactgcttgtgccacgccacgtgtctcgtaggtttcactctccccttacgtcttggattctcgggcgccactcttggggcccccaagcgtctataattcccgagggaggtgtgctcccccacgttatggccctttccccgatggtccccccccttgtccccccaggggggtgctcccccccccccccccgtggtgtttttttgtaaaaaatttttttttgcgttttttttccaaaaaaagttttaaaccaccccca

SEQ ID NO: 548552 - DNA, 362 bp, Homo sapiens
gttgtattaaaaatagatatatatgagttctttcacttgatgtgtgttagacacacgtgtgtgtgttctgtagctcagatctccagacacggtttttaggtagtggaggaagtggcttcatgtggcacttgggcatttatattccacttgggaaggtcaagctgtggccttctggagcaagtggcttgtgtaaggaatgctatgcagggcatggcacgtgagcttcggaatagatgtcttcatcacttctttcactgtgtgttgacactgtgttccttacctatttcctcagatccccagatttctcctctgctatgcattttcttcacagtgccttgcgtccgctgctggttcttctttct

SEQ ID NO: 548553 - DNA, 827 bp, Homo sapiens
  misc_feature (37)..(37): n is a, c, g, or t
ccagaggacaaggtaggctaggtactgaggccctgtntgtgttattgtgcacggagggcgtctgccggaatacttttcttccgctctgagtggcgctactgagtgccgcggagccggattgcggttggggcgtggaagagccggggccgtggctgacagtggagcatgcctgctgttgagtgctgctgccctccccgtcctgaggtgggtggcccaccaggatgagcaatgctgcccagtggagctgacccgagacttgtagcgcatgctgccttgcctgttggactccctgggctcctcactgtcccacagccagagcctctcctcgcacctccttcctggcgctgagaagcgaagggccatctctgatgtccgccgctaccttctgtctcttctgtcaccttcgagctgctcttcatctccctgctctggatcatcgaactgaataccaacacaggcatccgtaagaacttggagcaggagatcatccagatacaactttaaaacttccttcttcgacatctttgtcctggccttcttccgcttctctggactgctcctagtgctatgccgtgcttgcgtgttccggcactggtgggtgattgcggtcacgacgctggtgtccagtgcattcctcattgtcacgtgtcatcctctctgagctgctcaggcaaaggggatttggttacctgctcccatcgtctctattgtgtcgcctggttgggacctgttcttgacttcaagtctacccaggaagctgaaagagcggtggatttgcagccagatgtgatgccgtgaccctgctgtctcggtgttgtcgagggcgg

SEQ ID NO: 548554 - DNA, 295 bp, Homo sapiens
gttggttaacgcctttattaagccctctcttgcttatatgtcttgtattgatatttggactctgtatatacaatactataactcgaattgtttcttctcgcctagaagcaatcaaactccaaatggtgctgtaaactgaaccacacatggacaggccattcttccgaggacccttagattgatccaggggagccctagctgctattcccattcacgcccttttcagcaggagtagccagaggagtcgccgccaaactcctacacagtaggttgcattcccagaagtatgtttagg

SEQ ID NO: 548555 - DNA, 3929 bp, Homo sapiens
gcagactcgagatgcgcccgaggaggttgggccggtgctgcgcggggagccggctcggacccggggacccagcagcactcacctgtgcaccttcgccctcagccagtcccgctccggagccctctgcgcagccgcaggcacggggcactggacagagagtaggatcccgagccacctctggaacccagttcctctcggaagcccgcaccggagctcgcccggcctcggaggctggagccaaggcaggagcccggcgcccgtccgcattctcggccatccaaggggatgtccggtctatgcccgacaattcggacgcgccgtggacccgcttcgtattccaagggccgtttggttcccgggccactggccgggggactggaaaggcagcgggcatctggaagacgccagccgcctacgttggccggcgacccggggtgtccggccctgagcgcgccgcctttattcgggagctggaggaagcactgtgtcctaacctacctccgccagtcaaaaagatcacccaggaagacgtcaaagtgatgttatatttgctggaggagcttctcccacctgtctgggagagcgttacctatgggatggtcctgcagagagagagggacctgaacactgcagctcgcatcggccagtccctggtgaaacagaacagtgttttgatggaggagaacagcaagctggaagccctgctgggctcagccaaggaggagattttatacctcagacaccaggtgaacttgcgggatgagctcctccagctctactcagattctgatgaggaggatgaggatgaagaagaggaggaggaagaaaaggaggcagaagaggaacaggaagaagaagaagcagaggaagacctgcagtgtgctcatccctgtgatgcccctaagctgatttcgcaggaggcattgctgcaccagcaccactgcccacagctggaagccttgcaggagaagctgaggctgctggaggaggagaatcatcagctgagagaagaggcctctcaactcgacactcttgaggatgaggaacagatgctcattctggagtgtgtggagcagttttcggaggccagccaacagatggctgagctgtcggaggtgctggtgctcaggctggaaaactatgaacggcagcagcaggaggtcgctcggctgcaggcccaggtgctgaagctgcagcagcgctgccggatgtatggggctgagactgaaaagttgcagaagcagctggcttcggagaaggaaatccagatgcagctccaggaagaggagactcttcctggtttccaggagacgctggctgaggagctcagaacgtctctaaggaggatgatctcagaccctgtgtattttatggagaggaattatgagatgcccagaggggacacatccagcctaaggtatgattttcgctacagtgaggatcgagagcaggtgcgggggtttgaggctgaggaagggttgatgctggcagcggatatcatgcggggggaagatttcacgcctgcggaggagttggtgccccaggaggagctgggggctgccaagaaggtgccggctgaggaaggggtgatggaagaggcagagctggtgtcagaggagaccgagggctgggaggaggtggaactggagctggatgaggcaacgcggatgaacgtggtgacatcagccctggaggccagcggcttgggcccttcacacctggacatgaattatgtcctccagcagctggccaactggcaagatgcccattacaggcggcagctgaggtggaagatgctccagaaaggtgagtgcccccacggggccctccctgccgccagccggacaagctgcagatcgtcgtgccgatgaaaagagagggtggataagctccccgagtgctcacctgccccagcctggctctacctgctgtgcttatttgcatggactttgcatatcatttgcatagacacctctgatccccttcagtgggaaccgtagtgtcagtgctcatttatgtggcatttgcttaggattccagatctccatccacttttctcctgggggctgggctgggggttagggctgggactgtgcccccacactgcgcctcagcttcccatctctgcccgcttgcttcccctacccccaacccctgcctcctctataccccaggctctccaactctgcagcagtggcagcagcagtcaaaacaaacacggggggcggtgggtgggatggtggagcagcctgggggctgacccaggctggaggacaggaccagccaccctcccacggcctgggaggaagagaggccttctgggactgcccaggctatggggacaaaggccttcaccagcaagggccacagttggaacagtcccctgggtgtcagaaggtgggctagggcctcctgcagggttgtggggtggaacagggtctcctctccccagccagaaaccccaaagtctgggagctgcacctgccgagtgcaggccatgtgagccctgcctctttaaggagccgcaggacatgaaagatgaccttgtgacactcatgcacagcagccattgcacgtgcatcagctcccatcagcctcattccgtggcaggtgatgtgtccccattggttaggtgaggagggtgaggctcagagagctaaggacacttgtttggggccacacagccggggtagatctgagcccgtcctctctactcctgtgctgtagcaccttcactggcccatccctcccctctagtgctgtcctggtacccgtcccagcctgtccccattctcatggccctttggtcactgccgggtggaatagcactggcttcagcaggcgtgtcatgtaagcttgtgcaggttataaactgaaccatgacctttatggcgcatgcagggggcaacctgcataattatcaatggcgactttccgtgtccttctgatacagttgatcagacccctgcccaccgcccaggccaggcctgtggtcatcaatgccccagttcacatccacctgcttctcttccaggctttgctgttccccagcagcctgcagaggccccacagacagcttgaggcccctcctgctgcctggccaagccccacacccgcagaccctccttcccatcctctgaaatgggaccctgtgtctgtcaccagcccaccctctgtgttcatgaacctgggctggagcttggggacccctccctgcccctggcttcctcttccatgttctgccctttcccacatgttggaggcttttccaacgtcttcagggacaggcggtaggaaccccggccctcgctctgcagctggtgcaaaagctgtggctgccaggcctgggccacatggcagcccagggggcaggagaagcccgggagaggcccgctggctaccagactcagccctgagcagggaacagggcccagcttccaccggcagggagttgtgagcgccttcccaacaatgtgcccctcaccccttgatgcccatgctaatggtagccaccctggttcttgttgacttgagggacctggctgtcttccctgttcttcatcctttcttctcagtccctacctactgtttgtaaccacaagtgtctctgtgtgtgggtgggtgagggcccctctgcccagtggtgtgtctcctctccctccctccctcttctgccagtggcctgggggtgtccaggctcccatccatggcccagcccctctcccctctgtcttgatccccccctccctgcccctggcttcctcttccatgttctgccctttcccacacctttgttcctcaatagctgggggctgggactgaggcctcctgcaggtacctgccccccttcacacagcacctctcaatctcctattgcttgtcagcctgtgtgcgtgtggtgcaggaaataaaggatctataccctcctg

SEQ ID NO: 548556 - DNA, 154 bp, Homo sapiens
tgggcttgtgtgtcctttcgtgaggtgcttgagcccagtgtacctaatgcatcatactagggaatcatggtcagtccctatcgcagaagggaatttgacacatgtaccacatggatgagccatgaagacattttgctaatgaaataagtcacaa

SEQ ID NO: 548557 - DNA, 357 bp, Homo sapiens
actctataactagctgttgagtgatttaccttgacttttgactcatgtgacttatcgactcaccttgggcccttccactgtaacctttaacctttccatcttctgcctggtccccgaggctcctggaaccacatgggtgccaactgctttcatacttgtaaatttctaagtagagtagatactgctaacacagaatcagatctagagaataccattagcttctaatatagagacatcaattcttgacttgtcaaagaataaaaatctcatgagataataaagttgtactggtcttcagatattaaaaaaaaaaagggaaataactatacaatatccctcgtaaagcatgggtaccga

SEQ ID NO: 548558 - DNA, 3878 bp, Homo sapiens
gcagactcgagatgcgcccgaggaggttgggccggtgctgcgcggggagccggctcggacccggggacccagcagcactcacctgtgcaccttcgccctcagccagtcccgctccggagccctctgcgcagccgcaggcacggggcactggacagagagtaggatcccgagccacctctggaacccagttcctctcggaagcccgcaccggagctcgcccggcctcggaggctggagccaaggcaggagcccggcgcccgtccgcattctcggccatccaaggggatgtccggtctatgcccgacaattcggacgcgccgtggacccgcttcgtattccaagggccgtttggttcccgggccactggccgggggactggaaaggcagcgggcatctggaagacgccagccgcctacgttggccggcgacccggggtgtccggccctgagcgcgccgcctttattcgggagctggaggaagcactgtgtcctaacctacctccgccagtcaaaaagatcacccaggaagacgtcaaagtgatgttatatttgctggaggaggtgtgtactgccttcctgatccagcttctcccacctgtctgggagagcgttacctatgggatggtcctgcagagagagagggacctgaacactgcagctcgcatcggccagtccctggtgaaacagaacagtgttttgatggaggagaacagcaagctggaagccctgctgggctcagccaaggaggagattttatacctcagacaccaggtgaacttgcgggatgagctcctccagctctactcagattctgatgaggaggatgaggatgaagaagaggaggaggaagaaaaggaggcagaagaggaacaggaagaagaagaagcagaggaagacctgcagtgtgctcatccctgtgatgcccctaagctgatttcgcaggaggcattgctgcaccagcaccactgcccacagctggaagccttgcaggagaagctgaggctgctggaggaggagaatcatcagctgagagaagaggcctctcaactcgacactcttgaggatgaggaacagatgctcattctggagtgtgtggagcagttttcggaggccagccaacagatggctgagctgtcggaggtgctggtgctcaggctggaaaactatgaacggcagcagcaggaggtcgctcggctgcaggcccaggtgctgaagctgcagcagcgctgccggatggagactcttcctggtttccaggagacgctggctgaggagctcagaacgtctctaaggaggatgatctcagaccctgtgtattttatggagaggaattatgagatgcccagaggggacacatccagcctaaggtatgattttcgctacagtgaggatcgagagcaggtgcgggggtttgaggctgaggaagggttgatgctggcagcggatatcatgcggggggaagatttcacgcctgcggaggagttggtgccccaggaggagctgggggctgccaagaaggtgccggctgaggaaggggtgatggaagaggcagagctggtgtcagaggagaccgagggctgggaggaggtggaactggagctggatgaggcaacgcggatgaacgtggtgacatcagccctggaggccagcggcttgggcccttcacacctggacatgaattatgtcctccagcagctggccaactggcaagatgcccattacaggcggcagctgaggtggaagatgctccagaaaggtgagtgcccccacggggccctccctgccgccagccggacaagctgcagatcgtcgtgccgatgaaaagagagggtggataagctccccgagtgctcacctgccccagcctggctctacctgctgtgcttatttgcatggactttgcatatcatttgcatagacacctctgatccccttcagtgggaaccgtagtgtcagtgctcatttatgtggcatttgcttaggattccagatctccatccacttttctcctgggggctgggctgggggttagggctgggactgtgcccccacactgcgcctcagcttcccatctctgcccgcttgcttcccctacccccaacccctgcctcctctataccccaggctctccaactctgcagcagtggcagcagcagtcaaaacaaacacggggggcggtgggtgggatggtggagcagcctgggggctgacccaggctggaggacaggaccagccaccctcccacggcctgggaggaagagaggccttctgggactgcccaggctatggggacaaaggccttcaccagcaagggccacagttggaacagtcccctgggtgtcagaaggtgggctagggcctcctgcagggttgtggggtggaacagggtctcctctccccagccagaaaccccaaagtctgggagctgcacctgccgagtgcaggccatgtgagccctgcctctttaaggagccgcaggacatgaaagatgaccttgtgacactcatgcacagcagccattgcacgtgcatcagctcccatcagcctcattccgtggcaggtgatgtgtccccattggttaggtgaggagggtgaggctcagagagctaaggacacttgtttggggccacacagccggggtagatctgagcccgtcctctctactcctgtgctgtagcaccttcactggcccatccctcccctctagtgctgtcctggtacccgtcccagcctgtccccattctcatggccctttggtcactgccgggtggaatagcactggcttcagcaggcgtgtcatgtaagcttgtgcaggttataaactgaaccatgacctttatggcgcatgcagggggcaacctgcataattatcaatggcgactttccgtgtccttctgatacagttgatcagacccctgcccaccgcccaggccaggcctgtggtcatcaatgccccagttcacatccacctgcttctcttccaggctttgctgttccccagcagcctgcagaggccccacagacagcttgaggcccctcctgctgcctggccaagccccacacccgcagaccctccttcccatcctctgaaatgggaccctgtgtctgtcaccagcccaccctctgtgttcatgaacctgggctggagcttggggacccctccctgcccctggcttcctcttccatgttctgccctttcccacatgttggaggcttttccaacgtcttcagggacaggcggtaggaaccccggccctcgctctgcagctggtgcaaaagctgtggctgccaggcctgggccacatggcagcccagggggcaggagaagcccgggagaggcccgctggctaccagactcagccctgagcagggaacagggcccagcttccaccggcagggagttgtgagcgccttcccaacaatgtgcccctcaccccttgatgcccatgctaatggtagccaccctggttcttgttgacttgagggacctggctgtcttccctgttcttcatcctttcttctcagtccctacctactgtttgtaaccacaagtgtctctgtgtgtgggtgggtgagggcccctctgcccagtggtgtgtctcctctccctccctccctcttctgccagtggcctgggggtgtccaggctcccatccatggcccagcccctctcccctctgtcttgatccccccctccctgcccctggcttcctcttccatgttctgccctttcccacacctttgttcctcaatagctgggggctgggactgaggcctcctgcaggtacctgccccccttcacacagcacctctcaatctcctattgcttgtcagcctgtgtgcgtgtggtgcaggaaataaaggatctataccctcctg

SEQ ID NO: 548559 - DNA, 194 bp, Homo sapiens
gacgagatcccgaaagacacaggtaggtggtgtgtcctgtagtcccaactactcaggagctgaggtgggaggattgtttgagtctagcatgggtaacatagcgagacatctctttttttttttttttttttttttttttttttttttttttttttttttttttttttttttttgggggaagggacccccctttt

SEQ ID NO: 548560 - DNA, 204 bp, Homo sapiens
aaagtccggtagtttttaaactgtttgtttttaaaccaactataggactcttcattgtccagccaagccaagagtccctgcatccatgaaagttccagaacctcctgtactttaaccccgattccgccacgcttctgttattttttttgtatgtttaggatgctgaaatgtttttgaagttaaataacccgtattaccttttta

SEQ ID NO: 548561 - DNA, 615 bp, Homo sapiens
  misc_feature (608)..(608): n is a, c, g, or t
tgtaagccagtaaataagataaaacaaaaggtacttgtaataatagtcatataaaatagctatatgcatgcttttagaaacccaagacacaaataaaaatataccagcagtttgtcttttgagcagctgaaacctatcagagctattcaaagattatgtctcttcactgtagctgctatattggtggtagagtttccatcctttcagtattttatatttaaaatgtaaatagtatttcatgtaataggaaaagaagcctgctaaattttctttgctaaaaaaaattttaaatctaaaataatgatatagtagtaacagcaaattagtgatgtttcataactaactaacattaatggattattttagaaacaaagacaaaagaaccttactgagccacttaaatgaaagtaaattatttaaagtacacactattaaagagtgctattcaggcctatggagatagttattttgagtcatagaattacattttaaaaatttattttccgagacttaatattgtgaggttattcttaggttataagtctgaatttttgctcttactggccaattgtttgtaggtttatgaaccccatgaaacatcacttggnactttga

SEQ ID NO: 548562 - DNA, 4445 bp, Homo sapiens
gcagactcgagatgcgcccgaggaggttgggccggtgctgcgcggggagccggctcggacccggggacccagcagcactcacctgtgcaccttcgccctcagccagtcccgctccggagccctctgcgcagccgcaggcacggggcactggacagagagtaggatcccgagccacctctggaacccagttcctctcggaagcccgcaccggagctcgcccggcctcggaggctggagccaaggcaggagcccggcgcccgtccgcattctcggccatccaaggggatgtccggtctatgcccgacaattcggacgcgccgtggacccgcttcgtattccaagggccgtttggttcccgggccactggccgggggactggaaaggcagcgggcatctggaagacgccagccgcctacgttggccggcgacccggggtgtccggccctgagcgcgccgcctttattcgggagctggaggaagcactgtgtcctaacctacctccgccagtcaaaaagatcacccaggaagacgtcaaagtgatgttatatttgctggaggagcttctcccacctgtctgggagagcgttacctatgggatggtcctgcagagagagagggacctgaacactgcagctcgcatcggccagtccctggtgaaacagaacagtgttttgatggaggagaacagcaagctggaagccctgctgggctcagccaaggaggagattttatacctcagacaccaggtgaacttgcgggatgagctcctccagctctactcagattctgatgaggaggatgaggatgaagaagaggaggaggaagaaaaggaggcagaagaggaacaggaagaagaagaagcagaggaagacctgcagtgtgctcatccctgtgatgcccctaagctgatttcgcaggaggcattgctgcaccagcaccactgcccacagctggaagccttgcaggagaagctgaggctgctggaggaggagaatcatcagctgagagaagaggcctctcaactcgacactcttgaggatgaggaacagatgctcattctggagtgtgtggagcagttttcggaggccagccaacagatggctgagctgtcggaggtgctggtgctcaggctggaaaactatgaacggcagcagcaggaggtcgctcggctgcaggcccaggtgctgaagctgcagcagcgctgccggatgtatggggctgagactgaaaagttgcagaagcagctggcttcggagaaggaaatccagatgcagctccaggaagagagcgtgtgggtgggttcccagctgcaggacctgcgggagaagtacatggattgtgggggcatgctgattgagatgcaggaggaggtgaagaccctccgccagcaacccccggtgtccactgggtctgccacccattacccatacagtgtgcctctggagactcttcctggtttccaggagacgctggctgaggagctcagaacgtctctaaggaggatgatctcagaccctgtgtattttatggagaggaattatgagatgcccagaggggacacatccagcctaaggtatgattttcgctacagtgaggatcgagagcaggtgcgggggtttgaggctgaggaagggttgatgctggcagcggatatcatgcggggggaagatttcacgcctgcggaggagttggtgccccaggaggagctgggggctgccaagaaggtgccggctgaggaaggggtgatggaagaggcagagctggtgtcagaggagaccgagggctgggaggaggtggaactggagctggatgaggcaacgcggatgaacgtggtgacatcagccctggaggccagcggcttgggcccttcacacctggacatgaattatgtcctccagcagctggccaactggcaagatgcccattacaggcggcagctgaggtggaagatgctccagaaaggtgagtgcccccacggggccctccctgccgccagccggacaagctgcagatcgtcgtgccgatgaaaagagagggtggataagctccccgagtgctcacctgccccagcctggctctacctgctgtgcttatttgcatggactttgcatatcatttgcatagacacctctgatccccttcagtgggaaccgtagtgtcagtgctcatttatgtggcatttgcttaggattccagatctccatccacttttctcctgggggctgggctgggggttagggctgggactgtgcccccacactgcgcctcagcttcccatctctgcccgcttgcttcccctacccccaacccctgcctcctctataccccaggctctccaactctgcagcagtggcagcagcagtcaaaacaaacacggggggcggtgggtgggatggtggagcagcctgggggctgacccaggctggaggacaggaccagccaccctcccacggcctgggaggaagagaggccttctgggactgcccaggctatggggacaaaggccttcaccagcaagggccacagttggaacagtcccctgggtgtcagaaggtgggctagggcctcctgcagggttgtggggtggaacagggtctcctctccccagccagaaaccccaaagtctgggagctgcacctgccgagtgcaggccatgtgagccctgcctctttaaggagccgcaggacatgaaagatgaccttgtgacactcatgcacagcagccattgcacgtgcatcagctcccatcagcctcattccgtggcaggtgatgtgtccccattggttaggtgaggagggtgaggctcagagagctaaggacacttgtttggggccacacagccggggtagatctgagcccgtcctctctactcctgtgctgtagcaccttcactggcccatccctcccctctagtgctgtcctggtacccgtcccagcctgtccccattctcatggccctttggtcactgccgggtggaatagcactggcttcagcaggcgtgtcatgtaagcttgtgcaggttataaactgaaccatgacctttatggcgcatgcagggggcaacctgcataattatcaatggcgactttccgtgtccttctgatacagttgatcagacccctgcccaccgcccaggccaggcctgtggtcatcaatgccccagttcacatccacctgcttctcttccaggctttgctgttccccagcagcctgcagaggccccacagacagcttgaggcccctcctgctgcctggccaagccccacacccgcagaccctccttcccatcctctgaaatgggaccctgtgtctgtcaccagcccaccctctgtgttcatgaacctgggctggagcttggggacccctccctgcccctggcttcctcttccatgttctgccctttcccacatgttggaggcttttccaacgtcttcagggacaggcggtaggaaccccggccctcgctctgcagctggtgcaaaagctgtggctgccaggcctgggccacatggcagcccagggggcaggagaagcccgggagaggcccgctggctaccagactcagccctgagcagggaacagggcccagcttccaccggcagggagttgtgagcgccttcccaacaatgtgcccctcaccccttgatgcccatgctaatggtagccaccctggttcttgttgacttgagggacctggctgtcttccctgttcttcatcctttcttctcagtccctacctactgtttgtaaccacaagtgtctctgtgtgtgggtgggtgagggcccctctgcccagtggtgtgtctcctctccctccctccctcttctgccagtggcctgggggtgtccaggctcccatccatggcccagcccctctcccctctgtcttgatccccccctccctgcccctggcttcctcttccatgttctgccctttcccacacctttgttcctcaatagctgggggctgggactgaggcctcctgcaggtacctgccccccttcacacagcacctctcaatctcctattgcttgtcagcctgtgtgcgtgtggtgcaggaaataaaggatctataccctcctggaaaaaaaaaaaaaaaaaaaaaaaacaaaaaaaaaaaaaaaagaaagaaaaaaaaaaaaaaaaaaaaaacaaaacacaacacgcgcaaacacaccccaaacgcgaagagaacagacgcagagagcgaaaaacgacggcagccgaagaaccaacaccggcgagaagcggcagaaaccccgacggccggcgcggagcagaggcggcagaaacacaacacaaaacgaaacaaccaacaacgcacaaaaaggaagcaaaagaaacagcgaagagagagaacaaacaaccacgaacaggaaggaggacacacagcagaaacgaaaaacaaacagacacaaaccaagcgacaacaaccacacacaa

SEQ ID NO: 548563 - DNA, 140 bp, Homo sapiens
aagcagtaatacagactcatggcttcaagtaatatatgtgtgctgacaatcacagattttattcttaatgcatacggctttccatgacaacccacctcaagttggtcccactgtaatttttctattatagcacccagggt

SEQ ID NO: 548564 - DNA, 3899 bp, Homo sapiens
gcagactcgagatgcgcccgaggaggttgggccggtgctgcgcggggagccggctcggacccggggacccagcagcactcacctgtgcaccttcgccctcagccagtcccgctccggagccctctgcgcagccgcaggcacggggcactggacagagagtaggatcccgagccacctctggaacccagttcctctcggaagcccgcaccggagctcgcccggcctcggaggctggagccaaggcaggagcccggcgcccgtccgcattctcggccatccaaggggatgtccggtctatgcccgacaattcggacgcgccgtggacccgcttcgtattccaagggccgtttggttcccgggccactggccgggggactggaaaggcagcgggcatctggaagacgccagccgcctacgttggccggcgacccggggtgtccggccctgagcgcgccgcctttattcgggagctggaggaagcactgtgtcctaacctacctccgccagtcaaaaagatcacccaggaagacgtcaaagtgatgttatatttgctggaggaggtgtgtactgccttcctgatccagcttctcccacctgtctgggagagcgttacctatgggatggtcctgcagagagagagggacctgaacactgcagctcgcatcggccagtccctggtgaaacagaacagtgttttgatggaggagaacagcaagctggaagccctgctgggctcagccaaggaggagattttatacctcagacaccaggtgaacttgcgggatgagctcctccagctctactcagattctgatgaggaggatgaggatgaagaagaggaggaggaagaaaaggaggcagaagaggaacaggaagaagaagaagcagaggaagacctgcagtgtgctcatccctgtgatgcccctaagctgatttcgcaggaggcattgctgcaccagcaccactgcccacagctggaagccttgcaggagaagctgaggctgctggaggaggagaatcatcagctgagagaagaggcctctcaactcgacactcttgaggatgaggaacagatgctcattctggagtgtgtggagcagttttcggaggccagccaacagatggctgagctgtcggaggtgctggtgctcaggctggaaaactatgaacggcagcagcaggaggtcgctcggctgcaggcccaggtgctgaagctgcagcagcgctgccggatgtatggggctgagactgaaaagttgcagaagcagctggcttcggagaaggaaatccagatgcagctccaggaagaggagactcttcctggtttccaggagacgctggctgaggagctcagaacgtctctaaggaggatgatctcagaccctgtgtattttatggagaggaattatgagatgcccagaggggacacatccagcctaaggtatgattttcgctacagtgaggatcgagagcaggtgcgggggtttgaggctgaggaagggttgatgctggcagcggatatcatgcggggggaagatttcacgcctgcggaggagttggtgccccaggaggagctgggggctgccaagaaggtgccggctgaggaaggggtgatggaagaggcagagctggtgtcagaggagaccgagggctgggaggaggtggaactggagctggatgaggcaacgcggatgaacgtggtgacatcagccctggaggccagcggcttgggcccttcacacctggacatgaattatgtcctccagcagctggccaactggcaagatgcccattacaggcggcagctgaggtggaagatgctccagaaaggtgagtgcccccacggggccctccctgccgccagccggacaagctgcagatcgtcgtgccgatgaaaagagagggtggataagctccccgagtgctcacctgccccagcctggctctacctgctgtgcttatttgcatggactttgcatatcatttgcatagacacctctgatccccttcagtgggaaccgtagtgtcagtgctcatttatgtggcatttgcttaggattccagatctccatccacttttctcctgggggctgggctgggggttagggctgggactgtgcccccacactgcgcctcagcttcccatctctgcccgcttgcttcccctacccccaacccctgcctcctctataccccaggctctccaactctgcagcagtggcagcagcagtcaaaacaaacacggggggcggtgggtgggatggtggagcagcctgggggctgacccaggctggaggacaggaccagccaccctcccacggcctgggaggaagagaggccttctgggactgcccaggctatggggacaaaggccttcaccagcaagggccacagttggaacagtcccctgggtgtcagaaggtgggctagggcctcctgcagggttgtggggtggaacagggtctcctctccccagccagaaaccccaaagtctgggagctgcacctgccgagtgcaggccatgtgagccctgcctctttaaggagccgcaggacatgaaagatgaccttgtgacactcatgcacagcagccattgcacgtgcatcagctcccatcagcctcattccgtggcaggtgatgtgtccccattggttaggtgaggagggtgaggctcagagagctaaggacacttgtttggggccacacagccggggtagatctgagcccgtcctctctactcctgtgctgtagcaccttcactggcccatccctcccctctagtgctgtcctggtacccgtcccagcctgtccccattctcatggccctttggtcactgccgggtggaatagcactggcttcagcaggcgtgtcatgtaagcttgtgcaggttataaactgaaccatgacctttatggcgcatgcagggggcaacctgcataattatcaatggcgactttccgtgtccttctgatacagttgatcagacccctgcccaccgcccaggccaggcctgtggtcatcaatgccccagttcacatccacctgcttctcttccaggctttgctgttccccagcagcctgcagaggccccacagacagcttgaggcccctcctgctgcctggccaagccccacacccgcagaccctccttcccatcctctgaaatgggaccctgtgtctgtcaccagcccaccctctgtgttcatgaacctgggctggagcttggggacccctccctgcccctggcttcctcttccatgttctgccctttcccacatgttggaggcttttccaacgtcttcagggacaggcggtaggaaccccggccctcgctctgcagctggtgccccgggagaggcccgctggctaccagactcagccctgagcagggaacagggcccagcttccaccggcagggagttgtgagcgccttcccaacaatgtgcccctcaccccttgatgcccatgctaatggtagccaccctggttcttgttgacttgagggacctggctgtcttccctgttcttcatcctttcttctcagtccctacctactgtttgtaaccacaagtgtctctgtgtgtgggtgggtgagggcccctctgcccagtggtgtgtctcctctccctccctccctcttctgccagtggcctgggggtgtccaggctcccatccatggcccagcccctctcccctctgtcttgatccccccctccctgcccctggcttcctcttccatgttctgccctttcccacacctttgttcctcaatagctgggggctgggactgaggcctcctgcaggtacctgccccccttcacacagcacctctcaatctcctattgcttgtcagcctgtgtgcgtgtggtgcaggaaataaaggatctataccctcctg

SEQ ID NO: 548565 - DNA, 332 bp, Homo sapiens
tttccatggatatcgatcgcgcttcctatcaaaatcacagcaagattttattctagatacagaaaagtgtattccataatttatctaaaaagacaaaggaactagaataaccagaaacaattttgaaaaagaaaataaaggggcaatcatcagtgtacctgatttcaaagcttattatatagctatagtaatcaagacaatatattatcagctgggggacatacacagatcaatgaaatagagtagaaaatgcgaaaacagatgaacagatatatccaagtaattattgagagaggtgcaaaacacattcaatggagaaaaaataggctttt

SEQ ID NO: 548566 - DNA, 2123 bp, Homo sapiens
gcagactcgagatgcgcccgaggaggttgggccggtgctgcgcggggagccggctcggacccggggacccagcagcactcacctgtgcaccttcgccctcagccagtcccgctccggagccctctgcgcagccgcaggcacggggcactggacagagagtaggatcccgagccacctctggaacccagttcctctcggaagcccgcaccggagctcgcccggcctcggaggctggagccaaggcaggagcccggcgcccgtccgcattctcggccatccaaggggatgtccggtctatgcccgacaattcggacgcgccgtggacccgcttcgtattccaagggccgtttggttcccgggccactggccgggggactggaaaggcagcgggcatctggaagacgccagccgcctacgttggccggcgacccggggtgtccggccctgagcgcgccgcctttattcgggagctggaggaagcactgtgtcctaacctacctccgccagtcaaaaagatcacccaggaagacgtcaaagtgatgttatatttgctggaggaggtgtgtactgccttcctgatccagcttctcccacctgtctgggagagcgttacctatgggatggtcctgcagagagagagggacctgaacactgcagctcgcatcggccagtccctggtgaaacagaacagtgttttgatggaggagaacagcaagctggaagccctgctgggctcagccaaggaggagattttatacctcagacaccaggtgaacttgcgggatgagctcctccagctctactcagattctgatgaggaggatgaggatgaagaagaggaggaggaagaaaaggaggcagaagaggaacaggaagaagaagaagcagaggaagacctgcagtgtgctcatccctgtgatgcccctaagctgatttcgcaggaggcattgctgcaccagcaccactgcccacagctggaagccttgcaggagaagctgaggctgctggaggaggagaatcatcagctgagagaagaggcctctcaactcgacactcttgaggatgaggaacagatgctcattctggagtgtgtggagcagttttcggaggccagccaacagatggctgagctgtcggaggtgctggtgctcaggctggaaaactatgaacggcagcagcaggaggtcgctcggctgcaggcccaggtgctgaagctgcagcagcgctgccggatgtatggggctgagactgaaaagttgcagaagcagctggcttcggagaaggaaatccagatgcagctccaggaagaggagactcttcctggtttccaggagacgctggctgaggagctcagaacgtctctaaggaggatgatctcagaccctgtgtattttatggagaggaattatgagatgcccagaggggacacatccagcctaaggtatgattttcgctacagtgaggatcgagagcaggtgcgggggtttgaggctgaggaagggttgatgctggcagcggatatcatgcggggggaagatttcacgcctgcggaggagttggtgccccaggaggagctgggggctgccaagaaggtgccggctgaggaaggggtgatggaagaggcagagctggtgtcagaggagaccgagggctgggaggaggtggaactggagctggatgaggcaacgcggatgaacgtggtgacatcagccctggaggccagcggcttgggcccttcacacctggacatgaattatgtcctccagcagctggccaactggcaagatgcccattacaggcggcagctgaggtggaagatgctccagaaagagccccagccgtggacctaagatgggtagagaaaacactttccctcctctacagccctcaggtggcgggtagctcaaggtaatggtgtcaacaggcacaagaacaatgatggaatggagtgagacaccagcaatgcctgcatcagccactcatgagcaattatttacaaatatttattgggttcctcctattcttgccaccggtgatacagaagggaggagggacttgtcacgctcccagtttcctgttttgcccgagaggcagacaataaactggcaaacaaaaaaaaaaaa

SEQ ID NO: 548567 - DNA, 228 bp, Homo sapiens
cttatagatgcgagaaggagaggatgacagagatagcgcaatggcgaggatgactcttaagcacataggggggttagaaatcttatgccatattggttgagctaggcgcttgtctaagatcaaatttttcaccagatcctctcccctagtatcttcagcacatgctcactgttctccccatccttgtccttcccatgttcattaattcatatggcccccgggacgggg

SEQ ID NO: 548568 - DNA, 1386 bp, Homo sapiens
gcagactcgagatgcgcccgaggaggttgggccggtgctgcgcggggagccggctcggacccggggacccagcagcactcacctgtgcaccttcgccctcagccagtcccgctccggagccctctgcgcagccgcaggcacggggcactggacagagagtaggatcccgagccacctctggaacccagttcctctcggaagcccgcaccggagctcgcccggcctcggaggctggagccaaggcaggagcccggcgcccgtccgcattctcggccatccaaggggatgtccggtctatgcccgacaattcggacgcgccgtggacccgcttcgtattccaagggccgtttggttcccgggccactggccgggggactggaaaggcagcgggcatctggaagacgccagccgcctacgttggccggcgacccggggtgtccggccctgagcgcgccgcctttattcgggagctggaggaagcactgtgtcctaacctacctccgccagtcaaaaagatcacccaggaagacgtcaaagtgatgttatatttgctggaggaggtgtgtactgccttcctgatccagcttctcccacctgtctgggagagcgttacctatgggatggtcctgcagagagagagggacctgaacactgcagctcgcatcggccagtccctggtgaaacagaacagtgttttgatggaggagaacagcaagctggaagccctgctgggctcagccaaggaggagattttatacctcagacaccaggtgaacttgcgggatgagctcctccagctctactcagattctgatgaggaggatgaggatgaagaagaggaggaggaagaaaaggaggcagaagaggaacaggaagaagaagaagcagaggaagacctgcagtgtgctcatccctgtgatgcccctaagctgatttcgcaggaggcattgctgcaccagcaccactgcccacagctggaagccttgcaggagaagctgaggctgctggaggaggagaatcatcagctgagagaagaggcctctcaactcgacactcttgaggatgaggaacagatgctcattctggagtgtgtggagcagttttcggaggccagccaacagatggctgagctgtcggaggtgctggtgctcaggctggaaaactatgaacggcagcagcaggaggtcgctcggctgcaggcccaggtgctgaagctgcagcagcgctgccggatcttatggggcccagacggagaaactgcagcagcagctggcctcagagaagggagtccacccagagagcctgcgagctggctcccacatgcaggattatggaagcaggcctcgtgaacgccaggaggatgggaagagccatcgtcagcgttcc

SEQ ID NO: 548569 - DNA, 1949 bp, Homo sapiens
gcagactcgagatgcgcccgaggaggttgggccggtgctgcgcggggagccggctcggacccggggacccagcagcactcacctgtgcaccttcgccctcagccagtcccgctccggagccctctgcgcagccgcaggcacggggcactggacagagagtaggatcccgagccacctctggaacccagttcctctcggaagcccgcaccggagctcgcccggcctcggaggctggagccaaggcaggagcccggcgcccgtccgcattctcggccatccaaggggatgtccggtctatgcccgacaattcggacgcgccgtggacccgcttcgtattccaagggccgtttggttcccgggccactggccgggggactggaaaggcagcgggcatctggaagacgccagccgcctacgttggccggcgacccggggtgtccggccctgagcgcgccgcctttattcgggagctggaggaagcactgtgtcctaacctacctccgccagtcaaaaagatcacccaggaagacgtcaaagtgatgttatatttgctggaggaggtgtgtactgccttcctgatccagcttctcccacctgtctgggagagcgttacctatgggatggtcctgcagagagagagggacctgaacactgcagctcgcatcggccagtccctggtgaaacagaacagtgttttgatggaggagaacagcaagctggaagccctgctgggctcagccaaggaggagattttatacctcagacaccaggtgaacttgcgggatgagctcctccagctctactcagattctgatgaggaggatgaggatgaagaagaggaggaggaagaaaaggaggcagaagaggaacaggaagaagaagaagcagaggaagacctgcagtgtgctcatccctgtgatgcccctaagctgatttcgcaggaggcattgctgcaccagcaccactgcccacagctggaagccttgcaggagaagctgaggctgctggaggaggagaatcatcagctgagagaagaggcctctcaactcgacactcttgaggatgaggaacagatgctcattctggagtgtgtggagcagttttcggaggccagccaacagatggctgagctgtcggaggtgctggtgctcaggctggaaaactatgaacggcagcagcaggaggtcgctcggctgcaggcccaggtgctgaagctgcagcagcgctgccggatgtatggggctgagactgaaaagttgcagaagcagctggcttcggagaaggaaatccagatgcagctccaggaagaggagactcttcctggtttccaggagacgctggctgaggagctcagaacgtctctaaggaggatgatctcagaccctgtgtattttatggagaggaattatgagatgcccagaggggacacatccagcctaaggtatgattttcgctacagtgaggatcgagagcaggtgcgggggtttgaggctgaggaagggttgatgctggcagcggatatcatgcggggggaagatttcacgcctgcggaggagttggtgccccaggaggagctgggggctgccaagaagcagctggccaactggcaagatgcccattacaggcggcagctgaggtggaagatgctccagaaagagccccagccgtggacctaagatgggtagagaaaacactttccctcctctacagccctcaggtggcgggtagctcaaggtaatggtgtcaacaggcacaagaacaatgatggaatggagtgagacaccagcaatgcctgcatcagccactcatgagcaattatttacaaatatttattgggttcctcctattcttgccaccggtgatacagaagggaggagggacttgtcacgctcccagtttcctgttttgcccgagaggcagacaataaactggcaaacaaaaaaaaaaaa

SEQ ID NO: 548570 - DNA, 327 bp, Homo sapiens
acggagactgcaggtggtataaggtgctcttgtgagcacggggcaggagttggaattagttgctccctactgtggccgatgaggttgtgaacccctccccccaacttttcatgtttcttaaaggcattatggtttcttaaaatctgtacagcaagagcaactttttctgtcaaataaaaatgagaaatgcaggaactgggtctgtagactgtttattaaaggtgagttaaggtggcagccacttccctccgtgattacagcccccagcgtgggaggacctgtgtgggtccagcttgtggttccctcattgtacatgctgtcaaacca

SEQ ID NO: 548571 - DNA, 446 bp, Homo sapiens
ctcgtccgagcagatacgggaggactatgtacatggccagttctaggcagtggcttaagagctctgcccctgcagtgccttcaactttgtctctgtttccttatcaacagaacagatagtagtaccacacttcagggtcgaataaagtaaataaagaacaaaacaacggctgggtgcggtggctcacgcctgtaatcccagtacttggggagattgaggtgggcggatcatgaggtcaggagtttgagaccagccttatcaacatggtgaaaccccatctctactaaaaataacaaaaattagccaggagtggtggtgcatgcccgtaatcccagctactcaggaggctgaggcaggagaatcacttgaacccgggaggcagaggttgcagtgagccaagatcgcgccactgcactccaacctgggtaacagcgagattccgtctc

SEQ ID NO: 548572 - DNA, 153 bp, Homo sapiens
  misc_feature (16)..(16): n is a, c, g, or t
  misc_feature (22)..(22): n is a, c, g, or t
  misc_feature (24)..(24): n is a, c, g, or t
  misc_feature (39)..(40): n is a, c, g, or t
cttactctgtacacangtacantnaatcccgagtatgtnntcgaatgcttgtgatacatcatgtgttaagatacggacaatttatatgcctgaggaccagtcctgggtcggtggtgtggcctggctgctgcctctgcttggggactgactggg

SEQ ID NO: 548573 - DNA, 389 bp, Homo sapiens
tctcccctccccccttttaaccatttcccctgcggaggcgcttccccgggcagggcagagccggtctcacccccggttttccgggccggcggctatggaaggaagcttcaccgggtggggggctggcggggggttaatcgtggcacctaatttcggttgaaggcgcagcctcatggagtgtgccgctgcttgttgacgtttcccgccttggagccaggcattgccgtcttgtgcactctggtgcccccccggtatcggtttgtcccccctgtgtttcgtcgcactctctcattgggtgcagtttttagtacacggcgctcccccgatctctcgggcgcgccttttttaccaagtggacgtgctatcggcgcctgggaataacccggtct

SEQ ID NO: 548574 - DNA, 272 bp, Homo sapiens
tgagatggagtctcgctgtgtcactcaggctggagtacagtggcgcgatctctgcttactgcaaccttcgcctcctgggttcaagcgatttttctgtctcggcttcctgagtagctgggattataggtgtgcgccaccacgcccagctaatttttgtatttgtagtagagatggggtttcaccatgttcgtcaggctagtcttgaactctattctattttaaggacaggttgtgaacctgacctcgtgatccacccgcctcagcttcccaaa

SEQ ID NO: 548575 - DNA, 205 bp, Homo sapiens
  misc_feature (93)..(93): n is a, c, g, or t
  misc_feature (144)..(144): n is a, c, g, or t
  misc_feature (157)..(157): n is a, c, g, or t
cacctggctaatttttgtatttttaatagagacagtgtttcaccatgttgcccaggctggtctcaaactcctggcttcaagtgatccgccctntttgtcctcccaaagtgctggtattacagacttgagccactgcgcccagcntacattgtttagnttgatcattcactttacttattggcatttgactctttgcaagtatctt

SEQ ID NO: 548576 - DNA, 820 bp, Homo sapiens
gattgtaagtagagtattccacagaaagtggtaatcatctcgtgctctctgacctcgattatgaaaatgtaggtaaattgaagtaggattgcctatagatgggagcatcgagactacttattaaatacacacatgagaagtgatcgaattagaagaagagtttgtctaaggatcgtgcattgttattctgacagatttattgattaacagtgaaggaatttttaaagaaattcgttaatgaattgttcggtcaggtcagttttagaaatgttctacctgtatatggtaatgtccagttttaaaaatattggacatcttcaatcttaaacatttctatttagctgattggttctcacatatacttctaaaagaaacttttatgttataagagttactttttggataagatttattaatctcagttacctactattctgacattttaggaaggaggtaattgtttttaatgatggataaacttgtgctggtgttctggatcttatgatgctgagcatgttctgcactggtgctaatgtctaatataattttatatttacacacatacgtgctacccagagattaatttagtccatgtgaactaattgacccatgtgttcattgagacagcaacatacgcactcctaaatcaggggtgtctagacttttcaagtatctaacctcatttccaaacatgtaccatgtcttcataaacctctggatttccagcaacatactatagaaaacactgctactcaaaaacaaattctcagtgtcatccattggctgtcggtgagaagacaactagcaatatctgggtcgg

SEQ ID NO: 548577 - DNA, 300 bp, Homo sapiens
actgactatgattagaaatgaatgtccactacgtaatactatcacatacaataaaaataccaatgcagttcatcctataagtggataaactctgcttcccaacctcactctgagcggggaaagccctcctcagctcactgtggatctaatttacatcgtcctcacatacctcgaaggcacatgtgtcacctacatggtgctctccatgcattaaacacccaatttcatccattgcagcaattaggtgggctcacttagcaagagatagatcacccggggaagcactaagcgagggtgggc

SEQ ID NO: 548578 - DNA, 149 bp, Homo sapiens
gaccctatgagagcaaggacccttaggtatcactgttcaatgattcagagctcagctgggcccccaattccagacaccagcatttccggtcactccctccctaatatgagcatcactcaagctttgtattaaactcaatttggcccaga

SEQ ID NO: 548579 - DNA, 528 bp, Homo sapiens
tcgcatgtaccctgaagcacaccaggtggtggacgtgccgtgtcctaatgagctacgcgtggcttagagagtagaggttggggtctatgaagcccaactctggcttaaagatcttggtgggggtcggtcatgttctgaggccttggaattagcctcttcctcattatggagctgattttctagtctgtggatcagctatgcttttgcacacttctcttttccattgtgcctatggaatgttgtcttctcactcgggcatcagcagttcgatctaaatgcagactagggagttgggaggaggaactaaagtgaaccatccttcatttattcagtcattcgttcatctgtcaaacacgtatttggaggtcaaggttggcgagatgaaccaatgctgggttccatctttggggagttcaaaacctaggggagagacacattgtacactcgtcacacatgtagggcccagttagtgctgcagtaaaggtactaataacatgttccttggagaggaagaaaaaccacgaaacc

SEQ ID NO: 548580 - DNA, 164 bp, Homo sapiens
atgggttttgctgtgagctgggtgaagcccgtgactgccatctttcccccacctgtctgacaacctgcatgactcagcagaggcagcgataatcctcctaggtacactatctccagtgacctgagaatctcacccccatccccaacagcagccacagcaagaca

SEQ ID NO: 548581 - DNA, 503 bp, Homo sapiens
caggcccagctttcacccatccccagcttcctgaagctctacccaccattgcctgtggccaagctgggtggcttcctggacctcacagagcaggagttccggatccagcttcttgtcttcaaacacaagatgaagaacctcgtgtggaccagcggtatttcagccctggatggtgaatttcagtcagcctcagaggttgacttttacattgataaggacatgatccccatcgcggacaccaaggtcgccaggggttatggggattttttcatccgtcagatccccaaatttgaggagctttatcgaaccctgaagaaaatggggcagagcccttgatgatattcccccccattcaggaacctgtttttatgtattataggcaggaagggtttttgctcccgtgaaacctttacctagatcagccatcagcctgtcaactcagttaacaagttaagggccgaagtgtttcaagtgggtttcagtaaaggatttttggagccaga

SEQ ID NO: 548582 - DNA, 205 bp, Homo sapiens
aatatggacaactgcagagacaaagatatgtgccccgtcagccactatccacagccttttgtgttccgagttgcatatgttggtcaattataggagctcaccaaagatagaggccctttatgaaaaatgaccctctattttttttcgttcccaaaaagggttcccaaaacctccccaacataaaaaaaaaaacaacacataaaaa

SEQ ID NO: 548583 - DNA, 125 bp, Homo sapiens
aatccacacggatcccctcttctccgaaagcacttctctgtggtgccggccaccgtctccagtggctatggcggtgccagctggtgtcggcagtggccttaggcctggcgtggtaggaacgcacg

SEQ ID NO: 548584 - DNA, 1268 bp, Homo sapiens
gcggtgttggtggcagcaggcgcagcccagcctcgaaatgcagaacgacgtcctggcgagattcgtggacctgttacgtgccgcggaaatgctccgctagcaatcgcatcatcgtgtgccataggaccacgcatccatccagaataacgatgagccgcagtgttgacaagtgtctacggtgccaggatttaaatggccagttttaacaacttatgctatctgcgaggagtccattgcgttaggcatgggtgagtcagatgattccatttctccgaattggccaaggctctgattggcgatctgtctcgacaatgaaccttgttggacgtcggtacgcagaatctacacgatgtcgtgcacatcattatgtcccatgaacataaattaagtgacagacctcatgaaacaaagcattataggactatagagagcccaataaagagatggtagcagtacaccagcgcgaagggcaaaactctatatgtcgtggtcgtgacggcgatagacagaagatgtgtgccagggaccgatgagtgccccggttggcgcgctttacgcgaggttactccccaagtaattgccaagaggaactttgtctattgggaaccaaggcaagcgcgcgttagacataataaccggaaggtccatccactctttcctgtagggacggcgggccgttattctgatatgaaacctataacggaatccacgccgcaaacccgttgtggtacacccatgggaggctattgccataggagaccccagcgcggaacgacaaagagccccaaccagcgggtccaaattggcggcgcacctttaaagggcggtaccgtccatacatcataataagggaggtatcctattacattaacggggggcggccccttccaaaaacggggattcccttcttagccactcggttttggccaatttaaggcgcacttatgccttcgcaacgtttaagaagcccccccatcgattgggctggccaacagttacacacgcttaagttggcagctatccaggaccgcagcgtgggcgcccactattcagtccgttggcgtcgtcgtcggggtgcgaacccaagacgaaaaagagctgtgttttcatagatcactttaaaaccttagggcgtttactcgtacagacaccaactctgaccccctttgttgtggcacacagcagggtttagcggtatggaatcggatcccgattcaaaccgtggtgaccccttaagattcccccacccaccttacacgattaacccc

SEQ ID NO: 548585 - DNA, 342 bp, Homo sapiens
ctctaccacccactagatgccagtagcattgacccctgatctatctacccaagttgtgacaactgaaaccatctctggctaatggaggaaccttaaatgcatattgctaaggaaaagccaatctgaaaggattacatattgtatgagtccaactatatggtaatctggaaaaggcaaaaccatggagacagtgaaaaggtagtggttaccagtggtccatgggaagggttggatgaataggtggagcacagaggatttttaaggcagtgaaactattctgaatgatactgtaatggtggatacatgtcatacctttgtcaaaaccaataaaatataacaacc

SEQ ID NO: 548586 - DNA, 1180 bp, Homo sapiens
  misc_feature (273)..(273): n is a, c, g, or t
agcggcgtgagcagagtactgatggtgtgcgtgtttgtgtgtgtgtatatgtgtgtgtataagatgacgaaagagaaactcgaaaacgacgagagaaattccaaacttgtcttcgttttaccaggattaatccaaggacgcatggttacaggaaccctgatagttggacgctctaatcgtagaatagctgcgactagatctcactaggtagacttcagtgatgctataagtcgtgtatcatgtgaacactccacgaactgtaatatactagancaatataagggagagataggagataacgtgagatctcttccttgaatactatggagactaggacgcaagaactaaatcaacctcgacttttagtttatccccaattttgcactgtggtttagcaatatagtataaatactatcgtcgagaatccaaatggaggttaccacggggccttccggttttggctacgctaatatttggttccccctgccatgtgaaagtgttgctatagccatggcccatgtttggcagaaaattatttccacgtaagtaacgcggtcaccggacttgtttatagcggccatggcttggatatgggtacgaacgccatggatttgttgcctcctcttctccaatcgggcacacctaatacaccgaaagacgaggcccacacggaaagacggagagacaccatgaacgcccaagcgcgaactccagaatatatggcttacctttgcaaacggtctggcatgccaaaagcagagccgagcccttggactaaggtctatacagatacgaaaaggcctcctttcccagattgaacttgaccccccgaaccattatgtatgcagaaaaacacaaagatcagaagaagtgggccttcacaagaattatagcggcatgtagagaatacctaacggggaccaacattaatataaacgggcaccccctttgaacctccgctttacatacagaagatcagtcgagtgaaggaccacccgggtgatgaaaacccaaagacgactttgtcatgagaactaccccgtctatatttgctcgtgaatagaggcggttaaacaatctctctccacaaccgcttgtcggagcgtgacatacattacactgtgacgagctctacaacgaacgcgtgtgttacttccccatgtgagttttaaacacaagt

SEQ ID NO: 548587 - DNA, 1431 bp, Homo sapiens
agcggaggtacgccgggaagtggcatatctgcgcaggactcggaattgcgcgcgacgcagcagaagccggcgcccctcgggagccgccgggaccctctgcgttgtcgccggcgacggcgccccatagtccccgctgccaatgccgattccggacgtagagaccattaccgcctcgcgcgacccgtcaccattcgaagcacatagcagtaggatcctacctgtcctgatcgtgtatttcggacgatgcaggtcagtccagaccgaaaaatccacagggtcgattaagtacgatactgactatcaaggggtttgaggaatacgccaggtctatgccccttgatatacctagagaacttgatataccagaactgtctctcgtctgctaaccattgaacctcattgttccgatcagtcgagctagacgtcttcatctgagagtaatagtaaagaatagggcgctccaccagcgtcaattggcctacattcagagccctttgtttcatggttttcgggtcggaactgtttacgagcccaagcgagttgtgctccacgcaagctcaatccaacatcgcgaaacttcatcacatgcacgtgtcgattattagacagaagcatcgacggcaatagggatttgtaatccaatttggggtaattatccccattgataacgcctttggtggggccgtaatcggcacttccctagtaaggggaacgtaccctgatattcccgtggtggaagtaggcaactcagtttccgcctacctgggaattcggctttaaaagaaaaaacgcacctattgttacacaacattcgcaattgggctatttccttgccattattaccttgagggaagcagtttgggtgtgcggtgaagataggcgcccgccttgtttaaacccccaggattgtgggcccacacacatcgcgccacaaaccgggggcggttcgggctcttaatccccaaaatccagtgggaacggacaattccggggcagcttccctaggctggttacccacttaccccccatttttcgaagccaaggcaaccttggcccatttggcatctactaccccaggcctcacagtgtttgtgttctccccccctatatccctttaggtggaaaagcctgggctatttctgcggaccactggcgtctttagccccgggcttttaagggagtgacactacgttcggacagcgaacccttgttcatgggacaaacaactctttgtgagaaacggcgtccctcccaaattgtttggaatggcccctacccaatattcttcacatagccccgcttggtatgtgtgtgcaccacacacggttaaacctatttttaatggtcgcttaacactggggttttaggggagccactgaagatcgcccccaggcgtttgtgggacccaatacaacagtttttttgtcccca

SEQ ID NO: 548588 - DNA, 117 bp, Homo sapiens
actggagaacgcggttgtatgaccgcagaaagggcagagctgagcgtatgacctgtgtcgttcccctccagaaatacccgcagccaaaggcagaagaagaagatcgtcaagtacggc

SEQ ID NO: 548589 - DNA, 184 bp, Homo sapiens
tgtctgttactgaggaccggataagcgacacctcgtgtatatgctccgaggtgtacaggcactagtaaagtctggtatactcaggacatccttctgtgccaactcacgagggacaatgccagcatcaggcccattcagtaccagactgcgcattgatgaacaccatctgtgaaacagcaccatg

SEQ ID NO: 548590 - DNA, 193 bp, Homo sapiens
tgtcatctctgatacggcacaaatccacttcctctcagtgtagtgccaggcactacaggaacctttgtcattcaaataggcacactctcctgctcccaggctaggaacactgcaagagcaggcgcagcacaccagtaggccactgcaacatttcttccaacagcagcacgcagtgacgatgagcaacaatgca

SEQ ID NO: 548591 - DNA, 404 bp, Homo sapiens
taaactaattattggattcggtttaacttaagaacaggtctaaatatgggggctattggagggcaaatggaaagactggggattactctctggtgatctggtggacagttgggcacagggtaacatttgggacatgtgtctcactcttatatctctttgaggagaggagaaaatatcacttgtgcgcaaaaatattacattactttcattagaccacgtgagttcatagtttttattcacactacaacattctctttaacgatgtggcaggtattctcaatttccttttaagaaaaatgaaatggtgaggagaattcgggtggtaatagatgacagtacatatgatctggcaggttggggcatatgctttcatcattaaattatctgataaagttacaagtcac

SEQ ID NO: 548592 - DNA, 737 bp, Homo sapiens
aacatcgacggacgcatcactatttatcctgatgctctccctcactctgccccctttacaggatccaggtgtatgttctcctccctgtgtacatgcgttctcattgttcagctcccacctataagtgagaacatgcagcgtttggttttctgatcctgtgttagtttgtggaggatgatggctttccagctccatgtatgtccctgtataaaacatgatctcattcctttttatggctggataatattccatggtgtatatgtagcatattttcttaatccaatctatcattgataagcatttaggttgattccatgtctttgctattgcgaatagtgctgcaatgaacatacacgtgcatgtatctttatagtagaataatttatattcctcttagtatatacctagtaatgggattgctttgtcaaatggtctttctggttctaggtttttgaggaattgcacactgtcttccacaatggttgaattaatttacattaccaccaacagtgtaaaagtattcccatttctccacagcctcaccagtgttcgttgtttcttgactttttaataatcaccattctgataggtgtgagatggtatctcatggtggctttcatttgcagttttctaatgatcagagaggtggagtttttttcatatgtttatgtggcacataaatatcttatctcgaagaagggtctgtcatgttctttggccactttataatggtttgg

SEQ ID NO: 548593 - DNA, 211 bp, Homo sapiens
cctggtttttagagccatgaacacagacgaggccatggtgatgctcacggtggtggcagtagcaaggacaggtatgctcctgggcattgaggttgataaccaatggtgctgcactgtgtggtcgacttgccgtcctgggcattggatccagtgacaagaccatacttcctcgcttccaccagcaagagaggtgaggtccatgccttggtct

SEQ ID NO: 548594 - DNA, 377 bp, Homo sapiens
tatcttatcagtttttaataagatcagaataggtattagactacctaatcagttttgattaaggagaaaatgaaattgtgttgttcacactttatccaagattggtgtcatatttgctaaatcaaatcaatacttgaacaaatgcaaaattagggcttatcatgaaacactatgtcattcttgaagaagatgccttttttatttttattttttaaaggtggtgtcttgcttttgtcgcccaggctggtgcaatggcgtgattttggctcactgcaacctctgccttctgggttcaagcaattctcctgcctcagctacttgggaggctgaggtaggagaatcgcttgaacctgcgggacggaggttgcaatgagctg

SEQ ID NO: 548595 - DNA, 435 bp, Homo sapiens
tagaggatccctgcttctaatccagtgtggacctgggacacacatgtctgagcctctactactacaacatgcaggtttatgcgttagagagtccaccttccagtgtagagacgtaactgacttttgtcaatgctgcgtgaggaacatatgaaggtcatccgggagagatatgatagtaagtctctggagccagcttctagagggtaggaaagacaagatgttcttattcagaatgactgtcaagacaagcaattcgtcagtttcactgggtatctgcaagtgataatcgattattctaatctaataagacaagtttgtggaaatgcaagatgaatacaagccttgggtccatgtttactctcttctatttggagaataagatggatgcttattgaagcccagacattcttgcagcttggactgcattttaagccc

SEQ ID NO: 548596 - DNA, 913 bp, Homo sapiens
tccagaggcgccagtggaagctgcggcggcggtgttcgctgttcggcgggatttctcttcgctccggcggcggggagctggcgctggagccccggtggccgccaccgccccggcccccaccgtgcacaaagcgaagaagtgcagccccgtggctgcggcctggctccctggctgcgctggacaagaagccctgccagggtgccagaagcctggagcagctgctctgcacaatgaatggtgctgctgtgcgccaatgaatgtgacaaatgtgctgtgcaatggccaagaaagactggccgtgcctgcctggtgggcaaatgaaggtgtgaagaatgggctggccaagcccagctgtccccaaatgtgccctaaggtgcctgcaaaggtgaggcgtgtctggcctggtcagatgctggcctggcgtgggcttttcggtgttttttggtttttctaccccaatgtgaccgtagattttgtacgggctcacgcctggccggggcctgcgatggcctggtcttgagcctcaggggatgggggccccgggtcctctcagtctttcccctcccccaacgatgtaagcgtttcgttgttatgctttagggtttttgaaacagcccccggctgacgcctctattggctctcggcttggcaaacggccgtcggtcatgtttacttggccccctaggctgccgatgcccgagtcctgtgcctgccccaccggggcgggggttcgcttggttggccggtgcccaggctgcgcggggactccggaagtgccggcgcattcttttcccaggttccccaccctcctttgccttttgggtttcgctacaaacaatcgttccgggctcaggctgcgcggtcttccttcattccattgggcttttttgggccaataagcgttaaccttttc

SEQ ID NO: 548597 - DNA, 383 bp, Homo sapiens
cagaatggattgaactaatagaaaacaagtataatttttaacctttttgcttaaaactttggtgatccttgctttgtttttctgagtcaagaatacttattttgaactatttaaagcctttaataattgagtaaactatacacctgtgaacaaaatttgaaggatgtttgtttctctctgcctggctttgccagaatttggaaactatttgtgagaatatttaatttatggcaattcagttattttcatcagtgcaataagaatacattttcttttgcaacaggacacaattgaagaaactggtggttttaccaaggcttttactggaagggtatatgttcctttaagtcattaagctggacttgccaataaaagttccttgg

SEQ ID NO: 548598 - DNA, 170 bp, Homo sapiens
tgaccaagtccctgtaaatgggattgctatggctccttatatgatatcagttgctctttttgttgctgctatatctaccaatatgatttttgctaagttgccttctggacgtcatccagagagtcgttgggcttggttgaagtctcgctctgaaataaatgggattatag

SEQ ID NO: 548599 - DNA, 216 bp, Homo sapiens
  misc_feature (38)..(38): n is a, c, g, or t
  misc_feature (40)..(40): n is a, c, g, or t
  misc_feature (49)..(49): n is a, c, g, or t
  misc_feature (55)..(55): n is a, c, g, or t
  misc_feature (204)..(204): n is a, c, g, or t
gagaaggctggagaaaaaccatccacacataaacaatngnatttactcnaaaatnaagtacaggtttcaggtatttaaaataaataaagaaaaatctcgtttcctttggcatctttagaaaataaactaagcaataaaagaggtgattgtataaagacatgcgtaagcaaacatatggggaaaaccagcaacttggttttatgngataatatcagc

SEQ ID NO: 548600 - DNA, 938 bp, Homo sapiens
  misc_feature (36)..(36): n is a, c, g, or t
  misc_feature (67)..(67): n is a, c, g, or t
  misc_feature (87)..(87): n is a, c, g, or t
  misc_feature (89)..(89): n is a, c, g, or t
  misc_feature (95)..(95): n is a, c, g, or t
  misc_feature (112)..(112): n is a, c, g, or t
  misc_feature (125)..(125): n is a, c, g, or t
  misc_feature (130)..(130): n is a, c, g, or t
  misc_feature (135)..(135): n is a, c, g, or t
  misc_feature (141)..(141): n is a, c, g, or t
  misc_feature (144)..(144): n is a, c, g, or t
  misc_feature (152)..(152): n is a, c, g, or t
  misc_feature (154)..(154): n is a, c, g, or t
  misc_feature (157)..(158): n is a, c, g, or t
  misc_feature (176)..(176): n is a, c, g, or t
  misc_feature (188)..(188): n is a, c, g, or t
  misc_feature (190)..(190): n is a, c, g, or t
  misc_feature (242)..(242): n is a, c, g, or t
  misc_feature (284)..(284): n is a, c, g, or t
  misc_feature (334)..(334): n is a, c, g, or t
  misc_feature (338)..(338): n is a, c, g, or t
  misc_feature (371)..(371): n is a, c, g, or t
  misc_feature (373)..(374): n is a, c, g, or t
  misc_feature (392)..(393): n is a, c, g, or t
  misc_feature (419)..(419): n is a, c, g, or t
  misc_feature (424)..(424): n is a, c, g, or t
  misc_feature (429)..(429): n is a, c, g, or t
  misc_feature (437)..(437): n is a, c, g, or t
  misc_feature (444)..(444): n is a, c, g, or t
  misc_feature (481)..(481): n is a, c, g, or t
  misc_feature (486)..(486): n is a, c, g, or t
  misc_feature (490)..(490): n is a, c, g, or t
  misc_feature (499)..(499): n is a, c, g, or t
  misc_feature (513)..(513): n is a, c, g, or t
  misc_feature (532)..(532): n is a, c, g, or t
  misc_feature (712)..(712): n is a, c, g, or t
  misc_feature (839)..(839): n is a, c, g, or t
  misc_feature (876)..(876): n is a, c, g, or t
  misc_feature (929)..(929): n is a, c, g, or t
  misc_feature (931)..(931): n is a, c, g, or t
acccccgccgcgtcgccgccatgacgggctagcacnctctactccggggtctcgtgccttctgggcngcgcgctgccgtggtatctncncccccnttttgtattgggctccncttgctgtggtcnggttnctganggagantcnccctttcngnggnnccaactggggcattggcntagctatctccntntctgtggttggggcagcctggggcatctatattaccggctcctccatcattnggtggaggagtgaaggccccccaggattcaagacccaagaancctggtcatgcatcattctttctgtgagggctgtggccattctacggcantcantcattggcaatttgtcattaggcaacattggcntnngcctttcatgtgccacanncccccaagggccattcgggccattcnggacnaccantgcaggcnactccantgtttggggctggcctcacccgtaaggcctgtctaancctcnttcntgtgaaggntctgcggtgggcantcggtgggcatgtggggcntgcccctggccgatgctcagaaccccagcctctttgtaaagattctcatcgtggagatctttggcagcgccattggcctctttggggtcatcgtcgcaatctcagacctccagagtgaagtgggtgactagatgatatgtgtgggtgggccgtgcctcacttttatttattgctggtttncctgggaagctggagctgtgcccttagcctttcagaggcttggtgttcaggccctccctgcactcccctcttgctgcgtgttgatttggagcactgcagtccaggccgagtcctcagtgcggggagnaggctgctgctgctgactctgtgcaggcgcacctgtncccccacctccaccctcaacccatcttcctagtgtttgtgaaataaacttggntntgtctga

SEQ ID NO: 548601 - DNA, 143 bp, Homo sapiens
agtatctagagatcccacgcgacggtatcaagtagaacgggagatgggtggcaggtggctctggaagagctcaccagcacagttgccctgagctcggtgcttggtttctgtccctggggatattatattaataactttttata

SEQ ID NO: 548602 - DNA, 310 bp, Homo sapiens
aacatcaacacaggatgtatctatcacatcctgaggaccacataacccaccagcaagtctccccactgacacacattcacgtaggtccatacccattcagagtcctaaagggttaatgagaagccacctcagcttggtgcatggagccccagccccaaatacactccccttgacaatatgggacaagtaaggagcgtctgatggaggcaccaggacaactacacacaaccacttacccctcaagacatatagacaccaagatcaggacagaggatgcatatgccgaggggtcggcggtggggctcctcta

SEQ ID NO: 548603 - DNA, 158 bp, Homo sapiens
attctccagacctccattctcccgagttagctcggatttataggttgcccgccaccacgcctggctaatttttttgatattttttggttagacgacggttaggggatcccttcttagagttcgaccttgcagtgcattgctaagcctttggcacttgg

SEQ ID NO: 548604 - DNA, 271 bp, Homo sapiens
cgcgatcggcgccaagaagatcacctacgccgactttgacgtctacaccgatgccataggacaacccaggaccgcgcagtacccgatggatctggagtaccggaacctgcctgatgacctggcggcaggggtgagctgggaagccgcgcagaactactgcggttgggttggaggactgatcggacgaaagatggaactgccgacggaagcgcagtgggagtacgcggcgcgtaatcgcgggcagttcatcatctggcccaccgatgatggc

SEQ ID NO: 548605 - DNA, 684 bp, Homo sapiens
ttgatgagctctgactatctaatattgaccggcctgccactgaaggggggggctaagcctaattagtctcaaatctccaaacacatatggctagatacgtacataactaaactatccaatgctaaaataatcgtcccaaaatatatactaccactgacatgactttccaaaaacaccataatttgaatcagcacaaacacccaccagctaattattagcatcatccctctactatttttttaaccaaatcaacaacaaacctatttagctgtaccccaaacttttttccctacagaccccctaaaaccccctccttaatactaatacctgatctaccctcacaattcatggcaagcaagccacttatacaggtggagcactatcacggaaaaaaaatctatcctgcttaatgctatcttccctacaaatctgctttattataccttttacagccaggaactatcaaaattatatctctgcgaagaacattttcccgcttgttattataacccgtggggaacagacaaaagctgaggcggatatacttttaaacctgtgtccctcctctcattgagtatcaacctagtgcaacttaacctccgcggaataaccgcactatggactcaacttgagacttggacatgctacgtgccggttatggaacatgtttatcccaactgcaac

SEQ ID NO: 548606 - DNA, 440 bp, Homo sapiens
tctagtcctactagcatctccaagcggggatttccccttgacgccttctcccacacgacccagcccctctcccctgccccaagtccccgagggaggtactctggagtagagcagtagcccctgtgggggagcctgtaaatgccggctcagtggatcactggtgactgggctcatgcctccaagtcagacgtttccctggtgccccacagacaggagcacaagtgggatctgacctggtgagattatctctgatgacctcatcaaaaaataaacaattcccaatgttccaggtgagggctttgcaaggccttccaaacagctccgtcgcccctagcaactccaccattgggcactgccatgcagagacgtggctggcccagaatggcctgttgccatagcaactggaggcgatggggcagtgaacagaataacaccagcac

SEQ ID NO: 548607 - DNA, 119 bp, Homo sapiens
ttgacctacacgaaactatacagacatccttgctatgtaaaagcaagaaaataaagttcatttacacaaatatttcataatgatcccatagagctcatagagcattctactgcagcaac

SEQ ID NO: 548608 - DNA, 317 bp, Homo sapiens
cattgtctgtacttctagtagcgacaggtgttgtctgccactgtcgggcaggctggtttcaaactcctgagctcaggtgatccgtccacctcagcctcccaaaatggtgggcttacaggtgtgtgggccaccgtgcctggctgattcagcattttttctcaggcaggaccaggtggcacttccagcgtccagcctctggtcctaccaatggattcatggagtcgccgggactgtaatcatcgtttgctaaatgtacaaattcttaataggctagacttagattcattaaactcaggatgcttctggacgggtaccga

SEQ ID NO: 548609 - DNA, 161 bp, Homo sapiens
agtctgtgccaggatggagagctcagatcttctgacgctttttatttgagatggagtctcgctctgtcactcaggctggaaaacagtgagggtgatctcggctctattgcaaaccaaccaccccccagtttgagcgatgctcagccaggtaccgagctcaa

SEQ ID NO: 548610 - DNA, 1355 bp, Homo sapiens
  misc_feature (397)..(397): n is a, c, g, or t
attgacgcgcacggtcggggcacagcaggcctggggtgcgtgcacactggctcgcgacctcctctccgcgccgccgtctccctccggtccccggcgaaagccattgatgacaccagctggagcgtcacgcgccgagagcatgtctggagaaatcagagcgaggtggctccatcccacgcatagatccgcggacgccccgagatgggacgggacttgcggcccgggtcccgcgtgctcctgctcgtgcttctgctcctgctggtgtacctgactacagccaaggcaaatgtcaaccgacgggcagctgatcgagcttgcgaatgttgtttactttgttggtaacaagaagttatctttccggacatccccgggcaatcagagtgcgaggctatcagtngaactcagtcatccgaggcaaaggaccgtagagaaagccttaccactcaggttgtcgtatacatagcagcgaaggttccgacgcacctgttcccgtggaagctgttgttgtagcgagtgggcacacagaagggacgccgatggcgtttcctgagacattatgataaaagacgttgtctttccatcgtcaacaatgaactcgtcgcgacattgctttacctccgtgcggcattaggtgagcccccacccaatgaataagccaagttataccatgttccaccttattccgaaggaacctccgcccaaagtttggtgcgtttcaagggtggcccctccaaggaacgtggggcgacactacgtgatccgagggagataattcccgagtcaggcgcccagcgttgggcgccccgatgaattagccaatcgcttaggtccgcaacccttttggccatgttcccaactccagtgttggcccgtccgtaggcgccgttcacccaaggattaaggggaaattccgatcgttgggtgcccaatcgggggaagccagacaggaacaggcggtctcacatatcgtggttgctcgaggatcaattgaattaacgcggagcgcgagtatacgaaaccacacatagggcgcggggccctcgagacaacggccttttgggggctagggcatttggggcgccccctaatggaggcgggctttagacgagcggaaaggaacaccccgaaggaaaaaggccagcgcctctgggcggacggataaacaaactataggaccgtggtgtacaccccaaacaatggccctatgcggggacacagtttcgacagcagcaacgatgcagaggttgtggccccaacatgttacaccgtagaggagggagcactagcacgtgggtgtgccacacattaccgagcaccgtaccagtgcccgcttcaaaacccgggggaagagcccc

SEQ ID NO: 548611 - DNA, 244 bp, Homo sapiens
cgggtatgtggttatgctaggtgtggtgagtaggggatgtagggttatgccagagtttcatgggtaggggactgtatggttacgctaggggtcatgaatagggaactgtaggcgtcgtgaggtaggagactgtacggattactcctgggggtcgtgacgtacggggactgtagacgtaccactaagatgtggatgagtacggggacctgtacgggttacagctggagggtcggtcggaaggggg

SEQ ID NO: 548612 - DNA, 518 bp, Homo sapiens
  misc_feature (73)..(73): n is a, c, g, or t
  misc_feature (82)..(82): n is a, c, g, or t
  misc_feature (122)..(122): n is a, c, g, or t
  misc_feature (180)..(180): n is a, c, g, or t
  misc_feature (186)..(186): n is a, c, g, or t
  misc_feature (328)..(328): n is a, c, g, or t
  misc_feature (414)..(414): n is a, c, g, or t
  misc_feature (458)..(458): n is a, c, g, or t
atttatgggcatggaggaaaaaatgtgagataaaattgctgtgcagaaaaaagtgttaatgaagcgacctgantacttaacnttagagacttgctttacaaggttggcccttgattggcatntgggaacttggagttcagggggcttccaccattcccagaactgatcaaagtagcttantatatntaaactgtaaaacaatatagtttctcctgaacacctgctttccttctgggagtctggaattttggtatgtgccaggcagagactacctttgtgaccagctcccagtaaaaaccccaggcactcagtctctaacaagcttttntggttgacagtgtttcacaagtgctgttacaactggttgctgggagaattaagctcatcctctgtgattccactggcggaggattnttggaagcttgcacttagtttcccctgacttcaccccatgtgtnttttttcctttgctgattttgttttgtatcctttcactgtaataaatcatggccgtgagc

SEQ ID NO: 548613 - DNA, 238 bp, Homo sapiens
ggccggcaccggcttactggacttctgagggggcacgggagggacagcatcaggaagaatagctaatggatgctggacctaatacctatggttgatctgtgcagcaaatcaccatggcacatgtttacctatgtaacaaacctacacatcctgcacatgtatcccagaacttaaaagtggatgggaaaaaaataaataaaaagtatatgtaagaagatagctagaaggtccaggtatg

SEQ ID NO: 548614 - DNA, 335 bp, Homo sapiens
tgcttagaggatccctgaatcgacggttttagctgagccacatggcccgccgaggtagagagaggggtctttacatgccccaaaagcataccactaactgtggctcgattacatcatggtcctcttcccaggagagagagggagtggggcagagcaaagcagaccccagtacttggctgttgttccaggactaataccaaattgtgtaggcaggaaagagcgagtggcaagggcgggagcaatggcaggccaagtgggcaagtgaagtaaaatgcttaaaacacctgcagtcctgggctggtctggcttggccttctgctagctatggggacaaa

SEQ ID NO: 548615 - DNA, 317 bp, Homo sapiens
gattgcgagcggggcactcacactctattctctaaaggaagagaatgctctttccttttcagtacagccaaagttcattttcaaagcatctgaattcctaagtatccttttttgaccatcgagagcagcatacctcttgcccggggtccttggtcttggaagggcctcgtccatctgatggggtggtagatatagaagagtgcacttttgaaaagtgcactcttctatatctacttgatacccaactcatctctcatttatttccggcttcttttattccaggcattatgtagtgttacattttccctttctttttc

SEQ ID NO: 548616 - DNA, 362 bp, Homo sapiens
tggaataaagcctttgagcttgatttcctgggggaagcattttcccccgaaccttggcttgtccgggtttacaaggtaaagggcctgggtaatcggggcttttcaaggacctaaatttcacgtcccgctttgattttctttgcactgggcccctcccattttgggccttgaagattttttttttttttttttttaatatgccgtttgtaagaacaaaactggatggcctcagaattgtttggaagttttgtcttgggccgtttgggctgggccaaatgaaatgatttttataattctaaacaggttcccaaatgaaatgtcctggctttactttggtcaattaaaggggggaatttttttta

SEQ ID NO: 548617 - DNA, 372 bp, Homo sapiens
gcagtcaacactgatgtgtggagtgcgcaccaaccaggaactgtgtgcggccctacggatatggcgctgatctacctgagctagtcatgtacttctgttgaatgaacagatcagtaagttgtgacttttgccctctttgcttaccgtctgctactgctgtcagggctgtctattctgtttccggatgcctctgattattacaatgtttctccataagtgatccaaaatctgccctcaattcagggacaacacacaagtttcaccttttcccatatggaatccccgaggactgttaacaacaatcagccagagcccccttttagtgatccgccatccggcgctcctttacccacttcctggtaggagctgttc

SEQ ID NO: 548618 - DNA, 206 bp, Homo sapiens
  misc_feature (96)..(96): n is a, c, g, or t
  misc_feature (105)..(105): n is a, c, g, or t
  misc_feature (136)..(136): n is a, c, g, or t
  misc_feature (138)..(138): n is a, c, g, or t
  misc_feature (170)..(170): n is a, c, g, or t
  misc_feature (190)..(190): n is a, c, g, or t
  misc_feature (197)..(197): n is a, c, g, or t
ttcaaggaatttgttttttacaactggaaaatgctcctgtgtgtgttaacagatcatggatgttttatgttttccctgatcatttaaagagtttgncctcagagntccaggatcatcagtaaatttgtcatgttananatttatttttttataaatcaagacttctgtgngcttttaaatatattaaaancaatttnctttcagga

SEQ ID NO: 548619 - DNA, 326 bp, Homo sapiens
aacctttttatgttttttcttgtgcagtcaaaaccaattgcaggctggatgcagtagctcacacttgtaatcccagcactttgggaggctgagatgggcagatcacttgagctcaggagtttgagaccatcctgggcaacatagtgaaactctctcactgccaaagtacaaaaggaattagctgggcatgatggtacacacttgtggtcccagctacttgggggactgagatgggaaaattgcttgagcccgggagtcaaaggttgcagtaagccaagattgcaccactacactccagcctgggtgacaaagtgagaccctgtctc

SEQ ID NO: 548620 - DNA, 619 bp, Homo sapiens
atgtggttgagtttggtggtgagtgggaggaggaggggagggcgtgggcaagggcgatccagtacagacttttgcaagtggatacgtgatgtaggtcatccattgagctgggggctaaaaggaggagcggttagggaggaagatgatgggtctggtttgaatatgtgggacttttggaacctgagatcaccatggcaaccaggacacaccggacaacaggaaagagaagcaacctgaggttcacacgggacaacaggaaagggaagccagcagcttggtagggaagatgtgtgggactgagaaatccatctggagtgggcacagagcctggaaggcggtgatgggagggagtggagagggggcgctgggttgagtcggggcaggactcttccgaaggaacccaggaaagcctcctgcctctcccaagatccccaggtctgggaccggagcggcatccccagggaaactggaagagagatctgagggccactggttagacaggggcctggagcagccctggaggacttctggccaagtcctccgtccccagccttatgatctgggtgaggggagatggggttgctgacataggagggtcacgccaggcaggatgagggta

SEQ ID NO: 548621 - DNA, 203 bp, Homo sapiens
ctagaggatcctgcgagaagagttgtgctctgtcccaggtgagtgagtgtgtgatctcggttactgcagcctttgctcccaggttcaaatgattctcctgctcagctcccctgtggctgggactacaggtgcccgcaccatgcccatctaatttttgtgtttttagtggagacggggtttcaccatattggccaggctggtct

SEQ ID NO: 548622 - DNA, 385 bp, Homo sapiens
attccaaaactggaaatttacgtggatgagctcctggccaaggaaaattcacaagcccgggcccccagggtcaaaaaaattctggtttattgtttcaaacccccaaaggcctttttttttggcctgttggacaaaatccgggggatgcaaaaatttagcccccccccaaaaaaatgaggggccccccccccggaaaacggggggtcccccaggacaatttttgccccccacccttgtaaaaaaaacaaaaccggggggcccttcggccaggcctggggccattaacagggctccttgggcccctggcccaggggttttttcccccccccccccagttttccccttttgggggttttttttgtttttaaaatgatggggcttttta

SEQ ID NO: 548623 - DNA, 349 bp, Homo sapiens
aactaccttacctgcatgtgaatgaggagagctagaatgcaaagaatccctaggacacccatagaggattgataattcatattgtctatgcatagaaattattatccagacgggaattacgtatgttagaactatcccttcatttgccctatgctaatcccactttactcagaatataagagctatattttgaagacttgagttatttcagaaaaaactacagccctttttgtcttacctgccttttactttcgtgtggatatattaagcattgggtctggaactagctgtataacacaactaagaactcatgtcttttgtcacagaatactgtgccagttttttgtag

SEQ ID NO: 548624 - DNA, 838 bp, Homo sapiens
gctcatgaactcgcctgagctcttgggttgaaggtggcttgccttcgttatgtggagccaggctacatcccagcaaccatgtccaagggacctgcagtggtatgatcttgtgaccacctactcttgtgtgggtgtttccagcgagggaaaagtcgagataatggccaatgatcagggaaaccgaaccactccaagctatgttgcctttacggacactgaacggttgatcggtgatgccgcaaaagaatcgaagttgcaaatgaaccccaccaacacagtttttagaatgccaaacgtctgatgtggacgcagattggatgatgctgtggtccagtctgatatgaaacatgtggccctttatggtggtgaatgatgctggcaggcccaaggtccaacgtaagaatacaaggggagagaccaaaagcttctatccagaggaggtgtctcctatggttctgaccaacagatgaaggagattgcgaagctacctttgggaaagactgttccaatgctgtggtcacaggtgccagcttactttaatgactctcagcgtcaggctaccaaagatgcggaacttaatggctggtctcaatgtacttacagatattaagtgcggccaatggtggtgctattcgtaccggttaaacaacaaggttggcgcagaagaaacgtgtcatctttgactggagggtggcctagtggtggtcacccacattgggaaggacttgggggccagattcacgtgggaccccctgtgtggcaacattgcgacccggggccctaatcggggtaaggcgacaagagttgggaaacatgtacaccttgtgtgagctaaccc

SEQ ID NO: 548625 - DNA, 105 bp, Homo sapiens
gactacaggatccattccttatggcaaggccatgcacatccataggtagctttttctatgtcacgtggttcatcttacgtctgctgccttacacaactccttggt

SEQ ID NO: 548626 - DNA, 307 bp, Homo sapiens
  misc_feature (58)..(59): n is a, c, g, or t
aatcaggagacatttgatatgagtgttggtagtttatccaagggtcatgaatcgatcnngcatgttataagtactttttaattatttccatcccatgaatcctccatgagactaaggtaagatatagctactccctcagtctcaatgctttcagaaaagtcaaatatactctcctaatcatatcttagcaccaggcacccgcattcgtttaaagtaaatggccccccagacaaacctaattttatgtttatgtgtgtcccctccagaagggaaaaataattcctggcttctttgttaggaagtctct

SEQ ID NO: 548627 - DNA, 377 bp, Homo sapiens
  misc_feature (349)..(349): n is a, c, g, or t
ctgactcacatttttaaaaattgtggcctcccttcttacccccacaagtagcaaaagatgtttttagatcctgaacatctcaaaagtaaaatctagagctgactatccaaaaaggcagccactagtcacatgtggctattgagcacctgaatgtggctagtgagaaatgacatgtgctataaatgcaaaatatactctggattttcagggaagtaatatgaaaaaaagaataggaaatatttctttagtgatttttatattaagctgaaataacattctacatatattgggttaaataagatatattagtaaagttaatttcacctgtctctatttatgtttataaatntggttactaggaaccttaaaaggcccat

SEQ ID NO: 548628 - DNA, 171 bp, Homo sapiens
ggagaagacgtttggagttggtgtcgagctggggagaccaccagccaagcagcagtgcccacggtgccagaggcagccagaccctccttggccttatggggtggatggggctgggtgagaaacaggcaagcgctgcgatcctgagccaagaagcattggggctgaggtttg

SEQ ID NO: 548629 - DNA, 443 bp, Homo sapiens
  misc_feature (434)..(435): n is a, c, g, or t
agggtttagtcagacactggctgggagtcctgggaatgagcagagaaaacatcagcatagagcacttggacctcccttgtacctgttcagaggaagaaaatcaactaactatataccaacaacctaagtgaggtcttacagccttgctgcagggctagtttcctgcctttctttctatcaattttccagtatactcaagaaaatcgggaaattgtaatggggcagttatatctcctgagactttttgcctgttgaaatgtgcaggacccttttcctgtgatgagagatagctggttacttgatctaggtttaaaagttatgtaaaagaaaaaaattataataaaagggatactttgcttttaaaatcttgtttccttttaatctaggtaatcatttcaaaataagtatgtaaagaagaaaaataaaagttgtcnncctggaaa

SEQ ID NO: 548630 - DNA, 537 bp, Homo sapiens
ccagcgtcgccacgcgatcgatgattacttctcatgaggaggcactccttgttattgtgctactgagtgtccagatgggcctgctggtgctgagcgggctttggatgtgaaccatattcaggaaggggaaccccatcgtcctgttggttctgtgataggcaaatggaggcgtgcaaaagactccagaataggaggcatgatgaagactctgctgctgttgtggggctgctgctgacctgggagagtgggcacggtcctggtgggaccagacggctctcagacaatgagctccaggaacactgtcccatcagggaagtatagtacgtcaataaggaaattcaaaatgctgtcaacggggctgaaacagataaagactctcatagaacactacaacacgaagagcgcaagacaactgctcagcaagcctaggaagaaggccagacgaagatcgaggatgcctctaaatgatcatcacgggactcagagacaaaagctgaacggagctcccaggagatgtgcatgcgaccatgatggccc

SEQ ID NO: 548631 - DNA, 313 bp, Homo sapiens
tcccttggcttttccagactctagaagccacccccattccttggatcatggcccctgactccatcttcaaagccagaagtgaagcatcttcaaatctccctctcttacctctgctttcatcaccacatctcccgctacaattctgaatctcctactctctttcttttataaagacccttgtgattgctgggcatggtggctcccacccagaatcccaacactttgggaggtcaaggcaggaggaatacttgaggcccaaagtttgaaactagcatgaacaacacagtgagacccccaccttcagaaaaaaata

SEQ ID NO: 548632 - DNA, 283 bp, Homo sapiens
  misc_feature (55)..(55): n is a, c, g, or t
  misc_feature (66)..(67): n is a, c, g, or t
  misc_feature (71)..(71): n is a, c, g, or t
  misc_feature (81)..(81): n is a, c, g, or t
  misc_feature (86)..(87): n is a, c, g, or t
  misc_feature (130)..(130): n is a, c, g, or t
  misc_feature (132)..(132): n is a, c, g, or t
  misc_feature (134)..(135): n is a, c, g, or t
  misc_feature (137)..(137): n is a, c, g, or t
  misc_feature (139)..(140): n is a, c, g, or t
  misc_feature (154)..(154): n is a, c, g, or t
  misc_feature (204)..(204): n is a, c, g, or t
  misc_feature (249)..(249): n is a, c, g, or t
  misc_feature (283)..(283): n is a, c, g, or t
ctcgtgcgattcattaaacatttttgtcaggattatttcccgtaaaaacgtagtntgtcacttttnnatantactaatttnagttnntacattttaactttgttataatacagaaatctaaatatatttntngnntncnngcaatatatcactngaccaagaaattggaatttcaaaatgttcgtgcgggtatataccagatgngtacagtgagtagttttatgtatcaccagactgggttattgccangttatattatcaccaaaagctgttatgaactggn

SEQ ID NO: 548633 - DNA, 182 bp, Homo sapiens
cttctgtctcgtatcatgtaacaaccggagtgaccacatccaagtaggagtcagatcacgcctctcctctaccctgaaggccagtagcttctccagcacactccagagcacaatccaaactcctcggcagggcttgagagggccatctcgtaccctctctgacctccctccactgcacaatc

SEQ ID NO: 548634 - DNA, 323 bp, Homo sapiens
cctaatgtattaatgtattaaatctttataaatgattcaggcttgggcgcagtggctcacgcctgtaatcccagcactttggggaggccaaggtgggttgatcacttgaggtcaagagttcaagaccagcctggccaacgtggtaaaaccccatctgtactgaaaatacaaaaattagccagtcatggtggcacacacctgtagtaccagctgctagggaggctgaggcaggaaaatcacttgaacccaggaggcgaaggttgcagtaagccgagatcgtgctactgcactccagcctgggcgaccgagtgagactccatctc

SEQ ID NO: 548635 - DNA, 945 bp, Homo sapiens
gctatgacctatacattgtccgaatatgccaaagacaataaagagctcttcatgtcgaatcatcgatcccatcattgttcgcgcaactatcgataaacaatatcactctcaattgaaagctcctatgatcggccgcatcaagtaacgaaaaaggagcttggagatcccctttcatgacacgcctcagaacggcgtatcgcgggccagtacgagacagatcgcaaagtgagtatttcctcgaggctgccagctgggtgtgatgtcgtgatacgcattgttggcaaaacgtggctctaagagattcatgagtatgcgactttgctaaatttgtcacgaaggaagagagctcttcttttcctggagtagagacacgtggagcttcgagactctttgattacctattgtatctggtacttgagcgcgagttatcataatacacacaaatttgatggtatgtttttttaccttacacatggcttgctaaggtagtaaacgttctctcgaaaggagatccggggtgtttcctaaattatttttctcaacattgccgttgtttagaaagcgtgaaaactgttgactgttcaggtattctttatgaagccccttgagtttttatttaagtggatccggcatgggggaagttgaaactccgggagttagttaacatgaatcttatgccagctggatgtgctattcacttaaaggcgtatgaaggcctttaaactattataccgtgaagccgagtcactcagtgaaccgttgcctgtgtcactcccattatgggtttgccctagtctctcgctgctggcgcaattacgacggaagacttcgacaagtcactggcgctcgactcttactgaacacgggtttgactgaaaaaacggtcttaaaaaacaattacacctgggccccgcaaagatacgggggggcgaaaaaaccccctag

SEQ ID NO: 548636 - DNA, 765 bp, Homo sapiens
  misc_feature (177)..(177): n is a, c, g, or t
  misc_feature (401)..(401): n is a, c, g, or t
gagttatcggtaagtactattcgtgtgagagtatggctgataatgcctgtgttcttttcgccgtctctgttctgaggtttataatcagttcagtgctggtttatggagcaatttcttatcaagtgggttggctgattccattcttctgttaccgactttttgacttcgtcctcagtngcctggttgctattagttctctcacctatttgccaagaatcaaagaatatctggatcaactacctgattttccctacaaagatgacctcctggccttggactccagctgcctcctgttcattgttcttgtgttcttggccttattcatcatttttaaggcttatctaattaactgtgttgggaactgctataaatacatcaacaaccgaaacgtgccggagatngctgtgtaccctgcctttgaagcacctcctcagtacgttttgccaacctatgaaatggccgtgaaaatgcctgaaaaagaaccaccacctccttacttacctgcctgaagaaattctgccttgtgacaataaatcctataccagcttcggtcgtttatgttacagaatgctgcaattcagggctcttcaaactggttgatatacaatatgtgtctttgtgttaagcatttattttcaaacactaaggagcttttggacatctgttaacgtcttttgttttctgttagtctttacatttaatagttttgagacatctaggtagcagacaagtgcatgttgcttattggggtggaggaagaggtct

SEQ ID NO: 548637 - DNA, 239 bp, Homo sapiens
ccaaaaattttttttaaaaaaaaaaaggcccggtgttttgggccggcccaatggttttggggggtttttaaccttggcccatttaggggacccgtttttttggtaaggggaattttttcttttgggggccccggtgttccttttgttaatgccggcccgggtcccaaaaaaccttaaaaaggggggtggggttgggcttttgggccctgaaaataaatgtttttttttttgtgggccca

SEQ ID NO: 548638 - DNA, 425 bp, Homo sapiens
tctgtgatgtcccagccatgcttggagcatgcttccaggggatcgggaaaaatcatctcctcctgaacaatacacacatacacatagggctgtgtcaggtcagagaccacagacttgggggctgagtctgagacccaggcctgcccagccagacaggtctgagaaagggctgacttccccttttttcccctgacttcgggctgggacacccatcgtggaggctggctaaaacagaccagtcgggatctcgtcaggagggacacctagtggggatgagcggcagcattattagctcaaaaagacctccctcggccgtgtacacatgtgctaggacccagagagggcaccctcccccaaagccttggttttgacgctcggggatgtgcctctcgggttggtaagcccccactgtgaagtaagacctt

SEQ ID NO: 548639 - DNA, 108 bp, Homo sapiens
actactgccggtcatccgtccttatattgcgtccgggttattgtctccgatgtattgccacccagctcgcgcgtgtgtgtctccagcgtccgggttattgtttaccac

SEQ ID NO: 548640 - DNA, 1243 bp, Homo sapiens
  misc_feature (153)..(153): n is a, c, g, or t
tcttggtacaaaattttattaaagggtcttaagaagagcaacattccagaactctccagaaattacagctgtgccaagtgagaccctgtgtttagtgctgtggtggggacgtggcgtggggcatgtggcaggccggcctcgtggctttcccanccctttcgtcgttcgtgagaagtgcgggggtgggtggcgcagatactctcattcttgtggggttctccacaatggcctcagcgtgtggctcaggcaggggctttctatagggccaatctcttataccagtgtggggtctcccgagggcagaaagtgactcttcacctttgagtgcccagaacaacccgtgttcgtggagcaacagcgtgtgggcgcacgagcagtgtgtctcaagcgatagttagttaaacgggggtctctcgcgcgtggggcatcattcggaggccatccaacaaacttctcagggatttaagccccttcggttccctcggaagttttcccacaggaaacacacaaaaaacctctcggacaagcctctgtgggggcccccacgtttcttcccatgtgatgtggaaacccggcaggcagcaacccatatatgccaggtgccccctctcgcaggacaaccacggaaagggcccctcccataagaggaggtttgggtgtacacgcgcaaaggagagactttcttgcctcggggtggcataattgggggcgaccacacgagagaaccccttcttatgtggcgggcccacccctttttcttcacagggcaattaaaaaagggcttctctaaacaagcgttgggcccctcttcgtgggggaaaagcgccaaaaaacccctctttttgtttgggacacttcacgacgggacaatgctcaaggttccccgcggaaaattccggcgcggggcgccccttttcttcacaccaaacagaaaacaccattttctggggttgcttcaggggggggggcgcaaacagcaaatcagtgggagtactgctgtggcccgatgggctgtagaggtgtgataatccctcgcgacgccccctaaaaatctccaaagaaagtatagccacatatcttgtagcaccacaagcttccgccgagcaggtagagaaacacctcacattcgacaggagtaacagcgttttggaagagatatgcccactagcggggacaaacaacgtctcccctctcatcgggcggatatttgcgccagtggccaccattgcgcccgcgggcaaaa

SEQ ID NO: 548641 - DNA, 346 bp, Homo sapiens
acatgtttttttctcatcaatctacacacaataccccataatgataatttttgcaaatgtattaaaaataagaaacaaataccttatttacataggtattcagacactttgcaatgaaactcgaaattgagctaaggtgcatcctgtttccgttgatcatccttgagatgtttctacaacttgattggagtccacctgatataaattaaattgattggacatgatataggctcccgagaggcgcagcggtctaaggcactgtatctcagtgctagaggtgtcactgcagaccctggttcagtggtctaaggcactgtatctcagtgctagaggtgtcgtcgacgcg

SEQ ID NO: 548642 - DNA, 457 bp, Homo sapiens
  misc_feature (12)..(12): n is a, c, g, or t
  misc_feature (346)..(346): n is a, c, g, or t
gtcaatattatnggtatcagagagatgcagatcgaaaccacaatgagataccacttcacattcacaggatggctagaataaaaaagacaaataagaacaagtgtggtgaggatatggagaaatgcaaccctcatataccgctgatggtaatgtaggatggtgcagtcatttgggaaagcagtctggcacattctcaaaggtttaaacatagaattatcatttgacccagaaattccactcctagatatataattgagagaattaaaacatatatctacacacagacttacacaaatgttaatagcagcgttattcctaacagccaaaacgtgaaaacagcccagtngtcctgaatgtctgtttctttcttccttttttttttttttttttttggggttttgggggggctcggtcccccggggggggttggccccagggcctccaagcgggggggaca

SEQ ID NO: 548643 - DNA, 564 bp, Homo sapiens
caaatccaatccctggttcccaaatcgcccgcacatccagacagtattcggatctgttaaagtcttccttaaggtcttcgataagtcttttacggtaaatactactgctaagataatagcgactttgatagcgggattcgccgggttgcaaagattccgattattaagagcgaacctattcttcttagtatcctaagatgccttcctcttaactaggacgtaaaacttcgcgaatatgattacgatgttattttataacgtcgcgcggacgcgttgtgcatgtggtggtttatccgcaagatctcgacgtgaggctgggcgattatttagacttctcggtttcttaacgagaggtttcgtcttctcctgcgtaaaactagcgctattcgccttccgaggccgtatctttggcccggcgtttatgatgaagacgtttattactgttttcttaaaggagactaccggtgtttgccccttaatccctcttgcttggtttaaatgaggaggatggagttaagtcgggttttcggcgcgtagtagtatttactaaccttcataatacgg

SEQ ID NO: 548644 - DNA, 227 bp, Homo sapiens
agagttgctcttgaggatcccttttgtgatggaatttgacacactaaatttattttgcctcttctagcatgtgacacattgaattttcatgtagaataaggaccaatatatcaagtgcatacctagaggggagaaataaagtcgaattatcttgtgtaccacatttatgcagtcaggattatcttgtagtacttatatttggaaccttgctttttatcatttttttt

SEQ ID NO: 548645 - DNA, 139 bp, Homo sapiens
cctatgaatgtgaaatacagatcccagtgagtgccaaccgcaatgacccagcctccctggatgtcctctatgggccagatgggcccaccatttcccactcataggccaattactcgtccaggggataatctgaacctat

SEQ ID NO: 548646 - DNA, 1288 bp, Homo sapiens
cctttatgtactcgatccttctgtgtgactactatgctgttctacctccgccgtcattattctgggctggctgcgatcccctgttcttgactattctcccttgtgccggcttacttccacggggatccctgtggtgaactatgtagctaacttgcgccctctgtttctgttgttacctccttgtgttgaatagtgtgccgtccggtcccccttatttgcgtcgcgcgctcctatctccataacccggcggttttcccctaacccctgctgtccctggctctcaactggtccccgtctcagcctggttctatgaccttcactacgggtatttcggcggtccctggtgcttcacctatggggatatctcttgtgtgctataaactgtgttccccttcctgctcatttacgactcccggagccagtgaatagtcctccggatccttcgttcttcgcaggaccgcaagtgtgtatctgatcctggaggccaccgctttcaagctcaaagttagtacccggtggcacccgatgctccgtgcactttggtcttgcatgatctctcctgacgcccacggacacgtcaaagatgctgggttccagtacctcctgggtacagaatgagatgctccaggcctagtagacaagcggctgcattcagcgatcgcagcaacgacagcggcgtgcgccagggtcgcccggggggcaccgggtgcccagcagcagcaacagggatctacagcaagtcgccgcagacgcgtggcggtcccggtcctggtgaaaagacggcaaaccgtggccaggcgggtgcccccgcgccggggcgccgccagcctacaaggccaacgcgcagtcagcaggcgcagcaccaggcgcaggccgcgcaggcggccggcaagcggccaatctccgtggggcaccggtggcagccggccctggcagcacaacccgggccaccagccaggcagcgcaggccagtctccggacctggcgcaccacgccgccagccccgcggcgctgcagggaccaggtaatccagcctgtcccacctgaactcctcgggctcggaatacggcaccatgtccatgactccaccttgctatacggtcggaactctaggtgagaaggacacacgggccggccctagacccaagcgctctgcctcaccgcttcacctctctgcccgcaaatacagaccaccatccacgcgatgctacacgcgactttgacttttcttaacaacctggaccagcgtttagaccaaggaaaaacaaaaccgcaaaaggccaaactt

SEQ ID NO: 548647 - DNA, 548 bp, Homo sapiens
  misc_feature (1)..(1): n is a, c, g, or t
  misc_feature (112)..(112): n is a, c, g, or t
  misc_feature (175)..(175): n is a, c, g, or t
  misc_feature (217)..(217): n is a, c, g, or t
  misc_feature (226)..(226): n is a, c, g, or t
  misc_feature (239)..(239): n is a, c, g, or t
  misc_feature (289)..(289): n is a, c, g, or t
  misc_feature (291)..(291): n is a, c, g, or t
  misc_feature (293)..(294): n is a, c, g, or t
  misc_feature (296)..(298): n is a, c, g, or t
  misc_feature (300)..(300): n is a, c, g, or t
  misc_feature (302)..(302): n is a, c, g, or t
  misc_feature (308)..(308): n is a, c, g, or t
  misc_feature (317)..(317): n is a, c, g, or t
  misc_feature (319)..(319): n is a, c, g, or t
  misc_feature (326)..(326): n is a, c, g, or t
  misc_feature (329)..(329): n is a, c, g, or t
  misc_feature (332)..(332): n is a, c, g, or t
  misc_feature (334)..(335): n is a, c, g, or t
  misc_feature (339)..(339): n is a, c, g, or t
  misc_feature (351)..(351): n is a, c, g, or t
  misc_feature (372)..(372): n is a, c, g, or t
  misc_feature (382)..(382): n is a, c, g, or t
  misc_feature (392)..(392): n is a, c, g, or t
  misc_feature (397)..(397): n is a, c, g, or t
  misc_feature (405)..(405): n is a, c, g, or t
  misc_feature (429)..(429): n is a, c, g, or t
  misc_feature (434)..(434): n is a, c, g, or t
  misc_feature (438)..(438): n is a, c, g, or t
  misc_feature (444)..(444): n is a, c, g, or t
  misc_feature (446)..(446): n is a, c, g, or t
  misc_feature (488)..(488): n is a, c, g, or t
  misc_feature (527)..(527): n is a, c, g, or t
nagtagaaaaaaacctgtcaagaaagaccaggtggaaaatgggttccaataaaatggaatttatagggaaaaaaaaaaaaaaaggccacaaaagagaaatagcaccactgtnatttgaacaatggctagttacttgcattttttggcattgttaatcactgaatctgggtttttntttgaattccttatatagcatgtactacacaatttttttatnataaaatanttgctttctaaanacattttaggacaagctaccaccagaaaaaaatcaatacaaatacatcangngnngnnnantnttagtngtgggtggnanatatttnggngantnntgcnaaaaaaaggaantgaatagggtgtgggtaaagnaaatgagggngagttatggnatgangtattttnaatattaattttttatttagatanggtantgtntttttngnaaaagaaaattaacatttagtaacacactaatgaattttatntccaaagagattagtgcactggcaaagtattcggattanagtggagagctgtgaacagca

SEQ ID NO: 548648 - DNA, 676 bp, Homo sapiens
gaatgaggagtgatcatggctacctcagagctgagctgcgaggtgtcggaggagaactgtgagcgccgggaggccttctgggcagaatggaaggatctgacactgtccacacggcccgaggtagggctgctccctgcttgaggaggacacccagagactatgcagacctacctaccagcaggggctagtgccatggtgctggtgcttgctgctcgcccctggctgttgatgcggatgggcgtcctcgggcgtgggctgcaggagtaccagctgccctaccagcgggtactgtgcgctgcccatcttcagccctgccaagatggggctgccaccaaggaggtagcgtgaggtacaccaacatccatgcttcaggagctgctggcgctggatgactatgccctggtgtggccagtgtgtggacgcggcaggaggtggctggagatcactaagagcagatgacccctgttggtggctgtcagcaatgcccggttgctcgcttcgtacgctccctgtctccgctccatgtcccaggaagcacaggagaggctgagagggactgtgacgttgggctccgttgtgcccggcctgggctgggccttcctggctattgactgtggcatggggagcttgtggcattggctgcttgtagtttgccagagttggggctaaggggagg

SEQ ID NO: 548649 - DNA, 224 bp, Homo sapiens
ctgactacaggggaaggcggcgagagggaggctgtaaggaggcatcccaggccacactggacagatcacctctgtgcccctaggtgacaccacctcttcctcgaggccaccaggaggccccatcatcaccgcccacccaaaggaaatctggagcgcctttattcactttcaacagcagagagccctgagcagatgcgcccgtcacaggacttccgccgtagtca

SEQ ID NO: 548650 - DNA, 166 bp, Homo sapiens
tgtctgtgggacagatgggggcatgcatcagccaataggctagctgcttatatcacaggcaggttgcgacccgtcagtccatggacctctcaaccctcagtacgtcatctccaaggtagcatccaaggccaaggtggctgcatccaggaaaccacgtagccggtgg

SEQ ID NO: 548651 - DNA, 135 bp, Homo sapiens
gtgccagctgtctgccaggtgtctgccagtgtctgtccagtgtgctgccagtgtctgccaggtgtctgctcacagacctgtcaggtgtctgctcacagacctctcacagaccttcatctcagggtacgagtgaat

SEQ ID NO: 548652 - DNA, 204 bp, Homo sapiens
ttttttttgggggggggggcccccgggggcgggggaaaacccccccaaccccccccccaaaggggggggggcctttttttttttccccccccctgggggaataaccccctttcccccgggtggggtttttttttttcccccccccccccaaaggggggcctttttttttttggggggttcccccttccccccccccccccctta

SEQ ID NO: 548653 - DNA, 910 bp, Homo sapiens
tgggcgaggctaaatcggctgcgtcctctcggaacgcgcgggcaaaaggggtcctggtgacgagtcccgcggttctctccttgaatccagtcgccggcccgccgcctctgccgccgaccctgcacacccgcccctctcctgtgccagaaacttgttataccagcaccatgccctaccaatatccagcattgaccccggagcagaagaaggagctgtctgacatcgctcaccgcatcgtggcacctgggcaggggcatcctggctgcagatgattccacttgggagccattgccaagcggttgcagtccatgtggcaccgagaacaccggaggagaaccgggcgcttctaccggccagttgcttgctgacagttgacgaccgggtgaacccctgcaatgggggtgtcatcctcttccatgagacactctaccagaaggcggatgatgggcgtccctttcccccaggttatcaaatccaagggcggtgttgtgggcattcaacggtagacaagggcgtgttcccccttggcaggacaaatgccgagattaccacccaagggtggatggcctgtctgagcgctggtgcccagtacaagagggacggagctggattttcgccaagtggcggtgtgtgctgaacgattgggggaaacacacccctgtcagccctcgcaatcatggaaaattgcccattgtttctggcccgtaatgccagtatctgccaagcagaatggcgttgtgcccatcggggaagctgagaatcctccctgattgcgacagacttgaagcggcgccagaattttgacgaaaagggcggtggggcacaggctgagggcccacattctggagggctgttgagccaagggcccgcctgtgccaattctaaagataggcgcgcaaagcaaagcccg

SEQ ID NO: 548654 - DNA, 1345 bp, Homo sapiens
  misc_feature (413)..(413): n is a, c, g, or t
  misc_feature (641)..(641): n is a, c, g, or t
ggtggatcccgggttattgtgcgagatgtactactgtcagcaagcggaggcgctcgggagggtccgtgtttgggcattgccatggctgatggctgtgtgaggtctgacgcttgatgatgctggcgtgtggcggcctccagagcgtctctcggctacgcatatcgattcgcacggcgagggcgagtaacagcatagcacttcgagattgacgtcgtgcagagacgtggcgaggaatctaggggtgattaggaagatctatatcacttggtccacaggttgtgatctgcagagtcatagacatgtctcaagataccacatcgagagtggacgagcttcatcgtcggatcagcagcatggcccacaggtcagccagtgcaattactgggacggacagccaatcggaatttgcgagnacacttgggagtgtgacacaggccacgtcacatacacttgcggagattgtagtgccctctttagcgacatgtgacctatcattgcgccccatgctgacaagtaagagcctagttgaacctctgtatggcccgagttagcaagaagacttacgcctggaggtgttcccaaacggcgaaccacgtatcgccatgaggtcttaactccggagggggcaacttgtgcctggnacctggaagaacgccactcacttacagagaggtacatggcaagttaagattttggactttgggtggccgttttcccacaagaggttgggagtggggctcgaggctttcaagttccgaggctattcaacttttggcaggttggacgggaagagcggcaaggtgcggattctcgccattggggaaccgctagtccgacatgtgctttttggtcacaaataacgcgaagtacaacgctcggcgttgggtgtggaacacggaacctttcgcgacaacgccgagcactttaatcgctgtgccgcacgcgccagagattaaagccgggaaaaggacacaacttcccggttgtgtacccattggggtggggccattcgccgtggaccacaccggcgttgtggctcactccttacttgcctacttagtgtggaaggcgacaacaaggcgggcgtctggacacatcgtgacaggtgaccctgcgcggcgcgagtatggacacagtgaaaggttgacattttcccgcttggcgctcgcgggcggatgggcggtttattgtacaaatcggggaacacgcgcagtttggcgagaagatatcatggcccggccggtgtgatttaacaaacaaccaccaccacacaggtgtgagtatacccgacgatataccgattgctgacaggcagaacactatccgggcgtttccccaattctgc

SEQ ID NO: 548655 - DNA, 186 bp, Homo sapiens
gatcagtaggatcccacttatatcagaggatacacatatttgtgaaaatacatgaaagaagacactaaaatatgaccatcttgggtagtgaggttatgacggtgatttctactggtcctttatataaaatgaaaatattttgtatatgtatgttctggaattttctcacagtaatgcactacaaaa

SEQ ID NO: 548656 - DNA, 504 bp, Homo sapiens
gcacgagagaatcttgaacaacaacattgaatagcctacctccggcacaagtttgcaaagcagtagcatagcgaatattatcattatctatctggaaaagttgacccaccaccccatggacaaagctggcttcaaaattaggataaggtttcgtatagttaaattccagatttgctacgcgtctttttaaatattcagagttcttacatgtttgataataatggctcttcaatttatcctctctttgcttcaggtctttaattcgtgatggatcaaacccatattcgactagtcgggctcgtagtttatcgcacgtttcttggcattgtttaacatgcttcacatttaactcgttatcttttgtggcctcctttaatttaggttcaattgtcaatagcttttcttcaacaactccattttcatgcttgatttttttatcgccaaggagacttcattcagctcaagtctttgccttggccaactgtgcgttataaccaccgtctg

SEQ ID NO: 548657 - DNA, 436 bp, Homo sapiens
ggaaaaagttcacactgatggaaataaaattgcgaaatgccgagcgagcaaatgatgttgccgagaaaagaaatgacatggtacagaaagaaatggagcagtttttttccacgtttggagaactggcagtggtacccaggagaaccgagggaggaaacacaatctggattcagtgagcctgcttttgcctgctttatttgatggctttggcaaggactccagggattttgatgggatatgatgtagacccaggtggttggtcacctggatgtacagaagtctaactggtgaaggaatatcatttacagacgttaaacatccatttttgcaatgtgtaccaaagttatatcatgccccataatgctactgtcatgtgttacaactggatatgtgtatatagagtgatttttcaaaagtaactaagaagtgcgaagca

SEQ ID NO: 548658 - DNA, 886 bp, Homo sapiens
  misc_feature (8)..(8): n is a, c, g, or t
  misc_feature (28)..(28): n is a, c, g, or t
  misc_feature (63)..(63): n is a, c, g, or t
  misc_feature (103)..(103): n is a, c, g, or t
  misc_feature (107)..(107): n is a, c, g, or t
  misc_feature (118)..(118): n is a, c, g, or t
  misc_feature (149)..(149): n is a, c, g, or t
  misc_feature (154)..(154): n is a, c, g, or t
  misc_feature (161)..(161): n is a, c, g, or t
  misc_feature (189)..(189): n is a, c, g, or t
  misc_feature (193)..(193): n is a, c, g, or t
  misc_feature (234)..(234): n is a, c, g, or t
  misc_feature (276)..(276): n is a, c, g, or t
ccgccagntgggttgggaaattggtccntcttgggggcgtgggactaggcttcctttaggtgngcctggccctttggctgtatcctctgggtgtagaaaaagncggnagagtcatggnatgggaccgcaggggggaaaagggccctganaaaangcctggnaaatgagggagtgaggcaggggcagggnaacntagagtcacctttgaaaaaacaccctggggcctcccgttcngggtacaccaagccctttccgacttcggcccagcaggcgcgnaggatggcggggaggaagccaccagcccctgtgtttactgtcgtcagaaaggtcttgtgttttggttttggggtctttgttttgtttgtgttttgtttggcttgtttgttttttaaggggaaaaaagtttgtaattatttcatccaaatctcccgttatatatctgtgaataataagagattttataaagcaagaaaatgatgtatattttagtttgttgccaaataagtcctcatgttcccgaaggcccctgagaaaaaataatttaaaaccctggtttttgtgaatttttttgttttgtgtttctttgttttaaaaattgtgtttggtttggtttttgcaccccactaagccaagagggttgaagggctgggtgcagcctgggagtccaatggttttcaccaggaaacggggtgtcccctgcagggggttaaactgcaggggcctgaaattaactgtgaacatgtgggagccccatgcatttgggtcagggatttgggggcccccccagctggcgggaaccccaaatggacccaaactgtacatttgccaatgggtttttttcagaccatggtttttacttgcaaataaacctgagtttttttctcca

SEQ ID NO: 548659 - DNA, 136 bp, Homo sapiens
atttgattaaaaaatgattcccagaatttaggaacagaatccaactaacccctgtatgaggggaatcgaaatgaggatattaaccccaaaaaaaaagggggatttttaaaggattaaaaaaattttgaaatgttta

SEQ ID NO: 548660 - DNA, 435 bp, Homo sapiens
ggatcccccgggctgcaggatcatgtatcgatggagacatataggacatacatatcatactcttaggtctggcaaatatttgaggatcatacatattttatattcactcatcagcagttgtaaacacattcttaaaggaggattttcagatatgaacaagctgggatgaaagaagaactacggtacgggaaatggttgtggcaatgctcctgcgtggccatctacacctcacgagggctctaagagcacgcgttactggatcccaccaacatacgcagcagacaatcactgtcccccaggaccaggatggccaaggatgaaaaggaccgcgactgaccagccagctgtccctcttacctaaagacttataaccaatgcccccttatttaggcaaaggggggggggcctccgccttgcccttttcccccccccccc

SEQ ID NO: 548661 - DNA, 88 bp, Homo sapiens
cacacacagagggcaaactaagttctaaggtttttcattaagacagtttattttaaggctaacacaaacatcgtcgtcttcttgttta

SEQ ID NO: 548662 - DNA, 835 bp, Homo sapiens
  misc_feature (271)..(271): n is a, c, g, or t
  misc_feature (324)..(324): n is a, c, g, or t
  misc_feature (368)..(368): n is a, c, g, or t
  misc_feature (626)..(626): n is a, c, g, or t
ttatgaagatccccctgcgggaactccctgggggcctatctgttggaggccacgcctattttcctgccacttggggtcctcaccgaatgtgccctgggaaattgtgacaaaaagagacccacatggcttctataccctgcccagacgggcacacaatttgtggagacgtgtgtcccccgggggacacgctcttgttctcccaagagaggttaaaggggagagatgttgtttgccctgtgagcgcacaagggcttttggggacgagtctccnctcccgggctcacggatttttctgagacccctttggaggagtcacgacaatancccggagtatctctacgcccctctctctacactcgtatgctatncgggaccaacgagtttcctggtcgaaattttgtgccacccagtgcacgcccacttggcctccgtttctgggggaggatttttttgccgggagagcacgccaaaggagaggggcgacacatgggctcggccttttcaagctctttgaaggaccacgatgactactccttcaaggggcactggcacgtaacccactcgttgagtttgacatcctctttatgcccactcccttggcttaccacgtatgagagagagtgggngctgtaatgcttgataattcttgagaccacttggaacttacatagatgacttgaccaggtagagatctgatattttgagattttggagaccctttcctgtgcccgaatcactggtctattccctaccgggccctgggggctgttttagaaatggttggataacctggtttaattcaatattaagcgttataaaaaaaagaaaaaatata

SEQ ID NO: 548663 - DNA, 643 bp, Homo sapiens
gacgcgtgggtcgacccacgcgtcggacccacgcgtcgagagcaccaagatgctgcagcatattgattacatggatgaggtgcatcctgcaggacgggcggatcttcattgtatccttcaaggcttgagacaagcaatatgaatttgatcctctgtgactgtgatgagttcagaaagatcaagccaaagaactccgaacaagcagaaagggcaatgcagaagcgagtcctcggtctggtgcatgacttgtgacggggagaatctggtctcgatgaccagtcagcagggacctccgtcccataagactactgtgctattgcttcgaggttccgactttgcgtggagactgcctgtgggtgcccgatgtgggcatcggccagggctgtcctggcagtaggaattcccagtctgggaatgtcccatgtccccagggcgtccttgcaggactctgctgggctcaggtcgcgtgagtgcgctttgagatggtgtcattcccaaccagagtgaatgacaccctacaagcggaagaacggtacgtgggtgctcaagaccgcttggacccttgctttcaacagtgcaagttaatatgccgggactccaaagcgcagtacgccgaactgggcccgtggggagtcatccccca

SEQ ID NO: 548664 - DNA, 733 bp, Homo sapiens
gactgcagtactgagctttgcatcgccctttgccttgaatccgttctccgggctgagatcactgttctgtgggtttcaatgcgtgtcaaagccatatcccaagtactcgtgtagagcagacggggtcccttttgtgtaccacttcgggtctcgcgcatgaacgaacgaatgacgagctagtcgacttggcacagggacatccagattacgcttacgtttgttcctggttcgtcctcggtcatcctatcatccacattaattgtctatggtgagacacgtttgctagcttggcgtaattgtcaccgacagacagttctcaggagaaaaggctactgtcaacagaaaacgacaaacacttacgcacttgtctttatctccgccactgggcgtttgcgagggctacttgatcagagctgtctcggagacggattgctatggagaaaatagacagatccccctcggtgatatatgtgagaccgcggtgataccgatccagtgctcagtcgtaaatacgaacaccgcgtcctacgcgcgacggatagaaactgtgagagatttcgtgcccatgagcgagaagcgtttgccacaaatgctggcgcatgacatcatctggtaccgccgtctcgccagtcgtgttcacctgacgtggatccgagctgataacgggacacacttcgtgaagttccgccgagaacaaactgacacgactgacaacctgccctggcaaatctgg

SEQ ID NO: 548665 - DNA, 973 bp, Homo sapiens
  misc_feature (428)..(429): n is a, c, g, or t
  misc_feature (452)..(454): n is a, c, g, or t
  misc_feature (456)..(456): n is a, c, g, or t
  misc_feature (466)..(466): n is a, c, g, or t
  misc_feature (470)..(470): n is a, c, g, or t
  misc_feature (472)..(472): n is a, c, g, or t
  misc_feature (481)..(481): n is a, c, g, or t
  misc_feature (485)..(487): n is a, c, g, or t
  misc_feature (489)..(489): n is a, c, g, or t
  misc_feature (491)..(491): n is a, c, g, or t
  misc_feature (495)..(495): n is a, c, g, or t
  misc_feature (568)..(568): n is a, c, g, or t
atggagtcttgctctgtcgcccaggatggagtacaatggtgcagtctaggctcactgcactctagcctgagtgacagaacaactcattggcttaaaaaaaaaggagaagatttttggtggagggacattaagaaagaccaatactcaaagacgcgtcacaagttatgctacctaagccactacaccagatttactgggttggcacctatgccatgagctcaccggttgcactccattggtaaggcaaaatgctatgcctgaagagttgtaccattggaaagcgaggctggaggtgggaagtgtatgccgaaagcatgtacgtaagcttaccaccttacatttttctttctcaagtcaccaggacatagctcctacaattaatctctcgggtttgattcagtagatcccattttagctgaaagtcatgnngtttatgctgctctaagactctnnnanactaaattgnaggntnatgttagtnaagnnnantntctnatttctaatatcctaaatatatttacgatatctttggaacacccatttgaatcaaccattaaaccaatactgnttgaacaggtttgtgaaatcatggcattcatgggtcatgagaagacggtcaaagcacaaaagtgtgacacttctgcagatactggaacacagtgatgacttccatcatccagttctgccacttactaacccagtgatcttgagcagggtacctaactcctttgcacctcagtttcagctataaagcgaacatcataataatgtatattcacagggtttctgtaaaggctgaaagtcgaagcacatgcaaaacactttgtgcatggactggtaaaataagagttaatatgtattagatatggttataattattatcattactattattaataaattactggcttcagacatgctaacgtgtactatgatggaaagagtacttataactttgagaagcaggaccttc

SEQ ID NO: 548666 - DNA, 302 bp, Homo sapiens
  misc_feature (23)..(23): n is a, c, g, or t
  misc_feature (101)..(101): n is a, c, g, or t
  misc_feature (191)..(191): n is a, c, g, or t
  misc_feature (284)..(284): n is a, c, g, or t
  misc_feature (288)..(288): n is a, c, g, or t
  misc_feature (300)..(300): n is a, c, g, or t
aagaagatcctttgggttctgtncctttcatttctcattcaggctggagtgcagtggcatgatcacgggttcactgcaaccttgaactcctgagctcaagnagtcctcccaccttagcctcctaagaagcccggactacaagcagaagctacctcgcccagctaattttttaattttagtagagacaaggntctcgctgtgttgaataggctgatcttgaatttctgggttcaagcaatcctgccttggcctcccacaatgctgggattacaggcgtgaaaacnatcntgaccaagtcanta

SEQ ID NO: 548667 - DNA, 120 bp, Homo sapiens
  misc_feature (32)..(32): n is a, c, g, or t
  misc_feature (42)..(42): n is a, c, g, or t
aggatccgtctgtagttgattctagcatgcanacttagcaantggagtctcttggagatcaggaacatcagcatgcatttcatcacatattctaggctcattcatttgctcacttgcagc

SEQ ID NO: 548668 - DNA, 998 bp, Homo sapiens
gctcttggcggaggagcttcgagacctcagcaactggagatgagagatgatctggaggattgtcttgtcgcagtgcgagttggcctcgtacagagaactgcaattgctgttggctctgcagtagactcgccagtgttccagacctttgctcattgattcaatcgaggtaatggtcctcacagggaaaactggagccttgatcgcacaagcacatgggtgtgttgagagatgcgggcacgcgaagtcatcgtgggtccccagatgcacgacgcgattgcgtaggcgaccaaaggaatggttttctcctcactaatggcagtatcgtcatagaggctccatcgagcgtgtccgcgctcctggggcttggactaccgggcgttgttccatgtttgaaatccatcagctctgcagattgggagatatttatccgtaggactgctcgcgctcctcagtctgcatggtcgctgcgggcccttgggcgtgcttcgtcatctggccttattgttcaatggggggcgtgccgttggagtatacgctggcaatggctgggtcattacgggtgcttcgcaggtttgggcctcttggatggaggcttaggcatgatttccagccctatctaacgcatgtggcccttatggaagatggtggtgccgctcgctgtggtaagttcgtagacgctctttagatttacgtacgttggaagaactggtagtatgagctcttaagattcggggtgttgatggccacctaaggggtcccgcatgacggaaaaagataaccggattggtccaagagcggccggcctccgcatcttatgcacaggctgttctcatgcttaattttgggacacacgtgcgaagcaacgatacagctgggcacatggcgccaaaaccgcggctcagggggggcccccccattttataacagccgcaacaaaggtttaacacatggccgccgttaacatacaaaaacacacttcgcggcgccggaaaacacac

SEQ ID NO: 548669 - DNA, 418 bp, Homo sapiens
ttttgttgggatggagtctcgctctgttgcccaggctggagtacagtggcatgatcttggctcgccgcaacctccacctcccgggttcggacggttctcctgcctcagcctcccaagtgattgggattgcaggcatgcaccaccaggcccggcaaattttttgtattttttagtagagatggggtttagccaggttggctagactggtcttgaactcctgacctcaggtgatccacccgcctcggcctcccagggtgctgggattgcgggtgtgagccatcgttccctgctcttctttctttctgaggatacaagaagacggcaggctgtgacccggaagagggtcctcatcagcatccgaccatgcttacatcctaatcttggaactatgagaaataaatttctgtaatttctaagc

SEQ ID NO: 548670 - DNA, 148 bp, Homo sapiens
ctagagcagggctaggtgtctccggggaggcatgacagggggcaaggtccgtcctcggtgggcccaaacctattggtaaccaaagagctgggagcagcacaaggacccagccttggttctgcacttaataaatggtttggctacggct

SEQ ID NO: 548671 - DNA, 578 bp, Homo sapiens
ttcgggccgagatgtctcgctccgtggccttagcgtgtgctcgcgctactctctctttctggcctggaggctgatccagcgctactcctaaaggattcaggtttactcacgtcatccagcacgagaatggtaaagtcagatttcttggattggtttggggtcggggttccactcacatccgactattgatgttgacttagtgaagaatggcagagagagattgaaaaaagtggagcattcagacttgtcgtgtcaagcaaggactaggtctttcgtaatcatcttgtgactgacactgacattcacccccacgtgcaaaaagatgagtggtgcctagccagtggtgaaccgatgtgactttgtcaacgagcccaagatagttaagtggggatcgagaccatgtaagcagcgatcatgggaggtttgaagatgccgcatttggagtggatgaattccaaatgctgcttggttgcttttgaatattgatatgcttatagacttacactttatgcacaagaatgtcagggtgtataagtaactgttaacatggacatgatcttctttataattctactttg

SEQ ID NO: 548672 - DNA, 423 bp, Homo sapiens
tgtgagctgatgagtgggaccaaacggctctggccaccttggaccccattcctcccaggctttgtctctccctgagccctgcgcttgagaacattaaaagccatgccttggacccccttgttctgagtcctgccatgggccgtgaggacagccggccactcttcctggtatacactgcaaaagaacagaaagaagagactgaaatagagactggcacaacaatgttcttagcaggattatccacaatagccaaaggtggaaacagcctgaatgtccatcaacagatgagtgaattaataaaatgtgatatatgcatacaatggaattttcaaccataaaaaggaatgaatttttcatacatgctgcaacatggataagccttgaaaacataatgcaaagtgaaataaatcagccccaaaagga

SEQ ID NO: 548673 - DNA, 291 bp, Homo sapiens
  misc_feature (25)..(25): n is a, c, g, or t
  misc_feature (111)..(111): n is a, c, g, or t
  misc_feature (182)..(182): n is a, c, g, or t
  misc_feature (200)..(201): n is a, c, g, or t
  misc_feature (229)..(229): n is a, c, g, or t
  misc_feature (257)..(257): n is a, c, g, or t
  misc_feature (264)..(264): n is a, c, g, or t
tcgggtgatgatgtgacaaatacanaggcatacatgcaacacgcacacacgcacatgcacatctgcacacgcacatctgcacacacacatgcacatctgcacacacatgcncatctgcacacatacgcatgtgcatactgtgttggtctgttctcacgctgctaacaaagacatacccgagnactgggtaatttataaanngaggtttaatggactcagcagttccacnctggctgagggcaggcctcacaatcacnggcaganacggtgaatgcggagacaaatgtcaca

SEQ ID NO: 548674 - DNA, 111 bp, Homo sapiens
gacacatctgggatatggcttggctatttctgacatgttgtagggaagccgacatgctgaagtcaatttctgcgtctcactgtctcttgggcaacaaaagcatcagcctgt

SEQ ID NO: 548675 - DNA, 579 bp, Homo sapiens
  misc_feature (400)..(400): n is a, c, g, or t
  misc_feature (419)..(419): n is a, c, g, or t
  misc_feature (450)..(450): n is a, c, g, or t
  misc_feature (463)..(463): n is a, c, g, or t
  misc_feature (469)..(469): n is a, c, g, or t
  misc_feature (472)..(472): n is a, c, g, or t
  misc_feature (474)..(474): n is a, c, g, or t
  misc_feature (485)..(485): n is a, c, g, or t
  misc_feature (492)..(492): n is a, c, g, or t
  misc_feature (494)..(494): n is a, c, g, or t
  misc_feature (499)..(499): n is a, c, g, or t
  misc_feature (507)..(507): n is a, c, g, or t
  misc_feature (515)..(516): n is a, c, g, or t
  misc_feature (518)..(518): n is a, c, g, or t
  misc_feature (520)..(521): n is a, c, g, or t
  misc_feature (530)..(530): n is a, c, g, or t
ggtccaaattccatataagcaatgtataaactaataaagccaatcgtgataaattagtacgattgactttctggagtttctgaccataaaagtaaggaaaatgcagaacacaaagacagagagtaaaaagagaaattaggaaagcattctacatgttgaataggaagacactggccatgttcgtgcagcggcagtatgtcgtgacatgacataccttggagagaagttaacagatgaggaagttgataaaaatcatcagagaagcaaaatactggtagcgacactcaagtaaaccatgaaatttccataacttatgtcagcaaagtgggaatattgtacagtgtgtgttgaagttcctatacaacattgtttatctgccttttgtttgtaaggaatgtanatactaaaagttcttcttnctgtcaaaagaatatgtgtgaataagtcatntaacttattcttntgtttntcntntatcttcctgncatcatncnacagncttacttnagaaattnntntnntagaaaatngaacaaagtgcttcctgtggtggcacatacctcgaggatgggagtagag

SEQ ID NO: 548676 - DNA, 848 bp, Homo sapiens
gtgttcgttctcgagtatgtatgatcagataccgacacgagttaacatggtctcacggcccctatgtgggccctatttaccacaaagtcgtcggtgcggattcggatccctcgccgttttagaaaacaatggttgattacgcgattttcgcttaccgggacacactcaacgtggggccgaagcacggttgtggaacacggcgcccccacgtgccacaccgggatccctcttctttaaggacccaattttggccgcgtgtgccgaaatctgtaaccccgctaattttggggtcaggcccgagaactaaccattacccgcctggtgggtcctcacgcggggggtccaccgccccgcccccccccccggggggccaaaaagactctggcgaacacaatcaacagagcgaggtcggaatagctatgcccctctgacggtcgggtagcggtacacgaaccgtccaataaactggcatctccaacgcatcgcataaggtagaggcaagtgtcggccactaacaaacagagtcaccccggacttgtgtggtgaaaattaaaggagagtctcaatccttctcgcttcaagtggagcgggccaacggtttcgtctttaattcatcggggcacgacgccctggtgccacccaagagctctggaccatacaggcggcaacaggagaaaacacaaattgaggtgtacagaagtaagatatagagagagcaatcattccagtgtaagagcacgcacacgtttgagagcaaaaacttgggggagacatcgtttctcccccttgcccacaacacacgaaggggttataattattgtattgttagtgcgttgtttatttctcta

SEQ ID NO: 548677 - DNA, 676 bp, Homo sapiens
  misc_feature (247)..(247): n is a, c, g, or t
  misc_feature (252)..(252): n is a, c, g, or t
  misc_feature (254)..(254): n is a, c, g, or t
ccgtcgtccaccagcccggtgctgctccggtgagtggcgccatccacccgccccgcgctgctccggcgggcatctgcccatccaccaccgcagccatgtggcaacccagcttgcggcgcggagtggggtgcttcaaccagcggcgagcgggagtggcagccgttggcgaccgaggatgaccgcaggctgcaccgggtgctgcaaccgacaagcaattttgctggaaccacggcaacaagtgtggcanatccnangaacaagggaaggccatggagttgatttgctgggacggtggacggcggtggcggcggagctgcaacggcggttggtggtagggatgcgattgtgtgcccccgtgctgcaaccacggggcggttgggagttccaatgacaacctcgaacacggcggtgacctcgcgcgcgcgacgacgacgacttgtttgcggcgcgctggcacgagccaccgacggcaagcgcaggtcacggggcggccgacgagcgcattgttgtgcgaccgtgcgggaggccgggagtgcggatgaagacgaccagatgcgctgggtcgcgcttgggctctatcctctttttttttctgcgagatgaacgcaagatcgtacggtctgaaagcgatgtatcgtgtggtagggcagtgaccaaccccaatgtaggccgtgcg

SEQ ID NO: 548678 - DNA, 250 bp, Homo sapiens
  misc_feature (24)..(24): n is a, c, g, or t
  misc_feature (52)..(52): n is a, c, g, or t
  misc_feature (57)..(58): n is a, c, g, or t
  misc_feature (237)..(237): n is a, c, g, or t
agatggatttgtaatatatgctgnctattgctaatgttcacattcatatttnggggnnctatcttattttaatagagaacagacttctcaaaaaatcttcagaagcagcttattattgaaatatcgatatattgaaataaacccggtggggttagattactcatctgccaccaagtgggacattttgatggtctgggggtttaaaggtcttaggagagacctgttaagtaaattccngaaaatgagccaa

SEQ ID NO: 548679 - DNA, 171 bp, Homo sapiens
cactacgtataaaggtccaaccattactgcccagcacatgcttatctttcaagaggatgagatatgccgtaataagagcgctgaactacaagcttttggtttgggaatgaatccattcatattcccgtatcggatttctgctcatcaggtcacctaagtaaaccactacgt

SEQ ID NO: 548680 - DNA, 163 bp, Homo sapiens
aatcttagtgtgatactggaagattctgctgaagatctgaggtggcaatgactgaacatgtgactggtgtgctcacttctgcccacctgcctggaacaccatgtgccagtgaaaatggccaaaatgaatgtcttgtttctacacaatctccacaatatatgcc

SEQ ID NO: 548681 - DNA, 487 bp, Homo sapiens
tatcggacctttgatagccctctcctatcgaatcaaatttcctttacagaactgaaatttccatcaggctcatgctccaagtcagagtacaaaggacatgccaagggggcagccaggactcacctgcggggtgacctcactttgcacagacctggtgtccagggcccaggctcgcctcgtcacttgagtctgggtgtcattgaggcagtaagcagggttagctcctgggacaggtgagggtgcctccccctgcccccgccagtccagccccacagcggaggaagaactgcagattttcatctgtgcagatgaactcaggcccagtggtggaattggtgagggggaaggtggagaaggacaaagcctaactcagcaaagcgcctactgtgtgcctggcatggtactccgcgcttagtacactctgggctactccaggagctgctggcaccagagatgagttgcgggactgtaggattctgggaacttt

SEQ ID NO: 548682 - DNA, 561 bp, Homo sapiens
  misc_feature (108)..(108): n is a, c, g, or t
  misc_feature (316)..(316): n is a, c, g, or t
  misc_feature (561)..(561): n is a, c, g, or t
gtccaccccttccttttgcgcggaccccattacaattaaattttaaattaaaaatcccgaaaaaaaaaaaaaaaaaaaaaaaaaaacacctttggtcggcggccggcnctctgggccctctggaaaaacgccttctcttaacaccattctcggttgggcgcgcgcgcgcgggcgccccagttggggtgtaggtggcacaccatgtggcgctcatatagacgcggtgtggtttccccctatagggagagagatctcccgtgggggctcatatgagacacaataaggtgcgcgtgggggagtttctcctcttcaccanatattatataaaaaaagagcgccgcgcgggcgggcaaaaacccggcgagaagcgcgtgtctctgagcaaacacaatttctcccaagaaaatgtgagagtctctcgagagaggggcctcaataatcagaggggggggacatctctatttcttcaaacagcgggggagagctcctcccaagaaggcgaagagttcctcgcggaatatatctccaatattttaacgccccgctacctctggggggtan

SEQ ID NO: 548683 - DNA, 187 bp, Homo sapiens
  misc_feature (78)..(78): n is a, c, g, or t
  misc_feature (122)..(122): n is a, c, g, or t
  misc_feature (175)..(175): n is a, c, g, or t
ctgccttgacctcacgtgcagcaattaggaccaccaaggagtgttcttcaaaccaccttctaccaccccgcggacacnccagggctgattctggtgctcgcacccgcttcctcctctgcgtnccctgtggcaaagataaggagtcaggccagggcgggatgacactcattgattntaaagcatcttt

SEQ ID NO: 548684 - DNA, 197 bp, Homo sapiens
tgcgcgatctctagcaggatccccacttcgttgttgcactttatatttttccttactcaatgacgtgttgctggcggcctaactgttctcacataacagtagaaaaccaataatttgttgtcatctctttcaatagaatcgatgaattgcgtacaaaaaaatccttacataaattaagaatgaatacatttacaggt

SEQ ID NO: 548685 - DNA, 716 bp, Homo sapiens
gtttcccacgacacgatgttccctttctacagctgctggtagtgactggtactgctactactactcctggtctgtggcagtgagagaatcctggcacgtacagaagaaaataacttgcgacttggtaggaggaaaagggtaaacgagtcagaggagagagagttggctctagtgaagaggctgaagaccagctgatttaataaaagctttgagagcactgtgggccagtggttcagacagcattacactcttatcatcttcagggctgtgccgggtaagtctggtcaatccatcaccttctgtggcgcagcgtcctggctgcaaatcgaatcaataaagtacatgggaacggagacgacgtgcgtagcggcagtactcaacgagtactcacatcttcaacggacagtaattggcaatcatgctgatctatcaaagggcggtgatgaatatgacaaccactgtggcgaaggcagcagcgtcgtgccgctggtgatgatctcctgcattcgacacaccctagcggacaattttaaccctgtgtctgaggcagcgtggcgaaagtccaggatcgtttctgacctctttgagactgggtatgcagcctggcctgtgcacctacgcagatctcccacctcagtgtgggttcctcttacttgtcacgtttgcatcccggggttgctgttgactcgtgtggggggttcctataccagcgactg

SEQ ID NO: 548686 - DNA, 1654 bp, Homo sapiens
agcgggctgagcttgcatcacatccgccgcctgggcgcccaattccggaaggtgctgcacagctgtggcggcgggtactgcgttagtgattagagtttcttccctgccggaggtgggatacacggtagcatcatggtcgaggaggtacagaaacattctgtacacacccttgtgttcaggtcgttgaagaggacccatgacatgtttgtagctgataatggaaaacctgtgcctttagatgaagagagtcacaaacgaaaaatggcaatcaagcttcgtaatgagtatggtcctgtgttgcatatgcctacttcaaaagaaaatcttaaagagaagggtcctcagaatgcaacggattcatatgttcataaacagtaccctgccaatcaaggacaagaagttgaatactttgtggcaggtacacatccatacccaccaggacctggggttgctttgacagcagatactaagatccagagaatgccaagtgaatcagctgcacagtccttagcggtggcattacctttgcagaccaaggctgatgcaaatcgtactgcccctagtggaagtgaataccgacatcctggggcttctgaccgtccacagcctacagcgatgaattcaattgtcatggagactggcaaattaaaactgtcattgactgggcatattagtactgtgcggggcgtgatagtaagcacaaggagcccatatctgttctcttgtggagaagacaaacaagtgaaatgctgggatctcgaatacaataaggttatacggcattatcatggacatttaagtgcagtgtatggtttggatttgcacccgacaatcgatgtgttggtaacctgtagtcgagattcaactgcacggatttgggatgtgagaactaaagccagtgtacacacattatctggacatacaaatgcagttgctacagtgagatgtcaggctgcagaaccacaaattattacaggaagccatgatactacaattcgattatgggatctggtggctggaaaaacaagagtgacattaacaaatcacaaaaaatcagttagggctgtggttttacatccaagacattacacatttgcatctggttctccagataacataaagcagtggaaattccctgatggaagtttcattcaaaatctttccggtcataatgctattattaacacattgacggtaaattctgatggagtgcttgtatctggagctgacaatggcaccatgcatctttgggactggagaactggctacaattttcagagagttcacgcagctgtgcaacctgggtctttggacagtgaatcaggaatatttgcttgtgcttttgatcagtctgaaagtcgattactaacagctgaagctgataaaaccattaaagtatacagagaggatgacacagccacagaagaaactcatccagtcagctggaaaccagaaattatcaagagaaagagattttaatgaatgtggaattttttctctctctttttttttctttttaattaaaaaaaaaaaagcttggcgttcatgaggatatccagtcattttgtgctctggctgggaatataaaggagaaattcacttgcttcaatcattgctgcttcatattttacaataaactgtcccctgtccccta

SEQ ID NO: 548687 - DNA, 1394 bp, Homo sapiens
  misc_feature (1255)..(1255): n is a, c, g, or t
  misc_feature (1394)..(1394): n is a, c, g, or t
ggagagaccacactgcattgcctccctctgggccccgaggaaccctccttctgttgcctgctgctgctgctgctcctgcttccgcgcctgtgctggctgtccccctggagctgatgtgggctgcccaacacggatggatgaccccctgctgactgagagtccctgacacagggcctgtactaccacctgtgtacctccaggaggtcatctgatgtatctggagactggatggtgcatttccgacgagacagcttgctattgcttgccatctgctgtgctcggaccatctccgtcgccgtggacactgctttgattgccctgatgatgctttgtgactttctgtccggctcatccaccttggtcctgctatccatatctgtccttggtctcgatcgcttcaatctctgaccactgtgctcgttgttcatcttgtcttgctgggacttccttgcttcttctggccctctcgacttggatcgcctgattcccaaggggactccccaccagaattgttaaccacttggttgtgattcgatttcttgcatgttctccccgttggtcgtgccagccgttctcgagagccacccgtgggcacaccgccccagcgaagtctcacgggcgttcacacttttcccgcaaggtgcccctgacggacccccttgggcagagctctcgtcttcgacattccccaaagaacacggtggttccaagcccccggtgggaaccgcctattggcgcccccatgtgtatccggcaccggcttttgctcccgcattttcttcttggaaccgcacgactttccaattgcccggcctttacccgctttgcagttggccctataccctagtggcaacttctccgagcgcaacgacaccagcggtcgtctccgacttcgctggcgtatcgttttcacacccttggtgtgcaatgctcgcgtggacgcctatcaccgcgaaccgactctcgggcccgctgacacgcgcaccctacgcgcaccgtgccctatgctctcctaccgccggctcctacgctccccgcccgtccccgcgcccgacacccgctccgtgtcaccaaccggccctgcccgattagcccgtcttaccaccccgttcctgtaccctgctcgacttcgccctactcctccctgcccgtgccgaacattttggactccgggacccactgttgtttacccaccctccctcacttgtctccttacgcgtcaacccgtgcacaccccgttctacctacacactancatgacccacacccgctccgactctctccctctcctatcacgcccgtccactgctacactcgttacacaccaactgctttctcttacctactctacccttcctcgtaccacccctccttgcttgctctcgctcttcttn

SEQ ID NO: 548688 - DNA, 471 bp, Homo sapiens
  misc_feature (200)..(200): n is a, c, g, or t
tgagacgtttgagacggagtctcactctgtcgcccaggctggagtgcagtggcgcgatctcggctcactgcaacctccgcctcctgggatcacgccattctcctgtctccggagtagcagggactacaggcgcccgcgcaagcccggctaatttttttttttctatttttagtagagatgaggtttcgccgcgttaccanggatggtttcgatctcctgacatcgtgatctgcccgtctcagcctcaaagtgctgggattacaggcgtgacgaccgcgcctggcccaaataacacctttttgttattttctttagggtgccaaggctaagaagagttatttattttccttcaagtcagtaatgatgttgctattgttaaaaatgtttacctcccaaaaaatgttctgaagcaaaaatatatatatgtattagaatttgtctatgtattttttcttattttttatgattgtt

SEQ ID NO: 548689 - DNA, 733 bp, Homo sapiens
  misc_feature (24)..(24): n is a, c, g, or t
  misc_feature (230)..(230): n is a, c, g, or t
ttgttttggaactagcgcccttgnggggacacggattcggccttatggccgggatggaaagtttttggatcggggaacagcatctgttttaaatttgatcacttaaggaaggaggcaactgatccaagaccctgtgaagtagaaaatgcagttgaatcatggagaacttcagtagaaactgctctgagagcttacgtaaaagaacattacccgaatggtttttgcactgngtatggcaaaaaaaatagatggacagcaaaccattattgcatgcatagaaagccatcagttccaagcaaaaaattttttggaatgggtcgttggaggtcagaatggaagtttacaatcactccttcaaccactcaagtggttggcatcttgaaaattcaggttcattattatgaagatggtattgttcagctagtgaggcataaagatatacaagattccctaacagggtctaatgaagtgcaacagcaaaagattttataaagattggaaaggcctgcaaaaatgaataccggactgccatcagggagaattatcagaccatgtcggacactattttcaaggccttacgtgacagttgccagttaccgcactaagaatggatggacaagatccttagctacaagatgggaaagagatgcaaatggctaagaagaccagggctgacccggacatttaaggggctttgcgttaaaaatcattgcgttttctgaccggcgccgcc

SEQ ID NO: 548690 - DNA, 1058 bp, Homo sapiens
  misc_feature (850)..(850): n is a, c, g, or t
agcgggctgagcttgcatcacatccgccgcctgggcgcccaattccggaaggtgctgcacagctgtggcggcgggtactgcgttagtgattagagtttcttccctgccggaggtgggatacacggtagcatcatggtcgaggaggtacagaaacattctgtacacacccttgtgttcaggtcgttgaagaggacccatgacatgtttgtagctgataatggaaaacctgtgcctttagatgaagagagtcacaaacgaaaaatggcaatcaagcttcgtaatgagtatggtcctgtgttgcatatgcctacttcaaaagaaaatcttaaagagaagggtcctcagaatgcaacggattcatatgttcataaacagtaccctgccaatcaaggacaagaagttgaatactttgtggcaggtacacatccatacccaccaggacctggggttgctttgacagcagatactaagatccagagaatgccaagtgaatcagctgcacagtccttagcggtggcattacctttgcagaccaaggctgatgcaaatcgtactgcccctagtggaagtgaataccgacatcctggggcttctgaccgtccacagcctacagcgatgaattcaattgtcatggagactggcaataccaagaactctgcactgatggctaaaaaagcccctacaatgccaaaaccccagtggcacccaccgtggaaactctacagggttatcagtgggcatcttggctgggttcgatgtattgctgtggaacctggaaatcagtggtttgttactggatctgctgacagaactataaagatctgggacttggctagggaataaatggttngatggcatatagaatggcggggtgatatagcaaaggacccattgtctctgggggaacacaaggaagtggattggataaaagtacggattcaggattatggttgtagtgccaaatgggagtagataaggatggtagaactgaattgaaaggagagttacagaacgagaatgtgggaagaaaaaggcatcagaagattgagatgggatga

SEQ ID NO: 548691 - DNA, 1564 bp, Homo sapiens
  misc_feature (1030)..(1030): n is a, c, g, or t
  misc_feature (1249)..(1249): n is a, c, g, or t
tgcaccaagaataacagcaaataaatagattgctatgtaaattaattcgagaatcataagctttggtgttagtagaatatccaagtagaaatgttattttagatggaaaactacaaactaaacataatgaatccatccatctgttattagacttggataatgccagaagtttatcaactcttcctaaaactgtcaaagaactaagtgtataaagccaatgaataatgttagataccttatttttgttagaaaggaagcctattagacatgaagcaaactaataatactttattttaactcacttttctatttttagacagaagaaactcatccagtcagctggaaaccagaaattatcaagagaaagagattttaatgaatgtggaattttttctctctctttttttttctttttaattaaaaaaaaaaaagcttggcgttcatgaggatatccagtcattttgtgctctggctgggaatataaaggagaaattcacttgcttcaatcattgctgcttcatattttacaataaactgtcccctgtcccctacccctgtgtttttatttctaaaacaatttgtgatactaggaagatgcagatatcaagtaaatgcaggtttattgaacataactattctagatgtaatattttgacagtcttattagaaaacccccttttttaaaaaaaatgtatgaaaccgataattaggacatttgaaggagcagtagtttttttttagtcctttaaaaaataacatctgtgactaataatttgagattaaaagatttgaagtcttaatttatgtatgtttattccaaaaacagtttttgagtgtatgttctacaaagttctgcactagatactgttcaggaaatagacaagtaagatgtgtctatcctctaagacttccagtttggtagcttagtatagaaattctgtaacagaggtgcaggtgaaatgctgggggaacagaagggataagaccttttatttttctcaggaaggattgtggaagacttcatagagtnagtggcattggagattaccttgaagtgaaggaagacaaagaaggaaaagagatgaggcataaagtgatgaaaccaggcacaagaaagtgtgcggtgtgttctgggacaaggaatgttctgctactgtcgaataatggggactaaagctggcttgttctggggaaagctcatataacgtatggattttattcctcaatagtaggataccaaatactggtnttgaattggggacacatactgggatacaagggccagtaattaaagttggagaagggctggaaacttggggagatttgaaggagaaatttaagttctaatatggttggctttttgggaatacagtttttaaattgacggggattattccattatagatggtggattactttttattgaaaccggttaaaagagtgtaatttaataatgtgcgatgtaaatcatgatacattgcaaggagaaggagacaagtaggtgaaaatggatagggatgggaggggttaaagcacgggggttgtgttagatgtatatgtcctt

SEQ ID NO: 548692 - DNA, 176 bp, Homo sapiens
cacccagactaccctgggcacatgtcatcagtatctcctgagattatgtcatgggcaggtccttagccttgttaaaataaactttccaaattgccttagacccagtctcatattttgggttcatatctgtatgagaaaatgttattaatataaatactccaaaaactggatggaag

SEQ ID NO: 548693 - DNA, 697 bp, Homo sapiens
agcgggctgagcttgcatcacatccgccgcctgggcgcccaattccggaaggtgctgcacagctgtggcggcgggtactgcgttagtgattagagtttcttccctgccggaggtgggatacacggtagcatcatggtcgaggtaaagtgacactggggctctcaagagtcgtttgtctctggactgttttttttggcagtgcgcgtgggggattgagagtacttggagtccagagagaaaagaggctacgaggggagctatttggccaaggccgagtggtctcttcttcgggttttcggggaaggggtagaagccggatgagaacccgagtcggaggttcagcctgggcgcgaagcctgagataattcgtccagtcctcgtttgactcttgggagctggaaagtgtcctcggaggcggggcctctgttcgtgatcgaccactggtacttgccgccctcggggcagtgtcagtgagtctgtgccctaaaagattggtagtcttctctatcttgcgttcaggtcgtcttcttatttcacctctacccccagaaaaacttgtcgttctttacatctttccctggcatgaacagccaacgctgttagctggtcttgtccatcttaccccacatgtttattgattccattcactcttctccatatccgctgcagtccaccttaattgagaccaacatcatct

SEQ ID NO: 548694 - DNA, 2249 bp, Homo sapiens
aatagatgggggtctcactttgttctccaggctgatctcaaactcttgacttcaagagatcctcctgcctccgcctcccaaagtgctggagattacaggcatgagctgctaggtccaatcgctttgagatttttttggtttggtttggtttgttgttttttgtttgtttgaggcagtcttcctctgttgcccaggccggagtgcaatggcactatctcggttcattgcaacctctgtctcccaggttcaagtgattctcatgcctcagccccctcagtagctgggattacaggcgcccgccaccacacccagttaatttttgtatttttagtagagaccgggtttcaccatgttggccaggctggtatcgaactcctaacctcaagtgatctgctagcctcgccctcccaaagtgctgggattacaggcgtgagtcactgtgcgccgggctgggtaagcttacataacaaagcagttaaaacctttaacgtagtgttattacagttttctctccttcactagactgagatctgagggtcgtgccttgctcactggagctctgccgaatgcagtgcgtgtctgatcgtgaacatagtatatttatgggccctttcaggtctaaggttatgaggacgtaaccaagggccaagtgtgcgatcacctccaaccaacacaaaccgaggtgccgggaaccccttttaggtttacatccccatttggttccttgacaactcacttggcacctgagcctggagaaccccaactttcttcctctcccacccacctcactcacaggcacgggtggggtgaggatataatactttattcactaacacgggccgagggaatgtagtgatgtggggtgggcactgtttccagggaccccggcaggggattctccctgtctcccagttccagggcagccgggcctgccgtcccctcaatttcccagacccggaggccggggcgaggaggagcctgggttagtgcagccaggtcgaagccccagcgcgcccctccgcagccctgcgggactcagctgccctcacactccgggcaacgctcggtggcagtggcggccgtggcgccagggggcagcttgaagtccctgccgcagccggcgcaaatatacaggcggcgccgcatgtgcgcgcgtcggtggcgaatgaagtgcgagcttaggcggaagcggcggccgcactcggcgcaggggtagggccgctcgcctgtgtgcgtgcgcgcgtgctccgccaggttggagcggtggccgaagcgacggccacacacagcgcagcggtgcggcttctcgcccgtgtgcacgcgccggtgcttggccagcgccgagctctgagcgaagcgcgtgccgcagtcggcgcaagcgtagggccgctcgcccgtgtgcgtgcgtcggtggcgcgccaggcacgagctgccgccaaaggcgcgtccgcagtccgggcacgcgtacggcttctcgcccgtgtgcacgcgcaggtgctgtgcgtagttggagctctgcgcgaagcggcggccgcagtgcgcgcatgcgtacggcttctcgcccgtgtgccgccgccggtgctgccgcaggttcgaggcggccgagaagcgtttgtcgcactcggggcactcgtagggccgctcgcccgtgtgcgtgcggccgtgtttggtcagcgccgacttctgtgagaagcgccgcccgcactcggtgcacccgaagggccgttcgcccgtgtgcgtgcgcgcgtgcttcgccagcgtggagcggcgcgcgaaggcgcggccgcagtcggggcacgcgtggggacgcgccgggtcggcggacggcgcgggcgcctcgcccgggacctccttgttgtccatggggatcttgagtttcaccacctcatacttctcctcaccctcatcctcctcacccttcaccagcagcaccatctcctcctgcatctcttcctcctcctcttcctctgcctgctgttcgccaggcatcttggtgtccagccgaaggttcggcactcgcggtgccccaggcctgggcgccgggcggctgggcactcagcgaggccgcggctccgggggcggggagggggcgggaccgcagggacggccggtcattggtccgaacatatagccccaccccctggggcggagcccgaaggacccaggcgtccggcccaaacggctcggagagggcggcgagctcagacttggcgtcctccgcagtcccccgactcccaagcacctggagc

SEQ ID NO: 548695 - DNA, 278 bp, Homo sapiens
gaaaaaatgtaaaaaattagttgggtgtactggcatggtggtatacaccagtagtcccagctactcaggagctgacacaagaagatcacttgagaccaggagtttgaggctatagtgagctatgattgtgcctctacactgtagcctgggcaacagagtaagaccgtctccaaaataaataaataaacaaataaatatagtttcgcctgtatctttgggtctgcatctgaggtctccatgtcatataacagtatgattaataatatgttatgctgtca

SEQ ID NO: 548696 - DNA, 1205 bp, Homo sapiens
ctggtttaaatagtatctatactgataacaatagcaacaatcaataacaaagtattaagctttgacaacactatgtatgttattgtattaaatcctcctgtcacccgccttgagctgggtgttctctcttttgatagctgagaaagctgaggctgagggcgatgaaattcacatggccagtgggagccaggatggactcagggtgcccatgagaccatgccgtcattcaggctacactgttctgaactcacgtgaccaagatgtgacagaggctggattccacgtccctggcacactccaagagggattcaaggttaaaatacaacttgatactttaaatggagaaactccccacagtatgtttggtaccatctgaattcaaggtcacattttccagtcttgccctggttttgaaatctattggtttatttcaatacatcagccactgtggagagaacttgtctcatcagatctacatttttctggcccgtttttccttggcaccctctttcaggtgactttggacagcctgagggcttcctcatgctgagttcactgacttctgaaaaagaaattctccatacaagcactgttgatgtctccagcccaggagaaggggccttggatgcccgaggaaaaatcttggtaagaggagctgaatccagctcattaagatcctcctctgccccagtgtcccgagaaaggccaggtaggctaagtgagatcaaattcccagtatgaggccaggtgcagtgactcacacctgtaatcttagcacttcgggaggccaaggaaggaggattacttgaggccaggagttggacaccagcctgggcaacacagttagacctcgtctctacaaaaagtgaaaaattagccaggtgtggtggggtgcacttgtagtcccaacaacttggtaggccgaggaaggaggatcacttgagcccaagagttcaaggctgcagtgagctacaatcacgtgccactgcactccagcctgggtgacaaagcgagatcgtgtctctccttgttgtccatggggatcttgagtttcaccacctcatacttctcctcaccctcatcctcctcacccttcaccagcagcaccatctcctcctgcatctcttcctcctcctcttcctctgcctgctgttcgccaggcatcttggtgtcctgaggcggggagcagccgaaggttcggcact

SEQ ID NO: 548697 - DNA, 237 bp, Homo sapiens
gcgtcactctgacttgattcaagaagtgtagacgtcggcgtgtgcagcaacaacttcgtccagtcagacctgatttgtggaagtgtctggacagtcggcgtgtgcagcaacaacttcgtccattgcgaccttgagtgtggaccctcggcgtgtgtgcacacgcggaatgaccaaacattcttaaggtcaagtcggagtggacgaagttgtagcaaatcctaagggacgaagttgtcg

SEQ ID NO: 548698 - DNA, 101 bp, Homo sapiens
tctagaggactaccccttacacagcttggggtagtaacatggtccgaaacagcgcttctcataccactgtagtactttaagactcgtccaaccagggctac

SEQ ID NO: 548699 - DNA, 813 bp, Homo sapiens
ggtgccgcgcccagagcagcagcgggagcgaagatgcgaggccattacctgtttgatccctgtcggaaacctggcacgggccaacttttcccgattatcacgccaagaagttgcaaggactagtcgaagactcggaggggccaggcgagggcgcgctcccccgcgcgctgcctcctccctcctccctccggccgcccgagctcccggcctctctcccgcccgcgctcactccctccggccgcctccctcctctggccccctccgcgcggcacagggcgcgggggtgccgcgaaactccgacccgagccacttggacttgccacagtgtccgcgggccgcaggggccgaccgacgcagtcgcgcagctctgctccgcctgccagtctcgcccgcgatcccgggccggggctgtggcgtcgactccgacccaggcagcagcagccccgcgcgggagccggaccgcgccggaggagctcggacggcatgctgagccccctccttggctgaagcccgagctgcggaggaagcccgggcaaacgcaaggctaaggagacaaagcggcgaagctcgcgagaaagccggacaagcagccggaggacaacgacgaggaggggacccccggagacggggcagcaaacaagacagcgcggatcgagacgctccgggacaccgaccgccgttacagaccaccacacacacgacaaaaagaagccaccaagcgacaaccccaacacccgaccacgaatcacaaccaaaaaccgcccaaccaagcacacaacctcacgccccccggcacaacctcggcaacaagcc

SEQ ID NO: 548700 - DNA, 253 bp, Homo sapiens
attatgcaaatgcagttttccgcatagacttccgtctctgcgaagtcgtcgaaacaggtatctgcgagaggtgccaagcaaggtctgacagggcctgttgaatcaagccgtttctatggatacgtaaacagtgtctcagtgacgccctgaacaatctcaacgagagaccttctgttcccagatcgagagctgcgggaagtggccatgagcgtaggcctcagcttcctgggtggtcccttaagccaacgtcctc

SEQ ID NO: 548701 - DNA, 1497 bp, Homo sapiens
  misc_feature (206)..(206): n is a, c, g, or t
  misc_feature (574)..(574): n is a, c, g, or t
  misc_feature (910)..(910): n is a, c, g, or t
gctctaagccgtgaccgcctcgtgagcgcgtgcatcttgctacataggacggaagtcctgaactattcgtccttcccagtcgcactggtgtcgtgccagacgactcattgagagtgtatcgatagatgcggctgaatcgttcgagtactatgctatagagaatgcgtactggtcgacggagtggtccgcttggctcgacagcttcntggagtgaaggaagtgcgaaggcggcttagtagcttggtgccgaaatcatctcggttggtgcaactgagagagacgagaggtatacgcgctcatggacacgccatgggattgatcttctgtacaccatggcgcgctgttccgaacctcgactagcgtgatcattcgtggggcatacccgttttccaccattgactgaggacggtagtaatgcgtgggaaaaatccccgacagaaggacgaataccagttcaccgtgttcgaatgcgatatagcctttatggctgtgcatcgtgtccgaggcaccttcttttgcaggacggcgtatctcgagaacgatatggggtgacacttgtagctatataaattanggcgcgtaagaaccttccagggacatacgatgtgcgctatgtgtaaacttgacgcttgactatactttaagcgaggctagcctccgtcccggtccagtcccttagtgggaccaacaacagaagaaaggaaaggcttgagtgccttcggaatagtacccctgtgtctaaacactttttgtttgctaacactccaatttcctgctgttttaaacggtaccagcaattcgctacctaggtgaccaggccccaaggataattgctcgggattttcctgtaagaacacgtcgcacgctttggaaccttgaagaagtcaaaagcggttcggctgaacgagcncctgtagcgcatgcacatataaggagcaaacgctcaaaagagaatcttcgagggcctggtggcttggggcttcaaacctttccgcaacgtgtattggttttccctaggcgcatgtcgcagctcgaacacttcgggagcagcgagtcagggtagattagcgtctctcccatagatttcgcgaacagtggcacgagctgggtgagcatctccaaggcatggaataaatttacccgcgcatgaggaaaggaggctgagcttcagtagacattccttagggcgtcaacctaacccagctatgatgggggtaccccatgggcgtaagcaaaccttgtaacagggaagcgagctctagaggttgaagtgagaaggtggcccaggcgtctagaacaaaatttgcgcctgcgacgaaccgtccaggatactcttagtcacctcctcaccagagcagtagatcacattaccacctctgcgctagtataggtcgtagagcaaatccctcagggccactagctaacattgagcgcgaaataattatgagcacgatctaaccgacagaaccagcacatctaaagagccattgacgtatg

SEQ ID NO: 548702 - DNA, 312 bp, Homo sapiens
tttctccttacattaaggtctctgaaggcctccaggttaccaatttgcgagggtatagtttgaatttcattgcagctcacatcatgttccatcaaacggctgacatgcccacttgctactggccgtgacaccactttgttattactagcaattaagactctcaatggcaaattacacaagtgtaccggcaatgttgacagttggatccgactaatatttaagaatgttagagcttgtaggttaaaattgcctctggaatataacgaatacaattttggcacaagttgagattttccagagaaacaaagcgac

SEQ ID NO: 548703 - DNA, 153 bp, Homo sapiens
ctgactgagtgataccgagaggtgggacacgggacagcgctggtagggacgtagaatggagcccagcgaagtgccaacacccaagagacctcgtgggctgaccaaatgggaagcaaaaacaagggtgctgccaagacccgtggtcccacctct

SEQ ID NO: 548704 - DNA, 713 bp, Homo sapiens
caacagagcttgactccatctcaaaataaaaaaaaacagaaaaaaacctctgcatagcaaaagagtgaacagacaacctgcagaatgggagaaaatatttgcaaactatacacccaacaggggactaatatccagaattttcaaggaactcaaactactcaacaaccaaacagacaatctcatcaaaaagtgggctaaggatatgaatagtcatttttcaaaaaaagaaaagcaaatggccaacaagaatatgaagaaagttcaacatcaccaatcatcacagaaatgcaaattaaaaccacagtgaaatatcatcttacaccaatcggaatggctgttactgaaaagacaaaaaaataacagatgttggctaggatatggagaaaaggaaattcttatacactgttggtgggaatgttaattagcataacctttatgtaaaacagtatctaccctgtgtgtgtttgtatatacatatatatatacatgtatgtgcgtatacatgtgtgtgtatatatacacacacatatactagtatttcattgggtgtggatatgtggatatatattcatgcacacattgcaccacacacacaatggaattcttttaagccatgaaagggaatgaaccgattctccagagaaagacaaatgttcatggtttcacttttaggggggagcttaatagattggccattatttccccattaatgt

SEQ ID NO: 548705 - DNA, 122 bp, Homo sapiens
  misc_feature (115)..(115): n is a, c, g, or t
acgcccgcctactactactactactgctcgaattcaagcttctaacgatgtacggggacatgatgtgaagagtttcacaaatctttcaaaataaaaagtaatgacttagaaactncaaaaaa

SEQ ID NO: 548706 - DNA, 1071 bp, Homo sapiens
tgcctggtcccttgcagggctggtggtggcccggtgccctgtgacctactccgtgtggcctgcctgctgtgtgatgcctgtgccacacttaaatgcctgaatccctgtgctccaatgaaacctgtgatgatgaatgaccaatgatgtgtctggatgaagatgtgtagaaaattgttgtgcatgatgtgcctataaatgtgcagaaatgtgcaaatgagtgaaccctgtgcaccctgcttgtggcttttgagtggagtgccatgactccaattttaacatcactgaagtccgcaagaatactggtgtttaaccgaaggggacattagttatcaagactgccatgtataaatgccctttgagatctcagatatgaacttgcatgtatcgttatttgatatttggggtcagttgtatgagtcctatgtcaagcctatttgagcttaagcccatgacttgtcacattgggacgatggtgttgaccgatccaagccacctctcaacacacgggcattactggtggtaccaagcttggatatgacggacagggttgcatgaacaccatttactgggaaacacagttaagtatccgcaagtacagtctggcattcagaaaactagcctatatgcttgccacttggacaacacaacaatggttggagttgttcactacacgccttctatgaatccaagaacgtctggacatcgtactgcaaacctgttccattctttcttcgtggacaacccattccaaacaagaatgcttccagcaagaagaactggtaccatattacacatgatgcaaatgaacggggggtactggcgtgatctgccagattcctggagcagagcttgactcgctggaagaagtggaaccctacccggaatcactaaagctgaaccctcaaacggccggacaacaggagagaccagggcaaaaacagaagggaatggccagcatgcgcggacatggcgcaaaaagcctaaagcaaagaaaaccacaaacaataccaaaacccacagagccacagaacagccgaaagaggcagaaaaagagaggaccagcaagcacaa

SEQ ID NO: 548707 - DNA, 433 bp, Homo sapiens
ctagaggtgggtggatacaacggtcaggagttcaagaccagcctggccagatgatgaaaccccgtttccactaaaaaaaaaaaaacaaaaaaatgaatagagattaagtgaccggggggataccacaacaggacccaacatatgcttgtgggagtctcgaaaggagaagagagaaaaaggcaaagagagtatctgaagaaatatgtaatctcagtacttggggaagccgaggcgggcagaccacctgaggtgaggggttcgagaacagcctggccaacatggtgaacccccgtctctaccaaagatacaaaaattagctgggcatggtgacacatgcctgcaatcccagctactcaagaggctaaggcaggagattcacctgaacccaaaaggcagaggttgcagtgagctgagatcatgacactgcactcca

SEQ ID NO: 548708 - DNA, 1126 bp, Homo sapiens
  misc_feature (22)..(22): n is a, c, g, or t
  misc_feature (128)..(128): n is a, c, g, or t
  misc_feature (132)..(132): n is a, c, g, or t
  misc_feature (138)..(138): n is a, c, g, or t
  misc_feature (152)..(152): n is a, c, g, or t
  misc_feature (162)..(162): n is a, c, g, or t
  misc_feature (173)..(173): n is a, c, g, or t
  misc_feature (186)..(187): n is a, c, g, or t
  misc_feature (218)..(218): n is a, c, g, or t
  misc_feature (239)..(239): n is a, c, g, or t
  misc_feature (248)..(248): n is a, c, g, or t
  misc_feature (250)..(250): n is a, c, g, or t
  misc_feature (276)..(276): n is a, c, g, or t
  misc_feature (300)..(300): n is a, c, g, or t
  misc_feature (598)..(598): n is a, c, g, or t
  misc_feature (610)..(610): n is a, c, g, or t
  misc_feature (612)..(612): n is a, c, g, or t
agcggagtgaaggttgcccgangatggtcgggcctggcgttgggcgtgcggccgggctgtcttgcagcttccagggctaactcaggtgagatggagccgctatagtcctgaattcaaggatcccttgnattngacaanggaatattatcgcnaagccagtgngaggagctaanctgaggacggagnnaatatgttccgggagctcaagaagactcagnctcatcaaaagctgctccagncagggaaanancaaagttctgtgtttgaagacccagntcatcagataaattcaccaacatngatgatgataggaggaaacaaagtactggccagatccctcatgattcagactctggaagctgtgaaaaggaagcagtttgagaagtaccatgccgcttctgcagaggaacaggcaaccatcgaacgcaatcccctacaccatcttccatcaagcactgaaacaactgtgagcctatgcattgggctggtacccatcctcaaggggaggccgtttctaccaggtccctgtaacccctacccgacgcggcgtcgcgcgtttcctagccatgaagtggatgatcactgagtgccgggatanaaaagcaccatngnacactgatgccggagaaagcttgtcacacaagctgctggaggcttaccataaccagtgccctgtgatcaagaggacagccttgattttgccacaaacggatggtcagaggccaaccgtgcctggcccacatacgctggtggtagagtctccaggaggagtcccagggccctctggcgcgaagacaacagtgtgagctactgccacgctgaaaactaacctggtgcgttacggatggtacgtccttcgtaacgggtgggcacggccttcgtagaccagaatgtacgcaggcatattcactattccgtcaatccttctcactttgaggctgaaccttgctctctctgcccctatttcctctgcacacagcagcgcgcaccatgactggaactttcctccaggaacctcagagctgttactcttaccttcacggtggggcggaccttcggatttctacaggaagccgttacgtatcagacaaaagactactagccaatcctacgcctgactgggtac

SEQ ID NO: 548709 - DNA, 787 bp, Homo sapiens
  misc_feature (654)..(654): n is a, c, g, or t
ctcctgctccaccccaggaccctcagccctgaagcccaggaagccacacgtaaccctgtctcatagcctcctgcctggcctgagatagcaaccactggccaatgactccctctcctggaaactctgcccccagggcatccctggggccaacctggtgtcctgccgttaccgcacagtccccatctcatctgcacctggccgtgaagcaggctcatctccaccccaattgggccctcatcccttgctgacctacccgaggcccgctctcctctgcccacctctgcccagcctccctcagctctacttgctggcccagaactgtgctctgagcgcctgcttctcagctccctgtgaatgttcagatgccgctccagctcttcccggcccacactgagctcccgacgttcctcacaagcctaaggggcccagtgggcccccgggtcctcctctcacccagctccctgagccagacgcctgtgccccgactcccctccctcccttgccagccatgtgcaaagccactccaaaggctacttggttttcctgccggtctctggggacatgcacttctccctcatttcagccaccagcatcccgccaggactccttgtggcctcactcatccacttctgcctgccctgcccctcgaatcangccccagaggaaaacacgatcgttgtgccccatgctgaagccgtgcgatggcgcttgctgttttctcggggtagggctgtcacctcaaacatgccttccaaggcccactgggcgtctcagcttcactcggccc

SEQ ID NO: 548710 - DNA, 1252 bp, Homo sapiens
ggtttggtggcgtctaagggtttattttgtatgtgttttgtttagtgattttttgtgtattgggacggtgggagtaggaagttgtgtggtgtccggtgagtgtggtttagtgggtgggagtatagaggtggtttgagtttaggtggtatggtttgttaagtctatatgttgtataatgttcattgtttggtgtgaactgtttggtagttttattatcaggatctattgttggtgggttggtgtgttaatagttgaggggtgttgtgtgtcatgcgagctttacagggtaaagtactttgcgcctttagttagagtctgatgtgggtgatgtttgttgctgtgggttattaatggcgtcaagtgatggtattattttctcctaggggtgtgtcaatagagggtgtatatggctgttgagggatagcgttcagtgaagcggtgtgtcagtatagggttggattctagtgatcgtgctagtgtatcgcagttcaggattggatagtttctgcgatggcatatagttggaatcgttgtttgatttattttagggacggtggatggttattcttcgtcctcgggacaagatgtggcggaggatgtgcaggtgatcagggtcttaggtggatatgtcgctacctttatcatgggaggagtagatggtagcagcttgtgtctgcaggcggtgctggctgcttgccggtggtgaacaaattcggggagttgtatctaactcttatgtgagattcttggaatatagcatatctgatgagaataagccaaggcagaatgaagatgactgttgtggaaatgcggaagaacgaccctcagagcatcactgctgatgatcttcaccaggctgtctcgtggtggctcggtgtctggtcgtcatgcagtgcgtggtcagacaacgctgtcaagagaacgatggctgagagcaaagcagctagagtcttgtagagaagaccgaggcttcagcagcataaatgtgtgaatggaaatgaactttaaagatgtaatacctatgaagagtaatgggcaaactgtagccacataagttgtaaaattacagatattcagtgttataccacagttgttgttataggtaagtttctatcacaaaccagtgacatttcctgaaatcatagcctggtgtaacatcgtgatgctttagtatgatattcagtaaggagcttttaccttaactgagtttcactggagcttttgaaatattcgtccgtaggataatgatata

SEQ ID NO: 548711 - DNA, 114 bp, Homo sapiens
aaacactccttccatgacccagcctgattacccttgattaatgcaccaaaccaggtgtattaattgcctcctgctaacctaacattattactctcaagctttattatcctcaag

SEQ ID NO: 548712 - DNA, 1169 bp, Homo sapiens
  misc_feature (22)..(22): n is a, c, g, or t
  misc_feature (128)..(128): n is a, c, g, or t
  misc_feature (132)..(132): n is a, c, g, or t
  misc_feature (138)..(138): n is a, c, g, or t
  misc_feature (152)..(152): n is a, c, g, or t
  misc_feature (162)..(162): n is a, c, g, or t
  misc_feature (173)..(173): n is a, c, g, or t
  misc_feature (186)..(187): n is a, c, g, or t
  misc_feature (198)..(198): n is a, c, g, or t
  misc_feature (205)..(205): n is a, c, g, or t
  misc_feature (261)..(261): n is a, c, g, or t
  misc_feature (282)..(282): n is a, c, g, or t
  misc_feature (291)..(291): n is a, c, g, or t
  misc_feature (293)..(293): n is a, c, g, or t
  misc_feature (319)..(319): n is a, c, g, or t
  misc_feature (343)..(343): n is a, c, g, or t
  misc_feature (641)..(641): n is a, c, g, or t
  misc_feature (653)..(653): n is a, c, g, or t
  misc_feature (655)..(655): n is a, c, g, or t
agcggagtgaaggttgcccgangatggtcgggcctggcgttgggcgtgcggccgggctgtcttgcagcttccagggctaactcaggtgagatggagccgctatagtcctgaattcaaggatcccttgnattngacaanggaatattatcgcnaagccagtgngaggagctaanctgaggacggagnnaatagtgcagngaaagcngcaacggcaacaacaaacttccgaacttttgttccgggagctcaagaagactcagnctcatcaaaagctgctccagncagggaaanancaaagttctgtgtttgaagacccagntcatcagataaattcaccaacatngatgatgataggaggaaacaaagtactggccagatccctcatgattcagactctggaagctgtgaaaaggaagcagtttgagaagtaccatgccgcttctgcagaggaacaggcaaccatcgaacgcaatcccctacaccatcttccatcaagcactgaaacaactgtgagcctatgcattgggctggtacccatcctcaaggggaggccgtttctaccaggtccctgtaacccctacccgacgcggcgtcgcgcgtttcctagccatgaagtggatgatcactgagtgccgggatanaaaagcaccatngnacactgatgccggagaaagcttgtcacacaagctgctggaggcttaccataaccagtgccctgtgatcaagaggacagccttgattttgccacaaacggatggtcagaggccaaccgtgcctggcccacatacgctggtggtagagtctccaggaggagtcccagggccctctggcgcgaagacaacagtgtgagctactgccacgctgaaaactaacctggtgcgttacggatggtacgtccttcgtaacgggtgggcacggccttcgtagaccagaatgtacgcaggcatattcactattccgtcaatccttctcactttgaggctgaaccttgctctctctgcccctatttcctctgcacacagcagcgcgcaccatgactggaactttcctccaggaacctcagagctgttactcttaccttcacggtggggcggaccttcggatttctacaggaagccgttacgtatcagacaaaagactactagccaatcctacgcctgactgggtac

SEQ ID NO: 548713 - DNA, 233 bp, Homo sapiens
cggatggattggtgacacatcactcactacgtccttgagtaatctaacgaagcattagtgctttttctgccaactcaagtcgtttatctaaaatttcaaaatatcgttcttcactaccgcgagctagaatgccaatttgaggtaagtttaaacttactacaccaatgttaaaacgtccatcaaacttgtattcaccattttcatccttccaaggagataagaaggatcgacag

SEQ ID NO: 548714 - DNA, 1348 bp, Homo sapiens
gctagacccgacagactagtgctagtgggccaggctgtcgctggttcgagcagtggaggaagagtatgtgattgcagtaaaggaggggagtaaggttacatggatgattagtgaaatatgcgccatattctaaaagagatgaagaacgtgcataatgtatgtatagtacaaaagtacgtagcgtgttatcatctgggaattgatgattgatccgagaaaaagcgagcaggacgtatttctagaggaattaagagcgttgtgatagaaacaatttattcccatatataaacaagcgaataggaattagttgacaggtagattgcacaaggagcaaggaatactaatcgatattgttactagaatacgggtggactgacctctgtgttaatagagagggaagttatagataaggctttgggtgctagtcgtattgggaaactaacacgacggcctaattgaatatagagcaggttgaatagagtgtcgaggcgatagccaaaaatataatcgtatagtttggaatctatttaaggatatgtgtgcaaagtgttagggcttagtacacggtgagcgcgaatggcttgctaaaaaaatagtgagttaccgcgggaattggtctagtagaaatctacattgatctgagagcatattggtagaattaggggtgaaacgaaggagttacgcatttggctattggccggatactaggttagaagaattcgccctgttaggcattggcggctcaatgaacttagaaaagcttgagcaaattaaagggcttgggccaaactttgcggggatttccattgagcgcgtagggaaaaaggattactctaacggcaaacttgtgtaaatggtctccgagaattttttggagtacgcacacatgaaataagggaaaatttttgaagggcgtaatttgagcatgagacgtggaggttcaaataatacaggtttaaaattggaaggcaacacccaaaattggatttttgaccctgtgagagataatttagtaaatggccatcagcattataagattcgcgtacattagtacagttttatagaccacaaggagaaccgttataagttcccacagatataactctctgttcaaggcgggtggaccctatcacatactgagcttcggcaacatttgaacagaatgtaaatccgcccatttgactccgggaaagcagtgtgatagaattaacaggtcgaacatactcgaaatgtgtcacctctaagcgcccacctttcatgttcactccatttaaagcgtatctggaaagaggggggaatcccgattaattagagtttgcacagcacaaatgttgggcagaacaaaatt

SEQ ID NO: 548715 - DNA, 107 bp, Homo sapiens
cctcagcttatactctcccactgtatgactattactcataataatgacattgatgttaattcttacaagttgctttttggaccgtgctagctttgtccctgatcagt

SEQ ID NO: 548716 - DNA, 251 bp, Homo sapiens
agatgcagtctcgctgtatcgcccaggctggagtgcagtggcatgatctcggctcagtgtaacctctgtagcaagttcccccaggccgtgggcaggtctagaggtgctgtctgggagccagggactgcagtcaaaaaccttaaaagtctacttggtgttctagtgtactgtggctgagctggcactcaagccatgagatgcagcccttcccactcttccctcccctttccaaagaccccttcccctcgtgc

SEQ ID NO: 548717 - DNA, 241 bp, Homo sapiens
atactctcagcacagaagaatacagggagcgagtcattaacgttttcttttaaacctttatgatgacttccttatgaatactgaacgaacactgaaatggactcaggtatcctgaggacatctctcaactctgggcttagtttccccctctgtaaaattaggggtgcaactaatatgatctacaaggtccctttccagcggccgcattcctaatggtttgtcggggtaccgagctccgaaa

SEQ ID NO: 548718 - DNA, 196 bp, Homo sapiens
ggactcagctgaaaatgcaccctgtctatgaggtagaagccttcactttccaggatcttgtaggacattggtcagaattctgccagttttggtgggttttctccctctctttgattcatttacaaaggacagcataacaaacgggaggcccaaagacaatgcactgtatgttgatgtaaccaagaaagcagactcg

SEQ ID NO: 548719 - DNA, 221 bp, Homo sapiens
agaaatccttacctttaaaaaaagcttctagtctccataacccccaaagtactgcttattttgttttgaaggaattccagcccatcgtaggttgctttagttcactattcgtaacattcatgatagggcaaggatttgaaaacaggattcttgcttctgttagtcatcaggtgaccagagcatcctacacaaccaataaggggctctatgttttgtgccat

SEQ ID NO: 548720 - DNA, 776 bp, Homo sapiens
  misc_feature (744)..(744): n is a, c, g, or t
ctgcactaggtcttccaaactaaataatgtattgaagagaaaaaaaaaaaagaggaagagagggagctctgcacatatactgcggaaaggctatgtgagctctcacagtagagaaggtagcactctacaagccagcatgagagccctcatcagaatccagccatgctctaccctgctctgagactatcagcctccagaactgtgatgaaatattgttgctgaaaccacacactctatgggatttttttatgggagcccaagccaacacagacacagtcattgctgtcacttacagacacgagaactctgactaggagagagataagttaaacttgtccaaggtcacacaagccagatacacgtgaggcgagaagttgaccttgttctcctcaatacaaagccaggactcctccactccacatgtagatagcgccctcacagtcaacagccatatgtgcacacaccagagtcagcattagaccaagatgtcttaccaggagacagatgcctcatctcgaataaatatgagctaacaacttacccatgtaaaacattgaatctcatgagaaacacaaatgcagaagatgtggaaaactatgtgtaccacttaactgacagtgatagctcaatgatatccttatagtcttggaggggtttgtatatgtggtgaaacacgtgctcacgcactgctgatagactagtaattggcctagagagagaataaataaactcggaggtgaatanacaataatagctattctattttagaagaatgg

SEQ ID NO: 548721 - DNA, 178 bp, Homo sapiens
  misc_feature (54)..(54): n is a, c, g, or t
  misc_feature (73)..(73): n is a, c, g, or t
  misc_feature (146)..(146): n is a, c, g, or t
  misc_feature (173)..(173): n is a, c, g, or t
tttttttgaccattagaaccaaaaaacattttttcatgtattagaacacacagnacaaggcaacacttattcnattttctcatcttctggtagggatctgttggtggcccctcctgttgcactgttgctctccgagccagtgttantatcactggttccttcctctgccatantgtcg

SEQ ID NO: 548722 - DNA, 439 bp, Homo sapiens
gctcactgcaacctctgcctcccgggttcaagcaattctcctgcctcagcctcctgagtagctggggattataggcgcatgctaccatgcctggctaatttttcttggtatttttcagtggacgatgcgggtttcacctgttgtttggcccaggcctgcgtctcaaaacttggcttggtctcaaagctcctgacctcatgatccgcctgccttggcctctcaaagtgcgggattacaggcgtgagctactgcacccgaccaattcttgtatttctttttttctctgggaaaaaatgggcgcttggccaggtggccaaggcgggccatcaagcctctggagccaaacgtgaccggcccacaccttgggcctcccaaggggcaggactacacgggctatgagccacaatgccaaggccccaaggggctgcacaacgcgatg

SEQ ID NO: 548723 - DNA, 533 bp, Homo sapiens
gggatccatccaccatttattggaccaaaaagggggtagggccaggagctctaggactggcccgggggggttctaaaggccccctggggttggaaaacaatggtctggaccctctactggggggcaggctgggttccaagttcccccaaatagctcaagaagttaacccgttccgttccaccctttttgatcaggggggtcaactgctcctttgacttttcaaaagaaaacttggccccggcctgaaactttgggcttttgaccttttccatcagggccttgccataaaaagacacgggctggaagaccctgaaaaccaggctttccccacatgggtcctttgcctgtttccgaaccaaaactcctttaagggttcaaaatggggaggggatacccacatttctgggaacccctttttttttggtaaccaggggggagggggggccacacccccgcctttttcccttggggtgtgggccccccccgccataaaggcgcaatccccgggccccacaccatggcgccctccccga

SEQ ID NO: 548724 - DNA, 1200 bp, Homo sapiens
  misc_feature (241)..(241): n is a, c, g, or t
  misc_feature (873)..(873): n is a, c, g, or t
gtcatactgccataggctgaccgcgttgcatgaaagcacagttggttcgcgttaccgccagccatctgggagtcacgagacttgattcaacacgcacaaagcattcgtgtcatcattcatttccgttactgcatgggacttccaagccgtcatatgcgctcatccttcagaaagatgaagatggtgctgacgatggtcgcgtctttactagcagtgcaacaggcagctaattgcatgtggntaggcctggagtggacccttatgatattactcatctgacaacgaaagaccgtgtatgcagccggtccaatcacgcctcttagtgagatggagaatcgacccgcggtagcatgtcggtcgtcgacagacattgctcaccacgtgatcaaccaacaatagcgataagcagaattccttgttccatcgcgtcacagcgtgggcaaatagaccctttcgaagggcggtgagagaagatcgcttgagcacaaaattgtattgtgctcgattcgctctggtggctactgcgatgaattgagtcaatgtctctccgctgcacatcgagaaccagggattactcattagggtagatagtagttgcacaagccgagaggaaggtgggtgggatccgataaccatccttttgtttgggaagcgaaggcatggagaggagatccgcttggtaacgttttgaaatcgcctccccttgagcaagactggacgttatgtaggacttggccacagtggatccccacacctcatgcgatagcactgagaagcggtcagataagcgccttaacaatgtgtccctgccgaacaacacccctggaggcccatcgaatagtgcaacagcgaatttctatcgatagccaagcnaaaaaatccctcaattcggtccaaaggactcaactggggccgcattgtaaaagcaacgggctggtgtgggcaaaaagttggagaaccatggtaagtatacgaccccacatgttcccgccgcatgcggccagcgaatacaagccctgttttattgacctgtggcagtggtacctctgaacatagatgcccagtaaaaggaaaacttgtgagacagatcgagacctctctgagaattgtcggctagccgggacacacccagctcagggttgtggaccagaagatatagcaggtaatggcaatatgtaagaagccatttctttaggacac

SEQ ID NO: 548725 - DNA, 207 bp, Homo sapiens
tggaaccgccattgaacgtgctagacaggtgtgagttggaggcaaagctctaaagctcgagtcgtgccctcggtgcaggggagacaatatagggcttgataagtctggccatattgtcagcttattcttgagcttgatacagggcaacgtcatagtcataaaattcaggaattccctggcttctatttttccccattaagtgttgta

SEQ ID NO: 548726 - DNA, 1084 bp, Homo sapiens
ccacgcgtccggcgagaatgaatactattctcagcaatcagactgtcgactttccagatgatgtcgaccattactctgaacgggacgcacagtttatcgtgaatggcccccagaggatccctgcgtatggacttcatatcactagtcaatagtagaactcaccccttcttggaagagaagaagaaacagatggctccgaggttgacaaatggtggggtacacagaaaaggacctggctaccgtgcggactattgtgtacgtacatgtacagaatcgatgatcaaggagtagttatcgcttgggtctctccgcttaacaatgatggaggtctgtgctatgctcacttccccatcgaacgttgttcatcccaggagcaatgggttctctatgtttgaacatccgtgaactttactatgagtgtgcatattgatacatccagctaggattcggtatgagaacacatggttgattgcatgtggtaactaggtcatcttcgaagactcctagcacaagcactgaaatattcaatccctttggatgcgcacacttgacagtttgaagcctttgcttttccagaaagtcctaggctggcctcttgaattgcaatgcgagaggccaatcatacaggtttagaaaatagctaatggaacttattctaggagccacttgtatgggcggagtggcatactccttaatgctctctccgtggaccccaagaggggaaacctggatgtccaggacatcggcccgtgactgcacacgttacacgaattcctaaggcgcaagtttaacccggtgggcttacccctaccaacggacatgactcgccccagtacctgtacaaacagtcttatagcaccacctacccttgtcttggactatgctttcagcactttgacatcggcacgattaaacacaccgcacccctacctggcgcaaattataggaacccctatccttgtccttttcaaatgtcacaccacatccatacctgcacttggccacaaaagacagcccacccaaacccaactccacgacaccatagcacctgcaacacacagctcacaaggcaaaacatacacac

SEQ ID NO: 548727 - DNA, 667 bp, Homo sapiens
  misc_feature (436)..(436): n is a, c, g, or t
  misc_feature (512)..(512): n is a, c, g, or t
  misc_feature (667)..(667): n is a, c, g, or t
ggataaggggtgtaggtgtgccttgtggtaagaagtgatgttgtgttctgctcagtgcatcttatcaggaggcacatgctgtatgtctgtctcattattggggatgtcaacttctgttacttggccaaggttgtgtttagctgcatggagttgtagattcttattttacctcatgaatattcattctacatttatttatttagatgcccaaacggtctcagatttggcccgtgtgggtgtattttttaaaattggacatgggtatcaaatcttccaaacacttttgcaacatcatggaggcttgcatataatttttctgcatagatatattaatgtggcatattatgtaaatagttttctaatgttatgacaaccttttctggaatacatctcatttggttgtggtgtattctattctcagagtggtatggcattnctgttgctagtgttttatttagctctttgcatccatattcatatgtgatattgcccctatatattgttttgcgcgngtgcgtattttcagttagatataagattatagcttcgtggagtttggaactttcattaatttttgtgctttgaacaattatgaaccaggagctatggttttgggaggttaagtgaaccccctgaggcatttgatatgctttttgggctttgtgcn

SEQ ID NO: 548728 - DNA, 607 bp, Homo sapiens
cggacgcgtgggcgaggaagatgaagaagagcttggtgaagaagaaaggggtcagaagcgaaaacgagaacctgaagatgagggagaagatgatgactaagtggaataacctattttgaaaaattcctattgtgatttgactgtttttacccatatcccctctccccccacccctccaatcctgcccctctgaaacttatattggactgatatgtaacgatcgcatgtgggaacgagaggggaaagagtgtactgggagttgcaggaggggagggatggcggatggcggtggaaataaaatactattttatactgccactcttaataatttttcccctacttcttctctgtgtccaggtattttgtccctgtaaatgcgatagctaagtacacaactaagtgacgcattgcgatcctgacatctacaacagagagacaggcacaggagtacacatatacgtacaccaaggatataccccaagatcatctagcaggatggccagcaaaggctggggactggacgtcaaagaagagatcactcaatgccccaggaggggctggacgcacccacaccaaatcaaaagcacagggacacatgaccgatacc

SEQ ID NO: 548729 - DNA, 212 bp, Homo sapiens
  misc_feature (15)..(15): n is a, c, g, or t
aaatactgctggaangagcactgttcattctagttcattttggagacagaatcttcttggctgttttatggagaccagttaggattagcacctcaagtgtcagtctacctctcttcctacaaatcagttaaggagaaaaccagaatacaaaactgaagtttgtttgctgcttctatgatatagaggaaatttctcagtggcaactttgtagg

SEQ ID NO: 548730 - DNA, 310 bp, Homo sapiens
gatagtagcagatagagatacgggcgcactctcatgctgcacggacgttcctgagtgagcaggctctggctgtatatgcgatggtgcttgagatagtacctagagacatagaggatcggatcaaggagcgtgctgtgatgtatgatgaggtgacgatgtctgataacacgattttatgtgtgaacaagcctttacactgaagttacacatgaccgtgggaggtaatatgtagtgcctagatggatcgtacattagatgggtctagatgagaaccatatgcgatgagctaggaactcgatgtggctaccac

SEQ ID NO: 548731 - DNA, 906 bp, Homo sapiens
  misc_feature (1)..(1): n is a, c, g, or t
  misc_feature (3)..(3): n is a, c, g, or t
  misc_feature (23)..(23): n is a, c, g, or t
ncnttgtgtgtcggtgtgtcggntgacttgtatgcgttgaccaagcgttactggtccctgccgcctgtggtgcctttcactaatttgtcgccgtcatgtggttttccctgcggacttccccttgtgggccccggacacgcggtgccttatgtacaaatctgggccactttggagattttgccacccgtccgtattctgacacacattgggggtccctataacagccagaggtgggcccccggcccggtgcagccccctatccggtggcagtcggggcccccaccctgaattcttgccgggttgtcacccctccctcacccgccctgttttggcgcccccatattcacagtcgggcttggtggcccagacaccccgtcttgagataagtgtcgccttccggccggttgatggaaattcgcgcgcgttgcccgccagtagtggtcagggcccagcccagcccacgggtgggccccgagattcccttatttccggcgggaggggcaacaccacatgagcatcgtggatccgagctaccccacgaccgggctcccgtcccctgggtgtgtcccctgcttgtcagcccggggggggagggtacagcctccttcccctgggcaggagttcccgccgcaagttcgcagtggcttccccccatggggagccgggattctctgcccggtgatctttcggtgcgcgcctggtgtcccccggaggcagccccccagagaggtattcccggggggcatgggcgcgtggccagcgagacaggggcccggcggtttcacacccagggtctcccaacatagttgggcatgggtctatacagaccccctcagcgcgccccgcgcggccaagccccctggcctcgccttttttaacccaaaaagcccccccttccacaaatca

SEQ ID NO: 548732 - DNA, 203 bp, Homo sapiens
attttttggtggggtaccgtccagtgcattggaggatgtttagcagaattcttggtctatacatacatacatattggttgccagggggcaccttcactccaattatgacaaccaaaatgtccccagacattgccaaatgtcccctaggcagggggcagggggcacagggaagggtaaggtattatccacatggtgagaaccac

SEQ ID NO: 548733 - DNA, 451 bp, Homo sapiens
gggaaggggcccccccccttttttcccttgggggggcccctgtaagggcccaaaaaaaaaaaaaaatttttttgggggccccccccccaaaccccaaaaaaaacccgttttttccccctttttataaaaaatacccccttgggcccttttttttttttttttggcccccccaaatttttttttttttaaaaaaagggttctgttaaaaaacccccaattgggttttaaaatttcccccccggccgcccgaccaaaaaccccgggggggcccttgaaaggaaaaaccccttttttttaaaaaaaagaaaaacccctggggaaaaccccccccctttgggttgtggggggccccccaaatttccccccggggaaggggggggttttttggccccccgcccccccccctttttttttaagggggggaaaaaaaaacccttttggtcccccccca

SEQ ID NO: 548734 - DNA, 111 bp, Homo sapiens
tagtcagctcggtcccctctcaagaccctgcttctaacctccctgttcttatgaattcgacagcaaatagtaactactactaatcaacgcccataatcatacaaagccccc

SEQ ID NO: 548735 - DNA, 111 bp, Homo sapiens
aagtgattaaggatccactgggtgcttactgggtgctttacctgggtgctttacctgggtgctaccactgatgtctaccacggacctcttgcagaggggtacgagctgaat

SEQ ID NO: 548736 - DNA, 420 bp, Homo sapiens
ggtgagtgctcttgtcagcggctgctccgcaggctggccttggttagggagccacctggcaggacgctggcacagccgaggcgggagggtgcttgcctgaatcttctcctagtctcatttctgtgaggtgcacgtgctgccccccaggcaccccaagacagcagctgccacgcttccccttaacctggtttcccaccaaaaatagagccaaggagtgagatttctgacagttgggagttgaaaggattttcccctcgggaaacagggaaacttttgggacccagaaactgctgcattttgcatcttaggaatgtttcacagattcgaggtgaatgaaaagaaaatgggctcatttttactgaaatatgtccacatttccagctgtgttcatcttggtacttaataaatgctaactagtaa

SEQ ID NO: 548737 - DNA, 846 bp, Homo sapiens
  misc_feature (41)..(41): n is a, c, g, or t
  misc_feature (98)..(98): n is a, c, g, or t
  misc_feature (230)..(230): n is a, c, g, or t
  misc_feature (375)..(375): n is a, c, g, or t
  misc_feature (390)..(390): n is a, c, g, or t
  misc_feature (393)..(393): n is a, c, g, or t
  misc_feature (397)..(397): n is a, c, g, or t
  misc_feature (403)..(404): n is a, c, g, or t
  misc_feature (410)..(410): n is a, c, g, or t
  misc_feature (412)..(412): n is a, c, g, or t
  misc_feature (416)..(416): n is a, c, g, or t
  misc_feature (419)..(419): n is a, c, g, or t
  misc_feature (430)..(430): n is a, c, g, or t
  misc_feature (438)..(438): n is a, c, g, or t
  misc_feature (446)..(446): n is a, c, g, or t
  misc_feature (482)..(482): n is a, c, g, or t
  misc_feature (489)..(489): n is a, c, g, or t
  misc_feature (493)..(493): n is a, c, g, or t
  misc_feature (509)..(509): n is a, c, g, or t
  misc_feature (522)..(522): n is a, c, g, or t
  misc_feature (533)..(533): n is a, c, g, or t
  misc_feature (563)..(563): n is a, c, g, or t
  misc_feature (664)..(664): n is a, c, g, or t
  misc_feature (684)..(684): n is a, c, g, or t
  misc_feature (828)..(828): n is a, c, g, or t
taaaattgaaagtcaaaacaaaaaagggggtttattaaggnaaagccatatatatatatatatatgtatagacaaatccaaagattgttacttctttncattttaataacctctgcatttttcttttacacatttaggcagtgtgctttcttttctcctcagttaaagcaacaccttggccaatatttctaaatcatattttgatgacaacttacaggatcagtgattgngacaatgactagtgtatcaaacgctatctgatagttttcttagcatattccgtgtgtggtggtacatttattgtggtgtgcaaaatctgacaactgacgatttttctctgtcagcaaaactaacaaatttttaaaaatgattttnatagttataactaanatncgcntcgccnnccccgncngtcnggngggcggggggngtgtgttnggcggttncccaaatccttttacatgttttagatggcctttggnatatgancgancacatggctgtgtttnagatctaaaggtnttgggattttnaaaatcaaaaattactttcttatgcgaaanggcaatgcaaacggcaatcctacataatgtagaataatttttcttctgtacggctccttctaaaaaatgggtaaccacacacacacacacacacacacacnacataaatttagtccatctnaagaagcactccagctttctaattccacttttgaaggaaaaggcagaggcatgtttacattatcccagaaaacagaataaatggctttatttggtatcttcaagaagcttctcctttccgtagagaatgtaggtgttgtggganaaactgtaactggttttc

SEQ ID NO: 548738 - DNA, 399 bp, Homo sapiens
ctccataatgtgtgcccatgagtttgaggctgccgtgagccatgatcacaccactgcactagcctgggcaacagagtgaaaccctgtctctaaaaatatttttctaaaaaaatcagacagacaataacaagtgctgatgctattcacaacagcaaagacatggtaacaacccagcccatcagcagtggattggatacagaaaatatgttacacatacaccatggaatactacacagccataaaaaagaatgaaatcatgtcctttgcaacaatatggatacagctggaagccattatcctaagcaaactaaagcagaaacggaaaaccaaacatcatatgttctcacttacaagtgggaactaaacactgtgcacacattatggaagggtaccgagctc

SEQ ID NO: 548739 - DNA, 706 bp, Homo sapiens
  misc_feature (72)..(72): n is a, c, g, or t
  misc_feature (113)..(113): n is a, c, g, or t
  misc_feature (546)..(546): n is a, c, g, or t
  misc_feature (550)..(550): n is a, c, g, or t
agtgtctcataaatgtaagcggctgctgctaattatgattgtgactcccatcatccagcagctgtgaagtanagtgccaagtacctcttctgtagcatctgtctctctttttnaaggagggggtcaggagcagaatcttatttttattttagattttcagtgtctttgctttgggaaagtttagtacagtagagggcaattgaacccctgtgcacccattatcacccagcagcaatcatcacctcatggctattcttgtaaactcctggctcctctcccaccagattatttggaagcaatcctagttgtcataccgtttcatctgtaaattagtacatattttaaaaatatgactctttttaaaaaaaaacaaccaactattgataccgtgatcacaccagcactgtaataactccttaatgttggccgggcacggtggctcactcctgtaatcccagcactttgggaggccgaggtgggcggatcatgaggtcaggagatcgagaccatcctggctaacatagtgaaaccccgtctctactaaanaatncaaaaaattagccaggcgtggtgcggccgcctgtagtgccagctactcccgaagctgaaggcaggagaatggcgtgaacccaggaggcggagcttgtagtgagctgagattgcgccactgcactccaacctgggcgacagagtgagctccgtctca

SEQ ID NO: 548740 - DNA, 681 bp, Homo sapiens
  misc_feature (72)..(72): n is a, c, g, or t
  misc_feature (113)..(113): n is a, c, g, or t
agtgtctcataaatgtaagcggctgctgctaattatgattgtgactcccatcatccagcagctgtgaagtanagtgccaagtacctcttctgtagcatctgtctctctttttnaaggagggggtcaggagcagaatcttatttttattttagattttcagtgtctttgctttgggaaagtttagtacagtagagggcaattgaacccctgtgcacccattatcacccagcagcaatcatcacctcatggctattcttgtaaactcctggctcctctcccaccagattatttggaagcaatcctagttgtcataccgtttcatctgtaaattagtacatattttaaaaatatgactctttttaaaaaaaaacaaccaactattgataccgtgatcacaccagcactgtaataactccttaatgttggccgggcacggtggctcactcctcggcttcccaaattgctgagattacaggcgtgagccatctcacccaacccattcctctttttatggagaaggtttctcttagcaatctatatggttaacctagcatatagtttgtaaaggaaagatagtttttttttgttttgcatatcattaggctatctctgattttaaattattgcgattggatttcaggttcccttgtgtggccgtcatgccctacttcttatgcctct

SEQ ID NO: 548741 - DNA, 105 bp, Homo sapiens
acggccgtgtattactgtgcgagagtccctctccttcattgtagtagtaccagctgctactactactactacatggacgtctggggcaaagggaccacggtcacc

SEQ ID NO: 548742 - DNA, 732 bp, Homo sapiens
gaccccggtggctgaacccccgagcacagagcccacccagcctgacgggcccaccaccctgggccccttggatctgctgcccagtgaggagctattgacagacacaagtaactcctcttcatccacgtggggaggaagacttggctgccctgcttcccgacctctccggccgcctcctcatcatgctctgtcttccatgtgggcgctgagcggctccagcagactgctcttctcggatcgtcgtcccttcctccagggcttcctacagcagtgcaagtgcacagacgtgaccctgagcccctggacgtggggactgcgagtgccacctagcgcctggttgctgacgtacagccatccgccatcgagcaacgccactgtggccccagggagcgcctcctggtggtgtgatgactacagcacgctgttccggcgcgtgccccaggcctggcggcgtgtgtggtgtgactccgaggtgctggcgcagtggcatcccctaccaggactacttctacagctgcccaccgttatcggcttcctggtgtctggcccggatcacggcgcgggccgagtgtcttctgagatccgctaccgactgctgccgtggcgcctgtgaagtcgctcattgggaacgactcgtgcggcggctttgggactatgtcccccttctggagcgagagttccccaggctgggaagaggccctgggggcggggccagttcccgggctggatccg

SEQ ID NO: 548743 - DNA, 738 bp, Homo sapiens
  misc_feature (6)..(6): n is a, c, g, or t
  misc_feature (98)..(98): n is a, c, g, or t
  misc_feature (133)..(133): n is a, c, g, or t
  misc_feature (137)..(137): n is a, c, g, or t
  misc_feature (151)..(151): n is a, c, g, or t
  misc_feature (158)..(158): n is a, c, g, or t
  misc_feature (163)..(163): n is a, c, g, or t
  misc_feature (176)..(176): n is a, c, g, or t
  misc_feature (204)..(206): n is a, c, g, or t
  misc_feature (209)..(209): n is a, c, g, or t
  misc_feature (217)..(217): n is a, c, g, or t
  misc_feature (247)..(247): n is a, c, g, or t
  misc_feature (266)..(266): n is a, c, g, or t
  misc_feature (277)..(277): n is a, c, g, or t
  misc_feature (280)..(280): n is a, c, g, or t
  misc_feature (306)..(306): n is a, c, g, or t
  misc_feature (314)..(314): n is a, c, g, or t
  misc_feature (316)..(316): n is a, c, g, or t
  misc_feature (318)..(318): n is a, c, g, or t
  misc_feature (335)..(336): n is a, c, g, or t
  misc_feature (408)..(408): n is a, c, g, or t
  misc_feature (425)..(425): n is a, c, g, or t
  misc_feature (453)..(453): n is a, c, g, or t
  misc_feature (493)..(493): n is a, c, g, or t
  misc_feature (652)..(652): n is a, c, g, or t
  misc_feature (720)..(720): n is a, c, g, or t
gtggcngttgttgatttgttgttttgtttaaaaaaaaaaagggttcacaaacttggcagaacttttctctgctggcttcacggcctgttctgttctcntaggctccacatgggggcgcaggggggtgggagangganggggggtcgaggcnggtgaanagtanaaaaagaagcccnactgaaagtagagagggcagtcccgggnnntcngggggacngagggcggcggcggcggcggcggcggcccngcagcagcagtagcaccanccggtagggtngcngctcccggcgctgtcacccgccggcnggtgggcncncngggggctggtgaggcgnnggaggggcggggcgggtggggagcctcactttctgtgctctctcctctttgctccactgcttttggcgttgnttgtccgtgtggctgtntggggttgttgctgaggtacattttgtncatggccttgagggcctcggtgagatagttctgcagggcngtggccgcggcacacaccgcggggctgccgaagccgtgggagatgaggttgaagtgggtcaagcagctctggatgccgggctccaggatggggttgggccgtgagttccccaggggagatcggtcctgagccagcaggtcggtgaactctttgcatatntgttttgtagccaggagcatgttttttcttgtcacttgctcattgggatcggaatgttgtcggttganaaattcagctactgcttt

SEQ ID NO: 548744 - DNA, 1403 bp, Homo sapiens
ctgtccgtccccagtgggaggatgagctgtcccccgggggtcgattgtgatgcccttcgctcctgggagcgcccatcgtgtccgagtctttgtggggcacaccgcgtctttccgttgtgggccctttgggtgtcgtgggtcccttggatgtcgtgtgggtttgcacggcgtctttctgtgggctcgccctcattctagtggcactgggtctggtcgtcgcctgtgcccaagaggggtctgtttctccgtcttgggggggttttgctgacccccgtctcggggggttaggtcccagccaatgtcctacccgggggggtgccctcaaagaccgtctgggctcctgccccacgttgtgtgtgcgccgcagtgcgtgtaagggatgaacccccccgtgttcgctcgttgggaagcgtcctccgcggggtgtgcttcggtgttctcactggagtttgtgcgccgtcgttggggtgcccgcaagagatttgccgctgccagaagttgttccctggggaggacgtctccaaagcggcggtattttttctctgagtgtgtgccccttatgggatacggctgttacacgagggccttccaagaggcccctcccggggaatttttcgcacccacggggccgcagaaagtgaactagtgttctctcccttgggtgtatgggcgcccccccagaagggggaaatagaggcggtggttaccagagaggcctgtgggtggggccttgtagaggggcacgggggcccataaaccctcgggggcacacacacacgagaagaggcacataattgggggagggggacacgggggttttttggggatgttcgggggggcaacacaccacaaggccacagagcgaccccacattctggggaattggcacacaccgtgggcaaagaggcccacactgttgtttggggggtattatgttggctggcacctttttcccacgggggagaggacaacacctcggtcacagagaactgtgtcgcacatatccgagagtataaatctacagagagcaccaccccgctgttcgcaaaggtgaagtatagggttctgttggtgttcctcgtgtcctcgtgtctgttcacctcgaggcgacacaggggcttggaggggctctctctctatgagcactgttctctcctctgggtgtcctctcgtgttcacagctcgcccacctcgtgagtgatccaccacgtgcccgaggtttctcggctggtatttggcacaagttaaaacctcccttcctatgctggtttagagctaacacacttaaccaaaaaggaaaaaagcccctcgtggggagcactagacttgagagagatttataccacacataccacacatagccccaggaacatcattttgaaataaagaagagttttggacca

SEQ ID NO: 548745 - DNA, 164 bp, Homo sapiens
ccttttactctcagtagtgctctgggctgatggataaacacactagaatttgacaccctggatgtttgcagctctgacaaaaccactattagcagtcattgtgatggcttttagggtgtctcccgtcccaaaaattgttaatgagcggctattaatttttgaac

SEQ ID NO: 548746 - DNA, 110 bp, Homo sapiens
gagaaatagctcggggcaggtgctggggtatgcggcttcgtagcgcacttgcagcttggggctcttatctgagagggaaccaatggattgccactactttgtccttgggg

SEQ ID NO: 548747 - DNA, 169 bp, Homo sapiens
agaaataggcgtggatcttgacaatagtagtactgggtctccatgatgattagcaggtgggaagacacgttacatgccccagcaagagactccgagaagccaccaacaactggatagcccctgaactgaagagctgatccaccaggcgtcgctccatgggggctgagcc

SEQ ID NO: 548748 - DNA, 344 bp, Homo sapiens
tatgccatgtcctcagtgtttggactgccagctgcaaggcagagccaaacccaatatggccccatcatcccctggctcagctgtgctacctggccatgctggaaggggtttgatcttccaggaatttgcttcacagctctttcctgtcccaagatctatgcctgatgtgtaaattcaggacccaaaagggcacaaaaaagcaataactactaaatataaggaaaacaactctgtatacagcatgtataaagaaaagcaagatatatttggggagataaaagttgtaaaggcattaagatgtgtgtttgttgagaaaaaataaatttgtgcatttaagaagttaa

SEQ ID NO: 548749 - DNA, 265 bp, Homo sapiens
ctaagtagcgaattgcaggatgaacatccctgaacagccatccatggatgactggcgcagaccatccgcaaacaactccaggccccgcgtctgcgtaactaatccctgaacaaatccccggaaggtttttgccttccggggattttttatttggccaggcccaggcgagggatctcaatagccgggcagcgatccatcaccacatttaacccggcatcccgtgccagtactgccgcttgctcattaatcacccccagttgcatcc

SEQ ID NO: 548750 - DNA, 571 bp, Homo sapiens
atatcgtcggaccggcgtcgggaggaggatggagggtggtcctgatgtgatctttcaggaggacacctctcaacacctctgccgcagaaggcccctgagctccggggcccagaatcacccagatcccaagcctgaggtactctgttattgtggaggtcctgctcggatgatgacaaggacgaggacaccgatcccggcagtcaacagtcactgacgagtcggagatgcaggacatgatgacccggggaaacctgggcctcctggagcaggccatcgccctgaaggctgaacaggtgcagcacagtcatgcgagccgggctgcccggctgccgagcagagccagctgtgcctgggcagagcccagcggaaggcagcaaagacccctggacaactgtgcaggaagagattcactacaggtaacacgatccttcaagagctgagaagccgtgagcatcaaagtgtccaacaccaaggctgttgatggcactggaccacgttaccgggcttgtaccctcaacacaccgacgactttctggactgtgcacccaaaggactaggatcacccccaaga

SEQ ID NO: 548751 - DNA, 237 bp, Homo sapiens
tgggggggggggggattctacagagggggggggttaaaaaatgccgcccataattttttattttctaaagggatttttttttcccatacaaatagcccccatccctaaccaactggtatcttgggggcgtccttgggaatttaaaccctttaaacctaatttttttgttaaaagaccctaaaagccttcccagcggtttttcccaccctaggaggggagggaaaaaaaaactttcca

SEQ ID NO: 548752 - DNA, 168 bp, Homo sapiens
ccggatcttcgcgcggttcttcggcgcgggattcttcggcgccgggattccttcggcgccggatccttcggccgcgggattccttcgggcgccggattcctgccggggtcggccgccggattcctttaagtttcagctttgaaccatactccccccggaacccaaaga

SEQ ID NO: 548753 - DNA, 1426 bp, Homo sapiens
gcagcttataatgccattacttatacctgaagaatttcatgactttgatcagccactgcctgcacttcagcatgcacatcgcatgtggccccagccagttccagctctgcacatccagcagtcagcagtggcaagcagcatcaacccatgcagcagcaagcaagtttgggcaaccatcgagtcattttcaccaagcaaaatgcattttgcgtgcattttagggcaatggcatgcatcagtgcagcatcacatgcagcacgcacaggccagtagcttcacgcagagcatgcacgcaccatggttcaagtcaagccactcactcacttctcaaccctcctcattcagcagtctagcacaacagcagccacccagccacatctgcacatgcagcacacaattcacacccagtttcagcacatcatgcacagcatccaatatcacagggcatgcatcacatatttgcgcagcacggcacacatgcatgggtggcacatcattcagcatgcacccacacttcattcagtcaatcacatgcatggcagggtcatcatttagcatgcatcccccctgcccctcatctgcaggccaggggcgtagcatggtatagcccagcaagccagccctgccaccaatgcacgcatcatcggccatgcagagcatgccatcaacgtccatccacagggagcgagcgagccctgcactcacgtccatgcaaaccaagctgggcaccccagctatgcaacccaaatggcccacaccccatgcacgtgcatcccacacccaaccacttggtcccacaaatgcagggcacagacacgccagtcggcactggagcgccccatcctaggcagtactcaaactggtaacaacgcaaacccacaaaggccgccacaacggcacacccaggcaagcacataacatgggtggacaacgacgccacacacggagcctgggcactcaccccacgcaccactagaacgaccccactagctgacacacaggacgtaacaccgaacataattgcggatgacaacactcactgagcccccatgccaccgccacacactccccaacgccgcgaccgcccgcagcgaccagcgcacccaggacggccgcacgcccactacactggcgacgcaccaagccctggcaccggacccgtagaccggcccacgcgccgccacaaccacgcgcgacagccgaacacaccacacaacacagagcaagcgcccgagcgagggacccagcgcagcaaccgcacacacaaagagcgacccggcgcaccagcgcgctccacaactgacgaccacgagagcagcgccgcacaaccacggcccacaagacgacgcacaacgaaatcgaccaagcacagtgcagaccccggcggccgcgccacccacgaacagccagaaccgtcgaatgccac

SEQ ID NO: 548754 - DNA, 201 bp, Homo sapiens
gacacggcgctgaacgtcaacggtaacacctccctggtgaccatcaccttcagcgagacggtcaacaatcttgccctcggcgcgttaactgttgctgatggcagtctgagcaacctggtccaggtcgacggcacccactggaccgcgaccctgaccgcgaaccccggggtcaaccatgtcggcgatgtcatcagtcgacgc

SEQ ID NO: 548755 - DNA, 227 bp, Homo sapiens
  misc_feature (4)..(4): n is a, c, g, or t
ccgnagttaagggctacccccctctacacatttcagcaagaataatgatctaggccttgtttcctgagttgggaagggactggaaaggggattaaacgagaagaacaaaaatgaaagggtaggcatgatagcaggtaagaaattaaaacttcatctgtgtaactccagagaccagcaatcaggctctgaaacaacacagcttgcacgacaggcttaactttctactt

SEQ ID NO: 548756 - DNA, 255 bp, Homo sapiens
  misc_feature (238)..(238): n is a, c, g, or t
cgcgcgttcgggcactagataacccctttccgggttccagagtcggttagataaggtagtagattccatggatgcattagataaagttgtccaggacagagaagattctctctggcttcttcagcactgttcaagacagagctagacctgtctgcttggagcaatagacatctttgcgaagaatcatctaggcatcaagttcaatgccgtgcgttaataactctaggcccctatatanacagatacaatactgag

SEQ ID NO: 548757 - DNA, 420 bp, Homo sapiens
gtcctgcacttaatctgcactttgggccttacttgggggtaaatagcatcattgtgcacagaaatgccagacagtgttttgtgttgatagaaacgtattcagaaagcaatgcccattgttccccctggctaaataataattccgtttccaggcagtttgctgattaatcagacaggtgtctttcgttccaccaagaaaaacaaaatctgtcagcaagatgattaagaatagataggcatatttcaaaacaattaaaatagcatttttacaagtctggtcctttaaacattgagtagctgcctgctgttggaggctttcaggaaacacacaccacatccaagcatgccatcctgttaatacgcaatacgtctctaaaggtgctcttcaggcattcctccctgaatatgtctgaaacctcac

SEQ ID NO: 548758 - DNA, 170 bp, Homo sapiens
acagtgtgtgagcaccgctcctggctggcagcattgtcttgctctactgacctcgtgatctgccgccttggctcccaaagtgctgggattataggtgtgagccaccgtgcccggctgctggctgacattttcaaagatggcacgtggctggagcacttacgcgctgaaat

SEQ ID NO: 548759 - DNA, 155 bp, Homo sapiens
acgggatcgtgatccccttagcataggtatcattaaagcgcactcgacataatttacaatggaaccgaattacttttccttcatcatttcgtacctcttccacataatcatggcccactggatgcacatcactcctgtaaaggcagcaatgagat

SEQ ID NO: 548760 - DNA, 2610 bp, Homo sapiens
aagagagggaggaaggagaggagctccataagcccagacaagggcttgagagcagacaagggcttgagagcagacaagggcttgagagctggccaagcagtttctctcagcttctgtgttccagcccctctgtgggaggagagaagggcaggaccacaagcctgccagaggctgcggcctacagccggggagaggccagcccggcctacagtgcggacacaggacagaggggagccaggttctttgcactgaccaatgctgagagcagaccctcggagcagccgggttggaagtgtctctccacagtcaccagacagatccaggataggatgggcagcccagtgcaccgagtgtcattgggggatacctggagcaggcaaatgcaccccgacatagagagcgagaggtatatgcagtcctttgacgtggaacggctcaccaacatccttgatggaggtgcccagaacactgcactccgcaggaaagttgagagcatcatccacagttacccggagtttagctgtaaggacaattatttcatgacccagaatgagcgttataaggctgccatgcggagggcattccacatccggttgatagctcggcgcctgggttggttagaagatggtcgtgaattaggctacgcttacagagccctttctggagacgtggccttaaatatacacagagtcttcgtgagagccctcaggagcctgggctcagaggagcagattgccaaatgggacccactctgcaaaaacatccagatcatcgcaacgtatgcacagacagagttgggacatgggacatatcttcagggcctggagactgaagccacctatgacgcagccacccaggagtttgtgatacacagccccacgctgactgccaccaaatggtggcctggagacttgggacggtcagccacccatgccctggtccaggcccagctgatctgctcaggagccaggcggggcatgcacgcttttattgtgccaatccggagtcttcaggaccacaccccactgccaggaatcatcattggggacatcggacccaagatggactttgatcaaacagacaatggcttcctgcagctgaaccatgtgcgggtccccagggagaacatgctgagtcgctttgcacaggtcttgccagatggcacctacgtcaaactcggtacagcacagagcaactaccttcccatggtggtggtgcgggtggagctgctgtcaggggagatcctccctatactgcagaaggcctgtgtcatcgccatgcgctactcggtcatccgccgccaatcccggctccggcccagtgacccagaggcaaaggtcctggactaccagacacaacagcagaaactctttcctcagctggccatcagttatgccttccatttcctggcagtcagcctcttggagttcttccagcactcctacactgccattctgaaccaagacttcagcttcctgcctgagctccacgcactgagcacgggcatgaaggccatgatgtcagaattctgcacccagggagctgagatgtgccgcagggcctgtggcggacatggctactcaaagctgagtggcctgccatcactggtcaccaaattgtcggcctcctgtacctacgagggtgagaacacagtgctctacctgcaggtggccaggttcctggtgaagagctacctgcagactcagatgtcccctggctccacgccacagagatctctctctccatctgtcgcatatctcaccgcacctgacctggccaggtgtccagcccagagggcagccgacttcctctgcccggagctctacaccacggcctgggcacatgtggcagtaaggctcataaaggactcagtgcagcatttacagaccctgacgcaatccggagctgaccagcacgaggcttggaaccagaccactgtcatacacctccaggctgctaaggtgcactgctactatgtcactgtgaagggttttacagaagctctggagaaactagaaaatgaaccagcgattcagcaggtgctcaagcgcctctgtgacctccatgccatacatggaatcttgactaactcgggtgactttctccatgacgccttcctgtctggtgcccaagtggacatggcaagaacagcctacctggacctgctccgcctgatccggaaggatgccatcctgttaactgatgcttttgacttcaccgatcagtgtttaaattcagcacttggctgttatgatggaaacgtctacgaacgcctgttccagtgggctcagaagtcaccaaccaatactcaggagaaccctgcctatgaggaatatataagaccacttttacaaagttggagatccaagctatgaaataaccaacagtattcaagaagcaaccagcaccatcatgtgataatggtactatggcatatatgcaacattaaaatttaaattagaaaaacaaaaactatctaaaaaaaaaatttttggggggttgggcttcgaaaaaggttttttaaacatttgtttgggggggggggcccgttgggttgtgtaacgtggtgcaaggggttcccaagaaaactcggggaaaaaaaggggcggg

SEQ ID NO: 548761 - DNA, 635 bp, Homo sapiens
  misc_feature (44)..(44): n is a, c, g, or t
  misc_feature (122)..(122): n is a, c, g, or t
  misc_feature (529)..(529): n is a, c, g, or t
atattaagttataggcctggaggaggctctgtatgtcctcgagngactgacaacatcctccagattccagccataaaccaataactaggctggacccttcccactacataatagggctcagnccaggcagccagcttgggctgagctaacaggaccaatggattaaactggcatttcagtccaaggaagctcgaagcaggtttaggaccaggtccccttgagaggtcagaggggcctctgtgggtgctgggtactccagaggtgccactggtggaagggtcagcggagccccagcaggaagggtgggccagccaggccattcttagtccctgggttggggaggcaggagccccagcaggaagggtgggccagccaggccattcttagtccctgggttggggaggcagggagctagggcagggaccaaatgaacagaaagtctcagcccaggatggggcttcttcaacagggcccctgccctcctgaagcctcagtccttcaccttgccaggtgccgtttctcttccgtnaaggccactgccaggtccccagtgcgccccctagtggccatagctggttaaagttccccagtgcctccttgtgcatagaccttcttctcccaccccttctgccctg

SEQ ID NO: 548762 - DNA, 2544 bp, Homo sapiens
aagagagggaggaaggagaggagctccataagcccagacaagggcttgagagcagacaagggcttgagagcagacaagggcttgagagctggccaagcagtttctctcagcttctgtgttccagcccctctgtgggaggagagaagggcaggaccacaagcctgccagaggctgcggcctacagccggggagaggccagcccggcctacagtgcggacacaggacagaggggagccaggttctttgcactgaccaatgctgagagcagaccctcggagcagccgggttggaagtgtctctccacagtcaccagacagatccaggataggatgggcagcccagtgcaccgagtgtcattgggggatacctggagcaggcaaatgcaccccgacatagagagcgagaggtatatgcagtcctttgacgtggaacggctcaccaacatccttgatggaggtgcccagaacactgcactccgcaggaaagttgagagcatcatccacagttacccggagtttagctgtaaggacaattatttcatgacccagaatgagcgttataaggctgccatgcggagggcattccacatccggttgatagctcggcgcctgggttggttagaagatggtcgtgaattaggctacgcttacagagccctttctggagacgtggccttaaatatacacagagtcttcgtgagagccctcaggagcctgggctcagaggagcagattgccaaatgggacccactctgcaaaaacatccagatcatcgcaacgtatgcacagacagagttgggacatgggacatatcttcagggcctggagactgaagccacctatgacgcagccacccaggagtttgtgatacacagccccacgctgactgccaccaaatggtggcctggagacttgggacggtcagccacccatgccctggtccaggcccagctgatctgctcaggagccaggcggggcatgcacgcttttattgtgccaatccggagtcttcaggaccacaccccactgccaggaatcatcattggggacatcggacccaagatggactttgatcaaacagacaatggcttcctgcagctgaaccatgtgcgggtccccagggagaacatgctgagtcgctttgcacaggtcttgccagatggcacctacgtcaaactcggtacagcacagagcaactaccttcccatggtggtggtgcgggtggagctgctgtcaggggagatcctccctatactgcagaaggcctgtgtcatcgccatgcgctactcggtcatccgccgccaatcccggctccggcccagtgacccagaggcaaaggtcctggactaccagacacaacagcagaaactctttcctcagctggccatcagttatgccttccatttcctggcagtcagcctcttggagttcttccagcactcctacactgccattctgaaccaagacttcagcttcctgcctgagctccacgcactgagcacgggcatgaaggccatgatgtcagaattctgcacccagggagctgagatgtgccgcagggcctgtggcggacatggctactcaaagctgagtggcctgccatcactggtcaccaaattgtcggcctcctgtacctacgagggtgagaacacagtgctctacctgcaggtggccaggttcctggtgaagagctacctgcagactcagatgtcccctggctccacgccacagagatctctctctccatctgtcgcatatctcaccgcacctgacctggccaggtgtccagcccagagggcagccgacttcctctgcccggagctctacaccacggcctgggcacatgtggcagtaaggctcataaaggactcagtgcagcatttacagaccctgacgcaatccggagctgaccagcacgaggcttggaaccagaccactgtcatacacctccaggctgctaaggtgcactgctactatgtcactgtgaagggttttacagaagctctggagaaactagaaaatgaaccagcgattcagcaggtgctcaagcgcctctgtgacctccatgccatacatggaatcttgactaactcgggtgactttctccatgacgccttcctgtctggtgcccaagtggacatggcaagaacagcctacctggacctgctccgcctgatccgtgaaatacgatgtaaagccatccaggcaaaagagatgggaaaggtggatagtgtcaatctgaggatcaaagagatggaaggatgccatcctgttaactgatgcttttgacttcaccgatcagtgtttaaattcagcacttggctgttatgatggaaacgtctacgaacgcctgttccagtgggctcagaagtcaccaaccaatactcaggagaaccctgcctatgaggaatatataagaccacttttacaaagttggagatccaagctatgaaataaccaacagtattcaagaagcaaccagcaccatcatgtgataatggtactatggcatatatgcaacattaaaattttaaattagatattt

SEQ ID NO: 548763 - DNA, 262 bp, Homo sapiens
  misc_feature (171)..(171): n is a, c, g, or t
gagctggtccgacgacagggcgactccatcttcatggccaccccctcgtgggacggttgaccaccagcctaccacatcatcccagagctgagctcctccagcgggatgacgccgtccccatcacctccctcttcttctttttcatccttctgtctctattgtttcttgagncttttccgtgttctttcctctttgttcttgacgagacttcataagccgtccacgaactcctgtttacccccgatccccttctgacatttaa

SEQ ID NO: 548764 - DNA, 266 bp, Homo sapiens
aaccaacaattttcaacagcaattttaccagttcaacagaatccctgcaggctgggcgtggtggctcaaacctgtaatcctaggactttgggcaggccgaggtgggcggatcaccaaggtcacgagatggagcaccatcttggacaacatggtgaacaccccatctctcactaaaaatacaaaacattagccaggcgtggtggcaccatgcctgtagtccccagctcactggggcaggctgcaggcaggagaacgcgtcaaaatcg

SEQ ID NO: 548765 - DNA, 1171 bp, Homo sapiens
gacctcagagctgagctgggcatgagtagatgctcagtaagtggtgcacagggttggtccctatggtggaggccccctaacaccgcccaacccccctccatgttctcacagctccacgcactgagcacgggcatgaaggccatgatgtcagaattctgcacccagggagctgagatgtgccgcagggcctgtggcggacatggctactcaaagctgagtggcctgccatcactggtcaccaaattgtcggcctcctgtacctacgagggtgagaacacagtgctctacctgcaggtggccaggttcctggtgaagagctacctgcagactcagatgtcccctggctccacgccacagagatctctctctccatctgtcgcatatctcaccgcacctgacctggccaggtgtccagcccagagggcagccgacttcctctgcccggagctctacaccacggcctgggcacatgtggcagtaaggctcataaaggactcagtgcagcatttacagaccctgacgcaatccggagctgaccagcacgaggcttggaaccagaccactgtcatacacctccaggctgctaaggtgcactgctactatgtcactgtgaagggttttacagaagctctggagaaactagaaaatgaaccagcgattcagcaggtgctcaagcgcctctgtgacctccatgccatacatggaatcttgactaactcgggtgactttctccatgacgccttcctgtctggtgcccaagtggacatggcaagaacagcctacctggacctgctccgcctgatccgtgaaatacgatgtaaagccatccaggcaaaagagatgggaaaggtggatagtgtcaatctgaggatcaaagagatggaaggatgccatcctgttaactgatgcttttgacttcaccgatcagtgtttaaattcagcacttggctgttatgatggaaacgtctacgaacgcctgttccagtgggctcagaagtcaccaaccaatactcaggagaaccctgcctatgaggaatatataagaccacttttacaaagttggagatccaagctatgaaataaccaacagtattcaagaagcaaccagcaccatcatgtgataatggtactatggcatatatgcaacattaaaattttaaattagatattt

SEQ ID NO: 548766 - DNA, 308 bp, Homo sapiens
  misc_feature (187)..(187): n is a, c, g, or t
tgtgatgaacggaggggtgcggtgggcagaataacggcctcccaaagatgtccactgtgacagtccccagagcctgtgactatgttaggttacacatgccagtgggaactaaatgttgcatgatggaactaatggtggctaatcatgctgacctgaaaatatgaaagacgacctgggttctctgggntaggcgcaagtgtgatcatagagcgtccttaaaatgcggtaggagcaggccgggtacatgtgactcagtgcctagtgtgcgcagttgtggagacggggttgttgtcgaggaaacgaggtgt

SEQ ID NO: 548767 - DNA, 395 bp, Homo sapiens
aggatccccagtccgtgagccccttggaggactggttgaataagtgacatcagtgatacctggactgaacaacatcattgacataaaggtcactgacccccagctgctggaacttgggcttgtgcagatgccctgatggacaccgtctctatgtcaccatccctctcggcataaagctccaagatgaatactgcccctgggtcggtgcaagtcatgttgaggctggctgtgaaactggacatcactgcagaaatcttaactatgagagataagcacggagaggatccaacctggtccttggtgaactgcacccattcccctggaaagctgcaaaatacactgcttgatggacttggacccctccccattcaaggactactggacagcttcacagg

SEQ ID NO: 548768 - DNA, 1741 bp, Homo sapiens
  misc_feature (342)..(342): n is a, c, g, or t
  misc_feature (394)..(394): n is a, c, g, or t
  misc_feature (471)..(471): n is a, c, g, or t
  misc_feature (529)..(529): n is a, c, g, or t
  misc_feature (620)..(620): n is a, c, g, or t
  misc_feature (823)..(823): n is a, c, g, or t
  misc_feature (1273)..(1273): n is a, c, g, or t
gactcagcgccgacttcggagagaatgcgctctgtgtgtctctgctcccggaggattagctagtgaggcttcacacagacaggcgtccaacaattctgcgcgaacgagaagtgatgcgggatcccatgtgggctcctgagtccaattgctgcacacgggacatcacgagcgtggcgtcgctggctcgaggcacaggcagccaaaggactcgtagtgcacaccgtcgcctgatgaggcctcctgggttccgctgaatccttgcacgatggcttgcgcgtgccttctgacacgacggcgtatccatgggcgccgggtgagtggcggggtcacgggaggcgacgnctggcacaagcgcgcccagtggcctgggtggtgtaactcctggagagcgaantgctgcagggattcactcgtcatgaatggacgaagacgcggattgcgacaaaggccatgtggacactgacactcggnccttgggacctacttggacgcgttgcgacactagagatgatggaagcactggggcacnaccgtgaggagcgcagctatggttgggtagctagtcacacaatcgcagcgaagccgactgtaggggcagagaggacagggggagcctcgcnatgggttcccagaggaagctcgcgaagggccagtatgagctctacgaaggcacttcgaatgcctagggggagcccttctgaagagggatgccttggattcctcttgcgggggagagactcaacgtagttggcgcagcgaactagatcgctgcaattgcctctactccgaggggaattcgtagacaaaatcgtgccacggggtncttgggggccttgccgtagaccgtacccgtgtatagggacgaatcggagggtagttaaacgcatcgggaacgcccctgtgcattgccccatgaacggcgcatcatggcttggtgtgggacgcacgaaacgggagacttgcgcaggtgtgcattttgcgccgccatttagagttcacctcgtgattgatgagaattcgattcctagttcgtatggaaacaggagacttcggtacaccgggttggggacgaccccctttgaggaattgcgccaagcggaggttctctccgacagcggaaaggagataggtcttgggggtctggtaacgacttagcataggtggcaggggtataggctgcaccgaccaaaggaccgggagacgttgacacttttacagggccctgaggcgaagggctcgtgagacatttgcacaaaaagcgtcttgtgcggtntttggaaccccgttggtaggggtccagtatttggcgggccaaagagttcattcaaggagatggtccgtccattcgagtcccatggacaagaaagggtttctcggtgtcccagctgattgatcccaacgtgggaactctttatggaaaggctccacaggtgaggcttatcccccgagggggggttcctgggtcggaattgtccgtataccccaccctggtggggtggtcaccgcataaaagagatgtcaggggtgtgcacgtggtttcacaaagaatgtctctagaggggtaatgagattagagcccactcatgttgggggaacctcagggcaacccataataaatcttcctgtccgatgtgtgaaacactcaagcggatgatgtacatcatgtcccaaccgagcagcgggaaggctagattttgacagataccaaccagcaagaaagcgccgatgaatgaacgtactg

SEQ ID NO: 548769 - DNA, 443 bp, Homo sapiens
ctggaatgcagtggcacaatctctctgctcactgcagcctctgcttcccaggttcaggcagttctcctgcctcggcctcctgagtagctgggactacagacacgcaccagcacgcctggctcatgcctgtaattccagcactttgagaggccaaggcgggtggatcacgaggtcaggagatcgagaccatcctggctaacacagtgaaaccctgtctctactaaaaatacaaaaaattagccaggcgtgcgcctgtaatcccagctactcgggagtctgaggcaggagaatcacttgagcctgggaggcggaggttgcagtgagccgagattgcgccactgcacttcagcctgggtgacagagcgagactctgtctcaaaaaaaaagacaaaagtgatttcctgagctgctccgagctggagacagaaccatcagcctgggcg

SEQ ID NO: 548770 - DNA, 535 bp, Homo sapiens
cctcatcgcgtttatacttctcttaaagctatgcaaggcagctctggctaagtcttaaagaggaagaagaaagacagaagagagaagaagtaagaacgtataataacggcttgaagaattgagaagccaagcgtaaagaagaggaacgattggaacatgaaaaaagagaaaggaaaaagcaaaaagaaaaagaaagaaaagaacgcttgaaaaaagaagggaaacttttaactaaatcccagagagaagccagagccagagccgaagctactcttaaactgctacaagctcagggtgttgaagtgccatcaaaagactctttgccaaagaagaggccaatttatgaagataaaaagaggaaaaaaataccacaagcagctagaaagtaaagaagtgtctgaatcaatggaattatgtgctgctgtagaagttatggaacaaggagtaccagaaaaggaagagacaccacctcctgttgaaccagaagaagaagaagatactgaggatgctggattggatgattgggaagctatgg

SEQ ID NO: 548771 - DNA, 790 bp, Homo sapiens
ctacacaacaactgataggtgacatccgggaagactgtgacccccatagtacccagcctatgaggaaccagggactactacaagcaatttaggggataaattgcttgttgtaaccatgctgggggtgcctgagcatcagacacctgatcttgcaagaccatcattaaaagtctcactttcagtgttctcaaggtctctgagtcccttctttgggtttggacaggtgagtttatttctcaggacctggtggcctatatggggaactctgtgcctgcatggagtgggactccagccgagaggggagatgcatcccacctgatttaggtggcctgctctgcccaagtgtcttgtctccctgcagaaccatagacaaacctgagactgttattcaggagatgtgaaagtgacacagggagaaaagctggcaccccagcaactgggcaacctcgtgtttgagccaaggtaggaaaactggactatgtgtactgccttggtggttcagcattttcagaggtgagtgtgtgtgactgagatgtatctagatacgagcgagtgcagagtcccatccgtggttatgtcctccacagggaacagctgagacagatgaagtgatctcagggcatgcaggaactcagtcgggctagtaggaagctcgcacgagactaactgaaaaatgtgaaataagaattctaggcctagggaacagaggaaagaggggaactgaagagactccctctgaaattccccccgggaaaagccaagatataaaattttgcctgtttttttctgg

SEQ ID NO: 548772 - DNA, 385 bp, Homo sapiens
  misc_feature (288)..(288): n is a, c, g, or t
  misc_feature (308)..(308): n is a, c, g, or t
gctaagtagtagtccatggtatggatggaccacggtttgtttaatccatccgaggacctttttaaaatacttgtgcccagatgcagtggctcactcctgtaatcccggcacttggtgaggtcaaggcgggaggattgcttgaccccaggaattcgagaccatactgggcaacatggcaaaaccctgtctctacccaaaatacaaaaattagctgggcgtggtggtgcacacctgtagtcccagctacttgggagactgagatcaggaggatggtttgagcctgggagnagaggttgcagtaagctgangattgtgccactgactccagcctgggcaacagagccaggccttgtctcaacaatcaatcaatcgatcgtgtgttcct

SEQ ID NO: 548773 - DNA, 439 bp, Homo sapiens
  misc_feature (161)..(161): n is a, c, g, or t
  misc_feature (235)..(235): n is a, c, g, or t
  misc_feature (278)..(278): n is a, c, g, or t
tctagaggatcgcgggtcagtgatctctgggtcaagtgatcctctaagaagaaacagaaactaatctctctccatgacacgtgagaacacagtgtctgcagcagaaggagtgtaccctcaccaggaaccaaatccaggccagtacttggatcttatactgnctagctttcaaaactgtaagaaataaatggctgttgttgaagacatccagtctatgatattctgttacaccaanccaagcagactaagacagctgtgttccaataaaactttatttngcaaagcagacagtagggcagatttggctcatgggccaaagctgatgacccctggttaagaacacagacacagagtcaagaagtcctagaaacccactgggtgcagtggctcatgtttgtaatccccaaactttgggaggcctaggcgggaggatcacttg

SEQ ID NO: 548774 - DNA, 344 bp, Homo sapiens
acctgactgcttcgcctgctgcctttgcctagagcctcctgtgtcgggacgcgcaccacacccccctgtttcctacggtgcaccagccactcctactggtgctgggtatgtctatagtgatgggccacatcttgggacccggagacctggggcttcagtccctgcttcgcttcggctcactgggaactggaacaggcacgcagagagaggacgacaggtcgctgcaccacaatatcaacatgagaaccaccgagacagagttagtgctgtgtgtgcaacataacgggggtggaagttgaggacacgacccttttccaacaacaagattatcacatccgtactgg

SEQ ID NO: 548775 - DNA, 558 bp, Homo sapiens
  misc_feature (52)..(52): n is a, c, g, or t
  misc_feature (92)..(92): n is a, c, g, or t
  misc_feature (102)..(103): n is a, c, g, or t
  misc_feature (115)..(115): n is a, c, g, or t
  misc_feature (122)..(122): n is a, c, g, or t
  misc_feature (126)..(126): n is a, c, g, or t
  misc_feature (135)..(135): n is a, c, g, or t
  misc_feature (142)..(142): n is a, c, g, or t
  misc_feature (155)..(155): n is a, c, g, or t
  misc_feature (181)..(181): n is a, c, g, or t
  misc_feature (221)..(221): n is a, c, g, or t
  misc_feature (223)..(223): n is a, c, g, or t
  misc_feature (255)..(255): n is a, c, g, or t
  misc_feature (260)..(260): n is a, c, g, or t
  misc_feature (262)..(262): n is a, c, g, or t
  misc_feature (266)..(266): n is a, c, g, or t
  misc_feature (276)..(276): n is a, c, g, or t
  misc_feature (282)..(282): n is a, c, g, or t
  misc_feature (284)..(284): n is a, c, g, or t
  misc_feature (286)..(286): n is a, c, g, or t
  misc_feature (294)..(297): n is a, c, g, or t
  misc_feature (302)..(302): n is a, c, g, or t
  misc_feature (304)..(304): n is a, c, g, or t
  misc_feature (307)..(308): n is a, c, g, or t
  misc_feature (311)..(311): n is a, c, g, or t
  misc_feature (315)..(315): n is a, c, g, or t
  misc_feature (324)..(324): n is a, c, g, or t
  misc_feature (330)..(331): n is a, c, g, or t
  misc_feature (333)..(333): n is a, c, g, or t
  misc_feature (354)..(355): n is a, c, g, or t
  misc_feature (377)..(378): n is a, c, g, or t
  misc_feature (381)..(381): n is a, c, g, or t
  misc_feature (385)..(386): n is a, c, g, or t
  misc_feature (392)..(392): n is a, c, g, or t
  misc_feature (403)..(403): n is a, c, g, or t
  misc_feature (405)..(405): n is a, c, g, or t
  misc_feature (409)..(409): n is a, c, g, or t
  misc_feature (412)..(412): n is a, c, g, or t
  misc_feature (414)..(416): n is a, c, g, or t
  misc_feature (418)..(418): n is a, c, g, or t
  misc_feature (423)..(423): n is a, c, g, or t
  misc_feature (427)..(427): n is a, c, g, or t
  misc_feature (433)..(433): n is a, c, g, or t
  misc_feature (466)..(467): n is a, c, g, or t
  misc_feature (469)..(469): n is a, c, g, or t
  misc_feature (480)..(481): n is a, c, g, or t
  misc_feature (487)..(487): n is a, c, g, or t
  misc_feature (514)..(514): n is a, c, g, or t
  misc_feature (556)..(556): n is a, c, g, or t
ctcttcttccttaactttcttttttttatccatttttcacctgaaacttccnccccaccattcaaagtacaactcaagaataaaccatctancacattctcnncacacacattancccctanattnctcccctcncccatgnctaaagatttatnttttttaaataaatacagtaaaatcnaaaacatatgatgcataatttaatctgatgattcaaatgncncctcatttttttttttttccgttttcctcatncttcntngttnttttcctatnacatantncncgttactnnnnttttnanaannatncccntatatttcncattanncntctacagatagatacaatatnntcattttgatgtgtacatttcnnccncccnnagggcncaatttataantntttnctntnnnanctaanattntttttnaaatgagtatttttagcacacttagtaacagcnncntgttttaaacnnttattncctttttggtgaccaaattatatttgnccataattaaagaacccataaccttaaaataatatttaagancc

SEQ ID NO: 548776 - DNA, 165 bp, Homo sapiens
aggacgacgtagtcgtggtccaagagcttcatatgtgtattgtgacgcttaatggcctgcatatcttgcccttctaacataacacatgtaaggtgctgagttgtagaagttatttgccaggcagagaaagtgtctaaactacgaatgtcagtgatcattgtgggt

SEQ ID NO: 548777 - DNA, 110 bp, Homo sapiens
gtttttctagttttgtttgtttctcaaggttcattttttactaagccccttctgacacctaggcagataagatagagtagtgcgcctgggtccagaagtgcgcctgggtg

SEQ ID NO: 548778 - DNA, 818 bp, Homo sapiens
cgggggaatggatttgggaaagtaggctgtgtctggaaattttgttcaaggttttgggtatggttgtagatcttgtgtatgtattagttgttgctgtgttgttgacttgctgttgtgttaatgtaagcagcggatgagatgcctgagacttctagagagtgaaggagtcttccgcttgagagttggctgtcacaatctggacaaaggccgccagagccctgctaatcaatgttttgcgcttggttgtgctttgtaccccaccgggttccaagccagcttgtaagcccacaaggctttggttctcggcacatgcgccttacacagagactcttatgccaatctcgcgcgactgtcgggccctcaacgtgatgttctgggggacccactggaccactggtccagggatcaatcgcctcgaagctgcgcgacagcgccatgtctgcggtgcgacaacagtggagccggcagctcaccggcgcgacacaaccgcacttcccatgaagcaacccggcatacacggacgtgaccgtccgaaaccatgcatgcgctgcgggcgtgctagtctggaatacagcagcgggggccttggaggggaccgcattgtgcttgtcgtgatgggggcaagggcacaagtcctggatgttgctgtgtgtgcgagaggcctaaggctggtggcaagtgcacggggcacagcggagtctgtcctctgacgcgcaagtctgagggtctgggcggacgggcgtactgggtctgtgcatctctggttgcaccgcggcgcttcccagcaccaacatgtatacggcatgtttccagcagaa

SEQ ID NO: 548779 - DNA, 301 bp, Homo sapiens
gcgggagctcggatgtcggttctgtgaggctttacctgacacccgcgctttcccggcactggctgggagggcgccctgcaaagttgggaacgcggagccccggacccgctccgccgcctccggctcgcccagcgggggtcgccgggaggagcccgggggagagggaccaggaggggcccgcggcctcgcaggggcgcccgcgccgtcgcgggttgggagcgggcaaacggagcacaagtacgcggtgatggaggaggagcggagagcacaaaaggacgaaggacagcacgaggccaggaag

SEQ ID NO: 548780 - DNA, 311 bp, Homo sapiens
aaggattacctcgagtgtcgggaactgtcacttcaggttgtgtgagtgcgttacaaaaaaaaaaaaaaaaaaaaatccccttatccctcattggtattttaaaaatggcgtgaggtttatatagaattggtgtccatttttagggtttaaatttggcaaaaaacccattcccactatgcaaggtcctttaaaacttcagtgaaaatcacctctcattccctcagggttctctctttaattggaccaaaaccttccatttttcctctaattacaaggcgaccgggtgttctgagcaccctttcccccgaaca

SEQ ID NO: 548781 - DNA, 116 bp, Homo sapiens
ccagactgaccgctgagctccctggcactgtccacaaagaccatctgtatgccctgctcccactgctgggtccctaccccagctccgtgtgatgcccagtaaagcctgagccatga

SEQ ID NO: 548782 - DNA, 312 bp, Homo sapiens
cggtacccggtatggtggatgggtgatggataggtggatgaaggtgggtaggtgggtggatggatagtgagtagctgaatgaatggtggatagatggacggtgagtagatgcatgaatggatggatggtagatgaaggaatggttggatggtaaatagatgatggatggatggatggtagatgggtagataaattaataaaataataaactggagcctaaataaaaggaaattagaatagtaaagggatttctttcttccaagaggaatcccagcatctcctcttctcttctaaaggaaagtactgacttca

SEQ ID NO: 548783 - DNA, 137 bp, Homo sapiens
gaccttcggaatgctctaaagactgagtgataacagtttcaaatcaccatgaaggctttccttgcaaggcaaggtaaattctttccatgaggaaattatatggccaggatttaggcttaggttccaatggaagatga

SEQ ID NO: 548784 - DNA, 106 bp, Homo sapiens
tgtaccaggcgagcaagcccaaggacataatagaatctggagagtcctggggccttgttttgaaaaagacttgaaatacacttcgcatgaaagcactggacatgaa

SEQ ID NO: 548785 - DNA, 244 bp, Homo sapiens
actacggatgaacatccatactcgtccatgaccctcgaccatgtgtaccagtggaggaaggccttccggcgaaacatggcagagaactgaaccgagatgcgcatgaagagctcctggatggctgtgctatagcacaatgaaggtagactgccatctatgaggccacgaggtgggatgtcacagacggctgtcttgacattgtaagaggatccattccacaaagtagctgctactgctgtgatgg

SEQ ID NO: 548786 - DNA, 842 bp, Homo sapiens
  misc_feature (481)..(481): n is a, c, g, or t
gtgttctgtctatgtattgcgtgttctctttctgttcgtagtcgttgtgaccttctgggtggctgcctcgtttgtttcgcgtcttttcataaattggctagtacgatagtagacatgcattccggatccgcgattgggggaccgttgccgccgttcgggggtttctccgcgcgcggtgttggttactctctcaatatggcgcgttctctctccacgtttaagtgcgtgccccccagatctctgtgctggagaactgctcccccatactgtctggttcccgcaccttatgagcagtttccacggttgcccggtgcccgcgcaaaaaatccctgcgggtgtttctcccactttcctgcccgctggttttcttttccccccatccgcgtcctcgtggagccgctctggtccagagctttttatagagaataatttgtgaaagcttggtgcagacaccatcttcggataaaacgcgtgtgtcctnccaaaaggggccccccctcctttttcacaatcaaggcgctttccccgggggcgacccacttttcatcggccaaaaaatccgtatgaaaatcgcgccgagccacaccaggcacaactctgggggacatacacaaccacacctgggtactctgggggaaactaattcggcccccgcgaaacacgggtcagggttgtgccacaaactcgaacccacactttgccgccagagcccccgcgcaccagacagcggaggtggccgtgcccccccacgaggtcaggacatacggcagaacccaaagtaaaaaagccgcaggcatgggctcctcagattcaaaggggcggtaaaaattcccccccacaat

SEQ ID NO: 548787 - DNA, 444 bp, Homo sapiens
ggattatcacatatcctaacatttatttttatgtgaagatgatcgttttatatcaagggtgtatgctgtctgctcaagttcttgtgccctatccctttgggaccaacttaattcagtaagtctctgagatcatctcactctaattaggagcaggagcagtaggcaaggttgagcctgtgactttgccttcattagtgctgacctactaattagggtgaaagtaattgggaacaaataagatgcataagtgttccatagcatatggcttcaaggaagtggtcagaatggagctagaatgtcagtttcttggaggagcttgctttttttcatctttttttgttgttgttgttgttgagacggagcttgcagtgagccgagattgcgccactgcagtccgcagtccggcctgggcgacagagcgagactccgtctcaaaaaaaaaaa

SEQ ID NO: 548788 - DNA, 486 bp, Homo sapiens
  misc_feature (23)..(23): n is a, c, g, or t
  misc_feature (39)..(39): n is a, c, g, or t
  misc_feature (49)..(49): n is a, c, g, or t
  misc_feature (55)..(55): n is a, c, g, or t
  misc_feature (201)..(201): n is a, c, g, or t
  misc_feature (311)..(311): n is a, c, g, or t
  misc_feature (473)..(473): n is a, c, g, or t
aaaaaccctatccaccttggtancaacatcacgatttanaatggaaaancctaanatcattttcaagaaaagacctgcaatggccaatgaagaggttaataaccaagatatccgaggaaggacccagccacctccctccgcaggtctgcagatgaaggtttttgaataaatgccactgtgcatttcagaaaaaaaatctcnataacaacttgaatgatgttgtcctcctgattctctttctctctgcgacttaaagtggcggatattcggaactgtgaatgtacatagcgttgagttaaaccccttgtgtntagacaggacgcagcggcccctggtcctggggccagacccgtgggcaggtgggcatgggccctggctgcgggacctgctggggtgtgagggcagagggagggttgccatgaaggaacttgggattttcaatggaataaataaaacataaatctatactgggnctgaaaaaaaaaa

SEQ ID NO: 548789 - DNA, 1109 bp, Homo sapiens
gcacgacgttcgcagtctggtggatcacctgaaggtctgtccccggtacacggcagtgctggcacgctctgaggcatgaatggcatcggaatcgatggagctggagacccttgcagcatgcgagctgtgagacccgtgcctggtctatctgccagaccgggcgcctgcagtgtgcattgagtgcctgaatagcccagatcctcagcgactgggcaggactaagagaaggtgagcagacgagttccgtgaagctgggtcgagaccatgagacttggagctccccccaaacatgggaagcccaagaagcagaaactggaagggaaggcaggacatgggccgggccctggcccaggacggcccaaatccaaaaagcttcaggccaagatccaggaatatgacagttcactgatgaccctatcgactgtgccacggagtccccaagaaatgatgcccccaacaggttctgggcttcagtggcagccctactgtgctgacatcaccagcgaggaggtccggacacttgaggagtgactgaagcccccagaagatgaggctgagcattagaagatcccacccctggggaagcactagtcccagcgctggggcccaggaggacctgctggaggagcagaacggatggggcccgggcaagaggatgtggctgacaagaagacaggctcatggggccactgaccgaactggacactcaaagatgtggatgccctagtgaagaagtctgaggcccagcatggagacagcggaagatgggtgccctttggtgccctgagcaaggctactgcaggactggtgaagaaaaatattcccagggaggacccattctgccatggttggaacacaacagggagaaagagaaaacacacgagaaaaaagagaagacagcagaggcagaagacaagcgcgcgaacgcgaaaggaggacaaagacagggaaaaaggtaaggaccagacgaaccaacgagacagagacacagaaaaagggacgcaggaacagaggagaacaaacacggataggacccgagataccaaggagcaccaaaaagcagagaagaaaaagatgaccaccccacgcacaccacaacacaaagcagg

SEQ ID NO: 548790 - DNA, 222 bp, Homo sapiens
aaaaaaaaaaaaaccaacccccatgatttcaaggagtttggcattcctgaatcctttttccctgccaggggcctgtcacctgttttcactgcctcctttttcctgtcatgctcatcaggttatgggttctgttttagcccctgaacagagggctgaaacctcccctgcaggctggttttaggtctttaattatgttagaatcttgcccagccctggtaatgt

SEQ ID NO: 548791 - DNA, 561 bp, Homo sapiens
  misc_feature (544)..(544): n is a, c, g, or t
atgaagaggcaatggtccatctcaaaatactgcttttacaaaagcagaataaaagcgaaaagaaatgaaaatgttacgctacattaatccgggaataaaagaagccgaaataaatgagagatgagtggggatcaagtggatggaggaggctgtgctgtgtgccaatgtttcgttggcctcagacaggtatctcttcgttatcagaagagtggcttcatttcatcggggagcagaaaacagcaggcagcggtaaacagataagtttaactggcatctgcagtatggcaggtaagggataagtgcttatttaaaagagcgggggagtccttaaatatcaaccagggcactttctccggaccccttccctaggggatcccaggatggagaaatttttccatcgagccttttaaaaatggtaggactggtcccggtgggcttcagggaggggatagtacacttcactcagaggcatgggcatctttaaataatttcttaaaagcctctaaagtgatcagtgcctggatgccaagtaaggaaatttgtntagcatggaatccctga

SEQ ID NO: 548792 - DNA, 1342 bp, Homo sapiens
cgtacctcgttcttttctcacctctgtattctcatctttctctttccttcacttattgtagcctatctattttgtcttatatcttgtgctcttcttgcacacgtgtgttccctactatatatgtgtgctagtgtgtagtactcccttgctatctccttctgtcgtttctttcgcctgctgtcattcggcgtcgtctcttccttctttttttcttgctacgtaattactctatatcctaccttcacctactctttcctgcccttgtttttctctgtagtttttcatttctgtctgtgtttcggtgtgtagcccctcgtccccctcgttcgttttgtgtgcgctgttattcgtgctccttgtattccgtgtgcgtctttgttttttggtgctttcttcgttgtcttcctttaggtttgtgtcccctccgtgttgtcctcttgtctatttgtttttctcggggccctcgtgttgtgcttcgcctcgttgttgttcccctctctccttttgttgtgttcgtgtgttccgtgtcgtttctttcttgtgtcttcgcggttgtgtttgcgcgcttccgcttgttctgtccgtgttgttttttctcgtgtggcgctttcgtctctctcttttgtgtcctctttccgtcgtgttagcatcttcctctgttctgttttttgttttcttttttgttttgccctttcttctgtctcttcgtcagtccctggtttgatgggtccgtcgtcctggttgtctgcgggtatgttctcgttctgttgttctctttatgatgtgtttggtacgatcgcttgtagatgatctatgtccagccctcagcctccttgatgttatctagatgcagaagactagatgccctaaatctaggtagataggctacttgcccatcggtcatatcggcagtgttgctctcaagactcaagattggcagcccttccgcacgcgttgccgcacttgccatctccctcagagtccatgggagtccccataatatcccactatcatgtctttaagagtatatctggctccttgatcctagcaatcgggccctgggagtccaccaggtgggaataagcgcctctgtccagagtccaggtccttgggatgacagacagcttgcctcgcacactcgggccccactcaaggatgtagggccttcttctggtctccctgaccctctccctggtcatgggagcgtggggacggggctggtccttgggaggcgtcggtcaggggcatcacctccttctgctgcttcttcctgctcctaccctcaagggcctggggtctgcccagctgcctctatgcccttatgtgggctctcagcccactg

SEQ ID NO: 548793 - DNA, 362 bp, Homo sapiens
  misc_feature (217)..(217): n is a, c, g, or t
ccagtttgctgtgtggtggaacattatgaaaacgccattgaatatgattgcaaggaggagcatgcagaatttgtgctggtgagaaaggatatgcttttcaaccagctgatcgaaatggcattgctgtctctaggttattcacatagctctgctgcccaggccaaagggctaatccaggttggaaagtggaatccagttccactgtcttacgtgacanatgcccctgatgctacagtagcagatatgcttcaagatgtgtatcatgtggtcacattgaaaattcagttacacagttgccccaaactaggaagacttgcctcccgaacaatggtcgaacaccacagtgaggaatgctctgaagg

SEQ ID NO: 548794 - DNA, 445 bp, Homo sapiens
  misc_feature (441)..(441): n is a, c, g, or t
aaactatttatttagtgatcctataatccaggctgctttggcccttaaactaggccctcactgctccaggcatggggccacgcagcataacagagccaaccagtgcccagcagcctacagcctcagttaaggatgctataaccttttcatctgccgccgctcctgtcggcgttgtcgtttctcattgagctctggtgcaggggctccactgtctgctgtgaaccaggggcccagcacgtttacccacaaaaggtaaagggcccggcctggagccagaagccagaaggaccagatgtagagggagaaacagctgagcacctgaacaatggctgtcagtaggatcacatccttaaggtgctctgccatgccctgctccatgttgaggtccatgcaacatccatcaaaggacccatctcagagaaggatgccgagcatcgagcnggca

SEQ ID NO: 548795 - DNA, 945 bp, Homo sapiens
  misc_feature (127)..(127): n is a, c, g, or t
  misc_feature (151)..(152): n is a, c, g, or t
  misc_feature (159)..(159): n is a, c, g, or t
  misc_feature (210)..(210): n is a, c, g, or t
  misc_feature (216)..(217): n is a, c, g, or t
  misc_feature (222)..(222): n is a, c, g, or t
  misc_feature (224)..(224): n is a, c, g, or t
  misc_feature (274)..(274): n is a, c, g, or t
  misc_feature (286)..(286): n is a, c, g, or t
  misc_feature (290)..(290): n is a, c, g, or t
  misc_feature (320)..(320): n is a, c, g, or t
  misc_feature (358)..(358): n is a, c, g, or t
  misc_feature (386)..(386): n is a, c, g, or t
  misc_feature (392)..(392): n is a, c, g, or t
  misc_feature (418)..(418): n is a, c, g, or t
  misc_feature (452)..(452): n is a, c, g, or t
  misc_feature (462)..(462): n is a, c, g, or t
  misc_feature (464)..(464): n is a, c, g, or t
  misc_feature (476)..(476): n is a, c, g, or t
  misc_feature (479)..(480): n is a, c, g, or t
  misc_feature (488)..(488): n is a, c, g, or t
  misc_feature (517)..(517): n is a, c, g, or t
  misc_feature (529)..(529): n is a, c, g, or t
  misc_feature (945)..(945): n is a, c, g, or t
atcagaatacaaactgactagaaatacgcgtcaaaaccgagtacttaccaaagctcagagcatctgagtagcatgaatcctgtttgcttcatcaatctgaaggttatggcctttgacaagagggatnctgaacgactaaattagtcagttnntcgcttngtttacttaaatgtatggttagatggtttttgatctgcagtcttccctagntccccnnaaatnangtaataataacttccatgctgcctgctgtgttccagatcacagaggcagncaaggctcaggnaaanactggggcttgcttatggtcagcctatgtntgattgcacagtctttgacaatagtagcttactaagantgctcagaatgagtaagctttaggaaantactanaatgctgtgggagaataacaaaatcngttctctctcttcacttgacagaagcattaagtngaattttgtntnacatagagccantgnngccaaaanctttctatattgcctgtagatgatcggcntgctggtgtggnagtaatctgatcacagatattcttaaatcagagtgtggaatggtattagtcaaacatggtgccagtgtcttttacgaaagagcagatggcatagtgtcgagatgtagcttactctcgtgctactgtacagcttgaggatctgtcatcacctcccggtaacgttgtaaatacccaggttgcctcttctggtagtccatctcccagacttgtgactttgggcttttcattcttcaatgcatgaccgagtgccaaacttgattatctcgtaaggcacagctttcctccctcttgtgcctcctgttttccttttttctctcctggctcttcctctggtccccattccaattttctcatttggctcctttctcaattctggcagtctgaaattttgaaaccggttaataatccaagtgtgn

SEQ ID NO: 548796 - DNA, 186 bp, Homo sapiens
gggctggttatcagctgtagctagggtgcacatgtttgaggactgggagtgaaggcgaaggggaaacaagaaatgtgaggggaaggtggccgggcacggtgtgccacgcctgtaatcccagcactttgtgacggcgatgtgcgtggatcatctgagggcagggagtttgaaaccagtctggacaac

SEQ ID NO: 548797 - DNA, 284 bp, Homo sapiens
caacgcacgtgttgggccaacgcaccgtgggcactctggcctctacatctacaatctctatgccccgctgtgctgcacggggtgcccagccatcttaggtatgagaacggacactgttgtggtccaggatttgggctacatcttcactcgcctgccactcaagcggatgtggcatcaggcactgctgcgctcaggggataaagtgcgcattgaccccccctgcatctagacagcatacagctgcttccacctacctcaacaacccgtacggtgcgttggcccta

SEQ ID NO: 548798 - DNA, 132 bp, Homo sapiens
cccttatatgaggaacgtcactcgggctaagcagattgtgtggaatggtcctgtaggggtatttgaatgggatgcttttgccggtgaaccaagctctcatggatgaggtggtgaaagccacttctaggggct

SEQ ID NO: 548799 - DNA, 105 bp, Homo sapiens
ctgtcctgcgtcttacactattcctcatcaccaagaaaatattaacacaaactaccacctacttaggaggctgaggcaggagagtcacttgaacctgagggagcg

SEQ ID NO: 548800 - DNA, 739 bp, Homo sapiens
gtcatacttaggagtatatgcgggatgtcgacccgttattatcatacgctctcttaaagagggggactgccttagaacagtgacctgaacctattatccgtgagtctgggactccggggcaagctgtgggcacccaagctgttgaaagcctagacaggctacattaaacattcggcatgacaatgaacacagaatgaggacatcagctaaactgctgtataatcgtgagacgagactgagaaacggatcatcatccatcatgatgcggatagtcagtcactacagatatgtcacctaatcaaggacaaggtgcacgacggtacacctgggccctgactgacagaatcatgaatagcaagacagtctgcatccaagatgtactgcgtaagttcattctacatcacacaagcagcaacaagctgcgcatgctgtatcctaagggaccagaggactaaaggttccttcagctggaaagagatctctctacacacatgagtaatccgagcgcgcatagaaccacagaactgacgtaactacgccattttgggacgttcatgtaggtcctttaaggagatggcgtccatagggcatatattgatagaaaaccgtacattttgggaacaaattccatggagggactgacgactgggccatcataaggtaagggtcagactccccctcttgaagactctcttggttgtactgcataagcgaccacctgggcggtcttgcggcccgc

SEQ ID NO: 548801 - DNA, 327 bp, Homo sapiens
tgagacagaatcttgctctgtcatccagcctggagtgcagtggcacgatttcagctcactgcaacctccacttcctgggttcaagcgattctcttgcctcagcctcccgagtagctgggattacaggcatgcaccaccacacccgcctaatttttgtatttttagtagagatgaaatttcgccatgttggccaggctggtctcgaactcctgagctcaggcaatccgcccaccttagcccaaagtgctgggattataggcatgagccactgcacctggccccacatggctaatttttaaaagggttttggttccaccaaccttcact

SEQ ID NO: 548802 - DNA, 333 bp, Homo sapiens
tcatcttgggcctgtgttatccccaataaggaagtgaaggttggcgtaacgatcggtacggaactcgatcttgccgcccttaatatcggagacagccttagcgacatccatggtgacagtaccggtcttagggttcggcatcaggccacgcggaccgagcatgcgtcccagacggccaactttgcccatcatgtccggggtagcaaccacggagtcgaagtccaagtacccgccctggaccttggcgatgagatcgtcgtcaccgacctcgtcggcgcccgcctcgcgggcagcctcggccttctcaccggtgataacacaggcccaagatga

SEQ ID NO: 548803 - DNA, 291 bp, Homo sapiens
ccggtcctctacatgtatgctttacctaatctgcctctaggggcttgcaaggaaacggtttccggtttccgtcttcatttgacctcttaatgtcctgagcaatagtttttcgttattctgctgagggtacttttgttggttagctttagacatcattatttctactaattcacgtagttttgatcgtagcgccaaagtttcaattcttccactggttcttctggaaggaattagaacttttacagtgccttgcctgctcagtattatgttgttaaaaaagagtagaggcaa

SEQ ID NO: 548804 - DNA, 874 bp, Homo sapiens
  misc_feature (389)..(389): n is a, c, g, or t
attctctataaaccacaaagacataggaacactatacctattattcggcgcatgagctggattcctaggcacagttctaagcctccttattcgatccgagactggtgactgccagggaatcttctaggtaacgaccacatctacaacgttatcgtcacagcccatgcatttagtaataatcttcttcataagtaaatacccaatcaataatcgagagagcttttgagtgacattgtacatagtttctcccatacataatcggatgcaccccgtatcatggcgttctccccgacactaaacacaacagtaagcttctgctgcattcttatctccactctctccctcactccctactcggccatcctgcttatagtggcagtgacctgagnagccaaggaacaaccagagatctcgataactagctcatatcgcacttcgcccgtctgagtccgagaggcaacgtacatacacgcaacccttggcagcgctccgctagacctacaccatgtcttctccttgacatctgagtcagggtgatttccctctaatctattagacgcgtccagtacagattttcattcatctacagcaagttaattcaattattaaaaacctctctctcatgcacaataaaggcccataatgacccaataacgccccctactttcggtgcatgatccgtgcgctacatcacagcgagtccatacttgctccatatctcttccccagtcctagctgcctggcatcactatatcttactaacagaccgagaaacttatacacctagctttcttcgaacccgtccggagagaagggaagaacccaattcctataccaaaaactattgctgattttttccggtcaccctggagtt

SEQ ID NO: 548805 - DNA, 918 bp, Homo sapiens
ccacccccactctgcatcaactgaacgctaatcagccactttaattaagctaagcccttactaaaccaatgggacttatgacccacaaacatcttagttaacagacgtgaagcaccctaatcatctggacttcaatctacttctcccgccgtcgggaaaataggcgggagatgccccgagtcaggttatgaagtctgcttcttcgaatatgcaattcatatatgacaatcacctcggaagctggtactaagaggcctaacccctgtctttagcatttacagtccaatgcttcactcagacattttagctcacccccactgactgttcgccgcatgcgtgtagactatgtgctcgtacaaacctacaaaatgcactattggaacatctatacctattattcggcgcactgagctggagtcctaggcacagctctaagcctccttattcgagccgagctgggccagccaggcaaccttctatgtaacgaccacatctacaacgttaatcgtctacagcccatgcatttgtaactaatcttcttcatgatgtaatacccatcataatcggaggctttggcaaactgactagttccgcctatctaatcggtgccccgatatggcgtttccccgattaaacaacatatgcttctgacatctctacctccctctctcctactccctgttcgcatctgctatagtggaggccggagcaggaacaggttgaacaggtctacccctcccttagaagggaactatcccaccctggagctccgtagaactaaccagttttacttaaactaacaggtggttcctctatcttaggggcaaccactttcttcacaaccattattaatttaaacccctggctaaaccagtaccaaaggccctttgtttgaacaggcctaagacagaactattt

SEQ ID NO: 548806 - DNA, 660 bp, Homo sapiens
agaggacccgacggtcaacggaactttatcttagaataacatatctggcaaaaatgtccttcaaacatgaagaagaaataaaaactttcccagacaaacaaacactgagggattaaatcaacactagacctgtcctataagaaaagctaaagggagaacttcagtcagaaaggaaaggatgttaatgagcaataagaaataatttgaaggtacaaaactcactggtaatagcaagtacacaaaaaaatagaaagtgaaaaagtaggcgggggggatgaagttaaaacagagtttttatcagttttctttttgctgtttatttgtttacacagacagtgttaagttgttatcaggcaaaataatgggttgtaagagtatctacaaacctcataataacctcaaaccaaaaaacatgcaatgaatacacaaaaaataaaaagcaagaaactaaatcacatccccagagaaaatcattttaactaaaggaagacaggaaggaaagaaagaaggaagaggccagatgcagtggctcatacctgtaatttcagcactttgggaaagcaaggtgagtcgatcatttgaggtcaggagttcgagagtagcctagccaacatgatgaaatcctgtctctactaaaaattaaaaattagtgtgtgtcgt

SEQ ID NO: 548807 - DNA, 167 bp, Homo sapiens
acggagggcagcaggagagaacccctgagttctgcgggacagccccagttccagaacatgcggcaggtgattcatgcagaaccctgcgctgctgccctgcactgcttccaagacagctgggccagtgagaaccctacatgcttttacatgcaatatcatgcctggca

SEQ ID NO: 548808 - DNA, 825 bp, Homo sapiens
  misc_feature (564)..(564): n is a, c, g, or t
  misc_feature (710)..(711): n is a, c, g, or t
  misc_feature (758)..(759): n is a, c, g, or t
  misc_feature (771)..(771): n is a, c, g, or t
aagacaacgatcccagaggaggaggcgagcatactgctacaaaatacccaagcagggcggggcctttgccaaaagagtctccgtggcccctagagcgggccccagggtagttgctaacggttcagcaagaaattgaccttttctgcagccacctacctaagtggcagaggaaccccaacctctggcagacggtccgcatcccccatgtatggcaggagtgtacaggcgcgtcgggtcaccggggggccatgcctcggagaacccgattgcagctctccctgcacatcggtccaatgtcagcttccagacctggagctccagacgcgggcctgggggtcatctgaatgtaaccttcactttagagtcaccatactctcataatctgcactgttttaataaaatcttagtaattctctgtaaggagacggcgagtgaccatggaaatatttcatctcgtgcagggtctcattgtttatctcatggcgaaaatatacttttttaatggttggatgtaaacatgaactcaaacacgttttatttattaagatacaacctgaaccacanaaacaaggagatcaaagatgaagtggcttagacagaagtttcagtctctctccccagactgtctggaggtgagtggatggcgcttcatgaggttgctggggacccctgtctgctgggtctcttgctctgttgtcctgttacgacanncggtgcatggcatggcacatggtcggcatggtagatgctgggttgcnnccacacccacantccctgtgaggtgtttgtttttacttaattaccttagaatggtgagggcgggag

SEQ ID NO: 548809 - DNA, 3218 bp, Homo sapiens
  misc_feature (3092)..(3092): n is a, c, g, or t
  misc_feature (3095)..(3096): n is a, c, g, or t
  misc_feature (3098)..(3098): n is a, c, g, or t
  misc_feature (3101)..(3101): n is a, c, g, or t
  misc_feature (3104)..(3104): n is a, c, g, or t
  misc_feature (3106)..(3107): n is a, c, g, or t
  misc_feature (3115)..(3115): n is a, c, g, or t
  misc_feature (3127)..(3127): n is a, c, g, or t
  misc_feature (3132)..(3132): n is a, c, g, or t
gcggccgcctcaccagaccgcgtgcggacgggctcgcgggcggggcggggcaagctcaggccacgcccctgggcggtgcgcgcgggcggtgggtaggccgggcaggctcacgtgatgcgggccccgcggcccgccatataaacccgcgcgcccgccaggcgctgcggccgtcccgggccgtgactcctcctttcccccgccccgcctccgttcggagagccggcgggcgggcgcctctcggccaggaagcgcctcttggacgcgtgtgaccgatgcccagattgcacgaccacttctggagctgctcctgtgcgcacagcgcgaggcgccgaggccccccgcgagccagcgccgcggggctggcggccaaggttggggagatgatcaacgtttccgtgtccgggccctccctgctggcggcccacggtgccccggacgctgaccccgcgcccaggggccgcagtgctgcgatgagcggccccgagcccggcagcccctaccccaacacctggcatcatcgcctgttgcagaggagcctcgtgctcttctcggttggggtggtcctagccctggtgctcaacctgctgcagatccagaggaatgtcactctcttccccgaggaggtgatcgccaccatcttttcctccgcctggtgggtccctccctgctgcgggacagcagctgctgttgttggcctactgtacccctgtatcgacagtcacctcggagaaccccacaaatttaagagagaatgggccagtgtcatgcgctgcatagcagtttttgttggcattaaccacgccagtgctaaattggattttgccaataatgtccagctgtccttgactttagcagccctatctttgggcctttggtggacatttgatcgttccagaagtggccttgggctggggatcaccatagcttttctagctacgctgatcacgcagtttctcgtgtataatggtgtctatcagtatacatccccagatttcctctatattcgttcttggctcccttgtatatttttctcaggaggcgtcacggtggggaacataggacgacagttagctatgggtgttcctgaaaagccccatagtgattgagtcttcaaaaccaccgattctgagagcaaggaagattttggaagaaaatctgactgtggattatgacaaagattatcttttttcttaagtaatctatttagatcgggctgactgtacaaatgactcctggaaaaaactcttcacctagtctagaatagggaggtggagaatgatgacttaccctgaagtcttcccttgactgcccgcactggcgcctgtctgtgccctggagcattctgcccaggctacgtgggttcaggcaggtggcagcttcccaagtattcgatttcattcatgtgattaaaacaagttgccatatttcaaagccttgaactaagactcaattaccaacccgcagttttgtgtcagtgcccaaaggaggtaggttgatggtgcttaacaaacatgaagtatggtgtaataggaataatatttatccaaaagatttttaaaaatagggctgtgtttaaaaaaaaaaacaaaacaagaaaagcagcagtgattatagagaggtcacactctaagtggggtcgcggcgtggccacgcttcacggtcacgctcgtccgtcctgcagtggcgtgtttacatggtcacacgtgtgtgtatcaccagtgggtcaactgcttgtcattcctcccgtggcagtttgtgtagacaatcttactgagcaaaaggcaatgaaaagtcttggttcccacactgcgatatattggaattttcacctcagtttatgaagtttatttcgaaatccatagtcatctaagaatgaatacctgtctgccatgtatttcaatcttagtgagccaaaattgtttgtttgttactacagaatagagatgactgttttttgccacagccctatggaatttgcaatctgtgattgccttgtaaaaaggagagtgcatatggcactgcattaaacgtgtggtgtttctagtcaatgatattggtgagcacaatgtattcatttaatggcatagaccataccagacctaatttgcaagtattgggtcttaaacttcaagtgcaatgtatatgaaaaccaatctgagccttgtatctcttaaatatttattttttttaacgtgtgagatgttcgagagaaggttctccattcatttcagtgctgcctggaggaaactcggcaatgatttctttcagttgtgaagttcctttcgtgttacaccctccactgaaccctcaaccttcgaaatactccagttttgtgggtttggtcatttttacttataaatttacctttttgtattttgcaatttacatgtgtttggtttgttttaaattctgtgaaagtggcttgattaaaagactccttttaaatggaagccaccagtcagcagaatggaagcttagaggaacttgcctgtgagcgctggtctttgtgtttggttttgtgatgtaacgatctttgctggggttttttgctttgttttgagggaaatgtcttggagtaaattttaagttcctggagttaatttgttttacaggaattttgttttttaaaaaaataggatcattctgaactttggaatgacccccttatatattttctgaaaatgaaaacagttacatgaaaaaaatttccaatgaagatgtcagcattttatgaaaaaccagaagttattagatgaaagcagcgagtgaatctttaaaacagacttgatcacgcacacacaataagtctttctctccgaaaccggaagtaaatctatatctgttagaaataatgtagccaaaagaatgtaaatttgaggatttttttgccaatagtttatagaaaatatatgaaccaaagtgatttgagtttgtaaaaatgtaaaatagtatgaacaaaatttgcactctaccagatttgaacatctagtgaggttcacattcatactaagttttcaacattgtgttctttttgcattcattttttacttttattaaaggttcaaaaccaaaaaaaaaaaaaaaaaaaaaanatnntntgnggngnntcgggccngaaaaagttttnaaccnttcgttggggcggggccccagtggttgtgcacccgggccaaggtgttcccaaggaaaaccccggccgaaaatggggtggggttccc

SEQ ID NO: 548810 - DNA, 263 bp, Homo sapiens
ctcgctattacccctggactatatagccaagacataagctacaaattatgccggaaaaactgtccatacagtttataactacttcttcatacattcttatggaccatcatccaggacatctgctttgacagaaatatccagcttataagtatcttcaaaaggttagaacttgtgaatgaaaaacatataagaatgtgagttaaaggatgatatagccattcagtatgctaagtttacacggtcttaaaatttgcacgtttaat

SEQ ID NO: 548811 - DNA, 3069 bp, Homo sapiens
gcggccgcctcaccagaccgcgtgcggacgggctcgcgggcggggcggggcaagctcaggccacgcccctgggcggtgcgcgcgggcggtgggtaggccgggcaggctcacgtgatgcgggccccgcggcccgccatataaacccgcgcgcccgccaggcgctgcggccgtcccgggccgtgactcctcctttcccccgccccgcctccgttcggagagccggcgggcgggcgcctctcggccaggaagcgcctcttggacgcgtgtgaccgatgcccagattgcacgaccacttctggagctgctcctgtgcgcacagcgcgaggcgccgaggccccccgcgagccagcgccgcggggctggcggccaaggttggggagatgatcaacgtttccgtgtccgggccctccctgctggcggcccacggtgccccggacgctgaccccgcgcccaggggccgcagtgctgcgatgagcggccccgagcccggcagcccctaccccaacacctggcatcatcgcctgttgcagaggagcctcgtgctcttctcggttggggtggtcctagccctggtgctcaacctgctgcagatccagaggaatgtcactctcttccccgaggaggtgatcgccaccatcttttcctccgcctggtgggtccctccctgctgcgggacagcagctgctgttgttggcctactgtacccctgtatcgacagtcacctcggagaaccccacaaatttaagagagaatgggccagtgtcatgcgctgcatagcagtttttgttggcattaaccacgccagtgctaaattggattttgccaataatgtccagctgtccttgactttagcagccctatctttgggcctttggtggacatttgatcgttccagaagtggccttgggctggggatcaccatagcttttctagctacgctgatcacgcagtttctcgtgtataatggtgtctatcagtatacatccccagatttcctctatattcgttcttggctcccttgtatatttttctcaggaggcgtcacggtggggaacataggacgacagttagctatgggtgttcctgaaaagccccatagtgattgagtcttcaaaaccaccgattctgagagcaaggaagattttggaagaaaatctgactgtggattatgacaaagattatcttttttcttaagtaatctatttagatcgggctgactgtacaaatgactcctggaaaaaactcttcacctagtctagaatagggaggtggagaatgatgacttaccctgaagtcttcccttgactgcccgcactggcgcctgtctgtgccctggagcattctgcccaggctacgtgggttcaggcaggtggcagcttcccaagtattcgatttcattcatgtgattaaaacaagttgccatatttcaaagccttgaactaagactcaattaccaacccgcagttttgtgtcagtgcccaaaggaggtaggttgatggtgcttaacaaacatgaagtatggtgtaataggaataatatttatccaaaagatttttaaaaatagggctgtgtttaaaaaaaaaaacaaaacaagaaaagcagcagtgattatagagaggtcacactctaagtggggtcgcggcgtggccacgcttcacggtcacgctcgtccgtcctgcagtggcgtgtttacatggtcacacgtgtgtgtatcaccagtgggtcaactgcttgtcattcctcccgtggcagtttgtgtagacaatcttactgagcaaaaggcaatgaaaagtcttggttcccacactgcgatatattggaattttcacctcagtttatgaagtttatttcgaaatccatagtcatctaagaatgaatacctgtctgccatgtatttcaatcttagtgagccaaaattgtttgtttgttactacagaatagagatgactgttttttgccacagccctatggaatttgcaatctgtgattgccttgtaaaaaggagagtgcatatggcactgcattaaacgtgtggtgtttctagtcaatgatattggtgagcacaatgtattcatttaatggcatagaccataccagacctaatttgcaagtattgggtcttaaacttcaagtgcaatgtatatgaaaaccaatctgagccttgtatctcttaaatatttattttttttaacgtgtgagatgttcgagagaaggttctccattcatttcagtgctgcctggaggaaactcggcaatgatttctttcagttgtgaagttcctttcgtgttacaccctccactgaaccctcaaccttcgaaatactccagttttgtgggtttggtcatttttacttataaatttacctttttgtattttgcaatttacatgtgtttggtttgttttaaattctgtgaaagtggcttgattaaaagactccttttaaatggaagccaccagtcagcagaatggaagcttagaggaacttgcctgtgagcgctggtctttgtgtttggttttgtgatgtaacgatctttgctggggttttttgctttgttttgagggaaatgtcttggagtaaattttaagttcctggagttaatttgttttacaggaattttgttttttaaaaaaataggatcattctgaactttggaatgacccccttatatattttctgaaaatgaaaacagttacatgaaaaaaatttccaatgaagatgtcagcattttatgaaaaaccagaagttattagatgaaagcagcgagtgaatctttaaaacagacttgatcacgcacacacaataagtctttctctccgaaaccggaagtaaatctatatctgttagaaataatgtagccaaaagaatgtaaatttgaggatttttttgccaatagtttatagaaaatatatgaaccaaagtgatttgagtttgtaaaaatgtaaaatagtatgaacaaaatttgcactctaccagatttgaacatctagtgaggttcacattcatactaagttttcaacattgtgttctttttgcattcattttttacttttattaaaggttcaaaacc

SEQ ID NO: 548812 - DNA, 198 bp, Homo sapiens
cttgggaagcaagacaggcgaatacttgaggtcaggagcttgagacctacctggcaacatggtgaaaccccgtctctactgaaaatacaaaaattatccaggcatggtggcaggcgcctgtggtcccagctactcgggaagctgagacaggagtttcacctgagagaggaggatcacctgaggctgggcgtgcagtgg

SEQ ID NO: 548813 - DNA, 104 bp, Homo sapiens
cctttttgggggccccataaaacaagttttttcaaaaaaaaaggggggggccgggccggaatttcccggaatttttttcccccccgggccccccccgggtccca

SEQ ID NO: 548814 - DNA, 3303 bp, Homo sapiens
  misc_feature (3070)..(3070): n is a, c, g, or t
  misc_feature (3074)..(3074): n is a, c, g, or t
gcggccgcctcaccagaccgcgtgcggacgggctcgcgggcggggcggggcaagctcaggccacgcccctgggcggtgcgcgcgggcggtgggtaggccgggcaggctcacgtgatgcgggccccgcggcccgccatataaacccgcgcgcccgccaggcgctgcggccgtcccgggccgtgactcctcctttcccccgccccgcctccgttcggagagccggcgggcgggcgcctctcggccaggaagcgcctcttggacgcgtgtgaccgatgcccagattgcacgaccacttctggagctgctcctgtgcgcacagcgcgaggcgccgaggccccccgcgagccagcgccgcggggctggcggccaaggttggggagatgatcaacgtttccgtgtccgggccctccctgctggcggcccacggtgccccggacgctgaccccgcgcccaggggccgcagtgctgcgatgagcggccccgagcccggcagcccctaccccaacacctggcatcatcgcctgttgcagaggagcctcgtgctcttctcggttggggtggtcctagccctggtgctcaacctgctgcagatccagaggaatgtcactctcttccccgaggaggtgatcgccaccatcttttcctccgcctggtgggtccctccctgctgcgggacagcagctgctgttgttggcctactgtacccctgtatcgacagtcacctcggagaaccccacaaatttaagagagaatgggccagtgtcatgcgctgcatagcagtttttgttggcattaaccacgccagtgctaaattggattttgccaataatgtccagctgtccttgactttagcagccctatctttgggcctttggtggacatttgatcgttccagaagtggccttgggctggggatcaccatagcttttctagctacgctgatcacgcagtttctcgtgtataatggtgtctatcagtatacatccccagatttcctctatattcgttcttggctcccttgtatatttttctcaggaggcgtcacggtggggaacataggacgacagttagctatgggtgttcctgaaaagccccatagtgattgagtcttcaaaaccaccgattctgagagcaaggaagattttggaagaaaatctgactgtggattatgacaaagattatcttttttcttaagtaatctatttagatcgggctgactgtacaaatgactcctggaaaaaactcttcacctagtctagaatagggaggtggagaatgatgacttaccctgaagtcttcccttgactgcccgcactggcgcctgtctgtgccctggagcattctgcccaggctacgtgggttcaggcaggtggcagcttcccaagtattcgatttcattcatgtgattaaaacaagttgccatatttcaaagccttgaactaagactcaattaccaacccgcagttttgtgtcagtgcccaaaggaggtaggttgatggtgcttaacaaacatgaagtatggtgtaataggaataatatttatccaaaagatttttaaaaatagggctgtgtttaaaaaaaaaaacaaaacaagaaaagcagcagtgattatagagaggtcacactctaagtggggtcgcggcgtggccacgcttcacggtcacgctcgtccgtcctgcagtggcgtgtttacatggtcacacgtgtgtgtatcaccagtgggtcaactgcttgtcattcctcccgtggcagtttgtgtagacaatcttactgagcaaaaggcaatgaaaagtcttggttcccacactgcgatatattggaattttcacctcagtttatgaagtttatttcgaaatccatagtcatctaagaatgaatacctgtctgccatgtatttcaatcttagtgagccaaaattgtttgtttgttactacagaatagagatgactgttttttgccacagccctatggaatttgcaatctgtgattgccttgtaaaaaggagagtgcatatggcactgcattaaacgtgtggtgtttctagtcaatgatattggtgagcacaatgtattcatttaatggcatagaccataccagacctaatttgcaagtattgggtcttaaacttcaagtgcaatgtatatgaaaaccaatctgagccttgtatctcttaaatatttattttttttaacgtgtgagatgttcgagagaaggttctccattcatttcagtgctgcctggaggaaactcggcaatgatttctttcagttgtgaagttcctttcgtgttacaccctccactgaaccctcaaccttcgaaatactccagttttgtgggtttggtcatttttacttataaatttacctttttgtattttgcaatttacatgtgtttggtttgttttaaattctgtgaaagtggcttgattaaaagactccttttaaatggaagccaccagtcagcagaatggaagcttagaggaacttgcctgtgagcgctggtctttgtgtttggttttgtgatgtaacgatctttgctggggttttttgctttgttttgagggaaatgtcttggagtaaattttaagttcctggagttaatttgttttacaggaattttgttttttaaaaaaataggatcattctgaactttggaatgacccccttatatattttctgaaaatgaaaacagttacatgaaaaaaatttccaatgaagatgtcagcattttatgaaaaaccagaagttattagatgaaagcagcgagtgaatctttaaaacagacttgatcacgcacacacaataagtctttctctccgaaaccggaagtaaatctatatctgttagaaataatgtagccaaaagaatgtaaatttgaggatttttttgccaatagtttatagaaaatatatgaaccaaagtgatttgagtttgtaaaaatgtaaaatagtatgaacaaaatttgcactctaccagatttgaacatctagtgaggttcacattcatactaagttttcaacattgtgttctttttgcattcattttttacttttattaaaggttcaaaaccnaaanaaaaataatagaagataacagagaaaaaactgttttggggcgccttcgcgcttggaaaaattttttaaaacatgtctgttgggggcggggggccccaatgtcttactgtgaacgcgggcatcagcggtttctcgagagaaaatccgggcacaggaataggcgctgggtctctcccccattataaaaaggcggggggcaccgagggtttctgcacaatccccgatggagg

SEQ ID NO: 548815 - DNA, 3097 bp, Homo sapiens
gcggccgcctcaccagaccgcgtgcggacgggctcgcgggcggggcggggcaagctcaggccacgcccctgggcggtgcgcgcgggcggtgggtaggccgggcaggctcacgtgatgcgggccccgcggcccgccatataaacccgcgcgcccgccaggcgctgcggccgtcccgggccgtgactcctcctttcccccgccccgcctccgttcggagagccggcgggcgggcgcctctcggccaggaagcgcctcttggacgcgtgtgaccgatgcccagattgcacgaccacttctggagctgctcctgtgcgcacagcgcgaggcgccgaggccccccgcgagccagcgccgcggggctggcggccaaggttggggagatgatcaacgtttccgtgtccgggccctccctgctggcggcccacggtgccccggacgctgaccccgcgcccaggggccgcagtgctgcgatgagcggccccgagcccggcagcccctaccccaacacctggcatcatcgcctgttgcagaggagcctcgtgctcttctcggttggggtggtcctagccctggtgctcaacctgctgcagatccagaggaatgtcactctcttccccgaggaggtgatcgccaccatcttttcctccgcctggtgggtccctccctgctgcgggacagcagctgctgttgttggcctactgtacccctgtatcgacagtcacctcggagaaccccacaaatttaagagagaatgggccagtgtcatgcgctgcatagcagtttttgttggcattaaccacgccagtgctaaattggattttgccaataatgtccagctgtccttgactttagcagccctatctttgggcctttggtggacatttgatcgttccagaagtggccttgggctggggatcaccatagcttttctagctacgctgatcacgcagtttctcgtgtataatggtgtctatcagtatacatccccagatttcctctatattcgttcttggctcccttgtatatttttctcaggaggcgtcacggtggggaacataggacgacagttagctatgggtgttcctgaaaagccccatagtgattgagtcttcaaaaccaccgattctgagagcaaggaagattttggaagaaaatctgactgtggattatgacaaagattatcttttttcttaagtaatctatttagatcgggctgactgtacaaatgactcctggaaaaaactcttcacctagtctagaatagggaggtggagaatgatgacttaccctgaagtcttcccttgactgcccgcactggcgcctgtctgtgccctggagcattctgcccaggctacgtgggttcaggcaggtggcagcttcccaagtattcgatttcattcatgtgattaaaacaagttgccatatttcaaagccttgaactaagactcaattaccaacccgcagttttgtgtcagtgcccaaaggaggtaggttgatggtgcttaacaaacatgaagtatggtgtaataggaataatatttatccaaaagatttttaaaaatagggctgtgtttaaaaaaaaaaacaaaacaagaaaagcagcagtgattatagagaggtcacactctaagtggggtcgcggcgtggccacgcttcacggtcacgctcgtccgtcctgcagtggcgtgtttacatggtcacacgtgtgtgtatcaccagtgggtcaactgcttgtcattcctcccgtggcagtttgtgtagacaatcttactgagcaaaaggcaatgaaaagtcttggttcccacactgcgatatattggaattttcacctcagtttatgaagtttatttcgaaatccatagtcatctaagaatgaatacctgtctgccatgtatttcaatcttagtgagccaaaattgtttgtttgttactacagaatagagatgactgttttttgccacagccctatggaatttgcaatctgtgattgccttgtaaaaaggagagtgcatatggcactgcattaaacgtgtggtgtttctagtcaatgatattggtgagcacaatgtattcatttaatggcatagaccataccagacctaatttgcaagtattgggtcttaaacttcaagtgcaatgtatatgaaaaccaatctgagccttgtatctcttaaatatttattttttttaacgtgtgagatgttcgagagaaggttctccattcatttcagtgctgcctggaggaaactcggcaatgatttctttcagttgtgaagttcctttcgtgttacaccctccactgaaccctcaaccttcgaaatactccagttttgtgggtttggtcatttttacttataaatttacctttttgtattttgcaatttacatgtgtttggtttgttttaaattctgtgaaagtggcttgattaaaagactccttttaaatggaagccaccagtcagcagaatggaagcttagaggaacttgcctgtgagcgctggtctttgtgtttggttttgtgatgtaacgatctttgctggggttttttgctttgttttgagggaaatgtcttggagtaaattttaagttcctggagttaatttgttttacaggaattttgttttttaaaaaaataggatcattctgaactttggaatgacccccttatatattttctgaaaatgaaaacagttacatgaaaaaaatttccaatgaagatgtcagcattttatgaaaaaccagaagttattagatgaaagcagcgagtgaatctttaaaacagacttgatcacgcacacacaataagtctttctctccgaaaccggaagtaaatctatatctgttagaaataatgtagccaaaagaatgtaaatttgaggatttttttgccaatagtttatagaaaatatatgaaccaaagtgatttgagtttgtaaaaatgtaaaatagtatgaacaaaatttgcactctaccagatttgaacatctagtgaggttcacattcatactaagttttcaacattgtgttctttttgcattcattttttacttttattaaaggttcaaaacctctgccgaattcggcacgagcgcacgag

SEQ ID NO: 548816 - DNA, 3164 bp, Homo sapiens
  misc_feature (3038)..(3038): n is a, c, g, or t
  misc_feature (3041)..(3042): n is a, c, g, or t
  misc_feature (3044)..(3044): n is a, c, g, or t
  misc_feature (3047)..(3047): n is a, c, g, or t
  misc_feature (3050)..(3050): n is a, c, g, or t
  misc_feature (3052)..(3053): n is a, c, g, or t
  misc_feature (3061)..(3061): n is a, c, g, or t
  misc_feature (3073)..(3073): n is a, c, g, or t
  misc_feature (3078)..(3078): n is a, c, g, or t
gcggccgcctcaccagaccgcgtgcggacgggctcgcgggcggggcggggcaagctcaggccacgcccctgggcggtgcgcgcgggcggtgggtaggccgggcaggctcacgtgatgcgggccccgcggcccgccatataaacccgcgcgcccgccaggcgctgcggccgtcccgggccgtgactcctcctttcccccgccccgcctccgttcggagagccggcgggcgggcgcctctcggccaggaagcgcctcttggacgcgtgtgaccgatgcccagattgcacgaccacttctggagctgctcctgtgcgcacagcgcgaggcgccgaggccccccgcgagccagcgccgcggggctggcggccaaggttggggagatgatcaacgtttccgtgtccgggccctccctgctggcggcccacggtgccccggacgctgaccccgcgcccaggggccgcagtgctgcgatgagcggccccgagcccggcagcccctaccccaacacctggcatcatcgcctgttgcagaggagcctcgtgctcttctcggttggggtggtcctagccctggtgctcaacctgctgcagatccagaggaatgtcactctcttccccgaggaggtgatcgccaccatcttttcctccgcctggtgggtccctccctgctgcgggacagcagctgctgttgttggcctactgtacccctgtatcgacagtcacctcggagaaccccacaaatttaagagagaatgggccagtgtcatgcgctgcatagcagtttttgttggcattaaccacgccagtgctaaattggattttgccaataatgtccagctgtccttgactttagcagccctatctttgggcctttggtggacatttgatcgttccagaagtggccttgggctggggatcaccatagcttttctagctacgctgatcacgcagtttctcgtgtataatggtgtctatcagtatacatccccagatttcctctatattcgttcttggctcccttgtatatttttctcaggaggcgtcacggtggggaacataggacgacagttagctatgggtgttcctgaaaagccccatagtgattgagtcttcaaaaccaccgattctgagagcaaggaagattttggaagaaaatctgactgtggattatgacaaagattatcttttttcttaagtaatctatttagatcgggctgactgtacaaatgactcctggaaaaaactcttcacctagtctagaatagggaggtggagaatgatgacttaccctgaagtcttcccttgactgcccgcactggcgcctgtctgtgccctggagcattctgcccaggctacgtgggttcaggcaggtggcagcttcccaagtattcgatttcattcatgtgattaaaacaagttgccatatttcaaagccttgaactaagactcaattaccaacccgcagttttgtgtcagtgcccaaaggaggtaggttgatggtgcttaacaaacatgaagtatggtgtaataggaataatatttatccaaaagatttttaaaaatagggctgtgtttaaaaaaaaaaacaaaacaagcacgcttcacggtcacgctcgtccgtcctgcagtggcgtgtttacatggtcacacgtgtgtgtatcaccagtgggtcaactgcttgtcattcctcccgtggcagtttgtgtagacaatcttactgagcaaaaggcaatgaaaagtcttggttcccacactgcgatatattggaattttcacctcagtttatgaagtttatttcgaaatccatagtcatctaagaatgaatacctgtctgccatgtatttcaatcttagtgagccaaaattgtttgtttgttactacagaatagagatgactgttttttgccacagccctatggaatttgcaatctgtgattgccttgtaaaaaggagagtgcatatggcactgcattaaacgtgtggtgtttctagtcaatgatattggtgagcacaatgtattcatttaatggcatagaccataccagacctaatttgcaagtattgggtcttaaacttcaagtgcaatgtatatgaaaaccaatctgagccttgtatctcttaaatatttattttttttaacgtgtgagatgttcgagagaaggttctccattcatttcagtgctgcctggaggaaactcggcaatgatttctttcagttgtgaagttcctttcgtgttacaccctccactgaaccctcaaccttcgaaatactccagttttgtgggtttggtcatttttacttataaatttacctttttgtattttgcaatttacatgtgtttggtttgttttaaattctgtgaaagtggcttgattaaaagactccttttaaatggaagccaccagtcagcagaatggaagcttagaggaacttgcctgtgagcgctggtctttgtgtttggttttgtgatgtaacgatctttgctggggttttttgctttgttttgagggaaatgtcttggagtaaattttaagttcctggagttaatttgttttacaggaattttgttttttaaaaaaataggatcattctgaactttggaatgacccccttatatattttctgaaaatgaaaacagttacatgaaaaaaatttccaatgaagatgtcagcattttatgaaaaaccagaagttattagatgaaagcagcgagtgaatctttaaaacagacttgatcacgcacacacaataagtctttctctccgaaaccggaagtaaatctatatctgttagaaataatgtagccaaaagaatgtaaatttgaggatttttttgccaatagtttatagaaaatatatgaaccaaagtgatttgagtttgtaaaaatgtaaaatagtatgaacaaaatttgcactctaccagatttgaacatctagtgaggttcacattcatactaagttttcaacattgtgttctttttgcattcattttttacttttattaaaggttcaaaaccaaaaaaaaaaaaaaaaaaaaaanatnntntgnggngnntcgggccngaaaaagttttnaaccnttcgttggggcggggccccagtggttgtgcacccgggccaaggtgttcccaaggaaaaccccggccgaaaatggggtggggttccc

SEQ ID NO: 548817 - DNA, 356 bp, Homo sapiens
  misc_feature (55)..(55): n is a, c, g, or t
cggcacgaggtgaatggggacagagtctcatctcgggaagatgaaagggttccgnagatggatggcagtgagggctgcacaccagcgtgagtgtccctaatgcccctgaactgtgcattgaaaaacagtgtacatttaggacagtacattgatgtgatgtgttttttgccccaataaaaagtatgcgactttaaaaaatgtccaatgggttcctggccacagcgatgcaagaggccagtaacggggagactgcaggcatgggggagggctgggcagggggtagagcatcagggaactttctgtactttctgctccattttctataaaccttaaagtgtgttctttaaaaaaaaaaa

SEQ ID NO: 548818 - DNA, 315 bp, Homo sapiens
gaatctcatgagatggagagcattctcaaattatactgagaagtagcctgggcgtgatggctcatgcctgtaatcccaccactttgggaggctgaggcgggtggatcacttgaggtcaggagttcgagactagcctggccaacatggtgaaaccttgtctccactaaaaatacaaaaattagctgggtaaggtggcaggcacctgtaatcccagctactcgggaggctgaggcaggagaatctcatgaatccgggaggtggaggttgcagtgagtggagatcatgccattacactccagcctggcaacagagtga

SEQ ID NO: 548819 - DNA, 3164 bp, Homo sapiens
  misc_feature (3038)..(3038): n is a, c, g, or t
  misc_feature (3041)..(3042): n is a, c, g, or t
  misc_feature (3044)..(3044): n is a, c, g, or t
  misc_feature (3047)..(3047): n is a, c, g, or t
  misc_feature (3050)..(3050): n is a, c, g, or t
  misc_feature (3052)..(3053): n is a, c, g, or t
  misc_feature (3061)..(3061): n is a, c, g, or t
  misc_feature (3073)..(3073): n is a, c, g, or t
  misc_feature (3078)..(3078): n is a, c, g, or t
gcggccgcctcaccagaccgcgtgcggacgggctcgcgggcggggcggggcaagctcaggccacgcccctgggcggtgcgcgcgggcggtgggtaggccgggcaggctcacgtgatgcgggccccgcggcccgccatataaacccgcgcgcccgccaggcgctgcggccgtcccgggccgtgactcctcctttcccccgccccgcctccgttcggagagccggcgggcgggcgcctctcggccaggaagcgcctcttggacgcgtgtgaccgatgcccagattgcacgaccacttctggagctgctcctgtgcgcacagcgcgaggcgccgaggccccccgcgagccagcgccgcggggctggcggccaaggttggggagatgatcaacgtttccgtgtccgggccctccctgctggcggcccacggtgccccggacgctgaccccgcgcccaggggccgcagtgctgcgatgagcggccccgagcccggcagcccctaccccaacacctggcatcatcgcctgttgcagaggagcctcgtgctcttctcggttggggtggtcctagccctggtgctcaacctgctgcagatccagaggaatgtcactctcttccccgaggaggtgatcgccaccatcttttcctccgcctggtgggtccctccctgctgcgggacagcagctgctgttgttggcctactgtacccctgtatcgacagtcacctcggagaaccccacaaatttaagagagaatgggccagtgtcatgcgctgcatagcagtttttgttggcattaaccacgccagtgctaaattggattttgccaataatgtccagctgtccttgactttagcagccctatctttgggcctttggtggacatttgatcgttccagaagtggccttgggctggggatcaccatagcttttctagctacgctgatcacgcagtttctcgtgtataatggtgtctatcagtatacatccccagatttcctctatattcgttcttggctcccttgtatatttttctcaggaggcgtcacggtggggaacataggacgacagttagctatgggtgttcctgaaaagccccatagtgattgagtcttcaaaaccaccgattctgagagcaaggaagattttggaagaaaatctgactgtggattatgacaaagattatcttttttcttaagtaatctatttagatcgggctgactgtacaaatgactcctggaaaaaactcttcacctagtctagaatagggaggtggagaatgatgacttaccctgaagtcttcccttgactgcccgcactggcgcctgtctgtgccctggagcattctgcccaggctacgtgggttcaggcaggtggcagcttcccaagtattcgatttcattcatgtgattaaaacaagttgccatatttcaaagccttgaactaagactcaattaccaacccgcagttttgtgtcagtgcccaaaggaggtaggttgatggtgcttaacaaacatgaagtatggtgtaataggaataatatttatccaaaagatttttaaaaatagggctgtgtttaaaaaaaaaaacaaaacaagaaaagcagcagtgattatagagaggtcacactctaagtggggtcgcggcgtggccacgcttcacggtcacgctcgtccgtcctgcagtggcgtgtttacatggtcacacgtgtgtgtatcaccagtgggtcaactgcttgtcattcctcccgtggcagtttgtgtagacaatcttactgagcaaaaggcaatgagtttatttcgaaatccatagtcatctaagaatgaatacctgtctgccatgtatttcaatcttagtgagccaaaattgtttgtttgttactacagaatagagatgactgttttttgccacagccctatggaatttgcaatctgtgattgccttgtaaaaaggagagtgcatatggcactgcattaaacgtgtggtgtttctagtcaatgatattggtgagcacaatgtattcatttaatggcatagaccataccagacctaatttgcaagtattgggtcttaaacttcaagtgcaatgtatatgaaaaccaatctgagccttgtatctcttaaatatttattttttttaacgtgtgagatgttcgagagaaggttctccattcatttcagtgctgcctggaggaaactcggcaatgatttctttcagttgtgaagttcctttcgtgttacaccctccactgaaccctcaaccttcgaaatactccagttttgtgggtttggtcatttttacttataaatttacctttttgtattttgcaatttacatgtgtttggtttgttttaaattctgtgaaagtggcttgattaaaagactccttttaaatggaagccaccagtcagcagaatggaagcttagaggaacttgcctgtgagcgctggtctttgtgtttggttttgtgatgtaacgatctttgctggggttttttgctttgttttgagggaaatgtcttggagtaaattttaagttcctggagttaatttgttttacaggaattttgttttttaaaaaaataggatcattctgaactttggaatgacccccttatatattttctgaaaatgaaaacagttacatgaaaaaaatttccaatgaagatgtcagcattttatgaaaaaccagaagttattagatgaaagcagcgagtgaatctttaaaacagacttgatcacgcacacacaataagtctttctctccgaaaccggaagtaaatctatatctgttagaaataatgtagccaaaagaatgtaaatttgaggatttttttgccaatagtttatagaaaatatatgaaccaaagtgatttgagtttgtaaaaatgtaaaatagtatgaacaaaatttgcactctaccagatttgaacatctagtgaggttcacattcatactaagttttcaacattgtgttctttttgcattcattttttacttttattaaaggttcaaaaccaaaaaaaaaaaaaaaaaaaaaanatnntntgnggngnntcgggccngaaaaagttttnaaccnttcgttggggcggggccccagtggttgtgcacccgggccaaggtgttcccaaggaaaaccccggccgaaaatggggtggggttccc

SEQ ID NO: 548820 - DNA, 646 bp, Homo sapiens
  misc_feature (517)..(517): n is a, c, g, or t
gcctggccttcatgtctctcctggaggagaagttgctcccggtgctggtacatacttttgggatagacaccaagaagctacgtggaagtgacccgcgaagtggtatgcagaggctatgccctttcccctcgaacttcttcctgcctggccgcatgtcagcggcagtacatggaacggctacgagctgctgacttggggagcacaggcctgaggatcgaggaaggagctggagaaggagctgtagccgacaggctctgggagtgtctgaccctggtctctcagtggcctgggctcttcaataagttcttcttcggacagtgcccctgcctccttggacgctcttcgtcttcagctaacttggcgcctgctgtctgcaagtgcaaagactagatcctatgtggcgaaggcatgcaggtccacctgctggtgtggtctcgatagctaatctcttgtgtcctagttgtatcccatgagttctcatgctcatcatacattcaccctgcggactggaagctgnaggtaccaccgacaaacgccagacaccacggcagggcccagagacgtgacggacggagccagtaccgtggccaggaaccaggaatccataatctgtgctggctgagattgggccagcatggatgggcta

SEQ ID NO: 548821 - DNA, 3291 bp, Homo sapiens
  misc_feature (3165)..(3165): n is a, c, g, or t
  misc_feature (3168)..(3169): n is a, c, g, or t
  misc_feature (3171)..(3171): n is a, c, g, or t
  misc_feature (3174)..(3174): n is a, c, g, or t
  misc_feature (3177)..(3177): n is a, c, g, or t
  misc_feature (3179)..(3180): n is a, c, g, or t
  misc_feature (3188)..(3188): n is a, c, g, or t
  misc_feature (3200)..(3200): n is a, c, g, or t
  misc_feature (3205)..(3205): n is a, c, g, or t
gcggccgcctcaccagaccgcgtgcggacgggctcgcgggcggggcggggcaagctcaggccacgcccctgggcggtgcgcgcgggcggtgggtaggccgggcaggctcacgtgatgcgggccccgcggcccgccatataaacccgcgcgcccgccaggcgctgcggccgtcccgggccgtgactcctcctttcccccgccccgcctccgttcggagagccggcgggcgggcgcctctcggccaggaagcgcctcttggacgcgtgtgaccgatgcccagattgcacgaccacttctggagctgctcctgtgcgcacagcgcgaggcgccgaggccccccgcgagccagcgccgcggggctggcggccaaggttggggagatgatcaacgtttccgtgtccgggccctccctgctggcggcccacggtgccccggacgctgaccccgcgcccaggggccgcagtgctgcgatgagcggccccgagcccggcagcccctaccccaacacctggcatcatcgcctgttgcagaggagcctcgtgctcttctcggttggggtggtcctagccctggtgctcaacctgctgcagatccagaggaatgtcactctcttccccgaggaggtgatcgccaccatcttttcctccgcctggtgggtccctccctgctgcgggacagcagctgctgttgttggcctactgtacccctgtatcgacagtcacctcggagaaccccacaaatttaagagagaatgggccagtgtcatgcgctgcatagcagtttttgttggcattaaccacgccagtgctaaattggattttgccaataatgtccagctgtccttgactttagcagccctatctttgggcctttggtggacatttgatcgttccagaagtggccttgggctggggatcaccatagcttttctagctacgctgatcacgcagtttctcgtgtataatggtgtctatcagtatacatccccagatttcctctatattcgttcttggctcccttgtatatttttctcaggaggcgtcacggtggggaacataggacgacagttagctatgggctgatacccttctgtgaggagttgaatttgaagaccacttggctgtttcacaaaaccagaagtaattacagggtgttcctgaaaagccccatagtgattgagtcttcaaaaccaccgattctgagagcaaggaagattttggaagaaaatctgactgtggattatgacaaagattatcttttttcttaagtaatctatttagatcgggctgactgtacaaatgactcctggaaaaaactcttcacctagtctagaatagggaggtggagaatgatgacttaccctgaagtcttcccttgactgcccgcactggcgcctgtctgtgccctggagcattctgcccaggctacgtgggttcaggcaggtggcagcttcccaagtattcgatttcattcatgtgattaaaacaagttgccatatttcaaagccttgaactaagactcaattaccaacccgcagttttgtgtcagtgcccaaaggaggtaggttgatggtgcttaacaaacatgaagtatggtgtaataggaataatatttatccaaaagatttttaaaaatagggctgtgtttaaaaaaaaaaacaaaacaagaaaagcagcagtgattatagagaggtcacactctaagtggggtcgcggcgtggccacgcttcacggtcacgctcgtccgtcctgcagtggcgtgtttacatggtcacacgtgtgtgtatcaccagtgggtcaactgcttgtcattcctcccgtggcagtttgtgtagacaatcttactgagcaaaaggcaatgaaaagtcttggttcccacactgcgatatattggaattttcacctcagtttatgaagtttatttcgaaatccatagtcatctaagaatgaatacctgtctgccatgtatttcaatcttagtgagccaaaattgtttgtttgttactacagaatagagatgactgttttttgccacagccctatggaatttgcaatctgtgattgccttgtaaaaaggagagtgcatatggcactgcattaaacgtgtggtgtttctagtcaatgatattggtgagcacaatgtattcatttaatggcatagaccataccagacctaatttgcaagtattgggtcttaaacttcaagtgcaatgtatatgaaaaccaatctgagccttgtatctcttaaatatttattttttttaacgtgtgagatgttcgagagaaggttctccattcatttcagtgctgcctggaggaaactcggcaatgatttctttcagttgtgaagttcctttcgtgttacaccctccactgaaccctcaaccttcgaaatactccagttttgtgggtttggtcatttttacttataaatttacctttttgtattttgcaatttacatgtgtttggtttgttttaaattctgtgaaagtggcttgattaaaagactccttttaaatggaagccaccagtcagcagaatggaagcttagaggaacttgcctgtgagcgctggtctttgtgtttggttttgtgatgtaacgatctttgctggggttttttgctttgttttgagggaaatgtcttggagtaaattttaagttcctggagttaatttgttttacaggaattttgttttttaaaaaaataggatcattctgaactttggaatgacccccttatatattttctgaaaatgaaaacagttacatgaaaaaaatttccaatgaagatgtcagcattttatgaaaaaccagaagttattagatgaaagcagcgagtgaatctttaaaacagacttgatcacgcacacacaataagtctttctctccgaaaccggaagtaaatctatatctgttagaaataatgtagccaaaagaatgtaaatttgaggatttttttgccaatagtttatagaaaatatatgaaccaaagtgatttgagtttgtaaaaatgtaaaatagtatgaacaaaatttgcactctaccagatttgaacatctagtgaggttcacattcatactaagttttcaacattgtgttctttttgcattcattttttacttttattaaaggttcaaaaccaaaaaaaaaaaaaaaaaaaaaanatnntntgnggngnntcgggccngaaaaagttttnaaccnttcgttggggcggggccccagtggttgtgcacccgggccaaggtgttcccaaggaaaaccccggccgaaaatggggtggggttccc

SEQ ID NO: 548822 - DNA, 2724 bp, Homo sapiens
gcggccgcctcaccagaccgcgtgcggacgggctcgcgggcggggcggggcaagctcaggccacgcccctgggcggtgcgcgcgggcggtgggtaggccgggcaggctcacgtgatgcgggccccgcggcccgccatataaacccgcgcgcccgccaggcgctgcggccgtcccgggccgtgactcctcctttcccccgccccgcctccgttcggagagccggcgggcgggcgcctctcggccaggaagcgcctcttggacgcgtgtgaccgatgcccagattgcacgaccacttctggagctgctcctgtgcgcacagcgcgaggcgccgaggccccccgcgagccagcgccgcggggctggcggccaaggttggggagatgatcaacgtttccgtgtccgggccctccctgctggcggcccacggtgccccggacgctgaccccgcgcccaggggccgcagtgctgcgatgagcggccccgagcccggcagcccctaccccaacacctggcatcatcgcctgttgcagaggagcctcgtgctcttctcggttggggtggtcctagccctggtgctcaacctgctgcagatccagaggaatgtcactctcttccccgaggaggtgatcgccaccatcttttcctccgcctggtgggtccctccctgctgcgggacagcagctgctgttgttggcctactgtacccctgtatcgacagtcacctcggagaaccccacaaatttaagagagaatgggccagtgtcatgcgctgcatagcagtttttgttggcattaaccacgccagtgctaaattggattttgccaataatgtccagctgtccttgactttagcagccctatctttgggcctttggtggacatttgatcgttccagaagtggccttgggctggggatcaccatagcttttctagctacgctgatcacgcagtttctcgtgtataatggtgtctatcagtatacatccccagatttcctctatattcgttcttggctcccttgtatatttttctcaggaggcgtcacggtggggaacataggacgacagttagctatgggtgttcctgaaaagccccatagtgattgagtcttcaaaaccaccgattctgagagcaaggaagattttggaagaaaatctgactgtggattatgacaaagattatcttttttcttaagtaatctatttagatcgggctgactgtacaaatgactcctggaaaaaactcttcacctagtctagaatagggaggtggagaatgatgacttaccctgaagtcttcccttgactgcccgcactggcgcctgtctgtgccctggagcattctgcccaggctacgtgggttcaggcaggtggcagcttcccaagtattcgatttcattcatgtgattaaaacaagttgccatatttcaaagccttgaactaagactcaattaccaacccgcagttttgtgtcagtgcccaaaggaggtaggttgatggtgcttaacaaacatgaagtatggtgtaataggaataatatttatccaaaagatttttaaaaatagggctgtgtttaaaaaaaaaaacaaaacaagaaaagcagcagtgattatagagaggtcacactctaagtggggtcgcggcgtggccacgcttcacggtcacgctcgtccgtcctgcagtggcgtgtttacatggtcacacgtgtgtgtatcaccagtgggtcaactgcttgtcattcctcccgtggcagtttgtgtagacaatcttactgagcaaaaggcaatgaaaagtcttggttcccacactgcgatatattggaattttcacctcagtttatgaagtttatttcgaaatccatagtcatctaagaatgaatacctgtctgccatgtatttcaatcttagtgagccaaaattgtttgtttgttactacagaatagagatgactgttttttgccacagccctatggaatttgcaatctgtgattgccttgtaaaaaggagagtgcatatggcactgcattaaacgtgtggtgtttctagtcaatgatattggtgagcacaatgtattcatttaatggcatagaccataccagacctaatttgcaagtattgggtcttaaacttcaagtgcaatgtatatgaaaaccaatctgagccttgtatctcttaaatatttattttttttaacgtgtgagatgttcgagagaaggttctccattcatttcagtgctgcctggaggaaactcggcaatgatttctttcagttgtgaagttcctttcgtgttacaccctccactgaaccctcaaccttcgaaatactccagttttgtgggtttggtcatttttacttataaatttacctttttgtattttgcaatttacatgtgtttggtttgttttaaattctgtgaaagtggcttgattaaaagactccttttaaatggaagccaccagtcagcagaatggaagcttagaggaacttgcctgtgagcgctggtctttgtgtttggttttgtgatgtaacgatctttgctggggttttttgctttgttttgagggaaatgtcttggagtaaattttaagttcctggagttaatttgttttacaggaattttgttttttaaaaaaataggatcattctgaactttggaatgacccccttatatattttctgaaaatgaaaacagttacatgtttccaatggatgtcagcattttatg

SEQ ID NO: 548823 - DNA, 111 bp, Homo sapiens
atggcatctctgcgctacgtggtctacatgtacgctccttcccctatcatagcaagagcttatcacctttcatgtgtcacgccctcataatcatttctccttatctgcttc

SEQ ID NO: 548824 - DNA, 3164 bp, Homo sapiens
  misc_feature (3038)..(3038): n is a, c, g, or t
  misc_feature (3041)..(3042): n is a, c, g, or t
  misc_feature (3044)..(3044): n is a, c, g, or t
  misc_feature (3047)..(3047): n is a, c, g, or t
  misc_feature (3050)..(3050): n is a, c, g, or t
  misc_feature (3052)..(3053): n is a, c, g, or t
  misc_feature (3061)..(3061): n is a, c, g, or t
  misc_feature (3073)..(3073): n is a, c, g, or t
  misc_feature (3078)..(3078): n is a, c, g, or t
gcggccgcctcaccagaccgcgtgcggacgggctcgcgggcggggcggggcaagctcaggccacgcccctgggcggtgcgcgcgggcggtgggtaggccgggcaggctcacgtgatgcgggccccgcggcccgccatataaacccgcgcgcccgccaggcgctgcggccgtcccgggccgtgactcctcctttcccccgccccgcctccgttcggagagccggcgggcgggcgcctctcggccaggaagcgcctcttggacgcgtgtgaccgatgcccagattgcacgaccacttctggagctgctcctgtgcgcacagcgcgaggcgccgaggccccccgcgagccagcgccgcggggctggcggccaaggttggggagatgatcaacgtttccgtgtccgggccctccctgctggcggcccacggtgccccggacgctgaccccgcgcccaggggccgcagtgctgcgatgagcggccccgagcccggcagcccctaccccaacacctggcatcatcgcctgttgcagaggagcctcgtgctcttctcggttggggtggtcctagccctggtgctcaacctgctgcagatccagaggaatgtcactctcttccccgaggaggtgatcgccaccatcttttcctccgcctggtgggtccctccctgctgcgggacagcagctgctgttgttggcctactgtacccctgtatcgacagtcacctcggagaaccccacaaatttaagagagaatgggccagtgtcatgcgctgcatagcagtttttgttggcattaaccacgccagtgctaaattggattttgccaataatgtccagctgtccttgactttagcagccctatctttgggcctttggtggacatttgatcgttccagaagtggccttgggctggggatcaccatagcttttctagctacgctgatcacgcagtttctcgtgtataatggtgtctatcagtatacatccccagatttcctctatattcgttcttggctcccttgtatatttttctcaggaggcgtcacggtggggaacataggacgacagttagctatgggtgttcctgaaaagccccatagtgattgagtcttcaaaaccaccgattctgagagcaaggaagattttggaagaaaatctgactgtggattatgacaaagattatcttttttcttaagtaatctatttagatcgggctgactgtacaaatgactcctggaaaaaactcttcacctagtctagaatagggaggtggagaatgatgacttaccctgaagtcttcccttgactgcccgcactggcgcctgtctgtgccctggagcattctgcccaggctacgtgggttcaggcaggtggcagcttcccaagtattcgatttcattcatgtgattaaaacaagttgccatatttcaaagccttgaactaagactcaattaccaacccgcagttttgtgtcagtgcccaaaggaggtaggttgatggtgcttaacaaacatgaagtatggtgtaataggaataatatttatccaaaagatttttaaaaatagggctgtgtttaaaaaaaaaaacaaaacaagaaaagcagcagtgattatagagaggtcacactctaagtggggtcgcggcgtggccacgcttcacggtcacgctcgtccgtcctgcagtggcgtgtttacatggtcacacgtgtgtgtatcaccagtgggtcaactgcttgtcattcctcccgtggcagtttgtgtagacaatcttactgagcaaaaggcaatgaaaagtcttggttcccacactgcgatatattggaattttcacctcagtttatgaagtttatttcgaaatccatagtcatctaagaatgaatacctgtctgccatgtatttcaatcttagtgagccaaaattgtttgtttgttactacagaatagagatgactgttttttgccacagccctatggaatttgcaatctgtgattgccttgtatattggtgagcacaatgtattcatttaatggcatagaccataccagacctaatttgcaagtattgggtcttaaacttcaagtgcaatgtatatgaaaaccaatctgagccttgtatctcttaaatatttattttttttaacgtgtgagatgttcgagagaaggttctccattcatttcagtgctgcctggaggaaactcggcaatgatttctttcagttgtgaagttcctttcgtgttacaccctccactgaaccctcaaccttcgaaatactccagttttgtgggtttggtcatttttacttataaatttacctttttgtattttgcaatttacatgtgtttggtttgttttaaattctgtgaaagtggcttgattaaaagactccttttaaatggaagccaccagtcagcagaatggaagcttagaggaacttgcctgtgagcgctggtctttgtgtttggttttgtgatgtaacgatctttgctggggttttttgctttgttttgagggaaatgtcttggagtaaattttaagttcctggagttaatttgttttacaggaattttgttttttaaaaaaataggatcattctgaactttggaatgacccccttatatattttctgaaaatgaaaacagttacatgaaaaaaatttccaatgaagatgtcagcattttatgaaaaaccagaagttattagatgaaagcagcgagtgaatctttaaaacagacttgatcacgcacacacaataagtctttctctccgaaaccggaagtaaatctatatctgttagaaataatgtagccaaaagaatgtaaatttgaggatttttttgccaatagtttatagaaaatatatgaaccaaagtgatttgagtttgtaaaaatgtaaaatagtatgaacaaaatttgcactctaccagatttgaacatctagtgaggttcacattcatactaagttttcaacattgtgttctttttgcattcattttttacttttattaaaggttcaaaaccaaaaaaaaaaaaaaaaaaaaaanatnntntgnggngnntcgggccngaaaaagttttnaaccnttcgttggggcggggccccagtggttgtgcacccgggccaaggtgttcccaaggaaaaccccggccgaaaatggggtggggttccc

SEQ ID NO: 548825 - DNA, 869 bp, Homo sapiens
actcccggagtaggtagttcgtagggccgggttctggggtcgtgcttctctttacttgtccactctaggccacgatgccgcagtaccagatctgggaggagttcagtcgcgcgtgccgagaggctttacctcgcggaccctatgagggacaagtgtggtatctcaatgtataggacattctgatgggaagttgtgtgttcaagtgacaggtgaatgaattggtgtggggtgtataagcagagagagacgcgagatgtggagaagatggagaaatttgtcggagaagactaatgagagctgaatggtaggtcagggaaggcacgcaggtaaggcatggaatggagagtggaatggattggttgttgagaggaaaggaacgaccgtgtgcggtgtgacgtgtagagaaaggtattctagtacttcagaatataagagtagtggtgtggggacagaaagtatgttggagtgtaactaagtgggcatgtgccagtaagccttagaggtcaagagtgtgattctcctttgacagttacttgtagagagctagggatgcagaatgttagcagttagaaggagcctctatctgcctgtgggcagatgacccagcaaactgcatctgtccttgagcaaacggagattattcggatgtcaggtacgcccatgtcatcgtcgttctggcaacttgtatcaggcacattttgcaaggagcatcttagggaaaaccaaatctctcaaagggcggcatcctttcatgaacgacctaactgtgccacttgtcgacgcacgcattgggcagacacgttgcggggcgacacacatcacactcggagttccccccagatcgcggcaagcgggccacgtgtgaggaa

SEQ ID NO: 548826 - DNA, 565 bp, Homo sapiens
  misc_feature (200)..(200): n is a, c, g, or t
  misc_feature (214)..(214): n is a, c, g, or t
  misc_feature (223)..(223): n is a, c, g, or t
  misc_feature (239)..(239): n is a, c, g, or t
  misc_feature (272)..(272): n is a, c, g, or t
  misc_feature (279)..(279): n is a, c, g, or t
  misc_feature (300)..(300): n is a, c, g, or t
  misc_feature (352)..(352): n is a, c, g, or t
  misc_feature (399)..(399): n is a, c, g, or t
  misc_feature (429)..(429): n is a, c, g, or t
  misc_feature (437)..(437): n is a, c, g, or t
  misc_feature (443)..(443): n is a, c, g, or t
  misc_feature (473)..(473): n is a, c, g, or t
  misc_feature (551)..(551): n is a, c, g, or t
gccgcggccgggccccgccctggggccgctccccgcgggttccgttggctgtggcggcagctgacgcttgtggcggcggtggcttcggggtgggcgtaagatggcgacacagcgcagggacccctaagcttgctgtggggctggctgtggagcgagcgcttctggctacccgagaacgtgagctgggctgatctggaggngccggccgacggcnacggttacncccgcggccggcacancctctcggtgttcccgctggcggcgggcatctncttcgtnaggctgctcttcgagcgattnattgccaaaccctgtgcactccgtattggcatcgaggacagtggtccttatnaggtccctaactccaatgccatccttgaaaaggtgttcatatctatnaccaagtatcctgataagaaaaggctgganggcctgtnacacanacagctggattggaatgtccgaaacacacnccacactgctggtttcgcacactccggacggaacttcacggacaacgccccccaaccgccttacctaagactttctgntgaaacgcactgtg

SEQ ID NO: 548827 - DNA, 249 bp, Homo sapiens
  misc_feature (192)..(192): n is a, c, g, or t
ccaaggaggtattgaggggtaagagagagctcttgtccagaagatagtatttctagtctgtaattattcataaccttcaagattacatttagcccttaccttcctggtgacatcttaaaattccctagaacatcagtcacagaattccaaatgcattctgacaccagagattttgtctaacttacacttgtnaacttcatagctacttctctattgagtggtaaatttcatttctaataatggaagagg

SEQ ID NO: 548828 - DNA, 889 bp, Homo sapiens
  misc_feature (413)..(413): n is a, c, g, or t
agcgggtgggccttactgctatggtgccaagcaaaaaaaaaaaaaaaaaaaaaaaaaaaaaaaaaaaaacaacccttttttggtcttttttacaatatttggcaaataaatcagggattgaaaccccctaggggggggtcccgggacccgggaagggggttttctgtactccaagaacagaattaaaagcgagcgagcatttgggtttcccaagcccttcccccttcttttcgtggttccctcggggggcccctcaaccttaagagaaatgaattcgtgtgcacctatacctcaccatacgtgctgtaagcttcactcagtgaacaccggcaccgtgaaaacttggaaccctttttcacactgggtggaacattttctttaaatatttttttccccctaaggtaagaagacgngggggtccgccacttacatgttggctgtcaggggcaatagtctcttcgagacacatccgcgggcttctctcaccagcgaaatctcccttccttcttacaccttagaggagcttccttccccaaaagagtggcgtgggcgattacacgggggtttacaaccaccccgggaggatccaaccccccgcaacccccccggtttttattattttctgtgtctttttttcaaaaaaagaaagagtgtggaggcctccccccaaagatgggttgccccccagagggtggtgggcccttagagaaccccccatagagcggctgaaagagaggagcattttctcccccgaacactcctaccgcctcccgtggagttaatgcctcgaacatataacccgggcttggtggcccccccacaccccagggtgggtgaaaactccctttttaaaacgtggctccagaattaggaaattataaaaaccctt

SEQ ID NO: 548829 - DNA, 396 bp, Homo sapiens
agctctaatttcttttgactgcggggtgacggcgctggatggcgcaaccggccgcaccgtgtggcaaggcaaggcggatgtcgatctgacctccggcccgggaagcgacggcacactgacggccgtggctggtgagaagggcaccgtcgtcgcgttcgacgagaagggcgcgcagaagtggaagagcaccgtcaacggtgaagtcctgaccgctccgctggtcggccagggcctggtgattgtgcgtacgaccgatggccgcatccttggcttggatggcagcaatggcgatcgcaagtggatctatcaacgctcgccgtcggcactgaacctgcgtagcagcctgccgatgatctttgccggtgacaatgtcatcctgggctttgccggtggcaa

SEQ ID NO: 548830 - DNA, 1404 bp, Homo sapiens
gcacgactaactgctacgtgacgctatcagctagagtgacccaagtgagcgccgtgcgcgatctacagctacagaccatacatgtgcacgcaccctacggcatctacaggcatgcctttgaggatggcttcgacaactgtgatgctggctggctctctgaccgcactgttcggtatcctatcacccagtcccgtcctggttgctatggcgaccgtagcagccttccaggggcttcggagctatgcggaggcgcaacccacaggaactctacgatgtgctatagcatttgcccgggcagactggggggcgaggtctctctacgctgggcccggcccgccgcctgacactggccggcgcgcgctgcacacgtgccgaccgccagggctgccgacgacttggcctcggctgggcacagactagcacactggcactggcctgcagggcctggaccacctgcgacccgggcctggctggccgacggcaagcgtgcgcataccacgcatccagcaccgccgacgccggccgctgcgagagcgcccagccccggcgccgctgccgcacccgcactaccgacctccgcctacacccggaccaggcctctcccacatcaccacgaccgacgcgcttcgaccgccctacctgctctcccgcagcctcactccacccccacgctcacacaccatggagcaccctagcagaccccaatcactcacgcggactcgaccggccacacactcccgcatccaccacaagggaccccaagcacacgaccactcggagccccccaccccggcgaacgcaccgcacagcaggacgcgacaaccccctgactttcccaacgagcaccccggcactgtccccccgccaggacggcacacacccccatggcaacccagccaccgacacaccacgcactacacaaacacaacccctcaacccacacacccgcagagcaccccacgacaggcaccccacacagcacacatcgccgcaccccgtagcgacccaaccacagtcagtcaccccacagcccacagccaacctagcgaccagccacaccaccacacctacacaccccgcgccgcgtcccccaccaaccacacgccccacaccaacgcccacctccaccccgacacaccggaccaccacaccagcacaccccgcacccggcaccaacgagcacatcaccacaccacacaccaacgccgcaacacacgataccaacacacccaccaacgacacaccagccccagccacgcacaaccacacaccacagcccacccccgccccaccccagcccagctagcgcgcacggtaccaactaccatactccgcccagacacccagccccacgaccacgcagcccccctaaccaccaaccacaccaccccccacacacctcct

SEQ ID NO: 548831 - DNA, 978 bp, Homo sapiens
  misc_feature (231)..(231): n is a, c, g, or t
  misc_feature (281)..(281): n is a, c, g, or t
gcttctcatagaagtcgaccaggacttgcttgcattggatgtgagattcacccggtaaatggtgaggaaaggcatagaaccaccaggctgcatgtgcgatgcggaactgcatccggatcatcgatcttgtccaacaatcgtaatcgtccgttgtggcgttggtcttctagagagatggattcatagtcagaagttatggatggtcataggtatctagtggcaatgtgggancgaattggaagattaggtgtgcttaaagcgaggatttgatggtctgattngtgtgtatcgaggcaaagtaatcaagtggcagttgaatctgacgaaatgagtctatggatgcgcctagagttgatgattggcactgagatttgagtatgctgtagtgctagtcgtaatgtttcaatgtcataggcactcgttctatggtggtgaatggatcgtggtgagggccaaaggtgcaaccgtcaagaatacgaagggagagataaaaggttctattcgagtagataaggggtatattataggtccatgatcagagatgattgtgcatcgtgtatgggtatcgtggggaaggatcgtttcgaatgtgtgtttggtgagtgagagtgaattggattgaactgcgagcgggtagatagcatggatggatggactattgctggtcgtatgtgatgcgacatgatgaatggatcgtgggagaccggtgagggctgagactctaggttgtccccttgggtgcccttgcggtctggtagaacacaaggggcggcgagttcaccggacggcgcaaagggcgtgggcggaaaaacgcactcgtcccagcgcgaggcttgagtgttaccaagggccactgagggcaaacgtgaccacgtggggcattcaccgacacgcttctatcccacaacagaagaaccaacctgtgcgagatcacacaacacacagagccaagaggcaccatgcctgtatcaattcggg

SEQ ID NO: 548832 - DNA, 182 bp, Homo sapiens
ggacccctcacggatacctcagtatactgaaaatccgaagatggcagcaagggagagtgtgaatgaagtgtgggtaagaaagataaagggaaaaattgtttttaagaaagttgaaactaagataaattatcctgtatcaatgtaccttggtctctcataatttagacattggcacttatttt

SEQ ID NO: 548833 - DNA, 732 bp, Homo sapiens
  misc_feature (1)..(1): n is a, c, g, or t
  misc_feature (16)..(17): n is a, c, g, or t
  misc_feature (62)..(62): n is a, c, g, or t
  misc_feature (86)..(86): n is a, c, g, or t
  misc_feature (166)..(166): n is a, c, g, or t
  misc_feature (174)..(174): n is a, c, g, or t
  misc_feature (278)..(278): n is a, c, g, or t
  misc_feature (290)..(290): n is a, c, g, or t
nccgggctggaggaanncggctcgagacaccagtgacacacacctttcacacacaccagcanacacggaacatttgagggactttnaggcaacccacagacagcacacacaagagacaccggcacacagaacacacccacacaggagcagcacacaccacacaccngcacacancacaacacacacaccacacacccgcagacacagagcaacacacacagcaacacacgacaaacaacccacacacaggacagcggacacaccagacacacacaccnaacacacagcanacactacacacctgcacacatcacaaccgccacacatgacacagtgtacacatacatgacaacacatacatcacacacaatacccacacatcacacaccacctatacacaccacacaacactgacacatgacacaccatatatatcgcataagcacacacatgacatgccacacacattcatcacatgccacacacatcacagcatgcacacacacacacatatgataacccgtacacataacagaccacatacacaccatacacacaggactccacacgttacaaaccacacatatgacacatacacccccacagacatacgacatcacacacgcattacgtagcgcgcgcgcgtgcgcgcgcgcgcacacaacaacacacacgcggacacatccgtccaaaagccggaaaggtttcatcaggtacccatattggttcggt

SEQ ID NO: 548834 - DNA, 477 bp, Homo sapiens
  misc_feature (18)..(18): n is a, c, g, or t
  misc_feature (23)..(23): n is a, c, g, or t
  misc_feature (27)..(27): n is a, c, g, or t
  misc_feature (73)..(73): n is a, c, g, or t
  misc_feature (89)..(89): n is a, c, g, or t
  misc_feature (93)..(93): n is a, c, g, or t
  misc_feature (107)..(107): n is a, c, g, or t
  misc_feature (112)..(112): n is a, c, g, or t
  misc_feature (117)..(117): n is a, c, g, or t
  misc_feature (127)..(127): n is a, c, g, or t
  misc_feature (156)..(156): n is a, c, g, or t
  misc_feature (178)..(178): n is a, c, g, or t
  misc_feature (410)..(410): n is a, c, g, or t
acctgggtgcaccttggnagcgncagncctaccactgcacctctgcccctcttttacctcagacgacctcagntcctggaggccctggnccanccattcacggatgncaagnacggnctttcacctnacaggcactaccatgtaaaacattgctgnccgtggtgttctcctacatagnccactctgctctacgtgggtccatggggtgttctctttaatcagatgggaagtcttcataaagccgcagtagaacttgagctgaaaacccagatggtgttaactgggccgccccactttccgggcataactttttagaaaacagaaatgcccttgatggtgggaaaaaagaaaacaaccacccccccactgcccaaaaaaaaaagccctgccctgttgctcgtgggtgctgngtttactcttccgtgtgcctttgcgtccgggttgggagctttctgtgtctaaccttcaactgctgtg

SEQ ID NO: 548835 - DNA, 497 bp, Homo sapiens
ctccataatgtgtgcccagccgggtgtgatgggacatccctatagtcctagctactcaggaggctgaggcaggaggataccttgagtgacctacgatcgtgccactgcactccggcctgggtggcagagaaggtgcctgtctcttaaaaagaagaaaaatgacggccaggcgtggtggctcacacctataatcctagccctttgggaggccaaggcaggcggatcacctgaggtcaggagtttgaaaccagcttggctaacatggcgaaacctcatctctactaaacatagaaaaattagctgggcacgtggtgcatgcctgtaattccagccactcggaaggctgaggcatgagaatcgcttgaacccgggaggcagacgttgcagtcagtcgagatcaggccactgcactccggcctgggtgacagagcaagactctgtctcaaaaaataaaaataggctgggtgcagtggctcaagcctgtaatcccagcactt

SEQ ID NO: 548836 - DNA, 442 bp, Homo sapiens
cggcagacggaacttaagcgcaaattttgaacagataaacaatgatagtgatcaccagataccagggtgttaatctttatgtgaaaaagtcttggtgatggtattgattgtgaactgtctccggcaaagagttttctccatattggtacaatcactatgtgcaaacggttatgattggacgggtggtcgcatgcaaagtgttttgcgttttgtagtgttgtctcctccccagtaataagccactataagcagttacagaaacttaactggtagaatgtgtggccacaagagccattgtatgtatgctttaggctcagtcgcaaaggaatagcgccaggctcacctacactaaaccagtatatgcgagagaattggcaatgtgtacgaagctgttcccataccctgtatatctatccccgtaccagtccatgcactctccttt

SEQ ID NO: 548837 - DNA, 128 bp, Homo sapiens
aggactcacggttcctgtggactgctcacctagtggcaataggctccagagctcctgagacgtccctagctcctggcttggagccctgctactgccatgccctgagcaccagaggaaggccattagac

SEQ ID NO: 548838 - DNA, 217 bp, Homo sapiens
aacgccctggagccaattttcaagaaaggattttccaaaggataatatttttctaataaatgcggctgcaacctcgtgcgcattcaattaaataggccaaatttttgctgtttaggtcatttccaggcttacacttgagctgtgtgcccagagatcatgcatttagatttatattttggccagaaaattcaaggttataatatatctaagaactacc

SEQ ID NO: 548839 - DNA, 798 bp, Homo sapiens
tcgataatggcccattggggcaaaaagcctggttagcgggggcgggcctcctaggtgaaaggagggtggatggaatataagggtgttagtcatgttagccttgtttcaggtgcgaaatagtagtagggctcggtgggtgcgtggagttattaagttggagttagtaggacatgcgggtagatagtttaggaataattataaattagtttacaattaagaaagtggtatatgttaaggtgttgtcacgtgctaaacacgtgcttattatttcactccttagtgtgtggtgtacatgtgcaggagttatggcttaagagatttggcgatagcgtgggtttgtggttaaactccaccttcaactgtgcctgtgctagtgagtggaataagattgagaagattgaggagaaaggctttacgttaaggtgagggagaaaattggcgtatatgatggagatgggggctagttttggctcagtttgagaaagaagcaggccggatgtcagaggggtgcctgggggtaacctcggggactcagaaagtgaacggggggctatccctagtttaatggctatagccattatgattataacggatgagaatggatggacagcatggaagggccatggaccggagagaaaactggtcgaagaaggatgcaatagcaggcaacgacggcggagcagccggagacaaccgagggcgtacgggaacaggggctatccggcaaacggaaacgcacgacgaaatcaggccacccgtaaactggcctagcggaacgtgcgcatgcaaaaacagccg

SEQ ID NO: 548840 - DNA, 1195 bp, Homo sapiens
agcggggtcttgctgagcgcaaggcggtggagtgcctgaggcctgagtgcctggggctggggtgggctggccgggctggctgttggcctcgcgccttcccctgctgtgtctgcgctgggctccgcgggcggtatcggagtgtcgtgcggcgctgtggcgggtgaacgcgcattgtcggagtgactgggccctgcggaacgaggaggtgcggccaggcgcatggggagccctcgggagcgggcccggcctacagcgaccggccccggccgtgtcccgggaggatgcgggctgcggccggccggcgcggagaggaaggcacccagggcattgtggacataatgctcatagtgtggcgatagtgcttagggcccattacttgggggcatgccatgcgagagcaccaagggaggctccgcaaggggacattgtcttcccattaaattccatgcgatggggagtgccaaacctaggtgcgggaaccctggggctaacagcacacgtaccgttacttgtgccatgggcaccttggtttccaaggccttgtaccttgggacttgaaacggcgggcgacgggggtccgaccaggacgataacgcctattccaattgggaaggctgcgttctagcacaaggcccccacgaaggcaaggggatccacatgaagccttcaattggggcccgaagggacccgcttggaaaattccgcttcgtacccgtaggcccccccgaagtgacaccattgggccacgcgccaaggtttccacttgtcatgccagaaggcacaagcggggaatccagagttggccttgcagtaggcattagaagcccaatgatagccgcgcaacagcttggagaggacggggcccgaagcggactttaaattcaagcgggcgcccccttgggaaacacaagaagggggaaccaactttcgaaggtgcgcaccaaagggcgtacccacagcaaaccgcgcagggtgccatcaccggggacagggcttggtgcacggggaaagactgttcaatatatagtatatcaaaggtagggccaaacaccatttatcggcactactatgaaaaggaacaattgtgggcccggagaaggaattacagacagaggtcagcattggtccggtcggccaaagtcgcccctgggggcgcattgtgcattgggggaggtggttctttgagggagaagcg

SEQ ID NO: 548841 - DNA, 330 bp, Homo sapiens
  misc_feature (302)..(302): n is a, c, g, or t
  misc_feature (316)..(316): n is a, c, g, or t
aaaaatgcaaagtctaatagcagaatggatcaagcagaagacaaaattagtgaacttgaagacagctatttgaaaactttagaatttctgttttttttttgtttatttcaatatttttaatttatctgatagcattctgaattccttctctgtgttttcttgaatttctttgagttttctcaaagcagctattttgaattctctttctggaaagaaggtcaccatatctctttcttcagggcttggcctcctgggtgcccttatttgagttccatttagtgagggccatgtttttccagggngggtgtttgatgcnttgtggggaaaccc

SEQ ID NO: 548842 - DNA, 140 bp, Homo sapiens
gggatccccgtcagccatggtgatgcgactgtcgagtgcgttcgtagttctgagttggctaagtcagaatagtaatgaggatgtcagtccgtgcgcgactaatacgattatgactgcgccgtgtaaagcttacagtgggg

SEQ ID NO: 548843 - DNA, 552 bp, Homo sapiens
  misc_feature (15)..(15): n is a, c, g, or t
  misc_feature (62)..(62): n is a, c, g, or t
  misc_feature (65)..(66): n is a, c, g, or t
  misc_feature (93)..(93): n is a, c, g, or t
  misc_feature (95)..(96): n is a, c, g, or t
  misc_feature (143)..(143): n is a, c, g, or t
  misc_feature (147)..(147): n is a, c, g, or t
  misc_feature (161)..(161): n is a, c, g, or t
  misc_feature (176)..(176): n is a, c, g, or t
  misc_feature (179)..(179): n is a, c, g, or t
  misc_feature (187)..(187): n is a, c, g, or t
  misc_feature (210)..(210): n is a, c, g, or t
  misc_feature (250)..(250): n is a, c, g, or t
  misc_feature (263)..(263): n is a, c, g, or t
  misc_feature (272)..(272): n is a, c, g, or t
  misc_feature (279)..(279): n is a, c, g, or t
  misc_feature (281)..(281): n is a, c, g, or t
  misc_feature (286)..(286): n is a, c, g, or t
  misc_feature (292)..(292): n is a, c, g, or t
  misc_feature (304)..(304): n is a, c, g, or t
  misc_feature (318)..(318): n is a, c, g, or t
  misc_feature (336)..(336): n is a, c, g, or t
  misc_feature (350)..(351): n is a, c, g, or t
  misc_feature (400)..(400): n is a, c, g, or t
  misc_feature (425)..(425): n is a, c, g, or t
  misc_feature (431)..(431): n is a, c, g, or t
  misc_feature (434)..(434): n is a, c, g, or t
  misc_feature (445)..(445): n is a, c, g, or t
  misc_feature (475)..(475): n is a, c, g, or t
  misc_feature (507)..(507): n is a, c, g, or t
taaaaagaagcagcnttttcatgaaatgcttggaggtgaacgagttctcagcatgtgagagncgnncatcccattgactttgaagtgtctctngnntaatagaagaaaaaaggggagggtgaagaaaaggaggaacatgctanaaancttatgagaattangcaaatgtgagggangancaaccgantgagcaactccactttttctatntgacaactttctacatctgactgttgattttggccgttgnctggctgaaagancgtgggagngcctagngnccctnagaagngcgctggttctncaaaagagagaggnggagaagccctgcaggangcgctgaccacttnncagagaactgagagtgcgtgctcccaaaagtttgaaccaacagcctaangtgaaaagaaactgcacttaaaggnaaaggnggnaatggtgatgnactgggcttatgtgagaatgtgtatatgtncataacagagcgccagaatctttctctcagtnacagcctcaggcaaaccacgtgctggttggtgggtgctgcaggga

SEQ ID NO: 548844 - DNA, 267 bp, Homo sapiens
aaggtactataggagaacttatacaaatatacaataaatagactatcccctcaccaagtgggcaacggatacgatcagacacttcccaaaatgaagacatttatgcggccaacagacgcatgatacagtgcgggtcatcactggtcatcagcataaatgcaatctaatacacaatgagataccatctcatgccagttagaatggcgatcattaaaaagtcaggaatcaacaggtgctggagaggatgtggagaagtaggaatgcttt

SEQ ID NO: 548845 - DNA, 357 bp, Homo sapiens
gcgggcgatgtcatagtatgggtcatcccacttcaggtgtgtgacaagttccggggagctgcttttggagtcatctgaggaacacagcagggtcaggggacaagccaggggctggcaccatgctctgccccacagcatgctgtctggcccttcccccagtaaggcccatgctcccagcccaaacctgggactggtctgccccatcctgccctcctggcgtctcccttcagcagaaggagtgcttccccctctaaagcgcctgtagctgcctgagaccagacacaagcccacctgacttggggaggtcaggcatttaatccgagggccagttcttctcatcgatggaggcgagcttca

SEQ ID NO: 548846 - DNA, 316 bp, Homo sapiens
  misc_feature (14)..(14): n is a, c, g, or t
  misc_feature (168)..(169): n is a, c, g, or t
  misc_feature (278)..(278): n is a, c, g, or t
tatgtaagtcaganacttgtatctacataaagacaaaaacagcattagaggctaggcaggatggctcatgcctgtaatcccagcattttgggaggccgaggtgggaggatcacttgaggatgggaattggagaccagtctgggcagcagagcaaggcctcatctttannaaaataattagctgggcctggtggcatgcacctgtattcccagctaccgagaaggctgaagtgggaggatcacttgagcccaagaggttgaggctgaagttagctatgntcgtacactgcactccagttaggcaacagagcaagatc

SEQ ID NO: 548847 - DNA, 280 bp, Homo sapiens
gaaccccggtgcgggccctttccgcagcagcaacagcaacagcttatcaaaaaaaaaagcgagatacccgaaagtgcggttttaaaaaggatgtgtttcacccctccaaaagagaaagagctcatggagcgccttaagaagctctcagtgccaaccagtgatgaggaggatgaagtacccgccccaaaaccccgcgtggggaagaaaaccaagggtggtaatgtttttgcagccctgattcaggatcagagtgaggaagaggaggaggaagaaaaacatc

SEQ ID NO: 548848 - DNA, 598 bp, Homo sapiens
  misc_feature (149)..(149): n is a, c, g, or t
agcggaagcaccggaccaggcggaaggcgagcagtgccaatctacagcgaagaaagtctcgtttggtaaaagcgagaggggaaagcctgtagtcatgcagaagatgttgacagagtcacgagacttgtagctgctcgcggaaagccagntggcgctttgagcctggaccctgttcctggcgttctaccaaatctgccctgagagaaacagaggttcggcctcgcagaacctcctcagtcggactgtgtggcactttctcacggctaagagtagaccccccggtggcgtcacccagggggagttgaccccaccttttggcactggggaactgggccccagggactccggggagaacacccgtggtcgcgggcccacttcaggcaccctgagagaggaggagcggttttggccctgagccctggggccctatgggggattggcaatagtgcatcacggtgcgccatttgtgggcacagattcggccaattgggccccatggcgattccagtgtgtgcgctaggtttagggtttggccccgaccggcgaaccccccaaaagaccgcgcgaattgggaggaccaaggccacaaggcaacaga

SEQ ID NO: 548849 - DNA, 171 bp, Homo sapiens
  misc_feature (64)..(65): n is a, c, g, or t
cggccgctgaaaacactgtagtaataaattttatatgccaaaaaaaaaaaaaaaaaaaaaaaannaaccaatcgatatcagctatcgatactgacgactcagaggtgcgtacatgcactataagtgagtcgatacatcactagcatgatcacgagactgactagtacagct

SEQ ID NO: 548850 - DNA, 401 bp, Homo sapiens
  misc_feature (343)..(343): n is a, c, g, or t
tacagcgccttgttgctgctggcccccttgttggggccggctctgctgagggccatcattctggttcccatcaccggcagagggttgagattgctgtcctcccaaagctggaccctgacgctcctcatctatgaactgctcagagtctcctccatctgatattaccaagggaacgtcttcttggctgacatcttcatctaagtcctgagctgagctgaaggccagcagggccactgacagcagaatcagaagcatcttgcagaaggctctgttgtcactcccaactgtatgctctacctacagcgccttaacctacacgctttgtgactttgcctgaggaggnggtggaccttgttgctgctggcctccttgctgtggtggtccctgctgatgccatcatt

SEQ ID NO: 548851 - DNA, 120 bp, Homo sapiens
agacacgaagctgctactgttggaatggtgggccaggagtcatcccgagccattgtggacaggagggcacaagtctgccggagcagataacatggtggttgtgaggagagggacaggagg

SEQ ID NO: 548852 - DNA, 104 bp, Homo sapiens
ccgtacgttgggcccgtactggttctttatttcaaaaagacacttgtccaatattcagtatcaaaacagttgcactattgatttctctttctcccagtacggcg

SEQ ID NO: 548853 - DNA, 1030 bp, Homo sapiens
tctgctaccgtgactaaaatggaagcgttttgggggtcgcggcccgaactttgggcggggggtccggccccaggacagtttataccgctttccatccacttcccgattccttcagtggactccggcgttctgcacttttacagaggttccaatcacgcggaacccagaaaccccattggtgaccgggacctcagtcctcggcgtaaagtttcgagggcggagtggtgatgtgccgcagacttgcgtgggatctccatacgggcctcctttgagcctcgttatccgaaaacattcttcttcgcatttatgtgcgagttcaacaaccagctaccatgtgctgggtgcctctgtggcaggactatacgcggtgatttcccacgatattttgtgaacgcaagtttctgcggccaaattggctgacttgattgaaggacgcttctgtgggacagagtggacccacagattattagctcctataaacgcatatttcatctcattggcttgacacaggggccatttgttaacagtccggcgcttcggaaagattgaacccctttttgttggaaccacccagtgggtcattcgaaggccatcatggctagattggagaagcacgcttcccttcagggtatagtggtggcaccattggcttgggggtgtaacgccctattggaaacgccacgcttttcgcagtgggccccaaccgtgggtaaatggagcggcatactttggtgcttacacgcacctccgtgctatgcacaacaaaggtttctggaacacaaaggcgcgccacagggaggctttatagccccacagaacccggtaggggccccgagcaactttcttagatacagaaaccgctttgatcttttgcaaaagattgtcttggttacaataacgcggaaatattgccccgttttctttacaaagcgggtttatcaaaaattaggaccacgttgttccaccacgaaaacaacagttgtgtttgcaacacatcgagaggacccatgtgttctacaagaaagaacca

SEQ ID NO: 548854 - DNA, 150 bp, Homo sapiens
cacgcacaccccagtactagcttcacggacacgagcgctcatcggggatcggccagaaccaggtggcgctgaaccccgcagaacaccgtgtttgacgcgaagcggctgatcgggcgcaagttcggcgacccggtggtgcagtcggacatg

SEQ ID NO: 548855 - DNA, 678 bp, Homo sapiens
caaactcttatttcagcattaactcaaaattccatagtccaaagtctcatctgagacaaggcaagtcccttccacctatgagcctgtaaaatcaaaagcaagttagttattttctagatacacagggatacaggcattgggtaaatacactcgtttcaaatgggagaaattggccaaagcgaaagagctacaggccccatgcaagtccaaaacccagcaggcaaatcttaaagctccaaaatgacctcctttgactccatgtgtcacatctaggtgatgcaagaagtgggttcccagggtcttgggcagccccgcccctgtggctttgcagggtacagccccccttctggctgcattgagtgtctgcagcttttccaggcacacagtgcaagctgtcagtggatctaccattctggggtctggatgatggtggcccttttctcacagctctgcttggcagtaccccagtggggactctgtgtgggagctccaaccccatattttcctttgacactgccctagcagaggttatccctgagggcccccccctccccttccccccacaggaaaactttgcctggattttcaggcattttcatacatcttttgaaatgtaaggcggaggttcatgaacgttaaatctttgactttggtgcatttggagggcttaacaccacc

SEQ ID NO: 548856 - DNA, 352 bp, Homo sapiens
  misc_feature (190)..(190): n is a, c, g, or t
agcgagagaatgaagccctgcggtgcggccagggtgccagcctgaccgtggtgaagcagaacgccgacgtggccttgcagaacctccgggtggtcatgatcagtgcccagccctccctccagcaactgccttccccagcccagacaatgaatcctgccgccgaacacccttaaatccacagccgaatttntgaagttaaagacgaggaggaagactcttgaggacccctgggtgttctcagcatgaagctccgtgtataccctgaggtcaccaccgctcgatctaaatgtgcagttgtgtccttaaatatgcagtcttcacccagagcaaagtgttgatcgcaagagtcaaa

SEQ ID NO: 548857 - DNA, 729 bp, Homo sapiens
  misc_feature (627)..(627): n is a, c, g, or t
gcagtggggatgcagctgttggacaggtattgggggcaaggttggtagggaggacagaactgtcacttgctgttacaggcacaggtgattaaaaatgctaaatatgcaaatttaagcttggtcagtatatggaaaagttgaagggaaaatactggaatgcttcttcaaaggttaaaaaataaccgagtctttggggtaattgtgaccccacgtgctctctggccctcaagcatgtaacctcggggtctgaggcccaggacccaccccccttggcaccctccaaccgcatccctgctcagtacctggtgtgggtacaacaggcaaggaattggcacaacccaaaatgggccttttgctccctcttaataattgaagaaattcccacattttactcattctggtactggtgtgtggcctcaagattcttctagtattgcttctgatgaatgattcatggtctatacataaaagaagtaggcactgaagtattgctgaatttgcagtcactggtagtccggtatacagagctacttccacgtggtggttacgaatgaggccagtgtagatgatgactcatgttcctgctcgggtggctttgggccggcttggtgtccaaaatagggattngactttatgcatcagctggttatttcaagatctgggaactatttgggactttataccagtaaacattttatagtttagaacaaagcgaccataaaaacaaaa

SEQ ID NO: 548858 - DNA, 194 bp, Homo sapiens
ccagggtcgcacgcgtgagactttttccgccgcctccgccgcagacgccgccgcgattgcgcttacgtcgcctcctacctgctggctgccctaggggcaaactctcccccagcgccaaggacatcagagatctttgacagcgtggtatcgaggcggacgacgaccgctcaacaaggttatcagtagctgattgg

SEQ ID NO: 548859 - DNA, 1412 bp, Homo sapiens
  misc_feature (221)..(221): n is a, c, g, or t
  misc_feature (251)..(251): n is a, c, g, or t
  misc_feature (333)..(333): n is a, c, g, or t
gggagcctgcgagagtccggaaccgtgagtcgcagtcggcgagagatcccctgtgctgtgcgagagggtggcggtggccccgatctctgaaccctgacgccggggtgttgggccaatggtcgggaggagtcatgtcggacctgtgacctggcagtatcggagcaggctgtcggttcgcttgcgtatgcttcatcacatggtagatgcggaaggtcaacggngccatgttgacgctacatagtccatcacgnagagtcattggatacgaggacgagcagatggtgcagtagaggtgtgactcggccagtgtcttacagatgtgtcggtgatgantcctatgtgcacaaagttgctatgaccctcaacacgaagctgtttcatgaagtacgggatggccggacgatcccttgtagtatccaaatctacgcctcgtttcaatagggaggtacctttggttggacgcgctggcgtatcatactaggcgcgtcgtacaaaggggttcgcgtctcgttgcatgctaggcgatcgttgccgtgttcggcttactccgtggatctgcgatcaatccagcttgcatcccgtggtgcattaccattgtagtagttctgcgcatgtattcgacgtcatgcgtctacttgtggcgttcataccggagtagagattgccattgcggcagaagttatcgtggctccgtgtagagctggtgttgtgctgcatacttgagaccatgacgtatactttgtgaacgtaacgcttcagactctgtgctagggcgatgctattcgaattggccaaagatcttacttgcgtgccaacggtggggccattgtactcgcccttccattgcgagaaaccctggtgatcaggattccggacaatacgacccgaaaagccaagagggttgccctcaattgatgggggcccattggtgtgaaacctcccctctggggtcggaaccccatgaatgaaaacacaacagagcttgggtgggctgttgtaacccgccggagggacgccggggtaaacctattttggccacacgacacgatggtgggccccgattcaacagcaaacacatgaacacttggggcatcgaatactggcggggccccacccaaacgtggggacgggcacgggggatcaacaacaggggggcggcctaacaaaaacaaggggaggccccctgcgtgtgttggtgtgacggccccacacatcggttgtaacgctgttggaaaagttagtcggagcaacatgttgagaggagagagaaaattcacacagagagaaaacccagtaggcgggaggaccacgaaaacgagcttccccatcaacacagtggacagacgcgcaaacgaaaggagcacagcaccacagcatgagaataatgcgcgcaaaggatgaggaatatagaa

SEQ ID NO: 548860 - DNA, 429 bp, Homo sapiens
ctcccctggagcggttttctcgttaagggtgacagcctgcaaggtagccatccagcagcctgggaaggcagcctctggttaacaccagagacagacatttaggagcaggaggggtttgggcaggagctttatgctgaagaggttggctaaacatacatattcaacaggctacaggaggagctatgaatattcatgtaggtggttgcagtccatgcttattgaacaaacatgtgtggaacatatgatcccagccgggcatagtggctgacgcctgtaatcccagcacttggagaggctgagacaggcggatcacctgaggtcaggagttcgagaccagtctggccaacatggtgagaccccatctctactaaaactacaaaattaaccaggtgtggtgatgcatgccttttactcgggaggctgaagtgg

SEQ ID NO: 548861 - DNA, 610 bp, Homo sapiens
gcgcccttttttttttttgttggggagttattaattcttaattaggatccaggtttcaaacaaggtaaaaggcaggggcaagaggggttcaggtagggggatgatgagggaacaccagactgtggctagtggggccacgtgccagaagccaaaggggaacccgtgggcgtggaaggggtgtggagagggggtggacaaggggccagcctagaggagcagacggggctcagcggagtggtgtactcggacatagggaacctcgacatcctcgccgctctcgtcgttacagcacagctcaagcaccagcgcccgacgtggggcccagcgtttcgcttcgacacacggctcacaatctcgtgtcatcggctgatccaaccgttccttgagcctgggcagcgtggcatgaagaaggaatagagcatggacacgcccgtggggacagcagggggatctctaatttggcggcacggtcttaaaatcagtccgaggacctggttcggagggtcatctcctcaccattaggctgaacgcccttgtaacctcacaagcgatcccacaaggtccactctgggtatatacgtactgggtgacataggtgccggccacgcgg

SEQ ID NO: 548862 - DNA, 291 bp, Homo sapiens
  misc_feature (26)..(26): n is a, c, g, or t
tcaccataattaggaaacagactgtnttcttaatttgaaacacaacagtataaatactatagtaaagttgggtgcagtggatcacggctgtggtcccagcactttgggagaccgaggagggatggtcacttgagcccaggagtttgagaccagcctaggcaacatagagagaccttgtctcaacaaaaaaatttaaagttagccaggtgtggtggtttgcacctgtggtcccagctactcaggaggcttgggtgggaggatcgcttgagcttaggaggtcaaggctgcagt

SEQ ID NO: 548863 - DNA, 411 bp, Homo sapiens
cggctaccggctcgattctttgcctcagatgggcgactgttgcttttaatcattttaatataagaaagactgcagaaaatattccaattcaaagtgtatgtgaccatgaaaagggtgggttctttccaggagttctggtttgactgtgggaggccctgctggcttttgtgcctgttgctaaatgtgaacccacagaaagtgtcatcacagccacactgaaatgagttactctagacattgtcctgctgcagttacgaaagcactgactaaaccgtgaggaatctcagttcagcttatcccgtaatagtcactcgctgatattttgcctgaaataacccttgaatcatgtttgctggacagacaaagtccagactgaacagtggtctcagtaatacacaaagctcggcagga

SEQ ID NO: 548864 - DNA, 328 bp, Homo sapiens
ccccggacatggaatccagcattccatcatcacagggctcccaggcctgtgcacagtgcatcttagaggaagagccatgcctaaagtaccttcccatcaaagagcatggcttggtttcgtaaaaacctgtcttttgtcatactagattatcttcagaaacactgacccctggccctgagcactgaaagagcggttagagtgatgcggctggccacggcatcgaccactagcagtgagtgctgcgcccccaccacgcccccaccctgcgctctctgtggtggccagtctcagcctggagcatcagaggcctgactgggcgaatggaatt

SEQ ID NO: 548865 - DNA, 415 bp, Homo sapiens
tgagacctagcaggatcccggcaggagacacagacagatggaacagattgaagaaaaaaataattcaggtcaaaaaggatggaatataacttcgtgcttgggttattttcctatgttcgcatcgaaaacaagacatttcggtgcacatagttcatctttcctcttttttaccatttgtctggtggagaaaaaatactttttctataataaaatatgttatttcttggtttttaccgtaactttttcttcttttttgccgaatataattttgtaaactgtcacttcgcgggcaggtagcgatcgatgccatgtgggccccagctcacccgggtggaggctgtgagctgaaatcgaacccaggcaggagatggcgcgacggtggacgtgcaagggagggcacggtgcacaatacgag

SEQ ID NO: 548866 - DNA, 627 bp, Homo sapiens
tgtagaaagaatccaattgttaagattcaaccctgtatagtaattacagacagtaaattataagtagagtaagggtggctgaatagaagcagcaaacatgcttaaggcaatgcaaagcagtagctaaattctgatgataaggcaagagaaagaaaaaccaaaagtgtggaccaagaacttcatagcagtgtggggccatttgtgtatggagaactgactctgcatacttgtatggacattattacctttctcatcagttaatatttattgaactcttagggtgtgctgggcgctgttgtaattgcgggagatactaagaaatatttagcacagattctgccctaaagtttggttgacgtagaaagaaaatgtgtcaaaaaaaatacccaagttactacagcctatatgatattggaaagtactagaaaagttcagaggaaggaggaattatggaaagtcggattggtgtggaaaggaatcacaagcaagtacaacagatactgatagctttttatcaaaactatttcatcttatccctgggcccacaacttcccttgccatcttagatgtggccacgtgaatgagttctagctaatggaatattagccatgccctgtgccatttcca

SEQ ID NO: 548867 - DNA, 261 bp, Homo sapiens
cacgggtccctgcgcacgaccacagcatttcgactcgatgctgatccgccatccgggagacagaggcggcgctcggagtttggacagactcagctggcggcattccgggactgacggagagccgatgagtgcctcacaggagatggagtcgtacccgtggcgctgctcgggcctttgtaccgttcccgaggtgatgtcgcctcgttctggagaccgtccatcctataccgatgtcagaaggcatgacaggtgttggaagta

SEQ ID NO: 548868 - DNA, 821 bp, Homo sapiens
ggttcaaaccctctcagtacatggaattctttgggcgtctcaccgaggatgttgaggggaataattggcggtcgctttttcggtcttggaatatccaactccggctaaaggcgttgctggttgtgcccgccagaattttaaggggcaacaagtttgtccaagggaccctgtgcatttggctttagatcgccggcaataaccctggcggagcaatgtggccaatggttaaaccccgcactccgtccctcgggggagaacacgatcggaaaaagccgcggggaacccgagctctggaaaaagcgttaaaggctggcgagcattcttaaacaaagacgggggccttatgcccccagggtaaaatctagagcgacggggccgccccgggaacaatgaacgcgcagagtggggcccaaggtagagacagcgggcccgtagtgtatcactaaagtagaagggaccggtaaattgcgacagccggggtctttagcggctcccctatggatgatgagcatctttctcctgagcaccttccagtggtgtttagtatctatgcggttctaaaaagcaaagaagatggctgaagacacgctcctgaggacaagcagtctcaagactttcccaaatattttttaggcttctggcaaatgcaatggttcgggaatccgcagacaataatgcgcggcggggttttcggcacacaagatatgcatggcccctagcacccgtatcagggaggccgcgtcaaacacacccaaaattggttgtcaaaaagccgcccccttttaaccccaaaaaaaggattgcaccccgcaacaaaaaca

SEQ ID NO: 548869 - DNA, 448 bp, Homo sapiens
ctgggctcaagcagttctcccacctcagcactttgggaggctgaggcaagggatcacttgagggtcaggagtttgaaaccaggccggccagtatggcgaaaccccatctctactaaaaatacagaaaaattagttgggcgtggtggcacatgcctgtggtgtggtcccagcttcttgggaggctgaggcatgagaatcacttgaacctgggaagcagaggttatagtgagctgagattgcaccactgtactccagcctgggcaacagagcgagactggctcaatatatatgtttatttattgaagtgttgaacttctctgacattctgttaaaacgtctggatcaccctagaaacaaatggaggcgaacagttttgtgtagactatcagtggatttgtggacttccctgaaatgtatctttggatcgcaagttaaaacctcataatct

SEQ ID NO: 548870 - DNA, 480 bp, Homo sapiens
aggaagggcatagctcctggcccaggtctaggcagtgctgcttgcgttcgctcatcctcactttcctcctctaaccccaacaacatggaggctaggtcttgccctggaagcgtggaggcccggcccggggctggggtctatgtccagcagcgcaacagagtcgggcagactttctgcattgacaaatgtgactaagggtgccgcagcccttctgcacccagcacagtctgcccagcccagtcctgctcccccgggcactgcacaggctgtctgggggccagaccacccattgtccatccttgttgtccgtgagtccttggcctccaccaagcacgtgtggcattgtgtgcctgcttagtgactccgtggtttgtgaggagcagagtgtgtatgatttattgcctcagaagacatatacgtcttctgtgtaaacagatgcaagtaagacaacagtttgtcaacaataaaataagaaaaaag

SEQ ID NO: 548871 - DNA, 101 bp, Homo sapiens
gctggtggctgggtgcagtgtcacgcctgtaaagaccaaatatgatcataaaagatgctgcagttggctgggtgcagtggctcacgcctgtaatcccagca

SEQ ID NO: 548872 - DNA, 407 bp, Homo sapiens
aggcaggcaggtcacaagtctcagcacagtcctgccacctacttatttacttatttttagagacagggtctcactctgtcactgtggctagagtacagtggtgcaatcatagttcactgcagcctcaaactcttgggctcaagcaatcctcctgactgggcctcccaaagtgctgcaattacagatgtgaaccactacacctggccctgccatgtacttactatatgaccttgggacaagtcatttcctctctcttgagccttcctcatttcttttttttccagacagagtcttcctccgtcacccaggctggagtgcagaggcacaatctcagctcactgcaacttccacctcctgggttcaagcaattctcatgcctcagcctcccgagtagctggggttacagg

SEQ ID NO: 548873 - DNA, 492 bp, Homo sapiens
cggccccggctctagtggatccccgatgtagtcccaactggtcgtgactgggatgtgaggacgggcagaggtgtcttccacggtctcattgccttctgagatgagtgcccacacctgtaggctgaatgaatgggcgccccagataatggatcctagaccgttgcagctctatcctcctccacgggaaggagcagcccctggatgaggagctgaaagacgcctttcagaacgcctatttggagctgggggcctcggagaaggagtcctaggtttctgccatcatctttctgtcagatgaacaagtttccgtgaagggttccagtttgacacgtgacgatgtgaatttccctatcgataatctgtgctttgtagggctcatctccatgatggaccctccatgggcggccgttcctgatgccgtggggaaaagtgtcgaagtgctggaattaaggtcatcatggtcacaggagaccatccaatcacaggtaaagc

SEQ ID NO: 548874 - DNA, 202 bp, Homo sapiens
gggacccagcccatcccaggctgtgccctgatggaatgggttggaagcttctgccagtgccagtctgggatttccctggccgttttccctgtgtcctgcacagcctgtgaggatttttgtcaaagagtaaagaactcagaaggctttttagaattgtggtaaaatatgcacaacataaagtttatctttttaaaaaaaaaaa

SEQ ID NO: 548875 - DNA, 871 bp, Homo sapiens
  misc_feature (4)..(4): n is a, c, g, or t
  misc_feature (132)..(132): n is a, c, g, or t
  misc_feature (154)..(154): n is a, c, g, or t
  misc_feature (165)..(165): n is a, c, g, or t
  misc_feature (170)..(170): n is a, c, g, or t
  misc_feature (316)..(316): n is a, c, g, or t
  misc_feature (343)..(343): n is a, c, g, or t
  misc_feature (346)..(346): n is a, c, g, or t
  misc_feature (349)..(349): n is a, c, g, or t
  misc_feature (365)..(365): n is a, c, g, or t
  misc_feature (370)..(370): n is a, c, g, or t
  misc_feature (372)..(372): n is a, c, g, or t
  misc_feature (377)..(377): n is a, c, g, or t
  misc_feature (413)..(413): n is a, c, g, or t
  misc_feature (437)..(437): n is a, c, g, or t
  misc_feature (445)..(445): n is a, c, g, or t
  misc_feature (457)..(457): n is a, c, g, or t
  misc_feature (473)..(473): n is a, c, g, or t
  misc_feature (493)..(494): n is a, c, g, or t
  misc_feature (504)..(504): n is a, c, g, or t
  misc_feature (508)..(508): n is a, c, g, or t
  misc_feature (703)..(703): n is a, c, g, or t
  misc_feature (786)..(786): n is a, c, g, or t
  misc_feature (811)..(811): n is a, c, g, or t
gcanacaagtgtgaagaacttctggaaaaaacagtgaaaaactgcttggccctggctgatgataagaagctgaaatccattgcattcccatccatcggcagcggcaggaacggttttccaaagcagacagcngctcagctgattctgaaggccntctccagttantcgtntctacaatgtcctcttccatcaaaacggtgtacttcgtgctttttgacagcgagagaataggcatctatgtgcaggaaatggccaagctggacgccaactaggctgagcaatgacagaaccggctgcaccatgtaccccaccttcngtttaaaagaaaaaaaaaatccccttnacnccnactgggaggtgggacncctgngnttttnagttttgctcatctagggaaaataaggctttggttnccagtttaattgtttttgaccttntaaaatgnttttatgttagnactgatagttggcatnactgttgttaagcactgtgnnccagaccgtntctnacttagtgtaacctaggagattttatagttttattttaatgaaaccctgattgacgcacagcagtggggagaacagcgtcttttacctgtcaccgaagccaggaagccccgtttgtaagcgtgtgttgtggtgctttattgtacatcctccagtggcgttctttttactctaatgttcttttggtttcccccctncagaagaatcatgaatttgcaacagacctaatttttggttactttttgtcttattgatggatttgaaaatgaaagatttaatnaaggcaaagcagaatatgttgacantaaattatatttgcaatttggaatttgtgtgagttgatttagaaaaatgttaaacccgtt

SEQ ID NO: 548876 - DNA, 553 bp, Homo sapiens
ggcaggcttcagaaaggtgtagcagctatctatcgcctaacgacaaatcttcaatggaaccttagtgaagctcaacaaggctatcgattaacatagctgaggatagtagagccataataattgcatgggggtaccccaatctgaagtcagtaaatagaactaaatctacaagcgtggttatggcaaaatcaataagaagcgaatagctaagacagataacgctatagatagctcgatctactaggtacatacggcatacatactagcatggaggatatgattcatgagatctatactgtaggaaaacgcttcaaagaggcaaataactatcctgtggcccttcaaatagtactactccacgaggtggaatgaagacaataccaaccatatagtagaaggtggagatagctagacaacagggaggaccagatcaacaggctaattagaagaatgaactaaggagtctacccaagacaatattactaagctggaaggataaaaaaacagaaacagaaccacaattagaaaaacaacaaaaaacaaaaaaaataaa

SEQ ID NO: 548877 - DNA, 361 bp, Homo sapiens
aatgaggatatagatcacaccgggcatcgatcattactggggggagacatgtaacagcctctagctattagagaatatatactacttaatgagtcagctatagtcccccgtacagcatgctatcaatgggattctttattaaagcaaacagccgtacatataaatggcagcacagtatagctctactctaggtacttttcagagagtataatatttaattcatggttatccaatataaacaaaaactcaactaaggaaatattggtgagtacatattttctgaaagatatgaaatcttatatattgaggataagagtgatataaaatctttttctggattaaaccagttgatctgagagca

SEQ ID NO: 548878 - DNA, 262 bp, Homo sapiens
ctctcaggtatcagcacccaagtagttgggattacaggcgcctgccaccacacctggctaattttgtatttttggtagagatggggtttctccatgttggtcaggctggtctcaaactcccgacctcaagtgatctgcccgccttggcctcccaaagtgctgggattacaggcgtgagccaccgcacccggcagagttttataatgaaaaattaactaatattctagtatgaagtgaggaggatattgaaccggatagcttg

SEQ ID NO: 548879 - DNA, 466 bp, Homo sapiens
tgagaagggagtatggcagggctgggatgcggctactgagagtgggagagtgggagacacaggaaggaagatggagattggaagtgagcaaatgtgaaaaattcctctttgaacctggcagatgcagttagggtgtgcagtgctgtttggagattgttacagggagtgtgtgggttgacacatgtgcatcaggcccaggaagggcacaggggattagcactacagtagtcacatgggttatcagggtatgccagggggataacccgtcccggctatctgtgggtttccttgagagtagaggggccccttttgtgctggtgggagttagaaggagcaacacacaggtgtggtgggttggccttggacccctctgtggtgggaagcaggggtgcccggcagggttggtggagttccctgccagacaacagaccacacagtcctccaaaaataaacattttatatagac

SEQ ID NO: 548880 - DNA, 315 bp, Homo sapiens
tacaggatctttacagcatcctgaacagtgaggtgtaagatgcagtgagctgaaacctcaccactgcattccagcctgggccagaagagtgaaactccatcttggctgggcacggtggttcacgcctgtaatcccagcactttgggaggccgaggtgggcagatcatgaggtcaggagatcgagaacatcctggctaacatgatgaaaccccgtctctactaaaaatacaaaaattagctgggggtggtggttgggcgcctgtagtcccagcctgctcgggaggctgaggcaggagaatggcgtggacccgggag

SEQ ID NO: 548881 - DNA, 294 bp, Homo sapiens
aaagatagaaattttctctttataaatgcccccaccggtttctctttagatccggaatttttgacctcaaattcttaggagaaaccaatttatgcgcgcattatcctgcacctctttccgtgtattattgtccaaagcgaaccaccttgaaaaaaaggttggaagaaaaggaaattaaggagaggaattataaagaaaggaatttatgttccacaggtgaattccttttttttttttttataattctgggaacttataaattttttaaaaccacacctgttttccccctggtgc

SEQ ID NO: 548882 - DNA, 112 bp, Homo sapiens
gtctagaggatccctggagagcggaggccatgggagagcagaggcaagaggagggcgcagagccgccagcaacgcgcttgtcatggatccgtgtgggtgcaacattggtccc

SEQ ID NO: 548883 - DNA, 1590 bp, Homo sapiens
taaagaaccctctatcaatagagggagactatacagaaaatagtcaaaccactattctacaaaaggcccgtatcaggcgggcgggcttcgaagccaaagtgattgttggggatgtgtaaaggtggaaattattagttgggcgggatcgaagcagaatagtggagggaaatgtggacgccatataatggactgtagaatgtcctggggaacgccgtggtggcttcacaaacaaagtggtgtgacccgtataaatcgccgcccggaacaagtgggtgaaggggagacacctcgaaagaatacctctgtggaggctgtgctagggacgggctacaaatagaagcaacccgagttcaacacactgtggtacacatacagccgagagtggctgtgtgaaatatatcactgtgtgagctatcacggagggtggtgtcctctctatattatacacacccatagtggggtgaggcccccgaggggggaaatatggaaatacctccctgtgaagtgccagaagatacaaatcaggggagtgggtggtccacaggaggagtggtgggggaacactctcacaagggggacaaattaatagcgcgcgggcggagacagttgccccgcgggatgcgggaggagacccaaggaggcccccctcccaaaaagtggagaggggggaaaagaggggacataagcgcgcgacggcagggtggacacaacacagggcctcacagaaaacacactcccccgggagagaaaaagaaaacaacaacaccctctcatgagacgcgacaacaacctcaaccaccacggggaatcaaactcccccgggaatatcacgacacgggggcccattattcgggcggcccccacgtgcgtggtgcgtgatagcacgcgaggcagccccatcgggcgaccactctggtgcaatatccccaccgagtgggttaaacaactcggggcgccccaaacaccatgtgggcacacacaaggcgcacacagaacggtggctacggcgcaaaagaacagcgcccccaaaacatccaggagcgacaacgagtgccacactaggaccacgtggaacacagaggacaccacccccacagttgaccaaacagcccccggcccacggacacacaaccacgagacaagcgcgccagaaaaaaaggaccccccagtaacaaaaaagagccacaagagaagagacggggagagcacaacctaataaccacaacgacggcacaaacagcccccacggacacgcgcgtgagaacaaagagtcggtaagaggaacaaccacaccacaaaagaagacgtgagggaaagacacccccaaacgacagtcacagaaacgaaaccacagatgacccacataccctaaataatcaccccccaaaaaatatggagtccacccccgcaagcacacacacacacatgcggtgaacacaacaaacacaaaaactacaacacacacaatacaacccaccaacaaacgaccacgcaatacagagagcacagacaacgacgacaacactaactaacaatagcaaccacataaaccacaaagacacaaccggaaacacgaccgacccacaagca

SEQ ID NO: 548884 - DNA, 287 bp, Homo sapiens
taatctacgaggactcccttaaaagctaccgcagtgaccatggagcgcggttggtctacaagacgctacttcccctatcatagacgcgcttatcacctttcatgctcccgccctcataatcatttaccttctgtgcttcctagtcctgtatgcccttttcctaacaagtcacaacaaacataactcatactaacatctcagacgctcaggaacatcagaaccgtctgaactatcctgcccgccatcatcctagtcctcatcgccctcccatccctaacgcatccttt

SEQ ID NO: 548885 - DNA, 102 bp, Homo sapiens
  misc_feature (55)..(55): n is a, c, g, or t
ttctgcacatcaccggcaggtggcagccgagtacagtggtatgacggatcatggncccagcacccgtccacagactacgtgcctgtctcctgtgactgccct

SEQ ID NO: 548886 - DNA, 266 bp, Homo sapiens
caactccacttatcctaggtcatcactcattccatggtatgcttactttatgccaggcgacggtgctggtcactgatggtacacaaagatgaaaggatagagtcctttactttgaggtgctcacagcccggtgacgaagcccgatgtcacacgggaaggaaacatgaggaacacgagcacctcctaccgtctctcaaacaagacgctaaacttcccatgacggaacagtgcggacgccacaacctgacagacgacgggggcacagc

SEQ ID NO: 548887 - DNA, 1552 bp, Homo sapiens
  misc_feature (252)..(252): n is a, c, g, or t
  misc_feature (290)..(290): n is a, c, g, or t
cgcgcttgcaagcttagctccgtgggattgcgcgcaagtagggccagaatggagatcctgtacctacatggtcgactgcctctcgtcatgcagtcctagaggtggctctggtgcgacgtacagatgactcaacgtgcgattccgacgacagcatccgtgagttctcgagctggatcgtgtcccctgacaccctatcactgtcccgacgtgtaccgcatgaaatctatcatgcgacggcaacgcaacatatanttgcaccgcgtgataaggtagcgtcacacatatttctntatgcccggaaacataagggggatacattagcataagtgtttcccatgcagtcgcgtgggtacgttagacgcattcgcgttttaagcgcgtaccgtgacatagtagtttggggtgtatgcaaacgacggcggtcgaaacgctcacattgtctgccgcgggcagtacccacaacactttgttcttaagctccccaaaggcgttctgggggcacaccatgttctgtgggggaggaagcatgtccatcgcgattaaccatacacgctcgtgagtgaagggaattcaacttgtgggccccacaggtccgtcgcagggcagcatccacttttccccttcgggcacatgacatatgaccatggcgtacggcgcgggtaagctaggcttgggggagttacttgggctcgaggttgccggtatcaatctaatccacaacggcctgcccttatccgaaggccaagcaccaaggggtaattacccggcccaaattggagggggaccacgattcgcaccaagtttctcggcttatcgtagggccccatccttagcacaatgaccacttaccccgttggaaaaggccatggttaccctcacaatttttgccacccctgcaaaaacggaacccgggaaccatctcaactatactccttgatgcgtctgggagttggagactggtccgcagttgaaaattccctgcaggtcgggagatttgctcgtggcccattgcgcaccttggtacaaagcgggtttttgccccctcaggtgggctcgcaatgaccccgagccggaaggtagactcccaggcgggggatacatcaaaaatctcaaagcaagacatttacaaaagacccatgaggagcccacaagcaggagcggggggagcactcgggccctttccaatgaggccacagggaggtggacaacatcaccctgcagcgcgggagacacgacaatatccgaccaccagaagcgggggcgcgtaaacccacgcgaaagggggggggccccaggtggagtcaaccccgcgtggaccacaggcgcggctagaaaacaaaggggaggcgaatgcagcgagaggaacagcgggccacaacacacaagcagagcggtggcacaaaacagagagaatacctactagcaaaacgcgtgagagggccctccaagcagagggaggctctcacccacgactcatcagccagaaccacgaaaaagaagccccaccaagaacacgacgccgcaacagcagaggagcgccagcaaacaccag

SEQ ID NO: 548888 - DNA, 210 bp, Homo sapiens
  misc_feature (112)..(112): n is a, c, g, or t
  misc_feature (117)..(117): n is a, c, g, or t
  misc_feature (133)..(133): n is a, c, g, or t
  misc_feature (141)..(141): n is a, c, g, or t
  misc_feature (143)..(143): n is a, c, g, or t
ctcacgtaacggtcagagagggaggtcagcttctccaggtcagcacgcagggcgtggaatccactcaggagggtgacgtccgcgatggccatgccagacagccccaccttgncgttncgccagatgcacacgntgtagtgnancctggactcctgctcctgcactaccttggcgctaacttctgcggcggttccgtgactctggtaagac

SEQ ID NO: 548889 - DNA, 156 bp, Homo sapiens
gtgtcttgaagcccagaaccgatgttcttgtagtaccgggggagcttctcctttgcagtttctcccagcaggaccctcttcttgtttggaacgatggtcggctgctattggtaggcacgctcagtctgaatttcggcatcttcccagtttgccaga

SEQ ID NO: 548890 - DNA, 152 bp, Homo sapiens
  misc_feature (82)..(82): n is a, c, g, or t
  misc_feature (90)..(90): n is a, c, g, or t
attccttcaaggtttactgcaacttcacagccggggggtcgacatgcgtcttccctgacaagaagtccgaaggagtaaaatngcccgctngaccaaagagcagccttccacctggtatagtcagtacaagtgggggtccctgctctcctatg

SEQ ID NO: 548891 - DNA, 130 bp, Homo sapiens
  misc_feature (83)..(83): n is a, c, g, or t
  misc_feature (101)..(101): n is a, c, g, or t
  misc_feature (118)..(118): n is a, c, g, or t
aacaggcagaggcactggtgtcaggcatcagcagcttctcctcagagtccaggtctgccgctgccttcgtgcccacgtcttantccctgcgccgggacaanaatgcctggctcctgangctgcttttgac

SEQ ID NO: 548892 - DNA, 790 bp, Homo sapiens
  misc_feature (42)..(42): n is a, c, g, or t
  misc_feature (73)..(73): n is a, c, g, or t
  misc_feature (112)..(112): n is a, c, g, or t
  misc_feature (136)..(136): n is a, c, g, or t
  misc_feature (208)..(208): n is a, c, g, or t
  misc_feature (289)..(289): n is a, c, g, or t
  misc_feature (304)..(305): n is a, c, g, or t
  misc_feature (308)..(308): n is a, c, g, or t
  misc_feature (312)..(312): n is a, c, g, or t
  misc_feature (320)..(320): n is a, c, g, or t
  misc_feature (329)..(329): n is a, c, g, or t
  misc_feature (348)..(348): n is a, c, g, or t
  misc_feature (493)..(493): n is a, c, g, or t
  misc_feature (495)..(495): n is a, c, g, or t
  misc_feature (668)..(668): n is a, c, g, or t
  misc_feature (681)..(681): n is a, c, g, or t
  misc_feature (705)..(705): n is a, c, g, or t
  misc_feature (744)..(744): n is a, c, g, or t
aaaaaaatataacattgtataaaacaaaaaaaatattttttnttccaatattaaaaaaaaaaaaacatttaanaaacattttaaagcacaactcttctatataatcagtttnatgatctgaattaaaaaataccgntggataatcatgttcttgatacacatttcctttttttttgaaaagaagtctcgctgttgcccaggctggaanacaatagcacgatcttaactcactacaacctcagcctcccgggttaaagagaaaatcatgcctaagcctaccaaatcactnagatatacaaggagnnacnacanacctatgnaagactatnttttttatgatttaattanagataggatatcaccatgttggtcaggatggcttgaagcacaaatcatataggtacattagaggaaattgcttcctaaccacaataaacactgtgtacaggtttttaaaatgtccctagatacacattaattttttgaagtcagncnggccaaacttgcaagaaccaattatatactagaaccaataaacattaagagctcaaactaaaaaaatgataaaaagaaaaatactcaggttctacaaacgtcccataatttgtctttaaataggcagaaacaatttaaaaaaaaagatggaactgtctaaaaggtctacagcnaccttagcaagtnaatataaaaacaaaaagttgatanactataaaataagatgcttcggagcagctacaaaaaccnttataaatacagccatttagaaaggaagatcctggataagaaataa

SEQ ID NO: 548893 - DNA, 128 bp, Homo sapiens
gcaggctcccccgttactggcatttcctgcagaatggaagcagagctgaggctgggtaaagttccttagcctgaatgattttggccttgcaaagggatctagtgatagcagttccaagacacgtccag

SEQ ID NO: 548894 - DNA, 199 bp, Homo sapiens
ggcgccgtgtagatctagaggatccctcatttcctcataggtagagagccaccctctcatccgtagggtggcatttgatgttcagccgcaatgcgttggacttgctgtcagccggcaggtcacgagatgaaggctccattacaagttgttctctagaaacagctaggatccctatggagtgtattggctcccaagaatc

SEQ ID NO: 548895 - DNA, 415 bp, Homo sapiens
  misc_feature (34)..(34): n is a, c, g, or t
  misc_feature (42)..(42): n is a, c, g, or t
  misc_feature (45)..(45): n is a, c, g, or t
  misc_feature (53)..(53): n is a, c, g, or t
  misc_feature (86)..(86): n is a, c, g, or t
agcttgcccagggcagtgacttctggtccacttntgtccctnggntgtgtccntaagacccagggaccctggaaggttcacctgtnggtgtcacacggttccttcttcacacagcaggaacagaggtacagagaatggcgtccaggcctccttaaggactctcaatccatgagacaggaagccccacagggaagcagtggccccccgccccctatctcctcacatacagcactctgtaccttctgctcatttttctgtaaacctaaaactgctctaaacaatgaagtccgccacgcagaaactgcacacggatgttgagagcagctttactcataactgccaacactcagaagcaaccgagatgttctccaacagctgaataaataaataaactgtgatacacctaaaaaaaaaa

SEQ ID NO: 548896 - DNA, 385 bp, Homo sapiens
tgtcagaagagcgggaggaaagagctccggcggacagggctcccaggcccctccaggacgaggttggaggaccaagcgcagaagcaggaacagaggtacagagaatggcgtccaggcctccttaaggactctcaatccatgagacaggaagccccacagggaagcagtggccccccgccccctatctcctcacatacagcactctgtaccttctgctcatttttctgtaaacctaaaactgctctaaacaatgaagtccgccacgcagaaactgcacacggatgttgagagcagctttactcataactgccaacactcagaagcaaccgagatgttctccaacagctgaataaataaataaactgtgatacacctaaaaaaaaaa

SEQ ID NO: 548897 - DNA, 1031 bp, Homo sapiens
gtactgcttcgaggttggctgtcatggctaagctgctggggagccgcaagaggcgcctggcgtaatcttgacagtgtgagacgagttcctagcttacgggctttgactaccgagtcctgaatctcgatggtcctgaagaagttctccacaagtctggcagacacgggacagctacgcgacggctgctccggtagtccgagataagcctgggcgggatgcccctcggccacgccgcgcgtaacacggccgtgcctcatggagcacaaaaggacccagcgtctctcggctcgaacggacagaggacccccgagcttcctacgaagtaccctgcagggacgaatgacccagagcccgtgctatcacttatcagccgtactcggaacagactctgcagcgcaggacacaggggccccggtaccactgccctgcccagactgtgctgcgcaggcacgcccagctgacgtggggcgcgcatgcgacgccggagccgcaccgccacaaccccaccgcggcgcaccagaagccccccccaaaaagccccattaacacgcgccgccagcactgacactccctcgtcccccctggtcgacaccgtctcgcccaatgcctacgaatcacacaatgcgtccaaggcagaggtccaagccaaacaagccactgcggccatcccagcatcccaacaaggcttgctaacccactgcaaacgctgggataccatcgggccgatcccccagacgccagcacttgctgcgcccaaccaaccaccgacaggtatcaccccgcacaacaaggctgagctgagcggccagcacaatactcccactgcgcctcagcgggcaccggtctgcttgcgcctccccagctgtcatctgggctcaccccccttcccttgccctcccggcgcaccctcccttggccttgtcctccccagcaaaccccttgctgtctttggcgccccggtggtggctccaacgcgaccatgcacgcgagtgcgcgtgccagttcccgccccgctcccctgcgcacccccg

SEQ ID NO: 548898 - DNA, 498 bp, Homo sapiens
acagccaaacgcaaagtattaggcaaggctgctgagaactgacagaatggcagatcaagggtggaactgagatgatccaaaatatcataggcatcatgagaatgttaatggaagaatttattatctgagcatcctctgtaatgtcccttccaaatgactctgatctatatagttttcacaggccaggatctcagtggcacccgtatgttctgttcttgctttgtgatgagtctacataattaaagaggaagtccttcctcaggctctgataaaaatgcatcttcttgtagccttcacaaactttcccgtattcacagtgtccccaaattactgcaaaacaagccttataggacttccaaaagctggctcttcagctaaataaagaagagactggaactcgtagtcatgggcttaccttctgacacagactttcatatctttccagaaagatagaatgccagtctttcattaatctccatatccatagtaatcattagg

SEQ ID NO: 548899 - DNA, 446 bp, Homo sapiens
ctaatctactccctaaaaggagtctagttcattactgagtttatggcttccctacatttccctgtttctgacctcaggtgatcaacccgcctcccaaagttctgggtttacaggtgtgagccactgtggccagcctgtttcttttcttatacaaacaaacctataatggtaaggtttaatttatgaattaggcacagtgaaagattaacaacaacagactaataataaaatagaacaattacaacaatatactgtagtaaaagttatgtgaatgtaatgtgctctctctctctttcatgtgtgtgtctcactctctctcttgaaatatcttagtattttcagccatagttgaccagtgataacggaaaccacatgttgtaggctgttcttcattgctgcaaagaaataccagagactgggcaacaagagcaaatgtccatctcaaa

SEQ ID NO: 548900 - DNA, 226 bp, Homo sapiens
  misc_feature (142)..(142): n is a, c, g, or t
tgatctaccggatcttatgttacggtacggcacgcagatgtgtatctcagtcttcgactacaccacagatcatggcaacactaggtccttaaccactgagcgaggcagggatcaaacctgcaacctcctggttcccagtcgnattcacttccgctgcgcaatgtcaggaactcctaaaaaaatggttgtggtatctctcttcttttcccttggtccataacatatt

SEQ ID NO: 548901 - DNA, 636 bp, Homo sapiens
ttgggtctgtgcctccctccctgtttgggcgcaacctctgggccgacgacaggggccgcccccgggtgtgcgtattccgccatgtcgcgccctgaggtggccatcgcccccctgctgagatgcccccttggtcgcgcgcttctgggcccgaatcaggttcgtggtgggcgtcgcagcatgagggcacttgccctgttggtgcgtggaatcgccggcgggggatgcatcccccggtgggctctcacaagagtccttagcacctcatgtacaggggtgttgaatctgcgcgccacgtgctcgcttgtccagcttgatcacataagtgtgccgagactgctagcgcggatcccacaaggcgggtcccttttccctcgtagcttcatggcggacgcagtcgtataatatgtctgtcctggggtcctccatagcccccctctggtggtcgccaggcacaccgccccgctgtctccctttgttgatccgcccgggggccccaagaccttcccccttaacgcgccgggtcgatcgtgcgccacgtttccccgtggcgcccgcaccgtccgtggaggtcgtactagtggccgccccgccccggggggggaaagacccggcctctagggcttgtccaaaaaaaca

SEQ ID NO: 548902 - DNA, 271 bp, Homo sapiens
  misc_feature (113)..(113): n is a, c, g, or t
tagacgacttcatgagaggtatataatagctcagttcagaagagctttccttttgatagagtggagcagcagagccagagaaataatgttacaactggctttcctcaagactntgctatggagattcaaacttgaccttccctgccaggttctgctttgaaggcttacttataactacagacgtcgctgatattaaaagcagtttatttgtcgtctaattagatgtttatatttttattcttctcttcaggacttaattatgctagtttaa

SEQ ID NO: 548903 - DNA, 1068 bp, Homo sapiens
  misc_feature (849)..(849): n is a, c, g, or t
cgcgcggaccgaggtgcgtcttgaagcactacgtgtcccactcgttatccggggttcccccgtggtgggacagtgattcaggtcagtggcgccgagagtcgagggcttccatccaggtaaagtcgccgaggcctgcagtggggcattcccacacgcgcgggtcggtgagacgcgttgactcctacctcagttttacccgtcctatagtgagccgtgtaccttcggcaaacgctttcctgaaaccacgggggaagtggcgagagggcgcggggatgcgttggcgattgtgcggggtaaactcagagctcagtcgtgcggtgggcgagaggcgtcgtggtcagggctcataggaggggggcgcagcccgtgggacccccagggtgtctggccgattggggaggacacgggggggagcccgagtgcgaagcggacttcgaaccccattcgggagactacgaggagatcaaactttgcaacaagtcctcagtggttgaagtgggtaaccgttgcgcacttccagggttgaccccaatcttgtaaatcttgggtgagcccatcaggccttcacttcacgaatgggcgtccaatgggcatggggtcccttgggagcagcccttgggcaggtgggtactgctaagtcaacctgtgctaatgaaagtctcgtcgagcgaagatccattcgggactttgggccctttgtggtcccaagaaaattaccagcccgagacgcccaagccaagtttggtcaccactcagaggtttggtgcaacacaaacgattaagggcccaacgattcggtgccgggtaatcctagtccttcagtgggagaagacctttgggcactaggtncggggcccctatcttctggctatattccatttggtctcgggaattcacatttctctggagaagccccccaaggggcttttgggttatccatagaaaccatgttgcccgaaagaggattagagaggaagtatctattggaatgaaaacttattaagtccagtgggccaaggaacaggccgcgatggggatctcaaacccgctctggggaatattccccag

SEQ ID NO: 548904 - DNA, 201 bp, Homo sapiens
gagctgagagatagaccgcatacgtgagatgtagctcagcagactgtatccaaagactataagtaaacggagtcgagttttaacctctaatgcagtgtggatggagaattcaaaactgacagagtttggaaatttgccacccatcagaggcagtgaacattttcaagtcggactccttgagctccatgggatacctgagct

SEQ ID NO: 548905 - DNA, 380 bp, Homo sapiens
gagattagcagcagaaaggccattctctcaaatctcacttactccacacctgataagggggagagtttgggttaaagaatacgcaagtagatgttcctattgtctggctgcaatgaggagaacagttacctttaatccagggacgtggccatcctgagagggcctggctgggtgttacgggaaataaataccctggcctcacaatgttgcttccctttagtttcttccgccaaaccgggtctccttgttgaacaaagccaactggagccaatggcaaggaggattgttcttgttgatgttttaattttagacccagatcacattagaaaagaataaaacctatatctaacagggtaaatagaacataagagtccgagtta

SEQ ID NO: 548906 - DNA, 1005 bp, Homo sapiens
gcaatctttgtgtcgtcagcacagccgcagccgcatagtctccagcacaacatgcgtcaaagcgtgaatggatccgagcagctcccacgtgattcagtgtcgctattgtcgtcgcctgcgtcatcatgtatgctcttaactcaggtcatcagtgagatattgtagccattactgacctctctaaagatctcgactacatggtcgacatggtaaccatcattatcgcatgtccatccatactcgtgcagaacattccattggccatcgccatacaggttaggacgatccgtgtgaagcttagtcagatacacatgtgcaaatccatcatctacccaatttatccatacggaagtcgagtatgcgctcaccaaaatagcgtaagtagaggctgatgcattaacactgagttacgtcgttgataatcctattgggctgtcttacatcaatcatggcaataaagtcgtagcatcaattggcagcggggagttccatagaaggtcatacatactctggtcccctcattctggctgatgaacccccctgcttcgtgcaatgggtagtgaacccatagaaaagtctttagacatctgcattcaagacgataccacccagctattagggcttctgagaaccagatagacatgtttcaggaacgtcctggaaccaaggatcatctctatgaaccaaattataggtaatccgtggggtatgcttacgtggacacatgagttccgatgatcatgtggtagccaagccaaaagatcgtggctggcgcctctcggagataactgtggcgtgaagggctgggaaattgctgcagaaaattatcctataagctcttactgtgctgactgccctcgcttaaggcaacaagtcatccctgaactgacggggcagtcaatgggattggctaacgggttcccaataccaactgtattgatgactgaactgcggttgaagaacggcatatatgactccacgtgtagcgttataggccccagaact

SEQ ID NO: 548907 - DNA, 1396 bp, Homo sapiens
tccaaaacgggtcaaacttttttaaaccaagtgatttttcacaaaccaaattgtgtgggaaaaacacaccttctcccagacaataaagaaaatctcctctattaaagggtgcattttgtgcctgtgcaaccatctcttcttctccccatgtgtcgtggccctgttgtggtctcagggatttgagagggcacgtgttctccggaggggagcgccctctcgaggggcccccccttgaacccgtgggaagaagaggggaggcttgtgaaacgccccccgtgtggtgcgctccccgagggcttcactgtggaatataccctctctctcttcaccctgtgcccttctctcctctctgtggggctctcccagggaggtgtgcccctgtgccgctgtgacctcttcactgctgtggcagggtgtgtgatctctgtgggagacacccggggcgcttgccacgtgtcgcttgcgcgcgagtgtgtgtggagagagacagcgttggggcgggagagcgggtgagaacactgtgaaacaaccacccaggagcccccccttataggcgagcaaacacacacgcagcacgcacacgcagacagacacgcgcagcgcaagagaaaacaggagacacctcacaccgccgaagctaacaccccaagaatacgcgcccgcgtcgaccacacggagacacaccccatcaaaacttaggggggcgcccctgtcggccacattttgggcgcccctttccccacaacttctttacaaagattatgcgccccattaacacaaagagatgtagcgcactacagacctctctacatatatcccaggcgacatatttgtgcccccaagaaatgagtaacatatacccccatcactaaaaaaagtagggggcgcctctgaagcgcaaccacagcggcgcgaaacaggccccccccaaacccccccagagaggctactccaagaaaagcggcccaccacacgaatcgcccggtgctgtgccccaccgcgctcccccccacccaccacggaaagacgatgggcggaacacatcctacacaaaacagcaagcgcggcgacccaaacaccagcatcacaccaacaagcgacacaccccaacaaagggcacaagccaccactgaggggtcgaccaaacaacgcgtggagacaaatccatcaagcagaaaaaaacaccctgccaagttgtaaatcaacccacgccaacaggacacacggtgcgtctaaacccccagagacaccgcgcccccccagcacagcgacagcggaggcacaaaagcgggcgccccaacaagataacacaccactggacgtgcaaacgcagccggcagcgaataggcaacaagtccccagcacaccacgaccagaccacggacgaaaaaccaca

SEQ ID NO: 548908 - DNA, 791 bp, Homo sapiens
tcaaaccacgcccctggggcaactaaagacatctgagaaaatgtgacacctctcagggtgtgaggaactacagatgtccccataggcttggactccagagtcctcgtggatttagtagtggtgggatccagtcagccgtttctgaaaaaggctggagaatcgggaagggagaaggctacgccgatcatggaatatgccatgatggtaatccatgggcgccgacagcaaggagacgccggtggtcaccatcgacacacagactggcaggatcgaggacatcccatgaagagactagatagaggagacacgacaatcaactgatggactacaatcctcaaatcacaacacagagatcaatcgacacagagcatgcaaagacagcccaaaagaccaaaagggaactcaccatggtatcaagactcagcctggaagatgatggagaatactccccatacatgaggagcctcacgaagccagagcagcagagaggctggagaaggatgtcaacactcacagggtgagcaccaagacacctttccgagaagcaaggatgcagacaagacagtgacccctgaagacggtggagaaagagagggaccaccgaagaaacacacacggaaacaagaaaaacaaaatacccatggcagggcaagccaccgggaacacccccaaggggagggtggcacaggatgcagaccggatagaaacggtggagaacaaccacaggaagccgatatagtacatgagaaagcaggggaactcgctcagagacaatggacactgagaggcaa

SEQ ID NO: 548909 - DNA, 768 bp, Homo sapiens
  misc_feature (192)..(192): n is a, c, g, or t
  misc_feature (661)..(661): n is a, c, g, or t
tgaaacggagtctccctctgtcgcccaggcttggagtgcagtggcgcgatctccggctcactgcagcctccgccctcccgggttcgggcgattctcctgcctcggcctccggagtatctgggactacagttgcttttcaccacgtctcggctggttttggtatttttcggtagagacgggttcactcatggntgcgccaggagtggctctatctcttgacctcgtgattccgccccactcggcctcccaatattgctgggatttgcaggcttgagccaccgcacccagcctacaataattttcttaaactttaccttttatttaaagtcctagttccccggctttgcatagtcccctatttgaaactataactgttctctgtgtacgtgattgataaataaacccctatttagccttagaagaaaaaaccttgcacgatatacgcgtgtgtaaatgggccttagtctggaacgcaaaaacacaacacatttcggcccttcttctagcgcaccccgtgtaggcgctttttcactttgccccctgtcaccttctgtcttcacattgtaggggttctgagtggtccctgtaaatttcagggcttcttggcccagtgcctccgtgttaaaaccccgcgtgccaggagcaggtttcttgggcgcgnctaattcccatagagctctgggacgattaccttcacggaactcctgtatcctgggccttagcccaacgcctcttcaagtagtgccgccggccgcgcccgtccccctg

SEQ ID NO: 548910 - DNA, 441 bp, Homo sapiens
cccacgagaggcacgagggtgcacgttcacatcagctcgcaggtgcagtactcacctgaggaagtgtggggcatggttctcaataatcctcgtgctctagctgaagattgaggcagagcagaccatcaaggatgcagtgatcaccgggccagtcttctctcaaccaggccgagcgccgagcggtgacagaaggctgctcgtatggatggcctcaaagtgctgcagctcatcaaggacaacaccgccactgccctcagctatggtgtcttccgccggaaagatattaacaccactgcccagaatatcatgttctatgacatgggctcaggcagcaccgtatgcaccatcgtgccctaccagatggtgaagactaaggacgctgggcttttcactgagcagcgcaagggtcagagcgcaaaggatgtgcgggagaacccgcgt

SEQ ID NO: 548911 - DNA, 659 bp, Homo sapiens
  misc_feature (39)..(39): n is a, c, g, or t
  misc_feature (64)..(64): n is a, c, g, or t
  misc_feature (160)..(160): n is a, c, g, or t
  misc_feature (207)..(207): n is a, c, g, or t
  misc_feature (219)..(219): n is a, c, g, or t
  misc_feature (234)..(234): n is a, c, g, or t
  misc_feature (245)..(245): n is a, c, g, or t
  misc_feature (250)..(250): n is a, c, g, or t
  misc_feature (255)..(255): n is a, c, g, or t
  misc_feature (259)..(259): n is a, c, g, or t
  misc_feature (273)..(273): n is a, c, g, or t
  misc_feature (283)..(283): n is a, c, g, or t
  misc_feature (300)..(300): n is a, c, g, or t
  misc_feature (305)..(305): n is a, c, g, or t
  misc_feature (315)..(315): n is a, c, g, or t
  misc_feature (321)..(321): n is a, c, g, or t
  misc_feature (323)..(323): n is a, c, g, or t
  misc_feature (345)..(345): n is a, c, g, or t
  misc_feature (357)..(357): n is a, c, g, or t
  misc_feature (376)..(376): n is a, c, g, or t
  misc_feature (433)..(433): n is a, c, g, or t
  misc_feature (447)..(447): n is a, c, g, or t
  misc_feature (469)..(469): n is a, c, g, or t
  misc_feature (492)..(492): n is a, c, g, or t
  misc_feature (494)..(494): n is a, c, g, or t
  misc_feature (512)..(512): n is a, c, g, or t
  misc_feature (514)..(514): n is a, c, g, or t
  misc_feature (516)..(516): n is a, c, g, or t
  misc_feature (541)..(541): n is a, c, g, or t
  misc_feature (568)..(569): n is a, c, g, or t
  misc_feature (585)..(585): n is a, c, g, or t
  misc_feature (634)..(634): n is a, c, g, or t
atcttattagaaatacaagaagtgcacttaatacaaggnagttagtttctcggtgccaccagtnaggtggacatacactcacatcagtccctcaaacgaaggtttcgccagatttccctccagatttctgagatgatctgaattcaggaaggtctgagtnaacttcttccagaaattacagtgaacaagctgaccttaacttttggntcctcccgaganatactaatgaaaaanctatttttttncagtnggccntgtntttgctggaaaatnggcatctgcngctcttcaccggcaggngcggngcccacagcngcggtntncaagcgcgaggtagcacttgcngccccatcaganatatatgatatcaaaaaancaacctaaacccatatgctttttggtcaatcagaggttctgctcctacagattaggntgatagctcttggncttatatttattaatatttgtnatatatgatctccaaggttcttntnctgttcctaaagctagtntncngctacagcttttattaacaactgtncatcttgcgatgtgctgtgccttatgnncgatgtctcgtcagancagaccaggggtggtactgggtttcctatagcttctctctgcatctccnaagcaggttttcaaacacattttac

SEQ ID NO: 548912 - DNA, 413 bp, Homo sapiens
cgcagtggctcatgcctgtaatcccagcactttgggaggccgaggcgggcggatcacttgaggccaggagtttgagaccagcctggccaacatggtgaaatctcatctctaccaaaaacaaacaaaaaaaaaatgggccatagtctgtagtcccagctactcaggaggctgaggcaagagtaaaactaaaaacaaaattagctgagtctgtggtcccagctactcgggaggctgaggcaggagaggggcttgagccctggagtgcagtggcactatctcggctcactgcagcttccgcttcccgggcttcacgccgttctcctcctcagcctcccgggtggctgggcctacaggcgcccgcaagcatgcccagctagtttttcttggtaatttcaatagagacggggttcaac

SEQ ID NO: 548913 - DNA, 622 bp, Homo sapiens
accctactttgattgcctgggtgctgagttatggcttgactatggacgagatgtgtgtcctcttgggggaaagactggggagctcgtgccgattgtctgtcaggagtcatcccctgggctctagttcgcccctctctctctctgggtcctcgatcaggaccaaaccaagagaccagggttcactgtgccgggtgcaaaaggcccatccttggtacgcgcgtttctcttgaacagtgctggacagggcctggtcactgtcaagtgcgtccagtgctgtgaatgtaaatgcaacctgaccgaggaagtgcttctccaggcaaggcaaactgctactgcgaacgaacgacttcttaccgagtgtttcggtaccaaatgcgcatgggctgcgctcagggtcatctcccctagcgacctggtgcggagagcgcggagcaaagtgtttcacctgaactgcttcacctgcatgatgtgtaacaagcagctctccacttggcgaggaactctagatcatcgacgagaataagttcgtctgcagagagcaggtattaccgtaagtgacagcagtgttgccaagagagaagcagccttcagctcggccaccactgggcagtgagcccagtgt

SEQ ID NO: 548914 - DNA, 1358 bp, Homo sapiens
gtagctgggattacaccgcatgcgccatcatgcctggctactattatgtattttgaatagagacagggtttcttcatgttggtcaagctggtcatgaactcccaacctcaagtgataccgcccacctacggactacccaaagtagctggtgatatacagtgcatgagccaccgtgcccagccctataaatactacatatatttaagaaaccctacacctaatatactagtaagtacagctaaagcttattaataaacacttcaatatataaacgcactatagaacgcaattaaaatagactagccattataatacgatacccaagtagtcaacacaattaaacaaaccctacaacaactggtaacctactactactacacgcttgacgcgtacactacctgcgcgcttagcactaaaacacgcccactgacggcgtaccacctactagacaccactaacacctactggctacacatccaacactacacctaaaccaacgaacttaaataattctaacaaacccctagctaacacgacacgctcactcacctacgccttacaccaggatgacccccataccactaaacactatacatggcaaaactaattagagatacaccactaatggcataccacgcccttggcccacgacatccaaaaactaactactatcgcgaaccacagtttcatctacacaccaactacaccggcccaccccagggcgacccggcctatggaacgagggccccatactgcccgcttagcgacgcatacataatttatacaggaggaaccataacttaggccttcacacaccacacaatgcacaccgacgggcatactacaaccacacacccacattaaccctatagagaaacgtataccgacataatctatacacgctattcatcatacagtaataagtggctcacaccacaccgctactcggcgagaatcaactaccttcacctataacactactcaccaccataacaacactaaagccccacatatacaacacgagcgacatctcaccccaagcgctgggctgctatcaccacacagacgactgcccccaatactaccagccgagcacgctaccctatccaatacccacacataagagacaacaaccaccaactcacctataagagcacctacatatctcatcgtacatgcgtgggcatcacaagccgcagcatttaataaagagtgcacccgacaagcatactacacacctcaaactggtggagctgcacaaccccacagtcgacaaccaaccacttgtctcacaaacggcggaggaactctagtctcactcatgagtgcgcaccaacccttctgcacctcttaggtcc

SEQ ID NO: 548915 - DNA, 332 bp, Homo sapiens
agttcatccaagtgtttcatgggtcgtgagcgccgccccatgttcccatctccagctgtccgctcggccctgtgtgagctttgtttcgataccagggggctcagatggtgcggactgagcgtgcggcctgcgggctttgggatggaccgctgtatggtgggcggcgtgtgtgccgaggcctaattccatctttccaccatgacagagatgcccttgtgaggctggcctccttggcgcctgtccccacggcccccgcagcgtgagccacgatgctccccataccccacccattcccgatacaccttacttactgtgtgttggcccttatcgag

SEQ ID NO: 548916 - DNA, 815 bp, Homo sapiens
ctatcacgaacaaaaactctacctctctatactaatctccctacaaatctccttaattatagcattcacatgccacagaactaatcatattttatatcttcttcgagaccgcacttatccccaccttgggtatcatcacccgatgaggcatcgaggccagagagcagcctgaagtgcatggtcgcatacttcctattctatcaccctagtaggctcccattcgccctagtcagtctgccctgtatttatcactgcacaagagcacctaggctcatctaaaactaagttctactatcgtcactctcactgcccaggaaacttgtgcagaagaactgcctagagccaacgaagcttagagttatgcacgagcttacagcaagttgagcttgctagtaaataaacgatacgctccttaacggactccatttattgactccctaaagcgccatgttctgaatggccccatcgctggtgtcaatcatgtacttcgccagagtagtcttagaatcaggcggctatggtataatacgccatcagcacttcattcgtcaatcgctcctcgtgacaagaacatatagccgtatccccttccgttgttactatccgcgtatgaggcatgtattatggacaagctccgatcttgcctacgataaacagaactaaaaacgcgtcattgcatactcttcaatcaggcacatagccctgcgtagtagcagccattctcatcctagaagcccctgtaagctgcaccgcggcagtcattctcgataatcgcccacggacttacattctcattgactatgctgcctagcaaa

SEQ ID NO: 548917 - DNA, 118 bp, Homo sapiens
agcctccagaacaaggtggaatattccttgatttgaaggggaaaatattcagtcttttaccattaagtatgttaattcttatatttattttggttccccaaactaggcagcttgtaga

SEQ ID NO: 548918 - DNA, 968 bp, Homo sapiens
  misc_feature (588)..(588): n is a, c, g, or t
ggccatcttcatcatcatcgtgtggccgtgcatgcgaacgtggctctgatggccagcgaccacatccgagtggggcaatgctcaacctcgatggagctggtctgtgctagcgagagtgctagaacaaggcaggccccaatgcagcgggaggggcggccttgccatcctcgggtggcggtggtgtgcggtgcgacggcaagtggtgcgtggtgctggtggtgacgatggcctacatggaagctctcctgtggtcagtctctctcttatcttggcctgggtcaacgtgattgcgtgcctgggcggagcaaacaggcattgtcatcccagcattcaccctagcgccggagactccgaaggcgtgaccccggcgtgtctccaaggactcccatggcgcgcgcgtgaattgccagagtagccatcagtggtacgcacagcaccttggtagccagactttacctcatcagactaccggagtagagcaagcctcgttcatcccacgcattgtacgcctttttgtctcaacacgctgtaagaccacagggaaaccacttcaaagtgaaacaaacgtcccccagcggttgaaccggngtggaaccccccatatgggacaagcaaccttggcatggccgcgggaagatttccacatggacgcgtaagtagttttggcctcgactcgttgtaggaggcaccgatgctgttgtgcaaggagaggaagtgcgcgggataggcctgggcgtggagaagtggtttgcgcccttggaacggagaagaagcaggctaacgccggtctccgagcaattgtcatggcacagcgggcttaccggccctcggtgccgttgcggtctacccgggttgcaggaggcctcggagggttgtacttgcgcgtgaccatggcgttgggccgaagaaaggaggcgcccgagaatgatttaaccttggcagaaaaagaggtaaccgggaccgtccct

SEQ ID NO: 548919 - DNA, 166 bp, Homo sapiens
tgcagcggactcggagctggtgcttaatgtgaagacggcgatcgactgcgggaagtgaagcactgccttcagaccgtttggaacaagccaacagtgaaacccctttcctgcgacatatgcaatgacgttgtcaccgcagctggtgatatgccgagtccgctgcatt

SEQ ID NO: 548920 - DNA, 363 bp, Homo sapiens
tcgatacgactttatttcaatattatgtcgtttttttttttgagactgaatctcactccatcgtccaggctggagtgcagtggcgcgatctcggctcactgcaacctctgcctcccgggttcaagcaattctcctgcctcagcctcccgagtagctggaactacaggcacacactgccgcgcccagctaattttttgtattttttagtagagacagggtttcactgtgttgcccaggctggtctcaaactcctgagctcaggcaatctgcccgccttggcctcccaaagtgctaggattacaggtatgagccaccatgcccggctggcagttgtattttttaaagcccttctgtcgtcttctc

SEQ ID NO: 548921 - DNA, 456 bp, Homo sapiens
  misc_feature (44)..(44): n is a, c, g, or t
aattttggttagaaaaatgctatatgagtgcttttcttttaaantgctaagggcagagaatgaaaactacctgtgtgtgggagtgatatgatttggatctgtgtctgcacccaaatctcatgcccaaattgtaatccccattgttggaggtggagcctggtgggaggtgattggatcatgggggtggtttctcatgaatgatttagcaacatcccctttggtactgtcctcacaatagtgagtgggttctcatgagatctagttgtttaaaagtatgtagcacctccctcctgtctcttgctcctgctcctgccatgtaagacatgccagctccccctttgccttctgccatgattgtaagttccctgagacctccccagaagcaaagcagatgcccacatcttgcttcctgtatagtctacagaactgtgagccaattaaatctattttctttat

SEQ ID NO: 548922 - DNA, 101 bp, Homo sapiens
taagatgcctgcctcagttcatcctggaatccaccacaggtacttgctgctgttgagaacgcctcgggtacaactagacactcctaggttgctgtgtggag

SEQ ID NO: 548923 - DNA, 1214 bp, Homo sapiens
tccacacaacagtccatttttttgatgcccactccaggctgtcttagggttgagggtttgtacaaaaggaaaaccagaattcagttccagtgccgtggaggttctagctcgaggggggccggcgcggaaattggacacacagacagacacaatagattcgtggcatcgtgatagccagggcataacagtcctcagtgttaggggcactcgtgggccacgaggtatagctacagaaagagacttccatagaagaaatgtcctcacagggggtggtggagacgcaattggacgcaagtggcacgccattcaaaaccttacgccatttggtacattttgtaagcgcatgtgtcgactcttggaacaccatgtgagacaccagggttgacgcaccacaaggcgctaggagtgcatcgtggagacatgtgcgcagtcgacagccaaaggggcttcacccctgtcttgcgccatcgataaatccccatatagtgtgggtgacaagccaattcattcccgccaaacaccgcaagaattctctgaggcccgtgataacattgagaccattatgttgccaaacatgtggggccctttttctccagtgagtaaattccaaacctctacgcgagagggaattaacaaaaggggctattcccacgttgaaagaccaaatttcctactggtgagcacccagagggtgtgctatatatacccccgatggtgcctgtgggacaacccttaaaatatcaaagcaaaaccaccatatttccaaaatgagcacacatttctcttggtgggtccccaataaaaagggtggctcaaactaccatagggggggaaccaataaagtccataacgaaaactcctgagggaatcaccaaaaagactccagttgaaacgctgtagtgcgcaacaaggcgggagatccagtagcaaaagcgccccccaaggagtaaacaaggaggccccccatataaggacaaccgtgtcaagaacagcttacctacagaaaggaaacgcgccacataatggtgaaacccccatctcaatcgttggcactactgtgtgtataaaatcaggagcaaaagatacacttgtgaggtcccccacaaggccaaaacgcactccacaagggggatttgcggccaaagctcttagggcagctttggtgcctatgtcctattcacacaatgtgaatcacacagttagggaccccattg

SEQ ID NO: 548924 - DNA, 159 bp, Homo sapiens
cccgaatggaatcattcaaatgtggttctagatggcgatcaactctggaactgcaaggggattttgtagcgaagctggaatgtggcttacatctggcagttgtgacagttctccccgctgcaatctgaatctcaccctggtaaactctccccatgggac

SEQ ID NO: 548925 - DNA, 429 bp, Homo sapiens
attttaaaatttattctgattagtttgtgtctttttttttggttttttgaaagagagagtcctgctctgtcactcaagctggagtgcaggggtgctatctcggctcactgcaacctccgcctcccaggtccaagcaattctcttgccttgtcctcccaagtagctgggattataggcacacaccaccatgcctggctaattggtgtctcatttccaagagtagaaaccctaaatattttattttcatccctttcccaaatggctatgaatgggattaaaggattacagattgtaaagtctattattggtgaattctaaatgtagtcctgctgttgtccctgtggaacacatcttaaagaagtcacatatttggcacgtcctgcacgtgtaccccagaatcttaaatctataattaaaaagaatagtttc

SEQ ID NO: 548926 - DNA, 473 bp, Homo sapiens
cccacagtgagagatatctgcacaaaacgccccttttgcgaagagacactcaagaccaaacgagcgcatgcctattatcatgtgaaaaacagcccaggaaccaccgcaggggccctctcagcccaactaatgacgtccatcctaaggccgtgactacacttccactacataacgctcctcataccaagcctgctacccaacacactaaccatatgccaatgatggcgcgatgtaacacgagaaagcgcataccacggccaccacacacgatctgtccaagaaggcctaaaatgcgggataatcctatttattacataacaagttccttccttcgcaggatttttctgagccttttaccactccagcctaacccctaccccccaattatgagggcactgccccccaacaggcatcaccccgctaaatcccctagaagtcccactcctaaacacatcccgattacccgcatcagg

SEQ ID NO: 548927 - DNA, 392 bp, Homo sapiens
gtgcaggtggactcgagaggcccggatggagccgacgatccactgggtgtacttgcgctcatgaggatcaatgatcttgcagtcttcagttgtgctgggtgccatcggcagtgatctccttctgcatccttgtcgtgctatgccatgctacatggtggtgccgccatgactgaactgtgttggcgtacaggtcttcgcggatgtccacgtcacacttcatgatggagttgaaggctagctttcttggatgccataggactccatgcccaggaaggaatgctggaagagtgcctcagggcagcggaaccgctcattgcccatggtcatgacctggccttcaggcagttcgttagctcttctccagggaggagctggaagcagtcgtggccatc

SEQ ID NO: 548928 - DNA, 323 bp, Homo sapiens
cgagcggccggccgggcaggtacgcgggacctggaatagtgtttgaccaaacacgtgtaaggcatacttttaagcaccttatcatacacattaagttattggatgatacaaacagaattttaagggccaggcatggtggctcacacctgtaatcccagcactttgggaagctgaggccagaggatatcttgagttcgggagtttgagaccagcttggttaacacagtaaaaccctgtctgtaatcatcatcatcatcatcatcatcataattaatgaaacgatgttgtggtgggtgcctgtggtcccagctgcttggagggct

SEQ ID NO: 548929 - DNA, 555 bp, Homo sapiens
gcatcggtatagagtgtgtatacttacctatctggagccagagggagtcagcaaggtggttctgtggaggtcagctgagcttactcataaccatagagaggtttccctgttgactggctttgcaatgctgcaggttcctctaatccttgagtagaccagtattgggactcagaaaatgataccccaaaacaaaggcctcagaggcagcctcaaaagcaaaagtttctctctaagtttatctcgagtgagtgctgtgctattatcaataacctatcggcatgctgctgctgcacaacaagccaaccacatggctcagggggaagacaagagtgtgtattacttacctatctggagccagcagggagtcagcaaggtggttctgtggaggtcagctgagcttactcataaccatagagaggtttccctgttgactggctttgcaatgctgcaggttcctctaatccttgagtagaccagtattgggactcagaaaatgataccccaaaacaaaggcctcagaggcagcctcaaaagcaaaagtttctctctgacctc

SEQ ID NO: 548930 - DNA, 165 bp, Homo sapiens
tactgagaagcagttatgatgaccaggtgatagatccaaaataatgccacatttgttaacatttgtcgcatttctaaaccatccttaaagaaaatcatagatggggtctcaccatattgcccaggctggtctcaaactcctaggctcaagtgattgttccccgct

SEQ ID NO: 548931 - DNA, 212 bp, Homo sapiens
tataggtggtcttgaacctcctggcctcaatgtgatcctcccacctcagcgtcccaaagtgtttggattacagatgtgacccaatgcacccaaccaaacttcttttttttttttttttttgtgaaaagaaaggtctcccctttttggcccaggttggtctcaaacccttgggcccaattgttcctcctgcctcagcgggcctctatatttca

SEQ ID NO: 548932 - DNA, 576 bp, Homo sapiens
acatcgaaatatttcagctagccggtcgctcgcaaaatattccaactatgaaatcatggtatgtgacaacaacaaaaagagaggtgttttctcctgtaaggagtacgccacgagagactcactctattagtccgcatgcgcgaatacacgcggtgatatccaccgcgccctaaggtaatggtggataatttggtgcctaaatgagaaccaaccaggcgtggtacgccagttatatatgttctagaaaccagtgccctgcggtgaccaactccaaggtgccatggccaattgaatgcgccccttcgcctcgcctggaattaaggtgggcataaggaacgtggcatcctagcatcaacttattaatccttatcaaagacctcgttttttttcacaaaataggcttttcaaagcaattgaggtgatctggcagtaggcacgatattagacaaggaaaggtatgagcaaattcaccacgggcggcccatttgaacagactacatagatgcaatccttcttttcaggcaggccactccattctcaaaacaacccaacaaccaaaaaaccgtcaaaaaaaca

SEQ ID NO: 548933 - DNA, 1172 bp, Homo sapiens
  misc_feature (352)..(352): n is a, c, g, or t
ggtcagtcgcatcttctgttgcgtcgccagccgagccacatcgctcagacaccatgggagaaggtagaaggtcggagtcaacggatttggtcgtatggggcgcctggtcacctagggctgctgttgaatagcatcttggtaacagtggatattgatgccatcaagtgacccgctttcagttgaccttcaagcaatactagtggcttgtacatgtcttccaagtatagatgcctaccacatggacacaattccattggacacctgtcacaggcatgagcaactgggaagcatatgtcactcaaatggtacatcccattcaccagtcttccagagagcgagatccctcacaaanatcaaagtgagggcgtatgcttggacgactgatgtacgtctggtgagatgtccagcatggacgtcttcaacacacgcatggagaatggtcttggagggctcatgttgcaagtggagtggacgtcccacagaggtggtcatacatactactgaccctcctctgtctagatgcaccgccattgttgcgtccatgggatgatgaacgcaatgacgaagtatgaacaatcagtcgtcagaagatgcaatcagacaaatggccgtcctgcatccagcaactgtcgttagcacccctggacaaggtcatccaatgacgagcttagagtaatcgtggaacggactcatgactcacaggtccatgcccattcactgcatccaggaagaacttgtggatggtccctccgggaaacgtgtggccgtgatggccgcggggcatctccagagcatcatccctgacttctactggcgctgcaaagggtggtgggcaaggttcatccctgagctgaaacggaagctcacttggcattggccttccgtgtccccaactgcaacgttgtcagtggtggacctgaacctgcgtctagaaaaacttggcaaatatgattgacatccaagaaggtggtgaagcaggccgtcggagggccccctcagggattccggggtacaactggagcaccaggggcccctctgacttcacagcgaaaccaagtctccaccttgacgcggggctggatggccctcaggaccattggcagcgcactcggatgaacacaatggtcacgaacaagtggggccctgccaaaggcccagaaaaccggacaagc

SEQ ID NO: 548934 - DNA, 601 bp, Homo sapiens
gcacgagcgataatgaatatttatatatagattataatgatatgctacatctattagaacactacgtataagtcctacatggacctttgtatgttttatcactgtgactgcctatactaacaacattatgatctcagtggttacaagacatcagtaagcctgaacaacaaattcatagcacagctgattacattactattcataggatgactggaaaggttgaatctataatccaatcgaggagtaccacatagaatatcttcaattgactatataggtagcacatataatagatatggtacatgataagtcatatacttaatatacaactatctggacctattaatctcacttatggacacatctaatttaaacgataatactgtggcccattattaaaatatccatgttaattcaataattgcatactaaattttaattactatatcactataaacttcattctttttttagtgtaattcctaatgtattttaatgctttatatatatttttactgttcataactttgaattattcaaaattgtatttatattgattatatctatatggttccaattttgattattttaatatatttaa

SEQ ID NO: 548935 - DNA, 485 bp, Homo sapiens
  misc_feature (107)..(107): n is a, c, g, or t
  misc_feature (136)..(136): n is a, c, g, or t
  misc_feature (318)..(318): n is a, c, g, or t
  misc_feature (343)..(343): n is a, c, g, or t
  misc_feature (349)..(349): n is a, c, g, or t
  misc_feature (359)..(359): n is a, c, g, or t
  misc_feature (411)..(411): n is a, c, g, or t
cctaagcccgtaaaagaatccagaagacctcagatggtaaaggacagaggtctacgtctactgctgttagcgctcaggtatccatcctgttttccctaatctcctgnattctgatccaagaagtctttgagacctnatgtcctagtgccactcctttcatctagaaagtggaaacctatgtgctgtggcaccatggcatggtacacaccctgcagtagattcacgctgcacaaatggggtagtccacgagcttagatatgctgtctgatgctggctaggacacacactgtcattttatgagaataatgttaaaacaanacattagatatcacagacaaacaangaaacntgagatcacnttatatatctattgtaatagttaaaactgtctataatgtatttttctccagnaaactgaaaataccatagacataattttattaatcctcacaacacatctgtgaggtagtatggggttaggtctg

SEQ ID NO: 548936 - DNA, 230 bp, Homo sapiens
gaagtcatgaactcgatgcatacttaaacatgactcagtaataatctcagaatataacataaacaatgtgacaaggctgtcttaagaacggctctgctataaatagtatagaatatacagaattacaaagtcaagtattttattatcaaaatataccccctccctgaaactaacacaagctaagtgttaagagttcacagctcacctacctcaaaatgtgtttccaaatt

SEQ ID NO: 548937 - DNA, 114 bp, Homo sapiens
  misc_feature (4)..(4): n is a, c, g, or t
gtanagaaaaactttcagaattgtttaatgcaagaaaaaaatcatatttaacaattaaaaagcaaacttcatattacagtccaaacactaaacctacctgggtctgattgtatg

SEQ ID NO: 548938 - DNA, 327 bp, Homo sapiens
  misc_feature (19)..(19): n is a, c, g, or t
aaaaaaaaaaccccccctnccctttttttgaagaaaggaaggggttaaataatttttttccccaccccttttttgaagggcgggggctttttttttgaaaaagtagtaaatagttttttgtaccctgggggaaacaccacccccccttaaagtggcccctttttggtaagggttaaaccagtgaaaactaggggaattgtttgggcggcttttagttttttttaatcaaaattactaaatgataaaattcaaaaccttgttccatgttttccttgggggatcgataatcttttaaaaggaaagactttgtccggcctttttccccca

SEQ ID NO: 548939 - DNA, 368 bp, Homo sapiens
ggatgatgaggcgtaggacggagctcgagaccgtctctgcccgcagatgtggcggcaccggcggatccagccttatcggttcctctatgggcagcagcggtggaggctcgattgactccttctccgaacatctgatcactcgtaagcccaggacggcgcttgctcttccatccgcgctccccgaaggcggccgcctgttcatggatcacacgggccctgattatcagcctgacgtatctgtacagcgacgggtagaagaatcggaataaattgcataattattacgtgcacaacgacaacttgaacatgcaatcattagagatcatcatataaggagtcatatgccgccccacgacgatcgtgcgggc

SEQ ID NO: 548940 - DNA, 172 bp, Homo sapiens
ttggtgggcatacagaaaatcaagtgtgatgggaggtatgggcctctctatacgtcatgaaagcctggaatgggtggggtgggtgaaatagaagaatgaggtttcaatgtgattacatttttcacgtgtagtgatgatttgggggttttggagagacctgtaaccatgaaaa

SEQ ID NO: 548941 - DNA, 900 bp, Homo sapiens
ggctggcacctgagacgctggcgcgcacgctccggcctgcgcccggtccggccatggacggccccccgacccgtctccctgcgatctccgtttcggtctcgtgctccgtgctttttacgccccgcagaagaagttctggccctgtggtggccccaaatgcccaaatgtgaatcccttccggcccggggacagcgagcctcccccgtgcacccggggcccagctgcgcacagatgggccgggtgggcgagattcacaccgatcgtcccgggaaggaactatcacccattgtcatccaatcatccaccattgtcgtggggcgactgcgcagcacggcatagacaggcaggggtgcgtctgtttgagcgttgacctgtacccggaatgaggcgcgcagtataagcgtggatcagacggaccagtcgatataaagtcaagatgagtaaccatcatgtaataacgtggatcacaacctcatcccagtcatccccaccgtccagactcaaccccgaccccggaactaccccactccccagcacaccaccacctgaaatcgcatcctcacccatcacactagatacaacacacaatcatatctcgtgctcccgtcgcctacccacgctgcagaccgctccattctcccctcctcgctaccccctcataccagccactcatggcgtcactcgaacagacatatgcccggacgcgtcagcgcaacttagcctccatccactctcgtatcgtcgaacgccagcacgggagaggacgatggatatacgagtgccgaagactatgtagctgccagctagtaccggacagagaattagacaggagcactaaggtcctagtcgtagccgtcggagcaatgcgcatcctcatatctcgtccatagcagacagcgg

SEQ ID NO: 548942 - DNA, 129 bp, Homo sapiens
  misc_feature (95)..(95): n is a, c, g, or t
tatctaaggatcgcggcgagtgaggtcagatataatgctaaagtaggggaaaaagtaaaaggctgtgagttctgttgcagagtcatttgtagacnttgcaaaatctaactaattttatattatagcttg

SEQ ID NO: 548943 - DNA, 709 bp, Homo sapiens
tcacaagctgtgccccctactttgctgggaaccagaaacagctggagcgaccctgcagcagttcaacatcaactgcggcctccaggactgagaaaccctcctggctagaggaccatgagctgctcccagcccaacttggctatcacagaaagaccttgggaagggcagcccccgggtgtgggagattggacctggtaccacctgttgtcaccgttgccctctggcttgggctcctttttctgctggggcctgacacccgttttgcccccccttgctatggtgggaagaggcctggaggccccgaagttgctgccccgtctatcttcctggcccaccgggcttcattccccgatcttttccttccacttcacagcccacggctatgaccaaaccactcctggcccatggcatcactcttcaggctggggtgtgctccctgacccatgacagagcctgaaatgccctgtcagcccatggcagctcttctcggactcccctgggcccatgatgttgcgtctaataccctttgtctctcctctatgcgtgccccttgcagagaaggggactgggacccaaggggtggggataatggggagcccccttgctggccttgcatctgaataggcctaccctcaccccccccccccgtttaattgtgcttagagccccagaagattgggatctagccctaggaataaaccctttcata

SEQ ID NO: 548944 - DNA, 105 bp, Homo sapiens
agtagagaccagagatgaagcaggaaacagagagaggaagatggggacagacaggggacggcagaggggaggggagcaagacagagaacagcagagaaaggggac

SEQ ID NO: 548945 - DNA, 723 bp, Homo sapiens
gtgaaggtcggtggaatcctggggtcctccaaatctaccaggccatctccccagtatcccagttcttcctgcgtgcgggcagagagtggtttgggccctcgggaacccactcagagcgaggctaaatttactgtagatgtggacatttcttgttagcatgcatgatgtggcctgtgtgttagacctatagatgtgtgactggaaccagtgtggcatgtgatgtccatgggtcattggcctttctccaatggacctcaacactgtcacctaatctatgtgtgcccagcatcatgtgttccctctgtgcatccttggtgacatacacattgcatcccattagtgccataaccgcattgaagcccagaatgcacctgaacttggtgtgccccaccccaaatgctgggactgcacatctgtgaaatgcattgggtgacctccaactgggaattgtgcctgtgaccctgcaaacgctttgacagaggggtgttgagattccattgtttgccagcgattatagccgctgcgaagaccctgaaagcgatagcgccagaccttccatgcccgagagctcctggctaactgtagcttaggtcctggaaggttgggtggtgactcagggcgactttgggacctgctgattgcgcctgtcgttgggattttacaatcaccatgaggcggatgtggccccgatacagagcacctcagtttgggacactaggttgg

SEQ ID NO: 548946 - DNA, 446 bp, Homo sapiens
catagagacatactatatatatgactaggaagactcataaaaatatctgtctcttcaaactctacaaattccatgtacgtccaatgagaatactaacaggctttttcctggaacctgatggttgcaatcacaccaatttcatcatggcaagcagtcaaaggcaccaagcaaaagttcaaagtgcatttttgcatggcatcaagcaagcagccaggcacagcaattgaccatcacaacatgagtgccaggccttattcaaacaaccatccagtgcacacgcaggccagtgctggccacctagctaccagggaatcacacacaaccagcatcacacagggcaggcagcacttggcagcaaccccatgtcaaccatgcttcacgcttatcctggcacaaggtcacagcttgttcactgcaccaattacacaagtcacaggaacaattgc

SEQ ID NO: 548947 - DNA, 306 bp, Homo sapiens
ctgctgccagtactggatttctggaaagttgtcagccaggtgcattggctcactcctgtaatcccagcactttgggaggtcgaggtgggaggactgcttgaggcaaggagttcaagtccagcctgggtaatataacgagaccttgtctctacaaaattaaaaaaaaaaaaatagccaaggatggtggtatgtgcctacagtcccagctactcgggaggtgaagcagaaggatcacttgagccggagttcaggctgcagtgagccatgattcgcactgcacctagtctggcaacagagtgaagaacc

SEQ ID NO: 548948 - DNA, 112 bp, Homo sapiens
caaccgcagccatcgacttctacaagcgtgcgttcaatgcgagcgaacagtttctgcctggcgatgcccgacggccggctcgcgcacgcgtgcctcgtgattggcgattcga

SEQ ID NO: 548949 - DNA, 109 bp, Homo sapiens
aactgagcttcaatgaacactgagtagtatacaatggtggtgaaggaaggccgagaagcaccacagcagcaggatggggaagaactgggtaatgatacacaagccgctt

SEQ ID NO: 548950 - DNA, 479 bp, Homo sapiens
cccggtcccatgcacagttaggtagtagatgaaggcagtttaactaagctccattcagggcccagtgttgtagatgttcaatgatgacacttcatcagggttatggatgctgtgtctcagccccatgggactgcttagggaaagaacacacaggaggaagctaaggcacagaactgaccccgtcactgagcctagtgcctgctgagtgctcacgcacactgacagtaaaaatgccagtatggcccagttttaacggaacccacacactttcatgagctttacctcctgaagccataacaggttctcacagtgaagatctaagaaaaaaaaaatcccttcatgcttccagcagtgggagggggaaattagccattctgaaatatgcccagagcgtatggttcttcataaagcccaacctcaggagaaactattttaccagagctgaggttttaccagagacaaactgacctggggaaagg

SEQ ID NO: 548951 - DNA, 195 bp, Homo sapiens
  misc_feature (78)..(78): n is a, c, g, or t
aagccacagacattgccatccaggcagggggagatcatgaagctctaagaggcagctctattaacatctacgccaagnacaccaaccaggcctccaggtatcgagtccgccatggagagggcccctacatgagcccaatggagcccaggaatttgcactttagcaaggtcttggccacctcccaggacgggtagg

SEQ ID NO: 548952 - DNA, 103 bp, Homo sapiens
agcctgcccgggctccaaccccaattgtggacctcaggcaagagactgcttctctgtgcctcagttaccttgtggagtgggccatcggaaatagtatctgtgc

SEQ ID NO: 548953 - DNA, 1083 bp, Homo sapiens
  misc_feature (862)..(862): n is a, c, g, or t
cctgagcagttggtctgaccacggccggacctaggtcggtagcgtgacacttcagatcaactagcagcgctggccatatgtgaggacttactgggttttcgacctacgctgtgtacgtcagtactctaactcaacttgaatcgaagacctgccacgtgcgtcggaccagagatgctctgaaacacatgtctggagtgagtcgttgcacggagggcttcactgttgcctcgcgaaatccattgtccaaggctatgggcaaggtgctcgattgttctgcgatgactgctggaatctttgcaatagacgtttcatcgggcacccacaactcccgtggtcgatttctcgcaacggagcaaatttttaaagggcaaagttggccctggtttcggaaaggcgccttggcgtgtgctgggttagaggtgggcgttttcccttggctccaccctacaacctgatcaaagcaagcacatttgaggccaacgctagctggctgcacagacacccgtgacacttggcggcacaatttcggctacccaaatccggaaagtgcgtacttttgaggcagccttttctcgtagacattggtcccataatctccagggggacttactggagcggctgtgtaggcttaaatctggtgcaacccaattggacaaggtccgatatgcgaacgttagttgacaacttgaaccctccctgaaaacgtccaaaggaataagtgttgaagtcgccctcaaggggaattgtgcagttgcgtcctcgggggcatttttgaaacacacggtcccacatccttggcatggggcctggattccccgggcactgtgtggctcgttaaaaggtaaaaagcgccagaagttantatgaacgggaattggaacacacaaggttggatttgcgttccccaaagggcccgtgtgctttggcaacagggaagaaggcgcgacaatcattttgagccgcccatataggggtccttaagttgactttccgggaacgcccgaaccgtgatctttttacgccttgggttatgggagaagagattggcaggagggagttccataaggagaaacggggagttgg

SEQ ID NO: 548954 - DNA, 143 bp, Homo sapiens
cgatgaatatcagtgccttcaggctgcggtccctggcccagcgagcatggggcagcggcccgatggggctcgacggggtggtcaagtattggcggtcacccaggccccgtgctccagaagggtgaggttcacagtccatgcag

SEQ ID NO: 548955 - DNA, 370 bp, Homo sapiens
actaccttacttaaactcacattatgattatttgttaggatccatgaatcactgcattttggtatctagagtttttgtcttcgaacgccaattgggtcgctcatcgtttccccggtccccagaggctcccttaactatcgcaaaatgccaccccatgggaagagcgttccttgaaactgtcccggtctggtaattttttcaaaaaggaagccgttcggggacaagtcaattcgagtcaatgacgtacatttagacataaagtcctccccaatttgagatacttttgatagtccatgtaagtcgacactgaccaggctgtgacaagaagagaggaacctgtctccaatagtttccacattcaccaatggcc

SEQ ID NO: 548956 - DNA, 207 bp, Homo sapiens
ggtttagggagagaaatccaccaaccagatccttgctagttttgaagatgcaggaaggtgggcatgaactaaggaatgcaggcagcctcgacaagctggaacaaaggcaaggaaacagattctttcccagagcccccagaaaaaaaatgaagctttgcagatccattttagacttccgacctccagaactgtaaggtaatacatttg

SEQ ID NO: 548957 - DNA, 92 bp, Homo sapiens
gtcccaaaacttttttttttttaaaggcatttgtgggctcaattttaatttttttcttttaaaaaaaacagctgggcccatcccaaaagcca

SEQ ID NO: 548958 - DNA, 983 bp, Homo sapiens
ggagccacggcgtgcgagtacggggctgaaggcatgcagcagcggacagagggcgccctctgtctagtcgctgcttgggtctcggtgataccccgtatctgcctgtaggtgtgggacgtgcgtgcggcgagatggacactcccccgctctcggattctcgagtcgggaatccgatgaataccttggtcacagacagagcagtttggcaggatgcgttttcccgaggagtcttctgtaagccaggcctcacagtgtcgtgctgtaagggggcgaacaagggcgtgaacgacgtgaatggcctgaatcgcggttggcagaattcaagcgggatctggaagtgggtctgcaaggctcgcatgtgacactgggtccggtcccggacatcgggggatctgaggcgccaggcacctcagaacaaggaccagaaatctgttgatccatgacgacgacttcctacgcgagagatgagtttctatcggcaaggcgaggccgtagtgctctgcgagttcttacacccgtctccatcagctcaaagtccctacgaagcgagccgagtgattgatagtggcgcaaatggcaaatctgatctgcagatgcggacggattcgacagaagctgcagagtaaacaggctggcatggacgaggtctgaaaaaggctaagcaatgccgaggcacttaggacatacgggcagaaggtgcaacggaggttctgcagaagaggcagcatgagaaagccagtactgatgaggggcatcagagagtatcagaagggtccgctgataagcggattcctgagggagaatagaactctggaagccaagaaggggacaaggccgcgattggcgggcccgtcaacacgggtaaacccagtggtggcggcgccaaggcgccggacccgagacagggcaccccagccatcggcggccgcgggcaggtaccgcagcggaggaacacttcacgagagaccctggtgacaaatatt

SEQ ID NO: 548959 - DNA, 717 bp, Homo sapiens
  misc_feature (679)..(679): n is a, c, g, or t
  misc_feature (701)..(701): n is a, c, g, or t
  misc_feature (708)..(708): n is a, c, g, or t
gatatattcttacttcattattttcctgtttttatcacagattcgaatcttgggccatggcataatggtcaaattcaaacattttttaaatgtgacagatggacttcatgcaagttgcagtgggttctggtactaaaaatgtggttgttttttctgtttacgtaccctgcttagtattgacacttctacccaagagggtcttcctaagaagagtgctgtcattatttcctcttatcaacaacttgtgacatgagattttttaagggctttatgtgacctatgatattgtaatttttctaagcatattcaaaagggtgccaaaattccgtttatgtcctaaatccaatcaggaaagtaaggcaggaaaagttgatggtattcattaggttttaactgaatggagcggttccttatataataaccattgtatagtagggataaacccctaacttaatgtgtgttcattttaaagtgttctgtatttttaaattgccaagaaaaacacctttgtaaatttggagatattttccaacagcttttcgttttcagtgttttaatgtggaagttaacccttcccaaaaaaggaagttggcaaaaccagccttttagcccccttttttaaatgaataatggtagcctaaacttaatatttttataaagtattgtaatattgttttgnggataattgaaataaaaagttntcattgnatgccccta

SEQ ID NO: 548960 - DNA, 922 bp, Homo sapiens
gcccagccagaggtgtagccaagtggtccagcgtcactccagtgctcagctgtggttggtaggagctggcctgtgtgcacagcccttagtgtcccaagccgggagccaacgaagccggacacggcttcactgaccagcggttgctcaagctcgcaagctctcatgcaagtgcccatgtggagcctgctcgtcacccaccatgtggcacctgggagcccgctcacactatcccagtggtgccctggagaatccttgatgaacgagtttggggacatcaaggaccaggatgtcctgtcatcgtcgttgcttgatggaatgaagacctttattcagcccttgaccctgttgcattcccgatgacacatggacagacttcacagcgtctgctcataggacctgcatccttcctggggacgaattccactcgtccaagggacagcccacggtctggaggccgaggaccaccagcaggcaggtggactgactgtgttgggcaagacctcttccctctgggcctgttctcttggctgcaaataaggacagcagctggtgccccacctgcctggtgcattgctgtgtgaatccaggaggcagtggacatcgtaggcagacacggagcccgggtccaggagaagtgctccctggaggcacgcaccactgattcccactggggcccggctggggcccacgcaccgacgtcagcctcttaccttccccacctcaggtaggggtcctcggggatgccgttctgttccaagccttctgcttcttgggcaggtggacattgcctcaaaggcatccagggagcccggcggcatctcgacgggcaccgctcttgccctgtagcgctgcttgaagttgtgggcgaagcatagggggcttgcaacgtactgtaggcgcaacagtagctgtagtgacactg

SEQ ID NO: 548961 - DNA, 453 bp, Homo sapiens
cgtcagacaccatggaggactgttgaaatgggagctgctatggagactgagagagaggagaagacagcaaggactctcagagcgactgtgtgtctgctccatgtcccaattcagagggcacagatgccttgcctgagctagaatgaagaggaggagcacaggatggggagtcagtacgcgcaaggaagcctggctgtgggttgcgcctctggagacacttccagtctgcaatcataggacaaaactagaatctgcagttcagtgcttatgcgtcacgagagactatgtacacatacacgaaaacaagtcattcaccatcggtgtacaacgtctttaccccttgggcatttccttccgatgtttacaaaggaacgctagccggtcgcggtggctcacgcctgtacttcctgcacagtgggaggcctcggaaggctgatcacctgaagtccggac

SEQ ID NO: 548962 - DNA, 963 bp, Homo sapiens
  misc_feature (241)..(241): n is a, c, g, or t
ggcttaacttgttcccttgtatgttcgggtcttcccaggcgggcaaccggcgggtcccattgtgaacttcaagcggagctggcttccaaggcctgggcggcggcgcgaaggggaagcgctcgtgggcgcgccggggtggtgggttgggggacagggggttggtggcgcggcgcggtgctgtcgttctggtgccccactccaaaagggttccggtgctgcgcacggagaggaacgagggagntggcccggacaactctcccctggacgaattgacgagaacgcgggccagggagggcacgcctggtgtgagtgacactgtgaacagacttacaacactcctccacgaatggtcttccaggtaagtggtctgaaaggtttttaatctccaggtggtctacaagggtaaactaccaactgtggcttctcccggcggacaggctttccaagtgtaactgtaagtggactttacgtgtgaaggagactggtggttacaggtttttcactatacactcttggctatctgaggttcttggaagagatggcgtttcataacgttggttcgaacaaaccagattgacgaacagaaattattattcgacatatctaatggtgatccatgtaaaccgtgtgtctctaacggccattcgtgtggaacccacagagttggagggcaaatctttcggttatttagatgtcttagggtgggagggagaagattccaggttgagttatcttggagaatgttctgatttaatgtgtagcacggggaacctggctaactttcaactgtttattcaggggtacgtggttcacgatgctgttggtatgtgggactctgaggggtacagaacacttaagttcttcagagagtttatggttgtagaactttagtattttgtcgaagtgtataggtaataagagtatgttgatagtgggcaacggttagaatatcggttttggggc

SEQ ID NO: 548963 - DNA, 132 bp, Homo sapiens
tgggcggatcacttgaggtcaggagttcaagaccaccctggccaacatggtgaatcctcgttctactgaaaatagccaatattggtctgcaaccggtgtgcaaccaatattggtctgcaacggggatcctct

SEQ ID NO: 548964 - DNA, 626 bp, Homo sapiens
gcacgagaaattaggcatagaaggaacatatttccacataacaaaggccatatatgacaaacccacagctaacattatactgaatggggagaagctgaatgccttacttccaagaactggaacaaaacaaatatgctctctttcaccactcttattcaacacagtgctagaagttctgactaaagcaatcaggcaagagaaagaaataaaggttttccgaattagaaaagaggaagtctaattgccccctctttgaaaaatacgggatctaatatctagaaaaatgtagagactccaccaaaaactctcagaactgatcaacacagtaaagttgcaagatacaaaatcagtcaacatgcaaaagtcagaagcattactatacaccaacaacaaggtagctgaaaaagaaaatcaagaaagcaatcccatttataaaagcttcaaaaaaataaaatacctaggaatgaaattaaccaggggagtgaaagaaatcaaaggaaaactgcaaaacattaatgaaaagaaatggaagaggacacaaaccaagggaaaaaccatccaatcggaaggaaagggaaaaataatatgggtaaaaaaatccaactacccaaaggcaaaatttggaa

SEQ ID NO: 548965 - DNA, 246 bp, Homo sapiens
tacacacatatgacaaaaaaattcaaaaaagagaaagaaaaaaaaaaacccagaaatctggcaggctgaagaattcaatgaatgaaataaaaaacacaacagagagcttcaacagcaaacttgatcaattagaagaaagaatatctgaacttgaagaagggtagttggaaattacccagccagaaggaaagggggaaaacaaattgaaaagagtgaagaaaaccgtgcagggggaattcgcgaatg

SEQ ID NO: 548966 - DNA, 537 bp, Homo sapiens
ccgatgaaaagaaaaatcggatcccgatataaaccattcgtctagatgcactcacatttatactccgcatgtccactatctcgccttcctgcgctcaatggaggacgtgacgattgccggatgccgcactggggctaagttgagcctcttctcatgcactgagagttggatgctccatgccctctcccagcgactacagagaacgtggtgtgtgccctgggcctgagctgtgggtctgttgtccatcatttattgggaccatcttcatcatcaatggattgtctccaggcactgcttcttaatgcagggggcctctgtaatgctcatggaggtgatggtgtctcttagagagaagatcactgtagactcttctgctttaatgtcttgactgcgctggccctatttctttcctttacctcattgagggccttcctcttctgcatgtccccgccctttagccaccccatgtgtggatgtttctcttcgtttgcgccgtgccctctcctctaactggtttccctgtctaaatgctggcat

SEQ ID NO: 548967 - DNA, 854 bp, Homo sapiens
  misc_feature (82)..(82): n is a, c, g, or t
  misc_feature (104)..(105): n is a, c, g, or t
  misc_feature (119)..(120): n is a, c, g, or t
  misc_feature (141)..(141): n is a, c, g, or t
  misc_feature (144)..(144): n is a, c, g, or t
  misc_feature (161)..(162): n is a, c, g, or t
gcatagtgggcttgctgggcgggccggtctcggagaagaggggagagtggcgggccgctgaataagcttccaaaatgatgcncacaccagttatcctattgaanngaggggactgatannctcccgagggcatcccccagnctngtgagtaacatcagtgnnctgccaggtgattgctgaggctgtgaacgtaccctgtggtcccctgttggcaatggacaaggcttattgtagactgggatgatggctaaaagcgaagcgaattttcataagtgatggggccacaattctgatagacttcttgatgttgtccatcctgcggcaaagcacgtatgggtagacatagctcgagaatccgcaagatgctgaggtgggtgactggcgacgcacctcagtgaccgttggcgggcgtgccagaagttgtactgaagctagggtggaaagcccatatgtggcaggaatgggtgtgactacgccccaggatcgatcaatttcgagcatttctcgtcatcgagagcgcaccctagctggcagggttaacatacgattcaaacgtagtattggcctgtgtaacccgttgaaggaaagtgcatggatatacacgtcgtgggcatgatggtaacgctgactggtgaaactgttgttgcgcatgaccgttctgaggtccaagctgatctcccagacagaaagctttcttgtgctaagatggtgggtggatgctagtgaatgattgctcgatgattagggtggcagcttagaagctgattggaatcaaggaaaggtacacgggtggaagcctcgtcgaggaatgctcaagttgggttagcatgggagtttggcgttcgaagaaagag

SEQ ID NO: 548968 - DNA, 700 bp, Homo sapiens
  misc_feature (82)..(82): n is a, c, g, or t
  misc_feature (104)..(105): n is a, c, g, or t
  misc_feature (119)..(120): n is a, c, g, or t
  misc_feature (141)..(141): n is a, c, g, or t
  misc_feature (144)..(144): n is a, c, g, or t
  misc_feature (161)..(162): n is a, c, g, or t
  misc_feature (447)..(447): n is a, c, g, or t
  misc_feature (451)..(451): n is a, c, g, or t
  misc_feature (607)..(608): n is a, c, g, or t
  misc_feature (639)..(639): n is a, c, g, or t
  misc_feature (648)..(648): n is a, c, g, or t
gcatagtgggcttgctgggcgggccggtctcggagaagaggggagagtggcgggccgctgaataagcttccaaaatgatgcncacaccagttatcctattgaanngaggggactgatannctcccgagggcatcccccagnctngtgagtaacatcagtgnnctgccaggtgattgctgaggctgtgaacgtagactatcccctggcgtccccgctggacagtaggcatcacatgcctatatatgtacgtatggtcaggaagcgtcaaagggcaaccgaatctattctatatggactcggggccgagcagaattactagaatagcctatctctagagtggtctgttccgatcgctcgactaggctacaagagcatttggtgttagaacatgttgcgcagaagtacccagagactgactgcatggctgcgggtggaaatggcaaccancccntgcaggtgaacccttggctggtgcgtgacagcagctctgtcgtgaaagacagtcgtgaaataccctgatggtgcgacggacacggttatatcacctgcccagaagtcattcagttgcgaagcgttgtccgcagcaaggcagcctcaggctgtgcanngttaacacagagtcaagagagagttgcgtgntgaacccgntgaatgaacggtcagaatacaaggtggcagaccagagtgaaacgcgtgactg

SEQ ID NO: 548969 - DNA, 168 bp, Homo sapiens
  misc_feature (37)..(37): n is a, c, g, or t
atcagctcggtactagatgtatgtctcgcatcaaggntagacagtggcaatctggtggaggcgtttcgggatttgactgctggggccaggaaccctggtcccagtattgaaggggattggtatccaccgtagtcgagggatgcacatctctcgcacagtaatacatag

SEQ ID NO: 548970 - DNA, 405 bp, Homo sapiens
ctcttgtatgctcagtgtcggcgactgcagcggccatgagaagtcaatgatgcacgggcagagagaggccattatggacgggtggataaagaacaatgacatcaggagcatagggtctagaacaaaatcagtggtgtacagtgacaaagagtggggctgtagtgacaggcagggactacctggtagtgacagacttgggggagctggtgcttacaggtccggtaatgatgcagcatatcgggaggagtcagtaacaagagagtggactatagccggtagggaagctgcgagtacacagagtggccggtcccgggacagtacggtgcatgggggaaggtgacaggctgaacgacgagatgattccgatggaagcaacagggcagtgcggggtaaggtgaggttaga

SEQ ID NO: 548971 - DNA, 367 bp, Homo sapiens
ttccttgtggcaggggctgggtcttatccacttgttttcccagagccaaacagggtgtctgacatacggtcctggctcggcaactgttgacttgcaatggcaatgataagatgaatgatttcaacaaaaggaacatttacattttaagagctgaatcaagaactcgcttatgtcaaaggaagagactagtgagtatccctcaatgtcttgggcactggaaacaggccagggtgtgttttccaactcagctactttctataatagctgtgtgacccaaagtggaattttcttttttttttttgagacggagtttcactcttgttgcccaggccagagtgcaatggcaagatctcgactcactgtaacc

SEQ ID NO: 548972 - DNA, 762 bp, Homo sapiens
tggaaaacgtcatggaggccatggggttggtcttgaacccagcttgggggggtccgatatccttcctttgtggtctaaatttatgtatacgggttctatcgaatgtgtggtagggtggggggcatccatatagtcactccaggtttatggagggtccttctactattaggactattacagcattcgaagcgagggcttctcaaatcatgaaaattacttaatattacggctgttagacgaaatgacttgagcctacagatgataggatgttcatgtggtgtatgcatcggggtagctccgagtaacgtcggggcattccggataggccgaaaaacgtgttgtgggaccgaacagttagattttacgccgatgaatatgatagcgcaagtaggtctacaacgacgctatttcccctatcataggaacgagcttatcacctttcaggatacacgccctacaataatcattaccatctaatcggcatccatagtcccggatagtgcccttttgccttaaagagttaccaccagaccacagacttaaagctaactacgttaactgtgtccagagcgcctcgaggaaaagtagcaaaacccgttgtggaatatactccagtgccggggcccaatccataccatagtccttccagtcgggccgtccccaagtgctataggcaagtcccattttacatttacccagacgacgggtcaaaagactcccttcccttttaggcataagaaatcaattgtggcccccacacgg

SEQ ID NO: 548973 - DNA, 120 bp, Homo sapiens
caatctgcccgcctcgacctcccaaaatgctatgattacaggtgtgagccaccacgcctggtgcacacacctcctttagagtttgttagaccttcttttgggagcagcctctgtctcctt

SEQ ID NO: 548974 - DNA, 211 bp, Homo sapiens
gaatgaaaatagatgtgcaaacagtgaaggtctgggagcagtaatggattgaagggattcaccgtgctagaatttaagagaactacacaaaatgtctagtgaatactctggataaattttggtgataataaacatttccacccagaagacccttgggaacttacatttgcatggcacattaaaacctaaaaactgtagcactaaaaatgtt

SEQ ID NO: 548975 - DNA, 273 bp, Homo sapiens
  misc_feature (54)..(54): n is a, c, g, or t
  misc_feature (65)..(65): n is a, c, g, or t
tttcttatagcgattgatccgggaaatccgacacatcctcagcttaaccctggnagccccattancgcagctctgctgatgcagctagaccagctccgaagacaccataggaagctttggaagcacaatacactttgagaagaaatttgaaaactacagtgctacttagcaagtctcttggcattagcagatatacacggactcccaacgggtatctacccagctggagaaagaaaatcccaaccaggaaggaagaaactctccaatcttact

SEQ ID NO: 548976 - DNA, 133 bp, Homo sapiens
gctgaggtgtcaggccccgctctgggccgctgctcacagacatgcgttggtgcggaaccaagtatcgccccgctacggaggagcaagtgtcagcacatcaagaggcaggcagctcccaggcagagctctattt

SEQ ID NO: 548977 - DNA, 102 bp, Homo sapiens
tagaggatcccctctctcaacacatggccctcaaaaaagtgatgtaatcttaatgattttgcaatgtgtataggtatacttctgatacgaccagattaactg

SEQ ID NO: 548978 - DNA, 262 bp, Homo sapiens
aaatccctggggatttccccccccaactaaactatttcccttcttttaaaaaaataccccacccagattttaatggaaaatattttgccttaattggattttatgccctgattaatggaacatgggaatattgattttccggtttgggcccctgagggacccatctttggttggttttgggaaagcccctttttttaacagatacaatattgcccccacaatgggcagaaacccttttgataataaaaaattggtttttgga

SEQ ID NO: 548979 - DNA, 343 bp, Homo sapiens
cagcaatccagaggctggaaggaactgcccaaggcatgggagcacccctgcattacatgccctggatgtgaaacatggagacaaggagattattttaaagctttaagttttaatgactgccctgctgggtttcagactttcatggggcctgcatcccctttgttttgactaatttctcccatttggaatgggagcatttatccaattcttgtaccctcatggtatctaggaagtaactaacttgcttttgattttacaggcttataggccaaaacgtcttgccttgtctcagatgagactttgaactgtgggctgttgagttactgctgaaatgatttaagac

SEQ ID NO: 548980 - DNA, 169 bp, Homo sapiens
caacaagcgtgtacgtcgttcttatactcatacaaaaactcgcacacaaatgttcatagcctaccaagaaataactgtgcatgtccctaacagatgaaaggttaacaaactggtacatccacactatgaaatataactgagcataaattatctgtcaggtcatcaaaat

SEQ ID NO: 548981 - DNA, 113 bp, Homo sapiens
agtatcaaggactacattttacctcttaatagaaaagatgcggatgacaaaacacgaagtgtaaaaatattcctgacgctatgctcatatgaccaaacaaaaagctaatacta

SEQ ID NO: 548982 - DNA, 711 bp, Homo sapiens
tcagccttaagggaggattataatttggctcccaactgatggtcacttaaatgaaattttaagaaatgattaaaaagactatacttctcagctgcaaattattatggagatatgggggcacccacaggaatgaagagagaaagcagctccctaatcttcaaaaccatttgggtacctgacaacaagagctattttagagtaattaatttaataaagtaaattagtatggctgcaaatagctaaattatattttattggatttggatggtcaagagatttcccattttttttacagactggtccagtgtttggtcaagcttccgggcataaatatgtactcaaagggcatttccgcttacaattggtagaaacacaaattgcgtttcccatacagcagtgcctatatagtgactggattttctacctttcaaggtccatctttcaagggaagtaacaccaggttccacgtgttcaaggaatattcactttacctagcggcggaaaattcacacaaaaactgagatacttaatatagccattttacctggtatacctgtgtgacttggcggtctaataaatatgcctgtaagatactggaaaaggtgtgtcatgtaatgtgccaattcatgtattcttggaccctgatgggactcaaaacttgtggcaactctttttcgaccaggacttctccggtttcacgcacagttcacg

SEQ ID NO: 548983 - DNA, 1220 bp, Homo sapiens
ggccacaccaactttgccaatcccacaacctgttgcgtcgccaatgtgaacctgcatgatgctgctcctgtgggcgtttcggggattgccccctagtaccgtcaccgcttgtccgtccgttgtgctacgtttctggcctgttcgggtgttgacctttctctcgtgaatatcgttctcaacccccccttttccgttgcaaagcgcactctttcccttggctttttcactgcttctgtatcggtgtgtttgctcctctcttaactccccttttgtcgtactgtctccttgcttaaggcctgcggaaccttatctaactgagttctgtgggtttggttgtttaccgtcatgttagattccccgtctatgtgttagaaggccgactcctatgctatcctcttcctagcgggtccatattcgcgccgtcttcttaagtttggccctcttgttattcgggtgcccaatacctagccccttagctagcgtctcaaacagggaagcttggctagtggtaggatatggtggccaaaggtttttcaacaaggaacattgtgcccaatgtactagggtgctctctacctaccaagaatggctagccagacgagcgtacgggcctaaatgccatgtttaatcgatccttgcctggtatggctaaatctattcggactcctcaggcgccctgtccaacgggccttcttgtccataggacacagtaactactgtgatccattttatccttggccaaggccaggtactgcttcgtctgctacagtgactcatccatctgcattctgcacggacttggtactaaaccttcaagctcctcagatccacagtggttctgatagtgaatctttgccaatgtgaagtaaacgtcctttgacacatggacacagacacatgcaacaccacagcccaactcagttctcctacacgatgtactaaggaacaacagagttcggcagagcagagatgactagatagactcgtggagaaatcagaagggggaacagtctgtgttagttaagcgatggaacctgggaaaggccatccatttccttgccttgtatggggctctgatttgactcttgctcaagtggtatactaaccccgatggtcttcttgacatgattcttgatctgttctccactgagacacataataagtgatgatccttacaggactgacattaatcagcgctataaagtgctcatatgctctta

SEQ ID NO: 548984 - DNA, 205 bp, Homo sapiens
aaagcaaaatttttttaattttccccctaaaacctttttattttgttttattttgaaaaaaaaaccttggggcccccccttcccccttttttgtcccccaacttaaaaagaaaaaaggcttttggtttccctgggaggggggggaggaaaccaggggttacctgtaccctgcctttaaaccagttgaaaaaaagggcccccctta

SEQ ID NO: 548985 - DNA, 1233 bp, Homo sapiens
  misc_feature (1)..(1): n is a, c, g, or t
  misc_feature (266)..(266): n is a, c, g, or t
  misc_feature (269)..(270): n is a, c, g, or t
  misc_feature (273)..(273): n is a, c, g, or t
  misc_feature (275)..(276): n is a, c, g, or t
  misc_feature (278)..(278): n is a, c, g, or t
  misc_feature (286)..(286): n is a, c, g, or t
  misc_feature (335)..(335): n is a, c, g, or t
naatacaaaaattagccaggcatggtggtgtgcacctatattcccagctactcaggaggctgaggcaggagaattgcttgaacccaggaggtgaaggttgcagcgagcttagatccagcgactgcattccagcctgaggacagagtgagactctgtctctagaaaaaaaaaaaagaaaggaagatggaattagctgggtttcatggctgcttgggaggttttttgcagacaaagactccctctctcacccagactggagtgcagtngcnngancnnanctcactgnagccttgaactcctggtctacggtgatcctcctgcttcagcctaagtanctgttattggcatgagccactgcccctggctcacatggctgcttaaatggaagagttagcagttgagactgagaaacatgaaggactaggtagtatggggctcccagatagagggcagcccacaaacgagataagcagagctgccagaggggtaggaagacagccagacagtgatgtaagagagactcaagcaactcagggtttataaaaggagctaagctctctttagtcattcaccaagcatatgtattcagcagctgccctgtcccaggtactcctttggcatgaacaaaacctcccatccccatcctattggagcttgcatttttagaggggaggaggcagacatataaaataagtacagggctgggcaacatacaaaaaatttaaaaattagctgagtgggccgggcacggtggctcacacctgtaatcacagcactttgggaggccgatgtgggcagatcatgaggttaagagatcgagaccatcctggctaacacggtgaaaccctgactctactaaaaaaaaaaacaaaaaaaaataagcgaggaggatgaggctggggaccaaatgacccagaaaacacaggaacaggtcagggcagagaaaggcgagtcaacccccacaaacgaaagacttagacgcgagcccggagaatgccaccagggacgcacgctcggggaaccaagcagacacccgaccccaccggcgctactatggaacagccgagagaaacacggacacaaaagagacaagaacagggcccaataacgcgacgcaaacagacacggacacagcggcgaccaaaaacagagcaagacaccgacaagcaacagaacgaaacgcagacctcaacgagcgagccagacaaccaccatcggagcaggcaaaagcgg

SEQ ID NO: 548986 - DNA, 123 bp, Homo sapiens
cccttcaatcagtggcatgatcttcatgtgaacatctcttgccctgattgaactttgcccacatgctggaatgcccctcccaggaaaatgtactctcgaaccagcgtctgggtctcctcgctg

SEQ ID NO: 548987 - DNA, 272 bp, Homo sapiens
cagcggatccgtattggatgcggcgtatgtgggtaagaaacgtacacacttctggattgacagaaggtaacagagtggatagcaaagatgagggggaggagagggaagcatctggacagcagagtaaaataaaaggggtagaattgcaggaggctagtcatatgggggcctggaatttactcagtatattccaccccaagatcggggtcggacactaagggctcactaagaaggagtggctgcagggggtcttgactcggccgcatccaaag

SEQ ID NO: 548988 - DNA, 411 bp, Homo sapiens
agcaggaactgtcgtggaatggtacgttgtggacgtgaaacgggcggggcatccacagcaccatggtggatgtcatcgatgatgtcatgaggaggggggccatcaacataacagcccatggacggggcagcccccaggatctcttaaagggtcccggagagtcctcgggctaaggatcggtgccgcatctgtcgagcaaggtggacaatctcatcaaaggtgatatccccacggtgttcaaggtgttccggtatctttctgtctctggggggtcccttgagggcttggatgatcagggcagaggcagagggcaccacctcaatcggggcctgtctggtcctgaagggtcagttccatggtaatcctcaggcccttagggaaccaccaagagatttcccgtatggatgcaag

SEQ ID NO: 548989 - DNA, 394 bp, Homo sapiens
gctcgtactctagacgctcccccgtagtgggtccctgcctgtgcatgcggactactgcacaccaccgcgtccaactggctgcctcttcatccccctagaacgctcgagccacctcaagcgcaccgtgtagaatatcagcgtatcctttgttcacgttctttgagagagaacgtgaagatcggcgccaagctgcttcacgacgttcgccaggaccttgcagatgtcgtccaggtgtgcgcccgagcgaagaagcagaccaactacttgcgcacgctgatcaacgagctagtgaaagggatcttgcctcggagctggtcccactacacggtgcctgccggcatgaccgtcatccagtgagtgtccgacttcagcgagaggatcaaacagctgcaga

SEQ ID NO: 548990 - DNA, 1273 bp, Homo sapiens
  misc_feature (867)..(867): n is a, c, g, or t
  misc_feature (877)..(877): n is a, c, g, or t
tgcaatggctcacacctgtaatcccagcactttgggaggcagaggcaggtggatcacctgaggtctggagtttgagaccaacctggccaacatggtgaaaccctgtctctactaaaaatacaaaaattatctgggcatggtggtgggcgcctgtaatcccagctacttgggaggccgaggcaggagaatcgcttgaaccaaggagtaatcccagctacttgggaggccgaggcaggagaatcgcttgaaccaaggaggcggaggttgcagtaagccaagatcatgccatttacagcctgggcgacaagagcaaaactctgtctgccccccaccccccaaaaaaagtggtcttcaataatgagattgtgagcaatttttaaatgtcctgctttatattttagtgttttccaaatttttttcaataaaatatactattttcctagaaaaacaatttttaaaaagagagttgcttcaggttggtgaaaaaacagctaaatttatttctagtcttgtgaagcaagtatagaagtagagttagcctggaggtgaacaggcagagctggcctgaaggtgaataaacggactctacctacgtggagaggtagtcctctctgaatagcatttccgtttatgaattaattaccagcagctctccttaaatattatgatctttctcagggtagggatctttctgtgatatatgcaaaaaaaggaggaaaacatattttaatggaaggaaggaaagatgatttatgataggttttatccatctaatttagatattttaggaagaaaatcactatacagctcttattttaaatttttgaataggtaacacattcatatcactcaaaaacaaaacatgtnacagtgcttntagtgaaaagcttcccacctgctgatcctgtctcctagccaccaactgtgcaacctgttattagtttgtatgtccttctggaaacaatttattcatatataagcaaatatattttgttccctcctgtctcattttaaacactgttctgcaccttgcttttttcatttaacatcttggaggtcaatacataaacacatcttcatgttgtcaatggctgtatgctattccattatgtagatgtaccaaaattatttaaacattcccttactgatgaacattaagttatagaattaagactttgataaaacgatgtttaaatttagcttaagtattctgttcccattaagaactgcaagccttggccaggcacttgggatcacacccgtaatcccagca

SEQ ID NO: 548991 - DNA, 113 bp, Homo sapiens
  misc_feature (7)..(7): n is a, c, g, or t
cctctcngatcgacggtttctcaatgtcaggtttttcattcaactacaaaacacttaaaagtccagctcaggtgagaaacagcagcctgggtgacagagcaagacactatctc

SEQ ID NO: 548992 - DNA, 798 bp, Homo sapiens
  misc_feature (309)..(309): n is a, c, g, or t
gtccgaattgataaagaaggtgtgatagaaccagacactgatgctcctcatgaaatgggagatgaaaatgcggagataacggaggagatgatggatcaggcaagatgataaacacacagtggctgctattgaaagccctaaatgatggtgaactccaggaaagccagttgacgttatgtcacatgagtgccattcaagctgaactccatcgcgtggggtcatcttaggtagtgccaaagagggccaggtgatctgtcgatcaacagtatacagcaagaccgaaactgtctgcccatccggagtgactgntggagcagatgccagtatgaacataaattccgtgcattcagcttccacgcgccttacgaaagttgggcaggggggacaaatgcaacgaacatggacttttcctagtgctcgactgtgcgtaacgcaaggccaaggccccaatgaatctatgactcccgtgtgcactgttacaaagtatgggacttgagtgaatagaacggattggcctacgtagccacacattgcctagaaaacgccacgagcgtatccaaaccataggggcggcaccaacgtaagagacaaatattggcaaagcaaaacatgttcggcgggaagaaaaaaaggctacattggaagccgaaacaaaacccgggtgggaaaagggaaggcgggaacggtacggtgaaatctcaaatagtgcaaaaaggacaaacttacgaacaacccggaaggcttaaaatacggcaaaaaggaggcctaccgaaaggaaaaacggagggccattggacg

SEQ ID NO: 548993 - DNA, 747 bp, Homo sapiens
tgcaatggctcacacctgtaatcccagcactttgggaggcagaggcaggtggatcacctgaggtctggagtttgagaccaacctggccaacatggtgaaaccctgtctctactaaaaatacaaaaattatctgggcatggtggtgggcgcctgtaatcccagctacttgggaggccgaggcaggagaatcgcttgaaccaaggagtaatcccagctacttgggaggccgaggcaggagaatcgcttgaaccaaggaggcggaggttgcagtaagccaagatcatgccatttacagcctgggcgacaagagcaaaactctgtctgccccccaccccccaaaaaaagtggtcttcaataatgagattgtgagcaatttttaaatgtcctgctttatattttagtgttttccaaatttttttcaataaaatatactattttcctagaaaaacaatttttaaaaagagagttgcttcaggttggtgaaaaaacagctaaatttatttctagtcttgtgaagcaagtatagaagtagagttagcctggaggtgaacaggcagagctggcctgaaggtgaataaacggactctacctacgtggagaggtagtcctctctgaatagcatttccgtttatgaattaattaccagcagccttttcttaaatatcatggacctctctcaggtcacggaaccctttctgggatacaggcactacaaggcggcctatctaaatgtaagggggctgttct

SEQ ID NO: 548994 - DNA, 176 bp, Homo sapiens
tggggaaccgtgccctaggaaactctatgtgcctcgggttcagccctaaaaacaagttccaggagttcctatcatgactcagtggttaacaaatctgactaggaaccatgaggttgcagattcgatccctggctttgctcagtgggttaaggatctggcattgccgtgagctgtgg

SEQ ID NO: 548995 - DNA, 1305 bp, Homo sapiens
  misc_feature (1305)..(1305): n is a, c, g, or t
tcacaagagggggccgaaagcgaaaaaggaagctccggccccgcctaaagtctgaagccaaagcgaaggcttaagggccaagaaaggcaggtgtttgaaggggtgtccacagccacaaaaagaagaagactccgcagcgttcacccacctttcgcgggggccgaagacacgtggcgactccggagaacagcccaaattatcctcggaagagcgcctcccgagggagaaaacaaggctttgaccacttagtgctattcactcaagtttcccgggtgaccacgtggagttcgtgccaggaaagaaagaatagaagaacaacaacacacttgggtgttccagtgggtggatgtgtttaaagccaacaaagccaccgagaattaacacgaggcggggtgcacaacaaagcgtggttgtgacctttggagtggtggcccaagggtcaaccaccctgtgagatccgggccgtaagtgggagaagaaagaagaggcatagtgtttcgagagaggggcctccgggattataacgagtgcttggggggattgttgtgccaacaaaaagtggggggatccactcataagacgtggagctccaggcgtgccataaattcgtgaaataatatattatttttattattattcctttttcaccctatttaaaaacaaaaaacacaaacaaaaacacgaggagggaggagacacaaaaaggagagaggggggcggagaaaacacacagggggaataggaaagggggcgacggggccacaacaagcgggcccccgaggaccccaaggttccttgtgggaccacaagggggggaaacaatgcaggggggggcaccccataataagggaggcgagggaaaaacatcagcgaaaaaaaccccagtgtaacctcgtgtatgagatttcgctctgccaccacaaaccacaagcaaagaaccaaagcaacaaaccaaaaaacgacacatacaaacaaaacagcagaagaaaaacacaacaaagcaaagaaaaaagacagaaggcagcacgcgcaaggacaaaacgaacagagcctatacactaaagaccaacaggcaacaacctgcgataaagatgcaaggcgcagtaaaaaaaacaaacacaagaagacgaaaaaaagaccgagaaaacaagcaaaagaaaaaaaaaagaaagaaaaaaaaaaaagaaagaaaagaaaacaagagagaaggacacagagaacaacagcgagaaaagaaagaaaaagagaacaacaaaaaaccaagaagaacgaggaaagaaagaaaaaaacagagagaagaagaan

SEQ ID NO: 548996 - DNA, 349 bp, Homo sapiens
  misc_feature (77)..(77): n is a, c, g, or t
ggggaggaagaaaaaccgtcgggttttcccttttaaagtggggaacccttccaaattccaggtctgggtggacctgncccctttaagggtgcagtgaattatggtcccctggttccggaccatcctcggggttaaaaactccattgaatccgccaactggggatttttgggggcataagccccccccggggttttttttcccttatattattttgaaggggggggtttaaaaaaaaaaaaaaattttaacccttcctgggttaagggtttctgttccctgtgagtgaaaattttttcctttctccatatcccttttgttagttcttttctttattaatttttccgtgga

SEQ ID NO: 548997 - DNA, 342 bp, Homo sapiens
attttcttcttttttatttttatctaagtaatacatgtacatgacttaaacaaatcaaatgagccgggcgcggtggctcatgcctgtggtcccggcactttgggaggccgaggcaggcatatcacagggtcaggagatcgagaccatcctggccagcatgatgaaacctcatctctactgaagatgcaaaaaattggctgtgcgtggtggtgcacgcctgtggtcccggctgcttgggaggctgagacaggaggattgcttgagccttggaggtggaggttgcagtgagccgagatcgcgccgctgggctccagcctggcgacagagtgagactccgtctca

SEQ ID NO: 548998 - DNA, 348 bp, Homo sapiens
tgttttttgtggggttttaaaaataattatttttacaaattctaaaccttctcaaccttccaaaaattctgcaagtccaaagaccattattttcccctcaaccttctgccagtacacacacataatgcccctcacccccagatacctcagtgtctccagtacaaccaagcacactctctcacttcttccgagtccaaccactgaactcgagaaaattaccagtggcatcttactcacagtatatcttcagacctcatccaagtgtgcgcaaagtgtctcaacatatgtcttatatcacaaacacatcctattcagtctcatatggtgtgccctagtgtcacgcgtgcc

SEQ ID NO: 548999 - DNA, 278 bp, Homo sapiens
gttgcgaacaagtaagtgaaccatggttgtactgaagccacttagttagatacagctgatcataaccaacccgtgtgtaatatttattcccaaaaacgtagcacccttcagcaggaccctataaaactttcctccagcccttgcctctttgcaggtagccccttctctgctgagctgcccactgcaacatattttcacaatttctctaataaatctgcccttctttacctacaactatcttgataaacggctttaccacctgcaaaactgaccctagg

SEQ ID NO: 549000 - DNA, 292 bp, Homo sapiens
  misc_feature (193)..(193): n is a, c, g, or t
  misc_feature (207)..(207): n is a, c, g, or t
  misc_feature (240)..(240): n is a, c, g, or t
  misc_feature (244)..(244): n is a, c, g, or t
ggttttgggggaaacctgttttgacattcaaaaccttttttttcccgatttgaacccctggtgaataattttgcctgggtttgggtaggtttgcaggaaggaaggctgaaaaaacggacgaagattttgacttaagtgggactttgtgatttaatttttttttttttttaagtggggaggaaggggaagctanatggactaggaaanacttgattttgggggtaaagttccccagttcanatgngacatttttttaaaaaaaataaccacaaaaaaaaatgagagaaaaggt

SEQ ID NO: 549001 - DNA, 882 bp, Homo sapiens
  misc_feature (59)..(59): n is a, c, g, or t
  misc_feature (71)..(71): n is a, c, g, or t
  misc_feature (97)..(97): n is a, c, g, or t
  misc_feature (152)..(152): n is a, c, g, or t
  misc_feature (172)..(172): n is a, c, g, or t
  misc_feature (181)..(181): n is a, c, g, or t
  misc_feature (186)..(186): n is a, c, g, or t
  misc_feature (190)..(190): n is a, c, g, or t
  misc_feature (203)..(203): n is a, c, g, or t
  misc_feature (207)..(207): n is a, c, g, or t
  misc_feature (225)..(225): n is a, c, g, or t
  misc_feature (255)..(255): n is a, c, g, or t
  misc_feature (271)..(271): n is a, c, g, or t
  misc_feature (307)..(307): n is a, c, g, or t
  misc_feature (319)..(319): n is a, c, g, or t
  misc_feature (324)..(324): n is a, c, g, or t
  misc_feature (330)..(330): n is a, c, g, or t
  misc_feature (336)..(336): n is a, c, g, or t
  misc_feature (339)..(339): n is a, c, g, or t
  misc_feature (341)..(341): n is a, c, g, or t
  misc_feature (370)..(370): n is a, c, g, or t
  misc_feature (375)..(375): n is a, c, g, or t
  misc_feature (424)..(424): n is a, c, g, or t
  misc_feature (427)..(427): n is a, c, g, or t
  misc_feature (443)..(443): n is a, c, g, or t
  misc_feature (447)..(447): n is a, c, g, or t
  misc_feature (452)..(452): n is a, c, g, or t
  misc_feature (585)..(585): n is a, c, g, or t
  misc_feature (770)..(770): n is a, c, g, or t
  misc_feature (845)..(845): n is a, c, g, or t
ttctccataaatgaaagcttttaagaaaaaggcacgttttccttgaattaggtaagatntagcttccccantcatgttctcccttcccttttttttnggagcagcccctattgggaactcgtattggtaccccagaatacatttcagcaaanttaaccatttagtttccctnacccctctncccgnttcnccagcagctaggntganggcaacatattcctcacngggtcatttgatcttgaggtccttcaaggntgactccaagctcttnttatcccagatactcatgccgccatccatgccagtngtgcagaactgngagcncttggncttgcngcngntgagcaccgagatctggctgacgctgttnttgtncagcgagtttaggcccgcgcccgcagccgtgccaccctcggggctcgcnttnttgtccaggttctggnagcnctcgngggcggtcaagccacgctgcgagctctgcttaggaacgtccagccgcccgccgaagctcagcatccccgcggcggcgtcataggtgaacagcaccgggaagcagttgtggcccgctgccaccaggctgttgtntgtgatgaaggtcagcgccacagttggtagtgtttcagaggccagagtcgcgacggccatcttcttgtcggcatcagccaggcagacggtgctgtcgtggcttacccaggccacgcggctcccgctggctgagaaacagacgccatgtacccagccgcagctactgctggattcgaacatcagtnccccaaagggcatcttgggagccccacggggtgggtgccggccgttcctccacttctttgatgtaggctggaaanatccgaacatttgaagtcacaggagcgggcagccagc

SEQ ID NO: 549002 - DNA, 141 bp, Homo sapiens
ttcccccccttttttttggggggggggggggggccccccctttttttcccaaagaatttcccccccgggggggggcccgtttgggcccctttaaaaaggggttttttttttttttttaaatttttttttgccccggtttta

SEQ ID NO: 549003 - DNA, 432 bp, Homo sapiens
atggcagagtatgggagagagaaatttggaaagctacataagcatcctgccatgtagaaaagaggtctcaggcctggattttggttaaaactatgtatgtgtttttttaatttagttgcccaaagttgaaaagtaaaagatatcatataaaaacctctgggttttgaaaaaattttaaaagtttggcaaccaatggccctgtatttttaatggggcaacaatcagctggatttaccccctttagacaagacctgtgacctcatgttcacccctgccccaaccgttttttcaattcattcattttgcctatttggcctctatatgcatttgaatttttagttcctaatttagggccctattgggtatggctttttaaaagtggaattttatcataaaataaaggatagcccctggcatttttttagccaggga

SEQ ID NO: 549004 - DNA, 1052 bp, Homo sapiens
tgggctctagaagggggtaaagggggtgctatagggtaaatacgggccctatttcaaaaattttaaggggaattatttctaggacagatggggcttagaaactggtgtgtttggctccacagatttcaagagctttggaccggtagtatacccccggcgtcgtgtacgcgggtagaaatgtggtttgggttataacactgtcccggagaatcggcatctggttttataacgcctaatggtggggacacgctcatgagtgcaaagacggtctgggagatggtcaattattaatacagaattggggggcttacaatctcgggagagtacatactcagaatggtcaacggtcaagggattccgcaggtcgccgggtccctaggaaataagggggaggagtatttgtagagaagtgggaaaatttatgtccggccgatatctcgggtgtgtactccgtaagggttccatgtcaccccttggtggtggcgccaatttggatttggatggtgtacacgcggacggggcatctgttggaccctccggtcgggtatatgtgtaacagggatcgcgtaagggagattgggaacgcgcgcgtagtgagacgggacatagagattgaatggcccgggcaagagcattagttctccagaaagcgggctttcaataatgttcccctgaagccgtttcgggagaaactttccaggatcataaggtgcaagttgcggggtcgtcagaacggtgtttagcgaacaggggggcctatacccagggaatactacgagaacgcccaaaatcagaggcaaccacgcgcactacctagcgacagggccgcatcacccccctgcaaacacgggcggaccaacggcctcctgtcctaaacggaatcagcaggcaacaagcaacgcccggcactccgcacacccccacaacccctcgcggcccgcacctccgggcaacaggctctggcctccccaggcagaaccccggcctggcactcccagaactagacgccggggacacaccctgtgcccccgtgtctccaccagagacagaca

SEQ ID NO: 549005 - DNA, 299 bp, Homo sapiens
ccgggggccctttttaaaaagctggccttttctgagcgggggttggataaagcccgcctggcaggcaaggagctgcgcttccccaaggaaaagaaaaatatttttgtggtggctgctgggcagttgggcaatatgcatttttccaactgttgggcatccccccccataactccccgggctttccccacccttttttttatgtcccctttttaagatttaggatgattttttggccaaactttttcatttttatcctttaaaaaatatatatgggtataatttttccccctagattccta

SEQ ID NO: 549006 - DNA, 619 bp, Homo sapiens
gcatgagaagatctggttcgacagagttctagatatgacgacgcagaaaggatgtattctacggaggcagatgaacgggcctgtggtcaggctgcgctcccgccaggagaacggcgccagcgtgatcctccgttgaggtattgcgagcagcccatataggaacatcgcagtagaactcctctggactggtaagcatcagagcgcccgtggggcctccagtcggtgcaccatgccggtgaggaacacgagatgacgctcgttcagtccggcattgccagatctggcacgttggacgaacgcagtagctctgtcgtggcgtgtgtacatgtgagctgcatgcaggccgatctccaatgtctggagagcccagtgcagtgaaccgtagctggagatacgatgctctgccatggccaacacgaggccacgagcgcccagcagaacccagcactgtatctcccattgacgtccaatgtggagccccctagccaagaatgccagaccaacaccaggcagaaggaatgacgacggactgatgaccattgacctgctatggcagtgacgatgaggacggaggaccacggaggcggcacagcctgcgtcgaccgagcggctacaggca

SEQ ID NO: 549007 - DNA, 1149 bp, Homo sapiens
tttttcgtttttttctttgtttcctcttctgcttttcttcctcttctcttttttcttcttctttctttcttttgtttttttcttttttgttttcttttctcctcttttgttgtctcttctttctttttttctttttcctttttctccttcttttcgttctcttttttttcttttcttttgttctttgtttctctctactcgttctccctccctcccccttttttctttctttttttcttctcttttcttgtccttcttttcttttctttcttctttgtctcttccttgctttctctttttcttgtttccctttctcttccttcctcttgctttccctctttctttctctctctttttcctttttcttcttttcttcttctccttttcgtccttttttttctttttttctttccctttttctttttttttttcttcctctcttgtttttttctcctttttgtcctttctttcctttttcctctctttctttctttgtttgttcctctcttttttttttcgttttttttttttttttcttcttcttgttgtactttttcttcttattttcttttagtgtatggccgcccgcggcgggggtttctaataaattccagtgttctctttttgttgtgccccctctatttttttctccttgttagtccctctctacccccttttttggttccccctccttggtttagttccccgcgggggtccaattacaccctttctggtttttttattccttttgtgtccctttggggccgtggttatacattgttttcctcccggatgacccttttttgtcctttttgcgccttttttgggtgccccctatagtgaacacgtgttgtcccaaaaaacagccggtttgttatccccgttccggtattttccgcggatatattttgtccaccccggtgttccccccccgggccgcgcggtattttttggttccggcgcgcccccccctctttttttttttttttttttttttttttttttttttttttttttttaccattttgaggttctttcgtgttaaacggagaagctattatattttgttaagaaagtggggagaaaaaaacccagaggcccccgtgcctttgtaaagaaaccaaataaagtttgtactttgctttttta

SEQ ID NO: 549008 - DNA, 142 bp, Homo sapiens
tactccggggacgattgttaacgacggactagctacttacgaacggacttactggactgcggttgcttgcgtgacggacctaccttgactggcagacttctgtggaaccgagggttacttttatttggttagaccctggaac

SEQ ID NO: 549009 - DNA, 383 bp, Homo sapiens
gtgttagcgtactcctatctttcattgacatgggaggcatatcagaatcttaatttataacatataccaggattatatatggtcgccccagatagtaattcccggaaactacaaaaagtgtcaagatccataattcgcgacatcaaatgcttttctagctcgtctcaattcttcattcatagtaagcaagtctttaaccctggcacacttccttgggtcctttcgaatcaaaaagacgatatcttcaacttgtactcgaccttgtataccaattgatattgccttgtgagtcatttcagtgataaactctatgacaagatcttcaagaatatccactgactcagaataaggattctggtcatccccaaagccatacatcatac

SEQ ID NO: 549010 - DNA, 285 bp, Homo sapiens
caactatttgaggtgaggcatgagaaccaattgaaacccgataggtagaggttgcagtgagctgagatggcaccactgcactcctgggtgacagagcaacagagcgactctgtctcagaaaaaaaaaaaaaaaaccctaagctgggcgtgggggaggggccctgtaagtcccagttactcgggataactgaggcagaaaaatggcctgaaacccaggaggcggattagatcctaaaggaaccagaagacacccctataactacataccctatcatcttgttattc

SEQ ID NO: 549011 - DNA, 215 bp, Homo sapiens
acagagtcgtgacacgcggatgtttataaattccaataacgaaaacaacagattcacaaggtacaagttattagctcttggttaactcatgatacaaactacactatgaagaaatgactggagatatttgagaaagaatttttaatgcttccgggaacttttcattggtatctttatatcgaaggtcacatccagaaatacttagagtggttatc

SEQ ID NO: 549012 - DNA, 155 bp, Homo sapiens
caggagttgtagggttacccctttgacaagcttccatagttttcaaacacgcacattgatggcatccctacagtttttttcacttgaactttgtaaaacggcaaatggaccggtaatcaacttttgatattttttaataaaggcgttgaaaatca

SEQ ID NO: 549013 - DNA, 106 bp, Homo sapiens
tgaagacagaggaagaggaagtggagagggaggggggaatggccaagcggagagaaaggtaaaaaaaggtggaataaacagagggagacggaatataagcaaatca

SEQ ID NO: 549014 - DNA, 188 bp, Homo sapiens
tgtatgccctgtcttgatctgtctagctgacacagtcttgacaagcaggactcatagatgttatgactgtgatacataatatgttatctagaaatgacgattctatatatgatagccatcacggtgacatgatctagatataatctatgtgacagagtagtgcagctagactgagctgagccattcta

SEQ ID NO: 549015 - DNA, 147 bp, Homo sapiens
  misc_feature (81)..(81): n is a, c, g, or t
tgaaatatacgctaggacagctggtgggaatggcgaggctgatacataggctggtgggagtacaggactcgcctctcaggntccctgtgctgccacttttcagccaatgggccaagcaaggttgaacatgcagttatcgtgccaaag

SEQ ID NO: 549016 - DNA, 193 bp, Homo sapiens
cggccggaatcccgggtcgaccacgcgtccgggaggattgattgacaccacgagtttgagaccaccctgtgccacatagcaagaccctttctgtactcctcactacttggaggctgatgcataaagatcacttgtgcccaagagttcaaggttacactattccagcctgagtgacagagtgagaccgtgtctc

SEQ ID NO: 549017 - DNA, 855 bp, Homo sapiens
  misc_feature (536)..(536): n is a, c, g, or t
agaactaagtctccacacctaaggctaactacagaaaccaggttggtgctagggacttaaccttggtaggggcacctatatattacctcttggtatctttaacgggacacacttcacgttggctggtctggaaaggtaattaatcctacccaaatcacaatctcctgtgctaaataaatttggttattggtaaggggcaggtgtggctcactggggaaagaggccttctaggtttggtagtatctttaacaaatgttactattagcactaatttgttgttaatataacaatggaacacgagctaatatccgtataagagtataacatttcacggtaacttgtcacaatggcacgacattaactcaattattgtaactaatattaacttcacttaactcaattaagaagaatctattaatgcttctaagtatgaatataaaaatttgggcacgggcggtataaattctggtagcacttccacggaaagtgttagcaagacttgccaagttggagtcttgctctactatgacaaaatncttactatgacttacgaatctttcacccacagctgggaaaggaaaggttgagagaatattttaatatgaaggcaaaatgagggtatttaacttttggctggtttttaaaaaaggtggcacgggacggattgaagaggccattaactctggtatttatggatggaattaggacataaccaatttacagggagaggttatagggtaattaaacggaactgggtctaggtttcccaaacaaggaggaattaaaccaaaaccccaagggatttttggacgggaacaaccttttcccagggggcatctccggcccttttccctc

SEQ ID NO: 549018 - DNA, 170 bp, Homo sapiens
agccgtgtagcacgctcctatgtggaaatgcacaactaaagttcacgtcaggtcctaggaagggcatactgttgagtctagccatcaaaacagttttcccctccaagaattcctaacatggtttcaagttttttaaccattccattaaagcttttactgtaagtatgcca

SEQ ID NO: 549019 - DNA, 350 bp, Homo sapiens
ttatagaggctactagcttcaccaccagcggaactagcgggaaatcgtgcgcgacataaagggagaaagctgtgcgtacgtcgccctggacttcgatgcaggagatggccaccgaccggcatcctcctctgtctctgcgatgaagaagctagctagcatgcccggatggtcagagtcatcaccgatggggaagtgagctggttccggatgtcctggaggcgctgttccagaccttccttcctgggatatggaatcttgcgcgcatacacgagtaccagcttgcaactccatcatggatgtgtgacgtggacatccgcaaagacctgtacaccaacacggtgctgtcgggc

SEQ ID NO: 549020 - DNA, 278 bp, Homo sapiens
gtccattatttcttctttattgagtgtggttgctttgtttttagacaggatcttgctcctgttacccaggctggagtgcagtggtgcaaccactcacaacgttgcagccaccacctcccaggcttaagcaatgctgtcaccttagcctcctgggtagctgagactacaggcatgcaccaccatgcccagttttttttgtttttgttttttttaatttttttttttattgatcattcttgggtgtttctcgcagagggggatttggcagggtcatagga

SEQ ID NO: 549021 - DNA, 241 bp, Homo sapiens
tcacttcagatcaggagttcaagacaagcctgggaccttgtctctgccaaaaataaaaaacaaaaatagccaggtgtggtggtgcacacctgtggtcctagctactcaggaggctgaggtgggaggttctcttgggcccaggaatttgaggctgcagtgaactgtgatcgtcccactgcactctagcctgagtgacagagtgagaccctgtcttaaaaaagaaaagcacaaaccataatat

SEQ ID NO: 549022 - DNA, 418 bp, Homo sapiens
accctctgcgtcgcattacagctacaccaaaaagtagtttaacattttatttaaaaactaaacatgcaactaccatgtgacccagcaaatgcattcctggatatttatcccagaggaataaaaacacagccacatgaaagccttcacctgagtatttatagcaactttattcataatggctccagaatgaaaacaaccaagatgtccttcaatgggtaaatggttaaacaaattgtgggatatccaaaccatggaatactatttatcagtaaaaagacataaactattaacccacacaatagactctctgcatgaatctcaggagaattatgctgagttttttttaaaagccaattccaaaaggtgacatactataattccgtttatataagattcttcaaatgccagaattatagaa

SEQ ID NO: 549023 - DNA, 125 bp, Homo sapiens
tagcttgggtgtcctccacttcagtttggatactatctacctagaaatagcatcaaatcccacagatggagggctcagtcccacatgactattccccgtcttgccgctatcagtggtaattctgg

SEQ ID NO: 549024 - DNA, 146 bp, Homo sapiens
  misc_feature (16)..(16): n is a, c, g, or t
caggaccaacttggancctgagcttgtggagaccagacagcaggagatagaacttccagaagtgggcagctgtggtggtgccttctggagaagagcagagatacacatgccatgtacagcatgaggggctgccgaacgccctcacc

SEQ ID NO: 549025 - DNA, 130 bp, Homo sapiens
agcacttcctaccaacttctcatgaagcagccatatatgcaatcttcttgttgatgaaacatctctgttctgatcaatcatgtttgaagggctctttgaactcctggatctgtgactgggtccaacatag

SEQ ID NO: 549026 - DNA, 111 bp, Homo sapiens
cagacgactctagaggaccccacatattcgttaactatggatggggacagagcaaaggagcagagttaagtgtatgctattagacacttctcaaaactagcggggtaccga

SEQ ID NO: 549027 - DNA, 348 bp, Homo sapiens
  misc_feature (45)..(45): n is a, c, g, or t
ccttgcgtgaaatggctgcggtactagaaggcatggtccgtcatntgacatgtcgtcagatggcatggtggtcgcgatatgacggcacgtatctaggtcataaccagcgtagaggagaaccgtcacctctgttgagcgtgtggccaatagggatccataatgcgtgcaaagtgtgattcggcacgtcgtgggtggaacctggctgatgatggcctggtggacgcgtccagatggtgtccggtccgcggagagccatgtctgtctgcggtggtgtgcgacggcggtgcgtggggacatccagggcagttgtccggtcaccatggtcgtcagttcttgaacaatcagagg

SEQ ID NO: 549028 - DNA, 348 bp, Homo sapiens
agcggaagataccttatcgtgcagaagatacgtcaagatcacctctccttccggtgccagcagcttcccccgttcaactggccagcgagaggactattcgcagaaggacgggccgggaggccaaaaagacggtgtgttttacacgcagctgactcagagcgcccgcccgtgtgccgtcccagacgctgcctgcagcccacatcggagtccacacctccgtagctgcctcgcgtagtggagccacaatgaagcacagatagttccttaagccaatacagaataggcagccccaattgcagcgtgttcccattagcgtggagccatggcaggtgatcttctggcacgcat

SEQ ID NO: 549029 - DNA, 862 bp, Homo sapiens
  misc_feature (608)..(608): n is a, c, g, or t
ggtgacacaaaaaaattaatcattccatgcttatggattggaagggtcaatattattataatggtcaaactgcctaaagcaatttacagattcaatgctattcctattaaactacatatgtcatttttcaaagacttagaaaaaattattctaaaattcatatgaaaccaaaaaagagcctgaatagagaaaaaattattctaaaattcatatgaaaccaaaaaaagaccctgaatagagaaaaaattattctaaaattcatatgaaaccaaaaaagagcctgaatagtcaaagcaaattctaagctaaaggaataaagctggaggcatcacattacctgacttcaaactatactaaaaggctacagtaactgaaacaacctagtagaggtccaaaaacagacacatagaccagtggaacagaatacagaatgcagaaataaggcttcacacctacagctttctgatcttccccaaagttgataaaaataagcagtgaggaaagaactctctattcaattaagtggtgctgggagagctagctagccatatgcgaaagaatgaactggactgctaactagcacgtatacaaaattactctaaatgatnaagattactgtagattcaactatagaatctatgagaaactaagaaatgcttctcatttggctggcgatattttgctagtcccaaagatgaccaacacaatggcagtggctattataaagtttggcgaataatttcaggtgaagaactccggggggaattggactgtttgaaggttttggccaggtttaacccaaaaccttagagaggtttccaatagaaagagttttgggaacccactaaaagcgcagttgaga

SEQ ID NO: 549030 - DNA, 447 bp, Homo sapiens
  misc_feature (34)..(34): n is a, c, g, or t
  misc_feature (136)..(136): n is a, c, g, or t
aagcgcaacatccccgcagctgctcatcaggtangagtgcttccatatccatttaccccccattggcaatttgaaagggccatccagacccccataggatccccatggaacccccaaagggctttccaaaagttgnctactcccaaggtggtccccaagccgggccatttctttaaccccataaaagcaaaaaaggtgggctcccggttttccccaaggtgggccctgtttgtcatacaaaggaatccaaaacgaatccccccccgtcccaaaaaacagctgaaaaaatgctctgtaaattgagttgctggaggagtgccacccaggagccctgacttcccttcctttggtccagtttttctttgaaacaggggggattccaaaacgggcccagtccattgcaggtagttaagcccccttttaaaaataaaggcctttttttttcta

SEQ ID NO: 549031 - DNA, 680 bp, Homo sapiens
  misc_feature (36)..(36): n is a, c, g, or t
agtggtacccgcgtgcgtagtgggaggaccacaaanaggcttttggaactggcaattgcacctaaacatggagcaccttctcacctaataaagatatagataggtttattttgcagagtcctccccgttcccaggcccccgccctgcagttaccactgctctgataaacaggttggcacttgtaccctcgcaggggttttgttgaacaggtgtcttttgtgggctggagcagccgagccacacagcactgataggtatcaggtccaagagcagcctgggcaccctgatgggcctgaactaggctcactgcaggtttgacctcagaagggtggctaacaattcctacctcacagagccgatagatgaggggacaggactaacagaaggtggtgtctgtcctgagtcgtctaaagtttagcaaggaggtagaccatggccagaatcgtagtcagtgctcagagggggctggtgtctgtttgactgagacaccatgaacagagcagcaaattcgagctatgtttactgcagcggtaactgctgtactcaccaaaacagtctgtagggccagcaatcacagtagaatatactgtttgcacagttacagggttaagagaccccagataaggtgatcctgtttagcaatgtagtagtgagaaatttgtttatttcctttggattaa

SEQ ID NO: 549032 - DNA, 750 bp, Homo sapiens
  misc_feature (1)..(1): n is a, c, g, or t
  misc_feature (3)..(3): n is a, c, g, or t
  misc_feature (5)..(5): n is a, c, g, or t
  misc_feature (38)..(38): n is a, c, g, or t
  misc_feature (135)..(135): n is a, c, g, or t
  misc_feature (142)..(142): n is a, c, g, or t
  misc_feature (159)..(159): n is a, c, g, or t
  misc_feature (216)..(216): n is a, c, g, or t
  misc_feature (218)..(218): n is a, c, g, or t
  misc_feature (271)..(271): n is a, c, g, or t
  misc_feature (287)..(287): n is a, c, g, or t
  misc_feature (306)..(306): n is a, c, g, or t
  misc_feature (308)..(308): n is a, c, g, or t
  misc_feature (343)..(343): n is a, c, g, or t
  misc_feature (352)..(352): n is a, c, g, or t
  misc_feature (390)..(390): n is a, c, g, or t
  misc_feature (394)..(394): n is a, c, g, or t
  misc_feature (419)..(421): n is a, c, g, or t
  misc_feature (423)..(424): n is a, c, g, or t
  misc_feature (427)..(427): n is a, c, g, or t
  misc_feature (433)..(433): n is a, c, g, or t
  misc_feature (452)..(452): n is a, c, g, or t
  misc_feature (458)..(458): n is a, c, g, or t
  misc_feature (481)..(481): n is a, c, g, or t
  misc_feature (521)..(521): n is a, c, g, or t
  misc_feature (552)..(552): n is a, c, g, or t
  misc_feature (576)..(576): n is a, c, g, or t
  misc_feature (612)..(612): n is a, c, g, or t
  misc_feature (632)..(632): n is a, c, g, or t
  misc_feature (641)..(641): n is a, c, g, or t
  misc_feature (661)..(661): n is a, c, g, or t
  misc_feature (665)..(665): n is a, c, g, or t
  misc_feature (715)..(715): n is a, c, g, or t
nananttgaccatcaggtatattggggaagggagaaanggaggcaccttcatgagttcctcccaagggcagtagcctctgcaacttgctgggggttcaggggaagcagggagttcatggggctcctccagcaaanatgagcnccagggctgcttggatntccccaccggtggcctgcagggcccgcaggctcagctcatcgtcctggatgcccatntnacgtagctgctgcagctggggctgccactggctctgaaggctgggctgcccanaggcctgaagggcatnctgtagggcttggctgaananatcattggtgatgggcgtcccttactggacaccanaggacattngtgaggtccctgaggaatgaccctgggtgccaggagtnggtntgtgaaaactgctctccggagttcnnncnnggncaaggnggtggccagctcactcttngttatnggccggggccaacagctccactntaccccagggaggctgggcgggagctgggagttctgctanagggtgtggacctggtgtttgggtgaaagtnatcctcatcatctgagagcccttnaaacaggaagccacctggcatatcccggtatgagcnggagggcatgctccgggaanaggagttanttccaggcattggggcactncctnctacggagtgcagaaccaggacaatggcatttacgagggctgggtgagcnggcaccaacgtatcaagcatattgggatcagcgaa

SEQ ID NO: 549033 - DNA, 868 bp, Homo sapiens
cagcgtttgggtcaggggtcctatagttcgctgctatgaagatgcatctccatgtccgcgtgcccatcctcccttagctgttgcaatgtcttggactaataattgcaacacgtgttctttcttggcccccttcgggtgcatctctatacgtggtcactcacaatgcgtcgaagcagtagagatattgctcctcacactgtctcccctctcgaagagaaggcaacgcatatgtaggatatgcgctgagactatgccaaagatggataagcacaagaattctttgccatttgtcatgttagtgccttctattttaataaagtgcggcaatggggatagaggttctgcattacctgggagtcattagaccctcatctctgctgtgaccactcgcgaatggcatagtcatatacgacctactgtcgaccagagaccagggcatgatcagattaccacgtggtcatgccagttcgatactgcaagcaacacaaaagcgcgccatcgccaatctgtgacttcgatacaagatctcctcaaatgtaacacacactgtcaagcggcaggtgccccaaagtctaccgatgagccatatgagtgagctaaatagcgttggaaaccagaaagtcacatcatgtcaaggctgtgcgtgacaagccaaaagcacagttggcgaagaataccacacatacagaactccttgtagaatgtgcacctcccaaattggccattggctcacgcagaagaagccacctacttcgccaggccataaaagctcctctccggtaagtccctcctcttcggacttccacagcgatcgtaaagttgaaacttcctccaatgttcaatcactaggattcttctcgtccatgga

SEQ ID NO: 549034 - DNA, 245 bp, Homo sapiens
ctagaatccaggaaacacagcactggatgctcaaaaacagatactcttcctacacaagactgttctctaatctttcaggtgccgaacttattaaaactagacaaaggaggattaagttacaaatatagtggtgcagccgatggaattcggctctataattcactgaagtccagggcaggcccagatatgatgcatgcactgatgaggtgcagcaggtaagactgtaagactaggtaaagaactgc

SEQ ID NO: 549035 - DNA, 483 bp, Homo sapiens
tgccaaattcagtggggactcagtgcccagccctggccacgagctttggccttggtctacctgccaggccaggcaaagcgcctttacacaggcctcggaaaacaatggagtgagcacaagatgccctgtgcagctgcccgaggtctcgcccacccggccggatttgatccccccaagtcttacaggactgcatcgggtttctgcgcccttttctccagcctaaatgacatcatctatggactgagccgccactctctgccgaagtggcgcagctgtgcccccagctgcccccacccctcacaggtccctcagattataggtgcccaggctgaggtgaagagcctggggccctgcttccggcgctcctggaccctgggcaaaacctgtgacccttttctactggaatagaaatgagtttatcatctttaaaaataattcactcttgaagtaataaacgtttaaaaaaatgggaaaaaaaaaaaa

SEQ ID NO: 549036 - DNA, 447 bp, Homo sapiens
  misc_feature (14)..(14): n is a, c, g, or t
  misc_feature (39)..(40): n is a, c, g, or t
  misc_feature (321)..(321): n is a, c, g, or t
  misc_feature (438)..(438): n is a, c, g, or t
accctaaaacctantaccttttctctctaggaaaatccnnaaggtcctaaacttgacttttttgaaggtcttcctcaacttgaactacagttgtgcctcataattgtcccttgccctttcccagcttaattattttaaggaacaaatgaaaactctgggctgggtggagtggctcatacctgtaatcccagcactttgggaggctacggtgggcagatcatctgaggcccaggagttcgagacctgcctggccaacatggcaacaccccgtctctaataaaaatataaaaattagcctggcatggtagatgcgcctatagncccagctgctcaggaggctgaggcatgagaatcgcttgaacctaggaggtggaggttgcattcaactgagatcataccacttcattccagcctgggtgacagagcaagactctgtcncaaaaaaaa

SEQ ID NO: 549037 - DNA, 416 bp, Homo sapiens
atattaggttttttttttcccttttggaacatggattttgggacattagcagtagccttattttaatgctttatgtcctaaacatactaataaaaatgaaaagacgcaaaaagagcctttcggaaaactgaaggactagttttaaaaatgagactttcagcccaccatttataaaaaaaattttaagggccctcctggttttaggtatttaaaggtgatgttgttcaaatgggtaaatggacaaaaaaaaaattttaaagtaaacttggaactttggatataactaaaaaaaactagattataaaattagtcgggaacccctggtaatggacattggcattcatttcctttttcctcctaaggggaaggatgtgttttaaaatttttgttttttccattaaaactgggaaccttga

SEQ ID NO: 549038 - DNA, 1097 bp, Homo sapiens
ttgtctctcaaacaaggtggttgtcctccccttcaccttggggggggggggtttgccccctcctgcccccccccacattttgttggtagccgattttttgtgccccccgctttctcccgggcgggtttctttgagaagaccgctccctccacatagtggtgggggtgtgccccttcagtagcacagggtgttcttcatctccgcccggcgggtcatcctcatcagtggtgcgcacccccctctaatatatggcgcgccttcctcctttatagagagggcgcaccgcggggctatatcgtcctgtggtgggagacactctctgaaaggggccacccgcgcgttttttttttgcaccagagcccgtgggagacagcacatgttttttgcgagacgccccagaggggtggtttgtgcgcgttttctcccccacggagcgcgcgccctcgtattttatacccctctcgactgttctttcttgtcgcgtgtattaccgcgcggagccgcggggcaccaccccctctgggcgcgaggcggagggacccccccgcggggccgcgcttcgcgtatatccgccttggggcgagaattcttctgtgacacgggccgcgggggggccactctacaggggcacgcgcgcaactatcccgcgagagcatcgatctgcgctctggagaggggcgccccgaaacagcgctggaatcccccgctggtgtggacacccgcccccgagagaacaagagggtgtacgcggcctctctttgtgtgaaaaaagcagagagcagcttgggtttcgccgccctgtgccagctcccgagagggcggcagaagaggtgtttacacatcccaccataccagatcgctaccccacgatgataggtggtgacattttcgcagagagagggagcaccctttttggggccccgatggagtgggggtgagagggaaaatataagatggcctggtgcgaagatgggggaaaatttggggccccgaacccccgaggccccccggccagtggggaaaaattaggggactttttgtgtgaaatgatttttggtgaccccgaatgggaaaaaaaaaaatggaaacctttctca

SEQ ID NO: 549039 - DNA, 308 bp, Homo sapiens
  misc_feature (27)..(27): n is a, c, g, or t
gtcaaatccagcctgccacctattttnataataaagttctattggaacacagccatgcccattaatttacaaattgtctctggatgcttttgtgcattgacggcagagctgagtagttgtatcagagacttgaaaactcgaatatggctcaaaagcttaaaatatgtacagaaatattttgccagcactgattttaaaaactgtacagtgatcaaacctggccgttttatcacaaaacaatttttatatttccagtacgtgatggttcaagacatgctctctccatcccccatgggacggcctgaagg

SEQ ID NO: 549040 - DNA, 370 bp, Homo sapiens
agacaacaaagagcatgtcagtatagagacactgtcaagattaagttataccagcaaaagtgcttactaatgtcacgtgataacctggtcaatataggtgagactactaagatcataatcatccttttattaaaaaaaagaatgtaagaaagatggatttgatcacactcaccatttaatcatttccagcaaaagtatatgtttggctgaaattatgtcaaatggatgtaatatagggtttgtttgctgcttttgatggctacgttttggagagagcaatcttgctgtgaaacagtgtggatgtcaattttgataaggctgactcttactaaccaccatttcccctgtggtttgttatcagtacaattct

SEQ ID NO: 549041 - DNA, 80 bp, Homo sapiens
aaccgcagataagtttttttctcatttgacaagatagagcattaatacaactacttaaaaaatagtccgtcaataggtta

SEQ ID NO: 549042 - DNA, 175 bp, Homo sapiens
tgggggtcctccagggagttgacccaaaggtggaggccacggaggcagggtttttggggactgtcggggggtacaaagggaaaaggctttgcaaaagctccctggcaaaacccccttggggaattgctttgtgtgggacagggaggaagtttcaataaagcagcaccaaggttca

SEQ ID NO: 549043 - DNA, 109 bp, Homo sapiens
  misc_feature (22)..(22): n is a, c, g, or t
  misc_feature (29)..(29): n is a, c, g, or t
  misc_feature (64)..(64): n is a, c, g, or t
tcatgctctggttgtttctgtnccaaatnattccatccacctttcccaatcggccttacttctnactaatttgtaggaaaaagcaagttcgtctgttgtgcgaataact

SEQ ID NO: 549044 - DNA, 289 bp, Homo sapiens
taagtagaagatcaatctcttaaggaatcatattcctataggtctctcgaacgacgtatcatactataataacagagaacatactgcattacttaacagacaagctccacgtttactagcccactaacaatactttataggaaacagaaattgccgtttacatgctaaaaatatttctatcattgatatcacatatgactttgacaactatacaactaaactgatctgtggaatttttcacggcgtcatttttataattatgtgttctcacctatactgtccaaatgtg

SEQ ID NO: 549045 - DNA, 134 bp, Homo sapiens
ccttaccccatgcacgttcgggtcctggatggctaggcagctggacgagaacgcccagaagatccagcgtcgggcagacttcccagccaaatatgttgatggaccaatgaattctccagagaagctcgagcatg

SEQ ID NO: 549046 - DNA, 215 bp, Homo sapiens
ctaattctgccccatggtacagatttgtgtgtgatgaaaacctatgctttaagttctagagagcatgtttaggaatacctttcacctatttcagaaggtactttaaaattggacctgggagtcatgacagagcttcctggaacaaccaagcatctttctccatccttgcaatagtagttgacttctgaagtaccagaaacagattttctaaaata

SEQ ID NO: 549047 - DNA, 438 bp, Homo sapiens
accggcatacccaggacatgttcacttaatctctctgaagctcattctcctcatctagtaaatatggacataataccacctgcacctcacagagtgcctgggagaattaagtgagaagtatggcacaatgcttgcaaagcagtacaagagagatgctatgattccagaacggcatgctgattcattcagtacacatatgctatgagccaattatggcatacagcttctcaccctgagtccaatcagaggagcatgaagcacatggagagactgtcaggaagtcagtgccaatgggcacgttattgtcgctaatggagagggggcagacagtcctcagaggtacaggaactctttcaagccaaacatttccaattcccaattatatccacccctcaccagaagcattcgagatgtcagtcttgtccttagggactaggg

SEQ ID NO: 549048 - DNA, 131 bp, Homo sapiens
gcaggttaacaatcacagcgaaacgaagatacctggcgcgtttgtcccacagccgtcgacgcaatatcctgacgcaaactgcgcagccgagaagcgttcggaggtaggaagtcctggtacactggcgatgc

SEQ ID NO: 549049 - DNA, 1557 bp, Homo sapiens
  misc_feature (23)..(23): n is a, c, g, or t
agcggatagaaagtgagcttctngacaagtgccaaaatggcgatgcctaccacctagaactggattgtgcgctccatttctttcacctcaaagctggccgccaccgctgccacctgctcagagtgaaataatgaaggtggtcaacctgaagcaagccattttgcaagcctggaaggagcgctggagtgactaccaatgggcaatcaacatgaagaaattctttcctaaaggagccacctgggatattctcaacctggcagatgcgttactagagcaggccatgattggaccatcccccaatcctctcatcttgtcctacctgaagtatgccattagttcccagatggtgtcctactcttctgtcctcacagccatcagtaagtttgatgacttttctcgggacctgtgtgtccaggcattgctggacatcatggacatgttttgtgaccgtctgagctgtcacggcaaagcagaggaatgcatcggactgtgccgagcccttcttagcgccctccactggctgctgcgctgcacggcagcctctgcagagcggctgcgggaggggctggaggccggcactccagccgctggggagaagcagcttgccatgtgccttcagcgcctggagaaaaccctcagcagcaccaagaaccgggccctgctgcacatcgccaaactagaggaggcctcattgcacacatcccagggacttgggcagggtggcacccgagccaatcaaccaacagcttcttggactgccatcgagcattctctcttgaaacttggagagatcctggccaatctcagcaacccgcagctccggagtcaggccgagcagtgtggcaccctcattaggagcatccccacgatgctgtctgtgcatgcggagcagatgcacaagaccggcttccccactgtccacgccgtgatcctgctcgagggcaccatgaacctgacaggcgagacgcagtccctggtggagcagctgacgatggtgaagcgcatgcagcatatccccaccccactttttgtcctggagatctggaaagcttgcttcgtggggctcattgagtctcccgagggtacggaggagctcaagtggacagctttcactttcctcaagattccacaggttttggtgaagttgaagaagtactctcatggagacaaggacttcactgaggatgtcaactgtgcttttgagttcctgctgaagctcacccccttgttggacaaagctgaccagcgctgcaactgtgactgtacaaacttcctgctccaagaatgtggcaagcaggggcttctgtctgaggccagcgtcaacaaccttatggctaagcgcaaagcggaccgagagcacgcaccccagcagaaatcgggagagaatgccaacatccagcccaacatccagctgatcctccgggcggagcccactgtcacaaacatcctcaagacgatggatgcagaccactctaagtcaccggagggactgctgggagtccctgggcacatgctgtccgggaagagtctggacttgccgctggcctacagcacatg

SEQ ID NO: 549050 - DNA, 229 bp, Homo sapiens
aggatcttactaacctaatcgcatttataaacttcccatccagaacattatagtatccatctttacgacgtcagctagtgaaaacatttaacttcataaatatgctaccctgactggtcaagggctttttagtatttggctgtctcttcatgggaaagggaaatcagccgttcaaggaacgattcctttttcctttgtttttttttattttttattataggggggggca

SEQ ID NO: 549051 - DNA, 1000 bp, Homo sapiens
  misc_feature (23)..(23): n is a, c, g, or t
agcggatagaaagtgagcttctngacaagtgccaaaatggcgatgcctaccacctagaactggattgtgcgctccatttctttcacctcaaagctggccgccaccgctgccacctgctcagagtgaaataatgaaggtggtcaacctgaagcaagccattttgcaagcctggaaggagcgctggagtgactaccaatgggcaatcaacatgaagaaattctttcctaaaggagccacctgggatattctcaacctggcagatgcgttactagagcaggccatgattggaccatcccccaatcctctcatcttgtcctacctgaagtatgccattagttcccagatggtgtcctactcttctgtcctcacagccatcagtaagtttgatgacttttctcgggaccgagacgcagtccctggtggagcagctgacgatggtgaagcgcatgcagcatatccccaccccactttttgtcctggagatctggaaagcttgcttcgtggggctcattgagtctcccgagggtacggaggagctcaagtggacagctttcactttcctcaagattccacaggttttggtgaagttgaagaagtactctcatggagacaaggacttcactgaggatgtcaactgtgcttttgagttcctgctgaagctcacccccttgttggacaaagctgaccagcgctgcaactgtgactgtacaaacttcctgctccaagaatgtggcaagcaggggcttctgtctgaggccagcgtcaacaaccttatggctaagcgcaaagcggaccgagagcacgcaccccagcagaaatcgggagagaatgccaacatccagcccaacatccagctgatcctccgggcggagcccactgtcacaaacatcctcaagacgatggatgcagaccactctaagtcaccggagggactgctgggagtccctgggcacatgctgtccgggaagagtctggacttgccgctggcctacagcacatg

SEQ ID NO: 549052 - DNA, 1500 bp, Homo sapiens
  misc_feature (23)..(23): n is a, c, g, or t
agcggatagaaagtgagcttctngacaagtgccaaaatggcgatgcctaccacctagaactggattgtgcgctccatttctttcacctcaaagctggccgccaccgctgccacctgctcagagtgaaataatgaaggtggtcaacctgaagcaagccattttgcaagcctggaaggagcgctggagtgactaccaatgggcaatcaacatgaagaaattctttcctaaaggagccacctgggatattctcaacctggcagatgcgttactagagcaggccatgattggaccatcccccaatcctctcatcttgtcctacctgaagtatgccattagttcccagatggtgtcctactcttctgtcctcacagccatcagtaagtttgatgacttttctcgggacctgtgtgtccaggcattgctggacatcatggacatgttttgtgaccgtctgagctgtcacggcaaagcagaggaatgcatcggactgtgccgagcccttcttagcgccctccactggctgctgcgctgcacggcagcctctgcagagcggctgcgggaggggctggaggccggcactccagccgctggggagaagcagcttgccatgtgccttcagcgcctggagaaaaccctcagcagcaccaagaaccgggccctgctgcacatcgccaaactagaggaggcctcttcttggactgccatcgagcattctctcttgaaacttggagagatcctggccaatctcagcaacccgcagctccggagtcaggccgagcagtgtggcaccctcattaggagcatccccacgatgctgtctgtgcatgcggagcagatgcacaagaccggcttccccactgtccacgccgtgatcctgctcgagggcaccatgaacctgacaggcgagacgcagtccctggtggagcagctgacgatggtgaagcgcatgcagcatatccccaccccactttttgtcctggagatctggaaagcttgcttcgtggggctcattgagtctcccgagggtacggaggagctcaagtggacagctttcactttcctcaagattccacaggttttggtgaagttgaagaagtactctcatggagacaaggacttcactgaggatgtcaactgtgcttttgagttcctgctgaagctcacccccttgttggacaaagctgaccagcgctgcaactgtgactgtacaaacttcctgctccaagaatgtggcaagcaggggcttctgtctgaggccagcgtcaacaaccttatggctaagcgcaaagcggaccgagagcacgcaccccagcagaaatcgggagagaatgccaacatccagcccaacatccagctgatcctccgggcggagcccactgtcacaaacatcctcaagacgatggatgcagaccactctaagtcaccggagggactgctgggagtccctgggcacatgctgtccgggaagagtctggacttgccgctggcctacagcacatg

SEQ ID NO: 549053 - DNA, 1864 bp, Homo sapiens
ggtgcgatctcggctcaccccaacaacctccgcctcccgggttcaagcgattctactgcctcagcctcccgagtagctgggattacaggcatgcaccaccaagcccggctaattttgtatttttagtggagacgaggtttctccatgttggtcaggctagtctcgaactcctgacctccggtgattcgcccgcctctgcctcccgaagtgctgggattacaggtgcgagccactgcgctcggccgatactttcttagtgccccagtttaaggaagggcggttcaggagcagagagtctgacaggatcttactttatccctttagctctttttctttcaaattcctctgtctcgcttaaatcttcccgcatcttctcctttctatttaattctgccttccccggttctccttagaacctcatgtccttttctttagctccatttctttcacctcaaagctggccgccaccgctgccacctgctcagagtgaaataatgaaggtggtcaacctgaagcaagccattttgcaagcctggaaggagcgctggagtgactaccaatgggcaatcaacatgaagaaattctttcctaaaggagccacctgggatattctcaacctggcagatgcgttactagagcaggccatgattggaccatcccccaatcctctcatcttgtcctacctgaagtatgccattagttcccagatggtgtcctactcttctgtcctcacagccatcagtaagtttgatgacttttctcgggacctgtgtgtccaggcattgctggacatcatggacatgttttgtgaccgtctgagctgtcacggcaaagcagaggaatgcatcggactgtgccgagcccttcttagcgccctccactggctgctgcgctgcacggcagcctctgcagagcggctgcgggaggggctggaggccggcactccagccgctggggagaagcagcttgccatgtgccttcagcgcctggagaaaaccctcagcagcaccaagaaccgggccctgctgcacatcgccaaactagaggaggcctcttcttggactgccatcgagcattctctcttgaaacttggagagatcctggccaatctcagcaacccgcagctccggagtcaggccgagcagtgtggcaccctcattaggagcatccccacgatgctgtctgtgcatgcggagcagatgcacaagaccggcttccccactgtccacgccgtgatcctgctcgagggcaccatgaacctgacaggcgagacgcagtccctggtggagcagctgacgatggtgaagcgcatgcagcatatccccaccccactttttgtcctggagatctggaaagcttgcttcgtggggctcattgagtctcccgagggtacggaggagctcaagtggacagctttcactttcctcaagattccacaggttttggtgaagttgaagaagtactctcatggagacaaggacttcactgaggatgtcaactgtgcttttgagttcctgctgaagctcacccccttgttggacaaagctgaccagcgctgcaactgtgactgtacaaacttcctgctccaagaatgtggcaagcaggggcttctgtctgaggccagcgtcaacaaccttatggctaagcgcaaagcggaccgagagcacgcaccccagcagaaatcgggagagaatgccaacatccagcccaacatccagctgatcctccgggcggagcccactgtcacaaacatcctcaagacgatggatgcagaccactctaagtcaccggagggactgctgggagtccctgggcacatgctgtccgggaagagtctggacttgccgctggcctacagcacatg

SEQ ID NO: 549054 - DNA, 1144 bp, Homo sapiens
atggaacccatacaaagcaccgttagtcacagtggaagtgctcccaagaagcaggcgaaagtcatgacattacaaaaaaaaaaaaagatgctgaattgcttgataggtactatacattgaggtctgcagctgtggatttctttgccatatcaagataaactgaattccagtgtaagggccatgtgtaaacagctaaaggacaatttgtggagctgtcactgaagctgcatcagtaggcatgaaaaccttgttcctttccacgaaattacctttataatctggtactggaaaagggcacgctttaaatgctgaggtgtaggacctacctattaaggaacagggcattacctattagacctctaattattgatttcgcaggatattaggggacagctcattcactactggataaaccctataaacggcaacaacgcgacacgggtagaacggaactgttacaaacgccttgcgcacgacaaccttctacctggcacacattttacacacagggactgcccaaacacggcggtgggtatgggactaacacttttctacgaccacgcaagacgctatatgtggggaccctttacacagaaagatgtgtcttcagcaggtgttctaaaaactcaggcgacaggacaaaaggccgaaaacattctaccgtggaccaccaaaacccgaaagtaaggcagcgaaggccagacgacttgaaagtgatcgtcgccgaaaacaacactttcgatatcttgaaagagaaacagccccgccaaattgtgcaaggggcaaaacaccagcaggggcacgtcgattccgggcccggttggaaacacccaagggggctactaatcaacaagcaccgtccgccagcggcaagttgcaccacacaggtgttcggccgccgcgttagcaaccccctgtgaggaggggggagcacacaaaacagcaagagtgtggcccccacagcaacaaagcaggcgggaaaagtcagcgatgcacaagcataaagcggaagaacgcggggaacacgacaaaggcgccacaaacgcccaccaccacaggaggacacactactcaaaaagcgggcgcagcagcggaacaacagaacggcaaagttaaggcaggcagtaaaagcgactccatagta

SEQ ID NO: 549055 - DNA, 310 bp, Homo sapiens
  misc_feature (72)..(72): n is a, c, g, or t
ggagaagggagtccttgcccctgtcacccaaaggtggagtatagtggtgcgatctttgtggctcaccgcccnacctcccgcctcctgagttcaccccaggtctcctgcctcagcctcccaagtagctgggactacaggtggtccaccaccatgcctggctaatttttgtatttttagtagagatggggttttgccatgttggccaggctggtcttgaactcctgacctcaggtgatccacccgcctcggcctcccaaagtgctgggattacaggcgtgagccaccgcgcccgcccttctgtcgtcttctc

SEQ ID NO: 549056 - DNA, 1440 bp, Homo sapiens
tgcatatgtcgaccagcgtcgctggattgtgcgctggccgccaccgctgccacctgctcagagtgaaataatgaaggtggtcaacctgaagcaagccattttgcaagcctggaaggagcgctggagtgactaccaatgggcaatcaacatgaagaaattctttcctaaaggagccacctgggatattctcaacctggcagatgcgttactagagcaggccatgattggaccatcccccaatcctctcatcttgtcctacctgaagtatgccattagttcccagatggtgtcctactcttctgtcctcacagccatcagtaagtttgatgacttttctcgggacctgtgtgtccaggcattgctggacatcatggacatgttttgtgaccgtctgagctgtcacggcaaagcagaggaatgcatcggactgtgccgagcccttcttagcgccctccactggctgctgcgctgcacggcagcctctgcagagcggctgcgggaggggctggaggccggcactccagccgctggggagaagcagcttgccatgtgccttcagcgcctggagaaaaccctcagcagcaccaagaaccgggccctgctgcacatcgccaaactagaggaggcctcttcttggactgccatcgagcattctctcttgaaacttggagagatcctggccaatctcagcaacccgcagctccggagtcaggccgagcagtgtggcaccctcattaggagcatccccacgatgctgtctgtgcatgcggagcagatgcacaagaccggcttccccactgtccacgccgtgatcctgctcgagggcaccatgaacctgacaggcgagacgcagtccctggtggagcagctgacgatggtgaagcgcatgcagcatatccccaccccactttttgtcctggagatctggaaagcttgcttcgtggggctcattgagtctcccgagggtacggaggagctcaagtggacagctttcactttcctcaagattccacaggttttggtgaagttgaagaagtactctcatggagacaaggacttcactgaggatgtcaactgtgcttttgagttcctgctgaagctcacccccttgttggacaaagctgaccagcgctgcaactgtgactgtacaaacttcctgctccaagaatgtggcaagcaggggcttctgtctgaggccagcgtcaacaaccttatggctaagcgcaaagcggaccgagagcacgcaccccagcagaaatcgggagagaatgccaacatccagcccaacatccagctgatcctccgggcggagcccactgtcacaaacatcctcaagacgatggatgcagaccactctaagtcaccggagggactgctgggagtccctgggcacatgctgtccgggaagagtctggacttgccgctggcctacagcacatg

SEQ ID NO: 549057 - DNA, 1133 bp, Homo sapiens
gggccatgctgggcccggggggctgtgtgttgcgcagtgggctggcgtgacgcggtccggaaggctggcgcggtgacggcgttagcccggccctcgggccctcttgtgcgtgcgtccttcgcgctattccctccttgctcgagatggatctgcaccgtgggccccggagcgggtgagggccaggcaacagttcccggtcttccttgaacaatgatgtggacccatcgatgagctgaccacggacactgattgctgctcatcatgctggagtcccgagcaggagaacagcttgccatcgtgttcgaccagggccatgtttgccacaggaaggtgatgctccaagtacattcagtgctacatacaatccattggtccatgcattcgtgctggcgacgctcacaacatgtaatggcttccaggcaaagtggtccaacattcagagcagcggcaggcccttgaggtacaaggcccaagaagaaggacgcatggagcacgtgcaagtatccacgtcgatcccaatgtctatcccctgtcggtggggccatgcgcagtcaaggcttctctttgcaagaccacatactaaggcaggcaaaggtgaaaccaagttggtggtaccaacgctggagagcaccttgaaaggcacccgtaagacgattcccgacccacttgacacaggcgttcccccaaaggtttgctgaacgggcaccggtggcccacgctgcccctgaaacacggggggcaaggcacggaaagtggccgttggcaccgtacccatagggctgcctgtgcggcattgacaagcatctgagaatctgacgggctcctactagcgccgcgggacggttgggccacgacactgatatagcgagaagcaaagaccataggccgcatagcaaatcgacagaactagggccgagtccaacacaaaagggcgcttcaaatagacgagattacccgtggcagtcagcacacacttggtatgtcacagggatccacacatcggcagactcgctataggggagggacttacaagagcagagaaaggtatatcgggccgcgtcaacttgacgtccgcatggagatccaggtagggctatccgcgatagaactttcgaatgaaccgctaaagcaac

SEQ ID NO: 549058 - DNA, 1445 bp, Homo sapiens
actcccagggtttatactaaatggctgtacctcaaaggctggccgccaccgctgccacctgctcagagtgaaataatgaaggtggtcaacctgaagcaagccattttgcaagcctggaaggagcgctggagtgactaccaatgggcaatcaacatgaagaaattctttcctaaaggagccacctgggatattctcaacctggcagatgcgttactagagcaggccatgattggaccatcccccaatcctctcatcttgtcctacctgaagtatgccattagttcccagatggtgtcctactcttctgtcctcacagccatcagtaagtttgatgacttttctcgggacctgtgtgtccaggcattgctggacatcatggacatgttttgtgaccgtctgagctgtcacggcaaagcagaggaatgcatcggactgtgccgagcccttcttagcgccctccactggctgctgcgctgcacggcagcctctgcagagcggctgcgggaggggctggaggccggcactccagccgctggggagaagcagcttgccatgtgccttcagcgcctggagaaaaccctcagcagcaccaagaaccgggccctgctgcacatcgccaaactagaggaggcctcttcttggactgccatcgagcattctctcttgaaacttggagagatcctggccaatctcagcaacccgcagctccggagtcaggccgagcagtgtggcaccctcattaggagcatccccacgatgctgtctgtgcatgcggagcagatgcacaagaccggcttccccactgtccacgccgtgatcctgctcgagggcaccatgaacctgacaggcgagacgcagtccctggtggagcagctgacgatggtgaagcgcatgcagcatatccccaccccactttttgtcctggagatctggaaagcttgcttcgtggggctcattgagtctcccgagggtacggaggagctcaagtggacagctttcactttcctcaagattccacaggttttggtgaagttgaagaagtactctcatggagacaaggacttcactgaggatgtcaactgtgcttttgagttcctgctgaagctcacccccttgttggacaaagctgaccagcgctgcaactgtgactgtacaaacttcctgctccaagaatgtggcaagcaggggcttctgtctgaggccagcgtcaacaaccttatggctaagcgcaaagcggaccgagagcacgcaccccagcagaaatcgggagagaatgccaacatccagcccaacatccagctgatcctccgggcggagcccactgtcacaaacatcctcaagacgatggatgcagaccactctaagtcaccggagggactgctgggagtccctgggcacatgctgtccgggaagagtctggacttgccgctggcctacagcacatg

SEQ ID NO: 549059 - DNA, 339 bp, Homo sapiens
  misc_feature (45)..(45): n is a, c, g, or t
gggtccttttttttttaaggggggggggatgggggaaaaaggganaggggggggggggggccccccccgggccaaaaaaacaaatttgttttttgccccccggggggttttcccccccttttttgtttttttagccaaggcccaaaccccccctttttaggttttggtggggggggggggggggggtaaggttttttccatcccttccggggggggggggaagtttttttccccccgggtttttttcaaaagggaggggggccccgggccccctttttttttttggggggggttcccccgggggccaaaatgccaataattttttcccccccccggtta

SEQ ID NO: 549060 - DNA, 1461 bp, Homo sapiens
  misc_feature (23)..(23): n is a, c, g, or t
agcggatagaaagtgagcttctngacaagtgccaaaatggcgatgcctaccacctagaactggattgtgcgctccatttctttcacctcaaagctggccgccaccgctgccacctgctcagagtgaaataatgaaggtggtcaacctgaagcaagccattttgcaagcctggaaggagcgctggagtgactaccaatgggcaatcaacatgaagaaattctttcctaaaggagccacctgggatattctcaacctggcagatgcgttactagagcaggccatgattggaccatcccccaatcctctcatcttgtcctacctgaagtatgccattagttcccagtttgatgacttttctcgggacctgtgtgtccaggcattgctggacatcatggacatgttttgtgaccgtctgagctgtcacggcaaagcagaggaatgcatcggactgtgccgagcccttcttagcgccctccactggctgctgcgctgcacggcagcctctgcagagcggctgcgggaggggctggaggccggcactccagccgctggggagaagcagcttgccatgtgccttcagcgcctggagaaaaccctcagcagcaccaagaaccgggccctgctgcacatcgccaaactagaggaggcctcttcttggactgccatcgagcattctctcttgaaacttggagagatcctggccaatctcagcaacccgcagctccggagtcaggccgagcagtgtggcaccctcattaggagcatccccacgatgctgtctgtgcatgcggagcagatgcacaagaccggcttccccactgtccacgccgtgatcctgctcgagggcaccatgaacctgacaggcgagacgcagtccctggtggagcagctgacgatggtgaagcgcatgcagcatatccccaccccactttttgtcctggagatctggaaagcttgcttcgtggggctcattgagtctcccgagggtacggaggagctcaagtggacagctttcactttcctcaagattccacaggttttggtgaagttgaagaagtactctcatggagacaaggacttcactgaggatgtcaactgtgcttttgagttcctgctgaagctcacccccttgttggacaaagctgaccagcgctgcaactgtgactgtacaaacttcctgctccaagaatgtggcaagcaggggcttctgtctgaggccagcgtcaacaaccttatggctaagcgcaaagcggaccgagagcacgcaccccagcagaaatcgggagagaatgccaacatccagcccaacatccagctgatcctccgggcggagcccactgtcacaaacatcctcaagacgatggatgcagaccactctaagtcaccggagggactgctgggagtccctgggcacatgctgtccgggaagagtctggacttgccgctggcctacagcacatg

SEQ ID NO: 549061 - DNA, 122 bp, Homo sapiens
  misc_feature (86)..(86): n is a, c, g, or t
  misc_feature (88)..(88): n is a, c, g, or t
cgacagtgcggccagggctgctgggggatgggggttgctggaggctccacacctctcatccgcccgctcttgctcttggccccacnanagtcccctggggacctggccgctgccagcactgg

SEQ ID NO: 549062 - DNA, 1646 bp, Homo sapiens
gaggcaggaacagggcagtgcacagtgacagtgctctccttgcctgggttgaagagggctgtggcaggggttgaggttcaggagagctgcagcaacttgaagcatcagtgttgttcctctcaactgtgggagactagttgtctaaagattatctttcttccttctctccagatggtgtcctactcttctgtcctcacagccatcagtaagtttgatgacttttctcgggactagattggggatgacagacaaggccccgcctccttgacggccctgatgctgtgacccgtgaggctggataggcagcacatgatgcctctgggtggcatagctggacttccatgggagggggatcctggcaaggtaggggctggtgcttgggagccaatgtccagtgtcgaggatgctgagtctggaacccagggttggaggtgagaggagcaggagtcctgaatgcaccgtctgcctcatgtgagacctgggggtggatggaggcattccgtagcatctccactgtcctttccacagtttgatgacttttctcgggacctgtgtgtccaggcattgctggacatcatggacatgttttgtgaccgtctgagctgtcacggcaaagcagaggaatgcatcggactgtgccgagcccttcttagcgccctccactggctgctgcgctgcacggcagcctctgcagagcggctgcgggaggggctggaggccggcactccagccgctggggagaagcagcttgccatgtgccttcagcgcctggagaaaaccctcagcagcaccaagaaccgggccctgctgcacatcgccaaactagaggaggcctcttcttggactgccatcgagcattctctcttgaaacttggagagatcctggccaatctcagcaacccgcagctccggagtcaggccgagcagtgtggcaccctcattaggagcatccccacgatgctgtctgtgcatgcggagcagatgcacaagaccggcttccccactgtccacgccgtgatcctgctcgagggcaccatgaacctgacaggcgagacgcagtccctggtggagcagctgacgatggtgaagcgcatgcagcatatccccaccccactttttgtcctggagatctggaaagcttgcttcgtggggctcattgagtctcccgagggtacggaggagctcaagtggacagctttcactttcctcaagattccacaggttttggtgaagttgaagaagtactctcatggagacaaggacttcactgaggatgtcaactgtgcttttgagttcctgctgaagctcacccccttgttggacaaagctgaccagcgctgcaactgtgactgtacaaacttcctgctccaagaatgtggcaagcaggggcttctgtctgaggccagcgtcaacaaccttatggctaagcgcaaagcggaccgagagcacgcaccccagcagaaatcgggagagaatgccaacatccagcccaacatccagctgatcctccgggcggagcccactgtcacaaacatcctcaagacgatggatgcagaccactctaagtcaccggagggactgctgggagtccctgggcacatgctgtccgggaagagtctggacttgccgctggcctacagcacatg

SEQ ID NO: 549063 - DNA, 172 bp, Homo sapiens
agagtaggatgcaagaggctgaggaaaaaaggaaaacaaattagagggaaggaaggatggaaactcacagtattatcttgtcccaaaagaaaagaaggtccacgtgcagcaccagtggattacacctgtcagtatattcacataccccataccatggtatataactagaata

SEQ ID NO: 549064 - DNA, 87 bp, Homo sapiens
  misc_feature (81)..(81): n is a, c, g, or t
aagaatggagtctgtcagtacaggtgccgatatggaaaggcaccaatgcccagacctggctacaagcccaagagcccaatngtgcgg

SEQ ID NO: 549065 - DNA, 684 bp, Homo sapiens
  misc_feature (31)..(31): n is a, c, g, or t
  misc_feature (85)..(85): n is a, c, g, or t
  misc_feature (157)..(157): n is a, c, g, or t
  misc_feature (237)..(237): n is a, c, g, or t
  misc_feature (247)..(247): n is a, c, g, or t
  misc_feature (317)..(317): n is a, c, g, or t
  misc_feature (351)..(351): n is a, c, g, or t
  misc_feature (360)..(360): n is a, c, g, or t
  misc_feature (405)..(405): n is a, c, g, or t
  misc_feature (534)..(534): n is a, c, g, or t
  misc_feature (592)..(592): n is a, c, g, or t
  misc_feature (641)..(641): n is a, c, g, or t
gagtggtctgggcttttgtgggcactttacnctgggaagggggtatgaggtggctggagaagtgttcatggagagtgtttttttnctgcccccaaggccacggaatcttctattccttctttgtacccaaagggcaaagtggaggccagggtctctntgctaaggagctaagttggggaaagaggcagggggagctcccagcaggaccaaagggagaacaaggtttggaccccagancagagcaggnacccagagttctgttcagtaacaggatgaagcagggaggacggctgtggagtgaacttttctagggtttntccattactggctcttcaggatggtcttaatganatctttctnatagggaaagccccacatttttcagcttggagaacaacagcggtncatttatctttattttaaaggcacctgttcccccgaggagcgatttgatctagatgcccggatactgctccttcaaagcactggccagctccaggtaggttgcctcgaagccgcaggtttacagttctncaccacgatgcggaccccactgcccggctcgacctcctcgggagggggcgctacggangtttgccccggctccccgctcatcgcggccggctccgctcgggcccctnctttcgggtgttaagcgaacagcgggcacgttaaggggcgggg

SEQ ID NO: 549066 - DNA, 1735 bp, Homo sapiens
gacctgaagtacatggtgattcgaacggggcatatgactcatacgattggcattctggtagcgacactacgtcgtcgagggatcgaaagggtcctggacgcccttctcgaggaagggcagttccgtaagcgcctggtaaatcctcgcccgaaaccgtccaatgcacagtcgtgaattcgccgcatctcaatcctctggatcctatcgtcacgcatggccatcgactggtaacttccctccagcggctcgttcgcccgtgagcctgtggaccccatgcacctacacattgcaaatagccttcggagccctggcagccataaacgcaggcttgagacgccgaagataagccaaagcgaccgccctaagtcgcgcaatatgcggaggcccattcggtttgcatttcttacccgggttccacgaacaacgaatgcggcctcgccaaattcacaatgccaggttgccctaggaatcagtaagacactttaatgccggactggtatcccttatcaccaccccttcttgaacgtgcgttcaaaatacgttccgcttcagaccccttggtgcggactcctacgcggaagaccttccccgcttcttccttccaggggcggccgccgcctattcccgctttctcggccttgggcggcctagccaccggggcacccgctggaaccctttggtgccgccctaacccccaggtttggttgccttcccagggggaattccttacccctggtttccataatacccctcgggcccgtaggatcaccctacccttagggccccaaccgccctgagccctctactataattccccctgatccactcggcgcggacactgtgggcgcccctttattaacgggcactcttggaatagttgtcacaccctttggcggttggcccaactgcgaattactcccaatggtgcagtgactcccgttactctcaccggctggccgctttcttcccgtgccggatgctgccacgcccgactaggggcaacaggccaccgactggatatccccaacaagggccccaaacgaccttcctggttcctaaggttattgccagcgtataccgctcctaggcgggtaaaccgaaggtcgccccctctggggccaccacctcctgtccacacctatgtgggcatgccgcaccctttctcccccgtttgtgcacattacccccgactattcccagcctgcccttgagcggccacctttgccaacgcgcggagtcccttccctacggcggacctgtgcgcccctttccactggtgcttcccccctaccgacggcattcttggggcccccgtgcccccccgaatgaatgcgctcacacccacccctggggcaagccaccgggcaagggcgcccacagcccaaagcgacccccaggcacccaccccgcccatgcgccacacagaacagcggccccccccaaacccctggcgcccacgcgcaaacgcccacgcccaccctacgcccacaacatgcacggcccaccccccactgggtcgcagaaccaccccgtcccacgacgccccccgtccgcgcctacagcaacactgtcagccacacccccaaacgccaaaggcccaacccgcgcaccaacgcacgccccgcctctacaagagcgcacacgcgcgagcaaccactccgggcagcgcaaaatcttccccgaccacgccgcagttcgcccgcacagatgccataacccgcgggcccatacccca

SEQ ID NO: 549067 - DNA, 593 bp, Homo sapiens
tgagacagagtcttgctctgtcgcccaggctggagtgcagtggctggatctcagctcactgcaagctccgcctcccgggttcacgccattctcctgcctcagactcccgagtagctgggactacaggtgtctgccaccacgcccggctaatattttgtgttcttagtagagatggggtttcactgtgttagccaggatggtcttgatctcctgacctcgtgatctgcccacctggggctcccaaagtgctgggattacaggcatgagcccctgtgcccggctggtcaatcatttttgagttaactcattcccctgtcagaagaaccccatggaggtgtgggctcatgattactatgcccaggctggggacattgacagttctacctgcggtcacacacaaacatacgccacacacaccaaacaccatacacacacacactacacacatgcacacattgacacattgcaacacaccattcacaccacacacagctcgttgacaggacagaaacttacaatgccgaactctacacggatactcacacactacatcgacaacatctacacacttttgtcgcaaacctaaggataat

SEQ ID NO: 549068 - DNA, 966 bp, Homo sapiens
catgaaggtgttcgtcaaccgcaggatagccgccgaggctgtgaggtggagcagtgcggatctcggatagagcccgactcgcctgagcgaagggagactagagtcgaggtgtggctgggggcccaccgggctgctctgactcctctccgatcacgtggactagaggatcctggcatgcgtgcgagtggggaccaattctcaaagtcatcgagcgaccaatgatctggtgaggctatctgaccacttgggtctttgtgatggaaatcgacagacaagcgtgggatctctgtagtatggcgtacaccaccagatggtccctgaggagcagtagctaccgccgaacgtcgactaattgtcctctgataattgaccagcatgcacggcggttgtccgggaggccatcggaggaaattgacatgaaaatgggttggcgtgtgcacgcttcgatgagaacgtcgccccgtcctgggaatggtggtagggttgatgcgcactcaacagacaaagaagcgacatgatcagagtctatcatcgctgctgggggcgcataggccaggcacaatgttcggagtcctggaaaccatgttcggtgtcccaaagtattacttgtgacacagggcgccgaggacagggctgcagggaagcagcgggaaattccaggcagagtctgtgtgtacacttgaagctggttggcccggtctgttttcacttcgtcggtggccctgctcagttacagcacctgtggcgaggtacatctggggatgattgtacttctgccagcgaggatgggatggacacgggtgtggttcagcgagcttcagccgggggcgagaggtcgccgacaaggaagacctgtttccaaggcgttggcaggtggcagggattgggctggtggccggttttgaaggagcccggaggtgtgtaagcccctttctgggccgtgaactggggattgccccatggggc

SEQ ID NO: 549069 - DNA, 345 bp, Homo sapiens
tccaaatatgagatgcattgttacaggaagtcccttggcatccgaaaagcgcacgccactgcgtctctaaggaggatggcccagtcctctcccgagtccacacaggggaggtgagagcattgctttcgtgtaaattgggtaatgcaaaatttttttaatcttcgccttgatacttttttattttgttttattttgagtgatgagccttcgtgcccccccttcccccttttttgtgccccaactgtggagagtgatgaaggctgttgtggtctccctgggagtgggtggaggcaccagggcttacctgtacactgacttgagacgcgggtgaataaaagtgcacac

SEQ ID NO: 549070 - DNA, 185 bp, Homo sapiens
ccttttagggacccccaagggcccagggacccggggccccccggggttggggccagacaaaaactcggcaaaggggcgaaaggagggaacgagcgggccccgggcccctcggggttaaactgggggcgagcgggggcaggcggctgatgttttataaattgtaaaataaaaaaaaaagaattcta

SEQ ID NO: 549071 - DNA, 449 bp, Homo sapiens
gtgcctccccctttgaacactgccatgtagtgaccactacaacccacaagaccctgagaggctgccgtgctggtatgatattctacagaaagggtgtgcgcagtgtggatcccaagactggcaaagagacttactatgaactggagtccctcatcaactctgccgtgttcccaggccttcaggggggtcctcacaaccatgccattgctggtgttgctgtggccctgaagcaagccatgactacagaattcaaaatctaccagctccaggtgttggccaactgcagggctctgtctgatgcactcacagagctaggctacaaaatagtcacaggtggctctgataatcacttgatcccaatggatctgcgttctaagggtactgatggtggaagggctgagaaggtactagaagctgttctatcgcctgcaacaagaataccatgcttt

SEQ ID NO: 549072 - DNA, 210 bp, Homo sapiens
gttttaagggggggcccccccgaccaaaaaaaaaaattgcccccccttagggggttttcccaaccaaaggggggggaaaatttccctttaaaccctttttgaaaaagggttttaaaattttttaagtttggttttgttcccccctttgggggggggttttaggtttttgtttccggggggattaaaaaattgggcgggggttttttccca

SEQ ID NO: 549073 - DNA, 306 bp, Homo sapiens
  misc_feature (178)..(178): n is a, c, g, or t
  misc_feature (273)..(273): n is a, c, g, or t
  misc_feature (288)..(288): n is a, c, g, or t
gtatgattattatttgttaattaaaaaaataaaattaaaaaaatcatacatgggccaggcatagtggctcatgtttgtaatcccagcactttgcggggccgaggcgggcagatcacttgaggtcaggagtttgagagcagcctagccatcatggtgaaaccccatctctactatacanttagctgggtgtggcggcgggtgcctgtatccccagctcttcaggaggctgaggcaggagaatcactcgcctgggaggcagaggttacagtgagnccgagatcatgccantgcactccagctggcgat

SEQ ID NO: 549074 - DNA, 330 bp, Homo sapiens
tcgacacacgaaaggctgggcgtggtggctccacgcctgtagtcccagcactttgggaggccaaggcaggctgatcacgaggtctggagttcaagaccagcctgaccaacatggtgaaaccccgtctctacaagtacaaaaattagttggatgtgattgtgcgcatctgtgatcccagctacttggggggctgagacaggagaattgcttgaacctgggaggcagagcttgtggtgggccgaggtcgcgccactgcactccagcctgggcgacagagtttggctctgtttcaaaaaaaacaaagaaacaagaaaaagtcgacgcggccgc

SEQ ID NO: 549075 - DNA, 254 bp, Homo sapiens
  misc_feature (3)..(4): n is a, c, g, or t
ggnncactgtaatcccttctcccaggttcaagcgattctcatgcctcagcctcctgagtagctgggattataagcatgtgccaccacacctggctaatttttgtattttttagtagagactgggtttcaccatgttggctgggctggtctcgaacgctgacctccacctttcttggctcccaaagtgctgggattaccgtcatgagccactgcacctagccttcatagagaggtttttgccatcaggccacact

SEQ ID NO: 549076 - DNA, 387 bp, Homo sapiens
tggaaaaaccgctatgtggtgctgaaaggggaccagctctacatctctgagaaggaggtgggtgcctcttgcctctaactctccgttttctcataacccccaccccgggaaccccccaagggggcgccagaacaggacacccccggaaagttccaaaggcaaggacagtggtcgcctctctaaacccaactcatctgcagagaaaggccaccctttaatgagaagaccagagtgagaactagaagttgagttggccgcttactcagtgtatctctgtatgcaaatacctttctaacaacgataagcccctcccaagatgccccagaagttctaagtgtcccttgctgcctcccaccctaacctggcctcctgcatataggatttctt

SEQ ID NO: 549077 - DNA, 174 bp, Homo sapiens
agacatgagaggcagaagcaggaagcggcagaggcagaagcaggaagcgttttaagcaggaggtgtcagaaaagttaccacagggtcttgggtgaggagcagaagcaggaagcaaacattgaaagctatttcatgcaaacctttatctactttagcttaaaagtgaaagtggta

SEQ ID NO: 549078 - DNA, 699 bp, Homo sapiens
gacccaccgctgcctggagccttgcccctgatcctgcgcccgccccgtccgtgcggcgcgcgggcgtgagactgcctgtggccgcgccggagctcggtgcctggggtgccaccatcgaggctggggtgcctgctgcgatgtgtgcctggatgctggagcgtgctgcctgtcacctgcacgcactgcgcaaacttgggctcgcgcttccctgtgccctggcgctggagccctggtggctgccctggagcacccgcacatgtcgctgatccaacctggcagaaggagtacaaatgcggggacctggtgttcgccaagatgaagggctacccacactgtgcctggccctggattgacgcagatgcctgagtgctgcctgtgcaaatcacacagccaacaaataccaaagtcttttttcttacgggacccacgagactgtgcattcctgtggcccctaacagacctcttcccttacgaggacatccacaggcagaacgtttggcaagcccaacaagcaggaacacgggttcatgccgacggggccttgtggggcaagcatccgaagcacacaaccacattacatgttcacgtgcccttccctgggctaactcatgatgcctcccccagtacaacaacgacaggctgatgtcggaaagcaggccttgacaccacagaggcccgcaaagactgcagaggggttgc

SEQ ID NO: 549079 - DNA, 125 bp, Homo sapiens
tggcgtgtggcagttttaagttattagttttataaaatcagtactttttaatgggaaacaatcgtgaccaaaatatttggtgcacagatattttggagaccctattaaaaaatgttaatatggag

SEQ ID NO: 549080 - DNA, 794 bp, Homo sapiens
tacccctgatacgaaagatggaccgccatcaggcgcatactcggtcggagcgtccaattcgctcgatgagcgggagacagtcgctagaagacacggaaggcacagaaggcagacttcgctcagcgacaaagaagaattttctgataaccatactggacaaaatgaactgttttgccttcggagggtctgaattcttcatcccagaaggcattcagatagacttcgagatgcccactttttcagcaactatcacggaatggtatcaggagataaaggagggttggaggacgacgggaacggtctatagacgtgctcatctcttccctcctcgcaaaaagcaccttcccataattcaaaatagccttctacatctagtgatgatcttaagtcgaactttccatacgtatctcacatgggctacgagaacaagtacgatcaataatagtaagatgcggcgattctctagaaacagcgagagtcccaacgagatgacactcaacactcttgtattcgaccaacgggacctagtgcacacactcgactcctagcagcgtaactacacataaagacggtccttcttaatgtgcggccgagactgcaaatagggaacccaaggagaagtgctcctaaattattacaaactgggattataaactacagcctacgctaaccctaccatctcaatcaagatcacctaaggcgtacaatagcaaactaacccagagggaattcatatttaactaagtagtagcggacaacggaagacacacatccacaacaagcccaacagagcg

SEQ ID NO: 549081 - DNA, 970 bp, Homo sapiens
gttctaatcaaatttagaaagcccttcataacttatcataatgctgatgattttattatctcaggcaatctatatatgtgaaaccaactaagaaacttaaatgtattcagtggaaagaaggcatcatctgtgctggtatcttaacctgtaaaacaccaccagtgcaatagcagctgaggagcaggtcatgcatgttaagtcaggcagagcagcccggtgctgtgaacaccaggcactgtgcgtgtctgcacagccccatcaacttgatctcacagtaaatttaaaagttttttctttatattcctttgtccttcttttttctgttatgttttcttgcctgtggttttaccatttcagtttcctgcagacggggataatatgtcactcaattcagcatggccatgcattgctcctaaatgagtgtaatacggctagtactgtaataagtggcagtttaagatgcagtcatatttcatttcttcctgactgatttctacactgtgtctttaataactgcatctttagttctgcttttctatgggaagtaggacttatcacctttaatcatgtttcatcttagttatactaaaaaagtaagaatcctagggtatattattaccagatacacatgaacagaatttgagaaagattaaaacttgtaggcaacctctgaaggttttcgccaagggtctcaatcaggggaccggcatccgggctcctagaaatacccggggagacgaactttaaattatgggtccaggcagagtaccaaataatccgaataatcttcaaagaattcctgacctgggatgggtggcttggcatgaaggtgggggcctgtgtctcgctattttttcctccttctgctaaagaacataacatagaaacacacgtttacgggatcactgtcacaagaataagcaacagatggtatagaaataaaaatgagagaaggaacgagataagatca

SEQ ID NO: 549082 - DNA, 419 bp, Homo sapiens
ttttagatcgcatattatactgaactcctgatgttgatgagcagaagatgacatccctgtggtgagttcagtactaactggggataaactagaagaacctgtgattttacagtgcatcttgattaccatgccagggctcatctagccagtggcaatgtatgccttgaatggggataaccgcctttcttagttggatcaaatactactacactattacacttccacactatttatttggggatgggctgggagtgacagtagcctagtagttccgctacctgattactggcccattcttttcgaagcacatgtctgccaaggaatggtttgtactgctgtgtttggtacatctagtctttattctgctataagtattccttacctgtcctttactgtagattttattcatcacaggacag

SEQ ID NO: 549083 - DNA, 543 bp, Homo sapiens
attattctttcacaatttttcacttcccgaaaaaacaacataacaccattccccccttataaattttccactcctcctaatataccccccccccctcttcttttagatcatctttcaataattatattaaaattctttaattaacttaactctctcccacctatacttctgcactatattaccccgtgcttatcatctgacacatatttcacttacctgtctctcactataacttttaaataaactactttaatttatgtacacacactttctctatatctctctcatttattttatcactctattttcaccttttaaacttttcccttcttctatattaacccttcacccctacccaaatatctatatattaccatataaagagcgtctaactccttcatatcttatattcctatcctgtatacctctactcaaaatatactctatctcactttagtcccgccatctcacaacatcccttactctctctattacccatttcttttttttactacctctcaaatcacttacaatcattactac

SEQ ID NO: 549084 - DNA, 362 bp, Homo sapiens
  misc_feature (362)..(362): n is a, c, g, or t
agtgctaccacagacaactgctgtgtctcagacgtaagatacccatgttcttgtgcaactacctgtggcattgcagatatactgtgtacattatcaaatcaaagcggacagggatctacacgctttggaagacatcttacatcaaggtgagcaacaccacatttcaagtcacaacaggtgatcagactctgttaatttgaagtccaggaacacgccttaagaaattctgaaatatgagagcgctcgattttatacacatgactcaagcgttcgagatttgcgggaaatatatgattcaaatagtctcaagattggtaacctggagaacgtggaccagcttgaagcacaatgccggccttgtn

SEQ ID NO: 549085 - DNA, 198 bp, Homo sapiens
tcgtcgtcggtaagcctgctgcaagccaaccttcctgcctgcgcccacggtacatcagtttagctttgatcgacgccacaccttattcgcccttctgcacgagccgctacccagtcctcaccctggatacgttgcgactcatcagctgccctcttccatattcggacaagatgacgcccacttacgatgcgagagaaa

SEQ ID NO: 549086 - DNA, 1259 bp, Homo sapiens
  misc_feature (118)..(118): n is a, c, g, or t
  misc_feature (851)..(851): n is a, c, g, or t
aaggaagagagccttgaagatgaggaacgtgatatgggccatgggaagttgacaacgaccaattgagagcaatcattgaactaccatgcacaacacattcaccagcacagcacactancagcagttagcacatcattactcacgagtccattagtggtcgttccagccattcagcacagccaacattggacaaggtgcaaacacagcttgcataagtgggtgcctccatgcagctgcagcggaaatcaacaactcatcgttttgacagtgtcagtcttctatttcatgctcacgccaaccaaccaaacccatttctccaatcgggcattcgtcgcaccatcgtcagatgcacaacagtgcacattttcatcaccaacgacaccccagctcagtggttggaccaagaggcagctccaaagcagttcccaaagccaaacttgcaccaaaaaaaaggtcatggtcactgtatcggatggtctgcatgcccatctgatccactacagttttctgaatcctggtgaaaccgattacatctgagaagtatgctcagccaacttggtaagatgcaccgaaaactgcaatacctgctgcctgcattggtcaccagacagggcccaattcttctccacgacaacacctgaactgcgtgtcgcaacacacaggtgcttcaacacagttgaaggcactcgggctacaaagatattgcctcatccagcatatacacacctgaccttacggacaactgaactagcagtatctggctagccatcttgaacaaactagattgcacaggacacaacacttccagcattgtgctgacgaaagatgcatacacagaggttcgtcacaangcctacagcacggctttaaccgcatcacggacataaacagacacgtctaccatcggccaacacggctgtgcaatgcaacagcgaccagctcaggcacagacaggcacaacggcacacaggacgctcactaggcttaagacatcagcgagttggacaatgagaaatgagcgggtaatgcggatgcattgctacgttgcgtgctcgtcgtacgctgagtcagctcatatggcccgacgactgggtagcccgattaatggcgaaaacaaagaaaaaaatacagagggcagacaatatcaaagataagaaagagtgaacacgatagtgcagaagtagttacattataacaacgagggggtgacgagcatgatgtcgacccctgtctgcatctagagcaaaacatgaatgaaa

SEQ ID NO: 549087 - DNA, 84 bp, Homo sapiens
agcttctacatctgcagtgcgcgcacctgggacagggcaatctacgagcagtacttcgggccgggcaccaggctcacggtcaca

SEQ ID NO: 549088 - DNA, 230 bp, Homo sapiens
gtcgaccctggggccattgagttttgccctgccgtgcggtcaaagagcctaataacgctgaaacccaggtgttccaattctccctcggtcagaccttttaacggcctgcccctagataacgacaacggattttgtaggagtttattgtgcgtaagttgactcaactggttctgctggccactgttctggtagcgaccccggcctttgccgaaatgaaaatcgcggtcctg

SEQ ID NO: 549089 - DNA, 697 bp, Homo sapiens
  misc_feature (445)..(445): n is a, c, g, or t
  misc_feature (452)..(453): n is a, c, g, or t
  misc_feature (460)..(462): n is a, c, g, or t
  misc_feature (465)..(466): n is a, c, g, or t
  misc_feature (471)..(471): n is a, c, g, or t
  misc_feature (474)..(474): n is a, c, g, or t
  misc_feature (482)..(482): n is a, c, g, or t
  misc_feature (484)..(484): n is a, c, g, or t
  misc_feature (487)..(487): n is a, c, g, or t
  misc_feature (489)..(491): n is a, c, g, or t
  misc_feature (493)..(493): n is a, c, g, or t
  misc_feature (498)..(499): n is a, c, g, or t
  misc_feature (501)..(502): n is a, c, g, or t
  misc_feature (504)..(504): n is a, c, g, or t
  misc_feature (509)..(509): n is a, c, g, or t
  misc_feature (512)..(512): n is a, c, g, or t
  misc_feature (515)..(516): n is a, c, g, or t
  misc_feature (518)..(519): n is a, c, g, or t
  misc_feature (522)..(523): n is a, c, g, or t
  misc_feature (525)..(525): n is a, c, g, or t
  misc_feature (554)..(554): n is a, c, g, or t
  misc_feature (556)..(556): n is a, c, g, or t
  misc_feature (560)..(560): n is a, c, g, or t
  misc_feature (565)..(565): n is a, c, g, or t
  misc_feature (568)..(568): n is a, c, g, or t
  misc_feature (580)..(580): n is a, c, g, or t
  misc_feature (587)..(587): n is a, c, g, or t
  misc_feature (592)..(592): n is a, c, g, or t
  misc_feature (618)..(618): n is a, c, g, or t
  misc_feature (621)..(621): n is a, c, g, or t
  misc_feature (625)..(625): n is a, c, g, or t
tgactttgcattctgagatgtttgcttggttacagctgaatcaaagcttaaacgaccattaaagtcagcgtttggaaagtaatgtgtaaatgtacctgtacttttcttttattctttatgtctttctgttcattgggcaacagctaagagggcccagcaaggtaatttatggttgagctgatgtcaattggttcttgtcttgagtcgactctaatttagcccaagtgctgaaacaagtaatgtcattctttttcatcaaagacaccagggcagatttcttaagtaaagaaagacaattggacccttaagaatttatgcatttgtaaagttgctgttgatccaaatattttcaagccatgtaatccattggttttgtgggcagtttaataaacctgaacctttgtgtgttttctaattgtacctgagttgaccatcctttcttttnatagtanntttcttnnnatnntattnctntaaagctntnacntnnntnctctnnanngnacttntcnctnntnngcnncnccagtgtatttatgtgaaactttataagngnattnatttntcnatttgcatattnatatgtncctcnacacatgtaaggcacagtggctccgngtnttanaaaacagctgtattttatgtatgctttactgataagtgtgccaataataaactgtgttaatgaccaaaaaaa

SEQ ID NO: 549090 - DNA, 1228 bp, Homo sapiens
cccggacgacgctccggcgctgggtccccgaggcccggccccatccccgtggaggaggtgggcttctgagtcacgtgaccctgtgccctactggtgatggtggtgtgctgtgtcgtgggaccctggcatggatggctggctgagaagatgagtgacctgtgggtgtgctgttctgctgtggctcccatgcccgtggaccccacgcccctgctggacagttggggtgaaacttgagtgcctgatgctggtgcccagcacagtgaccatgaatgtgtgcttctccatcacatgggcttgggtggcccaatgttcttcgcctacttatttgggattgacagacttcctgacccaagtgtgacgcaaccattgtggggttagacgtggatggggatgaaacctggtgccatgcttgtccttgtccctcctggcccatgaagttgaccaacccctgtgctattgtgccatgacgcagcactccagggtacgctgctgatgttgcttgctgaccagggtgcccaagcggctgtggttgttggggtgacgagacgctatgggccctactacagcataacgacggcggatcttgggtgactccccaacacatggtgtggctacagcctgtggccgcaacaacttgatggggctcgttcccattgccacggacatcgggctggggcgcattgggcacgcttaccccatactgatggccttggaaaccagcaattctggggccgtggctgcgcccgctggtgcccctggggcaaacatgccagaaggccacacggcaaggacacgcgcgcagaggggacagacactccgggctttggggcatatcgactcggccacagtgataacgagcctattgtggttggacaggcttaagcgcgtggcaaaaacatgaccgttcaggaggaggctggctaggcacccaagacgccttggaaccggggagcaatggctacggggcctcaccgttgtgagtaggggattatgagattgatacacagttcggacctttggacttccagggacaccagctagttgacacccaacacgtgacaggtagcgtccgaacagttcacacataaaagtctgggaatgcggagcccgagagagtattgcgaggctaggagagagggggatattcatacagggcacacaccatgtctatgatggtgaccgactctgacctctttgcaacagggacaggtagacgaggtggagcgca

SEQ ID NO: 549091 - DNA, 270 bp, Homo sapiens
catctaccaccaccaccggcccctggccccactacacatggttcactctttccctcacctccgcccagattatttaaaagaaaatctcagacacattattttactcattaagcactggagccggtaactttggcctcttttggccagggcatctgtgaatctacatagataactgtagatttaaagtttataactagccaaagaaaagggcattggggatgatggaggggggtgagacggaaaacagaacaagtacataccgacgaagta

SEQ ID NO: 549092 - DNA, 330 bp, Homo sapiens
  misc_feature (19)..(19): n is a, c, g, or t
  misc_feature (61)..(61): n is a, c, g, or t
  misc_feature (236)..(236): n is a, c, g, or t
  misc_feature (250)..(250): n is a, c, g, or t
  misc_feature (295)..(295): n is a, c, g, or t
  misc_feature (307)..(307): n is a, c, g, or t
  misc_feature (326)..(326): n is a, c, g, or t
cgagtggaatggaaagganaggaatcaaccagagtggaatggaagggaatggaatagaatngaaactaatagaatggaatcaaccagagtgtaatggcatggaatggaacggaatggaatgagatggaatgtaatggaatgaactcctgtgcaatggaatgggaatggcaatggaaatgggaatgggattcaacttgaatggcatcaactcgattgcaatggaatggaatggaatnggaaaggaatagantggaatcaacccgagtaggaatggaatgggaaaggactggaaatnggagttggaatnggaattggaattggaattnaccc

SEQ ID NO: 549093 - DNA, 860 bp, Homo sapiens
cgccgattgtgggcgagaccaatgtgcgagtgggaggacaggcgaagcgcgcgtctggggcctgcgctctccacacttagccggcgctgcctcactgcctcgcagccacccctcctgcgtctccacaaatgtgtcctgacccgcaatgcaatgggcggctgggtcctggctttgaaaatgcctgtgcgggtcgtggccttgagtgtggaatggcgtggaaaatgtgcggattcctcgtggtgcgagtgcgctgggaagcctgcaacctggacccacaaattctagcagtgccaatgaagaacggataaacaggagttcaagcctttccaccgttggactgaaatttgggcttttaggaagcaacgtggctattgttcaaaaagacacggccgtgcgtttcctgtgcttgaactggagagtgtctcgttgactgatgctgactttcgtgggcattcctttcgctctaacacagcaagaatagcaagtggggtcgcgacaagggtgacctgcaggtccacgatatgctgggaaggggcatggcgacagcgtccagcatgaaccctggaatcgtctcgtgctaattaagtggacacaagaggccatcgtcacgaacaaggacgccaacaggtataggccaccgaagacaaagtatcaaatgacaacgcctgacgatcaaggcatcgatgttgacctggaccccgtccgaaagaaaagaaggcgcccgggactttatcatccttgacacgcccaagtggggcaccattgactcggacggtcgtcgaagaacgaagcctagcctggccttgcagccgcctaaccggtacatcccagataagcatggaattaggacgcacaccacg

SEQ ID NO: 549094 - DNA, 106 bp, Homo sapiens
atggaagcttggtgttcattaaacacacattggtatttattccctgacgcaatcaggtagttctcctgtggttctggagctcttgggtgggcggcacagggtgcat

SEQ ID NO: 549095 - DNA, 390 bp, Homo sapiens
tagattggtttgctgtttattcctctccttgagtgattattttcttcattgatatactgaattttccaatctgatttcttctttcatagtctgttaccccaatgctgccaagactgtgtgctcgttttcatcttagatttttagatcccaggggtagatgggcatcactgtatatatagcctctacccaaatcccaatgtacaacttgaaccttggttctgagagtgagcagttttcttggaagtatgattggagagctggaaaggcagcctgtataatgggtcctattgattcagaccaaaacccaattcagcttttccagaagacaagagtgtatgtaattgtttctctggttcagtttttccaacatgtaatagagctgcctcgtgc

SEQ ID NO: 549096 - DNA, 350 bp, Homo sapiens
gaaattttaaaaacccggggtattttttcggggggggtttttttgtttttgggggccccctttttaaaagtttaaaaaaatgttgcccggggggtcccgtttttcccccaaaatttgggggggaagccacccatttctttggtgggggtttaaagggttttattcccccccgtttgggggaatattttcggggaacccgttgggaaatttccccctgaaagaaaagggtgtaaaaacccggggttgtttctctgtttgggaaaaaccaattttggtgcgccagggccaaaaatataaatccctttttttcccccttcccgcccaaaaaaagtttgggtttttacccccca

SEQ ID NO: 549097 - DNA, 380 bp, Homo sapiens
tggacctggagctgacaggattggacattgagacggaacagattattgagataggactgtctgatcactgactctgatctcaacattaaggctgaaggtcctaacctgattataaaacaaccagatgagttgctggacagcaatgtcagattggtgtaaggagcatcacgggaagtctggccttaccaaggcagtgaaggagagtacaattacattgcagcaagcagagtatgcatttctgtcctttgtaacgacagcagactcctccagggctctgtaccacttgcaggaaattcagttacatgaagatgaggaagtatcttgagaaatacatgccccagttcatgaaacatcttcattatagaataatggcatgtgag

SEQ ID NO: 549098 - DNA, 140 bp, Homo sapiens
  misc_feature (11)..(11): n is a, c, g, or t
cggagtagtanttattcttgaatttaagaatgcctaagatacttcttcatcctcgatcttgggagccacgtagtacttttaagtgtcccatatccgtaattatatactctacaacaaggggtacatctagcagcacatac

SEQ ID NO: 549099 - DNA, 1064 bp, Homo sapiens
gcttgttgaggtagagtcagagtagggaaaacaactaatctgtttgccaaacaggttttcataatgtaactgacaggagatgggctgtttttatggaagtattaacccaaatgatgggtgttaatcattaaacctttttggtggtggctcgctgtgtatctctgatattctaatccgggtcacagaatggctagaggcagactttaacgtgcacgcgtggacttgttttggttgctcacttggccttgtgtttaccaccctgaaagaatgtcgtggctgctcttttttctggtgactgccattcatgctgaactctgtcaaccaggtgcagcaaaatgctttcaaacgtgagacttagtatcatgaaccagctctgggcagatacacagcatatgcctgggataccaatgaagaatacctcttcaaagcgagggtagcttgctccatgacgaaaagttcccaacgagagaagcaacagaaatttcccagtgtcctacttggcaagtgtaacccagagggtatcattctggtcaggaggatacagacccttcaaaaaatcaaacccttcctgctgttgagcgtgcactcagccataaggaatgagcgagaaccggatcaatatgacttctttcctaaatgacaaatctgggaactcttcaaaatcccttcacaacttgcacaaccatgtgacccatttgtgccattgggctctaacttagggcgcgcaaaaattagcactacacaacgtgcgccacagacacacgcgacttatcgcgggatcgccaccgtacacgagcgacacaacacacacttgtagcagagtgatgatagcgacaaaggggtataaacggttcccccatgcacagtacgacccacggttaccctggaaataagaggcggacaaaacgaagctctcagcctagaaaggcgcccccctatagatgttgggttgtcacagagatcatgtgtggttagttacatctgcacaaaccaattgtttgagaactcgaacaatatatttaacaaatgcatgcagaacattactcaataagcagtagtcgtca

SEQ ID NO: 549100 - DNA, 287 bp, Homo sapiens
gaatataagaaaagaacaagcatggaattagagccattacctgttttagcttaggcaaattatttaaactatctgatgccttatggcccttaaaatgcatcatgagaggattataagatttcataacttcatggttcatctgaagatattctacacattagagatataatacgttggattccttcttcatatgtctagaataactcatttcatgctcttttctgatagatacgtcatggtcttcaacacaacccttcggacccaagatagccctcctacatgacccc

SEQ ID NO: 549101 - DNA, 122 bp, Homo sapiens
ctcttttggggtctttgctcctgctactacctctgcttgaacagctcctcaccttccttcctccaaccctacccttgtataggtgaggagctgttcaagcagaggtagtagcaggagcaaag

SEQ ID NO: 549102 - DNA, 937 bp, Homo sapiens
  misc_feature (937)..(937): n is a, c, g, or t
gacaactcggtggtggccactgtgcggatcagacttcgctcgtactcgtgcgcctcgctttgctggtacctccgtcaaacatgtctgacaaacccgatatggctgatgagtcttaggaaacttccagtaggatcgataccatcttgacaagaacgatcattcacgtacgtcacatgagaacacatagtccagctggccgttccaaagtaaatgattgaatctaagtgaggaagcacagcacgagtcgagaactcgctaagtgagcgcgctgcaaggccgactctagtaatgcacgtgtacatttccacgaggcattgcctgtcttacttttagtttcttgtaaggctgtttaatctttgtcatgcatgcctgagacggtgttgagtatcaaagtcggtagaatggatcgttgtggctcgtcgcccctttgtcatcaatcataagtaaccttacctggagcaatgcggatggccgggacatgccttatcccaatcttgtgctggatctacttcgttggcttggcatgggcacgggagataggaaactttcgcgatcgttctgactcgcactggaacgaatacgatggagggctcgcgaaaacgagaagtcgcgtggatggtgggaacggatccgcaggttgcaccccaattccttcaggcaaagtttaggaattaccccataggcctgagtggcgcgccctaagggttgaggttccccatttgacgaatgcggcgtgggctccaaagttggcgctcaggtttttttagagtcccttacgcaagcttgggtcgcccaatctttggggttttcttttggcgcctctcccaaaagagggggaactctctctccaaaattccccaatctgggcggaaactttgtcccccctaagaattttgtaacgtccaacattttattcggcacaaccattcaaccgcgn

SEQ ID NO: 549103 - DNA, 105 bp, Homo sapiens
ggtttaccagaacagcataacaagggcaggtctgactgtcaaggctgggactgggagtgcatgagccgccgccaagggggcctcggttaaacactggtcgttcaa

SEQ ID NO: 549104 - DNA, 175 bp, Homo sapiens
gccgtcctgtgtaggtagcgcatgaaggcggtaatactggaacgtctgcgcaaaccgtggagctggaaggcacggtgcgcacccacagcgacgcggtgcgccgccaggtaccggacaagattcgccaggtgatcgacggcgttgccgccgcgctgggcgcgcaggccgaactgcg

SEQ ID NO: 549105 - DNA, 313 bp, Homo sapiens
ctttttttttttggggtttttttttgaaaaatttgggggggtttccgggtttcttgaaaaataaaccttttttccaaaaagggttttaaggggtcgctccccatttgggttcccattggccctttgtggcttttcccccctgaaaattggggtggcccaaattgggtttgcctttaaatttaaattgccccccggttttcaaagttttattccaaatttgggagttaagttcccccaaaaatttctttccggttcctttttcaaggtggtttttttgatttggggggttaaataaaattttcctttttattta

SEQ ID NO: 549106 - DNA, 138 bp, Homo sapiens
cactctgcctgtgggctcatcccgtgcctcgctctgagctgcgcctggacctggttctgccgttctggacaactctttttccggtgggagggggagccaataggttccgttggtccccccgttccttgcggctcccgc

SEQ ID NO: 549107 - DNA, 122 bp, Homo sapiens
tattagaggatcctagagactggagaaggagacaggagtgagaatggggcttactgggaacaaagaatagtggttctagcaataggctatggttagactactctccagaaaaggataaaaca

SEQ ID NO: 549108 - DNA, 744 bp, Homo sapiens
tgaactgcctttcagatatggagatcaacctttggagaattaagatctctctttgcaaacaactgaaaagaatgacacggttgccgggcaaggtgagcgggaccatctcatcactaagcgggatcttgccctcagtgaaggagatattcacactttgggttgtggagttgctcagtgcttgaagattgtctgccaagttgggagattagacagagaaaagagtgcaatcttgtccgtaaagtcattactgtgggctgagccttttatgaataaagaaaatcagaatcattcctattctctgaagtggtctgcttcatttaatgtcaaagagtttccttataagaattttccaattgaggatatccccaaccccccattggtaagtcattggtttaggcaaatagaataaatttcctcaattcaaatgcgggacaggtttttattttgttttttaaaaaacgccagcttaacttttttgaaaatttaaaccaaaggaggttaaatgaaagccttataccctagtttaatattatcattttactccttaccccgaagtgattaaagctagcccttttagtttagcatcttgtccagggtaaaaaattttttagtatatactaaattatattggagaaattttaggaattttcgtttccaaagttaaaaagttggaaattaactgcaccaagtgaggccttttgaaaatatttaaggagtaaaaatgggatcagcacatgcccccca

SEQ ID NO: 549109 - DNA, 866 bp, Homo sapiens
  misc_feature (5)..(5): n is a, c, g, or t
  misc_feature (88)..(88): n is a, c, g, or t
  misc_feature (117)..(117): n is a, c, g, or t
  misc_feature (127)..(128): n is a, c, g, or t
  misc_feature (155)..(155): n is a, c, g, or t
  misc_feature (162)..(162): n is a, c, g, or t
  misc_feature (169)..(169): n is a, c, g, or t
  misc_feature (175)..(175): n is a, c, g, or t
  misc_feature (197)..(197): n is a, c, g, or t
  misc_feature (199)..(199): n is a, c, g, or t
  misc_feature (210)..(210): n is a, c, g, or t
  misc_feature (224)..(224): n is a, c, g, or t
  misc_feature (256)..(256): n is a, c, g, or t
  misc_feature (259)..(261): n is a, c, g, or t
  misc_feature (264)..(267): n is a, c, g, or t
  misc_feature (269)..(271): n is a, c, g, or t
  misc_feature (293)..(293): n is a, c, g, or t
  misc_feature (297)..(301): n is a, c, g, or t
  misc_feature (305)..(305): n is a, c, g, or t
  misc_feature (308)..(309): n is a, c, g, or t
  misc_feature (315)..(316): n is a, c, g, or t
  misc_feature (321)..(321): n is a, c, g, or t
  misc_feature (323)..(323): n is a, c, g, or t
  misc_feature (329)..(329): n is a, c, g, or t
  misc_feature (332)..(332): n is a, c, g, or t
  misc_feature (339)..(339): n is a, c, g, or t
  misc_feature (343)..(344): n is a, c, g, or t
  misc_feature (353)..(355): n is a, c, g, or t
  misc_feature (389)..(389): n is a, c, g, or t
  misc_feature (402)..(402): n is a, c, g, or t
  misc_feature (442)..(442): n is a, c, g, or t
  misc_feature (445)..(445): n is a, c, g, or t
  misc_feature (471)..(471): n is a, c, g, or t
  misc_feature (553)..(553): n is a, c, g, or t
  misc_feature (639)..(639): n is a, c, g, or t
  misc_feature (767)..(767): n is a, c, g, or t
  misc_feature (770)..(770): n is a, c, g, or t
  misc_feature (778)..(778): n is a, c, g, or t
  misc_feature (835)..(835): n is a, c, g, or t
aggancctgcaccggggcggcggggtcgggcgggctgaggccgcgtgtcccgggtcgcaggtccccgcgcgttgtttccgccccggcntgcggcggggacgcctgaactgggctgancctgccctannggcccgcagaaaaacaggccgggcgcngcctgtntccagcnctcgcnctgctcgggggtccagggccananggggcggcgcnggtcgttgggactnggcccagctgccgcggccagcaagtgatcaangcnnnaannnntnnnggctgctgccccattggaaaantaannnnnaagnttnncttgcnncaaanantgagcngantggaatngtannccgggaggnnnctgagtctgctcagtgcctgtgcccttccctcancatcccaaatgcnaaggatgtgcttcggaagaggcacaaaaaaaggagccganagnaccaacggttcatggcccggaaggcnttgctgcaggagcaggggctgctgagcatgcctccagaaccagggtcctccccactgcccacccctttcggggcagcgacanaactgaagctgccagcagtgggaagcagtgtctgagggctggatctggcagtgccccatgcagcagaaggcctgctcccgggaaancctcagggcccttgcccagcaagtgtgtggctatcgactgtgagatggtgggcacgggaccccgagggcgggtaagcgagctggcccgctgttccattgtgagctaccatggcgatgtcctctatganaantacatcangcctgagatgcccatcgctgactacctacccgctggagtggcatcactcggcagcanatgcgcaaagctgtcccttccaggtggccca

SEQ ID NO: 549110 - DNA, 311 bp, Homo sapiens
gcttaaatagacgcactctaacaacgatgtgtaaatacttgcacgcaaggtctaggtcgtgctatccctgaccctgctccccgtttttatccaatgaactatcccctcttgtaaatatgaactcctactaattatttagggggcttccattctgcctctgcgcttcgctccaggcatctatagctgggattggagcccctaccatctttgacctgcttatttgcaagtcctagatgatgatctatctgtgccttatgccgtgcataaatcacagggacactgaagagtgaaatgagagccaaaatcagtag

SEQ ID NO: 549111 - DNA, 510 bp, Homo sapiens
  misc_feature (91)..(91): n is a, c, g, or t
  misc_feature (105)..(105): n is a, c, g, or t
  misc_feature (108)..(108): n is a, c, g, or t
  misc_feature (239)..(239): n is a, c, g, or t
  misc_feature (341)..(341): n is a, c, g, or t
actccgcgaaatgatccacggatttattgccaaattaaatttggctgttccccccgacccatattgatcttaaggaaggtgtactttaaanatgttcggactgcnaanaccccctgagcaatgtcattaatccatatgtggactagtgatgaatagatattttcataagagtttaaatgctgatatttggtggaagtagagagtaactcatattctatcaattcaagtattcttactanggttgctttccctatttgttcaatagactgataatactggaatttatagagtttgagccattacaacttttgtgaggatgtgtttcaaacatttctggacanatcttattttgtatttctggaagaatgtagtaatcttctagaccgcttaaaaccaatgctcccaagctgaatattcttgagaaatttgtttttattatgccatttgacatttcaaatcagtgctcatatacagtaaacttgtgatagaaattgtattttattgcttttt

SEQ ID NO: 549112 - DNA, 397 bp, Homo sapiens
tgcgtctgatgttagcccaggaggtcaagctgcaatgggcatcatccccaaaaacaagctggcagctgggcgtggtggctcacgcctgtaatcccagcacttttggggaagccgaggcggatgggtcacctgaggtcaggagtttgagaccagcctggccaacatgaagaaaccctgtctctactaaaaatacaaaaattagctgggcgtggcggtgggcgcctgtaatcccagctactcgggatgctgaggcatgagaatcgcttgaacccaggaggcagaggttgcagtgagctgagattgttgcctttgcaccctaacctggggtgacaggagcgagactccgtcttcaaacacacaaaaaaaaggctgggcaaaggtgctctttgcctaataa

SEQ ID NO: 549113 - DNA, 568 bp, Homo sapiens
  misc_feature (24)..(24): n is a, c, g, or t
  misc_feature (26)..(26): n is a, c, g, or t
  misc_feature (28)..(28): n is a, c, g, or t
  misc_feature (55)..(55): n is a, c, g, or t
  misc_feature (60)..(60): n is a, c, g, or t
  misc_feature (65)..(66): n is a, c, g, or t
  misc_feature (87)..(87): n is a, c, g, or t
  misc_feature (102)..(102): n is a, c, g, or t
  misc_feature (112)..(112): n is a, c, g, or t
  misc_feature (123)..(123): n is a, c, g, or t
  misc_feature (129)..(129): n is a, c, g, or t
  misc_feature (150)..(150): n is a, c, g, or t
  misc_feature (158)..(158): n is a, c, g, or t
  misc_feature (173)..(173): n is a, c, g, or t
  misc_feature (179)..(179): n is a, c, g, or t
  misc_feature (217)..(217): n is a, c, g, or t
  misc_feature (233)..(233): n is a, c, g, or t
  misc_feature (253)..(253): n is a, c, g, or t
  misc_feature (494)..(494): n is a, c, g, or t
  misc_feature (535)..(535): n is a, c, g, or t
  misc_feature (556)..(556): n is a, c, g, or t
  misc_feature (560)..(560): n is a, c, g, or t
atcacgatgatggacagctggtcntngnaggtcatgtcccaggtccaggtgctgntgtanttctnncagctggaggccatccctgcnccggacagcaagagncagagcatcntgttctccacngaagtntaaaggtcccagtccatctcntggaggcngacagatggcctggnaacctntggctaatcgggccatccgtagagcgggaaccttcctnaggtgtccttgggccncccccaagtgttgggccatntgccaagagacagcgacccaaagccgaaggacaggtggcctgggcagatttcgcccaggtttgggagccccaggctggcctcaaactgtggttttttatgtggccacccgagggggccccaagccagttcatttcagagtccaggcctgaccctgggagacagggtgaagggagtgatttttatgaacttaacttagagtttaaaagatttttactgggtcccttgtcaagatgggccctntttggggagaagggaacgtggccggattccctccctgttgnattttgaataaacgctggtgnttcntcctgtga

SEQ ID NO: 549114 - DNA, 1201 bp, Homo sapiens
taccaaggaaataaaaccggtaagggatcacggcactacagtggtccattaattatctgtggggccaacaccggggactcctacgtaaaacgcttcagcatctatgtggatgtggtccctcatacgtgccgtgggcaccctcgtggtgacagcttggaccacatttgggcccatggtcgtggtgaggcctcgtgcataacttggaatcgtgctcacgtgtctcacaacagctctttctcacatgagctctcaccgtggagggtggaacacacacgtgtgggctccacccaagaaagcgtgcgtaggtccacatacacctttgggcacacaggctccccatctggcttggcctgtggccacagtctcacatctagccccccttgtccacatctctcacatcaatatatccgcaacacagagaaatatgcgggaagacaagaacatttctatttcacaaaaccgcgtgtgtcccgcctctaaccgtgtggagcactcgcgagagagcatctatccactgaagtgggacacacgacaggtcacattccccagaggccacactctccctagagcacagagagcgtgcccctctctctaaataacaatatgtcatccccgagaacctgtctcactctgtgtgccccaaagaagccccataagagagagggggtgcatcccacagtggctatacccccgttctagacctctcgtggctgtggaaacctcctaaatacaccccctcctccaaagggggtatgacggaaacacccatactgtggagtagcgaccaaagcaacactctccctacacgtgggtgggataacacgagcacggccctcctcccgtgcggcgggcacaacaatattcaccccccatctccacggataataacgtgcgagaaaagcgccccccacaatacccataatctcccgccacactgatgcccaagtagccatccccgtgtgagcatactacaacgacacttcacgaccgttcgcagcaccagcacaatagactcccctttctttggtggggggccaacaacacacctcccgcagtggacctccgggtgatgttgctggagaagcaactcaaccaacgatcctcctccttgcccccaaccatgccggagtgtgctcccccgccactcacgggtggtaccgtgaaaacacacacgacgatgggcacccccgccccattcggg

SEQ ID NO: 549115 - DNA, 873 bp, Homo sapiens
tggtattttaagtaaaaacagggtttcaccatgtgggccaggctggtctcaaactcctgacctcaggtgatccgcccacccgggtctcccaaagtgctgggattacaggcgtgagccattgcgccggggccccctccgggactttaaggatgtgacttccttcccatccagcctttctgtctgagcactacccacccagctagactgactgggtaacgggatctaagaaggaggcgatatggctgtttcgaggtcgatgggccaggggcctgggctaaggcacttagacaagcccttgccttgcccacctggtcaccaccattcacagtgatcactcatctgtggcaagaggtgggcagcggaggaagctgactagagatccctgatgtataacttctgggaggtttacacacaaagcagatacagtggccaggggttcaaagaattggaatgagaacttgagccaggaacccggagccaggtatatctgagccctaagtccctctacaggccttcctgaacaaagcagacatctggggagcatgtctcaagctcgggtggggtcacagccagggagggctccaaaggccctgtgagcaggtttgatcctaccaatattccctctggggcctataaggtcttcttatgttacctgtaaactcatgtccttgttgaggcagcaatttctgaattcgtccttcaaaagctcagtggggctttccagaaaataccagaaattggtgtagctcggaacagaatccataagaggcattggcaggggttccgggacccagagctctactagggagctgtcctattcacaatgggcaggggcgtattcaacacaggcacagggagacactcgcgaagcat

SEQ ID NO: 549116 - DNA, 712 bp, Homo sapiens
aagtgtacaaccagcactttctgtggtactcctaattacattgctcctgaaattttaagaggagaagattatggtttcagtgtgactggtgggctcttggagtgctcatgtttgaagatgattggcaggaaaggtctcccattggataatggtgggaagctccgataaccctgaccagaaccacaggaggattatctcttccaagttatttgggaaaaacaaattcgcataccaggtctctgtctgtaaaagctgcaagtgttctgaagagtttcttaataaggaccctaaggaacgatgtgggttgtcatcctcaaacaggatttgctgatattcagggacacccgttcttccgaaatgtcgatgcgcatatgatggcagcaaaaacaggtggtacctccctttaaaagcaaatatttctgcggaatttgctttggaccacttttgattctcagttttactaatgaacctgtaccagcctcactcccagaattgcacgatgcacatttgtgaggaaagattggattcagtcttgcaatttgccaggttccgaggtactatcacatccctctttgaatgtctgcagaagaaattgtgtctgatcctcatttttcaaccaatgtatcctactcctgttgccatttaatgcatggataaacttgctgcaagcctggatacaattaaccatcttaaattggcactaaaaagaaag

SEQ ID NO: 549117 - DNA, 196 bp, Homo sapiens
taacagggcagaggggactagtgcggtgtgcggaagagcatagacggttgctgtagacgagacaaaggccacatctgtatgtttttagactcggagtttgatgagtccctttccctgtggtcacagtcatgtgttgattggccaggtttctcccttgtgttttatacaaaagtagaattgataaaacattttttac

SEQ ID NO: 549118 - DNA, 782 bp, Homo sapiens
ctgctgggccgtagctgtctgtctcgtttctgtcctgcgcgccctgcatcctggccccgggcgcccgctggaggtcgccgatggagccacagttgctgactggtctgctgcccgggcccaggagtgccatggtgtatgcatgtctgctggagccatccctggcgtctgcttgccatgacctgactctcccctcagagtgagactcttcctcagctggtggcatgcagatgacatgatgagctgtgcggctccgtgtgcctgcgtggacctgtgaggacgggtgttctgttggcctggccagtttagtggggagctgcttgcgacacacctgcacatgtcgccacctcctgggacttggtttcctttgtggcccctgggaagtgctctgctgtgctggtgcccttgccggtacttgctggcattgcttccctgcgtaggagcatgcttggcctgcctgtgcttggcgcgggagcgcagtggagcgggggggccttgcttgagcgcattcttgggccaaagtcatttgcctagctatccgtcactggtgccttgctgcttttgctgagcgctagcatagcaagacatgaattcggctgccaaggcttccttaacagtgctcagccctctttagcttccgagacgaggcctccacggacctgcatgtacatcactatcggacactggccatcttttggcagccctgtggatttgcaacaggtgccggttcccattggccaattccgctacttgccttatgattggctataggttaaggccaggag

SEQ ID NO: 549119 - DNA, 762 bp, Homo sapiens
ggacagtgctgacactacaaggctcggagctccgggcactcagacatcgatgagttggtccttgctagcccccgggaatttaattctctacttctatgctctttgtatttctctcgttcaacgatgtgtagcatatgttgcgtaccagagactaactgctgcatcttagatgaaagattcggtagttattgtccaacttacctgttgtgcattgcacgattgtcctggtctacttatcaatgaccaataggtagagcaaggatctacagatcttggggaagacatcttacatcaaggttgaacacgaaaacatcagaagtcaatcagcgtgaataaaagcaatccgaactcacgttataagtcctgatcgaatcatcgataaccaagatatgatagacgctgcgtacatttggagtccaggaaaatgttcgaagaaattatgaagatatgaagcgatcgattgtgaacgacgatgagtcacagatattcgactagtttgcaggaacatctactctagttcaacataagtcaaacaagagtggttaaccctgacacgaggaaggtagcccaagcttgaaagcacagtggccagggagccttgcgaagagacacggtgcaatatccatgatatcgactgggaaagattcgtcactgacgattggcccatcaagggagctacaagcagagcgggcttaacttcaattgacacctctgaaagctagcagacagttcttagtctacctgtggaactcgatgggtctg

SEQ ID NO: 549120 - DNA, 541 bp, Homo sapiens
ggaggtgatctccacatgacaccacaacatcaacatcaacgtcgtggacgaacacacgccgatgtgtgacgggcagtgtgccccctcccctggatcaatatgtgaagttcgacgccgtgagcggtgactactatcccatcatctacttcactgactactgcaacctgcagaaggactactaccccatcaacgagagcctggccagcctgccgctccgcgtctccttctgcccactctcgctttggcgctggcagctctatgctgcccagagcaccaagtcgccctggaacttcctgggcgatgagttgtacgagcagtcagatgaggagcaggactcggtgaaggtggccctgctggagaccaacccctacctgctggcgctcaccatcatcgtgtctatcgatcacagtgtcttcgagttcctggccttcaagaacgatatccagttctggaacagccggcagtccctggagggcctgtccgtgcgctccgtcttcttcggcgtattccagtcattcgtggatctcctctacatcctgga

SEQ ID NO: 549121 - DNA, 538 bp, Homo sapiens
  misc_feature (114)..(114): n is a, c, g, or t
tgtggtggcagatgcctgtaatcccagctactccagaggctgaggcaggagaatcacttgaacctgggaggtggaggttgcactgagctgagataggcgccaatcgccaatccnagcctggtgacagagcgcaatacttgggtctcaaaaaaaaaaaaaaaaaaaaaaaaaaaattttgtgggggcggcttgggccttgggaaaaaaagttttttaagaaccatattggtgttgggggcgcgggggcccccagagttaggttaatgtgtgaaaacattggctccatatgggcgctgtctccctagaggagaaaatccggggatcataggaaattagaggtgctgtggtgattttcttccaacaattttaaaaaaaaggccggcggggggggaagaaacggaaggtgttttttgaaaaaaaatttacaaagagaaggggagttcccgggggagaccatatcacgggtgtttttaatcaacgggggagtttcccaggcggaaagttgggaatttcacaatttgacgaccggggctgggag

SEQ ID NO: 549122 - DNA, 558 bp, Homo sapiens
aaagataaaaaacaaaaaaaaaaaaacacaacaccccacctctatattacacccacacagcgcacaaacacaatcataccttctcccacatctatctactcaatctcctcccctacctcttctctcctccctcccctcactctaactctgtcaataccaccccatcatctacctcatacctacctactctaacataacctacgctcatccactcaattctaataccccccccttcctctctcaaacatcaacctcatctcctaccaacccaactctttccttctatctcctccctcccaactccctaataacacacactacactccttcaatactactctcactcacccactccactctcaccctccatcacctctactctcccacctctctaactcacactccccccttttcaattcactctcccataccctactcatcttcccctctagacctccccaaaacctatcacttctcctcaacattcactcctacccacccactatttcctatctacatcaccacctactctctctataactctccatcccaataaccg

SEQ ID NO: 549123 - DNA, 602 bp, Homo sapiens
catgctgtactcccccggtttacgggatcgttgcggttgaccgtgacctcgcggcagacatggacttgcattgtgactgtgccgccgaaacgcctggcctgccgagccgccgtcgtgggaagatataataaatgctgccttcaaattattcaaagaagagtgaaatcgggtggcaccatgcccagcatttttgtgggtcaaaaacaaatgtgtgtgactgtggaaaagctcgtgtgtcctgactggtgtgctaggtgagtgatgctagtgacccactgactgtgacttgcctgagtgtgcttggatgcttggatgagctggcaggcaagttgagtgagcctgctgctgtgctgtgttgtgctgacatgctggtgcagtgtgtgctggcgtgtggtgtgctgtgcctgaaacccctgtggtgcccccccgagagacactgcagtgtgccctgtgcttgtggtgcatccccttcgccatgcagcatcgtgtgagcccaaaggtctgcacaagtattacttcttccgcttggatggaacgaacagaacgtggccggctcgtgaaaagctggaacgtggagaagccttgtgtgacgtcagcaaatg

SEQ ID NO: 549124 - DNA, 132 bp, Homo sapiens
ccggaaagccccccaaaaaaaaaaacttttccaacccccccccccgagaaatttggggatgaagggtttgaaaataaacccccttttgggggggattaaaagtgatgatggtttggggggagttttttttta

SEQ ID NO: 549125 - DNA, 664 bp, Homo sapiens
cagatgttgacaagacaggagcttcctactatggagaacaaactctacactacattgcaacaaatggagaaagtgctgtagtgcaattagctaaaaaatggccccattgtatgatgtagttaggaattctatgttctactgagttattgtgctgtatatggtattagtgcctgccaaagcgacaattttcaacttgaaatgtgatcctgtatttgactttggaactggtcctcgtaagtgcagccgtactatagccctcatggacatatattagtattagctggatttggaaatctgaggggacgaaatggaagtgtgaggatgtgaaaaatctatcaaacgttagtttctaaaccggtggcttactagattctacatattgtgcttggtgcccggatggtgagcatattttaacagctacatgtgtctcccaggttacgggtcaataagtggaatacaaaattgtggcattagtactggctctatcttgcacaaagtatgatgtgccatctaaatgcagaattatggcaggtttcttggcagccatttgaggctggaatatttccagcaaaaacaataacttaccaatgcagtgccaagtgaagtacccaagtgaggaacctacaagttgcgacagcgttatagacccccaggtttaagaact

SEQ ID NO: 549126 - DNA, 915 bp, Homo sapiens
  misc_feature (901)..(901): n is a, c, g, or t
acttgaccattcttgtgggataagagatcattaaaaaaatgctagggccgggcaccatggctcacgcctgtaatcccaggactttaggaggccaaggcaggtggatgacttgagctcaggagtttgagaccagcctgggcaacatgatgaaaactccgtctctaccaaaaatcaaaaaaattagccaggtgtgatgttgtgtgcctgtagtcccagctacttgtgaggctgaggtgggaggatggtttgggccccggaggtagaggttgcagtgagctgagattgtgccactgtattccatcctgggcaacagagccagaccctgcctcaaaaaaaaaaaaaaaaaaaaaaagggccgggcaaggggctcacgctttgtattcccactttgggggggcgggggggggaaaaacctgggggtccagacgttggagaccagcggggccaatcggggtgaacccccgttcttctaccaaaaataaaattaaaattttctcccaggccgggggggctgtgcctatagcccagttactcaggaagctaaagcccgagaatttgtgctcctgcaggtgacggtggcgtgagccagatcaaccattccatccgtgtggcaacgtgaaccgtgttcaaaaacaggaaggacgcaaggaacattgtttttggcgccggtcggggtcacccctatatcctggccttggggaggcgagggggagagatgctggggcgcaatttgaacgcgggttgtggaacccatctttaaaaaaagggggcgtaatacgcgggcgaatccgtcccttgtaagggcccagtgagtataaaaaagcgggtcaagaaggaaaatgctctaacatggtgtgtgatcacaaccgacatttgatgcttgggtagaataatagcaagnggggacgagatgtc

SEQ ID NO: 549127 - DNA, 131 bp, Homo sapiens
cgcaatacagttctgctccaagtccgctttgccccaatatagcgataacagacatatatttgaactcattctggtctgaggttaaaggtctccactaacccgctaggtctctttccgatcagtagcgtaaa

SEQ ID NO: 549128 - DNA, 825 bp, Homo sapiens
  misc_feature (5)..(5): n is a, c, g, or t
  misc_feature (68)..(68): n is a, c, g, or t
  misc_feature (71)..(71): n is a, c, g, or t
  misc_feature (75)..(75): n is a, c, g, or t
  misc_feature (91)..(91): n is a, c, g, or t
  misc_feature (97)..(97): n is a, c, g, or t
  misc_feature (103)..(103): n is a, c, g, or t
  misc_feature (107)..(107): n is a, c, g, or t
  misc_feature (121)..(121): n is a, c, g, or t
  misc_feature (123)..(123): n is a, c, g, or t
  misc_feature (148)..(148): n is a, c, g, or t
  misc_feature (153)..(153): n is a, c, g, or t
  misc_feature (171)..(171): n is a, c, g, or t
  misc_feature (215)..(215): n is a, c, g, or t
  misc_feature (260)..(260): n is a, c, g, or t
  misc_feature (267)..(267): n is a, c, g, or t
  misc_feature (269)..(269): n is a, c, g, or t
  misc_feature (280)..(281): n is a, c, g, or t
  misc_feature (286)..(286): n is a, c, g, or t
  misc_feature (337)..(338): n is a, c, g, or t
  misc_feature (370)..(370): n is a, c, g, or t
  misc_feature (421)..(421): n is a, c, g, or t
  misc_feature (428)..(428): n is a, c, g, or t
  misc_feature (468)..(468): n is a, c, g, or t
  misc_feature (471)..(471): n is a, c, g, or t
  misc_feature (473)..(473): n is a, c, g, or t
  misc_feature (481)..(481): n is a, c, g, or t
  misc_feature (483)..(483): n is a, c, g, or t
  misc_feature (495)..(495): n is a, c, g, or t
  misc_feature (509)..(509): n is a, c, g, or t
  misc_feature (516)..(516): n is a, c, g, or t
  misc_feature (544)..(544): n is a, c, g, or t
  misc_feature (555)..(555): n is a, c, g, or t
  misc_feature (569)..(569): n is a, c, g, or t
  misc_feature (575)..(575): n is a, c, g, or t
  misc_feature (584)..(584): n is a, c, g, or t
  misc_feature (596)..(597): n is a, c, g, or t
  misc_feature (612)..(612): n is a, c, g, or t
  misc_feature (620)..(620): n is a, c, g, or t
  misc_feature (666)..(666): n is a, c, g, or t
ggggnggaacccatccctctctgcttatacccagcacccctcatcccaggttcctttcttcaacctcngcntgcntctgggaacacagagnaccaanaactgntaanccgggaccctccangnccacagcgtggggcagagtccaggnttttntctccccgtagtgggagntttggggagttcagtgaacctcctcaccctcctgccagtatgangttgggaagcgccttctctgtcccccagaacagaacaaactcttnttctctntngttggggaaanngtgtngggggcttggacctaggaagaagctgagctgaattcctccagggcccaggnnaaacccccaggggagtttctgagactctaganttgccatttctccacttttccttcccaatgactccggtgagcagctcagantctgggntagggcaactggtaggacagtggggatttgccccagaaanatntntgggtttnanatgaaggtttcnccaacaccagattnatttatntgtacaaagggaagaaaccacctgaggnagggggaaaanccgttgggggctantaagantagccaccnttggggccaaanngatggggggggtagntagctctnggaggtaggcggggctctcatccaagtgggacaaagggactgtgtnctcctcactgacaggccggtcaaactcagccttgagagctggacgctgattgtccgggaaggccaaagagaagagggcctcgggctcacacacaaacttgtacacgtaacgctcaccagccaccttctgcatgatgcctttctcataatagtatcggag

SEQ ID NO: 549129 - DNA, 247 bp, Homo sapiens
  misc_feature (232)..(232): n is a, c, g, or t
atggctatcacaccccatccatgatgatcttcttccttaatcatactctgaggatctttctgtgtttgtctgtgaacgaatgtcacgtctctcgtgctaaggaagtagtgtagttagaatagatctctctctctctctccctttcctctctctctgttggatgcttctgtatctttttccacagcataatgtctggtgtgatggggagctatttattgaaattaaagattanttatttgtgccatgc

SEQ ID NO: 549130 - DNA, 1159 bp, Homo sapiens
agactcatatcagagcattgtccgtcatatgagatcacgtacgtattcgcggcagagataccacgcatcatatcatgcgaccaatctagagtctattaacatgtcagtgtggcatctgacacaacagaaccatatagaacagagaattcttgatgcataggagcatgtgcgtgtcctgcacggatgtgcgaagagggctcgcttcaaggtattgcctgggttctatgagagtaatacctgaagaggcatgagtctgtgcaacgctggtagtcagccactttgagtatctccttagtggccaatttagagaaccaggcacatgtactactgtgactatcattgatgccccaggacaccagagactttatcgaaataacgatgattacaagggcatatctctagagcatgacttgtagctggtccgtgattgtagctgctgtgtgttcgcgctgcaattttgaagctgtgtatcgtcgcaagaatggggcgagactcaggatggagcattgaccgtgtctggctttacaatagcgtggggtgtgaaatcgaacgtaaattagtcagggctgttagagcataagacttggagttccgacctggagccgaacccttacaagccaagaaagaagagtattgaggcaacatctgtcgaaaggcaaagttcagtagctgtacatttaaggaaaaattggggctacaaccccgtgacacagctaagcatttggtggcccaatatgctgggtttggcaattggtgacaaatcatggctgggtagcgcacagttggctaacaatgattttgggtcccaacgctgcatgggacacgtcaccccgtcacagcgattgggaattggtcaattttgaaaccacaggttggcttgaagggactcggaatggattgctagcagcaaattcaggcacaaattgacaaaatccctttgacctgggatcttcaaaggagaggtcatcacagaatgcgggcggcatggggcgaccgtccgctcgtttgtcccgtgtgctgaaaccggttgtgaccaaaacccgtgtgtggtcgaccccttgtgttctcataccgtgtacacggcgacgcaaatctggtggatcccatgatagtgtgggaggcttctcggagaacgaagagcactaagataaacttgtcc

SEQ ID NO: 549131 - DNA, 857 bp, Homo sapiens
  misc_feature (61)..(61): n is a, c, g, or t
  misc_feature (159)..(159): n is a, c, g, or t
  misc_feature (167)..(167): n is a, c, g, or t
  misc_feature (174)..(176): n is a, c, g, or t
  misc_feature (183)..(183): n is a, c, g, or t
  misc_feature (185)..(185): n is a, c, g, or t
cacgagggcgtggggctcggtcgcgcggactgaaggacactgaaggccctcggatgcccanaacctgtaggccgcaccgtggacttgttcttaatcgagggggtgctggggggaccctgatgtggcaccaaatgaaatgaacaaagctccacagtccanaggccccncaccgcnnnatccccngnactcccacagccagggtaacgccaccggggacagaacagagaccaggagaagtacaggatacagccacaaaggcgagcacaaatgaacaacaggcctacatcagaaccacgaacagcagcatctagccctagccagggcaccagcccccgagacagacgaaaccatcgccagacgggacagagtggcagaccaacatgaacacgaacacagagcgccagacatgcccaaatgatcatacccgtgacgtgggacccaagaagagacgaaaagagactcaccgcacgagcagagatcgtcaaaaacccaagaccgtaccacaatagggggccgaaataaaaatacacatgaaagaagaagaaacgaattccctaaactaacaagtagagacacggagaaaaggacaaaacgcgcatgcgtggaagataaagggaacgtccactgatagtacagtataccatgcggtacaaaagaacacacacaagacaatagggggcaaacaaaacgagcagagagcctaacaaataccaacgaagcacggaagaaccaacaacgtgaagcaaaaagcaagaaaccgcggaacaagcagcacaagaatagaaccaggcggaacccaggagggcacccaaaaagagacagcaaacagaccgaatcgaaagacaaaaaaggaagaa

SEQ ID NO: 549132 - DNA, 355 bp, Homo sapiens
  misc_feature (8)..(8): n is a, c, g, or t
atggctgntcacccggtgtttggagccctctcagaggtcatagacctctagagagagaaactgagatacataacagggcggaaacaactcactggtgacacactgtggagtcctgtctacaagcagcacacatcaatccaccacacaaaaaccctaggctacagctcagttccttctcttaagaaaaaaaaagtgtgaaacaaataacctaagaatgaggagaaaacaagaagaatgaccctcttgcgagcactctgtaggttttatggcacctctacttgccagagttaatgtaaaatggaagtaatatcgtcttcgtgcacatttacgttaaagaaaaagagccctaaagtag

SEQ ID NO: 549133 - DNA, 163 bp, Homo sapiens
aatagccctggccgtacgcctaaccgctaacatgactgcaggccactactcggccctaattggaagcgccacccttgcgatatcaaccattaaccttccctctacagtaatcatcttcacaattctaattgtaatgactatccttgaaatggtcgccaatccg

SEQ ID NO: 549134 - DNA, 313 bp, Homo sapiens
ctgccacgactcgggcaaatgacatattaatttatacctatagaatctgcctgttcacagggagtgccttaaacctaattgagacaggagtggtaatatttggaactctgaaactaatttttttttgagacagaatctcactccgttacccaggctggagtgcagtggtgcaatcttggctcactgcaacctctgtctcccgggttaaacggatttccctgcctcagtctcccaagtagctgaggcaggagaatcacttgaaccctccgggaggtagaggttacagtgagccgagatcacatgattacagtcc

SEQ ID NO: 549135 - DNA, 420 bp, Homo sapiens
accaagttgctgggttgttttgttttgttttgagacagagtctcactttgtcacccaggctggagtgcaggggcatgacctcagctcactgcaacctctgcctcccaggttcaactgattctcttgcatcatcctcctgagtagctgggactacaggtgtatgccaccatgcctggctaattttggtatttttctcagagacggggtttcaccatgttgggcatgctggtcttgaactgctgacctcaggtgatccgcccacctcggccttccaaagtgctggtattacaggcatgggccaccacacctggcctcagctgttcaattaaaagtaaattcaacttaaaatactatgtatcattggcagtagtgcatacattaaaactgagtagccacatgtgattagtggctatggtattg

SEQ ID NO: 549136 - DNA, 301 bp, Homo sapiens
agaccggccagctcggacgccccaacaccggcaagcatgacccactccactacacccccgaacaacgggcgcagcacggtatcagcgagggtctggtgcgtttgtcggtggggcttgaagacagttgccgacttgctggccgatatccatctggccctggccaagtgcagcgctgccaacctgcggcccattgcgacagcggcgtatgcgatgaaatagcgtccaaccccatgggttatgcggtgcctgggcgacggtcggaaggatccgactgccgctctgcctgtttaatgtttttttt

SEQ ID NO: 549137 - DNA, 359 bp, Homo sapiens
gaggctaagggagtgccagtgcgtagcgcgtggtgcatgtactcttagttacacatcatgagaccttaatgcatgttgctggtctcgggtgggagaaattccctttgacaccttttggggcagcgggaacggggaggagggcatggacgttgatgacccatcttctggctcccttaatggcatgggtggttcagcaacgtgaactttggccgctcccgctcatgcccaagagcccggccgagaggaagcaagatcccccagtcacccacgaccttcgagtctcccttgaagagatctacagcggctgtaccaagaagatgaaaatctcccacaagcggtcgacggacggggtacggagc

SEQ ID NO: 549138 - DNA, 173 bp, Homo sapiens
aactgtgtcgtactccctgtgttttgcgtgttctggtcccaatactgcactgtgctgtggcttgcctcaacgagccaagcccggcggaacttgccgactgtattcgcctggcatctcgattgcgcggagttgtgccagactgccgttggttacattggcacgcgacatcgcca

SEQ ID NO: 549139 - DNA, 357 bp, Homo sapiens
ctatcccgtgggccctggccaagctttagggaggctcctggtctgggaagtaaagagtaaactggggcagtggtcggccactacttaccacccacccccagatccgccggaaaagtaatctgtgcgctgcagaggaatttggggtgtgtggggagcggggaggcagggagcggaaagcatggatgtaatcagtgggcctgaacttcattcctggccgcgggccaagacaccttcacctccaccagctccacaggtggtgatccaaaacggctttcggcgtttccaacatcaacaatttggtgattttgtctctgggctgttataagcccagccaattattggccttttaaaaaaaaa

SEQ ID NO: 549140 - DNA, 108 bp, Homo sapiens
aggtcaatgttacacaaaagtaaagagatcttctcacaacactgttgctatacagaagtataaactggtacaatcttcacaggacaagcaatatggaaatagactaga

SEQ ID NO: 549141 - DNA, 263 bp, Homo sapiens
  misc_feature (215)..(215): n is a, c, g, or t
  misc_feature (240)..(240): n is a, c, g, or t
agccaactaagttctctcttcgtgaaacacaggtccatgagtcgacacaaacactaatgcaagaaccatcacggaaaaccaccgcagcagctgaaacttttatagcccataaaaggaccaaacaagtaagctgaatgactgtgaaaatatgaccttccagagcggcacataacaggatatcaaatcaggctgatgcttagcaggcttcaaatatnatggtcaaatgactggattacttanatgaggcaacttcatatcggaaa

SEQ ID NO: 549142 - DNA, 182 bp, Homo sapiens
tgtttatcgatgcacccactccagcctgagtgacaaagcgagcctctttttcaaaaaaaagagagagtcaagaaacaagagatgctggcgaggctgtggagaaatgggaacacttttacagctgtgggtgggaatgtaaattagttcaaccatggtggaagacagtgtggcatcgataaaca

SEQ ID NO: 549143 - DNA, 1183 bp, Homo sapiens
tcaccgaccaccacgggaaacacgtgtactggtccctcgttggctcccctatttttttggggtgtaccacgcctatttatgtacatacccagtcgatgttgtgttcaaccaaatagtgacgacccggcgctgtgggttcgcccgggttgctccggggcgtttttaccccgcggggggatgtttgtctggtgtgagaatccccctcacggactctccgcgcaggcgctgttttagttgtgggtgtagtaggacaatacacggcgtccgggtctgcccgggggatgctttctccacgcgtttatgtggagcttgctgctccttagaaggccccccacttggtgctgaacgacgcccgccccacttctgccttgggggttccaattgatgttgaccgtgttcccccacgagtgacctgtccttggtgaaatcttatgcccggcgccattagttgggttattaaatgaccgtcccttcgcacgacacgccaagtgtcttgtcgagaccccccccctcgcaccctcgaagcactcgctttggcgcttatccccgcgtgtgcgctgtggtgacgtatgtcccccttattgaagcgcaaataaaatttattacaccaagctcaccatctatggccttatccgcacacaatcaccaggacctttataagtctgcctcacatgtgcaataacatcttctcacaatcacagcctcacattagcccctcgttaggtacacacagcccctattttcatgcccatacccccctctgtaagactttcacccgcgccgtagatacatttctacataattcggcccaccgcgacttaaatcctccacttaacttatttctgccctatgcccaaactcacaatctaccgaaccgccacatccaccagtcgccatctataatcctcttttcaaggacttccaaacatttacatccccactaatagcatttttgatgacttttagcaagcctctgcttaaccttctcgcccttaccccccacctattaacctactgggagaactctctgtgctagtaaccacgttttcctgatcaaatatcactctcctacttacacggactcaaacatactagtcaccagccctatactccctctacatatttacccacaacaccatggggctcactcacccaccccattaacccacattaaaccctcata

SEQ ID NO: 549144 - DNA, 662 bp, Homo sapiens
cttaataggaacactatattacatctgcaacagctgccagtttggatgatgcaatgcctgctatagcaacgcggctgtggaccaacgccgaatactacgctgtacagaggcctggaggcgctacggactagtggtccgtatgtctctgcctaatcagagagaaggatatgtgagccgaattggccatgttgactatccgggcccactccacgtgactctatgtacagtcaacgtactccgtcatcgtgggcgacacagctggtgactgcattgacgcacagctagtactatgaggcgcagaaggttgagatcacgatcccgcagagacacgtgggcgcttatgacctagcaacgtggaacattagtaatctagactagtatgatcatcatagaagaatgctgacttccatagctaacgtgctcagctgcctactagaatagagactgtctgactattaggcacctataatgatgcactgtgctgcgatagagctgaactaggtcccttaaagctgtacgacagagatgttagaacttaaggatagataaagacgattccatgcttttcaagcttctgccactatgcgcggacagactagactgtttggaccaggcacatgttgtcgcactgcaacatttctgcatgatctgataagattttt

SEQ ID NO: 549145 - DNA, 192 bp, Homo sapiens
ctgcgtagtacaggaaaccaaacactccatgttctcacttgtaagtgggacctaaatgataacacgtggacacatagagggaaacaacacacactggggcctatgagagggcggaaggtgggaggagggagagatcaggaaaaataactaatggatacttagggtgatgaaataatctgtgtagaaattgaa

SEQ ID NO: 549146 - DNA, 333 bp, Homo sapiens
cgaactgataactttgggtagcaggccacagcgtcggcaacaatgcctggattgctttacttatgacgagtgtgaatgtgcgcggttcataaaattgcagattgcaagacacgatgccgctgagactgctccggcgcttgtaattgagcataccacatcagcttgtttgaggattgcatctcgttcacttctgcgcgtgaataatccagcagtatggtttgcttcccgccgccgctttgtatttcgccagattaatcgccggcttagcataaacgaatcatcctgcggcaaaacgcgtcggaaatccgccagcagcaggggctttcacaacgt

SEQ ID NO: 549147 - DNA, 100 bp, Homo sapiens
tttcctgacagactatcatcatataactttggtgcacttaactgagtgcataccaccacattcttcagcattgtggatctgtgtcctgacttgtgaaaac

SEQ ID NO: 549148 - DNA, 206 bp, Homo sapiens
gccttggtggagggcatgaggctatgatgactattggctataatatggatatggctttggctgatagatttgaagagacctcaattacgtttttcaggaatgtttgatcatagatacagagatggtggtccagttttcagagcaccacagggcactgtgtacacatgaggggttaccttacagagccactgagaatatattaataa

SEQ ID NO: 549149 - DNA, 187 bp, Homo sapiens
tacatgtagtctacctctgacggctcccccggtcttctcctgtactccgggattcttcgaatgtgtggtagggtggggggcatccataatagtcactccaggtttatggcgggttctactcctattaggacttatatcgcttcgcagcgaaagcttctcccatcatcacaaattcattaatcattac

SEQ ID NO: 549150 - DNA, 905 bp, Homo sapiens
  misc_feature (1)..(1): n is a, c, g, or t
  misc_feature (4)..(4): n is a, c, g, or t
  misc_feature (49)..(49): n is a, c, g, or t
  misc_feature (52)..(52): n is a, c, g, or t
  misc_feature (59)..(59): n is a, c, g, or t
  misc_feature (61)..(61): n is a, c, g, or t
  misc_feature (64)..(64): n is a, c, g, or t
  misc_feature (104)..(104): n is a, c, g, or t
  misc_feature (113)..(113): n is a, c, g, or t
  misc_feature (131)..(131): n is a, c, g, or t
  misc_feature (157)..(157): n is a, c, g, or t
  misc_feature (159)..(159): n is a, c, g, or t
  misc_feature (168)..(168): n is a, c, g, or t
  misc_feature (189)..(189): n is a, c, g, or t
  misc_feature (197)..(197): n is a, c, g, or t
  misc_feature (207)..(207): n is a, c, g, or t
  misc_feature (212)..(212): n is a, c, g, or t
  misc_feature (219)..(219): n is a, c, g, or t
  misc_feature (230)..(230): n is a, c, g, or t
  misc_feature (239)..(239): n is a, c, g, or t
  misc_feature (271)..(271): n is a, c, g, or t
  misc_feature (274)..(274): n is a, c, g, or t
  misc_feature (293)..(293): n is a, c, g, or t
  misc_feature (303)..(303): n is a, c, g, or t
  misc_feature (311)..(311): n is a, c, g, or t
  misc_feature (318)..(318): n is a, c, g, or t
  misc_feature (324)..(324): n is a, c, g, or t
  misc_feature (326)..(326): n is a, c, g, or t
  misc_feature (338)..(338): n is a, c, g, or t
  misc_feature (340)..(340): n is a, c, g, or t
  misc_feature (390)..(390): n is a, c, g, or t
  misc_feature (398)..(398): n is a, c, g, or t
  misc_feature (406)..(406): n is a, c, g, or t
  misc_feature (431)..(431): n is a, c, g, or t
  misc_feature (443)..(443): n is a, c, g, or t
  misc_feature (479)..(479): n is a, c, g, or t
  misc_feature (481)..(481): n is a, c, g, or t
  misc_feature (485)..(485): n is a, c, g, or t
  misc_feature (830)..(831): n is a, c, g, or t
  misc_feature (875)..(875): n is a, c, g, or t
nacnatggctgaccacaaccctgaaagcgattccacgccgcgcacgctnctncgacgcntnctngatacagcggacccgcgcaccccgcggcgaccccggattnctcgggctngagcccggagagcccttntttaaacggcttcccccaggaatttnantggccaaanaaggacgatagccaaagggcnttcccatngagccagttnttttngcagatnggcccatattnaggccattnggcactttgaggaacagacacctcggacgctnctnaagaacatcctactaactnccccagaatnttccatcnttattcnttattngntatttaagccantnccagcaccgcagcggtccaaccctccaaacaagaaagcagtttcggcacnttgagctncaacttcnttagctcgagccccccacaaccctngctccaggtctnctggcccctggcaggaggaaacagaggctgagactntnattntttcagcagggattggaccaggggctttctctctcccaagagcctcaagggaattctgatgcctcttccctcaccagatccctcaacctgacctttgccacacctcttcagccacagtcagtgcagaggcctggcttggcccgcagacctccagcccgccgagctgtagacgtgggtgcctttttgcgggatctgcgagatacttccctggctcctccaaacattgtgttggaggacacccagccgttctctcagcccatggttggctcccccaacgtgtatcactccctgccctgcacgcctcacactggggctgaagacgctgagcaggctgccggtcgcaannacagagcagtgggcctgggctgcagaagaatagtgagtgtgtgnactgggtggctggagcaaatttagcttggg

SEQ ID NO: 549151 - DNA, 1010 bp, Homo sapiens
ctggataatcatcatgatgagctacacgttgtgacatgtaatagtgacctagagatctgtcattcgtaggtgtctctcattaactggtccccgaggagtgctgaaagagacgtccagatggaagttctagagtgtcaatcacggggatcatttcaaccctggatgtcaactgcagtagcatgcggatttgcaaattaacgcaccaggtcagtgatcgtggattaacgcacctgtggagtaaaccatggtcaaggttgtaccacacagagagtcacggccactacttgctaggcaaaatatcttggtgctcgaaatcgcctgcacaaatctgagggcggtactccactacaatgaggcagactggaacaagcgtcttcaagagtggtacattaccacaaaagtggtgtacccagggaaagtacccacttatcctaaataatcatccggattacctgtgcatttacgtggctataacgacaactctgcgggatgaaggcatatctcatcaattcggaaacacgaacctggtgacataaaaatgagcctgaataacaaatggttgttgtaaaaatgataattcgacggctcttattaaaaaacgggtcgataaatagtccatgagtgacacgggtcgggggttatacaagttacaatatggagcagaatggattgaaggtggctcaaaaaattgttgtgtaagcatcgccattggaaataatttaaacggtgagtatatgcaagggatttcttctctcactttgtatattccgtcagctcagtaataagccttataattcagagatatgccatacgtatacaacgaatcgcgagaaagggaactaggcagatggagatggccaatctatgagttccaaatagtgagagagtattgagtagtataaagagtatctataaaaaagagggtagtgttagaaggttatagaagatagtgacaggcgaggtatgaacaacagtagtataagcgagaacaataggttgtttaaaacagt

SEQ ID NO: 549152 - DNA, 122 bp, Homo sapiens
atagcccggtccagatatgcgagaaccagttctcgagctgttcaaggacttggactaagtctgataacttcccaatcagatagctgatattgggccagaaatgaagaagaagtttgcagatg

SEQ ID NO: 549153 - DNA, 377 bp, Homo sapiens
  misc_feature (4)..(4): n is a, c, g, or t
gagnattccccacttgatgcccctggaatgcttacagtgtactgtggatacgggggattccctttccccattcattgacatgtctctctgcttggctgtaaactattcttgggaggacacttattgccaagtgaactctttccccagctgattcgtgtctaatgaatgatccattactgttgcccttttccttgattattacactgtctgtagcataccatagaatcttgtctgtacttcattcgaaaagtctcaatagagagtatacagtcctagagaattcctttatttgttcatgatctcattgattacccccgggtattgtcttttgacgtccagcagtccaaggtattgagacgtattactggaattcagaa

SEQ ID NO: 549154 - DNA, 926 bp, Homo sapiens
tggccgtaaacggaccagagcgaagactcaggacatccgccggccaaaaggtggctcaggggaaagcagctgctcacgagcagagggcaagcacaggctccaggaagagagccctcaaccgccaatcaccagcataccctctgactcaatgccaaggaagagacacggcgctgacaagtctaacaccgagacacgacgacagctgggacaacagaaggcgtattagtcccgatgacaccagaagatcgggaagagtggacagtccagaaactgttcccaccagctggaggaaggggccaacggagggtgagcagcaaggggccgtgggagtggcccgcaagagtcctcgcgaatggacctatgcgggcctgcccacagactacaaatgctcagaccagctcgtccgagataccaggccttatctccaagagccagagatagtggggagactttcttggactttggatgaggacaaagcggacagtcaggctggtcgaaccaactgctcggtgaacaccctccctccatcgttttcgtttcactgtcctccaagaccagcgggaactggcagaccgccaacgccgcccataaaagcacactcatcccctcacgtgccgcgtcgccctcccaggcgtgctcaacaggggagaagaagtgtaggctctcttcgcgtgcacggccaggacagcgtgcctccgcgatgatcaaacgccacagctccgggacgccagagttggggatgacatgcagctcagctctgggctccactgggatgggaggagaggacaagggaaatgtcaggggcggggagggtgacagtggccgcccaaggcccacgagcttgttctttgttctttgtcacagggacatggaaacctctcctcatgttctgctttcgattcgttacagcgcaggatttaccaaca

SEQ ID NO: 549155 - DNA, 117 bp, Homo sapiens
gccggtcctgcacacgcgtagaacaaacctgtgaagtcactgtggacgaagttttgcgcaacaacttcgtccattcagacttgatcttaagaagtgtctggtttctcggcgtgtgca

SEQ ID NO: 549156 - DNA, 157 bp, Homo sapiens
gttatcctacctacaaggaaaaggtaaggaaagggcctcgaggccgcccagaagtgatcttacaactatgtccaaagacccttttattcgaatgtcctgggagaagggaggagggaaagagtcggcatgtagactttcagtgttttaaggataattc

SEQ ID NO: 549157 - DNA, 399 bp, Homo sapiens
  misc_feature (266)..(266): n is a, c, g, or t
  misc_feature (350)..(350): n is a, c, g, or t
  misc_feature (354)..(354): n is a, c, g, or t
gggtcggggcgggttcaggcatcccgcaggatggagtctccggctgcaggcgggccagcggcgtgtgggggccattctccagctgctcctgaagagtccggatctggcccggcagctgctgcacctccttcacgtgctcccggtagctggccggcatgcgtgcctgcacagccgtgatctccggctcccgggccaccagctggctttttcactttgggcctcccgggctggtggctttgggccttttctggtggccatctcctggntggagctccctcaagttggctctgtggcgacagccgcatcttccggttctggtggccagcagtttttccttctcttccagcggncgtntcagaatcgccacagggtcacccttcggaggggccttggggggta

SEQ ID NO: 549158 - DNA, 501 bp, Homo sapiens
  misc_feature (492)..(492): n is a, c, g, or t
ctactcttaccatgcagcttcgcagttctgctgctaggtacttccccaagagaagtgaaaacgccagaacaagaaccctcaacaccaatgtttatagtggctttattcaggattgctcaaaaagaaaacagcctaaatgcccttcagctggtgaatgggctgataaaccatggtacattcatacagcccagtcctaccaagcaatacaaaagaatgaatgcccgagacatacatctccatggaggactctcagatgcattttgcagctaagtgaacagtttcagaaagcttcatatgctgtatgactccgtttcaataacagaaaacagatgaatgattgccaggtgcgggaggggctccactacggagaggaattcgagaacgttgggagtggtggggtcatggcagtagctacgtgatgataatgtgtccgtcagaattcgtagaaccatatattgtactctgtaaattacccttcaataaatccctctnttaacactc

SEQ ID NO: 549159 - DNA, 400 bp, Homo sapiens
  misc_feature (135)..(135): n is a, c, g, or t
  misc_feature (150)..(150): n is a, c, g, or t
  misc_feature (161)..(161): n is a, c, g, or t
  misc_feature (167)..(167): n is a, c, g, or t
  misc_feature (194)..(194): n is a, c, g, or t
  misc_feature (215)..(215): n is a, c, g, or t
  misc_feature (305)..(305): n is a, c, g, or t
aactctctaggctattgagggtcatcatttgaatgctgagaagtgtcacagatgctctgaaacacagatccttgagggctcttgggaatatctgtaaggtcacactgcagcacaggtgatgctcatacagtcctngagtgagtctaacangaaatgatgangcactngtggaaattctaacaacaaatgtgaangtaattccagaaaagcaccangtggcagtaacaaaacattccacactgtgcagaatggtttgcccataaacaggtatcttggaaacataaatacaccaaagaaagtcaaantactgagcccatattaaatccttttggaggaacgaaccaaggggaacatttccacggattggaaaaggagccaccaagtattacaagaccaactt

SEQ ID NO: 549160 - DNA, 663 bp, Homo sapiens
  misc_feature (95)..(95): n is a, c, g, or t
caggaggagcgcgcgggcacaggctgcgggtgactcgagggtgtgctccgacgtccagaattggacgtgcttgatgacacgactctgctgctgtngagtgtaagtctgcttgctgatctgggacgagtgagtcagcgtgcctggagagaccagtactggtgctcatcactagtgaactccatgtacactgtccgatcacgtgaagctatgataccgatccatgtattgggaatgttcatcaatgcttgtcatacggggttgcatggaggattaaccgactcgtcgagtagaacaaacagcaataccgagagatgcgcatgagacttgtctctggtcaaggctataagaagccgaaagaagaagataggaggactgcccttaaatgagaccagggaatctgatacatgctgtggacctcgcagtgagtgttgcggtgatgagcatgagtggccctctgggaagagtgtaagccctgcctgaaacagacctgcatgaagttctacgcacgcgtctgcagaagtggctcaggcctggtttggccgccagcttgaggagtccctgaaccagagctcgcccttctacttctggatgaatggtgaccgcatcgactccctgctggagaacgaccggcagagacgcacatgctggatgtcatgcaggaca

SEQ ID NO: 549161 - DNA, 433 bp, Homo sapiens
attgagtcgcgtctagcgtactaatgttgcatcttgaccttgagagtccgttgacccacagaactggcacaattaggctgggtgcagtggcttcatgcctataatcccagcattttgggaggccaagccaggtggatcacctgaggccaggagttcaagaccagcctgacctacattgtgaaaccctgtctctactaaaaatactacaatgagccaggtgtggtgcatgcctgtcatctcagctacttgggcagggtgacgcaggagaatcgcctgaacccgggaggcagatgttgcagtgagccaagatcacaccactgcattaatctgggcgacagagtgagactccatctcaaaagtaaagaaaaagtccaaagaccatacagatgactataaaggatggatgggcctttgactttccgagctgcctggg

SEQ ID NO: 549162 - DNA, 297 bp, Homo sapiens
  misc_feature (1)..(1): n is a, c, g, or t
ntcagtctgcgacgactctcttaatcctccaccgctacacgttgtaagcagccactgctttactttaataatcaacaaatagttatggaaaattcggtcacgtaattactctcatcgaaggactcattaaaaggaagagacacatcctctcatactccctgagactctgagaacagtggacgcagagggaagagatgatcatttgtgaagccccaccacagtggtcaaaaggcgtctgtatctgacactatgtgtgtgttctaaaataaactgcgatgcggccggtaccctttaggg

SEQ ID NO: 549163 - DNA, 884 bp, Homo sapiens
  misc_feature (23)..(23): n is a, c, g, or t
  misc_feature (142)..(142): n is a, c, g, or t
  misc_feature (144)..(144): n is a, c, g, or t
  misc_feature (146)..(146): n is a, c, g, or t
  misc_feature (190)..(190): n is a, c, g, or t
  misc_feature (192)..(192): n is a, c, g, or t
  misc_feature (237)..(237): n is a, c, g, or t
  misc_feature (242)..(242): n is a, c, g, or t
  misc_feature (279)..(279): n is a, c, g, or t
  misc_feature (281)..(282): n is a, c, g, or t
  misc_feature (315)..(315): n is a, c, g, or t
  misc_feature (323)..(323): n is a, c, g, or t
  misc_feature (326)..(326): n is a, c, g, or t
  misc_feature (333)..(333): n is a, c, g, or t
  misc_feature (336)..(336): n is a, c, g, or t
  misc_feature (339)..(339): n is a, c, g, or t
  misc_feature (342)..(343): n is a, c, g, or t
  misc_feature (349)..(349): n is a, c, g, or t
  misc_feature (370)..(370): n is a, c, g, or t
  misc_feature (383)..(384): n is a, c, g, or t
  misc_feature (394)..(395): n is a, c, g, or t
  misc_feature (416)..(416): n is a, c, g, or t
  misc_feature (427)..(427): n is a, c, g, or t
  misc_feature (445)..(445): n is a, c, g, or t
  misc_feature (457)..(457): n is a, c, g, or t
  misc_feature (567)..(568): n is a, c, g, or t
  misc_feature (671)..(671): n is a, c, g, or t
  misc_feature (884)..(884): n is a, c, g, or t
tctctcaaattttttgaattganttatttaattaatccatcaacctctcatagcaaatatttgagaaaacaaatttatattcagattcttattttcagtagggaagtaagaagttgcagctcagtgcacataaagttgaganananatggagacatccagccccacctctctggaacaagaaagatgaantnggaggaaacacaggtcagcatgggaacaggggtcacagtggacanaaggntgggctgtctctccacctcctcacattatgctaacangnncgcagacacattcaggtgcctttgcagaaaganatgccagntgntcttgangtnacnttnngggggngtgaagaaatcctgcatctcngtccctcacaagnnagctgtctcnngcttttcaagctgtggggggnacatcggggcnctgggcactgtcgctggncgcagcctgagngtggctccctccttttccacctgacctcttcctcctacacatcacagcggcgaccacagctccgatgaccacaactgctagggcagccaggccagcaacaatgcccacgnnggggacggtggactggggagatggctcccatctcagggtggggggcttcggcagcccctcatgctgtacatggcatgtgtatctctgctcttctccagaaggnaccaccacagctgcccacttctggaaggttctgtctcctgctggtctggtctccacaagctcggtgtcctgagtttggtcctcgccatcccgctgccaggtcagtgtgatctccgcaggttagaagcccagggcccagcacctcagggtggcctcatggtcagagatggggtggtgggtcacatgtgtctttgggggggtccgcgcgctgcan

SEQ ID NO: 549164 - DNA, 535 bp, Homo sapiens
cagtgtgccctgtggacaatggtacccgttttccactgcaactccattggacttgttctgcctaagtaacgaccgtttttctttttcgcctctttgatgtttctcgttctcgtctctatagcaaccgatgtgccgtctgtgtgcctatggcctcttcggtgcggggccttgccgagcgcaacagtctacctccgcgatctcttctttgagtcccttgattactcaggtaccgatggttagcctgcgcggacgtggcagggatggactagggcagggcagctggagtagtaagaccttacttgccacgtcgatttgggagtttgctaacgtagttttacagagctagatctgtgtgcatgtgtgtgctttgtgtatatatacatatctagggctagtacttagtttcacactccgggagctgggagctcaaacctgatatcagttgtctttctcttaagtttcttaatagaaatagaatagtcgcgcagcttgcgcgtcccccccctacccccttttttaaaaaagtgtacttgtg

SEQ ID NO: 549165 - DNA, 293 bp, Homo sapiens
gtgtcattatataacattcctttggcttataattcttaaagagaatgataatagcaaaagtgatgcaaaatcttcagtgtgagattatgcatcacttttgcgtattatcgattgcttttaagaattataagcagaaaagattttacgccttaatgtgtcattatataacattccttaaaagaattgtaaatataggtgttagtgatctgacattttaacttgaaagcgatatgctgcaaagataatgtatttaacaagtatttggtggcaaatattcaataaatagtttacat

SEQ ID NO: 549166 - DNA, 100 bp, Homo sapiens
gcagtacggatgagaaaactaccaaaagccggcaaatctccacaaccagacccaggggacaccccagcaagcacaaagcaacgggcccggggtaccgagc

SEQ ID NO: 549167 - DNA, 646 bp, Homo sapiens
cttttcttatgagaaatggttattggcaaaaaaaaatatttttacccttggttagaaggcaaatttcctgtgttaaagtgggccacagggttgaaaattggtgtttttccattttagccaaggagagagaggtttcttgttaaaacgggggtcaaggaaggtctttttgattgagaattctggatggtttaaggaaatattcttgatcacattgcggtatttttcagccctgggaatgatttaacggccgttattaatgttttaggtgtggggccatcgcgcattcagagcagtcttattcattattaaccagggattcattcaattcctcatatgtatcatacacagttatgggtgtcatggcatagtagtcggggaggatagatacatagtgttttgggcaattagtcaatttgttcacaatgtccttatcatctatgttgagcattctgtccattatagtgagaagattgtcgtaggtaggcagcttccttgtatgagagttctgtctaaagaatgaacatataagtgttagatatagtcacggcttaagggcgagataagtttccatttaggctgtgtcgtgtgaataaatcagttgttagcacccccggcaaagtttttataacaggccagtgtaatttag

SEQ ID NO: 549168 - DNA, 695 bp, Homo sapiens
tgaacctttatggtttacttattccaaccggaacagatgaaagagagggagaacagggagagcacgagatggaatggcccacacttgggaaggactgcgtcaatactaactttgtgaggatagggggcaactcagaaatcctgcactagcattactcggtgtgagatgcaaagtgggcaacagcctgctttgtgtcctgagttcgatagttgcttatgaagtaccatataccatcgaaacccagcaatgcttaagagaaatgagagcatacccgtaaattcggatactacgtcatgcaacatagtcacagaataaatcacttttacatgcaacaacaaatgactctagaacattctaccaagtgaaagaaaggttcaaacatgataccattcttctcttctacaaagagaaaaatatagtgacagaaaacagatcagtgatagccaaaggcctgcaggtagaattgcactgcaaaggggtctagcgaatgtccaaggcatgtttttgggggtgatggaaatgttctatatcttgcattgtggtagttaaatctgtataatttgccaaaagtcaaactgtataattaaaacggttattcatataatttataaacaattatatttcagtccaagctgatttacaaaaagaagcatttggttttgtgagaagcctcagacacataggtagaaagcaag

SEQ ID NO: 549169 - DNA, 285 bp, Homo sapiens
atctatagatgattctccgacacctgggggtaagtcgaggagaggaacctgagaatctggaggtgcgggagtccgctgacagataacaggcaatgatcggcagatgctggaggtcaagcactgagtacaattgaccctaaaacagatgactgtgatgcaggtatgtgggacgcggaaacggagagacagaaaaaggagggctgaaatagacaagggatgatgtctgaaggagtggcaaatgagggatttgggaaaatagtaggctccatgcctgattcccatggg

SEQ ID NO: 549170 - DNA, 595 bp, Homo sapiens
aaatttatttttaatataattttattttctaatcacaaaaaccatcacaacaaagaaaaaacatcaatattacaaaatctcaagaaaattcactaagtcacgaaaaaaaaaaaaaaaaactttcatcataaatctaccttgaaacaaaaactgaaaaaaaatcttatataccaaaaagtctgaccgaaaaaaagcgaaaaaaacaaaaaatccacgttactaaaattaacaaaaaaaaagataaaaatattacacaaacaacccgtacatatccaaccaaggcacaaaccggataaataaaaaccataaatgcaaattgctatacacatcatcgtctcaactaccaagcaaaaaactcctctaaaaattttctatccatacaaaaatatatccttaattcatacaataaaaacattaataaatttaaaaaaaatatacataatttaaaacaaaccataaatacaaatggccaatacaaataaatcaataattaatagacctaacattaataagaactttaaaaaaaaataattaaccacaattaaatctctcacaaaacatacataaaaaaaattaatttacaaaataaataaag

SEQ ID NO: 549171 - DNA, 423 bp, Homo sapiens
  misc_feature (31)..(31): n is a, c, g, or t
  misc_feature (322)..(322): n is a, c, g, or t
  misc_feature (411)..(411): n is a, c, g, or t
  misc_feature (415)..(415): n is a, c, g, or t
  misc_feature (418)..(418): n is a, c, g, or t
aaaaaaatggcccctacccaaaagctttcanaactagggacttaaccctgaaaaacgaagattttgttgttgttgtttgaagatggaatttcgttcctccgttgccccaggcctgcagtgcaatggccgtgatcctcagcctcactgcaaccctcccgcctcccgggttcaagcgattctccctgtcctcagccctccctgagtagctagattacaggtgcccgccactatgcccagctaatttttggtatttttagtagagatggggtttcacaacatgttggcgaggctggtcctgaactcctgacctcaggtgatcccnccgcctgggcctcccaaagtgctgggattacaggcatgagccaccacgcccggctgagatttttatagataggattttttaagagaatnaaanacnggact

SEQ ID NO: 549172 - DNA, 1791 bp, Homo sapiens
  misc_feature (515)..(515): n is a, c, g, or t
  misc_feature (681)..(681): n is a, c, g, or t
  misc_feature (719)..(719): n is a, c, g, or t
  misc_feature (724)..(724): n is a, c, g, or t
cttctgcggagaggatgtgtgttgtttgtgtgtcggcgtctgttataactaattttgttagggatgagggggtggtccgctccgtgtgggcgcttaatacgctacgccccgcgcgcaagattggtcgtcctatgttgttctctccaagggggcccgtcctccgcagtgtgcccctcttctgtaggagcccctcttgtctctgcctccattgtgcctgcccccctactttcttacgggaggggaatgttcctcgctcattagttaagtcccctttgttctgcacgccgaccccgctccctgaactgtttggtgggagaaagtcccctcgtttggggggggaccacctttctttttcttttcccggggccttattggggggaaatttctcctccacgggagagcgcgcgcgtgttgttgcattgtggtgtgcccgctgcccgtgtgatctctccctcgcttgtttttgcccccccaccacagtgttggggtgtccccttgtttgtcatgaagaattntttttgttgcgcaacacacaaatatttttggggggggaagcgacacaacacaacccatccttctttcggggggggcgccctgcttctctccccgccgggagaatgactctggtgccttgtgtcagcgcaccgaccgcacccctttgtgtggtgaagcaagtacatnttttttttgtggctggagggcagactggtggcgtgccnccctncctttatgatggggtgccttccctcgcgcgggtaggttttcctcacccctcgaagtgctccccccgtcccgtcgtgttactgagtgagttgtctccctccgtccccttcccggcagtatgtttcgccccctggctgtttgtgtgtcctcctttattgaaagaggaggaagcttcttccgtcttgtgtttgttaggaggcgtagcacctccacaacaagcagagttgttggtgttgctccttcctttgtggcgactgtcgggaagacacaagccaccgactgcgctgttggaagctgcttctgctttgctgctcctgtgtggggccgactctctgtttaagtttgggggtggttttctcaccaggagaggcccataatatgtctcccagcagttttgtggacgcttcggtgtgtgcccacacagtgttagacactctctccctccccccccctgctgctacactccctacgtgtcctcacagcccacacctcaaaggtgtgggcctctactctcttgggggagacacacacccagaggttctcacaacagagcccgcgcgagagggttctcccccctctgtgattcacattctctcccatactctcacaccccaaccccagcgaggggaacactttgtacacccactgggtctccccaccccctgtggtctctctcgtgctctctctctctccagacacccctcaccaaactcgcgcccaagaccagatccgcgggagagcttctcccctctccacacaccaacattcgttagacaatagtggattgccagaatagtggaaataccaaaacgcgttgctttgtctttttgttcttgttttgattctaccccctcggtcccgtggtctgccacagacagccttcatttctctgtaaataatagtgacttgggaccaaatagtttgacacccacgagaagtggtccatgaatagcctggtgttgggaatgttttgcactattctgactttttggtctcctgtaaaaatatgtttattcacccccagaccactttaaaaaaggacaaccccctaagaaaaagaaaaaataa

SEQ ID NO: 549173 - DNA, 104 bp, Homo sapiens
cgctgcttttcactgcgatgctgtcttgtctagtgaaaacgggttcctcctctttattacagctgttttcacttctctgtttttctaccagtgggctctacatt

SEQ ID NO: 549174 - DNA, 402 bp, Homo sapiens
gcgtaagggtcatgatgttacatgctaatcatagaaggagaaactgcacatttttttgaagaaatcaaggaggaatgatagaagatggtgttatctgtcctctgagttaggttatgtgttgaaaactgccgtacaggtactgtcttcattagaaaactctgaatctcatgttgaagaaaatcaagaaaaactggctctggatctccgattgtcaagttctcgagcagcttcttatgccttaattattggtacaactttggaacatgccagagctgagaaaaagaaactacgctaaacgttgcgggaatttcgtagaagcttttatcaaccatatggaacgaatgcccagaacgagtgtcgtgtgccagtgcttgaggagtacagagagttctagaaaattaa

SEQ ID NO: 549175 - DNA, 233 bp, Homo sapiens
  misc_feature (68)..(68): n is a, c, g, or t
  misc_feature (131)..(131): n is a, c, g, or t
atgatcagcggaccgggttccttagtcttttttccccttttatgtggagaatgggatctcgctatgtngcccaggctggtctcgagttcctggcctcaagagattctctctcctctgcctcccaaagtgtngggattacaggtgcccaccaccacgccccgctatccatactcttttaatgctttactgttgagttttaaaattcacagtgattttttagacaaagggaaaca

SEQ ID NO: 549176 - DNA, 786 bp, Homo sapiens
  misc_feature (535)..(535): n is a, c, g, or t
cgtggaatatttcccgggtgtgtgttagaaaattgattttggccgtgagaaaatcacatgttgtgccctccctcgtgggatagtttagttgcgggtgtacagacccgccgctatatgtgctctctctcgggggtgatacaaccgacgaggagtctaaataattattctactcgtcgtctccgactatttagcggctgctatggcgttggtagaccggcccgacgatgttatttatttgctacactgggggcgccccccctctctatgtttacgccccaccgcagcatgttgatgtggtcctacagcgcgctgagaggctccctacacacgactcctcagcacatgtgtgtttagatggtagtctctataataaaatgatgtgccctttcgccctcccaaggcgctgtgtgagatatatctatttggtgtgtttgtatagactcttcaaggtggagacacacccatgtatcaactaatggttctgtactgtgtgcggtacgtactcaccccacgcaataaatgtcagtcaaacccntgtgtgtctgtgtgccactaagagaatattctgttatgtctatatgtgttacaacagtggttactatcgcgggcgttcttctagccctgcgacgggagaatgcttatgttagtttaggataagtaagtctcgataagacgcacgagggttctctttcacgctccggtcatcgattagtacatgagagctcacagttgtaccactgaatcagtaggacttcagatctattcaacggacccgacaatgtcgca

SEQ ID NO: 549177 - DNA, 653 bp, Homo sapiens
atgcgggcacactattccacatgtcacatatgccagcgtgtcacactatatccactttcacactattctactgtcacactatgcccgtcacactgattccactgtcacactattccagtgtcacactattccactgtcacagtattccactgtcacactatgcccatcacactattccactgtcacactattccactttcacactattccgctgtcacactattcccatcacactattccagtgtcacactattccactgtcacactattcgccgtcacacgtattcccggtcacactattccactgtcacactagtgacccgtcacacgtagtaccactgtcacactattccagtgtcacactattccagtgtcacactattctactgtcacagctactaccctcaacacccactcccgtcttagcccatagtgtgcctgttgccatactagtcttagccgcctgcgaagaagcggtaggggcctaggccctactagtctcaatctccaaacagatagtggacaagacaacggtacataagctaaagcttactccaatgctaaacacaatcgtcccaaagagtatattactacccactgacatgactttcagaaaacacatagttcgatcacacagcagccaagactaatat

SEQ ID NO: 549178 - DNA, 648 bp, Homo sapiens
cacgagattcagccaagtatttgttctctacctcattcagtataaggcagcctttaatttgcttagaaggcaacattagaaggttagagttcagcaggaacatagaattttaaaatgtgacttcaactgaataaatttgaatttctctagggagtaaagaatcaaaacacctatttaaagactgcaaaatatgataattatttttaaagtaattgattaaacctggtaggttttcccaaaatgaaaaacaatcagttctaaaaccaaagctgatttttagaaaatgtgaaaatgtaaatcaaccctatccataatagattctctaaaactttatcttacagtcactttcaaataactattcaaaaatgtaactgctatattaacgtcttaaaataatttaaaacattttaaaatatgaatactgtagtttaaaacaaagaatctaggggaaggaaaagtagacaaagaaatgccaattccagtccaaagctgtatttgccaagttttcttagaatgacttttaccgatttatgaattcttatacacagaatgcataatggaaatactgatttttgtctaaagtggcattattgactgctgctgtgatgctactataatgtaatacattattaaattgtttcaaggtgc

SEQ ID NO: 549179 - DNA, 898 bp, Homo sapiens
cacgagattcagccaagtatttgttctctacctcattcagtataaggcagcctttaatttgcttagaaggcaacattagaaggttagagttcagcaggaacatagaattttaaaatgtgacttcaactgaataaatttgaatttctctagggagtaaagaatcaaaacacctatttaaagactgcaaaatatgataattatttttaaagtaattgattaaacctggtaggttttcccaaaatgaaaaacaatcagttctaaaaccaaagctgatttttagaaaatgtgaaaatgtaaatcaaccctatccataatagattctctaaaactttatcttacagtcactttcaaataactattcaaaaatgtaactgctatattaacgtcttaaaataatttaaaacattttaaaatatgaatactgtagtttaaaacaaagaatctaggggaaggaaaagtagacaaagaaatgccaattccagtccaaagctgtatttgccaagttttcttagaatgacttttaccgatttatgaattcttatacacagaatgcataatggaaatactgatttttgtctaaagtggcattattgactgctgctgtgatgctactataatgtaatacattattaaattgtttcaaggtgctgttttgcctaaaaattttgtgtgtcttgaaaactatagtattgggtattgagactctgcaaattctcggcatgcttggcatgaggtaatcggtttttattcttacaaaattgtaactatgtaagtgtgtttattaaaagaacacaaactaaaaaagttaacaggaattaaagttgtgggatgaaaaagttacaggataaaaaaatactgtggaaaagtggcaaaaaaaaagttgtggaaaaaaagtaaa

SEQ ID NO: 549180 - DNA, 1198 bp, Homo sapiens
gcaggcatggcatgggttactctaggtcgaagctgaccctacatgtgggtgacagttctagaggttcatgaaacagaatcaggatgcctatcgaggtgatcatcactgactcctcagcaccccatgggccccgccgagagagtctctgcaatggagtccgtattaccagcatccattaagacggcccttcaagtgacagatggttgtccttcttgctgctcatgggtctgagtgccaatgtggactgtcacccatggacactcgatcaaggcatgatgacagcgcgagatatctgcgcagatcccatggtgaccccgctgattcgagccatattgccctaacgtagccagcacgaattccccctacccataacactccaaaggctgggcgcgacggatcggcgtcgttccgcttggctggttagccgatccgatagggaagctcccgagtcgagcggatacttttcaccacgagcacgactcgggatgacaggctgggtggactacaattctagccaggggtgggcaggcacgaatgcgggcttcgatacgttactcatcgaaacctccccttaatcgggtggcaacgcggccgcccagtcgctttctggttcgactgggcctcgtaggatatccgactcgcggcaaaggggacctgcatgaaaataggactcgttcgaaaggcatgcaagtcccaccaggggctggcccatcccatcgtggaactcgaccccaacaccctatggggtaacacgtgccggggcacccctttgtggcgcaaagacgcgttggcagtggcgcgattgcaacctcagcgtctccgccgttcactaaggctgcccagaagggcaccgtgcactcgtaccctagccattggccttattccgccactccaacctaagacccaaacgtagttataacaacatgctcgcgcaatggagaatgccttcccgcggggaccatggtgcctgtggctgtggagtcggggaccttggtgcgtgggtgcttgcttcatggatacttacttcatttgggccggtgttcccttactcatcctcgagagggccctttgatacaccagggctggttggtgtacccaggggggcccaattccttcttgttcttggccccgtataccttgggtgtgaccccccttccttgttccactcaggaacctaccggtggtgatttccacttag

SEQ ID NO: 549181 - DNA, 340 bp, Homo sapiens
caactatgaagcgcttgtgaggcatatgctgtcgcggtgacgggcccatggcgcggagctcgtgcgcatggcgctgaatggctgaggaccttcccagtctccccatagtgcgtgcctttccctgtgtgaactgtgtatctagcctacagttgccctaggctttcctgtctgaggacctatgccatcttaggtatcttggcatgatgtccgccgaaagcatgtacgcatgtccgcatgctgtccgtgccctcatggtagtcatccgcatcaaccagatgttgtcctgtgctggggctgacaggctccacaggcatgcgaggcgcctttgggccccctgccg

SEQ ID NO: 549182 - DNA, 154 bp, Homo sapiens
gcacatgtttcgtacaagttggttaactgccagcagctttgaatcgtgtaactgcttacaaaaaatttcacatggtccaggaataagaggaaacaaatgtatgaaaaacaaattcccagatacttacatttaaaataaaaagcaaactaacaaa

SEQ ID NO: 549183 - DNA, 211 bp, Homo sapiens
cccggaaaccagcttgttttttaaaaaagggggtttttaaaaaaaaaaaagccaaaagggttttttaaaaaaaaccccccccccccctgggtttgtaaaaagtcagctttttttgggttcaattgtttgttttttccaaaaaaaagtggaaaattttgtttcaaggggggggttaactgggcctttccaataaaaatgtgggaagcttcca

SEQ ID NO: 549184 - DNA, 184 bp, Homo sapiens
actagtccacggttggctcacgcctgtatccccaagattcgggaggctgaggaggatcactggaggccaggagctcaagatcagcccgggcaacagagcgagaccccatctgtacaaaaaatacaaaaattggccaagcatggcgacgcacgcccgccgtcccagccactctggaggctgaggc

SEQ ID NO: 549185 - DNA, 325 bp, Homo sapiens
acctcccagccttggcctcctctctccagcctttccactgcattttccttttctgcaacaccctgcagcattccaggaagaaggtataagaggggaggattcctcctgatgccagtatttgatctgtgctatgcttggcaactgtgtgagtccaagctttgtttttaagggcagagcctgagtagaacatgaggcaattctgcaacaggcacagtgacgatgatggaccattgtgtctgtggcagtgatttcagtggagcccttcttttgctattgcatggggcagtttgccattgctggaaaaacaaggggttgcacacagggt

SEQ ID NO: 549186 - DNA, 338 bp, Homo sapiens
taggcatcagctcactatatacctcaaatcaccgatattcagtcagtgcactacgtaatcccacatagtgaccacttgagtgcacgagtgcagatgacgtaacctgcctcagaccactgaggcgactttgctctgagtcaccacactatactgcttaataccaagttgtttcctctgcttttccataatttccaatttctctacacagggcctgaagcacaattatttttaatcttttgagacagtctctctgtcgcccaggttggagtgcagtgatgtgatctcagctcacgtgcaacctcttcccaggttcaagcaattctcctgcctcagactcc

SEQ ID NO: 549187 - DNA, 258 bp, Homo sapiens
cagctcccagtagctgggacacaggcgcagcaccatgcctgctaatttttgtatttttagcacagatggggttcacgtgttggcagaatgtcttgatctcttgacctcaggtgatctgcacgtctcggtctcgcaagtgctgggattacaggcttgagcaactgtgcccagccttgtgttcatttttgtaagccttgaattcttaacctgggagcaaaaaggacaatttatgtggctagcatgagaagtgggtcgacg

SEQ ID NO: 549188 - DNA, 158 bp, Homo sapiens
ggtggctgtgggactgctgttgacttcctactaccggcgacggtagtggacgctgtcacgtgaccgtgtgttgtagacgttgacgcgcgggctgcctgggggttcttgttgtacggtgctactttgaccaccttctacaccacatacggggggactcc

SEQ ID NO: 549189 - DNA, 544 bp, Homo sapiens
  misc_feature (80)..(80): n is a, c, g, or t
attcgcggccgcgtcgacctcacatattaaaaagataagagtttaggtaaaaaaaaactcacagttcctcccattctttntttcgctgttgaatctttagttgtgccctttcagcttttaatataagttttctcgttttctcaatttgattttccacgatgatttcacttagggttttaggccgaaatttcttccctttttctattattgattcttcttgtatggtaacgctcccacctacatagagaatcaacatttttcagcctttttgagacataaaaacaaaactctcagatattgtttttaacctgctgcattagaaaaaacacagagaatatattgaatttgtaaatcaaagtatttattgagcactagttgtggtggctcttgcctgtaatcccagcactttgggaggctgaagcgggtggatcacttgaggtcaagagtttgagaccagcctgggcaacgtggtgaaaccccatttttactgtcgacgcggccccgaatttagtagtagtagtagtccaaccggggaatccggaac

SEQ ID NO: 549190 - DNA, 825 bp, Homo sapiens
agcggaaggggaggctgatactgcagaaccggaggacgaagcgaaccggagtgcgaacactagctgggtgggaaccatggttgggcatcaccacccatcgaggacgcgtgatagcgccaaaattgcaggttgctgaacgcaagcaggactgaaatgactggccgaggacgagagtcagcagacgtgcacgccgcgctccagacagaagacagttcgagggagagtacaggcaggcgtgcgcagcggaagcaacggactgaaggaggctgtagggtggagcttccttggaagcgcgcatggatgtgcacccgtggtgttggaaggaacgagctggaaccgatggcgtctaggcagcggccttgggcatgatgtgctgtgaaaagctgtggtgatgaagctgcggaaaggtggctgatgtagagtgtaggagagtgtatggaagacggttcatgtgaaagacttggggattacaagaatgatgaaggaggctagatggaagttgaggaattccggatcaaagaatcttagcggattgcagcaagaggtagatgtggagagtatgaagtaggtggcctcgataacggttgggtggatcagtggatacggagaatctgtagggaaagagctgcaagtagggatagggtagcgtgaaggcttagtggcgagcacgctcgtgaacgtgttgctggtaggcgtaggtagggcatggaagcctggcagaggagaatgtagagcaaaccaaaagcgtgcttagtacttcttgcagggttccaggccggaggaaagtgactctcagagaaagaaagatggaatatgaaggaataa

SEQ ID NO: 549191 - DNA, 165 bp, Homo sapiens
tgtagctggtacaattcacacaggaaagggttaaaagggtggtgagggggtaggggtaaaaaatttcaccggggagagtttaaaagcgagggatggggggaagggggtgacaattgtaacccagggaggtgaaaggggaaggggtaaggaataggacagagcaag

SEQ ID NO: 549192 - DNA, 752 bp, Homo sapiens
cgatgaagcaggtgatgtatgtgatgctgatgttaccgtgagggcactggagtcgtggcgttagtacggaaagaagatatgacctagtgcaggtacgagagaactggataacaagtaagtttagatctcactgcagggagagagactgactacgtccgggttagagttggatgggcgtcagaagtccagagttatggaagatctcggatctcgagagcgcgtaggtcgtagcgagaagccgtagcagaagcaactaagtgaggagtcgcagattactccccaaggagaagcagaggatctccacgctattctccccgatcatagcagatctcgctctcgtacataagatgcattggtgatcgactttattgtagaacccatgtcgtatacagtttttcctttattcagctaacaagtcttttcatgtatgtcaattcaagactgtttggtctcagaatgggctacaagtgtcgaattgcattcgttgtaatatccccttgctcctaacatctacattcccgttcgtgtcttgtgataaattgtattttaagttgatgtcatagaccaggagtagtttacaacactttaaggttaagctctcaataactctttcaagaacttgctgactactttgtggttaacaatggtacttatcttgcccctgggcacaggggggagcaaggttggggaatggttgcccgcggtgcacaggcagggcccatcctaaacctggggggaccgatcactataat

SEQ ID NO: 549193 - DNA, 658 bp, Homo sapiens
taaccagaagtttatttcatttttctaaataagtgaaattgtattgcatcttctaaattattctatttaaacacttgatgtctcgctgtctccgtctctgtgtgtttgcatgtcattgtacatgttcttaggaaaagtgtgggagcttgacgcaatatataccttatgtttctatgtgcatatagtttaccaaataataccataagtttacttagcatattagaatccatgcacattatttttattttatcttcaccgcaaccctgtgggatagaccaaaatcatgcttttcagcctcctttttccacttgaggaaaggagtcttaaaaaagggaccagtctcatgttcccattcgtcttacaactaattggtcaagccagaaagccagaactatgtcctgggtcactaactcctagtcactgtgtgttagtatttgagatgcctgttggcttgatttagtcatttattttttagtgttttataatccttgcatacttttacattttaaatggttaaccaggcaaattggtttaaaatcagtgcataaaaatactgtgcctatcatgatgggtttcatgaagtgataacttttcatcatggagatcctcagctgtcacaggatgaggggccctgggtacgctcacgtgagggtggtct

SEQ ID NO: 549194 - DNA, 141 bp, Homo sapiens
atttatataattagcagttgttaatgcaattaaatattaatccatgataggttaccttaactgtagtacaaagttatttgcaagcttttattttcaagaatgtaattttcaatcctggctctgccaccacctagttaaatg

SEQ ID NO: 549195 - DNA, 459 bp, Homo sapiens
tttctttcaggacatttcatgttcatttttttgtgactgttcttggtttctgagccgggaggaaacttttcctggtttaaaaaaaataactttctgcaaaattatcaggggcgttcgtcccccaaacttaaccagaaaaccgtttgccaggccgcttaaagggttcaaaaacaaccaataaacaccgttgtggtgctacaaaaaagtgtgcctgagtgcctaagcctttccccttcaaggaggtcctctcaaaagaaaaaacctggctgactgctaaccagggtgatggtcataaaacaggggcgcccctgttctttctggggaaaacaaggcaggactggttaataaatttttctatactaattctccgccgacggcttgggtaatcccccctcttccggggtttcttttttttccgttttggagatgcaaaatggtgccccacccaaaatggagcca

SEQ ID NO: 549196 - DNA, 178 bp, Homo sapiens
gtcggaccgtatttacggcttcaactcatggtggttgttattattggaatgccaagaatgtatatatatgtgtctagatatcttgcctgtcacatagtaggtgctcaataaaaagcagtgctcattattagtagctacaactactttgatcaggagaccgctcttaccagaccgctct

SEQ ID NO: 549197 - DNA, 488 bp, Homo sapiens
  misc_feature (375)..(375): n is a, c, g, or t
  misc_feature (390)..(390): n is a, c, g, or t
  misc_feature (420)..(420): n is a, c, g, or t
  misc_feature (448)..(448): n is a, c, g, or t
  misc_feature (456)..(456): n is a, c, g, or t
cagcaaacatgctaccctgctggataactgaaaacaaacccgtcacatgggttcaggaggcggttgcaggggagcaacttctcagcacttccttttgccgggtcgctgagtaaactgtggtctgaagccaaaccgcctacaccctgaactgttagagctctgtagattacgttcttaaggaaaagagtaacccccttacggcgtttagattttcgtacacccaagcagtagcatagatgctgtacaacgtaacactgagtcagtctgaactgtggacacggggactgctgggtgtgtgtactagactttcttggctatcattgaaccgcttttatagaaatgttcgagtttgatcttggctcagcagatgcattnactgctcctgtagtncacacagcatttgtttatttaacgagcttntcgggtgctttctgcaaccgcaactctnttaaggtnttgaaatgttaattccaaagtggggcaccagg

SEQ ID NO: 549198 - DNA, 373 bp, Homo sapiens
cctctagagaataaaaaattagccgggtgtggtggagggcacctgtagtcccagctactcgggaggctagaggcagagaattgcttgaacctgggaggcgaaggttgcagtgagctgagatgcgccactgcactccagcctgggcgacagaacgagactccatctcaaaaaaaaaaaaaaaaaagaaaaaaaaaaagagcaacagtgatatatttggcagaagcaatgtctggagtattaggagagaggaagcaagaatctaacgctgtgatgggaggggtttgagaccagtattgttgtctcatcctggctggtaataaggacatcgggcttttggggcgcttttggagaaatggggcgcgggtgtcccgga

SEQ ID NO: 549199 - DNA, 118 bp, Homo sapiens
gacagcacgtcaagaacctccattactacttatgatggccacctatgatgtcttgccagaagccgctggagcagcagctgctttgtctggagcagcttgacccccctgtcgtcgtctt

SEQ ID NO: 549200 - DNA, 200 bp, Homo sapiens
  misc_feature (157)..(157): n is a, c, g, or t
cggatcatccactattctctaatatcaagtagcacgttgctgtagatcgcgaacactaacgtacctcattgttcccactgctgacacatgtgatcatctctgcgcgtgctgctctgttgagaagatgacagggctcacgaagtctcacctgtctttngtttctttacaggtttttctggagcaacttgcttgttccgctg

SEQ ID NO: 549201 - DNA, 261 bp, Homo sapiens
tgagattttcagggcctccggtgagcacgggactgacgaggagatcgaatctctgatgaaagacggcgacaagaacaacgacggccgcattgacttcgacgagttcctgaagatgatggagggcgtgcagtaaggagtggacagtcgcctctaccaagatcgcgtgaccctagacagcagtatactcagtacctgacgcagcttccaccagggaggcgcggccccttgtgggtctttgtctggaaggaataaaagcaaatg

SEQ ID NO: 549202 - DNA, 181 bp, Homo sapiens
tgactcttgaggatcccagagtcgactggggcttggggggtcggtgcgctggggaaggtcccggtcggccggtgaaggtgaccgcgtgagccggtcgaggtcgcggcggatgtggtgccaggtctggccggtgctggtctcgatgatcctgatcaggagcagggcgagccagcacagcacg

SEQ ID NO: 549203 - DNA, 156 bp, Homo sapiens
gtctgatatgaaaatataacattaactaatttataaaaatattctatgtaatgcaaaatacttgaagctgcagtagttggtttaaacaaaaacaaaaaaaaaatgagagaaaacctatcagaaggactaaaagtacgcctggcttcaggggttggg

SEQ ID NO: 549204 - DNA, 83 bp, Homo sapiens
ggtcgaccgggcggtgtgtacaaagggtcagggcagctgtcaattcagacgcaagcttatgacccgcacttactgggaattcc

SEQ ID NO: 549205 - DNA, 870 bp, Homo sapiens
  misc_feature (96)..(96): n is a, c, g, or t
caaggacaatggtccgcccccgtgcggcgaagtcccctttcaggcccagttgtcgtgcggacgccacttctagggcctggctctccgggtgaagancgcgacacaacgcggtgggcctggagggagaacaacaaagaaaatgcgctttggcggggatgcgccttttccccagaccaaacgttttcccggagtagccccatgtattatgacgcaccacgcttggggctaattatctaggaggaacttgtgctcaatattaagggagtggttaagcagaagagacttgtcctctgttgctccttatacggggaaaaaaaaagcaccctcgtgtaaggtataatttctcccctacttctccaaagcccgtaaggtcaacaagatatttccgtaaaacttggcgataacgggccgagcccacccccggggtcaggtattgtaacattgaggggctcttctcctctttgttaactaactagagatgacatgcttgcctgacgactgtggtgggccaccccacgggaacactctgaattttaatatacacagagggggtgtccccgagggatttggtagtagttgaagcacccacagtggttgcctttaacaaaaggcgtatatgactttcttctgcaacaggtatatgaagaacgttggagacccacggtgtggactaatccatgcgggcaacaatgccagcaatgcgccaatttgcacccccagttttataagaagactgcacaccccatatgggtaatatcgacaaaccaacagccccactagagttcacggggccattataggttacctaggagaaaagtattcccctggcccacctattttcccaagggctaaaaattttgtaaaataaca

SEQ ID NO: 549206 - DNA, 750 bp, Homo sapiens
gggacccgggggacgcctaaccccgcgagacaccgtgcacatattcttcctcataattgggagaagactcactggccgaatggtcggcgagtagatgacttgcaattatgaagaatttggcaattgtcagccatcttctctgacagctaaacccagtatgccaccacagtaagacattgaggatccgtggtgaaaccccaataactaggtcagccgaggatccccagagaggctcaggaagagaagaagatgatagagttactgggaaatgatgactctgtacaagaacgtgagttactatgctggacagacagaaaagctcccccttctggacatttgaatacttaccaagacattctttgatgtggacacctaccaggtctttgacaggaagttaaaggatctcttgttgccaaatacccgggagaaaactttgtgaggttatatatccgcagcaactccagagtctctatggccccttatggactatgtgccacggtggtcttgtgccatagcaattcagtgggaactctttccaagcttctagatccatctgggagagacgacgtaccattattgtgcccgattcctgaccagtgtccgatagcagctaccatcatctatgcctatgcctggctggttcctctttgcactctggggttcgtcatgtggagaagccggccgttttgaacatcgtctcctattctttctggcattgtgtgggccacgggtttcctcttcattatttcc

SEQ ID NO: 549207 - DNA, 288 bp, Homo sapiens
cccccccccccggggggtttttttttgggggtttgggtttttaaaaaagggggggtttttccccccccaaccccttgggggggggttgggggggggggggcttttttcccctaggggaaaaaaaaaaggggggccccccttttttgggggacccgggggggccaaaccccttttggggccccctcttttttttgttttttttgggggggggggcccccccctttttgggggggggggcccggggttttcccccttttttttccccccggggggggttttttgggggga

SEQ ID NO: 549208 - DNA, 433 bp, Homo sapiens
ccggtgtatcctttgtctgataatcatgaatgtgctgccatgaacctgtctccccaggacaagtcagtagtttcagacacagacttactctcctctcacaaatctaactctaatattctgacaatctatatgacattctggtaaaaagctacaattacaattacttaatttaagctggttgtctaaggttcaaattaattgccctctgcctatctaacgtacattttgttttttgttttgttttgtttttttgagatggagtcttgttctgtcgcccaggctggagtgcagtggtgcgattgtcgctcactgcagactctacctcctggtttcaagcaattctcctgcctcaggctcccaagtagctgggattacaggtgcgtgccaccacgcctggctaattcttttgtatttctattagagacaaagggaa

SEQ ID NO: 549209 - DNA, 452 bp, Homo sapiens
gaggatctcagcagccatgtcgaagccccatagtgaatgccgggactgccttcagttcagacccagcagcgtgcagcgcagccatggcatgactagcattccgtggacgcacaatgtgctcgccttggtacatttgcattcacctactccagtcacagctccgggtaacacgtggcgatcgatcttgtacctattggtcccagacttcccgaatcagttggcagacgtcgaaccggacgactgacttaacgctctctgggcaatgacatgcttggcctcggctcttgtacacctcttacttccgtcgatgtggcacaccgtccagtgaacgcttaccacaagctgccccgcggaagggaaccccaagttccagcacgggacactcgctcgccgggccaacaaaggcgcccaaccgcgccacagagggccctatctcgcccgatcacgtggaa

SEQ ID NO: 549210 - DNA, 230 bp, Homo sapiens
ggtcagactaggcgtgacgtctggcccggcctttccgttttcctctcctctcctgccgagagtggaacacacgtgtcctgggagctgcatcttgtgtagggtccagctgcttttggggactgcaggaatcatctcccctgggccctggactcggactggggcctccccacctccctctcggctgtgcttaacggagccccaatccaggcctcctgtggctgttgggttcc

SEQ ID NO: 549211 - DNA, 1085 bp, Homo sapiens
ggagcgcgcgggcacaagggtgccgctgaccgaggcgtgcaaagacctccagaattggaggcatgatgaagactctgctgctgtattgtggggctgctgctgacctgggagagtgggcaggtcctggcgggaccagacgtgtctcagcacaatgaagctccaaggacacatgtcccaatccagggcaagtcaaggtcacgtctatatccaggcacacattccaaacatgctcgtcgcaccgatgaggttgcacaagctcaggcaatcaacagcacctcgtccatcaggcacacacaagacaaacacagcacagacaggccgcaccagccacgcactgcattcccagtcgaagagcccgttcaggccagagcacaaggccctacaaggcacaggcaacaggcacacacggccagagcaattgcccccagttagagcactcgcaaggaaccccaagtgagccaacatcaacagcaaggccaccgcaccaagcttaggaaacaaggtgtaaccgaccttaccacacagatgcggccagctttagattagggccacgtagtctgggtcacgtaacgcacgccaacttaggaacctaggatggacccccccttacattgggtgtcggcacacagcgaataggtcggcttaaaatggcgagcccacatatgggaaccgcattgtgtaaacataacacaaaacaatgatcaaccaccactttgagacacaaagaattgggatacaaaaggcagtataagcaatataaaagaaaggaacctacaatagtgagaccgtggggattccgattgtaccccaaggatgaacaaacgcacctatggaggtgcgagattccaagtaagaaaggcatacccgatctgaggagcacatacatgggcggtcaccacccggggagaccaacaaggaacgtatttactggcgcacgcccgacaaccgcttctagcaccccgattagggcatgactacaccagatagacaaccagcagcactatccatgggcccccagcccagtatgaccgatataaaacccattgacccacttggcgtgcacatgtgcgacaacaaattgggag

SEQ ID NO: 549212 - DNA, 796 bp, Homo sapiens
agttcaagaaaagcctggaccacatatgacaccccccacccttccctacaaaaaatttaaaaattaggtgtgcatagtggcacatgcctgtattcctagctactcaggaggctgaagcaggaagatcacctgagcccaggagttcgaggttacagagagctatgatcgtgtctgtgcattctagccggggcaagagaaggtcagtcttgtgcgataccgataacaatctgctgtattttaaaatgccctctcaaactaagaggaaaagaatgggtcatgcacgtgccactgtctcacgagcccgttttcaggaggaaacaaaaaaggaaacaaaaagagacaatagaagcaagatcctaccagaagtgacctccaaatagtgatcattcttaagtacagagtatagatcatgcagctcacataaaactgctggcattccagcaatcaatgcagtgcccaaagtaatccacagattaaggcggttcaatctgcgacccttttcactaggaagaacatgctagagtcattacaagcgccaccatcttagagcagcagcaacctgcaaatagcttgcactcattaattctcttatggttaactggtcaccattgactctgaggacatctcgtattgtaattctgaattaagacttccatacatttcagaattgaaagtagtggtaatggggataaaacttttcatacagggatgatggtttaaataggaaatattttactccgaaaaattgatgggcattaaaaataaatatgaggctaatctcattaatgtgaaagac

SEQ ID NO: 549213 - DNA, 278 bp, Homo sapiens
ctcttcgtttccgtggatctctatgagtctaatggtctcacctccatgattggctatgaactatcgtcacacaacatcatagctgggtaaatcccgtactgtttagtagagatggggtttcgccatgttggccaggctagtcacaaaactcctgacctcgggtaatccacccaccttggcctcccaaagtgctgggattacaggcgtgaaccactatgcccggcctcttatactaattttgatcacttatatcactcaggaaattcatctctttcttt

SEQ ID NO: 549214 - DNA, 397 bp, Homo sapiens
  misc_feature (1)..(1): n is a, c, g, or t
  misc_feature (7)..(7): n is a, c, g, or t
  misc_feature (32)..(32): n is a, c, g, or t
  misc_feature (99)..(99): n is a, c, g, or t
  misc_feature (106)..(106): n is a, c, g, or t
  misc_feature (109)..(109): n is a, c, g, or t
  misc_feature (120)..(120): n is a, c, g, or t
  misc_feature (124)..(124): n is a, c, g, or t
  misc_feature (126)..(127): n is a, c, g, or t
  misc_feature (141)..(141): n is a, c, g, or t
  misc_feature (148)..(148): n is a, c, g, or t
  misc_feature (150)..(150): n is a, c, g, or t
  misc_feature (156)..(156): n is a, c, g, or t
  misc_feature (170)..(170): n is a, c, g, or t
  misc_feature (172)..(172): n is a, c, g, or t
  misc_feature (178)..(178): n is a, c, g, or t
  misc_feature (186)..(186): n is a, c, g, or t
  misc_feature (195)..(195): n is a, c, g, or t
  misc_feature (208)..(208): n is a, c, g, or t
  misc_feature (226)..(226): n is a, c, g, or t
  misc_feature (230)..(230): n is a, c, g, or t
  misc_feature (249)..(249): n is a, c, g, or t
  misc_feature (255)..(255): n is a, c, g, or t
  misc_feature (258)..(258): n is a, c, g, or t
  misc_feature (268)..(268): n is a, c, g, or t
  misc_feature (283)..(283): n is a, c, g, or t
  misc_feature (321)..(321): n is a, c, g, or t
  misc_feature (378)..(378): n is a, c, g, or t
ngggaangcaaaaactttattgaaaggaaagngcaaagaaatttgtggaaaccttaaaaggggaaacttagacacccccccccaagcgcaggaccaagngcagagnggnctctttctggntgtngnngtaagaaagggggngtccatntnccagcngtttcccagcaaanancaaccnctgcggancaggggggntgccttccttatnttggatctttgccttganattntcgagggggtaactgggcnccaccncgngggggagggnctaaccagtaagggncttcacgaagatttgcatcccacccctgagagggagcnccaggggcaggggggactctttctggatgtggtggtaagaaagggggcgtccatctnccagctgtttcccagcaaa

SEQ ID NO: 549215 - DNA, 113 bp, Homo sapiens
gaaagaacacaagcagaggacaagggatatagtaacactatgtcagagctgaatacatagccactgtggttggcatagtctcagacaactcctacaaggaatcagctcaggga

SEQ ID NO: 549216 - DNA, 933 bp, Homo sapiens
cggagcccaggccgggagcaggcgccgccagccacagtgcgagccatgggtgaacgatgttggactgccagtctcgcctgccctgcagtggccgccaccgccgcctgcgccggccctcgtggggctgccgccacctcctgccctcgccgcacgggcttcacagctgccgccgctgggagtgcagacctgcgtgcgccgtgcaccagtactgagtcgaagttctggaacggacccccggggctgcaacctgccagcgcctcatgggtgccgccagagggatggggcctgcgggctgcctgtcccaacccgggcacattcgaggagtgccaccggaagtgcaatggcagctgtattcccattacagattggaggggtgtcaacgctcacaagtcaaccaaaggggttgagttaacccattatttcaggtcaaggcacacaagtagccagtcatgcacaatcaggggagtccaagctaccaagtatcgggggatcaccatatgttggggaacacaaggcacgcttgagttcccacagaaggcgttcccttgtactggttgaggtgaccataggaacaaacaggttggcaaggtcctcaaaactgctcacggtcatttcaacccaagcctggagcccccagggatctcaaggatacccaaggatgggccaatccaagacaccaggaagatcgaaagtttgtagaacttgtgcagggatgcaccggcagacgtactcggagggctcttgaacattcgacaagggaagccaggtcgagcacttgggaggaaaccccaatgaccgtaccatcagatgggggtacacagggaaattccgttcgtaaggcccaacgttagccttcgcattgaagcattcagacggccctattggcacgtgggccccgtgagcatgggaggacggctaggtacttagcgaccg

SEQ ID NO: 549217 - DNA, 107 bp, Homo sapiens
  misc_feature (1)..(1): n is a, c, g, or t
nggtgtgcctaagagatcaccggggctgacgagaaggtacatctgcgtgataagaagtctcaaaatgatgcttcagtaagttggtagctggtcgctgccaggataaa

SEQ ID NO: 549218 - DNA, 151 bp, Homo sapiens
acaccaaaaaactggccggggcacaattgggtcttaaaaacccctttcctccagttttttgccaggatttaccatatccagccggccccccatggttttccccctatgctttcccaccaaaattcgtggttttgggggggttcattttttg

SEQ ID NO: 549219 - DNA, 601 bp, Homo sapiens
atagctgctcgctcaggtgactttacgataagggttgttgtcttgtgattccgtggcaaatatctacgccttccccaaaatggtctgaacaaatccgtctctttaacaattcttcactgtctctgtcatgaattgattaatccctgtgtatctggattggaaggagtcaatatagcatgcagcatcattttctttaatgcccatctgctctcccaaagatttagctcccattccataaatgatcccatagcaaatctgggaaaggcacaaaggcatgtcgcatgctaaattgaaaatggcattcctctgtctacagctctctcctccatctgtgcctggcatctaggattcaggctgaaacccttcttatattttcctctgcccatgggaagtaggccttcgcctacagcttgagaaggtgggctttctcctactagtgtgggccatttggatttcaaaatctcttgggacattctgaatatttggttctgtaaaggttatacggcctcagcgatgtcatctgaactggtgaaagaaaaacctgtgggcagctagttgataggcctgggctcaaatgcaccagcgtgggtggctaatatgt

SEQ ID NO: 549220 - DNA, 365 bp, Homo sapiens
  misc_feature (41)..(41): n is a, c, g, or t
  misc_feature (116)..(116): n is a, c, g, or t
  misc_feature (123)..(123): n is a, c, g, or t
  misc_feature (140)..(140): n is a, c, g, or t
  misc_feature (188)..(188): n is a, c, g, or t
aaaaaaaaaaaaaaaaaaaaagagagccaatcacacattanaatccagaaattatccaggatgtaaaggataccaattttattagataggaaccccctattcttaactagaatttntgagctngggcaaagtccacaccnggaatctgggtctccaaaaagggagaattattatgagcttagaccacngtgagcttttacagtgcactttaaaaaaagttttttttaaacaaagtcatttctaagtatctaaaccacactcttccacatttgatcttagccaaaggcccagaagcgataaaaccacactcttccttaaaaactcaagagtaagagtaacctcagttacaataactattttagtaa

SEQ ID NO: 549221 - DNA, 563 bp, Homo sapiens
  misc_feature (25)..(25): n is a, c, g, or t
  misc_feature (69)..(69): n is a, c, g, or t
  misc_feature (84)..(84): n is a, c, g, or t
  misc_feature (112)..(112): n is a, c, g, or t
  misc_feature (129)..(129): n is a, c, g, or t
  misc_feature (135)..(135): n is a, c, g, or t
  misc_feature (148)..(148): n is a, c, g, or t
  misc_feature (166)..(166): n is a, c, g, or t
  misc_feature (186)..(186): n is a, c, g, or t
  misc_feature (198)..(198): n is a, c, g, or t
  misc_feature (212)..(212): n is a, c, g, or t
  misc_feature (280)..(280): n is a, c, g, or t
  misc_feature (311)..(311): n is a, c, g, or t
  misc_feature (320)..(320): n is a, c, g, or t
  misc_feature (327)..(327): n is a, c, g, or t
  misc_feature (329)..(329): n is a, c, g, or t
  misc_feature (331)..(331): n is a, c, g, or t
  misc_feature (343)..(343): n is a, c, g, or t
  misc_feature (459)..(459): n is a, c, g, or t
  misc_feature (524)..(524): n is a, c, g, or t
tgggcggtgtttgctctggtttgcnggggttccagctcgggttccaacctcattcttgtgccataaaantcagcatggctcttngatgttctagaataccctgtgttttganatccacagctggtttcntttttnaccattatgaaanaccagtactccttttccntcaaatgtgttttttaagcnataataaattcngatcccctgttttntgccacatacatctttgggaagccacataaacagtgggatcagatcagtaggaatatacccagttaanagaaatacacaaagtactgtagtttttttancccctactncttgggncngncatctttccccnactagcctacccctgtgggctggtggcggggtttggggcggctttaccccagcttatttcccattgtgtcttcctgggggtggtggccaagggtatttccttccttctctggggtntccctgtctccctccccggtcctctcgtctgggtgggtccccacccggcccggctggcctctggncctggtttggctgggggctgccttctgggtttgcagcat

SEQ ID NO: 549222 - DNA, 284 bp, Homo sapiens
ctgaccaatcaggccgaggccacagctctgattgcgtgttgaagccggttgcgatctatccgggcgctgcgcgtgaaaacggcgcgctcgtgatgtgcgaagtcatgatgcctgatggcaagaccccgcatgtgtcgaacaagcgcgccaccgtcctcgacgacgagggcgcctggttcggcttcgagcaggaatacttcttctacaaggacggtcgtccgctcggcttcccgaccgacggttatccggcgccgcaaggcccgtactacaccggcgtcggctac

SEQ ID NO: 549223 - DNA, 480 bp, Homo sapiens
caatgtgttgaagccaggagtggtagctagataccctgcattttcaaagccctaccatctataacaatctttctcttccttaacaccccaattcatcatcaaaactacatttcccaaggactgtatatccttaaaaaggtatgtaggcacagacatctagggggtaatagcaaatacctttgggtaaggtaagttagcgattagtaggctatggaaaagctataccctaactaagggctatagaggacagtccatcttcatctttcatatatagctagctaacaatctaatactatcagatgcagaaccttcagtgtattagggcctttgagctgctagacacacaatagtgcatcagagctgcctctcagtgctccggtcacctaaccacagaagatagactgaaggaatgcaaatgacgagtaaataccccaggaagaaaataaaactgggaacaaatgctagccccaaattgagcag

SEQ ID NO: 549224 - DNA, 1263 bp, Homo sapiens
tcattgtgaaaagctgggaatctcaaacatagtcaacttaactaaaaagaagctaatacaggttgagcattcctaatccaaaaatccagaatccaaattgctccaaaatctgaaactttctgaatgctgacctgatactacaagtagaaaattccacatacaagtacttaacacaaactttgtttcatgcacaaactactaaaaatattgtataaaattaccttcaggcagtgtgtgtagttatatatgaaacatgaatttcatgtttagacttgggtccatgcccaagatacctcattaggtatctgtaaatatccgaaatccaaaaaaaagtctgaaatctgaaacacttctggtcccaagcatttcagtaagtgatgctcaacctgcgtaatggtctgcgggccagtgctcattttctgcctatgttgtacatactttaaattgtgtaaattaaaagtcaaagcaaagagtctatttttaaagaaacttacaataatctaaacatatacttcttatgattatgaatcatcctgcaaagctgaatgaagaattttaccaaaaatacaatgaattaatcatatatttgagagtcacagtgataggttcgactatattttgactgttgtgtagtggcaccgtttaggtagtattgtttctgagcatggtgctttttatacttgaaatatatttttgctttattttttattgatataattatatttgcactaatggctttctgaagaaaatattatagatgacattttttgtatatatatttattaagcttgggaacctggtcgcccagtgttttctctggacaaatgtgaaactggataaagtatggataaagtcttgagttcctcagggtaactgtgttgatgtctcccgtcctcttcagtaaggcttgaatatgattttactcatcattgattctgcatagtgtacccagcaagacttagaaggacactgaacctgtcagagattttaagaggcacattttagtcactttgaatatggtagtggtgggcgcggtgactgaagcctgtaatctcagcacttcgggaggccaaggcaagcagatcacgagatcaggagtttgaggttacagtgagctgatcgcaccactgcactgcagcctggatgacagagtgagactttcttgggaaaaaaaaaaatgacagtgaagcagactttaagaatccgagatgtcattgcagaattatgggaataaaaattcagctgcaaaggtgtagaaattga

SEQ ID NO: 549225 - DNA, 700 bp, Homo sapiens
ctgaaatctgtggagcataccgcagctctctacatggcccatcgtcctacacatctcatagttcccctgaaaagatctgttgaaataggggcccggtatataccctatagacagcccgctctatcgcctctagagctatagaaaaaagaaccgaaacacacaagacgacaagaataatgattctggcagcgagtgtccaatgaggagaattttgaaacctgtgtccgtgagaggtactaggcgtgcccggggtgttgctttgcactgggttttctctggtttgctcaagatctctcgggttcttccgagaggtgctttcttgtccacagtacataaaacagacacgggagccaacactgcaaatgtgtctatagtacttgtgcgctcaggcgtgtgtggcgtggcgctcttcgtgggtgactagttgctcgagctctctggaatcacgcatcttccaagattttaccgcgcgccccgtgtgggggttgcccttgagggacttaccttctccttcacacatacccctgtggcaccccactgacaacttctgcacatactgggggccctgcttattctcccaggacaggctccttaaagcagaggagactgtcctggagccccttctcaaactcctaagattgtttcatgtcccacgttctttgctgaatcgcccaataaaggacctaagtttcaaaaaaaa

SEQ ID NO: 549226 - DNA, 117 bp, Homo sapiens
ccccggaatacacagcgcggagtacaccagcgcgaatacaccagcgcagctgagccttcacccaccgtaatgagcacgtccctgggcagcaacctttctgaactcgaccgcctgctg

SEQ ID NO: 549227 - DNA, 92 bp, Homo sapiens
  misc_feature (82)..(82): n is a, c, g, or t
  misc_feature (84)..(84): n is a, c, g, or t
attggagttggaaatcccagcatgacaaatatctgtaatatacagtacatgcaggccacatcctactgccttcctaactacncnctaaggaa

SEQ ID NO: 549228 - DNA, 426 bp, Homo sapiens
  misc_feature (59)..(59): n is a, c, g, or t
  misc_feature (89)..(89): n is a, c, g, or t
  misc_feature (188)..(188): n is a, c, g, or t
  misc_feature (223)..(223): n is a, c, g, or t
actgcgtccagcctgggtggcagagtgagactccgtctcaaaagaaaaaaaaaaaagantattgcccagtcgcgttggctcacgtctgnaatcccagcactttgggaagctgaggtgggaggttcacttgagctcaggagtttgaaaccagcatgggcaacataatgagaccctcatctctacaaaantataaaatttagctgagcatggtggtgtgcaactntagtcctagctacttgggaggctgaggtgggaggttcgcttgagcccaagaggttgaggatgcagtgagccatgattgccccactgcactccagcctgggtgacagagtgagaccctgttctcaaaacacacacatacacgcggcgtgcgcacacacacacacacaagagaacattttaacatgttacaggtatttgtaagtg

SEQ ID NO: 549229 - DNA, 641 bp, Homo sapiens
cattgctcctggtctgggatccagtgacagtctgctggaaggctgctgaatactggacatggggacttgccagggcacaagggtgagcggtgaggcgggactgatagtgtgtctacactcaagcccaggtgcttcctgccactctgcccagtgagactgccttgatccacagctgcggtaggagacgaggaccgtgactgtctccttccagtctggggtaccaggcagggcccagacaggagaccaggacccaggttcagcaggggaaatggttggaaatgttgaaaaggcatctgggggtggggaggccaaccagagaggagcagcagcaggaaactgtcacccctccggccccctaccagtggggttgctcccagggctggagaaacagagggagggagcccagaacctggactggccaagggagctggagccatgaagcaaatgggcttacagacagagctgccacccagatctggagatcaggaggaatacccagacttctcttcttactctgccctcatcttccttcacttttattgcgtctaatcagaagccacatggcatagagggtttggaccaagttgatttgccctccaagatactgagcagaacacaaggccaggaacagatgtgaccat

SEQ ID NO: 549230 - DNA, 132 bp, Homo sapiens
tctgctacggtgcccggtctctactacttcacctacctacgccagctctcgagggaacctgtgcgttaacctcatgcgtggccggagcgtgcgacagaaagtggtcaccttctgtgactttttcctacgata

SEQ ID NO: 549231 - DNA, 416 bp, Homo sapiens
cccagagcaacagaatagcatcctgcaccctgcctcggcttaaaccctcagatgctccgtctgagttgtgcagctttggacctgagagctctctcggcatggcaggcttcctgggaaggagggctagcgatagcatgtgccttgaattctgttgtccaaatgtctccttgcctgacaaacactctaaacttctttgctattgttactacatgttaatcaaggggaaacaacgtttacaggtaggaaaaacttacaacttataaaaactactggacttaccaccctcagcccaattgaactttgtcttgccaaatcagaaacatccctggagtcccttctaatcattgaattgctcacacaaataatgtttgatattaacaatgtcttttttctatttcagtttttacttgaaatgt

SEQ ID NO: 549232 - DNA, 187 bp, Homo sapiens
agtgaccatactaatggactaccttttaagctcaccaaaattttttacatcacatacgacgaaaagcacagggtgaagaagcaaaatcagtaaagaactctcttcccccaggatcaagaccgtgtttttcaccacctaaaaaaagactaccatggcctcgtttccctccttcggctgcgtagtgagc

SEQ ID NO: 549233 - DNA, 321 bp, Homo sapiens
ctgtgctgctgtgattctagaggatcccaatgtcggtcccattcatgtgtgcacccaggcaggaagtgaggacctggcaggtccctaggatcagcgctcaaagtcatccagtgactggcatggcccttctaacttgatggccccttggcgcagcaagaacctcagtcttacctagccagcagctgtcacccttagaggggatttccgtgggtcccaaaggaatgggccagatgtctgggagaacaggactgttggaggataccacgcacgtgatgtcctaatgttggccccctttccctcaactctaagaactccacatgt

SEQ ID NO: 549234 - DNA, 223 bp, Homo sapiens
ttacctgtcatactatgaagtcttttgtctgcatagtaggtcaagtctccagggctctgacaccatgccgggaggaatgtccccatagatgaagggcagttgtttgccagcttccaagtcactgcttggctatggggcttcttcatcatcatctttcttttcttctttggatgtaaaacattttcatagcttttctattcattcatcctaagcatatgttgaa

SEQ ID NO: 549235 - DNA, 278 bp, Homo sapiens
  misc_feature (181)..(181): n is a, c, g, or t
  misc_feature (258)..(259): n is a, c, g, or t
tcggaccagcgcactagctcatgcggaggaaaacaacaacaacaacaaaaacagaccccaaggtatcaggagaaggatagtctgaagtcatctgggcacccagccatttgggaagaacggatgcttctccacgggcctggttccccgtggtcaccccacccccaagatatctggtgacagngctcctccagttaaccagtgacggctaggtggcggccgaatttcaagggtggtgacccgtcaagtgaggctaggtgnngggggatccttctagaagt

SEQ ID NO: 549236 - DNA, 264 bp, Homo sapiens
cgcgttgacgaggcactgaataagtaaaggcttcctacaggtctgagaaggcaccacagtcatttcttcccttctgtcagacatattcctcagtttagccttcccacctctatacagtctgatagcagaccagcctttattagtcaaatcagccaattagtttttcaggctcttagtattcagtgaaacctttatatcccttacggtcctccgtcttcaagaaaagtagaacggactaaaggtcttttaaaaacacacctcgtt

SEQ ID NO: 549237 - DNA, 692 bp, Homo sapiens
  misc_feature (8)..(8): n is a, c, g, or t
  misc_feature (133)..(133): n is a, c, g, or t
  misc_feature (202)..(202): n is a, c, g, or t
  misc_feature (207)..(207): n is a, c, g, or t
  misc_feature (209)..(209): n is a, c, g, or t
  misc_feature (217)..(217): n is a, c, g, or t
  misc_feature (221)..(221): n is a, c, g, or t
  misc_feature (226)..(226): n is a, c, g, or t
  misc_feature (229)..(229): n is a, c, g, or t
  misc_feature (235)..(235): n is a, c, g, or t
  misc_feature (267)..(267): n is a, c, g, or t
  misc_feature (293)..(293): n is a, c, g, or t
  misc_feature (392)..(392): n is a, c, g, or t
  misc_feature (401)..(401): n is a, c, g, or t
  misc_feature (414)..(414): n is a, c, g, or t
  misc_feature (417)..(417): n is a, c, g, or t
  misc_feature (425)..(425): n is a, c, g, or t
  misc_feature (432)..(432): n is a, c, g, or t
  misc_feature (434)..(434): n is a, c, g, or t
  misc_feature (436)..(436): n is a, c, g, or t
  misc_feature (450)..(450): n is a, c, g, or t
  misc_feature (454)..(454): n is a, c, g, or t
  misc_feature (459)..(459): n is a, c, g, or t
  misc_feature (468)..(468): n is a, c, g, or t
  misc_feature (482)..(482): n is a, c, g, or t
  misc_feature (632)..(632): n is a, c, g, or t
  misc_feature (658)..(658): n is a, c, g, or t
agcaaggnggaggagagctccgccaggtggggatgtggggcagcctcacagggccccgtgctgggcctggtatcgggacagcacggcgcggtagtgggacagctcctggcgcacggccacaactttttttttnatcagggcgttctccttctccaggaaggccgcccgcaccgatatctggttctcctttagccgccgggcnttacngnaccgcttngctncctcnttnttcttnttccgccggctccagtttttctcatccttctnctcctccggcacctggatttttcttnccttcttcatgattggctggggcttaagttcctcttctgagaagcgatgtcttcgagggtgaaaggtctcgtggccaggaatgcttgatagggcaagancagcggggncgggggcaaaggncancaacaccnccacggngncnggggccacagggcngggnggggnccgagaggncaggccggcgcggnggccgcgggcgggcccgagggcagcccgggcgggggcgggccaggagaggagcggggggaagccgagccgcacgaacccggcccgggggagggggcgggcggccgcgcgggcgacggcgccggcgacgggccaacgggggggcggcgggnggggcgggagcggggcgccagcaggnaggcggcagggggacggcgccacaacgccgaacg

SEQ ID NO: 549238 - DNA, 160 bp, Homo sapiens
cgggtgacctgaggatccatttttactctctctacacgtttttctagtgtcaagagctgtctcttggctcacacttaatatacaaggggattagagggttctgtggggaaatttaaagttgaactaagattctatcttggacaacccagctatcaccagg

SEQ ID NO: 549239 - DNA, 237 bp, Homo sapiens
agataccacccgagaatgggcagaagcatcgagcctgccttatggcttccgatagctgaacactgtgtcatacaatgagcgggatgcgatgataggtaactagacaggacaccaccacgatccacaccctcacaccatgctgagactgacgggggttcccattgaggagataatggtgatattcagactctctgaattcctaggccatttggacactgtggtgaccgcatatcgatg

SEQ ID NO: 549240 - DNA, 203 bp, Homo sapiens
gagaaatcggacgaagctatagccaaatacactacaccgcagacacaacttggagcttcactgagaaaggcagatacgagttatgtcttggcttaaaagacgtgatcacactcggtatgagggtaaatcccaggacccaccagccaaggcatctgcctcttcctatgtcgaggtcgtcaagagaacacaacagctactgaggc

SEQ ID NO: 549241 - DNA, 727 bp, Homo sapiens
ttccccctcttcctggatcatccatatctccaccgtgtctcattcatcacttgctgtctgctagagcccttcctctcagcccccatgttgggagatggggagtggattcttgctgctggtatgagactccctgtgtgacctagatggtgctggcaaatgtttaaaatcaccacgtgtacgatgtgcatgccaagtcatgctctgccaacttgctagtgtggagtctggtgacatgagtggtgtgttgtgtcctgcatcccctcatgtagtgaaaacagaagcttatgtatgctatgcttgctccctcacacacaccacccaccatgtgttcaatgaccctttttatcttggtgatgacaagcaatcaaattgtggccttgctatattatccaaactgttattacccatgtcctggcccgttgccccagtcttgtggccgtgcccatgtccccatgtccatgtgaaccttggcttggattgcttccctgtccctaggaactcttccagcctctactaacttggatctccatgccccccagtgtcttattggccagattgatcggcgaactgcgcccaggcacgaccgtgtgacctgtgcacctacttattacttgctacccctgacaggcggattttcgacttgtataaccatattcaacgtgtgtgttgtgctgtgtgtgtagtgtgctgttgtctgttgtgcgcccactgcctcacaccgcgcccg

SEQ ID NO: 549242 - DNA, 896 bp, Homo sapiens
  misc_feature (12)..(12): n is a, c, g, or t
  misc_feature (64)..(64): n is a, c, g, or t
  misc_feature (83)..(84): n is a, c, g, or t
  misc_feature (96)..(96): n is a, c, g, or t
  misc_feature (107)..(109): n is a, c, g, or t
  misc_feature (112)..(112): n is a, c, g, or t
  misc_feature (123)..(123): n is a, c, g, or t
  misc_feature (125)..(128): n is a, c, g, or t
  misc_feature (137)..(138): n is a, c, g, or t
  misc_feature (142)..(142): n is a, c, g, or t
  misc_feature (149)..(149): n is a, c, g, or t
  misc_feature (163)..(163): n is a, c, g, or t
  misc_feature (165)..(165): n is a, c, g, or t
  misc_feature (172)..(173): n is a, c, g, or t
  misc_feature (188)..(188): n is a, c, g, or t
  misc_feature (197)..(197): n is a, c, g, or t
  misc_feature (200)..(201): n is a, c, g, or t
  misc_feature (204)..(204): n is a, c, g, or t
  misc_feature (215)..(215): n is a, c, g, or t
  misc_feature (219)..(220): n is a, c, g, or t
  misc_feature (227)..(227): n is a, c, g, or t
  misc_feature (243)..(243): n is a, c, g, or t
  misc_feature (255)..(255): n is a, c, g, or t
  misc_feature (260)..(260): n is a, c, g, or t
  misc_feature (266)..(266): n is a, c, g, or t
  misc_feature (279)..(279): n is a, c, g, or t
  misc_feature (285)..(285): n is a, c, g, or t
  misc_feature (289)..(289): n is a, c, g, or t
  misc_feature (291)..(291): n is a, c, g, or t
  misc_feature (318)..(318): n is a, c, g, or t
  misc_feature (321)..(321): n is a, c, g, or t
  misc_feature (333)..(333): n is a, c, g, or t
  misc_feature (342)..(342): n is a, c, g, or t
  misc_feature (344)..(344): n is a, c, g, or t
  misc_feature (352)..(352): n is a, c, g, or t
  misc_feature (360)..(361): n is a, c, g, or t
  misc_feature (387)..(388): n is a, c, g, or t
  misc_feature (416)..(416): n is a, c, g, or t
  misc_feature (418)..(418): n is a, c, g, or t
  misc_feature (472)..(472): n is a, c, g, or t
  misc_feature (490)..(490): n is a, c, g, or t
  misc_feature (558)..(558): n is a, c, g, or t
  misc_feature (886)..(886): n is a, c, g, or t
tttacaaatggngaaatcgaggcacaaaagattaaacatctgaccaaagtctgcacagccactnatatgcgggagcgagaatnngaacccaggggngcctccacttnnnaanacgagaccaancnnnncacgggggnngggnccgagantaacaccctcacancngggaagnncaggccaaaaccggngggcggggnggnngangcccgcacggngggnnggcggcncggaaacagggggggnagacaaaggggngggcnaagggngggaccagaagangggggngggngngggggggggccagaagaacccgcaagngcnggaacaaagggnggggggggngnggggaagngggggggnngcagcgcggcgcccagcagccagggnngcgcgccagggcaaagggggggggcggngnggccagcggaccaagaaaccccgccagcgccgccagggcaagggcagcagcggnccgacaacgaggcggccngccacggcggcggcttccttgcctcactctatgtcatggttacccttaccaactggttcaggtaaganggagtgggccttagatactctcctgaagagctagctattttaaggaaagagcaattcaaggccattccagacacacatgggtctgccattatatttggtgaggaggtagaacaggtctaaaagctaaggcccttcatattctctaaccagagcctttggttacacagctatgagggagcagaactggaaaagaccttcatcaagggtagctgggccaccttctgggtcaaggttgcctcatgctgggcctgcgtactcctctatctggggctgttactggcacactctgttggcccccacccagaaacccagccccttatcttgaggngcgcgccacc

SEQ ID NO: 549243 - DNA, 243 bp, Homo sapiens
cattcctgttgtttcagcccagcctcttgcttgggacccagaataagcatggatccaccgtggacacaccgaggctcagaaacagctctcctgctcccagcctgaccccagcaggatggaatgaccagaccccctccttcctggcctccatcagtggataaagatgccacaggcatggacacaggagcccctcgattcccaagtgtactctgatagtacaaagtgctgacaatttcaaggagg

SEQ ID NO: 549244 - DNA, 228 bp, Homo sapiens
gcccacgcccggttttgcaaaggttttcactcatgtttgctctagttatttgggggggtgtggggggtggtgatttaccatcatgggtttttttgccatttttttgataactcgggttgccaagtacccaatcacaggcttatgagccaaccggaatccttttttgtgaggggcctgtggaaagctgctgtcctttcattgtttttcaaaagagttgtttgcccttta

SEQ ID NO: 549245 - DNA, 606 bp, Homo sapiens
  misc_feature (542)..(542): n is a, c, g, or t
gaagacgtgcatttctgtgtttgaggcacatgtgcacgtgtggggcgtgaatgagaggcgtgcatgtgtgctcgtgtgtgtgtgcgaattgtgctcttttgtgtggggaaggggcagaagagacattttttttctcttccaaacccatggggcagtagttatgctgtaaaagcaaacaccctcctgctgttatgaaacggcttaactcacgagattaactggccgcgaaaatatgtacagacctttctcattcacaataagtttacattgagaagctaccaccaatacccattcctgcagacattcctctgttcagagggatctgtcatgagagagaaattgcatctgatatgggatcagaacatgcactctgctactttctagtgatgagaggccttgaaaatgataccttttatttcttcattacattatccttgattcttctaaaaatgagctgaggctgcttgcaataaacattgcttactttttctgtgcctcagcttctttacactcttaagaaggctaatgacatatctaccttntctttgcggttcacctgggggaacaaagttgaaatattatttgggatgaaagcccctgttgtcc

SEQ ID NO: 549246 - DNA, 1319 bp, Homo sapiens
  misc_feature (855)..(855): n is a, c, g, or t
  misc_feature (960)..(960): n is a, c, g, or t
  misc_feature (1030)..(1030): n is a, c, g, or t
tgtatctcaaataaccagaggtgctacgtcatagtcatctttcatgttcttatagacgccctcctacacgtgcggtgtgaccctcacattgacgtcctttttatttggggcaatcctctctccgttgcacatgtttttaagctccccccggtgtctctccccccccacaacgaacgaaaacgaccccccgggggggggccccccctccccacacacctcgtttccgggggacctacaaccaattggcccccacaaccggattgggacacagagtctccgcgggaccgggacacacaattctcgtggggggccaggggagaccccccgacaccagacagttatacggggacacaatccggcacacccccggcaatttgaagattctccccttccgcccccttttaagagagaagaaggaaaagggcgccccccccccctgttttccccggaggccgggccaggtcctcgggaggagcccaggcttttcctcggtggaccccccccccggggacacacccgttatgccccccatatgccttgcgcgcttccacggagctgctctatcccacgcgatgtatccccctatacccccccagattcccaaaccccgcagagctttcaaggccccgccccccctttacacgcgttttgtcctcacatatcgccacccacagaatttccaggaatatatattcacacaccaatagccctttccatagatatttaatatattttcttcgggaaaatgtgagaagtggctcccacatattggggtttccctccacaataatgtgtcacatgagactcccccacgagagatccccacattataaaatatatgtgtatatacttcgntggtacctaagagagagaagagatacccctctcccgccgcgagagagagagcggtgggacacataaatatatattttgttttcccaaaaagctaattctctgggngcccctcggcccaccctcggctccctctgtgcaccacggctccacgcttgtagaactctctcgtgacccntctctccacacatgagaagaaaggtgggctcgttattttataggagacttctcgtggagaaccacaatcaccacgtgcctgtttttaaatgccctgaggaaaatgcacctcttaaggggtaaacttcataccctctaacagtgaaaggaggtgggggagagcgagaagaaaccactttcttataagtatgaacgcacttttataaaataaaggcaggattgcttttaatgtttaactaccaaactgtacagcctattttagtgtggactattaaaacccctgccctgta

SEQ ID NO: 549247 - DNA, 230 bp, Homo sapiens
  misc_feature (18)..(18): n is a, c, g, or t
  misc_feature (26)..(26): n is a, c, g, or t
  misc_feature (64)..(64): n is a, c, g, or t
  misc_feature (83)..(83): n is a, c, g, or t
  misc_feature (145)..(145): n is a, c, g, or t
  misc_feature (183)..(183): n is a, c, g, or t
  misc_feature (209)..(209): n is a, c, g, or t
  misc_feature (222)..(222): n is a, c, g, or t
tcggtaccctcatcttgngcctgtgntatccaggaacacatttattatcattatcaagtattgngtactgtacagaatggtgngcgctgtgctatccaggaacacatttattatcattatcaagtattgtgactgtacagaatgngagtgcgctgtgctatccaggaacacatttattatcantatcaagtattgcgactgtacagaanggcgtgccgctgngctatcca

SEQ ID NO: 549248 - DNA, 578 bp, Homo sapiens
gcgacagtgcagtggaataatctcagctaactgcaacctctgcctcctgggttcagagcgattctcctgcctcagtctcccgaatagctggatttacaagcatgagccaccatgcctggtaatttttgtatttttagtagagacaggggtttcaccactgttggccaggctggtcttgaacttgctgatctcaagtgatctgcccacctcagcctcccaaaatgctaggattacaggcatgagccaccacacctggcccacagctcactgttgatacaggaactagaaagaaattatttaggccgatactgagggttcttaccaagtagctcctaaatcatttcttttctaacaaagagcagcctgaaaaattgagctgcagacataaataagcaagctggacgttgtataggtcaatgccaacagctgtgccaataggaaaaggctaactgggggtgaggccatgttcaacatggaggctcattttcccttatcttggtcacccatgtgtacggtacagacacaggcaccatgggtccggccagatagaggaccactgccttataaagatcgggtgg

SEQ ID NO: 549249 - DNA, 404 bp, Homo sapiens
ctggttactgaacagtaactcatgacatatgttcaaatttggcatacgttgatattaagtcatatgatagctttgcaaagagaaatattcctttgaaacaagggagtagggctgtgtcattattcttaccttctaatactcatgccaagaggtgagaaacagttaaggtcatataaggtgctagggaaagggtttccccatggagctttctgtgaggcgcagtattatagagccagcagcaaagtagaggaaaaagccagactgcgtcacacaagatttctcatccttttcaggagagggtcactgtgtagatttgaatcttttttctttgagtctgctttgaactttatcaggcttgtcctaagactgacaattgtcgtcttaaatcagcgattagggttagt

SEQ ID NO: 549250 - DNA, 1316 bp, Homo sapiens
  misc_feature (1219)..(1219): n is a, c, g, or t
ggctatcctgattatgtttgttcttttcaatcaatcgaattcttaccgcacacgattggtggggctgactcacgacaaaatagtagtaactagccaacgagatgtagcatctggagctgtcttgatcggttcttatacccacactttcctctccttatttccttgtcaagactggaggcagcaacactagctcaccctctatttctctaactctttattgtttttttgtattactaaccacatacttacgtatcttttttcacgcacaaacctaatacaccacactgcgttcagctaatatttcctctacatgtcacgctcttcacgcgggaagatcttttctttccgcccttttatgggttcccctcccccacgcacaccccggggactgtgacaccacagatctctcctctccactccacattgtttgatctacatctccacgtgtgtctctgcacccacttctctgcgcgcaaccctctatctttcatcacagtcgtcccttcgcactcatcttgcggcacaccacagaagtagaggtcgtcctcactcctctactcacgatagaaagaacgtctctcatgattttccctatggtttctccccccacacaattttctacacgacgactgatttttgtctgctgtctgtgatactcctctatactagtctggactatccccatgcatctgcagttcaggagaagactccacacactatttagcaccgcacacacgacacgacctcgatttttttcgaccccatcctctgtgtggatctacaactctctctttctctctgtgtgtatcaacacaaggcacacacatatctctctctcgtgcgtcgtagcgtatgtctcacatcatctcgtctctcgtctctctctggtgtctcacaactgacgggcttctcttcatacattcttatgcttcgcatcacacaccctgcccagccacacatctctcaccctctctatctctacattacttttcacaccaccccacacactaatgtggcggcgctcccaccttccacacccacacacaatgttccacacacccgtgacacacaccctgctcctccactcgctcgcgacaacacacacaccactctctctgtctctcatcgatgcacacacctctctctcacgccacctctctctctccttgttctctctctctctctcccccaccctctctctctctctctcccgcggttnttctctctctctctctgaccaccacaatcatccacaaaaatcaacaacaatataaacaatttagttaatacacacataaataaaataaaaaataagg

SEQ ID NO: 549251 - DNA, 823 bp, Homo sapiens
ggacccttggggtctgacgcgacgggggggggagatgaacgccctccagccttcgagtcgtctggctcttcgagggcgagaagaagatcaccattaacaggcacaccaggtaccaatggcctgtttattcaccatcaacaaagaagaccacacagtggaaacatcattaattcacaattcttaaaagaccgcgcagtgctatgggctgctacaaagtcccccacccttgtggagcacaagatcatcatccggagtgcagaccacgcggaattaaagcccccaggaagcttttaccaagggcaatcaggcgactcatcagtgagctgtccctgtgaggagcgcttccggtgggccataaaagacaagcaggaaggaatggagtaggggccagagggggctctgcttcggctctgtgaaaccccgtttcctacgttgtgcttgacccctccgttcaagttaccacaccgaggaagagcggccgtccacagccatgccccgcttggtgcaaccttacaccgtgacaacggaggtgtcctgtacctggattgaggggttcaaatattcccaattaaaaggtaattggggagggagacctagaagaaaagacacagctcaaaaaaaacacgtgtgttgtggccggcggcgccactaggaacttttcaaacacacttcttgtgggcgggggcccactagggacagtagcccggcaaaggtgccagggacaccgtgcagcgcacggtgtgccttcccaaaaaagcgggggacggggttggacaaccacaggggctgagccgggcaccagcgcaagggtaaaccgccgggg

SEQ ID NO: 549252 - DNA, 165 bp, Homo sapiens
atgctacgtgctctttagctactccttttcctacaagcatctcaatgcacgagcggctccgcaaataccattgaagaggacacactcctgcacccctcccacccctacgaccttgtgcccgatgccccctccgtgacggaacacaactctcacatcgttgcttga

SEQ ID NO: 549253 - DNA, 663 bp, Homo sapiens
  misc_feature (449)..(449): n is a, c, g, or t
ctcatctggatgtatggcaccatcttcttcatgctgggctccaacttctggtatcactcttataccaagggcaagcggctgccccgtgcacttcagcaaaatggagctccaggtattgcaaggtcaggcaactgaaagcatggctaataggcgcccactaatgctcagatggacttaggaggtcgtcagtgcctctcaactaaaacctgggaacaaagcttatgttggtccaggacatgacaggggacatggcctcccccttcccacaaggtggtctacagggacacacagggtttggttcctctaaccaatttcccccgggccagctcccagggattgttggcctccattaggttgtcttggcaatccaagaagctgggggctaaaagggcttggtacagttatttcccccttcctggcttaaaacttgggagaggagcactcagggncttggcccacaaagggtctcgtggcctttttcctcacacagaagaggtcagcaataatgtcactgtggacccagtctcactcctccacccacacactgaagcagtagcttctgggccaaaggtcagggctgggcgggggcctgggaatacagctgtggaggctgcttactcaacttgtgtcttaattaaaagtgaccagaggacacacacaacc

SEQ ID NO: 549254 - DNA, 638 bp, Homo sapiens
  misc_feature (23)..(23): n is a, c, g, or t
  misc_feature (71)..(71): n is a, c, g, or t
  misc_feature (77)..(77): n is a, c, g, or t
  misc_feature (80)..(80): n is a, c, g, or t
  misc_feature (93)..(93): n is a, c, g, or t
  misc_feature (137)..(137): n is a, c, g, or t
  misc_feature (202)..(202): n is a, c, g, or t
  misc_feature (207)..(207): n is a, c, g, or t
  misc_feature (222)..(222): n is a, c, g, or t
  misc_feature (270)..(271): n is a, c, g, or t
  misc_feature (273)..(273): n is a, c, g, or t
  misc_feature (275)..(275): n is a, c, g, or t
  misc_feature (277)..(277): n is a, c, g, or t
  misc_feature (280)..(280): n is a, c, g, or t
  misc_feature (282)..(283): n is a, c, g, or t
  misc_feature (297)..(298): n is a, c, g, or t
  misc_feature (358)..(358): n is a, c, g, or t
  misc_feature (430)..(431): n is a, c, g, or t
  misc_feature (433)..(433): n is a, c, g, or t
  misc_feature (437)..(437): n is a, c, g, or t
  misc_feature (452)..(452): n is a, c, g, or t
  misc_feature (489)..(489): n is a, c, g, or t
  misc_feature (498)..(498): n is a, c, g, or t
  misc_feature (527)..(527): n is a, c, g, or t
  misc_feature (532)..(533): n is a, c, g, or t
  misc_feature (537)..(537): n is a, c, g, or t
  misc_feature (539)..(539): n is a, c, g, or t
  misc_feature (543)..(545): n is a, c, g, or t
  misc_feature (548)..(549): n is a, c, g, or t
  misc_feature (552)..(552): n is a, c, g, or t
  misc_feature (554)..(556): n is a, c, g, or t
  misc_feature (560)..(561): n is a, c, g, or t
  misc_feature (620)..(620): n is a, c, g, or t
ttgggaaagggtaggggtctggnggggagaaggaggggccacagccagacaaaatggcaacacacgatcanaggcantantgacatcacaganatagcagagggtgcaggataggggctccagaccaggcctccaancaccccaggacgggtggaggtgtggagggagggagggcgcaggggaagggggaagaggggtgggncagtnccacatacccgtttnttctttcctcctattaacctagctgtttcatcacgggagtggggaagnntntntntgntnnggtgcttctctctnnatcccacgcctcaccctacaagccatatcactcgactcttctcaggccacttccgtcccnagtcgtagccagagccattctcccccacccctaacaaaacccatctggaagctcctatccaagtcccctctnnantgcncaaacccagccattntaaaacattttcttcactgcaccatggggaggggctnccctttctnaaaccaccatggaagccccattctaagcnacacnntgtntngaannntgnnttngnnnattnntgaatcccacttcttgccttgctcaagatctgtcccctttagaatcaagctcagtctcncaaatgttccaagccaca

SEQ ID NO: 549255 - DNA, 194 bp, Homo sapiens
aggcctggggccgggcttctccaggttcttcccagggggtcccggtagcccgggcccccgcccagccccgggtttccccgggccctccgcggggggccgggcctccctccccctgcagccttcccagggttcttgccctactgggcccctgggttttggggcaagccctgacccaataaaggttttgaccccca

SEQ ID NO: 549256 - DNA, 144 bp, Homo sapiens
aaatatatcttagtatcatagctaattctccaatacgttggaatatgtaggaaggatcaagtagtatctgcctcgacctaaataatttaaacataatttcagtgataattctctagaatataacaccgaggtactatcatatat

SEQ ID NO: 549257 - DNA, 1567 bp, Homo sapiens
  misc_feature (943)..(943): n is a, c, g, or t
  misc_feature (1196)..(1196): n is a, c, g, or t
  misc_feature (1225)..(1225): n is a, c, g, or t
  misc_feature (1288)..(1288): n is a, c, g, or t
aagactggcggtcttgttggtcagtggttcgtcctctggctttggtggtgcgtcgtgtcgtttggccacgtggcgttgtttgttgtatgatcgacttactccccgcttttttgtttggtttcggtaggctggtcggtgttcctacaacttgtggggtgctgggtgtcccggtagataattgttcgctgttctatttagtgtgggtgttgtttttcttcccctccccccgagttattcctcggccgcggatcggtgtggatcggggtgggccgcaccggtggggcggccgtgggtgggggcgttttagttatgttgttgtttgttttatatgctcggtggtttcgcccccccgcctctcttgtttgttgtagtgttgaaggagccccggggcggctaacaccacaactggttatagattatctcctccttatgatcgcccctccttataattggttaaatattcccacatgaactaccaccccacattatcccgcaatttttttaaaagggtgtgaaccaccaccaccttatataatggagaacttcttctcgcacaataggggaagttcccccaccccacaagcagggtttggtgtaccaccacaacaaatatagcgccccgggcgcgtgtgtggataaaatctcgcccgcgcgcccccaccggtgataacatttatattataccccgcgttctctcttatagagggttatcggctcgagagcgctctcttgtgggtgtggctgcgagataatgttctcgcgcacaaccgagaggctgcgcccacacaccacctcggggcgccgccccgcctgttgttcgcacccccacacaagcccccgcgtcgagaaagagagaggggcgcggcgcgccccgcgcgttatcatcatatcatcatatagagaaaaagatatattcttacacacacggcgcgcgctctcgtgngacaccacacgcagcacgttttctccacacacccgcagacacacacagggcgcgcgctgtgtgtgctgcgcagagagagagatattctctccccacactttatatctctcctcacgcccacacatatataggccgttctcgcgcacacaacacacagagtattattactcacagcgcgtatatagtgtttcacaccgcgcacagtctctgagatgatgagacggccgagaatgctcacagagagagagggcgnctcactacttatatagagagtgatatatnctctctcacactctacacagcgctctcacagagagagagagagagagagagagagagagaaangagagagagagacgcacacattaatatgtttctccctgagaggttctcacgccccttggagatacacaggaagagattatattgaaagataagagatccctgaccacctataaggagaaatgctgaaagcttttggaacttcgccacgtctgtcccaccccctcacggtcccctcacccccacccacttgggatgaatttccaaaccccttcggggacccgtttgaattttttctgtagatgctgtattattttccaataaatttgggaccaccacccc

SEQ ID NO: 549258 - DNA, 1468 bp, Homo sapiens
  misc_feature (545)..(545): n is a, c, g, or t
  misc_feature (927)..(927): n is a, c, g, or t
  misc_feature (1283)..(1283): n is a, c, g, or t
tcccaaattcatcttttattattataaaaggggcttttttagcaaaagacacacagataaaagagtcactatggctcaggacacaaggcagggaggttgccaggcctgtggtgcccctttctgtgggggaaaaggaggcctcgggacaaagtgtgggaaaaggtgcgtgggaagggctgagcggtaggggccacaaaagttcccgggtgggcaacacgtgtgtcggcggggtctcagtgggtgtgggacctcatgtggggaccctcgcgtgcataactctcttggtgtgggtggggggggtgtctcctataggtgcgtgccaccgtgggagggccactctccttgggtcccgtgggaggggacccacccaaggggacaccaggaaccaggagaaggcccaaggatgtggtttaggtgcaacctctcggggatgtgaaggcgcccaggggagaaaccgctggggtgcctctgtgcaagtgtggccgggatatatggctccaagacgcctgtagaggcccagaggcgcgcttctcccgtgtgtacancgtgtgcggggagcggttctcccgctctctgtgcgtctctctgtgtcacaggatgcgactctcctctctgtggacctatatggggcgccccgagggcatgtggcatgtgatatcacctctctctcttctcagggcgcgctctcccatgtgggcggcctcttttgcttgcccaggcaaatacgggtttgagcggccgagactcttcctttgtgccccattcttccgctcatattagacggtgaaccagcatgtgctcccgggtgataggggttgccctctgtggggaagcccccctgtgggggccccgcccggggggtgtggcctcacacaatccggcccgtggaccagcatgatatcccccccatgtggtgaagaggggcgntgtcccccacataaggttccgcttcaaacaccaggcggggtcccttgaaaaaagaggaagaccagcccggggactctcgtggtgccactttgaaagcaccactgaatagcgtcgacacgggggaaccgcccctttccctgtggaggacaaaccagggggcggccgacgattaatagaagggctccacgcgccgcgtgggcgcaatggggataagcccacggggcactccccacagggttttttccacaggcccccgggagcactgggggtttttgtccgcgcgaattcccccccccccaaggggggattggtgtctcccaccaccgtgggctgagttccaccgttgtccggggggnaaaatcctccccccactgttggggggccccccttaaaagagcccttttgtgttagtcacgccccctttctcaaacacgttgtagtttcgtgtgttggttgcggtatgcacgagggaccgcttcatgtgttgcgcaggaagccgctcacatggtcgtgatcgtgatcccacccgcgtccgtgtgta

SEQ ID NO: 549259 - DNA, 237 bp, Homo sapiens
gatgcttatactgtggtgttaccgtgaccaggtgttattctcatgacatttacattcctgtggagaaacaggctataaataagtaaactaaacggtacatgatgaactaaggtcgtttgccagagagtgatggggacgggacaagccaccaaagtattggatgaccaggaaaggctgtttgaggaggtaatatctgagtgaagagctggatggtagttggttgtataaagatttggg

SEQ ID NO: 549260 - DNA, 109 bp, Homo sapiens
cagcatcatggcaggcattggttcatctcaagggcagcaagggcccacgcagggcagccttctaagcaatgcttggcaacctttcccatcaacttcaatcttcagtcag

SEQ ID NO: 549261 - DNA, 165 bp, Homo sapiens
tttaggcacaattatttctggaatctcactcttgtaatcacagtaatttataaaaacaagagtgagattccagaaaaaattgtgccctatagacaatctggtttaggccagagtgcggtggcaccacagctgacaatcccagacaccttgagaagtccagaggca

SEQ ID NO: 549262 - DNA, 355 bp, Homo sapiens
tctgggttcttgcagaacagcaccactaccatggtgtaccaacaggtgggaactgcatatacacagacagcactgaagtggctgggtctttgcttgaacttggctgtccagtcaccaccagtgttcaagcacaaaaccagcaagaacagcagatccaggttcagcagccgcagcaggttcaggtccaggtgcaggtacagcagtcctccgcaacaggtctcggctcagctttacccaaaaatcaacgttcaccagcctactgagcaacccatccaggtccaggtgcagatccaaggccaggcaccacagtcagcagccccctccattcagaccccgtctctgcaaggaacccacg

SEQ ID NO: 549263 - DNA, 173 bp, Homo sapiens
gtcaaaggacccacaccaccatgtcaggtgtggcccacagagcttttgaaaatgatgttgatgccttgtgtaatctccggggtttcttcaactacctgccccttaggaggtaaggacccggctcccgtccgtgggtccagatcccagtgaccctcttggttcctgaggtttaa

SEQ ID NO: 549264 - DNA, 416 bp, Homo sapiens
cggcgggtgtcgctgccgctggtgatgccggcactggtctcgggtacggttctggccttcgcgcgttcgctcggtgaattcggtgccaccttgaccttcgcgggatcccggcagggggtcacgcgcacactgcccctggagatctatctgcagcgcgaatccgatgcgcaatcggccgtggcgctctcgctgctgctggtggcggtggcggcggttgtgctggccgttgtgggagcccgggcctggcgccgcgatgggtggcggcgatgagtgagttgcgattcgaggcagggcattccggtcggggtgtacacgccgcattcaccgttgcgcccggagagaccttggcgatcgtcggccccaatggggccggtaagtccacattgctcgggctcattgccggactactgaaaccc

SEQ ID NO: 549265 - DNA, 1015 bp, Homo sapiens
ggagtcatcaggaacctggagcaatgagatttcttttgactttggccccaacggggagtttgcattacctgtacagccaggtgctacgagctcacctactctaacgaatacgtcataccgctctcttgccccattcaatgcttgtctcgcgagaaacccaaatctcgagcggtgctctcccaccagccttggcacctggggctcatggattgcgccccgacctactgacgacatgttctagtagccaatgataagtgatggagccataggcacgggctgctggcgagggccccaacacgctccaccaaccagtgacgcctcctgtgcgggtaacagagacctatgagtagtaccaagtctccacatgtagaccctagttcgactgtcgagtgaccttcatgggagcttgattgatcgtccgagccgtcctgctccggagtccactcgcctgaagcacccaccgaagacgatccatgactcgacgctctatgcttggattggcgcgcaccagggtagggcagggcgatgcgtggacgtcgtcggtcgagtgctgtcccatgccaagggcgccggccggcgcgtgccctgacctgcgcgacttggacccgctatggcgcactctctcagtgctagtgtccccagtgtgccgctgcttattcctcgttctcgcgtccagtcgaccgtgcgagtcctccctcttgcggctcctatgctggccgtgcctcccgatcccacactcgcacctgacttgcgagcttctgccctcccgccgctcgccccccatcgtctcggtctccgcctttccgagtgacctgggcttgaccggtgtgccccccgctgcctggctatttttactccagaaggcggaccacaatgatgcccgaacataaccgccaagaccccgaccgtccaaagcaccgcgcgcccctggcctcccaacgggctaaggatacccgcttaccccccgccggcaaatccaggctcacccacgacaacacccaccacccacacccaa

SEQ ID NO: 549266 - DNA, 585 bp, Homo sapiens
ttagaggatccccttgcaggctctctacctactccagtcacccactcaggcggagcaaagtggtgtccaagcccacatgctgttgcaacccagccagatgtgtgcacactggtggtggcactgagatgccagccccctgctgcctcaaccccctccagacttggagcactgacaagctcaggagggaagctgaggggtagctccaccgggaactgcaagcacccctctgcatgaacagcctaggtgccctagacgacatgttgatggcagcaggaggcagacaggctcctgggcagaagggggtgggtcctcagtgaaaccccacctacaagccagggatggcctgaagccgcggggctgggctgccagttccaggtggagtcctcagcccagagtgagaacttatggtgctttttcccccagccggctccgggtcatggacaggggctccggcatgtgcaaagctggtttggcgggggacgacgctccccgagccgtgtttccacggccaggtaatcctctcattataacaacaattctctcaggtctgctctccgcggccggtggttcaaaatatcgccacat

SEQ ID NO: 549267 - DNA, 660 bp, Homo sapiens
gctgagatctagaggatcccagcggggaacagtcacttagattgttctcaccttttcttcctgctcagaggagaggagtagccagtgtgggaggaggattagagggtcaggatggcctgaagattaattcatcaacatggacctaattcatcaaatcctgatggatggggaatgggtcatttggctagctgtatatattcataaagtacccaaaatgtccctggttatggagagtagtttgggctttaaagagctttatgtgctggtagtgataatagatagggaggatgataatgaaaggatacatttctatttaatgatctttggccctggatctgttagggcaaacttcctccatatgcacaacattatgccaagcccagagctatgtttaatcgagtgatataatgtcaaaggaatttctagtttaattggcagagatactcataatattatggataataacagtaggaggccaaaggatttcccagttttttttggctctagtctgcttgtgggagagttgaagtgggttatataatactttgtgaaaaataatttaagaggtagttgtggggttggtgaagaacaaagtgacaaggggtcagttttttggttcctgatcgtgaatagattgtttgttgtcttgttggaaatgaa

SEQ ID NO: 549268 - DNA, 866 bp, Homo sapiens
ggggggactgtcccttgctccaggcgctcactttgcgggcggcactttttccaggtgttaatccagctaatggagaaggatagatgcacgctacttggtttagaaaaaaaaacaggaagaatgagcaaacgagagggccccttccgggtttatggataactaaagctgcaggggaacataaatcggttggttcctactggcgaatctactggcactcgagtgacatggtgagcctgcttctgtcgaattactggaagctataaggagatttggttaaaaattaaacttcaacaaccgatgagggggttgccacatctgtaaacttccggggagagtactggggattcggagtgcttcgattatcttggggggtcatgccgtgcgtatgatgtactggtagctgggtgtttgactggttacttgccagtgttatagaagacaagatggtcatgtgcgtagggaaataaaatcccagggagagtccagcatggagtcctgtatctcatagtgcaggacgtacaaagaacagatctcttattgaaacttttaaatcattatcaggctgtaccaaatctggcacagtggattgtggtcatggacgaatatgcggcgagaagggcacccagatgacattatggaattctgttagggcccacctatcctgtgatcttccaacacacagacagcaaacgcgtggaatcgatccgggtcttctgagggaaccagggttgtgttgattatgaacaccatggacccaaactgtttgctttcaggtgggacaatcggtcactgtggatggctaaaaacagttcaccaggtacattgggttgatgtaccggtgatgcggctctggtggcactaaacta

SEQ ID NO: 549269 - DNA, 886 bp, Homo sapiens
gaatatatccgcattcttcctagctccatctctgggttgtcatcagtaggtattctgggagaagcttaagaaagagaatcattgaggtagaaagtgaacgatgtaagtgattttcctttggtcatagtgcaatctagttaacatgtaaaatctttgtgccatagagaacgtgtataacttgtaagtaagggatagtatagatatatgggatagaatatatggactgaatggtgagaatataaatgcatccgagaagactctggtgtcgatgaaagcagagagaataaggctggggatggtcccagatccaagaggtgccaaaagcctgttggtcatcagttttctctatcgtagggtgatgtgcatacatgcatggatccttagtgcaaatgagggacgagaagtatctcgagtgcagccccacttcctttctgtctagctcctacctttgcccttgcagaggaggtagtagagatccgggaatggtctatcttatgaatgccattatttgtccatggcatctctactgaatacaggtctaagaatagaggagtgatagtctgaaagactgaatgaactaacaaaataagcgtttagaggatcacacctcttcctctataacaaagaccaagagacgttcggaggccagattagggtagtacagctataatgtaatgtaaggtgctacacaggcactactgtacatgtcccccaagtacgtcatagcgttcgacggcatgggtagagtctgacacagggggtgagcgtgagaaaaagcacgaggaagggcgggggccgaggaagcgggcagggcaggagaaagtggggcaaaaaaacaacgcgccacaaaagggcaaaaaaacgaaggcaaagagggcggcgggca

SEQ ID NO: 549270 - DNA, 488 bp, Homo sapiens
agtgaaagagccaggagttactgtctcgcttggtcatccgtgatgatatattctggaggatcacctcttcgatcacgtctattgtgccctcctcgatgggcttgaaccaatgcttctccgtcagggacgtcgctgtagtccagctccttgcagtggctaggagccaaggtggaacatctatctccatacgctcttcctcagaggtcagtcgatccacctcgggagtcgtccttgatgatccacgaggggagctcgtcctcctccatgaggcgcggcttccgcttggggtttgcgggcctcctcgcgcctgcggtccaggtccatgcgcatgaacagatcaaactcctcctcgtgccgggcgatcatctggttgacggtctcgtcgtcgggcacctcgtcttcctcctcatcctgctcctcgtgctccaggatgtgctgcaggaaggcgcgccgatcatggctggaggattctggtcgaacatgcgggg

SEQ ID NO: 549271 - DNA, 186 bp, Homo sapiens
  misc_feature (26)..(26): n is a, c, g, or t
  misc_feature (29)..(29): n is a, c, g, or t
aaggctatctatgggttacaccttanttngaaacacagtggtggtttaaaaacgtgtcgccgatcggatcgtaagcatagtgagtgtctgaagcctatcggtcatcgcgctcagtgccgcgaggtcggatctgttagcgcgcgcggaccttgcgcactgcgcgcgtgcattctcatgcggtcggct

SEQ ID NO: 549272 - DNA, 611 bp, Homo sapiens
ctctacctcctaggctgaagcgattctcctgcctctgcctccccagttgctgggattacaggcacccaccaccacgcctggctaatttttgtatttttagcagagacggggttttaccatgttggccaggttggtcttgaactactgacctaggtgatccacccacctcggccttccaaagtgctgggattacaggcgtgagccactatgcctggccaactcattttagttttaaattttttttttttccagagacaggggtctcactctgttgcccaggctagagtgcaggggtgtgactcagggctcactgcagccttcagcctccggggctcaagtgattctcccacctcagactcctaagtaagtgggactacaggtgtgcgccaccattccgggctaatttttttcctataatttttggtagagacaagatttcaccatgatgcccaggtgggtctcgaactcgggggggctcgaacctctgcttgggcatcccaaacgtggctgggatcacaggcctgagccaccttgcgtagcaagttcactccgcccgcttacgcgcttcaggatctgcggcctctatgctttcacagagccctcacccatgc

SEQ ID NO: 549273 - DNA, 578 bp, Homo sapiens
gtggtgtgatataagtacaaggtgctaggctgaagactgtaacaatctctgaagatacttcataattatgtctaagaggatcacctgggccatccctatgagccttgagacttgaaaaactgcacgcaacattggatctgtgttgagcctctgtgcaactgatctttgcaacctgaaaataattcattctatttgataacgtaatcacaaatccaggatcattagggattgtctatcacagaaaatgacatccgcgcggtgctagagatcttcgtgaaatactcctttgcggagagtaattcactgttatcattttcagggtcatccttctgaaatactatcatgtcaccatccattagttcatcaagggctttatcaagagacacgtcatacttcttactggtctctgttaaattcggtttaacttcctcatagaggataaggctagtatcttgaataaatcctgctctgtcacacataactgggagcaagtcacgtattttacaggatattggtgtgtagatatgcccacagtaattcaagccccgcgtattgggatcatacatcttcaaaaatac

SEQ ID NO: 549274 - DNA, 99 bp, Homo sapiens
aaaatggccgagccgcaaagaagtaccgcctgcgagtaactgcaaagatgctgtccgtgcgcgttgctgcggccgtgcgctcggcccttcctcggcggg

SEQ ID NO: 549275 - DNA, 105 bp, Homo sapiens
ttagctggctcctggagccactatcatcgtcgctgtctaggtgaccactagatggacaacatggagtgggccaggctagaactatctagagctagctactagcta

SEQ ID NO: 549276 - DNA, 168 bp, Homo sapiens
tttggagatggggcctcattaatttcgcccaggtgggtctcaacctcctaaggttcaaaggtatcttctaaccctcagtcccctggagtagctgggaactaacagtggcgtgccaccatggcctttttttttttaaatggaaccgggttctccttatgtgtcccctaa

SEQ ID NO: 549277 - DNA, 452 bp, Homo sapiens
ccccttttataacctcatatctcttgaatgttttgttcattttttaattttttctttatttttgtctaactgtattttggagaaccagtctttgagctctgagagtctttcctcagcttggttaattctgctgttaatacttgatatggtttggctgtgttcccacccaaatctcatcctaaattgtagttcctataatctccatgtatggtgggagtgacctagtgggaagtaattgaatcacagggcagtttcccccatgctattctcatgatagtaagttctcacaagatctgatggttttataaggggcttctccctcatttggttctcattcttctccttcctgtcaccatgtgaagtagggcatttgcttccccttccaccataattgtaggttccctgaggccttgcgaaccctgaggaactgtggtcaattaaacctccttcct

SEQ ID NO: 549278 - DNA, 567 bp, Homo sapiens
attgtatgtacgcagagttttcatcatggataactgtgaggagctaatccctgaatatctgaacttcattagaggggtggtagactcggaggatctccctctaaacatatcccgtgcagatggttgcacacaaaggcaaaattttgaaacgcttatcacggacagaatttgggtcaaaacaagtgcttagaacgctctttactgaatctggcggaccgactaaagagaactaacatagaaattctactgagccagtttctctaaagagacatacaagcttggacatactacgagagactactgccaagaatcgcgaaggaacgctttcagcagctggttacagggtacgtacacagttcttgcctctgggtggatgacgactgggtttactcgtcaagggacgtactggcaaccagcagatggacaaggaggaaacctagataagcaatactcttatttcactagtcaccacggttgaagacccagagggacccagggtaagcataaaactcaagccctttttggtgggaaccggttcctatccgagaaaagcaatggggctataga

SEQ ID NO: 549279 - DNA, 161 bp, Homo sapiens
  misc_feature (87)..(87): n is a, c, g, or t
ggccccagcagttatatgtcattgacagctccactagagtccagtcagtggagacaaaggtcaccaaatggtcagagactcaggcancaaggggtagaggaactccagctcgaggtagcagccttaaggctcagggcaggctggaggaaccgtgtgtgggt

SEQ ID NO: 549280 - DNA, 220 bp, Homo sapiens
agtgatcccgtttacacgactgtagttttgcaccccgatcatgtttgttcgtcacctgttcctatgttgctgacgccttagccctgtgggaacaggaaagcgtggcctggcctcttgcactgctttgtctcctaaataaactactgaaatctcaccgcatttcacacgtgtttacacattttgctcaagtttgttatgtcatactgcctagtccgctgca

SEQ ID NO: 549281 - DNA, 409 bp, Homo sapiens
ccctttctataaagacattagcatccccctaatggcctcattttatttatttatttatttatttatttttaaaatcttcgtaaaatttttttattgatacataacatttgtacatttgtgtggggtacacgtgatgtgttgttacatgtatagaatgtgtatagaatcaagtcaaggtatttagggtactcgtcaccccaagcatttattatttctatatgttgggatcatcaagtcctctcgtctagctatttgaaatatacaatacattgtttttaactatagtcaccctactctgctatcaaacattagaacttatttcttctaactctatatttgtacccatttaccagcttttcttcatctcccccgctccccctacctcatctcaacacacatccttccatta

SEQ ID NO: 549282 - DNA, 363 bp, Homo sapiens
tctctgttgtaccagagatatttctattggaaatattggaactattggaactatttgccccctcattacacgcattcctgttaacctatgggaaagagatcttttatatcagtggggggcacagatttcttttccggaaggcaatgacagccagcagagtaaagatgttatgaccaaaatgggatttgttcaaggtatgggcttaggaaaattagcacaaggcatcaccgagcctattatacctactgatgaatcagactacaggacttggttattctttttagcagcggtcactatcaagcctgcagatccctttgacctggaaagaactcagaaaccggtctgggtagatcgtggccgtcc

SEQ ID NO: 549283 - DNA, 197 bp, Homo sapiens
  misc_feature (174)..(174): n is a, c, g, or t
tccacttcagttccaaggcagttccaagtgcattgttccaagtgcattgtccaagtgcatggtccaagtgcatggtccaagtgcatggttccaagtgcatggttccaagtgcatttgttccaagtgcattgttccaagtgcattgttccaagtgcatgggtggtcactgcagcntcgcaattctgtcacatccatgg

SEQ ID NO: 549284 - DNA, 420 bp, Homo sapiens
taatttgtttctgattcaaagatttctaatttgttcagatactagttaccttgtgacataattaaataaaagtgatttataattagttcattaaccatgccatttaatgatgctttaaagaagattacccgccctcagagttgtggaagcagctcacttattcttctataggtacttgtgcttgccttgctcagcagctcattccttctgatgaataaagaggcccctgcagctcagcacagtgggtcagttgtacttgtgtcaaagaaagctgcaagaccctcctgtcctggctgctctgtgtatgctacttggtcctactaacctgctgctgttagctttaactgttagcttggcatgtgtgtgtgggggggagggagagaggaagggagggagggaggaaggaaggaaggtcgacgc

SEQ ID NO: 549285 - DNA, 211 bp, Homo sapiens
cagtctcaaaaaaaaaaaaaaaaatttctctctctcccgggtaatggggtagtcctggaccggtcagatatttttttcccatgggggtcaacagggtccctaaggtatatagatggcagaggggaaaaatagggggacaagaaatcagggatatgggcaggttttcccattttccatttggtggtggtagaatttacaattataaatggcg

SEQ ID NO: 549286 - DNA, 227 bp, Homo sapiens
gataagtctaatacctctcacacatgtatgtgatgaagagtagctataggattattgtactagaccatgaatctagattcccatcatgacttagaaggtgctagtaggtggctacatacccagaacccagataagctttgatcacttggatcaaagatgattctcgatttccactggagatctatacatatcacacacgatatttcatacaccacacattacatcgt

SEQ ID NO: 549287 - DNA, 204 bp, Homo sapiens
tacgtcaacattgagaacgtttactttgagcaatctccaataaaccaaagtgatacaaacacagtgatttgggaatgcttcaattacaatgcaatacttaaattttaataactcttgtagggagaaaaaagcaactgtataaatggaatgtagagtggaatttctgcaaatatttcaaaacctgtaatcaagagaaattaccac

SEQ ID NO: 549288 - DNA, 213 bp, Homo sapiens
tctggatgctaagtgtctacagctggacagaaccctaacatggacgctgtgaggcggcagcaagatggctgaatagatgccttccccaatcatcctccccacaggaacaccaaattgaacaactatccacacaaaaatagcaccttcataagaaccaaaaatcaggtcagtgatcacaacacctggctttacctttttattactgaaaggcat

SEQ ID NO: 549289 - DNA, 1019 bp, Homo sapiens
agtgtatcctcgggttgctggcgtttgtttgtgtggcgtgttcaaagttgttctcgtgggatgtctttggtaccctttctggtgttgtgctgtacttcggccgtctgtctgagtccgttcttcgggccagtcggtgggctatggatgccatactcaaggcgggcgcttgcggctggtctaccgctcgatgcattcgtgcccacagtcatacctgagggcgtgtgcttgcggagtcttgttctgagtcgtgtgtttcgttccttcgctttcacgatgcacggtggtatagagaggctccacacgggctgcagttcagccattggcttgccgggctccagcctcccttcctgcggccacatgttcgtggcagagagcccaatgggtgtccagcctcgtcagaggctgcgcaggcgtgcgtgcatgcttcgctaccagaagcgtctggaagtccccatcaccaggcctccacctcctgcctctccagcacccctggctgagtctgtggcacggcgtgtagggtggacatgtccgcagggctgttcagtcgctgtggggctcgcgaagcccaaacggctgaggggcccataccccatgaagaagcccccacgctccctccaccgtgctgtgtgtatgggcccccagggaacaaaagggtgtgggtcagggaggggtctagaggcaggattcactaggcctcaggccacccaaatatgcccctccccagtgagctacggttccctgcctaggagctggggagggagagatctaatcccttcaaggaagtgataacactggagtgctaacaagaggagcaggaagcaaggccagccttggttctccattcacccatgagtttccaggtggaacaggaggaactggtccaggccaggctcatcctcctggacccagcaggggcagaaggaggaaggactggtccagcatggtccctccctgctccactggggcagcgctgattacctccgctattggatagtcagcttattaaatgtctgtgtctt

SEQ ID NO: 549290 - DNA, 429 bp, Homo sapiens
tttagtgggttccacagctgaatatccctattagctagacacacaggatctgctttagtgggtcatacctctttgggatcagtccattcatagctgaatgtttctgtggatgccacatgggagtctcagtaagcgcgctcttatgctctgggggttgttatatggactttacctagtgctaagtttgaatatgaatgacatcatgagggcacatcaatgtgcgatgactgcttcagtagaaaagagatctaacactgctaaggatctgactatatgaatggcagttatcccataagtaactcgagagcatcgttaatgattatggtcaagttcctaggaagtggtaggccgctgttgatgttgcaggtgccgctgtttaatccctctttatgaccctagctacaatatggtgtctttcttccgtctctg

SEQ ID NO: 549291 - DNA, 352 bp, Homo sapiens
  misc_feature (16)..(16): n is a, c, g, or t
  misc_feature (209)..(209): n is a, c, g, or t
  misc_feature (244)..(244): n is a, c, g, or t
  misc_feature (257)..(257): n is a, c, g, or t
  misc_feature (272)..(272): n is a, c, g, or t
  misc_feature (302)..(302): n is a, c, g, or t
gaactcctgaccttgngatctgcccagcctcagcttcccaaagtgctgggattacaggcatgtgccactgcgtccggcctgtataaagtaatttttcagcatctattgcaagaagtttgtgggatttgatcactgggtttcataaggtagaattgcttcctcagcaattgtcattttatatgcatttgaataatttttcagatttctcngggtggcatagactttaaaggcagttcagatgatnaagaagagagtcntctttgcaatactgnccttataacacgggccaacaggaagtgggnaaaactgctgcaagtgtatgcttgtgcccacggagctttggatttaaaga

SEQ ID NO: 549292 - DNA, 947 bp, Homo sapiens
  misc_feature (1)..(1): n is a, c, g, or t
  misc_feature (220)..(220): n is a, c, g, or t
  misc_feature (229)..(229): n is a, c, g, or t
  misc_feature (260)..(260): n is a, c, g, or t
  misc_feature (268)..(268): n is a, c, g, or t
  misc_feature (272)..(272): n is a, c, g, or t
  misc_feature (278)..(278): n is a, c, g, or t
  misc_feature (339)..(339): n is a, c, g, or t
  misc_feature (359)..(359): n is a, c, g, or t
  misc_feature (364)..(364): n is a, c, g, or t
  misc_feature (396)..(396): n is a, c, g, or t
  misc_feature (398)..(398): n is a, c, g, or t
  misc_feature (408)..(408): n is a, c, g, or t
  misc_feature (413)..(413): n is a, c, g, or t
  misc_feature (423)..(423): n is a, c, g, or t
  misc_feature (425)..(425): n is a, c, g, or t
  misc_feature (427)..(427): n is a, c, g, or t
  misc_feature (429)..(429): n is a, c, g, or t
  misc_feature (440)..(440): n is a, c, g, or t
  misc_feature (442)..(442): n is a, c, g, or t
  misc_feature (446)..(447): n is a, c, g, or t
  misc_feature (452)..(452): n is a, c, g, or t
  misc_feature (454)..(454): n is a, c, g, or t
  misc_feature (462)..(462): n is a, c, g, or t
  misc_feature (468)..(468): n is a, c, g, or t
  misc_feature (480)..(480): n is a, c, g, or t
  misc_feature (487)..(487): n is a, c, g, or t
  misc_feature (514)..(514): n is a, c, g, or t
  misc_feature (536)..(536): n is a, c, g, or t
  misc_feature (544)..(544): n is a, c, g, or t
  misc_feature (567)..(567): n is a, c, g, or t
  misc_feature (874)..(874): n is a, c, g, or t
  misc_feature (926)..(926): n is a, c, g, or t
naatcattagttgctttcctctatggcacactgagagccccaggagggtctttaactcccttcctcagattatattcatcccagaaatatagccttggacaataatttggttacagcatagtcccaggaatgaggtcccccaagttgctaagttttacataggggagactgggaaattcaaagaattggatggagaaaccataggatccaagataatgtnagggggttnaagatgttggagaggcatggtagcatcattnagtttgantctncttctnacttggagtggaagttgtaggattctgcctctaggaaatgtgccatccttctgaataattngacccaggaagaggagtgtnactanagtggccagctctccgccagctgatcacaccnanagagaagatnttgangcccaggccnanantnactgttgatantntttnntttangntctgcttngtgganagcctaggtgtncagtccngaagatgggctcaggagctccaatgtnctctaccacacaggtgttagtntccccgtnagatggggttaaggctaaatgtnagatggtctggtatgtccagtctccattgggctgggcagtcttgtgcgcactgctgtgaggcatgacaagcttcccgttcttcctccacgtgatagtcacttctgctggatagaagccccacacatagcaggccagcatcacaggctccctcgtgttaaaaggagtggttttggctacttgcacagatggtggccgtgtcctgttggtcagtgatccccagaagggctgggtgtgtgtggcacaattctgaagcccattgcgcaacgctgcatcagggtgtctttttggttgaggtgctgtgagagncattcgcaagttattcagcaccccaaattcgcaaggggccatcttattctcntctggatccagcaggtcagca

SEQ ID NO: 549293 - DNA, 239 bp, Homo sapiens
cccatgcagccagctacaggccttgtattggacatcatttcaccatctcccaatggtctgttggacattccagttttacttgagtcaatattatattctagaaaactatcttcttcaatgaggtttcaactatttaatacagtgcaatttaatttttcaaaaaatctgcattttatctttctaatattagtgcatatccagggttttttcttatcctcttttttttttcttttcttttt

SEQ ID NO: 549294 - DNA, 925 bp, Homo sapiens
  misc_feature (619)..(619): n is a, c, g, or t
tttagggtcgttataagccgtagcgtgcggcagctcccgccgccgaaacagccaaaagggattgcaccaccaagaacaacaaaaggggggaaaaacaaacacagagggattaaaaatcgggccattaataagattgccgtgaagtacctgaagagaaatcatgttcccgaaggggtatatatttaggggtccgcgtgccagcgcgatgggccacacataagtgaaccgaaggggggggcaaccacagagggttgtctgcccgcaaccagggtgtgtatataacaggccgaggtaaaaatttttggggaccacgggagcccgaattttcctcttgacagcccctccagagattaaaaacgcacgtcggttttgacagggactaccgtgccgctaaaacgattggtggtggaacactaaacctgctcgctgtgaatagaaatttcttggggggaaccccgcccagcttaatatgccacgcgaaaagtggccgccaacggggtattccactgctgcgttaatgattcacccgtgatttgtaaaattaacagacccacctgtttaggtttttaaagagcactactagtggttgtatattaagacggccccttaaaaatatatntggggggccaaaaaaccgcacacctgttgaaatatctcttctcattgtgctaagggccataaggcacaataatgtttttgggcccaacgtattgtggcgacaatatgctgtgcgctgtaaaatgtttccgctcgcgcgccattgttcccccctctggtagatgccgcgcgcattagcgccgaccagcttaaatagttccatgggatgagctgcttcgatggggtgtgctccgcgcagattaaaagggaattcttttttccaaatattttttaaaggggaaaaaaacaaaagccggccccaaaaaaa

SEQ ID NO: 549295 - DNA, 294 bp, Homo sapiens
aacggtggtatatgacaacgtgacttcttgatgcctccagtggtatcatcgtggtcttctcgccaggacgcgcaccgtctccccgacatggtatcttcatgatcacctctgcccttctgggacgcccctttgaccaagccacggtcctacagggctttgtttcctgtaggatcctcatctacttcatcattcctgtttggtgggagcctcaccacacatatgttgcctcacttttctgcccctagtccaccgtgtcatagtccaagatgctgtctgtattgacccatctccctg

SEQ ID NO: 549296 - DNA, 479 bp, Homo sapiens
tagtctagaggatcctctctctccacactggttgaacattgtatgtaggtgtatatattgtaatagagattgctcgggggacataggttatgtgataaggagtagggtaaggatagagtgggaagaagcaaagagaggaagtaaagtttaattatgccttatttgggtagaggtgatgatggaggtggagatttggtgctagtgcaattcgttttaggtaatcagctatatctaagtcaggtaaggtctcggcaggagtaggggcaggttttggctcgtcaagaaggcctagataggggcatagtgcggtgtgtgatgctaagggtagcaatccgcagtatgtaggagaaataaaatgtagcatagtggggattttattttaagtattgttggttaggtagttgagagtctagggcctgttagaagtcctaggaaagtgacagcgacggctgggagttataggttccagtgtggaagag

SEQ ID NO: 549297 - DNA, 1004 bp, Homo sapiens
gcccaatgccaggatcgagctgcaggagtgggagcatgtgacctgcattgaatgccatcgtcactgcgcagagaggagacgtgtacgggcctcaaacggctacgtggccgccgggacctgcctcatgcaggcggagcgaggtcacagtgaccgagggcggatcttgatcatggatgtgattgacggtggtgcccgagcctggccagcccttgagcaagaacaagtacaaagtccgttgacagagaaggagcagaaggggcccgtgaccgcccatgtgcacagtgcaattggccgacctggtgtcgtgccatcggccatgaagaatttatcctgatgcgagcctgctgtgcccagctgcagctgaagggcatggcgctatcatcgacgacgcaggcgtctacatacgaccaggctgatcatgcgatcaatggaaacgttacagtccttggcaagccgacggtcggtgaatgaggcatcttcgctgcttgcgcatacccaggacggaaagcaagacgcatgaagccttggatgtcgcggtgatgccaacgacccctgtgaaggttgtacagacgctggcacctttctatttgcatgtgagcatatatggccccaagcctgggagtatctacctcgcggctactagctgagcgcaggggacccattggcggcatgcatgcatagctcttgcgcggagttgcaccagccagactgtacaccatgaaagcccgacctgcatccaaccaaagtacgctctgactcagccagaactccatgaaaacccttccggttgggtggaaccagttaataaacgcgattggcctcagtaaggacgcccaaagcggctcgaacagacaacaggcggagcgcacttagcagccgtttacgttgagactccaggggacagcaaagagtaagcaccgattaggggttgacccacaaggttggaaacccacgtgttcttcggcagggcagcccctcgttgccagagtgggcgcaacatacag

SEQ ID NO: 549298 - DNA, 493 bp, Homo sapiens
tgccagtcgacgctagcaggaccctcacgttagtagaaaaacacagacacatgtgacaagaaaagatgcccgaatccgaagacattgcaatgacaactaaagcaaaatgaaacacattaaagagcatataaaaagtgtatgaacgaagtatcagcgacctgcgggacagctgccaggggcccaacgtacgcctaaaagcagtctctggcatacataggagggggcaaaaagtattcaacgaacttaccgtagaaaactgagatgtcaaatactgcacttgaaatgtttccaaatagctagaactatacagcatatagatctaaacaagtccatgaaccccaagcaaaagaaacatacagaacactctacttacatgtacatactaataaagtactatcaaaactagtgataacaacatattcaaagccttagatacggcaatgtaaatgccgaggattgtcaactaagtaatacaaagtcaaaaattcatcaa

SEQ ID NO: 549299 - DNA, 216 bp, Homo sapiens
caggtcctgatcacgtgcattgtgcggtggtcccgtagtatccctaggaggcgaggcaggcggatcacctgagatcaggagtttgagacagcctgacccaacatggagaaaccccgtgtctactaaaactacaatattagctgagcgtggtggtgcctgcctgtaatcccagctactagggagtctgaggcaggagaatctcttgaacccgggagg

SEQ ID NO: 549300 - DNA, 263 bp, Homo sapiens
  misc_feature (125)..(125): n is a, c, g, or t
  misc_feature (196)..(196): n is a, c, g, or t
  misc_feature (250)..(250): n is a, c, g, or t
atgctggcatgaaggattccaggaagatctatggagacctggctggtagctgtaacaaaaatggtggagtccaaggaaacagcctgtttttggtgaatgggactttttttggtggacacttggcnccagctttgaaagcccttcccctgtgtcctgcccccatgtgggtcaaatgtactttttgtcacatgagganagtgctagttcatgtgttttccatttttgtgagcatcctaataaatttgttccnttttgatgccaga

SEQ ID NO: 549301 - DNA, 110 bp, Homo sapiens
tgtactactacagactcctatatatacatactaggctctggtccactgacgcagtccatattgtcatttcctatgaccagccacatggcctccaggtcatacaggctcct

SEQ ID NO: 549302 - DNA, 169 bp, Homo sapiens
gatgaatgataagccagggatgcactgaggtgttcgtgcctcaaaatgcccttcttggtagcagactgaaatgaaccatccagtcaacttctataagcagaagaggtgcttctgatctgtccagtgaagagggtaggagagtgaacaagatcgacaaggaggctctaca

SEQ ID NO: 549303 - DNA, 278 bp, Homo sapiens
tggcagtataaagtacatctctgcatgtagacaaccggaagacacagcagttcagtacttcacccaaaaatttcaacattgccaacacaggacattgcgaactgacacacagaaatactaggaaatgcacagtcttgaagctccacaaccaaaacagcaatcttggaacggcccctaatctacctcctcaatggtggagactgacccagaaactaccttgtggaccttttttcggaagacaccaggcccgggaacaccggcaccctgatacagaccgc

SEQ ID NO: 549304 - DNA, 347 bp, Homo sapiens
gccggctgagttttttattttctgtagcggggactcatgatgttgttcaggctggtagtatttctatttttagttgggggagaaaccccaatactgttttccataatggctgtactaatttacaatacaaacaacagtatactagagctccttttccttcacatccttaccagcatttactctttatctttttgatggtagtcattttacctgaggtcagatgatattccattatgggtttgatttgcatttttctgatgattagtgatgctgaacatttttttcatatactttttggctatttgtatgtctctttttgagaaatgtctatttggatcatttaccta

SEQ ID NO: 549305 - DNA, 242 bp, Homo sapiens
aaagtaaaaaagtaattatgattccttgtggctatcatttctgaaatcagaaattatcttattctgtctttcaggctaagaatacctttttgttttgttttggttttttacaatatataaagtgcttttatgatatgatttatttaactaaaatatctatgacgagatctcattatcattcagatgaaggacactggttcatgcagatgataaaggcttgggactcagctagatagagagag

SEQ ID NO: 549306 - DNA, 273 bp, Homo sapiens
gggggggggggggttttttttaaccccccccccctttttcgtcccctttccctttgcccccttggattcccccttttgggggggggggaaaaacagggcccactttggcccccggggttccccccttagcggggtttttcgggcctttggttttgccttttggggggggggggtccctttcggggccccattttttccccccctcccccgggcccccccccctccccccgggcccgggggttttggtttcctttaaacccgcgggggggggga

SEQ ID NO: 549307 - DNA, 783 bp, Homo sapiens
cacacgacaacgtcaacgacactgaaacactctcgccattccctatccatccggatctaccccccggatggaccacagcttttcctagaccgatatgctgcgcgacgcgtctgctagaactcgttattgtctccctccttgctgtctagatactcgactgagactcgcgccagtcttgccttgacttaggaccaatgtgctcatctttaagcacgcgttgttaatactttctcctcgcctgccgactgtaagcgtccttgttcctgtccaaggaagcgtcttacgtggacgagacagtggcctagtgtctacgtttttcgtcatctcaatcttacctgctctgtatctctctgctctcgggcttgatcgttggctgttcacgagggactttgtctacttctgcttttaacctaaggtcttgtttgtgtcttgatgtaccattcccagcacttgtgacttttgtactgtccgtggacaagcactcttcctttatccagctgagatcttggcccaggctgttcagtaaagccattttgctctcttccttgcactacgctataaatgaatagaatagagatgaaagtgtttcgttctaaacatctatagggctcagacttaagtaaattaaatgcgcttattggtctagaactctgcatccttagggctacatatagattttaatgtgttttaaagaagactgagaaattcaatgtgtggaaatgttataaaaagccagatatatttattaactccaaaggggggggaatgtctatgttatatttt

SEQ ID NO: 549308 - DNA, 213 bp, Homo sapiens
cgagcacaagtggtgtgctcagtagtacaacaggatgaccatgaatgcggccctccgtacgcctgcttcactacctttctgtatgtcatcctatttgccgggtgtgctagacggcaggtcaggtccaacactgacacgttggcagtggggacacggaaggccatgccagtgagcttcccgttcagctcagggatgagcgttgcccacagcctt

SEQ ID NO: 549309 - DNA, 1012 bp, Homo sapiens
  misc_feature (309)..(310): n is a, c, g, or t
  misc_feature (925)..(925): n is a, c, g, or t
tattagacaacaatcacgtgcctatcatatagtaaaaacctgaccatgacccttaatagtggtgccctcatcgtacgaatcccttgcgctaattggaactcatctcggtctcgtaatccattcgatgcatattacacttaccagactcgcgatgagacgactccgcatcagttacttagagaccataaactacacgcaataggacgatctcatagcacgagtactatccaattggaattgcgtcagcgaatcgtagaacatcgcagaacaggacactactactcatcggacactatcacagcacacgcnnacctgatccaaaacacggccccttcgactacgggcaataactcctactttatttaccctcagacaattatttttcattccgcaggaattatttcctgaagccacttttaccatctccatgcctatgccccataccacccacaagttagagagggcacatggaacccacaaacaaggcatcaaacccgactacaatcccactagaaagtccacacgtcactataacacgatccagtacttaactcgacactcacggacgtatacaattcacacttgacgctccacgcaatagatcataactacgacaaaacaaacacgaaaacacagaagtacattccagagcgacgtgacttaatatacaacatttatacataggagtctacatagttattagcccgtccgtaacaaatgcactcaagaagatacgattcggagatcatccccatatcacccatattaccagaaccgagacatcatacaggacatcaaacaatatatatcagatagaccaacaagagcttatccacacggaacctatcaccggtcaatatataaggagctcgaccgttatccatcgaactattcatgactacaattccagcacaacatacataanatacacatatatacgatcacaagacaattcaacttatggacttccgaacgaccggccgccttgattacctggacatagaggtagaca

SEQ ID NO: 549310 - DNA, 586 bp, Homo sapiens
  misc_feature (129)..(129): n is a, c, g, or t
agtccaagttgtgtattgacttgtttaatacccaccagaccctgtgaagtcagtatagtgttatcccttttataggtgggaaccagaagcacagggagattgagtaactgtgtgacatgatttctccantattctagacagaacaaaaaccattttttttttttgggtgtgtcccttatgtttgcccaggctggtctccaacttccgggcctcaagcaatcctcctgtgcctcggccttccaaagttacggggattacggggtgtgagccaccagtgccaggaatttttggagctttctaggaattcagcacttggcttatattatctctttcaatctttccaatcgtgtaaattagatattcttaatatctccatttttaggggaagggaatgggagacacaggagattacccccgggtctatggggggtagaacgggggcttggactcccggcatattggcctcttagccactttcacccaccttacaaggagctagcaccttggctgggggtaacagggagggcacctttcgtgaacagtgcttaagagggggtgtaaccgtgttcggcgttccgagttgtgg

SEQ ID NO: 549311 - DNA, 117 bp, Homo sapiens
  misc_feature (3)..(3): n is a, c, g, or t
ttnatacagatgctgctaggcatggtgcccagcaggagcctgaagctcaagaagccatatgtagctgcaagagtagggcataggagaacctgtgagccggcgcgtgccagagaaggg

SEQ ID NO: 549312 - DNA, 362 bp, Homo sapiens
caggggtttttgagggttaggaaattttaggtggaccccttattttttttttttcccgaaaaaataatttgctttggagggaacctccaaaaaaattcccctgggggattaaaggttgggcttccgggaaatggaacccccccttttttttttttttttttggggaggcaatggggtttaaccccttttccccccagtggaaaataccccccttaaaaccaaagggctgggggggtttgtttatatttgcttaaacagggaaaagggggtgccttttttaaaaaattttaagggggtttttaatgtggaaaagtcccccaaaatgggaatgccaatccaaaaaatattgttttaggggccca

SEQ ID NO: 549313 - DNA, 212 bp, Homo sapiens
ctctagaggatctccaccaaggaggcagaggcacaagggaggcagaggcacaagggaggccagaggccagggaggccagaggcaccagggaggctaggatccagggtgtcacaattccaccccttgccagctgtccagcagctgtccagccctgggggctgaaaccaaacctcatttctccaaaccggccccccttctttggtgcctctggg

SEQ ID NO: 549314 - DNA, 743 bp, Homo sapiens
agagagagagagatcagaaactcatagatatctacctggagagcctctctcaaggatgaggttaatgaagattatgccatgtgcagaagcagacccgtgccggccagcgcaccagtgttcaaggcatttgttgctatctggggactacatagtggcctactgtcgtgtcgtgttgtgttaatgtgctccaagagaggtggcacacgcgactatcgctgtggtggccattatctctggccaaagtctctcctatctgtcccctgtgctgcagagtgctacgtgggggaacaaagatcggcaagccccacacgtgtcccttgcaagggtcgacacgtgccgcgtgctgtgctctgtgcttgggtacgcctctatcctctgcacccgagggggcacgttggtatctgtcttcctgctatcgttgttgccgtaagaatgcgtgctctatgatcggcgtggtatctgatgacgttgctacactctcagcccgggaggtgtgcaggtgacaacctctgggcaacttcgccaagggccacctttgatgccatttctaagacctagagctatcgtgacccccgatctctggaaaggagactgtatccaccaaagtctccctatcaggagttcacgtgaccctctcgtaaagacccacaacagagtctccgtgcagcggaactcaggctccaggcttgtggttacaacaataggggttttatacgagaaaaatagtgtggaataacagcgtg

SEQ ID NO: 549315 - DNA, 660 bp, Homo sapiens
attatttctgacacattgtttcatttagtcatttgcacacataaattcacacgtcagaattctgcataggtcagattagccctgaaatgtagaaagactggtacaataactataagttcgtaaatggttacatcaggtaaaagggagttaggttgttcctgtaccatatggcaagtaacttttactgtgtcacctcatttagtccatctgcataatccagggtaaacacacacaaaaccaatggctatttaaaccatgcagagagttaaggcaaacttactgttcctaagggatatttttaataaaaggcatgataaatgtcaaagtgaggcatgtgagatcatgattttcttaaacctactggcaacaagcttaataaatttacagtataaagacttaattgattcaacctaaaaacacagtatttacaaatgcacatttttactcacaagcatacaaatctaaatatacaagaataaaacttccgtgtgcagtgcaagtttatcccacaggttttaaaaagtcatcactaccaacaatgtatgtgcctgaaacaagattcatgtacaatgacatacactttagcattttaagcacattccaatgaattccatacattattaggcagctgcattcaattcattttacctatctgagagt

SEQ ID NO: 549316 - DNA, 236 bp, Homo sapiens
actctcactgcacaaagaaggcgaagcggacacaggctggagggctggtcatgcagccggcacttcagagcggacctggaagcttccagactgtcagcctgactccaaagccactctcacaaccactgcttttgggacagtgtcctctgggcccctcataccttgaaaatacactttcttctttctactcagatcacagattgacagaacacatactgccgagaaaagcagtggtt

SEQ ID NO: 549317 - DNA, 286 bp, Homo sapiens
  misc_feature (277)..(277): n is a, c, g, or t
caggcagatcacctgaggtcaggagttcaacacaggcctggccaacatggtgaaaccccatctctactaaaaatacaaaaaattaactgggtgtggtggcgggcacctggctgaggcaggagaattgcttgaaacctgggaggcggagggtgcagtgagctgagatcgcgcccctgcactccagcctgggcaacaagagcaaaactccgtctcagaaaaaaagttcattcagagttaatccctacagaaacctatttggtaagaagtataaagcgtngaggggtac

SEQ ID NO: 549318 - DNA, 400 bp, Homo sapiens
tgtgaatggttactatgaccatttgtgggattggctagcagatagcgtaacggctgattttgccacaccaacggatttggcagcggtgcgattataccaaagtgttgacgacgcgttgcgctatcttgctaccatttgaaggtatgagaacaggggaaatcatatgccagaatacacaatgttagccgactttattcgggtttacatgtcatcactaaaacatatggaaaccatgctatcacagccaatgcgtgaatatgggctgtcttttgagcagtggttgattatggcagccattgcgcgcgaaaacgccgttgacattaacagaaattgcggctgacgtgacgtgaccaaggcgctgttgccgccaattaaggccgttgttggcgttggatttgtt

SEQ ID NO: 549319 - DNA, 335 bp, Homo sapiens
acaagccatattgaggaaaacgtagtgcatgactcactttctttacataagatattcattgcacattagccatttagaggtcattcaaataacagaatattcgatcgtaaaagaactgccaactttaaaacaataaagatttgaaccatgaaatgcgagtgccttttaaagaaggatacatttttaatatatttgagtgagtgctgcgaagtgtgaaaatatttgtatgtatcatatcacagacaaacatgttcactacacaaatgttcattaactatatactatgtaacaggtgaaacagtgttatgtaaaatagaattgtgtaaactgattgt

SEQ ID NO: 549320 - DNA, 519 bp, Homo sapiens
tttttgcccatgtaatgcaaactgcctaaaaaaattttttttaaacctcctccttgttacattgatttcacatggcgacgtgcccacataaaaaacatcttctggaatactatgcgtctcacaggtgacacgtgaaaagctctggtttaaaacagcggagcttgacaatatcgagaaaggcctggtggaactaaattaaggcaaatgttacttccctattcagggcaattgatcaagcagatctgctcatttcaatgaaaatgtcttaaatatttgccaaaataattgccatcgggaaagattagaacacgtagctgataaaatgcgctactcagcactggcaccagaaatcttacggtcatcatgtgcggttgtaatctacaccgcccacaggttgtacaccctatttacaaagtcaggtggagggcaatgcccaaatgttttttgaaggccaccccctaaaattggcaccgattgatgaataacaacgcccggcccgctttacattttggccaaaag

SEQ ID NO: 549321 - DNA, 1595 bp, Homo sapiens
tgtatggtccattgttagctcttgtggctttcctccggtaatgctccgtcttaaatccgtgtaatcgttctcgatataaatatcatgtgggtggtatacagtgccgtgatattccactgtgtcgctttcctcttcttgatgtcgagggtctcattgctcataaaacgatagcttcgtactgctttggtccctcatatcccgtttcgtaattgtatgtgaacattcattggttacacccaaaggcattcgtgccaacgtctggggaaataaataggggtcaccttggggtgtggggtttcgttatactattgactttccccatttttctctcacgcaaatgtttttccatgatttccaattccttgcggataacccaactgaaaatcaatgttgaacatggtggatagtgttaatttcgattctgtcctggcacctcatggcaacgcactgtcaataggcgtaatctttactgtgcatagggttttgtataggtgacggggacaaactctcgaccgtgtatgactgttgaatatgcggtttcccctggcaccttatggatggacggactagtacaacgacattacacccttgctccaaataagcttccaaagcgattcgtctccttctatgttgcttgtacaaccccaactcgggccatccgcaatggcacttccctctttctactttgccccatgggggagaattttccccaaaggcataagttgtgtaatccatgtaaccaactgacgcatcactaaaggttgtaacacaaaacgtgtggtagacctccctcagcttaggcctcgctggtgatgcacccattacacaacgctatggctcaaggcgtcccctaatgggcgcgctgttgtacacccctgttagttacctgttagcttcgcctgtctctgataggcttatcttctgtattgcgctcgcgttatggtagtacactaaggttgtagtttgtccctacgtgagataatttactagctacatggctggaggctagggccccagtagccaaggagacgtggggaactattcccaggtgtgcgcgcactcacgatacatacgtcgtattcgagtcgcatttgctttcatacctaggcgtcgcaacgcaccagatcttaacgctgtcgcccaaccaagaatgcgagttcggctgttttccaacacagtatgtcacgtcgtgccaagaaaagctgtagcgccaggcataatgtggacgatgacagggacctgataagtacgccgaccatagaaagacacgcacggtggcatcgaatgcgactagaggaccctcacgaggattactgaggccctcttgatacgaggagtcggtttacaaggacccaagagactactgcctgctctagagtttctctacgatgaggcgcggcgagtacgagacgtctctcttagcagcaaggacaagatgcagatcctggtacacaactgtgcttattggtgagcagaaagatgatgctaggggtagtgatcggtgataggggctgtctgtgtccaggaaacttaattccctggtgactaaagagctttgcctggtgatgaggaagtattttgtggcataatacata

SEQ ID NO: 549322 - DNA, 1106 bp, Homo sapiens
tcaactaggatgaggaacctgattagtcttatactagtatccttgaatcatttcgatagtgacatgtatcctcctcgagactcctagctcactcatagtgatgacaagcatccaactatctattgaagactatccatggtcgtcccttattgagcggatgcacgattataggatttagcagctgaaacattcaatcaaacttgcccgtatcccgaccttcttcaccaacacatgtacaacctcacatccccgctttatgccacaaatacgtagaatattgatctgaaaccgatcaaccctataacatatcaatcaaaagaccatgcctggaataacttaaatctgattgaaatatttacttgcaggccaccttactagatagcacctaaatatgagaatctgctgcactagacatatcaaactatataactttccctctatgcttatcatcgtatgtcaaattctaaattctactgatgtatccctataacatatcgtgtggctgccactctagtccaagcctacgattgcacagaagcgttcttatttaggcctctaacctgtgacgaccaacgaaagtaagtggcgcccaccgagtgaccatgcctgtcatatttgtagggcccagtgctatgacagcctgacagaggggccatcttcgagagcagacctaatggaccttcagacctagccatgtgcttttcgtctagccgagtccagtaaagcgtcgtcataatagggctacgtagccatctcacttaaccgtatatccatgatggcgcgaggttacccgagggttgcactttccaatgtcccctgtcgtatcattcctgttcaaatagggcctctacacggaaaaagccctataattacgccgaagtttatgatttcccggaatactagaaccgtttccgcccgcatagatgccatagtcccgaatatagggtgtcgcccagataacggcgacctgaaaatccatgatcagacgcgttccaaggatagagcgggccagttttagaaacccccattggtgttaaactggggtatccgacaagaatttccccggtagagtcaccacagtgaatatgctcaaggcttttgttaag

SEQ ID NO: 549323 - DNA, 140 bp, Homo sapiens
ctctagagttcccccccgtccgatggcccatgagatagagagacacctgctaggtgtaaggagaagattgttaggtctacggagggctccaggttggtgagtacgttcccatgcttaaggtgagggtagacttgttcaac

SEQ ID NO: 549324 - DNA, 155 bp, Homo sapiens
  misc_feature (113)..(113): n is a, c, g, or t
cacccaggcgcacttctcccagcggagagcaaggttttcttctgttttcatatgccagtccagaacaatgttctacgcacatttctgttctcatggtaaaatgagggcctctnggccatcaattttggctaagcgtgcccacttggtgataatga

SEQ ID NO: 549325 - DNA, 298 bp, Homo sapiens
acgtgtcctctggtgccatgccccggtgggcggcgggcctctctactcgaaggtgacacgtttagattctgagccgggacgtggcgggtgcataggtcaggcgtgcttttttttaagttaaacttttcctttttggctgtctagtcaccctcgtcggtcttctgcttctgggtatcgacatcgtcatcctcatcatcttcagctggccgctggcccgtagctgactcagcttcctcaccttcatctccatcctcttcctcaccatcagcttcttcttccacctaggggtaccgagctc

SEQ ID NO: 549326 - DNA, 770 bp, Homo sapiens
ggcagccggctcgggtccccttccacaccatggaagcttgttctttcgctctttgcaataaatcttgctagtgttcactctgggtccacactgcctttatgagctgtaacacttaccgcgaaggtctgcagcttcactcaggaagccagtgagaccacgagccccagaagaacgaacaactccagacacaccgctttaagagctgtaacactcaccgggaaggtctgcagcttcactcctgagccagcgagaccacgaaccaaccagaaggaagaaactccgaatacatctgaacatcagaaggaacaaactccggacacgctgcctttaagaactgtaacactcaccgcgagggtccgtggcttcattcttgaagtcagtgagaccaagaacccaccaattccggacacaatactagtacatgaaatgataggcttctcatggacttcgaactatgggtcattttagcttcctcaagtaacctgtactagcctttaatccttaagtgtcagaaagttattcttttacctaacaaaattcattggcattttagaccaattgaactttcatagattataacagatactatttgacagagcatgagaagtccagtaaccaagtactctgattgtacagataaagaacacaagctttcagaagaggtaaagtgtattcctggaacacattaaacgaagggaaattccagacgtgtgatttggaaaagttagagaagaaatactaatgaagagggtctccagttggaaactaag

SEQ ID NO: 549327 - DNA, 675 bp, Homo sapiens
gatgaaatgaaatgatgagatgaaatgaggtgaaatgaaattagatgaaacgtaatgagatgaaatgacataatgaaatgaaaaaatgaaatgaaataacgacatgaggtgaaattacatgagatgatgaaattaaatgatgaaactgaaactaatgaaatggaaactgaaactggaaactgatgacgatgacatgatgagatgaaactgactgagactgagatgtaatgactgagaggcaatgactgagactgtaatgaactgaccatgacactgaactgagactgacctgaccctacatgacaggaaattgaatggagatatgagatgaaatgagataaaatgagatgaaataaatgatgagatgaaatgatgaaatgctgaggtgagatgagatgaaatgagatgaaacgatgagatgaactgaacgaatgagatgaacatgatgagatgaaactgctgaacatgagatgagatgagaagaaatgacttgatgagactgagataacactgactgacactgaactgaacgtgaaactgaacttgcacatgagactgagatgacatgagataaccatgactgagatgacaccgccgaagaaactgcgactgacctgactgaacactgactgacgatgagatgaaacaatgatgggactgaaccactgacgatga

SEQ ID NO: 549328 - DNA, 332 bp, Homo sapiens
tcccctgtatccccacccaaatctcaggtagaataggatctgtgtccccacccaagtctcaggtagacttgtaatccccagtgttggaggaggggcccagtgggaggtgatggatcatgggggtggatttctcccttactgttctcatgatagtgagtgagttctcatgagatctggttttttgagtgtgtagcccctccccctctcctttggctctcttcctctttctccggccatgtaagatatgcctccttctccttcaccttccaccatgatggtcagtttcctgaggcctcccagccatgcttcctgtatagccggcgaacctatga

SEQ ID NO: 549329 - DNA, 340 bp, Homo sapiens
tgctcttgctgctctagtactttcaatggtgatacgaggttgtcgagtgaaagatcttacccagcgttactccgtgtaggcctgtaatgctatgaatccccctctaaacactgctctagctgcatcgcaaagatactggtacgttgtatcttggtactcatggttttcaaagaacttatttatttctgccttaatttcgtaattaacccagtagtcatacaggagtaggtagatcggtttccatgtatttatgcaagatagagtgagtatcttaatcctgagttctcattggatggcgctgtagtcttgaaagactatttgtaatgatatccattctttt

SEQ ID NO: 549330 - DNA, 211 bp, Homo sapiens
tgcgccagaaagggcagagtacgctggagaggaataggggagtgcttatattcctccatgtcccctcatgtacactgagtaccggagagactttttctattttattaatatgcaagtgttacctgattctagaatgaccaataaagccaactgagatctttagagaaaattgttgtgtggatgagattctaaataaaaaaaggaaaaaaag

SEQ ID NO: 549331 - DNA, 173 bp, Homo sapiens
  misc_feature (162)..(162): n is a, c, g, or t
cctggccgtcaatttgatgcccttccattgtcctagacttctgaagagggctcactttacactattgtgcattacagaacaggctttatactgccgttttttttttttgacagcaggatgtcactctgtcgccaatgctggagtgcagtggcgctatctcanctcaccgcaac

SEQ ID NO: 549332 - DNA, 726 bp, Homo sapiens
  misc_feature (726)..(726): n is a, c, g, or t
aaagggagatgagattcgtcggagacaaatttcagaatcctttgagatgatccaattcaaggaaaaccctctataaaatttaataaactgtataagttaactataatgtgttatactttctttgtggtgtcttaaaaatttaaagaagcgaggaacatgccattggtgagtaccgttggaagctattttaatttctaggaaaagccccaaatatcactccaaatagattttgtttgcagatctcagttcagaatgcacacacacacacacacacacacacacacacacacacacacacacacacacagagagtatgtatatatctccccaaaggtggatttctggtcacagagattagagaggtgggtataatataattgaagggatatatctaaaacccctctgagagtcgcgacaatattcagagaacagagagtggttgcccatctctctaacaaaagtagtgtgtgggaagcgtgatctacaagatgtatcgtgagggatgagggtcatagagcatagtgagaaaccaagagattcttcttccggtggtaagaaattacaattagtcactctagatatatataatgtattccagtgtctttgcagcctcttttctcactctcgatgtatatccttagagaacctagaagttatcgatgtgggaaatgagtcgtgaagttgagaagaagagcctatcgcagatatcttagtatttgaggcccn

SEQ ID NO: 549333 - DNA, 142 bp, Homo sapiens
gcatcaacacgggattggtctgaaaacgcagaatgcacaggagactcggctgatcctgtgctggatgggagaagagactgtgatatgagcctggcccattctagtaggaaggggagggagcccgttcagtaggtcatcctag

SEQ ID NO: 549334 - DNA, 705 bp, Homo sapiens
ctgcagaagagacatgcagcaggaagggtagcagctatctgtcaaggagctggcggtctgccgttctggtacccgtggattctccccactgtaacgcctgttacacacaaactgtagtggagttcctgccaggcttgaagaacatgatctgaattttgtccatccttttggttatatatatgtaaggtttatttatgtgttttcttttctccttataggggggtattcagagtgggctgggcccctgggcgagacacagctacctctgttggcatctttataataccaggaacccagcggatactagccactgagcggctaaatgaaataaagtggaaaaaaacaaaaaagaggcaaaaaccaacaagcactaaaaaaccacagacacaacaaaacagaagcaaacacgcagcccacacgcgactccatggacaaccgaacacaacacaacacagcacacagaaaaacaaaacgaaaacacagaagacgagagacataacaaacaacacgcacaagaagggcaacagaaagacgacgcgaacagaaagaaacaagacaaacaatagaggacacacataagaaagaaacaacaatcacagagacacaaaaagacacaacaacaacacagagtcagaatagaaacaccagaatcaaagcggacaccaaagaagaaaacacccataagtaactaataacacaaaagag

SEQ ID NO: 549335 - DNA, 124 bp, Homo sapiens
attctagaggatccctgatgtctctcctcgtatgcctcatcgttggtgatgatggaatttgtcaaacgattgtgccagactttgacctgccagaggtccaggccctagcacgccaaagttatca

SEQ ID NO: 549336 - DNA, 437 bp, Homo sapiens
  misc_feature (57)..(57): n is a, c, g, or t
  misc_feature (121)..(121): n is a, c, g, or t
ggaggaatcgaccccggagatgggctgtagcaagccgcacctggagagggtgacccnggggatcacgctcatcctagattctgccccacgtgtgacttaggtgaccatcatagaaaagtcncctggtgaacgtcatttgatttcttcccggggacaagagactagctgtgtgatgcctggagatgtgaagaccttccacctgatgaccaatggcttccacatgacatggagtgtgaaggtgggtgagcacatcacaccactgggatgcatgggatttaacagcatctcaaatctgactcaggtcacccagccttccatgttttcactccctaatgcacccactctggcagacctggagggccgatacacatgaagccagtgcatggatcatgtcagagtaaggcctcactttggactctcgcagcgctgatattttg

SEQ ID NO: 549337 - DNA, 140 bp, Homo sapiens
actacctccactgccactgacatactacttacgagctacactcaacacttccctatacagcgctttaactacgcgcactgatagacagtgttaatacgaccagctgtgatagatcactatatcttatgagattgagctat

SEQ ID NO: 549338 - DNA, 437 bp, Homo sapiens
ggagtgttatcatcagtgtgagcagtagattacattgacttcatgctcatgttgaatcataggcatggacagattcgcatacaagtccctaactgtggtgaccgtaaagcgatggcataattctaccgttcatctagacgtcgtccactcataggagctagttgcgacgttgctactgccatagaccttgaatgattctcagtctgagagggcctgtcattactagtgtcagcaaagggcaggtctcaatcatgtttcgaatgcaacgcttattctgtaagtttgtcaagcaggtcagcttctgtaaatatggtatggaccatcttccaaggctcctccagtgtggccctttgacaaagaatctgcaataatccctatggttctgcacgttctgtccacgctacgataattccgtttgctgcacttgatctgttgag

SEQ ID NO: 549339 - DNA, 255 bp, Homo sapiens
accgaccgcaggagggtggtcaccgatggtcacacctgatcacccttcccagaccaccccctcctacaggagcgggacaagatcgcggctcccatcagtgactcccagaagccacggcaacagcgtgtgaccctcacactacctgtcctgaatggcgcacgacctgtcatctttgtggcaactggacaccgcaagcagctgttctgaagcgcatctcggaggaccaggaggaaaacgcgctgaccacctcctctt

SEQ ID NO: 549340 - DNA, 344 bp, Homo sapiens
cataatcatgtgcagctaatttttatattttagtagagacgggttttcaccatgtggccaggctggtcttgaattcccaacctcaggtgatccgtcagcctcaggcctcccaaagtgctgggattacaggcgcccaccaccacacccagctaattttgtatttttagtagagacggggtttctccatgttggtcaggcagtctcaaactccccacctcaggtgatccacccgcgtcggcctcccaaagtgctgggattacaggcatgagccacctcacccagcctacatacaattttaaccctttaaagcttatatatatgccaaactcagaaatgaacattaa

SEQ ID NO: 549341 - DNA, 738 bp, Homo sapiens
tctcgcctcgcctagtgcctcagtctccctaggttttgcttcgcggagtacagaagctgggatggcgccagcctcccgcccccggccactatggcaacggaagcggcgcgcgcaggcggagcattctttggctccgtcccgaagaggggtgaaagggagagggacaggcaggcgaaggggagggggagtgcggagggcggcaggggtgacgcgaggcaagggacggcggcaaacctgtctgctcaggacgtgctggttccgctcactggctgctggccccaagggcttgcagactcttctgtgacaggtgttacttcctgtacagactgggttgaaactgcagctcagtaagacgataggttaaaagccaagactagggaactgcaagatacgatcgtgtactatatacatgacatacactatatagttaacttatgtcgcttagtaagccaataatgaaaaaggccaatcaaccccagaatggaacaatgagcaagatattagaacaggcctcccagtgatccacaatagtcaaatcaaatatgccactaaggatattacaaatactgtttacacctattatttagactaagaatggaatattgatacacatgcaatgttgcgctttagtaactcggtttaagccaacagtatgtaatagaccttggtaactgaccacttgtcggtgtgacctactggggaaaacaggtttacattctgtggctggatctgaccaat

SEQ ID NO: 549342 - DNA, 777 bp, Homo sapiens
cttttgggcccacttacatgccttgtgacccttggcccagaaatgacgaacacttcgccgagtgtgtcttccccctggtaccaaagactttgttcaacacatcagaagtggttaaacacaagcggttgagggacctgccggggggaaccccccccggtctcgatgtttgagggcgccaagatgtaaccacataggcgggggttccccccctgggcggtgtaccactgcgtcttttctcgagaggttcgcccctctgggttgggccccgacctttggtctagtgagcacggcccttctttctacgagcccccggtgtcctgcgccccctttggtggccaccccacaccctgggagccccctgtcccccaccctctccgtgtatttgttgtcttgaagttgtagcccctccccacttgtccgcaacccctttctctatgcacttccccgcgggccctcgtaccccgtggccccacacactggtttataggagttcaggagttccccccctcggggttctggttcctctgcccacttccttcacggggttgccccccgttttccagaacaccccccacctgatggggggccaccaccgttttacgctgctgccttttactctctgcactccgtgccctctgccggcccccctgagtcagcctttttatctttgttttgcggagggggtgggggaccctccccggagcatttccaccctcccccacatgtgccacacattgtagataaacctcccaataataaaaaaacccttgtttccca

SEQ ID NO: 549343 - DNA, 595 bp, Homo sapiens
ggggaccctccgggccgggcggtgttggccccttagctgcccggtgcgtctggggtcggtgaaaaggccggcagaagggacgtgcacttgagaaatgtctttcctccaggacccaagtttcttcaccatggggatgtggtccattggtgcaggagccctgggggctgctgccttggacgattgctgctatggccgaacacatgatcagtgattctactgtcctaagactccacaggaaagcggccctggatgctacctggtaggatatagtacctgtaaaacactggtacaaggaaccaaaggactttcaaagcaatacggagctatggcgaaaaaaatgtgacgcatgtgatctatggcccgtgcggaggccaggctgtttccttctgtcgagaggaagctgcggatctgtactccctgaataagcagtgttggaccagcgtgggcgtccccaatctatgcagtggtaaaggagcacatcaggactgaagtgaaggatttccagccgttatttcaaaggacgcaaatcttcctggatgacaacgaaaagagttctatggtccacaaaggcggacacgatgatgtggatgggatc

SEQ ID NO: 549344 - DNA, 130 bp, Homo sapiens
ctcggcccagttcacagctcaccgctggttcctcacctgcttaccagccccagttccgggctgtcttgggccatcttctcacacagtttcacttcccccaagagctgttgtaactgggctgttgtaactg

SEQ ID NO: 549345 - DNA, 257 bp, Homo sapiens
tcgtgtgtactagcgggttcaccttgtgtctgtctgactccagcccccccacagtgtgacctgtactgtggtacctgcctgggttcctgaccttgtgtctgtctgaccccagcccccccacagtgtgaccgtccgtggtacctgccgggttccgaccttgtgtctgtctgaccccagcccccccatagtgtgaccgtccgtggtacctagccgggttccaaccttggtctgtctgaccacggtctacccctgcttgt

SEQ ID NO: 549346 - DNA, 175 bp, Homo sapiens
ggctcgcaccggttcagggttgatgctgctgcagtgtgccccttttggagggggaaacgttcaccttagtgctggactcggtgctgcagggtcacggcctcgtccagctggtagttgtgtctgcatacccgtgtgccggcactgcccgctcctcctccaggatgtccttctggct

SEQ ID NO: 549347 - DNA, 1158 bp, Homo sapiens
cctttcccctcccgccggactgccaggaggtgggctggctgcggaggtgagtggccctgtcccctgtccctttaagtgagttgagtggccaaactgccggcctagagtgcggcgtagcccccacccgccagtgccctcaccccagagcagctgcagcctcagcctggccgcccctccgacagccaagtccgcgcgcgtctgacccccggcagcaagtcagcccaccatggtgaagatcgtgacagttaagacccaggcgtaccaggagcagaagccgggcacgagcgggctgcggaagcgggtgaaggtgttccaggagcagcggccaagcgtacgcggagaacgttcatccgagagtatcatcatccaccgtggagccgggtgcagcgcgcaaggaggccacgctggtaggtgggcggggacgtgcggttctacaatgaaggaggccatcacagactcatcgactcgcatcgctgccgcccaacgggatcggatcgcgatggtatatcggacagaatggaatcctcgtccagccctgctgatatccgtgcatcattagaacaaaatcagaaggccaaagcggggatggggactcacgtcttggagcaggcgcacgtcacgcaaaaccgagggggcgcccacaagtgggccaattgcgaggacactcgcaaagtccagagagttccgtaggtcggaggggaccttgcgccgcgcgacggccaagcaaagagagacaacgaaagtagacggcagcagagtcgagggcagcagcacagaagtaacgccgaggaaccttcattggcgagggcttaggcccgtggaagccgtggaacgacggtacgcaccatgggggagcgggagccagaggcgagaacgcgagcgcaggggaagcggcagtactggagaggcaaataccacgccagaaggggcgcgtgtcccacgagggcgggaacaagcgaggcggagatgcgcgggaacgggaacccgcatggacaggcaaactgcgatgacgaccgcaagcgtaggaaaggacaaggggcccgctgcacaggacgcaaccgccggcggacccaaagcgcgcgcgcaacgaacccggagacgggggccccgatgggcatgaggcatagcaggcgacgccggaggcgcgacggacacacc

SEQ ID NO: 549348 - DNA, 285 bp, Homo sapiens
cctcggtaccgattatcagctgcatctctgtctctgtactcctctctcccacaggtttggcattttttctggcaagcatctcagtgaagagatcccatctggagaaacgtttcaagaagcaagcaacagacgtatcccacatcctgacagagcaagcatgaatgctaccagttagtagggaggtttcttgttaaaaacaaaacccaccgcacaatccttttgcaaattctctgcaactggatggctcatactgacaaatatgctgcagaacaattatcttagcag

SEQ ID NO: 549349 - DNA, 100 bp, Homo sapiens
cctcttatgttttaagaataaaaaatctacactagtcccaaattcaaaagtgggactaaggatctgaatgggcattcctcctaagaatacactcatacgg

SEQ ID NO: 549350 - DNA, 830 bp, Homo sapiens
atgacgcccaataggcaaaattaacccctcccttccctacacatcaagctcgaggatggccccacccgggatgcaaattagctttactcaacatgcccgagtcaggaaactaaaatagctcttagtctaaatagacactttcaacctgaatacgtaaagacctttcctacagggtctgagaaggccaccgcagctcatttcttcccatcgtgtcagacataattcctcagtgtagccttcccacctctatacagtcgtgatacccagagcagcctttatagtcaaaatcagccaagcagtttccaggctcttagtatccagtgaaacccttatatcccttacagtcctccatcttcaagacacacgtcgcacggcactacaggtctttcacaaaaccacacctcaccaagcctcaagccaccaacttaacaacaggcagtgtacactgtgctttcatcacttctcgcttcctcagaattcaggcctgtcctcagactggttaccaccaagggtacagtccatttaagctccgtgtaatagacgctccttgttattaggccccaagtctccattcggaccacgcaggaacaaagtttaagagttgtggccccaaacacatctgtgtacatccccgtcactatcttgggactacagtccatatccttattcaaccattgctcaagtaatcactaacaccaccgtggtctggttacacgtggcggcttcacactggtcttccaaggcaatcacaaggtggcggcatctgggggtagcccaacgggcatccaggctaaaggaaacataacttggcgggggctagcggatcctag

SEQ ID NO: 549351 - DNA, 793 bp, Homo sapiens
  misc_feature (443)..(443): n is a, c, g, or t
tgtctgctgccagtcactccttgcaaagtggcttcctaatcagtatgcacttgcagcttatatagttctcgtgctgtggagttaaatgttcctctatcgtggagctcatgtcgcttttgagcgcgctagtcttcacggatatatatcatacgtcgttggtagctctaattgaaatcgattctctcttgcggtgaagatcaattgtgtccatatattattgaatagccctgtctttcagtacttaaggtttgatctgtagcttatagaagtcctatggccaaaaaattgaagtcactacacaatatagtacttctacacagactattagtgggcactcgtgccctcagcatcattgcctcatagaggctgtgtacaaccactgtctcttgagtatcatcatctcactggtgggtaaagtctatctttcagacactttgtcgtcnaaattgcgaaagcaatttgagcactattccatgtacgagagcccaaacagctatttcaatttcgaccacattcattcattcacactggatcgcactcagttcatttcatagtgcgaaccggtcgtaaaatgactgtgatttggtctagtgaagcaccaaacctactaaagtttagtcttgaacttatcataggttttcctacctagaaactgcctaacttgatttcgttaactggcattggatcccgtgggaatcagtgtcacagatgtttcccatatcctaggatataaccaataaactttgttagggagagccttgggccaccaataatttttgcacacggatttacc

SEQ ID NO: 549352 - DNA, 320 bp, Homo sapiens
tagataatatagagaatgccagatcatatcaaaactacagtacctatgataactgcattgggaagcagcatatgtgcagctgatatatgtgttcctcacatgttgcgaatggttccatagctctctcctgtacaagccccagacacgaagctgagtagatcgatgtcacgtgaagtgtactgtatattcacccgtataccttccttatcactgacacaacaggtaggattaagagatgggtcagacaaggtgctgtccctgttacatactgcggtttatgtggctgttattcttgttgtgccagtaacatgctgaccttg

SEQ ID NO: 549353 - DNA, 135 bp, Homo sapiens
aaaatgatggaggtgaccgatgaacaaggatgcatccccatctgtccaaaggctatgcgtacgtagagtatgagaatccagatgaaacacgagaaggcactgaagcacatggaatggaggacaaaatgatggcca

SEQ ID NO: 549354 - DNA, 144 bp, Homo sapiens
  misc_feature (130)..(130): n is a, c, g, or t
atatactaacgacgtcacgtacgtgtagagatatatttaagtaatatagctctatttaatgttggccataatttcctttatatcttactgttaaccagtagctgtaatgctaatactatcaacctattanttcagtaataacct

SEQ ID NO: 549355 - DNA, 1820 bp, Homo sapiens
gaggccaatgatcaggaaggccttgtgacaggcttcgcgaggaagaggcaccatgtctccagtcaggcatgcgtgacgagtgcgggagttccccgtgatctccgtggatggaggtacagccaaactgtcgagtgagtcaactgcgcccaggtggtaggaggcactatccagccgtgtcgtccgatgtcagcacgagatgagtgactgcgtccacgagtggcggaggagcagcgttggttccactgttctgatctcgaggtggttgaccagtaacagatcgaagacatgcggatgaggtcaacagattgtcccaagtgcagacagggggttaccctactggtgctggccagatagttgggagtaacaaccaagacttgacttgatgatgacgcttcaacactcagagatgaccggaggttatccatgtaggatctacactgctcgatgagagagcatacgaaggcaagcacgagagagcaaaacggtacacgagcgacgtggaattcaaagaggtggcacctgtaacagtgtgtcctgtattgtgccgtggcaatgtctccaggactcgaacagtgtgtagcacaaggactatggttatttgcatccaccagagatgagaagcggtatcaagcatgtgccccgaccaacatgaccggtgttggccaaccgagtcatatggacgcaccattccataacgagccaatttgaagccctggtgcaccataggattaaccaggtttgtgaaacaacacgccgaactgcggggagcgattttaacacttcaattcacaccagagagcacttttggcccatggcaggatgtgagcgccatacacatctctggaacgttatccaccattcatattcgcacgcgacgtcacaaatccacctgtggagcaaccagacaacgcagagtaggagcacgcaccacatatccgcgagatggaacagcaccgaacgtggtacacaacaggaagacacgggaggggcgaatccccgagggagagagctgcccacacgggagacacaaccacccacgagcagacctcagtacgagacacagcgaggtgaacgacagcaggagtcgcccgacatcaatgacgaagaagatcgaaagacgacaaaacaaaacagaagcgaagcacagcagatggatggcaacgacaaacaggcagagctagtccaccgggagctaaccaacccagccgagcacaccatatgaacacacaagcgggcagaccagaggggaaatctcaatcagaagaaaaagcaacaagcagaacgggacaccagcgaggaggcgacagcatggagaggcaacaatacataagaaaaaaacgacgcagcgacaggaaccaagaggagaatcagagacggacacccaaccaagaaacagcacacacaccaataacggaaagacaaagaagcaggaacgaagggagacacccgagcgtgaaacagaacagcagtagatgtgcgaacacaggagagacagcagagcgaaagtgcgagaccacaaacaagacggagcacaggggaggcacggcggccactagcgacgcacgcccacgacacaacgaagccgcagggcggcgagggacacatggacccaaacgacgaacaaccagagtgcgaggggcgaagacacaacgaaataggcctccgaggcgcagacgatgacaatgagcaggaccacacaggaagcacccgaaagacgcgaggagcgagaggagagaaccaggacacagcgacagaccaacagagcgcggcagagcgggtggtggagtgaccaggaaacaccaggagcaaccagcgagaac

SEQ ID NO: 549356 - DNA, 302 bp, Homo sapiens
taaaagcccccccctttttttttaaggagaagggcccagtcttttcccaagtccccacagggggggggaaagcattgtttttgggtaaattttgaaaagcaaacatttttttaattttcccctaaaaattctttttttttgtttttttttgaaagatgggccttggggcccccccttcccccttttttgtcccccaacttgagaggtatgaggggttttggtttccctgggggggggggggggcagccagggtttccctggcccttgatttgagcccagttgaataaaaggggcccccttta

SEQ ID NO: 549357 - DNA, 982 bp, Homo sapiens
gagtgccagcacaggagctgtatgatgaccaccccttccaagcagaatgtataccaggtgggactctctgcaatctacgtgaaagacccacaagccctccttgctgggaatgtgtctggcccttcagcagtaactctgtggcagcatcagttgggctgctatacttggtgtgtggccccaggtgtcaaaatgacacaagctgtctgtactaagacaaggttaccaagtgcggacatgggttactaactaacagagagattggctccattcctcttgggaataaacaggacagtgctgtatagatacagggcagaaggttggctctggtacccatgtgtacaggcctacccattgcagggactggggattcgaggacttccatggcgcatagggtagaaccaaatgatagggtaggagcatggtgtactttaggggccttggaaaggctggtacctttaggcatctggaactgactatataatggtcttcaatggacgagtaattccacttttggcatataggcggagcaacagagagatttcaggctctggaataagggggaatcacagttggaacaacaatatctggataactccattggaccacttgggacactactggatctggattcacttggccagtgtcaggagagaacatggagtaggaataatccctttgctggggcttaaaaagacaattatcccaaggtggacaacagaggcagaatgcccatatcttaacacggtgataaagagcaaaaagccaagatggtgacccatgtctaagatcccaagagggcaatattggccggcacttttgtgattatcccagttggtgtggactctttacgggcaccatatgattcatctaagaaccggtgtatggcgcaagacatctaagccagttacagatgatgtcacccacaggattaacccgctggagtgtgtgaagtgactgacttgtaacattatggaggacgcga

SEQ ID NO: 549358 - DNA, 103 bp, Homo sapiens
tgctgcaatcacgttgatcccagagcgttacccaatgcacccctctgacatctggcctgcttcttctcacatgacgaagaaacgtaggggtacctgatgcact

SEQ ID NO: 549359 - DNA, 348 bp, Homo sapiens
agaaacccccccccgtgggcccctttccacagggggggggggggggccctttttttttccccccgggcccccaaaagggctctttggggggtccccccccccccgggggggggcgaaaaactccaggattttccggggggcccccccccgggggggggggggccccccccccccccaggggaattggggtttattttcacccccccctttccccccctaaagggggggggggggggctccccccaaatttttttttgggggggggaaccctccccccctttttttttttggggggggggccccccctagggggggcccccccccgggcccataaaatttttcttttta

SEQ ID NO: 549360 - DNA, 449 bp, Homo sapiens
  misc_feature (2)..(2): n is a, c, g, or t
gnggagctagggcaggccatctgcatttgtcacccaagaactcttaccatggagaccctcctactgtggcaggacatggcgggggcctactgcaggcccatgggaatttggtgaatttccacagaatgatcaagttgacgacaggaaaggaagccgcactcagttatggcttctacggctgccactgtggcgtgggtggcagaggatcccccaaggatgcaacggatcgctgctgtgtcactcatgactgttgctacaaacgtctggagaaacgtggatgtggcaccaaatttctgagctacaagtttagcaactcggggagcagaatcacctgtgcaaaacaggactcctgcagaagtcacctgtgtgagggtgataaggctgctgccacctgttttgctagaaacaagacgacctacaataaaaagtaccagtactattccaataaa

SEQ ID NO: 549361 - DNA, 154 bp, Homo sapiens
atacgtacccgggaagaggtacatcctccattcctgcaggtatactgttcggctccgctgcggagggacacagatccgctgcgcttgtgacaaggctccgaagcggttgagctggctagaacgtcttgggtgtaagcacccgagtatcttctac

SEQ ID NO: 549362 - DNA, 407 bp, Homo sapiens
  misc_feature (231)..(231): n is a, c, g, or t
  misc_feature (246)..(246): n is a, c, g, or t
  misc_feature (333)..(333): n is a, c, g, or t
tgcacagcccttaagtcacctaagcatttctggcatctccactgggcataagctaaaacctcccaggtcaagatccagctagtggccaaaagatgcagtgccaggaccccttaaacagtggcacagcttctcagttcatctccacggcacccgggattggcttacttcctccaggatcccattggattttttaagtgacaaacccatggtgcttcctagagtgcatatatntatatttggccggtnaaaaggaaggtgagcagggtaagctaagtcctctttggaggtaggtaataatgataagcttggtcacggttccacaactcagcaggnaaccaggatgaattcccatttggtaggtggggagacaaatttggtgatccattaggtaaccaataatggtgctg

SEQ ID NO: 549363 - DNA, 184 bp, Homo sapiens
gaagacaagcaccgaggaagctgccgacgaagacgaaaagatcagcgaaatcgtcgacatttcccaactaccacctggttaggttagtctctcggccttgcgatcgccctcgggactctcctctatacatctatataacgtatctataaccatgagcctatttactcataagttgctatgattg

SEQ ID NO: 549364 - DNA, 1286 bp, Homo sapiens
  misc_feature (238)..(238): n is a, c, g, or t
gacctggctgtattgccggtcctgctcggtctgattcctctcgtgatgcacgtcgttcttcttgtctcctgtctcgtcgttcgtcgtcctatgcgtaagtgctgtgctcgcaagacgctgaatggaagatttcgactggaactagtggaccattgaggctgctcctgaaggaccacgagaatcgtatcttatctgggttgtgaacgtaataggccagatcaaatgattcattcatctntatagagggttcgcgactaactgtattgatgaccacttgacgacaaccatgctatactactgttaaagcataccggttccacgttatctcacgagcggctcgtgcttgcaatacgcgatgtaggctccgccacattcttgtttcgcacaggcagggacgcgccatctggacactttaccagacacgggcaagctcctcaaagttctccaaaaaggttcatatccaccttggcggccaccccggtgtctaggagaaagatgggtcctggtaagcgaaggcccacaacaaggttatatgcccccttttgtgagtgggccattctcggacaaaattaaaacggagcacgaaatctaaggcttagggtacctatgcaacacgcggttttcgcacaaggtcggtgcgggtgtgccaattggggacgcccatcattcggccacgtgtatttcaaggtgggtgcgacgcaaggacaacattgtaaaggctcaaggccatggtttgcggaagccagacacgtagttggccgaggaaaggtcccacgcacagggactcgaaacggaaccgagcaaggcaaggcgacttgtttgaaagagcgtccgtgtaatacggctaattactccgtgccgcacaagaggccgtggtccgtggcccccccttcggaacgtcgccgccgctaagctcccaaacgggtttttccctagcggcatgcctcacagcctctagttaccaaaacactcctcgcctcggacgtggacctgcaacaggaattggcattgcaaccgaacttggagtggaattgacacggaagcggcctgcagtggcagcggcacagcgaatggactgcaactgcaacatgcaactcggcatgtctgggactgcccacgggagcgcatcagcctctgcatcggacaaacaaccgccgccctcgacgctggccaaagaataacgttataacttcgcgacgagacctaacttccgcaggggcacacccaaaatgtagaggaagacaagattgaacaaacacaagaaatgagcacaacaaggagctcgc

SEQ ID NO: 549365 - DNA, 100 bp, Homo sapiens
ccgagaggtagaggagtgccgtctcgtgtactctacgttttagcgtggctttgacggctaccctttgctttggtctcatacgatgatcagtaagcctata

SEQ ID NO: 549366 - DNA, 306 bp, Homo sapiens
  misc_feature (37)..(38): n is a, c, g, or t
  misc_feature (122)..(122): n is a, c, g, or t
  misc_feature (126)..(126): n is a, c, g, or t
  misc_feature (131)..(131): n is a, c, g, or t
gggaattttatcgaattcgacggttctctgctgactnnagaccaggtctcggcctctcggactctgctcagtccctatgacgggcgcacgtggcagggtgaggtggtgcgctcgccgtcgcngcgntgcgntgagctgcagaattccaccaggtcgctgttgtctccccttgtgcaccagagcttccagtttgacgaggacgacggtgacggggaggatgaggaagacgtggatgatgaggaagacgtggttgcacgatgcccatgattcagaggccaaagtggcgagcctgaagatggaatggag

SEQ ID NO: 549367 - DNA, 327 bp, Homo sapiens
gggcctggagggcagaacattgagccaatgattattctcaagccgcaacatttcatgttgtttcctctgttgggtttcagacttacttgggaccagtcactgttttcttctttcctatttctcccttttaaaatggaaatatctatcctatgcccatcccaccattgtattttggaagcacagaacatgtttgtttcactgctagagagcagtttacctcagaatgagtcatactttcagtctcacctatatctgatttagatgaaactctgaactggagattttggagttggtgcgttcgtgcgacttgggcgctcgtgccgggta

SEQ ID NO: 549368 - DNA, 658 bp, Homo sapiens
  misc_feature (620)..(620): n is a, c, g, or t
gcgcgctcattatgcagaaaagacaaatcagacgaatcatatcagcatgattccactcatagaaaattcatagaaaagcttgtaacaactaaataatatattatttaggattatacaaactacaaagcaaaactagagaattaacaaaattcaggatgacagttacatctaagggtgagagaaaagtaatagaagaggcccacgggttcttcagaggtgttttaagcttttagttctcaaactagatcatggatctaccagtgtacaatctatcattcttctttaatctgtggatactttttttttttttaaccttaaattccaggagactgattcactttcctcatggattaattgtaaagattatggagaaccctatggtaaatgaaattggtgagatgtttcctcaaatatatgcggtgcctgtacttatatacggtcttccaagagagatacaaacagggcagaaccttttaaactagtattaagggtggtttcccaaagcttttttggttttcttaccttgaaaccacagacccgttaatccctgggttaaagcagttgctaagtttggtaatttaaggctcagaggaccattgggggtttcaggatttatgttnagcccgataggtgaggccttggatatcgggaatttgac

SEQ ID NO: 549369 - DNA, 868 bp, Homo sapiens
tccggaccgtagccagacctttggcaccaagaaggtgcaaaacgactgtccccgccggatccccgattgtcgcccaccggccccgaacgctgggcaggaccccccagagaggcggacccctccgcaaggcgacccaagaaggggttaaccaaggaagaagaaattctgaactgagaaacccattggtgcccccaacgacgtttttccgcccacatattctggaaggggagggagaacaacaccaaaacctgagaaatccgactcaaagggctcatccacacatgacgtttccccattcttagaggaatccaagagccaggatggttgtggacaaagtcatggaaacacctggaccatgatggagacggcgaatgtgacttcccggaattcatggcccttggttgccctggttactactgccctgccacgagttcttttgaacatgagtgagattatgaaagcagcccaacctttctcttgtacagagacggtcatgccagaaacgccgacacccagggcttcagcctagtaggagctgaggctttcccagccgtgttgtagctaattaggaagcttgatttgctttgtgattgaaaaattggacacctctttcccaaggctgttttacggcctgcatcattctttctgctatattaggcccgtgtgtaagctgactggcccccgggagctcttgttacccgtaacttaggagtccggtctcagtgataaagcgtgccccgctcagccccccatggccgtgtagaccctaacccgggagggaaccccgactacagaaattaccccggggcacccctttaaacttcccactaccctttataaaaaccaagccttatcccacccaacatta

SEQ ID NO: 549370 - DNA, 377 bp, Homo sapiens
ggaaagggggacccccctttgggggtgccagtgtttccaaaaaggctcaaggtccccaaggggggggcaatcccgtaaaggtcaacccccttttttttggaaaacctggcaaaatcttgggacccctggaaaagttaaagtttggggttggattcaatgaaggggcccccccgtatagtgaagataaaacccggcaagggggtttcttgggttggaaaccccaagggtccctggtgggcccattttaaaaacccgcatttcccttgcccgtaagggggggggataagcctgggttttcaccccccccggtttaaccaaaatttggatttcatatttttttgggggagggaaagaaataaaatcatatgaaaggctga

SEQ ID NO: 549371 - DNA, 681 bp, Homo sapiens
tgtggtggctcatgcctgtaatcccagcactttgggaagctgaggcgggtggatcacctgaggtcaggagtttgagaccagcctgactaacatggtgaaaccctgtctctaataaaaatacaaaaattagccgggtgtggtggcacatgcctgtaatcccagctacttgggaggctgaggcaggagaatcacttgaacccaggaggcgtaggttgcagtgtgccaagattgcaccactgcactccagcctgggcaacgagagcgaaactctgtctcaaaataataataataataaaaaggagtctggggattggagggatttaggagtgctctacaccaggaaaccccccaccaaatcttctaataagggacacagtgtggaatgcttccaacactttacaaaacactctcatttcacttccatttataccgacagagtctcactatgttgctcaggctggtcttgaactcctggcctcaagtaattttcctgtctcagccttcctaatagctgggattacaggagtgagccaccgcacccagctccttcaaacactttaacaaggaagctcaggtaaatgtgagaagagggtccatcgaatctccctcactgcattcaactgtccaagctctttacacccatccttactaatttcttccctccatgtgactaagggctca

SEQ ID NO: 549372 - DNA, 775 bp, Homo sapiens
tggaaatggagtttggctcttttggcccaggctggattgcaagggcattggtcttcagctggttgaaacctccacctccggggttcaaggcaattctcttgcttcagcctcccaagtagctgtgatataccgggcatgccccactcaggccggggctacatttgggtactttgcggggtacgacagggggattcccacggtgtgtgcgccggggcgggtcctcaaattccttgacctcaagtgatctggcctggcctgggcctcccaaggggttgcgggtctcacgggctgtgacgccattggcactggtgcctggcatcaagtcctttatgggccttggtccatatccgggtttttggcccttggaaacccaaactgtgttcgctgtctcatgttgacctcttttgaaccctgttgtccacatttttccccacatatgtgtttcacacgtgcccggcggccaaaacttgggcacccttcgcggccgacacagcttgccctgtatctaatttgctgacgtgcacaaaatgttctcatctacactgttgaccccagtcacctacggttacttcgaatcttcgtggacacacctattccctattgggtcaacgtcttgggtttcacattcacatttacatttcgcgggggcattcaaccctgcaaactgcctactgcgttagcggccctgtttgtttttgaccacactcttcttttagagccggttccaccattcggagactggcggtattttcgccaacaagcgcccttttgggcg

SEQ ID NO: 549373 - DNA, 1019 bp, Homo sapiens
accttagccaaaccatttacccaaataaagtatagcgcgatagcacacattgcaaaccatggcagcacatagcatcatcagtcaccgcaagggcacacagcatgcaacaaattataacccaagcatcaatatagccacggcactaacccctataccttctgcatcacatgcaattaactagaaataactcttgcaaggagagccaaagctaagacccccgaaaccagacgagctacctaagaacagctacacaagcagcacacccgtctatgtcagcaaaatagtgggcaagatctcataggtcagaggcgacaaacctaccgagcctggtgcatcagctggtcgtacaagatagaatcttagttcaactttaaataccgcccacagcaaccctctaacatccccttgtaaacccacaccgccagcccaaccgaggaaccagccctcagcacccctaggcaaaaaacctagcaccagcagagctaaaaacacccacacaccatagtaggcctacaagcgagccaccacactcacagcacagcgctccacgcctcaccacgccacctacctacaacaaatcccacacatatacctgcaaccactcacagccaaacggacccaaccatcaccctacccaacgacacccaccgccccgcatacgctcacaccgcccacccatcaccccccgcactcaagccctcccgccccaccaacacaccgcccctcgccacccccacacgcccaaacccacccaacacaccaccagccccaccacccccacacaagacaacccaaccccacgccgcacccaaccgcaaggaaaccacagcacacaggaccaggcaacaccaccccacagcaccaccacaaccccccctaaaagacacacacaatcacgcccgcacgccacgcccgtaccaccccacgcacacacgcaaaagcagagaagaacgaccaacgataccgacaccggccccacagcaccccaaccacaacgccacacaagcacacaaagccaa

SEQ ID NO: 549374 - DNA, 514 bp, Homo sapiens
ccagtgcctacagctcagctggtacatcgagtaacatctgtgatgcagaatatctgcagtcaggttatgacgtccatctggagtttcttgacttatgtgtggaaggaatgagggacgaccatctttatttcagtcagatccatctggagcttactttgcctggaaagctacagcacatgggaaagaactcatgtgcactgggacagcatttccttgcgacacagctatcatgaagctctggaacttgacgatgccattcatacagccatcttcaaccctaaaggaaagctttgacgggcaaatgacagaggataacatagaagtctggcaatctgcaatgcaagctggatttaggaggcttactccaactgaagttcaggattacttggctgccatagcataacaatgaagtgactgaaaaatccagaatttcagataatctatctacttcaacatgttcaagtatgtaagttttgcagacttttgcatacttattctactggtttaatcgctg

SEQ ID NO: 549375 - DNA, 291 bp, Homo sapiens
actctgaccgagttcctaagcgataagtgtctaaggtgagctctagtgaaggacagaaacctcccgttgtgagcagaagagtgtaaaagctcgcttgatcttgattttcagtacgaatacatggaccgtgaaagcggggccttcaatgatccttctgatccttttgggtttttagcacggaggtgtcagacaagtttgccacagggcattatctggcttgtggcggccaagcgttcatagctacgtcgcgtttctgatccttcgactgtcggcgtcttcttagtcattgtg

SEQ ID NO: 549376 - DNA, 153 bp, Homo sapiens
aaaaaagtaaaaggaactcggcaaattttaccccgcctgtttaccaaaacatcacctttaggcattaccaggtattaggaggcaccgctgcccagtgaccaatgtttacaggcgcgcgggtacccctaacccgttgaaagggtaggactatta

SEQ ID NO: 549377 - DNA, 218 bp, Homo sapiens
cctgccagagtgactgattgtgcatcgcgccgtagatgctttacttggattgatccacgctcgcgttcatccttatcaggcgtggcatcgcccacatttggaatagttgcccgcgcggagactttggttcctgtcctcgcgtgttccgtgagaatcagccaatgcttcccattggcctttcagacatcccaggttaagccatggtgaagctcttattg

SEQ ID NO: 549378 - DNA, 400 bp, Homo sapiens
gctcctattcttcaattctgagatgagtctgatacagaaagattttttgtcacaggtgatctgtagagaaacatgacagattaagtgttattagtataaaatgtgaactttttacttaagggtttttttggttttacttaaaaactacccatttggaaacaacagatggtcttttgattttttttttattagaaaaatgacacaggcttattgtaataagtgaaacaatgcagaaaactacagagaaaaagttaatagtttcctgcctattaaagaaacaaacttttgttgaggctaagatgggaggattgcttgagtccaggagtctgaagttacagtgagctatgattgtaccactgtgctccagcctgggcaacagagtgaaacgctatctctaaaa

SEQ ID NO: 549379 - DNA, 272 bp, Homo sapiens
ttatcttttatctagataataataaagaggcagatctacgtcattgtatgcatttcctgttaccttgaaaaaataaaaatgttaacaggaatgcaggtgctcattctccctactgtatcctacaagctgctaacttgaacgttgtctaaataggctctgagactggatgtgaatttaatgttttgagatatagccttctttcttggttaggactagtgtagcaagttgattcgtgccactcccttcactgtggcagacacggtaaagccgag

SEQ ID NO: 549380 - DNA, 276 bp, Homo sapiens
cccccccccaaaaaaaaggggggggggggggggggggggggggcccccccccccttccccccaaaaaggggggttttttttgggggggggtttgggggcccgaaaaaaacccccccagggggggggggttaccccccccccggggggcccttttttgggggttttttccccaaaaaaaaggggggggtggggggccccttttttttaagggcccccgggggggccccccccccccttttttgggggccttttttttttttttttttccccttttta

SEQ ID NO: 549381 - DNA, 263 bp, Homo sapiens
ataaatcactactaatataaagacacatgcacctgtctgtttattgcagcactgttcacaacaggcaaagacttggaaccaacccaaatgcccaccaatgatagactggataaagaaaatgtggcatatatacaccatggaatactatgcagccataaaaagggatgaactcatgctcatttgctgggacatgaactgaacgctggacaacccatcattttcaggcaaacataacagaacgaacatgtaaaaccaagacacca

SEQ ID NO: 549382 - DNA, 494 bp, Homo sapiens
gtggttcttacttccatctgagaatgcgcagttcatataaggttagatgttaacgcacctgtcagcataccttgcagtgataagacagttaatcaaagcaattccatcttgcccggttcagacagtctgactccgactttcatgcctttacgaagtgaaagggggcacaatatcatatctccccaaatatcgagacacctcttgcggtctaaactgagaaatcgagcagtgctgtctgctgcaccattcatagaagaactgtccgcttttttacacagcaaggaagcagtgaattaactaagcaagggagactgctttccagaagtctttctataagtagaaataaaaccaaacaagtacacttatccaggaagaaaaacaaaattcaagctgaaccatagccgctgactcaaggattccttcaatatttcaggtttgcaaggcaactaagactgatagcagctaagccagatcagttgattaagtgtcccgat

SEQ ID NO: 549383 - DNA, 1106 bp, Homo sapiens
ggtgagtgtgaagtgccagaggctacggggcttcaagaccgctgtctggagtccccctattccaggacatgatcggggcccacactggctgcccccgaagcagcacggagccctgccagagcccctcagggagagggctgatccaccctgcgtgcacccctggggccaccagactggcaccacggagcatgggtgctcccatgcagacagggggggccttcgcccatggaagcctgtgacgccgagatagcacttgctgagcagcacgctgtgccgagctgaatgggggtcggggtcatgcgtcacggagaacagaccgacaggcatatgagccacccgaacacactccatgcactacacggacggggcatcccatgaaagccaaaatccagacactcgcacgcatcccagcgtctccctatgggggacccactcacagcctacttacactaccgccagcaccccggatggcccagccttccccgtgcaagtgaaggtggcacagccagtgaggggctgcaggaccacccaggcaggggagcctctcaggcctctgggcccctcccggagaccccaaatttccctctcccaggacgcaggtgcaagtcaggaaggaactggcatataggacgcagaacagagccagagcccaaagggaccaaacgaggaagctgactgggatcacctgagaccctggcacggacagaaggacagaaggacggacgagcacacggggccccagggtgacacccagaagacaagacctcccagaggaatggcgctggaatcggcggccgacagaagcgcaggatcaacgcacatggacacaaccgaccaacgggtgtcacaaattaggccaagaggtgtgtaggacatgcgggagaaaaaaagtggaatgggcaattggcctagcgagtctgccgccccaggaccgcgaacaaaaacgcaggggacagcaaggagtagaacaagagaaggagccaacatacgcggagcagcatctaaacgcacagataagagagcacaccgacagcgcacagcggagacccccagacagagcacggagaccacgacaacagaaccacccgggcgcacagagccgcccc

SEQ ID NO: 549384 - DNA, 556 bp, Homo sapiens
gcaggagcatcacttgatctcaggagtttgagaccatcctgggaaacaaggtgagatcttgtctcaatgaaaaagtaaatattaaaaaaaaaagtaaaacagatttctctagagtagaaaaagagtaaatgctactgtgccgctctctgagtctagtatgactacagtatcaaaactagggatggacagtaacaaaaaaaatttgcaggctagttcatacggttgtagataggaaaagctaacattccagcaaatcagattcagtgttttaaatgcacatagctaagtaacgtttttggaggagctaaaaaatggaaaatattttcatggttggaaatcagttcaccattggaaaatacacgttactaattgattatattaaaagactaaatgagtacagctacatttgtggtcatctgcatttcagcaggcttggggaaaactgatctagttctattttgaatcatttgcacttcaactgatgtctaaaataagatgttgtttggggaagatactgcagaataaaaataaaggacagcactaacactttgttaaa

SEQ ID NO: 549385 - DNA, 915 bp, Homo sapiens
ggcacagcccgggaatctttgttagcgtagcccgcctggtccactaggatctgatcaatgggatctctcggagcacgtcataggcgcaggctcgctttactagtgtgtgtgctcggccattgtggacacacctatcaacgacgcccgctcccgcgcaggcgctggaggctcttcccctgctgaggccatggatggctttcctggctctagtcgcgctatactaccaatggtgactactaagtcgcggtctatgcctcgtcaatccactgcacggtcatgttctggtcccgccgcgcgtatattacagaagtggccatctacaggagtctgggtgctctgagagatcgttgcgacgcacacgtgccagtcaatatgtgtgcgttgcggagtgacccatcgctggttgcctcgaactctcatgaggtcgtaccgactctggccggagatgttgcgtctacagttgtataccatgatggtgtactgtagtctggcgctagccatacgcgtggtaaaggccagtacactctccgcaaactcgcgttcgccatggcgcgagtgtaaaccacgaagatggatagcacaggccattgtgtcgcctactgtgtgaaagtgatcaacgagcaggcaggctcatgacatgggagcactggggagccaatcgtcacgcacagatcgcagggtgcctctggccttgagtcatccactgactggtccaagggccattcccaaggaacgcgccccttcactgatccaccctttcaggctaaggagctgccctatctacgcctcagccccacgagacagccccttcaggatttccactggaccttgcccaaatagcaccttaggcactgccctaagctggggtggaaccggaattttggtcaatacatccttttgtctccaagggaagaa

SEQ ID NO: 549386 - DNA, 378 bp, Homo sapiens
  misc_feature (378)..(378): n is a, c, g, or t
gggctgtagggccgcgtgtgacagagctgttgcgcagactgtgttcggactctagataccgcgctcgacggcagctgtgcccagacttttgtgttttcagctgcagtgaaggctcggggctgtagaattgcgaccttgccaatggacctgagacgggtttggttatgcaacccttgtgacatttggaagcatttttggatatatagcggagagagggtggtccgcgtttgaatgcgtggtctttttggtggatgtgttggccgcgtatggagcttacacgggcttcaatgacaaacgagatgtgaaagtgtcactgtgtacaggtttcttcctggctaccatgggtgtgagatttaagaggtccgactgtgttgttgn

SEQ ID NO: 549387 - DNA, 331 bp, Homo sapiens
acccgcctgatcacggcggagggaagtaccttccgtgctccgtcacactccttctctgccggcttcgatgaagacaagccgatcgccatcactggcacttacaacttggactttgacaacattgagcttgtgcataccttgcagaccttggagcctcgtgcatcagacgctaagaatcaggagggcaaagtgcacacacgtaggaagtccacggattccgtacccatctctaagtgtacactgtcccggtcgctcagcctgcaagccagagactctgatggtgcttcttcctcaggcaatcccgaggccgtggcccttcccccgtagtgag

SEQ ID NO: 549388 - DNA, 304 bp, Homo sapiens
cagacgtgtccactcctggactgagagagaccagcattttttaaaatgccagcttttccactgacacaaggggggttttttcagaagtccccactggcactactgctgagggctccaggacagaagtcacctcctctgggagaacatccatccctggcccttctcagtccacaggtttgccagaaatatccacaagaacaatgacaaggctctttgtctcgcccaccatgacagaatcagcagaaatgaccatccccactcaaacaggaccttcttggtctacctcacaagatacccttacctt

SEQ ID NO: 549389 - DNA, 897 bp, Homo sapiens
tatgttctacgagaattcatttaataccagtcctggagttccatgtacgcctgcccataactgacatatcagctattccaatcattgcaacaactgggcctgttaatggaattctgccacaacaaggaattcataaggaaacagatctactaaaatgtattcaaacatattcgtctctttctcgatctcatggccaatgaaccgcatctggacagtcagacacaaccgaagccctactcagtcacaaccagtctttcttggccactaatgaagaaaaatgtgccagcagagcaacagttagagaggccacaagtgaaagaacaggatttaaacatacatgtgcgagatacaaaaacagtgaatggatgtacagaaggccaaaactgtgatccacgacaagctgaaaatgttagcaattcataaaatatttcgttgggagagctcaaggccctggtagcacgcaacaaccgaggattcagaaattcagaggtttgattacagaaatggaggcatgtactatctgtacttccaacagtaacgtggaaccccagatattcgacgttgagatagcactggcatgcgaccattaagaagtgagaatgctcagtgtacgaaggctagttgagaattttgaaccagcaactcagagaacaagcagaaaaatcaagaccatctggtgctgttggatttgcaacctttgaagttgctttctctttcagtccatcgaatatttcactgcgcaattccctgtggggagtcctaaagagcccggaagttactgcgcggtaacagtggcaccctgttccctgtgtctgacacccgcgcgctcacaccacaaatcccttgtctattcaaacacaccctttcatttgaaaaacgcgcttatattggagtcca

SEQ ID NO: 549390 - DNA, 474 bp, Homo sapiens
agtcagcttctgcttagctccatcagatcccaattctctacggagtcgagaattatgaaaactaaagctatctacagctcttaacaattgagtaaagtatactgttaccagaattgggagcatatttgtttctctctacctggtttctccagaatttggaaactatttagtcactgaaaactaagctgtgttttcttaaaaccctgcaaactgaagccagacaacttgaacttcagaagaaaataacagcaacctatttacgtacataagccactttcatacctgcctactaatgtatggacttcagagtaatgtggcttatatcgatttttctaggattgttcttttgtttgttgttgttttttctcccttcctccttgctattttctcttcacagaatgtgagacttcacaacctactaaaaatgagcttttgggacttacccatctaggaataaaccatcatagctatgag

SEQ ID NO: 549391 - DNA, 255 bp, Homo sapiens
tagaagataatattagaaaaaccccttctagacattggcttaggcaaagacttcatggccaagaacccaaaagccaatgccacaaaaacaagaataaatagatggggcttaattaaactacaaagcttctgcccagcaaaagaaataatcagcagagttaacaggcaacctacagagtgggagaaaatcttcccaatctatacatctggcaaagggctattatccagaatcttcaaataactccaatccacaaga

SEQ ID NO: 549392 - DNA, 125 bp, Homo sapiens
gttaaaaaagtatgtacacgttatttttagagtaattatagcaaaattgaatgtgaaagtttggggaatcccatatattacctgtccccgtgcacatgtcatcatgtccccctactttaaatcat

SEQ ID NO: 549393 - DNA, 316 bp, Homo sapiens
catacgaaggactcgctatgttctttacttcagtgtccagaattgccgggaggctgactcgaacattatcagcgatctctgtcgttgtgccgagtccttcattgacatgtctatataaagaagcaagcgcaacatactgatactcagatatttgcttcacctaaagtctgtctcgtgtgcaagacctctagaagggtcaaggagaaggtagttttagcttctctggtgtattgttcagttatgtctgtttttaacagcattatagatgtgccccaattttgaccttacacttcccttcttattatcctctaacacc

SEQ ID NO: 549394 - DNA, 365 bp, Homo sapiens
  misc_feature (231)..(231): n is a, c, g, or t
cagaatctgtttcacacaacaactgctatttgaaggaaaaaaaaaaaaagaagcaaatgataccaagaacaagctcatatacaggagatccaatcagcagtatgtgtacggcttgaaagatacaggtgagatgaggtcagaaaaccgagccaaggaagggctcccagtacttctccagaaaccagtaagttactccgaaactagttcaagcatacacttgcttgcccgccngttcacctttcctctaattccaagaaaggagcatagtggcatcggaaatacagcatctgtaagaagcggctgcttctaccagaagaaagaggaggactggatctgctgcgccttgccagaaagaccagaaacca

SEQ ID NO: 549395 - DNA, 533 bp, Homo sapiens
ccatcggcgcggcacttctctcccggtcactgcaggcgtttgtgcgctactacgtcgaacgcggggagatccgccgttttgtgatcaagtgtcgggtggcgaatcagcacagcaacagcgttgccgtgcgtaacggttttacgctggaagggtgcctgcgggaagcggaatacctgaatggccgctttgacgatgtgaacatctacgggaagatctacgccctataacgctcccagcagcggggtgcgggtgatgcgctggtcgccgttaatcaccttttcgccgcgcaggtgaatgctctccccggcaaaggcttcaatgaccgcatcatctgtgatttcaacccggtgctcaatgagcacatctccgctgatccgcgcgcgttccctggatcaccaccttatcgtccagcatgatcggtccgccgcgcagccatgcctgaccgccaatcagcacgtggtgcttgatgacgcagtttccttccaccacggcattctcggcaatctgagagctgtagcgcaccgtcggaatag

SEQ ID NO: 549396 - DNA, 1145 bp, Homo sapiens
  misc_feature (235)..(235): n is a, c, g, or t
  misc_feature (308)..(309): n is a, c, g, or t
  misc_feature (347)..(348): n is a, c, g, or t
  misc_feature (351)..(351): n is a, c, g, or t
  misc_feature (355)..(356): n is a, c, g, or t
  misc_feature (358)..(358): n is a, c, g, or t
  misc_feature (374)..(375): n is a, c, g, or t
  misc_feature (395)..(395): n is a, c, g, or t
  misc_feature (399)..(399): n is a, c, g, or t
  misc_feature (409)..(410): n is a, c, g, or t
  misc_feature (1140)..(1140): n is a, c, g, or t
ggcgaaagccccggactcgtggagttgtgaacgccgcggactccggagccgcacaaaccagggctcgccatgaagccaggattcagtccccgtgggggtggctttggctggccgaggtgggctttggtgaccgtggtggtcgtgtgaggccgagggggctttgtgctgggggcctgaggtcgaggcggaggctttagaggtcgtggacgaggaggaggtggaggcggcggcggcnggtggaggaggaggaagaggtggtggaggcttccattctggtggcaaccggggtcgtggtcggggcaggaaanngaggaaaccagtcggggaagaatgtgatggtggagccnncantcgnncntgagggtgtcttcatnntgtcgaggaaaggaagatgnactnggtcaccaannaacctggtccctggggaatctagtttatgtgcatgagaatgagagtctcgattctcgcgaaggagtatgacaataattgagtaccgagcctggaaccccttccgcatcaaagctagcagcagccaatcctgggtggtgttggaccagatccagatcaaaccgggggctacggttctctagctcggggttgcctcgggcgagcaggtcttcccagtgctcttgacatcgttggtccggatggtctagtctatgcagtcgagttctcgcacgttctggcgtgactcattaagttgggccaagaagaggaccaagttcattccttgtggatcgcagggttgttcgaaacccataaaaattacgggatgttcatcgaaaggggggatggacaccttgggttgatttgcccagcagaacgaaccggatatgtggccctaaatgcccacttctggggtagggaggcacctcgggtacgttccctttagggccctgggtttgatccccggctcatacgaaggcgcgttgctcccaagtaaaagtgccgcgcaaaatacccacaacgagcctgtgctaataagaccacggcgtgtggatgtgcccccaggatgataaaacatgacgtgagatgtgcgacagcgtcatagcaccaaaaaaaaaggcggtaaaggccctcctagcgtaccatgtcgttgcttgtgttgaatactaccgacgtgaacaagtcgtcactaancgggt

SEQ ID NO: 549397 - DNA, 252 bp, Homo sapiens
agggtagacagtcacggagtatgtgcacggacatgagggggtgtaggggggcaagagatgaaggtgagaggacagccaacagctactgcagtgatccatgtgggaggtagtggtggcatttttttttttttttggaaaaagagtctcgttttctggcccaggttgtagtgcaggggtgcaatctcggctcactgcaaccttttgccttcctaggctcaagcagattcttctgcctcagcctcccgagttagc

SEQ ID NO: 549398 - DNA, 514 bp, Homo sapiens
  misc_feature (120)..(120): n is a, c, g, or t
tgtcggggggagggttttaaaaattttatttgatttttggggggcggggactgaaagatacaccattggactctaaaccaaaaccctgaaagatataaaacaacatgaggcttctttttnaaaaagtaccccacacaccaccagcccttgaaaaattgtgctttataccaaaaccaaaaaccttaagggggcaggcacacaagggtcacgcctggaaaccctattatttgggaggccaagggtgctggaacacctaggcgggagataaaaccaagcttggccaaaaaaattaaatttctttttttattaaaaaaccagaaattccccggcctggggacccctgccctggggtccaatacatggggttgggccgtattccaggacccccgggtacccactagtttagacgggccccacccggaagattttagcttttttccctttgaggaggggaatacccactttgggtaaaaaagggaatccctgggccctgggggaaattttatccccttcg

SEQ ID NO: 549399 - DNA, 909 bp, Homo sapiens
gctgcgcctgcgcgccgctggcctgacggaggggagcctgaccgatgcctgagcgggctgctacgtcccgcggtcggagccgcgtcttctccctggctccgccaccagcctggggcatcggtgtggtggtgcccaggtgtgcccctggtgtgcatggcccatcctgtgagtgctgcatgggctgactggccccaccatccgtgccactgggacggcgtgcgcggagaaggcagggaagaacctacggcagatgagcaaggactaccaacaagtgttgctggacgtcctggcggtcattgcggcggttccctcctggcatgccagaggaacagcgagaagggctccaggaagaactgcttgacatcatcctcctcatcttggagcgcaagcctcagctgcactactaccagggctaccatgacattgtggtcacattatctgctggtggtaggcgagaggctggcaacatccctggtagaaacctcatctacccaccacctcaggcattacatcggatccaacaatggccaacaccaagcatatatgagcctatctgatgcccatcattgaccaggtgactccagagctccatgacttcatgcagagtgctgcggtactggaccatctaaggccctacagctgggtcatcaacctggtaacgggacatgtactgtctgaataccagcacgtcgagcggataaatgactatatcctggacctggcgaccccatgtgtactgcgcgcaatttcaacttcggccggtgcggtgagagtgggcggcaggacatccggcgcgaggaggcgaagatccactgtggagcattgtggacgctgtaggaacggtgggacctcggcgtcccgcccaaaccttgggtggtcacagggaattcccataaggaggagcattgc

SEQ ID NO: 549400 - DNA, 879 bp, Homo sapiens
ggatgggtgtctgcatggttctttgttcatatgcatcagcgccaggggtagccatgcgttgggttatgcattgtttcaagctacctagaggtcaggactgtcctacggacgacccatcctactctacctcacgcactccacccgcctgccagcctccactggtgctaccaccttacctgaggagctgcggagcacatgggtctataaccacagccaccaggccgcatatgagcctgggtctcaccggctcatcacatggccctgcttcctgcttagccaaggctagaggcctgggctgggaaagactttaggaaccagactgcttgcctgtttccgcagggcccactgtggcgctcagagactagggctccagcccctcttggagaagtctcagctaagctcacgtcctgagaaagctcaaaggtttggaaggacgcagaaaatccgttgggccagaagtaccagactagatggacctgcttgcataggagttctcggaggaagcttggagttttgtttcctctgtgtcaaacgctgcaggtgtcccgtaccgccactggtgctaggaagaggacgtggaggtgagtgtcagaccgctggaaggccccaaacggtgtcactcgcctgagctcctcttccatggcctgtgcgccacagggactgggaaggaaggacttgccctgtgtagtttgtgctgtaaagagttgcgtttttgttatatttaatagctgtgggcatgggtgaagaggaggggaagaggcctgtttggcctctctatcctctcttccatcttccccaaagatagagctctcatgctcttgagtagcccatcctggcctagaccagcagacagagccaggagaggctcagctgcattcg

SEQ ID NO: 549401 - DNA, 319 bp, Homo sapiens
caagatcctggtgaacggtggtctgggtgaacggtcagtcttatagaatgtagaagctgtagatggagatgtggtgttggaagtctaagggatgaggtgtgggaaggtgagacacagaagaagcggataaccctgaagatgtgatatgcagactgggaagatgagtgagaagcctttgcatcgcaggagtagggcacaggacatcttcttgagtgacgtctgtgcaggcctgtagtcgcaagggctctgagctgactggccggtgctggatctggtgagcggaccatccctcaatccaaggccatgactcactttgtac

SEQ ID NO: 549402 - DNA, 409 bp, Homo sapiens
agggaaggcagaaacaccgtaggtatcaggcaggcaggccccccctgttttcctccttctgagacagaaagttaaaaatctagttagatctgttcctcaccctgcgaaacaagaggcggccgtatcctggggctcttcccggcagccgtatcctggggctcttcccagcagcggagtgccctccagaccattgtttcatctcccgcactttcgtcatctcaggggaaggagctgtactgaatgatgcagacacaactccctctaactcccactctttgactctgcaaatgggccacccacttcttcatttacatcttcctgagcgttctgtggggaaactcaaattcggataatctgggatcttgctcagctccattgctgagaagtactgtggagcaggctgacgagg

SEQ ID NO: 549403 - DNA, 1091 bp, Homo sapiens
  misc_feature (362)..(362): n is a, c, g, or t
  misc_feature (365)..(365): n is a, c, g, or t
  misc_feature (547)..(547): n is a, c, g, or t
  misc_feature (719)..(719): n is a, c, g, or t
  misc_feature (1091)..(1091): n is a, c, g, or t
tgtgtgaactgctggaagcagggtgcccgtggcagcttcttgcagttcatgcccttcccccccgtttcggaactggttaagggttcaacccatgtccaagccccaaaggggtttttgccattcagggccttaagctgcccttggccccgccaggtggctgtaaagccattgctgcactctgaggggcttggcatggccccagtgggggctggggactggcgcagccccaggcggcctccaagggaagcagtgaggaaagatgaggcatcgtgcctcacatccgctccacatggtgcaagagcctctagcggcttccagttccccgctcctgactcctgacctccaggatgtctcccggtttnttntttcaaaatttcctctccatctgctggcacctgaggagtgtgagcaacctggaccacaagcccagtggtcacccctgtgtgcgcccgccccagcccaggagtagtcttacctctgaggaactttttagatgcaaagtgtgtatatgtgtgtgtgtgtgtgtgtgtgtgtgtgtgtgtgtttntgtgtattttgtaatatgtgagggaaatctaccttcgttcatgtataaataaagctcctcgtggctcccaaaaacaaacaaaaaaacaaaaaaaaaacaaacaaacacttgtgttgcgcgcgcgcgcgcctctcggcgcccctcggaataacacctttctttagaacaccantatccggttgggcgcgcgcgcggggcgcccaaataaggggcatacaggtgagaacactttggcgccaatagcgggtgtgtgtccaataagagaagagactccggggcacattgagacaacaggcggcgggggggtctctctcacaccacataatcaaacaagcgcgcgccgcggggggggaaaacagggccggagagcgcgtttcgcgtgagaaacacaaagatctccagagagagggggacgagtatctggcggagagggctccaatcataacgcgggacaactctatattacacacgagggagagtctcacaaggagagaatctccatatatactacaaaatttttgcgccccccgatcaaaggtgggan

SEQ ID NO: 549404 - DNA, 903 bp, Homo sapiens
  misc_feature (17)..(17): n is a, c, g, or t
  misc_feature (23)..(23): n is a, c, g, or t
  misc_feature (63)..(63): n is a, c, g, or t
  misc_feature (127)..(127): n is a, c, g, or t
  misc_feature (136)..(138): n is a, c, g, or t
  misc_feature (141)..(142): n is a, c, g, or t
  misc_feature (177)..(177): n is a, c, g, or t
  misc_feature (186)..(187): n is a, c, g, or t
  misc_feature (192)..(192): n is a, c, g, or t
  misc_feature (210)..(210): n is a, c, g, or t
  misc_feature (223)..(223): n is a, c, g, or t
  misc_feature (840)..(840): n is a, c, g, or t
  misc_feature (902)..(902): n is a, c, g, or t
gccccgtaagaaagacnatactngggtaatccaacaaagtctcccatctcccaagtaaaatanaagaaaggtgtatcaagtcaaactgaaagtcccatggacattcctgggatgtcccaaaaaaganaagtgcccnnnaannataagggtggtcaacaaaaacacagtggggagganccagacccnntcatngactttttaaaccgacantaagctcttaaanaaaaatcaagcctgaggattcaacgaaagccagctgagaatacaggaaacatgtttccagccaaaccctaaactacttgggatggtctgggccccctgaagctaataccagtcacatcagatttcaaggattctgtgccaagaaaaatactccgtgggatgcaaggcagatgccacttgccacttttcttgtttggggaaaaatcagccatctataagctgtgtcatgcactctcctcctggatgggctcgagaagtgagactctgcttgatattaaactattctgggataagtcgtaactgaaatgttatgaaagtcaataagaactacatatagaaccaactcagaatgagggaaacaacatagaaaaaaggaaggaagcaaggaaagaagcctaaacaaactagtgtctctgagtcttctagccaaagatcatctggatttactaagttttgttaaacatcagaaagtactgttcaggctgggtgcggtggctcatgcctgtaatcccagcactttaggaagccaaggggtgtggatcacttgaggttaggcgtttaagaccagcctagccacatggcaaacctcgtctctactaaaaatacaaaattagccangtgtggtgcatacgcctgtagtcccagctactcaggaggctgagccaggagaataattgaant

SEQ ID NO: 549405 - DNA, 334 bp, Homo sapiens
  misc_feature (43)..(43): n is a, c, g, or t
tgaaggaggtcattgacagagggcagatctcagagtaagttgngggagatgaagtggagatatactgtgacacttccttggagctggagatgggaaatggacatacttagaaatttagtggatttaattagcctggatttccctctccaaaacttttagaatggaaaatcccatccccttccttatatagtgacttctacccactaccttctaccattttctactttgggcttaggatgatgggcattatctacatgtgttttcagcacctggttggttctaaatgggatctggagacccagcttcttggagatttttaagaggaagtattaac

SEQ ID NO: 549406 - DNA, 324 bp, Homo sapiens
tgctatcatcttcaactaaaccagaaaacatcggaccctccccaagaacctgtcagtattatagttccaatcatatataacatggcttcaggatacaacccagcaggcagacatacccaagacagcagaactcttctgtggctgctcccataatggtcagcgacattctgaagaggttagcagagatgaatccaccacgacaaggtgaaatgcacaatatatgcagctgctacgtgatttcactggctaaatcttacactgcccactggtgggcgtccatagacactatagtatatacacccaggaaggctgacagatgagaca

SEQ ID NO: 549407 - DNA, 659 bp, Homo sapiens
tgccttcagtggtttagtgcgggaaggccagggctatgggaggcggcggcgggatgaacctaacgccatgactatcacaccggcaaagatcaataccaccaagaagcgccctcatcgttcattatccaatgcgtttaccctgtatgaccagtcacagatttaggagttcactgaggactgttgcacaattgagcagaacacatgtggcttgatcgacgaggtcgaattgcatgatatgcttgcttctctagtgaagaatgctactcatgcataccttgatgccttgatgaatgagggcccatggtccatcatatgcatcatgcctctgaccatgttagcttataagttaaatggcgcagatcctgaagacgtcattagaatcgacttcgcttgctgtgatgataaggtgacaggtaccattcaggaggattacctatgagagctgctgacaaccatggtcgatcggtttacagatgaagatgcgtatgagcttgacagagaagcacctattggcacactggcgaatttgactctcatcgaagtcacatgcaacctgaacgatgggtctaagacaaagtgaatggaagaacttaggttcctaacttatcataggctactctatttactttttagatatgtcataaccctgatgcctgtcg

SEQ ID NO: 549408 - DNA, 148 bp, Homo sapiens
aaggtggaggacctcttcctgaccatcgccaaaaaggctttctgcctaacaacagctggatatgaacctgcagaggaggacttaacagaccccgtgcgctgtaacatcctatgaaagaaatacaaagctagggtcacgacgcctcgaa

SEQ ID NO: 549409 - DNA, 686 bp, Homo sapiens
attcagagcattattgatttgcactaacagagcaacaagatggctattcaataaactaacattcggttttgagactcggtgagagctgtacacctacaaaaattccttaccgacgagattgcaacagatcgcattatctccaatgtcttaataagggaagagtgacatgatttcacatgtgaggtaatttggattgcgtggatcgcatggcattcaccagatatttacatatcatggttacgcaggcttacgaattaaaggacgtgtatttattactctgatgggcttctgggacatccataacagatgcaacatgcagggatgatgcctcggcctagggataaatgcgcctttttattgtcggtagtgtatccatatgttatcttttacgcgacagaggaggaaactcctgatggtacggcttgttaaagcacatactctcttggaacgagcgcctgatgtcttgccggaacttgatagcattagtctgctgttaaggaaagcataatcgagccccactaggtgctattgacaagtacttgcgatggactatgaccaggcacctaatttgtggcaggatcccagggatatgggtgcttctttaggaattgctgtttagacctgggaatttcacaaagtaactgtccacctttaattaggccggaaagccctgtacaaatttttgg

SEQ ID NO: 549410 - DNA, 103 bp, Homo sapiens
ttaaatatactgccttacctccacttttgacgttgactttttgcttactggtgacacgactacaacgtcttgttttaacttactttcgcatgtggactgtcac

SEQ ID NO: 549411 - DNA, 1041 bp, Homo sapiens
gagccaggtgtcagtgccggacgtgcctggagcagcggattgggagggcagaggtggtagcctttgactaccaatccaaaatgctggcatttaaaatgtccctcttccagtggaaagcccaaccatgcagcacatctgctcataaactatacagtatgtgatcagaagtggaacataattcatagaccgaacagaaaccccatcctccctttagcattcactcaatgtaaagataagcttgccagcacaagcacggcacagagaaggaggagaagctgagccaggcctatgcactcagtgactggtgtctactctagagggccagcagctacttccagaccattcacaagaccattaaaagactgtacaatggcaagacaaaaaacatcgtagatcatggaagaagtagtaatcacacccccatatccagtggaaaactgtccaaggcaaagagcgggacatgcactgagccatgtacgcacaactacgtgcacaaacattcaagacgacgtggaaagccaaacgatactgcaacgataacacaacgcccagcaaccacacgaaggagcgatgaccatgacaatcctgaatacagaaacaatggaaggacacatacagcaatccacgacaacggaagcagcatgaggagggaaacagcaacacacaggaccaaaggaagcacagcatcaaaatgaccagaaggaactacaaccagatcagcaaaccaccattacacaaaacaaacacaaaaccaaaaacaaaaccacaacacaaccaaacaccccacactacttgaccaaaaattaaacaaaaagaccttacaaaacacaatataacacaccataaaaaacacagaaaaaacaccaatgacctaaaaaaaacaaacaaaagcacacaaggaacaacggcacaaggaaagacagtaaataaacaaagaaaacaagagaaacgagaacgaaagaacaaaagaaaagacgaacccagagaaagaaaagaaaaagaacatcagcgatccagacaaaacaaagagaacaaaagaag

SEQ ID NO: 549412 - DNA, 120 bp, Homo sapiens
tcttgcattctgtgacagccatgtctgtgacttgcacgtactcccctgccctcaacaagatgtatttgccaactggacaagacctgcgcctgtgcagcttgtgggtatgattccacaccc

SEQ ID NO: 549413 - DNA, 206 bp, Homo sapiens
tttttttatgggcagggacacccccccccagggtttggggtttgagcccaggacattctcctgccccttggtccccttgggtgtggggtgtgaacattccggggccctggggattttttttaggtccgggcagcccaaggggtagccctttttattgttacatgttgcccccccccagccttaaataaaaaggttcctgttgttga

SEQ ID NO: 549414 - DNA, 828 bp, Homo sapiens
  misc_feature (339)..(339): n is a, c, g, or t
  misc_feature (356)..(356): n is a, c, g, or t
  misc_feature (378)..(379): n is a, c, g, or t
  misc_feature (392)..(392): n is a, c, g, or t
  misc_feature (394)..(395): n is a, c, g, or t
  misc_feature (406)..(407): n is a, c, g, or t
  misc_feature (419)..(420): n is a, c, g, or t
  misc_feature (458)..(458): n is a, c, g, or t
  misc_feature (581)..(581): n is a, c, g, or t
  misc_feature (583)..(584): n is a, c, g, or t
  misc_feature (607)..(607): n is a, c, g, or t
gtagcggtgtagctgcgcagcgtcgcgcgcgctacggacccaggttcgggccgtaagcgtctggcagcccggcgcccatcttcattcgagcgccatggcctgcagcctggcgggccggggagcggccgggtaactggttgctcctctggcttgcattttgttttcttggtgaaccgcggtgccctggtcctggggcgtggagacgaaccctgtacagacatgtttgcttgcgtggactgtaacaacgctccttaacacctctcacttatagacccgcttattaccaacctttacccgcagtgcttgggatcccccatccccactatgttgacaattgtngttctggacgtgcaccngactgagtatgtagacttctanntatataccccaanannaggtcatacanngttgtccagacnnacaaacgtgcttggtgacttggggttattgacttgttnacaggtgtgtgacattggtaacgcaccggcagcgttagcattatttgcgattacgaaaacttttggcaacaaacactggtgtgttgaaagctggtgtaagtgcgtactgcaggtcccttctgnannagaaccaagtattgtaactcaangaagaggttctatggtagggctttgggaggtatacactcttacgcatttattacatgacactttgtgggcttggccaggctgtgacaggaggtcctgggacaaggccagccacgggcgttttgggcgtctatttcctcctgactgtattactatatggtgtggccctcgcgcagggattccctggttacactgaggtggagttggagtcaccagtggtgtt

SEQ ID NO: 549415 - DNA, 182 bp, Homo sapiens
agaaagaatgggaaacctttgcaattcacagattcgcagttcctggtttcaaacacttgccttgatgtatgttacttatacttctcagttaaaacctctaccttcggggctagcactgtatgttcaattatatgcattctttacctttccttatcgtctctttttattactgcacaacaatt

SEQ ID NO: 549416 - DNA, 260 bp, Homo sapiens
taagatcctctacgagctagctctcagctctgccagagtcctgagcatcggcactatcacgcaccacagtgcctgctgccagggcgctcgcactacctagcgcgagcatgcagccagtgcagtggtacacgcgctgggcgaccctccttcagctgtctgtcgcgcgcagacctcccaccagacgagcagaagctatgtgctactccagccacttcagactgccgtgcagccgagatcttccccaagctggtgcccccgcc

SEQ ID NO: 549417 - DNA, 121 bp, Homo sapiens
tggagcatggctaggggatttaaaacaacacatacctgtcactgctgggagtcaaactttataaaaagccttaagtggaaggtgtcccaaacggaaactctgagttaatagaggagttaga

SEQ ID NO: 549418 - DNA, 466 bp, Homo sapiens
  misc_feature (65)..(65): n is a, c, g, or t
agttcttcattgatagccatttagattgtttcaaatctcttactattacacataattttgcaatntggcacatatatccttttgcatttcctgatgaatattcaatggtgtgctaagatgggtttgtgacagccatttgtgaaaagttcaggaattctgatatcagttgatgttaggacagtagcttgaaattggtgtggtggaactacttacaccactaaaattggcaaagtctacaaataaaaggcttccattacccttttttgtggggcgaattgattgttaagtatttacagttcccactgaataccttcccagtagtagaattgctgggtcaaagggtatgtgaatgtgcaatgtttttatataatatatatatatatatctccaaattgcccctcatttattttatttagttacataaaaagctttgaataatctgcattgcaaaaaaaataacaaattt

SEQ ID NO: 549419 - DNA, 235 bp, Homo sapiens
aggggggggggggggggacccaaccccctttgccccactctttttaaggttcccttattttttttttaaccccttttgatttttggccttggggttggggaataaaatgaaaaaactaagccccaaaaaaactgggtttccaaaaggccaaaccccccccctttgtttcagaagggggtgggcctttcccccgggcccgattccaataataaggtaatttttggggaaagggtta

SEQ ID NO: 549420 - DNA, 346 bp, Homo sapiens
cgtcgacgtttctgatcattaggaagacatgtgtggcgtacagtgtgttccaggtgaacgtccccaacaggaagtactgcagcaggactgccactgcagtacagggccctctgtcctgctctgtgtgtgtgtcggacggggggagaatgttgtcctcctgtattttaggtttgccttttttttttttttttttttttttttttttttttttaaccactgtaaatttattatgcattaggaagcttaacctaaaaaccaatagcatagtaaaaagatattttgaaacctgttctgctatgaacagagataacatatcttttgtcgacgcggccgcgaatttagtagt

SEQ ID NO: 549421 - DNA, 780 bp, Homo sapiens
taccacatatcctgcttatatgagaattttaaaggtatttgactacatttaagggggatccaggactgccgggtgatatgggaaagaaaggagaaatggggcaacctggcccacctggacatttggggcctgctggacctgagggagcccctggaagtcctggaagtcctggcctcccaggtaaggcttgagtttacaattctaaaagctggaagcattactcagagtatagccctccccaaatcattgtggtaaacagaaagctatttatacttttatgctgcagttgcttttattcaactttgaacttcaaattctaacacactaagagaattcattaagagagcccaattttactaatcagcccatttggactgaaatacaaaaatatgttcctataaaaaacacttttgaagaactgcctcaacaaattcagcccaaggatacaaaatgttagccgatatacaatcataatgtttgtattactttgtccaggcttccatagtgaattccacagactaggtggcttaaactacacttgatgttagccaaaaggctgagaagcgattaggtggcttaaactacagatgtttattttctcacagttccagcagctccgagtctgtgatcaagctgtcggcagcgttggtttcttgtggggcccctgttcttggcttgtggatggctatcttcttccagtgttttccaagtgtctgaatcttcttttcttataaagacaccactcacattggattagggccaccctactgacctcatttt

SEQ ID NO: 549422 - DNA, 132 bp, Homo sapiens
tagagtaccccggtcatccgctacacacacacacacacacatatgaatatttaattaactggagataatgttaaagcaaggtctctacaatttttccattaggttgtgcttcaaatagtctataataaggac

SEQ ID NO: 549423 - DNA, 217 bp, Homo sapiens
ttttttttttttggggaaatggggtttcgttctgtggcccaggttggggtaaaggggggcaatttcggttaattaaaagttcccccccccggttcaaaagaattttcctgccccagcccccaatttagttgggattaaaggaaccccccaccacgccccgttattttttgggtttttttaggagagcccgtttcgaggggccgttcgaaaattattt

SEQ ID NO: 549424 - DNA, 157 bp, Homo sapiens
cgtggggagcggaatgaagcgaacagattttcgttcatttaggttctcaggattcgtccatagattttttattatccatcgggctttggctgagtggcaggtagtgtggtatgttagctgtttaatactgtttatgttggggcctgagctatagcat

SEQ ID NO: 549425 - DNA, 170 bp, Homo sapiens
tatgtattgatgtaaatgaggggcatgggtaaatatgattatcataatctaatgagtcgaaatcattcgttaagttaagactatataccaattcagtctcagatctaatgctttatgtagtcactcatagggcagacttagggctaggatgatgattattaagagggatg

SEQ ID NO: 549426 - DNA, 765 bp, Homo sapiens
  misc_feature (239)..(239): n is a, c, g, or t
  misc_feature (271)..(271): n is a, c, g, or t
  misc_feature (285)..(285): n is a, c, g, or t
  misc_feature (294)..(294): n is a, c, g, or t
  misc_feature (364)..(365): n is a, c, g, or t
  misc_feature (370)..(370): n is a, c, g, or t
  misc_feature (375)..(377): n is a, c, g, or t
  misc_feature (382)..(382): n is a, c, g, or t
  misc_feature (416)..(416): n is a, c, g, or t
  misc_feature (433)..(433): n is a, c, g, or t
aaccaagcaggagacgacaggcgagagaggagccagacagaccctgaaaagaaggacgggttggggccgggcacattgggggtcaccggccgatggagacaccaaccgacaggccctggctgagggcagctgcgcgggcttatttattaacaggataacccttgaatgtagcagccccgggagggcggcacaggtcgggcgcaggattcagccggagggaagggacggggaagccgagntccagagcaacgaccagggccgaggaggtgcntggagtgccccccngggagacanaccccaccatccagcagcccagcctgttcacagctttctgctcactgctcactacccaaggaggtggggnnaggcnggccnnntgtantaaataacgcaataaacgcattatcagccaaagntggaatggccccagcanaaaaaaaagaaaaaaaaaaaaaaaaaaacaaattttggcaccgcaataggagccactgagaaaaggctacataagccacaagaagagacgaccggggcaccccacaagggacagccgaaacgggggcacaagagacggaccacaggggagcccgcgggaacagaaacgagggggagaggggaaatcgccaccgaataaaaacgaaggcctcgcggggacagcacggacgaacgatcccacaccacaatcacaggaggacgtagaaggggaagaaaacggagacgcacagcaccagaggagacacacacgagagagcaaatagaaaataaggc

SEQ ID NO: 549427 - DNA, 199 bp, Homo sapiens
agcgggcacaatcatttaagttaaaaaaaaaaggtaaagcagtatgtataataggcctttggttggggttacaaatatgtatatatataggccagacgggggggctcacgccggtaatcccagcgacttgggtgaggccaagggggggcgggatcaccgagaggccagagagttcgagaaccagccgtgaccaagtatg

SEQ ID NO: 549428 - DNA, 195 bp, Homo sapiens
  misc_feature (25)..(25): n is a, c, g, or t
  misc_feature (78)..(78): n is a, c, g, or t
  misc_feature (115)..(115): n is a, c, g, or t
  misc_feature (145)..(145): n is a, c, g, or t
  misc_feature (159)..(159): n is a, c, g, or t
ggcgctggaggcttatctttgccgncgctgccgtcgacttcctgggattggagtctcgagctttcttcgttcgttcgncggcgggcttcgcgcccttctcgcgcctcggggctgngaggctggggaaggggttggagggggctgntgatcgccgcgtcnaagttgcgctcggggcggtcatgttggccggcgagg

SEQ ID NO: 549429 - DNA, 763 bp, Homo sapiens
  misc_feature (239)..(239): n is a, c, g, or t
  misc_feature (271)..(271): n is a, c, g, or t
  misc_feature (285)..(285): n is a, c, g, or t
  misc_feature (294)..(294): n is a, c, g, or t
  misc_feature (362)..(363): n is a, c, g, or t
  misc_feature (368)..(368): n is a, c, g, or t
  misc_feature (373)..(375): n is a, c, g, or t
  misc_feature (380)..(380): n is a, c, g, or t
  misc_feature (414)..(414): n is a, c, g, or t
  misc_feature (431)..(431): n is a, c, g, or t
aaccaagcaggagacgacaggcgagagaggagccagacagaccctgaaaagaaggacgggttggggccgggcacattgggggtcaccggccgatggagacaccaaccgacaggccctggctgagggcagctgcgcgggcttatttattaacaggataacccttgaatgtagcagccccgggagggcggcacaggtcgggcgcaggattcagccggagggaagggacggggaagccgagntccagagcaacgaccagggccgaggaggtgcntggagtgccccccngggagacanacccccctccttgggtgatgaaccatgaaccaaaaattgtgaaacggttgggttgttggaggtggggnnaggcnggccnnntgtantaaataacgcaataaacgcattatcagccaaagntggaatggccccagcanaaaaaaaagaaaaaaaaaaaaaaaaaaacaaattttggcaccgcaataggagccactgagaaaaggctacataagccacaagaagagacgaccggggcaccccacaagggacagccgaaacgggggcacaagagacggaccacaggggagcccgcgggaacagaaacgagggggagaggggaaatcgccaccgaataaaaacgaaggcctcgcggggacagcacggacgaacgatcccacaccacaatcacaggaggacgtagaaggggaagaaaacggagacgcacagcaccagaggagacacacacgagagagcaaatagaaaataaggc

SEQ ID NO: 549430 - DNA, 102 bp, Homo sapiens
  misc_feature (41)..(41): n is a, c, g, or t
cttatcaagctgcagactgaggaaggtcagcgacacaaganccgggagtgaaacgaacaggctggggtggccctggggttaagagcccacagtccactttgc

SEQ ID NO: 549431 - DNA, 294 bp, Homo sapiens
ctcgagagccctgggggggactagggcgggatttacaataagtaacaaagaatttttacttgaggtgactactgcagccgtcaaagggtgaatatcatatgcaagagtggttcatttacaggctacggaattaaaagctatacaactagcgaacctgaaaactgctacaaatacagctcaaaacttgacactaaagacaaacattttctgtaggacgcaatacctaacctctatcaatagagactctccgttagaatcaaaacagaaaaaaataccacaattccactcttagaa

SEQ ID NO: 549432 - DNA, 419 bp, Homo sapiens
cgtggacatgatggcttcatccgcaacatgttcgtcatcgcccatcgtggaccatggcaagtccaggctgatgtatctgccctggtgtgcgtggcgcgacgtcatcgcctcgcgcccgggccgcgctaggacgcgcttcactgatatccggacacgtgacgaccgggaccgttgcatcaccatcaaggtaacctggcatcgtccctcttctaccaggtctctctggacaatctgactctgaactgtcatcaagctcagctaggacggctgccggcttcctcttcaacctcattgactcccccgggcatgtcgacttctccctcggaggtgattgttgccccccgaggtaccgatggcgcctcgttggtggtggacgtggtgtccggcgtgtgcgtgcggacggagacagtgctgcggta

SEQ ID NO: 549433 - DNA, 94 bp, Homo sapiens
  misc_feature (7)..(7): n is a, c, g, or t
  misc_feature (62)..(62): n is a, c, g, or t
acccccngggcgcttgagaccaaaattctaactatttgttgaatttatttttccgtcagttntgtaaaataaacatactcttcttcctcccctc

SEQ ID NO: 549434 - DNA, 247 bp, Homo sapiens
agtgctacctccacaacaggttcacaccattctcctgtccgtcagcctcttcaatgtagactgggactactggtcgcccgccaccatgccgtggctagtttcttttttaaaactatattagcacagagaataccatgttgtttcagggaagggctaatgtcactaacagactatcacagaagccagactgaaatttccatggggaaaaacaagatttagcttccttgctgtttgtggaggtagcact

SEQ ID NO: 549435 - DNA, 806 bp, Homo sapiens
  misc_feature (506)..(506): n is a, c, g, or t
  misc_feature (725)..(725): n is a, c, g, or t
cttctgacccaccaatgaatttctgttagccttcaactttaaccctaaaagtaattctctgctgttcacatgatatgaagattcagacaaagaaacagcaaagattttgttcatatagtggagatggttcgaataaaaaaattcttcctgtgatagaacatttttcttttttcaagctcttgaaacaataataccatttcctaaagtagcaaacttagatgatgtgtaaatctcttatttgtatctagacaaacaaagatagcttccctttcttttggtacaaatattttcatctctaatcttattgtgcttttgataaccaggctgacttactatgggaggatagtttgtcactctgaacccagcatacagagcttcatgtgagatagtgtccttgaccttggcctcactagtactcccatcaggctttcttaccagactgcctgagtgtattaacttgaatatttggttgaacattgtattaactttaatgtaataactgcctngtgggtcagcattcaagtagtgtggttgtttaatgctgtatacttagctgtttttctagaaaacacagatcatcagcagttctaattgtacatactcatcaactcagacattccacttgtaaggaatttatcctacagtcttatttgttggaaataagtataggatcatcatcatcattataagtgacataattcaaagacctgatcatctgtaaaaanaaaaactgaaaattcaagaagactgggttccttgaaaggctttaactatttcttgcaggggatgattttccaaggcaaaat

SEQ ID NO: 549436 - DNA, 140 bp, Homo sapiens
acatcgctcaccatccctacgcattctttacatacagacgaggctctacgatccctcccttaccatcaagatcaagttggccaccaatggtactgaacctactgatatacaccgacgtacggcgtgactaagtcttacaa

SEQ ID NO: 549437 - DNA, 911 bp, Homo sapiens
cgaaatggctatgtgggagaaataggggttgggccgggttggtcgttaatggggcacaaaagcgtgcggatgcgcgcgggcgtattggccggaaagggcagaagaagggtccctgcaaaaaaggctcgggaagggcaacgacaaaagggccatgatgatgaactggccaggggacgttgggccaccaaaggtaagcgaataaccgccgcaggggcgtccacctcaacctggtcgacaaactagacccagtttttggcattggtcggagctgccgataaggcgagaacttgtgaaaaggggctgttaaaaggaggataagccaaagagggtttgtgttgttgtggtctggtgtaaagaagatgtttgtgggtggagaagtgggttgcgaagtggttgaaaggtgtggtgggttgagtgggtggaaggggttttgggtggcgagaagcttaaggcgccgcttgagattgtgtaagtgggatttggggctcgattggggtgtagtgcagtttgctcaggggcgttagcgcttattggggtttctgattttatgttgtatgatttggtcacttatacgtagcttccaagtaggttaacgtggaaataagtgctcaccacacacttatatgatttattaaaggaagtgacttttgttgtgtatcaatagtggtgaagttattgttttcattttcctcctaataatgtttctcttttgttaacttatttatatgtttcgagaacatctgagccatagtcttaaatttaaatgctaaaaacaattgtatcatgtagtcgggcagcctactttgataggctgtcaggggaagaaatgggtcagaactcagcatctgtcatgaaagaataatcagagttgaaaaacaggcagattttgaattaattgcaatcaataatgg

SEQ ID NO: 549438 - DNA, 115 bp, Homo sapiens
ggtcgacccagggccggggtcttgggggtatagtggctgcaaagggcatcccggaacgtgatgcgctggcgcacggacagcctccacatgacaaggacatgttccggggccctat

SEQ ID NO: 549439 - DNA, 100 bp, Homo sapiens
tagaggatcccaaacacgcatctgtgacagcacattctcagcattcaatgatgacctctagatatgcagcagcatttttatctgctctgtcatttggcta

SEQ ID NO: 549440 - DNA, 981 bp, Homo sapiens
  misc_feature (743)..(743): n is a, c, g, or t
  misc_feature (757)..(757): n is a, c, g, or t
  misc_feature (789)..(789): n is a, c, g, or t
agcgggctagcggggttctcctagcagcgcgggccggtcggaccgccaaggcagccggcgctggcgatgggaagcggcgtggccgccgacacaggcagtggcaaagtttcccagacgtacacatctggacgcgcggctgccggctacccgtgacccctctaggaagggttcagggatttttaatttggaaaaaaatccacctggtttcctttgtcaaggtctctccgggtggccagcggcaggagctgcaaacttgggcacggcggctacaccggcagcggaccgggctttggagaacctcgggactcaggtgctgaggtgcccagcggctccggacgtgctacggggtgcgagcgcgggggagttcggggcgcacgacaaggaagggcccccgggagctctatatggaggaaggagcccagaatggtgtgcaccaggaagaccaaaactttggtgtccacttgcgtgatcctgagcggcatgactaacatcatctgcctgctctacgtgggctgggtcaccaactacatcgccagcgtgtatgtgcgggggcaggagccggcgcccgacaagaagctggaggaagacaaaggggacactctgaagattattgagcggctggaccacctggagaatgtcatcaagcagcacattcaagaggctcctgccaagcctgaggaggcagaggccgagcccttcacagactcctctctgtttgcacacactggggccaggagctcagncccgaaggccggcngcgtggccctgaagcaattccagtactacggntacaacgcctactcagcgaccggctgccctggaccggccctgcctgacctcagaaccagaggggtgacgaaactctcatagctggacagctgcagaagtgacatcgaggacacgacgaaatgagcggtcaggcaggagggatacatcaacggcacggaaggggcccaagaaggcacgaaaccagggagacca

SEQ ID NO: 549441 - DNA, 865 bp, Homo sapiens
gctcctcttggcgctgtcctgtgtaatggcgggcagtatccgcggatgggattgcagataagcgattcccgcacggggaaagtctaccctgcctgcgcagtttctgctcgccgtgagtgccggaggtcggcagttatgtcatgtaggtacgcgggccaagtcgctcgctagaccggtgtggacccgaggggtggtcgctcagtttctggtctaacaagtagcatcacgagcacgacgagaggtgctcacttgctagcctggagcggtcaccatcaatctgtgaccctctttaccaattatactttggtacaaaagagcgcctctacgagaaggacaggtctgtggcagatcagatttcgagtgcatgagggaagaattgataataatggggatgaggaggagtgtagaaggggtgcctgagtgtgcatgatgcacaggataatcccatgtgttgatgtgtgcagatggtgaacaattttctgtcaacactactcgtggtggtgaactttaagccaggagaagatgagtcgaagggctagaagcttaatgagagagatatgggtcgtaaggatggagtgtgccagaagtgggtcagttgacgattgcttggtggcttggggggagaccgagttttggaagcgtggtcaggatccaaataatgcctgggatattaagaaaggcaaggacattaggaaggtgggttgggccagtcggaaaaagctgtgtgggggcctaaagttaagtggtgttggcccctgttttggattggtttccaggcgcggggttggccacatttagatcccagggggaaaggtaaatttaaacgagtctggggggagaaaacagggggtggaggagtacggag

SEQ ID NO: 549442 - DNA, 361 bp, Homo sapiens
ccacgaaaaaaagacaggacagaggcttcacgcagaatactaacaaacttaaaaaaagaactaatacataatacatcactcaaactattacagaaaatagaaagggagaggatacttcacaaactctacgaggccagcattaccctgacaccaaaaccagacagggacacaacaaaaaaaagagcactatggccagtatccctaataaatacagatgcaaaaaccctcaacaaaaacaccagcaaaccaaatccaacaacacgttaaaaagattattcaccatgatcaagttagatttatcacaggtatgcaaggatggttcaatatatgcaaatcaataaatgtgatacatcgtatcaac

SEQ ID NO: 549443 - DNA, 1401 bp, Homo sapiens
ggcacgaggcttttgtggactggttgactatacctttgtggactcggtgaatatacttctgcggaccgggtgaccgtgcttctgtggaatgggtgaatatacttctgcggaccaggtgactatgcttctgtcaaccaggtgaatatacttctgtggaccgggtgactgtacttctgtggaccgggtgaatatacttctgtggaccgggtgaatatacttctgtggactgggtgactagggaggagccggcgtgttagcgccagcatatgcagtccctcaggacagccagcctgccgtgatcctgtctgtgtggtcgtggcagtggcctgcagcaagccatcgtggttggctggaactagacgtgtgatttgaatgcaggagttcagtcagcccctcagtggcctaaaaggaagaaggtgtcagtcacagggctggttctgggccctgccttggggggaccccagttccagggttctgggccctgccttcgggggacccgagttccagggtcctgggccctgccttcgggggacccgagttccagggtcctgggccctgcctttgggggacccgagttccaggtcccggcctcagcgttgcagtggccagggtcagtggctctttggccctctaggagtgagcagaccttagtgaaatagatccacagggtcctgactttgtacctggtccaagctgttggggaattgctgctgttgacccaggcaggagtctgactagagaacaaactaaggttgctgcaacaaacaaggacctcttccaagaagggctcccaggcctggcgcagtgactcatgcctgtgatcccagcacttgggaggccgaggcgggtggatcatttgaggccaggagttcgagaccagcttggccaacgtgatgagaccccgtctctattaagaatacagaaattagccaggcgtggtggcgcctgtggtcccagctactcaggaggttgaggcgggagaattgttgagcccgggaggcggaggttgcagtgagccaagatagcaccactgcactgcagcctgggtgacagagcgagactccatctcaaaagaagggctcctgtgtctacgtcatggtggggctagagagaggtccccgcagctgggctgtgttgagtgagggctcgtctcttcagcgccaggcaatagtttgtcttgtctctgtcccttttctgtgtccacatgacatttacatcttgcgagttgcataatttaagttgtttatttacattatacatttaattgcattctatagcgatgctatgttgaatgtattctgatcggatcgtttatggttatttacaatgcagttactcttgaagattattgttagaggtagactgttgatttgttttgataaaataaagcttttgtgtttt

SEQ ID NO: 549444 - DNA, 840 bp, Homo sapiens
gactgactctcttttcggatcagcctgcctgcaccaaggtgaaataaacagccttgttgctcacacaaagcctgtttggtggtctcttcacacggacgtgagtgaaatttggtgctgtgactcggatcaggggacctccctcgggagatcaatcctctgtcctcctgctctttactccatgagagagatccacctacgacctcgggtcctcagaccaaccagcccaaggaacatctcaccaattttaaatcggatcatccgacctctcccctcctccccaggctgctcatcgccaggctgagccaggtccaattcttcctcagcctccgctcctccaccctataatccttcgatcacctcccatcctcacacccagtctgtcttacagtttggatccaagactagctcttctccagctgcccaacaatttcctcttagagagtggctggagctgaaggcacagtcagggtacatgtgcctttttctctttcagacctctctcagatcagtcagcactcagaccctactgaatatatacaggaattccaatatctaaactctgtcctacaatttaacctggagtgacttaaatgtcatctaaacttctacctctcccagattcacaggaaattttctctggcccatctcacatgacaaccgtggtcctgaacagactcaaggaaggattgcgcagtcccggagatcccatggacttcagccgatcccaagtaccagggaataaaggtcggcataaggataaggcgttaaaaggtttttgaactgaatcccggagaaatccctagttgtttggaccttttccaaaaggttgttaatataccc

SEQ ID NO: 549445 - DNA, 523 bp, Homo sapiens
  misc_feature (162)..(162): n is a, c, g, or t
  misc_feature (349)..(349): n is a, c, g, or t
tacaaaggccccctgggctcggtgttaattgtccaaggaggtggccccccccctctgtggggccattattctgggcaaacttccctcggtccccggggcccggggggtttggggaacaaagttggccaaccccccactgtccctttcaaggggacaggcccntttgggtttttggttgggagccttatccccgcacccaaggggaaaggggtggtttccgcccctttggcttaaaaaatggtccagatgggtgggatacaatattggtgcccccccaaccgggggggccctgcccccctgggggaatttgccaaggccccctttttttcccttttttaaaccaacaggnccctggccccccgcctttggaagggggctggtttcccccaggttccccttccgggggtcccggtcccccctttttaaaccccccccaaagttttcggggatcgggatcaggggcccacttggggtccaaccaaggggttttttccccaaaaaataaaattaatttagcgtgcca

SEQ ID NO: 549446 - DNA, 1424 bp, Homo sapiens
ggcacgaggcttttgtggactggttgactatacctttgtggactcggtgaatatacttctgcggaccgggtgaccgtgcttctgtggaatgggtgaatatacttctgcggaccaggtgactatgcttctgtcaaccaggtgaatatacttctgtggaccgggtgactgtacttctgtggaccgggtgaatatacttctgtggaccgggtgaatatacttctgtggaccgggtgaatatacttctgtggactgggtgactagggaggagccggcgtgttagcgccagcatatgcagtccctcaggacagccagcctgccgtgatcctgtctgtgtggtcgtggcagtggcctgcagcaagccatcgtggttggctggaactagacgtgtgatttgaatgcaggagttcagtcagcccctcagtggcctaaaaggaagaaggtgtcagtcacagggctggttctgggccctgccttggggggaccccagttccagggttctgggccctgccttcgggggacccgagttccagggtcctgggccctgccttcgggggacccgagttccagggtcctgggccctgcctttgggggacccgagttccaggtcccggcctcagcgttgcagtggccagggtcagtggctctttggccctctaggagtgagcagaccttagtgaaatagatccacagggtcctgactttgtacctggtccaagctgttggggaattgctgctgttgacccaggcaggagtctgactagagaacaaactaaggttgctgcaacaaacaaggacctcttccaagaagggctcccaggcctggcgcagtgactcatgcctgtgatcccagcacttgggaggccgaggcgggtggatcatttgaggccaggagttcgagaccagcttggccaacgtgatgagaccccgtctctattaagaatacagaaattagccaggcgtggtggcgcctgtggtcccagctactcaggaggttgaggcgggagaattgttgagcccgggaggcggaggttgcagtgagccaagatagcaccactgcactgcagcctgggtgacagagcgagactccatctcaaaagaagggctcctgtgtctacgtcatggtggggctagagagaggtccccgcagctgggctgtgttgagtgagggctcgtctcttcagcgccaggcaatagtttgtcttgtctctgtcccttttctgtgtccacatgacatttacatcttgcgagttgcataatttaagttgtttatttacattatacatttaattgcattctatagcgatgctatgttgaatgtattctgatcggatcgtttatggttatttacaatgcagttactcttgaagattattgttagaggtagactgttgatttgttttgataaaataaagcttttgtgtttt

SEQ ID NO: 549447 - DNA, 271 bp, Homo sapiens
accagtatctctgtctacttccaggatcaggagttagtggtgcaagaagccatttagggcagcaaaacaagtagacatgaagggagggtccctgtgtgtgtgtgtgctgatagttacctggagtgccctaggctcctatgcaagcagggactggagcctgcagagacccaaggactcactagcagacgcgactcctagacccctaccctgacagggagctaacgttaagacagacccagacacactagcttgacctaaataggctttacac

SEQ ID NO: 549448 - DNA, 763 bp, Homo sapiens
  misc_feature (312)..(312): n is a, c, g, or t
  misc_feature (598)..(598): n is a, c, g, or t
gtgggcgcctgtagtcccagctactcgggaggctgaggcaggagaatggcgtgaacccaggaggcggagcttgcagtgagccgagattgcaccactgcactccagcctgggcgacagagcaagactctgtctcaaaaaaaaagccaggcatggtgtatttggactgtggtcctgggagatggaggctgcagtgacctgacatcacactgctgcattctagtctgggcaacagagtgagaccctatctcaaaaaattaaaaagttaggtgaggctgggtgctgtttacacctgtaatcccagcactttgtggngctgaggcaggcagattgcttgaggtcaggggttccagaccagcctggccaacatggcaaaaccctgtctctactgaaaatacaaaaattagctggtcgtggtggctcacgcttgtaatctcagctacctgggaggctgaggcaggagaatcacttgaacccaggaggcagaggttgcagtgagccaagatcacaacactgcacttcagcctgtgcgacagagtgagaccccatcttaaaaaaactcaaataaaaactcgagactagttctccaagcatgtggctnccggtcagcggaattctaaactcacggatattctctgttgggggagagccacattttgtgatttccaaaattaaccaggaattctaattgatgagtataggccatttccccaggttcctaccggggaaagtttcaaatcctccgtggttcttcggggctccttcc

SEQ ID NO: 549449 - DNA, 838 bp, Homo sapiens
  misc_feature (8)..(8): n is a, c, g, or t
  misc_feature (118)..(118): n is a, c, g, or t
  misc_feature (155)..(155): n is a, c, g, or t
  misc_feature (181)..(181): n is a, c, g, or t
  misc_feature (196)..(196): n is a, c, g, or t
  misc_feature (207)..(207): n is a, c, g, or t
  misc_feature (210)..(210): n is a, c, g, or t
  misc_feature (227)..(227): n is a, c, g, or t
  misc_feature (242)..(242): n is a, c, g, or t
  misc_feature (267)..(267): n is a, c, g, or t
  misc_feature (337)..(337): n is a, c, g, or t
  misc_feature (339)..(339): n is a, c, g, or t
  misc_feature (342)..(342): n is a, c, g, or t
  misc_feature (344)..(344): n is a, c, g, or t
  misc_feature (386)..(386): n is a, c, g, or t
  misc_feature (427)..(427): n is a, c, g, or t
  misc_feature (430)..(430): n is a, c, g, or t
  misc_feature (459)..(459): n is a, c, g, or t
  misc_feature (472)..(472): n is a, c, g, or t
  misc_feature (479)..(479): n is a, c, g, or t
  misc_feature (494)..(494): n is a, c, g, or t
  misc_feature (504)..(504): n is a, c, g, or t
  misc_feature (514)..(514): n is a, c, g, or t
  misc_feature (566)..(566): n is a, c, g, or t
  misc_feature (668)..(668): n is a, c, g, or t
  misc_feature (835)..(835): n is a, c, g, or t
tgcaaaangcagtgtaccttaaaaatgtctcacctagaaggcctctacctgtaatcacattaatttttctaaaaacaatttggtgttttgaagataaatgtcattagtctatgataanagcatcataggacaattagccattttagacttgaccntattttctctttttagcatatagccntcttgatatttaggngggggactacnccnatggggccacagtttcnttttacatgattggntttagaaatttacaaattttaaacncctaagaattctaaataatttgaaaatggaaacatttgcccccccgtctcgccgcctaaatccctttttnanatncntccttgttgatcttaggtccttgatttaaaaccgaatttggngcctttgggccgggggggggggcccgtgagggaggtataanagngaaatctttttgaattgtgttccgattgnttttgtttaaacntaatatnttcctggttgtttcncttatttttnatcccccccncccctgaagggggtccccggggggggtccctcttttccctcccctatttgcntcccctctcctcccgtggctgcttcataaaaatcttataaacttttattaaccaagttcagaaataattagaggggtgatctccctggatcagaactaaaanaagtgagatcaattaagctcctttgaaataggtctgtccacacttaatattcttttttagaccaatttagctggaaatctattacttaacccacattcattgatatcatagtcttgtcttatatttctttgccttaggcaggatttttctgtgattctgattgtgtntga

SEQ ID NO: 549450 - DNA, 262 bp, Homo sapiens
gcacgaggaaactgatctttactcaacaaagttttacccaagtggaatttcacgccccctcggcgccaatccccagcccagcccagtaacaaatggacagacccgggagcccccagggggaaaagggtgaggagggaaaaagggactgtggctcaaggccagtttgggtccccagccctgggtaggggaaaaggtttaaaaactgaaacttcattgtgcaaaaaacacccaaaaataaattaaaaaattaaatagtttttta

SEQ ID NO: 549451 - DNA, 139 bp, Homo sapiens
ctagaggatcctgtacatgacccaagcatgcatattgcgtggtttcgacgtgtattcaccactgcggtgttgctccctgtacaagttccgtcgacacgtgagccctgtgctgacctccaaatatcgtaagctggagcct

SEQ ID NO: 549452 - DNA, 283 bp, Homo sapiens
  misc_feature (74)..(74): n is a, c, g, or t
  misc_feature (283)..(283): n is a, c, g, or t
gctaaacgaaaatcaaactgatgattataagagaatttaaatcattatatggaagtccatacctcgtcagtatngaagataagcaggcaaataagattagcagccacagacaattaagcaacccagttacatacttgacctaataaacagtcacagaacacccaacaatcagcacattctgatcagttgctaagcaacaaaagtggcctcaagaaacaccaaaatagccaatcccacgcagagcacagtctctgaccacagtgaaacagcactaaaaatcaan

SEQ ID NO: 549453 - DNA, 1791 bp, Homo sapiens
taaaagagagaaaaccgggggaggggggggggggggggggagtaggagaggagagaaagggggggaaagggtgtgttaagaacaaaggaggggtggtgttccctgggggagaaagggggtgtaaattgttggtgaaagtgggggggtggtggaggtggagccccacatgggtgtgtgtgggaaaagtgtgtgatgagagaggggagataagagaggggtgtggtgacacaaaagagaggtgtgtgtggagaccccgcgtggaagagagagagagaggagagtgagaaaaatgtgagagacacagagagagaaaagagcggtggggtccactaagcaacaccagcagagagagagagatctcctctcgcgaggagaggtgtacaaaagagaggggtgtgtgtaacagggtgagagtgttgtatacagaggagagtgtgtcttgcgagaagagaaagctgtttcctctacaaaagacagagcgtcatatataagcgtgtgagcgagagacaaagagtgttgagagagactctctctctgtagagagaagagagagtgtgataatgagagatgagtagcacgagcttgtggaaagcgtcgtgtcgctatcaacgagaaagagctgtgagcgagaatgaggagcacgagcgccagaaacaaaaaggaaacatgagagatgagacagggcgatgatgaaataacacaacgccgcggtggggtggtgcggacagaaaaacaaacttgataaaagacgaacaacagaacacagtgggcccgcccgactggggacagaaacaagcacaccaaacggagaggggggagggtgattatgagtaggacgacgaaagaaaagcggtggtgcgcgggtgttaacaacaaatcacgagcagagaggagggaacatacagatggtgtcgtgagcgcgatgagaatcatcgagcagcagagaagcctacatcgcatgacaacaaaggtagagcaacacgaagaaaactataaacgagaggccttcataccgtagtgtggggtcgcgatagcactacaggagcaaacagacggtgtcggacctacacgttgtctgcaataacaaaacatagcatggccaccccacaagagcggggagtaaaatagccaccaagcaagcgcgaagaggggggggggaagacaagccacaaagacgagtgacgtatgacagcaccacggagaggtgcgagcaaaaccaaacactacagtgctgctgggtacgagcgcggcaagtaaaaacaaaacacagacaagcaggagcgacgcacaagaagataaaaaaaagaaagagtaggctgcgcggacagaaagacactcaacaagtgtcgacaccccacaagagagggcggggcgcgcccaccacaaaggcacgaactactagggccagaagacaaacaaggaaggtcgcccaccctcaagaagagtagtcatctacaacaacaacagcagacatacggtaaccacagacaacaacaaagatgggtgtgccacacgatcggcaaaaatccgtcgcgacgcgaacagacgaagatcaaccagcgtgacgacaccgcgcgggcagcggcggtaacagacacgaccggccgaggcaaggagcagccacgaacggcaacaaaaccagtcccggccatcggtcgttacgtgggtcgctcagtgagcacggcgaggccgacgcagcaccaaaaaacccgcgttgagacaacacaaggacaaggaagcaaacaagcgtggacgcacagacacagacagcaaaggcacacacagaaggca

SEQ ID NO: 549454 - DNA, 827 bp, Homo sapiens
tgggctctaaaggggtgtaaagggggtgctatagggtaaatacgggccctatttacaaaaattttaaggggaattaattctagtgacgaggggcatgaaatctggggttgtgctccacaagatttcaagatgcattggaccggtagtatacccccggtcgtggtaggcgtggtagaaatgtgggttgtgggttataagactgtcctggagaattggcatctggttttataacgcctaattggtggggagacacgctcatggagtggcaaagactgtctgtgggacatggtaatatttattatataccgaatatggggtgtgtcttccatatcgctgggaagtacactacactcgcgataagtgtgcaaaagcgtccagaggaatgtccgccaagtgtccgcgccagggttccctaaaggaatataaattggggggacatgtatatttgtcgaggaatgttttgaacaaatatctatagtcccccggcgcgtaacagactcgggggtgtataacactcgcaataagggtgtctcgacgtgatacacccagtgtggtggtgtggcccaatgtgtgacaacttgggcacgtggcatacaaggggcaagcgggatctcggtagtgcaccccactccggatcgtggagtacacagtgtatacacagggggacgtgggcgtacaagggggccaagtgcgcgaaccgcgggcccaacaacggcgaggcgcacccaataggggcgactatgacagaggcggcgggggccgcaagcggacctaggttccccaaacaaacgggcgtctcccataatttcccccgtgaagggcggcta

SEQ ID NO: 549455 - DNA, 185 bp, Homo sapiens
tttgcccggtttggaaaattttaaattttgggggccccgggggagactttttgttaataaacccttttgttttaaagcgggggcaatttggattttttttgcccctaaaattttttgtttgtttttttccgctttttttggaaatgtgaaaaaataaaaaattatttttgtttcttccccaccca

SEQ ID NO: 549456 - DNA, 232 bp, Homo sapiens
aagcttagtagtggagaaactggcagataccacttattcaaataataaaagttaacctcatgaatatgagaacaaattgacatcatgtgcctcaaataggatgcactgagaacacaacattgttttagtggtaatcctccgaaaaatgcatggtctgaatctaatcatgaggaaacctcagataaacccacactggggaacattttacaaaataactggtctgtactctttg

SEQ ID NO: 549457 - DNA, 87 bp, Homo sapiens
  misc_feature (59)..(59): n is a, c, g, or t
aaccggtattactatgtttcggggacttattatagcggagactggttcgacccctgggnccagggaaccctggtcaccgtctcctca

SEQ ID NO: 549458 - DNA, 354 bp, Homo sapiens
tgcacgtgaagccatgagcagtagaacctgttgcgacaccctatactaacaggctctcaaagctctgctcgctaaccagataacgctccgctagacactgtagacagtccagttgaataccagcatgcagaactattatcctgaaaatgtcaagcgcttttggaatacctgagtttaaaaccagtttgcggccttggtgctttgtggcagccaaggggtacagcccttactgggctaatgctaagcctgaaatattcgcctaatggacatggcaggacttgactgaacaaggagtagctacttttaaagcttccaccaagtcttggaccaagttttaagaatgcatgtttgcct

SEQ ID NO: 549459 - DNA, 310 bp, Homo sapiens
cctagcttcaccttattctttaaagggcagaaaattttagacggtaatcgccgtaacagtaaatttggcttacaattggggcccccctccggtttaggaagggggaccaccaattttaccacattcccacctaggaaaatttttctttgcgtaatcaggcctcacctggctcatttggctttcagtttgatcgtcgttagatttgaggaaaccatctagatgcagcgttcgctattagatacttcttagatcgtctagatcttcttagaccattggccaaaagagggtcgacctggcaaccttgcaaggt

SEQ ID NO: 549460 - DNA, 151 bp, Homo sapiens
ccacgatgtgatctgtgtactcctcattcccacctcctccagaagggcacttgctgctttctgtataagtgagatggtttttttcccctattccagtggaatacggtacaaatccttatcccttcataatgggcttacctgaaagtgatgg

SEQ ID NO: 549461 - DNA, 322 bp, Homo sapiens
cacgaggcctcctccagtgtacacgtttcctctcacacattgtgctgatacattctacctctatctcagcctctctgggaacatcggtcatcttcacttgcattctgaccattatccaaatcatcaacgccatcgcatggcaacacaacctttaaattaaaggccatgtgtattttatctcgcttaacattgattgaattgacaacaagggggactggatctatgattacttctcatgctgcagctcaggcgttaactcctacatcattatctcaattctccaatctgaagatgacgttgaatacttttgtcttacctgtga

SEQ ID NO: 549462 - DNA, 201 bp, Homo sapiens
tacccatatacagcgagatcaccaccaggctccaaagaggtatcttgcgttgacgcgcaagttcacttccaagtcgaacaggccgatctgtgggacgaaacatgaacccagggcttgcgatgagctggtgtaactatatctcaaagcttaaccaggtgttggcggctgcaagtgagactgagccttccactggttctaact

SEQ ID NO: 549463 - DNA, 436 bp, Homo sapiens
cgggaccgggtgcattctggactcatggcacctgtcactggcctgcgtctgtgctgtgccctgatgctgtcccaggagtgaccttcctgtctcgggggtctgagcgaagacggggcatacaatacaatctcaatgccatccgcgctggccgcttccctgaccctgggcgcttaccttctcctatgatcgtgccctgctggcctctgcactcaatgcctggcgagagcaaagcgacaatagcgtggggctgccactgacgagggtcaatcaagcgaggctgaggtgaatgggcttgcagcccaagggcaaagtataaaggacatgggaaaaaatagtggagaagcagcacagtaactcaacattgacaaccatgcctactgagtattcactccataccacagcccttggggccaggccatctgcacccactttagct

SEQ ID NO: 549464 - DNA, 455 bp, Homo sapiens
aggcagaatctcactcccatcactcaggctggagtgcggtggcactaacacagctcactgcagcctcgacctctcggactcaggtgattctcctacctcagcctcccaagtagctggaacaataggtgcatgccaccatgcctggctaatttttaggatttttagtagaaatagggttttgccatgtttcccagactagtctcaaccttctgggctcaagcagtcctcccatcttggcctcccaaagtgctaggattatatgcatgagtcaccggacccagccttttcttgacatttttaaagccaaacctttttctaaaactaccaaaccatcttttgatggcattaagctctctagcgttagatcctcaccttccttttgctttaagatgtcatataatgacttcactttttctcacatcatattagagattacatgtacccttttgccgaat

SEQ ID NO: 549465 - DNA, 157 bp, Homo sapiens
tgtataaccatatacttctgcatctgaattatctagcactactttgcacggagagccaaagctaagacccccgataacagacgagactaactaagaacaagctaaaaagagcacgcccagtctatgtagcacaatagtgggaagatatataagtgta

SEQ ID NO: 549466 - DNA, 190 bp, Homo sapiens
tacgggcgtcgtttgagatgcaggagaagctatggagtggggggtcgtttaatacgcgcggaaacagcaatgaccgggaagcggctctcctaccagtgagccctacaaatcaacgtgaggcgtgcgcactaatagttgtgtcatccctcttattgaagtcatcatcctagccctaagtctggcctatgag

SEQ ID NO: 549467 - DNA, 316 bp, Homo sapiens
caatatcggcaacgatgggtcagataggaccaaaagcagcaggataggtggcagataggctaccatactcgaagctagcataaagctccatactgtaaacgaatcaattccagctagctgccgacaagtagctagagtacacaagatagctctcggggatagccaagtagtcaggactcggctgccaaacctaagagggcagaggcttggagagcccgggagccaggctggagtacccaaagcggagggaccccactgctaatataaggaatgtaggtccataaaccgctcaaacactaggacccgatgcccggtg

SEQ ID NO: 549468 - DNA, 571 bp, Homo sapiens
ccctgagcttgaaatgtgttagtgtgtgtgtgtgtgtgtgtggtatatgggactggctgcagacgtaggctcagaaagacatgatccatgctgatctatctccgatggcctggaaagcactagtacagtcgagtccacttcataactgggagagacactcacagtggagacatgcacccatcttttatgtatgtcagttctcacaaggagagggaacgaaacgtgctttttcgtgtggatccataaaatctccgctgaagtcagacccaagttgctggactaactccaggggcagtggcttttgtcctttgaccctgcccctctcctgccagccctcggagtctccccataataccaaaccctcccccgacataagactcctgcttcaaggtaaaaatacttattttcacgtgagatatcaagaactcggtttccctggtaactcgggcagggaaagagaatttaagatgatcagaaatattcattctgaccagctagatccattctcctccttactcctaaggctttatctgcaacacagggcagggtcccaagcctctccaagtcacta

SEQ ID NO: 549469 - DNA, 654 bp, Homo sapiens
atgcatgaaatcaaaatttgtagaatctgcaattttatgcactcactcactcacaccaaaatgtgagaaccataaatctactcatatttcataactaatcagaaaacttggaactatgggtgcagataacttgttgatggtgacaacttatatttttgaaatatctcgtcttctacgtttctttaagggaagctttgaagtagaaagacgaaattttggttattctttttttttttttataatttatacttggagtctcggggatacttgttgcagaacgtgcaggttgtgtggcataggtatacttgtgccagtggtggtttgctgcaccgtgtcaacccattcatctaggttttaagcccgtgcttgctttaggtatttggtcctaattgctctctgtcccctttgccccccaattccccaacaggccctggtgtgtgatgttcccctccctgtgtccactgtgttctcatgggtgcaactcccacttatgagtgagaacatgtggatgttgggttaacaggtcccgtgtgtagggtcgagaatgatggttccagcttaatccatgtacctgcaaaggatatgaactcatacttaaatggctgcatagtatccatggacataaatgtgccaaatttctatatccagtctata

SEQ ID NO: 549470 - DNA, 176 bp, Homo sapiens
cacacttgcagtgcaacatggtggccaactcggggagctagccagcttcgagactcgctcagctgcgagcgttagtgctgcttcctaaccgagaacggtcggaaccagctaccgccacgatgtcctgtgcagatcgcataccttgaacgtctgtcatgggttcatgggagccggac

SEQ ID NO: 549471 - DNA, 1339 bp, Homo sapiens
  misc_feature (354)..(354): n is a, c, g, or t
  misc_feature (484)..(484): n is a, c, g, or t
gaactgactgtaactacaacgggtagtacgagatgcggggtcgtactggcgcgagaaggtcactgggaaacgagggacgagcggcaggggtgcccatcggagtcgctgcttgggtctctgataacggtgcagaagaccagtgagatcatcctacgctgggtcgttccctacgacgatgagggcactacgcatgagggaacaggcgtcggcggcttgtatctatcttcgcgcaagggcgctgacctgtggtcgagccagttctagcacttggtcacattgtgcttgtgtcaacatagggccgtgtcctacgaaggtagccataggtgagaattagtcgaacagcccgtctgaacnagctcacctggtcaggtccttgtcaggcgcgagtcatgcgcatggggagtcgtcgatagcctgaagccacaggttgcctgttacgacaggtaccgtgcgcttctggggaatgcaaatggacacgacgtancgcgtcgatggtacccaaggcaaggactgcgaaaagctgcgagggagactagcgcctgcatctggtgcccttgtgcgaggggaatggcgtgtataactatgaccttccatgggttagctcgatagtcgcgccatacgttggccgcccacattttatacaaccaacgcccctcaattgcgcccacaagtggcttatcctagagagagaagaggaggaaccaaggccataaggaaacacaccacaaaagcttagagcccccataggatccccacgaaccccgccaccaaagaggacctaaggggcggcgcacggcagacacacggggggggctttggtccccaggcggcgagggaacaaacccacgcgggggtcggaataccagccaacacgaaaggagcgtgtgaccagaaggagaccacgaaagtaccgcggcaatgccaagagcaacagccgagcacagaccaaagtttaggggagacgaattagccaggaagggaagcgccgcaaacgaccggcgggcggcggggaagaagcggaacagaagccaaacgcgggcccccagagaggcagccgaaaaatagcccgcgtgggagagcaaacaccccaaaacgtaatgcaccccgtagggcacgcccccgcaacgaagccgcccaacccaagagggaacattacccgactggcaggagcaccccgcacggagtagagagccgacccatatgaccaaccaccacgggagaccacacaaggaagagagaccacagaaggcgaccggcgccacgaaggggacgcctatcgggccaagcgccacaaagcagagaagaggccccggcagacaatgtgtggggagcaaagccc

SEQ ID NO: 549472 - DNA, 167 bp, Homo sapiens
tcggtcctgcgatcttacaactgcggttgtgcgtaacctgggagtgagagcttgcagtgagccaagattgcaccactgcactccagcctggtgcagcagagcgagactccatctcaggagaataaaagaataaaataaaataaagaccgtgcacctatagtctcgct

SEQ ID NO: 549473 - DNA, 336 bp, Homo sapiens
taaaaaaaattgggggggggggggggggggcccccccttttttccccccccctggggggggtggggggggggggccccaagggggggggggttcaaccccggttgggccccccggggtaaaccccttttttttttaaaaaccaaaaattacccccggggggggggcccccctttttttcccccccccccggggggggggggcccccaatttttttttccccggggggggggggggcccgggggggggggggggcccgtggggtcccccccctccccccaaaaggggactttttttcaaaaaaaaaaaaaaatttttttttaaaatccccgccccca

SEQ ID NO: 549474 - DNA, 887 bp, Homo sapiens
  misc_feature (5)..(5): n is a, c, g, or t
  misc_feature (419)..(419): n is a, c, g, or t
cgccnggaaattaggctaggtacgaggctgggtggctggggtagctgctcacgattttggctataaaggggaggagagcccagtcatcgtaggctctgcgtctctagtgccctatggacgggatcgggtacctctgcagttaggcctgaagtctgtgcagaagctactggatgctgtggacacttacatcccagtgcccgcccgggagcctggagaagccatttcctgctgcctgttggaggcggttgtactccgcttgccttggccgctggcaccggtggatgcgcgagggtacactatgagcgttggcagttgttcaacagacagggagactggatgtgtgagcatccatagcgtacatagcaacgtaatcatccgtcgactgttggatgacaggcctctgtgaggagtgtttccancaacgacgcctggatgacgtggcctgccgtgccggtaggactaagcctcgcgtgggcccgtgggctctcgacggactttgagagtcggggacggatcttggcgtgcggggccttggctcactggctcataggccagcgttccagtcgaagccccagcatcaatggtggaggctcggagtgtcttacaattccatctcgctgagggatgggaacggtggccgcccgacgagagcgccttttgtgtcccatcttcgagtgcctgtcatgttctcccttggctttgggggacatggcctgtcggtattgtcctgggctcgccgaggaatggagctggcctggtccggcgtattgcctgaagttcagcctactcttgcggagcggaggtcctggagaagtgccgggttcccctgcggcatggacggacctttggcccgtcttaccaaaggtgccggttggaggaaaaccggg

SEQ ID NO: 549475 - DNA, 166 bp, Homo sapiens
caccggatcctgagatcacgccaagaaaaaacatggctaataaataatttctgatgaaaaaaactatttaatttaccaccaggagtcaacacacgtttccaaattccacaaatggggctttcttaagtgttcacacattttgactctatacaatgatcgcttgtgg

SEQ ID NO: 549476 - DNA, 115 bp, Homo sapiens
gtcgaccaaggtcaagcttctgcgatcccttcctcagcgtttcaagatggacgtgcacattactccggggacccatgcctcagagcatgcagtgaacaagcaacttgcagataag

SEQ ID NO: 549477 - DNA, 190 bp, Homo sapiens
tagtgaagtgtgactctgtcctggtctccttacccatttaccattttctttccacctactgggcggatgttctgtcctgagtcaaccctctgtcccactctgtcacccaggttggaatgcaatagtgtgatctcgactcactgcaacctccacttcctaggttcaagcaattctcctgcttcagcctcct

SEQ ID NO: 549478 - DNA, 556 bp, Homo sapiens
cagacggttgctccgagcgttcgttcccgacatgtgatacctttctttgatgcattgctgccactgcagccctcatgccaactgcatgattgagcaccagtgcctcatgctttgcacctgctgtcacccatcatcaccctattttaagggtcagccgcactctaaggagagttcaaagacctaggccttgatcactttaaggcgaaatatacggtgcttttcttctatccctcgcattttacctttgggagtactacacaccatgtggcttttagggacatatctaacgaatttaacgaccgctacctgtaccgcagacgctcactcagtggatccccactgtagccatcttgcctgtttacttgcaccatgatagaatggtcgataggcccacatgatcatcgcactcttggcagacgcaactatgcagaatatccgcgactacgtgtgggctgtcacaaggaatggacttagcactaagacggctgttcattgttgaccctatggactcatcaagcacttttgcgataacgatctcccacaggaccgatgcgtt

SEQ ID NO: 549479 - DNA, 523 bp, Homo sapiens
  misc_feature (182)..(183): n is a, c, g, or t
  misc_feature (211)..(212): n is a, c, g, or t
  misc_feature (285)..(285): n is a, c, g, or t
  misc_feature (303)..(303): n is a, c, g, or t
  misc_feature (321)..(321): n is a, c, g, or t
acttgccattctatggttaagaagcgggcattcgacagatgaatattacgttaccttgcagactcaatggaaactgagttcattttctgagaaaggtttttatgactgaaatattttctctacagggagggactttaacatgccctggctgtaactaagctcttctgagtgggctccaggtnncactgtcctgaaatgcatcatgatacgnnaccttgccgagctcgctcataaactaactagctctgaactgtactcaaaccgactggacttatagattagtgnttttacattattgtttgnaccagtccttgtcgttcnagttgtgacctagctctttccttttttttgaatccacctcacccccgctcttctcttttttttactatcgcccaattcacattttctcctttcactttttaatctccactctctgtctcgctctttcaatctattcctccctccctccccctccttcctcctttttttcttttctcccatttattattcctttattcatcct

SEQ ID NO: 549480 - DNA, 302 bp, Homo sapiens
aagaaggaccatgtgcatttgggggacattgtaattctagccgctttttatattgaaaaattccaggccgggcgctgtggctcacaactagtaatccaggactttgagagggcaaggtaggcagatcacgaggtcaggagtacgagaccagcctggccaacatggtgaaaccctgtttctactaaaaatacaaaaattagccgggcacggtggtgcacacctgtaatcccagctactcgggaggctgaggtaggagaatcacttgaaacctggagacggaggttgcaatgagctgagatcgt

SEQ ID NO: 549481 - DNA, 626 bp, Homo sapiens
cacttcaaggtttagaatagctcaagtcagagatgggaagggaagcacacactggtaagcatggagtgcatctaaaacatggaagtgatcttatctcaccagaaatggccaatctcttatgtagaatggtacagtcttcaggatagatggtgcagggtgtgcagcaacttggaccagcaagctccaattttctagcaaggggtcttttacagtactcttccagacttcaaagttggactccctacagcggtgtggatgacggcactaataatggcttttattccccatctcaccctcgtccctcttagctggaccaggtttggactggaggctgtgtgccaggtccagaaacactagtctttacattggagcagtagaatcttcaggcagaattagtatttaatagttttggttggttttggagacatagtctccctctgtcgcccaagctagagtgcaggggcacgatctcggttcatggaaacctctggcttcctgggctcaaggcaccttccctcctcagcctccccagtagctgggactacaggcacacaccaccatgcctgggtaatttgtgtattttttctggcacagggtttaccatgttgcccaggtggttcaaaccc

SEQ ID NO: 549482 - DNA, 243 bp, Homo sapiens
aggacaaccggagatggagcgcgatgtccaaacagttgtcatagctgtgacctggggaaccacctgccccggcctcccaaagggctgagattacaggcacgatccactgcgcccggctgcccagcctaaccgcccagcctaattgctttctttcttttctttttttttttggagggggagcatcgctctgtcaccaagcttggagggcaatgggccattcttggttaactacaacctcggcct

SEQ ID NO: 549483 - DNA, 512 bp, Homo sapiens
ctagtacaacagcagccaccagtacattcctcaactgccgttttgggcagtctgctcgatgtcaccatctgcaagatcctctggcggtcatcagattttacgtgggacatctctaagtgctggtcgagactattttttcatttggaatccatcagaccagtatcacagtgcccccatctgccccaccaccaactactgctgccactccccttccaacatcattccccacattgtcatttggtagcctcctgagttcagcaatctaccccctccctgcctatgttccgctgtgctagaagcacagatacaggccacttcatcagctttgcctgagaggccgggtgacagtgaggtctcaccatcagcagcctctcttctagaggagcatcagtctgcccagcttccccaggctcctccgcaaccttctgactctgttataaaagaacctgttcttgcccagcctgcatgctgcaactctggcactgcgtgatctagtactactgaggtgtaag

SEQ ID NO: 549484 - DNA, 854 bp, Homo sapiens
cgaactttttctgttgaacaaaatattcacaacaggcagttgtgatacgaatagaacaaaaaaaaaaaaaaaacatttaaacttggtaaggactccgatgaggttggggacttcaggaaaaatcaacccagcaccagcagtttaccaaccaccattccatctcttcacttgaacagctttagtttacgtccagatgtgggaccccttctcttgggaaaaagtccctagttggtgtctcagaccggtgtaaacaaaccagccagccgccacctttgctaaaccttataagctttttaaaatccaattatttttctgccaaaaaattatgccttgatagttagccctcagcccataggtgtttttggtttttaaccagaattatattttgtcggggggtgaaaaaacccttgcttccaaagggtccatacgggttactgggtttcatggccaccactttaggggattgtccagtttaaaaccatttggtctgctccctcggtggaagcctttgcgcagagctacttggtactggtgggagaataactgctgaatttaagctgttggagtgattcgcaccagtgcaccacaactcatatgaaacctatttacgttatttattatctggtggaacacgtttaccctcgaccctttcggtccctactggtatttctcccgtttgatgacaacgcctagatattttttcttcatcactgtcacttttgatgggcctttttaatcggcaaatgggggggtttgtctctcccggaattttgccttggactcctggggtttatgtgctcgtcccatctctctaagatgggtgcatttctatcttctgtcctattgacacgttc

SEQ ID NO: 549485 - DNA, 509 bp, Homo sapiens
  misc_feature (86)..(86): n is a, c, g, or t
gttgagttctattgtcagtcagcccggggagttgacagtcctagtgccactgaggactacttgccagaccaggaaccagtggaatngagaacttcttacagaaaactcaggatcaaaaggacacaagccttggatcactgtgtatcagccacagagcaagtgatctggagctgcagctgctgggtgggcgggacaaccttcaagtgaagtgtatgtaccagtgtacaccttggaagtctcaccttgccttctccaggtaaccaagaactgcatagaaagaactttacgagcttggctgtggtctcccaaagagctgaagtcatcatcagtgtcagagcccaaaaggagaatgacagatgcaattcttcctgccatgcagaactggacttgagtttgcaaggtgggaggctctttcaaggcagctcacccatcagaatagtcccggatctttgaattctctcagagtccccaccatctgggtctctttccctttttggaggctgggatgg

SEQ ID NO: 549486 - DNA, 262 bp, Homo sapiens
agttatccccccacagactctctcggccgaccgccaactcttgccgcgtccgccacatcttttccggccgccacagcttactacctgcctgtccacagcttctcctgctttgccttaagtctagcctcagccttctctaacttctttgcattcactggtctaaacggtccaaacacatcgacttcactctcgcgtgtaggctctgaaaggaaccccaagagagaacatttcgagaagctgtggcgggagtaccgagctcgat

SEQ ID NO: 549487 - DNA, 383 bp, Homo sapiens
  misc_feature (1)..(1): n is a, c, g, or t
  misc_feature (6)..(6): n is a, c, g, or t
  misc_feature (116)..(116): n is a, c, g, or t
  misc_feature (124)..(124): n is a, c, g, or t
  misc_feature (325)..(325): n is a, c, g, or t
  misc_feature (362)..(363): n is a, c, g, or t
  misc_feature (372)..(372): n is a, c, g, or t
  misc_feature (382)..(382): n is a, c, g, or t
nggagntccccatccgctgaggagatggatgaggatgggcttcctctcatggggtcaggcatagacctgacaaggtgccagctattcaacagaaaagaaccgtggcctttctaaanccagtttntggtgcacactgtgagttttctcaaccggttttccgcagtttgtgaggagaaactggcagacctttctctccggattcagcaaattgaaacaactctcaatattttagatgcaaagctgtcatctatcccaggcctagaggacgtcacagttgaagtgtctcctttaaatgtcactgctgtcacaaacggatcacattctngaaaccacttcggagcaaacgcagcagaatagcacgnnaagactctnggaggcacang

SEQ ID NO: 549488 - DNA, 311 bp, Homo sapiens
  misc_feature (64)..(64): n is a, c, g, or t
gatgagctggtaccggtgttatcgatgcaccctcgaactcctgacctcagtgtcgcccgctgtnctcccaaagtgctgggattactggtgtgagccaccgtgtcctggccagatttctacttttttaaagctcttacaggatatgagacactttttctttttcttttttcctcatatatatgtttgtatttttcatttggtttctttcgtttttaaatttaatttaatttaatttccagttccgagatacatgtgcaagcttttccctttttgaaagggccgtgcagtgggaggtgtggcatcgataaaca

SEQ ID NO: 549489 - DNA, 564 bp, Homo sapiens
  misc_feature (270)..(271): n is a, c, g, or t
ctagaaacagtctctccccagctcacttggctgaagatactaaagagaactagatgttatctagtgttatcctgctgatcccaatttcctatagttctggcaccagaaaatcctgaatgataggtttttctgaagctgctgacatcgggtcaccctcaacaccatcacctttggccatgttcaggaagtactcaaaggtaacactggcagccaagagcaggccaatcaatgtctggccacaccctaatcccacctggacagtcacacccnncctccctatgtgtgttcgcacagtgggggtgatatcatgtgggtctggcctgtcctgagcagaacctggtgttgggttgtcagaaacccagtgacccatcacgttcactcttcagatcatggctcaaaagtctgcagagcagagacaagagattgacaaagaggtgttgatgagggcaataaaagcaaaggtggctttatcacggtgagctacttctcacaggagtcgggatccacatctgcagactacacaaaaacaaacaacacagattaaaagcacaatcaccattgaaa

SEQ ID NO: 549490 - DNA, 100 bp, Homo sapiens
accggttacttgggagcacaattaatggtttcctacagcttacttgtatctgagtatctattggatagatttaaaaataagtcgtataaatttgatctct

SEQ ID NO: 549491 - DNA, 907 bp, Homo sapiens
tgccgcatcatggtgcggaagcttaagttccactgagcagaagctgctgaagccggtggacttcctgaagctgggaggtcaccgactcacaacctgcacggagctgcgcgtgttgctggctgttaccggctgctagcggcgggaggagttacacgcgcgtacgaaaccagctgagccgtgccgtgcgttgagcttggcagctggcgcacgtggcggcggacctgcccgaagcgcgaccatgtccggcggtgcgcgactccggcccgggcttgttggacaacgctgttatgctctcggttggggtgcccgacggccggcgggtctccgcgtggaaagccttcgtggcagacctttccgtcaagtggcgccttctggtccctttcgtagccggcgcggccccaggccgtcccccccagcgcgggtgtggcttcctcttcacaacgcctggggccggcaaatgggggctggcaacagccacccccttttgcgaagcgcgctggcagcggttggcccttttggggtgggcaccccagctggtggccactcgtctacggccagttggggagcccccttgtggacccgaggtggtggtatttacaaccgccggtagatcccacccgcagattccgacatttccctgttggtgcttcaccacccggccgcaagagaggatgcggcaacggaccactattttgtcgccccccgtatggggcgtggggagaccctccgggtacaaggaggacactccaagcggcgggactcgccgagtagagttgacgaagcttacccaattagagaggagagcggcgacagaaagtggaccactcaacgattgcctgggagaaaacccactttataaccgcccggggggaaataactaccgtcccaacgaaaagtgtatatagcg

SEQ ID NO: 549492 - DNA, 264 bp, Homo sapiens
atcgccgtatatcagcgtggatattacggaagcaacggcgcgcgtgctcgtttagctcattacgatttaccaccagctttattggttgatataagtagaattaagcagtatttgtcctactgtgaccgatgtatttcacttaacataatgtcctcaagggtcatctaaattgtcccatactgtaggattctctttttttttttcttttttgaggctgaataatattccattgctgtgatgtaccacattttcttcattcttctg

SEQ ID NO: 549493 - DNA, 173 bp, Homo sapiens
tatctcccaaagtatgcagtttcacaaacttgattctcagttggtaatttttaaataaattctgtatccttgggctataaggatcttctattttgaaagccggatctaaagcccgaaatatcacctctccttcagttgagggttccatgtcagaactatcgaggaatccactc

SEQ ID NO: 549494 - DNA, 434 bp, Homo sapiens
  misc_feature (127)..(127): n is a, c, g, or t
tcggagaggtccaaacttcaaaagtggcctcagtctggaatttttccacaggaaaagtcagcagtaaatattgacaccggaatcaatcatctctactgaggttccagattgctccagccagccaggncagctaggtcacaggtgacaagaataagacagccaccctctgaaagagctgtcatccagaagcctggagagaggccgtctccctgactctgggtcgccatcctctcagtatggagcaggcaatgctgaaagacgctggctttgttgggtgctgggcaatgcactactgggtgtgccacaaggtttcccggtgtacgactacgacccttcctctctgcaggaagctctcagtgcctcagtggcaaaggtgaactcgcagtccctgagtccttacctgtttcgggcgaccggagctccttgaagagagt

SEQ ID NO: 549495 - DNA, 465 bp, Homo sapiens
gtgcagagtatgccggtctcttacatacataaatgcgtaccactgtggtttactgcacagatcatctcatcacccaggtaccaagcccagcatccgcagctattcttcctgatgctctccttcccctcccccatgccatgaaacaggtgtccagtgtgtgttgttcttcctgatgtgtccatatgttctcattgatctgcttctgctaataagttagaataataataggtggtgtttggttttctgttcctgcattagtttgctgggagtaatggcttcaaattccaaccatgtccctgcaaaggacatcatctcattacattttatggcttcatagtgttccatggtgtatgtgtaccacatttcctttatccagtgtatcattgatgggcatgtagattgattacatgatgttgctattgtaaatagtgctgcaatgaacatttgtatacatgtaaaaaaaaa

SEQ ID NO: 549496 - DNA, 926 bp, Homo sapiens
gccccgtgctgcgctgcagcgtcctggcgcgcacctcggaggggaccccggcactggcgagagtcaggtcgctgggttccaaccacgcgtgccctgcagacgagcctccgacccggatttctgaagggagggttggactgcgctgccgttcttgagtggtgtcctggaagttctggacatggtgacttgaatgtgatgggtgacgtggtcatgataaaggtggcctggtggtgcaaagtggaagcggccaatgagcatccatgtctgtcgctcgagtgtgatgcctggggagggcggctggtgcaatgctgccccagctggatgtgaaggagggatcccctgtgatgcctcatggcatggtccttgtcattggagcttgcggctctgggaggcgtagcccctgctgttgccctgccgcactgcttgcctggggtggcccttgtgggcttgccttgcgcctgtctcgcatggcgtggggcccctgcctgcaaccatcccggcaccagcatgaccctttggctggcctggtgccatgggcgcctgtggtgcgcttgtggcttcgccttgaggcatgcctgttctgtgccctttcctccccactgttgcatgccccaacggcacatgtcagctttcggttgccccgactgctgtgccgccttaaccccgtttggggctgcagcctgtttctggggcttcagccccccgtggagcctttgggctactccggcgggagcgggggggcgcaacaagccgcgggtcttgcgcctttcataggcggcccatacttccactttgccgcgtttggtgccaacgctctgggttttccggcccaccattggagtacggcgttagggagttattcggtagcggtcggccggcgtagcttcgggggtgccaaggacgagccagagggtggcgtgagggca

SEQ ID NO: 549497 - DNA, 374 bp, Homo sapiens
  misc_feature (11)..(11): n is a, c, g, or t
  misc_feature (80)..(80): n is a, c, g, or t
  misc_feature (147)..(147): n is a, c, g, or t
  misc_feature (176)..(177): n is a, c, g, or t
  misc_feature (187)..(187): n is a, c, g, or t
  misc_feature (196)..(196): n is a, c, g, or t
  misc_feature (206)..(206): n is a, c, g, or t
  misc_feature (208)..(208): n is a, c, g, or t
  misc_feature (213)..(213): n is a, c, g, or t
  misc_feature (230)..(230): n is a, c, g, or t
  misc_feature (239)..(239): n is a, c, g, or t
  misc_feature (258)..(258): n is a, c, g, or t
  misc_feature (266)..(266): n is a, c, g, or t
  misc_feature (274)..(274): n is a, c, g, or t
  misc_feature (333)..(333): n is a, c, g, or t
atttccccttnccccaggagataggacccctaaacctcccctgggtcctaggaccacctgatccaccacttgtagtctcnagtgaggaggggacccttatttggaaagaaatgaacatgtaagcagctgtccgcaggaagaaaggangatggctgaaaggaatgaaccaccggagnngtgttttttntgtggaggngtggagaggncntccanggcccggccttcttggngtgggggantggctggcctgggcttgcngtggcagnacagcttntgttgaaggcttggggatggccaggctgccggtctggggaaagatcactcgatctccangatgaggtcgtcaccttccagtgtcatgtccttggtcacat

SEQ ID NO: 549498 - DNA, 407 bp, Homo sapiens
ggtactctctgctcccagattcacatgatcagtatcaagtaggtcccctttcttctgccaggcttggccctggtgataggactcttgtgtcactctagtataaaatcacagtggcccaaggaagaacctcctgagcttgattaccctcactatggagcagaaggacctggccctgaacacaggggcggtgcagagtagtaaaatagacagtggctgaccttgtagctttggctgaaatgccgcacagggctctgatttgaccaacttctcccacctgaggaagaaacaagttgtctgatactggcactgctggatactcagtgttgaaagtctatgtagagaaaggatattgcaaatgaaatttagaagctattccttaaggctaggatgcagactatgctatacgc

SEQ ID NO: 549499 - DNA, 190 bp, Homo sapiens
atcaggagagagactgggcgttcattagacttttatcataactatgtttccatcatccacagttactgtttgaattcttctctaaaaatattgtaattggcaatagtccaaattttcttttgttttctttcctgtttttgagacacagtctggctctgtcgcctaagctggagtgcagtggtgggatctc

SEQ ID NO: 549500 - DNA, 383 bp, Homo sapiens
  misc_feature (383)..(383): n is a, c, g, or t
ttttaacaaatgtatagattttgaaccactgccactgccaggatgcagaacagttctataacatcatgatctaacttaacagatttttcaatatggtcacatctttaacattttaggcttgtcctctatcttcaggttatttttggataaacggttgtaatattttaaaaataattatttttgacttgctttgtatttactatgtcatacagttagctgtttaaccagcttttttttctctctcaattaaagggtatattaagtcagagtcaggataaatcacttcggagaatagcagaattaagagaggagctccaaatgacccagcagcaaagaacatctgcaagagagtttgatgcatcttagaggagaaagacagtatn

SEQ ID NO: 549501 - DNA, 290 bp, Homo sapiens
  misc_feature (277)..(278): n is a, c, g, or t
aagtttaggataaattccagtgcggcgggggcaggcaaggctacccacattttttaaaaagaagccagcccgtatttttctccctttccaaatcctccgccccccagtccttcgacccaggcacgagcgcccatcgcggaggccacgatgcccgttttattccctctccacggcaaggaaaagcagcgaaatctgaggtcttcagaggttaaccctatctaggagcagaatgtgacgcattgtaaacaaataaatattgaaaactcgatgttaaacnntttaaaaaaaaa

SEQ ID NO: 549502 - DNA, 323 bp, Homo sapiens
  misc_feature (138)..(138): n is a, c, g, or t
tgcagctgctgctgtgtgtgggtctagaggatcccatcggcgaagactgtggcagcattttatggcatcaggcgaggagtgtgggcaggcaccctcggagcccgacccagatctgggctgtccctgatctcgttctanagggggaagagcctattccgtcgccctactccaaggagcagagccattctccgaaaacggcagcccccaaactgaggtccctcccacagagttgtctgtccacaccccatccccgcaagcagaacctcgtaggccctgaaactgctcagagaggaggtggcccccagccacagtcttcgcctgat

SEQ ID NO: 549503 - DNA, 622 bp, Homo sapiens
  misc_feature (472)..(472): n is a, c, g, or t
ctgcttctagctcggagctaaatgctgctcatgctgaaaagagtaatgtgtatatctttgtgtgggtattagctctattttgatctatatcacagatttgtaattcagatcattacccctgcactttgtaccacatgggcgtattctttctttccagacattgctgcaattatcttggctggtctttgtgtaatatgttctgtgtgagcctctgcattaaactcgatttcttgggcaattatggaaattccagtgtggctgcagtttaactttgcactctctatgcatatgagggttcctaaataaatgaggagtagcataggttaaaatatatatatcttataactttctacaacaaagaattattgagtccaaatgtcatcagtgctcaatttgagagaccctgctatcgatgggcgctacaaaccacgaaatactcaagttattatgtgtgtacacatgggtttaggtntatgaaacaatttaccttcatgagctcataggtaaaaatgtgataaatttaggaatattaaggggcaatatgggaaagcccaatttctaggcggattctgttgggtttagattttgtgtaagtcacaccccggaaggagttgactatctg

SEQ ID NO: 549504 - DNA, 637 bp, Homo sapiens
agcggatctgggcgcagcgcggacatggaggaggacttattccagctaaggcagctgccggttgtgaaattccgtcgcacaggcgagagtgcaaggtcagaggacgacacggcttcaggagagcatgaagtccagattgaaggggtccacgtgggcctagaggctgtggagctggatgatggggcagctgtgcccaaggagtttgccaatcccactgatgatactttcatggtggaagatgcagtggaagccattggctttggaaaatttcagtggaagctgtctgttctcactggcttggcttggatggctgatgccatggagatgatgatcctcagcatcctggcaccacagctgcattgcgagtggaggctcccaagctggcaggtggcattgctgacctcggtggtctttgtaggcatgatgtccagctccacgctctggggaaatatctcagaccagtacggcagggaaaacagggctgacgatcagcgtgctgtggactctgtacctatggcatccttagtgcatatgcgccgtgtatagctggatcctggtgctccggggcctggtgggcttcgggatacggaggagttccccaagtcggtgacgctgtatgccgagtaccttcccatga

SEQ ID NO: 549505 - DNA, 432 bp, Homo sapiens
atattacagttccatttcataaagaaagttaggtttttagaaaatatgctctcagctggccacagtggctcacacctgtaatcccagcactttgggaggctgtggtgggtggatcacctaaggtcaggagttcaagaccagcctgaccaacatggtgaaaccctgtctctactaaaaatacaaaattagccaggcatggtggtatgcccctgtaatcccagctactcaggaggctgaggcagagaatcacttgaactcaagaggcggaggttgcagtgagtcgtgccattgcactccagcctgggcgtcaacaagagcaaaactccatctccagaaaaaaaccagcctgaccaacatggtgaaacccgtctctactaaaaatacaaaaactagccagggatggtggcacatgctgtaatcccagctactcag

SEQ ID NO: 549506 - DNA, 249 bp, Homo sapiens
gggactacatttatcatactgcacactataatacagacatggccagtgcctgggcaaagagtggcccgacgaaacgtctacatgtaccatgctcctgaaaactacagccatggcaacctggagctgctggcggatgtacagattgccttggggactaccccttctaaccagactatgaggggcagtaatctctgagaagagaagagcctgtcagtgacaatcatgcagcacataacccactacatcaga

SEQ ID NO: 549507 - DNA, 416 bp, Homo sapiens
aaagagtccccaggttatctcaaggttccttctgcccatctttcagaccagccagcatgctgtgtccttctcggaggcttttctgatctccatgggcagcatgagtgatttctttccctgaatccttgcagtttcctgtcagtcccacacctgggcacctagtgccttccacctctttgtgggtgcctgccttccactcttgtggtgtctgtctgttcctgtgacagtgagtgtctcagggcaggtttaggtctgtgggtctgttttcccagtttctggctcatatcctctttagtgcacatgggctgctcctccctccctcacccatggctctagtgcacgcacacacacacacacacacacacagacacatatgtgtgtccacacacaacatatgtacatggcacgcgacatcg

SEQ ID NO: 549508 - DNA, 296 bp, Homo sapiens
agttctgatctcatgcagatgagtgatttctttcctgatctcgcgttctgagtcccaactggcactagtgcttccactcttgtggtgtctgtctgttcctgtgacagtgagtgtctcagggcaggtttaggtctgtgggtctgttttcccagtttctggctcatatcctctttagtgcacatgggctgctcctccctccctcacccatggctctagtgcacgcacacacacacacacacacacacagacacatatgtgtgtccacacacaacatatgtacatggcacgcgacatcg

SEQ ID NO: 549509 - DNA, 156 bp, Homo sapiens
  misc_feature (136)..(136): n is a, c, g, or t
gggctgctgtgaagttttaaatgaaagctcctagctttaggagctctgagccactttccctcgactgcactggcctggcagtctgggctgctgaccaagagctcttaaagaggggtcggagcccgcccgtgagagnggagcttctcaccatgtggg

SEQ ID NO: 549510 - DNA, 237 bp, Homo sapiens
agagaaatgttgggcaggtcatgggggctttggggtggtgggaaagttctattcttgacctgcgtggaattcaaagtgtgtttgtcttatggaaacccattaagctttatatgggttaatgtgcttttttctatctatgcttacttttatcgtacgacagtttagaaggacagctgtcaggcggtgagtggggactctgctgagggtcacgtggacgggccggccccgaccacgtgg

SEQ ID NO: 549511 - DNA, 268 bp, Homo sapiens
cgatactacccgctcaagttcatgacggaggcggagcagcagcagctcatcgaggaccatttcctcttcgaaacactcgtaacacccgagatactgctcttaggcatggcccgcgactggcccgacgcccgcggtatctggcacaatgacaatcagacctccctggcgtgagacaacgaggaggaccacctgcgggtcatctccatgcagaaggggggcaacatgaaggaggtgttcacccgcttctgcaccgatctcactcagattg

SEQ ID NO: 549512 - DNA, 242 bp, Homo sapiens
atacatatacaatcgagctggtaccctcatagggcaagcatgagaggagagcacatcaagtaagtactgggccatgcgatatatcacaatccccatattgcaggtcccaggaagatatcacctagtgtgctgggcccagaaacttgtgacaatgtctcttataggcaaacacagggtaagagaggggaggggataacatcaaacatctgatgagccaagtgatatgttggcccttatccgag

SEQ ID NO: 549513 - DNA, 425 bp, Homo sapiens
gaaggcagcagcagccgctatacaccttccccagcagatgcccgtcagcacccgcggctgcggccctgaaggaggagctcagacagtgcccgagatgcccgggagacaccgcccctgtcccccatcgacatggagtcccaggagcggatcaaggcggagaggaagcgcatgaggaaccgcatctgctgcctccaagtgccgaaagaggaagctggagagaatcgcccggctgaaggaaaaagtgaaaaaccttgaaagctcagaactcggagctggcgtccacggccaacatgctcagggaacaggtggcacagcttaaacagaaagtcatgaaccacgttaacagtggggtgccaactcattgctaacgcagcagttgcaaaccattttgaagagagaccgtcgggggctgtcggagctgctga

SEQ ID NO: 549514 - DNA, 384 bp, Homo sapiens
  misc_feature (15)..(15): n is a, c, g, or t
  misc_feature (269)..(269): n is a, c, g, or t
  misc_feature (363)..(363): n is a, c, g, or t
ggatcagtcacaggnttggggggtggtggggtcaaatcttaatatgtgaaagtgccacagggcacacacaactgtagagacaaacagaatgctcatcttctggcaggcacagtggtcagacctcagatggcctcccagctctgtgtgcgaggcttcttggacgtgcattgccaagggcactgatgaagctgagtggttggattcttttgtatccacattacattgggaactctttgtccttgcagcaattcctcactgaacactcaggntggtgatgaggcataaaaagaacaggcatcaacttggaaacacatgctttaagtcagggcagagaaacaataagttgcagccttcatggcctgnactacctctagccacagtctt

SEQ ID NO: 549515 - DNA, 105 bp, Homo sapiens
accaaaaccaatatttcaacttatggtgcctttgttgctgtcagttcaaaaactacctgtactttgtttccttgatatcaaatgacgtcagagtaatatcctccc

SEQ ID NO: 549516 - DNA, 611 bp, Homo sapiens
  misc_feature (408)..(409): n is a, c, g, or t
ggagatatacctaatgttaaatgacaagttaatgggtgcagcacaccagcatggcacatgtatacatatgtaacaaacctgcacattgtgcacatgtaccctaaaacttaaagtataattaaaaaaaaaaatctcttccaattctctcccattcatccaactccatagtccctgttccaggaaccatgggcaaaactgccttactgtactaaaaagtgataacaaactctgagtcctaacttttactcccccacttcataacaaatgctttaaagaacttaagcagaatgtctgctttcactttgtcacattgttaccctggttcttccaagcactcagctttcccaccgagcttcttttagacatcttcgggtatcctttgatgatgcatcttctgctttcacatgnnctctggcgttccttcaccggggtctttgtggccccacaatttcctcccacaacaccattacacagaaggggtattgataaatattagtaaatgattaaacagattagaatgaaaaataaggtaggttttacaggaatataacaagattttacatcagatgagcacgctccccttcaaagtaacgatttttgcacaatacatt

SEQ ID NO: 549517 - DNA, 228 bp, Homo sapiens
  misc_feature (114)..(114): n is a, c, g, or t
  misc_feature (178)..(178): n is a, c, g, or t
ggcacgattcggcacgagtgtatgtgttatatgctggaaaaattaagctgggtgtggtggctcactcctgtaatcccagcactttgagaggccaaggcgggtagattgcttganttcaggagttcgagaccagcctgggcaacatgaagaagccccatctttataaaaaatgcaaaanttaaggccaggcatggttgctcacacctgtggtcacagcactttgggagg

SEQ ID NO: 549518 - DNA, 1794 bp, Homo sapiens
atggtccagaagagcggcatgtcccggggcccttacccaccttcccaagagatccctatggaggtcttcgaccccagcccacagcggaaatacagcaagaggaaagggcggttcaaaaggtcagatgggagcacctcctcagataccacatccaacagctttgtccgtcagggctcagcagagtcctacacgagccggccgtcagactccgacgtgtccctggaggaggaccgggaagccttaaggaaggaggcagagcgccaggccttagcccagctcgagaaagccaagaccaaaccagtggcctttgctgttcggacaaatgttggctacaatccgtctccaggagatgaggtgccagtgcagggagtggccatcacctttgagcccaaggacttcctcgacatcaaggagaaatacaataatgactggtggatcgggaggctggtgaaggaaggctgtgaggttggtttcatccccagccctgtcaaactggacagccttcgcctgctgcaggaacagaccgtgcgccaaaaccgcctcagctccagcaagtcaggtgacaactccagttccagtctgggagatgtggtgactggcacccgccgccccacaccccccgccagtgccaaacagaagcagaagtcgtcagagcacgtgcccccctatgacgtggtgccttccatgaggcccatcatcctggtgggaccatcgctcaagggctatgaggtaactgacatgatgcagaaagctttatttgacttcttgaagcatcggtttgatggcaggatctccatcactcgtgtgacggcagatatttccctggctaagcgctcagttctcaacaaccccagcaaacacatcatcattgagcgactccaacacacgtccagcctggctgaggtgcagagtgaaatcgagcgaatcttcgagctggcccggacccttcagttggttgccctggacgccgacaccatcaaccacccagcccagctctctaaaacctcgctggcccccatcattgtttacctcaagatcacctctcccaaggtacttcaaaggctcatcaagtcccgaggaaagtctcagtccaaacacctcaatgtccaaatagcggcctcggaaaagctggcacagtgcccccctgaaatgtttgacatcatcctggatgagaaccaattggaggatgcctgcgagcatctggcggagtacttggaagcctattggaaggccacacacccgcccagcagcacgccacccaatccgctgctgaaccgcaccatcgctaccgccgctctggctgccagccctgcccccgtctccaacctccagggaccctaccttgcttccggggaccagccgctggaccgggccactggggagcatgccagtgtgcacgagtaccccggggagctgggccagcccccaggcctttaccccagcaaccacccacctggccgggcaggcaccctgtgggcgctatcccgccaagacacctttgatgctgacacccccggcagccgaaactctgcctacacggagccaggagactcgtgtgtggacatggagacagacccctcagagggcccagggcctggagaccctgcagggggaggtacaccaccagctcggcagggctcctgggaagaggaggaagattatgaggaggagatgaccgacaacaggaaccggggccggaataaggcccgctactgtgcggagggtggtgggccggttctggggcgcaataagaatgagctggagggctggggacaaggcgtctacatccgctga

SEQ ID NO: 549519 - DNA, 163 bp, Homo sapiens
aaaccttagggaattgagagggaaactttatggtacgttacctttttccttttatatgaattattttgtacaaagttcagagagccgtacctttctactttcctttctttgactctcatgtgagagaatttgtaacggtctcgtgtgagccctaaagggtttt

SEQ ID NO: 549520 - DNA, 664 bp, Homo sapiens
ggggcaaggtggggtctcttgagggggcccaggctggtcttgaactcctgagctcaagggatcctcctgacttggcttcctaaggagctgggatttacaggtgtgagccactgcgccaagctaaaaaaggccgttttaatttttagtgattctaagtcagaagagtgggtgaaaaatggaaaacattagtctggaggttagccattttatgaggcccagttttatttcatttagactttggaaatttttacccagtccggtgatacaagttcttagggaaggtgtaaattggccggcagacttattttttaaattgggggattatcagaaaacaatggcttaatcacttccctaaaagaagaagggaagagttaatctgaaggggacctatctttgttacccttgggttcccttttaatggcactgggtttgggttttggcattttgggggtcaaactttaacctaacttctttttcccccttcccgttaaattgaccacagttgcttttggttacaaggggggtacttccaagaaatctgcgcagggggaaatccataattatgctttatggccacgggggggtgccctgagtccgatttgaggcgggcggggtcataagtaggattgactctgctgactgttacatggcgggctacatggtg

SEQ ID NO: 549521 - DNA, 873 bp, Homo sapiens
tggatatgcagcgcagatgtgggtctacgaagacgccagttcccctatcatggaagagcttagtcacctttcatgatcatgccctcgataatccagttgcttatctgcttaaccaagtcctgtatgccgtttttccgtaagacgattctagaaaaaaatactaaattgaatactagcagtttcaagacgcgtcatggaatatagaagggcggttctgaagtattcgtgccctgacatcatcgctagttctttgtcgcctcccatccctacgcatcctttacataacagaaggaggtcaaagatccctcccttaccatcaaatcaatgtggccaccaatggtaactgaacctacgagtacaccgactacgggggacttaatcttcaatcctacatacttcccccattattcctagaaccaggcgactgggactccttgacgttgacaatcgagtagtactcccgatgtgaagcccccattcgttatactacttacatcacaagacgtcttgcactcatgagctgtccccacattaggcttaaaaacagatgcaattccggacgtctaaaccaaaccatttcaacgttaaacgaccgggggtatcctaggtcaagtgtctgacatctgtggagcaaaccacagtttcatgcccatcgtcctagaatattcccctaaaatctttggaatagggccgatttacctatagacccctttaccctttagaggcaaaaaaaaaaaaaaaacaaaatgggggggcggccaaaaattttaacatttggggggcgggccgggaagatggcatagtgtccagaaccggcgaaggggtccaaaaaggcgggcggtaccggtcgggtgtcaaggcgaccccgcgggc

SEQ ID NO: 549522 - DNA, 228 bp, Homo sapiens
caagcttggtcagcagaggcgactgttgactcaggagtcaagagcagcttgggtaatgtcaggtctctgagcccaagctaagccaccatatcccctgtgaccggcacgtacacactcagatggccttaactgatgacattccttcacaaaagaagtgaaaatggcctgttcctgccttaactgatgacattcccttgtgaaattccttctccttgctcatcctgacca

SEQ ID NO: 549523 - DNA, 146 bp, Homo sapiens
atcatttttaccgtgactgaatgtcatgtgatattcatctgcagcataatgaagcccggcgctgagtttgggctacggtctccgttggcgttaccatgtgccttacctgttcccgtgtttaaaatctccctgagccgcgagagttt

SEQ ID NO: 549524 - DNA, 466 bp, Homo sapiens
aaactcacgtctgtatgtctattaggctctacaccccatgtaaagcggattaatgtgcttcattgaacaagttattggccactttaggggtgatacgaatcttatcaaaacatataggcctatgggctaggctacatgaggtgtgcgactatgatttgaaaaagttgccaaaataaagcatgccctgtttgccttcagctggtcatcattcacaagtgataatatatcattcacaactaatcggttaatattgtcgcccatcacattattatttatttaatatggcctttgcctataataaataatatatgggtgaaattcgttgtgatttacaatgaaccattatcctgcacctgtaacgagacagaggatgtcatctatgcacttaaatagagaatggaggaagcattaccgtggctcattttcaatgccagccaggcaggatatactccgtgtggtaaagata

SEQ ID NO: 549525 - DNA, 299 bp, Homo sapiens
agcaaagcaggagtatacacggagaggacatcgaacaggttcagatgaaatctcgaggcaacagaaaggccgatgaggcagcaaaagaagcctccctttcttctgcctcgtgcccctctccttcctgttatcccagcaatcctacccaagaactctcccaccgagaaagctttgctatacagcaaggagcctcctttcaaggggactggatagtcaaaaatcaaaagctcgtcctcccctaagagcagaccaaagaaattctgacatctcttcaccaatccttccatatcagtgtgcgg

SEQ ID NO: 549526 - DNA, 120 bp, Homo sapiens
agacaaggggagagttcacccgactggggaggaagagggtggacgattgaacctctgggcatctggatcaacaggagcctaacatgtagatcacctggaacgtagcatctggatcagttg

SEQ ID NO: 549527 - DNA, 209 bp, Homo sapiens
ttggtctttttgtctgcagtgaatgttcaacagtttgcccaggaactgggggatcaaatatgtcttagtggacagggttttaaagtcccttggaatttctgaaaaacttgtttgttaaaaacaaaggtaaaaaataatgcctttttttacaaaaaaaaattttggaaaattgtatactgtcaattaaagtgtttttgtgtaaaaaaaaa

SEQ ID NO: 549528 - DNA, 280 bp, Homo sapiens
  misc_feature (70)..(70): n is a, c, g, or t
ccccccccccaaagggggggggggggggtgggggacaccaaaaacatacttttttcctctcctctctttngggacccagaaggggggcaacaggagggggtggttcccccccccccccacccggggggaggagggggttttttttttttcccccccccttttttccccccccccaaggagggggccccttttgggggggggggggggccccagattggcccccccgggggatttaagaaccccaaaaaaaatttcttttaaaataaattttgggtcccca

SEQ ID NO: 549529 - DNA, 1837 bp, Homo sapiens
  misc_feature (124)..(124): n is a, c, g, or t
  misc_feature (177)..(177): n is a, c, g, or t
ttcggtgctcgccactgcgcaagactgtgagctcggggcttagtcctacagatcttcgtatagtgcgactctgggacagtcgcaatcaccagacagaagcaactccgcgtcaagtagtgatgtngagatgctgcgcactctcctacgccgctagctatatagtcgtcccgctagcanacgattaatcagagtgcatatggtcacctgcactttccctcagtagcgcgagattgcagggataggcgcaccaggtccaagagtgctgatctgcgcgattcgaaggctcgaccaggggactgtacgagcacggatgcagcacgatgggacatggagcaatcgatggtctcccgtgaatagcggttgcatggacttgtagctcatcctgagactagtccttgtggcaaatctgacgcatgggcttggcatatacctcaaattgtgacacattagccgtaagatatgtcaactctctcgaggaacaatcatcggggttgacgttgcgttgcctccaagacctcgtgtcctattgggtacttaggctcgagaaccgtgagcgaaggaatgcgcggacttggagagtgtgtgcccatgcaccaggcgatcgttcacgcattggatgggtggtttgtaatgtctcccaactccttgtatcacgctagccctttgttcatgtaatgtgtgtccccatttggacccaattgcttgggcgccagaaaagctatacatccccgtgtaaatccctttagaacagcgcgcatgcgaccttatataaaaccccctttagaacgaaatttcccaacttccttaccacaggaatgttccccactttggtggctttacgcgccttagacaaacaatccaggacgtatccccctatatccccatatttgtgagaagaaaccaccacacaaaaacaaaacaacacccacgtatgcactttggaaacgcagccgttaggacacacaacgcagtgagaacgccccatccaaagcgatgttataattaccaacagggtgtgtaggacccccctaataggtgaacacctataccagaaagagttacgcaaccatttagcaagggaaacgccgcaatacacccaagaaagatttcaccaactttccgggcagcaggaaaattacacatgggggacaggccaagcacattcagaaccaggggggatatcaacattgaaacaggggggctaacgacaaaacaggaaacgacggagcagagaacaacgggggacaacacgcgtatcccaagagtcattcttaacaagagtatcggagggtcacaaaccccaacggaaaaagggggcaaccaccgccaaaacgcgcgcaaaggcgcccaaaagacccccgtaacagagcgtttcaaacggccttaggcaacgcaggagcgaattagacatcgccaaagccagaccgaaagggacaaaacacaaaggaacagacgcagctatcctcacagggacaacggccgacagggcgccacatgtcgagcggcagcacaaaacaacgaactcaagcccgattccgtgagcacagtcacactcttgagcggcgaggaacacgaacgaggtaccacacgtccgccgcagggctcgccaaagaaccgtatagccctacaaaacagacaccacgacactgggtgagatgaggagccctcatcaacgcaacacagagacacgacaggcccctcacacaagcgccacgcacacacaagacggaggcgagcaccccagtcactcagggagcacgcaagacacgaagtatcagaacaacagcacgccccatcgtgcggacagaccaactgagagtgacaacaacaacaccac

SEQ ID NO: 549530 - DNA, 1989 bp, Homo sapiens
  misc_feature (972)..(972): n is a, c, g, or t
gggctgctggttggccggggaggggtgagcaggttgcctgaatggctgctggggtctgcgaggtcatccgagtccccaggacggacggggactcctaagaagccacctgcctgtgtttacccggcagcgagcgcgcaggtgcctcccgcagcaagctcctggcagcgctcaggaaagtgccgttgcgcctcgcgaacggaagacagaggccgttgaccatggttgtaactggcagttagagcagacaagaacccggccagtatgtcagcaattgctggcactgagggtatctacgccagagtagcctgtctaagctgattgttgactactggcgattcatgtagttcctgaagcccaactcagagcgacggcacatattcgaggaatcaacttgccagagatgtggctataagatgctggagcaactgtctgtccaaatcagagcagactaccacttgggtgctcaaaggtccttgtccctgagaaactgacccagagaatcgctcaagatgtcctagcgtgctttcctcaacggagccctgcgagcttgcgaggtagtgttatgcacgtgaacttggacaattgccactgtactgtacaacagccctggatacaggaatcggtggtgtcgactcctacgccgtcgtatcctaccttgattgagcgttacactaggtgtcacaaagcaaggaggacctcgcccatgggacataggctcacgggacttaatctaaccccagaagatcgagcatccacatggcacacgcgcacccgagcgcccaagccaaggagccagactggtacgcaaaacttctccctgagtgacacactatgacgaacggtccccacacggcacatctcaatgtctacacaaacgcgccacaccaacacacacacaagctggacagcacacctacacaacagtagacctactgcgaccacagcacgcgtctctgacatctcttacccacnaccatatcacaccatacttccccccactcaccaccacaccacccacactacccactaacaccacaaacagcgtacagaccacaacccacaagtcacacacactcacaccaactaaacgccaacaacacccacaccacaaccaccaccacccacaacagcacaacgagagcactcgacacgaccggcgacacgcaagcagtgcggagaccaacgagacaacaggaaagcgcggaaggacagacacaccgcagacgagatcgaagaacgagaggggaagcagagcgagaacagacaggggacgcgcgcaaggacgaacaggcagaacagagccgaaggagaacggcacgaacacacaacgacctacagaccaccgaccaaccaggcccgctacgacgacaccagccaaggcgcacccagcaacagacagagcgctaggacgcgagcgcagaacccaaggcaccacagcgcggaccacgcacggaccgacagccgaccgcggcagagccgccgaagatcgcgagcggcacgagcagcgccgaagccgcagcgcgagcgcgccgagagagacggcgggcggaggacgcggcgggagagacggacgagcaggcgagaggagcacgagacggacggaggacgcgcgagcgagagagcgggcgaggaagcgcagcggggcgaagccagcagcgagggcacggcaccgacgaaacagcacggcacgagcggaagcgccagcgacaagcacgagacagccacgccgaagccaagcggcggcgcagaccgacaagcaactagaggacgccagagacagcagcgagacggaagggacagagacgaaaaacaggagagacaggcagaggcgagcggcatagaggacgacgccacaacaccaaagacccacacaagcgcgacagaagcgagcgacccacggcaagcagaacacaagacagagaaaccacagagagagacaccaactagcacgaaaaggacgcacgagcgcacgaagaacacggcaagacg

SEQ ID NO: 549531 - DNA, 387 bp, Homo sapiens
atctgaggtgatctagaggatcccgtgtgtttatcgcattgccaccttcagtgagatcttgtgtctgagctacagttctggagggatgcggaggggagggagaattctcactttggaagacgtagagccatgcttttgttcattgctttttttttttttttttttttttttaaaaaaaaagggttttttttttggcgcgggggtgggggggcgggggtgtgatcatagctcaggggagcctccacctcgggggctcaagcaatctttgtgcctcagcctcccaggtagtggggactccgggcttgcgccacagtgcggggctcatttttaaaagagaggggggctctggctatgtgcgcccggggtggtctcaacctcgggggctca

SEQ ID NO: 549532 - DNA, 1315 bp, Homo sapiens
  misc_feature (690)..(690): n is a, c, g, or t
  misc_feature (1191)..(1191): n is a, c, g, or t
tctgcctgtgtcgtttctgtagcctctgttttgttactctattgctccttgttattcgtgttgtgggggcgggtgttttgcggttgccccggttcccccgctcaatgttttttgtggacacactttgttgtgacagggtttgttctcgtggcgtgttatgcgctttttgttggtaagccccgctgttttagacccattttttgtcggcgctcttattttatattctccttgtacagaactgcttttgttgcaggatcaccgtttttcgccccccccctttttgtaagtatgacacacaaagggtctgctgacaggcccacaccagtgttttttcccggcgccattaatgtgttctaatagaatctccggcacccttgtggccgcttcttttgtgaagtaaagagctgtgttgttcccccgcgttttaaccgtggtattaggcacttctcccctcgacccattgtcgaatttctaagttgctgtctccgcctgcgtcggatttggtaacacattaggccctggcccagctttttatgattccccgccactttgctaatggatggaaaatatttggggtattgcccctccacggaaatttctaggaagaatcttaccccctggtgttttcctcacagaactccccaccccctgtggtttggaccactcctggttggccccggtgaggggagnctttttctgagcacacggtgagattatttttagcctctccataaatctaagaaggttgccacagcaccctaccacgttaaatttagtgtgtttaatatcttggtgtgccacgagagtatgtatttatcctttgtataatgtcacagaatatgaatacccctcgcaccactattggctctttgcacacttcttataaatgttgtgtgtgaactaaatgaaataagagaaaatattgtataatttctcttgaggtggtggaggctcttgaaataagatgcgcacttaatccacctcttattgttttgtttaacccacaaactcttttgctcccattatttctgattgcccatagttatttctggagcccagtcctcatgccacaataattcttgtataaatagtttgttatgggaagattaaattttactcttgtgtggtaagactatttccagttactgatatttataagttggaatattgataattcccagccaccaagtncccacagggtgatatccaggaatcccagttggtcgtccataaccatttccattttgatagtgaacattttttttgctttcctttgttttaagactcccttttgccataaacgttttgaccagta

SEQ ID NO: 549533 - DNA, 209 bp, Homo sapiens
ggcctgaggccctggaaaacagcattccttctgcgtggaacatgccaaccctcgtctgcgactttgcaaaactgcatgagaccgccgggcgcggtgctcacgcctgtaatcccagcacttcaagaggccgaggcagacagatcacctgaggtcaggagtttgaggccagcctggccagcatggtgaaaccccgtctctactaaaaatac

SEQ ID NO: 549534 - DNA, 749 bp, Homo sapiens
ctgggagcgcccgcgtccggaatctcagccgccgtctgagggctgaggcagcgtggggacgcgtgcgcagggcgcgggctggccgtcgcggacgccgctccgggcagccgagcctctgtgggagccggggccgcggcggcgcgggtgctccgggccgaggccgcgtctggctcttgctgattgaattcctttggtgcagtttagcatgttcctctgtgttctgcatctcctgtagtgtactgttcaagctcagaaatgccttatgtggatcgtcagaatcgcatttgtggttttctagacacttgacagaacacatgacaaacagtgggaaactttcttcgaacggtacttcactactggataccagagaagatagtttcgtgtggtacatggcataatccacagaacctaccttctggatcatcacgtgtcggagccattaagcttacctacatttcaaaggttagcgatgctactacgctaaggccaaaggccggagttctgtacagtcatgcaatgcacggacatgagcgaagtaccttcctacaagccaatgactcagcaggaccctagtggcaatgggtacacatgtgctaaaccaagctatacaaaattacagtaccaaaggcagtcagactcacagcctaattctgatcacctaaagtcgccatggtgcactgtgggaaacccgcaagtgtctaacagacactgatatggtcgggtcggcgtacccagtcattaactcccac

SEQ ID NO: 549535 - DNA, 633 bp, Homo sapiens
cgagagcgggatcgcgctcctcggtccttcctccctcccctcttgcggctcccgctgtcatctggagccgctcctgccgccccctggcggctgaccgcgggaagggccggcccccatccgcacccctgacccctgcgaggtcaacaacaggcgatggtccctgtgtgtcccagtggtgaaagacgactatcacccaagtaggacgtggaagtacaggtctaaagacagagtgccactgaaggtgctgtggagcgtggggccgacggatgcctggggacgaaagttggtgcccaccaatagacatgtgtggccacgatcggtgtggatttcaaggttcctttaccaatggtttggaatggaatggtgcaccacaacaaccgggtggtggaacggaacgggcggggcctaggaggtttgagaagcggaaaacaccaaaatggtgtgcgcgaccaccccttggtcaaacaaccgttttttcccacccagggcccctgggcgtttcttcccaaagattttcccctgtttattttaaaggttttcccgcccctcttgtgcggcacaaacaagccaggcggtctttcccccttttggggcagagttgtgaggggaggctgggtgaaaacacgaacccat

SEQ ID NO: 549536 - DNA, 346 bp, Homo sapiens
aatttctctctgtgggggtggaggggggcggcatgaggctgtgacacaggcagattaaagagtgggagggaacgggcagccgggtttctggaaatagttgtagctaaaatcagcctctcagtgaaggttcctgcccatcttaacttgaggatagtgtgatgtccggaacactcagacgcgtggcccacagtgaagtgagtgggaccggggggtccagttcctgttggcatctggctcgtggcacgctagtcaggtgtgccccacaggaacgctgcgccatgagagcatcgtagcagaggcatcctcggttccactggaacagacgtttgccccacagagagagcgt

SEQ ID NO: 549537 - DNA, 219 bp, Homo sapiens
aggccagcttgcaatgttctttttccggcgctgctcttccgcagttcccattcgggcagccagcgcacaatgtctcctgtgtgaagccagccatcactgtccaggcttcctgtgtcttctcagggtccttccggtctcctttgaacacgtttgtccccttgtctgcagacctctccttcattcttcactgtaccgtagttcatgtcagccaccatcttg

SEQ ID NO: 549538 - DNA, 377 bp, Homo sapiens
tgcgggtctcttcgaccaatatggagaaaccctatctccactaaaaatacaaaagactagcagggcagtggtggtgcatgcctgtaatcccagccacttggggaggcagaggcgggcggatcacctgagatcaggagtgggagaccagcctgaccaacgtggagaaacctcatctctactaaaaacacaaaatggccgggtgtgatgacgcatgccggtaatcccagctacacagctaaggcaggagaatcgcttgaacccagaggcagaggtggtggtgagctgagatcacgccatggcactcgagcctgggcaatgagcaaaaagagcaaaactccatctcaaaagaagggaaagcaaacaaaacctcccagccg

SEQ ID NO: 549539 - DNA, 299 bp, Homo sapiens
agcgtatgctgctactactacccattcttcaggtatttgcggagccactaaacgcacaggccatccaggtaggctctcagcttgctccgccttcacgggccgcctcccacttgcgctatggtgatctggagcctgccatgtcctgccgctggtccaatgagcgcagtgtcctcgattcagggctgatgtaatccttgcctgtcgtaggcgtcctgccggtacccgcggaggaagcgcccgtccgaccccacgtcgcagccatacattatctggatggtgtgagaaccggcctcgctctg

SEQ ID NO: 549540 - DNA, 155 bp, Homo sapiens
gggcgatgatagcgacttgcgggtagactcaaagaagtactgtactttcccaggacgactaataaaggccagtggtggaggtgggtggtgcagaaaataacaggtcagccggagtttcccttgtggccctggcattatagaatatcattctagct

SEQ ID NO: 549541 - DNA, 94 bp, Homo sapiens
ccccattttaaaaaattttggaattcaggaatgtttaaatagaaaacccaaaattcatgaccatttctaagagaaaaataaatataggatttta

SEQ ID NO: 549542 - DNA, 145 bp, Homo sapiens
gtgccactataggccattcatctgaataattcacataatatatatcctttctttattaatctttttattttatcctaattactaccgcattcctactactcgccttaaactccatacacgcacgatcgacatcttgtgcacctca

SEQ ID NO: 549543 - DNA, 134 bp, Homo sapiens
aggccaggaggaaatctcaggcaatatatttcaagccagtccagcatctctggccatcccgataaacgcatgcctctcactgcaatgaggttggctggagcatcaaattcagctcatactcctttgtccaggca

SEQ ID NO: 549544 - DNA, 131 bp, Homo sapiens
ctctagaggactcccgttattcacataagtgagaagaaaagctgagatcgagctttgtatgggcagctgagagttcagagtctctccataagtcctacttctgtacacgatattttgggagtaccgagcat

SEQ ID NO: 549545 - DNA, 214 bp, Homo sapiens
atctagaggatcccggatgggagatgtctggaggatcagttactaaaagaattaaacttgggtgggccaggcacaggggctgacaccggtaatgccagcagttggggaagccgaggcaggtggatcacctgaggtcaggagttggagaccagccgggccaacagggtgaaaccatgtctctactaaaaataaaaaaaggaggggtaccgagctc

SEQ ID NO: 549546 - DNA, 316 bp, Homo sapiens
catctccccgaatttcaatatcatacatcatccggtaggccccctcctcaacagagtcatctgcacctcagacagaatctatctacaaattagactcatcttcctgcagggagcgggtggtctgcccctctgctgaataattattcttccattcatcgctgcttgtctcgctctgctccttatcaatttccacgaggtcctccagaagagaatccacttgttggtattatctgggtcacctccttcttaatggccagaaggtcttctcctttcaactctccagagcttggatagaagaaatgagatggtaggaagg

SEQ ID NO: 549547 - DNA, 142 bp, Homo sapiens
atagtcccaggactctcagaggtggaggtgggagcatcatctgaggtcaggagtttgagaccaaccggtggcaaaaccccatctctacttaaaaaacacaaaagtcagtcaggcgtggtatcgcacgcctgcaataccagca

SEQ ID NO: 549548 - DNA, 176 bp, Homo sapiens
  misc_feature (20)..(20): n is a, c, g, or t
gccagagtcagcagctgggncagatgggagaccatctctacaaaaaatttaaaaattagtcaggcgtggtggcacttgcctatagtcccagctactctggaggctgaggagggagaactgcttgagcccaggaggttaaggctgcaataaaccgtgatgtagccattgcactccgg

SEQ ID NO: 549549 - DNA, 244 bp, Homo sapiens
aactcgggatgactcgtaccagtagatcacataaaggtcacaaatgacatgcatattgaattgaatacataccaccagaatctagtgaccatctacgtgtaggtcgaaccgcatcactgtaagcatgttctggcacgactgatgaacttcataagtctatgacaatcgtatggtaatgcaataatttatgaaaacattaccatgaatttatgaagtaattccataatttctgtgcccatttcaa

SEQ ID NO: 549550 - DNA, 306 bp, Homo sapiens
gagtggtggttgtcgcttgttgtggcccatgagagctattggccatggttgctccatctcctccatcagctcatcagaggccccctccgtgaagattgggtgaaccaatatacatccgggcagtgcagtctccactagcttccctgcctgtgctttggttgtaattcttggtggatgtacttctcctctccatgtcctcgtggttgctgaacacctcccagaggtcgtagagcagttgggtggtgcgaaagcttgtcatagggaggacagatggccaggggtgtgccggatgggcaggaacatgaa

SEQ ID NO: 549551 - DNA, 175 bp, Homo sapiens
atcctcactaagtagagatcttgtaactcttcgcagggcacaatcttacttctttctgaacagagtaccaggctggagatgcagctgagttggtatatgccttccctgcctcatgccaaccacaggctgcatctacagcactgtaaaactaggcatgacagacctagaatcccag

SEQ ID NO: 549552 - DNA, 414 bp, Homo sapiens
  misc_feature (114)..(116): n is a, c, g, or t
ggctccagcaacagcagcggccggaagacgcggaggatggcgccgagggtggtggaaagcgcggcgaggcggactgggaaggaggctaccccgagatcgtcaaggagaacaagnnnttcgagcactactaccaggagctcaagatcgtgtcccagggcgagttgggccgattcatggacgctctcagggagccgctcccggccactttaggatatacttggttacgaaagccacgcaaaagagattcttcatttctttaaggacacatattttatgggattggaggacctcgaggtggacggtcagaaagttgaggttcacagccactcagttgtatctcatgagctttcttgtacacaaatttagtgcgaattcttggtgattgcacacttgtgaagtttatcagtttttgtt

SEQ ID NO: 549553 - DNA, 545 bp, Homo sapiens
actagcaatgacctggatcttgccaaagctagtggtcagtctcaatgtaatgtatctaattatgacctctctcaccagcatatcacagatggccaactttactagttgtgacctcttagttgttcattctcattgtctatatgctttcgccagttgatctctactatcccagtccttgaaaatttggcatgtccctcaggtgatttcatccaatatgaggtatcaaataccatttatatgccgatgaggctcaaattctaatttctagtactgacttttatcccccttgcgctctagactcttgtaactccatgcctctccttggatgtctaatggatatctcacaggcagcatgaacaaaggagggctatgaattactcttcctgttggtgacttcttcctctacctcccccaagtctttaccatctcagtaagtggcatcatcatccaccacttgcgcaggccagaaccccggattcttcctcctccttgatttctttttatcctcctcatctcatgttaagtctggtcacctccttcatgat

SEQ ID NO: 549554 - DNA, 120 bp, Homo sapiens
catgatgtataaacgcaagccatgcattcggcatgctacaataaaaacttaagctgagttaaacttaaaggagttttatacgagcaatgactgattcgtgaattgggcacccccagaatg

SEQ ID NO: 549555 - DNA, 475 bp, Homo sapiens
gcgtttctttgcgttctggatccattggacaggtgatcttgtgtcaactcttagctctgtattgacctccaaatcttagttactatcacatagttctcagctattatcaaattcattaggttgaacagcttccgagccattagctctgctgccaggaggcaagcgaaattttctacgaagtaactcatgttacgtttctgcacatacatttcatccggttagcttatgtcaaagcaacttccaggaacagatccacaagcagattttatcctcaccatcatcatactaactttggcgaatgtatatcttcaccattgttatcatcatcaccctctccatcaacctctgcatcatattcaccaaaaacctctccatcaacctctccatcatcatctccatcaccctctctatcatcctcaccatcatcctcaccaaaaccctctccatcatcatctccataatccgcaccaaaacc

SEQ ID NO: 549556 - DNA, 102 bp, Homo sapiens
ctgagctcacgatagtctaatagaaacaccgaaacaataattcaagcactgcttattacaattttacttgggtctcaattttaccctcctacaagcctcaga

SEQ ID NO: 549557 - DNA, 153 bp, Homo sapiens
ttttactatttatatatagagacaatcagcatttgggatagttttacatgaccagttatcaaacggtcatagtatgaagtgtgcagttgttcattattagtaattatgttgattttaactattagaacaatagtgagatgaaactgagaaaat

SEQ ID NO: 549558 - DNA, 165 bp, Homo sapiens
agccttaccctgggacagaaacaagatggtcgatagagaaggaagagtggctgctcagatggggtggtccagaggcctctcgggcgaggtgactcctttttattttattttttttggggcatggaatctagctcatgtcgccccagccttgaagtgccagtcagt

SEQ ID NO: 549559 - DNA, 106 bp, Homo sapiens
ggctcaagttctctgcatcagaccaacacttgtctgttgtctgttttttctttgagatggagtttcactctgttgtccaggctggagtgcagtgacgtgattgcag

SEQ ID NO: 549560 - DNA, 271 bp, Homo sapiens
aaaggaagccctaagtaatctacctgacattgaacacagatgacagatgatactgacagacagcagtgacagcgacagatgactaccagatgaaggcaaatgaaagataggagattcaggagcagcaatggtactcaccatagctgctggaaacacacctgagaactgagatatacccatctatacccttgttacaaagaagaaaagatacggattaggtagaataagtaactgtgaagtacagtcagaacacagctgactaatgaaaata

SEQ ID NO: 549561 - DNA, 97 bp, Homo sapiens
gagacggagtctcactctgtcgccaggctagagtgtagtgagctatgattgtgctactacactctagcctaggtgacagaacaagacactatctcta

SEQ ID NO: 549562 - DNA, 304 bp, Homo sapiens
tgcaagatgagagccgtggaatgccaatggatccaaagttgaacaaaagacgaggttttgtgtatatcaacctttaacagaagaagaaccctgtgaagaaggttctggcagaaaaagttccatactgtcatgtggaagcacagtgtgagatcaacggtggcccatgcccaaacgaagtctatcacgcagcagcagtattggctcctgggggcctgtggaaacctgcaaccgaagggaacctgaggcagcggagggtggtggttggagtgtggaggtcagacgtcacgagtttggaatcacgggc

SEQ ID NO: 549563 - DNA, 159 bp, Homo sapiens
  misc_feature (73)..(73): n is a, c, g, or t
agagcacaagaggctgcgggttattggctggatgtctctccagctgtcagcgctttggagctctgcaccgtgnctggagcttctgatccctcctccagccgagaacggatcgagctggagtgcactgcctctggtgctgcctcctccttggtgccctgg

SEQ ID NO: 549564 - DNA, 424 bp, Homo sapiens
  misc_feature (1)..(1): n is a, c, g, or t
  misc_feature (76)..(77): n is a, c, g, or t
  misc_feature (82)..(82): n is a, c, g, or t
  misc_feature (92)..(93): n is a, c, g, or t
  misc_feature (185)..(185): n is a, c, g, or t
  misc_feature (218)..(218): n is a, c, g, or t
  misc_feature (241)..(241): n is a, c, g, or t
  misc_feature (294)..(294): n is a, c, g, or t
  misc_feature (306)..(306): n is a, c, g, or t
  misc_feature (315)..(315): n is a, c, g, or t
  misc_feature (326)..(327): n is a, c, g, or t
  misc_feature (412)..(412): n is a, c, g, or t
nggtgtcattcttctagaaccaggttcatttttccagttttgtagaaaaatagatgttccagccaccttttacttnnctgtntagtcttttnngaccaatcagtatgttccctggaaaggtgaataagtctcatgactaattttttaaaaattctttaagacaaagaaataactttctttttttnctcccaaagcacagtatctcaacagcagcagcnaacatggggttttagcagcttanctttgccccctaaatacagctttgtatgaggccagtgattttacgtacaaaancaccactgtccntggaagaanggggtggcagnnagacatcgagtgcaaaacttggaatgattagataagtaaacatggcacttacaaaaggtagcttattagaatattccacttaagnaggggttacttt

SEQ ID NO: 549565 - DNA, 479 bp, Homo sapiens
actctagacgatcccggtatgtgtggtgttatgctagagtcaccccaatggtgtgctcagctagagacttgcacacgagacacagatggtgaggggtctgggtagctagcgctcacagctccacaaagggctttgtcatttgtggagtgaccccctttcctcctgcttctggggactgcacctgccccctctgtctctctgtctgtctttctgtctctgtctctctcttcagtgaagtatagctgacacacactgttataccctcttctccgctggggttattgcttcccagtgtgtgaggtcttggagggacaggccagattttactgccctccaaagagaagccaaccagcctctttattctcaggatctggctcatgtgcagagaacttggagcctgaaaaaggtgatgctccttcagctgtaggggacaccctgagccactggccctccataacaccacacaattccggtaccga

SEQ ID NO: 549566 - DNA, 192 bp, Homo sapiens
acatttttttgagtgttgtagaaaaaaaatatgcgacagtactatgtggtcccataaaacctaaaatatttactatctggccctttaaagaaaaaatttaccaactgatgccttaagtctcaaagtatacaatccttgtttcaagttgaaggtcttccttagttctgcatcatcctttagtcattctccagg

SEQ ID NO: 549567 - DNA, 408 bp, Homo sapiens
atgtgtgtttactgtggattggtccctgatggctcctttgtttgagaacatgtgaaccaggcaccctggtttgtttggagcattgctgcccagaagcttctatgggataggtggtgcttgggtttgatgttttgtggccatgcagccctccctgaggattgacttctgcactaatccagtgttggaggctgtgtcaaaagaaggctctgaagacctcttttcagaggcaatgattcctgtcagtatgaggtcccttagttactaaaaagggacttgttttaactccagtatgatgatcctcctccgagtttactttatagtctaaaaaactaaagttttcttctctttaatgaaagatttgtgggtaatgtgccttataaattgtatatttgtttgattataaaatta

SEQ ID NO: 549568 - DNA, 104 bp, Homo sapiens
  misc_feature (2)..(2): n is a, c, g, or t
gntaactctggctcaagacatcctctacagaggacccgaaggtattctattaactttgatttacaactgcctcacaacaacacccctgtgaggtaggtcagtat

SEQ ID NO: 549569 - DNA, 735 bp, Homo sapiens
tggacaaggatgctggtgcgtgagggaccaatggcctgcccgtgcactctgggcctacctccagaccacggtgctgatccagtgcacttctgacctgctggccagccaggacctgtgtgggtgatggccctcctgctgccttggggtgacaatctcagctccatggctacatgggatgacctgtggaggatcacagatgccagcatgttacatggatcctgacagtgatcaacgctctgaacagcctcgtcaaggtgattctggataaatactacttcctctgctggtgcatgcctctccagcttcatcccgaggaaggcagctgtgtgactggacggagctgtgcactgtccacttggtggcgcaggacgacggagcactgtagtcaagagcttccccgaagggcctgcagtggcagtccgcctctccaaggaccgatccacactgcagagtgctggactcggccacagggaactggattctctgcctgttgtcgacaagcttcacagaagctctcgcttgagacaggcctgtaggcagactgggctacagctgagaaacccactttcagcagcttgtggagcacttgtccccatgaccaggatctgcgatgtaggttgaaatcacagacaaacagccaggagcttcgcatgcggaactcaagctgggccctgactctcaggctccctggtacaccctgaactgtctatgcctgtgggaagagcctgaatgatc

SEQ ID NO: 549570 - DNA, 514 bp, Homo sapiens
tctataccatatcattatcttcaaggaaggtctatccacccaagacgggcgccaggtatatcccattgctaatgtttgaagcaatatattataatgagtggttctttggatttgtaagtcggcatcattcactgagagtgccataatgtaagaatgtaagacttcatatgggtagtctaaggctctggaagtcactgctttcaggccctgattctgtcatttatatcggctgaataatcttggacatgtaatataacatctccatgtctcagtttatatgtcgaaatggagatcgtcatgatacctacaggattactgtgagaattaaacgaagttaacatcgggtaaagacttgtacacagtgccgggcacacaagtgcagagtcagttttagcagtcatgattgtaactattactataattatttagtcagtcattcaaatatctatagagagcctactaatgtgccgatactgtgcgaggtactggtgatacagcgatgagtaccacagat

SEQ ID NO: 549571 - DNA, 133 bp, Homo sapiens
ctatctgcccttgttgaaagaacctaccagctaccacagcagcccgggctcacttgcaacaacacacttcactgacagctccacaagctcaggcctctgttgaggcatctacacgcttccacagcagccctga

SEQ ID NO: 549572 - DNA, 162 bp, Homo sapiens
atccctgtgtcatagtttgatgtctgcctctgcaggcttgcggacatacttctggtgagcactgtgcggcaacttgaggataaatcagtgagctgcatcacttaaaggcatggcctgtctcctcacttgagtagcaggtccatcgaccaaagccctgttctg

SEQ ID NO: 549573 - DNA, 181 bp, Homo sapiens
gcaggaaagtgatggctgtcgtccggcgtctttcaggacaggacgtgggatcatttgcatatcttacaattaaagacaggataccacagatcttaactaaggtattgatacattgcatcgacataaaagtgaatttttttgagacacacgggggaggagggcgtggagcttaaaagaaagc

SEQ ID NO: 549574 - DNA, 288 bp, Homo sapiens
ctgcaccacagcgaatattatttcacacgacatattacaacttaaccattaaattagtacttcaagttgagcctatgtggtgcgactctttataaaaaatgccttttaacagcattaatggctaattgaagtattttatgtctcctcattcctggcccagagggttgtctttgaaaccctgcttctaacccttgtgtagtgtgtttctgtgtgaggacagtgggtgtgtactggcctcccgggagccactgtgaccaggcctttgagctcttgtcatctgtggagaga

SEQ ID NO: 549575 - DNA, 104 bp, Homo sapiens
gaggggtgtacccatgaactgggtctggttcaccgtaagatgggaaatacacagagagcactgttgtacttggttgcagccctgaacgagggatcagcctggtg

SEQ ID NO: 549576 - DNA, 747 bp, Homo sapiens
atttggccggagatgtcccgctccgtgtccttagctgggctcacgctactttgtgtttctgtcctgttgggtactcagggctctccaaagatctaggttgactcacgttatccaacagagtacggaaaggcaagttacgtgaattgctatgagtcggtatttcatccatccgacatcatacgtgacttactgtagattggtgagagaagtgaagaggtggggcattcagactcgtctttaatcaaggtctggcatggtcatctcttgctctacattgaactaacccgcactgaaccagattggtatgcctgccgagggaaccatgggactccatgacagtccaagacagccaagggtggtcgagacatgtcggcacaatcatgcaggtttgtggatgccggatgaggcctgattgaattccaaagaatgccagcttgctcttgattactgatatgcttagacactcacactctatgcccatattggcgcattatgatagtgtttacaagggcatgcacggccatatacttctacttagagcgctgtctacatgtgtgatgattctgggcaggttggtccacagtgagctataggagggcttacaacttataggtgcttagcagaggattctcttatccactataacatactggacagatttggactgttcaaacctttgcactcaaggttgtcaagtttgttagcggtgatagctaacttacattaacatcctctgcttacaatggg

SEQ ID NO: 549577 - DNA, 144 bp, Homo sapiens
aggaaaatgattttctatttccatgagtcatggtttgtaggttttttccttaattttattttgtgtttagagacagggtctcgctctgtcatccatgctggagtgcggtggcatgatcatagctcactggagccaggaactctg

SEQ ID NO: 549578 - DNA, 156 bp, Homo sapiens
tgactctagacgatccctatcgggtagctaggattacaggcacccaccaccacgcccggctaatttatgtatttttttgtagagacggatttcaccatgttggccagggtggtctcgaacccctgtttctcaagtgatctgcgtgtgccagaagga

SEQ ID NO: 549579 - DNA, 185 bp, Homo sapiens
  misc_feature (178)..(178): n is a, c, g, or t
tagagctgcgtccactacgccacggagaaggaccgggagatccgtaggcgggcattgcctgaaggcatgcttggcaatgcctgcccccccttctctttctccgccgggtccctgcaagacccttgtggcttgaccgaacaacctggaaggccacgtctcccaggctcccttctccgtngcgtggt

SEQ ID NO: 549580 - DNA, 1048 bp, Homo sapiens
ggggaggttgttttaggggtccgctggtttttgttgcggcactcgtttctagtgctacttattttttggtgggcactcttccctgccctctttattgttatgtgtgtttctgggggtcctgggagtattttgtgtgtggtgccctctgcgcggctctcccgggggttgttcccccactatagctcctctttttccacgggtagtcttttctgcgttcgctcgcgcgtagggggctcccgaatgattttgtccccccaccgcggtggttctatttcgtgctgtcgctcacatttgaacattgtttcgcccctcggggggtcccccggtgtcttctcttggtatgagaaagagcgttggtagagatctcgcgcgggtgtgttgatttggagacgccccgactcggccccctctcttctgtgtgtggaggcgctgtgtgaggtcccccctcctttctatagaggggttccactctgtgaagaataggctctcttagggtttggtctctctccccccgcgtgtactctctaggtataggctctgttttgtgagctcgaggatatccctgcccctctctgtgttcttgacacgacacgcttctccttgagaagagaatatttctgtgcacacatattttgcgtccccaaaagtctttgtgtgtgagacaacctgtgtgtagacttgccgcacaccagttgttgtgaagaagacatgtggaggcatgggggtctcccccacgtgggcctgtgtcttctcctgcttgtggcggagggcgctctttctcgctgtgcacccactccacttgaaggagatagtggagccacttactgtcctcaaataaatgttcctcggagcttgcgtggaagagttggtggcgtgaggcctcttggataatttgtgcgcctctaggttactagccactcttctgtctgtgttggtggggaacacatttttgtcccccccccagatccttgtactttgtctcgaggcacaccttttttcccggttgctccctttttgttgttcgaggataaatttctataattataaa

SEQ ID NO: 549581 - DNA, 585 bp, Homo sapiens
  misc_feature (2)..(2): n is a, c, g, or t
  misc_feature (24)..(24): n is a, c, g, or t
  misc_feature (117)..(117): n is a, c, g, or t
anccaacccaggatgctgtgcatnggtgcatagaagagtcaagcactcacactggcccattctcccagccctcctgacatgtttttcagtacagtggggtgtcaccccacgacgatngtgatgagtttgagaagggtagccctgatcagtacttagcaggattgctgagccttgctgagaacaacaaaggaaaagttgttgcaataggagaatgtggacttgattttgaccgacttcagttttgtcccaaagatactcaactcaaatattatgagaagaaatagagaccggtatgtgggtggagtgctctctgaaaactgaagctaacttggaagttctgaagtcaatacctagtgaaaaactaatgattgagacagatgcaccttggtgtggagttaaaagtacacatgctggatcaaaatacataaacgacttcatttcctaccaaaaagaaatgggaaaacgggcactgcttaaaagatagaaacgagccctgccacatcattcaaatattggagataatgtcagcagtcagagaagaagacccactggaattggccaacacgctctataacaacaccatta

SEQ ID NO: 549582 - DNA, 731 bp, Homo sapiens
gaggaggaagaggaggtgatggcgacggaccaggagaggggggagatgctccgtcttagctcagacgccatcgcaggctgccgtcacccttccgggtgacataccggctcttggggccatgattgattccggagcgcagattaatcaaggcataatggcgtggacttgacacagctagcgacagacatacagacatcataacagtccaggaaaccaatcaataaataatctctgaaagcagttgaagtgcagcgaaataacagtggatctcaagttcagacaagttccaggtgatagatactatttcgtagtcactgtgccatccaaaatccaaacgaatgtcagccatcatcattcaggtcagttgacgacgttgtggtacttggcatgaatctcagcaagtttaacaaacttactcagtttttcatatgtgttgctggagttttcgtattttacctaactttatgggtatttacaggaattgatatcttcagtggagggttccaagtcctgtggctggtaccttaccttagtgcagtttgccttttactccatatttggcctaatagaacttcagcttattcaggacgaaccggaggagaataccaggaaaaacctacatgataagtagcttttctaactgtgggtactatggggttatcagacacttccttgggctaccctgaattaccctacccaagtcatcttcaagtgctgcaaattgattcctg

SEQ ID NO: 549583 - DNA, 891 bp, Homo sapiens
ccccgtgcctggaaagggtccagaagggggcccaggacgcacgggggccccaaaacattctctggaccttaaaaccccaaaaccaggcccatcccccccaaacgaagccacaacagaaaggaggccaggttgtgacttggaactgggaggggccagcaatgggagcaatgggacaaatccagggcaaaatggtttcccaaccctgggtgcattgcagggacaccagcgactgtaaaccaggtgggcttaccatattccagatggtggtccacacggacaattggccacatccaaggggccaaacattacactctccattaccaggtagcatatactggttagcaaacattggggcctggggtattccggatggacggtgggtggggccattggtgggagcattcatccaaccaggtacagggatggtccacaggttccagggttaatgggggtaaaggtggccaaccccatattccatccaaccaacaaccagcatgggcgtggccatggccttaccctggaaccaagcaatttccctgggcattggtggaacatagatccagtgggcaaaatccttccggagcatgcaatggttcgtccatttccgtaccggaaaggcggggtggacctttcatggacattccccaggttccctggaacacgattcccagaacccctgatgggacacggggccagaaggttgggtcccccaccagtggacgcaaacttgggcggggataagcgccaaggtgccacagtgggttcctatggcgcctcccctttatacaccaagtggaataaaatcgggaatacagggggtccttttccttttccttctaaccttttaggctcttaacaactgtcttctccgtcacctaggtgcccaggttc

SEQ ID NO: 549584 - DNA, 307 bp, Homo sapiens
gttaactcagctactctttgtggcttctacatggcttctattcgggggctgccacgcccatttttatcaccagaatgaggcactcctggaagctaactagcaccatcagatttagatatcccaactctttgaaccatgacgtctgctaccctttatccttgatatactagaggacactcggtctactagcaatttcttcagcgtcatccctagtagacggcattggaaacttccccgtttatcacgggagtacttggtggtagacgtcgatgcatagagtacaaggctttctccaatctgtcaatca

SEQ ID NO: 549585 - DNA, 1339 bp, Homo sapiens
ggagcaggtcgggcccgctaggcagcgagccgcagcgcagtcccggcgcgcggcacaaggaccctggatgctagcgattagcccgcacgggcatgcgtgggcgccgatgagcgagcgtctgggcacgtgaattcgggacaaggtagctagcatctgatacaggaaacttggaattgccagagcccccaagattgcgtacgttagtcgcctgtaattgtcgcggaccgaggcacgactgatcttgttggtgacatcttcgtcatcgtagcagggagccacgggtagcgaaacggcggctgcaagcgattgtgttccgagccgacagctcagttgtcacccgaggcaggtgcagagcctaatctaccagaacgcgagatagcagctcgagggtccgatgctcgcgactctagtgcttttgttctagaattgtgatgagagctaacccaagtttccattgcaaagactcacgttgagccacgtcacttggacaacgacactgtcggatggtttcatgactcaaagttgcattaacgcctagtgtttttgaacggggggacccagaagaggtcttgacaatcgacttgggtcacagtagtcttatcctatgaaagatggggcattgtggttgcggaacaaatcaagagccacgaataaaggaaagcaaggagtaggtcaccttgaaagcggagagtgagcgcaagcgctctggggctcggacacaggatctcccggtggacttattcacttgggaaaaccccctgggaccaagagttagagatgtgggctcgtgcaccaaaatgatgggccattgattgccctttgtggcctagtcacattacattcgcgtttgtggtaaacaaccaccaccaatataacttggagggtattgtcttgcaagtgcccctccttaggagcgaccaacatttcggcagcattagtctacccaccttgggataagtatcctagtaacgctaacccacaaaggcaggagaacgggtgcgcataatccccttggaacacaggtggactggcgcacatttgggcactacatgtttcagtgggcacactttcccaaccaatcagcggcaaacatcgtactgcacgcgcacaaagttttccttgcgcgataacttacagccggacacgcctttggcgacagggggacaaaacccctatgtggcgttgcaccacaatcaccagggatgtagtgggcacctgtcacaaacacagccctattgagacgattgtgggcacggccaacaacctctttcggtcacaggatgatactccgagcgcaagcccaacagtgacccagaggtcacacctatagaaagatagg

SEQ ID NO: 549586 - DNA, 365 bp, Homo sapiens
tccctgactcacctgtgctgcttctcctcccacatccaggctaccctgtcctggttttgttgctaggtgctcttctactcaacctctcgatacggaagaccctccaggttggacttttctcatctctctgtccccgctccctgggtgatttcctcctcacctttggctttgaacatcatctacatactgatgatgcctaaacctgtttttccaatccgccttgctctgaagctccaggatcccacatagccaagtgccttccttaaatctccacgtggcatcctcacaggcagctcaaacttcactgccaaactcaacctcttcttcttcctcctcctcctccatattaagccagcccccttcaa

SEQ ID NO: 549587 - DNA, 101 bp, Homo sapiens
atatgatagaaaataccctgataccaaggctttagctgcatgattatcatgtgactattatatccacccaattaataatccttccttctttctctttcttt

SEQ ID NO: 549588 - DNA, 265 bp, Homo sapiens
tagcagggatagggcagaggatggacagctctttacagctgtgaagcatctccaagggcagttctgtagccacaggatccaggttatttctaacctaccctggactaggcagtggcattgtgacttttgtaatctccaccgtcctccggcacaaggcactttagtgaaaggttgccaaagactgtgtcatcctccacggtgccaccctgaagcctgcttcacagctccctgcggccgttggaaagagggagacagtgtgtgttga

SEQ ID NO: 549589 - DNA, 387 bp, Homo sapiens
  misc_feature (319)..(319): n is a, c, g, or t
ctgctccagccctgtcccagacattcctaatgacttatgttcctgtcagacatccttgggctcaacatctctttctctaaccctgaccagaaaaagcacaaaaatcaatcagtattttaacaatgtctgtgcactggggaggcatgatttcttgcttattgcaggatggtttcgcttctcatcttgactttgcccttcgagatcagcttccgggtctaattgtgtctgtcagatttgcaagaggccacttcgggtttgccaaatagaagaaagtctttctgagaggcctcacttgatcaccccagaaaaatagtcaccncacccttcacctgttgctctttaaccccttaccctcctttcttttctttgtggcacttgtgactacct

SEQ ID NO: 549590 - DNA, 231 bp, Homo sapiens
cagacatagggtcatcaggttaccccacagacacactttatttcctaagggcgggcaaggctcccatagaggcgcggtgtcagtgaagatgtacgactacctgtggggaaggacaaagggatgaggctccagagagagtgggctgccacagcctcggccaagcttggtcttgggggctggctgcagaaaccgggcctacggaagatacgacaccactggttagggatctgt

SEQ ID NO: 549591 - DNA, 476 bp, Homo sapiens
aaagtcaaaaaacccgtttttgtaattcccccccggggccccaaaaaggcggtccccttttttgggaaaaaaccacccctcccggagttttttaaaggcattttggggaagtttcttcccattttcccccggaaggccttccccccctgggtaccaaggaaggggaagggcaaaaaggggtttccccggggttaaaacacaaaaaaccccccctttttttagaatccccaggtcccggatcccccccccaaaaaaaagagggattttgggtggggggcccaaaagagggcctaaagcaaaaccccccccccccccgggttttcagttcccttaaccgtttttttcaaaggcccccttccccccccccaaaaattgggtttgcgccccccttttttttttttttttttttttttggggggggggttaaaaaaaggcccggcccaaaaaaggggccccaaaaaaatttttttttttta

SEQ ID NO: 549592 - DNA, 803 bp, Homo sapiens
gggcctggccatgcttcgcggtcctgtggctgccagctttggctctttctcctgctgctgctcccgggcgctgcctgagccccgtggctgcctccaggcctgtgggatgtggaacctgactgatgcctgtggctctgtgcctgtgtgctctggcctggtgcttccatgctgcctgcagtgagcagctcatgtggctggctgtgtgtgccctcttccaatgctggtacttggactgctcttcatgcttgccatgtgtgttgtgccctgactgacttgtgactgatgtgactgatgtgatgggcatgccagctgtggggcaccacgtgggcttggcctgccttcacatcttgatatgggtgaccagctgtgataaccatttgggacccttccagttgaacacgagctgatgtggtagctttgcccatgacattcaaaaatggaccttgcattgcacactaaggatgggggggagttttgcagagaagacgtacatcgcaaaggcgagacaacttttttacacagtggggcttatagtggagtgttggtgtgaacccccattatggaagcaactttggatttggcctgtggactatttgtccatcatttgtgggcgccaaagaggcccaagttatattgcggtacccgagtggcaactggaccagttgaggtttcccttcacattgcaacaaccactggtatggactggggtgtggccgataaccatttaattggagtggagctagcactcttcaaatgagaccagtggagacaaaagatggtgccgcgttttggcacttcatttg

SEQ ID NO: 549593 - DNA, 83 bp, Homo sapiens
tgacttaggagtcagagcccggcaggctgaggaggaggagcagggggtgctgcgtggaaggtctgcaggtccttcacgctgtg

SEQ ID NO: 549594 - DNA, 155 bp, Homo sapiens
gataggatagccatggaagaagctctctcgactcccgtcgctcatcgagaaaccgcggaagaaaaagtaatccggaatcttacccccgtctctaatagacggtcccatccatagaggatagccatggatcaaactctttgagatctcacggagag

SEQ ID NO: 549595 - DNA, 160 bp, Homo sapiens
cataacatcagaagagcttcctgatctgggtgaatgaggagagatcatacacgggtgatctccatggagcaagggtggtaacactgaacgagagtgtttgaaagattctgccgaggcctcaaagaggtggagagacttatccaagagcgtggccagaagg

SEQ ID NO: 549596 - DNA, 692 bp, Homo sapiens
gggggaacgagcttaatacaggaaacagtgggaattttagtaggccccgggtaaccttcttatgaacagtttggtcacaattcttgtgcgagcactcatggctctagcatggaagtatgatggcacactggtccctaggtgtagtgggcactgagggttttcctagggtgtgcacttccgacatagcgtaagaaaggccttgtacccatctagttgccgtgctgtaacatagacggaatgccctatggctcagacagagtagcccatacagtcccgttcaagatccataaaggtagtcccatagtattcccgcagcagtgaacccgagctccttttaagccttttgttgagacattgttctccccttcaagccgaaaagttctattgtgcagtcagtctggagaggtgaaactcatgggtaagttatcatgtgttcagcaaacgtaaactctttccataaaaagatgttgtacaggtttttaaaggcagatttattgtttttgaaaatcttcaggctaggccccttgagtaacccccaacccgtgtgtttttgatgtcttggagtccaaaggtccctaaagggttagcagaggcaattttatatccttcgtccatttatgagaatgaatgaatgtggccctgaaagtcttcatttagaaggatcgctaggcttaagaacaagctgggttaag

SEQ ID NO: 549597 - DNA, 411 bp, Homo sapiens
gaggatcccaggagatagcaggatacgagagagacagagagaagatgtgtgagaaaagacaaccgagcaaataaagaatcaccagcatagcaagaataaaacataaattgaacacgaaggtgccatttggcaaatgtactgcacgggcgtcgataccatgccagagggaggatgaatgagggatgaaatggaggagataaggaagatgttacaaggggggcgaacccagggtctagtatcggttgtctcaggggaaattcgctgtcggggaaaatggagcactcccacatgtattatgaaaatgaaggaaatcctggagtgcatctggctctctgtaggactggccgtgggtgaacacccagaaagctgtgtttccagaggcatgctctttccaaacccatcctgcttatc

SEQ ID NO: 549598 - DNA, 309 bp, Homo sapiens
ggccgcgtgacttctgctctaggttctttcccacgtattatctcacccacaactaacatttcagtaatcaccagtgaacaaaagaataccacagccagagctccaatcttggctcttctcttgggatctagacccctggttcaaacttccttgaggtcctgtgtcccctggttggccttcgctcctctctctctctgatatcactactgaaactggtgtgccccaccaaggccatttgtattgtactttggttctatctatctgtccatttcactggagggtaaactcgtccagagcagaaggtcgacg

SEQ ID NO: 549599 - DNA, 467 bp, Homo sapiens
  misc_feature (1)..(1): n is a, c, g, or t
nggaacagacagtcgtagattgatttactttccctgcatttaatgctctgccaaaactatcatctatggacttccagaatgccttatccaccaccactttttccacacagcagtgcttttgatgaataaactcatttcacagcaagtgaagtacagcaatgggcccgtgctcatggcttaccatgttctccatcataccgaagcagctggcttgatagaaaggcggaatggccttttgaagatctagttacagtgccagctcggtcgcaacaccttgcagggttgagacaatgtccttcaggagaccatatatactccaactcagcatcccacatatggtactatttgtcgcatagctaggattcatggttccagggatcagtagtagaaatgaaatggcacccacaactcactattacccctagtggtccactggtaaatctttgcttcccatccctgtggcttta

SEQ ID NO: 549600 - DNA, 304 bp, Homo sapiens
ccattactactaaaaatagaacattacgtcaggcgcggtggtcgtgctgtaatccagcactttggaaggcgaggagggcagatcacccgaggtcaggagttcgagcaccagcctggtcaacatgaagccccgtctctactaaaaatacaaaaattagccgggtgtggtggtgcatgcctgtaatcccagctacttgagaggctgagacaggagaactgcttgaacccaggggatggaggtagcagtgagccaagatcgcgccattgcactccagcctgggcaacaagagggaaactccgctctc

SEQ ID NO: 549601 - DNA, 822 bp, Homo sapiens
cggagctccgacacagtcaccactgcgggaaaattgcccccctggacagaggcccaaaaacacggggtgattaagtcccagcgcgggcccaaaatttccccagcgccggtggaaaggcgccccccaaattggcgcgcccgaaccgcgccaaatcgttgtagaaccccccctgaacgacacttccctcaaggcaaaaattaccaccagggcccacagacacgggaactcctcccacccagggtgcaacccaacgaccgccgtccgtcggacagtacgcacacaacgatagcaatttgtgaaacaagaactgtccccaacaaccctccccgtggcgaacccttcggggggcaaatacgccctcagtgagtaaccccaagagttcttttgcagagcccaatttccgtcttctagaaatctcttcgagagggaatcgtgttgtacgagaccttcctgccgaaggctgcgacgggatatcccgagccccccggttgctccgtggctcccaaaaatagctaccctcctagatcagggaggtcacgcctccctgtgctccaattatgagattctagctgcggcagtgtggctgcttcctaatacgtctgtgatgtctgcggggcagatcatcgccaatagtacccctccaacgtcttctcaccacctctatcagtagtgagcacccctgccccgcagcagttcttcatgtgtggacgcctccggaggtcagatgcacgagaatggggcagggagagaaatatgtcatcactcacaccacaggagacccgatctttggaaccccataaaatatttttctcacacacaagc

SEQ ID NO: 549602 - DNA, 319 bp, Homo sapiens
cgcctagagttcctgcttgtatccaagcagtcgaactatagactatttgctatatattagcataacgggtagaagtctggaagcctttggaggttgcaaatctgagttcaggtctagctcttcgagttacctggctgtgtaaccttcaggcaatttactataacctccgtgagtctccagtttcctttatctgtcaaactgaggataacacagaacttaggcagttgttactctgagattaaaacgggatgcttcatgtcaaaattggcttagaaataaccgacttgcatggatatacaacggagggtacctgagctcg

SEQ ID NO: 549603 - DNA, 910 bp, Homo sapiens
ccgccgggggccgttggtctctgtggggtgtgcccagccggtatccaggtctcccttcagtgccgggtgtgaacccccgggtggagcctggggagccggggtgcagactgtggcggttggttggggcggagggagcagcggccccagcgagtttggggggagaagtaaccagtgctgtgtgggtggaggtggctggagcatgtggagtgtggtgcctcatgtgccccgccccgcagtctatgtgactgaactggcatactggtgtgcactgccccttcacagtgctgtgggtgcctggtgtgtgtgtgccttgtggatttgggtgaagttgggggagccgttggtgtgtgccccttggcgaagccttccccgtgttgtgctgtgatgacccctgagtggggggattagcgggggtggtgtacccgtggaatggcgcgatgtggaaggcacaggacatctgggtgacaatttcttgcaggcagaataattgaccaatcaacctgaaccagaaagccatggatcgatgtgcccaagtgccaatgaaaacagctgcgcctaaagctagcgcaccggatatgaagtcctgggtctcgtttacgcgtccttgtgttgaagatcagaggaggaaacactgggcctcagtcattacggaggctcccgaggagtgatgagcctggtggaccacacagcatgatgccgcttggacaaacattgcttcgtgggcacgatgggtgtgtgcttgggccccgaagacaaggggggcggcgtcaggcagcaagcaagtttgtcaggcggcttgcaggcgctcatgggtgggtgcgtagttgtacccctgaacaaactcccaattcgaacgactccggactatctgcaaggcaaaacattgcccaaaatccctgtacatatacca

SEQ ID NO: 549604 - DNA, 110 bp, Homo sapiens
gtaattatctgccagcaagtagtcagcactttcagtgttatgattatcatctctggctggaggccagggtgggccaacctgtcaatcaactgactcttgaaaagaaccct

SEQ ID NO: 549605 - DNA, 184 bp, Homo sapiens
  misc_feature (9)..(9): n is a, c, g, or t
  misc_feature (24)..(24): n is a, c, g, or t
  misc_feature (36)..(36): n is a, c, g, or t
ggaaaagtncgcatatagcgtgcnataatactacgnctaaggagaaacaatttcctacacataaagtagtgagaacatcatcctataacagggaactgtgattatttaaaaaacgcagaacttatttatttggctttagaaataactgcatacaatgtcataagtcgaaaagaactcaaaataa

SEQ ID NO: 549606 - DNA, 1201 bp, Homo sapiens
  misc_feature (278)..(278): n is a, c, g, or t
  misc_feature (301)..(301): n is a, c, g, or t
  misc_feature (436)..(436): n is a, c, g, or t
  misc_feature (544)..(544): n is a, c, g, or t
gctgtacgtccgggttttttacgttgtaatagccaggaacttgcacactgcgcactgtcctctgcaatggaagggacaagctacttctggtcgggagcggctcgagactgttagaacatccgtagcgagcgagcgcactagtgataggcacgcgactatcagaccagtttcgggacggtactcgtcatgaaggagtggtcggtctgtcaacggacccagggaagacttcacgacggtccgaggggtgctctatggggtttcaatcactcgttcagcgncgaacccatcgatgcactgcttntcaggatttgctcgactgaggaggccagtcgaatcggggagacggtgtggagagcgctccgtaatcggtgcgaagacagggcaccctttgtgtcccaccaagtctgtgccgggcatatccggtatcgattctcgngtctatctctgtatgtctctaccctgtcctcgatgctgcgtggtcgtccgcgcgcgcgagccgatgagcgcgatcccaatacggccccccgcgaagatgaccctaacntttcacatggggtacgcagttgacctatgctcgtttgttggttatcccctacgggtcggggttggtgttaggggggtcaggcctggggcacggaaccaagtatgggccctcgagtcgcgggcacttcggggagagggcccgataccggaactgtgtgcttcccttggctattgaaggaggcccggagaaagccctaggtcttgctgggaattgggttcttgtacccttggcgcttttgtggggctttaggcgctaagttataggacgttcttggctatggagcccgtaggtaggcgacctcttggcgcgccgtgcaccgaagggaacctctcgggtgaagttcgattcgtggagcggttggggcgttcttggaaaggacctcataaaagccaagggaagaggcgttgttcttgttcttaagccctccgtggacctgaggttccgggggggcaaggcttttacgaacgggagtttgtgccgggaggggagggaacaccttcgagagggccttgaaagtttccagttcgacacgaattggtcaagtaaaggtaccgcaacgtgttgtaacacatggggttggccattttcagggcttcaccatttcttggccggtcgcggagatttcgctaattaagagcatccgctgtgctcgcaaag

SEQ ID NO: 549607 - DNA, 178 bp, Homo sapiens
atatctcactgtatacctctatcaggttgcacgacagttccctatatcgtgcccatttgcttcccgataacactagctcgactctactcctctctctactctgctcgctctgctatgtggaggcgagcaggacaggttgacagttacctccttagaggaactactccacctggagctc

SEQ ID NO: 549608 - DNA, 503 bp, Homo sapiens
tactctgaggatcgtagggagccttacctggggtaccaggggggcggcaaccccgtgaacccaagaccagagttacagaacatagaacaacgtgacaacgtgactctggtatcccagagtcaacacaacaggggacctctcacaaccaagtgtcctgccttaaacaattgcccaaatacaattaacagaaagtcgaaagcaaacataagactccaaacaagacatacatgttaggactgaaaatgaaaccaaagtggagcaataaaatggagtcagaggagaaagaaccaggtgaaggggtggcaagaatgtgcttcaaggcacctaaaccgtggggaactgaccgcttagccaaaggcttttatttcctagcttacctgatattactgggggagggtgcaaaggggactctcagccatccacagaagacaaaatggcaccagccagtcttccacgtgggacccgggtgcaggtctctctaggttcaccagctagaaggtgct

SEQ ID NO: 549609 - DNA, 313 bp, Homo sapiens
tacggtcgtgcatgaggaagcagagagaacctgcctttcaaggaatttaggctgttgggggataatgcgaggcgtgtggccagtgtccaggacactgcgctagagtttgcagtagttttaatatgcttgaccacccacgaactgtgatcttagaaaagtcacttgggttaggagtcaaaggatttaaagcccacaaagcctgaaacgtaaatcctatacacgtgcacgctattacttttcatatgagaaaggaaaatataatccgtgttccacatgattatgtaaagactggaattgatgtacatgcagtacg

SEQ ID NO: 549610 - DNA, 959 bp, Homo sapiens
actctcagcactctcgggaggctgcaggcacggcagatcaccctgaggctagcgcagctttgacgaccagcctggccaacatagcaccaaccctgtctcctgctaacaaatacaaaaacttagccagcaccatggctgcgcaggcgcttgtaatcccagctactcagcgaggccgaggcaggagcaatcactctgaacctgggacacagcagcgctgccgtgcagctgagatcgcaccactgcactccagcctcggctgacacaagaccagcacctctgtcctccacaaaacaacaaacaaaaaagttcaacaacaatcgtgctccgagcaccggcggcgtctacttctcccttccacacgtttcccaacccacaatattcccctatacatcttcccctcctctaccacctctcaatacacctcttctctacacaacgtgctctacacacagtatatacaccctctcttcaacaacaccctactcggtggccacccgcccccaccactcccccaccactccccaaacaagacccgcctcaccaccctatcaccaacgcggccccccgcgcccccccacgccgcccagcgcagcggccaccccctccggacaccccctcccaccccactcctctacgccgcccccaactccagcccccgcactctcacacgccaaccacaccaaccaggcgcacacgccgcgcccgccccagccaaccaacctctccaacaccgccggaaacacccgccccaacacggccaacaccatcccggacaccaccatccacaggccgcacagagcaaaaaaccccagcacagcacacccacagtgccaacacacaccatccagaccagccccccaacacggggcacacacacacgagcacacagacaaaggcgcaaccacgttccgccccagcaccacccacggacacacctggcccgagaccagcaaaaccaa

SEQ ID NO: 549611 - DNA, 467 bp, Homo sapiens
  misc_feature (228)..(228): n is a, c, g, or t
  misc_feature (247)..(247): n is a, c, g, or t
  misc_feature (335)..(335): n is a, c, g, or t
  misc_feature (346)..(346): n is a, c, g, or t
  misc_feature (368)..(368): n is a, c, g, or t
  misc_feature (372)..(372): n is a, c, g, or t
  misc_feature (420)..(420): n is a, c, g, or t
gctcccttccatccacctcctcagtgcttgctcagcccaaaggctcctgcctctgaagtgctgggggcccacccaccccagtgtggtcaaggaggcaaggggcaggtgcttgacactgccaagtgccccgagatgactctactgctcacccatttctttgggccctggcagtctcctacttgtccccagcatggagcacctggcagaactggaaggcaggagggtggntggtgaatttgaggcacanggaaggccaatccccttgcaccttttgtgctttggaattcacagccccacacctgcccccagctagagagcctgtgggaacacaatgnttggcaccttnaggaaccagaaggagtaatggntggnaagaaggcacagatggtccaactttggctgatgccgggatggatttgntgcatgtacaggccttggatgcacttctggcctggaagatggcatca

SEQ ID NO: 549612 - DNA, 265 bp, Homo sapiens
tgtctgtccatctgaattaacattatgttgactgctgcagcagccatgggaaagcctggaggcaggagtggtgaataaataaaggaatagggagaggcctagccctgggctgggtcaagatgcctgcgctctatttgctgaggtgtgcagggtcagaggacaattctgagaaatgactgtgaagctgagacttgcagaaatggtgagagcccagaggggcacagagcctggggagagtgcaggccgggaacaagcacttgtagag

SEQ ID NO: 549613 - DNA, 288 bp, Homo sapiens
  misc_feature (63)..(63): n is a, c, g, or t
  misc_feature (74)..(74): n is a, c, g, or t
  misc_feature (150)..(150): n is a, c, g, or t
  misc_feature (162)..(162): n is a, c, g, or t
  misc_feature (167)..(167): n is a, c, g, or t
gacgtgtggcttcagcatcgtcattctgcgtcacgcctggccccagcttcagtgcagacactntccagctgcanctcacctcagctctaccctcagctccaccctcagcagatgataatctcaagacacgtgccgagcgtctgctcgggnccgcttccaccntcacngatgataatctcaagacaccttccgagcgtcagctcactccccttccaccctcagctccaccctcagcagataaatatcaagacacctgccaattcccagggggccggaccagctcattct

SEQ ID NO: 549614 - DNA, 740 bp, Homo sapiens
  misc_feature (33)..(33): n is a, c, g, or t
tcgactctgtctccaaaaaaaaaaaaaaaaaanttttttttttagatcatcagctattgttagtgttagtgtatgttatgtgtggctcaagacaactttgtttcttttaatataggcagggaagtcaaaagattggatatccctgctttataccaagaaagacaacaccccacatttgcaatgcctaaaaacactaccagccatctgaaaaacatgagacttctaacttctgttcttttttgtagcagtggaatcccacggtgatatctgagggatgtggttaccttttggaggaggttgacggtttctaaggatgattctttctgagtgaaatattgtcagtgtcattgaccttttcattatttcaactattattattccaggttatcaatactctggctgaccatcatcatcgtgggactgactttggtggaagtccttggttacatgtcattattgcgtttccgacaagttataaagttgtcattaccctctggatagtttacctttgggtgagtatactaactttctgtagaggtatacttgtaatcacaaataagaataaattatataaaacaattcacatttctggacttcattatgaatatgtggttttacccaaaaaatcagggaaatgatttattagtataagaattatgaaaacatctgccatttgcattatgaaaattaaataggtcggtgtttgtttaatagaatgtcaacagagcgagactgcatct

SEQ ID NO: 549615 - DNA, 133 bp, Homo sapiens
cccatcccccatatttaaacccaaaaaaaagttgatcttgtttgatttttttttgaaaaaattgatgttgttaaaaacaaatatgtaaccatttaaattgtttttgtgaaataaataaaccaattctttccca

SEQ ID NO: 549616 - DNA, 404 bp, Homo sapiens
gcctactactactaaattcgcggccgcgtcgacggaagaccgccagaaaacagtaagatgtgccttgacacaaatactgttgtatgaaccatgtgccaatcaaagtagacaactgtaaagtccttgagaatattttctacaatatttgtggcaaattcagtgggttcaaaattgagtttgtcctttctgcttcattagtttaagctgtataattcctttcccttcctacattcttgttttcattttttcggaggaagaggagttgctagtactggcattggttttcctttctctttttttttttttcctgagatggagctttgctgttgttgcccaggctgtagtgcaatggcacaatctcagctcactgccttttggtcgacgcggccgcgaatttagtagta

SEQ ID NO: 549617 - DNA, 3818 bp, Homo sapiens
  misc_feature (33)..(33): n is a, c, g, or t
  misc_feature (3096)..(3096): n is a, c, g, or t
  misc_feature (3647)..(3647): n is a, c, g, or t
  misc_feature (3663)..(3663): n is a, c, g, or t
  misc_feature (3774)..(3774): n is a, c, g, or t
  misc_feature (3803)..(3803): n is a, c, g, or t
tcgactctgtctccaaaaaaaaaaaaaaaaaanttttttttttagatcatcagctattgttagtgttagtgtatgttatgtgtggctcaagacaactttgtttcttttaatataggcagggaagtcaaaagattggatatccctgctttataccaagaaagacaacaccccacatttgcaatgcctaaaaacactaccagccatctgaaaaacatgagacttctaacttctgttcttttttgtagcagtggaatcccacggtgatatctgagggatgtggttaccttttggaggaggttgacggtttctaaggatgattctttctgagtgaaatattgtcagtgtcattgaccttttcattatttcaactattattattccaggttatcaatactctggctgaccatcatcatcgtgggactgactttggtggaagtccttggttacatgtcattattgcgtttccgacaagttataaagttgtcattaccctctggatagtttacctttgggtgtctctcctgaagactatcttctggtctcgaaatggacatgatggatccacggatgtacagcagagagcctggaggtccaaccgccgtagacaggaagggctgaggtccatttgtatgcacacaaagaaaagagtttcttcctttcgaggaaataaaattggcctgaaagacgtcattactctacggagacatgtggaaacaaaagttagagctaaaatccgtaagaggaaggtgacaacgaaaatcaaccatcatgacaaaatcaatggaaagaggaagaccgccaaagaacatctgaggaaactaagcatgaaagaacgtgagcacggagaaaaggagaggcaggtgtcagaggcagaggaaaatgggaaattggatatgaaagaaatacacacctacatggaaatgtttcaacgtgcgcaagcgttgcggcggcgggcagaggactactacagatgcaaaatcaccccttctgcaagaaagcctctttgcaaccgtgggtaagtttgcttgttttccttgcttttggacatagtctgccaggtcaggacatggatacatttttctccctacggctctgtgctcaagccctgcagagggagatggcagagaggaaggctgcctacaagcatcacagtcccatccctgttgggacaattccaaatgagggccttaaatgatgctcagctaagctggttcttgtgtggcctctgtaccttcaaaagctgccgagtcctatgattacacgcgatgggacttgtacacttgaagtgaaacacagttttaaaacttgctttgtttagaattcccacctcatttttccatggacaaaagtattctttatgtcctagtgcacttacaatttggtattacctgggagtgaaaagaaatattacagccatgcctaactgacttcttgaggtaagattgttctgtcagaaaaccctctcccagttcccctgcagctcttcaggaatccacatctctccagagctctttgttctcatgggtggcacctccagagtgaagaagatcctttgtcaagaagggaaacagaggggaaatgagagggtcctgcaggcagagctggaatcaacttccactctgcctcttgcaagctgtgtgaccctgggcacaatttctccttcctctggaaacctctgttttcttagatttggagcagggtggtcacactgaccttgcagagttctgagaatcagagacagaacataaaaggcctggaaaacattctccaaaaagaagctgcaacatgtgtggacaatgggcttttcatgcctctcttactgtctcttactgtctattgacctggtgcaagaaacatgctctggtgatggctgtgagggaggaatgaggatagacatagacactcctgtgtctcaaacatgcttctttattactctgttatgactctgtcttccctggggcaggaccccagcctgcctacatttgcagacagacacagtggcatgtggagacaacagtgtgtcccaatgacttttctttaccccctagctgtcggcagtactcagtggaagggtgatattatgacactgacactgctattttgaaacctggaggatggaaaggtgcaaaaatctatcaccagcaacagaaggtgcagactgtgttggtggcggtaattttgtccatcaaatgaatatgtgtgaaaacattccctcctttggccctacggtcagaatggcggcagcggagcatcgtcattcttcaggattgccctactggccctacctcacagctgaaactttaaaaaacaggatgggccaccagccacctcctccaactcaacaacattctataactgataactccctgagcctcaagacacctcccgagtgtctgctcgcttccaccctcagcggatgataatctcaagacaccttccgagcgtcagctcactccccttccaccctcagctccaccctcagcagatgataatatcaagacacctgccgagcgtctgcgggggccgcttccaccctcagcggatgataatctcaagacaccttccgagcgtcagctcactccccttccaccctcagctccaccctcagcagatgataatatcaagacacctgccgagcgtctgcagctgcgggggccgcttccaccctcagcggatgataatctcaagacaccttccgagcgtcagctcactccccttccaccctcagctccaccctcagcagatgataatatcaagacacctgccgagcgtctgcgggggccgcttccaccctcagcggatgataatctcaagacaccttccgagcgtcagctcactccccttccaccctcagctccaccctcagcagatgataatatcaagacacctgccgagcgtctgcgggggccgcttccaccctcagcggatgataatctcaagacaccttccgagcgtcagctcactccccttccaccctcagctccaccctcagcagatgataatatcaagacacctgccgagcgtctgcggggggccgcttccaccctcagcggatgataatctcaagacaccttccgagtgtgtgctcactccccntccaccctcagcctcccgagtagctgggattacaggtgcctgccaccacgcctggctaattttttgtatttttagtagagaaggggtttcaccatattagccacaatggtctcaatctcctgacctcgtgatccatccgccccgccctcccagagtgctgggattacaggcgtcagccaccgtgaccggctcagactgtactcttctagccatctgaaatacgttttctaggtagagatagattgtgtaagggtacagttgtgaggataacagaaacatggcagattatttaaaatcatcctgaaagtggtgctttatctgatgaaagtgattgtaatccataggaaaatgtttcaacgtgcgcaagagttgcggcggcgagcagaggactaccacaaatgcaaagtaaggagcttcctccctgcagttgcaggatagttcagtgctgatgcagatgatgccacggcccttagactctctcaacattcaatttctcatgtgttggctttttcagatccccccttctgcaagaaaggctctttgcaactggntcagaatggcggcagnggagcatcgtcattcttcaggattgccctactggccctacctcacagctgaaactttaaaaaacaggatgggcctccagccacctcctccaactcaacaacattctataantgataactccctgagcctcaagacacctnccgagtgtgtgctca

SEQ ID NO: 549618 - DNA, 264 bp, Homo sapiens
taaggagtgtgtttggaccaaaaggttgaaaatccattaggacactgagtgtagacagaggcctggagagaggagcttcccatactcttcccacacacattgtatctaggagttccctgtagcatcatacaggtgtgattaatttggaataacaagatcatacttgaaaggtcctatatgaactaaaagttgaccaactgaatcatgtcttaaaggtataagaggagctcttggctgaaagggactcttatcattaattatttt

SEQ ID NO: 549619 - DNA, 750 bp, Homo sapiens
caaaatacctactgggtcgggaagtcacgtggaaacatgtagagccatcctaagttgactggactagatacaggttcaaagtgaaagttcaggttgtgtgcaggagaccatgtacactgactgtctccattattgatcggttcatgcagaataacttgtgtgcccaagaagatgctgcagctggattggtgtcgactgccgatgtttattgcaagcaaaatatgaagaaatgtaccctccagaaatgggtgactttgcttttgtgacgtgacaacacttatactaagcaccaaatcagacagatggaaagtgaagattcgtaagagctttaagactatggtcgtgggtcgggctcgtacctttgcacttccttcggagaagcatctaagatgggagaggttgatgtcgagcaacatacttggccgaaatacctgatggaactaactatgttggactagtgactatggtgcacttgtcctccgttctcaaattgccgagcgaggagcttttgctgtagcactgaaaattctggataatggtgaagggacaccagactcttacgacattacctgtcatatactgaagaatctctgcttccagttatgcagcacctggctaagaatgtagtcatgggtagatcaggggacttacaaagcacatgactgtcaagaacaagtttgcacatcgaagcatgctaagatcacactctacacagtgattctgtctagttcagaatttgcaaggtgggga

SEQ ID NO: 549620 - DNA, 3709 bp, Homo sapiens
  misc_feature (33)..(33): n is a, c, g, or t
  misc_feature (3096)..(3096): n is a, c, g, or t
  misc_feature (3538)..(3538): n is a, c, g, or t
  misc_feature (3554)..(3554): n is a, c, g, or t
  misc_feature (3665)..(3665): n is a, c, g, or t
  misc_feature (3694)..(3694): n is a, c, g, or t
tcgactctgtctccaaaaaaaaaaaaaaaaaanttttttttttagatcatcagctattgttagtgttagtgtatgttatgtgtggctcaagacaactttgtttcttttaatataggcagggaagtcaaaagattggatatccctgctttataccaagaaagacaacaccccacatttgcaatgcctaaaaacactaccagccatctgaaaaacatgagacttctaacttctgttcttttttgtagcagtggaatcccacggtgatatctgagggatgtggttaccttttggaggaggttgacggtttctaaggatgattctttctgagtgaaatattgtcagtgtcattgaccttttcattatttcaactattattattccaggttatcaatactctggctgaccatcatcatcgtgggactgactttggtggaagtccttggttacatgtcattattgcgtttccgacaagttataaagttgtcattaccctctggatagtttacctttgggtgtctctcctgaagactatcttctggtctcgaaatggacatgatggatccacggatgtacagcagagagcctggaggtccaaccgccgtagacaggaagggctgaggtccatttgtatgcacacaaagaaaagagtttcttcctttcgaggaaataaaattggcctgaaagacgtcattactctacggagacatgtggaaacaaaagttagagctaaaatccgtaagaggaaggtgacaacgaaaatcaaccatcatgacaaaatcaatggaaagaggaagaccgccaaagaacatctgaggaaactaagcatgaaagaacgtgagcacggagaaaaggagaggcaggtgtcagaggcagaggaaaatgggaaattggatatgaaagaaatacacacctacatggaaatgtttcaacgtgcgcaagcgttgcggcggcgggcagaggactactacagatgcaaaatcaccccttctgcaagaaagcctctttgcaaccgtgggtaagtttgcttgttttccttgcttttggacatagtctgccaggtcaggacatggatacatttttctccctacggctctgtgctcaagccctgcagagggagatggcagagaggaaggctgcctacaagcatcacagtcccatccctgttgggacaattccaaatgagggccttaaatgatgctcagctaagctggttcttgtgtggcctctgtaccttcaaaagctgccgagtcctatgattacacgcgatgggacttgtacacttgaagtgaaacacagttttaaaacttgctttgtttagaattcccacctcatttttccatggacaaaagtattctttatgtcctagtgcacttacaatttggtattacctgggagtgaaaagaaatattacagccatgcctaactgacttcttgaggtaagattgttctgtcagaaaaccctctcccagttcccctgcagctcttcaggaatccacatctctccagagctctttgttctcatgggtggcacctccagagtgaagaagatcctttgtcaagaagggaaacagaggggaaatgagagggtcctgcaggcagagctggaatcaacttccactctgcctcttgcaagctgtgtgaccctgggcacaatttctccttcctctggaaacctctgttttcttagatttggagcagggtggtcacactgaccttgcagagttctgagaatcagagacagaacataaaaggcctggaaaacattctccaaaaagaagctgcaacatgtgtggacaatgggcttttcatgcctctcttactgtctcttactgtctattgacctggtgcaagaaacatgctctggtgatggctgtgagggaggaatgaggatagacatagacactcctgtgtctcaaacatgcttctttattactctgttatgactctgtcttccctggggcaggaccccagcctgcctacatttgcagacagacacagtggcatgtggagacaacagtgtgtcccaatgacttttctttaccccctagctgtcggcagtactcagtggaagggtgatattatgacactgacactgctattttgaaacctggaggatggaaaggtgcaaaaatctatcaccagcaacagaaggtgcagactgtgttggtggcggtaattttgtccatcaaatgaatatgtgtgaaaacattccctcctttggccctacggtcagaatggcggcagcggagcatcgtcattcttcaggattgccctactggccctacctcacagctgaaactttaaaaaacaggatgggccaccagccacctcctccaactcaacaacattctataactgataactccctgagcctcaagacacctcccgagtgtctgctcgcttccaccctcagcggatgataatctcaagacaccttccgagcgtcagctcactccccttccaccctcagctccaccctcagcagatgataatatcaagacacctgccgagcgtctgcgggggccgcttccaccctcagcggatgataatctcaagacaccttccgagcgtcagctcactccccttccaccctcagctccaccctcagcagatgataatatcaagacacctgccgagcgtctgcagctgcgggggccgcttccaccctcagcggatgataatctcaagacaccttccgagcgtcagctcactccccttccaccctcagctccaccctcagcagatgataatatcaagacacctgccgagcgtctgcgggggccgcttccaccctcagcggatgataatctcaagacaccttccgagcgtcagctcactccccttccaccctcagctccaccctcagcagatgataatatcaagacacctgccgagcgtctgcgggggccgcttccaccctcagcggatgataatctcaagacaccttccgagcgtcagctcactccccttccaccctcagctccaccctcagcagatgataatatcaagacacctgccgagcgtctgcggggggccgcttccaccctcagcggatgataatctcaagacaccttccgagtgtgtgctcactccccntccaccctcagcctcccgagtagctgggattacaggtgcctgccaccacgcctggctaattttttgtatttttagtagagaaggggtttcaccatattagccacaatggtctcaatctcctgacctcgtgatccatccgccccgccctcccagagtgctgggattacaggcgtcagccaccgtgaccggctcagactgtactcttctagccatctgaaatacgttttctaggtagagatagattgtgtaagggtacagttgtgaggataacagaaacatggcagattatttaaaatcatcctgaaagtggtgctttatctgatgaaagtgattgtaatccataggaaaatgtttcaacgtgcgcaagagttgcggcggcgagcagaggactaccacaaatgcaaaatccccccttctgcaagaaaggctctttgcaactggntcagaatggcggcagnggagcatcgtcattcttcaggattgccctactggccctacctcacagctgaaactttaaaaaacaggatgggcctccagccacctcctccaactcaacaacattctataantgataactccctgagcctcaagacacctnccgagtgtgtgctca

SEQ ID NO: 549621 - DNA, 501 bp, Homo sapiens
ccctcagattacctcaactatgaatgcattgcagtcaatctgtccattcagatccattaatatttgctttatatatttaggcattccaatgctgggtgcatatatatttataattgttaagacctcttgatgaattgatccctttatcattataaaatgatgtttgttgtctccattaaaagttttgaacttaaagtctattttatctgacataagtatagctactcctgccactctttagatttccattagcatggagtatctttttccatcccttcactttcagtctaggcatgtccttgcaggtgaggtgagtctcttgtagacagcatactattgagatcggttttttttttaacccattcacgcactctatgtcttttgattggagaatttaaaccctttactttcaaggttattattgataggtaagaacttactactgccatttggttgttttatagactctttgttccttccgtcctctcttactatcttccc

SEQ ID NO: 549622 - DNA, 194 bp, Homo sapiens
acaatgtcggagacaatgaggaaatatccggcgaaaccccgatccagatcatgtatgagctccacgagcaggacgcccaagtctacgagaatatcttcaaagctatccctgagggcttgcatctctatgggagggaacttcctcataggtgcgctacgctacaacttttccgcctcacctttcggctgtctgac

SEQ ID NO: 549623 - DNA, 255 bp, Homo sapiens
tgtggtagctcatgcctgtaatcccattactttgggaggctgagatgggtggatcacttgaggtcagttgttcgagaccaaccagaccaatatagcgcctcatttatactaacaatacattggccaggcatgcttgttatcccagctactcaggaggctgagacaggataatcgcttgaacccaggtggaagaggttgctttgagccaagatagcgccactgcattccattctgggtgagagagtgagacgctgt

SEQ ID NO: 549624 - DNA, 3228 bp, Homo sapiens
  misc_feature (33)..(33): n is a, c, g, or t
  misc_feature (3203)..(3203): n is a, c, g, or t
  misc_feature (3219)..(3219): n is a, c, g, or t
tcgactctgtctccaaaaaaaaaaaaaaaaaanttttttttttagatcatcagctattgttagtgttagtgtatgttatgtgtggctcaagacaactttgtttcttttaatataggcagggaagtcaaaagattggatatccctgctttataccaagaaagacaacaccccacatttgcaatgcctaaaaacactaccagccatctgaaaaacatgagacttctaacttctgttcttttttgtagcagtggaatcccacggtgatatctgagggatgtggttaccttttggaggaggttgacggtttctaaggatgattctttctgagtgaaatattgtcagtgtcattgaccttttcattatttcaactattattattccaggttatcaatactctggctgaccatcatcatcgtgggactgactttggtggaagtccttggttacatgtcattattgcgtttccgacaagttataaagttgtcattaccctctggatagtttacctttgggtgtctctcctgaagactatcttctggtctcgaaatggacatgatggatccacggatgtacagcagagagcctggaggtccaaccgccgtagacaggaagggctgaggtccatttgtatgcacacaaagaaaagagtttcttcctttcgaggaaataaaattggcctgaaagacgtcattactctacggagacatgtggaaacaaaagttagagctaaaatccgtaagaggaaggtgacaacgaaaatcaaccatcatgacaaaatcaatggaaagaggaagaccgccaaagaacatctgaggaaactaagcatgaaagaacgtgagcacggagaaaaggagaggcaggtgtcagaggcagaggaaaatgggaaattggatatgaaagaaatacacacctacatggaaatgtttcaacgtgcgcaagcgttgcggcggcgggcagaggactactacagatgcaaaatcaccccttctgcaagaaagcctctttgcaaccgtgggtaagtttgcttgttttccttgcttttggacatagtctgccaggtcaggacatggatacatttttctccctacggctctgtgctcaagccctgcagagggagatggcagagaggaaggctgcctacaagcatcacagtcccatccctgttgggacaattccaaatgagggccttaaatgatgctcagctaagctggttcttgtgtggcctctgtaccttcaaaagctgccgagtcctatgattacacgcgatgggacttgtacacttgaagtgaaacacagttttaaaacttgctttgtttagaattcccacctcatttttccatggacaaaagtattctttatgtcctagtgcacttacaatttggtattacctgggagtgaaaagaaatattacagccatgcctaactgacttcttgaggtaagattgttctgtcagaaaaccctctcccagttcccctgcagctcttcaggaatccacatctctccagagctctttgttctcatgggtggcacctccagagtgaagaagatcctttgtcaagaagggaaacagaggggaaatgagagggtcctgcaggcagagctggaatcaacttccactctgcctcttgcaagctgtgtgaccctgggcacaatttctccttcctctggaaacctctgttttcttagatttggagcagggtggtcacactgaccttgcagagttctgagaatcagagacagaacataaaaggcctggaaaacattctccaaaaagaagctgcaacatgtgtggacaatgggcttttcatgcctctcttactgtctcttactgtctattgacctggtgcaagaaacatgctctggtgatggctgtgagggaggaatgaggatagacatagacactcctgtgtctcaaacatgcttctttattactctgttatgactctgtcttccctggggcaggaccccagcctgcctacatttgcagacagacacagtggcatgtggagacaacagtgtgtcccaatgacttttctttaccccctagctgtcggcagtactcagtggaagggtgatattatgacactgacactgctattttgaaacctggaggatggaaaggtgcaaaaatctatcaccagcaacagaaggtgcagactgtgttggtggcggtaattttgtccatcaaatgaatatgtgtgaaaacattccctcctttggccctacggtcagaatggcggcagcggagcatcgtcattcttcaggattgccctactggccctacctcacagctgaaactttaaaaaacaggatgggccaccagccacctcctccaactcaacaacattctataactgataactccctgagcctcaagacacctcccgagtgtctgctcgcttccaccctcagcggatgataatctcaagacaccttccgagcgtcagctcactccccttccaccctcagctccaccctcagcagatgataatatcaagacacctgccgagcgtctgcgggggccgcttccaccctcagcggatgataatctcaagacaccttccgagcgtcagctcactccccttccaccctcagctccaccctcagcagatgataatatcaagacacctgccgagcgtctgcagctgcgggggccgcttccaccctcagcggatgataatctcaagacaccttccgagcgtcagctcactccccttccaccctcagctccaccctcagcagatgataatatcaagacacctgccgagcgtctgcgggggccgcttccaccctcagcggatgataatctcaagacaccttccgagcgtcagctcactccccttccaccctcagctccaccctcagcagatgataatatcaagacacctgccgagcgtctgcgggggccgcttccaccctcagcggatgataatctcaagacaccttccgagcgtcagctcactccccttccaccctcagctccaccctcagcagatgataatatcaagacacctgccgagcgtctgcggggggccgcttccaccctcagcggatgataatctcaagacaccttccttagctaattcaggaggcttgagggcaggaaaaaaccacggcaaacccaagagggcaggaggggcgggttgaggatggggaaccactttcccggaacccaagagggcgggagggttcggttgagttngggaaccgtttaaggnaaaccccaa

SEQ ID NO: 549625 - DNA, 972 bp, Homo sapiens
tccttgaaaattgaattctaacaacgtgccccgtgacagggagctgtcgatcccaggcccgccgtatagatttggggcatgtatagtccttatgtcttctcgtggttgcctttattcagttccttgaatacagctaatagccatgtggagttcaaaaacacatgtatcagcagctagcgtggagcatagacctaacaccccagaatgggggctggttggtagtgagaacgatggagccactaactgcatagacagcatgcattgtggtgagctcgtcttcatttcgaggagcccatggtgaaatctagtgcactgagcttgtaaaagctcgggagaagacgtggagaattcgtgctataccgcaatctctgcagagccatgtagggagccgctacccttggtagtgttcatggtgctgtatgggagaacgctagcgcgattccttcagggccaaggttctgaataatatacaccagcggcatcaattctgctcatcttgtcctccttgtttttggaagcaaacacacttaaaaatcttttatacgcactgcgatgagacgattctaaaaacaagtttaaggttttacaatgttttcctgtgaaaattagtgtgagtaacacctgagtggagctgtgtaggaatgaacacgtggactctccctggtgggtaaagagggagggttcgttttaatagattaaagtaaataggggggaatatttgctcaggcgcttgaattgagggacagaacattggcggggtgcatgttctggacatattagggaaaggactgtttagatttagctgcggttctggataaccctaggtgttgagggcctttaaaacgcacgcaggtaaggtcggaggaaaaaacgatgcgttttatttaattgggagaacgatataggcggaaaataggagttcggagatatacaatgtcacatggtgtgggaaaaaattgggggagcaagtga

SEQ ID NO: 549626 - DNA, 3764 bp, Homo sapiens
  misc_feature (33)..(33): n is a, c, g, or t
  misc_feature (3042)..(3042): n is a, c, g, or t
  misc_feature (3593)..(3593): n is a, c, g, or t
  misc_feature (3609)..(3609): n is a, c, g, or t
  misc_feature (3720)..(3720): n is a, c, g, or t
  misc_feature (3749)..(3749): n is a, c, g, or t
tcgactctgtctccaaaaaaaaaaaaaaaaaanttttttttttagatcatcagctattgttagtgttagtgtatgttatgtgtggctcaagacaactttgtttcttttaatataggcagggaagtcaaaagattggatatccctgctttataccaagaaagacaacaccccacatttgcaatgcctaaaaacactaccagccatctgaaaaacatgagacttctaacttctgttcttttttgtagcagtggaatcccacggtgatatctgagggatgtggttaccttttggaggaggttgacggtttctaaggatgattctttctgagtgaaatattgtcagtgtcattgaccttttcattatttcaactattattattccaggttatcaatactctggctgaccatcatcatcgtgggactgactttggtggaagtccttggttacatgtcattattgcgtttccgacaagttataaagttgtcattaccctctggatagtttacctttgggtgtctctcctgaagactatcttctggtctcgaaatggacatgatggatccacggatgtacagcagagagcctggaggtccaaccgccgtagacaggaagggctgaggtccatttgtatgcacacaaagaaaagagtttcttcctttcgaggaaataaaattggcctgaaagacgtcattactctacggagacatgtggaaacaaaagttagagctaaaatccgtaagaggaaggtgacaacgaaaatcaaccatcatgacaaaatcaatggaaagaggaagaccgccaaagaacatctgaggaaactaagcatgaaagaacgtgagcacggagaaaaggagaggcaggtgtcagaggcagaggaaaatgggaaattggatatgaaagaaatacacacctacatggaaatgtttcaacgtgcgcaagcgttgcggcggcgggcagaggactactacagatgcaaaatcaccccttctgcaagaaagcctctttgcaaccgtgggtaagtttgcttgttttccttgcttttggacatagtctgccaggtcaggacatggatacatttttctccctacggctctgtgctcaagccctgcagagggagatggcagagaggaaggctgcctacaagcatcacagtcccatccctgttgggacaattccaaatgagggccttaaatgatgctcagctaagctggttcttgtgtggcctctgtaccttcaaaagctgccgagtcctatgattacacgcgatgggacttgtacacttgaagtgaaacacagttttaaaacttgctttgtttagaattcccacctcatttttccatggacaaaagtattctttatgtcctagtgcacttacaatttggtattacctgggagtgaaaagaaatattacagccatgcctaactgacttcttgaggtaagattgttctgtcagctctttgttctcatgggtggcacctccagagtgaagaagatcctttgtcaagaagggaaacagaggggaaatgagagggtcctgcaggcagagctggaatcaacttccactctgcctcttgcaagctgtgtgaccctgggcacaatttctccttcctctggaaacctctgttttcttagatttggagcagggtggtcacactgaccttgcagagttctgagaatcagagacagaacataaaaggcctggaaaacattctccaaaaagaagctgcaacatgtgtggacaatgggcttttcatgcctctcttactgtctcttactgtctattgacctggtgcaagaaacatgctctggtgatggctgtgagggaggaatgaggatagacatagacactcctgtgtctcaaacatgcttctttattactctgttatgactctgtcttccctggggcaggaccccagcctgcctacatttgcagacagacacagtggcatgtggagacaacagtgtgtcccaatgacttttctttaccccctagctgtcggcagtactcagtggaagggtgatattatgacactgacactgctattttgaaacctggaggatggaaaggtgcaaaaatctatcaccagcaacagaaggtgcagactgtgttggtggcggtaattttgtccatcaaatgaatatgtgtgaaaacattccctcctttggccctacggtcagaatggcggcagcggagcatcgtcattcttcaggattgccctactggccctacctcacagctgaaactttaaaaaacaggatgggccaccagccacctcctccaactcaacaacattctataactgataactccctgagcctcaagacacctcccgagtgtctgctcgcttccaccctcagcggatgataatctcaagacaccttccgagcgtcagctcactccccttccaccctcagctccaccctcagcagatgataatatcaagacacctgccgagcgtctgcgggggccgcttccaccctcagcggatgataatctcaagacaccttccgagcgtcagctcactccccttccaccctcagctccaccctcagcagatgataatatcaagacacctgccgagcgtctgcagctgcgggggccgcttccaccctcagcggatgataatctcaagacaccttccgagcgtcagctcactccccttccaccctcagctccaccctcagcagatgataatatcaagacacctgccgagcgtctgcgggggccgcttccaccctcagcggatgataatctcaagacaccttccgagcgtcagctcactccccttccaccctcagctccaccctcagcagatgataatatcaagacacctgccgagcgtctgcgggggccgcttccaccctcagcggatgataatctcaagacaccttccgagcgtcagctcactccccttccaccctcagctccaccctcagcagatgataatatcaagacacctgccgagcgtctgcggggggccgcttccaccctcagcggatgataatctcaagacaccttccgagtgtgtgctcactccccntccaccctcagcctcccgagtagctgggattacaggtgcctgccaccacgcctggctaattttttgtatttttagtagagaaggggtttcaccatattagccacaatggtctcaatctcctgacctcgtgatccatccgccccgccctcccagagtgctgggattacaggcgtcagccaccgtgaccggctcagactgtactcttctagccatctgaaatacgttttctaggtagagatagattgtgtaagggtacagttgtgaggataacagaaacatggcagattatttaaaatcatcctgaaagtggtgctttatctgatgaaagtgattgtaatccataggaaaatgtttcaacgtgcgcaagagttgcggcggcgagcagaggactaccacaaatgcaaagtaaggagcttcctccctgcagttgcaggatagttcagtgctgatgcagatgatgccacggcccttagactctctcaacattcaatttctcatgtgttggctttttcagatccccccttctgcaagaaaggctctttgcaactggntcagaatggcggcagnggagcatcgtcattcttcaggattgccctactggccctacctcacagctgaaactttaaaaaacaggatgggcctccagccacctcctccaactcaacaacattctataantgataactccctgagcctcaagacacctnccgagtgtgtgctca

SEQ ID NO: 549627 - DNA, 346 bp, Homo sapiens
ctgacagtgaatgggtggcccctgggaagcctcctcacacagacggcactgggagtatgctctttctcattttattgtccttgtcctgctatagtaggtgggttttgaaagggagtcagtgtcccgtgatcttggatagtagctctttctgtcactgcacctttctgtctgttcagccttgtgggatggcccagctgcaggggttctgcatgatgggacagcagactgccctatgcttttctggttatgacatcgggcacccttacgtacatgctgatgtgtgcatttgtgcatggaatttgcatcacattctatatttagatttcctcaacttaggctgtcagca

SEQ ID NO: 549628 - DNA, 3818 bp, Homo sapiens
  misc_feature (33)..(33): n is a, c, g, or t
  misc_feature (3096)..(3096): n is a, c, g, or t
  misc_feature (3647)..(3647): n is a, c, g, or t
  misc_feature (3663)..(3663): n is a, c, g, or t
  misc_feature (3774)..(3774): n is a, c, g, or t
  misc_feature (3803)..(3803): n is a, c, g, or t
tcgactctgtctccaaaaaaaaaaaaaaaaaanttttttttttagatcatcagctattgttagtgttagtgtatgttatgtgtggctcaagacaactttgtttcttttaatataggcagggaagtcaaaagattggatatccctgctttataccaagaaagacaacaccccacatttgcaatgcctaaaaacactaccagccatctgaaaaacatgagacttctaacttctgttcttttttgtagcagtggaatcccacggtgatatctgagggatgtggttaccttttggaggaggttgacggtttctaaggatgattctttctgagtgaaatattgtcagtgtcattgaccttttcattatttcaactattattattccaggttatcaatactctggctgaccatcatcatcgtgggactgactttggtggaagtccttggttacatgtcattattgcgtttccgacaagttataaagttgtcattaccctctggatagtttacctttgggtgtctctcctgaagactatcttctggtctcgaaatggacatgatggatccacggatgtacagcagagagcctggaggtccaaccgccgtagacaggaagggctgaggtccatttgtatgcacacaaagaaaagagtttcttcctttcgaggaaataaaattggcctgaaagacgtcattactctacggagacatgtggaaacaaaagttagagctaaaatccgtaagaggaaggtgacaacgaaaatcaaccatcatgacaaaatcaatggaaagaggaagaccgccaaagaacatctgaggaaactaagcatgaaagaacgtgagcacggagaaaaggagaggcaggtgtcagaggcagaggaaaatgggaaattggatatgaaagaaatacacacctacatggaaatgtttcaacgtgcgcaagcgttgcggcggcgggcagaggactactacagatgcaaaatcaccccttctgcaagaaagcctctttgcaaccgtgggtaagtttgcttgttttccttgcttttggacatagtctgccaggtcaggacatggatacatttttctccctacggctctgtgctcaagccctgcagagggagatggcagagaggaaggctgcctacaagcatcacagtcccatccctgttgggacaattccaaatgagggccttaaatgatgctcagctaagctggttcttgtgtggcctctgtaccttcaaaagctgccgagtcctatgattacacgcgatgggacttgtacacttgaagtgaaacacagttttaaaacttgctttgtttagaattcccacctcatttttccatggacaaaagtattctttatgtcctagtgcacttacaatttggtattacctgggagtgaaaagaaatattacagccatgcctaactgacttcttgaggtaagattgttctgtcagaaaaccctctcccagttcccctgcagctcttcaggaatccacatctctccagagctctttgttctcatgggtggcacctccagagtgaagaagatcctttgtcaagaagggaaacagaggggaaatgagagggtcctgcaggcagagctggaatcaacttccactctgcctcttgcaagctgtgtgaccctgggcacaatttctccttcctctggaaacctctgttttcttagatttggagcagggtggtcacactgaccttgcagagttctgagaatcagagacagaacataaaaggcctggaaaacattctccaaaaagaagctgcaacatgtgtggacaatgggcttttcatgcctctcttactgtctcttactgtctattgacctggtgcaagaaacatgctctggtgatggctgtgagggaggaatgaggatagacatagacactcctgtgtctcaaacatgcttctttattactctgttatgactctgtcttccctggggcaggaccccagcctgcctacatttgcagacagacacagtggcatgtggagacaacagtgtgtcccaatgacttttctttaccccctagctgtcggcagtactcagtggaagggtgatattatgacactgacactgctattttgaaacctggaggatggaaaggtgcaaaaatctatcaccagcaacagaaggtgcagactgtgttggtggcggtaattttgtccatcaaatgaatatgtgtgaaaacattccctcctttggccctacggtcagaatggcggcagcggagcatcgtcattcttcaggattgccctactggccctacctcacagctgaaactttaaaaaacaggatgggccaccagccacctcctccaactcaacaacattctataactgataactccctgagcctcaagacacctcccgagtgtctgctcgcttccaccctcagcggatgataatctcaagacaccttccgagcgtcagctcactccccttccaccctcagctccaccctcagcagatgataatatcaagatacctgctgagcgtctgcggattccgcttccaccatcagccgatgataatctcaagacaccttccgagcgtcagctcactccccttccaccctcagctccaccctcagcagatgataatatcaagacacctgccgagcgtctgcagctgcgggggccgcttccaccctcagcggatgataatctcaagacaccttccgagcgtcagctcactccccttccaccctcagctccaccctcagcagatgataatatcaagacacctgccgagcgtctgcgggggccgcttccaccctcagcggatgataatctcaagacaccttccgagcgtcagctcactccccttccaccctcagctccaccctcagcagatgataatatcaagacacctgccgagcgtctgcgggggccgcttccaccctcagcggatgataatctcaagacaccttccgagcgtcagctcactccccttccaccctcagctccaccctcagcagatgataatatcaagacacctgccgagcgtctgcggggggccgcttccaccctcagcggatgataatctcaagacaccttccgagtgtgtgctcactccccntccaccctcagcctcccgagtagctgggattacaggtgcctgccaccacgcctggctaattttttgtatttttagtagagaaggggtttcaccatattagccacaatggtctcaatctcctgacctcgtgatccatccgccccgccctcccagagtgctgggattacaggcgtcagccaccgtgaccggctcagactgtactcttctagccatctgaaatacgttttctaggtagagatagattgtgtaagggtacagttgtgaggataacagaaacatggcagattatttaaaatcatcctgaaagtggtgctttatctgatgaaagtgattgtaatccataggaaaatgtttcaacgtgcgcaagagttgcggcggcgagcagaggactaccacaaatgcaaagtaaggagcttcctccctgcagttgcaggatagttcagtgctgatgcagatgatgccacggcccttagactctctcaacattcaatttctcatgtgttggctttttcagatccccccttctgcaagaaaggctctttgcaactggntcagaatggcggcagnggagcatcgtcattcttcaggattgccctactggccctacctcacagctgaaactttaaaaaacaggatgggcctccagccacctcctccaactcaacaacattctataantgataactccctgagcctcaagacacctnccgagtgtgtgctca

SEQ ID NO: 549629 - DNA, 968 bp, Homo sapiens
tcatgagggaccccattcggattcttgttcgagaaggaagagttgaccctggagggtatccgccagtttctacattcaacgtggatacgagatggtagtggaatgcctggacacactatgtgacttgtatgaaaccctggaccatcacccaggcaggcatcttcatcaacacccggaggaaggtggactggttcacgctgagaagatgcatgctcgagatttcatgtgtatccgccatgcatggagatatgggaccaaagaggaacgaggacgtgatatatgagggagtgcccgtgctggctctagcagagattttcgattaccactgacctgcgtggccagaggcattgtatgtgcatgcatggtttcttgtagtcatcaactatgaccttccctaccgaacagggaaaactatatccacagcaatcggtcgaggtggacggtttggccgtaaaggtgtggctattaacatggtgacagaatgaagacaagaggactcttcgagacacttgagaccttctacaaacaccgtccattgaggaaatgcccctcaatgttgctgaccgtcatctgaggggctgtcctgccaccagccccagccaggggctcaatctctgggggctgagagcagcaggaggggggagggaaagggagccagggatgggcctctgggtcttgggctttgaattagtgtcacttctgcagggaaagaagacgtgaacatttttagacacccttgtcttggcgtaggtcgttggccaggtgcggtgctttccgaaaaaaaaaaatttttctttcccaacggaactccgaaccgaaggctcccctcagtgggtcctgaagagcagggggggttctcccctgttggccctgcggaccccaaccaaaggggcggggccccggggggggaaagagccctgttttttcggcaccctttttttttgagaaaaggggatctgcacgccgta

SEQ ID NO: 549630 - DNA, 182 bp, Homo sapiens
agtacacaaaggagacaccaatatgaaatcctgaggtcaagccgaaagaaaaaaaaaaaaacccaaatacagaacaaaaaaaacaggttgcagaaaatcacctcctattctggcaggatcggttaccttcacgccaagggggcctcaatattctttatcggcctcttcctacacatgggggg

SEQ ID NO: 549631 - DNA, 3761 bp, Homo sapiens
  misc_feature (33)..(33): n is a, c, g, or t
  misc_feature (3039)..(3039): n is a, c, g, or t
  misc_feature (3590)..(3590): n is a, c, g, or t
  misc_feature (3606)..(3606): n is a, c, g, or t
  misc_feature (3717)..(3717): n is a, c, g, or t
  misc_feature (3746)..(3746): n is a, c, g, or t
tcgactctgtctccaaaaaaaaaaaaaaaaaanttttttttttagatcatcagctattgttagtgttagtgtatgttatgtgtggctcaagacaactttgtttcttttaatataggcagggaagtcaaaagattggatatccctgctttataccaagaaagacaacaccccacatttgcaatgcctaaaaacactaccagccatctgaaaaacatgagacttctaacttctgttcttttttgtagcagtggaatcccacggtgatatctgagggatgtggttaccttttggaggaggttgacggtttctaaggatgattctttctgagtgaaatattgtcagtgtcattgaccttttcattatttcaactattattattccaggttatcaatactctggctgaccatcatcatcgtgggactgactttggtggaagtccttggttacatgtcattattgcgtttccgacaagttataaagttgtcattaccctctggatagtttacctttgggtgtctctcctgaagactatcttctggtctcgaaatggacatgatggatccacggatgtacagcagagagcctggaggtccaaccgccgtagacaggaagggctgaggtccatttgtatgcacacaaagaaaagagtttcttcctttcgaggaaataaaattggcctgaaagacgtcattactctacggagacatgtggaaacaaaagttagagctaaaatccgtaagaggaaggtgacaacgaaaatcaaccatcatgacaaaatcaatggaaagaggaagaccgccaaagaacatctgaggaaactaagcatgaaagaacgtgagcacggagaaaaggagaggcaggtgtcagaggcagaggaaaatgggaaattggatatgaaagaaatacacacctacatggaaatgtttcaacgtgcgcaagcgttgcggcggcgggcagaggactactacagatgcaaaatcaccccttctgcaagaaagcctctttgcaaccgtgggtaagtttgcttgttttccttgcttttggacatagtctgccaggtcaggacatggatacatttttctccctacggctctgtgctcaagccctgcagagggagatggcagagaggaaggctgcctacaagcatcacagtcccatccctgttgggacaattccaaatgagggccttaaatgatgctcagctaagctggttcttgtgtggcctctgtaccttcaaaagctgccgagtcctatgattacacgcgatgggacttgtacacttgaagtgaaacacagttttaaaacttgctttgtttagaattcccacctcatttttccatggacaaaagtattctttatgtcctagtgcacttacaatttggtattacctgggagtgaaaagaaatattacagccatgcctaactgacttcttgaggtaagattgttctgtcagaaaaccctctcccagttcccctgcagctcttcaggaatccacatctctccagagctctttgttctcatgggtggcacctccagagtgaagaagatcctttgtcaagaagggaaacagaggggaaatgagagggtcctgcaggcagagctggaatcaacttccactctgcctcttgcaagctgtgtgaccctgggcacaatttctccttcctctggaaacctctgttttcttagatttggagcagggtggtcacactgaccttgcagagttctgagaatcagagacagaacataaaaggcctggaaaacattcttcttactgtctattgacctggtgcaagaaacatgctctggtgatggctgtgagggaggaatgaggatagacatagacactcctgtgtctcaaacatgcttctttattactctgttatgactctgtcttccctggggcaggaccccagcctgcctacatttgcagacagacacagtggcatgtggagacaacagtgtgtcccaatgacttttctttaccccctagctgtcggcagtactcagtggaagggtgatattatgacactgacactgctattttgaaacctggaggatggaaaggtgcaaaaatctatcaccagcaacagaaggtgcagactgtgttggtggcggtaattttgtccatcaaatgaatatgtgtgaaaacattccctcctttggccctacggtcagaatggcggcagcggagcatcgtcattcttcaggattgccctactggccctacctcacagctgaaactttaaaaaacaggatgggccaccagccacctcctccaactcaacaacattctataactgataactccctgagcctcaagacacctcccgagtgtctgctcgcttccaccctcagcggatgataatctcaagacaccttccgagcgtcagctcactccccttccaccctcagctccaccctcagcagatgataatatcaagacacctgccgagcgtctgcgggggccgcttccaccctcagcggatgataatctcaagacaccttccgagcgtcagctcactccccttccaccctcagctccaccctcagcagatgataatatcaagacacctgccgagcgtctgcagctgcgggggccgcttccaccctcagcggatgataatctcaagacaccttccgagcgtcagctcactccccttccaccctcagctccaccctcagcagatgataatatcaagacacctgccgagcgtctgcgggggccgcttccaccctcagcggatgataatctcaagacaccttccgagcgtcagctcactccccttccaccctcagctccaccctcagcagatgataatatcaagacacctgccgagcgtctgcgggggccgcttccaccctcagcggatgataatctcaagacaccttccgagcgtcagctcactccccttccaccctcagctccaccctcagcagatgataatatcaagacacctgccgagcgtctgcggggggccgcttccaccctcagcggatgataatctcaagacaccttccgagtgtgtgctcactccccntccaccctcagcctcccgagtagctgggattacaggtgcctgccaccacgcctggctaattttttgtatttttagtagagaaggggtttcaccatattagccacaatggtctcaatctcctgacctcgtgatccatccgccccgccctcccagagtgctgggattacaggcgtcagccaccgtgaccggctcagactgtactcttctagccatctgaaatacgttttctaggtagagatagattgtgtaagggtacagttgtgaggataacagaaacatggcagattatttaaaatcatcctgaaagtggtgctttatctgatgaaagtgattgtaatccataggaaaatgtttcaacgtgcgcaagagttgcggcggcgagcagaggactaccacaaatgcaaagtaaggagcttcctccctgcagttgcaggatagttcagtgctgatgcagatgatgccacggcccttagactctctcaacattcaatttctcatgtgttggctttttcagatccccccttctgcaagaaaggctctttgcaactggntcagaatggcggcagnggagcatcgtcattcttcaggattgccctactggccctacctcacagctgaaactttaaaaaacaggatgggcctccagccacctcctccaactcaacaacattctataantgataactccctgagcctcaagacacctnccgagtgtgtgctca

SEQ ID NO: 549632 - DNA, 204 bp, Homo sapiens
atgagtgcccataggggggtcataccaaatttttttgtatttatagtagagacagtttttcaccatgttggccaggatggtctggggttcctgaccgtgtgatccacccgcctcggtctcccaaagtgttgatattacaggcgtgagccaccaagcctggctgaatatttcttatatgaagaagttatgctcgtatagaaggta

SEQ ID NO: 549633 - DNA, 355 bp, Homo sapiens
  misc_feature (100)..(100): n is a, c, g, or t
agagcagagacccaatgcagagcacaggcccagtgactcatggttctagtcccagcactttgggaggctaacgcaggccgatcactagctcaagagatangagaccatcctggccaacatggtgaaaccccatctcaactaaaaatacaaaaaaaaattagctgggcgtggtggcacacacctgtaatcccagctacttgggaggctgaggcaggagaattgcttgaacctggcaggcagaggttgcagtgagcagagatcatgccattgcacttcagcctgagtgacagagggagactcaaaaaaaaaaagaaaatattcaaacaatgtggggggaaaatgattgtagaactag

SEQ ID NO: 549634 - DNA, 3892 bp, Homo sapiens
  misc_feature (33)..(33): n is a, c, g, or t
  misc_feature (3170)..(3170): n is a, c, g, or t
  misc_feature (3721)..(3721): n is a, c, g, or t
  misc_feature (3737)..(3737): n is a, c, g, or t
  misc_feature (3848)..(3848): n is a, c, g, or t
  misc_feature (3877)..(3877): n is a, c, g, or t
tcgactctgtctccaaaaaaaaaaaaaaaaaanttttttttttagatcatcagctattgttagtgttagtgtatgttatgtgtggctcaagacaactttgtttcttttaatataggcagggaagtcaaaagattggatatccctgctttataccaagaaagacaacaccccacatttgcaatgcctaaaaacactaccagccatctgaaaaacatgagacttctaacttctgttcttttttgtagcagtggaatcccacggtgatatctgagggatgtggttaccttttggaggaggttgacggtttctaaggatgattctttctgagtgaaatattgtcagtgtcattgaccttttcattatttcaactattattattccaggttatcaatactctggctgaccatcatcatcgtgggactgactttggtggaagtccttggttacatgtcattattgcgtttccgacaagttataaagttgtcattaccctctggatagtttacctttgggtgtctctcctgaagactatcttctggtctcgaaatggacatgatggatccacggatgtacagcagagagcctggaggtccaaccgccgtagacaggaagggctgaggtccatttgtatgcacacaaagaaaagagtttcttcctttcgaggaaataaaattggcctgaaagacgtcattactctacggagacatgtggaaacaaaagttagagctaaaatccgtaagaggaaggtgacaacgaaaatcaaccatcatgacaaaatcaatggaaagaggaagaccgccaaagaacatctgaggaaactaagcatgaaagaacgtgagcacggagaaaaggagaggcaggtgtcagaggcagaggaaaatgggaaattggatatgaaagaaatacacacctacatggaaatgtttcaacgtgcgcaagcgttgcggcggcgggcagaggactactacagatgcaaaatcaccccttctgcaagaaagcctctttgcaaccgtgggtaagtttgcttgttttccttgcttttggacatagtctgccaggtcaggacatggatacatttttctccctacggctctgtgctcaagccctgcagagggagatggcagagaggaaggctgcctacaagcatcacagtcccatccctgttgggacaattccaaatgagggccttaaatgatgctcagctaagctggttcttgtgtggcctctgtaccttcaaaagctgccgagtcctatgattacacgcgatgggacttgtacacttgaagtgaaacacagttttaaaacttgctttgtttagaattcccacctcatttttccatggacaaaagtattctttatgtcctagtgcacttacaatttggtattacctgggagtgaaaagaaatattacagccatgcctaactgacttcttgaggtaagattgttctgtcagaaaaccctctcccagttcccctgcagctcttcaggaatccacatctctccagagctctttgttctcatgggtggcacctccagagtgaagaagatcctttgtcaagaagggaaacagaggggaaatgagagggtcctgcaggcagagctggaatcaacttccactctgcctcttgcaagctgtgtgaccctgggcacaatttctccttcctctggaaacctctgttttcttagatttggagcagggtggtcacactgaccttgcagagttctgagaatcagagacagaacataaaaggcctggaaaacattctccaaaaagaagctgcaacatgtgtggacaatgggcttttcatgcctctcttactgtctcttactgtctattgacctggtgcaagaaacatgctctggtgatggctgtgagggaggaatgaggatagacatagacactcctgtgtctcaaacatgcttctttattactctgttatgactctgtcttccctggggcaggaccccagcctgcctacatttgcagacagacacagtggcatgtggagacaacagtgtgtcccaatgacttttctttaccccctagctgtcggcagtactcagtggaagggtgatattatgacactgacactgctattttgaaacctggaggatggaaaggtgcaaaaatctatcaccagcaacagaaggtgcagactgtgttggtggcggtaattttgtccatcaaatgaatatgtgtgaaaacattccctcctttggccctacggtcagaatggcggcagcggagcatcgtcattcttcaggattgccctactggccctacctcacagctgaaactttaaaaaacaggatgggccaccagccacctcctccaactcaacaacattctataactgataactccctgagcctcaagacacctcccgagtgtctgctcactccccttccaccctcagctccaccctcagcagatgataatatcaagacacctgccgagcgtctgcgggggccgcttccaccctcagcggatgataatctcaagacaccttccgagcgtcagctcactccccttccaccctcagctccaccctcagcagatgataatatcaagatacctgctgagcgtctgcggattccgcttccaccatcagccgatgataatctcaagacaccttccgagcgtcagctcactccccttccaccctcagctccaccctcagcagatgataatatcaagacacctgccgagcgtctgcagctgcgggggccgcttccaccctcagcggatgataatctcaagacaccttccgagcgtcagctcactccccttccaccctcagctccaccctcagcagatgataatatcaagacacctgccgagcgtctgcgggggccgcttccaccctcagcggatgataatctcaagacaccttccgagcgtcagctcactccccttccaccctcagctccaccctcagcagatgataatatcaagacacctgccgagcgtctgcgggggccgcttccaccctcagcggatgataatctcaagacaccttccgagcgtcagctcactccccttccaccctcagctccaccctcagcagatgataatatcaagacacctgccgagcgtctgcggggggccgcttccaccctcagcggatgataatctcaagacaccttccgagtgtgtgctcactccccntccaccctcagcctcccgagtagctgggattacaggtgcctgccaccacgcctggctaattttttgtatttttagtagagaaggggtttcaccatattagccacaatggtctcaatctcctgacctcgtgatccatccgccccgccctcccagagtgctgggattacaggcgtcagccaccgtgaccggctcagactgtactcttctagccatctgaaatacgttttctaggtagagatagattgtgtaagggtacagttgtgaggataacagaaacatggcagattatttaaaatcatcctgaaagtggtgctttatctgatgaaagtgattgtaatccataggaaaatgtttcaacgtgcgcaagagttgcggcggcgagcagaggactaccacaaatgcaaagtaaggagcttcctccctgcagttgcaggatagttcagtgctgatgcagatgatgccacggcccttagactctctcaacattcaatttctcatgtgttggctttttcagatccccccttctgcaagaaaggctctttgcaactggntcagaatggcggcagnggagcatcgtcattcttcaggattgccctactggccctacctcacagctgaaactttaaaaaacaggatgggcctccagccacctcctccaactcaacaacattctataantgataactccctgagcctcaagacacctnccgagtgtgtgctca

SEQ ID NO: 549635 - DNA, 82 bp, Homo sapiens
tggttggggaaaaacccaacaagggcgggaaatgtttgtttaatatttggttttttaattttaaaaaataaagtgtaacttt

SEQ ID NO: 549636 - DNA, 411 bp, Homo sapiens
agaggatcatagaacgtggtctaatacgtacccatcagtatacaaggctgccgaggaagcaacagaagacggcagtcgacccctggaactctagcacaaaatatgatggtgcacacgaagaccctactgctaagctccctgtgcttatgaattcgaacagaataccccctccccataatgtaagagatactctaacataaccatacctcggcattcatggtttattttggataatgatcagaacatattcactaggacacattacagatgttagaaacttaacacttttatgtgtcgttcattatgcctcttccacttattaaaactgaaaattagattagtctggaacataacctaatttatgttgtatgttgttctggattacaaggttcattcctaatgttagagata

SEQ ID NO: 549637 - DNA, 534 bp, Homo sapiens
aaataatactcacttccacagctctggagcgcaggaaccatgggctgaggccagaatgtttgctccaggagcgtccctcgtggtccgttcaggtgcccagagttgcgggccttgcacgccttgtacgccttgttccctggcgcctccttccctggcgcctcctccttccatgtgggtgtgcagcatcccgctccagggccttcagcctttgcgcccctcatctgctgatgcaggtgatggcatttagggcccacctgggtactcctaggattcacctttatcaccgcatgagggagcattcccaggttttagggattagggataggactgggattcctttggggactgctcttccgcccaccactgtgccagaatgtgatgcacacaacggccagcatatccaaaggccccaggaggacctggggtggctggaacaggacctggtgccgggaacaggcggggccggggattcccgacaaaggcttgatgtgtaccttaagtgagcaaagggttttgaattaaccaagaactgga

SEQ ID NO: 549638 - DNA, 429 bp, Homo sapiens
agggagtcattccatctggtattgatcttttccccaaaaacagaactgagaaactttatatataactgatggtcccataaaacagatttgcataaaattaccatgattgctttatgtttatatttaacctggatttttggcccaacaaaattgtgtaaaatatatttgaagtttcagtgatttaacagtctttcccacctttcatgatttttatgagcccaggctttccagaaaaaaccttggaaataaattcccttgccttttgtccctttatcagcaaataaaacatggccttaacaaagttgtttgtgtttttggtcaattttaaaattatgtcggggcataccctataaaattactaacccttctgccccctgtagaatatgtttttatccttttcccttaaaaaaaaaaatggttttttctgga

SEQ ID NO: 549639 - DNA, 189 bp, Homo sapiens
gcagaagtttaataactttccttggaaaactgaaattgatgtgtgtgtgtttgtgtatatgtgcatgtggaacatgtgttgtgtgtgtgcaggagtctgtatatatgtggggggtatatgtggagtgtgatgtatgtatatgtatgtgtgcggcatgtgtgagcatgtatctatgtacatgcggtatgt

SEQ ID NO: 549640 - DNA, 316 bp, Homo sapiens
  misc_feature (10)..(10): n is a, c, g, or t
ccccacttcncaccaccccaaacccccgcctaattttttacactcccgcaagaatcttttacatcagtcacaagaatgaccttgcggcatacaagacacttccctccatgtaatgcacgggaaaaaaaagttcaggcactccataggatgtcggacaagaagacttccactctaataggatgaaaaaatgatcatttatttacatcattctgattccttttaatcgcttcacaatccactataaagaagattcgctctgaccctaaattttctactttttttcccacttttctctcacataaatcaggcgtctcat

SEQ ID NO: 549641 - DNA, 201 bp, Homo sapiens
gggagagaggctcaggtgggccggagcaagcgcgggggatggatacgggcgctgctggaagaggggcccagctgcgtggtgtcagcgccagtctgggcctcattccgcttggggagtcctggtgaccacgtgccccgagggggcgtctagagtactgagctgagggtccagtggggtctaagctcttcatccgttgtcggc

SEQ ID NO: 549642 - DNA, 238 bp, Homo sapiens
gggtgatccagaggatcccccgaacatgtcgaggctattgggacggctgagacaggagaatagcttgaataccagaggcagtaggttgcagtgcgctgaaatcgtgcctctgacatctagcctgggtgacacgagtgagaccccagctcataaaaaacaatatagacagttatatcccataccgggaacataagaagtagtgccgttaatctgagaaactccctaagattcgaaacaa

SEQ ID NO: 549643 - DNA, 3471 bp, Homo sapiens
aacacatcgacttgtgtaagaaaaagattggaagtgcggagctgtcttttgagcatgatgcatggatgtctaaacaattccaggcctttggagatttatttgatgaagctattaagttagggttaacagctattcaaactcagaatcctggtttctattaccagcaggcagcatactatgcccaggagcggaaacagcttgcaaaaaccctctgtaaccacgaagcttctgtaatgtatcccaatcctgatcccttagaaacacaaacaggcgttcttgacttttatggacaaagatcatggcgacaaggaatactaagttttgatctttctgatcctgaaaaagaaaaggtgggaattcttgccattcagctgaaggagagaaatgttgttcactctgagataatcataactcttctgagcaatgctgttgcacagttcaagaagtataagtgcccgcgaatgaaaagtcacctaatggttcagatgggagaggaatattattacgcaaaggattataccaaagctttgaagttgctggattatgtgatgtgtgattatcggagtgaaggatggtggactctgctcacttctgtattaactacagctctgaagtgctcctacctcatggcccaattaaaggattacattacttactccctagaactccttggtagagcttcaactctgaaagatgaccagaagtctcggatagaaaagaacctcataaatgttttaatgaatgaaagtcctgatccagaacccgactgtgatatcttagctgtgaaaactgctcagaagctgtgggcagaccgaatttctctggctggcagcaatattttcacaataggagtacaggactttgtgccatttgtgcagtgcaaagccaagtttcatgccccaagttttcatgttgatgttcctgttcagtttgatatttatctgaaggctgattgtccacatcccattaggttttccaagctctgtgtcagctttaataatcaggaatacaaccagttctgtgtaatagaagaagcatccaaagcaaatgaagttttagaaaatctgactcaaggaaagatgtgcctagttcctggcaaaacaagaaaactgttatttaagtttgttgcaaaaactgaagatgtgggaaagaaaattgagattacttcagtggatcttgctctgggcaatgagacgggaagatgtgtggttttaaattggcagggaggaggaggagatgctgcttcctcccaagaagccttacaggcagctcggtctttcaaaaggcgacctaagctacctgacaatgaagttcactgggacagcattataattcaggcaagcacaatgatcatatccagagtcccaaacatttctgtacatctgctacatgaaccccctgcactgactaatgaaatgtattgtttggttgtgactgttcagtcccatgaaaagacccaaatcagagatgtgaagctcactgctggcttaaaaccaggacaggatgccaatttaactcagaagactcacgtgactcttcatggaacagaactgtgtgatgaatcctacccggctttactcactgacattcctgttggagacttacatccaggggaacagctggaaaaaatgttgtatgttcgctgtggaacagtgggttccagaatgtttcttgtatatgtttcttacctgataaatacaaccgttgaagaaaaagaaattgtttgcaagtgtcacaaggatgaaactgtaacaattgaaacagtctttccatttgatgttgcggttaaatttgtttctaccaagtttgagcacctggaaagggtttatgctgacatcccctttctgttgatgacggacctcttaagtgcctcaccctgggccctcactattgtttccagtgagctccagcttgctccatccatgaccacagtggaccagctcgagtctcaagtggacaatgttatcttacagactggagagagtgctagtgaatgcttttgtcttcaatgcccatctcttggaaatattgaaggtggagtagcaaccgggcattatattatctcttggaaaaggacctcagcaatggagaatatccccatcatcacaactgtcatcactctgccgcacgtgattgtggagaatatccctctccatgtgaatgcagatctgccgtcatttgggcgtgtcagagagtcgttacctgtcaagtatcacctacagaataagaccgacttagttcaagatgtagaaatttctgtggagcccagtgatgccttcatgttctcaggtctcaaacagattcgattacgtatcctccctggcacggagcaggaaatgctatataatttctatcctctgatggctggataccagcagctgccatctctcaacatcaacttgcttagatttcctaacttcacaaatcagctgctcaggcgttttatacctaccagtatttttgtcaagccacagggtcgactcatggatgatacctctattgctgctgcatgatgttcaagaccggcccttggctgttgttacagagatgttgggcagagctatgcaggtgtttcattgtgaactctagctttgatcatggtaaaaagttaaccttttctattttttaatggatgttataccaactattcagaggaactcatacttcaaaaatattaggaaaatctgtcttatagtttctctaataaatatctgaaatctcagtacgacatgaaagaatgtcagaccattgttattgttgaaagtcatttgatgaatggtaaattctatgaaaagtaagtgatttgcatgtataatatcaggaaaattaagcatcccaagtgtgactggacaaagagagcagatgcaccagtgcctgtgccataaagttccgaatcccccatgtgtctctttcagagctggccagaccggaaataaatcattctcataaattcagtgtgtactcagaacacatacacaacaacatagggagttgtatgactgatacggaaaacttccagaaagttttaatcaaagcagtttaattaaggtatcaaaaatatctttgcttactatcaagaagtgtcaaataggttcagcttgctgccaaaatatggatcatttatgaagcaggttcatattttagaggtgttaataaaatcctcatcggaaaagatccaaagtgcaaggatttgattataaacataatttcctagactgaaagtttttggaaaagatgcagggtctgagtcaggccttctggttatattgtgcagtttcaaaagaactatttaaaactcttgaaaactcatgtaaataaaaatcatagggtgaaaattgtatttgttaaaataccttaataatttaaaatgacctgatttcctggaaaattttattattcaaaaggtggaggcattgtaaaaaggaaatagtgatgtaaataaacatgttctctttcaagtaaaaaaaaaaa

SEQ ID NO: 549644 - DNA, 695 bp, Homo sapiens
cagcactgatgttctgcccgggatgaagcctgacccctcccgcattgcccgccccgccgtgcgcctcctgccatgctgctactgcgcctgtcctccgtcgtcctgctctcgtggccaatgctgctgtgcggtgcctgcttctgcgccggcttcgaggccgaggtgctgcacactggtgctcgccggcctgcctgctgccgcccggcgcggtggtggccgtgttgctgcctcgtggcggcaatggactccactggtgcttggctgcacgtgctgctgcgcgctggcgccgtgcctgggcatctcactgcagctcgtggccgtcgatgagggcatcggtggctacctgggacgcggcgttggctggccgtgctggtgccatgtgcggcgcgctgggagctgccgctcacggtcgtggcctacgaagacctctttgggggctggacgatggacgccgtggccctgcatgcacagccggctccggccgcagccgctcctgctgcaccttctgtggagtgctgcggcgccagggcgctggaggaaggggcgcgccgagttgggagccacgcaacatcgtgacaggtcacaactgccgacgacatggcggagaccgtgctccatgaacttcctacggggctgacgcggggctggctggcccgtgtgcgggggcctgggctctcccggcgaggggggcgcca

SEQ ID NO: 549645 - DNA, 1506 bp, Homo sapiens
tccaattttaaaataataagagaaacaaaaagagccgtggcgacttaggagtcactagctgatgagttgctcatctatatatcctggtctggatcactaacagtacctgccagtgactcctctctccactctattgttctgagatgactcgacgacgtagcctttaaacattaactgcagtctggtccacagatgtgacttaaagtcgagcatcaatgtatacgctcagatgatcgctcacgatgagcctgcacggcctggaactccatcttgggcgagctattcaaaacagttgctaactgttctagaatcagaccttcgaagcaaggaaattctgggtttaaaattgcacctctcggggggcagtggcctggtacatcaggacttgctgtaagggcacattcctccagtgcaagttcctaatgtgcagctgaggtcgcaggacgctcgagcacagaaaatggctaatctgaagatgcgatcctctatgtggatcatctggcccgtgtgaaagggccaggacagtgtgtcgttcctgacatagttgaaacctctcaagaaactactagtatatactatactatactgcaaacgagttaagaccaggttgtccacgccaatgtggatagaatcaccgcacgcgctgtttcaaagactcaaccggctttagaactgtggcttcacacaaaatcacttacagcacccatcggcttgcgataaccgtattacacaggcaatataagagaggaaatatatgcacgtgttgacacagctatcacaacagcctatcacagtggccgccacaaaataatccagtcgtcccgagcaaaaacaccgcgatattatggacaagcgcccaaactgtcacgatgacaacggaaggatggtacacgacgtgccgctaacaagacgtcgcgttgcatgataaaagatagtttcttaaaaacaacacagcacacacacagcaccatccgacgagcaccagcaaaagcaacccacgcacagcacctccgatcactacgagcagaacaacaaccaacagagacccgaccatacgaagcacagacgacaataaactagtacaacaaaacaacctaaacaattcatatacaacaacttatcataaaatatctatacatcaaatacaacatacactcatccaccactcactatcaattactacaatataacacataaaagctacgaggcacaaaacgagaacctagctcacgctggaacggacacaaaagatataaaactgactcagaacaagaggacgagtgagacatactatacgaagtcaagcaagcatagacgaccgcacaggcagatacacgaaggataccaaggaaacaagagaacagcaaacaagagaagagtagatcgaacgaacagcagatgtatagagagaggacagaacccacatgacgacagccgaaacagagcagcgactagcaacagcagaatgccacttcacacgtgcaccgacacgatctcgcacaaccc

SEQ ID NO: 549646 - DNA, 1196 bp, Homo sapiens
ctctcaacatcaacttgcttagatggcagctgctggtatccagccatcagaggatagaaattatatagcatttcctgctccgtgccagggaggataccagcagctgccatctctcaacatcaacttgcttagatttcctaacttcacaaatcagctgctcaggcgttttatacctaccagtatttttgtcaagccacagggtcgactcatggatgatacctctattgctgctgcatgatgttcaagaccggcccttggctgttgttacagagatgttgggcagagctatgcaggtgtttcattgtgaactctagctttgatcatggtaaaaagttaaccttttctattttttaatggatgttataccaactattcagaggaactcatacttcaaaaatattaggaaaatctgtcttatagtttctctaataaatatctgaaatctcagtacgacatgaaagaatgtcagaccattgttattgttgaaagtcatttgatgaatggtaaattctatgaaaagtaagtgatttgcatgtataatatcaggaaaattaagcatcccaagtgtgactggacaaagagagcagatgcaccagtgcctgtgccataaagttccgaatcccccatgtgtctctttcagagctggccagaccggaaataaatcattctcataaattcagtgtgtactcagaacacatacacaacaacatagggagttgtatgactgatacggaaaacttccagaaagttttaatcaaagcagtttaattaaggtatcaaaaatatctttgcttactatcaagaagtgtcaaataggttcagcttgctgccaaaatatggatcatttatgaagcaggttcatattttagaggtgttaataaaatcctcatcggaaaagatccaaagtgcaaggatttgattataaacataatttcctagactgaaagtttttggaaaagatgcagggtctgagtcaggccttctggttatattgtgcagtttcaaaagaactatttaaaactcttgaaaactcatgtaaataaaaatcatagggtgaaaattgtatttgttaaaataccttaataatttaaaatgacctgatttcctggaaaattttattattcaaaaggtggaggcattgtaaaaaggaaatagtgatgtaaataaacatgttctctttcaagtaaaaaaaaaaa

SEQ ID NO: 549647 - DNA, 3218 bp, Homo sapiens
agcggagaatgttgaagagtctgaaatgattatattaaataaaggtttcaaggagtgtacacatacaacgttcatatgaagatttatattaaatgagctgtctaaaatgagttgtgtctcatcttacgcaggttttgatctttctgatcctgaaaaagaaaaggtgggaattcttgccattcagctgaaggagagaaatgttgttcactctgagataatcataactcttctgagcaatgctgttgcacagttcaagaagtataagtgcccgcgaatgaaaagtcacctaatggttcagatgggagaggaatattattacgcaaaggattataccaaagctttgaagttgctggattatgtgatgtgtgattatcggagtgaaggatggtggactctgctcacttctgtattaactacagctctgaagtgctcctacctcatggcccaattaaaggattacattacttactccctagaactccttggtagagcttcaactctgaaagatgaccagaagtctcggatagaaaagaacctcataaatgttttaatgaatgaaagtcctgatccagaacccgactgtgatatcttagctgtgaaaactgctcagaagctgtgggcagaccgaatttctctggctggcagcaatattttcacaataggagtacaggactttgtgccatttgtgcagtgcaaagccaagtttcatgccccaagttttcatgttgatgttcctgttcagtttgatatttatctgaaggctgattgtccacatcccattaggttttccaagctctgtgtcagctttaataatcaggaatacaaccagttctgtgtaatagaagaagcatccaaagcaaatgaagttttagaaaatctgactcaaggaaagatgtgcctagttcctggcaaaacaagaaaactgttatttaagtttgttgcaaaaactgaagatgtgggaaagaaaattgagattacttcagtggatcttgctctgggcaatgagacgggaagatgtgtggttttaaattggcagggaggaggaggagatgctgcttcctcccaagaagccttacaggcagctcggtccacaatgatcatatccagagtcccaaacatttctgtacatctgctacatgaaccccctgcactgactaatgaaatgtattgtttggttgtgactgttcagtcccatgaaaagacccaaatcagagatgtgaagctcactgctggcttaaaaccaggacaggatgccaatttaactcagaagactcacgtgactcttcatggaacagaactgtgtgatgaatcctacccggctttactcactgacattcctgttggagacttacatccaggggaacagctggaaaaaatgttgtatgttcgctgtggaacagtgggttccagaatgtttcttgtatatgtttcttacctgataaatacaaccgttgaagaaaaagaaattgtttgcaagtgtcacaaggatgaaactgtaacaattgaaacagtctttccatttgatgttgcggttaaatttgtttctaccaagtttgagcacctggaaagggtttatgctgacatcccctttctgttgatgacggacctcttaagtgcctcaccctgggccctcactattgtttccagtgagctccagcttgctccatccatgaccacagtggaccagctcgagtctcaagtggacaatgttatcttacagactggagagagtgctagtgaatgcttttgtcttcaatgcccatctcttggaaatattgaaggtggagtagcaaccgggcattatattatctcttggaaaaggacctcagcaatggagaatatccccatcatcacaactgtcatcactctgccgcacgtgattgtggagaatatccctctccatgtgaatgcagatctgccgtcatttgggcgtgtcagagagtcgttacctgtcaagtatcacctacagaataagaccgacttagttcaagatgtagaaatttctgtggagcccagtgatgccttcatgttctcaggtctcaaacagattcgattacgtatcctccctggcacggagcaggaaatgctatataatttctatcctctgatggctggataccagcagctgccatctctcaacatcaacttgcttagatttcctaacttcacaaatcagctgctcaggcgttttatacctaccagtatttttgtcaagccacagggtcgactcatggatgatacctctattgctgctgcatgatgttcaagaccggcccttggctgttgttacagagatgttgggcagagctatgcaggtgtttcattgtgaactctagctttgatcatggtaaaaagttaaccttttctattttttaatggatgttataccaactattcagaggaactcatacttcaaaaatattaggaaaatctgtcttatagtttctctaataaatatctgaaatctcagtacgacatgaaagaatgtcagaccattgttattgttgaaagtcatttgatgaatggtaaattctatgaaaagtaagtgatttgcatgtataatatcaggaaaattaagcatcccaagtgtgactggacaaagagagcagatgcaccagtgcctgtgccataaagttccgaatcccccatgtgtctctttcagagctggccagaccggaaataaatcattctcataaattcagtgtgtactcagaacacatacacaacaacatagggagttgtatgactgatacggaaaacttccagaaagttttaatcaaagcagtttaattaaggtatcaaaaatatctttgcttactatcaagaagtgtcaaataggttcagcttgctgccaaaatatggatcatttatgaagcaggttcatattttagaggtgttaataaaatcctcatcggaaaagatccaaagtgcaaggatttgattataaacataatttcctagactgaaagtttttggaaaagatgcagggtctgagtcaggccttctggttatattgtgcagtttcaaaagaactatttaaaactcttgaaaactcatgtaaataaaaatcatagggtgaaaattgtatttgttaaaataccttaataatttaaaatgacctgatttcctggaaaattttattattcaaaaggtggaggcattgtaaaaaggaaatagtgatgtaaataaacatgttctctttcaagtaaaaaaaaaaa

SEQ ID NO: 549648 - DNA, 1010 bp, Homo sapiens
  misc_feature (1010)..(1010): n is a, c, g, or t
gggtcctccgtgcgcacgtcgcaggtgggactaagcatgtggtctggtagaagcgatcgggcggccgtcgggcccctgtcggtccgggcgcgctacaggaccgcgcgacaaggcgcattggacgcacccgctgtgcagccttgaatccgactctggccatcgttgcagattcccgtccctcgcctgggcgtcgagctggggggtggtgcggaccttcgctgggtttcctcgtctctgtgagcttcttgcctctgatgcacattcctcgttgttacatggccacgttctcgcgttgatgacagggctcgcatggtagtgaggatggcctacggtcggtcccccattggacgtcgccatgggtcgtaaggcgggaggaaccagactgggcggactgcagtgagaacctcgacaatgagggcccgaagcccatggagagctgtggccaggagagacaggatgtgtccctgtagtctgcctagccgtctcggtgccccctgtgatgccccgtggcgagatcctggaggagagtgtgagaagagagggcgactggaggtcgggctattgggctcggggactctcagcactgggttctataggtacatcaggtatgacttgtgaacctctgagcatctttaacctgtgaggtctgcagagacgtgcctacggcattgccatgcttacatgcgaacgctaccgggcgctatacgtgggccgcttatgagtctagaaagcaccgacaaaaacccaaagatctatggggcaaacattacttggcagcctattgttgacattccgtattcggcttgcaatgacaagggaccaacgaccatgaacccgttttcgaattggtgctcatctgtgaacaaggccgggacacatcatgatgtttgcgcttgtggccctgggccaaaggcatggacccattgtgcaagagagagggtgacaagatagattacaatagcatatatttattcagaaatagatataatggcatacaacacttagtgatn

SEQ ID NO: 549649 - DNA, 3074 bp, Homo sapiens
agcggagaatgttgaagagtctgaaatgattatattaaataaaggtttcaaggagtgtacacatacaacgttcatatgaagatttatattaaatgagctgtctaaaatgagttgtgtctcatcttacgcaggttttgatctttctgatcctgaaaaagaaaaggtgggaattcttgccattcagctgaaggagagaaatgttgttcactctgagataatcataactcttctgagcaatgctgttgcacagttcaagaagtataagtgcccgcgaatgaaaagtcacctaatggttcagatgggagaggaatattattacgcaaaggattataccaaagctttgaagttgctggattatgtgatgtgtgattatcggagtgaaggatggtggactctgctcacttctgtattaactacagctctgaagtgctcctacctcatggcccaattaaaggattacattacttactccctagaactccttggtagagcttcaactctgaaagatgaccagaagtctcggatagaaaagaacctcataaatgttttaatgaatgaaagtcctgatccagaacccgactgtgatatcttagctgtgaaaactgctcagaagctgtgggcagaccgaatttctctggctggcagcaatattttcacaataggagtacaggactttgtgccatttgtgcagtgcaaagccaagtttcatgccccaagttttcatgttgatgttcctgttcagtttgatatttatctgaaggctgattgtccacatcccattaggttttccaagctctgtgtcagctttaataatcaggaatacaaccagttctgtgtaatagaagaagcatccaaagcaaatgaagttttagaaaatctgactcaaggaaagatgtgcctagttcctggcaaaacaagaaaactgttatttaagtttgttgcaaaaactgaagatgtgggaaagaaaattgagattacttcagtggatcttgctctgggcaatgagacgggaagatgtgtggttttaaattggcagggaggaggaggagatgctgcttcctcccaagaagccttacaggcagctcggtctttcaaaaggcgacctaagctacctgacaatgaagttcactgggacagcattataattcaggcaagcacaatgatcatatccagagtcccaaacatttctgtacatctgctacatgaaccccctgcactgactaatgaaatgtattgtttggttgtgactgttcagtcccatgaaaagacccaaatcagagatgtgaagctcactgctggcttaaaaccaggacaggatgccaatttaactcagaagactcacgtgactcttcatggaacagaactgtgtgatgaatcctacccggctttactcactgacattcctgttggagacttacatccaggggaacagctggaaaaaatgttgtatgttcgctgtggaacagtgggttccagaatgtttcttgtatatgtttcttacctgataaatacaaccgttgaagaaaaagaaattgtttgcaagtgtcacaaggatgaaactgtaacaattgaaacagtctttccatttgatgttgcggttaaatttgtttctaccaagtttgagcacctggaaagggtttatgctgacatcccctttctgttgatgacggacctcttaagtgcctcaccctgggccctcactattgtttccagtgagctccagcttgctccatccatgaccacagtggaccagctcgagtctcaagtggacaatgttatcttacagactggagagagtgctagtgaatgcttttgtcttcaatgcccatctcttggaaatattgaaggtggagtagcaaccgggcattatattatctcttggaaaaggacctcagcaatggagaatatccccatcatcacaactgtcatcactctgccgcacgtgattgtggagaatatccctctccatgtgaatgcagatctgccatctctcaacatcaacttgcttagatttcctaacttcacaaatcagctgctcaggcgttttatacctaccagtatttttgtcaagccacagggtcgactcatggatgatacctctattgctgctgcatgatgttcaagaccggcccttggctgttgttacagagatgttgggcagagctatgcaggtgtttcattgtgaactctagctttgatcatggtaaaaagttaaccttttctattttttaatggatgttataccaactattcagaggaactcatacttcaaaaatattaggaaaatctgtcttatagtttctctaataaatatctgaaatctcagtacgacatgaaagaatgtcagaccattgttattgttgaaagtcatttgatgaatggtaaattctatgaaaagtaagtgatttgcatgtataatatcaggaaaattaagcatcccaagtgtgactggacaaagagagcagatgcaccagtgcctgtgccataaagttccgaatcccccatgtgtctctttcagagctggccagaccggaaataaatcattctcataaattcagtgtgtactcagaacacatacacaacaacatagggagttgtatgactgatacggaaaacttccagaaagttttaatcaaagcagtttaattaaggtatcaaaaatatctttgcttactatcaagaagtgtcaaataggttcagcttgctgccaaaatatggatcatttatgaagcaggttcatattttagaggtgttaataaaatcctcatcggaaaagatccaaagtgcaaggatttgattataaacataatttcctagactgaaagtttttggaaaagatgcagggtctgagtcaggccttctggttatattgtgcagtttcaaaagaactatttaaaactcttgaaaactcatgtaaataaaaatcatagggtgaaaattgtatttgttaaaataccttaataatttaaaatgacctgatttcctggaaaattttattattcaaaaggtggaggcattgtaaaaaggaaatagtgatgtaaataaacatgttctctttcaagtaaaaaaaaaaa

SEQ ID NO: 549650 - DNA, 394 bp, Homo sapiens
  misc_feature (159)..(159): n is a, c, g, or t
gactaacacatccctaaccaggtgtggtggtgtacttgtagtctcagctacttgggaggctgaggtgggaggattgcctgagcctgggaaggtggaggttgcagtgagctgagatagtgccactgcactccagcttgggtgacagagtgaaaccttgtntcagaaaaaaaaaaaaaaaggaaaagaaaagacttttttttatacaagaggcctcaggatattcagggacagtggctagcaataaatgtgggcttatctccatgcctgtttccatgatctcctaatgcgggttctgccataagctcagattctataaatctcaaagcactcttttaaaaaaatttatttaaatgggacggtggtctgtgatgtacaaggctgttaagggtgctgt

SEQ ID NO: 549651 - DNA, 122 bp, Homo sapiens
aaaaaaaaaagggggggccccccccttttttttccccctttggggggggggggggggggttttttttttggggggggttttttcccccccccggggtttttaggggccccccgttttttcca

SEQ ID NO: 549652 - DNA, 1567 bp, Homo sapiens
accattgcataaggaatataaagacttttccctgtagttatcttacagactggagagagtgctagtgaatgcttttgtcttcaatgcccatctcttggaaatattgaaggtggagtagcaaccgggcattatattatctcttggaaaaggacctcagcaatggagaatatccccatcatcacaactgtcatcactctgccgcacgtgattgtggagaatatccctctccatgtgaatgcagatctgtcatctttctctgtagatctgccgtcatttgggcgtgtcagagagtcgttacctgtcaagtatcacctacagaataagaccgacttagttcaagatgtagaaatttctgtggagcccagtgatgccttcatgttctcaggtctcaaacagattcgattacgtatcctccctggcacggagcaggaaatgctatataatttctatcctctgatggctggataccagcagctgccatctctcaacatcaacttgcttagatttcctaacttcacaaatcagctgctcaggcgttttatacctaccagtatttttgtcaagccacagggtcgactcatggatgatacctctattgctgctgcatgatgttcaagaccggcccttggctgttgttacagagatgttgggcagagctatgcaggtgtttcattgtgaactctagctttgatcatggtaaaaagttaaccttttctattttttaatggatgttataccaactattcagaggaactcatacttcaaaaatattaggaaaatctgtcttatagtttctctaataaatatctgaaatctcagtacgacatgaaagaatgtcagaccattgttattgttgaaagtcatttgatgaatggtaaattctatgaaaagtaagtgatttgcatgtataatatcaggaaaattaagcatcccaagtgtgactggacaaagagagcagatgcaccagtgcctgtgccataaagttccgaatcccccatgtgtctctttcagagctggccagaccggaaataaatcattctcataaattcagtgtgtactcagaacacatacacaacaacatagggagttgtatgactgatacggaaaacttccagaaagttttaatcaaagcagtttaattaaggtatcaaaaatatctttgcttactatcaagaagtgtcaaataggttcagcttgctgccaaaatatggatcatttatgaagcaggttcatattttagaggtgttaataaaatcctcatcggaaaagatccaaagtgcaaggatttgattataaacataatttcctagactgaaagtttttggaaaagatgcagggtctgagtcaggccttctggttatattgtgcagtttcaaaagaactatttaaaactcttgaaaactcatgtaaataaaaatcatagggtgaaaattgtatttgttaaaataccttaataatttaaaatgacctgatttcctggaaaattttattattcaaaaggtggaggcattgtaaaaaggaaatagtgatgtaaataaacatgttctctttcaagtaaaaaaaaaaa

SEQ ID NO: 549653 - DNA, 1329 bp, Homo sapiens
ggcagtagctgctggaacgcagggttgagagagaagtactgacagaagaggattcttcgggtggaagtgcagagtcagctggtgatggctacaggagagggcagctcccagcctgtgccgtggccatccccaggtgcaagtgaagaaagaaagaggtggggtgaaaggaggagaatcaccatatcaccatttttattttgatgcttacactcatttattctgtttttgtaaaacagtttcaagaatttaaaaatccttccagttaatagagcttttgttattatattataattttgtaaacccactttgtttttcccactttaaagccacagggtcgactcatggatgatacctctattgctgctgcatgatgttcaagaccggcccttggctgttgttacagagatgttgggcagagctatgcaggtgtttcattgtgaactctagctttgatcatggtaaaaagttaaccttttctattttttaatggatgttataccaactattcagaggaactcatacttcaaaaatattaggaaaatctgtcttatagtttctctaataaatatctgaaatctcagtacgacatgaaagaatgtcagaccattgttattgttgaaagtcatttgatgaatggtaaattctatgaaaagtaagtgatttgcatgtataatatcaggaaaattaagcatcccaagtgtgactggacaaagagagcagatgcaccagtgcctgtgccataaagttccgaatcccccatgtgtctctttcagagctggccagaccggaaataaatcattctcataaattcagtgtgtactcagaacacatacacaacaacatagggagttgtatgactgatacggaaaacttccagaaagttttaatcaaagcagtttaattaaggtatcaaaaatatctttgcttactatcaagaagtgtcaaataggttcagcttgctgccaaaatatggatcatttatgaagcaggttcatattttagaggtgttaataaaatcctcatcggaaaagatccaaagtgcaaggatttgattataaacataatttcctagactgaaagtttttggaaaagatgcagggtctgagtcaggccttctggttatattgtgcagtttcaaaagaactatttaaaactcttgaaaactcatgtaaataaaaatcatagggtgaaaattgtatttgttaaaataccttaataatttaaaatgacctgatttcctggaaaattttattattcaaaaggtggaggcattgtaaaaaggaaatagtgatgtaaataaacatgttctctttcaagtaaaaaaaaaaa

SEQ ID NO: 549654 - DNA, 3130 bp, Homo sapiens
agcggagaatgttgaagagtctgaaatgattatattaaataaaggtttcaaggagtgtacacatacaacgttcatatgaagatttatattaaatgagctgtctaaaatgagttgtgtctcatcttacgcaggttttgatctttctgatcctgaaaaagaaaaggtgggaattcttgccattcagctgaaggagagaaatgttgttcactctgagataatcataactcttctgagcaatgctgttgcacagttcaagaagtataagtgcccgcgaatgaaaagtcacctaatggttcagatgggagaggaatattattacgcaaaggattataccaaagctttgaagttgctggattatgtgatgtgtgattatcggagtgaaggatggtggactctgctcacttctgtattaactacagctctgaagtgctcctacctcatggcccaattaaaggattacattacttactccctagaactccttggtagagcttcaactctgaaagatgaccagaagtctcggatagaaaagaacctcataaatgttttaatgaatgaaagtcctgatccagaacccgactgtgatatcttagctgtgaaaactgctcagaagctgtgggcagaccgaatttctctggctggcagcaatattttcacaataggagtacaggactttgtgccatttgtgcagtgcaaagccaagtttcatgccccaagttttcatgttgatgttcctgttcagtttgatatttatctgaaggctgattgtccacatcccattaggttttccaagctctgtgtcagctttaataatcaggaatacaaccagttctgtgtaatagaagaagcatccaaagcaaatgaagttttagaaaatctgactcaaggaaagatgtgcctagttcctggcaaaacaagaaaactgttatttaagtttgttgcaaaaactgaagatgtgggaaagaaaattgagattacttcagtggatcttgctctgggcaatgagacgggaagatgtgtggttttaaattggcagggaggaggaggagatgctgcttcctcccaagaagccttacaggcagctcggtctttcaaaaggcgacctaagctacctgacaatgaagttcactgggacagcattataattcaggcaagcacaatgatcatatccagagtcccaaacatttctgtacatctgctacatgaaccccctgcactgactaatgaaatgtattgtttggttgtgactgttcagtcccatgaaaagacccaaatcagagatgtgaagctcactgctggcttaaaaccaggacaggatgccaatttaactcagaagactcacgtgactcttcatggaacagaactgtgtgatgaatcctacccggctttactcactgacattcctgttggagacttacatccaggggaacagctggaaaaaatgttgtatgttcgctgtggaacagtgggttccagaatgtttcttgtatatgtttcttacctgataaatacaaccgttgaagaaaaagaaattgtttgcaagtgtcacaaggatgaaactgtaacaattgaaacagtctttccatttgatgttgcggttaaatttgtttctaccaagtttgagcacctggaaagggtttatgctgacatcccctttctgttgatgacggacctcttaagtgcctcaccctgggccctcactattgtttccagtgagctccagcttgctccatccatgaccacagtggaccagctcgagtctcaagtggacaatgttatcttacagactggagagagtgctagtgaatgcttttgtcttcaatgcccatctcttggaaatattgaaggtggagtagcaaccgggcattatattatctcttggaaaaggacctcagcaatggagaatatccccatcatcacaactgtcatcactctgccgcacgtgattgtggagaatatccctctccatgtgaatgcagatctgccgtcatttgggcgtgtcagagagtcgttacctgtcaagtatcacctacagaataagaccgacttagttcaagatgtagaaatttctgtggagcccagtgatgccttcatgttctcaggtctcaaacagattcgattacgtatcctccctggcacggagcaggaaatgctatataatttctatcctctgatggctggataccagcagctgccatctctcaacatcaacttgcttagatttcctaacttcacaaatcagctgctcaggcgttttatacctaccagtatttttgtcaagccacagggtcgactcatggatgatacctctattgctgctgcatgatgttcaagaccggcccttggctgttgttacagagatgttgggcagagctatgcaggtgtttcattgtgaactctagctttgatcatggtaaaaagttaaccttttctattttttaatggatgttataccaactattcagaggaactcatacttcaaaaatattaggaaaatctgtcttatagtttctctaataaatatctgaaatctcagtacgacatgaaagaatgtcagaccattgttattgttgaaagtcatttgatgaatggtaaattctatgaaaagtaagtgatttgcatgtataatatcaggaaaattaagcatcccaagtatgactgatacggaaaacttccagaaagttttaatcaaagcagtttaattaaggtatcaaaaatatctttgcttactatcaagaagtgtcaaataggttcagcttgctgccaaaatatggatcatttatgaagcaggttcatattttagaggtgttaataaaatcctcatcggaaaagatccaaagtgcaaggatttgattataaacataatttcctagactgaaagtttttggaaaagatgcagggtctgagtcaggccttctggttatattgtgcagtttcaaaagaactatttaaaactcttgaaaactcatgtaaataaaaatcatagggtgaaaattgtatttgttaaaataccttaataatttaaaatgacctgatttcctggaaaattttattattcaaaaggtggaggcattgtaaaaaggaaatagtgatgtaaataaacatgttctctttcaagtaaaaaaaaaaa

SEQ ID NO: 549655 - DNA, 586 bp, Homo sapiens
agggaatcttaccattaatagatatgttgtctagcctgagctgtataccaattcttatgggggacaagggtaaaatgacagactttttagttaaagtgaagaaaagcatctttcagtccatagttaaactcctaccataatgcaacaagtgagctggcatacatggacagcttcagttgtgactgggtacacgtttaaaaacttattactgcaggtattataatcatagtgcactgccatgtcagtctgtcatgtctacagcggcgtacgcttaaataatagaccgtaggcgctccagtaaacacagatactggtctttatacaaattagttctgccagtcagaagcaatgtgtatgtaaagatgggcagcgctaatttactatactattacataaagaagtttagggtcatcaccacagcctatgttggacccaggattaggatcttgttgtattcgtctcagtcactgtcatcatgttgtataactctaacctacgtttcctacggatgagacctgtctcaatctaaaaattcgtgtgtcctgcacccagctcttaaaaggcctggtgtgctaatgcatcctag

SEQ ID NO: 549656 - DNA, 2534 bp, Homo sapiens
agcggagaatgttgaagagtctgaaatgattatattaaataaaggtttcaaggagtgtacacatacaacgttcatatgaagatttatattaaatgagctgtctaaaatgagttgtgtctcatcttacgcaggttttgatctttctgatcctgaaaaagaaaaggtgggaattcttgccattcagctgaaggagagaaatgttgttcactctgagataatcataactcttctgagcaatgctgttgcacagttcaagaagtataagtgcccgcgaatgaaaagtcacctaatggttcagatgggagaggaatattattacgcaaaggattataccaaagctttgaagttgctggattatgtgatgtgtgattatcggagtgaaggatggtggactctgctcacttctgtattaactacagctctgaagtgctcctacctcatggcccaattaaaggattacattacttactccctagaactccttggtagagcttcaactctgaaagatgaccagaagtctcggatagaaaagaacctcataaatgttttaatgaatgaaagtcctgatccagaacccgactgtgatatcttagctgtgaaaactgctcagaagctgtgggcagaccgaatttctctggctggcagcaatattttcacaataggagtacaggactttgtgccatttgtgcagtgcaaagccaagtttcatgccccaagttttcatgttgatgttcctgttcagtttgatatttatctgaaggctgattgtccacatcccattaggttttccaagctctgtgtcagctttaataatcaggaatacaaccagttctgtgtaatagaagaagcatccaaagcaaatgaagttttagaaaatctgactcaaggaaagatgtgcctagttcctggcaaaacaagaaaactgttatttaagtttgttgcaaaaactgaagatgtgggaaagaaaattgagattacttcagtggatcttgctctgggcaatgagacgggaagatgtgtggttttaaattggcagggaggaggaggagatgctgcttcctcccaagaagccttacaggcagctcggtctttcaaaaggcgacctaagctacctgacaatgaagttcactgggacagcattataattcaggcaagcacaatgatcatatccagagtcccaaacatttctgtacatctgctacatgaaccccctgcactgactaatgaaatgtattgtttggttgtgactgttcagtcccatgaaaagacccaaatcagagatgtgaagctcactgctggcttaaaaccaggacaggatgccaatttaactcagaagactcacgtgactcttcatggaacagaactgtgtgatgaatcctacccggctttactcactgacattcctgttggagacttacatccaggggaacagctggaaaaaatgttgtatgttcgctgtggaacagtgggttccagaatgtttcttgtatatgtttcttacctgataaatacaaccgttgaagaaaaagaaattgtttgcaagtgtcacaaggatgaaactgtaacaattgaaacagtctttccatttgatgttgcggttaaatttgtttctaccaagtttgagcacctggaaagggtttatgctgacatcccctttctgttgatgacggacctcttaagtgcctcaccctgggccctcactattgtttccagtgagctccagcttgctccatccatgaccacagtggaccagctcgagtctcaagtggacaatgttatcttacagactggagagagtgctagtgaatgcttttgtcttcaatgcccatctcttggaaatattgaaggtggagtagcaaccgggcattatattatctcttggaaaaggacctcagcaatggagaatatccccatcatcacaactgtcatcactctgccgcacgtgattgtggagaatatccctctccatgtgaatgcagatctgccgtcatttgggcgtgtcagagagtcgttacctgtcaagtatcacctacagaataagaccgacttagttcaagatgtagaaatttctgtggagcccagtgatgccttcatgttctcaggtctcaaacagattcgattacgtatcctccctggcacggagcaggaaatgctatataatttctatcctctgatggctggataccagcagctgccatctctcaacatcaacttgcttagatttcctaacttcacaaatcagctgctcaggcgttttatacctaccagtatttttgtcaagccacagggtcgactcatggatgatacctctattgctgctgcatgatgttcaagaccggcccttggctgttgttacagagatgttgggcagagctatgcaggtgtttcattgtgaactctagctttgatcatggtaaaaagttaaccttttctattttttaatggatgttataccaactattcagaggaactcatacttcaaaaatattaggaaaatctgtcttatagtttctctaataaatatctgaaatctc

SEQ ID NO: 549657 - DNA, 500 bp, Homo sapiens
tattttgccactgcgagaagatttattgaaagcttaggatgtcattctacatagaagtgagggtatgtgacagtcatgacagtaaagtcctttcaaacaaatactactggtatactagaggtaggtttgtgatcgatgattcctggtgagaatttaaggatagacctcttatttgtttgagatagatggatagatagatagatagatagacagacagacagacagagttggatatatgtgagaggatttttactgaatacctaccatgtgccagaaacaggactagaactttagaaggacacaaagtctaacatgggcccttttccccaagagctcctaacatcagtgagaggccagatgtcttttcagtaaggctgaaatatatatgatgtgctttctaattatacatgttaaacaccattaggtatttgccaatgaataggttgtaaattataagacttcgctattgaaagaaaggagtaatcatctgggaagggaag

SEQ ID NO: 549658 - DNA, 444 bp, Homo sapiens
gtctctagagatccccacgtgcgggcgtagtctgcctgcctgttagcctccatgtctgcttttctgttcctcttggcctctagtgttcctgccttttgatgcctttgcagtgcatatcagccactttctttggggcctatacagcatctaacgagctgtaggagttcttcctcgtactttatttctttgcccccagcagtttagggtcctctttccttatatatagctccgtgaacatgcaatgtggcccaggcttatttggagtcagtataaacattgactttggttgtcttttgctagctcaagggctcttgtcagggctattaggtctgctttctgggctgatgttctgtgggcagaaactgagcctctaccactgagtccaatgttactactgcatacccggcctgccggatcccttccaataccatattgcttccatct

SEQ ID NO: 549659 - DNA, 451 bp, Homo sapiens
  misc_feature (31)..(31): n is a, c, g, or t
aagtgaaataactggtttttactgtggctantttgcccactttggttattaattattattagtttttcccattttatttttattcagtttcattgttttcaagtttatcccaatttataaagggcttttttccctttataaattacagggagaaaatgagaacccctgtgcatggctggtgggaatgtgaaatggtgtagccactatggaaaacagtatggcagttcctcagacattaaacacagagttagcatgtgatctgcagttccacctctgcgtatatacccaaaagaactcgaaagcgagggacacgaacagatatttgcatacctgtgttcacagcagcattattcaccatggggaaaagggggaagcaacccaaatgttcattgacagatgaatagatcaagcaacgtgagatgtctatataaccagaatattatttaacctc

SEQ ID NO: 549660 - DNA, 1016 bp, Homo sapiens
  misc_feature (799)..(799): n is a, c, g, or t
  misc_feature (822)..(822): n is a, c, g, or t
ggcagtagcagaacacctgctctcatgaacttcatgatgacaggctcttgggtgacaattggtgcgacctttgcagccatgattggagctggaatgcttgtacactcaatatcatatgagcagacccaggcccaaagcatctggcttggatgctgcattctggtgtgatgggtgcagttgtggctcctctgacgatcttaggggggcctcttctcctgagagccgcatggtacaccgctggtattgtgggaggcctctctactgtggccatgtgtgcgcctagtgagaagtttctgaacatgggagcacccctgggagtgggcctgggtcttgtctttgcgtcttctctggggtctatgtttcttccccctacctctgtggctggtgccactctgtactcagtggcaatgtatggtggattagttcttttcagcatgttccttctgtatgatactcagaaagtaatcaaacgtgcagaaataacacccatgtatggagctcaaaagtatgatcccatcaattcgatgttgacaatctacatggatacattaaatatatttatgcgagttgcaactatgctagcaactggaagcaacagaaagaaatgaagtaaccgcttgtgatgtctccgctcactgatgtcttgcttgtttaataggagcagatagtcattacagtttgcatcagcagaattccttgaggtttagaagatagcctgtcaccatgtttaaaatgtgcagtaatgcgacccttcaggcatgcctttcttttagaaaataaatgcaatagatgtcttccnaatatattttcatctcttatgcnttctactttaaaactgcttgatgaatgtgtgaaccaactatattttagaagattgcaagtatgggtatgtttgggtaaggtaagctttagcaaatgggtggcttcatttgtgggagccggcgaatattccggggctctgggtgcagttgtatagggtcaaaaataaggctgaacagtgaggccgaaccggtggg

SEQ ID NO: 549661 - DNA, 474 bp, Homo sapiens
  misc_feature (90)..(90): n is a, c, g, or t
  misc_feature (140)..(140): n is a, c, g, or t
  misc_feature (196)..(198): n is a, c, g, or t
tgggctcattgtgaccactggcctctctacagccaccctgtggcctgttcaaggcagaacccacgacccttgactccccgggtggggagnttgccaaggatgctggagctgaatcagacgctgacgggtctggcgggcgnttggtgttttcacaatcgaattgaacacattggccaaataaggttgaaattttaannnaaaaaaaaaaaaactcgagactagcaaggtgctgggattacaggaatgagccactgtgcgcagcccaataccccactttcaataaattattaatagaacaactagacagaggatcaataaggaaatacaggacttgaacaacactgtagaccaactggacctaacagacatacacaaacactccacccaacagcagagtacacattcttctcaaatacacatggaacattcattctccagaatagactgtctccagagaggtcataaaacaagtct

SEQ ID NO: 549662 - DNA, 395 bp, Homo sapiens
  misc_feature (167)..(167): n is a, c, g, or t
  misc_feature (175)..(175): n is a, c, g, or t
  misc_feature (186)..(186): n is a, c, g, or t
  misc_feature (192)..(192): n is a, c, g, or t
  misc_feature (219)..(219): n is a, c, g, or t
  misc_feature (222)..(222): n is a, c, g, or t
  misc_feature (257)..(257): n is a, c, g, or t
  misc_feature (261)..(261): n is a, c, g, or t
  misc_feature (288)..(288): n is a, c, g, or t
ggtagtggtgatcttcaggaaatgacacctgtatacattagattataatatgggtaggttaaaaaaaaaaaatcaagactcactccagctcccagtcagagcggtaggggttttaaactggttttcaaaggggaaatcctttcttcaaatgttatcttcctgggaangctaacangtgaaacagtnggacanggagctgcacagccagggggagtaggnggngcgggtacatcctcctctaatagcgcatacggggncggngtacccagctcccacccaccatacacngaagcaacagaggcacctccacaaaaggtaattggaaaaccaacagctgggccgggcacaggggctcacaccggtaatcctagcatggtggaaggccgaggcaggcg

SEQ ID NO: 549663 - DNA, 126 bp, Homo sapiens
  misc_feature (2)..(2): n is a, c, g, or t
cncctctttataaccccacatttttagtcatcaaatctcatttccacggctggggtgcagtggctcatgcttgtaatcccagtactttgggaagccaaagcaggagttattgcttgagcccaggag

SEQ ID NO: 549664 - DNA, 3740 bp, Homo sapiens
  misc_feature (33)..(33): n is a, c, g, or t
  misc_feature (3018)..(3018): n is a, c, g, or t
  misc_feature (3569)..(3569): n is a, c, g, or t
  misc_feature (3585)..(3585): n is a, c, g, or t
  misc_feature (3696)..(3696): n is a, c, g, or t
  misc_feature (3725)..(3725): n is a, c, g, or t
tcgactctgtctccaaaaaaaaaaaaaaaaaanttttttttttagatcatcagctattgttagtgttagtgtatgttatgtgtggctcaagacaactttgtttcttttaatataggcagggaagtcaaaagattggatatccctgctttataccaagaaagacaacaccccacatttgcaatgcctaaaaacactaccagccatctgaaaaacatgagacttctaacttctgttcttttttgtagcagtggaatcccacggtgatatctgagggatgtggttaccttttggaggaggttgacggtttctaaggatgattctttctgagtgaaatattgtcagtgtcattgaccttttcattatttcaactattattattccaggttatcaatactctggctgaccatcatcatcgtgggactgactttggtggaagtccttggttacatgtcattattgcgtttccgacaagttataaagttgtcattaccctctggatagtttacctttgggtgtctctcctgaagactatcttctggtctcgaaatggacatgatggatccacggatgtacagcagagagcctggaggtccaaccgccgtagacaggaagggctgaggtccatttgtatgcacacaaagaaaagagtttcttcctttcgaggaaataaaattggcctgaaagacgtcattactctacggagacatgtggaaacaaaagttagagctaaaatccgtaagaggaaggtgacaacgaaaatcaaccatcatgacaaaatcaatggaaagaggaagaccgccaaagaacatctgaggaaactaagcatgaaagaacgtgagcacggagaaaaggagaggcaggtgtcagaggcagaggaaaatgggaaattggatatgaaagaaatacacacctacatggaaatgtttcaacgtgcgcaagcgttgcggcggcgggcagaggactactacagatgcaaaatcaccccttctgcaagaaagcctctttgcaaccgtgggtaagtttgcttgttttccttgcttttggacatagtctgccaggtcaggacatggatacatttttctccctacggctctgtgctcaagccctgcagagggagatggcagagaggaaggctgcctacaagcatcacagtcccatccctgttgggacaattccaaatgagggccttaaatgatgctcagctaagctggttcttgtgtggcctctgtaccttcaaaagctgccgagtcctatgattacacgcgatgggacttgtacacttgaagtgaaacacagttttaaaacttgctttgtttagaattcccacctcatttttccatggacaaaagtattctttatgtcctagtgcacttacaatttggtattacctgggagtgaaaagaaatattacagccatgcctaactgacttcttgaggtaagattgttctgtcagaaaaccctctcccagttcccctgcagctcttcaggaatccacatctctccagagctctttgttctcatgggtggcacctccagagtgaagaagatcctttgtcaagaagggaaacagaggggaaatgagagggtcctgcaggcagagctggaatcaacttccactctgcctcttgcaagctgtgtgaccctgggcacaatttctccttcctctggaaacctctgttttcttagatttggagcagggtggtcacactgaccttgcagagttctgagaatcagagacagaacataaaaggcctggaaaacattctccaaaaagaagctgcaacatgtgtggacaatgggcttttcatgcctctcttactgtctcttactgtctattgacctggtgcaagaaacatgctctggtgatggctgtgagggaggaatgaggatagacatagacactcctgtgtctcaaacatgcttctttattactctgttatgactctgtcttccctggggcaggaccccagcctgcctacatttgcagacagacacagtggcatgtggagacaacagtgtgtcccaatgacttttctttaccccctagctgtcggcagtactcagtggaagggtgatattatgacactgacactgctattttgaaacctggaggatggaaaggtgcaaaaatctatcaccagcaacagaggtcagaatggcggcagcggagcatcgtcattcttcaggattgccctactggccctacctcacagctgaaactttaaaaaacaggatgggccaccagccacctcctccaactcaacaacattctataactgataactccctgagcctcaagacacctcccgagtgtctgctcgcttccaccctcagcggatgataatctcaagacaccttccgagcgtcagctcactccccttccaccctcagctccaccctcagcagatgataatatcaagacacctgccgagcgtctgcgggggccgcttccaccctcagcggatgataatctcaagacaccttccgagcgtcagctcactccccttccaccctcagctccaccctcagcagatgataatatcaagacacctgccgagcgtctgcagctgcgggggccgcttccaccctcagcggatgataatctcaagacaccttccgagcgtcagctcactccccttccaccctcagctccaccctcagcagatgataatatcaagacacctgccgagcgtctgcgggggccgcttccaccctcagcggatgataatctcaagacaccttccgagcgtcagctcactccccttccaccctcagctccaccctcagcagatgataatatcaagacacctgccgagcgtctgcgggggccgcttccaccctcagcggatgataatctcaagacaccttccgagcgtcagctcactccccttccaccctcagctccaccctcagcagatgataatatcaagacacctgccgagcgtctgcggggggccgcttccaccctcagcggatgataatctcaagacaccttccgagtgtgtgctcactccccntccaccctcagcctcccgagtagctgggattacaggtgcctgccaccacgcctggctaattttttgtatttttagtagagaaggggtttcaccatattagccacaatggtctcaatctcctgacctcgtgatccatccgccccgccctcccagagtgctgggattacaggcgtcagccaccgtgaccggctcagactgtactcttctagccatctgaaatacgttttctaggtagagatagattgtgtaagggtacagttgtgaggataacagaaacatggcagattatttaaaatcatcctgaaagtggtgctttatctgatgaaagtgattgtaatccataggaaaatgtttcaacgtgcgcaagagttgcggcggcgagcagaggactaccacaaatgcaaagtaaggagcttcctccctgcagttgcaggatagttcagtgctgatgcagatgatgccacggcccttagactctctcaacattcaatttctcatgtgttggctttttcagatccccccttctgcaagaaaggctctttgcaactggntcagaatggcggcagnggagcatcgtcattcttcaggattgccctactggccctacctcacagctgaaactttaaaaaacaggatgggcctccagccacctcctccaactcaacaacattctataantgataactccctgagcctcaagacacctnccgagtgtgtgctca

SEQ ID NO: 549665 - DNA, 250 bp, Homo sapiens
cagtgattaacctggaacactacacgagagttgatcctaaggcatatactaaacccagtgttggtcagtatacagtgccagccagctgcggtcacacgattaacccaagtcaatagaagccgtcgtaagagtgtaacagatcaccccctccccaataaagctaaaatcacctgagttgtaaaaaactccagtagactcaaaatagactacgaaagtggctttaacaaatctgaacacaacaatagctaaa

SEQ ID NO: 549666 - DNA, 3553 bp, Homo sapiens
  misc_feature (33)..(33): n is a, c, g, or t
  misc_feature (2831)..(2831): n is a, c, g, or t
  misc_feature (3382)..(3382): n is a, c, g, or t
  misc_feature (3398)..(3398): n is a, c, g, or t
  misc_feature (3509)..(3509): n is a, c, g, or t
  misc_feature (3538)..(3538): n is a, c, g, or t
tcgactctgtctccaaaaaaaaaaaaaaaaaanttttttttttagatcatcagctattgttagtgttagtgtatgttatgtgtggctcaagacaactttgtttcttttaatataggcagggaagtcaaaagattggatatccctgctttataccaagaaagacaacaccccacatttgcaatgcctaaaaacactaccagccatctgaaaaacatgagacttctaacttctgttcttttttgtagcagtggaatcccacggtgatatctgagggatgtggttaccttttggaggaggttgacggtttctaaggatgattctttctgagtgaaatattgtcagtgtcattgaccttttcattatttcaactattattattccaggttatcaatactctggctgaccatcatcatcgtgggactgactttggtggaagtccttggttacatgtcattattgcgtttccgacaagttataaagttgtcattaccctctggatagtttacctttgggtgtctctcctgaagactatcttctggtctcgaaatggacatgatggatccacggatgtacagcagagagcctggaggtccaaccgccgtagacaggaagggctgaggtccatttgtatgcacacaaagaaaagagtttcttcctttcgaggaaataaaattggcctgaaagacgtcattactctacggagacatgtggaaacaaaagttagagctaaaatccgtaagaggaaggtgacaacgaaaatcaaccatcatgacaaaatcaatggaaagaggaagaccgccaaagaacatctgaggaaactaagcatgaaagaacgtgagcacggagaaaaggagaggcaggtgtcagaggcagaggaaaatgggaaattggatatgaaagaaatacacacctacatggaaatgtttcaacgtgcgcaagcgttgcggcggcgggcagaggactactacagatgcaaaatcaccccttctgcaagaaagcctctttgcaaccgtgggtaagtttgcttgttttccttgcttttggacatagtctgccaggtcaggacatggatacatttttctccctacggctctgtgctcaagccctgcagagggagatggcagagaggaaggctgcctacaagcatcacagtcccatccctgttgggacaattccaaatgagggccttaaatgatgctcagctaagctggttcttgtgtggcctctgtaccttcaaaagctgccgagtcctatgattacacgcgatgggacttgtacacttgaagtgaaacacagttttaaaacttgctttgtttagaattcccacctcatttttccatggacaaaagtattctttatgtcctagtgcacttacaatttggtattacctgggagtgaaaagaaatattacagccatgcctaactgacttcttgaggtaagattgttctgtcagaaaaccctctcccagttcccctgcagctcttcaggaatccacatctctccagagctctttgttctcatgggtggcacctccagagtgaagaagatcctttgtcaagaagggaaacagaggggaaatgagagggtcctgcaggcagagctggaatcaacttccactctgcctcttgcaagctgtgtgaccctgggcacaatttctccttcctctggaaacctctgttttcttagatttggagcagggtggtcacactgaccttgcagagttctgagaatcagagacagaacataaaaggcctggaaaacattctccaaaaagaagctgcaacatgtgtggacaatgggcttttcatgcctctcttactgtctcttactgtctattgacctggtgcaagaaacatgctctggtgatggctgtgagggaggaatgaggatagacatagacactcctgtgtctcaaacatgcttctttattactctgttatgactctgtcttccctggggcaggaccccagcctgcctacatttgcagacagacacagtggcatgtggagacaacagtgtgtcccaatgacttttctttaccccctagctgtcggcagtactcagtggaagggtgatattatgacactgacactgctattttgaaacctggaggatggaaaggtgcaaaaatctatcaccagcaacagaaggtgcagactgtgttggtggcggtaattttgtccatcaaatgaatatgtgtgaaaacattccctcctttggccctacggtcagaatggcggcagcggagcatcgtcattcttcaggattgccctactggccctacctcacagctgaaactttaaaaaacaggatgggccaccagccacctcctccaactcaacaacattctataactgataactccctgagcctcaagacacctcccgagtgtctgctcactccccttccaccctcagcggatgataatctcaagacacctcccgagtgtctgctcactccccttccaccctcagcagatgataatatcaagacacctgccgagcgtctgcgggggccgcttccaccctcagcggatgataatctcaagacaccttccgagcgtcagctcactccccttccaccctcagctccaccctcagcagatgataatatcaagacacctgccgagcgtctgcgggggccgcttccaccctcagcggatgataatctcaagacaccttccgagcgtcagctcactccccttccaccctcagctccaccctcagcagatgataatatcaagacacctgccgagcgtctgcggggggccgcttccaccctcagcggatgataatctcaagacaccttccgagtgtgtgctcactccccntccaccctcagcctcccgagtagctgggattacaggtgcctgccaccacgcctggctaattttttgtatttttagtagagaaggggtttcaccatattagccacaatggtctcaatctcctgacctcgtgatccatccgccccgccctcccagagtgctgggattacaggcgtcagccaccgtgaccggctcagactgtactcttctagccatctgaaatacgttttctaggtagagatagattgtgtaagggtacagttgtgaggataacagaaacatggcagattatttaaaatcatcctgaaagtggtgctttatctgatgaaagtgattgtaatccataggaaaatgtttcaacgtgcgcaagagttgcggcggcgagcagaggactaccacaaatgcaaagtaaggagcttcctccctgcagttgcaggatagttcagtgctgatgcagatgatgccacggcccttagactctctcaacattcaatttctcatgtgttggctttttcagatccccccttctgcaagaaaggctctttgcaactggntcagaatggcggcagnggagcatcgtcattcttcaggattgccctactggccctacctcacagctgaaactttaaaaaacaggatgggcctccagccacctcctccaactcaacaacattctataantgataactccctgagcctcaagacacctnccgagtgtgtgctca

SEQ ID NO: 549667 - DNA, 3475 bp, Homo sapiens
  misc_feature (33)..(33): n is a, c, g, or t
  misc_feature (2753)..(2753): n is a, c, g, or t
  misc_feature (3304)..(3304): n is a, c, g, or t
  misc_feature (3320)..(3320): n is a, c, g, or t
  misc_feature (3431)..(3431): n is a, c, g, or t
  misc_feature (3460)..(3460): n is a, c, g, or t
tcgactctgtctccaaaaaaaaaaaaaaaaaanttttttttttagatcatcagctattgttagtgttagtgtatgttatgtgtggctcaagacaactttgtttcttttaatataggcagggaagtcaaaagattggatatccctgctttataccaagaaagacaacaccccacatttgcaatgcctaaaaacactaccagccatctgaaaaacatgagacttctaacttctgttcttttttgtagcagtggaatcccacggtgatatctgagggatgtggttaccttttggaggaggttgacggtttctaaggatgattctttctgagtgaaatattgtcagtgtcattgaccttttcattatttcaactattattattccaggttatcaatactctggctgaccatcatcatcgtgggactgactttggtggaagtccttggttacatgtcattattgcgtttccgacaagttataaagttgtcattaccctctggatagtttacctttgggtgtctctcctgaagactatcttctggtctcgaaatggacatgatggatccacggatgtacagcagagagcctggaggtccaaccgccgtagacaggaagggctgaggtccatttgtatgcacacaaagaaaagagtttcttcctttcgaggaaataaaattggcctgaaagacgtcattactctacggagacatgtggaaacaaaagttagagctaaaatccgtaagaggaaggtgacaacgaaaatcaaccatcatgacaaaatcaatggaaagaggaagaccgccaaagaacatctgaggaaactaagcatgaaagaacgtgagcacggagaaaaggagaggcaggtgtcagaggcagaggaaaatgggaaattggatatgaaagaaatacacacctacatggaaatgtttcaacgtgcgcaagcgttgcggcggcgggcagaggactactacagatgcaaaatcaccccttctgcaagaaagcctctttgcaaccgtgggtaagtttgcttgttttccttgcttttggacatagtctgccaggtcaggacatggatacatttttctccctacggctctgtgctcaagccctgcagagggagatggcagagaggaaggctgcctacaagcatcacagtcccatccctgttgggacaattccaaatgagggccttaaatgatgctcagctaagctggttcttgtgtggcctctgtaccttcaaaagctgccgagtcctatgattacacgcgatgggacttgtacacttgaagtgaaacacagttttaaaacttgctttgtttagaattcccacctcatttttccatggacaaaagtattctttatgtcctagtgcacttacaatttggtattacctgggagtgaaaagaaatattacagccatgcctaactgacttcttgaggtaagattgttctgtcagaaaaccctctcccagttcccctgcagctcttcaggaatccacatctctccagagctctttgttctcatgggtggcacctccagagtgaagaagatcctttgtcaagaagggaaacagaggggaaatgagagggtcctgcaggcagagctggaatcaacttccactctgcctcttgcaagctgtgtgaccctgggcacaatttctccttcctctggaaacctctgttttcttagatttggagcagggtggtcacactgaccttgcagagttctgagaatcagagacagaacataaaaggcctggaaaacattctccaaaaagaagctgcaacatgtgtggacaatgggcttttcatgcctctcttactgtctcttactgtctattgacctggtgcaagaaacatgctctggtgatggctgtgagggaggaatgaggatagacatagacactcctgtgtctcaaacatgcttctttattactctgttatgactctgtcttccctggggcaggaccccagcctgcctacatttgcagacagacacagtggcatgtggagacaacagtgtgtcccaatgacttttctttaccccctagctgtcggcagtactcagtggaagggtgatattatgacactgacactgctattttgaaacctggaggatggaaaggtgcaaaaatctatcaccagcaacagaggtcagaatggcggcagcggagcatcgtcattcttcaggattgccctactggccctacctcacagctgaaactttaaaaaacaggatgggccaccagccacctcctccaactcaacaacattctataactgataactccctgagcctcaagacacctcccgagtgtctgctcactccccttccaccctcagcggatgataatctcaagacacctcccgagtgtctgctcactccccttccaccctcagcagatgataatatcaagacacctgccgagcgtctgcgggggccgcttccaccctcagcggatgataatctcaagacaccttccgagcgtcagctcactccccttccaccctcagctccaccctcagcagatgataatatcaagacacctgccgagcgtctgcgggggccgcttccaccctcagcggatgataatctcaagacaccttccgagcgtcagctcactccccttccaccctcagctccaccctcagcagatgataatatcaagacacctgccgagcgtctgcggggggccgcttccaccctcagcggatgataatctcaagacaccttccgagtgtgtgctcactccccntccaccctcagcctcccgagtagctgggattacaggtgcctgccaccacgcctggctaattttttgtatttttagtagagaaggggtttcaccatattagccacaatggtctcaatctcctgacctcgtgatccatccgccccgccctcccagagtgctgggattacaggcgtcagccaccgtgaccggctcagactgtactcttctagccatctgaaatacgttttctaggtagagatagattgtgtaagggtacagttgtgaggataacagaaacatggcagattatttaaaatcatcctgaaagtggtgctttatctgatgaaagtgattgtaatccataggaaaatgtttcaacgtgcgcaagagttgcggcggcgagcagaggactaccacaaatgcaaagtaaggagcttcctccctgcagttgcaggatagttcagtgctgatgcagatgatgccacggcccttagactctctcaacattcaatttctcatgtgttggctttttcagatccccccttctgcaagaaaggctctttgcaactggntcagaatggcggcagnggagcatcgtcattcttcaggattgccctactggccctacctcacagctgaaactttaaaaaacaggatgggcctccagccacctcctccaactcaacaacattctataantgataactccctgagcctcaagacacctnccgagtgtgtgctca

SEQ ID NO: 549668 - DNA, 4128 bp, Homo sapiens
  misc_feature (33)..(33): n is a, c, g, or t
  misc_feature (3406)..(3406): n is a, c, g, or t
  misc_feature (3957)..(3957): n is a, c, g, or t
  misc_feature (3973)..(3973): n is a, c, g, or t
  misc_feature (4084)..(4084): n is a, c, g, or t
  misc_feature (4113)..(4113): n is a, c, g, or t
tcgactctgtctccaaaaaaaaaaaaaaaaaanttttttttttagatcatcagctattgttagtgttagtgtatgttatgtgtggctcaagacaactttgtttcttttaatataggcagggaagtcaaaagattggatatccctgctttataccaagaaagacaacaccccacatttgcaatgcctaaaaacactaccagccatctgaaaaacatgagacttctaacttctgttcttttttgtagcagtggaatcccacggtgatatctgagggatgtggttaccttttggaggaggttgacggtttctaaggatgattctttctgagtgaaatattgtcagtgtcattgaccttttcattatttcaactattattattccaggttatcaatactctggctgaccatcatcatcgtgggactgactttggtggaagtccttggttacatgtcattattgcgtttccgacaagttataaagttgtcattaccctctggatagtttacctttgggtgtctctcctgaagactatcttctggtctcgaaatggacatgatggatccacggatgtacagcagagagcctggaggtccaaccgccgtagacaggaagggctgaggtccatttgtatgcacacaaagaaaagagtttcttcctttcgaggaaataaaattggcctgaaagacgtcattactctacggagacatgtggaaacaaaagttagagctaaaatccgtaagaggaaggtgacaacgaaaatcaaccatcatgacaaaatcaatggaaagaggaagaccgccaaagaacatctgaggaaactaagcatgaaagaacgtgagcacggagaaaaggagaggcaggtgtcagaggcagaggaaaatgggaaattggatatgaaagaaatacacacctacatggaaatgtttcaacgtgcgcaagcgttgcggcggcgggcagaggactactacagatgcaaaatcaccccttctgcaagaaagcctctttgcaaccgtgggtaagtttgcttgttttccttgcttttggacatagtctgccaggtcaggacatggatacatttttctccctacggctctgtgctcaagccctgcagagggagatggcagagaggaaggctgcctacaagcatcacagtcccatccctgttgggacaattccaaatgagggccttaaatgatgctcagctaagctggttcttgtgtggcctctgtaccttcaaaagctgccgagtcctatgattacacgcgatgggacttgtacacttgaagtgaaacacagttttaaaacttgctttgtttagaattcccacctcatttttccatggacaaaagtattctttatgtcctagtgcacttacaatttggtattacctgggagtgaaaagaaatattacagccatgcctaactgacttcttgaggtaagattgttctgtcagaaaaccctctcccagttcccctgcagctcttcaggaatccacatctctccagagctctttgttctcatgggtggcacctccagagtgaagaagatcctttgtcaagaagggaaacagaggggaaatgagagggtcctgcaggcagagctggaatcaacttccactctgcctcttgcaagctgtgtgaccctgggcacaatttctccttcctctggaaacctctgttttcttagatttggagcagggtggtcacactgaccttgcagagttctgagaatcagagacagaacataaaaggcctggaaaacattctccaaaaagaagctgcaacatgtgtggacaatgggcttttcatgcctctcttactgtctcttactgtctattgacctggtgcaagaaacatgctctggtgatggctgtgagggaggaatgaggatagacatagacactcctgtgtctcaaacatgcttctttattactctgttatgactctgtcttccctggggcaggaccccagcctgcctacatttgcagacagacacagtggcatgtggagacaacagtgtgtcccaatgacttttctttaccccctagctgtcggcagtactcagtggaagggtgatattatgacactgacactgctattttgaaacctggaggatggaaaggtgcaaaaatctatcaccagcaacagaaggtgcagactgtgttggtggcggtaattttgtccatcaaatgaatatgtgtgaaaacattccctcctttggccctacggtcagaatggcggcagcggagcatcgtcattcttcaggattgccctactggccctacctcacagctgaaactttaaaaaacaggatgggccaccagccacctcctccaactcaacaacattctataactgataactccctgagcctcaagacacctcccgagtgtctgctcgcttccaccctcagcggatgataatctcaagacaccttccgagcgtcagctcactccccttccaccctcagctccaccctcagcagatgataatatcaagacacctgccgagcgtctgcgggggccgcttccaccctcagcggatgataatctcaagacaccttccgagcgtcagctcactccccttccaccctcagctccaccctcagcagatgataatatcaagacacctgccgagcgtctgcagctgcgggggccgcttccaccctcagcggatgataatctcaagacaccttccgagcgtcagctcactccccttccaccctcagctccaccctcagcagatgataatatcaagacacctgccgagcgtctgcgggggccgcttccaccctcagcggatgataatctcaagacaccttccgagcgtcagctcactccccttccaccctcagctccaccctcagcagatgataatatcaagacacctgccgagcgtctgcgggggccgcttccaccctcagcggatgataatctcaagacaccttccgagcgtcagctcactccccttccacccttccaccctcagcagatgataatatcaagacacctgccgagcgtctgcgggggccgcttccaccctcagcggatgataatctcaagacaccttccgagcgtcagctcactccccttccaccctcagctccaccctcagcagatgataatatcaagacacctgccgagcgtctgcgggggccgcttccaccctcagcggatgataatctcaagacaccttccgagcgtcagctcactccccttccaccctcagctccaccctcagcagatgataatatcaagacacctgccgagcgtctgcgggggccgactccccttccaccctcagcggatgataatctcaagacacctcccgagtgtgtgctcactccccttccaccctcagcggatgataatctcaagacaccttccgagtgtgtgctcactccccntccaccctcagcctcccgagtagctgggattacaggtgcctgccaccacgcctggctaattttttgtatttttagtagagaaggggtttcaccatattagccacaatggtctcaatctcctgacctcgtgatccatccgccccgccctcccagagtgctgggattacaggcgtcagccaccgtgaccggctcagactgtactcttctagccatctgaaatacgttttctaggtagagatagattgtgtaagggtacagttgtgaggataacagaaacatggcagattatttaaaatcatcctgaaagtggtgctttatctgatgaaagtgattgtaatccataggaaaatgtttcaacgtgcgcaagagttgcggcggcgagcagaggactaccacaaatgcaaagtaaggagcttcctccctgcagttgcaggatagttcagtgctgatgcagatgatgccacggcccttagactctctcaacattcaatttctcatgtgttggctttttcagatccccccttctgcaagaaaggctctttgcaactggntcagaatggcggcagnggagcatcgtcattcttcaggattgccctactggccctacctcacagctgaaactttaaaaaacaggatgggcctccagccacctcctccaactcaacaacattctataantgataactccctgagcctcaagacacctnccgagtgtgtgctca

SEQ ID NO: 549669 - DNA, 160 bp, Homo sapiens
caacagggagctgccaccaccgtgtactgtgctgctgtcccaaaactggagggtctgggagggatgtactttaacaactgctgccgctgcatgccctcaccagaagctcatagcgaagagaccgcccggaccctgtgggcgctcagcgagaggctgatcc

SEQ ID NO: 549670 - DNA, 104 bp, Homo sapiens
cacatcttctgctgggaccaggaagaagatgtggaaacggggcagctggatcagggcaaagctaccatggatgatgagcaggacatagagcaggatagagaggt

SEQ ID NO: 549671 - DNA, 276 bp, Homo sapiens
aaaaaaaaaaaaaaaaaaaaaaagagcttggttggtaacaaacaccctcgggggctccagaggtcgggggaaaccacccttaaaatgtgccatgagcgggtagggggtaaattccggggggcacccaaaagcttcggcacccactcacccggggtgctccccctcccacagggggttggagcagggcgggtaagcaagtgagccacccctgtcacaagtcacgtgagggggtcgagggaactcggccgtgtcaataggagctcgaaccctgtggtg

SEQ ID NO: 549672 - DNA, 3433 bp, Homo sapiens
  misc_feature (33)..(33): n is a, c, g, or t
  misc_feature (2711)..(2711): n is a, c, g, or t
  misc_feature (3262)..(3262): n is a, c, g, or t
  misc_feature (3278)..(3278): n is a, c, g, or t
  misc_feature (3389)..(3389): n is a, c, g, or t
  misc_feature (3418)..(3418): n is a, c, g, or t
tcgactctgtctccaaaaaaaaaaaaaaaaaanttttttttttagatcatcagctattgttagtgttagtgtatgttatgtgtggctcaagacaactttgtttcttttaatataggcagggaagtcaaaagattggatatccctgctttataccaagaaagacaacaccccacatttgcaatgcctaaaaacactaccagccatctgaaaaacatgagacttctaacttctgttcttttttgtagcagtggaatcccacggtgatatctgagggatgtggttaccttttggaggaggttgacggtttctaaggatgattctttctgagtgaaatattgtcagtgtcattgaccttttcattatttcaactattattattccaggttatcaatactctggctgaccatcatcatcgtgggactgactttggtggaagtccttggttacatgtcattattgcgtttccgacaagttataaagttgtcattaccctctggatagtttacctttgggtgtctctcctgaagactatcttctggtctcgaaatggacatgatggatccacggatgtacagcagagagcctggaggtccaaccgccgtagacaggaagggctgaggtccatttgtatgcacacaaagaaaagagtttcttcctttcgaggaaataaaattggcctgaaagacgtcattactctacggagacatgtggaaacaaaagttagagctaaaatccgtaagaggaaggtgacaacgaaaatcaaccatcatgacaaaatcaatggaaagaggaagaccgccaaagaacatctgaggaaactaagcatgaaagaacgtgagcacggagaaaaggagaggcaggtgtcagaggcagaggaaaatgggaaattggatatgaaagaaatacacacctacatggaaatgtttcaacgtgcgcaagcgttgcggcggcgggcagaggactactacagatgcaaaatcaccccttctgcaagaaagcctctttgcaaccgtgggtaagtttgcttgttttccttgcttttggacatagtctgccaggtcaggacatggatacatttttctccctacggctctgtgctcaagccctgcagagggagatggcagagaggaaggctgcctacaagcatcacagtcccatccctgttgggacaattccaaatgagggccttaaatgatgctcagctaagctggttcttgtgtggcctctgtaccttcaaaagctgccgagtcctatgattacacgcgatgggacttgtacacttgaagtgaaacacagttttaaaacttgctttgtttagaattcccacctcatttttccatggacaaaagtattctttatgtcctagtgcacttacaatttggtattacctgggagtgaaaagaaatattacagccatgcctaactgacttcttgaggtaagattgttctgtcagaaaaccctctcccagttcccctgcagctcttcaggaatccacatctctccagagctctttgttctcatgggtggcacctccagagtgaagaagatcctttgtcaagaagggaaacagaggggaaatgagagggtcctgcaggcagagctggaatcaacttccactctgcctcttgcaagctgtgtgaccctgggcacaatttctccttcctctggaaacctctgttttcttagatttggagcagggtggtcacactgaccttgcagagttctgagaatcagagacagaacataaaaggcctggaaaacattctccaaaaagaagctgcaacatgtgtggacaatgggcttttcatgcctctcttactgtctcttactgtctattgacctggtgcaagaaacatgctctggtgatggctgtgagggaggaatgaggatagacatagacactcctgtgtctcaaacatgcttctttattactctgttatgactctgtcttccctggggcaggaccccagcctgcctacatttgcagacagacacagtggcatgtggagacaacagtgtgtcccaatgacttttctttaccccctagctgtcggcagtactcagtggaagggtgatattatgacactgacactgctattttgaaacctggaggatggaaaggtgcaaaaatctatcaccagcaacagaaggtgcagactgtgttggtggcggtaattttgtccatcaaatgaatatgtgtgaaaacattccctcctttggccctacggtcagaatggcggcagcggagcatcgtcattcttcaggattgccctactggccctacctcacagctgaaactttaaaaaacaggatgggccaccagccacctcctccaactcaacaacattctataactgataactccctgagcctcaagacacctcccgagtgtctgctccttccaccctcagcggatgataatctcaagacaccttccgagcgtcagctcactccccttccaccctcagctccaccctcagcagatgataatatcaagacacctgccgagcgtctgcgggggccgcttccaccctcagcggatgataatctcaagacaccttccgagcgtcagctcactccccttccaccctcagctccaccctcagcagatgataatatcaagacacctgccgagcgtctgcggggggccgcttccaccctcagcggatgataatctcaagacaccttccgagtgtgtgctcactccccntccaccctcagcctcccgagtagctgggattacaggtgcctgccaccacgcctggctaattttttgtatttttagtagagaaggggtttcaccatattagccacaatggtctcaatctcctgacctcgtgatccatccgccccgccctcccagagtgctgggattacaggcgtcagccaccgtgaccggctcagactgtactcttctagccatctgaaatacgttttctaggtagagatagattgtgtaagggtacagttgtgaggataacagaaacatggcagattatttaaaatcatcctgaaagtggtgctttatctgatgaaagtgattgtaatccataggaaaatgtttcaacgtgcgcaagagttgcggcggcgagcagaggactaccacaaatgcaaagtaaggagcttcctccctgcagttgcaggatagttcagtgctgatgcagatgatgccacggcccttagactctctcaacattcaatttctcatgtgttggctttttcagatccccccttctgcaagaaaggctctttgcaactggntcagaatggcggcagnggagcatcgtcattcttcaggattgccctactggccctacctcacagctgaaactttaaaaaacaggatgggcctccagccacctcctccaactcaacaacattctataantgataactccctgagcctcaagacacctnccgagtgtgtgctca

SEQ ID NO: 549673 - DNA, 93 bp, Homo sapiens
  misc_feature (59)..(59): n is a, c, g, or t
gaggatccaccaaccatagcccgaaaatgtggtaagggaccctcatctatcacacaacncaggtaagaaggcacccagccccatgggccatac

SEQ ID NO: 549674 - DNA, 3608 bp, Homo sapiens
  misc_feature (33)..(33): n is a, c, g, or t
  misc_feature (2886)..(2886): n is a, c, g, or t
  misc_feature (3437)..(3437): n is a, c, g, or t
  misc_feature (3453)..(3453): n is a, c, g, or t
  misc_feature (3564)..(3564): n is a, c, g, or t
  misc_feature (3593)..(3593): n is a, c, g, or t
tcgactctgtctccaaaaaaaaaaaaaaaaaanttttttttttagatcatcagctattgttagtgttagtgtatgttatgtgtggctcaagacaactttgtttcttttaatataggcagggaagtcaaaagattggatatccctgctttataccaagaaagacaacaccccacatttgcaatgcctaaaaacactaccagccatctgaaaaacatgagacttctaacttctgttcttttttgtagcagtggaatcccacggtgatatctgagggatgtggttaccttttggaggaggttgacggtttctaaggatgattctttctgagtgaaatattgtcagtgtcattgaccttttcattatttcaactattattattccaggttatcaatactctggctgaccatcatcatcgtgggactgactttggtggaagtccttggttacatgtcattattgcgtttccgacaagttataaagttgtcattaccctctggatagtttacctttgggtgtctctcctgaagactatcttctggtctcgaaatggacatgatggatccacggatgtacagcagagagcctggaggtccaaccgccgtagacaggaagggctgaggtccatttgtatgcacacaaagaaaagagtttcttcctttcgaggaaataaaattggcctgaaagacgtcattactctacggagacatgtggaaacaaaagttagagctaaaatccgtaagaggaaggtgacaacgaaaatcaaccatcatgacaaaatcaatggaaagaggaagaccgccaaagaacatctgaggaaactaagcatgaaagaacgtgagcacggagaaaaggagaggcaggtgtcagaggcagaggaaaatgggaaattggatatgaaagaaatacacacctacatggaaatgtttcaacgtgcgcaagcgttgcggcggcgggcagaggactactacagatgcaaaatcaccccttctgcaagaaagcctctttgcaaccgtgggtaagtttgcttgttttccttgcttttggacatagtctgccaggtcaggacatggatacatttttctccctacggctctgtgctcaagccctgcagagggagatggcagagaggaaggctgcctacaagcatcacagtcccatccctgttgggacaattccaaatgagggccttaaatgatgctcagctaagctggttcttgtgtggcctctgtaccttcaaaagctgccgagtcctatgattacacgcgatgggacttgtacacttgaagtgaaacacagttttaaaacttgctttgtttagaattcccacctcatttttccatggacaaaagtattctttatgtcctagtgcacttacaatttggtattacctgggagtgaaaagaaatattacagccatgcctaactgacttcttgaggtaagattgttctgtcagaaaaccctctcccagttcccctgcagctcttcaggaatccacatctctccagagctctttgttctcatgggtggcacctccagagtgaagaagatcctttgtcaagaagggaaacagaggggaaatgagagggtcctgcaggcagagctggaatcaacttccactctgcctcttgcaagctgtgtgaccctgggcacaatttctccttcctctggaaacctctgttttcttagatttggagcagggtggtcacactgaccttgcagagttctgagaatcagagacagaacataaaaggcctggaaaacattctccaaaaagaagctgcaacatgtgtggacaatgggcttttcatgcctctcttactgtctcttactgtctattgacctggtgcaagaaacatgctctggtgatggctgtgagggaggaatgaggatagacatagacactcctgtgtctcaaacatgcttctttattactctgttatgactctgtcttccctggggcaggaccccagcctgcctacatttgcagacagacacagtggcatgtggagacaacagtgtgtcccaatgacttttctttaccccctagctgtcggcagtactcagtggaagggtgatattatgacactgacactgctattttgaaacctggaggatggaaaggtgcaaaaatctatcaccagcaacagaaggtgcagactgtgttggtggcggtaattttgtccatcaaatgaatatgtgtgaaaacattccctcctttggccctacggtcagaatggcggcagcggagcatcgtcattcttcaggattgccctactggccctacctcacagctgaaactttaaaaaacaggatgggccaccagccacctcctccaactcaacaacattctataactgataactccctgagcctcaagacacctcccgagtgtctgctcactccccttccaccctcagctccaccctcagcagatgataatatcaagacacctgccgagcgtctgcgggggccgcttccaccctcagcggatgataatctcaagacaccttccgagcgtcagctcactccccttccaccctcagctccaccctcagcagatgataatatcaagacttccaccctcagcggatgataatctcaagacaccttccgagcgtcagctcactccccttccaccctcagctccaccctcagcagatgataatatcaagacacctgccgagcgtctgcgggggccgcttccaccctcagcggatgataatctcaagacaccttccgagcgtcagctcactccccttccaccctcagctccaccctcagcagatgataatatcaagacacctgccgagcgtctgcggggggccgcttccaccctcagcggatgataatctcaagacaccttccgagtgtgtgctcactccccntccaccctcagcctcccgagtagctgggattacaggtgcctgccaccacgcctggctaattttttgtatttttagtagagaaggggtttcaccatattagccacaatggtctcaatctcctgacctcgtgatccatccgccccgccctcccagagtgctgggattacaggcgtcagccaccgtgaccggctcagactgtactcttctagccatctgaaatacgttttctaggtagagatagattgtgtaagggtacagttgtgaggataacagaaacatggcagattatttaaaatcatcctgaaagtggtgctttatctgatgaaagtgattgtaatccataggaaaatgtttcaacgtgcgcaagagttgcggcggcgagcagaggactaccacaaatgcaaagtaaggagcttcctccctgcagttgcaggatagttcagtgctgatgcagatgatgccacggcccttagactctctcaacattcaatttctcatgtgttggctttttcagatccccccttctgcaagaaaggctctttgcaactggntcagaatggcggcagnggagcatcgtcattcttcaggattgccctactggccctacctcacagctgaaactttaaaaaacaggatgggcctccagccacctcctccaactcaacaacattctataantgataactccctgagcctcaagacacctnccgagtgtgtgctca

SEQ ID NO: 549675 - DNA, 242 bp, Homo sapiens
taggtcagaaaggattgggattcctatccttaaaactcgatcaccagtcactttcctgtctggtctgcgcaggcccctacgagttatccaagtgaaccgtgggaatcgctacactctcaagctcatcaaggcatgtggtgctctatgtggggactcaggccattgcgcacatccacaccatgggcatgacatcgtatcagtgagcagcatcactacgactcaagcagatatggatatcttcc

SEQ ID NO: 549676 - DNA, 3507 bp, Homo sapiens
  misc_feature (33)..(33): n is a, c, g, or t
  misc_feature (2785)..(2785): n is a, c, g, or t
  misc_feature (3336)..(3336): n is a, c, g, or t
  misc_feature (3352)..(3352): n is a, c, g, or t
  misc_feature (3463)..(3463): n is a, c, g, or t
  misc_feature (3492)..(3492): n is a, c, g, or t
tcgactctgtctccaaaaaaaaaaaaaaaaaanttttttttttagatcatcagctattgttagtgttagtgtatgttatgtgtggctcaagacaactttgtttcttttaatataggcagggaagtcaaaagattggatatccctgctttataccaagaaagacaacaccccacatttgcaatgcctaaaaacactaccagccatctgaaaaacatgagacttctaacttctgttcttttttgtagcagtggaatcccacggtgatatctgagggatgtggttaccttttggaggaggttgacggtttctaaggatgattctttctgagtgaaatattgtcagtgtcattgaccttttcattatttcaactattattattccaggttatcaatactctggctgaccatcatcatcgtgggactgactttggtggaagtccttggttacatgtcattattgcgtttccgacaagttataaagttgtcattaccctctggatagtttacctttgggtgtctctcctgaagactatcttctggtctcgaaatggacatgatggatccacggatgtacagcagagagcctggaggtccaaccgccgtagacaggaagggctgaggtccatttgtatgcacacaaagaaaagagtttcttcctttcgaggaaataaaattggcctgaaagacgtcattactctacggagacatgtggaaacaaaagttagagctaaaatccgtaagaggaaggtgacaacgaaaatcaaccatcatgacaaaatcaatggaaagaggaagaccgccaaagaacatctgaggaaactaagcatgaaagaacgtgagcacggagaaaaggagaggcaggtgtcagaggcagaggaaaatgggaaattggatatgaaagaaatacacacctacatggaaatgtttcaacgtgcgcaagcgttgcggcggcgggcagaggactactacagatgcaaaatcaccccttctgcaagaaagcctctttgcaaccgtgggtaagtttgcttgttttccttgcttttggacatagtctgccaggtcaggacatggatacatttttctccctacggctctgtgctcaagccctgcagagggagatggcagagaggaaggctgcctacaagcatcacagtcccatccctgttgggacaattccaaatgagggccttaaatgatgctcagctaagctggttcttgtgtggcctctgtaccttcaaaagctgccgagtcctatgattacacgcgatgggacttgtacacttgaagtgaaacacagttttaaaacttgctttgtttagaattcccacctcatttttccatggacaaaagtattctttatgtcctagtgcacttacaatttggtattacctgggagtgaaaagaaatattacagccatgcctaactgacttcttgaggtaagattgttctgtcagaaaaccctctcccagttcccctgcagctcttcaggaatccacatctctccagagctctttgttctcatgggtggcacctccagagtgaagaagatcctttgtcaagaagggaaacagaggggaaatgagagggtcctgcaggcagagctggaatcaacttccactctgcctcttgcaagctgtgtgaccctgggcacaatttctccttcctctggaaacctctgttttcttagatttggagcagggtggtcacactgaccttgcagagttctgagaatcagagacagaacataaaaggcctggaaaacattctccaaaaagaagctgcaacatgtgtggacaatgggcttttcatgcctctcttactgtctcttactgtctattgacctggtgcaagaaacatgctctggtgatggctgtgagggaggaatgaggatagacatagacactcctgtgtctcaaacatgcttctttattactctgttatgactctgtcttccctggggcaggaccccagcctgcctacatttgcagacagacacagtggcatgtggagacaacagtgtgtcccaatgacttttctttaccccctagctgtcggcagtactcagtggaagggtgatattatgacactgacactgctattttgaaacctggaggatggaaaggtgcaaaaatctatcaccagcaacagaaggtgcagactgtgttggtggcggtaattttgtccatcaaatgaatatgtgtgaaaacattccctcctttggccctacggtcagaatggcggcagcggagcatcgtcattcttcaggattgccctactggccctacctcacagctgaaactttaaaaaacaggatgggccaccagccacctcctccaactcaacaacattctataactgataactccctgagcctcaagacacctcccgagtgtctgctcactccccttccaccctcagctccaccctcagcagatgataatatcaagacacctgccgagcgtctgcgggggcccttccaccctcagcggatgataatctcaagacaccttccgagcgtcagctcactccccttccaccctcagctccaccctcagcagatgataatatcaagacacctgccgagcgtctgcgggggccgcttccaccctcagcggatgataatctcaagacaccttccgagcgtcagctcactccccttccaccctcagctccaccctcagcagatgataatatcaagacacctgccgagcgtctgcggggggccgcttccaccctcagcggatgataatctcaagacaccttccgagtgtgtgctcactccccntccaccctcagcctcccgagtagctgggattacaggtgcctgccaccacgcctggctaattttttgtatttttagtagagaaggggtttcaccatattagccacaatggtctcaatctcctgacctcgtgatccatccgccccgccctcccagagtgctgggattacaggcgtcagccaccgtgaccggctcagactgtactcttctagccatctgaaatacgttttctaggtagagatagattgtgtaagggtacagttgtgaggataacagaaacatggcagattatttaaaatcatcctgaaagtggtgctttatctgatgaaagtgattgtaatccataggaaaatgtttcaacgtgcgcaagagttgcggcggcgagcagaggactaccacaaatgcaaagtaaggagcttcctccctgcagttgcaggatagttcagtgctgatgcagatgatgccacggcccttagactctctcaacattcaatttctcatgtgttggctttttcagatccccccttctgcaagaaaggctctttgcaactggntcagaatggcggcagnggagcatcgtcattcttcaggattgccctactggccctacctcacagctgaaactttaaaaaacaggatgggcctccagccacctcctccaactcaacaacattctataantgataactccctgagcctcaagacacctnccgagtgtgtgctca

SEQ ID NO: 549677 - DNA, 163 bp, Homo sapiens
atactgagttccccatcataggagagaaaacaagcaagtggcagctgagatgaggggaatcatcccaggccctttggctctgagtaccccatcccaaaccaacattgtacccagctttttgcagcgggggctgaggttaacaggttgcagcgatgagccaacg

SEQ ID NO: 549678 - DNA, 148 bp, Homo sapiens
taagggaaatgggtatctccttatgttgcccgggctggccttgaactcctaggctcaagcagtcctccagtctcagcctcctgagtaactgggactgcgttttttttgttttattttgtttttaatttggtcttgaagtggagttata

SEQ ID NO: 549679 - DNA, 2668 bp, Homo sapiens
  misc_feature (33)..(33): n is a, c, g, or t
  misc_feature (2624)..(2624): n is a, c, g, or t
  misc_feature (2653)..(2653): n is a, c, g, or t
tcgactctgtctccaaaaaaaaaaaaaaaaaanttttttttttagatcatcagctattgttagtgttagtgtatgttatgtgtggctcaagacaactttgtttcttttaatataggcagggaagtcaaaagattggatatccctgctttataccaagaaagacaacaccccacatttgcaatgcctaaaaacactaccagccatctgaaaaacatgagacttctaacttctgttcttttttgtagcagtggaatcccacggtgatatctgagggatgtggttaccttttggaggaggttgacggtttctaaggatgattctttctgagtgaaatattgtcagtgtcattgaccttttcattatttcaactattattattccaggttatcaatactctggctgaccatcatcatcgtgggactgactttggtggaagtccttggttacatgtcattattgcgtttccgacaagttataaagttgtcattaccctctggatagtttacctttgggtgtctctcctgaagactatcttctggtctcgaaatggacatgatggatccacggatgtacagcagagagcctggaggtccaaccgccgtagacaggaagggctgaggtccatttgtatgcacacaaagaaaagagtttcttcctttcgaggaaataaaattggcctgaaagacgtcattactctacggagacatgtggaaacaaaagttagagctaaaatccgtaagaggaaggtgacaacgaaaatcaaccatcatgacaaaatcaatggaaagaggaagaccgccaaagaacatctgaggaaactaagcatgaaagaacgtgagcacggagaaaaggagaggcaggtgtcagaggcagaggaaaatgggaaattggatatgaaagaaatacacacctacatggaaatgtttcaacgtgcgcaagcgttgcggcggcgggcagaggactactacagatgcaaaatcaccccttctgcaagaaagcctctttgcaaccgtgggtaagtttgcttgttttccttgcttttggacatagtctgccaggtcaggacatggatacatttttctccctacggctctgtgctcaagccctgcagagggagatggcagagaggaaggctgcctacaagcatcacagtcccatccctgttgggacaattccaaatgagggccttaaatgatgctcagctaagctggttcttgtgtggcctctgtaccttcaaaagctgccgagtcctatgattacacgcgatgggacttgtacacttgaagtgaaacacagttttaaaacttgctttgtttagaattcccacctcatttttccatggacaaaagtattctttatgtcctagtgcacttacaatttggtattacctgggagtgaaaagaaatattacagccatgcctaactgacttcttgaggtaagattgttctgtcagaaaaccctctcccagttcccctgcagctcttcaggaatccacatctctccagagctctttgttctcatgggtggcacctccagagtgaagaagatcctttgtcaagaagggaaacagaggggaaatgagagggtcctgcaggcagagctggaatcaacttccactctgcctcttgcaagctgtgtgaccctgggcacaatttctccttcctctggaaacctctgttttcttagatttggagcagggtggtcacactgaccttgcagagttctgagaatcagagacagaacataaaaggcctggaaaacattctccaaaaagaagctgcaacatgtgtggacaatgggcttttcatgcctctcttactgtctcttactgtctattgacctggtgcaagaaacatgctctggtgatggctgtgagggaggaatgaggatagacatagacactcctgtgtctcaaacatgcttctttattactctgttatgactctgtcttccctggggcaggaccccagcctgcctacatttgcagacagacacagtggcatgtggagacaacagtgtgtcccaatgacttttctttaccccctagctgtcggcagtactcagtggaagggtgatattatgacactgacactgctattttgaaacctggaggatggaaaggtgcaaaaatctatcaccagcaacagaaggtgcagactgtgttggtggcggtaattttgtccatcaaatgaatatgtgtgaaaacattccctcctttggccctacggtcagaatggcggcagcggagcatcgtcattcttcaggattgccctactggccctacctcacagctgaaactttaaaaaacaggatgggccaccagccacctcctccaactcaacaacattctataactgataactccctgagcctcaagacacctcccgagtgtctgctccttccaccctcagcggatgataatctcaagacaccttccgagcgtcagctcactccccttccaccctcagctccaccctcagcagatgataatatcaagacacctgccgagcgtctgcgggggccgcttccaccctcagcggatgataatctcaagacaccttccgagcgtcagctcactccccttccaccagccacctcctccaactcaacaacattctataantgataactccctgagcctcaagacacctnccgagtgtgtgctca

SEQ ID NO: 549680 - DNA, 199 bp, Homo sapiens
ctctgacccccaacaggatacctgttcacatccagaatcacgtatcccacttgcagcccatgcccctgggcagctgaacctcctggagtcacctaggtgtaagtagggggcatagcagcaacaggggacacctgggggacaaagtattgcttggcttatagcgctctaggcgcagtggcaagccacgcaggcaaagacc

SEQ ID NO: 549681 - DNA, 3626 bp, Homo sapiens
  misc_feature (33)..(33): n is a, c, g, or t
  misc_feature (2904)..(2904): n is a, c, g, or t
  misc_feature (3455)..(3455): n is a, c, g, or t
  misc_feature (3471)..(3471): n is a, c, g, or t
  misc_feature (3582)..(3582): n is a, c, g, or t
  misc_feature (3611)..(3611): n is a, c, g, or t
tcgactctgtctccaaaaaaaaaaaaaaaaaanttttttttttagatcatcagctattgttagtgttagtgtatgttatgtgtggctcaagacaactttgtttcttttaatataggcagggaagtcaaaagattggatatccctgctttataccaagaaagacaacaccccacatttgcaatgcctaaaaacactaccagccatctgaaaaacatgagacttctaacttctgttcttttttgtagcagtggaatcccacggtgatatctgagggatgtggttaccttttggaggaggttgacggtttctaaggatgattctttctgagtgaaatattgtcagtgtcattgaccttttcattatttcaactattattattccaggttatcaatactctggctgaccatcatcatcgtgggactgactttggtggaagtccttggttacatgtcattattgcgtttccgacaagttataaagttgtcattaccctctggatagtttacctttgggtgtctctcctgaagactatcttctggtctcgaaatggacatgatggatccacggatgtacagcagagagcctggaggtccaaccgccgtagacaggaagggctgaggtccatttgtatgcacacaaagaaaagagtttcttcctttcgaggaaataaaattggcctgaaagacgtcattactctacggagacatgtggaaacaaaagttagagctaaaatccgtaagaggaaggtgacaacgaaaatcaaccatcatgacaaaatcaatggaaagaggaagaccgccaaagaacatctgaggaaactaagcatgaaagaacgtgagcacggagaaaaggagaggcaggtgtcagaggcagaggaaaatgggaaattggatatgaaagaaatacacacctacatggaaatgtttcaacgtgcgcaagcgttgcggcggcgggcagaggactactacagatgcaaaatcaccccttctgcaagaaagcctctttgcaaccgtgggtaagtttgcttgttttccttgcttttggacatagtctgccaggtcaggacatggatacatttttctccctacggctctgtgctcaagccctgcagagggagatggcagagaggaaggctgcctacaagcatcacagtcccatccctgttgggacaattccaaatgagggccttaaatgatgctcagctaagctggttcttgtgtggcctctgtaccttcaaaagctgccgagtcctatgattacacgcgatgggacttgtacacttgaagtgaaacacagttttaaaacttgctttgtttagaattcccacctcatttttccatggacaaaagtattctttatgtcctagtgcacttacaatttggtattacctgggagtgaaaagaaatattacagccatgcctaactgacttcttgaggtaagattgttctgtcagaaaaccctctcccagttcccctgcagctcttcaggaatccacatctctccagagctctttgttctcatgggtggcacctccagagtgaagaagatcctttgtcaagaagggaaacagaggggaaatgagagggtcctgcaggcagagctggaatcaacttccactctgcctcttgcaagctgtgtgaccctgggcacaatttctccttcctctggaaacctctgttttcttagatttggagcagggtggtcacactgaccttgcagagttctgagaatcagagacagaacataaaaggcctggaaaacattctccaaaaagaagctgcaacatgtgtggacaatgggcttttcatgcctctcttactgtctcttactgtctattgacctggtgcaagaaacatgctctggtgatggctgtgagggaggaatgaggatagacatagacactcctgtgtctcaaacatgcttctttattactctgttatgactctgtcttccctggggcaggaccccagcctgcctacatttgcagacagacacagtggcatgtggagacaacagtgtgtcccaatgacttttctttaccccctagctgtcggcagtactcagtggaagggtgatattatgacactgacactgctattttgaaacctggaggatggaaaggtgcaaaaatctatcaccagcaacagaaggtgcagactgtgttggtggcggtaattttgtccatcaaatgaatatgtgtgaaaacattccctcctttggccctacggtcagaatggcggcagcggagcatcgtcattcttcaggattgccctactggccctacctcacagctgaaactttaaaaaacaggatgggccaccagccacctcctccaactcaacaacattctataactgataactccctgagcctcaagacacctcccgagtgtctgctcgcttccaccctcagcggatgataatctcaagacaccttccgagcgtcagctcactccccttccaccctcagctccttccaccctcagcagatgataatatcaagacacctgccgagcgtctgcgggggccgcttccaccctcagcggatgataatctcaagacaccttccgagcgtcagctcactccccttccaccctcagctccaccctcagcagatgataatatcaagacacctgccgagcgtctgcgggggccgcttccaccctcagcggatgataatctcaagacaccttccgagcgtcagctcactccccttccaccctcagctccaccctcagcagatgataatatcaagacacctgccgagcgtctgcgggggccgactccccttccaccctcagcggatgataatctcaagacacctcccgagtgtgtgctcactccccttccaccctcagcggatgataatctcaagacaccttccgagtgtgtgctcactccccntccaccctcagcctcccgagtagctgggattacaggtgcctgccaccacgcctggctaattttttgtatttttagtagagaaggggtttcaccatattagccacaatggtctcaatctcctgacctcgtgatccatccgccccgccctcccagagtgctgggattacaggcgtcagccaccgtgaccggctcagactgtactcttctagccatctgaaatacgttttctaggtagagatagattgtgtaagggtacagttgtgaggataacagaaacatggcagattatttaaaatcatcctgaaagtggtgctttatctgatgaaagtgattgtaatccataggaaaatgtttcaacgtgcgcaagagttgcggcggcgagcagaggactaccacaaatgcaaagtaaggagcttcctccctgcagttgcaggatagttcagtgctgatgcagatgatgccacggcccttagactctctcaacattcaatttctcatgtgttggctttttcagatccccccttctgcaagaaaggctctttgcaactggntcagaatggcggcagnggagcatcgtcattcttcaggattgccctactggccctacctcacagctgaaactttaaaaaacaggatgggcctccagccacctcctccaactcaacaacattctataantgataactccctgagcctcaagacacctnccgagtgtgtgctca

SEQ ID NO: 549682 - DNA, 1254 bp, Homo sapiens
  misc_feature (487)..(487): n is a, c, g, or t
agcgtagtccgctggtccctaccttgcgagctgtgaggggattcatcttcgttgtgcggaacatcactcgcgataccatgggcggtcccttgttcccgtgtgccaccgtagtttcaacatcattttagggcgcatggcaatgcgttgtatccaatagcagtagcatgccatgagacaagcctcggttggctgcacgtttactgtcttgttagggtggccgatcggaccttcattttggagaactctggtacatgcagctacacgcgttgggaggacgccatccaggacgaatggtgctaaaagaacttcatgcttaagcgagtagtgacggagaatgcgcgttctcttctattgcgtaacgcgaaatgaatgaggtgccaacgtatctcatacacagaacactgatttgggtgttctggaccaagtccggagcagcctagagagcttctctaggtctggactactcggttcgaattggggcttcgangagtaattgcacttgcatagctcggggtggattgggccagcgttaccccgtcgttgctttaaaccctgctgtattgacggctatgctatgcagactctcaatgtggcagggggggcataatgcgccggaaaattcgtatgtccacagtatagccaagacattacccaaggattctgccattccccaatccacggaacgcctagtccaactcaaggctgtgccggtgttgggaacgcattggaaaaggccccaggcggacctggggctaggcttaccggaacggcagggggccgccctccgatctttgaacgatttatcttcgggccatggttgttcgcaagttcgacctcgggtattcccccgaactatggacaaaggtctcagagaattctgcacccgttttcagaaggcgaaatatcttaaacttggaagggttacctctgggcgagagggcgaaccaagacccagttctaggtccccggttccgtaacacaggttttccttgttggcccttctgagtcccaggcacaaatcggaacgccaaggttgtgtaagccaccaagcgattatatcggcatttgctagatgagcgaggccaggggttgtctcttcgcaatgggagcctcttggatcacccagcggctctctcgttggggcgaagacggcacctgggaggaacgcggggagaaggttcttcgcgaatagggttttgaggttccacaaccgaaaaaggccttaagccgaaggtggagaaaaggataccgggg

SEQ ID NO: 549683 - DNA, 339 bp, Homo sapiens
gtcatttctacacttaaatacgtgctggactctacagcataagatggcattatctattattagtacagctggcacatctgtgtgacgctctttattaagtggggatataaccatatccattctcactcatattttaagaaacatcattcttgagtttattttttttttctttaaaagacaggatctcatgctgtcgcccagagtggagtgcggtggcatgatcgtagctcactacaacctcaaattccgtgggctcaagcgatccttctgcctcatccttccaaagtgctgggattataggcatgaggccaccgcgcccagcctcgtgtagaagttgaa

SEQ ID NO: 549684 - DNA, 3762 bp, Homo sapiens
  misc_feature (33)..(33): n is a, c, g, or t
  misc_feature (3040)..(3040): n is a, c, g, or t
  misc_feature (3591)..(3591): n is a, c, g, or t
  misc_feature (3607)..(3607): n is a, c, g, or t
  misc_feature (3718)..(3718): n is a, c, g, or t
  misc_feature (3747)..(3747): n is a, c, g, or t
tcgactctgtctccaaaaaaaaaaaaaaaaaanttttttttttagatcatcagctattgttagtgttagtgtatgttatgtgtggctcaagacaactttgtttcttttaatataggcagggaagtcaaaagattggatatccctgctttataccaagaaagacaacaccccacatttgcaatgcctaaaaacactaccagccatctgaaaaacatgagacttctaacttctgttcttttttgtagcagtggaatcccacggtgatatctgagggatgtggttaccttttggaggaggttgacggtttctaaggatgattctttctgagtgaaatattgtcagtgtcattgaccttttcattatttcaactattattattccaggttatcaatactctggctgaccatcatcatcgtgggactgactttggtggaagtccttggttacatgtcattattgcgtttccgacaagttataaagttgtcattaccctctggatagtttacctttgggtgtctctcctgaagactatcttctggtctcgaaatggacatgatggatccacggatgtacagcagagagcctggaggtccaaccgccgtagacaggaagggctgaggtccatttgtatgcacacaaagaaaagagtttcttcctttcgaggaaataaaattggcctgaaagacgtcattactctacggagacatgtggaaacaaaagttagagctaaaatccgtaagaggaaggtgacaacgaaaatcaaccatcatgacaaaatcaatggaaagaggaagaccgccaaagaacatctgaggaaactaagcatgaaagaacgtgagcacggagaaaaggagaggcaggtgtcagaggcagaggaaaatgggaaattggatatgaaagaaatacacacctacatggaaatgtttcaacgtgcgcaagcgttgcggcggcgggcagaggactactacagatgcaaaatcaccccttctgcaagaaagcctctttgcaaccgtgggtaagtttgcttgttttccttgcttttggacatagtctgccaggtcaggacatggatacatttttctccctacggctctgtgctcaagccctgcagagggagatggcagagaggaaggctgcctacaagcatcacagtcccatccctgttgggacaattccaaatgagggccttaaatgatgctcagctaagctggttcttgtgtggcctctgtaccttcaaaagctgccgagtcctatgattacacgcgatgggacttgtacacttgaagtgaaacacagttttaaaacttgctttgtttagaattcccacctcatttttccatggacaaaagtattctttatgtcctagtgcacttacaatttggtattacctgggagtgaaaagaaatattacagccatgcctaactgacttcttgaggtaagattgttctgtcagaaaaccctctcccagttcccctgcagctcttcaggaatccacatctctccagagctctttgttctcatgggtggcacctccagagtgaagaagatcctttgtcaagaagggaaacagaggggaaatgagagggtcctgcaggcagagctggaatcaacttccactctgcctcttgcaagctgtgtgaccctgggcacaatttctccttcctctggaaacctctgttttcttagatttggagcagggtggtcacactgaccttgcagagttctgagaatcagagacagaacataaaaggcctggaaaacattctccaaaaagaagctgcaacatgtgtggacaatgggcttttcatgcctctcttactgtctcttactgtctattgacctggtgcaagaaacatgctctggtgatggctgtgagggaggaatgaggatagacatagacactcctgtgtctcaaacatgcttctttattactctgttatgactctgtcttccctggggcaggaccccagcctgcctacatttgcagacagacacagtggcatgtggagacaacagtgtgtcccaatgacttttctttaccccctagctgtcggcagtactcagtggaagggtgatattatgacactgacactgctattttgaaacctggaggatggaaaggtgcaaaaatctatcaccagcaacagaaggtgcagactgtgttggtggcggtaattttgtccatcaaatgaatatgtgtgaaaacattccctcctttggccctacggtcagaatggcggcagcggagcatcgtcattcttcaggattgccctactggccctacctcacagctgaaactttaaaaaacaggatgggccaccagccacctcctccaactcaacaacattctataactgataactccctgagcctcaagacacctcccgagtgtctgctcgcttccaccctcagcggatgataatctcaagacaccttccgagcgtcagctcactccccttccaccctcagctccaccctcagcagatgataatatcaagatacctgctgagcgtctgcggattccgcttccaccatcagccgatgataatctcaagacaccttccgagcgtcagctcactccccttccaccctcagctccaccctcagccttccaccctcagcagatgataatatcaagacacctgccgagcgtctgcgggggccgcttccaccctcagcggatgataatctcaagacaccttccgagcgtcagctcactccccttccaccctcagctccaccctcagcagatgataatatcaagacacctgccgagcgtctgcgggggccgcttccaccctcagcggatgataatctcaagacaccttccgagcgtcagctcactccccttccaccctcagctccaccctcagcagatgataatatcaagacacctgccgagcgtctgcgggggccgactccccttccaccctcagcggatgataatctcaagacacctcccgagtgtgtgctcactccccttccaccctcagcggatgataatctcaagacaccttccgagtgtgtgctcactccccntccaccctcagcctcccgagtagctgggattacaggtgcctgccaccacgcctggctaattttttgtatttttagtagagaaggggtttcaccatattagccacaatggtctcaatctcctgacctcgtgatccatccgccccgccctcccagagtgctgggattacaggcgtcagccaccgtgaccggctcagactgtactcttctagccatctgaaatacgttttctaggtagagatagattgtgtaagggtacagttgtgaggataacagaaacatggcagattatttaaaatcatcctgaaagtggtgctttatctgatgaaagtgattgtaatccataggaaaatgtttcaacgtgcgcaagagttgcggcggcgagcagaggactaccacaaatgcaaagtaaggagcttcctccctgcagttgcaggatagttcagtgctgatgcagatgatgccacggcccttagactctctcaacattcaatttctcatgtgttggctttttcagatccccccttctgcaagaaaggctctttgcaactggntcagaatggcggcagnggagcatcgtcattcttcaggattgccctactggccctacctcacagctgaaactttaaaaaacaggatgggcctccagccacctcctccaactcaacaacattctataantgataactccctgagcctcaagacacctnccgagtgtgtgctca

SEQ ID NO: 549685 - DNA, 128 bp, Homo sapiens
aacattcgtgtcagaggctgaatgggggataggtgtatgaacatgaggtgttttctcgtgtgaaagagggttttatgttgttaatgtggtgggtgagtgagcctcattgtgttgtcggtaaatatgta

SEQ ID NO: 549686 - DNA, 649 bp, Homo sapiens
tgggctctaaagggggtagagggggtgctatagggtaaatacgggccctatttcaaagatttttaggggaattaattctaggacgatgggcatgaaactgtggttggctccacagatttcagaagcattgcaccgtagtatacccccggtcgtgtagcggtgaaagtggttgggtttagacgtccgggaatgtgcatctgtttttaagcctaagtggtggggcacagctcatgagtgcaagacgtctgtgatgtaattattatacgaagtgggggctctcaatcgggagttactactcgatgtgtcaacgttcaaggagttcgcaggtctcgccgtgggtctctaggaataagtgggggaagtattgtaggagtttgaagattagctccgccgaaagctcgggtgatacctcgtaggtctcagtaccatggggggccaccatgtgattggagtggtaagggagggactcgtgtgaccctcgtcgtgttatgtaaaggatgcgtagggatgggagggcagatgaggactaggatgatggcgggcaggatagtctcagacggtttctattacctgagcgtctgagatgtgacgaataagtaaagagaggggagtgttaggacagggcatacaggactaggaagcagatagg

SEQ ID NO: 549687 - DNA, 1468 bp, Homo sapiens
gcaaaacaccaaatggcggatgactgccggtgcagcttggtgtgtgggccctggggtgccctggtggccctgggatggggaaccgcgtgtggcttccgcggagtgtttctggcagtggcatcgtgggccggggtcgcggccgtggacggggccggggccgaggccgcggagctcgcggagtgcaaggccgaggataaggagtggatgcccgtcaccaagtttgggcctgttggtcaacggaacataaagcatcaagtcccgtggaggagatctatctattctccctgcactattaaggaatcagagatcattgatatcttccttgggggcctctctcacaggacttgacggtttagaagcattattgccagtgacagaagcagacccgtgacggccagcgacaaccaggttcaaggcattaagtatgcatatcggggcactacaattggacacgttcgagaactggggttgtaaaagtgctcccaagagaggtgggcaacccggccaatccgttggggaacatcatacttggcaccaagctcttacaatacgtccccggatgcagacagaggctactgtggggaacaaagatcgggaaaaggcacacagcaagttgagcactatgcacagggtggaccaggaccgaatgagagattcatgagaatggcagtaacgacacatccaataaccatagcaacacagaaggaggcaacattggcaaatcaagtacttccacgaaaaccagatgtgagcgataaggaaaagcagtgagtccaattgaatgcggaatggcaatatacgaatagaccataggtaacaaacattacaagacaccaggatgagctaagacatatgcaaagccacataagagaaaaactatacgacacacacgggcgaacctatttggaaaagccaacaagtgctaaagaacgccgttaacgaggcaaacagttagaaccccaagcgagaaagcattctgagcaacgggagacaaatgggtatttcacacgccaaggatataaccaccatataatacaaggaggaatctgacgtgacacacaaaccaattcgaatcaagcagacaccaaagcgaaaaacagaacttaacggtggccaagcgggaaatccaagagactcacagaaattgagtggacttacaaacacaaaggggagtaataaatacacgagacaccaagcttacacgatggaactaagcggtgtaaaaagaaaaagccacacaaggcaagagaagcaggacgacaaagagaagacgaagaaagacatgagtgaagcatagaagaatcgctggacgaagcacaaaagaactgaagctaacgatgcagaggagacagacacagagatgctgcgagcaggacaatatattcgaacgagagagaaaaaaacgaggggaggcacaaacgaacgcaaccaaacgcagcaaagagagagcacaagataagaaatacaa

SEQ ID NO: 549688 - DNA, 439 bp, Homo sapiens
atatcattaaacaaataaaatactttttatcacaaaaaaaaaaaaaaaaaaaaaaaaaaaaaaaaaaaaaaaaaaaaaaaaaaaaaaaaaaaaaaaaaaaaaaaaaaaaaaaaaaaaaaaaaaaaaaaaaaaaaaaaacaaaaaagaaaaaaaaaaaaaaaaaaaaaaaaaaaagtggccgccctttgcccccgggacgtttaaaccttcacatgtatagacctggctatccaatgaggctaaaattgccaatgtcccctgaaggggggccttttaaaaagaccggggccgtttttaataaccttgagctggggaaaaccctgggggaccccaaatttaacgcgtttgaataaagaccccttttgccccagggggaaaaaaacaaaaggccctttcaaggagggctttcaaaaaaggggccaaccttaaagggcaaagg

SEQ ID NO: 549689 - DNA, 391 bp, Homo sapiens
  misc_feature (371)..(371): n is a, c, g, or t
  misc_feature (386)..(386): n is a, c, g, or t
agagctacaccatgagcttcaataccctgtctctagagtcaaaaataaattggccaggcacagtggctcacacctgtaatctcagcacgttgggaggccaaggcgggaggatcacttaaggccaggagttcaagaccagttcatgcaacatagggagatcttgtctctacaaaaaatataaaaattagccaagtgttgtggtgcacacctgtagtcccagctactgaggaggctgaggtggaaggagtgctggagccctgggagcactgggagcctggggagatgggaagttgacagttgagctgtaattgttgccactgcattccagccttgagttgacagagccaagattttttcttcaaaattaagantaatatttaaattanaaatt

SEQ ID NO: 549690 - DNA, 188 bp, Homo sapiens
ctcatccgtggtgtatcaaattgagctccgaatctattattggtactgtaatctggaaagactcaaatgcaggattccctacatgttacaaagtggatgagagcgcccttttgattattctgcacttattaaatgcttactgactccatcagtgatctgatgctgtttgtcagagggtcccaagcgct

SEQ ID NO: 549691 - DNA, 160 bp, Homo sapiens
ttagattaacgtagattattttagaaaggacagtaggtatgctcaataaacattcagttattattactgcaaactttacagaatatatcagttctatttatctaagtcccacatctcaacagcattcatcactacctgctgcattctttttatttattat

SEQ ID NO: 549692 - DNA, 543 bp, Homo sapiens
gagacagggtgtcactctgtcacccgggctggagtgcagtgacacgatctttgcgacctccgcctttcaggttcaagtgcatctcctgcctcagcctcctgagtagctgggattacagtcgtgtatcaccacccttggctaatttttgtatttttagtagagatgggatttcgccatattggttaggctggtctcaaacttctgacctcaagtgatctgcctgcctcggccttccaaagacctgggattataggtgtgagcacactccgggcccaatatggcattttgattgggatgaagggtggaggaaaatcagtgtgatttttgtatctatctctctagctatctattattttttgagatgaggtcttgctctgttgcttaggctggagtgcagttgggcaatgatggctcactgcagcctcgacctcctggacgcaagccatcctcctattttagcctccgtagtagctgggaccacaggcacacgccaccctgcctggctaatttttactttaagtgtagagctgaggaccatcgttg

SEQ ID NO: 549693 - DNA, 393 bp, Homo sapiens
ttcttctatcctgaaagctgtcctctccccactcccgacacactgggagcccccccatccccgcccctctcccgcccctcccttgtccccgccccttcccgccccaactcaggttctgccccaccccgccccaattcacgtcctgctccgccccgacgtaggccccgccctggcccccgggccccgcccccgtctgacgcaggccccgccccctctccgccccgccccggctcgggcggccggaggacccggagctaaggcgcccgaacccgcggcggcggtggggacgatgtggttctttgcccgggacccggtccgggactttccgttcgagctcatcccggagcccccagagggcggcctgcccgggccctgggccctgcaccgcggccg

SEQ ID NO: 549694 - DNA, 156 bp, Homo sapiens
tcgctattcatcggcacccccaggacacagagactttatcaaaaacatgattacagggacatctcaggctgactgtgctgtcctgattgttgctgctggtgccgaataatagcgagctattcatcggcacccatatcagtgatcgtggggttgtaa

SEQ ID NO: 549695 - DNA, 117 bp, Homo sapiens
tagagaaatagctgcagcagaaggctgcttggagaacagtgtcggatctgctggttcacttggggacacagtgaccacttcataaccctcaggtggtgtgactcgctccccgccctc

SEQ ID NO: 549696 - DNA, 309 bp, Homo sapiens
gtatttttgtttttcccaaaggtttttcctctcaaaatttgttttttgttcaggcattggatggggtagaaataaaggcaggaaaggaaggaaaaaaaaaggcaggtgtgggcccctgggggggccaattcccatgcaaagggatgtcaaaggggtgttgccagcgacccccgggggttttccctcactccagttccttaagagccccttgcatttatttatccatgggggcagatcccccctttaggagttgagagttttagggtgcagttccagacccctcccccaataaagagttcctcctttgta

SEQ ID NO: 549697 - DNA, 422 bp, Homo sapiens
tcacttagaaaaatagcttttgcatttcatacagcttctaattccaaaattagttcaacatctagcagtgaatgtagaaatatataccccttttggagacatacttagggctggtattgatttatgctgtaccatgattttagtcttatgggataatcaccttgtcaaggctatatttattgttgtggctattaaatcacattaattccttggcgattacatgagataaagcatccacaaactgcagcagtgacagaattcagtttttctccctaaataaactcaatacaaagatagccatgtcctagtttttcaatggcattccaactttttttttttttgcatatcttactgagcattagagttgcagcttgtgctttgccacagatttgaactctggtgtaaaagcaccttgagggaga

SEQ ID NO: 549698 - DNA, 920 bp, Homo sapiens
ggagcttcccggtgcctccgcgggcgcccaggtgtagcggaggctgctggagatgcgaccggggggaggaggaggcgccctgggggggagggacgggaatgccggccagtgttctgtgctgtcttcccgggccaagggagccaggtgttggggcattgggccggggtatagtcaaaatacctgagagcgtccgggaaaactctacggcggacgcccgcggggtgcgtgggatacagaacctgttggaaattggaagcctttggaagggggccggaagaaagacctcttgaagcgggaagctgttgatttggtaaggcggcggaattttgcagttgggcaatcggagtggccctgatgttaggaaaaaattaattttaatttgggaggcctcgggtggattgagaaaaagtgtgttggtggtggaggattcacaggggtggggaggagttgtggcagcccttagttggttggcgggacagccattggaaatttggctgggagggtttggtatcggagggggaaaactccagagttggaggcatggcagggaaggttaaggaaggttgccagaggtgagattggtgttggctcgggcaagctatagtccatgtcattcgctgttgtgaaagccggggaacactggaggtttaggcatagagacccccgtttgtgcagtgtcaactaccttacagatgccgggtggtcggcacccagaggtcagggtctcagagatccctagttcattagagccacggagtgccgtagtgcgatccaaccggtatgggcaggtgaccataagagttaaggggcgaataagacctgttggaaccacgcacgaaaaggtcgggccaggtggcaggggccgggtgcagtcggctaagaaggggcccatgagcggacgcagaagacgtgcacgccag

SEQ ID NO: 549699 - DNA, 139 bp, Homo sapiens
cttcctacatctcccagtagcctttatgctaaggatttctcaagaccgctcttcgttcaagtgagttgactcttcctttttcctccccatggaggctggctggacaattcttacattcatgttcttgacttaggatcac

SEQ ID NO: 549700 - DNA, 306 bp, Homo sapiens
  misc_feature (46)..(46): n is a, c, g, or t
  misc_feature (158)..(158): n is a, c, g, or t
aggtctccacatatctataatgacacgatggtagtgagcatggttngctgtcaacttcagaggctgctgtggcggggtctagtactgcatctgctcaagaactgtaggttggatttcgtagccgtctgctgcatcttggacaggtggcgctcctctgnggtgacagcggcgtcaaccgtccaccacacatgatgaatggatgtgtactgtttcttcttcagcatcaccaaggtgatgacgatcactgtcgctatgacaacaccggccaccatgagtccaatgattgcacctttgtttgaacccact

SEQ ID NO: 549701 - DNA, 101 bp, Homo sapiens
gagatatccccgagtccttcaatgctatccttctctttgactacttggacccatactgcatagtacccgagaaccctacgtgcgaagcacgtgactcacgg

SEQ ID NO: 549702 - DNA, 290 bp, Homo sapiens
actagagggaacccccgccacagcccccaaaggtacgagcccagcttacttgtcagtaaaaagcatgcatcattcacaatttatatcttttttggtggtacaaaaatgaacacaagatattctcttttatctgcaaagcgaaaggtttggcgagagggaattaggccacttgagagttagtgtgtgttcacaattttctggccaggcacggtggatcatgcctgcaatcccagcaccttgcgaggccaaggcgctcggatcacttgagctcatgagagcgagaccaaatt

SEQ ID NO: 549703 - DNA, 518 bp, Homo sapiens
tataaagaggacccccttttatgggggtaaaaaaggggggttaaatttcccgggacatggaaagggaccttatccctaatcccaggggaaccaaaaatatttttttttcaaaggaaagaaaagggggggcaaaaaagagaggcggggctaaacaaccaaaaaaatttcttgccgctggctactttaccgcaacgcccagtgagtttctggcccccagttcatacagcgtacccaggaaaaccacccttaacccggaagatcctcataagcatacaatgcaacaaggggggcgggggccaacaaactctccggggtggggaaaggggggtgcaggcaatactggggtggggcccccagccacaagtgccctgcgtggctacccgctgtggggtatcaccccagtggtgtttgtccccttgtgcgcaggttgtgtaccctccgggggagaggggccgtgaccaaagtgatcaggggtggggaaacacgcactcgtgattcagcacagggttccacgagtg

SEQ ID NO: 549704 - DNA, 149 bp, Homo sapiens
atggcagaagcaggaagcataagagatactgccctggcacccagcacaatgaagatcaagatcattgctcctcctgagcgcgagtactccgtgtggatcggcggctccatctctggcctcgctgtccaccttccggcagaagcaggaag

SEQ ID NO: 549705 - DNA, 163 bp, Homo sapiens
tccagtctcttccatcacacctaccttgaataggcatctctcctagcaactctgaccccaactctcatctgttaatagatcagacacaagtatgaccaatgcatctgacatgagcaagaaaggaggagtacaagagtgttttgttgctgtataatgtcgacgc

SEQ ID NO: 549706 - DNA, 156 bp, Homo sapiens
  misc_feature (89)..(89): n is a, c, g, or t
gtgatgctgaggtcgctctagagatcccccaaccctttgttcacctgacgacagcgggcctgtggtgggacggggtgacgcacctcctngcctccacttgcatctccttcccagcaggcccgggctctcctgcctctgacttcaagtccttggtac

SEQ ID NO: 549707 - DNA, 204 bp, Homo sapiens
cctgtggtgtactgtcagttgtacctctacggcatgcaatgctagatcctaggacatgcctctgttcagttttcctcaaaacaatcaatggacttcttcaagtacacagtagagtacgttaggaaagggatcttactccagaggccactgtagtggcgatgtcctcccctagacgttatccgacgacattgcttttacatctgt

SEQ ID NO: 549708 - DNA, 148 bp, Homo sapiens
gaattcaagtttgaccctcatgaggcaacgtgttacgatgatgggaagacataaccacgtaaggagaacagtggcagaaggaatatctacggtgccatattgctcctgcacatagctaaggaggccaacgggactaggcgcttgtgac

SEQ ID NO: 549709 - DNA, 3222 bp, Homo sapiens
  misc_feature (33)..(33): n is a, c, g, or t
tcgactctgtctccaaaaaaaaaaaaaaaaaanttttttttttagatcatcagctattgttagtgttagtgtatgttatgtgtggctcaagacaactttgtttcttttaatataggcagggaagtcaaaagattggatatccctgctttataccaagaaagacaacaccccacatttgcaatgcctaaaaacactaccagccatctgaaaaacatgagacttctaacttctgttcttttttgtagcagtggaatcccacggtgatatctgagggatgtggttaccttttggaggaggttgacggtttctaaggatgattctttctgagtgaaatattgtcagtgtcattgaccttttcattatttcaactattattattccaggttatcaatactctggctgaccatcatcatcgtgggactgactttggtggaagtccttggttacatgtcattattgcgtttccgacaagttataaagttgtcattaccctctggatagtttacctttgggtgtctctcctgaagactatcttctggtctcgaaatggacatgatggatccacggatgtacagcagagagcctggaggtccaaccgccgtagacaggaagggctgaggtccatttgtatgcacacaaagaaaagagtttcttcctttcgaggaaataaaattggcctgaaagacgtcattactctacggagacatgtggaaacaaaagttagagctaaaatccgtaagaggaaggtgacaacgaaaatcaaccatcatgacaaaatcaatggaaagaggaagaccgccaaagaacatctgaggaaactaagcatgaaagaacgtgagcacggagaaaaggagaggcaggtgtcagaggcagaggaaaatgggaaattggatatgaaagaaatacacacctacatggaaatgtttcaacgtgcgcaagcgttgcggcggcgggcagaggactactacagatgcaaaatcaccccttctgcaagaaagcctctttgcaaccgtgggtaagtttgcttgttttccttgcttttggacatagtctgccaggtcaggacatggatacatttttctccctacggctctgtgctcaagccctgcagagggagatggcagagaggaaggctgcctacaagcatcacagtcccatccctgttgggacaattccaaatgagggccttaaatgatgctcagctaagctggttcttgtgtggcctctgtaccttcaaaagctgccgagtcctatgattacacgcgatgggacttgtacacttgaagtgaaacacagttttaaaacttgctttgtttagaattcccacctcatttttccatggacaaaagtattctttatgtcctagtgcacttacaatttggtattacctgggagtgaaaagaaatattacagccatgcctaactgacttcttgaggtaagattgttctgtcagaaaaccctctcccagttcccctgcagctcttcaggaatccacatctctccagagctctttgttctcatgggtggcacctccagagtgaagaagatcctttgtcaagaagggaaacagaggggaaatgagagggtcctgcaggcagagctggaatcaacttccactctgcctcttgcaagctgtgtgaccctgggcacaatttctccttcctctggaaacctctgttttcttagatttggagcagggtggtcacactgaccttgcagagttctgagaatcagagacagaacataaaaggcctggaaaacattctccaaaaagaagctgcaacatgtgtggacaatgggcttttcatgcctctcttactgtctcttactgtctattgacctggtgcaagaaacatgctctggtgatggctgtgagggaggaatgaggatagacatagacactcctgtgtctcaaacatgcttctttattactctgttatgactctgtcttccctggggcaggaccccagcctgcctacatttgcagacagacacagtggcatgtggagacaacagtgtgtcccaatgacttttctttaccccctagctgtcggcagtactcagtggaagggtgatattatgacactgacactgctattttgaaacctggaggatggaaaggtgcaaaaatctatcaccagcaacagaaggtgcagactgtgttggtggcggtaattttgtccatcaaatgaatatgtgtgaaaacattccctcctttggccctacggtcagaatggcggcagcggagcatcgtcattcttcaggattgccctactggccctacctcacagctgaaactttaaaaaacaggatgggccaccagccacctcctccaactcaacaacattctataactgataactccctgagcctcaagacacctcccgagtgtctgctcgcttccaccctcagcggatgataatctcaagacaccttccgagcgtcagctcactccccttccaccctcagctccaccctcagcagatgataatatcaagatacctgctgagcgtctgcggattccgcttccaccatcagccgatgataatctcaagacaccttccgagcgtcagctcactccccttccaccctcagctccaccctcagcagatgataatatcaagacacctgccgagcgtctgcagctgcgggggccgcttccaccctcagcggatgataatctcaagacaccttccgagcgtcagctcactccccttccaccctcagcatccaacccgtcagcagaatagataagtatcaagacaactggccgagcgtctgggggggccgagttccacccgtcagcggagtgagtagatctcaagagaccttcggagacgtacggaggtgcgagtgccgcatgggcgaccgctgcgagctcgacccgtcagacagatagatagtggtcgaggagaccgtgcgcgagcgtcatgcgggggccgattccagcactcagcggatgagcggctgcaagaggacattcgcgagcgagtagcggtgtcacgctgccacaataagacgaaaccatcggactccaacccttcaagcgagaaagaatagaacactccagagaggacccgggaccggaggcggtctgcggggaagcccggaatgtacgcaagcaggcaggcgggagtaaggcagtgactcaggggaatacccagtcccgaagcggaggcgtgcaccacccggtgggagaaaccgcaggtttccaaccctac

SEQ ID NO: 549710 - DNA, 3135 bp, Homo sapiens
  misc_feature (33)..(33): n is a, c, g, or t
tcgactctgtctccaaaaaaaaaaaaaaaaaanttttttttttagatcatcagctattgttagtgttagtgtatgttatgtgtggctcaagacaactttgtttcttttaatataggcagggaagtcaaaagattggatatccctgctttataccaagaaagacaacaccccacatttgcaatgcctaaaaacactaccagccatctgaaaaacatgagacttctaacttctgttcttttttgtagcagtggaatcccacggtgatatctgagggatgtggttaccttttggaggaggttgacggtttctaaggatgattctttctgagtgaaatattgtcagtgtcattgaccttttcattatttcaactattattattccaggttatcaatactctggctgaccatcatcatcgtgggactgactttggtggaagtccttggttacatgtcattattgcgtttccgacaagttataaagttgtcattaccctctggatagtttacctttgggtgtctctcctgaagactatcttctggtctcgaaatggacatgatggatccacggatgtacagcagagagcctggaggtccaaccgccgtagacaggaagggctgaggtccatttgtatgcacacaaagaaaagagtttcttcctttcgaggaaataaaattggcctgaaagacgtcattactctacggagacatgtggaaacaaaagttagagctaaaatccgtaagaggaaggtgacaacgaaaatcaaccatcatgacaaaatcaatggaaagaggaagaccgccaaagaacatctgaggaaactaagcatgaaagaacgtgagcacggagaaaaggagaggcaggtgtcagaggcagaggaaaatgggaaattggatatgaaagaaatacacacctacatggaaatgtttcaacgtgcgcaagcgttgcggcggcgggcagaggactactacagatgcaaaatcaccccttctgcaagaaagcctctttgcaaccgtgggtaagtttgcttgttttccttgcttttggacatagtctgccaggtcaggacatggatacatttttctccctacggctctgtgctcaagccctgcagagggagatggcagagaggaaggctgcctacaagcatcacagtcccatccctgttgggacaattccaaatgagggccttaaatgatgctcagctaagctggttcttgtgtggcctctgtaccttcaaaagctgccgagtcctatgattacacgcgatgggacttgtacacttgaagtgaaacacagttttaaaacttgctttgtttagaattcccacctcatttttccatggacaaaagtattctttatgtcctagtgcacttacaatttggtattacctgggagtgaaaagaaatattacagccatgcctaactgacttcttgaggtaagattgttctgtcagaaaaccctctcccagttcccctgcagctcttcaggaatccacatctctccagagctctttgttctcatgggtggcacctccagagtgaagaagatcctttgtcaagaagggaaacagaggggaaatgagagggtcctgcaggcagagctggaatcaacttccactctgcctcttgcaagctgtgtgaccctgggcacaatttctccttcctctggaaacctctgttttcttagatttggagcagggtggtcacactgaccttgcagagttctgagaatcagagacagaacataaaaggcctggaaaacattctccaaaaagaagctgcaacatgtgtggacaatgggcttttcatgcctctcttactgtctcttactgtctattgacctggtgcaagaaacatgctctggtgatggctgtgagggaggaatgaggatagacatagacactcctgtgtctcaaacatgcttctttattactctgttatgactctgtcttccctggggcaggaccccagcctgcctacatttgcagacagacacagtggcatgtggagacaacagtgtgtcccaatgacttttctttaccccctagctgtcggcagtactcagtggaagggtgatattatgacactgacactgctattttgaaacctggaggatggaaaggtgcaaaaatctatcaccagcaacagaaggtgcagactgtgttggtggcggtaattttgtccatcaaatgaatatgtgtgaaaacattccctcctttggccctacggtcagaatggcggcagcggagcatcgtcattcttcaggattgccctactggccctacctcacagctgaaactttaaaaaacaggatgggccaccagccacctcctccaactcaacaacattctataactgataactccctgagcctcaagacacctcccgagtgtctgctcgcttccaccctcagcggatgataatctcaagacaccttccgagcgtcagctcactccccttccaccctcagctccaccctcagcagatgataatatcaagacacctgccgagcgtctgcgggggccgcttccaccctgagcggatgataatctcaagacaccttccgagcgtcagctcactccccttccaccctcagctccaccctcagcagatgataatatcaagatacctgctgagcgtctgcggattccgcttccaccatcagccgatgataatctcaagacaccttccgagcgtcagctcactccccttccaccctcagctccaccctcagccttccaccctcagcagatgataatatcaagacacctgccgagcgtctgcgggggccgcttccaccctcagcggatgataatctcaagacaccttccgagcgtcagctcactccccttccaccctcagctccaccctcagcagatgataatatcaagacacctgccgagcgtctgcgggggccgcttccaccctcagcggatgataatctcaagacaccttccgagcgtcagctcactccccttccaccctcagctccaccctcagcagatgataatatcaagacacctgccgagcgtctgcgggggccgcttccaccctcagcggatgataatctcaagacaccttccgagcgtcagctcactccccttccaccctcagctccatccgaagcagttgccg

SEQ ID NO: 549711 - DNA, 2697 bp, Homo sapiens
  misc_feature (33)..(33): n is a, c, g, or t
  misc_feature (2677)..(2677): n is a, c, g, or t
tcgactctgtctccaaaaaaaaaaaaaaaaaanttttttttttagatcatcagctattgttagtgttagtgtatgttatgtgtggctcaagacaactttgtttcttttaatataggcagggaagtcaaaagattggatatccctgctttataccaagaaagacaacaccccacatttgcaatgcctaaaaacactaccagccatctgaaaaacatgagacttctaacttctgttcttttttgtagcagtggaatcccacggtgatatctgagggatgtggttaccttttggaggaggttgacggtttctaaggatgattctttctgagtgaaatattgtcagtgtcattgaccttttcattatttcaactattattattccaggttatcaatactctggctgaccatcatcatcgtgggactgactttggtggaagtccttggttacatgtcattattgcgtttccgacaagttataaagttgtcattaccctctggatagtttacctttgggtgtctctcctgaagactatcttctggtctcgaaatggacatgatggatccacggatgtacagcagagagcctggaggtccaaccgccgtagacaggaagggctgaggtccatttgtatgcacacaaagaaaagagtttcttcctttcgaggaaataaaattggcctgaaagacgtcattactctacggagacatgtggaaacaaaagttagagctaaaatccgtaagaggaaggtgacaacgaaaatcaaccatcatgacaaaatcaatggaaagaggaagaccgccaaagaacatctgaggaaactaagcatgaaagaacgtgagcacggagaaaaggagaggcaggtgtcagaggcagaggaaaatgggaaattggatatgaaagaaatacacacctacatggaaatgtttcaacgtgcgcaagcgttgcggcggcgggcagaggactactacagatgcaaaatcaccccttctgcaagaaagcctctttgcaaccgtgggtaagtttgcttgttttccttgcttttggacatagtctgccaggtcaggacatggatacatttttctccctacggctctgtgctcaagccctgcagagggagatggcagagaggaaggctgcctacaagcatcacagtcccatccctgttgggacaattccaaatgagggccttaaatgatgctcagctaagctggttcttgtgtggcctctgtaccttcaaaagctgccgagtcctatgattacacgcgatgggacttgtacacttgaagtgaaacacagttttaaaacttgctttgtttagaattcccacctcatttttccatggacaaaagtattctttatgtcctagtgcacttacaatttggtattacctgggagtgaaaagaaatattacagccatgcctaactgacttcttgaggtaagattgttctgtcagaaaaccctctcccagttcccctgcagctcttcaggaatccacatctctccagagctctttgttctcatgggtggcacctccagagtgaagaagatcctttgtcaagaagggaaacagaggggaaatgagagggtcctgcaggcagagctggaatcaacttccactctgcctcttgcaagctgtgtgaccctgggcacaatttctccttcctctggaaacctctgttttcttagatttggagcagggtggtcacactgaccttgcagagttctgagaatcagagacagaacataaaaggcctggaaaacattctccaaaaagaagctgcaacatgtgtggacaatgggcttttcatgcctctcttactgtctcttactgtctattgacctggtgcaagaaacatgctctggtgatggctgtgagggaggaatgaggatagacatagacactcctgtgtctcaaacatgcttctttattactctgttatgactctgtcttccctggggcaggaccccagcctgcctacatttgcagacagacacagtggcatgtggagacaacagtgtgtcccaatgacttttctttaccccctagctgtcggcagtactcagtggaagggtgatattatgacactgacactgctattttgaaacctggaggatggaaaggtgcaaaaatctatcaccagcaacagaaggtgcagactgtgttggtggcggtaattttgtccatcaaatgaatatgtgtgaaaacattccctcctttggccctacggtcagaatggcggcagcggagcatcgtcattcttcaggattgccctactggccctacctcacagctgaaactttaaaaaacaggatgggccaccagccacctcctccaactcaacaacattctataactgataactccctgagcctcaagacacctcccgagtgtctgctcgcttccaccctcagcggatgataatctcaagacaccttccgagcgtcagctcactccccttccaccctcagctccaccctcagcagatgataatatcaagacacctgccgagcgtctgcgggggccgcttccaccctgagcggatgataatctcaagacaccttccgagcgtcagctcactccccttccaccctcagctccaccctcagcagatgataatatcaagacacctgccgagcgtctgcgggggccgcttccaccctcagcgatgaaaatcntcgcagagcgaaaccctata

SEQ ID NO: 549712 - DNA, 184 bp, Homo sapiens
gtgctcggtccgccacgccgatcagtatttgctgaatcgcagccacaggcggcggcggagaagatcgggatattgctggcgggcagcgtcggcgcgatcaggatgacgatcagcccgccaagacctattttgacctttttgctgatttgcttttcgctgaatatcggcgcggtgctgatcagcg

SEQ ID NO: 549713 - DNA, 385 bp, Homo sapiens
ggggacagcacgggggctaagtgatcaagcgcgtaactaggatcctacactaaatagtgagtcataaatacttaaaatacaaagccaacaacattagctagcaaataaacgtaaaaaatactagtaaaagtgtaaagtagtaatacctaccgataccatactagacgttatactaggacggttacgtaagaacagcagagaaaacgctagacaccgtctagcactagatgcatagggagacactaaaagcaaaggtagaggagatcctactaaatattgtcgacctagcaaggacatagcaaagctataggcacctaggaccagtacgtaatcaaccaaaaatacgttagacttgaggaaaaacccattggacggacaaaggagc

SEQ ID NO: 549714 - DNA, 2849 bp, Homo sapiens
  misc_feature (33)..(33): n is a, c, g, or t
  misc_feature (2804)..(2804): n is a, c, g, or t
tcgactctgtctccaaaaaaaaaaaaaaaaaanttttttttttagatcatcagctattgttagtgttagtgtatgttatgtgtggctcaagacaactttgtttcttttaatataggcagggaagtcaaaagattggatatccctgctttataccaagaaagacaacaccccacatttgcaatgcctaaaaacactaccagccatctgaaaaacatgagacttctaacttctgttcttttttgtagcagtggaatcccacggtgatatctgagggatgtggttaccttttggaggaggttgacggtttctaaggatgattctttctgagtgaaatattgtcagtgtcattgaccttttcattatttcaactattattattccaggttatcaatactctggctgaccatcatcatcgtgggactgactttggtggaagtccttggttacatgtcattattgcgtttccgacaagttataaagttgtcattaccctctggatagtttacctttgggtgtctctcctgaagactatcttctggtctcgaaatggacatgatggatccacggatgtacagcagagagcctggaggtccaaccgccgtagacaggaagggctgaggtccatttgtatgcacacaaagaaaagagtttcttcctttcgaggaaataaaattggcctgaaagacgtcattactctacggagacatgtggaaacaaaagttagagctaaaatccgtaagaggaaggtgacaacgaaaatcaaccatcatgacaaaatcaatggaaagaggaagaccgccaaagaacatctgaggaaactaagcatgaaagaacgtgagcacggagaaaaggagaggcaggtgtcagaggcagaggaaaatgggaaattggatatgaaagaaatacacacctacatggaaatgtttcaacgtgcgcaagcgttgcggcggcgggcagaggactactacagatgcaaaatcaccccttctgcaagaaagcctctttgcaaccgtgggtaagtttgcttgttttccttgcttttggacatagtctgccaggtcaggacatggatacatttttctccctacggctctgtgctcaagccctgcagagggagatggcagagaggaaggctgcctacaagcatcacagtcccatccctgttgggacaattccaaatgagggccttaaatgatgctcagctaagctggttcttgtgtggcctctgtaccttcaaaagctgccgagtcctatgattacacgcgatgggacttgtacacttgaagtgaaacacagttttaaaacttgctttgtttagaattcccacctcatttttccatggacaaaagtattctttatgtcctagtgcacttacaatttggtattacctgggagtgaaaagaaatattacagccatgcctaactgacttcttgaggtaagattgttctgtcagaaaaccctctcccagttcccctgcagctcttcaggaatccacatctctccagagctctttgttctcatgggtggcacctccagagtgaagaagatcctttgtcaagaagggaaacagaggggaaatgagagggtcctgcaggcagagctggaatcaacttccactctgcctcttgcaagctgtgtgaccctgggcacaatttctccttcctctggaaacctctgttttcttagatttggagcagggtggtcacactgaccttgcagagttctgagaatcagagacagaacataaaaggcctggaaaacattctccaaaaagaagctgcaacatgtgtggacaatgggcttttcatgcctctcttactgtctcttactgtctattgacctggtgcaagaaacatgctctggtgatggctgtgagggaggaatgaggatagacatagacactcctgtgtctcaaacatgcttctttattactctgttatgactctgtcttccctggggcaggaccccagcctgcctacatttgcagacagacacagtggcatgtggagacaacagtgtgtcccaatgacttttctttaccccctagctgtcggcagtactcagtggaagggtgatattatgacactgacactgctattttgaaacctggaggatggaaaggtgcaaaaatctatcaccagcaacagaaggtgcagactgtgttggtggcggtaattttgtccatcaaatgaatatgtgtgaaaacattccctcctttggccctacggtcagaatggcggcagcggagcatcgtcattcttcaggattgccctactggccctacctcacagctgaaactttaaaaaacaggatgggccaccagccacctcctccaactcaacaacattctataactgataactccctgagcctcaagacacctcccgagtgtctgctcgcttccaccctcagcggatgataatctcaagacaccttccgagcgtcagctcactccccttccaccctcagctccttccaccctcagcagatgataatatcaagacacctgccgagcgtctgcgggggccgcttccaccctcagcggatgataatctcaagacaccttccgagcgtcagctcactccccttccaccctcagctccaccctcagcagatgataatatcaagacacctgccgagcgtctgcgggggccgcttccaccctcagcggatgataatctcaagacaccttccgagcgtcagctcactccccttccaccctcagctccaccctcagcagatgataatatcaagacacctgccgagcgtctgcgggggccgcttccaccctcagcgatgatantctcaaacacacggggggatgagcacacagtaccgagctcgatga

SEQ ID NO: 549715 - DNA, 3243 bp, Homo sapiens
  misc_feature (33)..(33): n is a, c, g, or t
  misc_feature (2521)..(2521): n is a, c, g, or t
  misc_feature (3072)..(3072): n is a, c, g, or t
  misc_feature (3088)..(3088): n is a, c, g, or t
  misc_feature (3199)..(3199): n is a, c, g, or t
  misc_feature (3228)..(3228): n is a, c, g, or t
tcgactctgtctccaaaaaaaaaaaaaaaaaanttttttttttagatcatcagctattgttagtgttagtgtatgttatgtgtggctcaagacaactttgtttcttttaatataggcagggaagtcaaaagattggatatccctgctttataccaagaaagacaacaccccacatttgcaatgcctaaaaacactaccagccatctgaaaaacatgagacttctaacttctgttcttttttgtagcagtggaatcccacggtgatatctgagggatgtggttaccttttggaggaggttgacggtttctaaggatgattctttctgagtgaaatattgtcagtgtcattgaccttttcattatttcaactattattattccaggttatcaatactctggctgaccatcatcatcgtgggactgactttggtggaagtccttggttacatgtcattattgcgtttccgacaagttataaagttgtcattaccctctggatagtttacctttgggtgtctctcctgaagactatcttctggtctcgaaatggacatgatggatccacggatgtacagcagagagcctggaggtccaaccgccgtagacaggaagggctgaggtccatttgtatgcacacaaagaaaagagtttcttcctttcgaggaaataaaattggcctgaaagacgtcattactctacggagacatgtggaaacaaaagttagagctaaaatccgtaagaggaaggtgacaacgaaaatcaaccatcatgacaaaatcaatggaaagaggaagaccgccaaagaacatctgaggaaactaagcatgaaagaacgtgagcacggagaaaaggagaggcaggtgtcagaggcagaggaaaatgggaaattggatatgaaagaaatacacacctacatggaaatgtttcaacgtgcgcaagcgttgcggcggcgggcagaggactactacagatgcaaaatcaccccttctgcaagaaagcctctttgcaaccgtgggtaagtttgcttgttttccttgcttttggacatagtctgccaggtcaggacatggatacatttttctccctacggctctgtgctcaagccctgcagagggagatggcagagaggaaggctgcctacaagcatcacagtcccatccctgttgggacaattccaaatgagggccttaaatgatgctcagctaagctggttcttgtgtggcctctgtaccttcaaaagctgccgagtcctatgattacacgcgatgggacttgtacacttgaagtgaaacacagttttaaaacttgctttgtttagaattcccacctcatttttccatggacaaaagtattctttatgtcctagtgcacttacaatttggtattacctgggagtgaaaagaaatattacagccatgcctaactgacttcttgaggtaagattgttctgtcagaaaaccctctcccagttcccctgcagctcttcaggaatccacatctctccagagctctttgttctcatgggtggcacctccagagtgaagaagatcctttgtcaagaagggaaacagaggggaaatgagagggtcctgcaggcagagctggaatcaacttccactctgcctcttgcaagctgtgtgaccctgggcacaatttctccttcctctggaaacctctgttttcttagatttggagcagggtggtcacactgaccttgcagagttctgagaatcagagacagaacataaaaggcctggaaaacattctccaaaaagaagctgcaacatgtgtggacaatgggcttttcatgcctctcttactgtctcttactgtctattgacctggtgcaagaaacatgctctggtgatggctgtgagggaggaatgaggatagacatagacactcctgtgtctcaaacatgcttctttattactctgttatgactctgtcttccctggggcaggaccccagcctgcctacatttgcagacagacacagtggcatgtggagacaacagtgtgtcccaatgacttttctttaccccctagctgtcggcagtactcagtggaagggtgatattatgacactgacactgctattttgaaacctggaggatggaaaggtgcaaaaatctatcaccagcaacagaaggtgcagactgtgttggtggcggtaattttgtccatcaaatgaatatgtgtgaaaacattccctcctttggccctacggtcagaatggcggcagcggagcatcgtcattcttcaggattgccctactggccctacctcacagctgaaactttaaaaaacaggatgggccaccagccacctcctccaactcaacaacattctataactgataactccctgagcctcaagacacctcccgagtgtctgctcactccccttccaccctcagcggatgataatctcaagacacctcccgagtgtgtgctcactccccttccaccctcagcggatgataatctcaagacaccttccgagtgtgtgctcactccccntccaccctcagcctcccgagtagctgggattacaggtgcctgccaccacgcctggctaattttttgtatttttagtagagaaggggtttcaccatattagccacaatggtctcaatctcctgacctcgtgatccatccgccccgccctcccagagtgctgggattacaggcgtcagccaccgtgaccggctcagactgtactcttctagccatctgaaatacgttttctaggtagagatagattgtgtaagggtacagttgtgaggataacagaaacatggcagattatttaaaatcatcctgaaagtggtgctttatctgatgaaagtgattgtaatccataggaaaatgtttcaacgtgcgcaagagttgcggcggcgagcagaggactaccacaaatgcaaagtaaggagcttcctccctgcagttgcaggatagttcagtgctgatgcagatgatgccacggcccttagactctctcaacattcaatttctcatgtgttggctttttcagatccccccttctgcaagaaaggctctttgcaactggntcagaatggcggcagnggagcatcgtcattcttcaggattgccctactggccctacctcacagctgaaactttaaaaaacaggatgggcctccagccacctcctccaactcaacaacattctataantgataactccctgagcctcaagacacctnccgagtgtgtgctca

SEQ ID NO: 549716 - DNA, 3134 bp, Homo sapiens
  misc_feature (33)..(33): n is a, c, g, or t
  misc_feature (2521)..(2521): n is a, c, g, or t
  misc_feature (2963)..(2963): n is a, c, g, or t
  misc_feature (2979)..(2979): n is a, c, g, or t
  misc_feature (3090)..(3090): n is a, c, g, or t
  misc_feature (3119)..(3119): n is a, c, g, or t
tcgactctgtctccaaaaaaaaaaaaaaaaaanttttttttttagatcatcagctattgttagtgttagtgtatgttatgtgtggctcaagacaactttgtttcttttaatataggcagggaagtcaaaagattggatatccctgctttataccaagaaagacaacaccccacatttgcaatgcctaaaaacactaccagccatctgaaaaacatgagacttctaacttctgttcttttttgtagcagtggaatcccacggtgatatctgagggatgtggttaccttttggaggaggttgacggtttctaaggatgattctttctgagtgaaatattgtcagtgtcattgaccttttcattatttcaactattattattccaggttatcaatactctggctgaccatcatcatcgtgggactgactttggtggaagtccttggttacatgtcattattgcgtttccgacaagttataaagttgtcattaccctctggatagtttacctttgggtgtctctcctgaagactatcttctggtctcgaaatggacatgatggatccacggatgtacagcagagagcctggaggtccaaccgccgtagacaggaagggctgaggtccatttgtatgcacacaaagaaaagagtttcttcctttcgaggaaataaaattggcctgaaagacgtcattactctacggagacatgtggaaacaaaagttagagctaaaatccgtaagaggaaggtgacaacgaaaatcaaccatcatgacaaaatcaatggaaagaggaagaccgccaaagaacatctgaggaaactaagcatgaaagaacgtgagcacggagaaaaggagaggcaggtgtcagaggcagaggaaaatgggaaattggatatgaaagaaatacacacctacatggaaatgtttcaacgtgcgcaagcgttgcggcggcgggcagaggactactacagatgcaaaatcaccccttctgcaagaaagcctctttgcaaccgtgggtaagtttgcttgttttccttgcttttggacatagtctgccaggtcaggacatggatacatttttctccctacggctctgtgctcaagccctgcagagggagatggcagagaggaaggctgcctacaagcatcacagtcccatccctgttgggacaattccaaatgagggccttaaatgatgctcagctaagctggttcttgtgtggcctctgtaccttcaaaagctgccgagtcctatgattacacgcgatgggacttgtacacttgaagtgaaacacagttttaaaacttgctttgtttagaattcccacctcatttttccatggacaaaagtattctttatgtcctagtgcacttacaatttggtattacctgggagtgaaaagaaatattacagccatgcctaactgacttcttgaggtaagattgttctgtcagaaaaccctctcccagttcccctgcagctcttcaggaatccacatctctccagagctctttgttctcatgggtggcacctccagagtgaagaagatcctttgtcaagaagggaaacagaggggaaatgagagggtcctgcaggcagagctggaatcaacttccactctgcctcttgcaagctgtgtgaccctgggcacaatttctccttcctctggaaacctctgttttcttagatttggagcagggtggtcacactgaccttgcagagttctgagaatcagagacagaacataaaaggcctggaaaacattctccaaaaagaagctgcaacatgtgtggacaatgggcttttcatgcctctcttactgtctcttactgtctattgacctggtgcaagaaacatgctctggtgatggctgtgagggaggaatgaggatagacatagacactcctgtgtctcaaacatgcttctttattactctgttatgactctgtcttccctggggcaggaccccagcctgcctacatttgcagacagacacagtggcatgtggagacaacagtgtgtcccaatgacttttctttaccccctagctgtcggcagtactcagtggaagggtgatattatgacactgacactgctattttgaaacctggaggatggaaaggtgcaaaaatctatcaccagcaacagaaggtgcagactgtgttggtggcggtaattttgtccatcaaatgaatatgtgtgaaaacattccctcctttggccctacggtcagaatggcggcagcggagcatcgtcattcttcaggattgccctactggccctacctcacagctgaaactttaaaaaacaggatgggccaccagccacctcctccaactcaacaacattctataactgataactccctgagcctcaagacacctcccgagtgtctgctcactccccttccaccctcagcggatgataatctcaagacacctcccgagtgtgtgctcactccccttccaccctcagcggatgataatctcaagacaccttccgagtgtgtgctcactccccntccaccctcagcctcccgagtagctgggattacaggtgcctgccaccacgcctggctaattttttgtatttttagtagagaaggggtttcaccatattagccacaatggtctcaatctcctgacctcgtgatccatccgccccgccctcccagagtgctgggattacaggcgtcagccaccgtgaccggctcagactgtactcttctagccatctgaaatacgttttctaggtagagatagattgtgtaagggtacagttgtgaggataacagaaacatggcagattatttaaaatcatcctgaaagtggtgctttatctgatgaaagtgattgtaatccataggaaaatgtttcaacgtgcgcaagagttgcggcggcgagcagaggactaccacaaatgcaaaatccccccttctgcaagaaaggctctttgcaactggntcagaatggcggcagnggagcatcgtcattcttcaggattgccctactggccctacctcacagctgaaactttaaaaaacaggatgggcctccagccacctcctccaactcaacaacattctataantgataactccctgagcctcaagacacctnccgagtgtgtgctca

SEQ ID NO: 549717 - DNA, 1149 bp, Homo sapiens
atgttgagcccagatagcctaagtatatatcatatggctatccccccagtttttccaacgtattctcttttgcggaccgggatggtaccttgtgcgcaaatatctaccttaaaacgggctgcccgaaaatttcacctactaatgtctcgcccaaccatttaaatgtgagaattggccattttcccctattacgctggcctcctacaattattaccttagtatataggcaacccctatgtggttggtttttaatggtatagaacaccggaaggtttccttctttcccttaagtattacccttcaacatggatgcacgggtacttagtgcccttgtttcacgctcccttaacgcttgctttgcgcgtttcccgttaacatacttgggatgacattcagttacaggtataacagtaatgacagttcagtcaacaccaaggcaagattacccttgctttccctaggcgtgatgtcactcaccaccatttcgctaacagggttcgttaattcaagtatcctgggtggtatacacgacacgggacagaccgggttggaccagtgctgatatgtcatgaaaccactaacctgcacttcctcgatctgcagtagccatctgatcatcttagttagcgagtgaacggttcttcagttggagacttctcagcccttaggaaggtagcaacgtggaggtagcggtatcggaggaggttcccttgctgggcatgacttcgtagagggccaggagcagacaggtcatgtgcactatgccgattgacagcaacaagcttatgcttcaccgctatgccgctggcttttgcattcatgcgacagtcccaggatcccagctcccctcttatggctttctgtcattatgtgcgtttatctgagttggctccccaagcatcaccgagaatgtcaacttgcagtatttctagtgggaaccaataatgtacaagtttgacaattatgctgtgagcattcaaatgtgcttagttcggagaaatgctaatgcgcagggcataatatataacaataaaaagagacaatcattctgtttcctgcagtgggaactggccatgtagtcttaacagtctaggtacaaatatctacaaagcagataatatccctatacagccgcggccttggaatgtt

SEQ ID NO: 549718 - DNA, 100 bp, Homo sapiens
attcacttggaagcccacattctctttttctgtgtgtgtgacggggtctcactttgtcacccaggccgcagtgcagtggtgtgaacacagctcattgcag

SEQ ID NO: 549719 - DNA, 2511 bp, Homo sapiens
  misc_feature (33)..(33): n is a, c, g, or t
  misc_feature (2499)..(2499): n is a, c, g, or t
tcgactctgtctccaaaaaaaaaaaaaaaaaanttttttttttagatcatcagctattgttagtgttagtgtatgttatgtgtggctcaagacaactttgtttcttttaatataggcagggaagtcaaaagattggatatccctgctttataccaagaaagacaacaccccacatttgcaatgcctaaaaacactaccagccatctgaaaaacatgagacttctaacttctgttcttttttgtagcagtggaatcccacggtgatatctgagggatgtggttaccttttggaggaggttgacggtttctaaggatgattctttctgagtgaaatattgtcagtgtcattgaccttttcattatttcaactattattattccaggttatcaatactctggctgaccatcatcatcgtgggactgactttggtggaagtccttggttacatgtcattattgcgtttccgacaagttataaagttgtcattaccctctggatagtttacctttgggtgtctctcctgaagactatcttctggtctcgaaatggacatgatggatccacggatgtacagcagagagcctggaggtccaaccgccgtagacaggaagggctgaggtccatttgtatgcacacaaagaaaagagtttcttcctttcgaggaaataaaattggcctgaaagacgtcattactctacggagacatgtggaaacaaaagttagagctaaaatccgtaagaggaaggtgacaacgaaaatcaaccatcatgacaaaatcaatggaaagaggaagaccgccaaagaacatctgaggaaactaagcatgaaagaacgtgagcacggagaaaaggagaggcaggtgtcagaggcagaggaaaatgggaaattggatatgaaagaaatacacacctacatggaaatgtttcaacgtgcgcaagcgttgcggcggcgggcagaggactactacagatgcaaaatcaccccttctgcaagaaagcctctttgcaaccgtgggtaagtttgcttgttttccttgcttttggacatagtctgccaggtcaggacatggatacatttttctccctacggctctgtgctcaagccctgcagagggagatggcagagaggaaggctgcctacaagcatcacagtcccatccctgttgggacaattccaaatgagggccttaaatgatgctcagctaagctggttcttgtgtggcctctgtaccttcaaaagctgccgagtcctatgattacacgcgatgggacttgtacacttgaagtgaaacacagttttaaaacttgctttgtttagaattcccacctcatttttccatggacaaaagtattctttatgtcctagtgcacttacaatttggtattacctgggagtgaaaagaaatattacagccatgcctaactgacttcttgaggtaagattgttctgtcagaaaaccctctcccagttcccctgcagctcttcaggaatccacatctctccagagctctttgttctcatgggtggcacctccagagtgaagaagatcctttgtcaagaagggaaacagaggggaaatgagagggtcctgcaggcagagctggaatcaacttccactctgcctcttgcaagctgtgtgaccctgggcacaatttctccttcctctggaaacctctgttttcttagatttggagcagggtggtcacactgaccttgcagagttctgagaatcagagacagaacataaaaggcctggaaaacattctccaaaaagaagctgcaacatgtgtggacaatgggcttttcatgcctctcttactgtctcttactgtctattgacctggtgcaagaaacatgctctggtgatggctgtgagggaggaatgaggatagacatagacactcctgtgtctcaaacatgcttctttattactctgttatgactctgtcttccctggggcaggaccccagcctgcctacatttgcagacagacacagtggcatgtggagacaacagtgtgtcccaatgacttttctttaccccctagctgtcggcagtactcagtggaagggtgatattatgacactgacactgctattttgaaacctggaggatggaaaggtgcaaaaatctatcaccagcaacagaaggtgcagactgtgttggtggcggtaattttgtccatcaaatgaatatgtgtgaaaacattccctcctttggccctacggtcagaatggcggcagcggagcatcgtcattcttcaggattgccctactggccctacctcacagctgaaactttaaaaaacaggatgggccaccagccacctcctccaactcaacaacattctataactgataactccctgagcatctcaagacaccttccgagactccccttccaccctcagcggatgataatctcaagacacctcccgagtgtctgctcactccccttccaccctcttgccgccgttccgggaatcctctagagggacntccaaagggcat

SEQ ID NO: 549720 - DNA, 512 bp, Homo sapiens
gacccgtattgtctgacatcatatgcaatcaagtcacctgacgcaattttgtgaagaactatttatgcaggaaatgctctattgggtaaacctaaaggtgtggggataaaagcgggtttgggcttggactagagaaagggaaagtgttttcatgtccgtggaatatcctttgattgctgcagaatacgaagtggcggtagtgccagttcatgaaataggtatcaagtacttcatcagtggaaatatcaggagtggcttgagcaagaaattaactaaaagagtgatcgaacagagctaatcaggtgccatagtggtggtacctggtggtcgaagctgtgaagagtgggaggagaactttccagttgtgtatattgacttgtgcatgatctaagtacatgctgtcagtatggtgtcttcaccgtgctgtggttgatgctggcttagtacccgttgacatgcaagttggacagacgaggaaaatagtcgtacagagattgatatgtgtggagtta

SEQ ID NO: 549721 - DNA, 2345 bp, Homo sapiens
  misc_feature (33)..(33): n is a, c, g, or t
tcgactctgtctccaaaaaaaaaaaaaaaaaanttttttttttagatcatcagctattgttagtgttagtgtatgttatgtgtggctcaagacaactttgtttcttttaatataggcagggaagtcaaaagattggatatccctgctttataccaagaaagacaacaccccacatttgcaatgcctaaaaacactaccagccatctgaaaaacatgagacttctaacttctgttcttttttgtagcagtggaatcccacggtgatatctgagggatgtggttaccttttggaggaggttgacggtttctaaggatgattctttctgagtgaaatattgtcagtgtcattgaccttttcattatttcaactattattattccaggttatcaatactctggctgaccatcatcatcgtgggactgactttggtggaagtccttggttacatgtcattattgcgtttccgacaagttataaagttgtcattaccctctggatagtttacctttgggtgtctctcctgaagactatcttctggtctcgaaatggacatgatggatccacggatgtacagcagagagcctggaggtccaaccgccgtagacaggaagggctgaggtccatttgtatgcacacaaagaaaagagtttcttcctttcgaggaaataaaattggcctgaaagacgtcattactctacggagacatgtggaaacaaaagttagagctaaaatccgtaagaggaaggtgacaacgaaaatcaaccatcatgacaaaatcaatggaaagaggaagaccgccaaagaacatctgaggaaactaagcatgaaagaacgtgagcacggagaaaaggagaggcaggtgtcagaggcagaggaaaatgggaaattggatatgaaagaaatacacacctacatggaaatgtttcaacgtgcgcaagcgttgcggcggcgggcagaggactactacagatgcaaaatcaccccttctgcaagaaagcctctttgcaaccgtgggtaagtttgcttgttttccttgcttttggacatagtctgccaggtcaggacatggatacatttttctccctacggctctgtgctcaagccctgcagagggagatggcagagaggaaggctgcctacaagcatcacagtcccatccctgttgggacaattccaaatgagggccttaaatgatgctcagctaagctggttcttgtgtggcctctgtaccttcaaaagctgccgagtcctatgattacacgcgatgggacttgtacacttgaagtgaaacacagttttaaaacttgctttgtttagaattcccacctcatttttccatggacaaaagtattctttatgtcctagtgcacttacaatttggtattacctgggagtgaaaagaaatattacagccatgcctaactgacttcttgaggtaagattgttctgtcagaaaaccctctcccagttcccctgcagctcttcaggaatccacatctctccagagctctttgttctcatgggtggcacctccagagtgaagaagatcctttgtcaagaagggaaacagaggggaaatgagagggtcctgcaggcagagctggaatcaacttccactctgcctcttgcaagctgtgtgaccctgggcacaatttctccttcctctggaaacctctgttttcttagatttggagcagggtggtcacactgaccttgcagagttctgagaatcagagacagaacataaaaggcctggaaaacattctccaaaaagaagctgcaacatgtgtggacaatgggcttttcatgcctctcttactgtctcttactgtctattgacctggtgcaagaaacatgctctggtgatggctgtgagggaggaatgaggatagacatagacactcctgtgtctcaaacatgcttctttattactctgttatgactctgtcttccctggggcaggaccccagcctgcctacatttgcagacagacacagtggcatgtggagacaacagtgtgtcccaatgacttttctttaccccctagctgtcggcagtactcagtggaagggtgatattatgacactgacactgctattttgaaacctggaggatggaaaggtgcaaaaatctatcaccagcaacagaaggtgcagactgtgttggtggcggtaattttgtccatcaaatgaatatgtgtgaaaacattccctcctttggccctacagggtcaaaggcggggcggagcatcatcattctccaggatgcctgttggcctactcgtgaactttacaacagatggcggcgcacctcccaatcaacacttaagataaccgtgtcgccg

SEQ ID NO: 549722 - DNA, 1366 bp, Homo sapiens
  misc_feature (582)..(582): n is a, c, g, or t
  misc_feature (769)..(769): n is a, c, g, or t
ggcctgaattagggatgtgacagagcgcaagaccgaggctactaggatggatgcccggagccagtcgtgggaggccggtgcgcgatcgtcgcgccattgtgtatattatctgttcgcttgtagttaatagtaattttgttctctattaagaatgtcttgcgcacttgttccacacggacagcgaagctatatctcactgcaaaaagactgtggactatctcataccacgagagggacctcattgtgtcacgcactgatacgggaccttgagacattcgtaatagagctggaggcgcatagtgtagaggcaccttagagttggcaccgacgctctcctaatctgtgtgcgcatatgtataaacgagagcgcgtgagagatcttgctgttgcttctggtcgcatacaaaggaagatgctcaatcagagatcatctgaaaaccgcgccagtttgaggctctggagagaccggttgtcgctgcgagagcaggcgggtgggtgaagagtaggggccctccccatttcggtgggggagtatctgtggtgggcagagggtcgataatcagtagatcgcgcaaatggcgngtagtagtgggtggaatagggcgctcgaagagcggagagggggggttttccggaactttacaacccctagtggggcgttaggacctcgggaagtggggggtcacggagaggtcctcacgtcactctccttcttagaccatttggggagagaggagaattaaccccccctgtattgatgatgcgttgnaacaacccctacgagggctcatattcatttgtaagatcttttcagacgatccgttactctgctgaggacaagacgtggagcacgtcttaattggcgcgccgagaaggggaggtgtcacacacactaagagacggccacaagagacagcaaaacatttcggcgatgtgtgtgatgaaatgcacacgcaaactttatattccgacccagtctgttgtggcagtttctggacgtgtcggaaaaatccctccacttttggcggagatacaacaattgttatagccgtggttgtatgttcgggaggtacccatcgtcaccactattgcggcacgggggccaggtgtgtgggaaggttgtaggcagagttggaacgcgcaggtccgtaatctaaacctctcggcgtgtgggcggaaaagaaaaattggccgcttatccacagaggggtgatcagtgccatatcatacacttagcaggcgttcttcgctgtgggtgggaagccccccgttgtgggaggaggaggctccggagagacatattcatataccggagcgaaaatgttgcttgtggcacacaaattgaaactgatcagctgtgtaggaa

SEQ ID NO: 549723 - DNA, 1964 bp, Homo sapiens
  misc_feature (33)..(33): n is a, c, g, or t
tcgactctgtctccaaaaaaaaaaaaaaaaaanttttttttttagatcatcagctattgttagtgttagtgtatgttatgtgtggctcaagacaactttgtttcttttaatataggcagggaagtcaaaagattggatatccctgctttataccaagaaagacaacaccccacatttgcaatgcctaaaaacactaccagccatctgaaaaacatgagacttctaacttctgttcttttttgtagcagtggaatcccacggtgatatctgagggatgtggttaccttttggaggaggttgacggtttctaaggatgattctttctgagtgaaatattgtcagtgtcattgaccttttcattatttcaactattattattccaggttatcaatactctggctgaccatcatcatcgtgggactgactttggtggaagtccttggttacatgtcattattgcgtttccgacaagttataaagttgtcattaccctctggatagtttacctttgggtgtctctcctgaagactatcttctggtctcgaaatggacatgatggatccacggatgtacagcagagagcctggaggtccaaccgccgtagacaggaagggctgaggtccatttgtatgcacacaaagaaaagagtttcttcctttcgaggaaataaaattggcctgaaagacgtcattactctacggagacatgtggaaacaaaagttagagctaaaatccgtaagaggaaggtgacaacgaaaatcaaccatcatgacaaaatcaatggaaagaggaagaccgccaaagaacatctgaggaaactaagcatgaaagaacgtgagcacggagaaaaggagaggcaggtgtcagaggcagaggaaaatgggaaattggatatgaaagaaatacacacctacatggaaatgtttcaacgtgcgcaagcgttgcggcggcgggcagaggactactacagatgcaaaatcaccccttctgcaagaaagcctctttgcaaccgtgggtaagtttgcttgttttccttgcttttggacatagtctgccaggtcaggacatggatacatttttctccctacggctctgtgctcaagccctgcagagggagatggcagagaggaaggctgcctacaagcatcacagtcccatccctgttgggacaattccaaatgagggccttaaatgatgctcagctaagctggttcttgtgtggcctctgtaccttcaaaagctgccgagtcctatgattacacgcgatgggacttgtacacttgaagtgaaacacagttttaaaacttgctttgtttagaattcccacctcatttttccatggacaaaagtattctttatgtcctagtgcacttacaatttggtattacctgggagtgaaaagaaatattacagccatgcctaactgacttcttgaggtaagattgttctgtcagaaaaccctctcccagttcccctgcagctcttcaggaatccacatctctccagagctctttgttctcatgggtggcacctccagagtgaagaagatcctttgtcaagaagggaaacagaggggaaatgagagggtcctgcaggcagagctggaatcaacttccactctgcctcttgcaagctgtgtgaccctgggcacaatttctccttcctctggaaacctctgttttcttagatttggagcagggtggtcacactgaccttgcagagttctgagaatcagagacagaacataaaaggcctggaaaacattctccaaaaagaagctgcaacatgtgtggacaatgggcttttcatgcctctcttactgtctcttactgtctattgacctggtggcagtgctccggtgaaagttgttaaggaggattgcggttacattaaactccgtgtctcaacagcttcttataacccgttgaaaccgttccccgggggcaccgggtacattgtgaacc

SEQ ID NO: 549724 - DNA, 1759 bp, Homo sapiens
  misc_feature (914)..(914): n is a, c, g, or t
  misc_feature (1501)..(1501): n is a, c, g, or t
ggggcaccatggcagatgaataaacgcggcatgatgcagttactcttgagtgtctgaagaaatccgcgacatgcactcagacggatgcgactggtcgcatgagctgcacccagactgacgggcgagcgagtggagcaagccaggggacgtaccatataatctgaggtgtgctcgtagcacctcgagtgcaagagacaagaccttcatgaggtgtgttaacttacgtgtgcactaggagtcgacacgttcacacgcgagggccctacacgattggagtcgatctgcgaagctatgatactctgcgcatgccacttagaaacgctgtcatcttcgtgagcctccgggcgcacaacgctcacatctagggatcactctgtgagcggccttagcacccactctgctcattgcgcactggtcactagcagctcgcacgcacacgggagagagccgttaccacgtagacaccacttgggcagccacgttatagggccgcgctcccttgggcatagggagcttcgtcgttgcattctcggttgcggctatacatacgaattcgtagcgcctagttcggcccggtggtgcgtcgctcaagcttagagatttgccccttcaagacagttcgccttaggcaatataggacttcaaataccgttatgtgcaccccacaaggggttcgcacaagacccgtaaaaaactttgccgacacaaggcaaggcacatataggtctctaacacggaataatatgctccggagctcaggcaagacgtggcgcaatgcgcagataggtctagaacccttatactcggacaatgtgctcataccccacgaacggcggtaattcgcaccttccgaatatgcgagagcggcacacctacgggaggcaagcactagggttcgccattttcggcatacntgtggtctcaaaattgccacaagcgacattcgtcctctagcgggacattaacaacattgccacataccttagaggcgcacgacacaagcgcagtgtcgcaacacggccatttcaatgtgccacccccacgagcccataggactaatcctcacccaccccgcctagagtctctacatgcgaacacacacacgactatgttcgacccaattaagcggctatattgttcggagttcaccaataaacggcaaaggcttaaacaatatcgccgggtgcacaaacggccttgcgagaaccaacggcacttctaggaggggaaatcagctccgtgggcagggacatactgtcggcgtgacaatctctattcctcaggggtgtggtccagcgccacattgccaaaccaaactcctgcgttgggtggtaactctggaaagccatccgggctatgacacaagctctaggtgccccatagcggaagggcgcaaagcatggccttggcgggatgcgacacacagtacagaattgctatctaaaccaggggaagcgcgtaaccacaattgatcttgccccccgcagcccttacgttaacncgcactggcacatacgggggggggcacgacattgtggcacactttgcaaatggcatgcctttcgaatcgtactagtgcacgcctcgtggacgacccaaccatgtcatcagtgtaccccccaagacacaaacgtcgttataatccagtactaaagctccccgcgtatagcaacggcacacaagattatatctccgcaatgctacagacacccactcgcgccaaccgacccgcccatcacctagtgactatcgcacgatc

SEQ ID NO: 549725 - DNA, 89 bp, Homo sapiens
  misc_feature (67)..(67): n is a, c, g, or t
catggatttgctggtgcagtacaactaggcttaataggctcgaattcgaggtattccattgtagganaattacaagctgaaaataagca

SEQ ID NO: 549726 - DNA, 1082 bp, Homo sapiens
cggcaagcgcaggaaagttgatgaggagctcgtggtcccagaacaaagcttgagaaaaaccatggtgaatccgggcagacagcgtcgcaggcgccccctgtgatgacggcacggctcccatcatcctggaagcggtgctgcaggctgacagtggggcaagaattgcggaccgctttctgctctatgccatggacagctattggcacagacggtgcctcaaggtgctcctgctgccaggcgcaggctgggcgactcactcggcacgtccgtgttacaccgagaaagtggcatgatccgtttgcagaaatgactacattaggttatttgcgcacaatagcaggtgctatgcagcgcttgcgagacagatggattcctgcagagtgaacatacgtcatgagggcgcaaggcacatgctcgtatcatcttcacacgctgttggtacatgctctacctagacggaatcagcctggtcccgggagatcggattcactacatcaatcggcagtgaaatatattggtgaacatgattagacctacagctcttcatcaatggccatgcgaattcagttcagagcacatcccactactgccagaccagaaggtctgctaaaaggtcagagtaatgcagaatgcgtgacttcatctcagatttgtcatcacgcagggtggatcccgaggtgtcttcacgcacgacgaggtcacttaggaagatagcaaacaagaggcaagctccatgccattgacagcattatgaggactaaattgacattacccgacgttataggcggactcaaactgcctggaatatgaacatttaagggcacaccagaagaaccgtgaccaacgggaacagccgggcacgccacaagagcaaagaactaccacaccagaggaaaacaccagggactcggggcgcagcgaccaaggtggggagcaggaacgagcggcagcagagaaaagagaggaagcgtaaaaacagggcgacaaccggcccaaaaacgaccgacggagaaggagacagcaaggctgcagtagacacacagcacgacagagaggaacacagagaagaacgcggcgctcac

SEQ ID NO: 549727 - DNA, 352 bp, Homo sapiens
aaatgctttacatttgagaatgaagctcagctacagatttgaacagcatactgacatataccaacaagaatgaaaataacttaacagcaattttataaattcacatcccccagagcaccacagagtaaagaaatactgcatatgggtaacaactggttcttagttactaaatctgaaagatcaaatacagttaattacataagcttctcttgagtttttctgggggaatataccaggagaccataatcaagcgctttcagcatcaccagtggcatttcatactggtcccatggtgttaatccaggtttctggtattggactaaacacgatgaaaaacaggagagaacggaga

SEQ ID NO: 549728 - DNA, 150 bp, Homo sapiens
gctctagaccatcttacgctctccacccacccccggagaggcagcaatagaaacggctaccacatccaatgggaggctatcagccatacaggcttaacaaatatagtagactggcctagtataagagaacagggggtgggtggagagcgg

SEQ ID NO: 549729 - DNA, 162 bp, Homo sapiens
tccacctcgtgtatccccgccctctccctagcaaatcagtccagccagtcctcctttgggtgcaccgttccctggggaggatgacaagcgctccgcacagaaatttaggggtgcgcctggtctcttctcacttgcttccaaccagggtcgactggctcaact

SEQ ID NO: 549730 - DNA, 116 bp, Homo sapiens
cgttacaagatgcatacagctcactgattgcatcctctagttgccgcacagtgcccaccaaaagtatgtgcgacaagcctggcagaaggcagacatcaatactcatgtacagccag

SEQ ID NO: 549731 - DNA, 375 bp, Homo sapiens
ttcattactcacgcactcatgcaagggtgcatccagtagtcagccctttagtgcagatctacctgtcaccagctcctgtgcactgatcagagctcagtcagcagccatgtgactagtcgtcctcgcagtcaaggcataggtcgatcagacgagcacatggtatgctctcagcctcgttatagtgtgtatgcagagtacacgcctctgtccctgtgaggcttcctatagcccctccttcatgcagggcgctgtatcagagtctgcacagcctaaccacagggcatgagtgactgagcatatatgtaagattgtcttcagtcttggagacagaggtagtaagtcaggaatgtccacacaatgtcatgatcatcagag

SEQ ID NO: 549732 - DNA, 241 bp, Homo sapiens
  misc_feature (232)..(232): n is a, c, g, or t
aaaaaaagaaaaccttaaaaaactccccttaaaaaccaaacctctttgtgttttgaaccaaggaattttccaaatttgattgggattctgttttgaagtctaggaaatttttcagcccataaagccccccgttttatgcccctctaattttgaagtttggggaatgggggagggcaaggggttttttttttttttttttaaagcgggtgtgaaccaatggaaataaagccgngggctgtga

SEQ ID NO: 549733 - DNA, 246 bp, Homo sapiens
  misc_feature (74)..(74): n is a, c, g, or t
cgtagagatgggatctcactatgttgctcaggctggtcttgaactcctggcctcaagcagtcctcctgcctcanctgtaggcctcccaaagtgctatgattacaggtgtgagccactgcacaaggccagcaatttttttttttaacatatctgcttcccttaacaaattgtaatgaccttgagagcaggaactttaaatccctgtcttctacacctaattcctggcccatctcagagttaatctct

SEQ ID NO: 549734 - DNA, 157 bp, Homo sapiens
atatggaattgaatttgcacgctcagaggctttccagaagggtgaaaggaaaggagccaagaaggttatgattgtcatcacagatggtgagtgccactgacagcccagactctgagaaggtagatccagcaaagctaaagagactgcctcgccaaat

SEQ ID NO: 549735 - DNA, 125 bp, Homo sapiens
  misc_feature (99)..(100): n is a, c, g, or t
ggcctagcctgccatacccttacgagcaggctcagtgattagactttgagtctaagttaaaaacgccctgcccccttctcgcaggccacctacaccgtnnttttatcgatttgataaaaccacca

SEQ ID NO: 549736 - DNA, 197 bp, Homo sapiens
ctaattggttcttcgatgacgggtagagaggatgactgtcctgttgcttttcctcgctttaggcttccccactcacctcctctaggaagccttcctggatacccctacattctccaactttcttcggtatattccatggagactcccaccccctctgccggccaagcaacagctaacgtcatcgaagaaccaattag

SEQ ID NO: 549737 - DNA, 409 bp, Homo sapiens
accgagcgttgttagatctataggcgctcctccgtagtcgagccatggccacagagcctgcgcgtgagacggaactcgaacgacgcgctacagacttcctagctacggaaggggctgatacgttctgctgcagcaccgtgtatgtgagattaacgtgccagcgctgtagatagtccgtgctggactcgagttgcaagatcatggactgttggatcattcatgaactcacagattcattacttactacattgcaagcggaacctgctatgaaccaggacgaagagactgagtatcgagagaagctacagatggtaactcctagccaggaggatgtcgttcgcagtttgatgctacctggcgggcagatgtccacacatagcgctgatagttacagtctgaatggaggcat

SEQ ID NO: 549738 - DNA, 904 bp, Homo sapiens
ccaacgcgcatgattatgttaggaaaactgttctggcagcaatcatagagcctcagaactgagagtgacgtcgcctgtggatagatggcaggcgtgtgaaacaggggcatcgacattgttacgagttttactggggagcatggataagagctcgatctaagttttccggatgccagaggccggctaccttctggagactgtttcactcaaccatgtgcacccttggaccagtttgataggtggcttaagtagcggactagtacccaagtatgtagatttggctcaattcagtaccattgaaaaataactttgacgctggtcgcttatccttatgtacaccgttactagttcttaagtgcgtctgttgttcatacgttggtcgtgtcgttcgtcatatggactcaacatcccttgtggaaagttgactctcccacctgcacctgtttatcactgtatactatttgataaattgctcatgtggatctcatcgtgaaatattggctccatggttgtgtctaacttcaagcatatatacctggtcatttaagttactcactaaagaaccataacaagcgagctaggtattgaatagtcagccacgcagactttttgttgaagcgtctcatttcatcggatattacccgatgcactctgggagtagacatgtgtacgtctaatcatattgtgatttgcgctcatgccgaactcccatccttagtgtcatgccagtacccttgataaggtcctcggcaagttggcgttgccaacttgtttttggacgcaggaaattggcgggttacagcgtcaacgactcatccggtcaggggcaaaacaggggatatgggggaattcttgggggacaaaccttcgccgggacagatacacggtttttgacagtattcgc

SEQ ID NO: 549739 - DNA, 406 bp, Homo sapiens
gcgcgactggtgcacaccgcatggatgctcatgtgcggggacacgctgttcagcagcccggaggccctgtaatctgatatgagctactagacaagccctgtgtattcctggactaggtgtggctgtcctgtctgtccctggcctcgagttcccattcctaacatgacgtgctttcaaggactcaggagagccctatggctgctgccaggacgacggtatggactccgctgtagggaagcgccacgtgtagctgcggggccgagcatctggaaccctgctcctccttccccgctgtgccagcctggctcccaaaatcaggagaagggggctactcctccacacggctttcttaaccaacaccgagctttgccgtggtcaggtgaagctaggtgcacgctagcattcc

SEQ ID NO: 549740 - DNA, 245 bp, Homo sapiens
  misc_feature (126)..(126): n is a, c, g, or t
tagcatcctacagacatacttccgttgttctctcacccaccctggaactcctccccaggcgccatgaggaagtataaacacgcggcaagcgactgagaggcaaaacctctccagtggttaccagtnaccgctcaggtcacactgagcagcgtgtttcccgcccatcttggcagaaaggaggagcaagcccgagttgcaggtgtcctggatcgctgtcaggagacccggagcataccaggctcttc

SEQ ID NO: 549741 - DNA, 288 bp, Homo sapiens
  misc_feature (8)..(8): n is a, c, g, or t
tagctggnactgcaggcatgtgccaccatgcccgactaattttttaaagttttttttgtagggagggggtcttgctttgttgcccaggctgccctcaaactcctggctccaaatgatccttctgcttcagcctcccaaagtgctggaattacaagcgtgagccacagcgcctggcctgttttaactttttgaggaaatgctaaactgttttttccacaggtcttgcaccattttaaattcccaccaacaacaattttgttcaaccaccccctcttttttgatccaaac

SEQ ID NO: 549742 - DNA, 174 bp, Homo sapiens
agggatcccaaaaagggcaggggccccccccccaggcccttttttggaccatggagccaggtgaaacctgtttggccccttccccattgggtttttactccttcccaaggggcagcactcctttcccagcccccccgccccctgttttcaaaaaaatggggggggggaggggca

SEQ ID NO: 549743 - DNA, 116 bp, Homo sapiens
attaaggacaccatcgagaaactgaaggagaagaagctggccccatcacctaccgcaggccgtggactggccaaggagattgactcggtgaactacctggagtgctcagctctcac

SEQ ID NO: 549744 - DNA, 1060 bp, Homo sapiens
gtacgggtacagaaatccaggttgccctgccacgcgacctggccatgcgcacatcgcaatgtccctcactgtgctaatcttgccccctcgctgggagcacgataaagtgctttctgtgtctcccgtgcagtcgcgggaggatcctgctggctggtctctagagtgccggggagctcgtgctgtgtaccagtgacgggacggcagtcttcagtcgtcgccttggcgatgcccgctcgtcgatatgtccagctgctccgtcccgccacgcgttgcgtgtccgtcgctgctcgctcgcgcggccgtatcgtggggtgcgaggcgaatcaggcagggcgaatccgtagaacgacgtcgactcccgatacgggccctgtcatgtgccgcgcgcaaaccgagaaaggcttagatcccaatgcaaagaaatgacgtcaatggatgcgaggcatggcgtcgttccgtacgcgtggaccaagggatgccggcgcccgtggagggcgggtccagacagtggggaccgcctattatgggttgaacagactcccgctgatcgttggttacccgaagaatgcgaggggagccttggggccccttccccggcggactaacaggaccagcttaacttacaggcagacgctagtcgcagtggatccttggcacgtggagccaatgatttcgtttgggtttgctcaacccagttttgaaggaagcctcccaggggaacttgtgtttccctgaccaagaattcggaacctagattagcccccaggtcttgtgagacttggccagaatcggacccgtttccctgaaacctcaaaagatgttcgacggcaccgtggacaatcgaaggggcctacgttggcccgccaattggagaccggttgtgacagggaccggagcaatccaaagcggggcctaggcgcccaaggggttgacttgggattggaagcttgagcacctggtgacccaggggaacccgagccctgggacgtaattgccatgcatccggacacgggccctgaaagggaaagaagctgggcactaagcctgaaaagaaggaacc

SEQ ID NO: 549745 - DNA, 466 bp, Homo sapiens
  misc_feature (13)..(13): n is a, c, g, or t
  misc_feature (24)..(24): n is a, c, g, or t
tttgaggcaaganaggtccatctnccaaataattcaaccataggccaaagaggtttttctacctttaacctacaaaccagtgggaggaaatgagagaagagatgtattttgtacatggctgtggccagtgataaccccttaagttgtgtacggaacaggttggtggttaatagcagcaagtacgggttgggcactgtgggtcagactgttaatcccagcactctgggaggccgaggcaggtggatcacttgagctcgggagttcgagaccaaccctgaccatcatggagaaaccccgtctctactaaaaatacaaaattagccaggcatggtggcacatgcctgtaatcccagctactcagggggctgaggcaggaaatcacttgaacccaggaggcagaggttgtggtgagccaagatcgtgccattgcactccagcctgggcaacaagaggaaaactccatctc

SEQ ID NO: 549746 - DNA, 125 bp, Homo sapiens
  misc_feature (2)..(2): n is a, c, g, or t
tntaattgcaattaattggtgtcccccaccatatagatatttaaggaaggtgtacttaaaaatgttggctgtttaaaactgagcatgtcattaatccatatgtggactagtgatgaatagatatt

SEQ ID NO: 549747 - DNA, 148 bp, Homo sapiens
gaagtaatactgtcagacagctcagaacagcctcaccgtctggaagtctgtcggcaaagctgccaaatgaataaccggccacatctgcaggtagtaagactaacatggggtcatatatctcgggatctactggctctaccaccacaag

SEQ ID NO: 549748 - DNA, 349 bp, Homo sapiens
  misc_feature (24)..(24): n is a, c, g, or t
  misc_feature (33)..(33): n is a, c, g, or t
  misc_feature (47)..(47): n is a, c, g, or t
  misc_feature (54)..(55): n is a, c, g, or t
  misc_feature (81)..(81): n is a, c, g, or t
  misc_feature (93)..(93): n is a, c, g, or t
  misc_feature (173)..(173): n is a, c, g, or t
  misc_feature (258)..(258): n is a, c, g, or t
  misc_feature (277)..(278): n is a, c, g, or t
  misc_feature (289)..(289): n is a, c, g, or t
  misc_feature (308)..(308): n is a, c, g, or t
  misc_feature (319)..(319): n is a, c, g, or t
  misc_feature (321)..(321): n is a, c, g, or t
  misc_feature (327)..(327): n is a, c, g, or t
  misc_feature (329)..(329): n is a, c, g, or t
  misc_feature (331)..(331): n is a, c, g, or t
  misc_feature (335)..(335): n is a, c, g, or t
cgaaggaggtggcagaggctagtncagcctcanaagaacaggcaggnccccagnnctacagagccatccactccctcgcgngccggagagtgncctacaccagccagcgctgagcagaatgagtagctttgtaggtgcaggtgggtgatctctaagctgcaaagactgtgctntccttgtgatgtcactgcctgcaccttgtgccctggctgccttcctgtgcccagaagggaaggggctattgtctcctcccagccncgttcccttttctcctctnnctcctgtggantctcccatcagccatctcnttctcctctcnangccagntnangatngtccctgtacgtta

SEQ ID NO: 549749 - DNA, 288 bp, Homo sapiens
tcgcatcgtcaccacgtgggacgacatggagaaaatctggcacacagcttctacaatgacgctgcgtgtggctcccgaggagcacgccggtgtgctgagcgaggccccctctgaaccctaaggccaatcgcgagaagatgacccagatcagtgtctgaggaccttcaacagcactcagtcatgtacgttgctatccaggtcggtgcttatccctgtacgcctctggccgatccactgtgtatcgtgctggactccggtgacggggtcccgcatgttgtgcccttttac

SEQ ID NO: 549750 - DNA, 185 bp, Homo sapiens
gtatggtagggttaggtagggccagatgaggcattgtaaatgatggtgagggctctgggatagggttagggttgtagttggtgtaatggttagggttgaggttggggttgagttagggtgagggttagagttacggttgaggttgcggtctgttagtagtatagtgatgccagcaggtaggactg

SEQ ID NO: 549751 - DNA, 306 bp, Homo sapiens
gaattcccccccccccccccccccctttaaaatgtgtttgcaggcagtatgcttggtaaaagtcatcaccattctcccagtctcaaataccaagggacacaatgcactgcagaaggccacagggacctctgccccagaaagcctgggtattgtccaaggtttctgcctgctgagacagcctgagatatggcctcatgggaagggaaagacctgactgtcccccagcccaacacccgtaaagagtctgtgctgaggaggattagtgaaagaggaggacctctttgccagttgagataagaggaggca

SEQ ID NO: 549752 - DNA, 903 bp, Homo sapiens
agaatatgataatcctcatgcctttaatctcagcactttgggaggccaaggcgggcggatcacctgcggtcaggagtttgagaccagcctggccagcacggtgaaaccctgtctctactaaaaatacgaaaattaggctgggactacaggcgcctgccaccaggcccggctaatttttttggtattttgtatagtagagacggggtttcaccgtgttcacccaggatggtctccatctcctgacctcgtgatgagcccgcttcggtgctcccaaagtgttgggattacaggcgtgagccaccgcacccagcgatttagtatttgtttctaatagactatgttcaacaaataagtaattctcgaattagtgcagattaagacaatacaggaaccaagtagcatacccagtcatagaagaactttacgaaaggcttctcggaaagccctttttgtgaaaggacagtattcgtaagtaacatatcatttataatgagacatcttgacccagtgctagaagactaatcatcgtcaaaatgtatttgtctttgggcagtgttgcccacactcaggtgtgaggctgacgttgaagcagataggctccggctatattcatgccccattgggtggtcctacgattaaggctcctgcgttgcatttgggccattatttctagaaacttgcggtctccaaaccgatggttggcttcaccgattttacatcggggcgcaaaggctcaaatggaaggccacgcaaggaggagcgcccataagatttcgggacagaccgaccgcgtcaggagcactcggggggtggggaccgcaacggtgcacgggaaaggcgccacggtgatcgggacgcccataaagggcctgcggaacgggacccaaatggggtcaccaggga

SEQ ID NO: 549753 - DNA, 691 bp, Homo sapiens
gagatgagacgaaacgatgagatgaaatgaaaggaagagatgaaatgttgagatgaaactgactgagatgaggtgagatgaaatgacgatgaaacaagatgaaatgatgaaatgatgagatgagaagaaactgagatgaaatgagatgagataaaactgatgagatgaaatgaagtgaaatgaacactgaaataactgaaatgaaattgacactgacgactgacgactgaaactgacgactaaaactgatgaggatgaaactgactgagaacgaacatgacgatgaacatgactgaacactgactgacgatgacgactgactgacgatgacaacaactgactgacgatgaacatgggtgacgactgaacatgacacactgacacactacacctcgaacactgagcgactgaaccacacgacacactgactgaacactgactgactacttgacacaactgacaacttcgaaacgaatgacgactgaaactgaaaatgtttgacccactgaaacactacatgaacatgaacgacgactgttgaccatgaaaatgacctgaagctgaaaatggatgaaactgacacgtggaaaactgaggacttacgactgattgacgatgaaaacacatgactgagactgaacaactgacaactgaaacctgattgaattgacgattgacgatgaaaatgaac

SEQ ID NO: 549754 - DNA, 133 bp, Homo sapiens
tctagatatatccactcactaaggtccaagaagaagatgtggtccaaaagaacgtcacctcagagtccacttgctgtgtagctaaatcatataacatgggtcacatgtaactgggtgggtttcacaatgtgga

SEQ ID NO: 549755 - DNA, 177 bp, Homo sapiens
taccttgcttatatattctagagattaagcccttgtcagttgcatcatttgaaactattttctcccattctgtaagctgtctttttgtttcttttgggtttcctttgctgtgcaaaagcttttcagtttgatgaggtcccatgggtttatttttgctctaatttctattgctttggg

SEQ ID NO: 549756 - DNA, 438 bp, Homo sapiens
tggctcatgcttgtaatcatagcactttgggaggccaaggtaggtggattgcttgagcccaggagtttgagaccagcctggacaacatggcaaaaccctgtctctacaaaatacaccaaaaaattagctgggtatagtgatgtgcgcctgtggtggtccgagctactcaggaggctgaagtgggaggatcacctgagcccaaggaggtcaaagctgcagtgtactgtgattacactgaagcaggatatttccctgacccctttgtgggacttgagacaggggtaccttgtttactcagcctgccactctcaactccttgctggaaggaacgcctgagcaaatgagcatgggaactggggtgagtgagtgctggaaccagctggctgctttggcacgggcaggagtgaactctgtgcaggctctgcagcagcatccagg

SEQ ID NO: 549757 - DNA, 188 bp, Homo sapiens
tctatctatctatcttatctatctatctatctatctatctatctatctatctatctatctatctatctatctatcatgtgtgtctgtcctcatgtgcaccacaaaagcacgttctggattcagttctcttctttaccatgtgggtcccacatgtgggtcaattcaggttgtcaagcttgagtcgacgc

SEQ ID NO: 549758 - DNA, 192 bp, Homo sapiens
tttttttaatgggattttttttttcccccgccttaaagggccccatgggggggggggtttgggccccaacaggggccccccctgccccccttaggggagggggagcctttcccccttgggcccgggcccgggtttgttaacctttacctttttcccccactaacccccattgaaaccccctttcccggggga

SEQ ID NO: 549759 - DNA, 247 bp, Homo sapiens
ttgggctcattcaggtccagggaagagggaggagggagcagttaggatgattatctcggccggggggagagagaaaaatcagggaacgttcagaaaggaaatgtggacacctcatgcctctaaactcggaagaggggtggaaaactaataaattcataatctctacctctcaaacaaatcaatagtaagacatggcatcttataggcactggagttcccgtgaggggagcccaaaggggtaccggag

SEQ ID NO: 549760 - DNA, 296 bp, Homo sapiens
ggacgatataaccccgtcgggtattgagtatctccttgcgttgtgaaccagctgacacaagggcataaaaaaaggcactgtccatacgctggcgggcctttgaagttcgttggttattggactcacgatacctcgcacgctccgtttgaagtggtcgtggtggtggttgtcgaggtcaggcaatgggtggtcatgggggtgacacatagcattgtgattgtccgaatgctaggcaaaaaaaagacgttgtgggacatctttattcgcgagctgggtggcgtagagaaagggatcgg

SEQ ID NO: 549761 - DNA, 913 bp, Homo sapiens
gtctctgtcagtcgcgagcgacgaccaagagggtgtcgactgctagaggcgagcgaagggttgcctaaatcaagggaacttgttcttcaagctcttctgcagtgattctgacagttgagtgttggacaaacaatgttacggaggaaaaagcagagttgtccagaaaaactttgtaagagaaacaaaagacaggtgagacttcgagagccgtgtatcttctaaacagagcagcatgcagagaagatgatacacttgtccagatggggaaaatgaggtacgtaagttgtcgcgatttaaagggggcaacggtgctattgggatatagagaatatgggagtggactcctgagtggtgaaattgaacgcaggaagaaaggggtatttcttaaaatccagaacaatgtggagccagttgaaggaaaaggatttctgactattgatgatgcagtaagaaaatggtgtaaatattcgagcaatataaataaaagctgtagtgtctagttgttaaatcgtgtcttttaacatgggcttgtgtttctaagttggttcctcccaagctattgttatggtttggtcttggcggaaagacttttgtacacgattgaactaccttttttaattgtgccttacttaaaccaattttttggttgcacgctatttgtcccacctctaataaagggattactgttgtcttgccccacccacttagtggtaactaacatccaagtaataacactcttagtgtggtggccttttgagcataaacgtggcctgggttacggccaaagtacaggttaaaattttacgtcccccccgttaacacaacggttgtggtcggggaacactgggggcacactggtttcccacagtgtggtggtcccccgttctatttttcaaaacgcgcggccattttg

SEQ ID NO: 549762 - DNA, 570 bp, Homo sapiens
gcaaatccaatccaggttcccaaatcgcccgcacatccaactaacaggctcccctctaggtaagaagtactccgcgagatactacaataacgaacccgcctaagaattcgcccgtggccgcagtataaaaagtctcgcctaaagcggagttaccatctccctgccccactctagaggactccactccctaatactaaccaacgtcccgcgtaacgtagaaccgcgactataagtacaactctctaaaaccctacgaggaggagaaggctctagactatcctgccacagagttataggaggcgactccggcagtagagccgtcactaccggacgagtcagaggaagcctactccacgccgtacccgacggcacctacttcaccgacgtaaatgacgtcaaaataccccacctacacgaaatactccaaaccctaacctaactctgcccgagagtcaactgctaccgaaacgccaacgtaataacacctacctcctactattcctaagaagaagaagcaccttctaagttggtatctaccgtcgtcagaagcctactccccacctcctgctt

SEQ ID NO: 549763 - DNA, 280 bp, Homo sapiens
ctgggaggctgcagtgcacccggctaatttttatatttttgtagagataggttgtcactgtgttgcctgaggcttgtcttcaactcctgccgtcaagcaatcctcctgccttcaagcaatcctcctgccttagcctctcaaagtgttgggattacaggcatgagccttacgcccagccaacataattttttttttttttttttttggaaatgaatgtttcactctctggtggcccagggctgggagtgcactgggcagcctccctaggggtaccggagct

SEQ ID NO: 549764 - DNA, 299 bp, Homo sapiens
  misc_feature (121)..(121): n is a, c, g, or t
tttttaaatcatgcacacatggacttggtaaaaacatacttgatagaaaactaagatgaaagtcaaaacagcattgcacacagacagactgctgaactgttaggagtttttagccccgccntgtgcaggtaggcgatgaagcagagtcaggtggtttgacttcagtcctgcacagcacctgtgacttagaaagcattacagttgagatgtagatacaaaaagcatctatcaaagaaatcgcttcatcatcttgaaaacaggacaaaacacttttctttcacagacagttttctaaactc

SEQ ID NO: 549765 - DNA, 238 bp, Homo sapiens
aaaagtgattaggaattatgtacatgacgtatcagaactaggacttaccatacggagcagcataccagtgctttcaaccatctacttttacagactcaatttcacaacagcatacccgagactacttccccatacaggcgtgactaatacactctaaatcccaacgacacgagtcgctggcatcatccccaggccattgggtgagaactgaactaccatgtcaacagatctgtaaaca

SEQ ID NO: 549766 - DNA, 284 bp, Homo sapiens
  misc_feature (11)..(11): n is a, c, g, or t
ttatgataaancagaccatccaaacaaaaaccccaccccattaaaactgggcaggacccattaggccttgtaactttaaaaagtcccagcactgtttagcataataaagcgtctctttctatgcttggattttattcaaccctggaattccctcctcctcctcttaattaggctagagttaaaaattaggctagagttagaaaagtctaatctgtttctagactctcaaattctgcatctaatgcttgcacaacccatttaaaacttaggaatgctgccttttt

SEQ ID NO: 549767 - DNA, 937 bp, Homo sapiens
tgccatgttaatactgtgggctgtcccatctctctgcgtgggcgcgactagctggaagagccgaacgtgataagatgaagagtgagtgtgagaggagctgtacaccacaagagtgcactgagtggactcagtgataacgtggatgaagccgtcagtgcccccagaaacgaagcggcccctggacgaatttctagagtcacctgtctgctgagaaatgctgggcttgagcctgccatatttggaagccttggcaaaacctgaatgcaaatgaaatgcttgcctgtgtttggatctattgccagaccttctgtgcacgaattggtgagcagtgttgcgaggcgagggatgagccaagtatacacgtatgggcatgattagagccctgtgttggcttgccatgattgtataaccgagacaccgaatttccatctacctttttgtccgaagcaagctttatttgttggggtcaatgggactgtcatgtgtacgcattgccatatggtttataactgttggtcagtgcattgaagcatcatgacggacgtgccacttacttgtaaggcgggcaaattggaaacattgctcctagtgctggggtccatattttccttaggggtgcagagctgatcagtcaaccctttgtcaaactgggttacggatgaaaggccgctgatggcctgccatactatgcatctcggggcgggccacgataaggggacggcgggagatgtgccggcagaagggagtgcggggggcaaaacctggcgcccgggaccgatgacggccaaagggcagccagcaccatgatctaaatagaaggggacgaggtgaaaagagggcccggaggaccggggccaatggcctaggcaaacaggggcaccgaggccagggaatgggacctaggaaggaccgccaccgaaggagcctggagggaagc

SEQ ID NO: 549768 - DNA, 121 bp, Homo sapiens
tagaggatcccgacacaagaaatgcagcaaaagcacacaaacacacacactgacactcatctggggcaggccatcctcctccccaactctcagctgcctgcactgctggtcatgggtgaga

SEQ ID NO: 549769 - DNA, 385 bp, Homo sapiens
cacagaaatcgtcaaatcaggtttagcctaaagccacgtctttacatattttaagtttggcctaaaggtttttctgtacatcatgaactgtaacagggggaggtgtaaacagaccatagcctacacttgtgccagtcactgagttttggccaaccaaatgtagccaactgttcaaaccatgtgcaaataaggcaaacaccaagctgtaaccctccagctgtttctgtgcctcacttccattttctgtaagtcactttcttttttctgtccataaatcttccaccccatggctgcactggagtctctgagcctactctgactggaagcttgctggattctcaaattgttcattgctcaattaaattttatttggctgaaaaaaaaa

SEQ ID NO: 549770 - DNA, 619 bp, Homo sapiens
tgattaatctctgccatgaaatgcttagggctgatcgtgatggactatgtcgctacagttctagaaacaacaggtggagatattcaataagctcatactcgaacagtatgctaccagtagatgcagtttcaaaggaactcagcagacttatgaaaatagcgagttgacacttacaacaatattttaacagttcttgaaattaaaacatttcacgcatcttagagatactttgcatagatttctttatttatctatacttgttatgtgcttagtaatgttctggattataacacagaaatagtctctcaagcacaggtggattccataatgaatttggtatccacgttgattcaagatcagccagatcaacctgtagaagaccctgatccagaagattttgctgatgagcagagccttgtgggccgcttcattcatctgctgcgctctgaggaccctgaccagcagtacttgattttgaacacagcacgaaaacattttggagctggtggaaatcagcggattcgcttcacactgccacctttggtatttgcagcttaccagctggcttttcgatataaagagaattctaaagtggatgacaattgggaaacaagaaatg

SEQ ID NO: 549771 - DNA, 239 bp, Homo sapiens
  misc_feature (5)..(5): n is a, c, g, or t
agggncccccccccccccaaaattggggggggcccctttttttggccccccccccccctttcaaaaagggggggggtttttatccgggggggggccccttttttttttagggcccccccgggaaatttttccttttttcgggccccccggggtttttttcccccttttcccccccccccaggttttggggtaggggggggggggggggttttttttttttttcccctttccccccttta

SEQ ID NO: 549772 - DNA, 1522 bp, Homo sapiens
gggcacgaagggtacctcacagcagtgtgcctgcacagcgtgaagaatgctccatcagagccccaactctggccgaagctggacagctctgagtctgaggaagaaacgctgcacaagtcgaccagcagacagcagacgtgtctccctcatttccctgtacagatgccatgtccctggagtgccgtgtccacacaggaagcaacgcctcccaacaattcctgcccacaatatcatcaaacacacccatgacagcagagacgggaagcccaccccaagaagaccgcacagttaccaattggaaacacgggcaaaccgcccttacctaaaacgctagaggcgcaagattcccatggaccgcaccatatccaagggacccgaagtttcccctgcttcgtcgatatgcagcgaactaccttgacctacacgccaagagatgggcacatatgcccctcgccatactattaaccatatgcatgggacaacgcaacgttctgcacttgccaattattatctgccccaaagtgctacccctggagctacgcacacacgcgtccaacgaaagccttcgggccatccaacaaaagctaacgcccacatcgcacggcataacttcacaaacccagaacgactattcccttatacccaaccactaggataccccttcttgccaaccaccacaccaacccacgcgcgaaccacaccgcccctcccattcggcacctcaaaacctctggctacctcaggccaccagaaaagacacacccgatcgccgaaacagaggattatcagcatagaccctctctcaccttccacaccaccctacactcgcgaacaccaacaccaataagcagccccatcggacaccacaaacaaccacacaacggcccacaaacgcaaacaggagaccacggcgcacagccgatacgaccaacaaacccaaggagagggcacacaggaccaacaacacaccacccgcatgtcactcccccgtaccaacagacaaaacccccataccacgaggatacacaaacctagagcacccccaccacatccacacgcaaacacaaaaaccccaaccccaaaccccaaagacaacccccccccacacaccagccacgcgaccaggcaaactgcccgacaaaagccacaaccccaggccaacgaaccacaccccgcaacgcgacgaaaccccacaggaccagcacagcgacaggcgaccccccacggccccacaataccaaaaacacgagaccaccaacaataaattcacacgcgcagacaaaccactcccaacaccaacaaggcaaaaccaaaaccgacccccgccgcccccgccacagacacaccaacagagaaaaacacatcacgcaccagacccaccaccccgacacccacaacgcgagcacacccccgcaccactccatcacaccacccgcgacacacacacaccaaccccacacccccgcccctccaacaaaacccacgaaccccacccccaacgcgcacccacaccgccgcccag

SEQ ID NO: 549773 - DNA, 132 bp, Homo sapiens
ccaggagcagtgtggaaatcgaatcgtgaagcattacatttgcttgagccagaagcccgttcagtcacgttctcagcgtttgtggaaaattattcccattcttcagtgtcaccagccaacctccgtggacct

SEQ ID NO: 549774 - DNA, 334 bp, Homo sapiens
tagactcttttaatgggcagcagggaaggcaggataagatctgtactttagagcagggcatggtggctcatgcctgtaatcccagcactttgggaggccgagacgggcagataacttgaggtcaggagtttgagaccagcctgggcaacgtagtgaaaccctgtctctactaaaaatacaaaagttagccaggcatggtggcacacgcctgtagtcccagctacttgggcggctgagacagaagaatcacttgagcctgggaggcggaggttgcagtgagccaagattgtgccactgtgctccagcctgggtgactggagtgaaatcctgtctc

SEQ ID NO: 549775 - DNA, 101 bp, Homo sapiens
gaatcgagctcggtaccggcactatcgaccggtgaagtggcaccatcgaagtgggggcactcccgacaacgtcgtaaaggtgccgcagtgcacccatctgg

SEQ ID NO: 549776 - DNA, 882 bp, Homo sapiens
  misc_feature (30)..(30): n is a, c, g, or t
  misc_feature (344)..(344): n is a, c, g, or t
  misc_feature (452)..(452): n is a, c, g, or t
  misc_feature (507)..(507): n is a, c, g, or t
  misc_feature (514)..(514): n is a, c, g, or t
  misc_feature (516)..(516): n is a, c, g, or t
  misc_feature (540)..(540): n is a, c, g, or t
  misc_feature (559)..(559): n is a, c, g, or t
  misc_feature (567)..(567): n is a, c, g, or t
  misc_feature (574)..(574): n is a, c, g, or t
  misc_feature (588)..(588): n is a, c, g, or t
  misc_feature (626)..(626): n is a, c, g, or t
  misc_feature (777)..(777): n is a, c, g, or t
  misc_feature (856)..(856): n is a, c, g, or t
  misc_feature (878)..(878): n is a, c, g, or t
cccccctctgtcttgtgaaggcaggggaanggtggggtcctggagcagaccaccccgcctgccctcatggcccctctgacctgcactggggagcccgtctcagtgttgagccttttccctctttggctcccctgtaccttttgaggagccccagctacccttcttctccagctgggctctgcaattcccctctgctgctgtccctcccccttgtcctttcccttcagtaccctctcagctccaggtggctctgaggtgcctgtcccacccccacccccagctcaatggactggaaggggaagggacacacaagaagaagggcaccctagttctacctcaagcangctcaagcagcgaccgccccctcctctaagctgtgggggtgagggtcccatgtggtggcacaggcccccttgagtggggttaatctctgtgttaggggtatatgatgnggggagtagatctttctaggagggagacaactggcccctcaaatcgtccagcganccttccncnatccaccccatccctccccagttncattgcactttgattagcnagcggaancaaggangtcagacattttanagatggtggcagtagaggctatggacagggcatgccancgtgggctcatatggggctgggaagatagttgtctttcctggcactaacgttgaagcccctggaggcactgaagtgcttagtgtacttggagtattggggtctgacaccaaacaccttccagctcctgtaacatactggcctggactgttntctctcggctccccatgtgtcctggttcccgtttctccacctagactgtaaacctctcgagggcagggaccacaccctntactgttctgtttctttcacancccc

SEQ ID NO: 549777 - DNA, 925 bp, Homo sapiens
gctgtcctttaagcgtcgacaggcggcggagcgggcacaatcacagtgtccgggtcatgggggaacccgagaccgggtgcgccgggggaatccgtgcgggcgccttccgtcaccggatcccatcctcggcgcgctccagcaccttctgaagtttgcaggcgcccagaacaggaggcagaggcaagtgagggagtgtgtggaagaggagggacgtcaacataatgcatcaccctatgaacatgatatttcacaggaggataaagaaaataggggggggcgctgatgaattggttggggcaaatgtatagtaaaagagagtgaagcatgcgaagagagctgtgccattgatgagtggcgattcgtgctcggtgttcactacaatccattggtctctatacattggctcgagcgaaggcgtcctaaagactaagtctttccccaagggcgacgcaccaaactaaaccggagacgaaggggtcggttgcccgtaaccgactttgcttccaggggtgggacaatagtgttggatagggaacttggggcctcgggataataagggaaaattcccccaattccaaccaaagaacggttaggggctataacccaattttggtcggtgctaccaggttaggccctatgggggggtaaacctcccgaaaaatacttaacttatggggttgggcaacccagccaacaggacaaatttttccccccggggaaaggcaaaccccaagttcctgggacagagccagggtcctatagttgttgccccgagaagggtgcggaacacgccttcttggggaaaaggggccgccgaatacttggggacgcccaaattccgggggtggcgcttcaaaatatactcgtccgctgggggcttaaatacgcaaacccccattttttcccccccccgtttgccgccaca

SEQ ID NO: 549778 - DNA, 167 bp, Homo sapiens
cgtgagctagtctgagcgcgcaaacttccagcggcagccgtcccagttgcagtggtagggcttctcacctgtgtgcgtgcgcagatgcgccttcagatgcgatctcttggtgtaggtcttgccgcaggtcgcgtagctacaggtgttagtggtggtgcgtttgcggg

SEQ ID NO: 549779 - DNA, 355 bp, Homo sapiens
ggacgcgttgggtcgacccacgcgtcgcggacgcgtgggagcacatattgagatatagtaattctagggtaacaaccgtatgagtagtacagcggggaaagaccgcagccgcttagaccactattacgggaccagcctattgtatcaagcacaaaccctgagctatcgcgttgagcataggtggcccctcgtagaagagtacttcgtagattcgaccgtacgcatactttgccgttcgtttctacaactcgattcaagaagcttgatagatacgggcgataccgctctgccaatctacgtagaaggagaacaaaaatttttgtcagtgatgacattatcgggacttcaaggcaaa

SEQ ID NO: 549780 - DNA, 165 bp, Homo sapiens
gatgtgtagtatcactcatagattcaggtgtcttcagctgaatctcatgtctcagtacgaaaaactgaatcacatgctatgtaaggaacgtgctattcacccagtacaccaaaaaagcaatggataatgctgtgcattttgcctttctgacatttccttggaata

SEQ ID NO: 549781 - DNA, 220 bp, Homo sapiens
gagctcgagaacagcctggccaacgtggtgaaaccttgtttcccctaaagatataaaaaattaactgggcatggtggcgggtggcgggggcctgtaatcccagctacttgggaggctgaggcaaaaaaatcgcttgaacctgggagggggaggttgcaaagtgaacaaagatcacgccgttgcactccagcctgggcagcaagaatgaaactccatttca

SEQ ID NO: 549782 - DNA, 445 bp, Homo sapiens
  misc_feature (6)..(6): n is a, c, g, or t
  misc_feature (11)..(11): n is a, c, g, or t
  misc_feature (35)..(35): n is a, c, g, or t
  misc_feature (61)..(61): n is a, c, g, or t
  misc_feature (428)..(429): n is a, c, g, or t
gcccanggaancccccacccaaaacaaaatatatnccccaagttagttagcctggatgccntggggtgccagccgggtgaatccagaaccagaaagacccccatcccagcccaaattccacctcatcctttttccatgtcccagaaaagccctgaagggaaatgcccaaggtgtcaatgtaagcacatgcaatcataaattaaagctttgttatattcaaataaagtaatacaacatttattacttgcttgggaaacagcttgggaagcagccacattgaaatttcttgtagccatgaaaataatacaagttgcttgtggataacaaaattcacacagaaaccatttctgagatatcttatatttgatgtatttatgcattcatttaagtcacatattacctctttttaatggaattccaagtacaanntaattctcctgtatag

SEQ ID NO: 549783 - DNA, 842 bp, Homo sapiens
  misc_feature (106)..(106): n is a, c, g, or t
  misc_feature (235)..(235): n is a, c, g, or t
actttttaaagatcttcagctattctcttgtatcatgcatcatcactaaaaaatgccatccgtctcgtgccactgcactccagcctgggcaatagagtgagactcntgtctcaaaaaaaaaaaaaaaaattctcatctcgggggtcatctcccaccgtgccttaatttggcaatttgtgggtattctcacaaaccctatagaatttttaattctctaaaattaatctcggcgggngttggactacattaaagagttgggtgttccgatgtgagttaaaacacaaggcgggagaagtttcgggctcaaaattatttattctcaacaatggccgtggtttttaaaaaaagtgcattcaggtaacatcaaggtacaaaaatacctacattatttattttaaatcattctctcttttggaaagtatgggcaaccttttctacgtgggtaactcttatttcctaataccctttctcaggatataaatcgggtgtttcctgggccaatctctattggtgaacgcagttatgtacaggcaacaacgggaagatggacaaaggagcaccagagattcttctggtggcaaataaattccatatgaggatagagtggggatgggggaaacgacatcacgtgggaggtgccacgaattaaaactttgggggggaaccgtgtgagtcacattacgtgtgtaccggtatgggcttcttatttacggttccagaacccggtcttctggagagcctgaaaaactctttattgtagtacttaacccattttctaatacagcctgaataccctgtgggggataaggggcaccccttgggaggaagaggttttgaccacg

SEQ ID NO: 549784 - DNA, 115 bp, Homo sapiens
aagcatgtgtgttgagagcttttcagactatcacctttgggtcgctttgctgttcgtgatagtgagacagcacagttgcggtgggtcagagcataagggtgggtcagaacataag

SEQ ID NO: 549785 - DNA, 1153 bp, Homo sapiens
cttcacagcacaggtatcaaggacttagacttctggctgtctgaggtggaggccctgctgggttacgaagattatggcaaagacctggcttctgtgaacaacctgctgagaaagcatcaagctgctggaatgcagatatatctgcccatgaggatcgcctgataggacctgatacagacgcaggcagatcagccattgatgaccagcggagtgccttcgacacctcccaagtacaaggacaagagggacaccatcaacgggtcgcttccagaagatcaagagcatggcggcctcccggcgagccaagctgaatgaatcccaatcgcctgctaccagttcttccgggacatggatgacgaggagtcctggatcaaggagaagaagctgctggtgggctcagaggactacgagccgggacactaactggcgtgcagaacctgaggaacgaagcacaagcggctggaagcagaactggctgcgcatgaggccggctattcagggtgtcctggacactggacaagaagctgtacgcgatgagcaacaggcagtcgggaaagaggacgatacagcagaggctgggcggcacgtttggtggagcactggaaagaggctgaagcaggctggcagctgacccggagagtaagacggctggaagaagtccatggggaaatatcagcagatttgtagcccaatgttggacggaggcacgaaggcctggatcaggtgagaaagatgaacgctggtgggcagcgaagattactggagaaactcttgaccggccataccaaggggttaactgaaagaacaccatgaaagcatttagaagaacagaattacacacgatcaacaaaggattcgagatgcactgaatgttcttgcaccaaatggaacaatgacctcataaagaagaacaatcacaccaaggaaggaagaaacaatcaacctgcaaaaggattcgaggggccctgaaacggggaaacgagagaccacaccataggagaaaagctggcagcacagaagaaaacgagaacaagagagaaagaaacagaacaacaaacacatacaaaaagaaaagcagaaagcagaaaaccagaacggaagaacgaggaaacaagcgagcaacaacagcaaaggacagagaacccgcagaacg

SEQ ID NO: 549786 - DNA, 435 bp, Homo sapiens
tggtaacacacaaatatggggcagcatgcttataggactacaaaatagatcaaggaacttacagctatagaagagagaaatacctatgggctgctgacaagagcagtagatgtgcccacgagtacggatgtgtgttgtccttgggttagccactgtaggtttataacctggtaggaacttttcataggaagggccaaaaattcaagatgctcattagcaagtcgtcttctagggtgttgcctgaacctaggctgcagtagaagtggggctatggaggtaggcgatattgaaatcccaggttaatgctaatctccatctcagcatccaggcacactgcagaccagcttccttttgggccctgccggtccttagttcctctgtgctggctcttacatttctgatcacgctactggtgccaagctaaatccgccgcct

SEQ ID NO: 549787 - DNA, 801 bp, Homo sapiens
  misc_feature (597)..(597): n is a, c, g, or t
  misc_feature (672)..(672): n is a, c, g, or t
  misc_feature (694)..(694): n is a, c, g, or t
cagatctgtggggggggggagcttgttcttaggatgactccgaaggctcattgacataaatgctgacatgtacgtgcacatagccatataccccaagatatgcatagtgcgggtgtgatcatgcacacacacactctctatctagggtctatggctatctgtaactgtgtgtgacggtagtcatagagacactcgacacattagggtcctatgacaagctaagttgccacctatgatggcgggaccagatcgtctacatcacaagctcacgactctacagggtgcgaactggagggagcaaaacactggacagatactgaccagttcgtttgatactagatacacctgaagatagacatctgggaaacaatcttttgaaaacctcgacaccttagaggtaaacactcactgacacaaggggcacaagctcaatgcctatattggggagcgtatatgcatgtaggagatctattactgtttgaaacgcttcagatatgtgctggatatatatctactcatccaagagtacgtctgagctattatgactgacatagatgtatcacatctgcagcactatggaaatgatgagaatagttnctacctgtatggggagaatgttatatgaaatctaccctgcatacactttcccaaacagtgcatagctggtagccnataatacgaggcgcccacagcntcgggggcatcaattatgtctcctcaggagtgctcttcaacgggacgccgtgaagaacactggagctctacaggaactgataatgcggggcttctcatcacgacggg

SEQ ID NO: 549788 - DNA, 149 bp, Homo sapiens
cttatggatgctcgtcatgggatattgcatcccgatcccatcagatgggtcacgggtaccgcgctgctggtagggtagacacgctgagcagtcagtgtagcggcgtgagccggacatctagggcatacagactgttattgtcatctcgg

SEQ ID NO: 549789 - DNA, 313 bp, Homo sapiens
cgggaggatagttgaaccctggaggcggagatagaggtgagctgagttcgtgccatagcactccaggctgggtgacagagtgagagtctgtctctacaaaaaaaaataaaataaaagagtaaattaaggaatgtgaaattctggaccaccttgtgggtttaggagtatatttccgaaaagatatttggaaatgcgtattggaggaaatacaaaaaaagctagggaaaattacgacaaatttgcataatggaacaatataaaatggggtatataaactataacatacaaactaaaaccaagattccagacatgg

SEQ ID NO: 549790 - DNA, 845 bp, Homo sapiens
gatgtaagcaaaagtcattatttttcctattcatttgaaataagttatggcttaaaatgctttggagtttatttctcaaaattaaaatctggtcacatgagctttagtttgttttctggtttaaaaaataaaaaggtttctcttaacagtatttccagtgacaatgcaaggtaagtatatcaaaggaaatcaacagttgtgcttgggggcttttcgttatgggatattgatttcttgttcctttttccgtaacattgtctgctgcaatttaaataaaaattacgacattttaacggatatttcatagacaaaccaaacaaaaatatatgtttcttactttaaaagtgaatgtttcttctcttcagctgatctacaaaactgaaagcaagatatcttatgttacgaactatttcgacacactattctcttacagtgagctttcccatgttcttcactgtcttaagtcttctctcgctgcgtctatgtaggtggcaccaagaactttcactcacttgtcactggtgcctcagactttttgaaagtctacctttctaaaatttgccccgacgatctagattctacatgtaccatggggtttattctgtgtgcttttctgtattttaaaacttgtggctgtactaagcaaattgccaggttataactctcagcctacatagtagttcaccgcccactcctgactgccttatcgactccattggggtaactacgctgttcctagttcattcctcagcgaaatgcgtctgtcgacaccacgttaatacagcctgagagaccaccactaagtccggttgtttaaactcaccacatctcaaccccacaacacc

SEQ ID NO: 549791 - DNA, 912 bp, Homo sapiens
  misc_feature (912)..(912): n is a, c, g, or t
gggaaaccgcctactttggtgtggtgtcaccttgagctgtgcacataggacaccagtttgatttaacctaacaggcagtttttatctctagctttttcaagccaggtattgagcagtttcttggccaatggcctgagaaaccaccgtgtccctgtcaaggggtgatttatgggtttcaagtggggaagtaatcccatgtacttatttcttaaatacctaggaagttcttctggtggctcctcttggccctcccctctttctcccccaaaccaccatcctgcaaggacaagggaatggcctctccctccaagaggcaagggttgcagagggagcactgtggttgccatcccagttcctcttcaaaagccaaacagacactgctgtgactcaaatcttacagtatggagggtggagttgattgaaattccaggtgctgagtttgatagtggatttcaatgtagttgtcacaggtatgaatcatgtatataactgtaggaggcaagcaagttttattttttaaaaagttgggagaatcacttataaggtttctgtgaagcaaagtggtaattactccataacatacaggaaaagaatgtgttttcaaaaatccagctttgtctttaccctctggtacacttcagatttaattacctaataaaattatgaggggttttaaccattagttattaacttgccagtttattacttgataaaatatggagaacgaccaaaaatggattcgacgttccaaaatgggtttggccttttacggttccccaacatgcaacttggacaatttggatccattgtttgcatgagaagtttatattcaaagcgcgacaggcgtagggacatatggggggttcgccgacggtcctttggacaacagcggtggcggacacatatccggtn

SEQ ID NO: 549792 - DNA, 103 bp, Homo sapiens
tatcgtgcagaagcatccactcctctgtgcagaagcatcactaatctgtgcagaagatcaccttattgtgctgaagatcaccttatctgtgcagaagatcacc

SEQ ID NO: 549793 - DNA, 857 bp, Homo sapiens
agaagcagtagcgagaaagcaattcatgccggatgttactggattaatgcgaacccccgttgtaagccccttctttccacctctagagggccaaagccgcggtctaaaagtgaaggagctcccaacagtgggtggcgccccccgttggggttccccccccggttgggccccacccaggcagggggggcacacgccccccaagtgcgcccggacagggttaccccacaccggcacgggctgggccgcaccttttgggacgtgcccttttgcacatttggcaggaacaccccccgctgatgtagcagtacgcccgcccaaaggggtaaccccgggagggttctgcaagccaaactgggccggggttaaccatcttccgcaaggcatccctgttaataaagcgcgaagggcgacctggccaacagtcaaacaaggcgaccgccccccagaggggatacacagcccgctccctccaggaggtgatggagtatcaccctctcctccagggccgagacacttgacgggcacaccccgagaaaaaaaaaaccacgcgccgtgtacggtgaaggatcacctcgacgacgcgtcgccggcaagtcacgagggcagctccgcgggacgatccccccaaaaaggagcacacgtgtgcgtagaacccggcacggagacacagcatatctgcaaggggaaacgggccaaaactcatacttgtaggggcccccagggctcaaccatggagctcccgccgggctggaaggagtgagaggaagggtgccccatacgcctgacggcgtgccgccccgagcccgagggcgagagtgcgcccatcctgattaaaaataatatttcccccaacatgt

SEQ ID NO: 549794 - DNA, 889 bp, Homo sapiens
tccttgtttccccccctttggttgtcccgccgttcctggaagggtttggactttacgtctgtcgaggttcaattctatcccgtttagaccagtgttttgccaccattgcacctgttgtggtcaggcacacaagacctcctggacctgctcttggagaattccaaggacctttgttccgatgcttttttccggcatgtgccacccccgacatggcccttttgactatcctgaggcatcaccattgatcttggagccatcccacagaagattgagggccagctctttacctcggaggaggaaacacctggcagagactgtgaagagattctgacattccctctgagaccacccccctgagcttccctgagagcaagtgctgagcagagccctggaaaatcagtcccggcccttgaatatgccccctcctgtgccagtgtcccaccaaatcgttttcccgagcctgcagcctgtcatgccaggagttggcattaccttggtgtccttactaaggaagatggagagaaggaaacgtggaaggtgagtaataaatttcaccttgaagcccaccaccaagaagatgaaaggcagcccaagaagacagcccgcctggggaacagaatgatcaaggagagactggttccttgccaggacagccagagaaagaggcttcagcctcccccgaccctgcccagaagagcttcatctgtaaggcctgcgaccaaagcttccctttctactgccgccttaaggtgcacatgaagcgctgccgggtggctaagagccaacaggtgcagtgtaaggagtgcagtgagacccaggattccaagaaagagctggaccaacatcagctggaggcccctggtgcaggtggagagcccgatgcccccca

SEQ ID NO: 549795 - DNA, 1592 bp, Homo sapiens
gcactcagggaaccggaggccagccctcaactcactcttcagcttccctgctgtgttgcagcccagccagctccatacatgtcctatacagatgcattgacacagatagctgaaattcaaaggaggcaatattcatcactgaatcagacaagcacacacgagatagcctatcccaaagcattcaacccataaaaagaccaagcagcacgcgcagaacagatcccataaccgaagacaccatgcgagcaaccaaccaatccccaacacaaactagcacgcaacgagtccacgcgcaacaacgaataccatgggagaaaaaacacccgaaggcaccaactgcacaggaagcccgtaggcacaaatgccccacaacgcaaaaaacctcagaagcatcccagcaacccaacagctctgaccaatggcccattaacatacactagcgagacgccccactatatcacaacagcaacccaacagaggcaccctaagagcaccaaccacgtaacgtgaagagcgaacgctaagaggaacagacaaggacgcacgatggcgataagctcacaccaacaggcaccaacggggcacagcgccacaacagcgacctccacatccgactagagcgatagcctagaaaacataccagcgccacacaggctaaattaaagcaaaaccaccaagggagatagaagacagaagtaataggaccaacgtaaccggcaacaagccacaagcatggcgacaaaacccacccatgagaatagacgacacggagcccccacacgcaacaagcaactcacccccaacacaggagaccatggccaattccaaaacactaacagcaaacagacattacaagaggcacgaacagaccgacgaattccacttgatccctacctccctggcacacatggcagagagacatcgatacaaaagaaagaccacaagccccagtcggacgcactcacgcgaaacaggacccacggacccacgacccaaccacctcgagcatacaccacaactcacaacacacacccccagctgtgcaccaaaacactcccatccccaggaacccctggcaactcaccccaacaccaataccaggaacacaacaaacacggcccacacacggagaacacggatccacaaagcacatggaaagccacaatcccgctacccacaaccacacaagaaaccgtacaggcacgacaacatgacccgcaccagacaatacggccaactgccctagaccagaacagaaacacgcagagagacaagacagagacacatacacaagacaaaaacgcaagcaacagacacatgggcccaaaccctgcacacaagccacacaaagcagaccaaacgcagtattacaagaacctagcacagcaggtgaactccaaccacaagccacaccgtctagaaacagacgacagcaatgacacacagctacaggggcacagcaaccgagcacacaaacacaaacgacaccgacaacaacacacagtaccggccagcacaccaccacacagcaagacacacacacacaaccacgacggcggcgagcccacagaagagcaagcagcagcagcaat

SEQ ID NO: 549796 - DNA, 469 bp, Homo sapiens
  misc_feature (299)..(299): n is a, c, g, or t
aggcaggcgccatctcctcctccccagctcctcccctagggcacagataccgatagtcaagctccatctcctcctcaccagctcctcccctagtgcacagatacgcatagcaaggctccatctcctcggccccagctccatccctagtgcacagatacccatagcaaggctccatctcctcagcaccagctctaccccaagtacacagatagccaaaggcaatcttcacctccccagctcctcccctagtgcacagatacactataggcagggtccatctcctcctccccagctcctcncctagtgcacagatacctataggcaggcttcatctcctcctccccagctcctcccctagtgcacagatatctataggcaggctccatctcctcctccccagctcctcccactagtgcacagataccatataggcaggcttcatctcctcctccccaagcattgatgcact

SEQ ID NO: 549797 - DNA, 456 bp, Homo sapiens
  misc_feature (3)..(3): n is a, c, g, or t
  misc_feature (46)..(46): n is a, c, g, or t
  misc_feature (67)..(67): n is a, c, g, or t
  misc_feature (75)..(75): n is a, c, g, or t
aancggcatcgctcccttggggtgccatgggggggccccgggccanagtggaacgtgtctgcgaagncgggcccnggttctgccagcggacccccagttaccctgtgggtgggtgggtgtgacagcaggagcattgccatcttggacaaacatggccattttaagttctccgtgattaaaaaccagcccaaaacattcagcctaatggctcatgtcagtatgagcagaaacatttcaaccatgagataaacccccatctgaccagaaacatgccaatcctgagaataacctcccctccagccagagatattccaactctgcaataaaactctccttcacacagaaacattcgcagctgcggtaggctcccccttcctaaacccttaaatgcccttagtctgtaagagaatgtccctgaccgaaatcggccagaagcccctctcaggtttattccca

SEQ ID NO: 549798 - DNA, 223 bp, Homo sapiens
gcccttgcacttacagtagccactggctgcacatggccccttgagcacttggagtatggctagtccacattgagatgtgctgtaagtataaagcatacacaaggtttcaaagacttagtacaaaacaaagaatagaaaagagcagtaactttttatgttgattacatgttcagatggtatattttggatatattgggttaaataaaacatgttattaaaatta

SEQ ID NO: 549799 - DNA, 663 bp, Homo sapiens
ggagagagacagcgcgcgcgaggcggagaccgtggaggagaggagctgcggagaggggttaggcggagagagagagagagagacagcagcctccgagttggttgagggggcactcagtgggtgccaagctagtggcccttgagaacccacaggagacccgcagcccgcagcagtgtcgccagtgagccgtggtcccaaatgcacctgaggctcatctcactggatgacggctaggagccgcaccgcctaccccttagcacaacgatctgcctgtgtatccccgtaccccccaccgatgtccagcggggacgctcggaccgcgtgtgctcctttgcgctgagacctcaggccaggacctcgcatcccccccccacgtccatcgtcgcttactccactaacgtcgcgtgggtgctccccttcgcgtgcctctcgcacacatgtttcccatactgtatccttgtgcgcgaccacgaacccggcgtcttgggctcggatgcactgcggactctagtggcgcttccactctgacggcggatagcacttgctacccgtcatacaacgttccatataatttgcattccacgttctgctcccaagtctccctctttctttgtttgtcatgacagcatctgttgtcaactgtctcacgcatccttggtgacc

SEQ ID NO: 549800 - DNA, 251 bp, Homo sapiens
cgcgttacagatcccggcacatctgacccagactgacgtggatggactccgactgggcctgcgaggtgcatgcctcccctccactccggagcggctcggagacctcccaggtctcagttcctgggcctcacttagtgaagaggcttcaggctgtgtgcttggagccaccgtcgaacagcatgggagcgaagtgcaacagtgaaacttgacgtggtgagcctgcacgcagctactggtgtgagctcttggct

SEQ ID NO: 549801 - DNA, 148 bp, Homo sapiens
aaactggaatctggaggctgtatgagtagaagacgatgacattcagaataggacaatagagaattgaagtgtgtatggtgaatctagaatggtgtatgtcttcagagctatcacatctagagacctgaaagaagaggattaggtgatc

SEQ ID NO: 549802 - DNA, 138 bp, Homo sapiens
cgagctggcagagctgggccatggaaccggtagagacctggacccccgtgaaaggtggcaacttggctgagaggtcttgacgactccctgcaggactatccctttgatggactggcagctgcctggcaagaacctgct

SEQ ID NO: 549803 - DNA, 635 bp, Homo sapiens
tggggagacggggttcaggctcagctcagccaggctccctctttccgtctcagccgggggccggggccgccgtctcatctgaggcctcaggggggctcggtctcagccgggggcgggggccaccgtctcatctgaggcctcacgggacaggatcctcccaggctccctccaggcggcaggggcctccccaggggcggcgggcatccttagcacagggagcggggggtcagagagccacacccaggcagaagccgccctcggggagtccgggggtgagggcagagccaggtgaggatgtgcacatccagaggggcctggtcagcatctttaaatggcgagtgaagtcggcccgggacggcttcgaaaacggcctctgaactggtcggacaagtacatacggtcggttgcaggggaaccaacatctcagagatcccacacaaggcttcctctttagagaagaaaaacacagcaaaacaacacaggcagcctcggtttaaaggcacggggcccccgaacccggcctgaaagcctcggcacggggccttcatctggaagcctctgtattaaagacatgtgggcctcctccatctggaagctttgtattaaacacactgagacccgtctcccaggtacga

SEQ ID NO: 549804 - DNA, 274 bp, Homo sapiens
caagcatttgctggtcagtactcgtaatctagtctaacaagtacaacaagattcttaaggaaggctatgcactaaaatcatcaaaacatcagtaccatcaaagtatgcagaagacacactgtgcatcgaagggtatatcacaatcatacacctcctttaagaaaacagaagtcactactcagcaaaaccatgatagctgcttcctctccattatatctgtctgttcatactttcatacaatggtccattcactatgaattcttatcttttcatt

SEQ ID NO: 549805 - DNA, 431 bp, Homo sapiens
acgcgcacgagcggtcaaaggtgagaaggtgtaacggagtatattggcgtgagatcccagcacaatatacgatagggtataagtatgtaaaactagacatagagagctcaaaatgattgtaggaagcctctaggatagaatacgcactcaaaattctacatggtgccgtattattcagccagtagtagaagtaaaatagaatataatttaaaaaatacaaaaataggcagagaattagaaaaagaattaaggatagataagagaaacagaatacagagcacgatgattgttacaaacccaaatatatcatttattacaaacaacgttaatggcccaaatacttcagtaaaaaaacacagaagaaagccaggcgtgggggctgggtactgtaatgccagcactttgaaccggcggagcagcgtggaacccga

SEQ ID NO: 549806 - DNA, 295 bp, Homo sapiens
aattagggacctcgtgattacttacggccggtacctagcacccttcagatacaaaatggggtgggtttctgggcgtgggggcgcatgtcgtagtctcagctactacagcggcggaggtgcaaagcttgagcacaggagttccaaggccagccgggccaacctagtgagaccggacctgtctgaaacatacaaccccacccctaccccccaccaaacacagggactggtgcttcctggtcccttaccggagaccaacgacgaccaaacggacgacaacgtaccgttcgcgttttcc

SEQ ID NO: 549807 - DNA, 845 bp, Homo sapiens
tatgatgttaaaatcagcaactctttatacgttaaaaacttgaaacctgtggccgggcatggtggctcgcgcctgtaatcccagcacttgggaggccaaggcaggtggatcacctgacgtcaggagctcaagaccagcctgaccaacatggtgaaaccccgtctctactaaaaatacaaaaattagctgggcatggtggcgcatgcctataatcccagctactcggaggctgaggcaggataatcgcttgaaaccgggagacagaggtgtggtgagccgagatcacgccattgcactccagccggggcaacaagagcaaaactccatctccaaaaaaaaaaaacaccacaaagagaaaagggaaaaacacacaacacaaaaaacaaccacttgtggcgacccgagggacacaattgtgggccctgggtgggcgccaaaataggggtagtggtctctggagggtggggaaacttacccttaaccttcaatctactgggtgggaacaacctggacccacagaggggattggaaccccatggaaaaaagagggctggcgaccaggttggcatttcaataagaccccgggacttaccacaggaagatacggcccaccaaatgaatcctgtaaaaggatcctaaggaggctgcgtgcaaaaggcaggacttgtggccagaagtgaaccgcagaggcatggcagacccaacagaaaaggtgacaggcataatcaggcggagtgcagggcctaacacactatcggacaattggcctcactcaacaaggacaataacggcgaatcaacaaccacaacggagatcccggaacgcagggacgcgccacagaaccg

SEQ ID NO: 549808 - DNA, 195 bp, Homo sapiens
  misc_feature (87)..(88): n is a, c, g, or t
  misc_feature (91)..(91): n is a, c, g, or t
  misc_feature (99)..(99): n is a, c, g, or t
caacaatggcggcgccgaggaggtcgctgaggaggcggaagactgggtactcggatccggagcctgagtcgccgcccgcgccggggnntgngccccagngcatctccggcccatctccacacgggcaccttctggctgacccggatcgtgctcctgaaggccctagcttcgtgtacttcgtggcattcctgtgtt

SEQ ID NO: 549809 - DNA, 108 bp, Homo sapiens
acacacaattttgatcccttacattggtgctgaaggcaaccagcatagttctgatgcctgggggcgttaacaaaggcgagagggtacgtggttgctgcagctggaagg

SEQ ID NO: 549810 - DNA, 475 bp, Homo sapiens
ttaaatggagacacactaaaaatatttattcccattcaggggaggatattgaatttgaatgtaaatatggatatcataaagcaagaggatcaccgccatttcgtacaaagtgcattagtggcaccatcaattatcccatttgtgaataaaattgtaatacatttattaattgattttattgtttagaaatgcacaagcatgtcactaatatactttcaatttgcatttgaaatattgtttaactcatgtcttctcataaatataaacatttttttatatagtgattaatttttaactttaaagatgattgccaaaatgcaaatgcagtacattcaaaactcctaatccaaaccattatatgtccaaggacaaactcaaacaagaaaatttgatgtatgtttttcagcattgtttttctattcagaacttcctcagattttcctagatatcttttgatgtaatgttttgctggatt

SEQ ID NO: 549811 - DNA, 301 bp, Homo sapiens
ggggggggaaaatgtcccccccgggggtttccaaaaaaaacccctttcctcccccccattgggggtggcccccttcccctttggggggggggggggtttttggggggggggtttaaacccccccccccccttttttttgggggggaaaacccctttgggcccgcccccggggttttttccccgatttttgaaaacggttttagggggtttccccccccccccgggggccgggttttttttggggaaactgggtttttcccctttttccctcccggttttttaagggggggggggcccttta

SEQ ID NO: 549812 - DNA, 228 bp, Homo sapiens
gatgatctcgatatgcctcgcacttggtcttggcattgagggacatgctgaagagctcaagtggtggtgtagtttgaatgtaatagtaggcggcgatcatgcctaggttcagagggcgccccgttccatctcgtccttcgatgcttgatgccacttgtgacttgctccagtgtcacctcagtggtcttgctcacaccatgctcttgacaaagttggtccctgacaatg

SEQ ID NO: 549813 - DNA, 362 bp, Homo sapiens
  misc_feature (33)..(33): n is a, c, g, or t
  misc_feature (35)..(35): n is a, c, g, or t
  misc_feature (121)..(121): n is a, c, g, or t
  misc_feature (167)..(167): n is a, c, g, or t
  misc_feature (170)..(170): n is a, c, g, or t
  misc_feature (174)..(174): n is a, c, g, or t
  misc_feature (279)..(279): n is a, c, g, or t
tcactctgtcacccaggctggagcgcagtggcncntcatcggctcgctgcgacctcagccttccgagtagctgggactacatctcaaaaaaaaagagccagacacaaaaggttgcatggcntgcattagaggcccatctatgaagaaaggaggtcaggggttgccangtntggngggatgggatgggcgtcgggtctccttcggtggtagtgggtgatgaaaaagttctggaaccagatagaggtggcatccacacaaccttgtgaaatgtcctgagcngcatagaagtacacaccttgaaattgtgaatttctttctttttttttttttgaaggcagtctcactctgccaccccaggctgg

SEQ ID NO: 549814 - DNA, 427 bp, Homo sapiens
ggtcgaccctacccagaaagtctcctagtggtgaggaggtaaatagtttgatgtatagtcttctggtttcctcttttgcatttataaacacactattttaaaaatataaatgtggctatgctgtgtatagtatattagctactaacttttttcttatattcaatgctattttatgtatatctacctcattattttttaacaggcatatactatttaatagtatgaaaatatatagtttattttagcttttctactggtggacatttagctggcttctaatttttctttatttagaggtgctgcaatcttgtcagattcatctttctgaatgaatatgtgtgagcatttctattaggatacatacctagaagtgaagtcactaagtcaaaaggagttatttgcaatacaaattttgttaaatactgtc

SEQ ID NO: 549815 - DNA, 1352 bp, Homo sapiens
  misc_feature (468)..(468): n is a, c, g, or t
ggtggagtattagctggagccagggataccagtggacgtggagcagaaccattctgagctaccagctccgcaattaggggcatcgaaagagcggtctcgccggaggatgatagaaagaggaggaggcttagggataggaatgcgatcgagaaacaaaatggtactcgagaacgcggtcgactatcgaggaagatacgaaatgactgtggtggatgggagcggatgatgacgaagaataggctgatgtgagagttattgagcagagtatgtggtgaaaaaggaagaaggaatgagcgaggggagacgcatctggtatgggaccaggcgtacagctgtaagtatacaagtgagtccgtcacagtttgaacctgcggaatcactactatacataattcgatgcacaattgcaggatttcatacgcttttccgaagactagatccgaaagaacggtttcatgagaaatccgnagactggcacacattaagattgttagctaatcgactatgcaggagactgccacggtggatggccgatcgaggccagtacctctgctagcaactcattcgggatgtgcagacttgaatgcgggggtgacagacgcgttcatcggctttgcctcggacacgtatacactactggatgttgttccatagactgtggtcgatttggctgtcaggcaattaaccaagaatagtgtgaacacccctcgcatgaaggaagttgaacgaggggagctggagaggggctgcatccgagtcggctcttgggtgggaattggggccgaggtgggcaggccctgtgctgggacccgaaaatctggggcggcccggagtgaggcctccgggaaacagcggcggaaggcatcggaggtcctggcacacgccgcgcatttggggcaacatctgcgagtgcgcgaccaaagatctcagcagcggaccacggggcctatcactcgtccctcacacagctgaagcgactattgttgcacaaagtcctatcgaagcggccagatcggtcaagaagcgaaaggcgcgaaacatcatacaaagatgaaaccataacgagaaaacacctcctgtacttgttgtccctcgcgcccccgccctcgtctgccctccattcaaagagcgaggcgagcgcgaagagaggggacacagccgggacaaagaccacggacgacacgaagacaggagagaccgaacaggaccgaaagccacgagcgcagacagaagcagacagaccaacacacgggcacgcgccagcagacagccacggcgaaagacacaccgaaacacgcaccaaagcgccgcgagcgacgacagcaagcgccagaccacgacacgcgacagcc

SEQ ID NO: 549816 - DNA, 314 bp, Homo sapiens
cgtccatcccccttcgtatgatagaggtggtattgactgacttgtattaatatagtgtcaatgctattgataattgtcgattgtatgttaatccatagaacatggcctgctgccaacacccaggacacccaatagatggtctttgctgcttgattatcctcatccccagtctcaatgggacaccacgaccatgacaacagccacttcccatcaggactcactgcctagtcaccaagctggcatggatgggatataataacctcgatagaagttggcacaaaggagttatgggacaaacggtccaatatatgcat

SEQ ID NO: 549817 - DNA, 104 bp, Homo sapiens
ctagtatgcactgtcatgtctccgacgtgtgataagaaacttttcccgccactgatgaagttccccagcacatcaccagcacccccaactatagggtttgatga

SEQ ID NO: 549818 - DNA, 445 bp, Homo sapiens
  misc_feature (81)..(81): n is a, c, g, or t
  misc_feature (141)..(142): n is a, c, g, or t
  misc_feature (146)..(146): n is a, c, g, or t
  misc_feature (150)..(150): n is a, c, g, or t
  misc_feature (171)..(171): n is a, c, g, or t
cttttaacatgtcatcgtggaagtccctttcacctcccaggctgaggcacagatccattttcccacagatctgattcttangctagggtagggagcaaagccttgtcttgtgtatcgaaagttatcttgctgctgtgctgnnttcnctgntggtgtgcacagcatgagctntcaattatacactaattatatggctgacttcattatctcccttctgaaaatatgcagtctgtcccaaacaattagcactgaattatttccctatattgtttcctaatttttccatatgttggtttttactcttcagccagactacacacctccggaaggcagagacggggacttgaagttctttgaactcaaaacatggcaatatttattggtcctaatactgtcactggcaaggttggtgttttagggaagagatgatagtgtaagtgtcaac

SEQ ID NO: 549819 - DNA, 348 bp, Homo sapiens
ctaacactacactaatgtacatcaggagaaagatatgtttggaaaacccatcattgctacagccaaagactgttatacatccgtctgtccctttccgatgtacttaactatgaagcttgtaccggtgtgtgcaaagtaaaaggatatggcataggccaaggttttcaatgcatatgtgtggtttggcataagctcctgctgtctgcatgaagaaagtatgctccaggtagctgtggctgctgtcagaataagtgaccacagagcagaattaaacctgacctgtggtctagattgcaaactggtccagacccatgtgtagctaagtccatcttagctgcaggtcgacgc

SEQ ID NO: 549820 - DNA, 227 bp, Homo sapiens
tgattacccgaatttcgagctccgtaccctgcaaggagatctgcgacacctccgctccttcatgaccgtccactgtgcttcgggcgtccttgtcacttgcttcctcacgttgaattttatgagcttcgagagcctgatttctccccgacccctcctaacacggctcctggcaggctgaggtgtcgcaaaactccttgcagggtaccgagctcagaaattcgtcaatc

SEQ ID NO: 549821 - DNA, 340 bp, Homo sapiens
aatcaccatgtcaaggagagaatggtgcaggatggccgaatagttctcaccagtgatggaccttctataaaaacatctattcgaataactatccacaaaaaggacttcacaggagctatgaaaaccaggtgataaatcacaatacctggttatagcataatacgaaaagaggccaggcatgatggctcatacctgaaatcctaatgctttgggaggatgaggtgtaaagatcacttggcaccacgagttcaagaccatcctggtcaacatagcaagaccctatcgctacaaactagaaaaaatatcttcaaggaaagagaataatcatgtggcccgacta

SEQ ID NO: 549822 - DNA, 1225 bp, Homo sapiens
gaacgaactttgtggcaccggaggatcggaggtgtggaactgaacatagggaggggtttggaagtgtcagcattctattgcagtcagcacgcaggtttgcctgactttaggtactggagcccaaggcctcggtggcccgacagtgtgtgggctcatagagacaggacgtcgatgccctggctggctagggaagactattcatataattagtacgaagacgcgggacatgtcgctggacttgtagcggatagatttcacatattacacacaaggcacgagacgatggctatcgcttgatataaggcccctgggtacacaacgcgagccccatggggacctggacgtaataggctgtggtgtgatgtgaggtacccgaatactatactacattggtgcgctacatcttcactgtggaacgatgtccctgctctgtaaacatacaagggcggggaaatcctcatatctgccttctacgtgcatgggagggcccttatcaggtgccatagcgagacctacatgtcacgcaggcaaggcgcgatatgtacgaacatgcgttcgcaacatagtggcacccatactgggcgccccctattacgagattcttggaatatgcgccacacggcacaagatctcacaaaggtttcacaggctcacgccaatgccacgtaagcatgcgccactccatgtgtgattaaaaaaatcccattctcctaaatgtacgcaatcaggtacagtgccttcagttcaaaacgcacctccatacctattccgagagttgcgatacacatgtgagctttcgcagttcctactggtacattcacaagtgtgactaggtaaagttggtctcaccatggtatatatagctaaaagtgacgggagccaatggggtgaaacatgttgcacccttctcatgcaccgatactactatgagggggagcaaaaactaatccacagacgattacagtacgcacgagggaaaaatgtgaacattcccaagttacattagccgaagataccgatcagcatatgcgggcatgttacccctagtgagctgcgatggtccgatttggtaggggggtggagttgcgaaacaaaggacagattcgaaacaacttgcggttggcatatcaaaccaatgcaaggttggtgcgaatgaagcagagtatacgattgtgccaagggaaagcgtgcgccgttgtcgtgatttgtgattggggacaataca

SEQ ID NO: 549823 - DNA, 238 bp, Homo sapiens
aaaaaaaatttttttttttccccccgggccccttccccgtttaagggttttaaaagggggttaacccccccctttttaaaaaaaaattaacccgggcccctggttttttccccccacccccttttttcccggtttattttaaaaaaaatttttttttggggcccggttttgtttttttttttggtttttgggggaaaaaaaaaaaggccccaattttgggggggggttttttttccca

SEQ ID NO: 549824 - DNA, 682 bp, Homo sapiens
gtgcatgcccaagctggagctgccccttcgctggacgtggccccgctacatgctcaatggtccgctgtgagccagagggagttgatgcctgcggctgtgtgctgccgagctgctactcgcagtgagtgtcttcgagaagaccaagcgactcctgttcctcgtgtgtgcccatggcctacctgtgaccactgtgtgtgtgattgaatgtgcttgtgcctgtctgtatcaccttgccagatgtccccaaatgcctgtgcccttacatgtggtgcccctgagtgtgctgcactgtgggcatgatgcttgatttgtgaccatgactgtgcctgcctgatcatggatgccttgtggcatggcctccgaagctgacccatctggtgtgtagcgtccattgcctgttcctcatgcgtgcgagccgtggatgggaaggcggtcttgctgtgtcagttgtgagctgagccctgtgcgggcagttgtgtgctgcacctgctgggggcttgcggctccgtggccttgtaccctgtgtggcctcgtggactgcagtgacatgtacgaggaaatgtgcttgtgcaccagcttgtgccatgttctgagacctgaggctgggctcacgccggctgccttcacctgggagccacgcctgtgctttgcagccttcccctggacggagcgctcggtgtca

SEQ ID NO: 549825 - DNA, 781 bp, Homo sapiens
  misc_feature (136)..(136): n is a, c, g, or t
  misc_feature (180)..(180): n is a, c, g, or t
cctctgtgccccattcctgctgtgagcagggccgtccgggcttcctgtggattggcggaatgtttagaagcagaacaagccattcctattacctccccaggaggcaagtgggcgcagcaccagggaaatgtatctncacaggttctggggcctagttactgtctgtaaatccaatacttncctgaaagctgtgaagaagaaaaaaacccctggcctttgggccaggaggaatctgttactcgaatccacccaggaactccctggcagtggattgtgggaggctcttggctttcacttatctagcgtgtaactgtgagactgtcgtgggggcaaggagtacccacaggggttgactgctgtgctgatagatcttcatagaacgtcactagctccaggctgggatgcaggaggacttcaagtgtgtggacgaaacgacagactgatggctcaaagggtgtgaaaaagtcagtgatgctccccctttctactccagatcctgtcctttcctggagcaaggttgagggagtaggttttgaagagtccttatatgtggtggaacaggccaggagttaggagaaagggctggcttctgtttacctgctcactggctctagccaggccaagggacacatcactgtgagaggacgcctccacctcatgttcaaactatatactggagcatgggctgaaactacgacagatccttctgctgaacaagcagcaagccagaagagtgggactaaaggagcctccctaaaccaatcggtcgccaacagcgaga

SEQ ID NO: 549826 - DNA, 433 bp, Homo sapiens
taatgtatccaaatggtctttccaccggagatagtcacgtcacaatcatgggagattattccagcagcctggtcggatccgcatatacacttcagggtgcccgaacactcagaataggtgtaggtatcgcagtggggtctcctcctccggcggggtcgaaggaggtggtgttgaggttgcggtctgttagtagtatagtgatgccagcagctcaggcactgggcagcagcatcaggcagcacagtaggcactgctgtgcattcaggcacggatcagcacaaagaggggcgttaggtattgggttcatggccgggggttttatcttgctaattgttgtgcatgcaaatggatggcccctaagatcgcaggcagacacctgctcaggtgtaaggcgcacagctggttaggtctacggagcacaccggtggggctg

SEQ ID NO: 549827 - DNA, 149 bp, Homo sapiens
ggctgtctccgcttattacacctccccgaccccctgccatggccggcactgactctgcctctgacgctgaggatacgcactgacacacgccctgccagaatgccaaaggaagccattcttctggaagaagactttctcctgaaagcctc

SEQ ID NO: 549828 - DNA, 909 bp, Homo sapiens
gtcctgtcgacaaaacctgtcctcaacaagctgaccgtatacacaaccttgcatagatgtcaccaaaggtcaatgtccgataatattacctgcgggtactgtccctgacccttgtataggtgggtgagccaatacgtctggcctgacagaatgcggcctctgagacatgaagacaccatctccatgtgacgccgaacaactgcaagcggtgtctgacgcgttgccaagagactaagactcgcggcaggatttctctttgagtcaatagcttgtcttcgtcctatctgtcgacaaatgacgaggatctttttttgtgtatcccccctatcagttcgtacttgttgctctattgtaccagaatagaccttctattagcgggaagtagaaatcagctctatctgagaaattgcagctggaggtgcaggtatcagctccccgaccatcattggggagctggtgggtagtcgaacctgtggtgaactccgcctcggtgaataaaatggagatccagggtgggtgtgaatccaagcagcgtctgtgtgagtaacgggcacagtgaaatctactccaactgttcgttcagtgtgtgtgcacttcgtcacctacatatccgtgtattgggattgtcgtgtaataacatgcccttaccctttcttgttttcatgactcggctgttaaactccatatatcagtcatcttggctgttatgagaccacccatataggttccttaacatatcggtgacgaggggattagaacggacattcagcagtagtattacttaaaggggctcataaatggggcgtagctcttaaaagccattattgggttcaagacctcacacgattgaaaggacttgaaacaaatggaagggtccattcaaaaaaactcatccatgacctaaggatg

SEQ ID NO: 549829 - DNA, 1135 bp, Homo sapiens
  misc_feature (1120)..(1123): n is a, c, g, or t
gatccactccacgaacgtcaaatgcgtcatctgaggagggggagggccggggcaaaggaggggcaccctgacatggagcctgccagctccgtcagccctgactcggcccggagctgagctccccacctgccggtagcccaggagatggagcagcccagcccacgtgcccggccttccgcccctgacttcacttgataacaaactagaaactgaaacagggtcgggatgccgatgccggcttggagttagagatgagtcaccgctgagagcagctgcagtagctgagcagtggcagcagagaggcagacgtgagctgagggcgcagaggcaggcagcatctctgagggtccccaaggaacatggctgggagccgtgaggtggtggccatggactgcgagatggtggggctggggccccaccgggagagtggcctggctcgttgcagcctcgtgaacgtccacggtgctgtgctgtacgacaagttcatccggcctgagggagagatcaccgattacagaacccgggtcagcggggtcacccctcagcacatggtgggggccacaccatttgccgtggccaggctagagatcctgcagctcctgaaaggcaagctggtggtgggtcatgacctgaagcacgacttccaggcactgaaagaggacatgagcggctacacaatctacgacacgtccactgacaggctgttgtggcgtgaggccaagctggaccactgcaggcgtgtctccctgcgggtgctgagtgagcgcctcctgcacaagagcatccagaacagcctgcttggacacagctcggtggaagatgcgagggcaacgatggagctctatcaaatctcccagagaatccgagcccgccgagggctgccccgcctggctgtgtcagactgaagccccatccagcccgttccgcagggactagaggctttcggctttttgggacagcaactaccttgcttttggaaaatacatttttaatagtaaagtggctctatattttctctacggccaaaaaaaaaaatcggcctcgtggcctacagcggggagtattcgtccaagaggccatttttttggactttattttatattttctcttttatttcttnnnntaatctttataa

SEQ ID NO: 549830 - DNA, 1087 bp, Homo sapiens
ggtcatttggcggaggtctctggagagcgcagaacctagataaaagccccagcttggctgcagaaaggtcccaggtagacctcactagtgtgaacagctactcaggcccccgtagcctaccccagccaggtctcctacctgtctgctgccagtatagtaggtcccggtcagctctggagtgctctcatcggagggccatgcctgtctcactcctacttgactcttttggcaagggctctcatctccaggtcagcgctggaagagggacagatgtcgatttcgttgttatgtaaatggccacatgggcactcgactggtctgggacctacacgcaagtcacgttcccttcagaacctgggcctatagagcccaaactcaggtcccaagaagtgcatgctacagatggtcatgttcctggagaggcagggagggtgaggggcagcgtctgactggttccctgcacccaaaaacgcctttaagtccatttctccatgcctgcccatcctgccttgtatccgctggcccaaggggacggtgagtcccgtcccgtagatatccacctgggatccatatgacaaggatggtcggcgaatcattgcgagttgaagacagcggggtgtcaccgtagaagaccagccagactgtctttagacacccccggtggccaaaggtcatccaatgggacaagtttagtgtattcagggcacccgtgacgtcgtgaacagccgtgcagtgaccactcattggcacccaaactacctgggatgtcgccctccggggagctctgtggcgtgagggccgcggggtgttccggagtgtcatggctgcctctggctggcgctggcgaggtgcgggcaggtcatgcgtgagctgaggggaaggtcaccggcatgggctcgtgttcgcgtgcaacgtttagttggggcctggactgcgtctgaaaaacctccaattggtgactcacgaggggtgtagcagcgtggaggccctccggtcgcggctacttgccggggccttgttggggccacccccttgccgggtttcccaccttcccctcgtgacagcgcggggtccccgcggagacgcc

SEQ ID NO: 549831 - DNA, 969 bp, Homo sapiens
  misc_feature (6)..(6): n is a, c, g, or t
gcattnctcttgactgagaatggtgccacgtgtggtctgtaagtagcatctctgagggtccccaaggaacatggctgggagccgtgaggtggtggccatggactgcgagatggtggggctggggccccaccgggagagtggcctggctcgttgcagcctcgtgaacgtccacggtgctgtgctgtacgacaagttcatccggcctgagggagagatcaccgattacagaacccgggtcagcggggtcacccctcagcacatggtgggggccacaccatttgccgtggccaggctagagatcctgcagctcctgaaaggcaagctggtggtgggtcatgacctgaagcacgacttccaggcactgaaagaggacatgagcggctacacaatctacgacacgtccactgacaggctgttgtggcgtgaggccaagctggaccactgcaggcgtgtctccctgcgggtgctgagtgagcgcctcctgcacaagagcatccagaacagcctgcttggacacagctcggtggaagatgcgagggcaacgatggagctctatcaaatctcccagagaatccgagcccgccgagggctgccccgcctggctgtgtcagactgaagccccatccagcccgttccgcagggactagaggctttcggctttttgggacagcaactaccttgcttttggaaaatacatttttaatagtaaagtggctctatattttctctacgccaaacaaaaaataaaatataaaagtaaaaagtcggaggttttttggggcgggggcaaagggataggaagggcaggggtaataggtttcggacccgttttggtcaagggggaatcgggtccccaaagaggggaataattggagagagagcagttattactagaaaatgacgagaataggagaacaaagaaaaaggaaaaaatataaaaagaaaaaatattaaaggaaattatataat

SEQ ID NO: 549832 - DNA, 363 bp, Homo sapiens
  misc_feature (344)..(344): n is a, c, g, or t
gaacacaggtgtcgtgaaaactacccctaaaagacaaaatggggaagggaaaggactcatattaaccatttttgttattcggcacggtggtttgggccagttccaccctatcttggccattttatctttaaattccggtgcgctctgacacaaagttccccttgtaaaaatttttggagaggggagccgtctttgagtggggaaagaggctcccctcacagtgatttcctcgggcctctggatataactctaaagcctgtgcgtgtaacacggggtctccaccagtgcaactcctcttcgggatatcagagccgcaacgaggctcatgtgtcttatcagttggncccgccgacgacacacatc

SEQ ID NO: 549833 - DNA, 1133 bp, Homo sapiens
gatccactccacgaacgtcaaatgcgtcatctgaggagggggagggccggggcaaaggaggggcaccctgacatggagcctgccagctccgtcagccctgactcggcccggagctgagctccccacctgccggtagcccaggagatggagcagcccagcccacgtgcccggccttccgcccctgacttcacttgataacaaactagaaactgaaacagggtcgggatgccgatgccggcttggagttagagatgagtcaccgctgagagcagctgcagtagctgagcagtggcagcagagaggcagacgtgagctgagggcgcagaggcaggcagcatctctgagggtccccaaggaacatggctgggagccgtgaggtggtggccatggactgcgagatggtggggctggggccccaccgggagagtggcctggctcgttgcagcctcgtgaacgtccacggtgctgtgctgtacgacaagttcatccggcctgagggagagatcaccgattacagaacccgggtcagcggggtcacccctcagcacatggtgggggccacaccatttgccgtggccaggctagagatcctgcagctcctgaaaggcaagctggtggtgggtcatgacctgaagcacgacttccaggcactgaaagaggacatgagcggctacacaatctacgacacgtccactgacaggctgttgtggcgtgaggccaagctggaccactgcaggcgtgtctccctgcgggtgctgagtgagcgcctcctgcacaagagcatccagaacagcctgcttggacacagctcggtggaagatgcgagggcaacgatggagctctatcaaatctcccagagaatccgagcccgccgagggctgcccgcggtggtcgaatgagccatcagccgtcgcggactaagcctcggctttttggcagcaactcctgcttggaatcacttctgtaaagaaacacacaaacataaaaaaaacaccgcgcaaaaaaaagtggtgcgccgcggcgaaaaaaaatgtgggcgaataaaagtccggatcgcaggtgccaaaacgcgggtacacggttgtgcccgaccacatccgtaacatgacaaaaccagtatccccatccgagct

SEQ ID NO: 549834 - DNA, 307 bp, Homo sapiens
  misc_feature (72)..(72): n is a, c, g, or t
tgtgcacagtcccggacgaggtatcagacagtggcgcccccaaggatctgtcaccttcacgcgagactatantctccccacgccagaaaactcttgtgttcttgctaggccaggtgttcctggcagtcaaatcgagtcctccattttctcttgtggaccagttagttttgctcataacgcagtattctgagtttgcaactgtctctctgatgttgttgcttttgttcaccaccagtattttctgcattctgctctggtctaaatacacctaccttgagaaagtctttcccttattttcacctaaatg

SEQ ID NO: 549835 - DNA, 456 bp, Homo sapiens
acctagatgcttgttaagtacacaccattacctggtcatatatttccttcagcttcagggactggatctggatatggaccagatatctctagccaccatgatggcactggctccttcaccagatgaaacaatacttcaaaacaagccagtggagcaggtcacgccacccgacaactcctagttccgctgcctcttctgcactccaaactctctcttcaaaagctcctggattccctccacaaattgaaaagtggaaatatttgcaaataactgcactcacttctccccttgctagcatggataataaaactcactctctttatcacacttcactcttattatattggcttctttttacaagtggcgagcagctgcaccgttctactgattacaggaggatcacttgaggccaggagttcgagaccagcccgggcaacataagacgctgtttctaca

SEQ ID NO: 549836 - DNA, 854 bp, Homo sapiens
gtgtggtctgtaagtaggtggtcagctgtagctggatgtgtgccttgaaaggctgacaagtttgccctgagtgactcacctactgtcacctgatccaacaagatttgtgggcgtagcctgccgatgggtgacgccagttaaagcatctctgagggtccccaaggaacatggctgggagccgtgaggtggtggccatggactgcgagatggtggggctggggccccaccgggagagtggcctggctcgttgcagcctcgtgaacgtccacggtgctgtgctgtacgacaagttcatccggcctgagggagagatcaccgattacagaacccgggtcagcggggtcacccctcagcacatggtgggggccacaccatttgccgtggccaggctagagatcctgcagctcctgaaaggcaagctggtggtgggtcatgacctgaagcacgacttccaggcactgaaagaggacatgagcggctacacaatctacgacacgtccactgacaggctgttgtggcgtgaggccaagctggaccactgcaggcgtgtctccctgcgggtgctgagtgagcgcctcctgcacaagagcatccagaacagcctgcttggacacagctcggtggaagatgcgagggcaacgatggagctctatcaaatctcccagagaatccgagcccgccgagggctgccccgcctggctgtgtcagactgaagccccatccagcccgttccgcagggactagaggctttcggctttttgggacagcaactaccttgcttttggaaaatacatttttaataggtacaaaaacaacaacacaacactaccctctactccacaaaacaaaggggg

SEQ ID NO: 549837 - DNA, 844 bp, Homo sapiens
  misc_feature (739)..(739): n is a, c, g, or t
agaggcaggcaggtgagagcgggagctggagcagcagctggggaggcagcgggaggggcttcccggtccccaggctgcggggcaggccagaggccctgggacacacgggcagcatctctgagggtccccaaggaacatggctgggagccgtgaggtggtggccatggactgcgagatggtggggctggggccccaccgggagagtggcctggctcgttgcagcctcgtgaacgtccacggtgctgtgctgtacgacaagttcatccggcctgagggagagatcaccgattacagaacccgggtcagcggggtcacccctcagcacatggtgggggccacaccatttgccgtggccaggctagaggtccccttcccatactctccaacggaagcatgtgtgaaagcaagctgactggcctgtgtgacagagagggaggatgacatgtgggaggcggggcagaagaaacggcggggttgggacatcacaagatgagcgcatggtgtgttgaaggactggagtggtagacaatacttctggtcagttgtggaaagtggatggggagttcgtgattcataccaatggaatcaaagggaatgaattggcataataagggtgagtgtcacagtaatcagatgggagatggaaataagacaaaaaatacggtacaacaatagcatattattcagatagaaacgtgaaggatgggaaggtgtacggagaaagacaaggcaggaagtnaagacttgaaagtggagattgaaatagacagtgaaacaaatagtagtgttggtagagcatgagaaaaaatatgagggaaacgaggttaaaatgagaaaggagcgc

SEQ ID NO: 549838 - DNA, 927 bp, Homo sapiens
  misc_feature (1)..(1): n is a, c, g, or t
  misc_feature (3)..(3): n is a, c, g, or t
ngntcgtgatgatacaaaagcggcaacgacgcacagatgagttggccacctctgcgcgctgggtgaactggttcctgtctcacctcgacccattgtgcccgtcactctgtttcaccggtccccatcacccatggctgtaaacacatgggcgccaatgtcttcccaaggccggttatgccgggtaaaatcctttttccagcgtggacaagacacattcggcatggtataactcttcgccttttcaccttgttcccgactttcccttgatgctccctagcccctggctggtcggtgtctccccccctgtttccacgttttcgtccgcacccaggtttccccttccccaattggggggcccccaccacgggggcaacaaaagcgatcaaaattctcgggaacccaacaacacgggcgcgccagaagtttcttggcacgcgggggcaaccccggattctccccccctgggcgccacaagaggactcctttcacaccccggtcgtcggtaaaacaggtccccggcaccacaacagagcgtttctctgtgttcggtaattaataggcacactttcttcccccggtattgatattgtctgagggcccccctccctccccccggtatggttggtcccccccctgcattgttgaactccacggccgacttctggggactcccgagggtttcatcattaagtagtgtaggacccaagcggcccccccctcctttctctatgagcggggccatccccggagtttatctgggcgcgccaattcctggccaccccgtccttcatttcttgtgtgtcccccgccctcccctcgggggcgaatttctccctccccctcccccccgctgcaggcagtgcccgtgttcggccccccggtgcctttctaacaaatcctggggggggacccccccaaaccataaca

SEQ ID NO: 549839 - DNA, 1258 bp, Homo sapiens
gatccactccacgaacgtcaaatgcgtcatctgaggagggggagggccggggcaaaggaggggcaccctgacatggagcctgccagctccgtcagccctgactcggcccggagctgagctccccacctgccggtagcccaggagatggagcagcccagcccacgtgcccggccttccgcccctgacttcacttgataacaaactagaaactgaaacagggtcgggatgccgatgccggcttggagttagagatgagtcaccgctgagagcagctgcagtagctgagcagtggcagcagagaggcagacgtgagctgagggcgcagaggcaggcagcatctctgagggtccccaaggaacatggctgggagccgtgaggtggtggccatggactgcgagatggtggggctggggccccaccgggagagtggcctggctcgttgcagcctcgtgaacgtccacggtgctgtgctgtacgacaagttcatccggcctgagggagagatcaccgattacagaacccgggtcagcggggtcacccctcagcacatggtgggggccacaccatttgccgtggccaggctagagatcctgcagctcctgaaaggcaagctggtggtgggtcatgacctgaagcacgacttccaggcactgaaagaggacatgagcggctacacaatctacgacacgtccactgacaggctgttgtggcgtgaggccaagctggaccactgcaggcgtgtctccctgcgggtgctgagtgagcgcctcctgcacaagagcatccagaacagcctgcttggacacagctcggtggaagatgcgagggcaacgatggagctctatcaaatctcccagagaatccgagcccgccgagggctgccccgcctggctgtgtcagactgaagccccatccagcccgttccgcagggactagaggctttcggctttttgggacagcaactaccttgcttttggaaaatacatttttaatagtaaagtggctctatattttctctacgccaaacaaaaaataaaatataaaagtaaaaagtcggaggttttttggggcgggggcaaagggataggaagggcaggggtaataggtttcggacccgttttggtcaagggggaatcgggtccccaaagaggggaataattggagagagagcagttattactagaaaatgacgagaataggagaacaaagaaaaaggaaaaaatataaaaagaaaaaatattaaaggaaattatataat

SEQ ID NO: 549840 - DNA, 409 bp, Homo sapiens
agcggtccttatcgccaacacataaagaagagctgaaacaaccctactaaactatccaaaaaatgagaagggactcctcgtcaaatcattctatgaagctagcatcattctgataccataactttgtagaaacacaacgaaaaaagaaaactttagaccaatatccctgatgaatatagatgtaaaaatcctcaacaaacactagcacaccaaaaccagcagcacatcaaaaacctaatctaccatgatcaaaatggctttattcctgttatacaaggttgggtcaacatatgtaaatcagtaaatgtgattcaacacataaacaaacctaaaaacaaaaaccatatgatcatctcaataggtgcagaaaaggcttttgataaaatttaacatgtgttggggataacat

SEQ ID NO: 549841 - DNA, 622 bp, Homo sapiens
  misc_feature (36)..(36): n is a, c, g, or t
  misc_feature (607)..(610): n is a, c, g, or t
gctcccttgccagccccagccccacccagaagatgntgggtcatgtaggggtgggcacatgtcttcctggccagatcctgcagctcctgaaaggcaagctggtggtgggtcatgacctgaagcacgacttccaggcactgaaagaggacatgagcggctacacaatctacgacacgtccactgacaggctgttgtggcgtgaggccaagctggaccactgcaggcgtgtctccctgcgggtgctgagtgagcgcctcctgcacaagagcatccagaacagcctgcttggacacagctcggtggaagatgcgagggcaacgatggagctctatcaaatctcccagagaatccgagcccgccgagggctgccccgcctggctgtgtcagactgaagccccatccagcccgttccgcagggactagaggctttcggctttttgggacagcaactaccttgcttttggaaaatacatttttaatagtaaagtggctctatattttctctacggccaaaaaaaaaaatcggcctcgtggcctacagcggggagtattcgtccaagaggccatttttttggactttattttatattttctcttttatttcttnnnntaatctttataa

SEQ ID NO: 549842 - DNA, 1075 bp, Homo sapiens
  misc_feature (1060)..(1063): n is a, c, g, or t
gatccactccacgaacgtcaaatgcgtcatctgaggagggggagggccggggcaaaggaggggcaccctgacatggagcctgccagctccgtcagccctgactcggcccggagctgagctccccacctgccggtagcccaggagatggagcagcccagcccacgtgcccggccttccgcccctgacttcacttgataacaaactagaaactgaaacagggtcgggatgccgatgccggcttggagttagagatgagtcaccgctgagagcagctgcagtagctgagcagtggcagcagagaggcagacgtgagctgagggcgcagaggcaggcagcatctctgagggtccccaaggaacatggctgggagccgtgaggtggtggccatggactgcgagatggtggggctggggccccaccgggagagtggcctggctcgttgcagcctcgtgaacgtccacggtgctgtgctgtacgacaagttcatccggcctgagggagagatcaccgattacagaacccgggtcagcggggtcacccctcagcacatggtgggggccacaccatttgccgtggccaggctagaggcactgaaagaggacatgagcggctacacaatctacgacacgtccactgacaggctgttgtggcgtgaggccaagctggaccactgcaggcgtgtctccctgcgggtgctgagtgagcgcctcctgcacaagagcatccagaacagcctgcttggacacagctcggtggaagatgcgagggcaacgatggagctctatcaaatctcccagagaatccgagcccgccgagggctgccccgcctggctgtgtcagactgaagccccatccagcccgttccgcagggactagaggctttcggctttttgggacagcaactaccttgcttttggaaaatacatttttaatagtaaagtggctctatattttctctacggccaaaaaaaaaaatcggcctcgtggcctacagcggggagtattcgtccaagaggccatttttttggactttattttatattttctcttttatttcttnnnntaatctttataa

SEQ ID NO: 549843 - DNA, 706 bp, Homo sapiens
  misc_feature (552)..(552): n is a, c, g, or t
  misc_feature (555)..(556): n is a, c, g, or t
  misc_feature (558)..(558): n is a, c, g, or t
cagtgcaggaagttggattctattgagcccgccatgaacttactgcgtgtctgacaagcaacatgacgctagagatatcatcgtagaacaaccgaagcttcactcaggcaggctgcgcgcatcgggatgtcctgatccaacatcgaagttgtgagttctatccactggttggagacggaagagtaacacagggtgctcgagatgcctcgagtaagaaggaccagagacagttctaatccgactcttggggatctatgtgggctgggtgatggattcccgtcgaacacatggtccctcgtactgcttccatcagctcctagcccctcagaagcggacgcctacagttggcagctatgcctgtacccctcagtcgtttgcccaagttccagcatccttcccatgaactgctcaaggaaaatggcttcacacaacacgtctaccataagtatcgtaggcgctgccttaatgagcggaaacgcttgggcattggccagtctcaggagatgaacacactcttccgcttctggtccttcttcctccgagatcacttcnacnnanagatgtatgaggagttcccagcatgctggctctggacggacgccaagacaggctacagatatggtttggagtgcctttcttcgatactaccgttatggcctggcaaaagaagttccggctggaatatcaggattttcacggagaaacg

SEQ ID NO: 549844 - DNA, 952 bp, Homo sapiens
ctcgccaatagaaaatctttgatctacaggactggacccaggcacgatgaagtgggacaaaaatgctgctgagggcaaatctcaagttacattgtgctcgatggaagcgtataggatgtccttagcataataggcatgctgtagttgagatatgggcgagagtggactatagttataagagttcatggagggactatagacaaattttgcctgattgtaagagtggaggggttgcatataagtcaggatcaagttacagcagaggtgatttaagctttagtcaccttcagtagtacacagaaggtcagctggcatagttctggtgcaaactgttttttggggaggaactcattgggtctgtgaatgttagtggcaacagggtagtagatgatagggcgagtagtgaggacttggtcgagttaaaaaataccctgttgtgggaagaggtaagcaacggatacggagagtgcgacttgattgtctataggcacctgagtagcgaacatgcgggatctaaaaatagagctgtggcttgtggactgactttgggatggaagggctggctaggaatggtagtaaaagttctcatgaaaataagtgaagcttaagtggaacgttgagcaggatgtcggatgtgagattgtcacttgcgccgatatgatccggaagcacccagtgaatggcagattggttgtccaacatgttgcgaattgtcactgaagaaatgcctgtgtcccgtggaatcggtcatgcaactgtgcgacgtgtgtgagctgtgtggatggcatctgggccacacagcactttaaatggcattggaccgctttaattggccttcacggacgggcgctaggccaaggatgataacgcacgcatcacttttgctgtaaacggccctggggcaataaaggggggttgcgctacaatggggaacacccccggagaaccaaaa

SEQ ID NO: 549845 - DNA, 936 bp, Homo sapiens
atcgttacccggggcagcagttgagccggctgggaagggatgcatcttttactttcatgtatgcttgcagtgaagaagtctaagtcatcttggtgagtaccgggtggatgcttaaagactgcaggataataacgatcagaactttcaggaacagaaagcactatatcccaacaatctcagtatatggcagaggtgaagtcgaaggttccgggaaaggttcttccaacgcaagggccgaatgtatcgtggatagatatggtgaccgcaactggtgctgtgtcatacccaagaaattgttacccttagaacaaccattctgctgtactctggaaccaaactagagatagaatgcatcaagcgagacctatgaatacgatgtgcgacatcaaagaaatgggtcgaaaaaggatcacgggcgaaaataaacctactgaatagataaatgtgcagctggtttgggaacaagcctgccttatcgtactgatgtggaaccaagtaagtacaagagtatggctacttgtgtgcgtgaaaagtagtattgtgtggtcaattaaaggttgataagagttcataagaagagaagtgtgtgtccatgattggtggaaaatttggtattgttgaatgtaatagagtctggtttgtgttgaagcatagaactgttaagtatgaaccaagtgtaatggggtgacacgtcatgttgctagagtggaaatcaattattggtgcaacatactatgcagtatacatagataaaatactagggatgtttataggatatgggtgacaggattcataacatttatatacagaggatctaggggttcataaattggatggaaatcatacagacggaataagggaggaggctcacattagaatcgaaaaaatatagaatataggcgtaagttagggtagtacaatacaaaagacaggaca

SEQ ID NO: 549846 - DNA, 593 bp, Homo sapiens
  misc_feature (6)..(6): n is a, c, g, or t
  misc_feature (578)..(581): n is a, c, g, or t
gcattnctcttgactgagaatggtgccacgtgtggtctgtaagtgatcctgcagctcctgaaaggcaagctggtggtgggtcatgacctgaagcacgacttccaggcactgaaagaggacatgagcggctacacaatctacgacacgtccactgacaggctgttgtggcgtgaggccaagctggaccactgcaggcgtgtctccctgcgggtgctgagtgagcgcctcctgcacaagagcatccagaacagcctgcttggacacagctcggtggaagatgcgagggcaacgatggagctctatcaaatctcccagagaatccgagcccgccgagggctgccccgcctggctgtgtcagactgaagccccatccagcccgttccgcagggactagaggctttcggctttttgggacagcaactaccttgcttttggaaaatacatttttaatagtaaagtggctctatattttctctacggccaaaaaaaaaaatcggcctcgtggcctacagcggggagtattcgtccaagaggccatttttttggactttattttatattttctcttttatttcttnnnntaatctttataa

SEQ ID NO: 549847 - DNA, 725 bp, Homo sapiens
  misc_feature (144)..(144): n is a, c, g, or t
  misc_feature (158)..(158): n is a, c, g, or t
  misc_feature (710)..(713): n is a, c, g, or t
ggcacagatgcagacagaagggaagtcatggtagcttgtgaacagggagagatttcagctgtaccagcctggtagccttgcacaggtgggagtgtcctgttggggccctgcacctggagtccctctgggtctcagccagatganggaggaaggcttantatccagatttgccccaggatcctgcagctcctgaaaggcaagctggtggtgggtcatgacctgaagcacgacttccaggcactgaaagaggacatgagcggctacacaatctacgacacgtccactgacaggctgttgtggcgtgaggccaagctggaccactgcaggcgtgtctccctgcgggtgctgagtgagcgcctcctgcacaagagcatccagaacagcctgcttggacacagctcggtggaagatgcgagggcaacgatggagctctatcaaatctcccagagaatccgagcccgccgagggctgccccgcctggctgtgtcagactgaagccccatccagcccgttccgcagggactagaggctttcggctttttgggacagcaactaccttgcttttggaaaatacatttttaatagtaaagtggctctatattttctctacggccaaaaaaaaaaatcggcctcgtggcctacagcggggagtattcgtccaagaggccatttttttggactttattttatattttctcttttatttcttnnnntaatctttataa

SEQ ID NO: 549848 - DNA, 380 bp, Homo sapiens
cgggtgcggtgttatgtggatgtcttgtgagtgttgcagcatcgtgacagtctgagctggtctgtggtacattgaatcatataaactgtgttgtcacagtgacgattgacccacttcaaatgagcacagaataagcgctctcactgcacgctgtggaagaggctgtacacgtggacatctggcacatgctggttcaggtgcggcggcacggcgcccctcctagggctcttcacctgctctcttttatttttaccaaagtaaaatcataccacgttcgcggttcttccagtgtatgagttccgtagtgctgtgaatcgggcacagaggcagcttttctgcccccgagtcctgcaggtggatcagtgctatcccgcgttaaa

SEQ ID NO: 549849 - DNA, 110 bp, Homo sapiens
acggccgtgtattactgtgcgggagaggtagtaccgcggtattatgattacgtttgggggagttatcccgatgcttttgatatctggggccaagggacaatggtcaccgt

SEQ ID NO: 549850 - DNA, 1769 bp, Homo sapiens
caaagatgtagcctgattagccctgtctctctacgaccagggccttggggctaggcccggctggccgggggaggatgagtcgcgttgggttgggagtcgggcggcggttggccgggctagggtgtcgctgacgtggccggtgcggggctcgttgaggaggacccgcgactgttggtctgggaccggtctaccgcgctcggcggcgtgcgtcaagtactggtcagatgttcacgtgacgactggcgggttcatctagcaggactctccgtgcagtacaaggctgagcaaccgtttcggcggcgggtgctctccatgtgggtgctgcgatagcgcagcttgtccgtggccccggagtagcgtgagccgttgcaccctgtctataaaagcgagcgcgaatggagactggcggcgtgtggggatggacccgcgagttccagcccgatgagacagagaacgccgacacagtgaagccagggaatacgccgtaacgggaagggcaacaatgggccatttaccagatggcgtgcgcaacagggcaatggcagttgtgaaccgtcgggggactagagataccaaaggctgccatttgatcagcacccaacaggggcatgggttcgggaacaacgccccaaattacgcagaagtaggccttctatccaaatttcgggtccgcccaattgggtttgcgcaaccgtggctactgggggccaaaattcacggagtgaaaacccttggttgggacaagcgtgggctcgccccgccaatctggagggcaccccgagacagcgctttagttagagtgcccaaattgcgaaccaaggggtggcgccacgagacgaacaaccaacatggcggagccgcgaaattgcggcctggagggatcgacgatagatctatatgccgcacagagtttgcggcacgatgtgtggcaccacaaagccgggtgtggttaaagcagattgttagcctcgggggccagcagtggctggggccacacaaactagtgcccgccgaaacttggagagcgcagcactttggcggctgaggcggccattaagcgcgaataattccagtgcccccattgttttaagttcaccacaagatgtggaagagtggggctttgcgaaaactgttccacacggagaagagggattgagggtcgcgtaagtagcgcgagctttatacgggagcggacgcgttatgcgcatgatgagtcctgagtgtgccgcgcgcgacccgtatggcgagtatagcatatgggatagagttggcgtttatcctacgcattgcaggaatgggtgccactagtctgctcacaccctcgggtatgtggcgatagaagacgccgaaagcccactaccacagcgaagatctcgcgaaaagacctcactatatgagggagaccccacggggcgaactgggccatgccaacgttagtacgacccggggcagttccatgggaaaccacgggggcacggtgccaaaaccaccgccagcaacgcacaggggggtgataacaccacccaaggcaccctaataggtgcacacaccgcatggggacatcacaggccgccaaccacagacgggaggcacaggggcgacacaatctgtggcaatcagacccacacaggaggatgcctagcactcatactacgaggtggacaacaacacaggacagacaaaggatataaacaaacgcggcacagacccactgatgagcaccaacacaaaaaggagcaagcacgcgagagtaccacgcggtgcacaaa

SEQ ID NO: 549851 - DNA, 338 bp, Homo sapiens
cacacttgtaatcccagcacttggagaggcagaggcgggtggatcacctgaggtcaggagttcaagaccagcctggccaacatggcaaaaccctgtctctactaaaaatacaaaaaattagctgggcatggcagcagacgcctataatcccagctactcggtaggctgaggcaagagaactgcttgaacctgggaggcggaggttgcagtgagccgagatcacaccactactctccagcctgggcaacaaggcaagactccatctcaaaaaagaaaaagaaaaaaccactgaactaagctaaaggaaggtaacaactcaaagtaaagaaaaaaacttt

SEQ ID NO: 549852 - DNA, 479 bp, Homo sapiens
acacgaagatctgcatcccacttctaagagggagcaccagggtgcgggtggactcttgctggatgtggtagtcagagggggtgcgtccatcttccagcctgtttcccagcaaagatcaaccttggcggatcaggagggatgccttcctggtctgggatcttggccttgacattctcaagggggtcactcggctccacctcggagagggatggtctaaccagtcggggtctccacgaagatctgcatcccacctctaagagggagcaccaggtgcggggtggcctcttcctgggatgtggtcagcggaggggggtgcgtccatcttccagcggtttcccagaaaagatcaagctcggcgggtcaggagggatgccttcctggtctgggatcttggccttgacattctcaggggtgtcactcggccccacttcgagagggagggtctcaccagtcagggtctacacgaagatctgcatccc

SEQ ID NO: 549853 - DNA, 762 bp, Homo sapiens
  misc_feature (57)..(57): n is a, c, g, or t
gaattcggcacgagcaggatcgaagccatgactgggtgcaggcgggcgcaggcccgntgtgggtgggcaccagttctcagcaccgctcactgctgccgggcacactgggaccagcaggctcctcagccaaccctgtccctcgtgcccgggcccgtgccagagatggtgacccccagccactatcggtggggcacgggcagggcttcagccggctcccacctccccacagaagcccaggagtgtgtggacgtctgagcccagctttctgcgtgccctcctgggccccctcactcccgggcaggcgggccgggcctcgccccccattccccctcctaccccgggcaggggcttccgggggcccttttcacctggagaaacattcccactcccctttgcctcccttgtactctgagctgtgaatattttaaccctgtaaataccggccagctctgtgtgaccacagagactattttatcactgtgtcagtcccggttcccttttaacccaataaggggaatttctcccagcatggtgggcttttcccggaccttcaaggggcctccccaaatgtgggacccaaaatattaaaacacggcccgtttatggggtttccgggttaaaagcacacacaagtacacctacacaaacacaccaccaatgcggggggcggggcgcgcgtctttaaaagaaagtttccccctcaggggtgggcccccagggttttaccggcgtaccccgcgttttctggtccacagtggggct

SEQ ID NO: 549854 - DNA, 931 bp, Homo sapiens
caacaacagagaaaatcaagagtgttgcaatctataacagttaatattgattcattcacattcctgtgtaaagtcattttatatggaaaggcttacaaatcaatatgtaagcatgcattattataagaatgtacaatgtattgtgtaattatagaagtaaaatctagatgttgagacctgttggtctaatagatgtggatacagttattttacttgaccatccttgttgtctacttgtgtgtctaacgtaaatatatgtcagagtatagaatctgcctgcagtcgtgacaacagaaagcttaagtgcatgcagctctatcggcaagatgcaatgataatggaaaaatagaaagcgaatactcagtttaagccaaggaaaatatgtggatttaatcatcgataaaactgactttctgtcacaaacaggaacaattttatagcatcagtcatataacatctggtttatcaatgcacgttcaacacaataaatactctgcagtggaggacacagtctaacaagatcgaagcaatagacgtagaaaatatatcttacaatagttgacctagatgtcatcacaatagctacttaacgatgtcaaagataggaagctattgcttgcaaccgagacacttgcacatcaggtgcacccccattgctatagaaagctcatagacattaacaccatacgatgtaccccagaacgacgtaacaagactgacagagacagcaaagaaaccatacatgctcaaaacgatggcgcactgaaaccaaacggacgcaaagaaataagcacccaacaatatgaacaacagccaccacgtcaaaagcagaacaacaacacaccgaccagcacgcccacagcacaacacgggcaacacagaccaacacgaaagaacacaaagcagaagaaacaaaaaacaagacaaaaac

SEQ ID NO: 549855 - DNA, 606 bp, Homo sapiens
accgtctcatggccagagtctagagcatgaacctaagttctgacccaccatcagtctgaaggactctgtttctttggacacatgatcctttggagttaatccttccttctcagttctggcctcatcccctggacagatacctctgagagcctccctgcccataggttcccagggatcgaggccccatggcagttccccttgctccagctgggagaccagaacaggcgtggtgaatgggaatgccagggaagccacatttgcataattctccagcatcacttccctgtacagggccctctgcacagagtccaggctggcccattcattctgggtgaagtacacagccacatcctcaaaggtcactggttcctggcgccaagcggtctggaacatggctggcgtcccagcttcacacactgcctcagggttcggagaagtgaaactcttcagctcggaccgcgaatcccgcgcggcgcaggcgcagataaagcgtggaaattccacctgccgccgacaccggggaaagcttgagaccctccgccggaagtgcgttttccatgcccctcctctctaggaggtgggtcagaacataaggggtaccgagct

SEQ ID NO: 549856 - DNA, 447 bp, Homo sapiens
acgatcacctttaccaggagatggaggctgcagtccagtcatggcatgcagacggccctctcagcaccgccgtgaaagcgacgatgcagtcctacacagggtcccagcagcttcacccactccgggaccaccatggacccttcacacacaggcagtgtggagcagaggaggccattccactctacacacaggaggaggccattccactctacacacacaaggctcccaaagctctgtgagcaacatctcagcctctccccgtgctcctctttgcgcattcgcgcgtgacaatcctgcagaggtgggctccacacaccagccacctggcactcggtctctttccttctaacaggaacagcaccctcaatcctgtgatagtctcaactctcttgggcccatgcttacctggcaaacacctgtggttaacccagcaatcccacatcaaaa

SEQ ID NO: 549857 - DNA, 239 bp, Homo sapiens
acatcatttccttgcaatatttccaccatggccttttcatctcaaagcacatgcaaagcatggtgcataggcagttggtccctgcagcaaacaaggatgagtggtcaggcagatgtggagccatatttcagccaagcatcttcaatagtcagcagtcagcatattggagtagctcaattctgtgtttttgggtttggagttttattcactcttcccactttcatggtaggcagcacaca

SEQ ID NO: 549858 - DNA, 1173 bp, Homo sapiens
  misc_feature (788)..(788): n is a, c, g, or t
  misc_feature (817)..(817): n is a, c, g, or t
  misc_feature (842)..(842): n is a, c, g, or t
  misc_feature (911)..(911): n is a, c, g, or t
  misc_feature (982)..(982): n is a, c, g, or t
  misc_feature (1067)..(1067): n is a, c, g, or t
  misc_feature (1135)..(1135): n is a, c, g, or t
  misc_feature (1159)..(1159): n is a, c, g, or t
  misc_feature (1165)..(1165): n is a, c, g, or t
actacacccaaacctataaccttagagactctcagtctttctggatagggctgatttgaactttccagaaagttgaccagatacattactgagcctttatgagtactgaaaaacaaaacaaaaaaaagatccctctttgaccatgtttcctccgaaaaatggaaataaaaccaactcaccattatgaggaaaaaaaaaaaatatggcctctgctggccctcagtggtggattctttgactggtcgcttcacctttacgagagggttacatacactgatccatacgtccactgactcagatactcatatgatcgcatcgcttgcatcataagcgcgcaccagcatgactccacagagtaggtaaatacaggttatctcacacaactcaccggagatacccgcagcgaagagaatcatacccaccaaacgagacagctataaaagcacagaaaaccacaaaaaaatgggctgtgttagtttggctctttttactatgctgcttcgcccctatcctgatcacacgatcaccacaaatcgatcatccaacaatataataggtggtttatactcacgcattggtactagtcctagctaacgctagatgcatccttcacaagtgcataacttcacccacgagtaagcttcaacatggttatcaaacccatacacacaattatcctgaaacacctaagccagaccactactcaacatgcaggataatcggaatcaacacttatcaacatagtgctgacatctatgacaatcaatcttccatacattcgattatcnacgctagtactaactcacgataggcgtgncacgtagtacgccacaagaccgccntacatcataaatcgactcaactatatgaaatctctgtatgacgtgaatacatatatcacctccattacntctacacacactacgtctagaatctcatactcaaccagacatctgagagctagtgctcttagtcatatctntataactcacaccaacaaacaactcagatacagtcccatactctctctgatactgatcccgcacatctataataacacgccacanctatcaggatagacagatgatacatctcacgatctatcacgtaagatactcagcgatcaatacataantatcactcacaactgatctatcgnacttantccagtcg

SEQ ID NO: 549859 - DNA, 598 bp, Homo sapiens
gcacaattcttgccttttatcggccacaaacgtcttatcccctaaaaagggggcaaccgtaaataaatttctcccaccttgttcacaagctctgcttttaaatcccactctccctctgcgaactgggacataacccgaatctgtttgtccccgttcatcagtcctccttacaagataccccacacccggtgcataccttctcttattagttttcaacacccccgcattgaccctccccccagtttcccggcatctcccccctcccataataaggtgaaagtttctttttcatcggcgcttcaagtcagcgcaccacaacatatggtattcttaatcattgctcctagtagtccacctttttgtttccccgagggtttccccgctaaccatcttataattctacccaacacattcattttctcttgcttatctgtaacacatgacaccgcaatgggtgtttacggcgcctcaatttatgatccctctcggaccgtaatgttcttcacctacctaaattcccacccacgttcaattatgcgccacccaaatgacgcccctatttaaaaaaaacccaaaacagtttttcgaccacaaaaca

SEQ ID NO: 549860 - DNA, 130 bp, Homo sapiens
atcatgcgtgtgcctacagtattgcgggccagatacttcagtgacagcagaagtgtttgggtgactttcctactttaaattttggtcatatcatttcaaagcatttgcatcttggccttgccatatgcaa

SEQ ID NO: 549861 - DNA, 608 bp, Homo sapiens
  misc_feature (422)..(423): n is a, c, g, or t
  misc_feature (574)..(575): n is a, c, g, or t
tatagcggaacccaggcgctgcgaggtagatagataggagactccgatcgtcataacaagtaactaacacagggttagccgaataaggtggtgcacgcctgtaatcccagctactcatgaggcaagtcagtggtatgttcggtatcatggctgagtgtaggagcattttagggaatagaagttaaatcctagacgacaagcgagtggggtaacaacactttacctgtcatggtaactacttcattgaataggaaaacagaaaaagaagaaaccttatagagggtgatggtaaagcaaccccaactgatatggaaggcagtgttggcaatcactgaaggtcaggattttgaaagcacaacaattaacaatgtaaaatttgcaagtgtgggggttggacataggttactatgtgtttaatgtgnnctccaacaaaattagcagagcccaaatgagaaggaagtattactctgtttaacaagattgaaattaaggggacagtatacagtttaaaccctttgggatttaggaatgtcagagttgtagggtggtattgccccttgatccacgtatgcannatgacgtctggaccggctcgattcgtatctgct

SEQ ID NO: 549862 - DNA, 241 bp, Homo sapiens
cagcgagtgatcagaatgtatagtcacgcatgtatggagaagatagtctctggtatgctgtaagtgaaattgaacctgtaacacgtagatggtaagaaaatacagatatgttgctctgtatggtacgtactaatactgttacgtcatgtacataattactaatcgcttatcttcccctttacagcacaaataaagtttgagttctaaactcattagaattgtagtatcagctcagaggatc

SEQ ID NO: 549863 - DNA, 363 bp, Homo sapiens
aagtctatacaagagaatactatgtgggactgttggaatacatatagaaataggcttgttgtcaattataggtcactggttaaataaatgccgatcagctcttcaaaatcacataccaaagccagtccgtgagggttttcaacttacaagatgatcagttcaccaaaattggtatcttttaattatttcagatttacgtaatgtcatataagatgggatagttttaacagcttaagtttataacagttggtataagttgtggtgctttcatagcttaagagtatagtaattctttttttaaaaataatttcaacttttattttaggttcaggaatacatgtgcagggggtagcccttaaactg

SEQ ID NO: 549864 - DNA, 1929 bp, Homo sapiens
  misc_feature (448)..(448): n is a, c, g, or t
  misc_feature (1385)..(1385): n is a, c, g, or t
  misc_feature (1671)..(1671): n is a, c, g, or t
gtatctagttgtaatgatctagtttctgttcgctgtgagtgcggtcgttgcctccttccctcgttgggcttgagtctgtctgactgataagtacctaccgtataggatgtatgtggtgtttgatttagttacttgcacttcaccaactattgttggtgctatgtattactctcccttgtgtggctcgctttctcctcctcgcgggtttcttcacccacatgtgggggggggatagtgagcgcctgctcgtttttcctgttggggccgcaagctgaggagaagacctcgtgggtgtttgtgtgtaatacaaaagccgcccggcggattgtggggggtggcacactcactgtgtgggtggccaccacttatccaatcctggtttatctagccctcgcgcggtagtgttataattctcttgttgtcgtagatatgtggccgcctccctggncaagccgtccttggtcagggtgagttaaaacgctcttttttctccttcctggggggagaaccaaaatattgaggggccgctctcactaatatgtgtgttccacaagaagaagtctgtgtgtttctctgttctaccacacgggggacatttttgtttccttgttctgcgtggtgaccaacaacaccatttttggtacttgtggggggtggcacccaatgctgcctaatatatgatttgggtgtcgcccccctcccccgccaacttggggggggacgacccctcgcctgtggggggctttcatctcaacctgtgtggcttcaccaacaggcgtggggatgatgttatttttcctgcgtcggttgcgtcccctcttttcccctcagcgcctcccctataatttatgtatggccgccccccggcggctcttaatatgtgtcgtcccccctggtgtatggatttcgggaagttgtgtcgccacacaccacgcggcgggcgtcctacaccactgtgtggccacataggatcacaacaggttttttgcggcctgggaagcgcccttcgtaatagcgtcgcagaaatagagtagcttttggtagttgctccccccgcttctttatcggcggttatataaaagactccttgtgagaaagatattgggcccccccctagaagtgtcctctgtgagagagcgtctctgggtgtgatatggccctggcaccaccactgtggtgtgtggagaatatagtggggggtgtccctctggtgcgacacagcccccacattgtgtgcgtgttttgagagagagccctttcttctctacagagacggtaatttctcacaccccttgtgtgggttctcgcccttgtgctcatgtgtgtctgcgttgagatatattgagagacacacagacactacagcgttgctcgcgcgtgtgggngtgtgtctactactctacacacactcacactttgtgacacacacagagagagggcttgtcatgtgagagcctgggctcacacaggggtctacaccacacagcgtgctgtgcgcctcacagaaaaggctctcacgagaagggcctattaataggagatatttatatcctctcacaagaacctgcggccacacccctacactctctttatatacacacagtgggggtgcggagaagagacacgcgtgtctccacagagaactctgtgtttgtgttcccacacttgggngccactcttatagtaaaaagaactggtgtataatgagtgaaccacacatgcacttcgtgaaagcctctcacagaaggaaaaggaggaaatgttttcgtggagcccctcttggtgtttctctttttcgcgtgtggcacacttttaaagttaattatagtttttaaaataccgatacatttttaatgggacaccacttggccccaaaatttgtcaccagaattttgagaccccactttaaaaagtttaatggggaaaccc

SEQ ID NO: 549865 - DNA, 329 bp, Homo sapiens
gcgagtcgtccagcaggacataggtctctacgtctggtcggagctgaccatctcctcacttacgacataccccgctcaggttccagggactggagaaacaagaaggtcctccagcagctaccagtccaggtactggtcacagtccgtcagactcaaagagaactgagaggccacaacagtcttccagacccagcaaccttaggcatctcagttgttaactccattccagcaaatcaccctgttccaggcagggcaagtccaggaagagctgccacagagtgatgccatcctaacttggccttcccatatgcgagggttccgagctcgaa

SEQ ID NO: 549866 - DNA, 295 bp, Homo sapiens
aaattgctgaaaacaggctgggtgagctggctcgtacctgtgatcccaacactttgggaagtgaagttgggcggatcacttgaggtgaggagtttgagaccagcctgcccaacatggtgaaactcgtctctactgaggatagtaaaattggccaggcatggtggtaggcggctgtagttcccgctattcgggtggttgaggcctgagaattgcttgaacctcgaaggtggaggttgcagcagtcgagattccaccactccactccagcttgggtgacaaaccagactctgtctca

SEQ ID NO: 549867 - DNA, 195 bp, Homo sapiens
aggtagctgatccgttaagctgggtactgcctagggcatacctgcctcccattctattcaaagtcatccctctgctcactgagataaagggacatctgattatctgattgcctccttgtggacagacaaatcagaaactcaaaagaatgcagcagtttgtctctcatgtacctgtgacctagaaacactatccct

SEQ ID NO: 549868 - DNA, 344 bp, Homo sapiens
attcgcggccgcgtcgacggagtttttaatagatgtctgcttactccactagagcaaagttctctatagtcagcaagtatatctttatcactcttttaaaaacattagtgtttaggctgggcgcggtggctcactcctgtaatcccagcactggccagcctggcgaaaccctgtctctactaaaaatacaaaaattggccaggtgtggtggcacgcacctataatcccatctactcaggtggctgaagcaggagaatcacttgaacccgcgaggcggaagttgcagtgagccgagatcgcaccacttcacttcagcctgggcaaaagagcgaaactccgtctca

SEQ ID NO: 549869 - DNA, 100 bp, Homo sapiens
gcctggtgtggtggttagtcgggctaacaagcgcagctggcgcggtgccgggaggcagcggtgtgcggggtgatgccagatggggctggagtgaggaacc

SEQ ID NO: 549870 - DNA, 109 bp, Homo sapiens
ctaggcttccggggctctgcagtcctcggcgtgtgctggcagcttcggagcccaccgagccgggcggctaggatgatgaaccggacgacccccgaccaggagctggcgc

SEQ ID NO: 549871 - DNA, 176 bp, Homo sapiens
tcgcgtcgcttctagtcttcgaggtcttggcagtcgtgctctcatcaaagatagatgggtcctatgcctttccatatacattttagaataagctgttacattgtgtgtgtgtcgtgtgtgtgtgtgatgacaaactccctcctgggactttctgatacgacgagttgtacttgaac

SEQ ID NO: 549872 - DNA, 1053 bp, Homo sapiens
  misc_feature (102)..(102): n is a, c, g, or t
  misc_feature (200)..(200): n is a, c, g, or t
ggagcccttatccctagatgaatgaataaatgatttgctgtaatgtttcacgtgcatgaccatttttctcaggggattttatactgagtgtttttaagtatncctctcattcttgagatttgccgttctgattctgtctggtccataacccacatagttgcaaaacagacaggttttcatgaatcaattaatatagcaanccttttgcatgtgtgtgtgattctataatttccctaacacaggagaatccagctttggcggttgcaattaaaacatgtaaaaactgtacttcggacagcgtgagagagaaatttcttcaagaagcctgtaagtgtctagaaatttctgtggaactccattgactttctatctgtgaaatccaaactgtctctgaagaaataagaaaaatagtgttttgacttttaggagacaactatgtttattattttgccttgcaaattaatgtctaaatttgtacaagcacctatctacagatttttccaggtaaaccatcatgttttatgtgtaaaggtagattgatgtgcatttactttatactttggtacttaggccattacacatctttgcactggaattggtgcagatatataagtgatcctaatgttgatgctgcccagaccccaggaatgcagaggtgagcatgacacacacagtccctgccctgatggagctcatagactagtgaaggaatagggctctatgaccattccccttgtcctgctacaaaatcagaacaaatcacccaggctgggcacggtagctcacgcttgtaatcctagcactttgggaggccaaggcaggcagatcacctgaggtcaggagtttgagaccagtctggccaacatggtgaaacagtcttctactaaaaatacaaaaaattagccgtgcatagtggcacgcacctgtagtcccagctactcaggagactgaggcaggagaatagcttgaaccccagagagggaggttgcagtaagccgagatagcaacactgcacttcagcctgggcaatagagcaatctctgcctcaaaaaa

SEQ ID NO: 549873 - DNA, 933 bp, Homo sapiens
  misc_feature (466)..(467): n is a, c, g, or t
  misc_feature (471)..(471): n is a, c, g, or t
  misc_feature (477)..(477): n is a, c, g, or t
  misc_feature (485)..(486): n is a, c, g, or t
ctcgcaggtcaatactgtagagtcctccacattgggctgccacattgctatctcctgaggtctatgattccatgaatctgtttggtccaaaagagatactgatgcatggtgtgaagccttttcaaggagtgaagaacaatgatgtaatcggtcgaattgaaaatggggaaagattaccaatgcctccaaattgtcctcctaccctctacagccttatgacgaaatgctgggcctatgaccccagcaggcggcccaggtttactgaacttaaagctcagctcagcacaatcctggaggaagagaaggctcagcaagaagagcgcatgaggatggagtccagaagacaggccacagtgtcctgggactccggagggtctgatgaagcaccgcccaagcccagcagaccgggttatcccagtccgaggtccagcgaaggattttatcccagcccacagcacatggtacnnaccnatcatnaccaggtnnctggctaccctgggtcacagggaatcacagtccatggtctggcagcatctatccagggcaggcatcgctcttggaacaacagattcagggaagtcatagacctcaggtagatacactgtggcagcccaatgtggaggactactaccagtattgaacatgcaagaggactcggggcacgcggtggccaccccacggactcacgaaccgcagcaccccgcacagccccacgaaactgcgacgacaaaatacagggccgggatggcaacacagcgacagcacgtcacgaaacccaggaaatgtgcgaccacacgacaagaaaacaacacacggagccgcatgacgtgccaccggcaacaacctagtgacaaaacacgaacagaaccccgcggtgagctccccgcgatccgcaggaccagcatacgaagaagagaaccaagacaccagcaa

SEQ ID NO: 549874 - DNA, 889 bp, Homo sapiens
  misc_feature (422)..(423): n is a, c, g, or t
  misc_feature (427)..(427): n is a, c, g, or t
  misc_feature (433)..(433): n is a, c, g, or t
  misc_feature (441)..(442): n is a, c, g, or t
ctgtcttgttcttacctatgtccgtgctttaaatgtacttgcccatttggaccaaggctattctagaatcatttcgtggagagttagaaacctgatccgtctgtccccggtgtataggatcctttattgttattatctactgttagccaactggtgttccttagataactcagggtgggttctaatgtgtgctaactctgggttgtcagctcccctaagacaatgtgttgtctctctagcacaatcctggaggaagagaaggctcagcaagaagagcgcatgaggatggagtccagaagacaggccacagtgtcctgggactccggagggtctgatgaagcaccgcccaagcccagcagaccgggttatcccagtccgaggtccagcgaaggattttatcccagcccacagcacatggtacnnaccnatcatnaccaggtnnctggctaccctgggtcacagggaatcacagtccatggtctggcagcatctatccagggcaggcatcgctcttggaacaacagattcagggaagtcatagacctcaggtagatacactgtggcagcccaatgtggaggactactaccagtattgaacatgcaagaggactcggggcacgcggtggccaccccacggactcacgaaccgcagcaccccgcacagccccacgaaactgcgacgacaaaatacagggccgggatggcaacacagcgacagcacgtcacgaaacccaggaaatgtgcgaccacacgacaagaaaacaacacacggagccgcatgacgtgccaccggcaacaacctagtgacaaaacacgaacagaaccccgcggtgagctccccgcgatccgcaggaccagcatacgaagaagagaaccaagacaccagcaa

SEQ ID NO: 549875 - DNA, 927 bp, Homo sapiens
  misc_feature (131)..(131): n is a, c, g, or t
  misc_feature (135)..(135): n is a, c, g, or t
  misc_feature (140)..(140): n is a, c, g, or t
  misc_feature (143)..(143): n is a, c, g, or t
  misc_feature (156)..(156): n is a, c, g, or t
  misc_feature (161)..(162): n is a, c, g, or t
  misc_feature (175)..(175): n is a, c, g, or t
  misc_feature (186)..(186): n is a, c, g, or t
  misc_feature (387)..(387): n is a, c, g, or t
  misc_feature (413)..(413): n is a, c, g, or t
  misc_feature (430)..(430): n is a, c, g, or t
  misc_feature (469)..(470): n is a, c, g, or t
  misc_feature (475)..(475): n is a, c, g, or t
  misc_feature (521)..(521): n is a, c, g, or t
  misc_feature (530)..(531): n is a, c, g, or t
  misc_feature (544)..(544): n is a, c, g, or t
  misc_feature (927)..(927): n is a, c, g, or t
gggaaaggccggggccaagcctctaatgctttttgctcacccattttccgaaagcgaagctgaggcaagagaattgcttgaacccccgaagtggagggtgccctaaacccagatcacacccccgcactccnaccnggacnacngagcgagactccntctcnnaaaaaaaaaaaantgtgttgcctnatacgaaatgtatttggttttgttggagagtgtcagactgatctggaagtgaaacacagtttatgtacagggaaaaggattttattatccttaggaatgtcatccaagacgtagagcttgaatgtgacgttatttaaaaacaacaacaaagaaggcagagccaggatataactagaaaaaggatgtctttttttttttttnactccccctctaaacactgctgctgnccttaattttagaagcngcttactagtttacccttgtggtataaagtattcataanntggtngtgaatttggaagaatccgtctactgtattattggctaaatatttngtttatacnnaaggggacaattnattttaaggaccaaaaaaaagaaaaaaaaaaaaaaaaaaaaatatttgtgtggggcgcgcgtttggggccttggaaaaaggtttttaaacaccactctcgtgtgtggggggggggggcgcccaagagaggtgataaggcgaacagatggggcaaagggtgtgttcccaagagggaacacgcggggaccaagacaagaggggggggaggtgttttccaccacatatataaaagacgcggccggggggggagaaacccgagaggtgttctcgtagaaaaaacttcccagaagggggagtcctcgaggggggcgcaacataaggggggcctcaatacagacggggaggccccaaggagaggcgccgaattatcaaaatttacgccn

SEQ ID NO: 549876 - DNA, 849 bp, Homo sapiens
  misc_feature (382)..(383): n is a, c, g, or t
  misc_feature (387)..(387): n is a, c, g, or t
  misc_feature (393)..(393): n is a, c, g, or t
  misc_feature (401)..(402): n is a, c, g, or t
ataggacgagggtttcaaactgtctgctgagccctggggaatctgcgtggaatgggaaactagccaagtctcgctttggctgcactctgaggggtttatgtgatggcaaacagccaagatgaagaagctgcctagcagtcgctgcagcggctgcagcgttatgtgggacttcagatagcttctgagtagtcaagcagtgcacaatcctggaggaagagaaggctcagcaagaagagcgcatgaggatggagtccagaagacaggccacagtgtcctgggactccggagggtctgatgaagcaccgcccaagcccagcagaccgggttatcccagtccgaggtccagcgaaggattttatcccagcccacagcacatggtacnnaccnatcatnaccaggtnnctggctaccctgggtcacagggaatcacagtccatggtctggcagcatctatccagggcaggcatcgctcttggaacaacagattcagggaagtcatagacctcaggtagatacactgtggcagcccaatgtggaggactactaccagtattgaacatgcaagaggactcggggcacgcggtggccaccccacggactcacgaaccgcagcaccccgcacagccccacgaaactgcgacgacaaaatacagggccgggatggcaacacagcgacagcacgtcacgaaacccaggaaatgtgcgaccacacgacaagaaaacaacacacggagccgcatgacgtgccaccggcaacaacctagtgacaaaacacgaacagaaccccgcggtgagctccccgcgatccgcaggaccagcatacgaagaagagaaccaagacaccagcaa

SEQ ID NO: 549877 - DNA, 2169 bp, Homo sapiens
  misc_feature (1702)..(1703): n is a, c, g, or t
  misc_feature (1707)..(1707): n is a, c, g, or t
  misc_feature (1713)..(1713): n is a, c, g, or t
  misc_feature (1721)..(1722): n is a, c, g, or t
atgaggaacgtcacttacggcgatcatactgggagatgcggggcaatgcactagaaaagaagtctaactatgaagtattagaaaaagatgttggtttaaagcgattttttcctaagagtttactggattctgtcaaggccaaaacactaagaaaactgatccaacaaacatttagacaatttgccaaccttaatagagaagaaagtattctgaaattctttgagatcctgtctccagtctacagatttgataaggaatgcttcaagtgtgctcttggttcaagctggattatttcagtggaactggcaatcggcccagaagaaggaatcagttacctaacggacaagggctgcaatcccacacatcttgctgacttcactcaagtgcaaaccattcagtattcaaacagtgaagacaaggacagaaaaggaatgctacaactaaaaatagcaggtgcacccgagcctctgacagtgacggcaccatccctaaccattgcggagaatatggctgacctaatagatgggtactgccggctggtgaatggaacctcgcagtcatttatcatcagacctcagaaagaaggtgaacgggctttgccatcaataccaaagttggccaacagcgaaaagcaaggcatgcggacacacgccgtctctgtgtcagaaacagatgattatgctgagattatagatgaagaagatacttacaccatgccctcaaccagggattatgagattcaaagagaaagaatagaacttggacgatgtattggagaaggccaatttggagatgtacatcaaggcatttatatgagtccagagaatccagctttggcggttgcaattaaaacatgtaaaaactgtacttcggacagcgtgagagagaaatttcttcaagaagccttaacaatgcgtcagtttgaccatcctcatattgtgaagctgattggagtcatcacagagaatcctgtctggataatcatggagctgtgcacacttggagagctgaggtcatttttgcaagtaaggaaatacagtttggatctagcatctttgatcctgtatgcctatcagcttagtacagctcttgcatatctagagagcaaaagatttgtacacagggacattgctgctcggaatgttctggtgtcctcaaatgattgtgtaaaattaggagactttggattatcccgatatatggaagatagtacttactacaaagcttccaaaggaaaattgcctattaaatggatggctccagagtcaatcaattttcgacgttttacctcagctagtgacgtatggatgtttggtgtgtgtatgtgggagatactgatgcatggtgtgaagccttttcaaggagtgaagaacaatgatgtaatcggtcgaattgaaaatggggaaagattaccaatgcctccaaattgtcctcctaccctctacagccttatgacgaaatgctgggcctatgaccccagcaggcggcccaggtttactgaacttaaagctcagctcagcacaatcctggaggaagagaaggctcagcaagaagagcgcatgaggatggagtccagaagacaggccacagtgtcctgggactccggagggtctgatgaagcaccgcccaagcccagcagaccgggttatcccagtccgaggtccagcgaaggattttatcccagcccacagcacatggtacnnaccnatcatnaccaggtnnctggctaccctgggtcacagggaatcacagtccatggtctggcagcatctatccagggcaggcatcgctcttggaacaacagattcagggaagtcatagacctcaggtagatacactgtggcagcccaatgtggaggactactaccagtattgaacatgcaagaggactcggggcacgcggtggccaccccacggactcacgaaccgcagcaccccgcacagccccacgaaactgcgacgacaaaatacagggccgggatggcaacacagcgacagcacgtcacgaaacccaggaaatgtgcgaccacacgacaagaaaacaacacacggagccgcatgacgtgccaccggcaacaacctagtgacaaaacacgaacagaaccccgcggtgagctccccgcgatccgcaggaccagcatacgaagaagagaaccaagacaccagcaa

SEQ ID NO: 549878 - DNA, 1724 bp, Homo sapiens
atgaggaacgtcacttacggcgatcatactgggagatgcggggcaatgcactagaaaagaagtctaactatgaagtattagaaaaagatgttggtttaaagcgattttttcctaagagtttactggattctgtcaaggccaaaacactaagaaaactgatccaacaaacatttagacaatttgccaaccttaatagagaagaaagtattctgaaattctttgagatcctgtctccagtctacagatttgataaggaatgcttcaagtgtgctcttggttcaagctggattatttcagtggaactggcaatcggcccagaagaaggaatcagttacctaacggacaagggctgcaatcccacacatcttgctgacttcactcaagtgcaaaccattcagtattcaaacagtgaagacaaggacagaaaaggaatgctacaactaaaaatagcaggtgcacccgagcctctgacagtgacggcaccatccctaaccattgcggagaatatggctgacctaatagatgggtactgccggctggtgaatggaacctcgcagtcatttatcatcagacctcagaaagaaggtgaacgggctttgccatcaataccaaagttggccaacagcgaaaagcaaggcatgcggacacacgccgtctctgtgtcagaaacagatgattatgctgagattatagatgaagaagatacttacaccatgccctcaaccagggattatgagattcaaagagaaagaatagaacttggacgatgtattggagaaggccaatttggagatgtacatcaaggcatttatatgagtccagagaatccagctttggcggttgcaattaaaacatgtaaaaactgtacttcggacagcgtgagagagaaatttcttcaagaagccttaacaatgcgtcagtttgaccatcctcatattgtgaagctgattggagtcatcacagagaatcctgtctggataatcatggagctgtgcacacttggagagctgaggtcatttttgcaagtaaggaaatacagtttggatctagcatctttgatcctgtatgcctatcagcttagtacagctcttgcatatctagagagcaaaagatttgtacacagggacattgctgctcggaatgttctggtgtcctcaaatgattgtgtaaaattaggagactttggattatcccgatatatggaagatagtacttactacaaagcttccaaaggaaaattgcctattaaatggatggctccagagtcaatcaattttcgacgttttacctcagctagtgacgtatggatgtttggtgtgtgtatgtgggagatactgatgcatggtgtgaagccttttcaaggagtgaagaacaatgatgtaatcggtcgaattgaaaatggggaaagattaccaatgcctccaaattgtcctcctaccctctacagccttatgacgaaatgctgggcctatgaccccagcaggcggcccaggtttactgaacttaaagctcagctcaggtaggagttggcgggagagagggcctgggggtgggggcagattatgctgcttctcctccttgcagtaatagcattttaaggtcattatatcagtatgtctaaggcgaactatttttcgttcaaatgcaattacttttaaaattgatttgcatttctttgtaccttgctagagtcttaagtaaattatatctttaaaattttaata

SEQ ID NO: 549879 - DNA, 1632 bp, Homo sapiens
atgaggaacgtcacttacggcgatcatactgggagatgcggggcaatgcactagaaaagaagtctaactatgaagtattagaaaaagatgttggtttaaagcgattttttcctaagagtttactggattctgtcaaggccaaaacactaagaaaactgatccaacaaacatttagacaatttgccaaccttaatagagaagaaagtattctgaaattctttgagatcctgtctccagtctacagatttgataaggaatgcttcaagtgtgctcttggttcaagctggattatttcagtggaactggcaatcggcccagaagaaggaatcagttacctaacggacaagggctgcaatcccacacatcttgctgacttcactcaagtgcaaaccattcagtattcaaacagtgaagacaaggacagaaaaggaatgctacaactaaaaatagcaggtgcacccgagcctctgacagtgacggcaccatccctaaccattgcggagaatatggctgacctaatagatgggtactgccggctggtgaatggaacctcgcagtcatttatcatcagacctcagaaagaaggtgaacgggctttgccatcaataccaaagttggccaacagcgaaaagcaaggcatgcggacacacgccgtctctgtgtcagaaacagatgattatgctgagattatagatgaagaagatacttacaccatgccctcaaccagggattatgagattcaaagagaaagaatagaacttggacgatgtattggagaaggccaatttggagatgtacatcaaggcatttatatgagtccagagaatccagctttggcggttgcaattaaaacatgtaaaaactgtacttcggacagcgtgagagagaaatttcttcaagaagcctgtaagtgtctagaaatttctgtggaactccattgactttctatctgtgaaatccaaactgtctctgaagaaataagaaaaatagtgttttgacttttaggagacaactatgtttattattttgccttgcaaattaatgtctaaatttgtacaagcacctatctacagatttttccaggtaaaccatcatgttttatgtgtaaaggtagattgatgtgcatttactttatactttggtacttaggccattacacatctttgcactggaattggtgcagatatataagtgatcctaatgttgatgctgcccagaccccaggaatgcagaggtgagcatgacacacacagtccctgccctgatggagctcatagactagtgaaggaatagggctctatgaccattccccttgtcctgctacaaaatcagaacaaatcacccaggctgggcacggtagctcacgcttgtaatcctagcactttgggaggccaaggcaggcagatcacctgaggtcaggagtttgagaccagtctggccaacatggtgaaacagtcttctactaaaaatacaaaaaattagccgtgcatagtggcacgcacctgtagtcccagctactcaggagactgaggcaggagaatagcttgaaccccagagagggaggttgcagtaagccgagatagcaacactgcacttcagcctgggcaatagagcaatctctgcctcaaaaaa

SEQ ID NO: 549880 - DNA, 1643 bp, Homo sapiens
  misc_feature (1176)..(1177): n is a, c, g, or t
  misc_feature (1181)..(1181): n is a, c, g, or t
  misc_feature (1187)..(1187): n is a, c, g, or t
  misc_feature (1195)..(1196): n is a, c, g, or t
agcggtgggagtaatagtgtagaagaatatccagcgtagtagaggatttaagcagatcgctttgcctactttaattatatgaaataccaggaggtcagatgtttaacctctttcaacatatctgtgctcttgtcctgcagaaacagatgattatgctgagattatagatgaagaagatacttacaccatgccctcaaccagggattatgagattcaaagagaaagaatagaacttggacgatgtattggagaaggccaatttggagatgtacatcaaggcatttatatgagtccagagaatccagctttggcggttgcaattaaaacatgtaaaaactgtacttcggacagcgtgagagagaaatttcttcaagaagccttaacaatgcgtcagtttgaccatcctcatattgtgaagctgattggagtcatcacagagaatcctgtctggataatcatggagctgtgcacacttggagagctgaggtcatttttgcaagtaaggaaatacagtttggatctagcatctttgatcctgtatgcctatcagcttagtacagctcttgcatatctagagagcaaaagatttgtacacagggacattgctgctcggaatgttctggtgtcctcaaatgattgtgtaaaattaggagactttggattatcccgatatatggaagatagtacttactacaaagcttccaaaggaaaattgcctattaaatggatggctccagagtcaatcaattttcgacgttttacctcagctagtgacgtatggatgtttggtgtgtgtatgtgggagatactgatgcatggtgtgaagccttttcaaggagtgaagaacaatgatgtaatcggtcgaattgaaaatggggaaagattaccaatgcctccaaattgtcctcctaccctctacagccttatgacgaaatgctgggcctatgaccccagcaggcggcccaggtttactgaacttaaagctcagctcagcacaatcctggaggaagagaaggctcagcaagaagagcgcatgaggatggagtccagaagacaggccacagtgtcctgggactccggagggtctgatgaagcaccgcccaagcccagcagaccgggttatcccagtccgaggtccagcgaaggattttatcccagcccacagcacatggtacnnaccnatcatnaccaggtnnctggctaccctgggtcacagggaatcacagtccatggtctggcagcatctatccagggcaggcatcgctcttggaacaacagattcagggaagtcatagacctcaggtagatacactgtggcagcccaatgtggaggactactaccagtattgaacatgcaagaggactcggggcacgcggtggccaccccacggactcacgaaccgcagcaccccgcacagccccacgaaactgcgacgacaaaatacagggccgggatggcaacacagcgacagcacgtcacgaaacccaggaaatgtgcgaccacacgacaagaaaacaacacacggagccgcatgacgtgccaccggcaacaacctagtgacaaaacacgaacagaaccccgcggtgagctccccgcgatccgcaggaccagcatacgaagaagagaaccaagacaccagcaa

SEQ ID NO: 549881 - DNA, 989 bp, Homo sapiens
  misc_feature (959)..(959): n is a, c, g, or t
cacgaggctccctggtgtttggcaccatagcgttgtcacttacaaccattgccttgggacacacagagtgaactgtttgagtgataagtaatttaggtagaaactttacccttaatttcaaatgataccaaacagctcattactaccccaagggacgctctccgtagcttctggattccccagtttccttctagaaacaaggactccaatagcactataaccctaaacaggccctaacccagaagaatacaccacaaaatgcgattgattttctcaaaatatcacagtcttagacactatacaaataattcaagaaaattctttctaccctgcagtggatatagtattctattatattctccagcaaaacttttaggacttttcaaactcatttctaagccaaatagtttagataaatatttacccttatatttggggggaattcaggctcaccatttgccgaggcaagcccatcaacagtctagaggcatattctgtgtcattccttcccgtctccttcatagaatactactttttccttttgtctcctggccattctccatcatctgctgattattgctaaccacaggatgctggcaaagcttacagtgataggcacatgtgttcagtgatgtccaatacactcttatcacagtggttattgcttcttactcttttcaaatgcattattctacccctcaacctacatccaatcattagaactatacctgattggagcccagaacttggggaccaatacttaattcaaataggcagggggcttgctcacaaatcatttaagcccaacaggaagcacagcactttgaaaagtcaaatagggctttggtagctctgtacatttgcaattttacatttgttagtagtttatagcactaataacacttcagtcgtgaatctacagtctcaatatgataagtcttagaacatgttctagaaanagtggtacttgctgctattatacttggtac

SEQ ID NO: 549882 - DNA, 140 bp, Homo sapiens
ttcccccgtccagttaccgatgtgaaatgaagcctgatgacggacagcgattcacgatcgatgtcctgaccgcatctactctctgcggtaaacggagagtctgagcctgcaattaggaactgtgtatattgtacggtgac

SEQ ID NO: 549883 - DNA, 112 bp, Homo sapiens
tcctgcatctagtagtgcgatctctgcgctcctgacggtgctcgctttatccatttttccaggtcctccacgtcctcctcttcttcctcccatctgtgccatcaaaggtcca

SEQ ID NO: 549884 - DNA, 888 bp, Homo sapiens
  misc_feature (7)..(7): n is a, c, g, or t
  misc_feature (73)..(73): n is a, c, g, or t
  misc_feature (91)..(93): n is a, c, g, or t
  misc_feature (95)..(95): n is a, c, g, or t
  misc_feature (97)..(97): n is a, c, g, or t
  misc_feature (99)..(99): n is a, c, g, or t
  misc_feature (101)..(101): n is a, c, g, or t
  misc_feature (113)..(113): n is a, c, g, or t
  misc_feature (115)..(115): n is a, c, g, or t
  misc_feature (117)..(118): n is a, c, g, or t
  misc_feature (121)..(121): n is a, c, g, or t
  misc_feature (140)..(140): n is a, c, g, or t
  misc_feature (143)..(143): n is a, c, g, or t
  misc_feature (146)..(146): n is a, c, g, or t
  misc_feature (151)..(151): n is a, c, g, or t
  misc_feature (156)..(156): n is a, c, g, or t
  misc_feature (166)..(166): n is a, c, g, or t
  misc_feature (175)..(176): n is a, c, g, or t
  misc_feature (178)..(178): n is a, c, g, or t
  misc_feature (181)..(181): n is a, c, g, or t
  misc_feature (189)..(189): n is a, c, g, or t
  misc_feature (196)..(196): n is a, c, g, or t
  misc_feature (289)..(289): n is a, c, g, or t
  misc_feature (297)..(297): n is a, c, g, or t
  misc_feature (329)..(329): n is a, c, g, or t
  misc_feature (332)..(332): n is a, c, g, or t
  misc_feature (380)..(380): n is a, c, g, or t
  misc_feature (383)..(383): n is a, c, g, or t
  misc_feature (398)..(398): n is a, c, g, or t
  misc_feature (482)..(482): n is a, c, g, or t
  misc_feature (514)..(514): n is a, c, g, or t
  misc_feature (559)..(559): n is a, c, g, or t
  misc_feature (590)..(590): n is a, c, g, or t
  misc_feature (884)..(884): n is a, c, g, or t
cttccgncagacacaagccttcttctcctagtctcctgagaattgtgtaaaaaaaaaaaaaaaaaatcatacntcccccgccacgcgcgcnnngngncncnctgggggtgggngngnnggngggtggggtgggggggggnggnccntcccnggggngggggggggnggtctgggnngnggnggggtgtnggggggnggcccggctgggcgggtgccccagctatccccgggggggttattccgtccttaagacttcatttccaagggcggccccagaaaagccctgacnggcagggngggccagtgatccccgatatcccattgggggnggnccccggaaacaaaatgcctggggcttctgggcggctgcggcctggggntgnggctgggcccggggngtggttgcgggggaacggctgtctccgggggggggcaaatggcgggccggccagccctgggtacgtggccacggggggggcccnggcccccggtttcaggctggccctcttgggcnggggctccctgggcttgcggtggggggggtcggggttcaaattcngggtgccaatttccgtggcacccggacccgnagacggtgaggccacgcgtggggagtgggggagtgcttgtatgtgggatgcatggagggaggctgcagtatgtggaggagaaagagaggctgttgtgggctggttcttaagacactcaaggggactcaaagggtcggctccagccatggacactatctaaggctgctcagaggagaatgctggaggagaggaagaggaagtgaaatggtgtgagaacattcttacccctataaataaactatttacacactttaagaaaaggagagccggctctcagtgaagaaccatgcccancgcg

SEQ ID NO: 549885 - DNA, 172 bp, Homo sapiens
tccctccgcttcaaggcagtgatgaagattgggcttattattaagagctgctataaaaacagcttgcttaaatgttaagagaagcccaggggtacttcaatgcattccttcggatgcttcactccatgaaagagggagttgaggcaagtcctcattactaataaaaatcagg

SEQ ID NO: 549886 - DNA, 294 bp, Homo sapiens
gaatatacaatggattaagaaagagtctataaccactgtccgttaaaatgtgaaacaacttgtcactgtactgatgaaacagattttaataccgctaacatacacagtaatgattcattcttgtttcaaacaagaggtgatttcgacttgggattgggatttttattttttgagatggagttttgttcttgttgcccaggctggagtgcaatggcacaatcctggctcactgcaacctccgcctcctgggttcaagcaattctcctgcctcagcctcctgagtagatgatggga

SEQ ID NO: 549887 - DNA, 633 bp, Homo sapiens
  misc_feature (86)..(86): n is a, c, g, or t
agaggacccccgaatcgcggttctcagcggtgcgtgttatgtacacaacatatggtcacttgtgaagtcatcaagtcaccgcagancaacgggaccacggtgtggagcagatctgtgtggatatccgacaatacggtatcattccttggaatggtttccccgggaaaaatatgttgctctgccctggagaacatcttgaaaacaaacgagttctacatgtcctatcacctgttcattgtgggctgtgcaggagctggtgccaccgtcatttgcctggtgatctacatgatggctactacatataactatgcgggtttgaagtttaagagtcgggaagattgctgcactaaattctaaattgcataaggagttaaagagagctatgctctgtagcatgaaatatcactgacactccagactaaaggagagtctaggtttctgcaattttgttacagtaatttgtaaatagcttaagtaaactcaccttgcatggtagattaataagatgacttactgtacctgaattacacaataatgagatctggtggctatttccacattttgaaaggatcagttattactgacagtggtgagcatccttttaacatatgtctatactaacctagagagcga

SEQ ID NO: 549888 - DNA, 677 bp, Homo sapiens
gcggtatagccttctctgactcagttacttgagatcaatcatggtcccaaaatattagatgaaaaattctagaaatatacaattcataagttttaaattgtgcactcgtctgagtagcctaatgaaatctcacaccatcaggaaggctcggtccttcctgagtcgtgaatcatccctttctccaggtattctgctgtaaactctactcgttcattagtcacttagtagcaggcttggttgtaggattgactgttgaggtattgtagtgcttgtgctcaagtaacctttgttttacttaataattaccccagagtacaaaaatagtgatgctggcaatttatatatgacagagagaagctgtaaagtgcttcctttaagtgaaatgtgaaagttctcaacttaataagaaaaggagagaaatcatatcctgagattgctaaaatctgtggtaagaatgaatcttttatctctaaaattctgatgaaagaaaaagaaatctgcacatactatacataaggttcggtactatccgtagtttcagacatccacttggggtcttggaatgtatcccctgaggataagggagaaccactatattcctaaatattctgagttaaagatttcttaagcagagattttatagattattttagccttttcggactcttatcatcgtg

SEQ ID NO: 549889 - DNA, 187 bp, Homo sapiens
  misc_feature (17)..(17): n is a, c, g, or t
  misc_feature (132)..(132): n is a, c, g, or t
  misc_feature (168)..(168): n is a, c, g, or t
tggcgctggccaccacntctgcggccttctggatggtggagaggaaattcgcctgccgagcccgtgcggccgtgttccttgctgtagccgaaacctggagggtgctgtgcggcctggcctgggagccccatnctgtggcaggcggggtccccagaggctgggagggancagcggcaacacggtgtcc

SEQ ID NO: 549890 - DNA, 829 bp, Homo sapiens
aataacctttagggcagtcaggtccactggagctgagagtagaagtggaggccacatgagggatatatggggacagaaaggatagtttttttaaaatcatggttctgataggaaaaacatgagcaacgcacaatatctattacatttgcctagaagcagaattttttgaggaactttaaaaaatgtacagatacctaggtcccaactttgtagactgattcaagagtgtttgggatttggtataggaacttaatagacctcacagggtgttctgatgcataatcagagctgagatcaactggagttgatgatagtgacttggattacttagtctttgctgattagtgcaacaacaacatgttctaactctgactcttgaccttttcttgaccagcccaagtactgtcacggcgtgcgttttctggttctccttgaactgttacacaaactaacactactttctaactttactacactactgcttctaacaccgttagacctagcttaacagatttcccaactattttttccacctatcccttttttaaaagcaaaaattacttacaagaatgaataaatgagatcctaaaagtgttgtcatcgcaagacagtgagccattgtcgctgtggatctctgcttttgtctttgtacctagtaattatattgcagtgtcattgaagaccacataatcttcactgaacattaaactgtgttcatctcaaagccaatctcttagtacatcaatctggctgcattctcacattagagcaaaatcattgctctcatccaacagaatccatccacctcagtgtcctataacaactcata

SEQ ID NO: 549891 - DNA, 171 bp, Homo sapiens
acggctccaaattctgcccagatgtataattttactagttttgcaatggtttgaatgaagtagacaagacatggagagtgtgattcccaagacagactgcaggttacgcctgacatcagagcatggaaatgagagatagatcagctagtgagaaaaacgacttgaggaaac

SEQ ID NO: 549892 - DNA, 316 bp, Homo sapiens
ggacttccataccacgatgtatcatactttaaaacaagtcgtaaacaatatatacaagtattatttgccaattgaaaatacatacatttaaaaatattttagatatttgtccattttggtttcaagtttacgtgcaggtcattttattgttcaagaaatactaggttgttttcggctgggcacagtggttcatgcctgtaatctcagcactttgggagcctgacgtgggtggatcacctgaggtcaggagttcaagaccagcctgaccaacatggtgaaaccccatctctactaaaaatacataaaattagctgtg

SEQ ID NO: 549893 - DNA, 417 bp, Homo sapiens
ttgtccacatcgtgctgcagagactcagtgggctttgaaccatgcctgctatctaggcaagacgcaatcaagcgaagtgcaaatgcggtgagatccacaaacaaatggcagaaactggaggctgtgacccaaacctcctggaggcggtctgcaggaggagacgacagaagaggactagggcagggaaagtccctgggaagggtcacagcccacagggtcagtgcttccagctcagcatgtgtatcatatgtaaatatgcaactgtgaaggcagactttttaaaaattcagttaaaaaaatgtaaaggttagaaaaggggtaaaatcagaaacaaagtaggacaagcatggagtggctggggctcagaggaggacaccccagaacggaggctcaggagcaaagtccctctcagatctg

SEQ ID NO: 549894 - DNA, 160 bp, Homo sapiens
ccccgggctcccgttaatgggtccataaaacccccccccccaagggggctccccttgttaaaacacccagttccaaaaagcagggggcccaacccctggcccgctgtaaaaaagggccggggcccctattgttgttgtaaaaaaaaaaattttttgttta

SEQ ID NO: 549895 - DNA, 249 bp, Homo sapiens
cgctgctgtggtcagaactccgagcttctctcctggacacagtcagttcccgtgggtgctagcttcaaactcgtacaagacttgcagttatcagagcgggcgggggcaggttgggggctggagggcctggagtcggggtccccaggctgagggtcatggttgtgtgtcgtctcctgaggaaagtgtgaggtgctccctaacctatgacttccccgccgaagggaaacagggtcctggtatcctaagggt

SEQ ID NO: 549896 - DNA, 132 bp, Homo sapiens
  misc_feature (55)..(55): n is a, c, g, or t
gacacactgccccctagcgggccaagcggggggcatccatatagtcactccaggnttacggagggttcttctactattaggactgggggcttttaagcgaaaagtcctaatcgccgaagaaccctccataaa

SEQ ID NO: 549897 - DNA, 904 bp, Homo sapiens
tattgccttgttggcggtgctgagaactgtcgggagcttcttgagaccgaggaccgtcatcccggctccaggcctctgtggactgcgtgactgttgggagcgctggccggatagcgagggactgacggggcctggcccccgggactccctgtgccttggcttggaagcttgacgccgacggctttattgcagggaactgactagatcacctttttgacgaagaagttggaaatgaattcccacatgtgtgattgaacttgaatattcttggattgaggacacgatcttgtgtgggacgatgacttgtaaggattgaacttgagtccatttaagtccccagtgacgggtggcaaagctaggcgtaggtaggagttggcaagccgatggttgtgggaaagcttgcttgcttggaggatacccaggtcccttgcagggcttgttgtttctttttccaggacaagattgcgatcagcctccaaaaatacagacctttcttagcatgcttcacctatacaactgataaacagtcgagcaaagaaaatacaagaacagtggaaaagctctataacatgttcagttgacattaggaaaattcgtacgattaaacaggatgggtacttttagaggatgaaacctatgttgaagaaattgcgaatattttacaagaactaggtgccgatgagactgctgtagccagtattttggaacgctgcccggaagcaattgtctgtagtccaaccgctgttacacccagagaaaactctggcagttggtctgcgaaacactgacgactgagttacatcacagttaagtagagcagtttccagaactctttctttactacttaaagaccaagagaaccaggacagctgaatgttcagttctttcaaggagcttgggaact

SEQ ID NO: 549898 - DNA, 370 bp, Homo sapiens
cagtatagacggggttcgccatgttggcatggctcgtctcacactcctgacctcaggtgatctgcccacctcggcttcccaaagtgttggggttacaggtgtgagccaccgcgcctggcctgtaaacagaacttttttacgtgagttgttgcccagacccctcaattaagtccagatttttaagagattttttctttaaagctctgcaagtgattccagcacacagtctggggactaaccgctgatatacggtctggaaaatctaagaaaccactctaccccaccctctggtgaccagaagcttatgtctaccagacccagggccttcccttgctgaaacatgctgggtaaactcttggtttcttcccag

SEQ ID NO: 549899 - DNA, 783 bp, Homo sapiens
tggaaaaagtcatggaggccatggggttggcttgaaaccagcttgggggggttcgatcccttcccttttttggtctaaatttatattgttatacgggttcttcgaatgttgtggtagggtggggggcactccatatagtccactccaggtttatggagggttcttctactattaggacttttcgcttcgaagcgaaggcttctcaaatcatgaaaatttaattaatattactgctgttagagaaatgaatgagcctcacagatgataggatgtccatgtggtgtatgctatcggggtagcccgagtaacgtcggggctatcccggataggccgagaacagtgttgtggggaagaaatgttacgatttacggccgatgatatatgatcagtgaaatgggatttgggcgtaggttgggtctagggttgtagcctgagaatcaggggacattccgtgaatgaagcctccttatgatggcaaatacgctccttatggatcggcacttagtgggaagtgagctacaacgtatctacgtgtcgtgtacgtacgatgtctcagtgatgagtctggctaataacaatgcccgtcctggccccctacgggtgaagaagccaggtcctgcggggcgccggatatccctggaacctcttctttgtttgtgccgccccagtgtttccccggaagttccgagcgaacgactcttcaacgtgccttggccgggggtggctctgctgttgagactagttgtccctcactcgtatcggccggcgggcgcgggaggagcg

SEQ ID NO: 549900 - DNA, 691 bp, Homo sapiens
agcctgtcgtgcttcacctggtctacctcgctagcatgtcgggccgcggcaagactggcggcaatggccctgcgccaatggccaatgtcgctgctcgtcgctgcgccggcctccagttcccagtgggcctgtgtacaccgtgctgctgcggaagggccactactgcctgagcgcgttggctgcctgtgctgctgccagtgtacctggctgtgcagtgctggagtacctcacctgctgagatcctggagctggctgggcaatgctggccctgcgacaacaagaatgacgctgaatcatcccccgccacctgcagctggccatcctgcaactgactgaggagctcaacaatgctgctgggctggctgtgactgatcgcccagggatggcgtcctgcccaacatccaggccgtgctgctgcccaagaagaccagcgccacctgtggggcctgaaggcgccctcgggctggcaatgaagtgccacccatggcctccccagtgagtactaagagttgccctgctgccgcgagccggcctgcagtgcctcccaatgccaccacaaatggcgctttttaagggtgccaccaaccgcaccctcattggaaagagcttgagccgttcagactgcggggcaatgcgggctgctgtttcgcttcaatacactaaaagaaaagcaaaagacaaaaaatagaac

SEQ ID NO: 549901 - DNA, 285 bp, Homo sapiens
ggtttgtcagggttggaaagtcccacccgtagggccccgtttccttttttagctgatgtttttggccagaaccccggggggtgttacttgctttgagttggaaacggtttgcatttacccccggaaagggattcatttttaatttaaggaagggtttttttggacgcaatttttgatttttttaaaagatggcaacaaaatttggttttttcctgttatgggggaacattaggccccaccaacccgtctttgtgtaaggaaaaataaaagggctcccggacccca

SEQ ID NO: 549902 - DNA, 154 bp, Homo sapiens
gaaatgaggaacgtcactttcattgaagactcaggtcgctgttctttgagagccatgagcagagcgtgttgtttggacaccaccactgagccaggactctggcccagggaagggattgtgttaagggtattcaccaaatttgggcacttcattg

SEQ ID NO: 549903 - DNA, 319 bp, Homo sapiens
caaaggtcagtgggtggggaagtgggagatgtagagagataggagaagaagaaggagaagcagtagcatgggaacctacaaaaatgtgtctgtaagtcaattactgatttccacatgtagttcctcctagaggagaaaaaaattagtctttcttaggatatgcagaaagacatgctagttctgccagatattaacaagtgttactagaaaaaaaaatgggacctataatcctagcactttgggaggccaaagtgggcagttgcttgagcccaggagtttgaaacagcctgagcaatgtggccaaaccccatctccacaa

SEQ ID NO: 549904 - DNA, 477 bp, Homo sapiens
tcatcttgggcctgtgttatcccactgccgctcagcccgcggtatctcaggtatccctggggttcgcccggctatcgcccgctgtcgacttcaatggacctgacggcccggccgacctcatctttatgatcgcggcctccgaagacggcggcgcggaccatatgaaacttctgaccaagctggctcgcgccctcgtcaatcctgagttcgtcgagcagttgcgtcaggcccccgacgcgcaaaccgtcgtcgacctcatcggtggggtcgtcgagccgaaggaagaagcctcgacctcatctgcaacggccctccccgctcctgggcacgccgcggtgaccaatgccgcctccgatacgccccgcatcgtcgccattacggcctgtcccaccggcatcgcccacacttacatggcagccgactatttgagggctgctgggaagaactgggtgttgagataacacaggcccaagatga

SEQ ID NO: 549905 - DNA, 848 bp, Homo sapiens
gagggcgccgggcgggcggctgagtcgccgagcgggcacatgcgctgctggccgacgtggacacgctgctgttcgatgcgacgggtgctggtggcgcggggagactgccgtgcctggcgctgcccgaggccctgcgggccgcatgcgatgccctgtgtaaagttgcctgggcttcatcaccaacaacagcagcaagacccaggctgactacgccgagaagcttgcggcgcctggcctttcgggggccccgagggggcccgtagccagcttggagggtttacgggactggcctaattgaacacggggattctaattgcgcacaagtgcttgcccggaggcccccggtcacagaggtccatacgtttgctgggaaggcacaagccatgtgcagggaacatgaaggccaggggggcttcagcaagcgttgtgctttgagtccgacccacttgctggccagagggccgctggaaaatgcagtgcaagagcgagatgagacccgaaagctggcaccggatgatagctggactatgacccgtgagagaaagaaagatgagcaaagcagggccgtggagacctgcagaacgccgacgcgggacagagggcacaagatgacaaccggaatccggtgaaaaaggcgaacaagagagacaccgaggcaggaccgaccgggagaggcgcagaggcgccggatatggaacccaggccaacgactgggccggaacgaataccgggcactacaggggacgcgtgaaaccgcaggcgcgtgcaaccacgcgccgggtcaccgggccgcaccagtgggcaaacagttgctgcgaccatgccagtgggtaggaaccaagaagcgt

SEQ ID NO: 549906 - DNA, 201 bp, Homo sapiens
cgttgcctctactattattcctcctcttggagcaattaagacctgggctaatttgctccactccaggcatatggctgacgccgtcctagcttctctagactgcctcttttatcaagattggattaaggtacctgcaatggtcagaactgtagagattttcacaagagtctagtataacccaggagaagatgagctagtagg

SEQ ID NO: 549907 - DNA, 475 bp, Homo sapiens
tacgcgggcccggcattcgtacacagtataaagtccacaatagaccagtccagggatagcgaagagtctcaggttggcgtagggatttctcaatgagactcttaatgtgtatacgctgctctacagtgttacagtgcctttggttgcatattacatcatcttcaccataatccaaggaaaccagtctcctttgtcggggttacgtcatcactgtctccagcctcaaatttgttaaagacactatctacaggtagtttctttctcttcacagaattaggctgaccaggactatgggaagcacccagtttaagacttagtcctatttttggcctatgctcctcaggttgctgttgatctggtgagttttcatgaggaataataataccacagggagactcatccccaggagtgttaggtgttgcattgccactggcagaggaaacagatggagcagagctgatgggagcaagatgcg

SEQ ID NO: 549908 - DNA, 130 bp, Homo sapiens
  misc_feature (43)..(43): n is a, c, g, or t
  misc_feature (109)..(109): n is a, c, g, or t
tcaaagaataaccacagctcagaagacgatgacgtggtcatgntgatcgccatccccttcctgctgcacacctgaccacggccatggggaggctgctcctggggcaagntctctggcagaggttattaat

SEQ ID NO: 549909 - DNA, 291 bp, Homo sapiens
  misc_feature (12)..(12): n is a, c, g, or t
  misc_feature (70)..(70): n is a, c, g, or t
  misc_feature (94)..(94): n is a, c, g, or t
  misc_feature (97)..(97): n is a, c, g, or t
  misc_feature (154)..(154): n is a, c, g, or t
  misc_feature (204)..(204): n is a, c, g, or t
  misc_feature (238)..(238): n is a, c, g, or t
  misc_feature (277)..(277): n is a, c, g, or t
attcggcacagnggcgctgacttctatggaaaccagatcaagcccaagatgttctgtgctggctaccccnagggtggcattgatgctgccaggngancacggtggtccctttgtgtgtgaggacagcatctctcggacgccacgttggccttgntgtggcattgtgagttggggcactggctgtgcttgggcccagaagccagncgttctacaccaaagtcagtgacttccgggagtngatcttccaggccataaagactcactccgaagccagcgnatgtgtgacccagc

SEQ ID NO: 549910 - DNA, 246 bp, Homo sapiens
accccttttttttttttaaaggggttccgggaattttttgcccaatttgggagggccccggttcccctggggggggggcccggtttgggtttttgttttcaaaacaaagcccggtttggggggggaatacggtttttggtttttttagttgccccgggggggttttttttttaaggggggcccccaaaaaccggttttttggttttcccggggggattggccccccgtttaaggttttttttttta

SEQ ID NO: 549911 - DNA, 203 bp, Homo sapiens
tcgggtgtctaccggacgccaacctctccctgtaagcacgatgttaccggctcccggaccccaagcaggggggagggagatacccgcaagtgtagcaagatctgtgcgcctggatacagcccgacctacaaacaggacgagcactacggatacaattcctaccagcgtctccaatagcgcgaaggacatcagggccccgagag

SEQ ID NO: 549912 - DNA, 112 bp, Homo sapiens
agcaggaagaaggaggggaaaattaaccgggcttccaacttttgtctgcctcattctaaaatttacacagtaaccatttgtcatccatgctgatcaccacaaatagttattt

SEQ ID NO: 549913 - DNA, 107 bp, Homo sapiens
acctgttccggggagcagtacagcttcagaattcatcaggaccagaaaggataaggatatttggctcacctcgttcccacagctccaccttcatcttctcatcaaag

SEQ ID NO: 549914 - DNA, 793 bp, Homo sapiens
tactcatcgcattgttcatcattttagatgtgttctacaccgttgtcgttggaccacgttcgtactgtacatgtgcggacatcgtagcaggcactcatttcatgcttggtggtacttgtgtttcattgggtggtctaaggacgacagtggtgtctcaaggaatagagcaatctctcctttcctgtgtaattgtctatgtgtgagccctgaggaggggcagagatgagttcttatatttgcaaatgtcatcattaatttataaatgagaaaatgagtcacagtgattttcagcattggtcaatattcattccttcaagatgaaaatagtgcagtttttgttttaatcattagatatgttgttcttgtaaattattattactttagagagagtgtctcactctgtcgtccatcctggaatgcagtggcatgaccgtagctcactgcagcctccagttccagctccggcgcaagcaattctcccacctcaaactcctgagtagctgggactacagatacatgccaagttaagaaaattctttttcaaatttttttgttagagacgagttctcactatattttcccaggctggtctcaaactaagcctcaagtgatcctttctcctcagtctttcaaagtgctagaattatagggggtgagccacctccactcaagcctttgtgtgcttttattaaggcaaactcatatgattgatatgggaggaatccatctaattttttataccaaaattggattttaattaattggttcctttttacccaggttattattggag

SEQ ID NO: 549915 - DNA, 463 bp, Homo sapiens
  misc_feature (31)..(31): n is a, c, g, or t
  misc_feature (79)..(79): n is a, c, g, or t
  misc_feature (120)..(120): n is a, c, g, or t
  misc_feature (128)..(128): n is a, c, g, or t
  misc_feature (211)..(211): n is a, c, g, or t
  misc_feature (435)..(435): n is a, c, g, or t
ggtaaacaaccctgtgcaagtcctctttttncagaaagcaggtggataatccttgtaaatccctcctgccttaaaaganccctcctcacagtatgtaccccctccttccagagagcaganaagggganccctttgttcccgtccttaatccttgtttccttcctaaaggctttgagcagcactgaacaaacggctaaagctgatgtttaanagtgttctgtttgggaggccgaggcgggtggatcatgaggtcaggagttcaagatcagcctggccaacatagcgaaaccccatgtctactaaaaatacaaaaattagccaggcatggtggcgggcacctgtaatcccagctactcaggaggctgaggtgggagaattgcttgaacccaggaggcggaggttgcagtgagctgagattgcaccattgcactccancctggctgacaagtgaaacaacatcaaa

SEQ ID NO: 549916 - DNA, 613 bp, Homo sapiens
ccacgcgtcggctgaatctccttaggcactctctaatcagatgtctaggtcctcccaattcttagaccttttatacctgtttttctccttctgttattccatttagtttcttagttcatccaaaacggtatccaggccatcaccaatcattctatacgacaaatgtttcttctaacaaccccacaatatcaccccttaccacaagacctcccttcagcttaatctctcccactctaggttcccacgccgcccctaatcccgcttgaagcagccctgagaaacatcgcccattctctctccataccaccccccaaaattttcgccgccccaacacttcaacactattttgttttatttttcttattaatataagaaggcaggaatgtcaggcctctgagcccaagccaagccatcgcatcccctgtgacttgcatgtatacgctcagatggcctgaagtaactgaagaatcacaaaagaagtgaaaaggccctgccccgccttaactgatgacattccaccattgtgatttgttcctgccccaccttaactgagtgattaaccctgtgaatttccttctcctggctcagaagctccccatgagcacctgtgacc

SEQ ID NO: 549917 - DNA, 98 bp, Homo sapiens
cgtattggggagtgagagggagagaacgcggtctgagtggttttcggtgctctacacgttcagagaaacttctctagtaacacactatagaaatggtc

SEQ ID NO: 549918 - DNA, 1053 bp, Homo sapiens
gcaagtgtagcctctgtgcctcgtggtcccctggcgctagccggacatctctcagggatggcggcacatgaagatctgggacttcggagtcagcgtctttgagccacccgtgggaaactagttacaagagctgcggaatgcagaaatacccaaatcctatgaacgccaagtgtggttggagttgatgtgttgtgacagagatatagatccctctggaaacggtcgcacagtcacagacttctcagcacagaggggggactgccttccattgtgaagtctcttattggtgcagcaagaacgaaaactatatgtgcacagaacgattctcgtagttgatcctgtatgagaaaacaatggacacttatactctactaatatttctactttacaagacatggtttcacgtagatgagagacttatatacaaaccaatcctcaggatccagaaaaaactgttttgacacaagaagccataattaccgtgaaaggagttagcctcagcagttaccttgaaggactgatggcaagtacgatatcctcaaatgctagtaaaggccgagaagcaatggaatgggtaatacataaattaaatgctgagattgaagaactgacagctcagcaagaggaaccataaggactccaatggcagcagcagcgtttgcagagaagtgatcgtgacagttggtagacaacatcgggtactccaggtctctccaaactgactatatatttatttgttattttaaaaatacaactatatttgcgtagttctcatgactgtagcctgtgcgaataagctgggcggtaaagggctatgtggtgacgtggattcaacaacagagtgcaggggcctcttagaattaaaggggactcactcgtgaacattaaggtggttggaaatcactatctggatttaggagggtcccagctatttctggtgaaaattcaccaagaactcctgggaaacgggtatggatatacagtctccttaagggtacgattttccaagctttgcatacattgggaactccacctgacttgggaccaacccca

SEQ ID NO: 549919 - DNA, 846 bp, Homo sapiens
ggccgaggaacaccgtgtactattagccatggtcaaccccaccgtgttcttcgacattgccgtcgactgcgtgagcccttggtccgcgtctcctttgagctgtttgcagactaggtccctaatacagcagaaaattttcgtgctctgagcactggagagaaaggcatttggttattagggttacctgctttcacagaattattaccagggttcatgtgtcatggctggtgacttcactacgcctataatgcgcgactggtggcaattgtccatctactgtgggagaacatctctgaatgatgagaacttcatcctaaagcactaactgtgtcctagtcatcgttggtccactggcaacactgcatgagatccaaatcaacaaaatgtgttcccaaggtgttatctcatctcttagcgcctgaccatagtagctgatcgcttggattggattgcgctagacgtcattgtgggtgtaatgtgcagaaagtgagagatgattactgcatgaactagtttgtgcgaagcgcccataggcagtcgcctcttgcgtggtcctatgagcacctggtcgaagtactcaaggccaccaaagggacaccatgaaatttcaggcccagtgtgggctgtgaaccttgtagagaagcgaattctcccgaacattgaaagggtctatcgcaccttttgcatggcttccatgtacttcctgtttaatttacttcaaaaacggccgaaaggggaaaaatttctcccagggtttttcccccctttgtgtgccttggttaacgacgtcccaacgtggaaagcaaggtccaaaccccgcccccttttccccctaatggcggccta

SEQ ID NO: 549920 - DNA, 902 bp, Homo sapiens
  misc_feature (32)..(32): n is a, c, g, or t
  misc_feature (850)..(850): n is a, c, g, or t
  misc_feature (852)..(852): n is a, c, g, or t
  misc_feature (854)..(854): n is a, c, g, or t
  misc_feature (860)..(860): n is a, c, g, or t
  misc_feature (873)..(874): n is a, c, g, or t
  misc_feature (881)..(881): n is a, c, g, or t
ttcccgggcagtataaagttgctgtctccttngttcgccctcgttgcgcagtagtgctagcggcttcgcggttcggtcctcgcacccggcagccgccactggtgctgagctgctaggaagcccctatcgccgagctcgttggagcttgaacccattgtcacccctccgactcaccggcccaaaaaaaaaaaaaattgggttgaagcagatcgcccaggaaagctcttcatgggggggcttaatacggaaacaaatgagaaagctcttgaagcagtattgggcaaattatggacgaatagtgggaagtactcttgatgaaagaccgtgaaaccaacaaatcaagaggattggctttggtcaccttttgaaagcccagcagacgctaaggatgcagccagagacttgaatgggaaagtcatttagatgggaaaagccatcaaggggggaacaagccaccaaaccatcatttggaaagtggtagacgttggaccgcctccacctccaagaaagtagaggccctccaagaaggtcttagaaggtgggaagaggaggacagtggaggaaccaggggacctccctcacggggaggacacttggatgacggggggatattccatgaattttaacatgagttcttccaggggaccactcccagtaaaaagaggaccaccaccaagaagtgggggtcctcctcctaagagatctgcccttcaggaccagttcgcagtagcaggggaatggggaggaagagctcctgtatcacgtgggaagagatagtaatggaggtccacctcgaagggaaccggtggcctctcgtagagaatgtaattggtcccaagagatgacgggnancnactaangacggtattcagnnggaatanccagttctggcacacaagata

SEQ ID NO: 549921 - DNA, 881 bp, Homo sapiens
  misc_feature (41)..(41): n is a, c, g, or t
  misc_feature (829)..(829): n is a, c, g, or t
  misc_feature (831)..(831): n is a, c, g, or t
  misc_feature (833)..(833): n is a, c, g, or t
  misc_feature (839)..(839): n is a, c, g, or t
  misc_feature (852)..(853): n is a, c, g, or t
  misc_feature (860)..(860): n is a, c, g, or t
aacacgaatgcaaattgacaccttgaaacgccaaacaacanctggaaccccttcgataccccggccattatggccggggctcgaagagcaatagtgctagcggcttcgcggttcggtcctcgcacccggcagccgccactggtgctgagctgctaggaagcccctatcgccgagctcgttggagcttgaacccattgtcacccctccgactcaccggcccaaaaagaaacaaatgagaaagctcttgaagcagtattgggcaaattatggacgaatagtgggaagtactcttgatgaaagaccgtgaaaccaacaaatcaagaggattggctttggtcaccttttgaaagcccagcagacgctaaggatgcagccagagacttgaatgggaaagtcatttagatgggaaaagccatcaaggggggaacaagccaccaaaccatcatttggaaagtggtagacgttggaccgcctccacctccaagaaagtagaggccctccaagaaggtcttagaaggtgggaagaggaggacagtggaggaaccaggggacctccctcacggggaggacacttggatgacggggggatattccatgaattttaacatgagttcttccaggggaccactcccagtaaaaagaggaccaccaccaagaagtgggggtcctcctcctaagagatctgcccttcaggaccagttcgcagtagcaggggaatggggaggaagagctcctgtatcacgtgggaagagatagtaatggaggtccacctcgaagggaaccggtggcctctcgtagagaatgtaattggtcccaagagatgacgggnancnactaangacggtattcagnnggaatanccagttctggcacacaagata

SEQ ID NO: 549922 - DNA, 1204 bp, Homo sapiens
tctccaaaactgtaggaacttgacttgcgttagagtgtactcttgaaaccaagctcgtctctggccggcagggagttctatatgttgtgtcgtaatcttcattcaagaaagttttcacataacggcaagacataaaactagcaagactaaactcgatatcgaaacggggtgatagcaatgggtttcctacatgagcgacatacagtcctgggaaggaggaagtcactcatgactcgcatggacgtgtggaattggtcttgccacccgggacacagggcatctgctgagtcgggctgcaatgggaaaggaacacgtaaaaacgctagtgccataccaaagagcaaaagttgctgtgataagagccaaacacgggtaacggggggaacataaggcctgccatccattggggatttttcatactgctgattgttccgcaaagcaagtattgcgtgacatttagcgaatgtggctctacacgataggtagcgtttcatgaaaactgagggttgcgttctccgaagtgaatacgcgacaagctttgttgatgtacccaagtatcctttacataatgtcagctgaggaaaatctgcattagggctcaaataggcgagttgaggtactcatacaagtccccggtgttggagaattgcttacagtcatgctggggggagagcccttaccccaggcttggagtacgtgggaaagtcgtgtcaataggggcctaggtattaggtccttcttaactataatctgggtgagattcgcgctgtggagtcggttccacccctcggcgactctgttcgcacgacagtcattttcaactagtcctaattactacatccatcttagtgtaaccgcatatagcgaaacaattaaggctctagggttacccgaaaatcttaaaggagggtcctacaagaggggcgcacacaattgggtgccggcgggtaaaggtaaaggtttgacgtttcaaaggtgtatacagaaaaagggcagcagtgccacaaggtatagggacatttcatattacaagggacaaaacaagtccagatgagtccgtttgatcagaaacagaagagcgacccggagccgatattgttgtgggaaaacagaaacgataaagtatgtataacgtgtgtaaacaacagtttacaagaattttgatcaaggggagacctagaactcctgtacacacgggtgtgga

SEQ ID NO: 549923 - DNA, 769 bp, Homo sapiens
gatcgggcctcactggcttcagggagctgaataccctcccaggcagcacgacagggtgggacacaaataagggtttcggaaccagctatttgactcatcacggacagcaagcttaaagatgcctgggaagatggtcgtgatccttggagcctcaaagtatactttggataatgtttgcagcttctcaagcttttaaagatcgagaccaccccagaatctagatatcttgctcagattggtgactccgtctcattgacttgcagcaccacaggctgtgagtccccatttgtctcttggagaacccagatagcatagtccactgaatgggaaggtgacgaatgaggggaccacatctacgctgagcaatgaatcctgttacgtcacgggaacgaacgactctgtacctgtgcagcagcaactgtgtgacatctaggaagattggacaaaccggaatccaggtggcagatctactcttttcctaaggatccagagattcatggagagtggccctctgcgacgctgggaagccgatcacagtcaagctgtccagttgcctgatgtatacccatatgacaggctggcagatagacttactgaaaggagatcatctcatgaagagtccaggcaatctctgccagcgatgcagaacaggaagtccctggcaaacccaagaactctggacaggtaccccttaacaccgggtccattgaggaatcttgggaaaaaggtccaggtcgggccgagcctcactacaccatggataacatgg

SEQ ID NO: 549924 - DNA, 807 bp, Homo sapiens
tttgaaattactcatatgatggtcttgcttctgaggcttatggtcccaggtacttagtgtggtgaataactatggtgccactgacgacgatttcggggtgcggtggggaagaacaagcataatggtatgggggaggcttgagcctgaaactaaccactgagtgaattgcactgccggtttaagcttaacgggaattccttatttggcatgtcgagcagggtagctgccaacgtgaataaacaactccagtaacatgtacttcgttttagtgtacttgtagcaggcaatataactatctacagtaagtagctttgacagtcctgcacatttgttgcactagagactatatttgctagaagatgattagctcttgcctttacttttacagatgcgttagctgtgataaacttctagtcatgtttccgtatccaagagaccagttcctataattgtacataaaccacagaaatagtataacacactatttttaaaattatccgtttagcctacttaaattttgtttagcttaagacttcttaggacatttgtcaaacgcaggttaacatttaataaggtttctgatttccgttttgtaaccggagatagttttgtacaagtgaaataaccatttccagctaagataaaacatcgctaaataagttgatattgatgaggatctgctttgtataatttctgtaaattatccttgtctgaaaaaggtgttatgccctaatatttttaaatccttatcctttgatttttttaaaaactgtacctaattgataaacactataaatttcattttca

SEQ ID NO: 549925 - DNA, 288 bp, Homo sapiens
  misc_feature (56)..(56): n is a, c, g, or t
ctccatctcaaaaaaaaaaaaaaatgggaccagaattaaataatgcccatgtagtnaaatctttcaaccctggcaaggaagatgtataataatcatctgagtgctttgggaggctggggcaggaggattgcctgaggccaggagtttgagaacagcctgggcagcatagcaagaccccatctccgcaaaaaaaaaagttaaagaaaattagctgggcttggtggcacgtgcctgtagtcccagctactcgggaggctgaggtaggaagattgcttgagcccaggagtt

SEQ ID NO: 549926 - DNA, 1088 bp, Homo sapiens
taagtaaaaacaggttttcacctttgtgggccaggcgggtctcaaactcttgacctcaggtgatccgcccacccgggttctcccaaagtgtgcgtgggatttacaggcgtgtgagccactgtgggcctgggcccccttccgtggactttaaggagtggtgacttccttcccattccagcctttcgtgtcgtgagcacatacccacccagctagaaacgtgacttgggtaactgggatctaaaaagggaggcgcgagatattggcgtggtttccagagggtcagatgggcgccagggcgcctggggctaagggcatttatgacaatgcccttgccttggcccacctggtgtcaccaccatttcaacgaggtgatcactacattcgtggggccacagagaggtgtgggccaggcggaggaaagccgtgactagaagaatacgcgtggagtgtattaactttgtggggaaggttttacacaaaagcggaatacgggggccatgtgggctctcaaagaattgggatatggaaacacttggagccccagggcacccgggacgcaggggtaattttcctggagggccctaagttacccttctacaggcgccttttcctggaccaaaaagccatgtccacattctgtgggggacgccagtgtcctcaagactccgtggcgctgggggtctaccaggcagccgcacggggctcccaaaaagggcccccttgtatataccaagtggtcggattccctaaaaccacataatcccctcttgggggccctacataatggtggcctttatcacccatttacaccgtgtttaaccaagcatggttccctcccattgtgtggcgcgagcggcaaaaaattctccgttagagtatgtacggccccccctttttaagaaaaggccccacagcgtgaacgggttcattcaacacacgaagaaacctattcgctcccaaaaaacaatgttggcttgtagcaaggtctattcgcagggacatcatccctgacatttcactgttctacacgagcggcatattttgtggccgcatgtatggcataccacgtggtgacccgacgaagacat

SEQ ID NO: 549927 - DNA, 357 bp, Homo sapiens
ccgcgtctcgcggcgcgtgtccgcggcgtatcgctgtgacccccgcacacctgtgaacatgtcgctgtgagtgtggcgcagcgtgcgggccctgttctgtaccctgcgcgcgcgcccgttacccgccgcgccctgtccgccgagagccctggcagctgggggtgggcgccgtccgtacgctgcgcactggacccgctctggtcttggtgcgtaaattcacagagcaccaatgggtaacaaccgtggcattggaacagtgggaatcagcaattttgcacaggaagcgttgggagagagtgtggtattggaggctccctgagagttgggacgtgagactctattctcctttatcaaggg

SEQ ID NO: 549928 - DNA, 385 bp, Homo sapiens
  misc_feature (248)..(248): n is a, c, g, or t
  misc_feature (287)..(287): n is a, c, g, or t
  misc_feature (312)..(312): n is a, c, g, or t
  misc_feature (319)..(319): n is a, c, g, or t
ataacgtacggcacgcgtcgacgggaagggagcggtggtcggccatcgggtctggtgtaaagtctcgatgggagtctgaccaccgctgggatgggggtaggggggatgagctggccaggagtgggataggttccagggatatggacgggtgggtgagggatggatgggccggagaggcgggcggcgggcccgctctgggttcggtggtatgaggaacgggggggagttacgcgtcccccgggaccggncatcggattcctcgggcactcctcacagacgagaccaancatacccgccagttcctcccccctncccgggngacgcgtaactccccccctcccgactcagctcagcagatcgatttgcagtgatgggtcatgcagca

SEQ ID NO: 549929 - DNA, 844 bp, Homo sapiens
ctggtcaagggctgtcattgcacataagcttccatttaattataaagtgcaaaagggcgccagcgtggctctaaaaggtaatgtgtggattgcctctgcaaaagtgtgtatatattattgtgtgaaattgcatacttggtattttgattatttttttttacttcttgggatattgggatttccagaaccacatccttgcaaacctttgtttatacgttgttaggtatttgcatgaaaataccattaagtgaagaattaccagatcgaaagtagagaaataatgctatcggaatttgtaaccaggggagggaagggaaagtttcattgtctgcatgtgatattgtgtgttataccaacttttgtatgttaaagagaatgagtccttgtatatcaaagttctgtggtacttaagtggtactaagcactggtaaacttctgcaacaagcagtgcagctttgcaaacccattaaggggaacaatgacagtctgtacctgggtcctagtaagaagacaaactggttcccttacttggctgagggtttgaataaagcctaggacttccgagctatgtcagtactattcaggttaacacctaagggccttggaaattcctgtactgtggtctcatggattgtggcactagccaaagcgaggcacccttattggcttacctccgtcagtggaggctactctccttgagtgtatgagtagccaggttaaggggtaaaaggatagtaagcatagaaagcatagaaagtgggcttaatggagttcttgtggctcagttcaatgcagttagtgaagaacttgaaaagttttcgtgggagacgtttataaagcagaa

SEQ ID NO: 549930 - DNA, 452 bp, Homo sapiens
tagttcagctacttggaggctagaggaggagaattgcttgaacccaggaggtggaggttgcagtgagcccagtatcacgccactgtactccagcctgggtgacagagtgagacactgtctcaaaaaaagaaaaaaaaaaaaaggaagaatgccggtatcatggcaggatagagggagcagatccaggttatgtccgagactgaaaagattaaaaggagtcaggggagatggggagaggtgaagcagtcattccagatacagaggcaaatagaacggaccagaatgccccctaagtagaaggaagccaaaaggcggcactgtgctgaggaccagctgggggcgcagggttcccccgatcttcaggctcaccagagttggctttagctgacagtctggctgtctatttctgccctatttcccattttattttgcctaccaaagtcgtctcaggt

SEQ ID NO: 549931 - DNA, 288 bp, Homo sapiens
ataacgtacggcacgcgtcgacgggaagggagcggtggtcggccatcgggtctggtgtaaagtctcgatgggagtctgaccaccgctgggatgggggtaggggggatgagctggccaggagtgggataggttccagggatatggacgggtgggtgagggatggatgggccggagaggcgggcggcgggcccgctctgggttcggtggtatgaggaacgggggggagttacgcgtcccccctcccgactcagctcagcagatcgatttgcagtgatgggtcatgcagca

SEQ ID NO: 549932 - DNA, 890 bp, Homo sapiens
gtacgctgtctcgccatgcctggagtgagttgtgggggacggaggcgtgtagagggcttaaggtgcttctactgggcgttggaatatttgaagcgcttcaaaggaccgatagccaagaagaaagagaaatccacatctcatacgcggctgacgatgtagcagccagaggatccatgttcgcttcgcataggattgtttcttgggggtcattttatacttcaatgtaagatagaatcaggatatctggtactcactgggccaagttaaggtacagaccgtcttcgatgttgagatgtattggccgtcagaaaattcgaactgctggaggattcgtatgcggttcatgctccttgtatttgtgattcacaaatacaatgagattcaattattgcgctaagtcttatcggggacatggtgatagagaagtgcctcaggcgcaagatgagtttcaggaaaccaattaaaatttataaagaagtggatactgctgtgtgcacgagaaattagttccaaggaatggggtgggtggcaaggtgggatgatgctgtgggggaggaattggaatgatgggggtgacctgtaaaatggggcgagatctaggaatgatcgtggagttccagatagtttagacaaataacaaaataatttctggtaggtgaagtggtgagctagaatgcgagatggctacggtggtgcaatatttcttgacatatgacaggaaaagtaaatacttcattatatggtgggctctgtgtgtggttgggacaatgtttcctttgggttgacgaagttgttggtagtaaattgcaaatcggagaaaaagggtgcggatttgggagcgtgggcagtcggaaatcaaagggggaggggtccagattggaagcgaaaga

SEQ ID NO: 549933 - DNA, 892 bp, Homo sapiens
tccaggttcagtcggacgggcgcgagaacgcttctggaatgaacgccgcgatggcttgcgcaggtagagccccaggtccagttcaacacttgtatctggttggtgatggtggtacttggaaaaacgaccttcgtgagacgtcatttgactggtgaatttgagaagacgtatgtagccaccttgggttgtagaggttcatcccctagtgttccacaacaacaagaggacctattaatgttcacatgtatgggacacacgacggccatcgagaaattcggtggactgagagatggcttattatatccaatgcccagtgtgccatcataatgtatgatgtaacatcgacgaggttacgttacaaggacttgtgcctacagctggcatacgagatctggtacgaggtgtgtgacaaaccactccccgattgatgtcgatgatggcaagcaaacgtggactaatctaagggaccgcgagacagtgagcggcgaaaagtccagcttgatcatccccaaccggaacaaggacggacacatcactatgagggtagcataacggaccagttacgagccggtggggcagagaatcggtagatacagtaagccacgagcctttgtcgggacacctcaggcacccgtatgctcagtgcttggtagtctttgtgtcgataagtagaacgatgcgctaacagcgtagtggggagagagacagcgatgacagaggatctggggatagcagatttaggcgaactgccaaaagttgatgcgacgactatctatcgggcagacccgacgcgagagaacgaggggtcgacaccgcagtatcagcgcccaggaccatttatagggagtacgtaaagcgtaggtaatagagacagccgagaccattacaagaa

SEQ ID NO: 549934 - DNA, 417 bp, Homo sapiens
ccatgatactatcatttagctgctgccagtcactgaccagttcgcctgaatgtgcggtgcgttcaccagtgggttgtcttccagcggccattcacctttcgccacccgatcaatctcaccacggatagccagcatcgcatcgataaagcgatccagttctaccttgctttccgactcggtaggttcaaccatcagtgtacccgcgaccgggaacgacatggtcggcgcatggaaaccgtagtcgatcagacgtttggcgatatccatttcgctgatgccggtctcttctttcaacggacgaatgtcgagaatacattcatgcgccacgcggtgatcgcgaccggtatacagcaccgggtaagcgtctttcagacgggtttagtttgtagtagtggcgttcaggtctaaatgcaatca

SEQ ID NO: 549935 - DNA, 940 bp, Homo sapiens
gagggaacgacatggcggttctctggaggctgagtgccgtttgcggtgccctaagacgccgagctctgtggcttcgaagctccagtggtcagcacctgcgtcatatctcaattcagttctctctcagtggaccgatcgtaatccccagcaaactgcgtgtgttatgtgcacgcaacatacacgttgtctccagatcccgccatccttggctcccaaggctgtatcgtctctctcttggactaagccgagaggggtttccctaggagttttggcttccttgggtggtcttgctctccgggtgccttatttgatactctctgtgctcttgccgatggcactattctccccctgtgcctggtgcccctctactctttccatggtcacctggcgcccttggacaagtccgctcgactgactactcgttcatgggtgatgccttgccgagaaagctgccatggcgagggcgtttggggcactttcagctttatcctttgctgtcctttgctatggctactatcacgatgtgcgcatctgcaaagctgtcggccatgctgtgggagctctgacccttctgacttcatacttcgaggaattgatgcttgcctctgtgccgctgctttgtcatgccgttacgctcccattagggagagacttcctcctaggtccatttggtggtgcagtcttggcttctctttcatcaccagattatcccccagaattcatctctggggcacaccgttgcgcggccttctctcctccgtgcggcgaccgagtcatattactgggacgttaagggggtgcccccgcgtctgttccggcccggcttctacgggtagttcggttggccccattgcccctctcgagacccttgcgcgcctgtcaaccctttccgtgaacgggggcccttctcgggaacgccgccggtttcccccctcacccg

SEQ ID NO: 549936 - DNA, 2058 bp, Homo sapiens
aacaagagcagtgccgtcccctcctcctccccccatcgtgaagaagccattgaagcaaggtggggccaaagctccaaaagaggctgaggctgagccagccaaggagacagcggccaagggccatggccaagggccagcccaaggcagggggactgtggtgcgcagctcagactccaagcccaagcggccacaacccagcagggaaattggcaacatcatccgcatgtaccagagccgcccgggccccgtgcctgtgcccgtgcagccatccaggcctcccaaagctttcctgaggaaaatcgaccccaaggacgaggctctggccaagctgggtatcaacggtgcccactcgtccccgccgatgctgtcccccagcccaggaaagggccccccgccagctgtggctcctcgacccaaggccccgctacagcttgggccctctagctccatcaaggaaaagcaggggccccttctggacctgtttggccagaagctgcctattgcccacacacccccacctccaccagcgccaccactgcctctgcccgaggacccagggaccctttcagcagagcgtcgttgcttgacacagcccgtggatcctgcagagcagaggcctggaggcgcctccccggggctggtctgtgtcactgcactccagggacgcatggcaggacttggctggctgcgactttgtgctggacctgatcagccagactgaggacctgggggacccagctcgcccccgcagctaccccatcactcctcttggctcagccgaggccattccccttgcccctggcattcaggccccctcactgcccccaggaccccctccaggtccagccccaacgctgcccagcagggaccacacaggggaggtccagaggtcagggagcctggacggcttcctggaccagatcttccagccagtgatatcctccggcctcagcgatctggaagttgttcctacgcaaggaggtgttctacccacgggagaacttcagccatccctactacctgaggctcctctgtgagcagatcctacgggacaccttctccgagtcctgtatccggatttcccagaatgagcggcggaaaatgaaagacctgctgggaggcttggaggtggacctggattctctcaccaccaccgaagacagcgtcaagaagcgcatcgtggtggccgctcgggacaactgggccaattacttctcccgcttctttcctgtctcgggcgagagtggcagcgacgtgcagctgttagccgtgtcccaccgtgggctgcgactgctcaaggtgacccaaggccccggcctccgccccgaccagctgaagattctctgctcatacagctttgcggaggtgctgggtgtggagtgccggggcggctccaccctggagctgtcactgaagagcgagcagctggtgctgcacacagcccgggcaagggccatcgaggcgctggttgagctattcctgaatgagtttaagaaggactccggctatgtcatcgccctgcgcagctacatcactgacaactgcagcctcctcagcttccaccgtggggacctcatcaagctgctgccggtggccaccctggagccaggctggcagtttggctctgccgggggccgttccggactctttcctgccgacatagtgcagccggctgccgctcccgacttttccttctctctgagcagaggagtggctggcacaagggtcagctgtccaacggggaaccagggctggctcggtgggacagggcctcagaggtgaggaagatgggagagggacaagcagaggcaaggcctgcctgagactgaggaaggaaaggggtttgaccactcccgaggctgccatgcggtgggaccaccctgctgtccgtctcctgtggctgcccctctgcccgctcctgatggctcgccttgtctctccagcaagactgtgcactccttgcaggcaggggctgggctggatgctgctcttgtgtcccacgtggtacttagttcaaggctgccccagcagatgcttaataaacagctctccactttc

SEQ ID NO: 549937 - DNA, 367 bp, Homo sapiens
tgcagtcatcagtcagaatttcagaaaagtttccttcaagtcccaaggctttggaatctgtcactaatgaaaacgcaattattcctttaccaacaatcaaatggaaacccttaattcattctccttccagaactcctgtcttggtaggatctgatgaatttgacaaatgtctcagtaatgataagttttctcatgaagaatatagtaatggtgcactttcaatcttgcagtatccatgtctggaatacaccgaaattcaaagtggccaacactgaaattccacttctcattccatgcgaggtccgacagctctacagtttttttggtacactgtagaagcagatgtctcctctgtccatcctatcac

SEQ ID NO: 549938 - DNA, 3156 bp, Homo sapiens
  misc_feature (554)..(554): n is a, c, g, or t
  misc_feature (624)..(624): n is a, c, g, or t
  misc_feature (633)..(634): n is a, c, g, or t
  misc_feature (1435)..(1435): n is a, c, g, or t
tgcagtcatcagtcagaatttcagaaaagtttccttcaagtcccaaggctttggaatctgtcactaatgaaaacgcaattattcctttaccaacaatcaaatggaaacccttaattcattctccttccagaactcctgtcttggtaggatctgatgaatttgacaaatgtctcagtaatgataagttttctcatgaagaatatagtaatggtgcactttcaatcttgcagtatccatatgataatggttattatctaccatactacaagagggagaggaacaaacgaagcacacagattacagtcagattcctcgacaacccacattacaacaagaatatccgcaaaaaggatcctgttcttcttttacactggtggaaagaaatagttgcaacgattttgttttgtatcatagcaacaacgtttattgtgcgcaggcttttccatcctcatcctcacaggcaaaggaaggagtctgaaactcagtgtcaaactgaaaataaatatgattctgtaagtggtgaagccaatgacagtagctggaatgacataaanaaactctggatatatatcacgatatctaactgattttgagccaattcaatgcctgggacgtggtggcttnggagttgtnnttgaagctaaaaacaagtagatgactgcaattatgctatcaagaggatccgtctccccaatagggaattggctcgggaaaaggtaatgcgagaagttaaagccttagccaagcttgaacacccgggcattgttagatatttcaatgcctggctcgaagcaccaccagagaagtggcaagaaaagatggatgaaatttggctgaaagatgaaagcacagactggccactcagctctcctagcccaatggatgcaccatcagttaaaatacgcagaatggatcctttctctacaaaagaacatattgaaatcatagctccttcaccacaaagaagcaggtctttttcagtagggatttcctgtgaccagacaagttcatctgagagccagttctcaccactggaattctcaggaatggaccatgaggacatcagtgagtcagtggatgcagcatacaacctccaggacagttgccttacagactgtgatgtggaagatgggactatggatggcaatgatgaggggcactcctttgaactttgtccttctgaagcttctccttatgtaaggtcaagggagagaacctcctcttcaatagtatttgaagattctggctgtgataatgcttccagtaaagaagagccgaaaactaatcgattgcatattggcaaccattgtgctaataaactaactgctttcaagcccaccagtagcaaatcttcttctgaagctacattgtctatttctcctccaagaccaaccactttaagtttagatctcactaaaaacaccacagaaaaacnccagcccagttcaccaaaggtgtatctttacattcaaatgcagctgtgcagaaaagaaaacctcaaagactggatgaatggacgatgtaccatagaggagagagagaggagcgtgtgtctgcacatcttcctgcagatcgcagaggcagtggagtttcttcacagtaaaggactgatgcacagggacctcaagccatccaacatattctttacaatggatgatgtggtcaaggttggagactttgggttagtgactgcaatggaccaggatgaggaagagcagacggttctgaccccaatgccagcttatgccagacacacaggacaagtagggaccaaactgtatatgagcccagagcagattcatggaaacagctattctcataaagtggacatcttttctttaggcctgattctatttgaattgctgtatccattcagcactcagatggagagagtcaggaccttaactgatgtaagaaatctcaaatttccaccattatttactcagaaatatccttgtgagtacgtgatggttcaagacatgctctctccatcccccatggaacgacctgaagctataaacatcattgaaaatgctgtatttgaggacttggactttccaggaaaaacagtgctcagacagaggtctcgctccttgagttcatcgggaacaaaacattcaagacagtccaacaactcccatagccctttgccaagcaattagccttaagttgtgctagcaaccctaataggtgatgcagataatagcctacttcttagaatatgcctgtccaaaattgcagacttgaaaagtttgttcttcgctcaatttttttgtggactactttttttatatcaaatttaagctggatttgggggcataacctaatttgagccaactcctgagttttgctatacttaaggaaagggctatctttgttctttgttagtctcttgaaactggctgctggccaagctttatagccctcaccatttgcctaaggaggtagcagcaatccctaatatatatatatagtgagaactaaaatggatatatttttataatgcagaagaaggaaagtccccctgtgtggtaactgtattgttctagaaatatgctttctagagatatgatgattttgaaactgatttctagaaaaagctgactccatttttgtccctggcgggtaaattaggaatctgcactattttggaggacaagtagcacaaactgtataacggtttatgtccgtagttttatagtcctatttgtagcattcaatagctttattccttagatggttctagggtgggtttacagctttttgtacttttacctccaataaagggaaaatgaagctttttatgtaaattggttgaaaggtctagttttgggaggaaaaaagccgtagtaagaaatggatcatatatattacaactaacttcttcaactatggactttttaagcctaatgaaatcttaagtgtcttatatgtaatcctgtaggttggtacttcccccaaactgattataggtaacagtttaatcatctcacttgctaacatgtttttatttttcactgtaaatatgtttatgttttatttataaaaattctgaaatcaatccatttgggttggtggtgtacagaacacacttaagtgtgttaacttgtgacttctttcaagtctaaatgatttaataaaactttttttaaatta

SEQ ID NO: 549939 - DNA, 2503 bp, Homo sapiens
  misc_feature (782)..(782): n is a, c, g, or t
ttttttagaaggaatgaatggaatgtgatgttctgtatctcacattgcatgtttttatttaatttgtatgttgttttgttgtcatttggtaagtggccttattacagttgaagctttttaaacaaagggtgcagttcaggtacttgaatcaatatatattcactcttacccctttgtatttctcccacttttagcacagactggccactcagctctcctagcccaatggatgcaccatcagttaaaatacgcagaatggatcctttctctacaaaagaacatattgaaatcatagctccttcaccacaaagaagcaggtctttttcagtagggatttcctgtgaccagacaagttcatctgagagccagttctcaccactggaattctcaggaatggaccatgaggacatcagtgagtcagtggatgcagcatacaacctccaggacagttgccttacagactgtgatgtggaagatgggactatggatggcaatgatgaggggcactcctttgaactttgtccttctgaagcttctccttatgtaaggtcaagggagagaacctcctcttcaatagtatttgaagattctggctgtgataatgcttccagtaaagaagagccgaaaactaatcgattgcatattggcaaccattgtgctaataaactaactgctttcaagcccaccagtagcaaatcttcttctgaagctacattgtctatttctcctccaagaccaaccactttaagtttagatctcactaaaaacaccacagaaaaacnccagcccagttcaccaaaggtgtatctttacattcaaatgcagctgtgcagaaaagaaaacctcaaagactggatgaatggacgatgtaccatagaggagagagagaggagcgtgtgtctgcacatcttcctgcagatcgcagaggcagtggagtttcttcacagtaaaggactgatgcacagggacctcaagccatccaacatattctttacaatggatgatgtggtcaaggttggagactttgggttagtgactgcaatggaccaggatgaggaagagcagacggttctgaccccaatgccagcttatgccagacacacaggacaagtagggaccaaactgtatatgagcccagagcagattcatggaaacagctattctcataaagtggacatcttttctttaggcctgattctatttgaattgctgtatccattcagcactcagatggagagagtcaggaccttaactgatgtaagaaatctcaaatttccaccattatttactcagaaatatccttgtgagtacgtgatggttcaagacatgctctctccatcccccatggaacgacctgaagctataaacatcattgaaaatgctgtatttgaggacttggactttccaggaaaaacagtgctcagacagaggtctcgctccttgagttcatcgggaacaaaacattcaagacagtccaacaactcccatagccctttgccaagcaattagccttaagttgtgctagcaaccctaataggtgatgcagataatagcctacttcttagaatatgcctgtccaaaattgcagacttgaaaagtttgttcttcgctcaatttttttgtggactactttttttatatcaaatttaagctggatttgggggcataacctaatttgagccaactcctgagttttgctatacttaaggaaagggctatctttgttctttgttagtctcttgaaactggctgctggccaagctttatagccctcaccatttgcctaaggaggtagcagcaatccctaatatatatatatagtgagaactaaaatggatatatttttataatgcagaagaaggaaagtccccctgtgtggtaactgtattgttctagaaatatgctttctagagatatgatgattttgaaactgatttctagaaaaagctgactccatttttgtccctggcgggtaaattaggaatctgcactattttggaggacaagtagcacaaactgtataacggtttatgtccgtagttttatagtcctatttgtagcattcaatagctttattccttagatggttctagggtgggtttacagctttttgtacttttacctccaataaagggaaaatgaagctttttatgtaaattggttgaaaggtctagttttgggaggaaaaaagccgtagtaagaaatggatcatatatattacaactaacttcttcaactatggactttttaagcctaatgaaatcttaagtgtcttatatgtaatcctgtaggttggtacttcccccaaactgattataggtaacagtttaatcatctcacttgctaacatgtttttatttttcactgtaaatatgtttatgttttatttataaaaattctgaaatcaatccatttgggttggtggtgtacagaacacacttaagtgtgttaacttgtgacttctttcaagtctaaatgatttaataaaactttttttaaatta

SEQ ID NO: 549940 - DNA, 273 bp, Homo sapiens
  misc_feature (177)..(177): n is a, c, g, or t
cgccacatctgtgttatatactgtgttcttataataaagtaagatagagaaagggaaatgttatcaaaaaagtcggaagggggagaaaatctacacactattcattaggtgggagtggggcacgatcaaggtctccatcctcgtcgtcttcacgtcaagtgggctgaggaggagcanaaggaggaggaactggtcttgctgtctcaagaacggccgtggggggggaaatccaagtattactggaggaacatgggttcacttggaaacatggaa

SEQ ID NO: 549941 - DNA, 677 bp, Homo sapiens
actctgcaagattgcaaatcattactgcactatgtctcagggacccatatgcggccgttcaacctcacgcgacttgtagagcacctggtcctagccaacttactgcctgtatagaatcagcatggacagcacatggaacatgcactgcacacacgctgcgtttgtgtcatgctaggtacctgcgcaactgaaatagatagtacacatatgtggtgtggcgtgatggactacctgtcatttgagggaagacccacctgtagggaggattacgagagactcgaaactgagaagatcattagtgtttacttttcatgtcactgagaggtacaacagagggcgccgcactatgtgactgaaccgctgtcatgagcacagtgtcaaagacacatcctttatattggtgacattgagacatgcccttaagagccaagggcagccacgtatggggtccatacgctgctatctgctgtatctaatggctgctatgctgacaggccttttgggcctactctagggcagacactgacgcagatcgccttatctcagtgccttgacatgtcacagggcgcctgacccctatggggagactggagagaatcctcccaggctcaaagataattgtcttttgttcctatcacactttaccagaacttttggtcttttggggcccgccctgt

SEQ ID NO: 549942 - DNA, 1886 bp, Homo sapiens
  misc_feature (165)..(165): n is a, c, g, or t
tttgctactggtgggcttgaaagcagttagtttattagcacaatggttgccaatatgcaatcgattagttttcggctcttctttactggaagctacattgtctatttctcctccaagaccaaccactttaagtttagatctcactaaaaacaccacagaaaaacnccagcccagttcaccaaaggtgtatctttacattcaaatgcagctgtgcagaaaagaaaacctcaaagactggatgaatggacgatgtaccatagaggagagagagaggagcgtgtgtctgcacatcttcctgcagatcgcagaggcagtggagtttcttcacagtaaaggactgatgcacagggacctcaagccatccaacatattctttacaatggatgatgtggtcaaggttggagactttgggttagtgactgcaatggaccaggatgaggaagagcagacggttctgaccccaatgccagcttatgccagacacacaggacaagtagggaccaaactgtatatgagcccagagcagattcatggaaacagctattctcataaagtggacatcttttctttaggcctgattctatttgaattgctgtatccattcagcactcagatggagagagtcaggaccttaactgatgtaagaaatctcaaatttccaccattatttactcagaaatatccttgtgagtacgtgatggttcaagacatgctctctccatcccccatggaacgacctgaagctataaacatcattgaaaatgctgtatttgaggacttggactttccaggaaaaacagtgctcagacagaggtctcgctccttgagttcatcgggaacaaaacattcaagacagtccaacaactcccatagccctttgccaagcaattagccttaagttgtgctagcaaccctaataggtgatgcagataatagcctacttcttagaatatgcctgtccaaaattgcagacttgaaaagtttgttcttcgctcaatttttttgtggactactttttttatatcaaatttaagctggatttgggggcataacctaatttgagccaactcctgagttttgctatacttaaggaaagggctatctttgttctttgttagtctcttgaaactggctgctggccaagctttatagccctcaccatttgcctaaggaggtagcagcaatccctaatatatatatatagtgagaactaaaatggatatatttttataatgcagaagaaggaaagtccccctgtgtggtaactgtattgttctagaaatatgctttctagagatatgatgattttgaaactgatttctagaaaaagctgactccatttttgtccctggcgggtaaattaggaatctgcactattttggaggacaagtagcacaaactgtataacggtttatgtccgtagttttatagtcctatttgtagcattcaatagctttattccttagatggttctagggtgggtttacagctttttgtacttttacctccaataaagggaaaatgaagctttttatgtaaattggttgaaaggtctagttttgggaggaaaaaagccgtagtaagaaatggatcatatatattacaactaacttcttcaactatggactttttaagcctaatgaaatcttaagtgtcttatatgtaatcctgtaggttggtacttcccccaaactgattataggtaacagtttaatcatctcacttgctaacatgtttttatttttcactgtaaatatgtttatgttttatttataaaaattctgaaatcaatccatttgggttggtggtgtacagaacacacttaagtgtgttaacttgtgacttctttcaagtctaaatgatttaataaaactttttttaaatta

SEQ ID NO: 549943 - DNA, 3349 bp, Homo sapiens
  misc_feature (554)..(554): n is a, c, g, or t
  misc_feature (624)..(624): n is a, c, g, or t
  misc_feature (633)..(634): n is a, c, g, or t
  misc_feature (1435)..(1435): n is a, c, g, or t
tgcagtcatcagtcagaatttcagaaaagtttccttcaagtcccaaggctttggaatctgtcactaatgaaaacgcaattattcctttaccaacaatcaaatggaaacccttaattcattctccttccagaactcctgtcttggtaggatctgatgaatttgacaaatgtctcagtaatgataagttttctcatgaagaatatagtaatggtgcactttcaatcttgcagtatccatatgataatggttattatctaccatactacaagagggagaggaacaaacgaagcacacagattacagtcagattcctcgacaacccacattacaacaagaatatccgcaaaaaggatcctgttcttcttttacactggtggaaagaaatagttgcaacgattttgttttgtatcatagcaacaacgtttattgtgcgcaggcttttccatcctcatcctcacaggcaaaggaaggagtctgaaactcagtgtcaaactgaaaataaatatgattctgtaagtggtgaagccaatgacagtagctggaatgacataaanaaactctggatatatatcacgatatctaactgattttgagccaattcaatgcctgggacgtggtggcttnggagttgtnnttgaagctaaaaacaagtagatgactgcaattatgctatcaagaggatccgtctccccaatagggaattggctcgggaaaaggtaatgcgagaagttaaagccttagccaagcttgaacacccgggcattgttagatatttcaatgcctggctcgaagcaccaccagagaagtggcaagaaaagatggatgaaatttggctgaaagatgaaagcacagactggccactcagctctcctagcccaatggatgcaccatcagttaaaatacgcagaatggatcctttctctacaaaagaacatattgaaatcatagctccttcaccacaaagaagcaggtctttttcagtagggatttcctgtgaccagacaagttcatctgagagccagttctcaccactggaattctcaggaatggaccatgaggacatcagtgagtcagtggatgcagcatacaacctccaggacagttgccttacagactgtgatgtggaagatgggactatggatggcaatgatgaggggcactcctttgaactttgtccttctgaagcttctccttatgtaaggtcaagggagagaacctcctcttcaatagtatttgaagattctggctgtgataatgcttccagtaaagaagagccgaaaactaatcgattgcatattggcaaccattgtgctaataaactaactgctttcaagcccaccagtagcaaatcttcttctgaagctacattgtctatttctcctccaagaccaaccactttaagtttagatctcactaaaaacaccacagaaaaacnccagcccagttcaccaaaggtgtatctttacattcaaatgcagctgtgcagaaaagaaaacctcaaagactggatgaatggacgatgtaccatagaggagagagagaggagcgtgtgtctgcacatcttcctgcagatcgcagaggcagtggagtttcttcacagtaaaggactgatgcacagggacctcaagccatccaacatattctttacaatggatgatgtggtcaaggttggagactttgggttagtgactgcaatggaccaggatgaggaagagcagacggttctgaccccaatgccagcttatgccagacacacaggacaagtagggaccaaactgtatatgagcccagagcagattcatggaaacagctattctcataaagtggacatcttttctttaggcctgattctatttgaattgctgtatccattcagcactcagatggagagagtcaggaccttaactgatgtaagaaatctcaaatttccaccattatttactcagaaatatccttgtgagtacgtgatggttcaagacatgctctctccatcccccatggaacgacctgaagctataaacatcattgaaaatgctgtatttgaggacttggactttccaggaaaaacagtgctcagacagaggtctcgctccttgagttcatcgggaacaaaacattcaagacagtccaacaactcccatagccctttgccaagcaattagccttaagttgtgctagcaaccctaataggtgatgcagataatagcctacttcttagaatatgcctgtccaaaattgcagacttgaaaagtttgttcttcgctcaatttttttgtggactactttttttatatcaaatttaagctggatttgggggcataacctaatttgagccaactcctgagttttgctatacttaaggaaagggctatctttgttctttgttagtctcttgaaactggctgctggccaagctttatagccctcaccatttgcctaaggaggtagcagcaatccctaatatatatatatagtgagaactaaaatggatatatttttataatgcagaagaaggaaagtccccctgtgtggtaactgtattgttctagaaatatgctttctagagatatgatgattttgaaactgatttctagaaaaagctgactccatttttgtccctggcgggtaaattaggaatctgcactattttggaggacaagtagcacaaactgtataacggtttatgtccgtagttttatagtcctatttgtagcattcaatagctttattccttagatggttctagggtgggtttacagctttttgtacttttacctccaataaagggaaaatgaagctttttatgtaaattggttgaaaggtctagttttgggaggaaaaaagccgtagtaagaaatggatcatatatattacaactaacttcttcaactatggactttttaagcctaatgaaatcttaagtgtcttatatgtaatcctgtaggttggtacttcccccaaactgattataggtaacagtttaatcatctcacttgctaacatgtttttatttttcactgtaaatatgtttatgttttatttataaaaattctgaaatcaatccatttgggttggtggtgtacagaacacacttaagtgtgttaacttgtgacttctttcaagtctaaatgatttaataaaactttttttaaattaaaaaaaaaaaaaaaaaaaaaaaaaaattttggggcgcctgggcccctgggaaaggtttttaacccctccggttgggcggcggggccatgggtattggtgaacctgtgccaaggggtcccaagagaaacctgggcggacattggttggtccccccaataaaaagccccggggaccggggggttggaacaatccg

SEQ ID NO: 549944 - DNA, 1692 bp, Homo sapiens
ctcacctcaggggtagtcgagcagatttgctggctcccacaaacttttttagcatggcaagtctccaggtttccgaggggcctgttttactgatgcatatctcagagctatacctgggctttccttctgtaatgctgagtagtttaattactcttggtgtagtagtgaagaaaagagacttgggagattaactctttgctaacatttttacacatgtacttgcatttaaaccaagaagtgactaagtaaactttgggattcaataatgctgtaatatcaactgtactgtctctgtgttaatttcttaaacttttctttatgtgggatttcagattcatggaaacagctattctcataaagtggacatcttttctttaggcctgattctatttgaattgctgtatccattcagcactcagatggagagagtcaggaccttaactgatgtaagaaatctcaaatttccaccattatttactcagaaatatccttgtgagtacgtgatggttcaagacatgctctctccatcccccatggaacgacctgaagctataaacatcattgaaaatgctgtatttgaggacttggactttccaggaaaaacagtgctcagacagaggtctcgctccttgagttcatcgggaacaaaacattcaagacagtccaacaactcccatagccctttgccaagcaattagccttaagttgtgctagcaaccctaataggtgatgcagataatagcctacttcttagaatatgcctgtccaaaattgcagacttgaaaagtttgttcttcgctcaatttttttgtggactactttttttatatcaaatttaagctggatttgggggcataacctaatttgagccaactcctgagttttgctatacttaaggaaagggctatctttgttctttgttagtctcttgaaactggctgctggccaagctttatagccctcaccatttgcctaaggaggtagcagcaatccctaatatatatatatagtgagaactaaaatggatatatttttataatgcagaagaaggaaagtccccctgtgtggtaactgtattgttctagaaatatgctttctagagatatgatgattttgaaactgatttctagaaaaagctgactccatttttgtccctggcgggtaaattaggaatctgcactattttggaggacaagtagcacaaactgtataacggtttatgtccgtagttttatagtcctatttgtagcattcaatagctttattccttagatggttctagggtgggtttacagctttttgtacttttacctccaataaagggaaaatgaagctttttatgtaaattggttgaaaggtctagttttgggaggaaaaaagccgtagtaagaaatggatcatatatattacaactaacttcttcaactatggactttttaagcctaatgaaatcttaagtgtcttatatgtaatcctgtaggttggtacttcccccaaactgattataggtaacagtttaatcatctcacttgctaacatgtttttatttttcactgtaaatatgtttatgttttatttataaaaattctgaaatcaatccatttgggttggtggtgtacagaacacacttaagtgtgttaacttgtgacttctttcaagtctaaatgatttaataaaactttttttaaatta

SEQ ID NO: 549945 - DNA, 140 bp, Homo sapiens
ccatgatcagggtcgaatctgggggtcctggtccgctccccttggactaggtgtcaagcctcaaggttaagatttcgaaaggaaattcttacgtgaaaaaaatattgctgagactttttcttctgggcccgctttaattt

SEQ ID NO: 549946 - DNA, 83 bp, Homo sapiens
gctcgacagagaagaaggtctttgggatcgtgctcccatgcaggtcctggccaacgtggctacatcatcatcgagtcccgcga

SEQ ID NO: 549947 - DNA, 1376 bp, Homo sapiens
tataaattttccatttgatagatgtacaacctcttagtcattttgttagagtatcaaaaaatattttcatgttgtatgtcaaaataaacttaataagtgatactttttttctttttagaccttaactgatgtaagaaatctcaaatttccaccattatttactcagaaatatccttgtgagtacgtgatggttcaagacatgctctctccatcccccatggaacgacctgaagctataaacatcattgaaaatgctgtatttgaggacttggactttccaggaaaaacagtgctcagacagaggtctcgctccttgagttcatcgggaacaaaacattcaagacagtccaacaactcccatagccctttgccaagcaattagccttaagttgtgctagcaaccctaataggtgatgcagataatagcctacttcttagaatatgcctgtccaaaattgcagacttgaaaagtttgttcttcgctcaatttttttgtggactactttttttatatcaaatttaagctggatttgggggcataacctaatttgagccaactcctgagttttgctatacttaaggaaagggctatctttgttctttgttagtctcttgaaactggctgctggccaagctttatagccctcaccatttgcctaaggaggtagcagcaatccctaatatatatatatagtgagaactaaaatggatatatttttataatgcagaagaaggaaagtccccctgtgtggtaactgtattgttctagaaatatgctttctagagatatgatgattttgaaactgatttctagaaaaagctgactccatttttgtccctggcgggtaaattaggaatctgcactattttggaggacaagtagcacaaactgtataacggtttatgtccgtagttttatagtcctatttgtagcattcaatagctttattccttagatggttctagggtgggtttacagctttttgtacttttacctccaataaagggaaaatgaagctttttatgtaaattggttgaaaggtctagttttgggaggaaaaaagccgtagtaagaaatggatcatatatattacaactaacttcttcaactatggactttttaagcctaatgaaatcttaagtgtcttatatgtaatcctgtaggttggtacttcccccaaactgattataggtaacagtttaatcatctcacttgctaacatgtttttatttttcactgtaaatatgtttatgttttatttataaaaattctgaaatcaatccatttgggttggtggtgtacagaacacacttaagtgtgttaacttgtgacttctttcaagtctaaatgatttaataaaactttttttaaatta

SEQ ID NO: 549948 - DNA, 1944 bp, Homo sapiens
  misc_feature (554)..(554): n is a, c, g, or t
  misc_feature (624)..(624): n is a, c, g, or t
  misc_feature (633)..(634): n is a, c, g, or t
tgcagtcatcagtcagaatttcagaaaagtttccttcaagtcccaaggctttggaatctgtcactaatgaaaacgcaattattcctttaccaacaatcaaatggaaacccttaattcattctccttccagaactcctgtcttggtaggatctgatgaatttgacaaatgtctcagtaatgataagttttctcatgaagaatatagtaatggtgcactttcaatcttgcagtatccatatgataatggttattatctaccatactacaagagggagaggaacaaacgaagcacacagattacagtcagattcctcgacaacccacattacaacaagaatatccgcaaaaaggatcctgttcttcttttacactggtggaaagaaatagttgcaacgattttgttttgtatcatagcaacaacgtttattgtgcgcaggcttttccatcctcatcctcacaggcaaaggaaggagtctgaaactcagtgtcaaactgaaaataaatatgattctgtaagtggtgaagccaatgacagtagctggaatgacataaanaaactctggatatatatcacgatatctaactgattttgagccaattcaatgcctgggacgtggtggcttnggagttgtnnttgaagctaaaaacaagtagatgactgcaattatgctatcaagaggatccgtctccccaatagggaattggctcgggaaaaggtaatgcgagaagttaaagccttagccaagcttgaacacccgggcattgttagatatttcaatgcctggctcgaagcaccaccagagaagtggcaagaaaagatggatgaaatttggctgaaagatgaaagcacagactggccactcagctctcctagcccaatggatgcaccatcagttaaaatacgcagaatggatcctttctctacaaaagaacatattgaaatcatagctccttcaccacaaagaagcaggtctttttcagtagggatttcctgtgaccagacaagttcatctgagagccagttctcaccactggaattctcaggaatggaccatgaggacatcagtgagtcagtggatgcagcatacaacctccaggacagttgccttacagactgtgatgtggaagatgggactatggatggcaatgatgaggggcactcctttgaactttgtccttctgaagcttctccttatgtaaggtcaagggagagaacctcctcttcaatagtatttgaagattctggctgtgataatgcttccagtaaagaagagccgaaaactaatcgattgcatattggcaaccattgtgctaataaactaactgtattgttctagaaatatgctttctagagatatgatgattttgaaactgatttctagaaaaagctgactccatttttgtccctggcgggtaaattaggaatctgcactattttggaggacaagtagcacaaactgtataacggtttatgtccgtagttttatagtcctatttgtagcattcaatagctttattccttagatggttctagggtgggtttacagctttttgtacttttacctccaataaagggaaaatgaagctttttatgtaaattggttgaaaggtctagttttgggaggaaaaaagccgtagtaagaaatggatcatatatattacaactaacttcttcaactatggactttttaagcctaatgaaatcttaagtgtcttatatgtaatcctgtaggttggtacttcccccaaactgattataggtaacagtttaatcatctcacttgctaacatgtttttatttttcactgtaaatatgtttatgttttatttataaaaattctgaaatcaatccatttgggttggtggtgtacagaacacacttaagtgtgttaacttgtgacttctttcaagtctaaatgatttaataaaactttttttaaatta

SEQ ID NO: 549949 - DNA, 2064 bp, Homo sapiens
  misc_feature (554)..(554): n is a, c, g, or t
  misc_feature (624)..(624): n is a, c, g, or t
  misc_feature (633)..(634): n is a, c, g, or t
  misc_feature (1435)..(1435): n is a, c, g, or t
  misc_feature (1894)..(1894): n is a, c, g, or t
  misc_feature (1976)..(1976): n is a, c, g, or t
  misc_feature (2003)..(2003): n is a, c, g, or t
  misc_feature (2013)..(2013): n is a, c, g, or t
  misc_feature (2017)..(2017): n is a, c, g, or t
  misc_feature (2020)..(2020): n is a, c, g, or t
  misc_feature (2030)..(2030): n is a, c, g, or t
  misc_feature (2033)..(2033): n is a, c, g, or t
tgcagtcatcagtcagaatttcagaaaagtttccttcaagtcccaaggctttggaatctgtcactaatgaaaacgcaattattcctttaccaacaatcaaatggaaacccttaattcattctccttccagaactcctgtcttggtaggatctgatgaatttgacaaatgtctcagtaatgataagttttctcatgaagaatatagtaatggtgcactttcaatcttgcagtatccatatgataatggttattatctaccatactacaagagggagaggaacaaacgaagcacacagattacagtcagattcctcgacaacccacattacaacaagaatatccgcaaaaaggatcctgttcttcttttacactggtggaaagaaatagttgcaacgattttgttttgtatcatagcaacaacgtttattgtgcgcaggcttttccatcctcatcctcacaggcaaaggaaggagtctgaaactcagtgtcaaactgaaaataaatatgattctgtaagtggtgaagccaatgacagtagctggaatgacataaanaaactctggatatatatcacgatatctaactgattttgagccaattcaatgcctgggacgtggtggcttnggagttgtnnttgaagctaaaaacaagtagatgactgcaattatgctatcaagaggatccgtctccccaatagggaattggctcgggaaaaggtaatgcgagaagttaaagccttagccaagcttgaacacccgggcattgttagatatttcaatgcctggctcgaagcaccaccagagaagtggcaagaaaagatggatgaaatttggctgaaagatgaaagcacagactggccactcagctctcctagcccaatggatgcaccatcagttaaaatacgcagaatggatcctttctctacaaaagaacatattgaaatcatagctccttcaccacaaagaagcaggtctttttcagtagggatttcctgtgaccagacaagttcatctgagagccagttctcaccactggaattctcaggaatggaccatgaggacatcagtgagtcagtggatgcagcatacaacctccaggacagttgccttacagactgtgatgtggaagatgggactatggatggcaatgatgaggggcactcctttgaactttgtccttctgaagcttctccttatgtaaggtcaagggagagaacctcctcttcaatagtatttgaagattctggctgtgataatgcttccagtaaagaagagccgaaaactaatcgattgcatattggcaaccattgtgctaataaactaactgctttcaagcccaccagtagcaaatcttcttctgaagctacattgtctatttctcctccaagaccaaccactttaagtttagatctcactaaaaacaccacagaaaaacnccagcccagttcaccaaaggtgtatctttacattcaaatgcagctgtgcagaaaagaaaacctcaaagactggatgaatggacgatgtaccatagaggagagagagaggagcgtgtgtctgcacatcttcctgcagatcgcagaggcagtggagtttcttcacagtaaaggactgatgcacagggacctcaagccatccaacatattctttacaatggatgatgtggtcaaggttggagactttgggttagtgactgcaatggaccaggatgaggaagagcagacggttctgaccccaatgccagcttatgccagacacacaggacaagtagggaccaaactgtatatgagcccagagcaggtgagtttttcagacctttacttactagcacagcagcagatgtacctgatgaatctcttctcatgttttcattaaaatacccagtaatctaaaacccngtaagtctgaaaattatgaaaactggcagtagtgttccagtagtggaatagtgacacagctaagatgtagtttctacaaccngaattggggctggattaagaaaatacnacacataaantgcnctnaccccctgancangcacctgacagcaaccaggaatttggaaaga

SEQ ID NO: 549950 - DNA, 419 bp, Homo sapiens
  misc_feature (308)..(308): n is a, c, g, or t
  misc_feature (335)..(335): n is a, c, g, or t
  misc_feature (349)..(349): n is a, c, g, or t
  misc_feature (384)..(384): n is a, c, g, or t
  misc_feature (398)..(398): n is a, c, g, or t
ggaggctgaggctggagtgcagtggtgtgatctcggctcactgcaacctctgcctcccaggttccagcaattctcctgcctcagcctccctagtggctgggatgacaggcgcctgccatcatgcctgactagtttttgtatttttagtagagacggcgtttcaccatgttggccaggctggtctcaaactcctgacctcaggtgatccgcctacctcagcctcccaaagtgctgggattacaggcgtgatccaccacacctggcccttgcaatcttctactttaaggtttgcagagataaaccaatanatccacaccgtacatctgcaatatganttcaagaaaggaantagtaccttcaatacttaaaaatagtcttccacanaaaatactttattnctgatctatacaaattttcag

SEQ ID NO: 549951 - DNA, 837 bp, Homo sapiens
gccctgcactcgtcgctggagctcacgggagaggatccggacagtgcatagtggggctggaccgcgaggtggtcagcggtgtacaatctgaccctgcaaggtggcggacatgtctggagacggcctcacagccactgcctcagccatcatcacccgttgatgacatcaatgacaatgcacccacgagttcagcagggatgagtacattcatggaggccatagaggccgtcagctggagtggatgtgggacgcctggaagtggaggacaagggacctgccatggctccccaaactggtgtggccaggttcaccatcctggaaggcgaccccgatgggcagttcacacataccgcacgggacccctaagaacaacgagggtgttctcgtccattgtgaaggccctggacatatgagagctgtgcaacacataacagaacatccaacacgtagtcgagtagcacgaacatgacgggccccgctagacaaggccggaattgcccataagcgggctgaagacggaggaccagggccaaagggtccgacagtagcatagatgcaaaggacaagcaaacgaaggcacccccaggataccacggaagaaaaccacaaatttcaggaaccaagaacttagcacgacaaggaggaacacccccaagaggaacatcattgggataggccaaactattctccttgaacccgggaaccccatgaaacacaagaagccaacgatggcagaagagcatcaggctaacatcacaagggaccataacgaacaccggaaaaaactggcttgcaaagatggacaccaagccaactggcccgcgatcaagaaccaag

SEQ ID NO: 549952 - DNA, 353 bp, Homo sapiens
  misc_feature (49)..(49): n is a, c, g, or t
  misc_feature (51)..(52): n is a, c, g, or t
tactctaagcagaagtaactcagaaatgacacatgtatgtctcactcgntnnaagtgagagtagctatgaggacgcaaaggcataaaaataatacaatggactttggggacttaggggaaagggtgggaggtaggtgaggggtaaaagactgcacattgggtgccatgtactctatttaggtgatgagtgctgcggcaaaatctcagaaatcaccactcactaaagaacttattcatgtaaccaaacaccacctgttccccaaaaacctattaaaattaaaaaataaaataacgtaaagtccaggtgcagtggcccatgcctgtaatcccagcactttggaaggctgaggcgg

SEQ ID NO: 549953 - DNA, 126 bp, Homo sapiens
gcactgaacttcctcttcatgtgaacctgggtattggttctctcagcactcgcatgtcgcctgctcttcatgtgaaatggtggcgtcagtggaacccccccccgcactgggaaccccccccggact

SEQ ID NO: 549954 - DNA, 715 bp, Homo sapiens
taaggtttggagggggaatgctgggagatggtaaggggtatggaaacatatcatataagtaaggtctagggtgaggggtaggaagttttttcataggagggtggttatggaagttgggtccgtaagcggaatcgggggtatgctggtgtccgaattcataaaaaaccacgggaggttaaaatgtagggttctgggtgagacaaaattattgttggtggtgaaatgttcatgggagaaatgtgtgcgtctcacatatgtgtgtgtggtctccataggaaagaatgtgtggtaggtgggtagagaggtgtgtgttatatatatatatatatataatgtgtgtgtgtggtgtgtatatctcgcgctatatgttgaaaaacatatagaggcggacacaaggggggaccgctgtgcgtgcgcgataatatctctcgcaaagatttgtgttgtgaaagcaccccggctgagagaaaactataagatgtaatcgcggggaacctcctctccccccttttctgctgcggcggcccagaaggtgcggcatctcccacaaagagggggggcggcgtcatccgaggtgtaggtgggggtctacttctcctgctggagcccacttacgtgctgcggtgacggaagacatattaaaacacatcattcccatataatattatcatggtgggggcccccacaaggggggggacctcccataatgacaacg

SEQ ID NO: 549955 - DNA, 381 bp, Homo sapiens
gaaccccctggggttaaatttaatctctccccgaatatgggaagttttttagttgcatatgaaacacccaaggaagccccggctcctatggagggacccaatggccaggatttgatggggcaccccctcagcgttgattggtgtttttttcggggtcccccaaaaggcaaaaggaaagggggccgaaaaccccccaaaagtccagaccggagaggttgctgccaggtcctttgttgtccaggggtttttttcaagattccatttggccacccacccttgggcaaaaagggctggggtggaacctgcgggggttatatttaatctctccccggaaaagggtagtatttgagttgcgaataaatgttccctttttgtttttta

SEQ ID NO: 549956 - DNA, 322 bp, Homo sapiens
gacacagaatctcactctgttgcccaggctggagtgcagtggcacgatcctttagcctcgatctgctggactcaacgatcctcccacctcagcctctcaagtagctgggaccacaggcatgcgctactgtgctgggctgattttttaattttttagagatgttatcccactatgttgcttaagttggtcttgaattcctggactcaagtgttcctactgcctcagcctcccaaagtgttggaattacagatgtaagccaccgtgcccagctctgatttacgtgtatttctgtccccttctgtcgtcttctcaaagccgtata

SEQ ID NO: 549957 - DNA, 209 bp, Homo sapiens
atggatccgtctagttttcggccgcctactagctacgtatactggcgtgcgggagaagacagacatgaaggggggttcttgggacctttagttgtgcctctccttctggatgccccgtcactgtggtcgtgcactcatgtttcccctcactaatagcatatggcgtgtgtttccaccctcgataatattaacactgagtcttgggcaat

SEQ ID NO: 549958 - DNA, 397 bp, Homo sapiens
gcagcatgaacaaggtggacactcactgacctgtcacaaggttgccccacaaaactttggggcccatgtctgaatggattgccagagccgactgatctctcccttcgcccagatgccggcatcctaagactggaatgccgcacaggacctggagaaatacatggtgtgaacagcttgtctgaggatgagaagcctgactgcctcatgcatgacgatgagtccacagtccactgcaccaacatcctcccgggcctaaatgaccagcggtaaaaagatattctatgtgacatgactttgattggcggaaggaaggattcccggtcaaacggctgtgcatgccccaagcatgaaaaattttggccggccactgtggcccgcctaaatggatgggtcgccc

SEQ ID NO: 549959 - DNA, 1034 bp, Homo sapiens
agtgccctctgtccactgctctgggccattccccaatcccccatcccattgagcccctaactcagaatctgtgcgaccaggggcccttccctacccacagctaacactcttctggaccaggagagccaacaagatacccactacctaccatgagtgctacacgacaggatggggcccagagcttgtgcacgggcactgcgcgatggcactgctgtatgctgcatggctgcctaggagaacaccacaaagtaaaggggcgtaccaggggccagcgaccgagcgctgggaacctacccctgagctaacgcatggtcgtagcacccggggtgactacaactggtaccaattggccaaagaacataacaaaggacactagtcgcaacacagggacagtaacagaagcagacgctggcaactccatctaacccagtgacacccccacgcgcaggcaaagacaaaggcctacacaaaggacaactacgcgacattgcgcgcagcctggactcccaggcgcagctaacacagccccaagaacactacagacgagacaagggcgtgacaggctacggggctgggacagactacggacgcagggccgccgctgtgcgccacgaacccaacggccaactgcagtggacaagcccaggaatgaactaccaagggcaagactgacaccatgacaaacagaagagaagaactgccgaacccaacgctagaaacagaagaaagccaaaaaggcccgaggaaagcacaagcgacacaacaccagcgcgcacactagcacacacaacaccaggctctcatacacaccacacacaacacccaaacgaagaaacccaccattccacccaacataaactaccgatataaacgcattctccacacactatcttattattctttatcactctttctactaaccaaacacaaacaaccaacacacccaactcaccacctaaccataaccaccacacacacacacacccacctcacatacgaacacaaccacataacacatcacatccacaccaacc

SEQ ID NO: 549960 - DNA, 1423 bp, Homo sapiens
  misc_feature (334)..(334): n is a, c, g, or t
tctccatttaattttttaaagggggtctcaaaatttcgtggtggacaaatttttggggccaaggtgggtgtcccattataaaaaggtacgtggatgtttaaaaaacataattaactataaaactggcgcacacgcgcaacaaaaagaaaaccaaagggggtccacaaaaacattcctccttctcctatctctgtgagagagggtcttacacgaagtgcctgtggggtatactcgattatacaccgagtctcttttatactcatactataaacacttatagagatgtggccaaaagtgtgaaaaacaagagagagtgttctgtggagacacgcgngttcttctcaccaaccaagtgtagattataagagaggtggtggggggggcgcgagggatatatataggggagatataaatatattctacattatatagcgcctctctctgtagagcgctttctcgtgggcagacgagagacactgtgtggggagcacctgtgtgtcgacagggctctcacaaagacacagcgcctctctcctgtgtgtgctcacccagcgggagtatgtgtgagagtgacaacacacccagacacgcgcgcaacagtgtgggtgctgtggtctctcaaatactatcgcacagcaacacagaggcacacagaggggacacctcacagagagtggtggggcaatgagctctgtgagagaaagagctgctctctcacacacaacacacacgaggtgggctgtgtcgcacagggagagaccacagaatatctcagacacacaatggtggacagagacatctcacgcacaagagaagctgtctcaaagagcacatgtgtgtagggcgggcccatctctgtctcccaggcgtgtctgtttaaacccccagaggcagccgggggagataatcaaaatcttgtatcccgctttttcgagcgctctcaaagcaccacaaaacttgctgcccatagtagccaaacggggtggaaaacccccagggggtgtgggcacacaactcctccaagaatacaccggagggggggagacaaaatatcaccgcgggagacgcccataaaatatggggccccgtggaaagtggtgcctccacgggaagataaatccacccctggaaaacccgagggagaaaaccccacagagtggattccccaacggggggggggggcacaccaacgataggggcggtgggaccaccacgaggaaatgctgttgcgcccagcgagcaggagaacaaactccctgagagaaccagagaagccagatctcctggtgagaacttggtgaagccacacaatagtgtgtccccacgggaaaaaaaacactagctacaagaggcccaggggggcgcatttagaaacgcaattaaacatcccagcagtgaacctatgagggggtcacaagggtgc

SEQ ID NO: 549961 - DNA, 352 bp, Homo sapiens
gggggggtttttttgggccccccaaaaagggggttttccccccccctttccccccccccccctttggggggtggggggggggggtttttcgggggggtttttttttccccgcccttttttttggccccccccccccggggttttcccccccccttttttttccccccctttcccccccggggccttttccccttcgggggtttgggttggcccttgggcgggggacccttttttccccgggggcccctttttcctttggccttttttggggtttttttttaacccggttttgggcccgggccgggttgtcccgggtttgtttttccccgggttttttgccccccggggtcca

SEQ ID NO: 549962 - DNA, 564 bp, Homo sapiens
ctcgcgatctagaactagtcgtggcacacgcccatagttccagctactcaggaggctgaggcaggaaaatcgcttgaacccaggaggcggaagctgcggtgagccaagatcaagccactacactgcagcctgggcaacagagccagactccatctcaaaaaaaaaaaaaaaaaaaagggttgggcaccgggggttcaggccttgtattcttagcactttgggagaggccaagggccagcggggtcacgaagggtcagggtggtccggagaccagccttgggccacgcttgttggaaacccttgtctctactaaaatatacaaaatttacgccagggcttgggtggcgcaccttggccttggtggatatcccaagttacactccaggaaggctggaggcgaggagaatatcccctggaaatccggggaaggcggaagtgttgcgcacgcgaagtctggagtatcttggccaatctggccctccaagcctgggcgcacacagagcaagagacttcccggtcctcacaaacaatataaaaacaacaaaatatcaaacaagaggcggg

SEQ ID NO: 549963 - DNA, 86 bp, Homo sapiens
  misc_feature (8)..(8): n is a, c, g, or t
gcccacgngaacagcctgcggggcattgtcaagcacctggaagtgatgtcagaccaggcgatcatggagctgaacctgcccacggg

SEQ ID NO: 549964 - DNA, 950 bp, Homo sapiens
  misc_feature (941)..(941): n is a, c, g, or t
tctccctgccatgtggttgacgctaagctctgcctcgtctgctacatgctagttgcgtgctgcacgctgctgggcccgtctacttggtcattgtgctcgtgctggcctatgctcgggctgtacacggcttacgaacgaatcttatagtacacatgatgtatgtacccgtgcatgccccttgtgaactccctcgtgagtgacacttcgatgcaaccgcttgtctctcatgtgttcattgtaccgttggtggcacgcagatctggcgtacaccaggggcttcggatattgcccgtctgtgtcttaatcatatggggagggttagatagagtagaagcatatgatgtcgcgtcccaggctgctattgaccgtacaatcgatcgtgactgcgaatgttctagcatatgtgtcagaaggaaggatggcgcaaataaaggtggaatccatgcttagtatcattactaccatatagtgggagtgatctatgtgggggagagctcttagaagaacacaacagaagacttggtccagttaggtggcatgctaaaaggcaccaaatgagggatctatgcagcaggatctgtacaagagtagctggggaattttgatcgggacgttctaaaaaaggagtcgttaatttttaaaaatgtttccacatcttgcttgtgggcggcctgtttggcaattgtatactcgcataacgattgaactggattcgttattagttaaaataatgatacccgtctgtggcagcttgaatttggccagctatgaaccgcaaaaaggcagaagagggtaaaaatgagcggtacaaccgcagggtatgtttgtaacattgggcaactggggtggaacggtcactaaaatttgcgacaaacgggtttgaggacatgtatgcagggaggctagataaatttgtggaaaaaacccgtatataggagctnggagttaaa

SEQ ID NO: 549965 - DNA, 140 bp, Homo sapiens
acgatagaggaacgatatgtagggggaggggacgccctaccgggcttagcgataaagggggaggcaaggaaacaggttcagagcaacctgagtgtgccgaaggacccactgacccattgggaaaatgacagtcctcagaa

SEQ ID NO: 549966 - DNA, 1268 bp, Homo sapiens
gctactcacccatattgacccctcgttccggctgaaagactgtctcgatcaagtaattattcgtcaccggccagagcgaacaccgcagtccactaactcctggcttagataggctagtcgcgtcttcatagcaaatatagcgtactccggaacaagttgaaccagtaaccacaaataggtaggacagatcacatatcgtcagtcagttaactacttcagtagactggctagtatgcatattacacctgctaggaagtagcctcactgtgccacttctgtaggtcgccagtgaggatctaacctgagaaggtcacacacctcatgtttaccatcctgaggcattgcattccattcttcgacaatgtacgaacaatatgtagcaccttcaatcctcaaatctcatataccgagacatctctccctctactcaaaaagtatagtcctaccgtccgtcaacatcctttctcagaattctatagtccacttcgaataagacaggcgccagtatgaccgcgtgggaatgtgatgacgcaatagtctccgaagctacggaccaaaaagtaccgtataagtccttactacttctcaagttaccccagccataggtagtggactagatagctagtgtcctactccgttaacataccatacacaataaatcgaagttcctttatatcttacacagttaatcaagtgagtttaattccctgaaagcataacttgacggctgtagttcctttacatacattcgagacctttttaatcctctcaagcaacactacggatgctctaaataattgattcttcaagcaacccttgaaaatctaaagcttagaccagttgaattaacaaccgctttaaattccaatccaaaccttccttctccccttaagagagagccttgacccccccgcataaaccgggctttttttgccccaaaaagtggggccattattccgaaaagaattttcaccaagaagaaccaataagccttcattcattccccagccaatcattaagccaccattcaacccttccctctaagactttctaacttttctaagcttaagccccttaattcctaattccaaccttcaattcacacgttactcccccattattttatccaacggttaacaactaaatgtacagtgtggaacattttgaaaaaacctacacccattcttccccaaagtcattgccccttaacagctatcccctacgtgttttttcccctttatatttaaaacaacagaaaacaaaacacc

SEQ ID NO: 549967 - DNA, 437 bp, Homo sapiens
gagggagccggggctgggagttctcctgagggaagaggagctggagtaacgggggacgcggcgtgcggcgtggacaaatgagtatacttggacggctttatcggtccaagtattgtgagatcgatattgtacttaatgatggggaaaccaggaaaatggcagaaatgaaaactgaagatggccaagtagaaaaacactatctcttctatgacggagaatctgtttcaggaaaggtcaacctagcctttaagcaacctggaaagaggctagaacaccaaggaattagaatcgaatacgtaggtcaaatagaacttttcaatgacaagagtaatactcatgaattagtaaacctagtgaaagaactagccttacctggagaactgactcagagcagaagttatgatttcgaatttatgcaagttgaaaagccatatgaa

SEQ ID NO: 549968 - DNA, 210 bp, Homo sapiens
tttgctcagaaactaggcttggtcgatggactgccctccagttcaggcgacaggccatgcctttcaagtgcatgcagctcactgactttcatcctcctagtttccgctactgtgcccacctagaagtatgtccgacaacgcctggcagcaaggccgtacttcaagaactccatgtcctgctccggggctaccgagtctcgtacacttcgt

SEQ ID NO: 549969 - DNA, 542 bp, Homo sapiens
  misc_feature (484)..(484): n is a, c, g, or t
  misc_feature (488)..(488): n is a, c, g, or t
cagaaatttaccttttaataaattaaaaaatctaaattttaacctacttgtatgttcggagagtgtttttgtactatattgactacttaaaatagagaatgagactaagaagggaacatttctgttgatacatgttttttaaaagtaattttaagagcattattaggttaatttaatccaattaatgacccaaatgccaaggtaattttaaatttacatttttaataaaagcaacatgttgaaacaagagagggtgagattaacctttttgctaaagtaatttacaagtcaaagacaggaagagatcagagtgaatgtgccttcttaaccagagctacagaatttagtgaataattaaagtaccaactgctttgacctccttgaacttttccaagcaatttctctgtacttctatatatgaatgtcttagccaattttctgctactataacagaatacgacagactgggtaatttaaaaagaanaganatttattttcttcctagttctggaggctgcgaaggcgaaggcatggcactgaca

SEQ ID NO: 549970 - DNA, 867 bp, Homo sapiens
tgtggtggctcatgcctgtaatcccagcactttgggaggccgaggcagacggatcacgaggtcaggagatcgagaccatcctggctaacacggtgaaaccccatctccactaaaaatacaaaatcttagccgggtgtggtggcaggcacctgcagtcccagctactcgggaggaaaatggcatgaacccaggaggcggagcttgcagttgagccgagatcatgccactgcactccagcctgggtgacagagcgagactccatctcaaaacaaaatatttataatgataataataatggttcttctttcacacattatcagaacctaagtctgagagatccaaaaatgtacacagcgttgtataaatctctttattaactgtgggaaatgacacacctagttgtaaagcaaacgggatcaccatacttacacgaaacatattaaccccaccagcttaacagtgctgagtacctatgtaactgagagtcctcaagaccgcaacatactcacaatgctaaaaacttttacaccctaaatacatacccatttacgtgggatctttcgataagcacctatttgaaggcacgcaaccctttaagccagtccatatcgaatacaatggccagactgagggtcgtgtcctcgggggggcacaaacgactagaaacatggcccgccggacagtctggctttaacaagctgacttcaggtgactggttccttagtcggtataacttttagccctcacattgctacctttccatctttggcaacgaatgttactgcatcaattcttaacccgcatctgcacattcgtcactagtaaaggttaagacgcatgggtacagcacacctggtgcttatcacg

SEQ ID NO: 549971 - DNA, 226 bp, Homo sapiens
  misc_feature (20)..(20): n is a, c, g, or t
  misc_feature (23)..(23): n is a, c, g, or t
agaagacagccgcacaacgntcnccggcccaaaaacaaaggcggtgcaagaaatcaagaggcttccttggggatgaagacccccgaggccccggccattctgaattacacaactgcatcattgacaaagaagtttcattaatggcagaaatggataaagttaaagaagaagccatggaaatcctgactgctcgtcagaagaaagcagaagaactaaagaagactcc

SEQ ID NO: 549972 - DNA, 138 bp, Homo sapiens
acacctgcacgggcatgagcctggagggaacactcaccgtgccgggcacgggagctggggggacactcaccgtgccgggcaccttgagctggggggacactcaccacgccgggcaccgggagctgggggttacgagct

SEQ ID NO: 549973 - DNA, 384 bp, Homo sapiens
cataatctatatattattttagtgtttattcaatttaacaatgcaacattagcagacattccatagatatagaaaatacataccacatgcacatatatgtatatatgtatgtatgtgtatttacaaaacttccctctcaagaagataaatattgattcaaaaaggccctttactagctttgggagtgcagacttaagggaaggtagaagccacatgcttcatgatgcaacacactctatgagtcatcaaaactcatttactgtttaatcagaggtacatgttgaatttttaaaacatcttcccagtgttatttttgtttccttttaacaatatggtggattacattaacatctcctaataataaataattgtttcaaccctaaa

SEQ ID NO: 549974 - DNA, 210 bp, Homo sapiens
ttgctaggactacaatgtgtgtgccatcacgcttggctaatttttgtatttttacgtagacgatgaggcatcctcccctatctttctcttccttctgcctcccccgtgcccccagctgctattgtcactgtctctaatgggaatacgcctgggtttgttgcttctctatctgtatttagctgcagtgatcctttacctggtggaagggag

SEQ ID NO: 549975 - DNA, 340 bp, Homo sapiens
atggctagttctgactactaagaaatgttaagaaataggccaagtgcggctgcacgcctataatcctatcactttgggaggcctaggcaggcagatcacctgaggtcaggagttcaagaccagcctggccaacatgaggaaaccccatctctactaaaaagacaaaaaattagctgggcatggtggcatatacctgtaaccccaactacttgggtggctgaggcaggagaattgtttgaacctgggaggcggaggctgcagtgagctgggattacaccattgcattccagcctgggcaacagagcaagactgtctcaaaaaacaaaacgaaacaaaaaaa

SEQ ID NO: 549976 - DNA, 499 bp, Homo sapiens
gtaaccaccactgtactcacaattccgccctgccagcaggttccctcgttaccccctttatgatcaatctcctcgctgacccctctgcaactggcaactgctgattggtttcctatttatagttctgctttttctagaatgttctataggtagaattatatggcctttcacaacagacttctgttacttacaaaaaagtttttgaggctggatgtggtggctcacgcctgtaatcccagcactttgggaggctgaggcaggcagattgctcgagtctgggagttcgagaccagcctgggcaacatggcgaaaccctgtctccaaaaaaatatgaaaaagattagctggggcatggtggtgcacacctgtggtcttcagcttcttcagggagactgaggtgggaggattgcttgagcccaggagacagaggttacatcaaactgagattgcaccactgtactccagcctgggtgacagagtgagatcatgtctcaaaaaa

SEQ ID NO: 549977 - DNA, 252 bp, Homo sapiens
ctgcgttgtcgtgagcagctggaggttgcagtgagccatgatcgtgccactgcactccaacctggtgacagaacaagactccgtctcaaaaaaaaaaaaaaaaaaaagggtaaattggtggctaaaaacccatttccccatttgtccccgggtcccgaaaaaattaattttccccaaaacctcccagggaaattatggtgggcatagggtgctttagaactaagctcttcaccattttttttcctccatgga

SEQ ID NO: 549978 - DNA, 295 bp, Homo sapiens
ccccctagcagtgggataaggcgtcgcgatgccctctatattcagtgcaaaaacgtgctgaagatccgccggcgtgagtgatgaaccaccacaagtaccggaagctggtgaagaacgacgcggttcctgcggaggacggtccaggagggacgcctgagatgcacgccagatcaaggatcgagaaagacctgaggcgcatctggctgaaggcgggccttaaggaagcccccgaaggctggcagaccccccaagatctacctgcgggggcaaatgagtctggcgccgccctttccgg

SEQ ID NO: 549979 - DNA, 819 bp, Homo sapiens
  misc_feature (388)..(388): n is a, c, g, or t
atcgaggaggctgaagaggacgatgaatgaataagaagaagagatgatggtgccaggcatggaaggcaatgaggagcctggactctgacagtggtacaacagcggtggtggccctgatacgagggaagcagttgattgtagccaacgcatgatgattctcgctgtgtggtatcgtcgaggcttggcgaaagctttgatgacagtgtcctatgatcacatagacctagaggatgacagtacgagactagcacgacacgagaatgctggtgcgcgaggctcactcgtggagtgggcgagatcagacgggggtctcaagcctctccaggagccattggggaccacattttatcacgagaagacaagaaccgtgccgagcgtgaggaacagnatgatttgcagtccttccgtgactagtcaatggtgcttgactctcgactgagcagaggcatgcaattcaatggatcattagccctgtgtagtggcgactctggaatgtgactcgagcagccaggagagtggtatgatttcgattcaattcgagagatcagcgcagtcgtgatgataaatggggagcttcgggtagtgtcatccattgtggacgagctgctggatcagtgcctggtgccagacagttctggggatggtacaggctgtgacaacattgagctgcactcatcatggtgcttcaagcccctaaacagagtagagtctccaggcagagagtgggaagcgaaaactacgaggaggtgctcgtctactgagggggctgatgaagatggtgacaggacctaaaatatgaggcacgaatagagtatcgac

SEQ ID NO: 549980 - DNA, 277 bp, Homo sapiens
cgcagcagacacagcacagtagaagtgataatagaaagaagagcattttgatacactaaaaaacagatgctcagtagagacatttaaccttctatttatattattaaacatttaatcatacagtaccttcctacaggatcactggctaatcctgtggtggggtatatactattagaggtattactccccattataactatttccctatatatgcgaaggatcagagctgttcattttctggagaggaaaactgattttgcaagttagagcagctact

SEQ ID NO: 549981 - DNA, 514 bp, Homo sapiens
ttgtgtgtcctaaagcagttgtaaactcttaacactcaatttgagaaagtacaattaattaagaaaaggactagtctaaaagtaggaggttctttgtatatgtaaaaacttgagaagtttaaaaacactttttttatccgaaaattttattagctggtattagataatatccttcatcattttcaaacttatgtattttaatggcttaactaattatctattttttaatttttgtgggtacataggtgcacatatttatggggtatatattttgatacaggcatgcaatgtgaagtaagtacatcatgaaaaatggggtacccatcccctccagcatttatcctttgagttacaaacaaaaatactctaagttatttaaaaatgcacaattaggccaggtgtagtggctcatgcctgtaatcccagcgctctgggaggctgaggcgggcagatcacctgagattgggagtttgagaccaccctggccaacatggagaaaccccgtctctactaa

SEQ ID NO: 549982 - DNA, 437 bp, Homo sapiens
  misc_feature (26)..(26): n is a, c, g, or t
  misc_feature (360)..(360): n is a, c, g, or t
  misc_feature (389)..(389): n is a, c, g, or t
aaattcggccacgagggctggatttnagggagagccataagaaaggataggttatccatggacttggaaaatgggagttttttaactgatcccatgtgtgggtaaaagacccaagttgtggccgggtgcagtggctcacacctgtaatccccagcatgtcagaaggctgaagcaggcagatggcttgagtcccaggagtttaagaccagcctgaccaacatggtgaaacctcatctctaccaaaaatacaaaaacttagctgaccgtggtggcgcgtccctgtagtcccagctacttgggagtctgaggcaagaggatggcttgaaccccggaggtggaggttgcagtgagccgagattngccactgcactccagcctgggcaacagangtgagaccctgtctcaaaaataaagtagttgaaaaaaatattgtccaa

SEQ ID NO: 549983 - DNA, 124 bp, Homo sapiens
atcacgctgactcttcctcttcgtcctcctcttcatcatcctccggaccctccggcatcggtaccagatcctcctcctcttcagaatcggtggcctcctcctggtcttcttcctcctccttaag

SEQ ID NO: 549984 - DNA, 150 bp, Homo sapiens
ccggtcgttctagaggatcccacccacctgctgcagggtgctggcccactctggcagccagatacagctagattgtaatatttaaggtcgaatttcgacctgtggtacacaggctgtgttgtggcttcagtcagcaacctcagcaatctg

SEQ ID NO: 549985 - DNA, 166 bp, Homo sapiens
ttttttttagatggagttttgctgtcgtcacccaggctggagggcatggatgcaatctcagttaacaacaagctccgcctggaaggttcaagtgattctcctgcctcagcctcctgagtagctgggattacaggcaaccacacccagcggaagtatgtagacggcc

SEQ ID NO: 549986 - DNA, 1094 bp, Homo sapiens
gccttcaggcatctcaatcgctgactcattacacgtgatgctctagtgttcagtgtgctctccgctccaaccacactttcaaattttaggttgcaacaccaaccgttacccctgcagatttctctcgaaaatttccttgcctggatagtgtcctcagctatatgagtggtgatgatggattctgtgtggttcgacgacgcaatcgctcactatgtgctacctattgattgagcaaatgaggacgtctgcgcgtgcgtaaatgatactcacatatggcatgacagaactccatggctgtgatgtcaagtaggcgatgacgacttggcatgagttcctgaattctatgatgcccctctgctcacgttacgcatgggctagttctctcactaccccttggcgtctagtcatgtcactcacaacgaaagcaaggccacctggagcaagtagccgccgtgaggagaccgatggacgagcagaactttcctgtggaggtgccttgacctaggcacttgacgttagcgttgaacacgatcgacgcgtaacttctaattctggatgtgagactgaacgagttgacaattaggcctgagggatcacattattggtcttgctacctcatgttaggtgcgtctctgtcacgacaggggttcattaaaagccctttcttatccgacaggctcttattactcaataccatatacacgcttggattccttcaacttggtaattaaatcacgtcctcagtgtgcagttgccctgttatgagtgcgaatgtgagaactgtgttgagaagatggtccgagttggatgctagataatgtgttgagaagaatcttaactaataagaggggttatcgtgtgataagagcatcggttctcgggtctagagaacgctgaaggccccaagttgagtggacgttgttgaaaagtggttgtccgggtactggatgacggagattggtttgtgtggggcaagggggggtagaaaaggccatgggaaaggatcctttggtcatttgcctgagtcttgggggttgttgaataaaacgacggagataaggggggcatcttttggagggggcgagggtttgggg

SEQ ID NO: 549987 - DNA, 255 bp, Homo sapiens
ggcaggttcagaaaggagcatacagaacgaatcctgaagacatctaccccagcaagcctactgatagatgacgtgagcagcggctcctccagtagaaaggagcagcacttcagtgaggttacatcttattacacctatttctactgtcacaccccatcccagaacgaagacagtccctgtgatcaccgcactgcacagacagtaatcccttgctaccagtacaggagcataaatcacttgtgcttcccaataaac

SEQ ID NO: 549988 - DNA, 180 bp, Homo sapiens
  misc_feature (2)..(2): n is a, c, g, or t
  misc_feature (96)..(96): n is a, c, g, or t
  misc_feature (115)..(115): n is a, c, g, or t
tntggtacccatgtatgtctcccactaacacatctactaggacaacaggcagctgaagaacatctggtgtgaccatcacttggacagaattagganctggttctggaccaagtgngtaaggatgcggaaggattgcaatgcccgcagcacagtggcggcaacattgaaccggatagcttg

SEQ ID NO: 549989 - DNA, 784 bp, Homo sapiens
gcggaggcggaggagcaggcgcgtggacgcggccgaggcctcgatggtctcgggcgggggcgcagcgttccggggtgcgcgcggtgctgtgggtccgttggtctgcgacggtcggattcttgagtctttcgtcatttacgggggcccatcgtgggttacggcgttagccccgtggtgttcgttgatgcctggggctggtccgctattacgtgaggtcgctactgtgtaaggctagggcgacgtggacgggtggggttgtacagatgattcggtgacgatgaggaatagatatggggtacgactttggagaagtctcttagatggattggactactcgtttgatgtttcatggtggttggttgtaccatgatgtttgggtaacagagtttagccgtagtggcagaaatcttgaagcgtcttcatagagtggtgactgaatttttggtgactattgcctaatgatttgtacctacagtgtgcttacaatcgatagaggcgtgccatgtagtagctattgcttggcgtttgaagaaggttatggcggttacctggaagtactgacgtgttaaagttggaaaggacagggttatttttaattagcaacccaggggggaaaggcctaggttggactaaacggttggaacgagatatgtatttgtactataatgcatatgagaacgttccaaagaaaaaaaaatactaatccgtagcagtaaaataaagaaacaacggaatgagaacagacaataagtattatacagaggagaaagaacatacagaacga

SEQ ID NO: 549990 - DNA, 277 bp, Homo sapiens
taaaccagatagttgatcaccctccctgagagtttgggattctatgaggactcctgtctagagtgcagcgccactgcgagggtggtcctttattgtcagaaacctcattcccagaaggagacatgcagtggaaactgagcgtcctctgccctgcggtgcccagctccattcaagaaagcacacctgtggatgagaggcgcaattaacgttatcagtcgtgaagggtcagaaggaaaacccagtggccgttgggaatttagagatggtgtttcgccat

SEQ ID NO: 549991 - DNA, 216 bp, Homo sapiens
gacgggacacagatcgcactcagtgtccgctttatgtgagcaagactcatcctttaacagaatgacacgagcagttctcaataacgactaataacaaattcccactgaatgccaaacatgtttcaatcaacattacctcaggacggaaacatcgcatgctctcaagtcaggagtgttgtgagagacgttgtgggggtacccgcagcctcggaaatt

SEQ ID NO: 549992 - DNA, 313 bp, Homo sapiens
ctctaccggatctttactgcatccgaacaggaggtgtaggttcagtgagctgaaaactcaccactgcatatccagcctgggcaagaagagtgaaatccatcttggctgggcacggtggttcacgcctgtaatcccagcactttgggaggccgaggtgggcagatcatgaggtcaggagatcgagaccatcctggctaacatgatgaaaccccgtctctactaaaaatacaaaaattagctgggggtggtggtgggcgcctgtagtcccagccgctcgggaggctgaggcaggagaatggcgtggacccgggag

SEQ ID NO: 549993 - DNA, 386 bp, Homo sapiens
tgtgtgtcaaagttctcaccttcctggtgtctggcgcttccgcagcttcttcttcttagagtaagcctcagtaaaatgttttggaatttttacattgctgatatcgatttgggttaatgtgccaatgcacaaatttctggtgtgttcttcgtagaggacctcgattaaggcccagaggtccattcccaagtattaagccactagccagttgcttcaggaaacccacctctcttgcccctgtggcgtccagtgagaatgatcagaatggtcccgggggtaatgctggctcacagttttctcacgtgctgactaaagggtttttccccgtggctcaaccgctttcgaggcacatcctcagtagtataatctctcgtgccgtctcctac

SEQ ID NO: 549994 - DNA, 459 bp, Homo sapiens
ggttctttgaggacatctgacttcaaagggaaaaaattcataattcagacaggctctcggggcttcaccatacaacgcctttcttgtatttggttagttttatgggcctggagtgttgaccatgtattaattttctctataaaaatcagaaccgctctgggcagacccagaatttatagtatctgtggcagtctggcagagagtagggaccctcagccatgagtcctcgcctcacttgtaacgagtaccccataagtgatcccaggtgtctggggatgctttaacgcacccagatcccaccttgctcttggcgcctcctaattacacaccatgagcggcggcggcagaggagaactgctgggaggaccgaggaggatccgcctctcgtgtagaagaacagactgtattaaacagtgattatggccatgcaggcacaggaagacctgacctcatggaatc

SEQ ID NO: 549995 - DNA, 477 bp, Homo sapiens
agtcttgttgcccaggctggagtgcagtggcgttatctcagctcactgcatcctctacctcctgcagttcaagtgattctcctgcctcagcctcccgagtatctgggattacaggtgcccgccaccacgcccaactaatttttgtatttttagtagggatgggggttcaccatgttggccaggctggtctcgaactcctgacctcaggtgatccacccacctcagcctcctaaagtgttgggattacaggcgtgagccaccatgcccggccaccagaagagctcttacagaaattattccaacacccttagttcttccagaaaaggaatctggtctagaaaatttaaatgacttacccaagatcacatggcaatgctaggaccagatgtgagacagccttttctgacaccatacttcctgtcttagttctcaactgcagtaccatcagttatcttttgacattaccttaagaatccc

SEQ ID NO: 549996 - DNA, 968 bp, Homo sapiens
  misc_feature (40)..(42): n is a, c, g, or t
  misc_feature (79)..(79): n is a, c, g, or t
  misc_feature (115)..(115): n is a, c, g, or t
  misc_feature (138)..(138): n is a, c, g, or t
ggaggaggggccgctaggggcagaaagatttagttttggnnngccttcgcgatctgaaccctcatctggggcacattgnaaactacaagccaccagggaaggttcccaccttggnaccacacaaaatcgccaacctgnaaacttaacaccagtggacacttccgttgttggaacagaagatagtattggctgaacctacaggaaaggtcaaaaaacttcatcagaaattcaaaaaaagaaactatgtataaagtacattaaaaatgctaacaatgtaattttatcttcagttatactttgatacaggaaagtgtcaaaaaacatcacacattcagaaaaagaaactaggtataaagtacattaaaaatgctaacaatgtaattttatctttcattatactttgatacaggaaagggtcaaaaagcatcagaaattcccaaaagcaaactagatataaacgtcattaacaatgctaacaaggtaattttatcttcaattatactttgatccaggaaagggccaaaaaaacatcaccaactctctaatcacaacctatgcgttacagtccctgtacccggggccccccttggccaccctctttacccctccataccccacatggatctcgccgccctccccgcgcgccgctcttcagagccgtcacctttcctgcggggcacattattcgccccccgccagttccctccgccaagccgcggggcgacggcccggcccgaaaaggcacgagcccgccctcgggcgggcgccccgcagttccctacgcacctcgcgcctactcgcgacgcgtacaccgatactctcgcccgagaagacgagcgatggacccagttgccacgtattggcgtcgggagttccggcgctggcacagagccggttcacctgccactgcctcttttttcccgatgtatccgttcccccgccctctacttgtcaattaccaccgacaa

SEQ ID NO: 549997 - DNA, 159 bp, Homo sapiens
ccaggctctctacctcggtgtatcagattgggttagtgctcaataaagtttttagaaaaaatttaaaaagggccagggtgcagtgactcaggccggtaatcccagcacttggggaggccgagaggggtggatcatctgaggtcaggagtttgagaccag

SEQ ID NO: 549998 - DNA, 210 bp, Homo sapiens
atacaatcctgaggtgtaaggggatccatgcccaggtagtcagctcaaatgatctctgcatcatcttgaggtgggaggccggaaaaggagcgccaataaggttccctgcaacccccgccctccagcccaccgcccaaccttatacaaatggcatttacttaattgcaaatccgggaagcaggtgcgggaaatgggaactgcaggtgcaat

SEQ ID NO: 549999 - DNA, 130 bp, Homo sapiens
ccgatggcgaagtttccgatggcgaggaccaaactcaggacaccgagcttgtggagaccagaccagcaggagatagaaccgtccagaagtgggcagctgtggtggtgccttctggagaagagcagagata

SEQ ID NO: 550000 - DNA, 327 bp, Homo sapiens
  misc_feature (34)..(34): n is a, c, g, or t
  misc_feature (51)..(51): n is a, c, g, or t
  misc_feature (175)..(175): n is a, c, g, or t
  misc_feature (234)..(234): n is a, c, g, or t
  misc_feature (269)..(271): n is a, c, g, or t
gccgcggcgaaacaaggcaaatgtcccgtggttnctgcgcgcccagcattnattacccccggaagcccgtgaagtggcggatctactgggttttacccatcaccgaatgtgatgaatcgatcccggtaacggcgtccgtgcccgccagcgtgccagccgacaaaaccgaaagccnagcatccgcgaaaccatcattgcccagctgccggaaggccagtttaccgaaagcctggntccacagctgatggaaaaagtgatgaaggaaaaannntcgctggagcagggcgcaatgcagccgagcttcaaatcggtgaccggcaaaggcgg

SEQ ID NO: 550001 - DNA, 190 bp, Homo sapiens
gtttaaactgagaaaatggcctatgcttaaaaggaaaatgaaagtgttcctggggtgctgtttttgaaaaaacagagtttcattacctgtattgtagccccaatgtcattatgtaattattacccagaattgtttttccataaaggttgggcctttgtccaagctaaacaataaaatttttaagtagtgc

SEQ ID NO: 550002 - DNA, 514 bp, Homo sapiens
  misc_feature (1)..(1): n is a, c, g, or t
ntggtgctgaaaaaattatattctgttgattggggtggagagttctgtagatgtctattaggtccgcttggtgcagagctgagttcaattcctgggtatccttgttgactttctgtccgttgatctgtctaatgttgacaggggggtgttaaagtctcccattattaatgtgtgggagtctaagtctctttgtaggtcactcaggacttgctttatgaatctgggtgctcctgtattgggtgcatatatatttaggatagttagctcttcttgttgaattgatccctttaccattatgtaatggccttctttgtctcttttgatctttgttggtttaaagtctgttttatcagagactaggattgcaacccctgcctttttttgttttccatttgcttggtagatcttcctccatccttttattttgagcctatgtgtgtctctgcacataatggggtatcctaataccccattatgtggaaaaagcaaatcacagtaaattttaaatagggta

SEQ ID NO: 550003 - DNA, 246 bp, Homo sapiens
atatatttggggggacaagtgcaggtttctaaacatgcatatattgcatgcatagaggtgaagtatgggctttttttagtgtgcgcatcgcccaaatagtgaacatcatacccaataggtagtttttcaaccctcaccctcctcccaccttctcacctttcatagtctccgatgttttttattccactctatatgtccatgtatacccattatttagctcccacttataaatgagaatatgccata

SEQ ID NO: 550004 - DNA, 139 bp, Homo sapiens
tctaggacagtggaacgactaagtgactctggaaatgcagtcatgcactggcctcattgtggtcatggcatttaaggtgcaaatagccacggttgtgtcatttttctcgcagtgcaccattccagctgcaccaggtact

SEQ ID NO: 550005 - DNA, 749 bp, Homo sapiens
gtggctgatttgcgttcagttgatgcagagtggggttttgcagttcttatcaaaaaaaaaaaaaaaaaaaaaaaaaaaaaaatgtgtgtgcgcgcgcgcgcgcccgcgcggcccctcgcgaaagaagctttctacaagaacacacaccgcgcggtggggcgcgcgcgcgcgggccaccaggagggaaaaggggaaacagtgggcgccaaagacgcgtgtttctccataagagagaacaccgcgggcgccgagagaacaagagggcgcggaggaatctctcctcaccccaaatataaaaagagcgccgcgcggggggacaacacgcagagaggtgtctctcggagacacacaaacacactcccgagagagagaggagagtctctcgagagagagcgctccatatatacgagggggggagcactctatatacacacacaagagggggagagtcccccaaggaggagagacgcgccgtcgagaaaatatcacactacagaatatattattaccgcgcgcccccgcgtacacagccgggggggggggggacccacccaacaaacacaaaaccacaagaccaagaaacaacaaaaatccaccacacaacccacctactactccaccaaaacaaaaaacacaaacaacagaccaaaccaccacacacacaacagcgatcccacaacaagccaaaaacacaaccaacaaaacaaaccaaaaaaaaaccatacaccaccggccccacccgccccccc

SEQ ID NO: 550006 - DNA, 946 bp, Homo sapiens
  misc_feature (679)..(679): n is a, c, g, or t
ttgctgtaggtcgctgtgccccacacaaggttttgtgggggcacccccccagtgcgcggcgttcgccctctgagttccaaggggtttcccttcctggcttccgcccccctgggggtcaagatccttgtcccctcctgggcgcaaatacttccccgtggatttggcggctcactattggcctttcgcgggccacccttgtcgcgccagaatgtggatccccccccggggtttgcggattccggcccctccattggtccccccccaatgctttttgagcgcggctatggacctgagatggccgtaccccccttttgtgccccaaccttaacctttccccccaaccccaaatggaaattcgcccggcccttatattttttttttttttttttttttggtttttttttttttttggccttgacctccggaattttaaaactggcaccggtgaaggtgaccacgcccgtccggttggacgccgagccatcccccccaagttcccccaaagtgcgcccgaggacctttgattcgccaccatttgttgtttcttttaaatagtcactttcccaaatattgaagatgccgcttgttaccacggaaagttccctctgccactccttaaagcccacccccacctttcttcttctaaggaggaatgggcccacgttcctcctccccagtnccaccacccggggaggtgatagcccttgctctttcgctgtaaattatgtaaagcccaaatttttttaattcttcccctctaatacttttttattttgttttattttgaatgatgagccttcgtgcccccccttccccctttttttgtccccccaccttgagaatgtatgaaggcttttggtctccctgggaagtgggtggaaggcaggcccgggcttaacctgtaccctgacttgagacccagttgaataaaagtgcacccccttta

SEQ ID NO: 550007 - DNA, 131 bp, Homo sapiens
caaggttacgcactttagactcacaggctgtgctccgctgctccgcctcagcagcagcaactcctcgttggtggtcttcagtctgccctcccccttctccacctcctaacgcaggctcggatctgggcctg

SEQ ID NO: 550008 - DNA, 695 bp, Homo sapiens
taagatacccaagatatgaaggccaccagtgtccaacagaaggtcaatttctctgaagaaggagaaagtgaagaagatgatcaagacggctctcacacgcagtgtcactactgttaaggccagatccaggggattctgactgaatctggcacataagaagccgagccaggatcgatctagctcgaactagtatagaatcatttcgggagtcatcactagaagtcgaagaacgttcgacagctctatgagtaagcgaacgttcgagcgctaagctcgaggatatcagaaagaactccccaggagatgggccccacaaactgcaagaataaggaccaggatgcaagaatgacagcattctgagaatcagagcttggaaaccagtcaccatcagacctccagtcgcgagcaagtgagctggacgaccccaaaatgcatctgttgtcaagaggaaccggtggtggctacttcctctgatagcatagcgtcttgcctctgggagtttatgggtctttagatactcctgaggtagaaaccacgtgctgttcaagagttccagaaccagatgaatcaccttaagaagtaagtaccaaggtccagatgacgaagctgtggcaaaggagccaaacattcctggaaaaaacatcttaatagctcccatcctcggtctcagctgctatcttactgtcaatgttgcc

SEQ ID NO: 550009 - DNA, 728 bp, Homo sapiens
aagcagtggtatcaacccagagtgcccattacggccggggtaagatatcagactagggagaaggaggaagaaggagaagaaagaggagaagaaggaagaacgaacggacgaacggaccgaaccgaaaacacacgacggacacgaacggacgaaccgacggggaccgaaacgaacgaacggacgaacgaacgacgaaaccgaaggacgcgacgaggggaggaagacacgacggacacggacacgaacgaccccggacgaccgaccgacacacgacacgaccccccgcgacacgaaggaaggagaacgactgacaggacaacaggaccaagcgacggatacgacgaacctgaaaccgaagaacgaagacaggacgaacggaccgaccgacacaccgcgagaacctaagaagcgaacgacaggaaccggaaaccgcacaggagaagaagaaagaactaagaagacgaaggatcacgggacacgaagacgaaaaacggaaccgaagaacgcaacctacttaggaacaacagaccggaacagaggcaagaaagaaccgcgacacccgaaaggcaccgcaagcaaccagagggagggacaaacgaaccgacacacgacgacacgaacgaaacacgcgacacaccgaagcaaagaggaaaggaacgaaccaccccggaccgcacgagcgaacgcaaaggcaacgaacgcaacggcaacacgaaccgggccccgac

SEQ ID NO: 550010 - DNA, 316 bp, Homo sapiens
tagtaggtgtcaatattttacataaagatctaaatttccgacttctcttaaaaaaaaaatcagaagatcttagcatactggaccagaaagactacttggcaacatctggctgaagctgtggggtgggagtgttgaggggggtgtggatggtgcacttttcctagtcatctctggatcaaaactggctctagtttgccagtgttcccaccactccctatagttttatactcactcatatccattacctgctttgtcctcgtattacagtatttacattactgacctgcaagaagttactagcagtcagaaagcctga

SEQ ID NO: 550011 - DNA, 789 bp, Homo sapiens
ggaattcggaaattgctctagactcatggtaagtatatcgtaaaatacatatgtactaagaattgtcaataataggttggtgcagtgtggagtatattcagcagtatttttgacattctgcttgagaacaaggaagagctaaaggaatattataagtgtggtcagatgacaaggttgaaatattgaggtggttgaaagtgaactggctgtttgcgcatgatatgggtaaaggctaacaagatcgtacagagttgagtagtcattcaggtttctcctgttgagatattgtgtagtgccctggcacttgttctgaggtgagaattctttggcagtgtgacgaaatctggatacactcaattgatttacgagagctaacagttactttatgcccattgtgctataatttgttggagaacccacaaccaatattggaagtttccaatgccctttaaagaaaaaattactcgcttatataaaggagaaatcagtgggtgatcagcgaagatgctatggggtgcgtcttgtccaaaagttgatatataaacagctttgtctaccccgtcgatacgacaatgagtacgcatatggagtgcctgtgcattgtgaatctactggcagattcatcattcatttccagcatgttctagtgggaagaagcgacttccatttgagaagtaggtgctgtaacattattcctggcatatggaatacttgtgtacatgcttgtctcattccaagaattcggtaatcacgcatcgaaggccgagatttttgagggtggggtgtccc

SEQ ID NO: 550012 - DNA, 418 bp, Homo sapiens
gcggccgcctactactactaaattcgcggccgcgtcgacaagctgagaaagcctggcctagtgacatattgagccaaatatttactgtgggaagttgtccctgtgcattgtaggaaaagttcagcatgcactacttgcgttctacttaactatgagcgccagctagggaccacgttccacctatgatgtgactaaccaaataatattctacactattgcgcaaatgtcctcctggggaagagagggtacaaaaccatcccccagttgagaactactgcttcgggccacagctaaaaccaaatgtcaggtatgtgaaggttcccttgcctttcagggccatgctaacagtcagtgcctgactttaccctggaaggcagctgtggcctgataaaggcaaatgtgttctcattcaaaacaa

SEQ ID NO: 550013 - DNA, 291 bp, Homo sapiens
  misc_feature (103)..(103): n is a, c, g, or t
agtcgggtgactctgaggatcccagaagacactcgggtcaatcacagatcgttggttgcatggaagacctggagtttattctcagagcagtgagaagccactnggaaagttgtttttttgtttttctgtttttgagacagagtctagctctgtcacccaggcagactgcagtggtgcaatcttggctcactgcaaactctggctcccaggttcaagcgactctcctgccccagggcccccaggtagctggggactacagggcacacgccaaccaacacccaattcaaattt

SEQ ID NO: 550014 - DNA, 198 bp, Homo sapiens
cctttttgggtggggggttggccccccccccccccccgggggggcctttcccttttttcggggttttttttgggggggggggggggccccccccccccggggttttttggtggccggggggggtttggggggggccccgggttttttttttccggggggcccccctgggttttttgccccccccccccccctggggga

SEQ ID NO: 550015 - DNA, 790 bp, Homo sapiens
  misc_feature (1)..(1): n is a, c, g, or t
  misc_feature (9)..(9): n is a, c, g, or t
  misc_feature (790)..(790): n is a, c, g, or t
ntctactgntttgcggatgcgcgcctagtgttggtaccatacgattcggccctatggccggggggggggtgtttatgtacagggggggtgcccacctttcaaaatcactgttgcccatatgccacacatgtttcaacgcttctacgcggatgcacttaactcttattatcaccatctaagtcacctcccccggaagaggcagcatctgaccgtcagacatgcctaccttttatgttaaccagctcacactcagacctagcatccgcaatgctgatctccagccccttgacataaaccagtttctatctaccttagggcacaacccaaccttcctcatgtacatggtccgactataccagataaagccacctcctaccctgaatctattcactaactggaccacggcaacagattcctctatccataacaaggaccctctaaactagattccatatccacaccacgggcaacaaactctaggcccgatcagcctatccattttagccagcacctataaaaatttgaatgatcacctaaaaagtcctaatgaactaacttgacactgaaccaatcgccttatttttctatgtacttcaaactcctccttactctgatggacacactaacctaacctactgctaaatgatctcccaacgctatggaaacatctaactgaaaggtttgcctacacccaccgatttcaggatgagccttaaaaatacaggaatgtgagggtgtcctgtgggtcgactaaaacagcctgtatctgagttatcttgcagcccaattn

SEQ ID NO: 550016 - DNA, 1204 bp, Homo sapiens
  misc_feature (18)..(18): n is a, c, g, or t
  misc_feature (20)..(21): n is a, c, g, or t
  misc_feature (44)..(45): n is a, c, g, or t
  misc_feature (47)..(47): n is a, c, g, or t
  misc_feature (515)..(515): n is a, c, g, or t
  misc_feature (1059)..(1059): n is a, c, g, or t
  misc_feature (1070)..(1070): n is a, c, g, or t
  misc_feature (1072)..(1072): n is a, c, g, or t
  misc_feature (1078)..(1078): n is a, c, g, or t
  misc_feature (1084)..(1084): n is a, c, g, or t
  misc_feature (1108)..(1108): n is a, c, g, or t
  misc_feature (1122)..(1122): n is a, c, g, or t
  misc_feature (1147)..(1147): n is a, c, g, or t
  misc_feature (1159)..(1159): n is a, c, g, or t
  misc_feature (1204)..(1204): n is a, c, g, or t
tattttgggttagccttncnntgttcttttctctatttcgtctnntntctacacgaggtgaatctctgtgtcttatttaggtgcgggggcgtctaggtgttgttgtgagcagccacgggagaggaagcgatgaccgaacagaggacgagaagcagggaataacgcgacaaccacttaacaacacagtatagttcaaggtgcgacctagcgccaatgcgatagattaagaaataccaacctatttccatacacgatgatagaaatcccactctcttattgtatataaacatagatcgaggtgaaaatactgtagaggaagagtaggcgggcgccgcggtcccggaggatgcgcccgttcgatacgatacaacgtacccgaccctcgccgcccttatacatgtacgtagtattgttctctttcgttttgttataatatttattatttaaatttgattgttcattcatactgtatattatgtttccgttagatattaattaagagcgcagcagacacncacagcagcgaagagacacccagaagacaaagaaccataaccaagcacgcccatgagagagaaagagtcatccggtctcttattgctgccttcttcgattctctattcatattcatacgacaaactcataacatacttatacggctatcacttttatgtcatacattctctatatattcacctatcacctatattgtttagatctttacattccttttagttgctatgttcttatttatacagttaacttaaattatacctacatcaaatttataatatatttcaatttacaatacaatgacagtgatcatactatgatgtaggcacgggatgcagcgtgacagcgtctcgctgacttacttatcaataaccaataactacactatatagtagatttacagtacatcatagagaatcaatgtattccgttgctcatatcgaatatgatctttagttacagcgaagaagattatgtgagcactgagtgagagtgagagtagtaagaagttgtgtgcgatgcgtgtgtgggctgtagttgtacgtngcgttcacgtngngtgtgngtagtngcgttcgcgtgtgcacgtctcgantcgtatgcggaagnaacgatgcgtagagcgcgcatgaantgcttagagacngagcagctccgtcattgcatagtgagtgctcgtctcgtggattgn

SEQ ID NO: 550017 - DNA, 369 bp, Homo sapiens
  misc_feature (249)..(249): n is a, c, g, or t
  misc_feature (284)..(284): n is a, c, g, or t
  misc_feature (294)..(294): n is a, c, g, or t
  misc_feature (318)..(318): n is a, c, g, or t
  misc_feature (329)..(329): n is a, c, g, or t
  misc_feature (352)..(352): n is a, c, g, or t
ggaaatataagttgttttttattttaaaatgatacttatgctaacgtgttattgttattttaaaataaactaataaaatttttaaatttctaatacagtaaatactaataaatataacccacataagccaaagcttgctaggttctcaataattgtttttttttgcgggggacagagtctcactttgttgcccagtctgggagtgcagtagccaatctcaggctcactggcaacctccacctcccgggntcaagctatcctccccacctcaggcctcctggatnggctaggggnaatagggtggcatgccaccacggnccaggccattnttggtattttctttgtggggggntagggtttcggccatgg

SEQ ID NO: 550018 - DNA, 794 bp, Homo sapiens
  misc_feature (497)..(497): n is a, c, g, or t
tgggagtcatgtgcccctttattagctgagccattacttgaaagggatagaaccgggaggatgtggttggccccgatgccggggccggccatgcttaacggggcttgtaggtgatggagaactcgcccaggtagtggccgatcatctcgggcttgatctccaccgggttgagggtcttgccgtttgtagacgcccaccatgctgcccaccaatctcggggtaggatgatctatgtcccgcggggtgctgttttcaccaattctccgggcttctccaggggcgggggccctcctttctgggccttgcggcaaggcgccttcaagcaggggaagtgcgtgcttccggccggaaggccccggttctcagccgccgccgctgtggcgcgcactgtgtgtccgagctgtgcatctcaggcgtgcctcgtatgaggcacattgtctccgagcagtctgtggtctcagaggtctccccacgcccggggtataagtggtgcaccnttggcggaagggctccgctttcttctctctcgtgacctcatacttctcgtggggcccattcatagtgtctcggggggtgcgagagaacaagagaggcggtaaatgtgacacattgtgcgccacaatgtgtgctcatatacgcgtggtttcccctagaaccccccagagttttctctttttgttcacacacggggtgcggtaaagactctgtgccgggggttctccccataattgggagaggctccgtatttataactttcgagaataacgccaggggttacccccgtgctttatagc

SEQ ID NO: 550019 - DNA, 93 bp, Homo sapiens
ccttgtgctgaaaataaatgtcgactggtatctattttatgacttgagctttttaaaggtagtgtgtgtggtgagcccttctgtcgtcttctc

SEQ ID NO: 550020 - DNA, 621 bp, Homo sapiens
gatacaggcagaacattacaaaagccatacaagccattgtctctctatgggatatgataatatccctggtgaatgaagtaatcaacaacataagagaaggaaaagaacgatttcttttgtatactccctaaacacaacagagttggctgcgtcagatctagcgtgtgagcatatatatgcctacttccaggcatcgtccagctgatgtccactgctagtggtttctgttgtctgactcctcatattctgctttggaggttgttctccggggggagaacctactggagctgcgcgttctgcaagacgccattctttccgaagccttttctcctcatgtggtctgtcttcttgtgggattctttggcctcatcctctgtgagggggagggcctcctcatcattttcaggttattcctgccacacagatatccttataatatgctggtgcgtctgcttcttgagggggtgagaggacctcctcttcttccaattgagggggggcaacgacttgttgatgacctgcttcctcctcttttcctttgctgtggtgtgcgtctcctcctcatcttctagttgtgcagtcttattgcggagatgctccttccggtctcttcgagttgca

SEQ ID NO: 550021 - DNA, 945 bp, Homo sapiens
aaaaagaacatgagaataatagcgtactaacaagacggaattgaaaaggtacccataagatatcctctagtccctgctacttgggaaggtgaggagggaggattgcttgggcccccaagtatgttccagaccagcctgggcaactactacaacggaggcccttgtttttctactaaaaacggaacaaaagaaaagggaaaagaaaaaatatccacaggtctatagtgataccttaaaaaatatgcggggaggccttctcgcaaaaaccagaagaattggctaggttaataaacctgtaccgatgattaaacacgtgtagaacgttcagttactaaccaggattcagggcccatggatttctcaatgatgctaagatccactgttgtggccaaggctcgtgcggggactaggaacacttcattacaaattttcagcgataccaccttcgaggacttaacaaaatgcttgtgttggttgaccaccatacttttaaaccatgtggttggtgacctcaaaaacagggccaaagccgaaaatggtggtcttccagggaatgtggacttctccatacgggttaataccaaaaacgaagcaaccctaagttcttctttgcaaaaatatttcaaccttgcaaaactaattcttaagggcaaagcaaagcacgttacaagattggcagtctattaagagaacacgttgaccgtggggactctccacaaaaacttgcgagtggacttatacacacccagcggcgcgtcggccaacgtgtggaaattcctaccccttagattttcccccttaatctttgtgtggacgctgattttctcacgacaattctggcccaccggcggcaggggaaaataggagtcactctcctatgatggagaacacaactcctttcggccaccagcgtgtagggcgcacaaacactgggggtgggacacc

SEQ ID NO: 550022 - DNA, 335 bp, Homo sapiens
acacagacgacagcacagcgcacaaaaggcacggttggaggcccccagcgtgaggctgcgtctgttgttacacatcccggataatggtgcggtatttgtcctgctccgggcaagtcacccccacgtcctggataagcgcagccgcttgaattggacaacacattcagctgggcgggcgtcagcacatcagtgacattgaatggccttcgccacagggaccgcagcttcctctccagcaggtctagagccacgtgcaggtagtcagcggccctcaccgccgtcctggtgggtgccaccggctgcttgaagtaggataggagttccatggggctgga

SEQ ID NO: 550023 - DNA, 1071 bp, Homo sapiens
gggcgaggagaaggtaggacaggtgctacgtctaggtctcagtggctgcgtgcaaggggaggaggttggaggggcggccttcgtgcttgacgaaagaaaagggaatggggagggctgagcagagttcgccaaggcgttgcggcagagatggcacttgctccgcgcttcgttctggtcgtcctcggtatgagaccaaccacatctccaaccttgtgtgccagtaaccaccatcacgggacgatcccgatgcatgcgcagtccacatcattcgtccttttctggtggccgcttgaggcaggactgcaacctcgaaggctcctgcaggacaggctgtgaggcaactccgtgcactcacgtggaggcgcaagagtcgttccccagggggcgtgccaggaccaccctcagccggcctgtcgcgtctctggggccgcgcaggggatcttgggcgtagcgcgcgcgacgcacgactccggggagacgcggtgaccgcggggctgttagtctcgccccgaagtgtcggcctgcgtacgcatcgccgagggtctctccgggtttgcgcgcaattagccacacatgacggcgaaaaccagaccgacatccgtagcatcacgaggcggtctgttcatcttgctcacacttatctgcgcgactggcaggggtttgcacttttttttggcgggtccttttccaatccccgccgacgaggttaccgctttttctacccgggctgttctcaacttgtgactcagtgtccgcgtgagggaccacgtacggcggcttccaccttcttgggacacatggcgcacatcttcggcatctcagcgggggacagttgtgctttcactatgcgccattccgctggggcttggctatcgcttcccgtttgccgtacatctaatgtttgcttgccacaagtgtttggctaggagccggaatctgggttgttgcggcttggcaggcctcttccttccctacattgcccctagtcgcggtccgcggtccccgtccgaggctttcggacgacgaacccgacggggtgtgggttgttggtcgctgtcgaccccctttgtg

SEQ ID NO: 550024 - DNA, 442 bp, Homo sapiens
  misc_feature (252)..(252): n is a, c, g, or t
aatatataataaagtatatggcattctcccatatactttaaatcatctttagataacttacaacatctaacacaatgcctacatatcatttcattcatgtaaattcaacacagtactaggcatggcaagttcaagttttgccttttgaaactttatggaattttgttctgaatattttcaatctttggagggttgaattcacagatgcacacagatatggagggccaactatgtatttgagtatatacatantgtgtgtgtgcatatatctatatatatatatatatactaaagattatatgtaaccgtaatatcaaatataatagactgtaagtgaaaaagcactattagagattcggatggatgttacataatgaaaaagaaacaatctatcagacagatatctctaaatttgaatatacttaacagagcctcaaaatat

SEQ ID NO: 550025 - DNA, 365 bp, Homo sapiens
gagttaaacgagtcagtatatttcctttattgctcaaatcactttttgtgttgggtcctttttgaaaggtggccagatctgcccaatcatattatgctcctcaaggacacaccctgtgtgaggaataagcagggtttctaccaagtcaactgtcagagtgatttaccttccatgatatttctgaatgatggtagactcaagttaatgtgagttatgtgatgcctgtctgtcattggatgaagatctacactggacagtttcaggtttctttctaaaccatgactgaagccatagattacctgataaccaaccatggttctataaatgtctgtacgtgtctataaaagtcaatgcagaaaattaaa

SEQ ID NO: 550026 - DNA, 430 bp, Homo sapiens
  misc_feature (11)..(12): n is a, c, g, or t
  misc_feature (16)..(16): n is a, c, g, or t
  misc_feature (40)..(40): n is a, c, g, or t
  misc_feature (379)..(379): n is a, c, g, or t
  misc_feature (421)..(421): n is a, c, g, or t
gatttttttanncagncaccttcctaaccaggaatttgtntccttaaatttgttgttgttgttgttgttgtttgttgttatttttttgagaagagtcttgccctgtcgccaaggtgggaatgcattgacgtgatctcagttcactgtaacctctacctccccggtttaatcgattctcctccttcagcctcctgaatagctgggattacaggcaccacatttttagtggagatggggtttcaccatgttggccaggctggtctcaaactcttgacctcaagtgatctacctgcctcagcctcccaaagtgctgggattacaggtgtgagccactgcacccagcgttttttgttgttaagacagggtcttggctctgttngcccaggctggagtggcagtggtgtgatcccagctcactggnaacttttgg

SEQ ID NO: 550027 - DNA, 234 bp, Homo sapiens
gcacccgcaccacagcacccagctccgagatggcacctgcacccacagcgcccggctcccacccaatacggcacccgcacccatagcacccagctccgagatggcacctgcacccacagcgcccggttcccacccaatacggcacccgcacccacagcacccagctccgaggtggaacctgcacccacagcgcccggctcccacccaatacggcacccgcacccactgcatcca

SEQ ID NO: 550028 - DNA, 627 bp, Homo sapiens
acaggctccggacgtcctgctccggcttttggctgtctgctgcctggcttcaagagggagtgcttccaacattccttatcaggcttttgaaacgtatgtccgcgccatcgctggacagctggctttgagactacaggagttgaagaagctataaccaaaggacagaagattaatactggtgaaccccagactccctctgttctcagagttattcgacacctccaacaggagggacacacagaaatcaactaagctgtccgcatctcctgctggcatcagtcgtggtggaggccgtgcagtctcagagtgtatttgcacagctgggtttgggcctctacagaaagttattactcctaaagactagatgaggcgtcatacgctatggtggaggtgtggatggagtcccggactgtgcgatctttatcaagctacagaagtcgatacaactcaccaacgatgagcctactcagaactacgggtggtcactggttccgaagacgttgtcaggtgtgaaatcctgcgctcttggcggtctttggaggcagtgtggtttacttgccgggggttcctgtacctccagtgcttctgcctgagtgcatcatgcacagctgctaataatatgtttcc

SEQ ID NO: 550029 - DNA, 872 bp, Homo sapiens
agcggactgggtgacagagcaagaccatcctgtctcaaaaaaaaaaaaaaaaaaaaaaaaaaaaaaaaaaaaaaaaaaaaaaaaaaaattgaacgcaccacaaacgagaagacaagagaggcaaacgacaggcaggggagagacgacaccgaaaccacaccaacaccgagaagaaagacagagagagagaggagaaaaaaaaaggaagaaagaagaggagaagagaagggggagcgacaacacgacagcaaggggacaagaaaggaagagagcgcgaaggaacagacagcgagagcagtcgcaaggaacagaggaacaccaacacgcgagaaaaaagaccggacagagcaggagcgcagcacgaccggcggaggagaaacagcagagggacgcaggggaaacagcaagacaaaagaacaacggagacgagaggacgaaagaagagcagagagaacgagagggaggacaaggagaggagaggaagacaggcgaagggagaaaaaacagaaaagaaacaggtaagaacaaggcgaggagggaagcaggcgaagcaaagcaccgacgacgaggaaacggacagagaaagagaaagacgaggcaagaggagcaagtcgggacgcaaagagagcgggggagggagacgcgggcgggagagacccggagggcaggaaggggtggacgggagaaggggagagagagagaccaacaggccagggagaaagaagggagcagcgagggcaagcagcagcgagggggggaagaagagagacagaaggggagagaggagagcaaaagaagaggcgagaagacagaagacgggaggcagaggggcagaagagggcagagcagaggaggagatggggaaggagaac

SEQ ID NO: 550030 - DNA, 119 bp, Homo sapiens
  misc_feature (78)..(78): n is a, c, g, or t
ctttctgcggtcgactctagcaggctcccctctgtcagcggcgcccccaggggggcatgcgcccatgcagcagcattntgggtcccgcagctcgcacattcgtccatccatggtccatc

SEQ ID NO: 550031 - DNA, 220 bp, Homo sapiens
aatgctacgtaggagtatggtgagccagtggccattagataatacctttcaagtgtgagcttagacgtcaaccctaaggtgtgtaaccgtaatgctaattgtgatcatggatgaatcccttcagtcacattacggcgaaagtagtatggctataagttacgtcattacttagtccacgtcagtcgtctaaaaacatcttagggttacccaactctgatcc

SEQ ID NO: 550032 - DNA, 277 bp, Homo sapiens
aacgtccttatccatcctcttctcttcagtgaactgggatggaatatttccgcagtttcagaaactggaaaagcttgtgtttggtcctcttcttcaaggccatcagggcacgcgttttctcctccagatcttgatctatggcaaaaatgatctgggctctctcctctgctttctggtctccagagtttctgaagagcctttctagtgattctgggtctgtgtttccaaagatgtggcccacggttttcttacgagaggctgtgtcgaagtggtagcc

SEQ ID NO: 550033 - DNA, 457 bp, Homo sapiens
  misc_feature (41)..(41): n is a, c, g, or t
  misc_feature (109)..(109): n is a, c, g, or t
cacatcacatgtctttcgtgctccgagcaccagattctctngtgtcagtatgatctcatatacacacctctctctcttctcttttcttctatacacaaatactcaagangagagtatatgtgcacctctcctccctcatatgtgtctcttctcacaatactcactcatctagatgtgctcgagacactttgcgacagtgtgtcatcgtgattctacactcctatctcagaccgctctttagacgctctctctcatgtgtgtatctctctcccacgatgtcactcactctctctctctctactctcacatgtgatagtgtgagagagaggtatatatattctctattgtgtgtgtgtgtgtgtgtgtgtgtgtgtgtgtctcatctgtctgatatacgagagcccattttctccgtgctctgtcgccctctgtgtttctcttctctttctctctctct

SEQ ID NO: 550034 - DNA, 718 bp, Homo sapiens
  misc_feature (718)..(718): n is a, c, g, or t
catcgattccacggtctcatttggcgcatccacaagggcatacactctgcgcgagaagcctcatacatgccatcggctgtgtaaaggagatgagaagatgggtggagaggatgatgaactcaagggcttacgtgggggttccagaggaggaaattgagctgtgataagcctgacagagttcaacagtgcccacaatgaagcggatttctacctctgtaccattgaggagggaaatctgggacattcaaagaccaaagaggaagaggaagagctcacttgggtgacatccagtgaggatgatgagatcatcaaaccagaggatgtggatccctcagttggtcgattccggaacatggtgcatgactgcgagtggtcccatgtcaagaagaagcgtgtggaggggccctgtgctccctgggccgtggaggaatcagggtagcaggcgcagtgctagaatgttcgcctatcagcggaggactctacagggggcctgccccccacatcacgagtgaagcaggcgtcccagtcaacatggcatccatgggacagtactcatcggtgggcttgcgccatgccagagccaatgacttgacccctggatgtggagcttgagatctctgtgttgccgtcgagcatgtgatagtatgaaccccttgcgatgcgaaacccatgcagtctatagccctgaaagcatgtaagtgaacccaagaagaagaan

SEQ ID NO: 550035 - DNA, 481 bp, Homo sapiens
  misc_feature (154)..(154): n is a, c, g, or t
  misc_feature (464)..(464): n is a, c, g, or t
  misc_feature (476)..(476): n is a, c, g, or t
ccgtgcacgcttgtcagtcgtcacacctgtaatccagcactttgggaggcaaggaagaggatcgcttgtcagcagctcgcacctgtaatcccagcactttgggaggccaaggaaggaggatcgctcgaggccaggagttccagaccagcctggnaacatagcgagacccccacctctacaaaaaattttaaaaattagccagaggtgggggtgcacacctgtagtcccagctactcaggaggccgaagcaggaggatcacttgagcccaggtatttgaggctgcagtgagctatgatcacactactacactccagcctggggtgtcagagtgataactcttcttcacaaattcaaaaaaacacaaactgtccattgattcacagcatggccctaatttcttagctgcaggtgtaatttcttattttctggggattctcaacctaaaggagggcaggatcacacntcctcaagggcntgggc

SEQ ID NO: 550036 - DNA, 471 bp, Homo sapiens
  misc_feature (234)..(234): n is a, c, g, or t
  misc_feature (351)..(351): n is a, c, g, or t
  misc_feature (465)..(465): n is a, c, g, or t
gtttattaaaaaagtgttagagcaggaacgaaaggaaataaagtacacttggaggagggccaggtgggcatcttgagagagcaagtacacggttttgacctttgacttggggtttatatcttggcatgcttctgggggctgcgtcccttctcccctgattcttcccttggggtgggctgtccgcatgcgcagtggcctgccgacacttgggagggccgcgtgcacagtgtcttnactggagttgtgcggtgccctcttgaggcagtcttcccttaccagttcctaggggaaggtcacacgctggttaaactttgccactttgcctcgtagtgtgcatgcttgacctcactncaccaactcctgagattttttttaaattttttaaatttaaagttcttaggggtacatgttacacaacgtgcaggtttgttaacataggtatggcatgtgccatgttggtttgcngcattt

SEQ ID NO: 550037 - DNA, 112 bp, Homo sapiens
gagagctataaccagaaatatgtggatgaggcaccaagaaggagatcaaagacatccacatccagtatgaccggaccctgctgatagctgaccctcgtcgctgccgagtccg

SEQ ID NO: 550038 - DNA, 297 bp, Homo sapiens
agaagaacatgaagtttgtcatttaagtgtgttatattttgtttactggttttatttattatttatttttatttttatttttgaaacagagtttcactcttgtcgcccaggctgaagtgcaatggtgcaatctcagctcactgcaacctccacctcctgggttcaagtgattctcctgcctcagctacttgggaggctgaggcaggagaattgcatgaacccaggagacggaggttgcagtgagccaagatcacaccactgcactccaacctgggtgacaaagcaagactccatctc

SEQ ID NO: 550039 - DNA, 727 bp, Homo sapiens
tctatgacaggcctggttttaatcggccgaggctgaagcctggcgctcttggatcggctgcggaccgctgcaatcctgtggaggaacgcgctgccgagccaccatcatgcctgggcacttacagtgaatggcttctggctgcgtggtcaccaaccgattcgaccagttatttgactgactgaatctgtgacccacttcagatgtgtgcttgaatgtgcatgcagatgaacaatgcaaaaaatgaatgcctggctggtggtgctgtgctgtttgtggggccctgtgtggccaatgatgctgcagctcagtgcctgctgtgcccaggaccaatctccaactgctggcatggcaaacatgctgctgcaaggatgtcccatgaaatgaccgcaagaacccgctgccccccagcgtttggcgtggtttgacagagaaacgagtgagacgcagaccgcccgtggcgcttaaggaaatgaaggaataagacgagttggaacgaagacctgatcaacagacttcagtggtgaacgtggaaaataattgatagaagaccacgaaatggctgaccacctcgtgaacgaagattcgaaagccacttgaacgaaaatgtggtgaatggaggcgaattttcatgttgatagacctgattattgaccgacctattcgaggtcgtggtggtcttggacagaggtcgaggtggccgtggacgtggaatgggcctgatgagatg

SEQ ID NO: 550040 - DNA, 153 bp, Homo sapiens
gtaggcatttgtatgtcttcttttgagaaatgtctgttcatatcctttgcacattttaaaattgggttgttttcttaccattgagttgtataagttccttatatattttggatattagcttcatcaaatgtatggtgtgaaaatgttctcttc

SEQ ID NO: 550041 - DNA, 200 bp, Homo sapiens
taaaaagaaaaaaaaggatttggggccttaattttaaccgggcagcaaaaaaaacccctttagggggaccggggcaattggacggaataaaaataagccccaaaaaaggaaaggggggacccggaaaagagaaaatatcaacgggggcctattccacacttttacacacagccgggcccctaaaaagggggaaaaagccc

SEQ ID NO: 550042 - DNA, 380 bp, Homo sapiens
  misc_feature (69)..(69): n is a, c, g, or t
  misc_feature (251)..(251): n is a, c, g, or t
  misc_feature (310)..(310): n is a, c, g, or t
  misc_feature (321)..(321): n is a, c, g, or t
  misc_feature (325)..(325): n is a, c, g, or t
  misc_feature (331)..(331): n is a, c, g, or t
tgatctagaggatcccgagcagtcgtgatctctatgcaatgttcccctaataatgctctgagctggatntagtgcttctttgggatccaattgttccttctctgagggttggtatactcccttgtgggaactcccctgtcacgtctggggcgactccagccctgggttaggaggatgaaacagacgtgtgccatagaagctcagaaaagacaggttccagatctaaccatgagacataccacactgctttnagaagatgctgtagaaggatcttcatagcctcagaactgggaagtatggaaggcagtangaaaagatgtnaggngttagntgtggtggctcatggctgtaaacccagcactttgggaggccaaggtggg

SEQ ID NO: 550043 - DNA, 419 bp, Homo sapiens
cataggttagggaggatcaaggtgatgagggctggaaagaggggctggggtcgaatcaccagatcctgtggttgcaagggaagagcctggagttattctcagagcagtgagaagccactggaaagttgtttttttgtttttctgtttttgagacagagtctagctctgtcacccaggccgactgcagtggtgcaatcttggctcactgcaacctctgcctcccaggttcaagcgattctcctgcctcaggctccccagtagctgggattacaggcacatgccaccacacccatctaatttttctttttcttttttttttttttattggaaaaagattttctgcccccaaggttggattgccgggggccaatctcagctcagggcaccccccccctccggggtacaagcgatcctcgggc

SEQ ID NO: 550044 - DNA, 670 bp, Homo sapiens
  misc_feature (116)..(116): n is a, c, g, or t
  misc_feature (142)..(143): n is a, c, g, or t
  misc_feature (154)..(154): n is a, c, g, or t
  misc_feature (156)..(156): n is a, c, g, or t
  misc_feature (161)..(162): n is a, c, g, or t
  misc_feature (164)..(164): n is a, c, g, or t
  misc_feature (167)..(167): n is a, c, g, or t
  misc_feature (170)..(170): n is a, c, g, or t
  misc_feature (179)..(179): n is a, c, g, or t
  misc_feature (182)..(182): n is a, c, g, or t
  misc_feature (188)..(188): n is a, c, g, or t
  misc_feature (193)..(193): n is a, c, g, or t
  misc_feature (205)..(205): n is a, c, g, or t
  misc_feature (213)..(213): n is a, c, g, or t
  misc_feature (220)..(220): n is a, c, g, or t
  misc_feature (233)..(233): n is a, c, g, or t
  misc_feature (241)..(241): n is a, c, g, or t
  misc_feature (249)..(249): n is a, c, g, or t
  misc_feature (264)..(264): n is a, c, g, or t
  misc_feature (278)..(278): n is a, c, g, or t
  misc_feature (281)..(281): n is a, c, g, or t
  misc_feature (293)..(293): n is a, c, g, or t
  misc_feature (310)..(310): n is a, c, g, or t
  misc_feature (315)..(315): n is a, c, g, or t
  misc_feature (325)..(325): n is a, c, g, or t
  misc_feature (331)..(331): n is a, c, g, or t
  misc_feature (351)..(351): n is a, c, g, or t
  misc_feature (366)..(366): n is a, c, g, or t
  misc_feature (378)..(378): n is a, c, g, or t
  misc_feature (389)..(389): n is a, c, g, or t
  misc_feature (395)..(395): n is a, c, g, or t
  misc_feature (402)..(402): n is a, c, g, or t
  misc_feature (415)..(415): n is a, c, g, or t
  misc_feature (425)..(425): n is a, c, g, or t
  misc_feature (434)..(435): n is a, c, g, or t
  misc_feature (440)..(441): n is a, c, g, or t
  misc_feature (443)..(445): n is a, c, g, or t
  misc_feature (447)..(448): n is a, c, g, or t
  misc_feature (450)..(450): n is a, c, g, or t
  misc_feature (510)..(510): n is a, c, g, or t
  misc_feature (547)..(547): n is a, c, g, or t
  misc_feature (555)..(555): n is a, c, g, or t
  misc_feature (582)..(582): n is a, c, g, or t
  misc_feature (605)..(605): n is a, c, g, or t
  misc_feature (608)..(608): n is a, c, g, or t
  misc_feature (612)..(612): n is a, c, g, or t
  misc_feature (614)..(614): n is a, c, g, or t
acacccgatgttgtcaagatggtttggggactaagggtccagtggggggagagatcctgcagaaccccccaaccagaacgtggttttgctgaggctggacctgagagaaagattcnggggctgtcttataaaataagacatnntcccataagcncngttcnncnccnttncctcctttnccnttcagngcagnttcttttcacantaggctgntgggtcnaactttgggagcncggactgncagttctntgggaagtgggcagngcatcccgcagggnttntcctcctctgtnttttggagaaccagggntcttntcaggggctntagggnctgccaggctgtttcagccnggaaggcccaaatcnagagtgagatgnagaaagttgtnaaatanaaaaagnggaggtggggaancgggtggtcnttccccccnnttggnngnnngnnanaagggttttagcagggtccccctttttttcccccccccccttttttttttattaatcaanagaaacttcaaaggtaatggggggggggggtttcccngggtgagnactcggtccccccccagcctttcatgnaaaagggggtttttttttatcanacnaacncnccccctgatggggaggggttccccaatctttccaaataaaaaggaatggctttgga

SEQ ID NO: 550045 - DNA, 328 bp, Homo sapiens
atctgtggtcataagacgtccagtgtagggcgggtccaacatcatcagtccccactatccatacgtaagacttgagtaagccgttaccttaccaactagctcatggaacgcaggcctatctcttagcgattaatctttcctcctcttctcatgtgatctaaggagagtatggtgtattaatccgactttcatcgggttattcaccactaagaggtaagtagcatacgtgttactcacccattcgccggacgccgacaacgtatagctacatctcgctgcccctcgacttgcatgtgtaaagcctatcgctagcgttcatcctgagcca

SEQ ID NO: 550046 - DNA, 913 bp, Homo sapiens
  misc_feature (8)..(8): n is a, c, g, or t
  misc_feature (10)..(10): n is a, c, g, or t
  misc_feature (20)..(20): n is a, c, g, or t
  misc_feature (24)..(24): n is a, c, g, or t
  misc_feature (32)..(33): n is a, c, g, or t
  misc_feature (39)..(39): n is a, c, g, or t
  misc_feature (71)..(71): n is a, c, g, or t
  misc_feature (108)..(108): n is a, c, g, or t
  misc_feature (133)..(133): n is a, c, g, or t
  misc_feature (138)..(138): n is a, c, g, or t
  misc_feature (143)..(143): n is a, c, g, or t
  misc_feature (176)..(176): n is a, c, g, or t
cattgcanancaattgattnaccnattaggannatgcantggacacatgtacttactaggcatatcacccntggcaccgtacggtcatgtaactatatcagtgcagtnggacttagcggtaaaagatcatctntcgtnacgcngttgctcatgagtactgtacgggcatatatganatacagcgtatgcataatatgcgcgcctccgtggcatcgacagagcatctctacgagtgatctcatgtgagcacttactgcatggagttcctacgatcactatgccatttaatctactagtctgagcgtaccaacaatgtacactagcgagatatcatgtgtatagttgtgacaccagagaggctcgctcgtgatcacttgtattcactagtagataccatatcatgattgaatgaggagctactcgtaatggatactcgagtttccttatgtaggaactatgcatctttataatagtctagtgatgacaagcactgcatctatatgcatgtgtacagtacgtcggatatctgccattatattgcatggccagaccattgacctataaggtactcatccgtattatgaacattatcatgaattttaatagatgctctaacatgcagagtctgtacaagactttgtcttaagggctcaaactggcagtttaaaaactgttacagaaagttggattttttgtaattttgtccatggctttaattccaaatcctttatttgatctggctggaataacgttttgacactttctgggacctttattggaccttattttggtgcaaaccctatttggataagcaattctttaaattgcatattccgaaaaatttttgtattaatatcttttaggtagccccattttggatacaaaatggatggttctcattggttccagctca

SEQ ID NO: 550047 - DNA, 203 bp, Homo sapiens
gccagctccaccccgtgactgctccctgcccaggcggacagtggggagggggcatacagcactctgaggatcataagggtggggaccccaggagctgaatctagaaggaaagggctccttccagaggaggtcatttggagatcctgccatccccacccccttccaaacagccaaacctgctctggcaacaccaccttacctat

SEQ ID NO: 550048 - DNA, 199 bp, Homo sapiens
  misc_feature (121)..(121): n is a, c, g, or t
tttcttttctccccacgaagagatttttttttataaagagggggggggggggaaaacacagagggcgccccgcccgccccttttctttttttgtggggggggagaggaccccccccccccngcgggttcctctccccctctcttttttttttttaaaaaaaaacaccccccccctctctgggggggggggggggcgggc

SEQ ID NO: 550049 - DNA, 1506 bp, Homo sapiens
  misc_feature (1)..(1): n is a, c, g, or t
  misc_feature (914)..(914): n is a, c, g, or t
ngcctgcggcgctggtgtagtctcgtagttctcgctggtcggtgttctctcacagttgggtggttgctcgttactctgttgttgcccagctcgtttgctagcccacgcaggttgcctccgctcgtgtgtccttggtggactctatcccgagctggggcgctctcgcgcagaacgagggtttttctgtttgccccccccgggggcgaaccttttttcggtcgctggagccgagtggtgccccccggccctctgttcttgtcctcccgggggtgtgtgcctctgatccgccggggtgggggtctcccccgcggtccgtaagcctttgtgtgagggggaagaggttttctttgggggggacccttcctgttgttgcccggcgtgttccccgttgtgtgttgaccccgctctcgtccccaggtttcacgggcccctggtgtgtgccccgaacaagccgaggcccccccacgggatatgtgagggatgttaagggcgcaacttgggcaccgagggaccacgagaagtttttgcccgcctgtggccaggagggcccactttccggggctcgctcctgaacccggccccccccgcgtttggtaaacccaaatcttcgcagcgttttaaaccttccaagagggattggagggacaagagaaatttgtctgtactattgcccccacgggtgttttctctgagtttggctccacgtgaatcgccccttctgaatgcgcctggtttaccctttcagactccccgggagagatctctataaggggaaaggagaatattggggagcgccaaactctagatgggcttgtgcaacccaaaaggccccacgagagaggagacaacccgcccgctctactgtggaaagagagagatttttctgccccgggatttgtgggaaacatagaganactggcccccgccccgcgggaactctctcccagagaatatatgagaagttggggtgacccccagagaatctctgggaaaaaccccgagagagatgtgaaacccctgggggagatatataggagaaaatatagagagagaaaatatgcgcttctcacagagaggagaaaattatagcctgtttctcctgtagaaatatagagaagagaatatatatcgctctatacccccgcttctgcgacacaactcgaccacattatagaatttctatcgaatgttgtaccccacattagctcgagaatccacgagaaggccactgtgaaagagtatataattttatatgtgaaattccacaaattattttctctctttttcccacggttgtaaacttgccttctttctaactctttaaaaagtatatatgaaccacgcttaactttcttataatcacgaaaagagaatgttttatatgaaccactctttcttttattaatataaagttatgaagaatgttctttcctatggcccgctatggctatctttgcccccagaaacataagttaaattttagagttctgttttccctgaggtcca

SEQ ID NO: 550050 - DNA, 267 bp, Homo sapiens
tactgggactggacggtggacagtcaacattccaagcagcatgaacaactgcatctgtaaaggaactgctggcaggtccctttagaatgtgttctggccacagggaggttcatcatgttcagtgcccttgaggaaggcgggttctgcatttcccagatacccgctcgctgagctccacactgccaggggacccatgtagcagcaaggggttagaacagggcagggagactttcccacaggcaaaattctcacacaaattcacaaata

SEQ ID NO: 550051 - DNA, 1791 bp, Homo sapiens
agtctcgagttttttattttttcttttttggaaaatgaaatgttccccatcataggggattctaaaccccgtcctccacgtatgcggggtgccaagcgtggagttctttgtagggcatacatgtgtcacacgattgggcagtggctagccaccacagggtcgggtgttctttcaaaaaggccacaccaaactaggccctacactgtgccctccgtgcacaagccaccgagaagagcgtggcgcccgaggaaagaccgcaagaactcgtggtcttacaagagctccgtagaagcacacattctcctcgccacaccagagacacgcgcgcggacaagcgacgacacagactacgcgccaaacactcaacaaagagtctctcgacgagatgtgcaaaccctctcgcgacacataaagccgctctcaataaaatctctcaccacgcgagccagccgccccctccaccacacgacatctcacgacgacgcccgcgcgtcacaacacgcgaaaaaagagagtgttgtctcatctctaccactagcacacatctctccaccaagaagactaagagcaagagagcgctcgacacaactcttcttatcgtgagcaaacaagagaggtggacacatattatgaggtagataagcaccccaaaggacgtgctgatccctctccccctgatgcgtagtaagatggtctcctattatcacccacaaccgtcgtgttgctcccgaaaacatgctgttgcgtgcgatgtggttacgaagcacaccttgtcgaacgcacttctggtggtcgactaactgatacagtgctcctactagtggtacgttgcataacaccacgaagaagaaccaacttctactatcctccttcttatattcagcatcattatccacccgaccaccgccgcctacctacttctatctcttactacctacttatactacgaagagcgagattgtgagacaaaggctcactacctgctggtagcagaccgataaaagactctcgaactaacaactaatgctagttgcgcgttagtatccagataccgagtagtagaccgactactctatgtcagcaacgacacaaactcagatgcatacaactaccattaattagtttgcatcaacaaccaaattccatcacccatctatctcactccacgcagatatacatctatcatactattataatttctctcgctacttatatcatattcctcatatattatactcataaaatatctattatatatatacttccacacaactattattcatattcaataattagattgctaaacactcttccttctcccacccaccaccaatactactccatctacatgctatatatagctcatattaaaccacaacaccccacacctctaaattacttaataactaacacaatacgcttgcgactcacaacacacccttcatgttcattacacacaacttatatcagtccgaacccatcatgtaccccacccaccatcttcttgtctcactcggcgtccgaccctcgacgcacaccaccgcagacacataacagctgcaacatcagcatagcagacaaagcgaagaggagaaacacaacggccagcacgaaaaccaactgaagagcgacctacgcgaggcgtgctgaaccaccccgatcagcgtactgaactcgcaatgagtcacccagcgcagcggcgacctactcacatacaacaaccgcaacctagcgtacacaacacgtaactaatgcgccactcaccaacagatacaatacatctatgagcac

SEQ ID NO: 550052 - DNA, 175 bp, Homo sapiens
actactattcctgtttcaattcatttgtttgtctgagaattgggaatgcatgtctgggcagtgattagaggccacagcaacgcagaagatgtgtgaggaggataatcttttttccacaatgagatgtcagaaatactgcttgctaaagtcagccatgaaaaccaaagcaagaaga

SEQ ID NO: 550053 - DNA, 451 bp, Homo sapiens
  misc_feature (10)..(10): n is a, c, g, or t
  misc_feature (117)..(117): n is a, c, g, or t
  misc_feature (402)..(402): n is a, c, g, or t
ggcaactttnccccaagagaaaagcccttcaggcaccaggacccaggcaagcccccgcaactggctggccagggcccgcccccgagcgcgctagtctccctctccctctcttttccnacggtctccctctgatgccgagccgaagctggactgtactgccgccatctctgctcactgcaacctccctgcctgattctcctgcctcagcctggccaacatggtgaaaccccgtctctactaaaaagacaaaaattagccggggtgtggtggtgcgcacctgtagttccaagctacttgggaggctgaggcaggaaaattgcttgaacccaggaggcaaaggctacagtgagccgagatcgcaccactgtactccagcctggggacagagcgagactccatcanacacacacaaaaataatttaaaaaataaagcatctacctgtggctgtga

SEQ ID NO: 550054 - DNA, 182 bp, Homo sapiens
  misc_feature (182)..(182): n is a, c, g, or t
agactgggtttcgccatgtcaccctggccggtctcaaaatcctggactcaagtgatcaacctgtctcagccacccaaagtgctaggattagaggcgtgagccagcgcgcctgtccagaaggctttattggtaaaaatataatttaaatctctttcaatacctcaaaactatcatataagatn

SEQ ID NO: 550055 - DNA, 281 bp, Homo sapiens
gatacaatcgagctcggaccccccgactagcccgacattagaggttttgctggtggatggatcgggcaccgtcttcctcatattccttttgggagacccacatctgcttaaaggtgtccagggcaggcaaggatggagcccccaatccacgtggaatacagtctctccggaggtgcagatatccggatcttcacatctttgggagctagtttcttcacttcagtcactgtcgggctagtcgggggctgtcgggctagcggggactgtcgggctggtcgggg

SEQ ID NO: 550056 - DNA, 478 bp, Homo sapiens
aagatggtcctcagctattcgaggctgagatgggaggatcgctttgggcccaggaggtcgaggatgcgtgagctgtgatcatgccatcacattccagcctgggcgacagcaagtccttgtcttaaaaaaaaaaaggaatttgtcggagttaagcatacttggtgggtttcaatccgatgtgattttaatctttattaagctcagactagcttattcgggtcagtgagagggagcctcttcagcttgggtctatgctttcttgggaaaagtgtgcagatgtgtgcatacttgtgtgcacagaccacacgcacagtcatggatagctccctgcaggcgggcatgtcaagatgctctaggcccaatttatagagcttctggtccaaacctgtcttaaccgaaacacttgagagaagttagcagtttaattgagcagagaatagtttcttgcagctgaggaccatcgtgggggtaccgagct

SEQ ID NO: 550057 - DNA, 509 bp, Homo sapiens
ttcagccatccctgccagtgtcaccagccgacagagatttgaattctccctgggacagagaacagggaagggcaggcaccatctttgctgtttgggtgactcagccactccagtctgtgggctttggagagcccaagccaacgaggacagaagcagtaccccagcacagcacagttgctccatgaaagcatggccagactgcttctttaaacaagtccctgatcccgttccttttcactgggcagaatctcacaactggggcctccagccacacataccgatgttctctggctgacagagatttgaaaacttcctgggacagagctcccagagggagaggtgggctgccatctttgctgtttgggcaacttagctgttccagcctccaggctttggagagcacaagacaatcaagggtggaaatggtaccccaacccagcacagctgatctatgaaagcatgcgcagagtgcttcttgaaatggtcgccaatccggggtaccgagctcg

SEQ ID NO: 550058 - DNA, 220 bp, Homo sapiens
ttttgaagggggggcccccttggggggctttttttttttccccccgggagaaggggggaaagggccttggaaattaagggaggtttccctccctttgccaattccgggccaaaaagaaattttttttaggggggaagggaccccccacctgggaattccctttggggtccaaatggggccccccccggcggttttcccaaaaaaagcggttttggaccta

SEQ ID NO: 550059 - DNA, 685 bp, Homo sapiens
gagaggtgttaccgtttcggcggcgacacgggtgtttccgaactaaagtggatagaaaatcaagtatattttacatgacggtatgcggtatcaaggaggacgaccttggcagccgaggagctagagccagctgcactgtatgcagtcattccagcaccatcagaatccatgccagatcgataggcctgcattgacccaagcttgcattgcccaaagagaagtttcaggacaggatagcttggaagatcaaccagtagcaatgatgtcttaaggcccagatatgtctacaaaggaatgtgtcgcacacattcagggaaatttccaagggtgttcacactttaacatgatgatgcaaccagggttgttgctcatgttttgacaattttgagacttttaaaaagcagaatgaagatcatgattaaactgtgtaatgtgctaagttgtatgactattcgagattaatgcttgttagtgaataggcagaattcaatttgtagtgactttgacattttgaggtgttgttctgcactaattatgcttgctatgccgtccttagatcgaatgtatccgcggatctgtaatcctaggctgcagggtgtgggaacaatttggaacgctgacctggagaccatggaagagcgcaatctttgtgactctaatggcattgaactctttagagctgctc

SEQ ID NO: 550060 - DNA, 114 bp, Homo sapiens
ttactctgaggatctcccccgactagccgacaggtaggtggagggcacaaccttgtaggtgcctgctggcgggaggcagagctggctcacctactgtgcgtagcggatgtggca

SEQ ID NO: 550061 - DNA, 105 bp, Homo sapiens
agctcggacccagcgccctagcctataaggggatggccatggctaggtttttagatagttgggtggttggtgtaaatgagtaaggcaggagtccgatgaggctag

SEQ ID NO: 550062 - DNA, 350 bp, Homo sapiens
atctggatgggcacagtggttcgtatgtataatcccagcatcattctggaaggcaagagaatcactgagcccaggaattgagaccagcctgggcaacacaggggagacccatctctctctttttttttttttcttttcctgagacggagcttcgctcttgttgccaaggctggagtgcagtggcacaatctcggctcactgcaacctccacctcctgggttcaagtgattctcctgcctcagcctcccaagtagctgcaattacaggcatgcaccaccatgcctggctaattttgtatttttagtagagacagggtttctccatgttggtcaggctggtctcaaactccc

SEQ ID NO: 550063 - DNA, 873 bp, Homo sapiens
cgcgcaatgggcgtatccggtgggcacacgggtcagaaaaggtgcagaaaggttatttggtgccagccgcatcagaaccgtcatcgtgtcagaatacgtgtaccgaaatagattcccggatttcagcgtgtggcctctattgagcaacgtggaaaaatgcggaatagaaggctgttatcacattgggttttgatagagtataaatggagacccttgtgattaagattgattcgccacgatagaggatctccattcttgaagacaccaaagctccacaggagacaccaacatggggtctcgagatctaatagcgtaaaaagggaggtataaataagttcacgtcttgcgtcaccaaagagtggtcttccgcaacattaggaaatggactccaatgtgaagatggagagaaatatgtgttgtgagagaagaggatacaccagatttgtgttctttaaagaaatagctcgcctgtgtggtccccaaaaggtggaacactttaagtgcacaattggttttggaattgaaccctccgtggtgtaactacacacaagagtgggcacataaataaactcatgggagattgtgtttgtgattataaaaatattaacacttgcgtttcttacatgattcaccgcacgtagaaaactttgttaacaccacgtgaacacccactttgcttggttggtaatttagtgttttctgaaagggtcgccacgttgcccttgaggcacacttggtaattcgcacgaagcttggagacctgtaagagttttgagggcacagaattaggaattctgcctgatgggtaagcttccagtattgggaggtggagaaggggagggttcagaaaaataaataagagttattgcacta

SEQ ID NO: 550064 - DNA, 391 bp, Homo sapiens
  misc_feature (16)..(16): n is a, c, g, or t
  misc_feature (251)..(251): n is a, c, g, or t
aagctcgcactccttntggccacgccactgtaccgggaggctgtgcattaatcggtaaactccgatcagcttcctggagccctgctccatcgcgtagatcaaccctggcgcgggggcgcgcgcagagcgtttgctgacgattcttatgggtacctgatcggtgatcggtaattccccaaaagccgcctgcgcggcttcaattatcgcgcggttctgcttgaacaagttggggtctgtcttgagctgagacngcagggcaacactggtcatcgtggactccgcgttgagattgccggcgcgggagccatacatgttgacgcccgtcttgcccacaaggactggtgcatcttcacctggcaggaccaacactgcagggtcggtatgcccgttg

SEQ ID NO: 550065 - DNA, 112 bp, Homo sapiens
gtgtggctgtgcaggctctttccccacagctgccctcgtgggctgagcggtggtcagtgcctgcggtttcccacaccgagggtgcaagcagttggtgagtctatgaatctgg

SEQ ID NO: 550066 - DNA, 123 bp, Homo sapiens
tgggggggggaccccctttttttttttttaaaaaaaaaagaaggggggggggaaggaaaaaagtacccgggccccctcccttttgtttaaaaaaaaaccagggcccccggcccgggggggggt

SEQ ID NO: 550067 - DNA, 424 bp, Homo sapiens
  misc_feature (217)..(217): n is a, c, g, or t
tatctaaggatcccgtgtcatccccttcgtggtagtgtatgaatgaatgggtgagtttgtgaacgagtgggcagttagtgtgtgagtgggcgagttagtgtgtgaagcagtgggcaagtttgtgaatgagtgggtgagttactgtgtgaatgagtgggcatgtgaatgagtcgatgagttagtgtgtgaatgggtgggttagtgtgtgaatgagggnttttgtgaatgggtgtgtgaacgagtgggtgagttagtgtgtgaatgagtgggtgtgtgaatgagtgggtgcgttggtgtctgaaagagtgcgttagtgcatgaatgggtgggttagtgtgtgaatgggttgtgaacgagtgggtgagttagtgtgtgaatgactgggtgactgtgtgactgaatggggccagtgtgtgactgagtg

SEQ ID NO: 550068 - DNA, 347 bp, Homo sapiens
tctgggtagactctgaggatccccagatgcatgcagagaaccccacaaatctcctcgaaaagagcaacctcaagacacataattgtcaaattcaccaaggttgaaatgaaggaaaaaatattaacagcagccagagagaaaggtcgggttacccacaaagggaagcccatcagactaacagcagacctcacggcagaaaccatacaagccagaagagagtgggggccaatattcgccattcgtaaagaaaagaattttcaacccagaattacatatccagccaaactaagcttcgtaagtgaaggagaaataaaatcctttactgacaagcaaatggggtaccgagc

SEQ ID NO: 550069 - DNA, 839 bp, Homo sapiens
  misc_feature (219)..(219): n is a, c, g, or t
  misc_feature (233)..(233): n is a, c, g, or t
ataagtggggaattgttctctgtggtccaaaatgttctctgaaaaagatctccttgttttcccaaatgattctcttagaaaggaaacttgatcattctgcttgttctggagtgttacacaagtgttataccttgttctggtgttataccttgttctggtgttatacctttgttctggtaggtagtactaccaaaagagaacttgagaaattatcccttngggtgaggatggtntgtttcaagttttttttttttttccttcaagaaaattctcggtcttttaatttttaaactttcggcatctgggttaatcaaaatttttctaagagggcaatttggagggttttacaattagcaattacggcaatttgaagacttggcttatgagtcaggtgagatgagggcaaagaatattctttgtcgagcaaggggtgcaagcttaggacccattcttaaagtcgggggagaattaaatttgggcggtaaaacaaagtgggccaatttttaactctttggacaaattctgtgagcgaaggccggtcaacccctttttcggtcctgggcttggtctccagggggggggagggggtggacttaaagccagtggtgtcctttccatgaatgggtggaggtcgatcctcccatctggcgggaaactggtatcaagctaaacgtgcgagaaccctttgggatattccaatttctctgtacccagtattgttttcactcctggtttacaaggttcaaaagagattgtccgtaacatttcttctagtttaaaaacaatccctaagtttttttgaacccttgttggggcgcttaaaggtctcttggtcccca

SEQ ID NO: 550070 - DNA, 109 bp, Homo sapiens
ccgatgcaagcatacaggacactaaaatgccctttaaaaacttaagtagaataaacagaaagtacgtgggtcataatcttctggtcaccatcgatccatcctccatgga

SEQ ID NO: 550071 - DNA, 645 bp, Homo sapiens
  misc_feature (575)..(575): n is a, c, g, or t
  misc_feature (592)..(592): n is a, c, g, or t
gccccccaggagctttctaattcttttttttttttaaacagtgaaattctttattcaaatgaaatctcacagaagcaggcctactcccagtaaaacagggttggggattctagagaccccacttgctaggctccacttttgtggaccccttagggttctgaggagcagagcttggaaagtgaagccaggacataagggttctgtgtcacctctgtcacagctgactcagtgaccttcagtgagtccattcctacctctgggattctgtcctcgggttccgaaagacagggaagggagaaaaataagtacaaagtagtgagttttacataaagcctgttattctgttctatttttacaatgttaaaaatgtcctttcttttatgttacaatagtaagagaagattataaaagtttctttttgaatgccctttatagattaaaaggttgcctccctgaacaacttttgtctcagggaatacttactggttcttgaagcccaaaggtgtaggaactcctttggacaatatccatgtttttcaaactttttgattgcctgccataggggaaaaaaggcntttagtactcttatatntaaccgaaataacagtctataaaaggtactttagtggaatgtaccccgatatt

SEQ ID NO: 550072 - DNA, 574 bp, Homo sapiens
cgcagctgcagcgtccgggccgtgatgcctcgctccgcggcatttagcctgagtctcgggcctactctttttattgtctggccggggagcgctctccagcgggacacacaaagattttatgtttactcacgtcattcagcggagaacgggaaggcaaatcccccgaacggctatgtgtctgggcttcatccatccgacaatgaagttgacttactgaagaatggagagggaattgaaaaagcggacccttcacacttgtcattcagcaaggactggtctttctatctgttggactaccacggaattcacccccactgaaaaagaggcagatgcccgccgggtggaccatgcgactctggcacagcccaagaaaggtaaggggaatcgagacatgaaacagcatcatgagggttgaagagcccgattgggatgggtgaattccaattctgctgcttgcttttatacggaatggctatcctacccttaagggccaaaggccggggatagatggtgcatcccggcagggtggtcccccagcaggcctaaccggggtcggcacttaaaggggggagcg

SEQ ID NO: 550073 - DNA, 244 bp, Homo sapiens
ctgctgttcgggcacataggtaggccgagcagcacgcgtcgttgcgcacggccagcagatcgagtcgggcgcgcggacgtaggccaggtcggtgatcgtgaacccgttgaaccggtgcggcgccatgatcgaaacgtcgaccgtgcggtaggcgttggcctcccagctgtaggatagctcgcgaatccgcgaaccctgggcctgcacgtagagtatcgaacccgtggtcaccaccggctgcacg

SEQ ID NO: 550074 - DNA, 234 bp, Homo sapiens
actgcgtcaccttcaccgttccagtttttacatcctgagtcacgccaaaaaaaaaaaaaaacccaaaacaaaccaaaaaaaccaattaaggccaggccattctcattgggtttccgggcgcacgttaggtttggtcaagaaaggggcgtaccgcacctaggtcatagtcggcctaaaagctttggggggggacagatgggagggggcgggacctcgtcattggagggcacagat

SEQ ID NO: 550075 - DNA, 145 bp, Homo sapiens
gtttcccttgactaaggaacaggtgcccatcagagtggggcgggcagctttgggaagtgacacaagaatgcagtaatgatgtgtaaatgatggatgctggcctgggcagtgccagtccatgcctggccactagcagaataccaat

SEQ ID NO: 550076 - DNA, 254 bp, Homo sapiens
ccccccccccaaacccccccccaaaaaaataaaaattttccacgcccggttttctccttttaggccccggaaaaaaagggcccccccccccacgggttttgggcccccccgggccccatgaaaaaaatcccccccccctgggttttaaaattttttttttttgggtttttcttttttttcctttttcctttttttttttttcccccccttttaaaggtttttttaccccccttattaaaaccccttttgtttta

SEQ ID NO: 550077 - DNA, 802 bp, Homo sapiens
  misc_feature (117)..(117): n is a, c, g, or t
acccaaatagagtgtagcccatagaaattgagatcctgtgagacatgagactatagtaggctcgcacatgaggaagagtatcgagagatacattgataatacgcatgggtcagtaantatctatgacacaggatctaacccgtatggcgtctgcctaatggatattagaactagatactaaatgggcataggaggaagccatagctgaaatcctactcgaaagcagatcgaggtagacgtacgaacatgctaatagagcacagcccggctatgtagcaaaatagtgggaagatttactaggtagaggcgacaaacctaccgagcctggtgatagctggtttgtccaaggatagaatcttaggttcaacttttaaagtttgcccacagaagcctctaaatccccttgtaaatttaactgttagtccaaagaggaacagctcttaggacactaggaaaaaaccttgtagagagagtaacagatttaacacccatagtaggcctaaaagcagccaccaatttaagaaagcgttcaagctcagaagccactacgtaaaaaatcccaaacatataactgaactcctcacacccaattggaccaatctatcaccctatagaaagaactacatgtcagtatcagtaaccatgacaaagcattactcctccgaaataacgccctgcgttcccggattcacgaccacttgaactgaagcaattaaccaggccaagatatctgccacttcaccccaccaaggttcatcatacaccctcactgtcaaggcgcacagacagggcctggcccgta

SEQ ID NO: 550078 - DNA, 1116 bp, Homo sapiens
gggaacccggtcgctccgttccctcgactctccgtggcgtgcgctgcgcacatgagcgcatgctccctctggtcacctcttcaccggaccctcggactgccccaatggccctacgaacgttcgcgtcctagcggctggacagacgagtccaatcggccgcacagccagcgcgagcatcttcctttatgatcgtccgccatgtactgaccagcgtccacctcgacaggtgcgccagaactaccaccaggactcagatgccgctatcaaccggctgaatcaaaccttggagcgtctacggcgctccgtgagcggtcgtagcctgctccatgtactaacctatctttgatccgcagattgatagtgggctcttgatacaaacctgttgaccatgataccttttccattcagtcaggtctcagtgaaagacgaggcgaaaccattgtctgaagcacacaactgctgtgacaggtcttgccaagaaagccaaaacgcagtgttggtgccggcacagtctgtcccctgttccgagggcattaatgccagggaacccatcccaagtaacttggtgagatggccacttggggctaacacccgggcgtcgttggatagtggcaataccggggcaggtttgtttgcaagtatagtactttctagtgcaaatgaccccttgttcgaccactccccgatgccacgtaccttcggcacagcttagtcacccggaagcattggaggcacgaacttgtatccaaagatcgattgggagcccccacaatataaaggtgggtcgacccatttccgactatgtaggaacctaacacgttgtaacccttgaaacgtgaacggcatgtgttcgacacaaggcccgatccaaaaagaaacttgtgagaggttagaacccacggtttgaatcccaatcatttgtgtcaggccatcggacttgagcggacgccgcccccgaaatcccttgcgcctttgcgagctggcaaacattatttcttccttttgttgaaccaaaaagggcaacaacccgctttggggcaaagaacgcggtcgaattacatttcgacaagagggcttacaatggccttcccggggggcttaacatttttacccccc

SEQ ID NO: 550079 - DNA, 359 bp, Homo sapiens
aaaaaaaagggtccaagggggttgggggggggaaaaaaaccccccctggttccttaaccccccaaaaagttttttttattccccccctttttttttccccaaaaaaaaatgaccccccctgctttggggggggggtttattccccccccaggttttagtccgttccccaaagaaagggggacccccccccctttttttttgaaaatttccttttttccctttgggggggggtccccccccccccccatgggttttttttttccccccatttagaatttttttttttgtttgacccgccggttttttttttatttaaaaaaaagcctcccccccaaagccccaaaataattgggatttta

SEQ ID NO: 550080 - DNA, 91 bp, Homo sapiens
  misc_feature (41)..(41): n is a, c, g, or t
  misc_feature (60)..(60): n is a, c, g, or t
cagtgggcacttttttttttccaccctggctccttcagacncgtgcttgatgctgaggcnagttcaataaagattcttggaagttttgggg

SEQ ID NO: 550081 - DNA, 127 bp, Homo sapiens
aaagaagtatcaatagcattattaactcattaccagacttgtcaacaaactctggaaaacacctgtcaacactggcaaggcaaatcagcttctattcatatggagataccctatcctcagagctcta

SEQ ID NO: 550082 - DNA, 203 bp, Homo sapiens
  misc_feature (171)..(171): n is a, c, g, or t
ggagggtgggacggtgaatgctctatccttgagcgtttatcaagtccaagccttcattttacagcttgggtgaacctgcagggacagagaaaggggcgaagtcactcattgacgggtggcatggtgcgggcatgctaaagagttatggtacgcagatcctactttttcacncctcctgtagcaactgggacaaaaaatgctac

SEQ ID NO: 550083 - DNA, 1458 bp, Homo sapiens
tgctttctgctcttgttgcgtgtctttttgtgcactctgcttggtgtcctctctggtgttctggtgctgtctttctgctctttttctcttctgttctgttgtgttgcggttctgctgtttttgctctgcgtgggctttgctccgcggtctccttgtcccgcgctgcctgtcgctcctctctcgctcgttctacttgttcttttcgttccgttcttcgcttgtccttcgttgtctgtcattttttttttttgtttttctcccctctgtctttccggttctggtggctctcttgtggtctctttttctgcgttctgctgtggtttatttgttgctgctttcctttgtgtgtttccttgttcttgcgtttttgtctttcgtgcctgctccctgtctgtttgtctgggggtttgttctctgtgttgtcctttctccttttgtgttcgttctttccgtgtcgtctcgtggtcttctcctgttctgtcctttcttcgtttttgcctggtggcttcttagttcttgtcccctgttgtgtgcctgatcactctgctttgttctgtgattcagtgctgtttttattccatgggtctagtggttactgtcaggggttacctttggggttatatctggttgttctctgcgcggtccatgtctttcgtcttctaagctgcggtcgatttgtcggtggtggttgcatccgtttttctctcttatggtcacaagttttcacatgtctgttggtttttatttgggtatgagtatcatcgtgtattgtgattcttttgttgtgtttatgaattgtctattattttgatatgatgtttatttgtgctttattgtactgtgttttatgtctttgatgtttatcatgtcatagtattatattttaatgtatctatgatatgtatattttccctatgaatggcgagtttttccttggttttgtttccttgttggttataattgatgtgatggtttagattcatatatgatatggttatctatcgttgcctgtacatctttttgtgtccctggccatcttcactggtttgtaacctaatttactcatagtacctaggtatcctggtagggtagtctctacttgcgggtagtctagtaactgtcagtggtgcagctactctggactggtctggggctacctggtcaggcccaggtcagatgaggtctggcagagatcctatctgaagtccatgttgtgatgacgctacaccttcatggtatctgcttcagttgtcacatgatcctgacattcagtctccctgctctggggatgcggattaaagcgtctctgaatgttaatagtccaggagaggaagcgtgcagagcatgttacagaccgagcgggatgcactattctaactttgacagggtacggcagggccaccagaatctgcatgtgcccgctgcccatagtgagtcttcctggctatccagaagtaa

SEQ ID NO: 550084 - DNA, 303 bp, Homo sapiens
acagatccacacatcacagaagtataatgaactgttcaactggtacaaggtctggttaagactgcaggttaatcgcacatgcctttaacgaggacacacatgatttttgaggctttgacaactgcacattttaagtatccatgtctagtatatggtacaaactaagtgaggtgaaatttttaagggtgtaaaagactaacagagaataaagtaaatcaatatgagtcatgtgtaagagtttaattcattttcctgtctacagatttcactaacgtccgttttagttcaatctctttgctgaac

SEQ ID NO: 550085 - DNA, 439 bp, Homo sapiens
  misc_feature (61)..(62): n is a, c, g, or t
  misc_feature (80)..(80): n is a, c, g, or t
  misc_feature (84)..(84): n is a, c, g, or t
  misc_feature (95)..(95): n is a, c, g, or t
  misc_feature (168)..(168): n is a, c, g, or t
  misc_feature (182)..(182): n is a, c, g, or t
  misc_feature (202)..(203): n is a, c, g, or t
  misc_feature (218)..(218): n is a, c, g, or t
  misc_feature (270)..(270): n is a, c, g, or t
  misc_feature (317)..(317): n is a, c, g, or t
  misc_feature (328)..(328): n is a, c, g, or t
  misc_feature (335)..(335): n is a, c, g, or t
  misc_feature (360)..(360): n is a, c, g, or t
gcagccctctgcacacgcttgccgtcttgtctggctgggcagctgagctccagatgggggnngatgggatagctcttgcnaccntatttggaganagatggcagggaagtcagcccccgtgaagaagacaggagcaggcaggtgctggacagtgctgcccaggccctngggctgaagtgtcnaaccccacagcctctaggtnncactaaagcagcccnagaggatcttctctgtccatctccatcctggcacctacagacacttggaganagtccttcacatgggaactcacaaatgcacactgataacccccacanggaactctcanacgtagnaagtgaaaagacaggatgccagttnaacttgaatttcagataaacaacaaatcattttttagggtaagcaggtcccaaatattgcatgggatatatttgcacca

SEQ ID NO: 550086 - DNA, 775 bp, Homo sapiens
  misc_feature (428)..(428): n is a, c, g, or t
taaaaaccctcatcaataaatggaaacatacaaaaatagtcaaaccacttctacaaaatgtcagttatcaggcgggggtcttcaaacccaaagtgatgttgggtattgtaaaggtggacaattattaatgttgggcgggtatgaacgcagtatagtggaggaaatgtttgacgccaatatatggcactgtgaatgccctgtggaacgcctgcggggctcacaaaaaatattgttgacgcctggtaatatcgccgtcggaatatggtgtgaaaggggaagaatctccgaaagttaactcctcgagaggtctgtgatgagagaagggtgtaaatataagaagaacccagataaacatatgggttatatgaagccaggtgctctgtgaatattatatgtgtgggttacgcggttgttgtattctctttatntcagacatctatagtgggtgaagctctccgagagtgtgatatgtgttatatatctccccgtgagagtgcgcgagagacttaactacagcggatagtgtgtgttatcagagagagagtgtgagagaatctatctaataaggaagcgattctatacggcgggggagtatagaagtcgcccgtgtgtgtggcgtgcgcccatgttgtgtcccctccctataaatgtgggggggggggagataagggggcgccataagagcggtgagaagtgtgcggctacaaaaggggccctccagaaaaaaaaccccccgttggcagaacgaacaaaaaaacatctttccgtgaaggga

SEQ ID NO: 550087 - DNA, 614 bp, Homo sapiens
tggagcaggtgcccaaaacgtaatgaaataccagtacatctgccaaaatgacaatgtatcattcgtttcctttcttaatggtttgatagacttatttatgggctgcatggagctttcttcgaaattgtccacatcaccatctttatcaaattcgtcttccgcaacaccttcatcacttattttaacggaagccttcttgtcaggagtattcatatcttgtaaaagatagctatccgtttcgcggccactaaatttgcttctcacggagcctttggagcgcagggagccactccgacgagttgcatttgggtttacaccggtacttgatggtaaaacatccaggtgattcatctgctcctgcgttttctgcgcataataaaaatgtggattatcaggattgttcagtcggcttctttcgggccgcactaaagagccttgtctatgaggtgctcctgagccgacactgtgtcttgacctaagtagagactcttcatcttgattaaggttcagatagtagtcatcaggatcatctccattcaagccggtcattctaatttctttcctgcggatagtctaaacaggacctttaagaaaatgggacctacaccaaaaat

SEQ ID NO: 550088 - DNA, 330 bp, Homo sapiens
  misc_feature (73)..(73): n is a, c, g, or t
ttttcccccccccttatttttcctttattggcctggagggtccttttcaacttccgagggtgaacccaaagangggctctttttaaaatcatcccccatcccaaattcctgtccccccaaataaaataagccctatgtttttaatagccccttaaacatggtttttttttaaaaccccttcccctggggtgtaaaatttttgggtttttttcccccctagactgtgggccccttgagggcaagttttaactttttttcttttttgggtttttagaacttgggccagggccccccccccgggggggccccataaatgttggttgaatgtta

SEQ ID NO: 550089 - DNA, 413 bp, Homo sapiens
  misc_feature (117)..(118): n is a, c, g, or t
  misc_feature (156)..(156): n is a, c, g, or t
caagagtttttccaattcaagaaagtccccatgctttggggcagggccctgccccagcccatgtttatccagtcagccaaccagccctccaaagggcgggccccccaggttaccggnnatttagggccttagttggcaaggccaaggacccccacncaattttttccatacagcccccggcaatggggccacccttcctccccaaaggacccggccgccctcagcccctcctgcaggttaggaccttggtgccctcccccccctgcctgggggccgaaattttcccccaaaaaaaagcaaaattttttgtttcctttttttccctttttttttttaaggaaccaatatttccatatgttgagggggggtcccatgctatgaaattaaaatttttaataccatttttttggcca

SEQ ID NO: 550090 - DNA, 419 bp, Homo sapiens
gtcgtctaaggtccccctgcttgtctgcctctgctgagagagcagatcgcacctcagcagccagctttctgccttctagtcacgcctcgtcatattaggggttagcacgaggggtcttcttgttttttgtagtggggggtgtctcactgttgttgcccaggacggttctctaactcttgtcctcaagtgatcctcctgcctgtagctctgaaatgacagcatttacgggtgtgagctggcacacccagcaggttcttaccctttataatgaccacacaaaattctcctggagttcctgggggagattgtctctttgaaatcagaatctttcccatgacagcttgagcatatccttcaggctctttctggattggaggcagaagaaattgcagctcggtgaccacgaaggcagcaaagag

SEQ ID NO: 550091 - DNA, 374 bp, Homo sapiens
cgtgtgaatcgacggttctctattgtgacagagttcgctctttcaccaggctgagtgcagtcacacgatctcggctcactacaacctccgctcccaggttcaagcaattctcctgtttcagcctcccgagtagctgggaccaaatcattctcttttaaagcacttgctgggtcaccagccttgtgtttccttcaggcataggtgccctaactgccaggtcctccttatggtctgcttagtggtgatgcaggcagctatcccatgtcactttactttgacttcgtgaagcaccgtgtggtttggcaagattcgcccttttcaccttcgggtcgcaacgaccagctagggcctagaactctagctgtcaacggcac

SEQ ID NO: 550092 - DNA, 469 bp, Homo sapiens
  misc_feature (24)..(24): n is a, c, g, or t
  misc_feature (41)..(41): n is a, c, g, or t
  misc_feature (83)..(83): n is a, c, g, or t
caccattgtacaagcttagtaacnccagtagcatggcaccnactgtggagaactgcacgcttggtcgaaggcttcttgtaatntcttaggggtttcatcaacaccattattgcccagtgacaggtcaaagtagtgagcgtactgtctgcggatggcctcagagtccttctgcagctgctgcagggattctgtctgagtgctctggtcagtaggtgcaatgagcacaatgaaagtgataagttctgctgtgcgaacaattgtcagggtctcgggctcaatgtcaaggatggcagtcgtgttctgcttatggatctggtgcactgtttcaaatttggtgccgaacatgttgccatggagtctgccaaactgctagtacgcattgtcagatatgttcctcgtcatctcctccgttgagatagagtggtactccttcccatcgtcctcactctgcctagtcgttcgtgttgta

SEQ ID NO: 550093 - DNA, 785 bp, Homo sapiens
caggtgcatggcaccctttcctgtcgggaagggagaggggaactacccccccagctgccctccgcccgcccagccggcggactgtgctgtttcctccgcccccagtcccgtgtttgctgacctcctgcctgagttggggtattatagacatattaattgttctgactgagctcaattagctggttgggagaacgtcttgaacaaaggggagagaatggctgggctgctgtcggagttccccacctccgagacccttccttccacggtccaatcctgagggcatgtggatttgggcacgtgtcttgggggccccccatccttgcatgctgaaggatttgggacgggaggtagcatagacgctagatgaaagtcccccttgggccactcggagcgctgacgaaccttcccagtgtagcaatttaaaccgccccccagttgggctgagaggttcccagcctagctggagtacattacacattcttgggaccccacacatggccctccatccgaacgtggccacccccgttggcacacctttaagtcgtcgcgactgtttccatggcttccttacgacaagttacgcgcagcgaagaggaggaaacataactaatttcctccccattaaaccttggtcgtggccccaaattctgtccaacactgggtgtggaattaggattgctactactcggggtcaacgttctctcattctatgatgttcacccgccccctaccatcctaaccgatttaatgtgatcagttgtcttgtctatacaacttggcactta

SEQ ID NO: 550094 - DNA, 349 bp, Homo sapiens
ctgcctagagagagcgtgtttcttttccctcatcttgagctcttattttcttgtctcaagtgctttctggtaacctttgttcacctggtacttctcaagaaaaaaagaaggatctcttacgagaggagagccagattaatgaattagtgagtcactcatagcagcgcagagcaaggagagaatctgcaatgtgaatgaggaggatctgagtgtgggtgtggttgtacttggggaaaagcaggacctctcttgaacccttgacatggtgcatttgaggcctctctcacagtagggccacgtgagtccctgaggagccgcaaggcatagtacagccttccctatatgggcc

SEQ ID NO: 550095 - DNA, 544 bp, Homo sapiens
agaaaaaaattagccgggtgtggtggtgggcacctgtaatctcagctactcaggaggctgaagcagaattgcttgaacccaggaggcagaggttgcagtgagctgagatcacgccatggcagtctagcctgggcaacaagaatgaaactctgtctcaaaaaaataaaaataaagataaaataaactccatcttaaaaccagtgaaaccaccattgcaaaattataactgagacagtgagagatctgacctaaccaactccatcctacttttaacctccaaactgtccttgttcattcctgggtgtaggccaaactaactttggaagaaacttagttttatgggttttccccgaaaacaaaaatccttttccttgtctggagactagactgctttgtaggacttaacaaattagcccacaagattagaaattcatggtttaagaaattccatgcagctgggagatttaccaagaattctgaaccttcccttaaaattggcttcccgggggattaccattcccttattgaaaaaaaccctaaacaa

SEQ ID NO: 550096 - DNA, 289 bp, Homo sapiens
acctcagccagttctcagacacttaggggacattttctctgcaggaccactctgagggactcttctgcatattgctgacctgagaggatgtcctcagagctgacttggtcaatcctccccaacaggttggggtgtcatttctttccactgagtaaacagttctttaagtggtatatatgtttcaaggggcgaagctactttatttcaggggaaaacgtgtctctttaaagctgctatgtgaacagcttttatagtcattaaatttacctaaactaaggttaaaaaaaaa

SEQ ID NO: 550097 - DNA, 204 bp, Homo sapiens
ctgctctcacatgatgccatcaaagccctgatggccacgacgttcttgctgtgcacctggcaccctgaatctcagtgcttcctgcaggctcctcccctgggagaggctgaagatgacggaggcattgaaggtgtctccagctcccagtgtatccaccacgcgtggtgctgggaaagcatcctgagtggagcaatttgccattgg

SEQ ID NO: 550098 - DNA, 269 bp, Homo sapiens
gtagtgaacacattagttgtatgaacacttattacgaaactgctgatcataaccatcctgtgtgtacatttgtttttctccaaaaaacgtagcacccttcagcaggaccctataaaactttcctccagcccttgcctctttgcaggtagccccttctctgctgagctgcccactgcaacatattttcacaatttctctaataaatctgcccttctttacctacaactatcttggtaaatggctttaccacctgcaaaactgaccctagg

SEQ ID NO: 550099 - DNA, 142 bp, Homo sapiens
ctcctaccgacgatccaggtccgcaaagaccagtgtgtgttcttgggcaggataactgaatttccccatttcaccgtgaatggaggtgacgcagttccctttagatgtttgtctaacggttaaatgaaataatatgtaggag

SEQ ID NO: 550100 - DNA, 211 bp, Homo sapiens
gcaaaaacaaacattttatttttcatgataggagctgtaccaaattatatgggggcctttgccaacccccaggctgggactggggcctgtgaccttgaaaaccttatttaacattttgcaaactttggggggggggcagggctcaaccactggctgggtgggctggtcttaacctttcctgcaggcccagggctgaaataataaccgtaag

SEQ ID NO: 550101 - DNA, 111 bp, Homo sapiens
atggccggtgaagagctgcagtgagactctcctcagtgctcatgaccttgagccatgtgctggtgacagcctgtgccatgcagggcctttcacagcctcttcacccgccat

SEQ ID NO: 550102 - DNA, 881 bp, Homo sapiens
  misc_feature (647)..(647): n is a, c, g, or t
ctcacatgctctgcatggtgcatcccgagataccgccccatgagacctgccatccagttggttgcccaggctctacggtgtcgagatccatccgatggcctaccagctgcggtccaagtcgccgagcaacttcatgagcgccagtcaagaggagttcgcgtgattccctcccctactgttctgcagtctttgaacttttccgtttcttttctagccaacctttatgcaaccctgtctgggtgctcagtattaatatttaaaggatgtcgttatcgctggtgggaatatggagataaagtatacatgatgcgtcatctggagcctagaaataaagggtcatcgaatggtggtgtgagctcgacggttccccacttggaggacacgtctgtactaatcacgttcgaatgctgccaggtccctctggagggtcggccaaacttgcttttgccctccttggtccaaggacacagtcccggggggaataacatactctttcgtttaggccactggattaaagtaagcgcccgggggcccagtcatgttatcgttacacacttctagtgtgcttgtgtatggacgaacatcaggacataatggaaaacccgatagactactttaaagacattgtgcccgcgggggggtgaaanccctctgaagtgtggccgttcggacttggttaattctaaacaaccatatttgtggaatacgcgtgaaggtgggtcacacaattgggaatgttcttgccctcttctcccaagggagggccccacatattaacctcgcattggttaatgcgctcctagcttgacgaccatatggcaggtttcacttcgttgcttccacattctcgcgaaaagccactatttacgcatccactttcg

SEQ ID NO: 550103 - DNA, 120 bp, Homo sapiens
  misc_feature (86)..(86): n is a, c, g, or t
aactttaagagattttttttattgaaggaacaaatcaaaatggctcagaaaattcagatggagtggatacacaatatcctcacatngtttttgcccaacacaccgaacacaaattttctt

SEQ ID NO: 550104 - DNA, 555 bp, Homo sapiens
ggccaaacacaatagcaagtgctgcagttgacaagagtcctgggttactaggtgtctttcagaagcggatgcatccaaagcaaatgaccaccaaggttttgtatcttctaaacatgtataagtagagcacatgcctccgtgaatcagttgaccatatataggaaacaaatcttcattctgctatgccagagacttcagaattccagaacaaccaagtttatcaagagtttagtagtctagataaattggtatggcataaaatatggggcactagccctacaagaaatctttgatggtatacaaccaaaaagtgtgggaatggtctgggaaaaaattataattcctgaaattcagaaggtatctggaaatgtagagaagaagatctgtgcggtgggcataaccaaattactaacagaatgtcccctaatgatggacactgagtataccaaactgtggagtccattattacagtcttggatgggacttttcgagttacccgaagatgataccattcctgatgaggaacatattattgacatagaagataaccaggat

SEQ ID NO: 550105 - DNA, 382 bp, Homo sapiens
gtgataaactgattgctggttgatcccagtaccgtgatatcgataacattaaacgaagagataccctacgcgtgtatgaaagtgcaagcgagcattattacgaagtcctagtattccggatcaccgggaaggaagtggactcatctctgagctgagggatgacttacctgttcagtactctacaatacctctgataatatattaacaaggatgtatttcttaattaatgttaatattaaaaagtctgtatggcatgacaactacttaaagtgagaagatacgatttctgtctactaagtgatgctgtgataccttaggcactaaaagcagagctagtaaatgctttaagagtaatcatgttggtttatttacacagataggg

SEQ ID NO: 550106 - DNA, 160 bp, Homo sapiens
tgaccttcactatagtctgcattacttctaccgattgaagatcgtttttccttctttggatcggtaatttgattccatattctttatccaataaaacaatcaactccaaagcatcgatgaatctaatcccaaaccgtcaccaaataaaggatcatcattt

SEQ ID NO: 550107 - DNA, 125 bp, Homo sapiens
ggtgtagctcagagacagtcttttcttgagggttcagttttcctagtcatcctaccagctcccaaaggtactcagtcgggttagtcaacctctctattcattcatagatatgggcgtgatgccag

SEQ ID NO: 550108 - DNA, 1803 bp, Homo sapiens
  misc_feature (168)..(168): n is a, c, g, or t
acggatacgacaatcttgctgtgttcttcagagattaaccgagttgaggtcgtaaagaaattatttcacgaggtattattattacgtatctgctgttgtcacatatcttatgtctcttgtggtgtgtaacgttggatattcaacacagaatgcatagatggcatttantctcataggacgagtgatcctcttgtaattgcatttaccatagacatttgcacgtggcagcacacgcaaatgtcacaaatgattcacacatgttctctactactagttgctctgcgtgagcgcgctaatcgctatgaataacgtatatctgccatacgacgcgtgtatatagtctctctagtttgcacctctctatatagatagagacagtctgtctcattctatcataagtgtgtgtccatatgtattgtcaatgtcaatccaaggtctctgtctatactctaataatctggtcgaggacgaaaacttctttacaagtgtgacttgtaatgagcgactattatctgagaccatattgtctcactgtctccttatacccgcgaggggacatcataatttagcccaatcacggtggctcttttcaaccacagcagaccgtgagtgaaaagccggcggatggcgttgctcacgcggctcccttatagtcgctgtggggggacgagacacgacactcccactcacactctcactctgtgtatacaccccacggagggacactgtgatgtgcggcggaaatagtcgccccacagtttagagtgctcgagcccagcccaaagagagcacactttgatttgcaagacatctgtcacccaggggacttagaatggagctccattggtctggatcgcggcaatcccccttggtcggaccccagatcggggttgtgaggtgcgccggatgatgcacaccaacgacgttggtgcacctcgcccatagtgtgggggcatccaccgtgattgtcatcccgccaagaagttgccgttggggggtttcaccccggtgtaaagccattatgagaacgacacgcgagtgggtgttattagttataggtagacccatgtgttgcggccgcaattcgtagggcgtcgaaaattaaaaatctcgatccttcggcgccaaaaggcggggcggaacacccatacgagaacaccgtttccctgtcaatttgcgccccagtttttacccggaacccgtgcaacagggggatctcccgaacccacattgtggataggatcgggtcgctccgcgaacacctagcgagagtgttcccagcaaccctcggcgttcgacaattatagtaccccccgattttttgtgcgctcatgggcccgccaggattaaagcccacccagtggcctcgttggctccccattattggcggtccccaaaaagccccccccggggcgagacccatacccgagcgcgacttgcacacatagctacccaacaccagcacagcgacaccttccagacaccccccggcgcgcggccccaacacacaacgcagccacctcatacaccgacgcccagcgcgaagacgaccgcccgcgccccaagcaaggtcgaccccacccgcggcacccacacccacaagccagcgaggccacactcgagcagaccgacacaccaagcggcagcccgcaacacaacacgagtcgagacaacccgccacactgccaacagcagccacaccccaccgaatcacaggcaacccgcgaccagtccgcaccacgaaaaaacaccacctctcggcagccgccacatccccagcgcgacacaccacaccacacagcc

SEQ ID NO: 550109 - DNA, 110 bp, Homo sapiens
atacgaatcgagcttcggtacccacccaccacacctctctcccagttaattgaaaagtaggtatgggggaatcagatgaaatatatgagaaagctgtaaacctgcactgt

SEQ ID NO: 550110 - DNA, 159 bp, Homo sapiens
ggttactgatgcataagagcagcacactaaaatggcataaaaatattaaatcacaaatggatagtgagaccatgtggcatactagaacacccaacatagtacgctactgaaaacattaggcaagagagataaaactataaagtaggcttcttcagttca

SEQ ID NO: 550111 - DNA, 103 bp, Homo sapiens
agccggacctgactgcattagactagctacttcatacgcagccccaccaagaaagactaatctgcgatccgatatacccattactacgatctaaatgcaatca

SEQ ID NO: 550112 - DNA, 965 bp, Homo sapiens
gaccccggaccgaccaaagcccgcgcgccgctgcatcccgcgtcagcacctacgtccctgctgccgtcgccgccgccaccatgcccaagacgacaacggctgaacggggactgctaacgggacgactaacacgcaacacggtgaacggacgaaccacagacgaagatccgcgaggttgtctgctaaacctgctcctccaaagccagagcccaagcctaaacaaggcccctgccaacagaacgggagagaaggtacccaaacgggcaacaaacgggaaaacgctgatgctggcaaggcaggggaataaccctgcagaaaactggcagcatgccaaaacagaccaggcacagaaagctgaaggtgctggagatgccaagtgaacgctgtgtgcacttccccgactaccctgtgctactctctggctgactgtacagcttcgaacaatacctatcctattatcacagctcccatacacacaactgccagtaatttctcgctcctcaacccttctctccactctctcttctcccaccacgccatcgctgcctcgctaacgccacaccacagcacaccaccactccaccgtgaccgcctccccccgcggcgccaaacgcgcgcgcaacacgtccacacaccatacacaacccaccagcgcccctcccacagccgcccagccactccgcaaagcccgcgcacacaccccccccctcaccacgcctatcctccgcaccacggcagcacgaacctcccccatcaatagggcgcctcacccaaggagaggacgaaggcggagaacaataccccccgttgaaccctaccacgaccccaccgccaaactcgggccaccaccgctcaatcgcgccaccacgagcacaccgccccctaaggagagcaccacaacacaccgcaaacacacaccccacaaaccactacggccaacacaaagcaggaacaccaacagaatg

SEQ ID NO: 550113 - DNA, 387 bp, Homo sapiens
aacacatgtgaccgtgatataaaaaatatctaggcctggcgcagtggctcacacctgcaatcccagcacttagggaggccgaggcaggcggatcatctgaggtcgggaatttgagaccagcctgaccaacacggagaaaccccatgtctactaaaaatacaaaaaaaattagctgggcttggtagcacatgcctgtaatcccagctattctggaggctgaggcaagagaatcatttgaacccaggaggcggaggttgcagtgagctgagatcacaccactgcactccagcctgggcaacagagcgaaactccgcccccaaaaaaaaattaaattaaattttaaaaaggccagacgcagtggctcacacatgtaatcccagcactttg

SEQ ID NO: 550114 - DNA, 315 bp, Homo sapiens
tgggccgtagaaccaagaggttgtagtgagtatttagaatgaactgggcaggaacagagatatagattatagaatactgggcaggaacatagagatatagaacactggaatgtactgggcaggaacagagatatagattatagaatactgggcaggaacatagagatatagaacactggaatgtactgggcaggaacagagatatagattatagaatactgggcaggaacatagagatatagaacactggaatgtactgggcagaaacatagagatatagaacactggaatgtagtcgacgcggccgcgaattta

SEQ ID NO: 550115 - DNA, 224 bp, Homo sapiens
ggagcaagagagagagatgggggtagatgtctcacacgtccaaacaaccagacctcgggagggcgtcactatcacgagaacagcaatgggcccacgctgccccatgatcccctctccttcctccaggcccctcctccaacactagggattacagtctgacctgagatttgggtggggacacaaatccaaaccacatcacctgggctcacctgtgtcaccaaagg

SEQ ID NO: 550116 - DNA, 128 bp, Homo sapiens
cacgaggactacgccggtaccgacataccaaccctgactggtgatggctgcggtggctgggccaacgaagattctcgttcagcacacctcaggatccgagccatgcgactggaggaacagcacacagc

SEQ ID NO: 550117 - DNA, 205 bp, Homo sapiens
atcacttcccgtaaacttttggtggagaaggaagatcaggaggtggacatttactttagctctatcaaataatttcatgactggcaactccttcatactggtagctgcagcaggtcctattaacaaaacaaaacaaaacaaaacattttggttaatcaagtctgtggaacaaggaaaaaggacacaaggtagggagggatccaga

SEQ ID NO: 550118 - DNA, 1033 bp, Homo sapiens
gagcgggggagcggggtacgcgagtggcgaggcggcactgcggggccgggaatgcccgcggtgcggggccccagagccagccggtggtcgtgtccgggcgatggcatcttcgcctggtcgccgacttcgacctcgggaaggacgttgctcccgtgattgctgtgttctgcagagggcagtgtcggaagccaagcggggccccgggaagccgggctggcgcagatagtaaggaaaaaggaattatgagcacgcttacacttgttatttaaccgtgtcggacaaggacacattggccacattatgacttaattaccctattcacgggattgcattccgcgcgacactggtccgcccttcgggaccttcatactgacatgcgtcaaagccccaaggaccaacacttggacgctttcttatttatttaaccccttttgtgggaaggaacaggcaactttggaccacagtgttttccgcacgactgtcggactcctgtgattcaaagccgtagtttggaacgcgcggggacctttttgtactcttggccgttggcccaacgggttgttaaggctttccaaggattcattaaacttaaaacgcgcaacagcgtgacgagccacaccgcggcaacacggtacatcgtttgacgaaacgcaccgcaggcgataattccaagcatgattgtgcctgtagcccccttttgtgattacggcgatcgtggatgcaacacctgcgccaacccccgctggtgttctgaacaccaagcatttggctgcgcaaggcgttctcgataaaagaccgggccctttgtgtgggacttagggcctcttaattattttatcgggagtgcgtttcccagggcttatatacgtttcagtataccacgaagccaacgtttagtttgtgacacaggggcgtccacgcttccccgttgccattttcacgctaaagaatcagtcataatccagctcaaccatcccgatgggtctcacacgactttcgcactttttatccactcgccacagaccacatgacg

SEQ ID NO: 550119 - DNA, 480 bp, Homo sapiens
  misc_feature (185)..(185): n is a, c, g, or t
gagtatgtggggcacaggactggtagcggtcgtggctctgtggcagtgcgtccggctggtgtcctgtgggccgcttagtggttatgcgactagagacagatgcgatcatatcttgcagtcagtcaaatgtgatccaagtggcctagatgacggttctacatgcaaggcagaatgtagcttacaanagctttgtaactacaccataggtcttgcccatggtatttctttgagaacccgcaagtacacattactacccatacacgggtgacgtgcgggatcgctacattttctcgagagaaagcccgggttttgcaaagggaaggcagtttgaattcgcttatactgggaatgcgacattgaatttgcttgacatggacagattcacaccggaggtacacccgagttcggagaaggaaaatctttgaggttgtgtggaacagggagggttgggaaaggttaacgtttaaggtggaaagatgg

SEQ ID NO: 550120 - DNA, 93 bp, Homo sapiens
cgcatgttacgagagcgggctgcgtttgtgtggtaatggggaggaaatgtcactgtcgaagaccaaaaacaagcttcttggataaaagactct

SEQ ID NO: 550121 - DNA, 193 bp, Homo sapiens
cctcggctccgcatcagagggagacggtggaaagagagggagagggagaccgtggaaagagagggagagggagaccgtggaaagagagggagagggagaccgtggaaagagagggagagggagaccgtggaaagagagggagagtggaattttgactcttaaagttttatgtgataatgccaaattgttttcc

SEQ ID NO: 550122 - DNA, 353 bp, Homo sapiens
  misc_feature (117)..(117): n is a, c, g, or t
  misc_feature (120)..(120): n is a, c, g, or t
tttcggtgttttccttttaaaccaaagggactgaaatagcattgagaaatatttttctttcaaattctggttcctctcacctatgtaactgtataccttaggcatggccaggaggcngantttaattctccttcccactatcacctcttcattcttgtgttcctcgttccccactccttccactaacaatctccctggactcctcctccatactgtatgtgcatgcattcacacacacatatgtacatgcacatagatgagatgaatctgcattgtaaaaaaattaaatcacatttagtgctgtataatttgcatgcaataaaattcaataaaattaaatgtaaaaaaaaaaa

SEQ ID NO: 550123 - DNA, 234 bp, Homo sapiens
cccgggctggagcgtcccggttttaagtcactgcacgatactagaagagctgaccttttttctggcctcacagcttatgctgaagcttagtgtgatgaacagagatgacctttctcgtgaccgaccgctgggtgcagagatggtctatgtcgccgacgatcctgcgcatcatgcaaggtgtaggcgggtccgtcggggaaggggcagtcttccactagtgtgtgctgcagcagt

SEQ ID NO: 550124 - DNA, 295 bp, Homo sapiens
ctagtatagaagtttcaatagcaactggaatagtataagccacatggattgtaaggaagatgaattatagtgacatccccattacccaaagtttattgtttaaaaccagatcgtctaatatgatgaggtcttctggcggcataaaaaccatttacggactgggacctctccatttctatctagtcagtatctcgtatgtcgtgtattaatattaacaagtccatgagcaggaatattatccttgaattatcccatgatagctattacctgctatagaaacttctaaaactaggga

SEQ ID NO: 550125 - DNA, 179 bp, Homo sapiens
atagtatctgtactgagtaaaaaccatcccaaaaggtgctaaacagcaactgtgtatttgtccatgattctggggttgggctaggcctggctgggtggttgttctgctcatctggtcagtggttactcataaggcttcattctgctagagaattggttggggaactgggctccgctggg

SEQ ID NO: 550126 - DNA, 124 bp, Homo sapiens
ctggtggtgtctctggtaggactggaccgtgtccctgagtctcgtgtgtacatgagcccctgcggatccgccagcttctccgtcccttcttcctgctagcagatctcctctatgatgaagaaga

SEQ ID NO: 550127 - DNA, 767 bp, Homo sapiens
ttcttcaaggagctgaactacaaaaccaattctgagtctccctctgtcacgatggtcaccctcctgtccaacctgggcagccagtggagcctgtggttcggctcctcggtgttgtctgtggtggagatggctgagctcgtctttgacctgctggtcatcatggcctcatgtgtcgaggtcgaagccgatactggtctccaggccgagggggcaggggtgctcaggaggtagcctccaccggatcctcccctccttcccacttctgccccacccatgtctctgtcttgtccagcaggcctgctcctctccagcttgaagccctcccgctatgccctgggccgccatctccaggggtctgaggggcgtcctccacgtctcggggggcctgaagggagagagttctcaacaagcagatgctcctctggggaggggtggcctggaagatgagatggcggttctctcaaccgcaatgcgttgagtgtgaggaagagatgggtaagctcagaattgtcagacagtactgtgaatgcaaatgctggtcaagctgtacctgtatgcttgaatctgttccacaaggggtagcctttcctggatagcaagcacattggcttgcagactctagaacggtacgagaaacacaggtagcgtgggtcgccaaggtgctccggggtgcagtccacaatgctctatgggacccaactggataacccgcggataggagacgtcaacaagtacgggacatactccaccttactgccgacgttttg

SEQ ID NO: 550128 - DNA, 115 bp, Homo sapiens
gggaacatcagttctacgagaccctccctgctgagatgcattcactccccaacaaggtggtattgtgcgctgaaatgaaggaactgtgtctaatagcatatcttgaaaggggacc

SEQ ID NO: 550129 - DNA, 243 bp, Homo sapiens
aatgagctggccccccgtgtcgatggcccagtgagagggctcaggagcaggcaatgtttggcaaggaggtcagttgcccgcatgtcatccagccaaggaagtggtgtcctgcctccgacagaagcctgccaagtgtcctcaaatgatgcccagatcaagactcctggcctgtgagtggtctctttccacatactgggtgtcttgctgatctgatggccgacttacctccgatgtagcctccag

SEQ ID NO: 550130 - DNA, 427 bp, Homo sapiens
cactccgtcgtggctcacattgatatatattagtagtgcatctatcccctacctccctaatatttcaaacttctatgtggacaatgacattcattttcatacctttatatttccagagacaacagaaacacaaaagcagcttagatgtagatttaatgaaagtagcaaaatgttaaatacataacaaaacagattgtcctgtcacctaaaacaaattagtgatgtatgagtcatatcgggttttgcatgtgtatatagaaaggctattttgcaaacagtggttcagtctgtattgggcacaggtgcattctgccctgcgattgccatctttagcacttttcagagaatttgttgccattaatgacactgatcttcagacacactgtgtagtgccttggattaaactgtcagactggcaacagatgag

SEQ ID NO: 550131 - DNA, 360 bp, Homo sapiens
  misc_feature (37)..(37): n is a, c, g, or t
atacatgtggtacccacgtttgtggtgggaggccctngttctactacccagccacatcaggcgcagccttggcagagggcttggactacccagtgcagttcgggttgcactcaggctaggccaaccgagacccctcagccttcgagactgaggaggtccagtccagccgacatgtttttccagcctttatagtagtctacttgttggaggagttgctggcgacggggggcccccacttgggctaccagggcatctcagtgctcctggaggacaccacagtcaacttctgcgtctccctcaccacctccaaagtcgcaggggcaggctaagcccacttcgtcctcccaccacaaacgtggg

SEQ ID NO: 550132 - DNA, 332 bp, Homo sapiens
acctttcggcgcgagcaccaggtcacttcttagatgacacacacacacacacacacacacacacacacacacacacaacaccccgagagtgcactcacctgggcaacaggtgggactatatttgtgcatatgagggacccccagtcccctccttgtgtgtataatttctggaagcccaggcgcagtctcagcttgtaagatatcctggcggtggcccgcgagttgcaccctgggagttatggggaaaggcgtggactcacggagtcacaggcagattgctccttgggccctctggtgttctatgatatttctcgcgcgcgtctacccccatg

SEQ ID NO: 550133 - DNA, 235 bp, Homo sapiens
tatttcaggctctaaaattctctgtgttggcctagtcatccctctctccaccctaacctttaaaaccactgagcattttactgtctccatcgttttgcctttttcagactatcatgtagttggaatcatatagtatgtagccttttcagattggtctctttcacttagtaatatgcatttaagtttcctcaacatctttttgtgatggcttattcttttagcactgaataatagt

SEQ ID NO: 550134 - DNA, 281 bp, Homo sapiens
gggggggttaaaaaaaggaaaaaaaatcttttccccccctcccccagaaaaataggccccaaagaaaaagggttaagcgggctgcccccaaaaattatagggggggtgagaagggcaaaatttttcccctttttcgaggggcccccttttaaaaatggggggggggggggtttagggcaagcccctttcccccccctttttggggcaaatgttttttgcctttttttttccccccccccaaaaccaaggaccggtttgggtttataaaaaccctgccctca

SEQ ID NO: 550135 - DNA, 353 bp, Homo sapiens
  misc_feature (98)..(98): n is a, c, g, or t
  misc_feature (119)..(119): n is a, c, g, or t
  misc_feature (186)..(187): n is a, c, g, or t
agttacaacagcttcccaaggatgtggttatacttggtcggagcctgtgacaattgttgacactgtggaccggtccaaaattttttaaactgcacctngtgaatggtagttgaggtctncatacagttcagcctctagaatggtaacaaatcagccaattggattcgaaacaaagaagactatgtnnaactcacccatcacacttgagactactcactggttggaagaatatagtattgcagcaaatcctgtatgtaagagcgatgtgggcttccgtggtgtgagtcttgtgctataggtgctgagacgttttcacatgggcataatacagggagagtgtcttctaataaagt

SEQ ID NO: 550136 - DNA, 654 bp, Homo sapiens
ggaaagaccgccgctaccatggaggagtaccatcgccactgcgatgaggttggcttcaatgctgaggaagcccacaatatcgttcatcagtagtgtgtagcatgggagttttaaggtggtcgcaagatctatacagtcacgaacaacatcaacccaggtgagactgcaagcatagtggaacaagtccttaacacacctggttcagttgggaaacagcctataaatatattgtgaccctgtgcacgtggctcgcagcaagagcgcatatggctttcacacagccagctcctgttctttgggataccacatctgatggaacctgtaccgtaagatgggagaaccggaccatgaactgtattgtcaacgtttttgccattgctattgttccttaactgactaaacactgtcgcgcgctaaagccattaaccttaacgaatccgtcacgctgtatcctttccaacaaagacgtactagttgtctactagtgtgctacgatgacacagcgtgcaatatgctttcaacagctatcaacaaacactgaatattatcaagcaagcaatatcatacgtacatcgcgcagattagctcatattctatacagcatcgtttaaaataggaacaaccccaatgctagcaaccacatcaatttagaaa

SEQ ID NO: 550137 - DNA, 747 bp, Homo sapiens
ttcgccacatagtatgtgatgagagagtcatataacagcagtctgcttgattatccgcgaatggtcagccttatcagatagttcttcatgtggagttcatctgcatgtgcccttactctggaagcctcttcctgatctggaccaccgtctgtctgtcttcccagttcatctccagtcctcgagaaaggccctttaaatatgtcactttccccattttcccgttaaccctgggttgtgtgagcccagaaagagctttgagaaagatggctgcgttcccacccagggtggaggcttctaggtctgcatgatgatggggcccctttcatggcccgagggtggctctgggacgccagattgtgctgcgggcttgctgggggagaacgctaactgttgccagaaaccagagcttcatggcttgcttaaattacttagctgcgaatattttaaagtgtccagataatgtgatgtaccaagagagtatgccgatgccatttcattgtttttcgccattatctgtactccagtatttccccttgctagcccgaataatccagaccccagactgtttcttgtccactggattctggaagccttgccctttccactggatttatgtttgtttctgctgctgtgaaacccccaagtaatgccgtaggttttaattgaaaattgtttaattctattattgataattatttattgtaataaaagtaaaagagtaatttttaaatcccttttaattgttta

SEQ ID NO: 550138 - DNA, 279 bp, Homo sapiens
taggctcggtacctgcttacttaacccagctgtgcattcatgatagactgcatagaaaatgtggcacatatataccatgaaatactatgcagccatacataaaaaagaatgagttcatgtcctttgcaggacatggataaagctggaagccatcatccttagcaaactaacagaggaacagaaaaccaaacactgtatgttctctcttataagtgggagctgaacaatgagaacacatggacacagggaggggaacatcacacactgggtaagtaagca

SEQ ID NO: 550139 - DNA, 733 bp, Homo sapiens
attctagaggccgaggcgggtggatcaactgtggtcaggagtttgagatcagccaggccacctggtgaacacccgtctctactaaaaatacaaaaattagctgggcgtgatggtgggcgcctgtaatcccagctacttgggaggctgaggcaggagaatcacttgaacccgggaggcggaggttgcagtgagccgagatcgcaccattgcactccagtctgggcaacagagtgagattccgtctcaaaaaaaaaaaggaaagggaaaaaaaattagtttatacccttttcctggttttaaacggccattgaaaatttctggaacactccaaatttcaggtggaattaatccaaaacaaaatttatacgtattaaaataattttaaccttctatatagatactaggtatacttaaaaaaaggcctcggggtaatataatcttactaaacaggctaaacaattcaggtgcggttacatttaaacaaacttatgttctctagtggagaacaacttaggcctatttcaacgtgggtggtagcctcaggggcctaacaatgggtgccaaattaaatattcgtagaattacagtgaattggtaaacccattcgtttttgttaaaatttgcacaaattcaaaaggtcgtgataaatggtaatcttggagatatcatttattcgattccagatatgggagggtgggggtgcttagacatagtctcatatttaaactaatag

SEQ ID NO: 550140 - DNA, 539 bp, Homo sapiens
tctctagagaatgccacgatgtcatacctggatgcatgatgaatgaggcctagggtccatcaatgtcaccatgtctggaccatggttggtgagaggttaaatggcacagatcctgaggatgtcatcagaaacgcctttgcttgctttgatgaagaagcaacaggcaccattcaggaagattacctaagagagctgctgacaaccatgggggatcggtttacagatgaggaagtggatgagctgtacagagaagcacctattgacaaaaaggggaatttcaattacatcgagttcacacgcatcctgaaacatggagccaaagacaaagatgactgaaagaactttagctaaaatcttccagttacattgtcttactctcttttacttctcagacacttcccccaccctcatagaacctgttgcatgcaacttagtttcacagctttgcctcttctttttgatgtatttattccagacctttctgccacttagcacttgtataatcagactggaaatggggatgagggtgtacattgtat

SEQ ID NO: 550141 - DNA, 277 bp, Homo sapiens
cggatagtacatagggaaggggtaggctatgtgttcagtcagggggtagagaatagagtgtagaggcgtattataccactagccgcctaggtatagagagtactgcggctagtactattgacccagcgatgggggcttcgagctgggcttaaggtagtcctaagtggagtccgtaaagagtgatctttactataaaagctattgtgtcagctagtcatattcagttgtaggctcaggagtttgatagttcttgggcagcacaggttcagcgtagaag

SEQ ID NO: 550142 - DNA, 457 bp, Homo sapiens
tctattctttctactcattaaggaaaaaaggttagctgtaaaacagccccagacaggtccttcggaaggtattccaaaagaaggaatgttatcaaagatgatagctccgtgtgtgttactgttcctgaagaccttccagtgggacaagatgtggactgagaagacagtgatattgatgatcctgaccctgtgtaggcctaagctaatatatatgtttatgttttcattgttaataaaaaaagtttaaaaagtgaaaatgaattttttggagacagggtctccatctgtacaccaggcttgtgtgcactggtgcaaacacagctcactgcagcctcaatctcccaggctcaagcaattcttctgcctcagcctcacaagtagctgggattacaggcgcacaccaccatgcctggctaattttggtatttttagtagacgaagggaaacaccgggtacc

SEQ ID NO: 550143 - DNA, 195 bp, Homo sapiens
aatgaaatatgtgatatatgtatacaaatgctgatcgtctcttctcctcgccctatgtaggatgtcaacacatacatttcagggtttgggcactaccagtgagaaattcctttctaactccagcgacaaatagtctagatgcgagatagaaattacattccagctggcaaatagcgagactcatctctactaacg

SEQ ID NO: 550144 - DNA, 820 bp, Homo sapiens
  misc_feature (149)..(149): n is a, c, g, or t
  misc_feature (171)..(171): n is a, c, g, or t
  misc_feature (235)..(235): n is a, c, g, or t
  misc_feature (423)..(423): n is a, c, g, or t
  misc_feature (431)..(431): n is a, c, g, or t
  misc_feature (455)..(455): n is a, c, g, or t
  misc_feature (464)..(464): n is a, c, g, or t
  misc_feature (470)..(470): n is a, c, g, or t
  misc_feature (472)..(472): n is a, c, g, or t
  misc_feature (477)..(477): n is a, c, g, or t
  misc_feature (480)..(480): n is a, c, g, or t
  misc_feature (486)..(486): n is a, c, g, or t
  misc_feature (504)..(504): n is a, c, g, or t
  misc_feature (518)..(518): n is a, c, g, or t
  misc_feature (520)..(520): n is a, c, g, or t
  misc_feature (525)..(525): n is a, c, g, or t
  misc_feature (528)..(528): n is a, c, g, or t
  misc_feature (531)..(531): n is a, c, g, or t
  misc_feature (534)..(534): n is a, c, g, or t
  misc_feature (537)..(537): n is a, c, g, or t
  misc_feature (540)..(540): n is a, c, g, or t
  misc_feature (546)..(546): n is a, c, g, or t
  misc_feature (554)..(554): n is a, c, g, or t
  misc_feature (564)..(564): n is a, c, g, or t
  misc_feature (569)..(569): n is a, c, g, or t
  misc_feature (571)..(571): n is a, c, g, or t
  misc_feature (574)..(574): n is a, c, g, or t
  misc_feature (577)..(577): n is a, c, g, or t
  misc_feature (579)..(579): n is a, c, g, or t
  misc_feature (581)..(581): n is a, c, g, or t
  misc_feature (588)..(588): n is a, c, g, or t
  misc_feature (608)..(608): n is a, c, g, or t
  misc_feature (684)..(684): n is a, c, g, or t
ggccagccttggaaaaaaatgatttaatttgcctttctgaggcagggcggggatggatcacttctaacttccagttaagaattaggtccgccctcaagccaatattgactatgcatctcaggagctctttgaagccagggggctaacgnatgtgtgtgaagtcctggctgnaggtcctccccaggtggccttcctccttcctttaacaggcggtctctctgacaggaaatggggnaaggatctagaaccacgtgcacctagagatgtttctgtaaatgggtacttgtgatcacactacgggaaatcaaccttatttgggggggagtatggggaaaagagctgagagtttatgctgaaatggatttatagaatatttgtaaatctatttatagtgtttgttcgtttttttaactgttcattccnttgtgcanagtgtatatctctgcctgggcaanagtgtggangtgccnangtgtnttnattctntcgcacatttccacagcncctgctaagtttgnanttaanggnttntgnttntgnttttgnttgtttcntgaaaatganagaananccngananangattttnataaattttttttttttttnttttactatttatagctttagatagggcctcccttcccctcttctttctttgttctctttcattaaaccccttccncagtttttttttatactttaaaccccgctcctcatggcctcggccctttctgaagctgcttcctcttataaaatagcttttgccgaaacatagtttttttttagcaaagaccccaaaagggataccgagctggaat

SEQ ID NO: 550145 - DNA, 925 bp, Homo sapiens
  misc_feature (9)..(9): n is a, c, g, or t
  misc_feature (230)..(230): n is a, c, g, or t
  misc_feature (555)..(555): n is a, c, g, or t
  misc_feature (588)..(588): n is a, c, g, or t
  misc_feature (591)..(591): n is a, c, g, or t
  misc_feature (604)..(604): n is a, c, g, or t
  misc_feature (615)..(615): n is a, c, g, or t
  misc_feature (642)..(642): n is a, c, g, or t
  misc_feature (664)..(664): n is a, c, g, or t
  misc_feature (684)..(684): n is a, c, g, or t
  misc_feature (715)..(715): n is a, c, g, or t
  misc_feature (719)..(719): n is a, c, g, or t
  misc_feature (782)..(782): n is a, c, g, or t
  misc_feature (806)..(806): n is a, c, g, or t
  misc_feature (819)..(819): n is a, c, g, or t
  misc_feature (826)..(826): n is a, c, g, or t
  misc_feature (895)..(895): n is a, c, g, or t
ggaccccanggattgttcttgggcccctgactgataggactttgaccaacgtttcactttgaccatttgacgtggggcccagcagccgtagtcacccagagtgccggcacccttggggaggccggtgaggtcaggaaggcatcgtaccgctttttctcctcctcccatctcgtggtggacagacagaaaaaggatctgggaacttgccctgggggccacaggcctcagancccccaggggcccaacctagggcatggaggcggctgctggtgcgtgggcggaggcggaggccagctgcccccagcgtggcagcgtaaggcacaatttcaaatcactcgagacttgacagtaaacacccgaagctggttctgcggccggaggagctgtggctggggctggtgctggtgcggtgcccggcggtatttctcagaggaagaagctacagtttagacgctgggcgggttccggctgcacccactccggcttggggcgcgttccaggggagggtgggggcctcagccacagccacttggcctcctcccctgaggggctctnaggtacctcaggtacctatgttccaaggcagcnctngagaatgtaggtnagaggtcagtnaccttgttctccagttcagcggcaatntgctgcaggcggaaggccagcngcatctcctgggcggcaggntcctcctccaagggatttatgaacttgttanagtncttctgcgtgtattggtagagctggtggagtccaagagggtgtacaaggagtgcgtgtgcgcncgggaaatctctgccaggtgtgtntacatgttctggncgctganctgcaccatctgccggatccctttgtagttatcctccaccatcttcttgtaggtggagatctccttggngtacagagcttgttgctgggagaatcgcgg

SEQ ID NO: 550146 - DNA, 1905 bp, Homo sapiens
ggccaactctcgacactctgttcttcctgccggctcctgccgtcgccgttctctctgcctggtcgccaactggaagaacgacgatcgcctgcgctgtgtcatctgaccaactgtgctcctggcactgtgcaaacgctgtgctttatgcctacggcggacgcacagcctcaccctgagcccgactgttctccatatcccactcagatcagcggccgacccccacgaacacccaggggcccggctcactgcgcctggcgccaactggcgccccaccgaacgggcaccatccattaccgctgctggcgccgaaccgacgcgcccccagaagccacatgcccgttgagcacttccatggaaccccctgcacacgctacccccactctcgcaacgcccacgcgcccacttcggcctcccaccccaacaacactggcgccaccggcaaccacttgcgaaagccaaacgccacgtcctggggccaaccccaaccgagcaccctttgcctaaccggcaaccgcacggccctggccagcacggtctgggcggccccccgcggacgccacgcggcaacgccaaccccaccaacgcctggaccctgggcctacgaaaccccggaacgcggacccaccccccccgtaggaaacaccccccccgacatgggggccgccccaaaacccaccggcacccgaaccgcacacccgcaactagggacccgttcccacagcgaacttatccaggctacgctatattagggacggcagaccccccatcactcaagcaaccccacgcccccccccgtggcggcccccaacttgggcaacagcccgcatcggagcccccaacgtttccccaaatggagtgacccctggctttggccctataggttcccccccctgttcccctacacccgcccccatttcccatgggtgatcgtccgggccccaccaccaaaacaattagcgcgcccaactcttatcggcgctcccaactttgggacatcccgttatccgtacgcgagcacgcaaaacccgacggtggaggctatccaacccacgccgaaccacacaacgacggggccacgagccgccccccaccactacgcttacacccgcgcaaaccgccgggccggcgcctaacaccacgcccaccaccatcaccacgacgcgcgcccgaaacgacctggcccccacaagattccgcccactggccagcgcgatcccattgggggcgccacccccccattgggccgccccctggcggcgcccccggccgacggcaaacacgcgccatgcacaaccccccgcgaatcccccgttcgaacccaccgcatagccaacatcagcgccaccacacagcaccaccaataccccaactcacacaaagcccacgagccaaacgacccgccgcaaagcaccggccgcaactacacacccacaggcccaccactttcgcccccacaccccgcacaaccggcacgccaccgcgagaccgccaccgggcaaaccgcccgcggcggccgcgcaacaaacacacactcgccgcgggacgcggaccagggtccaccggaaaacaaccagacttcccagaacctcgcgaccacagcccacacacgccacgtgcgacgcgccgcccctcaacccccgctaacccacgagcaccccgacccgtgggcgcgaagaacgctatgccgagccgacaacgccgcaccgagggacatagccgaagttcgcggggcacgccccagccccgggagccaaccgtgcagaagcatcaccacctctccctcggctacccatcacgcgcctccgcctgggcaggcccgagaacaacccgagagcgcacgatcaacccacgcaggccagcgctcgggcccccgccccggcaactgagcggggacccacgagggcg

SEQ ID NO: 550147 - DNA, 103 bp, Homo sapiens
tatttaaacatcatctcccttttttttttggaaaaactccccccccctttttccccgatccccccaggcctttttgtaaataaaagctcccaagttggggcca

SEQ ID NO: 550148 - DNA, 209 bp, Homo sapiens
  misc_feature (77)..(77): n is a, c, g, or t
cccccccccaaaaaaaagggattttgggggtggtttttttcacaacccccccgggccccctaaatgggggggggttnaaaaagacccttaaacccccctttttttttcaagggaaattaggggtttttaaaggggggaaaccctcccccccgttttattccccccccaaagctttccccccgggggggttttttttgttggggggttga

SEQ ID NO: 550149 - DNA, 967 bp, Homo sapiens
gttgccgaggctggtctcaaatctggactcaagcaatcttcctgcctcagccctactgagtagctgggactacaggcacccgccaccacgcccgtctaattttttgtatttttagtagagacggggtttcaccgtgttagccacgatggttatcaatctcctgacctcgatgatccgcctgccttggactacccaaagatgctgggactacaggcgtgagccaccgcgcctggccaatatatagtatatattcagtagagacgagggtttcaacatcattggtacaggctggtctcgaactcctgaactcaagtgatccgcactgcactccagactcacaacattactgggattacaggcatgagaccacactctggccgaaatttccaatctccttaaactctctctctggtatctcatctctctctctcatctctacaaacacacagaacacacacacaacacaaagcaacaccccatgtggattacaatcgaataaacaagacttagtcataaataagatcagcagcacgatcacatagtcatctatgcgtatatcataataaacaatataggggagcgaccgcgaggatcatacctagactctcaagacacaaccagtaaagagcagctagaggaaataaaaaggagcgcaacacgcaaaagaaatgcacccaacatgaagagtagagatgcagacagaaatgacagaacgaaggaggcgtagtccaagcaaagaggacacgaaaaaaacgaaatgccaacgatcggaagacgacgagcagaaaaaccagtaggccccaggagcacaaaccaccgcccaggaaccaacacgggagggaactaaaagcgcacagaccaaagaacgaagagacgacaagggcgcccagaaaacagcagaaggcggaggagacaaaaacacgaggacgcagcatacagcaccagagagcgacaacacccccacaca

SEQ ID NO: 550150 - DNA, 463 bp, Homo sapiens
catggactctgcagtcatctattttctatgagtcctatgtccttagcataagagtatttgaatagccaatggagtggtacaatagcatattggggtggtacaaattattttccttaattttgcctgatgataaagattgttttttttacctgcttgaactagtatccttatctacctggattagtatccttatgtatctgaatcagttttaacatatcttggtataataacaaacacatttttatcttaggatgacaaaatagttttcagtctcaaaatgcaaaaatacaagtagttgtacttttatggtaaatgaaaaccttagatacagaaaaacatgcagcaaatatcacaacaaccatatatatcacattcccagcctaatcaaaaggtaattgtttcctggagaatcaggttaacagacacagaggtttcctttagtttcaacagaaaagaaaaccat

SEQ ID NO: 550151 - DNA, 154 bp, Homo sapiens
  misc_feature (46)..(46): n is a, c, g, or t
  misc_feature (142)..(142): n is a, c, g, or t
gatccagtatcttcctcggtttttagggagcaggaaaaatgcgctnaaagaacttttttaaaaacctgccctggtggataaaacggggcttgttaccgggtgcccccaaggggtggacttgaataacggtaaaggggcacgntttccgggggta

SEQ ID NO: 550152 - DNA, 257 bp, Homo sapiens
agggaagcgcggaggcggcgcgcgggggcagtggtcggcgagcagcgcggtcctcgctaggggcgcccacccgtcagtctctccggcgcgagccgccgccaccgcccgcgccggagtcaggcccctgggcccccaggctcaagcagcgaagcggcctccgggggacgccgctaggcgagaggaacgcgccggtgcccttgccttcgccgtgacccagcgtgcgggcggcgggatgagagggagccatcgggccgcgc

SEQ ID NO: 550153 - DNA, 146 bp, Homo sapiens
  misc_feature (12)..(12): n is a, c, g, or t
  misc_feature (77)..(77): n is a, c, g, or t
tcgagctcggcncccattgtggcgaacaggtaaccttccgccatgacctacggacagatcaccctgacgggcatccntgcccacgcgaaccacggcgtgcttgccagcgagcgtgaactcggtcagcctttcagcgtcgacgtgag

SEQ ID NO: 550154 - DNA, 948 bp, Homo sapiens
aggatctcacctttcggacagggaagctgccccgtgcgcgggaggatcgggcgcccgcggtccccaggacacgcgctgaccgcggctgccagtccctcatgatcatgagcaaggatgaagaactttagagcgccgtttctccgctgtcagtgccccgcatatgagaccattgaagaatccttggcctgaatttcacggagcatagttcaaccagtatccacaaccggcgtgcaatgagaacttgcagactcggtcctcttggcagagaccccccgcaggatgtgcagcatccttctccccaacagacagcggggaggagccggggcagcatctccccatggacgtgcagttccagcggcggcagaaccagcgccgcttctccatggaggacgtcagcgaagaggctctctcgtgcccatgggatatccgcctgccccagggaattcctacagaatgctacagatggagagcccagatcttgcccaagccgctcagccgctttgtcccgcctgggcctccctgtcagacattggctttcgggaaactggaaacatacgttgaaacctggcacaaaccttgggacgagggcaccttattgccaacagtctttcaaacggtgcgcagccaaatcttgacctggaggaagccttgttgtgcccttgaaatgcagaatccgggcttggaagccacctgaggcaatgggaagccgcccttgcaacttgctcaattcacgagagggtagtcctcgtgccttgaaaggcaacccttgaagggcacggccaattatttggtgcaccctttgcattgacccttcattccacaaccagcattcgggtacccttcacccgctgggtgtttcgggggttaccttggcaccaggtgacccttgagggcagggtatcctgggacccaccttgtggggaaacccttcattgaggcattccacca

SEQ ID NO: 550155 - DNA, 105 bp, Homo sapiens
tgaataaacacctacagtctaacataataataataatattccattatcctagaagtcctgaatgggaaaataatgtggatgagtgagagtctccgtcgaactggt

SEQ ID NO: 550156 - DNA, 128 bp, Homo sapiens
acggatccgttgtgctggactcgggcacccgccgcgcgccgggctagttttttgtgtttttagtagagacgaggtttcaccgtgttagccagcatggtctcgatctcctgtacctcggtgaccagccg

SEQ ID NO: 550157 - DNA, 552 bp, Homo sapiens
agctggagtgtctcgtttgcagatcggcgctttagtgtggaactgtcttcctccgcaggcgcgaggctgggatacagggtctattgtctgtggttgactcctgtactttggtctgaggccttcgggagcttttcccgaggcagttagcaggaagccgcagcggacgcccacgcccgtctcctctgtccctgggtcccgggagggaccaatcttggcgtcacgcccctcagcggtcgccactctcttctatgtagtggggtccgcatcgtattcccggaatcagacggtgcccccatagactggccagacgattccccgtggggcaacgatgaagagcagactcgttagaatttcggacctataaggtggaactttttagcttccctgagagcgtacccgtttcgaaccatatgcaaatggtggctccgttgaaatgttgagacctgtgggcatttgggcgtccgagaatggatccatacgctggggggcgttgaggtcagcaaggatcatctggacccagtaaatgcattggtacctgtgggcccaggtgcc

SEQ ID NO: 550158 - DNA, 1293 bp, Homo sapiens
gattaggtccaagcgcccgcccagaggcagggcagtcctgcgagcccagccgaccggtgtcgccggcagtagcagccttcgccagcgagactgccgcggcggaaccgggcgcaggggagcgagcccggacccgccaggcccagagccagccgcagcctcaggcctacgtccctcacccacgcacagggcaagtagccgttgctcagacgaggaagggtggaggactgaaatccaggagcctagcgactgcgcggctagccagtctatgtgacgcagttagtgagttcttcgagggcacatacctcaaatcgcatttacggtgactgccaagataggagcgacatgcgtggacctggtggagctcgatcccttggcagccggggcctcgtgtggagtagatgccagtcactatggacacacgtagcattgcgacgggccattgggtagtgaagcgtcgcccacacgtctctgccgaacggcggggggcacgacaatggatctgaggagagcaatcttagacgagggaactgtggcctgggcattggggcctcgaagtcgtcatgtcgtgagtgcatgggagggtcatcgtgcaggctgtaatgccttgtgccaggaccagaggggaggtaagatgagagtgcaaggaatgatcttgcccaagcgtcccagagaggttcctcgcgatgttcatgacggcatgacacataggcgtgcatacctggtgtccatcgtgagctcgagagaaggccgtaggatgcgcatggtcgcacgatgacgcctgggtattgactctgtgaccccattactactagccgtcctttgtgccataccgatggagaagttctcccgctagagacccagacgtagacgcccgagcggcccccggccgtagaaccggtggcggtcgttccagagaatacgaagaggacaaccttgagcacacaatgtgtgactttccagcaaatttcggccttaatggcgagaaaggaaatggcttggggacaccggaggctcagagtggagccaaaaaggcgtcattggaaagggagtaggggatatggggacaatctgggtggaagagcgtggatcagatcgagaaggttggaaacaacggcttgtggaccgtggacggcgaaagatagggggagaacaccagtgtggtgatattggtaacaatatacgtccaaatggggacggagtgggagaagaagacatcagagtaactgatatagggaaatgtggtacagagggtaagaggacacatcatagggatgtggacagagagaggggtgt

SEQ ID NO: 550159 - DNA, 854 bp, Homo sapiens
agtgcaagacgatgacttgaaaaatgtcgccagctggaacgcaacatacagaccatcatcaacaccttcgcaccaatactctgtgatagctggggcacccagacaccctgaaccaggggaattcaatagagctggtgcgaaacgatctgcaaaattttgctctaaagaatgagtagcagtacccgaatgaaaaggtcatagaacacatcatggaggacctggacataaatgcagacaagcagctgagtcttcgaggagttcatctatgctgcatggtcgaggcgtaacctgggttgctccctagcgagcaagatgctcgaggcggtgacgagggccctggtcaccaccataagccaggtctcggggagggcaccccctaagagcacaagtggccaatgatcacagtggccacggccactgcacagctcatggtggccacggacacagacactaatcaggaggccaggccatcctctgcctctagccaatgcagggcccctggggggcctgttatgtcaaagctgtcttggctgtgtgggctaggggctggggccaagtaaagtctattcgctccataataactaacgggtcaatgctctgaaatctgtgggagcaaaaccacagttttcatgccccatcggtgcgggggggtggacttcccacgaaaaaatcttggagagtacgcggcccgttatttacgccctatagttttcccatacaaaggcgctctagaaggcgggaggaagatatacaagcacgagaaggcggcgcgggttaaacaacgttcggggggaaaaccgcgagagcgacactggggggcgcaccctttttgcgggggattatggcaagctccc

SEQ ID NO: 550160 - DNA, 614 bp, Homo sapiens
agcgggcggggaggggcgtggggctggatcgcgcagcggatgcttcctttaccttcctcccatggtctccttccggttctcgagttgcttctctgagcctaagggtgtccgccactcgttcacccatcgacgacgaatgctgatgtagtccttgcttctgcttagcactgcgactccttgtgctctcaaacttccgtagtctcggacatcaacggtaaggagcaaggcccaggaagtaatagactcaccgtttaaggaagcctagcacacgggactgacaccgccaggaactccggcatggtttgcgatcgcacccgtcctggtttgagccgaacgtgcttcaatacttctgcgcttcccttgctgactcctcctcaccgaggcagttggctttatacgttgctggcacgtgtacctcctggctaggggtgtagacaggtatccgtgcacgcctggtggcttcgtgggacaaaaatgcttgcgattgttgatctaacgccttgacaaataggactatccacttcggagacgagcagatatggacccaacctaatagggttgtgctccgtggtacgctttgttgaaacatttaccaccccaaatgacccatctga

SEQ ID NO: 550161 - DNA, 211 bp, Homo sapiens
  misc_feature (13)..(16): n is a, c, g, or t
  misc_feature (55)..(55): n is a, c, g, or t
  misc_feature (59)..(59): n is a, c, g, or t
  misc_feature (67)..(67): n is a, c, g, or t
  misc_feature (81)..(81): n is a, c, g, or t
  misc_feature (103)..(103): n is a, c, g, or t
cttctcaatgggnnnncggctgagctccagccaccccgcaggcactttctttgtnacancttccttnggtgacatcggaancttacacagattttataacggntgcatacattaacttatggcctcattttgttatttttcgaaacaaagccctgtggaagaaaatggaaaacttgaagaagcattaaagtcattctgttaagctgcgaca

SEQ ID NO: 550162 - DNA, 138 bp, Homo sapiens
  misc_feature (62)..(62): n is a, c, g, or t
aataagggaaatgacagaactattttacctcacaggcgtacaaaaacaggtacaggctggtntggctctggagccctcaatgcattaataataatccagagtgaaagtctgcatagtggggtccagaggccaaaccag

SEQ ID NO: 550163 - DNA, 358 bp, Homo sapiens
  misc_feature (160)..(161): n is a, c, g, or t
gggggcttatcctggaatcaacaagaaccccaagtataagaaactcaaagatgccattgaagaaaagatcatcattgctgaagtcgtgaacaaaattaacccgtgctaatgggaagagtacatctctggattttccttctataacaaacaataatctccnnttcttgctgacccaaaagtcttggacaacatcaacgtcagcaggttcccactggctggcatgtgacccaaggtatcagatgagctcacaaaattgatggcttcttcgccgtccaccctcaaagagggctcagaagcagctagtaaaggagactttctcttcagcagtgatcacctgattgaaatggtcgccaatccg

SEQ ID NO: 550164 - DNA, 904 bp, Homo sapiens
cacagattattaattatgaccttatgtgactctatttgtctgcttgcctgggattttcgtacacctgccaaccgaggagcgctgactgacgtgtgctagtggtcctgtgggtgctgctgggcacccctgcagggcgtatgttagctgccagattctataagtccttcggaggtgagaagtggaaaacaaatgttgtattaacatcatttcttggtcctgggattgtatgtgtgcttgactttcgtactataatgaatctgatcctctggtgggagaaggatcttcagtcagctatccctttttgggacacatggttgccttattgggcctttggttcgtgcatatctgtgccttctgaaccgtggattggtgcatacattgtgggttgtagtgaagaggtgccattgagagcacccagttcgacccaatctagattccacgtcatgattccatgaacagtcgttctacagcgataggccccttgcctggtagttatcatgggagggattttgcccttaggctgcatctgtgatacaacttttcttcattctgaatatgtatttggtcacaccaggatgtattacaatgttggcttcctgtttctggtgtttcatcatcttggtttattacctgttcttgaaggcaagtatacttctttgctgattccacctatgtgccgaggatttcatgtggcaatggtgtccatccttaacgagtggcttactgggtttattcctttatcgatgcagtacctagtctttcaaactgggattacggtaacggagcccaatctgtgcttgtctccacgatatgggttgggctccttcttcacggacaggccccggaggtccggggcccacattctggcgtgacgggttaaacacccggcctaaaagaatactcc

SEQ ID NO: 550165 - DNA, 914 bp, Homo sapiens
cggcctgtctcaagaaataaaaatcaatcagcctggcgcggtggctcacgcctattatcccagcactttgggaggccgagggtggggaggatcacgacggtcattgagatctaagaccatcctggctaacatgtgtgaatagccctgtctcgtactataaatactacacagaagagttatcctgggcatgggtggtgggtcgtctgtatgttcccagtctactcgggaggcttgaggcaggagaactggcgctgaaactcggcgaggcggcagcgttgctggtgcagtccggaaggatcgctagcctacatgctatctccagcacttggtgtgacagactcgagtactccgtctccaaaagaagaagttagggaagtaagtgaggagcacacaaaacacaaatatacgggcgctgcgatgcgatgctaaggaagtgtagtgtgccgctccgcgaggtgccacgcactgctctatgagagttgtagcgccttctatttattctgtgtgtacccaaggtgtgtgggcactcgctacataaagatgggagctacgatatgtttgatcaccgttgtgaggacccttgggggcgcagccgtgtatattcttccgacaacgtgtttcatgtgagattgtgggaaataccatttgcgtatagagctctaggcgaagctcatgtcgcgtgatgaagcgagaacgcctttataaatttttgttgaggagcgcgtggttggccatgtaatttgggtgggacgcggcagttacggctttggcaagaagtaatttataaccagggtcatcgctcataggtttccaaattattttcaaaagttgtgtttaacggaaggatgaatcgcgggtttcttagaattgtaaacgtgggggcattttcggtatggatgtctttggaaagagtt

SEQ ID NO: 550166 - DNA, 693 bp, Homo sapiens
  misc_feature (82)..(82): n is a, c, g, or t
ccctttctctttaaaccaaaggggtccgcgtataggcccccccccaccccattctgcaatgcccctttctcttgaaagttcntcgcacctcacagtctctgcccattttgggcgttctgccagtctcttaccagacccatttgtgtcctcattggctccttcacacaaagggtcccctcttgcttgttgtgattggcaaacaaagtggcttgcccaaacccctgcactgtcaattgtagggtataatagctcagtctctagagcaagatgggtctgcgttggaatctctggagccaccatttcgtgtttgttctgaaacttcgtagagccttagttcccgcatctgtaaaatggagcaaagagtctcagctgaagggttgtgtaagaattcagcgacacgatgcgcacagagtccttacacgcgatcagtggcggcccagttcgatggctctcacctgtaatcccagcactttggcagtccaagacgggcagatcactaggtcacaagatcaagtggctacacacggtcaacccccgtctctcctaaaaatacacaaaaaattaaccgggtgtggtgtcgggcgcctgtagtcccagctgctcagtagactgaggccgaagaatggcgtcaaactggaagtcgtagcttgcagtgaaccaaaagtgcacctctgcactccagcctgggcatca

SEQ ID NO: 550167 - DNA, 234 bp, Homo sapiens
tgtcgtcggaagcctggagtatgtggcgctgggcgtcattagcacccagcctttgccagatcgtttttatggagtgttgattccctccaacaatcaaatctgaaaaaaggagcacgacgactgctctttacactccacgcttcagaaacaccaggcagtggatcacccttcttgatgattcttcctaactgcggtgagtaaatgtaatcgaccgcttcaccgttcatccgcgtt

SEQ ID NO: 550168 - DNA, 160 bp, Homo sapiens
ggtggtgttctagaggatcccagatgattgtccaccgctcctcctgtgcatcagcggcaacttcctgcggacctgatgcgggtgggcgagcagtgtggacatcagccgctttttatatccatgtacattcacctggggaaaaaaacggagcggtggagca

SEQ ID NO: 550169 - DNA, 223 bp, Homo sapiens
ggtcccaaatctagtaggcgtccttgccctattactatgcatccatcatcctagtcaagaagtccccattgctgtatatatggtcatagcgtgtgcattgtgtgtacagcccgatttcgccaaatcactttattgactcctagccgcagacctcctcattctaacctgaatcggaggacaaccagtaagctacccttttaccatcattggacacgaatgttca

SEQ ID NO: 550170 - DNA, 321 bp, Homo sapiens
actcagctccgggatacaggtagacctctcaggcttccaaggaatgccaagtgctatacgccagtctggcctcgtccaactcgttcgcgatctggcataccaaatggtaatgctccggctctcgtggcctccctactaccactcagagagtcgagtctgagtgcccggaccgcttggctattgacctttggtggcgctgagttgccgacccagtcaagggctggactgacaggtgccagtctggaggcgttcccacagctgtgcaaaaacttagcgcaactccctggtatcggtgttggtgatccccgagatacagggttc

SEQ ID NO: 550171 - DNA, 366 bp, Homo sapiens
cttttcgcagaacagatccctttacttctatgtcaggaacctgtttcgtttgaggtgctttgtaggaagtacaagtctagttttactcagagactagcgattgccagccctgcctttttaagctttccatttgcttggtagatcttcctccatccctttattatgaccctatgtgtgtctctgcacgtgagatgggtttcctgaagacagcacactgatggatcttgactctttatccactttgccagtctgtgtcttttaattggagcataaagcccataaacatataaggttaatatagttatgtgtgactaagatcctgtaattatgatgtacgctggagataaagctcgtaagtagatgcag

SEQ ID NO: 550172 - DNA, 782 bp, Homo sapiens
  misc_feature (121)..(121): n is a, c, g, or t
  misc_feature (143)..(143): n is a, c, g, or t
  misc_feature (166)..(166): n is a, c, g, or t
  misc_feature (188)..(188): n is a, c, g, or t
  misc_feature (195)..(195): n is a, c, g, or t
  misc_feature (275)..(275): n is a, c, g, or t
  misc_feature (289)..(289): n is a, c, g, or t
  misc_feature (296)..(296): n is a, c, g, or t
  misc_feature (298)..(298): n is a, c, g, or t
  misc_feature (309)..(309): n is a, c, g, or t
  misc_feature (324)..(324): n is a, c, g, or t
  misc_feature (359)..(359): n is a, c, g, or t
  misc_feature (410)..(410): n is a, c, g, or t
  misc_feature (442)..(442): n is a, c, g, or t
  misc_feature (455)..(455): n is a, c, g, or t
  misc_feature (460)..(460): n is a, c, g, or t
  misc_feature (483)..(483): n is a, c, g, or t
  misc_feature (485)..(485): n is a, c, g, or t
  misc_feature (510)..(510): n is a, c, g, or t
  misc_feature (619)..(619): n is a, c, g, or t
  misc_feature (621)..(621): n is a, c, g, or t
gtgagacagctggtcatgaccatgggtgtggtctgactctcagcttttgcttctacccagcaacttctgcccatacacacgttagatgtcaagagtacaatgttacctgctgccgttcgtngctctgagtcccgtctttcagnagaaggaatatcttactgctaanggtctacacatgtcctgtggtngggagtnagcagccaccagaatgatccaggaatatttaatgtgccatcttgtgcacatatcaacaagatatgacattgctgcctgangtgggaaaccatantctcaanantcagaatgatnctgggtatatccaanaaaagaggccatatcaatgaagctcacaattgtanagcaggagaacaaccagaaatggttttccgacagttcctggtagacgacanaggacttacggaggctcttcttatgtggattncctttgttgtgtncacanggagatctgtcagctgcttaatnanttgaaacttctctgtcatggatgtngcattccaaggagataatctccttctttggtgcctaatttctagatgataataggctagttgggattctttgctcatttcagaatcacttccaggaacgagatggcatntngaacttcacttggtgccaggtatcacaggccactacggtccatttgccccattcaggggcccatctggtctcggtggccacgtctccatcttacacccggtggggctggcgtccaaaaggcagggtccgaacctaacctttccatttttgggagcctaatt

SEQ ID NO: 550173 - DNA, 189 bp, Homo sapiens
agaggatcccccgcgtgtttcggggccagcggggaccaggggcacgtcgagcgttgtggagtaagctatctctccacttgtgccatagcccacttacatccagagtgtcaacattctcttcacagccacgtctaagcggctgcgagagtgatggagtgagcgatgggatgtgctcgatacgagagggta

SEQ ID NO: 550174 - DNA, 167 bp, Homo sapiens
gactctagatggatccccagaccacacttgcggataggctccaaagctgggagggagtcctccaactaccttggcactcttccccactgcttgcagaagccgtgatcactgcaggaaactggagctgcatagtgcaagctcccatgtgcaatgcaaacagggacaat

SEQ ID NO: 550175 - DNA, 260 bp, Homo sapiens
ccgtcttggaacccgggtacatcgactcagaaataggaacttcagaccagattgttccagagtaccaggaggacagtgacattagttccttcttctgctaatccccaaaacctcagaaacctcataattcttaacaacctgcattttcaattctaaaggtgggcaaggccttttgcgttgtacccaccagataatgacttcatcaagatggaagctctctggactctgccatatgtgtctctctcttctctgtttgggtg

SEQ ID NO: 550176 - DNA, 164 bp, Homo sapiens
ctaccccatgcactttgtcacagctccattgaagaagcttcaggagtgtatcctattgatgacgatgactatgcttctgcgtctggctcgggagctgatgaggatgtatgagagtccatagctgacaacatctttgaacacttccaaagatactgtgacaaagg

SEQ ID NO: 550177 - DNA, 283 bp, Homo sapiens
ggtatactccatctgaaaaattacaataaaaagataattaggtaactggtaggaaaaataattacattaattcatatatgcaacatcaattggtttggtataaattataatacaagaccttatttgtaacagcaacaaagtagaacatgcccagcaatttacaacatgttcaaaaccaagatggatataatctttaaacattccttaaagacactacaataccgggcatggtggttcatacctgtaatccctgcactttgggacacttgaggcgggtggatca

SEQ ID NO: 550178 - DNA, 378 bp, Homo sapiens
  misc_feature (5)..(5): n is a, c, g, or t
  misc_feature (69)..(69): n is a, c, g, or t
  misc_feature (89)..(89): n is a, c, g, or t
  misc_feature (340)..(340): n is a, c, g, or t
  misc_feature (344)..(344): n is a, c, g, or t
gcctnaggccaggagaaatccgccttgaacccccgggaggtggaagattgccagtgaaacctgaagaancctgctgcctgcactcccancccgggtgatagagccgagactctgtcctcaaaaaaaaaacaccttagcactttggcaggctgagatgggcggatcatgaggtcaagagatcgagactatccctggccaacatggtgaagccccatctctagcaaaaatccaaaaaattagctgggcatggtgctgtgcgcctgtagtcccagctactcgggaggctggggcaggagaattgcttgagcccgggaggcggaggttgcgctgagccaagatncttngccgcaatgcagtggtgacagagcgagactccat

SEQ ID NO: 550179 - DNA, 375 bp, Homo sapiens
agtcgctctagaggacccggtgagcatcagagagaaaccttgtgttagagaacacagaacaaggctgggcacggtggctcatgcctgcaatcacagcaccctgtggaggccaacgcaggaggatggcttgaggtcaggagttcaagaccaagctgggcaacatggcaaaaccccatccctaccaaaaatacaaaaatcagccaggcattgtgatatgcgcctgcagtcccagccactagggaggctcaggcaggaggatggcctgaacccaggagatggaggctgcagcgagccaagattgcatcactgaactccagcctgggtaagaaagcgagaccatgacaaaaagaaaaaaaagaaaaagaactaaaacag

SEQ ID NO: 550180 - DNA, 887 bp, Homo sapiens
  misc_feature (419)..(419): n is a, c, g, or t
  misc_feature (439)..(439): n is a, c, g, or t
  misc_feature (445)..(446): n is a, c, g, or t
  misc_feature (481)..(481): n is a, c, g, or t
  misc_feature (483)..(484): n is a, c, g, or t
  misc_feature (491)..(492): n is a, c, g, or t
  misc_feature (513)..(513): n is a, c, g, or t
  misc_feature (516)..(516): n is a, c, g, or t
  misc_feature (523)..(523): n is a, c, g, or t
  misc_feature (528)..(528): n is a, c, g, or t
  misc_feature (573)..(573): n is a, c, g, or t
  misc_feature (575)..(575): n is a, c, g, or t
  misc_feature (577)..(577): n is a, c, g, or t
  misc_feature (579)..(579): n is a, c, g, or t
  misc_feature (583)..(583): n is a, c, g, or t
  misc_feature (585)..(585): n is a, c, g, or t
  misc_feature (591)..(591): n is a, c, g, or t
  misc_feature (595)..(595): n is a, c, g, or t
  misc_feature (598)..(599): n is a, c, g, or t
  misc_feature (602)..(602): n is a, c, g, or t
  misc_feature (605)..(607): n is a, c, g, or t
  misc_feature (613)..(614): n is a, c, g, or t
  misc_feature (625)..(625): n is a, c, g, or t
  misc_feature (628)..(628): n is a, c, g, or t
  misc_feature (637)..(637): n is a, c, g, or t
  misc_feature (639)..(639): n is a, c, g, or t
  misc_feature (641)..(641): n is a, c, g, or t
  misc_feature (645)..(646): n is a, c, g, or t
  misc_feature (654)..(655): n is a, c, g, or t
  misc_feature (659)..(659): n is a, c, g, or t
  misc_feature (662)..(662): n is a, c, g, or t
  misc_feature (667)..(667): n is a, c, g, or t
  misc_feature (670)..(671): n is a, c, g, or t
  misc_feature (678)..(678): n is a, c, g, or t
  misc_feature (684)..(687): n is a, c, g, or t
  misc_feature (691)..(691): n is a, c, g, or t
  misc_feature (697)..(697): n is a, c, g, or t
  misc_feature (699)..(699): n is a, c, g, or t
  misc_feature (719)..(719): n is a, c, g, or t
  misc_feature (726)..(726): n is a, c, g, or t
  misc_feature (729)..(729): n is a, c, g, or t
  misc_feature (731)..(731): n is a, c, g, or t
  misc_feature (738)..(738): n is a, c, g, or t
  misc_feature (741)..(741): n is a, c, g, or t
  misc_feature (748)..(748): n is a, c, g, or t
  misc_feature (773)..(773): n is a, c, g, or t
  misc_feature (794)..(794): n is a, c, g, or t
  misc_feature (814)..(814): n is a, c, g, or t
  misc_feature (857)..(857): n is a, c, g, or t
gtgtgctgaggtgatctagaggattccaaatcctactcgcagcctgcagaggagtgagctgcagcccggcctcgaagaacttctgcttgggtggctgaactctgatcttgacctagagtcatggccatggcaaccaaaggaggtactgtcaaagctgcttcaggattcaatgccatggaagatgcccagaccctgaggaaggccatgaaagggctcggcaccgatgaagacgccattattagcgtccttgcctaccgcaacaccgcccagcgccaggagatcaggacagcctacaagagcaccatcggcagggacttgatagacgacctgaagtcagaactgagtggcaacttcgagcaggtgattgtggggatgatgacgcccacggtgctgtatgacgtgcaagagctgcgaagggncatgaagggagccggcactnatgagnnctgcctaattgagatcctggcctcccggacccctnannagatccnncgcataatccaaacctaccancancaatatngacgnagccttgaagattacattctctcttacacatctttcattttccancnantncttntntctctntcanctnntgngannnatgaannaaattatcttnacnatgctctcntnanacannattcccannaccnttnttagnctnnagagaanaaattnnnnacanattatntnaaatttctaacttttctctnttccctnaancnaaatcanctnttgcatntgtttgatgaatacaaaatgatatnacagaatgatattgaacagantattaaatctgaaacatctngtagctttgaagatgctctgcttgctatagtaaagtgcatgangaacaaatctgcatattttgctgaaaagct

SEQ ID NO: 550181 - DNA, 102 bp, Homo sapiens
accttctgattatgttttaaacatgtaatgcccgcttttaaacctaggatcaagaaattgaagtttcacgaggtgaggtttttattgcttaatttagtctca

SEQ ID NO: 550182 - DNA, 155 bp, Homo sapiens
cctgctcagactatctgtggtagctagggattacaggtgcccaccagcatggcctggctaattttggtattatttaatagacgacggggcttcgccagcgttgcccagtgctgatctcgagactcaaagggaatggctcacctgcaagttgaact

SEQ ID NO: 550183 - DNA, 405 bp, Homo sapiens
aacacctggaaagtggggccggccacagccatagccccagatagtgaccccagttagcaccccccgtccagagggctcctgcaaggccaggggtcccccaggttcaccctgttggggaaaaaaaaaagggggttcaaaggcgggtacctcccctacaaaagcccttgggtcattggcccctttagaagtgacccaagtgacttcccctgggagccgcattttccctatttggaaaatgggctcaatgcaaaggtggcaaacatttatggaccccccccacgtggtcccggagtggaagggtgcctcccactgaagcctttgctttttttccccccaaggcccgggaatggaatggggtgggttgcccaataaacggttgtggagtggaatttcctccaggcccca

SEQ ID NO: 550184 - DNA, 252 bp, Homo sapiens
agggataagaaggggactggggattagtgatattctgtttattgatgcagatgcaagtcatgcaggtgtgttcagtgggtgaaaaatcattgagctacacccttacatgttgattaaatattcagggctgggcacagtggctcatgcctgtaatccctgtaaatgcttacagaggccaaggtaggaggatcacttgaagccaggagttcaacagcagcctgggcaacatggtaaaatccagtctctaccaaa

SEQ ID NO: 550185 - DNA, 188 bp, Homo sapiens
acaaatgatcttaacatattgtacgggaactgctgttttaataacgccatcagatcgttcattttgtacatttaagagttttttatcaataaagatttcataggaggacatcatcatacttgtctgttcttccattgatgttctcagagtcccgggtcagtctctgagtgtctcatgggtcgggatgc

SEQ ID NO: 550186 - DNA, 171 bp, Homo sapiens
gttgtggtatatcaaggcataatcaagctccttctgggagcttgattcaatgcctactcaagctccttccgggaagaatgggtaggcttggatatattcctgggttgaacccgacataagactggtagtgtcaaactatggttccatctgccacgactgacactatacttg

SEQ ID NO: 550187 - DNA, 258 bp, Homo sapiens
  misc_feature (51)..(51): n is a, c, g, or t
acgtaaatactagcgagaaggagcagaggcgggagagtaatacgtaggggngagctacgtagcactaggctgtacaggtaagcaaactaccccgtagggcgccaaagtcaaaagaaatactactagcaccagggtatcctagataggactacctaccatagtacctatcagacgacgcgctacgcgtctacctacgacactaagtaagccgggccctacctagggcacgcatacgatagacaggcctagcgtactagc

SEQ ID NO: 550188 - DNA, 101 bp, Homo sapiens
agaaagcgttcaagctcaacacccactacctaaaaaatcccaaaccatataactgactcttaaaccatttggcccatcttatacctttaggaggactaatg

SEQ ID NO: 550189 - DNA, 122 bp, Homo sapiens
taccgccattatgctaaacaaaagactttctttttaaaggaggaggaggaagaggacatgatattgcacagaggacccaacactgaatggtgggagctagaggttgctggaggccacggagg

SEQ ID NO: 550190 - DNA, 364 bp, Homo sapiens
  misc_feature (318)..(318): n is a, c, g, or t
cctgtggtcccagctactcgggaggctgaggcggcaggatagcttgagcccaggaggccgaggctgtagtgagcttcctgcatgccttactggtagaaatcctagggcagcgtgccattttcgaccttctgccattgcccatggcagatcacgtcgctgcactccagcctgcatgatggagtgacgaccctgtcttcaacaaataaattaataagtaagtaagtaatgtgaatgagtaaataaataaactaaactgattggagctgcgctgccatatgctgagagacgacctgaagccaggagagagaccttgaacanatgcttcctccgcaccttgagagggaggatagccccgttgacacac

SEQ ID NO: 550191 - DNA, 126 bp, Homo sapiens
atcatcgcttagtgctcccccgaggtcaggattaaccaacaactctcactaaatcctcaccagtcacccctccacatcgtctaaaaaatgaaatcttttgattagattttcacctctctgcgtctg

SEQ ID NO: 550192 - DNA, 1055 bp, Homo sapiens
aaggctaagtagatgacgcggtgttaatatggacgaggataccctgacaatgaaccctgacaacccggaggcctgcggacaagtttaagtgagatcaacaacgcgcacgccatcctcacggactgccacaaaaaggaacatctacgacaatgtactggctactgctgtgtgtctctacgtaggccgagcagttctgggtgaatgatgaactgtgaacacctacttctgtgctagtccagtctagggtagtggccaaggcctctagtatttgtacttcttgctgtgtctacctacactgtgtctgtcttactagcgtatttagctaattcttaatatcttactaaactgattaatctaatctaactgaacttaatataattattatatctctctattaagtcttctcgatatatgattctattgatagaattgctaagatagttcaattgcctaattatctctctcctatgattatattcaatatttgttttctttctttcgttgctttttccagatttcgatgatataattatcgaattcttcaatattcttcaattattccttctagattaataaaatgatataagatttcttttctgatatttttctatttttatattgtttaattatattacttattatatatacccctttgatgtatttgttactctttcttagtaactactgctctttatattcataatccttttatactttattctcttatacttatcaccagactcctttcatctgttatttttattctttacgcctctttaattcttttcttacttttatcctgttatatcttgctctcttatccttctccttaattttttatatcttctcggtagttgtattttcgtattaatatagtcgggtctctaacacttatcatcttttcacgatgtacatttctttataagaagattcggtatcatgaagaggcactagcccgatatgtccccggaaagtctgattgctcgtgtgtccgtatatggtagtggggtttacgtggtggaattaattgcactggtattcgtatattgtgttgt

SEQ ID NO: 550193 - DNA, 104 bp, Homo sapiens
gactctagcaggatcttaggtatatttaggaataaataaaaagaggcgggcacgggtggctcacacctgtaatcccagcactttgggaggcgaggtgggcggat

SEQ ID NO: 550194 - DNA, 178 bp, Homo sapiens
cgctagcggctagtgaacgatccagacactggatctgacaacactttgatcttggactttccaatccccagtcttataagaaataaatatttgttgtttaaaccatgtggcctatgatattttttttccttttttcttttgtctttttaaggctgcgttcacttaatgccgctagcgc

SEQ ID NO: 550195 - DNA, 277 bp, Homo sapiens
aagtctgagggaggctgtgtataagaaccggacaaactccttaacgctggtcttcagaacaggacttggtacagaaaataaaaagaggcttgtttactacattactaaattatttcagtaggagacttgtaagtaaccatactatgtagaaaatggtttatggctttgagccatgaatattaatttgcatttagcaggtgaaatattagcatttccacttaatttcactggttacaaacataatagacactgtttacacataagtttcacattcagg

SEQ ID NO: 550196 - DNA, 194 bp, Homo sapiens
ggcggtgagctccagccaccccgcagtcactttctgggtaacaacttccgttgctgccaacgaaaactgactgcttgtttataacgtgtacatacatgaagttattacctcattttgttatttttcgaaacaaagccctgtggaagaaaatggaaaacttgaagaagcattaaaggcattctgttaagctgcga

SEQ ID NO: 550197 - DNA, 864 bp, Homo sapiens
ctgaggtgtcgggcggactccctccttctcccggcgcctcaagcggaagagacattcctcaagaattttgtatccaaggcccaaaagttggtgacccaagatgatgaatgctgacatggatgcagttgatgctgaaaatcaagtgtgcactggaggaagaaaacaagacttattaagtcacagtgttggtaactccaatacacactgtgagagatctctctgcaagagtagatgcagttaaggaagaccatctgaagctaaaatccagaaaaccaagttcttggacaatatatagaaagatctcatgtcagttcgtagtgtgcccaaagcaactgacacacaaaaacgcaaaagaaagtaagggattgacacccttctgttttatggaatgctgctgatcatttcattcttttacaaacttggataggattccaaaaggttacagtacctttgtggcttcatgaatattctgaagataatgtcagatgtgacaaaaataccacagtagcaggagacttccataagtgcggtattatgtagtctatgaaaactgtgcaagatgtatggtacgagactttatgatttagaatgggcctatattattaaacctaagagatgaatgtaatcgacttgaggtgagcacccgccttgaattatagggtagaagattacaagaaataaccaccggtggaaaagtgaccaaccgtgtataatggcaggttattacctggcacactggcccttcaatggcttactccattcctcgctaggaacatgggtccttgtaggaacacaattccaaaacgcttgtgaaaaccaaaagccacgcacaaacggcaacaactcacaccgcgccatgtccca

SEQ ID NO: 550198 - DNA, 521 bp, Homo sapiens
  misc_feature (309)..(309): n is a, c, g, or t
gcagcagctgctcggcgccctgcgcgagctcccccggcccaaggggctgcagcgacgtggtgcttatcgacaacgcgggctctctgggggatgtgtccaaaggcttcgtgggacctgagttgactccactcaagtgaacaactacgtgggcacgtgaactgtgacctccatgctcgtgctgtgacttccagcggtcctgaagggccttcccgggacagtccgtggcctcaacagaaccggtggttaacattctcgtccctctgtgccctggaaacttttcaaagggcgtgggcgctggtactgtgtgcnaggaaaggcgtgctcgtgatatgctggtccaggtcctggcgctggaggaacctaatgtgagggtgctgaattatgcccaggtcctctggacacagacatgcagcagtgggcccgggagacctccgggggacccagacatgcgaacaggggctggcaggagctggaaggcaacggggaagctgcgggatggcaggggtgtcagcccaagaaag

SEQ ID NO: 550199 - DNA, 188 bp, Homo sapiens
cccaaacccactccaccttactaccagacaaccttagccaaaccatttacccaaatatagtataggcgatagagattgagacctcggcgcaattagatatagtaccgcaggcagaagatgagaaattatacccaagcataatatagcaaggactaacccctatacctcctgcataatgaattacctag

SEQ ID NO: 550200 - DNA, 721 bp, Homo sapiens
aaaaattggcacttttttatttttaaaaaacaagggctcactttgttggccaggctggtttcaaaccccttggctcaagggattttccagcctaagcctaagcctcccaaaggggtgggactacaggcatgagccactgggcccaggggctttttttttcaaaaatctaaaaacccccattggcctatttgctttaaaaccctaaccctagacccttttgtggaagggtggttttttctccccatttggagctggtttttatgaaaacatttttggggagagccgcttaagggaaaaaactgggaagggtcccctgggaaagggaattttttacctttatacatgaaggaaatgggggctcaaaaaggataaacaattttggtccaaccccaagacaaatcccgcccccaaaggtggttttccagggcgggttttattagggggaaggcccaatttgtcctcctgggaccccatttctggggggggacagggggtggtttattcacacccctctgggccagagggctccccgttgacctttccctttttttttttgagaaaggggtttctgtctgcaccaaggttgggaggcggggggggaactttggtacatggaagtcccctttccgggtaaagcctttcctggctaaccccccgaaaggggggacaccggtttgtgggggggggtttttcttttttgaaaaaaacttctttcccccgg

SEQ ID NO: 550201 - DNA, 163 bp, Homo sapiens
ggacgattagcatatattagctagacgttactttctgtgatagtggttcactgaataagtggcgtcgtcttgccatgattgtcaggggagaacgggagatgggtagcatcatttggattaacatttggggcctgataggggcaaactggtgaaacaatggaaa

SEQ ID NO: 550202 - DNA, 401 bp, Homo sapiens
tggaaagggagttttgggctctgttgcccaaatgggaaagcaggggtgcaatctcagggcattgaaacctccgcctctgggatccaagcaatttcccggcctcagcctcccaagtagctggaataacagatgcctgtccaccacacccagctaattttggtattttaagtaaaggcgaggttccaccagtgttgcgctccaaagtgactctcaaactctggacctcgaggtgacccgtctgcctcgtgcctccgtgaagtactaggaatccaggcgtgagccaccacgcggggccttctcttctctctctctcacttggattttccaaggctaagtgggccatcccttgaatagggttacagccaagttccacttaagacttctaagtagctcaaaataga

SEQ ID NO: 550203 - DNA, 202 bp, Homo sapiens
gtggtgatctgaggccgttttatgcggggcacgtgtcgaggagtcccttgtgtcggcacccccatgtttgtggtcaaggcctatctgcccgtcaacgagttctttggcttcacgctgactgaggtccaacacgggcggcagggtcccccagtgtgtgtttgaccactggcagatcctgccccggagacacccttaaactcgc

SEQ ID NO: 550204 - DNA, 201 bp, Homo sapiens
tgttgaaagcagtctggccacggttccagcacgacacatcaactcgccctggtagtcggaatcgatcaggccgaccaggttgcctagcacgatgccatgtttatggcaccaagccggagcgcggcaggatcagcgccgccaggccaggatcgccgacatagatcgacaagcccgtggggatcaggatggtctggcccgcca

SEQ ID NO: 550205 - DNA, 309 bp, Homo sapiens
  misc_feature (131)..(131): n is a, c, g, or t
  misc_feature (168)..(169): n is a, c, g, or t
  misc_feature (225)..(225): n is a, c, g, or t
  misc_feature (258)..(258): n is a, c, g, or t
  misc_feature (294)..(294): n is a, c, g, or t
cattgaaagtataaaccgttgccgcagtacaaacccattacagaataatgcatccaaaagcgctatggactacccgtgacaattctgcttaccttccatcttgatgatttcctatcagtatccaaaattcnatactccagcattttttccgaatatagtcttacatgnntgcaattcctgaggtaacctaagtgtccactgccaacatccttggacgaaaaccangtcccccgggagaattcagatatttatattcanacatacaatacaacgggaatttcatcaatggtaatncagatatttgcagat

SEQ ID NO: 550206 - DNA, 760 bp, Homo sapiens
gcttgactaccatgctgatgatcgcaagctgtacaatggactgtaggccaagggccgccagtttgggtcaaagtgcaactccggggtaccggattgcctgtgtgcattgagcctgtgtctttgatgtgcagtaccgcccagatcttcttcagcaaaaatgggaagcgggtggtgctcttaccatcatgcccatgtccccagatgtgacttgttcccagcagttgggcattgcactccctgtggtgaacgtgaggtgcggctgcacctctaacgtctgtagctgggacggtgtacgtggactgacaagcgtcctgattgtgggttggacagttacgagtgatgaatgtggtgcctggcttacatgattgtccatgacggtctgtgtgcacctcttgatcgtgacgtacttaggcgaaattggcctatacgtactcgttggattgttgggctgtccctaatgacccggcagtccacttcagtacacctgaaggctcattacttccgttcggtcgtgatgatcgtgtgagccacttgtacgacgaaatgtgctacagtcagacactcaagagtgaggcgacgtgtgatgaacgatgttcccaggaacagggagctccctgtggattggatccctagtgaggctcgtggtgtaattcattgcatacccatgtggtcaatacctccattggtatttcgttcgcatggagtcctttaggtctgaagcttgtgcctgtgacacattgttctctctctgtaatgatcc

SEQ ID NO: 550207 - DNA, 415 bp, Homo sapiens
acgatctgggagtcatagtctcacgggggagataaaaaataaagtgtgattacttcacagatagattacatctctgtgataatatatacatacaggccccctcaaataggaggattcgtgtacccaagcagtgtactgaatatttcataatatatgttggtcattatatacttgatgatgccaattctccagtcagagatggtttacactgtacagacatttcgaaagaagatgtagccttctacttaaggtaggcagtgtgcacagggattatatcaatgattagtagctgtgccaccgacatgaatgtctaatagccaatgtatccagattcctaatgtgtattcctaacatggcaagctgcccacaaatacatacacaaacacctatatctctactgtcccgcaagactctc

SEQ ID NO: 550208 - DNA, 109 bp, Homo sapiens
gcgtggtcgcggccgaggtacagcatagtgactataattaatttatgtatactggaaaattgctaggaaggtagattttaaatgttctcatcacaaaaaaagacaaatg

SEQ ID NO: 550209 - DNA, 426 bp, Homo sapiens
tctctctctctctctctctctctgtctatgtctgactaccactggatcacgctacactgccaagtctgaaaatcgagtccacaagatttgattggcagaatgtgctatcattggacaactgaaaatatctactaatttccatttatccatttgacatgagttgtatagaaatgtatgcatcagtatgtgagatagcaacaactcgtgagacccatagacttacagacatacctaaacataaaatttaaatattagaaactatcttacaagcagacttacacaaagagtaactgacaagaaagcgagatcgtgataggatgacggaatgtcaagaccaattgtcccgaaatgactgacacgggaacgacaatcagacaggactaaggacttagaagatccgaaactatgaagctactgagcatagag

SEQ ID NO: 550210 - DNA, 257 bp, Homo sapiens
ctctacgaggatccccctaggtggcaaagcgattgtctctctaggtggacaagcgacgtctagtgtgggagcgtctatgatccttggtattatcggacagcccgtaccagtctgttcaaaagcctcgtccaggtagatacgctatttggcctgaggtctcaaaagtaagccaacgtgatggaaggcgcggaacggctgcggcttctgatcgggggatctctaggtgaaaagcgaagtaagcgcggattgctatacgt

SEQ ID NO: 550211 - DNA, 103 bp, Homo sapiens
tgggtctcaaaattcctgacaaatttttgccaagtcgtttccattaaaaagtactgattttaaaaactaataactaaaacgccacacgcaaaaaagaaaacca

SEQ ID NO: 550212 - DNA, 223 bp, Homo sapiens
caccaccacaccaccacaagggtactctagaatgtgggcagaggattcacatttctccaccctgccctcctgccatgcaactgcagtatctcctctgggagagtatacatggccttccttaggtggtatcagagctataccaccacaactcctttcaaaaaacgccacgcgcagaagatccattcaatggtgaaataataacccattcctttctcatcttaat

SEQ ID NO: 550213 - DNA, 115 bp, Homo sapiens
ctctagagtatcccccgagcgggtgggggtgtacactgtaggaaggagagcgatatttaatcagtaaccacttcctagggtattttaacatgccatcagttcgccaaccagctcg

SEQ ID NO: 550214 - DNA, 460 bp, Homo sapiens
  misc_feature (252)..(252): n is a, c, g, or t
acagcaaggggaaaggattccctatttataatgatgctgggatagctggctaaccatatgcagaagatagaaacttgacccctccctttcaccatatacaaaaatcaactcaagatggattaaagacttaaatgtaatacctaaaactataaaaccctagaagaaaacctaggaaataccactccagacataggccctggcaaagatttcatgatgaagactccaaaagcaacggcaacaaaaacaaaaatngacaagtgagacctaattaaactaaagagctctgcacagcaaaaaaaaaaaaaacctatcaggggagtaggtagacaacctacagccgggcagggggaggcccgggctggtaatcccagcactggggaaaccccaggcgggaagatcattggagcccaagagttcaagatgagcgggggcaacatagagagaccgggtctccacaaaa

SEQ ID NO: 550215 - DNA, 147 bp, Homo sapiens
ctctaccgttaacattactgcaggcactactcatgcaccgtaatggaagcgcaccctagcaatatcaaccattaagccttccctctacacttatcatcttcacaattcgtaattctactgactatccttgaaatggtcgccaatccg

SEQ ID NO: 550216 - DNA, 200 bp, Homo sapiens
  misc_feature (10)..(10): n is a, c, g, or t
  misc_feature (32)..(32): n is a, c, g, or t
  misc_feature (78)..(78): n is a, c, g, or t
  misc_feature (107)..(108): n is a, c, g, or t
  misc_feature (141)..(141): n is a, c, g, or t
  misc_feature (148)..(148): n is a, c, g, or t
  misc_feature (158)..(158): n is a, c, g, or t
  misc_feature (160)..(160): n is a, c, g, or t
  misc_feature (164)..(164): n is a, c, g, or t
  misc_feature (167)..(167): n is a, c, g, or t
  misc_feature (175)..(175): n is a, c, g, or t
gaatttagtngcgcctctgccatggcctgggngcataggaggctacaacgcccatccagcaaacattcgtcaccgccntctacattccctgtggacaggatgcagcnncagaatgttggtacgttcaaacctgtattaccntaatggnacgcaacgtngncccncanatcgacangacctcatactatcacgctcgcacc

SEQ ID NO: 550217 - DNA, 120 bp, Homo sapiens
caggattttgaggctgcaactaagtatgatcgtgccagtgcactacagcatgggcaaaagagcgaaactccatctcacataaagtaacaaataaagttatcacagacaaatgcatctgag

SEQ ID NO: 550218 - DNA, 140 bp, Homo sapiens
tagctatctttaagtaagaagaatctacagtcatccgtgagttcactgtttcacacgacagcgcccacgaaacaatcaatcaccaaatcttattttgagcttccctgagacttagtgaaacatctggtccatttatagcc

SEQ ID NO: 550219 - DNA, 410 bp, Homo sapiens
ctacccatctattttatcatttactaccataaaatacacacaaatctattataaaaagttaaaaattttcaaaacttacacaaacacttacagacatggtcccattcccagtcgagagaaatgtaaacaaatgtaaagatgcagtattaaaccactcatgcataaaattaactgtagttcatactgtatcactgtaatactttcatagccacctcttgttactattgcagtgagttctggtgaataaccacttcaaatgccatgtgatgctaccatctctgtgtgagcagttcatctctccaataaattgcatattgcagtaagtgatctttcatggttctcatgtatttttcgtttagtgccataccataacaccatggagcccataatgccactgtggtcctgggtgg

SEQ ID NO: 550220 - DNA, 122 bp, Homo sapiens
ttgacgtcgactctgcaccttcaggttcggatgcagcgtcagaagacgcgacaggctcggggccagatgctgcgagccgacctcgtaccgggttggcgatccgcagcgtgccgctgacctgt

SEQ ID NO: 550221 - DNA, 129 bp, Homo sapiens
  misc_feature (22)..(22): n is a, c, g, or t
atcctcaagctcaagcattgtngtgtgcaggcaaggtcaggtttcccccaaggcccaccattgtctttttccacctttcccccagatgctgcactcagcttcaggcatccatctgcgccggggtcacgc

SEQ ID NO: 550222 - DNA, 232 bp, Homo sapiens
tctagaggatctctgagaagctttattactaacacaaaggaagtctgtgcaatgttgcgagaacccgtctctgaaaaaaaaaaaaaattaatttggcgggtgtgggggtggtggagcctatggtcccagctactcaggaggcggaggggggaggatcacttagcccaaaaggtcaagactgcagtgaaccatgattggaccattgcattccatgcctagtcaacagggtacc

SEQ ID NO: 550223 - DNA, 374 bp, Homo sapiens
ggagatgccatgcattgcacgatgaatgaatccagagtagggacatgtagaaaaaaaaaaagaaaaaatatatgaagccttcacggcagctacagcagcaggcacaaaagcttggcattggtggcaaaatacatttttatcaaatggaaaattcagcttttatgagggtgcagggttgctgtaagaaaggcatacctttccaatctgtcccggggtctaacgaaaaaaagccatagctgtagactccaatgtgatcccagaaaaagcaaggtcattatatgacaacttaaagcaaaaggaaggtgaaggatctaaagcgggagaatttaatgccagcaagggatggttggataattttagaaagaggttgggct

SEQ ID NO: 550224 - DNA, 300 bp, Homo sapiens
gaccaaaaataataattaattaattaattaaatagctaagcaatctttaaagcttaactaaagacatgaaggatactttgggaataagattttccatcctggagcaggggaggtttgaccaaaacgatactaatatttgatctagaaaagttaatgtgcaagaatactgcacacagtagctcacgcctgtaatcccaacactttgagaggttgaggagggaggatcacctgaagtgagaagtttgagaccatcctgggcaacatagcaagactctgtctctacaaaaaaattaaaattgg

SEQ ID NO: 550225 - DNA, 380 bp, Homo sapiens
  misc_feature (179)..(179): n is a, c, g, or t
  misc_feature (259)..(259): n is a, c, g, or t
tctagaggatccctgggcgaagaccgtattggaggtcctccccgaatactcagcaactggaccatggaaaaagtcagacgagagggggttaaggtgatgcccaatgctattgtgcaatccgttggagtcagcagtggcaagttacttatcaagctgaatagacggcagagaaggtaganaactgaccacatatgtggcagcttgtgggcctgtgagcccaagtgttgatgttggcccaagaactggtggccttggaatnatatgactcagattttggtggcttccggtgtaaatgcagagttacaatgcaacgctctaaacatctggggtggtaggacgatgctgcagtgcttctaacgatataaaagttgggaacggag

SEQ ID NO: 550226 - DNA, 184 bp, Homo sapiens
agccggaccgcacacgcgaagccaaacgcgcgagtcgagaggtcggggtggacgaagttgttgcgcaacaacttcgtccactatgacatgatttcaagaagtgtatggagactcggcgtgtgcagtctggaccctctgacacgccgaacgcccaaaccgccgcaggtcagaatggacgaagttg

SEQ ID NO: 550227 - DNA, 306 bp, Homo sapiens
ctcggccgcattgacgtgcatggcatctataactgtcacagcaccggtagagtgtcttttagcatgctaatgtattataattagagtataatgagcggtgaggacaaaccagaagtcactttcatcaccatcgtggtttggctgggttctttaccgcatcctcttctatcagcaggggctttgtgacctgtatcttgtgataccaaagctgctgacctcctatttcatcctgtgaccaagaatgaccaaactcctggggatggagcccagcagttctcagccttcaggacacagtggatctgtgaa

SEQ ID NO: 550228 - DNA, 152 bp, Homo sapiens
aaaccccagcccatgactcctacagggccctctaagccctcctaatgacctccggcctagcaatgtaatttaacttcaactcaataacgctcctaatactaggcctactaccaacaaactaacatatacaatgatggcgcgatgtacacggg

SEQ ID NO: 550229 - DNA, 107 bp, Homo sapiens
gagaaaattggtacagaaatgtgaaatttgcctttgttgcaccatacaattgcaaaagatggagtttaaaaatttacatacaaacagcttgtattatatttcatatt

SEQ ID NO: 550230 - DNA, 424 bp, Homo sapiens
  misc_feature (38)..(38): n is a, c, g, or t
  misc_feature (106)..(106): n is a, c, g, or t
caatactctactttcgccaagtctcagggacccatccnccagcaacggtggcggcgccctgtgcctttgcgagggcggagctgccttctcctcagcacagacccgnagagcattgccagggcggagctgagttctcctctgcacagacttcggagatacagcgaagcggagcatgttctcctcagcacagacccgggcgggcgggccaggggcaccgcgagggcggagctgcgttctgctcagcacacacccgggagacaccgcgaaggcagagcagcgttctcagcacagaccttgtgggcactgcctcgctttgggactactcggagccgcatcaatggtgaataaaatccttcctgtttgcagcccttaataatcagggtcagagaccagttagaagggttcagtgtggaaaacgggaaac

SEQ ID NO: 550231 - DNA, 425 bp, Homo sapiens
tcccattcagatggggttgtcagagaattaaaggagacaaggtgtacaaatttcttaactgtgtgtgacacttaaataagcatttgataaatattaggagttttaaagaatccatcctaaaaggaaaattatttgaatctataaaatcagttaaattttaccttttcatttttactaatgactgcagacagaaagttgaaaactactgtagagctctttctcctgtaattgctgcttcagtagaaaaacctagactatcttaactgaatgttcctctctccttcaagtttctatgtaacctttagagatggattcataatttaaaagaataccattactgcggaaaagcgtattgccttactaactaatctcttctgatactgcaaagatatttccaaagataattcgtttgctttttcttctgt

SEQ ID NO: 550232 - DNA, 113 bp, Homo sapiens
tatgagcacgcagttcagcagcaggttgcacacgttaggcggcgcgcggcggcgcagcagcagcgtgaaggtgacgtcggggtagggctcggagcagcagccgtaggtgagca

SEQ ID NO: 550233 - DNA, 165 bp, Homo sapiens
ggatcccacttaggtcccgattgcgcttgttctcccgttaattaccgtttagaggtcaacacggtgcgcctcccgggactagagccgcgggcgatttctcttctgcgctcctgtggcagcgcggatggcgtattggcctccccattgcacgcagaacgcccctta

SEQ ID NO: 550234 - DNA, 147 bp, Homo sapiens
cgtatctacgcgttgacagtgggctcgagactctggctgcctgaggaggcctcggctaggatgcagatggatgctgcagcatccagagactatggaagagagtacctatatctagtttattccaaagacagacaagcagtgtgtgcc

SEQ ID NO: 550235 - DNA, 706 bp, Homo sapiens
ctgggcgtgcgcggccgcaatgaactgggagctgctagctagtggctagctaggtgctagtgcgcgctgctcctgctcttggtgcagctgctagcgctatcctgagggctagacggcgacctgacgctactatagggccgagctggcagggcacgacgcccagaatgggcagctagactagatataggtaggtagtagggtagactaggagcctcgcagtggaatatggtagaggagctaggctataaccagtatagtctaaaactaaggagtttctctatgtgctagtcagccagaagagtgcatagagctggaaaggggtgaaaagaagatgcctagagaatggcaatttacaacagaaaaagatatacttgttttgccccattgacctgaccgacactggttcccatgaagcggctaccaaagctagttctccaggagtttggtagaatcgacattctggtcaacaatggtggaatgtcccagcgttctctgtgcatggataccagcttggatgtctacagaaagctaatagagcttaactacttagcggacggtgtccttgaccaaaatgtgtacctgcctcacatgatcgaggaggaagcacggaaagatttgttactgtgaatagccatcgtgtgtatcatatctgtacctctttccattggatacctgtgctacaaagcattgtctccggggttatcca

SEQ ID NO: 550236 - DNA, 880 bp, Homo sapiens
gattgcgcatgtgggaaacccacgctgagggaagaatcatgggaaagagtggagacggggttccaccgtgttagccaggatggtctcgatctcctgacctcgtatcctcccgccttggcatcccaaagtgctgggattacaggcttgagccagcgcgcccgttcctttcgtgttccaaaggctttgtaaataaacttccactcctgtcctggattctgctttatggccctcagtcgaattctttcttctgaggaggcaaggacctgaagtggcttctgaccagtacaggagaaaacgaatacagcagggatgacttccaccagctccattttgccagctctgaggtgtatcaagaaagtgaccctgaaggaagtcatggccacgggccaagaacctttaagcattcctttgcggttgaccccaggatttcagacgaggctacaattttcctaaccagtcacaaaatcagaggaatgtttgattccacctatgacctgtgagctcctgtttcaagatattccaccttttttaggccaaaccaatgtataacctccaagtgtcgattcaacactttcgaatgtaatttctgcttccctgagatttacccctgcttaaaacctggtgtgaatccctcggagggcgggattatagtcatgaggtgccaatcccctggtggtgcctggaaataagaccttctttccccctgaaaaaaaaaggagagaagagagtgggggggcggccccaaagttaaaaccgtggggggcgcgagaagagagcgctagaggccagggacggcacaaggggggacccaaaccgggcggggaaaagggagcggaaagccgccccgccgggacgcacaaacaagggcgaacagcagagg

SEQ ID NO: 550237 - DNA, 1082 bp, Homo sapiens
tttggtctagtgttgtgtgttgtgtctctgttttgtttttttgtcattgtacttcttgtcgtataagtatttagtgtgttacgtgctgtaatcatgcccgttctcgtttggttctttgggttcctagctctgcattggtggttcgtgtgtgggatagattgctgaggttatggcgttgtatcggggttctccacatggttaaggttgggagttgtggagtgttgtgcaattgtggtctagtgcgtgctatcggtgcgtgtgcgtatgttgtgggttgtctgcttgccatgtgtgtcgagtccatgggtccttgtgttattgttgcttcgtggggtttcagggttggatgtatgtcaagactcgcgttgcttaatggtggatgtcgatacaatggtgatggagatcattacggcagcatgtgtgtctttgacgcttcatatggtacatacggtctggattatttgttggattgtaaatcttctcgaaccctgcgccttcgtggatcccagtcatctagtttgctacatctattggagccctcccagatctcacgcttgagccaggcatctttgacactgatgggccaagattaagtctagtttcttgattgttcatactgttacgccccaggttgagagaacagaggcttagggaccttcagaccatgtggtatcactgtttgcctagctgtgtggccttggtcatatctctcagcctctgagaaagcctcgttcccactatctggaaataaggatgatctatagcgtacctcacggttactattgcaaagcctgtactatacaagctcccagcctacagaggctctcaacgaagagtcaccttcatggtcgtcttcaggaacaggacggatgaagaaggggtggggttaagactcaggggcacctgagggtctgagcccccttatgagtacccaagaaggactgtctatgcatgcacacccacaagccttatacacctatttatataccatacacgaacggcaagagaacgcagagagataggcgatgcagactcgcgagtcaatgatcgatatgtctccattacgttgcctgggttatttt

SEQ ID NO: 550238 - DNA, 678 bp, Homo sapiens
  misc_feature (39)..(39): n is a, c, g, or t
  misc_feature (65)..(65): n is a, c, g, or t
  misc_feature (146)..(146): n is a, c, g, or t
  misc_feature (159)..(159): n is a, c, g, or t
  misc_feature (167)..(167): n is a, c, g, or t
  misc_feature (175)..(175): n is a, c, g, or t
  misc_feature (184)..(184): n is a, c, g, or t
  misc_feature (221)..(221): n is a, c, g, or t
  misc_feature (235)..(235): n is a, c, g, or t
  misc_feature (243)..(243): n is a, c, g, or t
  misc_feature (246)..(246): n is a, c, g, or t
  misc_feature (252)..(252): n is a, c, g, or t
  misc_feature (262)..(263): n is a, c, g, or t
  misc_feature (281)..(281): n is a, c, g, or t
  misc_feature (285)..(285): n is a, c, g, or t
  misc_feature (297)..(297): n is a, c, g, or t
  misc_feature (312)..(312): n is a, c, g, or t
  misc_feature (315)..(315): n is a, c, g, or t
  misc_feature (337)..(337): n is a, c, g, or t
  misc_feature (455)..(455): n is a, c, g, or t
  misc_feature (528)..(528): n is a, c, g, or t
  misc_feature (600)..(600): n is a, c, g, or t
  misc_feature (678)..(678): n is a, c, g, or t
ctcagacctctaacatctgaaactatacgaaaataaagntctgtgtttatgtcactcggtttgtngtacattgctgtcgcagccctagtaaccaatacactgagaggtaccatgttctctccaatcaaggttatggctttggccanttcctcacttgtntatcttgntttctgcntcctcagtntcggtcccctttgcctcctggggttgccccttgtggnagtctaggccagcntagtggcngcncctgcncatcttctgnnatggggccagcctcagcngggnggtctgagactntgcctgtctgggacnggngctggtggcccctggggcctgngaccatggcggggttcacatcatccgtgttttgcactggctgggctgctttcttccttctagtcttcactctgaagatgaagcaaacacagaggaaaaccagggttgtgatgctagcnccccaggctgctcccaggacaccaccagccctgccttctggtttccaatgcacaaagagactcagagagattngcagggagcccagaggatgctgagcacggcaggtgaaatctccttcttctgcagaccctacttgaggcagcnccaggaccccggtattggagatgggggtggcgttcagggcggggaagcctggaaccagctcaggtgtgcaggggggtn

SEQ ID NO: 550239 - DNA, 481 bp, Homo sapiens
  misc_feature (80)..(80): n is a, c, g, or t
cacgaggccggccgagagcccgaaagaagtggcgctgaaatccgagtggttgcgtacgtcgttccacgacagcgttccantggtcaagctgttcttgtcagcagttgccgtactggcgatcaccgcaccatcaagatccgtgttgcccttgaccgtgatatcgaacccgccttcaccagcccgaatggctgtttgttcggtgacattggcgtagctaccgtcggccttgcccttggacgccgaaaaactggctgacccgccgccctggctgatgctgaagccaccgcccttgctttcctgccgggcgtggaccacctcggtgtcctgacggctttgcaggttcaggtcgccgccaacattagccgcaatcttgccgccggtgacgacgccgcccaggatattggtatcgccgccggaaacgattgcgacggaatcggtaccggtgatgtggctgttcacctgtgttgcgctgacgctgtcc

SEQ ID NO: 550240 - DNA, 920 bp, Homo sapiens
ccgggcgcggtggcgcgtgcctgtagtcccagctactggggaggctgaggcaagagaatcacttgaacctaggaggcagaggttgtggtgaactgagattgcaccactgtactccagcctgggtgacaaagccagacttgatctcaaaaaaaaaaaaaattaaaaggaaaaagattcggctaaaggtaaattttccatagagaagggacattaatcccagaagggaaccttgaaccctcaggattgaaagacggggcaacgggacctgggtaaatatcctgggtaaactatacatagattattccatctggatttctctacaactatgtttggagggtaaacaggttaacaacaacaacaaatttacttgtggctggaagtttttttaacgtgtttgtgcaagttttacatttttaagcacaaattacaacattaagggggccataagggtaagagagaacctattgtgagtgggtggagaactaacggtggttggggacacttttgaaggtgtggtaaacactttgtggacctcttaggtatgaactgtggtggaacgagttaacgggctggtgtatattattgggtaaaggcccttagaagggcacacacggggaaaattccttattaccaaaggggagattatttggtaaaaagttacagatgttagcgtttgagagttcaaaaaggtgtgggaaattcaccttaacaagcgaagggtttcccctattttcttaaacgaggggggcggaccacaaaaattgtggggagaaaaccgactgtggaaggggtgacaacaaccacggggaacaaccagatgtgtggcaaaacaccacacacttagtgtaacacattattggggcagatagaaagctggtcaaacgctatgataaaaatgagcgtgaatgtttcagcgtaga

SEQ ID NO: 550241 - DNA, 241 bp, Homo sapiens
cttccggacgcatcttcgattaatctataacatctgtgatatggcgtctcatggctcctattacctgatcttatacctctcaacgctgagatggaggggctcccgttctctcgcttcgatcgctatagtggaagacctgttactcactgtcatcttgtccgatcacctggaaacctactgagttcttccaaacgttctgagttttgagatacagcttccactgtggatcctctaaactctt

SEQ ID NO: 550242 - DNA, 815 bp, Homo sapiens
ggtcagagtgagtgttacagcggcgggagtgctggccgggttccttccgcgggacggggagaaagagagagcgcgaaacgacgagaggatgtctctctcagactggcacctggcggtgaagctggctgaccaggcacttactccaaagtctattcttcggttgcgcagagacagaactgggagaatactcgcgtagggggctatagtattatcatttctgaagcagcttattgctggcagactccaggagtctgttgcagaccctgagctgattgatctgatctacttgtgcgtctggaacgctaagacgatgaccagacacttgacttctatggcattcaacctgggtccactgtccatgttctgcgaaagtcctggacctgaatcctgatcagaagaccggaacctgtggacatagagtggctggcatgagatgagttccgggtgttgcacactggcctgcacagtagctcctcttacagggaggcggtctttaagatgctcagaaataaggagtctctggatcagatcattgtggttcaccccaggcctcagcagtgatcctattgctcttggggttctccaggaccaaggacctcttctctgtacttcggctgatcccaatatgcgttgatacgttaggtgcctgtgtcacccagtcctcgtcaatgccattgtcgctggttcttgcactccgaaagcaggcaggtgcccaaatgcctggggactgactcctcttcccggagcatgcctccagtcataccgggatatgcaagtggttcctgtttgaaggggtctcagatgatgaggattga

SEQ ID NO: 550243 - DNA, 201 bp, Homo sapiens
  misc_feature (110)..(110): n is a, c, g, or t
  misc_feature (113)..(113): n is a, c, g, or t
  misc_feature (152)..(152): n is a, c, g, or t
  misc_feature (161)..(161): n is a, c, g, or t
  misc_feature (177)..(177): n is a, c, g, or t
agtgcaatatgcacattactaagcacaaaaaacaagtgtaattcagaactacttgcattttttttagttaaatgccaatgaattattatgccttagttttatgaacctgnctnctccttgtgcaattccttccttgcaaatgaattgacttnaacgccgtnagtgaatagcctcagnctgtaggatgtcctttcaaatttt

SEQ ID NO: 550244 - DNA, 1196 bp, Homo sapiens
cgtgacgcgatgtgcgagtacagcgatgggcaggctgagagagtggggtgatgactgccactggcctgaagcaggcgcctctggtcccaagggtagtgaggcccattcagcgaaacggagtgggcctgcgattctgcggaggaagaccgcccaggtcacagagcagctccacctttactgatggtcatgagcatccacgaaaaagtggccagtacttcagctgtcctcaaagcaggacagacagagtgtttctggcagaaagaacagcacaagcaaagatctggtaaccctaggtgcctccagtttgagggaggagagaggacaccccactaccaccccagacataggaaagcagtccacctgcgacaccaggggcaggacacgtggctgggattgcagacgctggcccggatgtcgcggaggactcgcgggccggtagagcgcgcggcgagcagggagcggaggcgaaaggcggaagggagaagcaggtcacagccccctacaccaacaagctacccgaaagacagagggagacgaaacgacggccgaagaaagcccgaggacaggatgaaatccaaaagaaggaaactgagacatgagaacaacacaccgagagaaggaatacacatacaagaacggagcctacggacaaacccccgaggcagttcacacatccgtgtggcataaccgaggacgtcaggaatacagaccaagacggcaaatcggaatcagagatcactaacagaagaaacccgaagcagcagagaaagaaattacagcgattgcaggggagcacagaatagagggcaacgtaatatgacaacagaacgatgaacagtacgagggggaaaccgcgggcagatggggacaacgggaggcgaaaattaaaggaggcggaaccaccgagaacgggaaacaagacataagacaaccaccaacaagcacacgacggaccaaggcgaggaagagcggaacaacggcagagggggagtccaagaaacagagaagcctagagaagagtgggcagtaagaggagggaggggaacgagagaaagcgagaataggacgaggagcacgccgaagagggaaggggagaggagataggagagcgagagagagaagggagaaagagagcaaagaacgcagagacggacggcaagaggacgaacaggaagacgaaggcagacgcatgggga

SEQ ID NO: 550245 - DNA, 464 bp, Homo sapiens
gacgggtcagggtcaagcccttgttggagcagccgaaacaggcgaaaaccaaactgctcttcgaccttgttcaactgcgcggccaaccctgcaccgtcaaactggactgctccgcggccgccgacaacgagccggtctgcacgatgcgcatcaggttgcgtaagattctactgtccatgggctgatgcctctaaggtgagctggcgattgtcgcgtaccttgcggtctatagggcgccatttgaaacaacggctcacagcgcaccttcctgaaaaatgaaccgacatgaccgttcggcgctttttttggcgcgatcggaaattcatatctagggttacgtaactggcgaaatgcagtctgcgagtatcggaaaacctgctgttaccgacagctaatacccaagaaaatcagggatgttttgtgcttgcgatcatctattcgctcgccctgagtgacgagttgat

SEQ ID NO: 550246 - DNA, 575 bp, Homo sapiens
atatattaacatttccttctctcttcttaaggacaaaaaccacccccaataaaagctgggactacaggcatgcaccaccacaccaggctaatatttttgtatcttcaccccaaaccgccgtccccccacctcttcctccctccaccctccctcagctcccaacccttccccaccaccccaatccatacaacttcctccccaacagatcctttctccaccccccgcagccacaccacaacatacaccctcactctacaaccccctccttcccccgcggccttccaaaatgaacctcccccacccacctcttcaccacaacacgtctcccaaccctctcctaaaaaaacatgccaccctacccatctcctatctcactacaacccccatcttccccaccaaacatactctacaacaacactctcttccctccatcaccacccacctcatcgtccaaacccctccccctgatccgcccacaaccaccacagaactctcaccacccctcttcccctttccaaatcctcccccacatgaacaacccactccatctacaacctccctcaacccaattctcg

SEQ ID NO: 550247 - DNA, 172 bp, Homo sapiens
tgagatggagtctcgctctgttgcccaggctggagtgcagtggcgcgatctcggctcactgcaagctcggcctccggtcacagcactatctgcctcagcctcaatagctggactacaggcaccacacacgccgctaatctttgtattagtaggcagtcacgggtagcaggac

SEQ ID NO: 550248 - DNA, 1366 bp, Homo sapiens
cttagatccaaataatgactttggatcattgtccagtttttacaaatccatcaacccagagccatttaataagtaattatccctcaattttctctttcctaatctccctgacacttgaagaaaacccctaggctaagttaggtttggggggatttctagaaccatcaagactctgcctgtatctcactactgtcagctctttgcacaatgtaataaattaccattattgttcaaatgggtgggctttagcaagtctttcaaagatacaccaggctctgccttgcaaagctacatgggagaggaagctaaacaggtagggtgtgagacccctcccaccataccgccaccagagcagcctcatatctgtgcaaggtgaaatctctttgccattcctgtcataaacacagattggatacttagagtatatatgatggaaaactggggagcagaaggggcaaaccttgtgtccatctagtctctggcacttctggctaacgttgctaaacagagccagctttctgggcaatgtggacagttgcagatagcacagtgaccacatatgacgcaactcccctgtgatgtatacgaatgcactggcttcaaaggctatgctgtccgcgcaataccttaatccattgcacttttgtatcactaataaatcaaacgtctattgtaaatgttcccttcacacttacatatccttctgtattgagacaaccatgcacatgtccactttccagttactcaccagatacacagactttatctatacatagacaccacagagcaattcagcggccattgcatagacacctcctacatatatcgtcgcaaatagtataaaaatcatcaaatgacaccactatgagagaacacagcactttcttttacacgttaagctactcagataatcagtccgccccacctcacattatcatacactcagagtgataatcagtaaaacttatattagttgtctcacctgagtacataatcaccagcacctcagacggtagcaaactatactaaacaagacaacagacagctaacaagtctagacaataagtcacactttcaatattctactcccatcatacattacttctcctccacttattccacaatcatcaccaccgcaccacctccactcacttactccaactaatcatatccttataatctattctacctccactccacctatctacaatatattccactacacaacatcacacatcaaaaacatccacctcactaatacactaacaccaactaaatcatacaaacaacccacccaactcaccatcaaaccgcaatcaactaaccactccaacttaccaaccacaccacatctccacattcacca

SEQ ID NO: 550249 - DNA, 313 bp, Homo sapiens
gagcagaacaaagctgacactagaacaaccaaggataactacaaactaccactacatagcccctgacgcatggtcagcgagaggatctaggctagaataggggtgaggcaaggacccctgactattactacatacaagtgtacagctaccctccgtggtcatagcaggatctctactgaggcctactgaggctggctggtagtggtgagtgagaagtggcatctcctctgtatcctcccaacatctgtctgtccagaataggtcccctcctctctgtggaggctcccgccgtgccccagcacaagtgagccca

SEQ ID NO: 550250 - DNA, 747 bp, Homo sapiens
acaatttgcaaggactctgaattttgcaggactattttgggatactgtaaaaaaaaaaaaaagaaacaacgacacacacacacacacagctcatagccagagcctgctctggctcgctctaaggcctcttggagggaaggacagttccaaaaggcacggaccgggtgacatgggtgggcccggcccctcctcaggcagacagctcagccagggccctgctccaagggggtccacgagaccaggaatcatcagtcccagcgcaaggaaccagcccacaaaggagggaggctcaaagccttgctatcaccacggtgatgggcggtccgccgatcccgatgggcggggtccggtctcgagtgtaccggttagcagaagtcaagggcttcgtggggctgtatcttcttctggagaatcctttccaagcccagacaaagacctggtcccagggtggtccagaagcgtgacggtcatcccgtggccagggtctgcctgcatgagctcacccaggaacctcttcgatcacaaaaggtccaatctgtgtgggacgcaggcaaacgaggcgaggaggatgggcatccatcttcgtgtccttcagccggggggatgtgcggtaggcagcttccggcgccaggctcccagaagccatgtggtcggggcttctgcccctgcacaggttgggccgcagaccctgagaagctcctgggccgcgtcttctgtgcctcgggtcctgtaccacccaagtagggg

SEQ ID NO: 550251 - DNA, 414 bp, Homo sapiens
gggggggcgcgagactcacctagatacgaggtgctcaaaggagggctctatgagacagccaccacgcctgggggccaaaaaataggttggtggaaaacacccccggcggtggcttgctcggttggtaacaactcagcacacaagaagatgtacgccccggggcggctgtctgaccgcgcgggggcagccacacgtgaggggccccgcacagcacacaccctctgcgggagcggcggtgggagagcgcaggggagagaaaccactttctctccacaccgcggagggcgcgcggaggtgttcgcacacagacctgcaaagagtccacacccccgcgaggaacctcccccactcccggggcggacatcgtcacgaccacctcggccgctctaaaaaataaccaaccacaaaaaaaca

SEQ ID NO: 550252 - DNA, 141 bp, Homo sapiens
tcgcgtacatatcggcttgactagattcaagcagcttccagcaagtctcgatgtgctgctgggctttacgggcatcgtgaaagtagattgcctctcgtgtttcagttcctgaacatagcgtgccaagtccacaatgatctg

SEQ ID NO: 550253 - DNA, 705 bp, Homo sapiens
ggatcccccggtctgcaggaattcggcacgagtacatgtcaaccctttaacaacccagtagttagccatgatcattgtattaggctgcttgggttgctgtaactgttaataccatagactggctggcttaaataacagacctttatttctcacagttctggaggttgcgaagtccaagatcaaggtgctggccaattctgttcctgcctctcttttctggcttatatatttctgcctttttgccgtgtccttgcaaggcagagaaatatcttctcctactccaattcttccttctactccttctttttcttcataagccactaatcctatcatgacagccctattctcattacctcattcaaccttaattatctcccaaaggtcccacattcaaataccgtcatattgagggttaaggctttaacatctgagttttcgggcagacacaatttcgtccagagcaaccatcattttgctaatgccatctgccttggaaatattaatagcaagcttaagacttttctcaatattgaggaaggctcatagagacttcgatagcttttcgctcgcttgggaatatatacaagctgcacagagcgttcagcgtctggacgctatcacacccttttttaacatctactcccatactttgaccgcccattacctgggctatgcccctctcttgtgctcgtccggttcctgccg

SEQ ID NO: 550254 - DNA, 898 bp, Homo sapiens
ggctcgtggtccccagaagcatctgaagcgggtggcagctccaaatgcattggatgctggatacaattcgaccgggtgtgttagctcctcgataccatccaccgtgtaccccatcaagtatgagagagtgtctccccctcatcattttcctgaggaacagacttaagtgtgccctgtacaggacgcatgagagtaaagaagatttgcatgcagcaggttcattaagatactcgactggctaaggtccgactctgatataacctatccctgctggcattcatggatgtcatcacgcgttgacaatgacgggagagacatttccggctgatctatgaccccaagggtcgcgtttgctgtacatctgtattatcacctgaggagagccaaggtatcaagttagtgcaaagtgacgataagatctttgtgggctacaaaacggaatccctcatctggtgactcatgcatgacccgtaccatccgtctaccccggatctccctcatcagggtgagatgatagcattcagaatagatttggtagactggcaagaattactgatgtcatcaagtacgatcacatggctaagctgtgtatggtagacgtggaggtggctaacctagagaactacacttggtgtgatcaccaaagtgagacaggctccctggatctccatgaagcagtggtccacgttgaaacgattgccaatggataacggctattgccactcgacgttccaagcatgtgtggtgatttgggcaagggctagcaaagccatggattttctctttccgcgaggaacggggtatccggctcaccattgctgcaagaagagaagacacacagtactggcggccaaaacagccccaagtgcgttgacaactggggtcccctgggtggaca

SEQ ID NO: 550255 - DNA, 111 bp, Homo sapiens
ttagctcggcccctaaataggatgtcctaactaattgattataataagcattatcggaaatgtgagttgggatcaggcgcgcgcgcggtcagattcccctcagtgccttct

SEQ ID NO: 550256 - DNA, 148 bp, Homo sapiens
attaagcttgacacatctgtgttatcacgcactgaagacaggaagcagttcactgagtcagctggcttccaagcttacacagaaggcgataagtcactatcaaagagccaatgagaatcttcttatagaataacctgggcccaagtga

SEQ ID NO: 550257 - DNA, 171 bp, Homo sapiens
catggacactgatcattcgtgcttatcttttgcctgaaaataacactgctattaaaaaccatgtagtactgtgaggtagaagtgtatcctgaatagcagtttttcatatctcgaattagcttatcaaactctttgtagtttagctcaaaactaataatcatcaatagtctc

SEQ ID NO: 550258 - DNA, 839 bp, Homo sapiens
  misc_feature (1)..(1): n is a, c, g, or t
ntgtcgatggcttcacccaagcgcgatcgggtgtggccaaccatacattgtggtttccgcccccattggtgaagaatagattttccggcccccccccgacaccaccctgtgtgctttgttgcggcagaactaaagaggtcttatctttagtttaagaaaaaatcgtggggccgccactcatagacggaggcgtaggtccaaacccaaatgatgtgcgtctcggaccacgcaaggttggtgtttacagacgagaatatccgcacgctctcacacgacacattgcgtggttacatatactcaccacgcgtcaggaccgaaacagctggtgaggtgccatctcccctactttcaagggagcccgctctttccccccagcgcggacgatgatctctcttgtgggttcccgaccgtctgcacttcgaggttcaaacccctctgtgataatcgtggtcgttgtcatcgctcctaggagaaagggctcacatataggcgccccgccacccggttctgtacctaccttaccctcggaatgtcgtgggctcgccgcttcgtgagccccctaacagaggatgacgcgacattgaccactacatctggggtaatcgttgcctacaacaagagagagcgccccctaaaagcgagaggattgtcccgcatatctcagtgagggacgtccccgccggaagtaatgagagctgacctcgtggggagcacccaccggtcgcctttcatgatgatcgctatgggaacagtacctaggcacagcgcagaagctctgcgggccttgtggcgcgccttaaagaagaactttttcttctccccgaacacgacaaaacaca

SEQ ID NO: 550259 - DNA, 492 bp, Homo sapiens
ctaggacgtaacgtatttactgggccatgactaatatccaggcacaggctgtggtctcctcagttctctattattagtgcgattattaagagtttgaatattctttaaagaagttgcaaaatgatctctagtgttcatttcttagactagtttcgtatctctcaaaaaagccagagttcgctcattatagctccttttaccgagaaagaatcccaataaaacaggcgccacgatgtacaatcagaaatcacatctcccacattttataccttctgcatggttgcccccacatctttcactcttatacacaatttagtgaagccaaaaaacatctcttaccaggcgaatcatattaaataccaaaacacgatggctgaatatacactagaaggaagaaaacccattagagaggccatagttttctctgggctcgacttgccatgataacgctcagtctgacattctttaacacacatctttaggtatccgatt

SEQ ID NO: 550260 - DNA, 1112 bp, Homo sapiens
gacgccctcgagagttgcgtctacgctgctacacatggcataaccgctaactattctacctttccacagccctagctggatcgacatagagtctaggttgacagtgcccggatgcaatcgctcaactatcgtactattactaatcattaagtgggtctggccacactaatgttgcgtagctgtacgactcttggcgtgaagcaatgtgcttaggggttaatgtgtgtccggctagtcgcgttggtggtgacacagaccaagcaagcttgacgggttgtcaacccactagaacatgacaaggggctgatccatctgtccccccactggggcccgttagcttcctgctcgtgacgtgactttgacgatagaggaggcgcaactgtgccctggttcccgaggatccagaggtagaacgtgcgaggtagaaggtacaggatgatcatatccagctgtcgtgcgttcgtcctatggtgcgcagtaacaatgtttttggccagtatctcatggtgtcgtgcttctcggtatggaccaaggctcacggatggcataattctcctggacctgatcatgtcattctccaagtgtagactacgtcgttcatgcgttcgcagagaatgaaccgtagtcaggaccccggcatgaggtgtctgcaggttctccttgtaacgcactatcccagatcctcacaagctagtgtatcgagagggatcatggaccatatacactacatgacgggtccagattacccgtaaggaccatgcgggccctaaaaaacaaggtgtgtagaatgcaaatctctggcgaatgaattcctgggcagaccattacggtgctcgacggatactaggcatcccaggaaagacattgaaggccggtgcctccacgataacaagtcacgaggaaagcagtggcggcaagaatttgatcgcttaaacattaggcgctgagaggcaacatcacggaggctcgagagacggcatccgcggggaagaacgagcccgcgaaaggagactgctcaccccttggttgggttgccacccggccaggttgcacggcctcatgcagcccccccggggctgccgggttatgagaacctctctgggaacttggga

SEQ ID NO: 550261 - DNA, 190 bp, Homo sapiens
ggcacgagacggtgaaacccatttccactaaaaatacaaaaaattagctgggcgtggtggcgagcgctttagtcccagctactcgggaggcttaggcaggagaatggcattaacctggaggcggatttcagttagcttagatttcgccacttacttcagccttggcaacggaaccagactttttttcaaa

SEQ ID NO: 550262 - DNA, 178 bp, Homo sapiens
ataaaaactgtttgaataattagacctttacattcctgaaggtaaacatgtaatcttttatcttattttgactcaataaaattgttcagaggtcaaagtggtaaagacaatgtaaatttacacattttaatactgtgtgtgtgtacactgtgtttactttacattttgggaggtgact

SEQ ID NO: 550263 - DNA, 106 bp, Homo sapiens
aaagcccagcctttctggatccacagtgtatgggagccctgactctcacgtgctgatctgtgccttggtccaggtaggccacccctgcactccactgcccagccct

SEQ ID NO: 550264 - DNA, 382 bp, Homo sapiens
  misc_feature (32)..(32): n is a, c, g, or t
  misc_feature (377)..(377): n is a, c, g, or t
acaataactctccattccccagcccctggcanaccaccattctactttttgtctctgaatttttctactcctagatacgtcatggtaatggaatcatatagtatctgttcatttgtgactgggttatttccataacataatgactttgcaaggttcatccatattatggcgtacgtcagaattttctccttcttatgggtggataatattccattgtatgcgtccacattcttttacccaatatttttttgtgtgtgtgacagagtcttgctctggcccaggctggcagtgcagtgtcacaatcccagcttcactggcaacctctgcctcccagggttcaaggcaattcttcatggcctcaggccttccgagtaggntgggc

SEQ ID NO: 550265 - DNA, 769 bp, Homo sapiens
cgagatgctgatggggccttcacctgctgcacctaagtgacaaggccacccagacgcccctgtgctggcaagagctagaaggtgagcgtgccaggttcctgtgcacacaagcgctcagtcatcctggggcagcacagaccaccgaaaagagatttccaagttgaagcaacaactgcagaggacgaagctgagccagcagtgggaaagagaaggatgcgaggttcaccactcctaggggacgcactgcagtgcggggagcaactgagtggcgtcccctcccatcttcccctcagggtcccctgtcttgcgacatctagccccttgcctgcacaggagcctggaagggctcatagcgcaagagctggaggaggtatctgtgaaggagcagggagaaggaggagcatagcatgaggatccttgatatccctgatgggcagccgagtgctcccagcatcctccccagagatggcggctgatgatcattcgcccatctctcctcgcgtggagtccttggctgagcgcttgccacgtctctccgttccagtgtccttggcagtctccccagcgcttgtggcctgtgccaggtctatgaggagacatcggggtgccggtcgaggaagctgtgcatcgaacccctcaacgacgaagcctcctctccaggacacccaggagctttcttgaacgatggcatgcccgatctccagtccttgcctttgcttgcctcccctcgacgctaatcatagctacgatcttcaaacgggagccccca

SEQ ID NO: 550266 - DNA, 358 bp, Homo sapiens
ttgttggtttgactagtatgccatcaatagtacccgtaagctgggcacagtggctcacacctgtaatcccagtactttgggaggccgaggcaggtggatcacttgaagccaggagctcaagaccatcctaaccaacatggtgaaatcccatatctactaaaaatacaaaaaattgccaggcatggtggtgcatgcctgtagtcccagctcctcggggaggttgaggtgggagaatcacttaaagccaggaggcagagtttgcagtgagccgacattgaaccacggcactccaacctgggtgacagagcgagaccttgtctcaaaacaaaccaaccaagcaaccaatcaagctacccct

SEQ ID NO: 550267 - DNA, 421 bp, Homo sapiens
  misc_feature (70)..(70): n is a, c, g, or t
tcggtacccccagttacaacagctgaactcattcttatacatccacagttttattactcattccagtcanttgctatctataatatattttcagattcattcatcaagcagttattttattgagagctgtctttctgtttgactatacttcattttctcaactacttcttgagggatggacctgatgcttatacttttttttttcctaattccctcaacaatgcttagaagcacccctaagttatagtgccaggtatactgaaggtgctcaaagtattggtggatcagttacttcttatccatgtaatttattaggtcaaggcacatgtcagaaagcagcaaagttattcatttaacatcttttactgacatttctgaatgtctgaagccccagctggagctgtggtaactgggggtaccg

SEQ ID NO: 550268 - DNA, 313 bp, Homo sapiens
ggtagtatatacctgacctgttctcagaagctacagatcctctaagttcctacttagatgatactagacgaacatagcaggcatatggtgtaatgcacaagacttgttcatgaaagtacattggggcacgtggctgctttatgaagcaacctggctttcagggtgttcctttcatcctggaacctggtgaataccctgacttgtccttactgggatacagacgcagcgtacattggatccatgcggcctctgaaaatgggtggccgtaaagttcgaataccctacagatccaacggtagttgtatatgaaaag

SEQ ID NO: 550269 - DNA, 101 bp, Homo sapiens
tgatcctgcggactcaggccctggagtcatatactcgcccatgaagacagggaacttgtgcttgctggtcccatgagcacgatagaggaagggctgctgca

SEQ ID NO: 550270 - DNA, 168 bp, Homo sapiens
ttgcttctaaacgggaacgctaaggtcttgcttatatggggagaaaacaaaaaaaaattgaacaggattacaatagtttttctacaaggctagtttatgagtttcagcaatttgattaattacagctgttttattttccttttccaattaaaaaatatatttaatatt

SEQ ID NO: 550271 - DNA, 181 bp, Homo sapiens
actgatagattttgacttaatcaaaagttttatttattacttgtgtctttcagaaattcactcttctggaaagttgtttatgaactacttcgaagagataactagagcaaatagtttaatcccatgtgtctaacacctagatttactaaatgaaactttctttactccgtacttagggttt

SEQ ID NO: 550272 - DNA, 271 bp, Homo sapiens
tgtgtccacacggctaggcttgccggctgaaagcgtcggtcaggcagccaagatcgcgtcaggctcacgcccggtggcgggttgtcgcgcagctggtcgcccaactgacggccaatgccgtagctcacgcgggtttcgtcggtggacagattaacttcggacatggaaaggctccgctgtaggacgacacaggtgtcgtccaaactaaaagggcgagcagactagcacacaagccacgcccttgatgagccctgcgcccaggcaacgggga

SEQ ID NO: 550273 - DNA, 244 bp, Homo sapiens
  misc_feature (21)..(21): n is a, c, g, or t
  misc_feature (43)..(43): n is a, c, g, or t
  misc_feature (93)..(93): n is a, c, g, or t
  misc_feature (118)..(118): n is a, c, g, or t
  misc_feature (127)..(127): n is a, c, g, or t
  misc_feature (241)..(241): n is a, c, g, or t
caaccgcccaatccgtggggnccatcatccctggccaagcttntccatcgtccccgtgcgcagaggctactgggggaacaagatcggcaagcncccacactgtccccttgcaaggtgnacaggccgntgcggcctctgtgctggtacgccctcaatccctgccacccaggggcactggcatcgtctccgcacctgtgccttaagaaagctgctccatgatggctggtatcgatgactgctnacg

SEQ ID NO: 550274 - DNA, 106 bp, Homo sapiens
aggatcacttgaagccaggcgcttgagtcagcctgagcaacaaagcaagacctcatcttcaaaaaaaaattaaaataagggtgggtgcagcagctcctgcctgtaa

SEQ ID NO: 550275 - DNA, 146 bp, Homo sapiens
  misc_feature (142)..(142): n is a, c, g, or t
gggtgacttcaagttcttacagcatttcatcaatatccaagttgagtgtggctaatatccagtgtgaatgacagacagttggactttgtgcatttatggttctaatgatgcatttgagcttattttcacagctgccgagtangcgg

SEQ ID NO: 550276 - DNA, 134 bp, Homo sapiens
gctcgacctggctgggtgcggtggcttccatgcctagcttgtgtcccagcactttgggaggcgggtggatcacctaaggtgcacggacgttcaagcaccaggcctgggccatacatgggtagcaaccccggtct

SEQ ID NO: 550277 - DNA, 200 bp, Homo sapiens
acttaagtggagtcttaaagcaaggcaggatcttaggatagctatcagagcgtttagcgtgggggtcccagtaaaagggcactgtgctgaagccagagagcggtatgcctcaggccaccaagtggggactgtgacaccacgcattgacttccacccagaaggtctccaatgacatccgatagtcatgagtagttgatgaa

SEQ ID NO: 550278 - DNA, 1734 bp, Homo sapiens
  misc_feature (1293)..(1293): n is a, c, g, or t
  misc_feature (1434)..(1434): n is a, c, g, or t
ggaccgtccacttgagtaattcgatttgttgtgtggtggtcggttgatgttcgctccgtgctggtgcttccttacgtatggttgctgtgttgttcttcgctccatcagtgctggcggtatgtttctttcgcgcggctcatatcctgctctactatattctcttcttgccctcgttgtgttgtggtctctctcgtggataattgtgttctctctcccggggaagcactacctcaccgctcgggggtgggctacccctattccggtatggtcctcttctgagtaccagtgcctcccgctcctgtcttcgctggatatgttcactccttggggggcccttcttcttttgtgatctctcttcgagagtttgttcgtcggtggtggacccaacaggccctccggctcgctgtgctgtcgccctcgtgcgtcccccggagattccccccgtttttggggtggttgctcccccagatgggcccgacacgggtgatccatcgctcgtgtgtgtctcccaggaagtatatcgtcttggtgctcaatgaaacaaatggtgttctcatctgtgggatgagttttttactccctcttggcgggcgctttctttacaccagtccctagtgttcctcgaccacgagtctttggtgtctccctctttttgataaggggatccctcacgggatcccaatgcgcgtgtccccgcgccccgaaggataatggggtgttttcctacttcggtgcgttgaaaaaggaggggaaaaattattatccttttttggggggaaaaaagcccccccttggggagacacattccggctacccccaccacagtggccccccgcagagaacacatgtcctcgagggggggggggaaatatggggaagttttttctgaaccgaatgtatttacacacgctggattttcccgccgccaactctccccttgggacccctcgggagagggccccgcttggaaaaacaccccccttttccgcacaaggggtatgacacccacttggaagccacatgtttcacacgcgccccctcgtgatgctccctcttgtgggaggaaagccctattttcatcccgggggaaaatttcccacgggccgcttttcacccggggcctccgcccactatggtgagagcctcgctctcccaatctcaacaggggggcccccgagagatcttgtctctcacaagcgcccactcttttctctggggagagagatatgcctctggctctggagccccttgataggagagcgcgctctgtgggctctctctgagagctcttanagagaaagtggagaggtggcggcgagtggagagtggggagaagtgagagaagaccacctcgagatttcttataaatatccacaattgttccctcttctcgagaagttcgcttgcacagaattgtgttccctctataaatanagagaagaatggaaatttctctctcgtatgaggcgttctcacaatccacacttttaaaccactggagatgaggagagcacgagctcccactttataccctgaaaatatgcacgctttcttcttgagagagaggagagagagtgaacctggagagcacaactccgcttctgctgcacgctgagccccctcaccctgagttcacccgtgcgccctccctccctcccacttctgggggtagtgccttatgctgggtgttggaaccgaatgagggagaggaaaaaataagacctgcaccatctg

SEQ ID NO: 550279 - DNA, 291 bp, Homo sapiens
  misc_feature (28)..(28): n is a, c, g, or t
  misc_feature (201)..(201): n is a, c, g, or t
cagttatgttaggtgtcagtttcactgnaattaaagaagatacccagatagctagtaaagcattatttctagatgtgtctgtgaggggttctggaagacactgacatttaaatcagtggactgagtaaggaagacctgccgtcatccaagtgggtgggcactatccaactgaatgagtgccccaatgaaacaaaatgcacnagaaaggtaaatttgacctctcttctggagctgggacattcaccttctcctacccttggacataaggactacagtttctccagactttgg

SEQ ID NO: 550280 - DNA, 476 bp, Homo sapiens
gcacgagttccaaagacacttgtgaggacgattcttaacaataacgatacaaatttggccttaagaactgtgtctggcgctctcaagaatctagaagatgtgtaaacaggtatttttttaaagcaaggaaaggctcattaaaaacaggcaaagttttacagagaggatacattgaataaaactgcgaggacatcaaaggggaaaatactgagaaataccgatactcacaaaaagggaaaaaatggaggtggtttatcaacttcgctagaaaaaaaaaacacctggcatacaaaaaatttaagtgaagggaaaggctaacgctgaactgacaatgaagggaaaattgggtatgggttatgaaaaaaacaaagccttagttctattttaaagggggaaaaaaaaggttccccaaaaaataggaaggggacaacaggttcctaagctgaaaatttcgccataaaaacctgggacaccct

SEQ ID NO: 550281 - DNA, 206 bp, Homo sapiens
ggatacccacactttcgagcatcagtgtcagtgcagtccagtgagctgccttcgcaatcggagttcttcgtgatatctaagcatttcaccgctacaccacgaattccgcccacctctactgtactcaagactgacagtatcaactgcaattttacggttgagccgcaaactttcacaactgacttaccagtccacctacgctcccg

SEQ ID NO: 550282 - DNA, 695 bp, Homo sapiens
aagaagatatgcagcttatttggccattagcccagcgacattgacgacattctagtctcgctcattgctgcgagtgggctgctacagccagtgtccggtccatgcccagcaggttgtcccaggtcgctgtgcgggatgaacagcaagacagcaggagaagtgaaggcgtctccaggagtggcaccgagagagtcagccacagccatagagaagcgatcaggtgtgagacactggaaagacgcgggaagagacgtacaacttctgaaagatctcagaggactggcactggtctggagacggcttcctggaagaggagacgtccgagcagatgccctgtaagtgtggacaagcttcgcattcgagctgcaacattcggtgagcacactctggtgtcaggatcgtagtaacggaagatgggcttgagcagagcagggggtacctgtggggttcttctcttcagttttcacgcaggcacaaagctggtctaagctgccatcaattcccacctggacaactgtccaaagccttccagctgttcctgcttccagtctgtgctcctctacaattcattctgcacgcagaagtcagaatcaaaatcaagagttcatcatgtcattctcttgagcttgtggcgtccctttgctcttaagctaaagttaaagatcattatcatggctaaaaaaacaggaatgaaa

SEQ ID NO: 550283 - DNA, 157 bp, Homo sapiens
atgttatgagagctactcagacttgccgggactcaactgggagccttagaaggtgtaaatactgtcttacaggaaaatcattttaaatttttgagccttttactaaaaaactcaatttcagaatgcagtccatgtgtttgatttcttgggctgccta

SEQ ID NO: 550284 - DNA, 109 bp, Homo sapiens
cccctggggtttttttacctgtgggaaggggatttgaatggaaaattttagccttgtttggtttttgttcccagaccttggccattaaagccttttagttggatgggga

SEQ ID NO: 550285 - DNA, 289 bp, Homo sapiens
ctcttagaggaccccggaactcactaaatactttgtattctgtgagcattatgcattctgaatgtatgcctctacatacttcgctgatttaatgatgcctattattaaaaaaacactgtggtattcatatggagaccggagttacctggaggcagagattatacgctgttacaatacttgtatctgtgagatatcaagcccaagcatagaatgttgttcctgcgaatggcgaggaagattccagtcactgcagaggacgacttcggcagtctctggcctagattttttt

SEQ ID NO: 550286 - DNA, 1418 bp, Homo sapiens
  misc_feature (277)..(277): n is a, c, g, or t
  misc_feature (323)..(323): n is a, c, g, or t
  misc_feature (496)..(496): n is a, c, g, or t
cctagcatgtatcaaccatttaaccttccctctacacttatcatcttcacggacttctaattctagctgcactatccctaggaaactcgctgatcgaccttatactccgaagcctgacgcttgtgtcacacttcgtagatagagctcatctacactgcgacgacgaacgatcattaagtgaccctagctcaatcacatgcctatcagatagtcaaaaccgcaggcccatgaccgcccgtgaagcagggggccctgctgcagccgcgtcctagatgancgcgtgcgcggtgcctcagccagtgtgcgagttgtgcacttaccancttcgcagtaagcgactcctcgattagctaggtcgctatctaaaacacagacagcagcatgataacctagtaattgaccccatttagagtgggtcgtgcaatggttaagcatcgcatgcaaagtcactattgacgccaatggtcccacacgatcgaacaacaccaacgctagntctcaaagaaatagggccctgtccggagtaacggggcaatgaagtcccctatgtgtactgtgaccctcgagcacaaggtatctattgtatccttcgtccaggggattattatcttggcagccgtattctactctagcgtccaggcgcgtagacacgcactagcctcccctcaaattcaaggaaggggcgacgtgcgttgcccccaagaacaggagcattcgatcctctgcctagaatcacccacttaggaaggtcccacatacactaaatgagcatcgcggtagttacctcgcagtccatggaggttttcaattgtcactcttgaagctccgaccatatgtctaactagacaacacaaaccgaaaacccaaattaattcaagcactgtctttatttacacctttttactgggggtcctctaattttacccttcctaaaagcctcagagtacctttcgagtctcccttccaccattttcccgacggcatctaacgggttcaacattttttggtagcccacaggccttccacggactttcccgttccttatgtggtccaactttccctcaataatatgggtcaattccggccaactaatatttccactttacatcccacacatccaatttggcgttcgaaaagcccgacgccgaaaaacgggcaactttggacaacgcgacgggaggagacaaccaggagggaaccacaccatggaagagggcgtcgcacaaaccaccacaagcgaagcagacgagaacacgaaagactagcagcaaatgaccagggcggggcagatacacagcagcacggacaaccgacccataataagccgacaagacgtataacatgcacgagccagaaacggacgtagtagatgcgagtgacacacgatactcagcctctactacctacatagaccaatg

SEQ ID NO: 550287 - DNA, 214 bp, Homo sapiens
  misc_feature (22)..(22): n is a, c, g, or t
  misc_feature (45)..(45): n is a, c, g, or t
  misc_feature (78)..(78): n is a, c, g, or t
  misc_feature (105)..(105): n is a, c, g, or t
  misc_feature (157)..(157): n is a, c, g, or t
aggttaaacccgatgatgattntggctgctggaactgtttgaatnagatagaaccgttgtagaccacctgcccgtgcnccgaccaggggtgggggagacggtggnaggtgaaattgtccgtgttcatgaagtcaaccatggaacttgtactacacgnacgaaagcggttgttgtgaatagccgtcccatgtaaccacacccggtttatcgacct

SEQ ID NO: 550288 - DNA, 378 bp, Homo sapiens
  misc_feature (7)..(7): n is a, c, g, or t
tgccaanggaaaatttaaaggataagtaaattgcctatggaaaaaaaagaaaacttggagcacaggctaaaaagaccccagggatgggggtcaggccatgatggttcacacctgcaatcccgacactttgggaggcccaaggtgggaggatcacttgagtcccaggagtttgagaccagccctgggcaacagagcaagacctcatccctacaaaaaaatttaaaaactagccaggcacggtggcatgtgcctatagtcccagctacttgggaggctagggcaggaggatcacttgagcctgggaggtggaggctgcagtgaactgattgttccactgcactccagcctgagcgacagggcaagataaaatccctgaag

SEQ ID NO: 550289 - DNA, 522 bp, Homo sapiens
  misc_feature (3)..(3): n is a, c, g, or t
  misc_feature (10)..(10): n is a, c, g, or t
  misc_feature (36)..(36): n is a, c, g, or t
  misc_feature (46)..(46): n is a, c, g, or t
  misc_feature (184)..(184): n is a, c, g, or t
  misc_feature (190)..(190): n is a, c, g, or t
  misc_feature (248)..(248): n is a, c, g, or t
  misc_feature (421)..(421): n is a, c, g, or t
  misc_feature (477)..(477): n is a, c, g, or t
tgncataaantttctgtgtcctgctttaaataaagncagatccttnatgccagtggagctgcccatcccttaatccctgccacacggggccaaggaggaggttactgggaattagctccaggcttagaatgcccaaccaaatccaagtgccctaactgagattttagaatttctttaagaaaangtgtcntcaacttgttgttttggttaatctccgaagtgctttaaatggttgtttggggccaggnctggtggctcacacttgtaatcccagcacttttgggaggccgaggtgggtggatcacgaggtcgggagattgacaccatcctggctaacacggtgaaactccatctctactaaaaatacaaaaaattagccaggcgtggtggcgggtgcctgtagtcccagctactcgggagntgaagcaggagaatgtcgtgaacccgggaggcggagcttgcagtgagccgagattngccactgcactccagcctgggcgacagagcggctctgtctcaaaa

SEQ ID NO: 550290 - DNA, 408 bp, Homo sapiens
gttcacatgccccggtcgatctcatgaccgtctcttgattggaaaaccccttgcggccccaggccctcaatagttcactttagagacttcaggattgcaccacacagaattgattaaacaatataccacacagaataagactggattagtaccaccccttccctttgccctcttgactccagataactccctagagtattacaggcagggtagatctaactatatgggaaggaatccctcacacttttccggggttaaaattctggctagtccaaaaggggtcctctctttaagggtttggagaaactagacactgcaacttataagtatcggcaacgttggttgggggcaaattcagttccaggagctgcacggttgattgcaggaggagtccaccaatggccccac

SEQ ID NO: 550291 - DNA, 835 bp, Homo sapiens
gagagtgtggtcaggcggctcggatgagcaggatttccttatcccagttgatgtgcagaatacactggctgtctgttgtctctatccaccatgtcttctctgatatccaggtgaaagaactgagaagcgtgcctcaggccaggcttggagctgattctcagccctcggtcaaaagaatctgttccagagattccccttttcccctccaagagatagaaggatctttcccgtgaggaaattcagagcgaacataagaagctgcagaagaaagacgcaggtcccttgtgccgctgaggtcttgaagcagctggttgagcaaagcgagagcgcgagaaagaagggtttcagaagcggcatatagaagagaaccacgaagtttcgagtaatactgcgcagaggaagagagtggacctacaaaagtggcgggcagtacggacgaaaccgagaaggcctcaaattggtgccacattgaacgtgttgcgaagacgaggggatacagccgcttgacacgctgtcgggacagacacaggtgaatccaaagaccctggtgggcggaggactggaaagctgacgctacttgtgtgctgagcaagtggaccttttttccccaaatcgtcctttctaaaatattccagggacgtgtacctgccaggtgctcaaatttaatttttcccttcctggaaaagtattttaagaggcaatggacggactggacttgcttggcccccagtccgactgtaaatgcggaaaagggcaaagggacacccggacggttactccttgcacagggtgggtccaaggaaccatttttgtgcgcttttcctcgcccttgggg

SEQ ID NO: 550292 - DNA, 185 bp, Homo sapiens
  misc_feature (120)..(120): n is a, c, g, or t
  misc_feature (171)..(171): n is a, c, g, or t
tgatattacagcacaactgcctgtagtgggtaaatggtcagagcctcccggtcagttccaggctgcagctgtccaaatgacaagaggaccctcactctactcagtgtcacaagggaatanaacacaggaccctatgaagtgtgaaactaccagacacaccagtgggtgccnagctacagctgacc

SEQ ID NO: 550293 - DNA, 305 bp, Homo sapiens
cggtatatcggcgcacggtacgcatcaatcggcgctatccgcaacgacgtcaaattatttagctgagtcgcctctctctcagcggatgcaatatgaattgatctgcatgacagtgctctgtagaccctagagattcatctgtctcttcaccgaaggtagccagactggcattgtattatcaaactcatcactagacatcgttactacacgacacgtactactttatagcccacttccactatttcctatcaataagagctgtatttgccatacataggaagcttcattcactgatttcccctatt

SEQ ID NO: 550294 - DNA, 532 bp, Homo sapiens
ggggggcccgctcctcttttctttccctccgtctcctatccccccgcaaccttccccccctttctttgtgcttttttcccgcttcccctaaccgtgctcttttcttcggacaaaaaaaaaaactctctcccttttcttcccccctggcccttattcttccatcgctccctctttcggtaattgtcccccgccctcctattcttcaagtccctttttcttttttcgcctcttttccctcccaaacccccgccgtgctttatctccccggtttctccccgtcttattctccttgctgcgggggggcgggtgcacattcagtcctctctgatcattttgcgttcttcgcccccctcttcctctgtttatctccctcacctgcctctttgtttttttttgctgccccccctacttttctccccacactactctttccgtttttctctccctcggtgaacccggttcttctcctttccaatctggtccctaccatactcttctcctcccccccgcttttgtgttctccttccctccg

SEQ ID NO: 550295 - DNA, 866 bp, Homo sapiens
  misc_feature (477)..(477): n is a, c, g, or t
cgtggcgaaatcccatctctagctttattttaaggatatagtatataatacacaaaatgtgttttaatcgacttttatgtttatattattgataagtcttctggtcaacaataggctatgagtagtcagtttgggggagtcagaagttatacatgggccaggtgcagtggctcgcaccagcaatcctagctctttgggaggccaaggcatgaggatcacttgagtccaggagtgcgagaccagccagggcaacgtggcgaaatcccatctctactaaaaaaaaaaaaaaaattagctggacttggtggcttgcacctgtggtcccagctacgcgggaggctgaggttgggggatcacctgagtttggggaggttgagactgcggtgagccaagattggtgccactgcacaccagcctgggcgacgcaagtgagactctgtctccaaaagttatacatagattcttaactgcttctgntggggttcagaaccccaaaccccattggttcaagggccagctgtatagtaataaaaactgacgtcaaaaaacaaaacaacaacaaaatccaacatgtaatagaacagacaggataaaagctaacgcagaacacaaatgatcaataagagaccagaagcagggggcgggggcgccctagtaataacatacgcacgaggaggggcaaccataggagcaacacacccccttttttgttagaaaggggccccccagagagcggtggtaaaaaaaacacgacgcgcggcgcgttaacaaccgcgaggatagaaaaaaagctcgatcttgatctctggagaacacccctcttggtggttgaacagatgggaacacaccgagcagttatggctgca

SEQ ID NO: 550296 - DNA, 389 bp, Homo sapiens
ccatataaattacatgtcataatattagacttccaaaagcaccatgactctgtatttttaaaatacctcttgaatgatagatgcatgaaatgaaatactaggtttttataccaagatattcaacgcttatttccttcttttgccactggttaaaaaatgtatgtaatatgctcttttataagatttcaattgaaagtggccaactttaaatttattttatagcataactaaaagttctataataataccatgttcctttttaacattttaaaatattttcagaagtctgtggaagatttttttgcagtgaatcatgccactaatcattggattagtgggtgctattgtaatgggctttaaaatttcgtataaagatttagtctaaggca

SEQ ID NO: 550297 - DNA, 219 bp, Homo sapiens
cagtcgcaaatcgaggatttgaaagatctcgcagcgattgtgatggatcagattgaattgcagctttccgcccggcgggcggtctccgaggccaaactgatggcgaaggagattgaccatcgcgtaatgaacagcctgcaattcgtgtcgggcctgctcgcgatgcaaagtcgatcgcttgaggatgctgacgctgtcgcccaccttcagcttgccgcc

SEQ ID NO: 550298 - DNA, 455 bp, Homo sapiens
acagataccaaccacaggaggtcttgaaagtacaagctccacacgaacaattgaatctttaaatatacacaagtatttccatcaaatgaagggtcacgcttacatccaaatagacctaagcgcctaaaaacataagaaaaataagagctattagctatgtattaactgagaaaccacatacaaaccaaagaatatggaagagagaaagaagggctgaaaggccaaaggttgaaggggtagggagatgtaaaagagttgaaaacaaagcccatcacacttgatgtactaatagctccaatccatttaaatgttgaccagttaaacttagaccttaaaatgcaggatgtgggtagagtttaatctggttggtcataactttcacctaagacgtagctccttcagaataaaatgaatacagacacagcttcatgttcttcaccttgcttttcataact

SEQ ID NO: 550299 - DNA, 890 bp, Homo sapiens
ggagagaactgtctcatttttttccttggtttgtaaatctgaatttatctttattaaagataccatgaatggaggggaccatcagataacgggattttgggtcagggtgcaatgaaacaacaagaattcaaagcacccaagatcgatcaagaaagacaccgtgtgattccgtggacttccgtatgtatacgacagtgagtggtgcactagacgaaacaaggcgtgttgagtccgtgttaggttcgtgtctagcagcaacacaaggtcgtggcccgtgaggagccccgaccccaataggaggcagcctccgtggaagagacaaaattctaacaggcagtgacgtggaaagacgtgcctcccgtgaaaagggcatgaaaactgcgagaatgggcgcgaggagcctgtgccgggaaaacgcatcccaagtgcacgtggacacacctttagaaagcgtgtgtgaaaggaggacgttgttccccttaagaaaaagtttccatagttcaccaaagcgagggctccttcagggacggaccagaagttctcggacaggtccgtgggcgtgtatgggagtgccatatagtggtgcacaaagtgctcagtggcgcgtgaaccaacatcttcgtgaaagaaaaagttccccgcctgtggtaacaagtgcatttccatccagaaaggcgtgattttccaaaaaattcccagtggtgttcctccacattcagggacgggacgtgccgtgaataacccttaatttcctctaagatactcagtgtagcccaacaagcgggggctgggccccggaactatttggggactcacccaatcaaacatccattgtgggacatctaacagaaggcttgggcctttgaagctgggggaaattgtggggaaga

SEQ ID NO: 550300 - DNA, 270 bp, Homo sapiens
  misc_feature (77)..(77): n is a, c, g, or t
cgcaactgatgcttcagaggtttgtgcgatgctgtggtgtgggtcggaacatgtccgtctaaatgtgcttttcagancgactctgtgcgcgggcgtgaagatgtggcctctacggaaatgattggaatgaggtaagaaatcgagcgagaccaatacgtgtttagtgtgctataaagccggacctgtggtgcgttatgataatggatgtaacgcaggggcctggcgggaacaaactacatactttaaccagtgcggagatgctgttatcta

SEQ ID NO: 550301 - DNA, 339 bp, Homo sapiens
ttctcccgacaacttcactatcagcgggaatgcgagaaaaaccgttatcccctcaccttgtacctcaaaccatgcgctgtcggggatccgtctacattcgacgtgtgagccctacatgtgttcggactggacgtcttcttcaacgacgtgattgctagatcctttctggcctgtcgtctcctgcttggttcccggctgtggggacagtctggtcacgcagtgcgttgcgctgcgcgacccccgctcagcgcgaggctgagaaacatggctaaaccggttacggcatgtttcccaggatgcgcactccaggcacctcctcggacctggtcgaagctctgg

SEQ ID NO: 550302 - DNA, 683 bp, Homo sapiens
ttttgagacagaggctcactctgtcacccaagctggagtgtggagtagcacttttaatttccttcaagaacttttcctttgcattcacaacttggctaactggggaaagaggcgtggcttttagcctatcttggcttctgacacgccttcctcactagcttcatttcttgcttatgatttaaagtgagagacatgctacttttcctttcacttgaacacttaccggccactgcagggttattaactggcttaagttcaatattgttgtgcctcataaaatagggagaccccaggagagagaaagaggcacggaagggacagtcagtggagcactcagaacacacagcatttatcaattcaggttatcctttcatatgggtacgggtccgggccccaaaaacaattacaatagttacctctaagatcactgatcacagatcactataacagatattataataatgaaaaggtttgaaatgtttcaagaattaccaaaatttgacacaaagacactgtcctgttggaaaaatggcaccaaatgacttactcaacagggttgccgcaaaccttcaaatttttaaaaaactagatatatatgaagtgcaggaaaaaccaagtgcatttaaatgaggcaattttggtattctaaaaattgaaatgcttggccggccacacctataaaa

SEQ ID NO: 550303 - DNA, 977 bp, Homo sapiens
gccggagccgagctcagccgagcgtacgcgcatgcccgtgcgcctctgcgcctcgcgccatggccggcctcaactccctggaggcggtgaaactgcaaggatccaggccctgcagcagcaggatgggacgaggctgtgaagaccgctgcgcattggtctgcagacgggagctggatggagtagacgcgagacggcgcggacaaaacgtctgaacggtgatagtggccgcccctcaacccgagagcatccagactcgttgaggtagggagttggacagcgcgactcaggaacggactggccacgggccttgcaggcaaggctggagcgtgggcagaaaaagtctgccagaataaagcacgtgaggagagtcaactgaacgtgtgattagaaaggaccggggcccattggaacgggattgacgcgaggaaaggcattgggcgattcatcggggagcagtgcgacgctcaaacgacgggccaatccagcgttttgcggggacaggatgggctagaaccggcaatatacgaagggaggcctatagctccgataaaagcttaggctcatccgtggatcgggagatggacgcgtggcagcagtcggacacggaagaggaccgccggttgccgcgagccgttgcttttcgacctttagcgccagtgttggttgaccgcgttgggaaagaaacggaaagcgtccagcgaaacttgtttacctaagagcagattcctggacaaagtctcgtgggaggggcctgccctctttgccgcaatgcttctgcttgacaagaggggagggacccaaatactgaacgaaagggcaaattagagcttttcttgctctgtacaacacgtgcacaagaagggatgaagaccccggtggctggactttgcaggaggagcagccgggttgccaaaacgctgggacggcagacacattgagtgacctgggaaggagaaactttgccccgggccaagaag

SEQ ID NO: 550304 - DNA, 206 bp, Homo sapiens
attgctgggattaccaggcatgagccaccgcgcccagacaaggaaaacaatttctggagtctgagcaggtatcctgtcttctcatgtttgggacgtttttttgttgctgagatagagtctcactctgttgccaggctggggtgccaatcccactcacagggagatgacagtaatgtgtacttcgcaccctagcacggtggcggtgc

SEQ ID NO: 550305 - DNA, 716 bp, Homo sapiens
  misc_feature (255)..(255): n is a, c, g, or t
  misc_feature (257)..(257): n is a, c, g, or t
  misc_feature (263)..(263): n is a, c, g, or t
  misc_feature (267)..(268): n is a, c, g, or t
  misc_feature (271)..(272): n is a, c, g, or t
  misc_feature (293)..(293): n is a, c, g, or t
  misc_feature (301)..(301): n is a, c, g, or t
  misc_feature (303)..(303): n is a, c, g, or t
  misc_feature (307)..(311): n is a, c, g, or t
  misc_feature (314)..(315): n is a, c, g, or t
  misc_feature (317)..(317): n is a, c, g, or t
  misc_feature (321)..(322): n is a, c, g, or t
  misc_feature (324)..(324): n is a, c, g, or t
  misc_feature (327)..(328): n is a, c, g, or t
  misc_feature (332)..(333): n is a, c, g, or t
  misc_feature (337)..(337): n is a, c, g, or t
  misc_feature (339)..(339): n is a, c, g, or t
  misc_feature (341)..(341): n is a, c, g, or t
  misc_feature (343)..(343): n is a, c, g, or t
  misc_feature (348)..(348): n is a, c, g, or t
  misc_feature (355)..(355): n is a, c, g, or t
  misc_feature (363)..(363): n is a, c, g, or t
  misc_feature (366)..(366): n is a, c, g, or t
  misc_feature (369)..(371): n is a, c, g, or t
  misc_feature (373)..(374): n is a, c, g, or t
  misc_feature (378)..(379): n is a, c, g, or t
  misc_feature (382)..(384): n is a, c, g, or t
  misc_feature (394)..(395): n is a, c, g, or t
  misc_feature (397)..(401): n is a, c, g, or t
  misc_feature (403)..(403): n is a, c, g, or t
  misc_feature (405)..(405): n is a, c, g, or t
  misc_feature (408)..(408): n is a, c, g, or t
  misc_feature (412)..(414): n is a, c, g, or t
  misc_feature (417)..(417): n is a, c, g, or t
  misc_feature (419)..(420): n is a, c, g, or t
  misc_feature (422)..(422): n is a, c, g, or t
  misc_feature (428)..(428): n is a, c, g, or t
  misc_feature (431)..(434): n is a, c, g, or t
  misc_feature (439)..(439): n is a, c, g, or t
  misc_feature (443)..(443): n is a, c, g, or t
  misc_feature (450)..(450): n is a, c, g, or t
  misc_feature (452)..(452): n is a, c, g, or t
  misc_feature (455)..(456): n is a, c, g, or t
  misc_feature (460)..(460): n is a, c, g, or t
  misc_feature (463)..(463): n is a, c, g, or t
  misc_feature (470)..(470): n is a, c, g, or t
  misc_feature (473)..(474): n is a, c, g, or t
  misc_feature (479)..(480): n is a, c, g, or t
  misc_feature (482)..(482): n is a, c, g, or t
  misc_feature (484)..(484): n is a, c, g, or t
  misc_feature (488)..(489): n is a, c, g, or t
  misc_feature (491)..(492): n is a, c, g, or t
  misc_feature (496)..(497): n is a, c, g, or t
  misc_feature (500)..(501): n is a, c, g, or t
  misc_feature (504)..(504): n is a, c, g, or t
  misc_feature (515)..(518): n is a, c, g, or t
  misc_feature (522)..(523): n is a, c, g, or t
  misc_feature (527)..(528): n is a, c, g, or t
  misc_feature (530)..(530): n is a, c, g, or t
  misc_feature (533)..(534): n is a, c, g, or t
  misc_feature (536)..(538): n is a, c, g, or t
  misc_feature (542)..(543): n is a, c, g, or t
  misc_feature (545)..(546): n is a, c, g, or t
  misc_feature (549)..(549): n is a, c, g, or t
  misc_feature (553)..(554): n is a, c, g, or t
  misc_feature (557)..(560): n is a, c, g, or t
  misc_feature (563)..(563): n is a, c, g, or t
  misc_feature (565)..(565): n is a, c, g, or t
  misc_feature (567)..(567): n is a, c, g, or t
  misc_feature (648)..(648): n is a, c, g, or t
  misc_feature (716)..(716): n is a, c, g, or t
agccaggctcgcccaccttgtagaaggagcgccttgagtcccctctcaccctcggttgcaaagagccgaccgcttgatctggacaccccctcgcccagattgcatgatctcccgggaccctcttgagttgcacgtttctgcaccgaggacctcaaatccccgtcgctcctaggatttgcagcgttctggatactggagggttgcaggctacactcgcccgcccctgggcagacactcgtccaaaccactggagtntnctggtnactnncannccagcccttcgcctctccatnaacccgtnancctnnnnncanntnccanncnatnncgcnncccngnancnacagnaccccgncccccccnccnctnnncnncccnnccnnnacaccccccnncnnnnnancnctncctnnnttncnnancatcancannnnaccancaancccaaananccnnccanctntcaccanaannaaaannancncaanncnncccnnccnncanccacaaccccnnnnccanncctnnanacnncnnncccnncnnatncccnnctnnnncantntntttcttattttcccctctttttctcccttttccttttccctccccttttctttattctccacatcatttttatctcactcntcctttcttctatttttattacttatacctttactccttccttctttatcactttctccctcccatcn

SEQ ID NO: 550306 - DNA, 404 bp, Homo sapiens
cacgaggggctggatcaccgtgtcggactgcatcaacggccagcggcacgtggtgagcagctgccgcatgcgccggcggtgttccgccagacgcgcacgccgctcgacgccctccctgatcaagcgcaggctcgccagcaccgcacaggcggtcgctgtgggcgctgcggtggtgtagcgataactgcgtccggtctgcatcatccattcgatcgcgtccgcgtcgccagcgacgaaagcaccggtgacaccggccgccttgcccagcgtgccgatgtatatcagacgcgacgacgcgatgccgaagtgcgacagtacgccgcgcccctgttcgcccagcacgcctaattcgtgcgcgtcgtcgaccaccatcagtgtgtcgtggcgctcgcagagcgccagca

SEQ ID NO: 550307 - DNA, 118 bp, Homo sapiens
cccgcgttgccgttccatttatagatcatttgccagaaacaactcattaggtagtactcaaggaaaaggctgccatgttggaatccatcatctctcccttcaatttgatcttcgataa

SEQ ID NO: 550308 - DNA, 749 bp, Homo sapiens
tactgggttttttgttgttgtttgtttggagacagagttttgctcttgttgcctgagctggggtgcaatggcgcaatctcagctcactgcaacctccgcctcccaggttcaagcgattctcctgcctcaccctcccgagtagctgagattacgggcgtggtggcgggcacctgtagtcccagctacttgggaggctgaggcaggagaatggcgtgaaccgaggaggcagagcttgcagtgagccaagatcgcaccactgcactccagcctgggcgacagagcaagactccatctcaaaaaaaaaaaataaaaaaaaaaagaaagtttttttaaatttttatatgggcgggcgagaggggggttaaccccttgtattcccaggcctttgggaaggcgccaggccaacacgggtttttggaaaccgcgcttgtgcccaactgggttcttaaaatttccaaaatttgcgctgggccttgggggcttgccctctgttattccccagcctattggggagaggcggaggccgaggagaatttctcctgtgtaccgctggcgagtattttggtctcccctgaagccaagagagcggagatccccttctcaaaacgggtcgtgttgccacttttgcgggctcccattagtgactcttgctaggtcttgggccttctggctggattgtaccctttgcgctgggtgaggcacaacttagggaaagccacttgcaatctcaggggtgcgccggaggccgc

SEQ ID NO: 550309 - DNA, 421 bp, Homo sapiens
ggcgctcgccttgcggcgcgagcactgcccccacctagggctctggttccccaaccttcactcggtcctgccacacctcccagccccttctcccttcagaactttccttcttgttgtccccaacactgggacacaaaaccctccttatcaaccctccttatctggctgactcttacaagatcagaaacctgtgtaatgctctcatggcacgctccccttgtcttcgtggatttctcagatgggaaggaattatccatgcaatcacacataaacttctacctaccctcccctagtagctgtctgctgctaaggatggggaccattctcacttactcactgttctgtccctctgcccagtccagatgtgttgaaggatggaaatatacagagtagtggtaaaatataaaccgttcagacatac

SEQ ID NO: 550310 - DNA, 103 bp, Homo sapiens
ggcacgagtctagacttcgagcaggagatggccactgcgcatccgcttccgcccgggagaagagctatgagcggcctgacggccatggcatcactattggcaa

SEQ ID NO: 550311 - DNA, 120 bp, Homo sapiens
cttcgtggagaatccagttcctccttcatggtctgctgcctgttctccgtatccacccgccgcactgtctcctcctggagttgctccttggactcatctaggcgctatagtgcgcctata

SEQ ID NO: 550312 - DNA, 703 bp, Homo sapiens
  misc_feature (146)..(146): n is a, c, g, or t
  misc_feature (162)..(162): n is a, c, g, or t
  misc_feature (216)..(217): n is a, c, g, or t
  misc_feature (324)..(324): n is a, c, g, or t
  misc_feature (328)..(328): n is a, c, g, or t
ggctgcctgagcccctggagagtgtggaggtccctcccaggccccaagcccttacatgatggcccccgggaacacagcaagagtgccagcctcctgtttggcatgcggaacagtgcagccagtgatgaggactcaagctgggctancttatcccagggcagnccctcctatggctccccagaggacacagattccttctggaaccccaacgccttnngagacggattcctgacctgccggctggatggatgagggtccaggacacctcagggacctattactggcacatcccaacagggaccacccagtgggaaccccccggcngggnctccccctcacaggggagcagcccccaagaggagtcccagctcacctggacaggttttcgtaatcggaacggctctcgagtgatggcgcattttctcgaaggaatcgacccatgtgatgaggccccaatggagctgggactgaatggaacctgaggatggggactgtttgaccttcccagctcagagcctcagcccagagccgttgccccaatgaggatggagaagcttcccccactggaataccaacccagggatcaatgtgtttctgccgtgcgctccctaggctgggtagagatgaccgaggaggagctggcccctggacgcagcagtgtggcagtcaacaattgcatccgtcagctctcttaccacaaaag

SEQ ID NO: 550313 - DNA, 201 bp, Homo sapiens
atcatccagcaggtgttcgacactggcagcatctacaaccctgtaagtgcttgatatcacagaggacactctgcattctcgcttcctggagggtgcccgcaatgttgccagtgtctgtctgcagatgggctacccaactgtagcatcagtaccccattctatcatcaacgggataccacacgagcacttggccttgccgcc

SEQ ID NO: 550314 - DNA, 226 bp, Homo sapiens
tgctgctgtcagctcgccaggagaatgtgtgcaggcggcagagtgcaggtccggtggccttctcggtgctctgcctcagccggccaagcaggctgcccacggccgccattcctccttacagcctcagtggcacgtgaaggtggtcagtacaggccttggcgtgcaaccagcacaggagcctggggctggtccaggagggtcttagggaaaagctccctctcctttc

SEQ ID NO: 550315 - DNA, 903 bp, Homo sapiens
ggtgatcaataacacgagaggcgtgctgattacctggggaaaacagtgcaagttgtccctcacattactgatgctgtccagtgagtgggttatgaatcaagccaaggtgccggtggtatggtaataaggaagagccccaaatatgcgttattgagtctgggaggcaccattggagacatcgaagtgactgccgtgttgtggaggcgtttacacaatttccagttttaatggctgaaacatgagtagacatttcctgtatatagtccatcgtatagcgctatgtgcccatcacgcttcagtggctaaccgggtagaagcaaacagaatccaaaatcccagcctcaaagacatgcgtacacgcgacacttgaaggcggtttgagggccttggtctcccaggattgctggatatggtctagaccggaagtttccaagcagcccgattgcagcattggccggtagaacggacgacagactttcctatggttgtcgctcactgtcgaacccgtgagacacggtcagtatgctatccagtgactgctttctctccaacatactcgacgttccctggtggcttgttacgcagggaatcgaaacgcattcgtcgaagactactttcaacggacgcagacttgcaccgtgccgcgatcggctgaattctagcaacgtaattctgctcttctaacgtggcagacaatatggcgtgacacggtattgaacacggtttacaggaatacattattgctccagtagtcccctggtatgagcaacatgacagccaagactcaggagactagctacggccatactgtgcttcaacagccctaggaaccactcacggcctgtgccatcaacgcagaagcttgaatctgatgtacatagacctccattgaatctggagaac

SEQ ID NO: 550316 - DNA, 976 bp, Homo sapiens
tggctacatctatccagcctggtataccgtacggccagctactaatcccgctcccaaggtaccgacgctcccgtgctctcccaaattcggcaccgagcctgacccagcatcccagggccggcttgggcatagatacaagcgacccttacgactaggcggcatcaaaagggacccaaagaacgctaacgtggattgatccattttctaagaaagacttggtatgatgttgaaagcaccctgccatgttcaatataagaaatatcggaaagacgctcgtcaccagggacccaaggaaccgaaccttgcatctgatggtctcaagggtcgtgtgtttgaagtgtagtcttgctggattcgcagaatgatgaacgttgcattctagaacaattcatagctgattactgaagatgttccagggtatacaaactgcctgactaacttccatggcatggatcttacccgtgacaaaatgtgttccatggtcaaagaaactggcagacaatgattgaagctcacgttgatcgtcaagactacccgactggttacttgctttcgtcatagttcatgtgatctgcgttactactacgaaactgcaacaatcagatactggaagacctcttatgcatcagcatccaacaggtccgaccaaatcctggatagaacgatgatggacaatcatgagcccgagaggtgtcagacaatatgacttgcaaagaagtggtccaccacattgattccagacagcattggaatatagacatagaaaaggcttgtccaatctatttatccgtcgtccatgatgtctttcgttagaaatagtgataaatggcgatagcagcccaatgtttgatattgggacaaagctcatggagactttatggccccccccagtagttctggaaaagccactggggacgagacaggtgccttaaggtgaacgagtctgatgcatatgaaccaccagtgccaagatctg

SEQ ID NO: 550317 - DNA, 152 bp, Homo sapiens
gagagagagagagaactagtctcgagtatctatttcttttttattcctttcttctacttttatggaaccagtattcacggggtctctttcaaccttctttggtggtattacatcaaaaggcgccgaaaaaagtaaagaaatacttgggttgc

SEQ ID NO: 550318 - DNA, 146 bp, Homo sapiens
gcagcatagagaggctagtctggaagcctgggcccatgcccccagcagcccccagcccagggggcccccaaggctgaacagcaagctcaggatcatcttggtggtggggcaggctcagctcacactcagccttggcaagtagctcc

SEQ ID NO: 550319 - DNA, 566 bp, Homo sapiens
gcaggaattggcaccaggctgaccgtgaacagggagccgcctctgcctgagggtgtcttcatttgcatactaatggtagatgcactgtgcaccactgaacctgtgtctctgctggaatgcggtatcatggaggagagagagatgtctcgatttacagaagcagatgacacaattgaggaccggcctgctaccacttgagctccaagctcctagctgaatcctgtgtggtgtataccagatgcacatacaaccgtgcgctaaggccatttacctcttctctgcctcgagcaccactgcatcccatgtatttgtcatcctggggaccaatggtgtaacttatgcagccaacagctttcctgagatcgaggatgctctgaacccacacaaataccagatgctcatggccacggtggatgtgatgtttgttagtgagggccagacactaccagatccgattgtgggcctgaatgacacaccttccttcataatggcggacatcttggatttgcataccggccagtgcattgactccacaaccttaacctggacatgtttctccggagggg

SEQ ID NO: 550320 - DNA, 144 bp, Homo sapiens
tgcgggaagagcttttccagggcgatgccttccatcagtcggatacacacatattcatcatcatgggtgcatcgggtgacctggccaagaagaagatctaccccacatatgaaggtcgttccggggtggtcttctgcccgaaaa

SEQ ID NO: 550321 - DNA, 159 bp, Homo sapiens
  misc_feature (63)..(63): n is a, c, g, or t
tgtctgtccatttgtgttttttgggttgtgtcattggatataatcttcagaaataatgcacantagcctttgacaaccatgaagcaaaaatccgttacatgtgggtttgaacttgtagactcggtcacagtatcaaataaaatctataacagaaaaaaa

SEQ ID NO: 550322 - DNA, 953 bp, Homo sapiens
  misc_feature (184)..(184): n is a, c, g, or t
ggagcgcggggagccagacgctgaccacgttcctctcctcggtctcctccgcctccagctccgcgctgcccggagccgggagcatgcgaccccaggccgccgccgctccccgcaggcggctccgcgggcctccgtgctgctcctgtggcttgcagttgcccgcgccgtcgagcgccctctgagnatccccaggggggagcaaaagggcgcacctcccgggcaggaaggcgcagttgggtgggcccctggtattatgggactttgttgtttaaccaggggggcccagcgggattttccttgtttcggaaacggggactccccttgggcccccatgtggcattcccgggttaccaccctgggtcatccccaggtgtcccgcgaacttggacttcacaacgcccgaacacacgccgcggcacttgtcctgcaagggccacgcgccttgtgaagggaagttccctggagacaccccaaattaacagcaagggggtcaccttggcatgttcactttggcctttactgcgcataggcattctggggacccattggcgcaggttgtccattttaaccacaagtatggcgttcaaataggtgcctcaacgacgttgttgctgcaggggggcctcccttccggctcaaccgatcgccgccattgccttgctcgacacgcgttgggcgatttccacaatcaaggggccgttgatgtccaggaccttctcccagtgaagctataattcaatggcaccaggaagcactgtaattgattcacacttatatcatcgacactccttctgtggagcacttgccacgcattgcggcgacttaggggcatgctcgctacgggtggcactggttcacgatacccaaggaattccccgcgggagaaccactctcgctttttgcaacaccaaagtttatatggcccttatagcggagcacaagacaaaaggtac

SEQ ID NO: 550323 - DNA, 154 bp, Homo sapiens
tctatagatcagttttatttactatcaaacacattctacaaaagaaccaagacttttttattatctttaaggaacaaaggcagcttattttccaatgtgcacaatgtcattcaatattgtcacatcactattcgtgtttcaatgggccatcact

SEQ ID NO: 550324 - DNA, 384 bp, Homo sapiens
acgacaggcgactccaaactgatcttgggctatctggaaacataaactctttatccttgaacacacctcatatatccaccctgatttcctaacacatccccactccattcatttacacacagtatgtgactctctatagaatttactattcaagtcctagtcaagaaacttcttggattgcaagtcagggccactgatcttcctgacttagaactcacagaggggcgaactatttatggtgctatttagctttttctgtatttatgttatttgcccatctctaacacataccatttgaaaataaagactatatttttatacagtcttgtgtgtcatcaattagaactagaaccaggcttaaggttatcagaggctgagaaccca

SEQ ID NO: 550325 - DNA, 180 bp, Homo sapiens
caagaggagctgtgatagtgaataggtaggtagtcagatgagagtaaaaatgtagtattatccctagattgcaaatgttccaaataagacagtgccataactacacgagagagaacaaaaaaaaaatcatataagtggggttagttcctctaatccaacaactcaagtctgtttccttgg

SEQ ID NO: 550326 - DNA, 104 bp, Homo sapiens
ctcactgttaggaatagtcctggactatcggtagtaaagggtagcgattgaggagttcaagggtaaaatcaggactagtcgagatttaacagcatattctagcg

SEQ ID NO: 550327 - DNA, 213 bp, Homo sapiens
caccgttcgaccggtggcaaaggctacgcccacggcgacacgttcggccgcatcggccagttgttcagcaggttcatggacgacgccagcgcgcactacgtggagaacctggccgacgccatcgaggatcccgagcgccagcttgatgtgtcgttcgaactgccggcgcgccttaaatgacctccctccttcaattcatcgccggcggcctgg

SEQ ID NO: 550328 - DNA, 211 bp, Homo sapiens
attctaggttgttttatgttgaatgttctatatcttactagttaatttgtatattttattagtatttcggaaatagcatatctgagactgaagagaacccgacaattcacttatttgtggtttttttctcagctattctgacgcttacttacttatttgtatgttctaatggctaaacatttacattaaatgttttttttcccaaaaaaaa

SEQ ID NO: 550329 - DNA, 334 bp, Homo sapiens
agcattttcattcttcccatggcagctgattttttggggccagttttcatgttttttccataggccttgtgcagaaaggttttttcattgcatccatactgtgagaataaactgcagactgaaaaaaacatgcctgcagggtcaggaactgggcccctgttcccagaacgggttgggcctcaaaaatttattttttttttaaatgttgaaccctgaaaaaactaaaatgatatttcaaaaaagttgggtgccttttttggaaacaaggaaaacccaataattccgaggaacattgggggtttaataccaaaaataaaaattggtttttttttta

SEQ ID NO: 550330 - DNA, 1608 bp, Homo sapiens
  misc_feature (46)..(46): n is a, c, g, or t
  misc_feature (979)..(979): n is a, c, g, or t
  misc_feature (1191)..(1191): n is a, c, g, or t
ctattctgtcctgtgtggagtgggtccccaccagctcctccgtctntttttgttggagacccgccctgtgtcgtatcaaaaaaggggggtgtgttgtttgcagaccgggcgtgctacgttcgctctcccctctcgccgctcctctgtgtggctgtgctcttccacctggggatataataactctccggcggatgtttgttggtgtgggtttgttctcccatgcgtgtggtcgccctccgttgtcagaagatgggttgtctctgtggcgcgtctgtctcttgattagtgtgcgccctcttctcagctatggtgggacgaaggtttgttgtcgccgcctcaattttctctcttgggggggggcgcccatcctctgggtgctttaccaaccccagagggggtttttgtgcctctggtggaaaaggtgtgttcctccaacgcgcacacgaggtggagccaccgaccgcccctcccccccccccttgggagtagcggaggataaatgatgttggggaaaatgtagtgggtatatgtcctccccacaggatggtcctccactccttattccccccgtggagaatatgagattatggataaccccaccggctgcttcactactagagaagggggttatcccggcgggataacacaccacggccccccacggagatgataggggaccctcgtggtgagaagatagtggagaaaaatatttttgagcccacacgagaggtagtccccaccacagaagagggggtctccctctctcctacagaggctccccccccctcgtgacgactcttctcttctgtgggttttcttgagagccgcccccctatatttattaaggagcacccggtggtgtaagattgttcttctttctacatggttctcggttgtgtctcgctggtctccacgctgtcctccctctcacactttgttgtgttgtcccccccctgtgaggaagtgtgtactcgcggcnaagaccctcacagcggtccacagcacacctcacgctctccacagcgggtgtctcacacacacgggcgacaccccccacctgtgagacgacacactacagagagaagcctctgtgtgagacacacacagagagataagaggggtgtttgtatgtgtctacctctgtctctctctctccgacgaagagtgtgtctctgtgatatagcgcacacnctctgggagagagaatttgtgtgccacgcgtggttcactcgttatattctatgtgagcccacatataggagaagaggcacaccccgctgtttctcatatagagagtgagaaagggagagccccgcaaagagactgagattggagagggccgccatatttctgtgagagtggggcgcacttctcgttggaactcttccaccctcggtgcacaataactctctgccacgctcgttaagaaagtcccacagcacctctggggaccacccactcgaagctcttctcgttgtaaccccgggatttttctaagaaacccacaaataaactgggaaaaagccaccccccaagggttaccccgcctcccccctgctccctcccccgtattttataatccacgaaatataattgccttttaaaaaa

SEQ ID NO: 550331 - DNA, 502 bp, Homo sapiens
gacaaccccatagtttcgaaattttgtttctgcaatccgcagctttgggaagcactgaattacaaaacctgaaaaccctcatatatgtggcggcttaaaggccggcctaggctggagcggaggtcttgggaagcgctgggccgctcgtaaagtcaatggtgagtctcccggctttcggctttcggctttcggcggcagccgggtgtgaggttccacgggcaaagccagccagagggttgacagaaataactggataaatctgggccccctgcccctgccggctcacaagggtgcaacccacggctggagccaaaaaaaaccgcccaattgacgcccacggtttctttagcgtcttgctggaaaacaatgactttttaaagcccctgtcccggccttccaatccccactaactggggaagcccaccgggttccacccccgggagcttcgggaaacccaagggcccggcaaaagacaccttttacgagggaacaagcttccggg

SEQ ID NO: 550332 - DNA, 173 bp, Homo sapiens
cccgttttgtggaaatgacccgtgctcattatattcactttaaaaacataactttttgctttattacaacaagtatatatctctgttgttgaaacatctagaaaatacaaataagccagataacaaatccacctataatcttatcatcatagatagctattttctaagcctcg

SEQ ID NO: 550333 - DNA, 240 bp, Homo sapiens
tatggtattatcacacagtaaatagcaagttggcatcactgtagcagtcttggatcttagcatgctctatagcagaaggatgtcatttatatcaccttgtggatgtctctaagtgcagctattatttgtccaccatcattgtggtattataacacagtaaatagcaagttggatcactgtagcagacttggatccttagcatgctctatagcagaaggatgacggtaacagcaccgtacg

SEQ ID NO: 550334 - DNA, 324 bp, Homo sapiens
gtcgacctctcttaactaacaataaaaaacagcaacaatgcagctgggcacagtggcttatgcctgtaatcccagcactttgggaggcccaggcaggtggatcaactgaggtcaggagtttaagaccagcctggccaacatgtgaaaccctgtctctacgaaaaatacaaaaaattagccggatgttgtgttgcacacccgtagtcccacctactggggaggctgacgcaggagaattgcttaaacccaggaggcagagcttgcattgagctgaaatcgtaccacagcactccagcctgggcaacagagtgagactccatatcc

SEQ ID NO: 550335 - DNA, 127 bp, Homo sapiens
agataactgtgcagataagtacggcatgctgcaggagacaggctcactgggggctaggaaatggtgcaggtgcaggtccaagccccccacccaggctccagccttcaacttgggtcccactggcagt

SEQ ID NO: 550336 - DNA, 182 bp, Homo sapiens
ctgcgaagactgctccatctcaaggtgaggggcttgggcagaccctcttgctgcacatggcgggtgtatctctgctcctgtctagaaggcaccaccacagacgctcacttctggaaggtcccatcccctgcaggcttggtctccacgagctccgtgtcctgggtctggtcctctctatccct

SEQ ID NO: 550337 - DNA, 572 bp, Homo sapiens
agcggggaacaatcacttcagtgagtgaggctggagttccacttgagtccaggagttcaagactgcagtgtgctgtgatcttgccactgcactccagcctgggtgacagaaggagacctgtctctgattgcatgaatgactgaatgaatggcccatgatgctagaaaccaccaaatctgtgtgcctctcgtttaaacaaataaccgtactgttgaaatacatacacctatgtatttctctaccccaaaaacgctataaacagtagtggggatccagaaaggagaataataaataacagattaaactttttttttttaagttaaagggttacagtgaaggaactaagagggggtatggtggtggctgctgtggtggtggtttggtgtaaatttaaaaatgggggatctgggaaatttaagggtcagaggaatacaagagagagaagatggagaaatacactttatgaaatgccaggattcaggaagaagagccaaaggagatgtcagaagtagtcaaataagtatatggtcaacagggtcagatggaagtatattctacataaaagtttaaaa

SEQ ID NO: 550338 - DNA, 707 bp, Homo sapiens
  misc_feature (2)..(2): n is a, c, g, or t
  misc_feature (57)..(57): n is a, c, g, or t
  misc_feature (201)..(201): n is a, c, g, or t
  misc_feature (303)..(303): n is a, c, g, or t
  misc_feature (322)..(322): n is a, c, g, or t
  misc_feature (341)..(341): n is a, c, g, or t
  misc_feature (375)..(376): n is a, c, g, or t
  misc_feature (382)..(382): n is a, c, g, or t
  misc_feature (387)..(387): n is a, c, g, or t
  misc_feature (390)..(390): n is a, c, g, or t
  misc_feature (416)..(417): n is a, c, g, or t
  misc_feature (425)..(426): n is a, c, g, or t
  misc_feature (437)..(437): n is a, c, g, or t
  misc_feature (459)..(459): n is a, c, g, or t
  misc_feature (495)..(495): n is a, c, g, or t
  misc_feature (502)..(502): n is a, c, g, or t
  misc_feature (510)..(510): n is a, c, g, or t
  misc_feature (514)..(514): n is a, c, g, or t
  misc_feature (535)..(535): n is a, c, g, or t
  misc_feature (549)..(549): n is a, c, g, or t
  misc_feature (551)..(551): n is a, c, g, or t
  misc_feature (556)..(556): n is a, c, g, or t
  misc_feature (582)..(582): n is a, c, g, or t
  misc_feature (587)..(587): n is a, c, g, or t
  misc_feature (592)..(592): n is a, c, g, or t
  misc_feature (594)..(594): n is a, c, g, or t
  misc_feature (599)..(599): n is a, c, g, or t
  misc_feature (601)..(603): n is a, c, g, or t
  misc_feature (607)..(607): n is a, c, g, or t
  misc_feature (611)..(612): n is a, c, g, or t
  misc_feature (615)..(615): n is a, c, g, or t
  misc_feature (617)..(617): n is a, c, g, or t
  misc_feature (623)..(623): n is a, c, g, or t
  misc_feature (642)..(642): n is a, c, g, or t
  misc_feature (645)..(645): n is a, c, g, or t
  misc_feature (657)..(657): n is a, c, g, or t
cngccccgaaccccccctgaaaaaatcggcccagcgctgttgcccccggagcggacntttctgcagctattctgagaacaacttgacgtaggctgagggagagggacagggtcagtggcgaaggaggcaggccccgcgcggggatttcggaagccctgcggtgcataatgaagtttcagtaaaaggaggacaatctttttnagtatcggaaaaaggaaggagaaaagattcggaagaaatattcggaaagggttccgtgattgtagagaaggctccaaaagcaagggatgcctgatttagganaagaggaagtaaatagtgncttatgaatttattgttgncaagttttattttttaatacggaagagaatttanntgaganttgangangaattatttttttttgtaaaaaaaannattcctcnnaaaagtgttanaatgggccaactgtatgagganaataatgaggaagattattttttgtatgtggcttanagtgatnagagtgtntatnggaaataagtggttgcgaaancagtagatgggagnantgganttggggcgtaggcgcgcaggcgcgtntgctntgccncnaaatncnnnaaanagcnntgncntcccancgccaagcagcacagcaanctnaagcacatctanaaaacattacaccaaacacaccgctcatcacattttcacatgctcaattc

SEQ ID NO: 550339 - DNA, 312 bp, Homo sapiens
  misc_feature (249)..(249): n is a, c, g, or t
  misc_feature (277)..(277): n is a, c, g, or t
  misc_feature (307)..(307): n is a, c, g, or t
ggcacgagaacacatacaaagacaagacagacagaagggcttccaaatcagatccctaaccaagaactccaagagtatcccttccaaactatcctcctgttctctgtctgagaaatctccccaaaatcttcctgattgagaagtctcccaaaccaagactcttcctactaattagagagagccaaccgagaatctcaaatgaaccaaactgagaaagatgcccctcagtgggcttacagaccgacaccncaccatggggcaacagaaaaaccaagancccctccccaaaggaattcaaaaccaatcnggaaa

SEQ ID NO: 550340 - DNA, 163 bp, Homo sapiens
tcatagttggatacatttttttctcacttatatgattagtatcagtgggctttcgtattggcagtttgtcttgggtcatgactgtagttctgtgcaaacaccactctttacatgcaaacaacctatgaatagatattttccccaaatgcaaggaaaattaatc

SEQ ID NO: 550341 - DNA, 378 bp, Homo sapiens
ctactaaattcgcgcccgcgtcgaccggcgttggccggtaatctgctggtgcaatcggcggacccgacgtcgttgatccatatcgtgctcaagggcggcaccttgccggtgacccacaccgcacattcgaacttcaccacgccggcgtctgcctggcgattgtcggaccaggaagtggcggacgtggtcggtttcattcgcggcagttggggtaatcagggcggcgcagtacaggccaccgatgtggcggcgttgcgcaaggaggatatgccggccaaaccgtaggctggcgcctgccagacggtgctaggcagattcgcctgactccattactgtatataaatacagtaatggagcctttccaatgttcgtcgacgc

SEQ ID NO: 550342 - DNA, 862 bp, Homo sapiens
  misc_feature (184)..(184): n is a, c, g, or t
agcgggtggaacgaggaacggacggcgatggcgacggtcgcagcaatatccatggtgctggtgcggcggctgtggcggcggcagcggtggtgactgacgatgtagacgcagccagcagccgacgcaggagctgccaggccatgggacagcccaggtggacagccaagatacgaaagagcggcgnatagtgggcgaagaatcgatccactgtgggaccggcgaaagtcctggttcccttgctggagaaggcgctggtagtaactcactgggaaggcatacgatgcgagggagggggatccatggtactccgatgcagccttcccgcatgagactgcgagtcagagcagatggcaccacacatctgtatcaacgactggagagtagtacgtgagctgccctccaagggaaggggactggatgcgaacgtgcccagggactttatcggtagcctgccgtacccagttacgccgtgacttgaggcagattaaaccataggtacacgcttaggctaatggctcctacgacgccagtcggacccaaggcccatcgtccatgtatgaaacgccaaaaggaaccaatacgatgccattgccgcaaacagtccaggaaagggctcgagaactggtagccccaagataggaacctgcgtgccgtatgtcccggtccaacaggtgaagttagtgggccaagagtcatgcaacacgtggttcacacgttccagcccaagtgaccggaaatgcgtagtggggccgtagataatgggcgccatcagcgtcgggcgagtcgggccaccctggggtggtcagacgccccagggatacgacgacctcggggattccggcgacagggacagtcaaaaagg

SEQ ID NO: 550343 - DNA, 159 bp, Homo sapiens
cagcccgtcctataggcgctaggtgggcagactataggagggactggttaggagtcagcattgctttccctgtcacctggagcccatgtttgggccgcacagctttcctactaaaaacgtcatcatcttccttctttttgaaaattcagcatttgcttg

SEQ ID NO: 550344 - DNA, 429 bp, Homo sapiens
cgagaacaacacgctccagttacaacagctcagttacaacagctacgtggacgactatggacaccaaggcccgcctggccgatctcgaaagtcgtgcgaaagcgctgaacgttccggtcggcagcgacccggatgatgagcttgagcggcaaatcgcatcgggatactcaagcctccgaggcactgtcgagcgcgccatacgcgaggtttttttgaacaataccgtccagccgttcagcgatgtggtgagcgtagaagcatttggtgctgtcattggccaccccgcagaggagtgggagcagttgctggcagtgtatgcgcgggcctgcgaagctaccgaggcccacgacaccccaggcgagcgccaactaccgctttccgcgcgtgaggagttgctcggcgatatcgcccaggtcctggaattaatca

SEQ ID NO: 550345 - DNA, 743 bp, Homo sapiens
accagcgtcaccgacggactatgagggccctgggagcccaggggcttcggatccccctacctccgatagacgttgatcgagtcacggaggctgtggtatgaccgcgaatctggtgcaagttgcccagtagcccatgattagcagtgtggacctcacgtactcgcggaccgagattgtggtactaagaatacagcactgagggttacgccgatatgacccttaggtgaagagtcctcgcaggggggatgtaacctcgtgtgaacgacagcgggcagatccgccctcgcaagaagaccgcacatgaaatcggggcccgacagggcgccccgcgcactgccgaacaaaagcgccgggcggcacggaggacatcgcaacccagagtaagacgaagcggacagcagacccgcgcggggtagaggcgcacaacaacagagagggagcactagagctggaacaaaggtacccgatcaactagggtcgcatgtgcaaggaacaacgacacgagacacaagaaaccgaccaccaagcaaaggacaggaggcagacgacacccagtgagcgaaagacaggcagaaaacatgctcatgggcaatcaggagacacaacgaagcctaagggcaacgagacaggcagaccaagagtcacacaatgaccaggacggcatgctgaccagggcgcagcacaacaacacacagcaaaagggaaaagcgtgaagcacgaactggagcgaggacagagcaacg

SEQ ID NO: 550346 - DNA, 1004 bp, Homo sapiens
tcgctcgctcggctcgctgactcgccggagcgctctgtggcggtcggcggcaggtcggtcgcgagagcgggctctgtggaagggggcgaggctatgtcgcggtggcagccctggatgggccggcaggcgccgggagtaacgggacgtcgccgcggagcttcttccccctggtaatcagtgcggccctgagctggagtgcctgatggctgccgccctcccgatcttgaagagccctgcgcttgcgccggagccttgccccccgggcttgcgcaactgggcacgcgaggccaggtagcggagcagcgccagccgagacccgggcccgggcggcggggtggatctaaccccagccaagggagggcaaataacttaaggccccctcttggaggccagggggaagctcctttccccccaaaaagacatgaacgctttatgggagaacgtcgagctttgaagggcgaatcaacttcacaagcttgacttgtgggagaaccgggagattgcccacaattcatttgcgccggattgagaagctactccttggtaaggatgggcacgggatgactgacaaacaaactgtggtcaagcaaggttcctgccacgggagggggccaggcccccactgttgctgaaagggcaatttctccaccgcaagaacttcagagactgtaggccgcaggcaaggacttcgagcaaaagatcccaatggtgggtgcagggaaggagggcgcccctcagtgaagatgttgccgccggaagaaccctttttttatccttgatttgccccgcccagagtgaggtccttcagggctgtataataacttaggccaccagccccggagccattgagtttcagccgggggagcccagccctatgttgtgctgtgtaattcacccaccatgggggtgtttaatgactgggggggggggcgtctggttgtttaacccaccgtgtgtcccgcgggcagagaactgtccggtgggatcaacggtgtttatcccag

SEQ ID NO: 550347 - DNA, 343 bp, Homo sapiens
gagtattaatatcatcattatagaagtaactcttaaatgagttgagtgtaaatcaaaacatcatcaaattgcttaagcagtgaagaaacatggaagctcatgcactgcctctctgtgattgtatctcattcactaaatgatcctcccaccaactgtaagaactgctgggcaattttcatatgatcccttgaacccatttcctggccaaaggctgcattgaccactcctttgagaatatactcctgaggagtagtaggttccagatccttaattaagttatacgcttcttgtacatcatcttgacgaaggtagtaaatcaccaagtttagcctagcttcaggaa

SEQ ID NO: 550348 - DNA, 154 bp, Homo sapiens
tttggtgggaaaatgtccccccccttttttcctagttttatgttttttgggaaaaaatccctttgtattttctgtccagggcttcaaattttttgcccgatttttaaaacatggcaataaatggctggtgggttttggccccctgggcccccca

SEQ ID NO: 550349 - DNA, 166 bp, Homo sapiens
tctgtctcatcttatcatgtgaatgagtgcgtatcactgtactgcaacttgaactccctggcccagcgatctcctgcttcagcctcctgagtagctgggattagaggtgctgccaccacgcttgtgaatttttctttctttctttctcttttttttttttgggaat

SEQ ID NO: 550350 - DNA, 847 bp, Homo sapiens
agaccggcgtgtatgcgagcattctttgtcgggaacacctgcgatacaccgacgtctgctaaaatgggtgatgcatctgtcatgcatgaagtaggaccttgtcggaagatcaacagtgacatcgtcttttcacttcactagtggactaaacgcatggttggaatgtgaaaacctcatcggattacacgataagggagactttggcggagtccatgggtttgatggacgcatcgtcgtcgggcagccagtcctcatataatccattcgtaactaggtatctgtctttctgcaaagtatatgctcggagggctaatggacccgatattggcaatttcacctgtcgcaaattctcattggactcaatgcattgtgcaatcggatcgaattgtaggcgtacatcagcgaaatgatgcacatgagaggaaatatagcacgcacgcatgttcatcctccgtgtagtcccgataaggggatacgcgccaaggggcatcatcatcatgtagcattgcaggacatgcctgtcctattgtctgcattttgacaaaccatttgtagggcagcacaggttctacaagtactgtaatgaccgttcgtctgcatcctcgtactactgagggacgctcgagctcattcgtctgtgcacatctgctcaagtctttattactgtcatagcccggtcacgtcaggtgagtgagaatgtcaaaagtgaaagcacagttgatcgcagaaaatgctgtaacagtatcttccgttaaatacccagcaatagtgttgcccttactatgcagttcgtaccggttactaggcttaaagtgttccttctcttaatggtaacctatttatgtct

SEQ ID NO: 550351 - DNA, 180 bp, Homo sapiens
gatgtgatcaggccccacccatgtaatcaggcaaggaggaggagtcagatgaggcagtgcaccttacacaaggaaccgaccagtgcaggtattaagaaggagaaggctggagaaggacattagatcagggcctaccactgggattcacagcctcacccctgcactgtggacctcatcctt

SEQ ID NO: 550352 - DNA, 868 bp, Homo sapiens
ggtcacattccccctttagtaggcaccttcgagttttgggagatctgttgaacgtgcaacggggacgaaggaagccaaggaacgcattcctgtgttctcatcttcaagtcttaaatttgtcctttctcatgatcaagcgtataggcacaactcatggcatcttgtgctacaggccctccctctactgttcctgtcctgattatagggtcccttttcttacacacctcccagagagatgagggactgtcacactgctgctgagtgacctggtgctgctgggcgtctgttctttaccgaaaccatccatccctagaagagcacagagccctgaggggctgggctggactgggctgagcccctggtcttcctcaacagttcacagaggtctttcagctaagtttaatcgcacaggaaagaggcatcaaagctatgaatgtgaatataacttttgtggaccaatactaagcaataaggaagaagtcccagttggtagaggaaagtgcgttctcccagcactgctctcctgttttctccctctcatgtaccctccagggaaaatgactttattgcctaatttctgccttttcccccctcacacatgcactttttgggcctttttttatagactggaaaaaaccaacataccaccctacaaacctgtactgttaaaatacgatacacgaaatgaccacgtgaaaatttgcctctgtccaaacatttcatccgtgtgtatcgtgtatgtgatgtgaagtgtagtgaagctcgccagttcatctttgtatatgggtttagttgtctcattttggtctgcttatggtcccctccctcgtgggcattgtgctcgggatcaaacctttctggcccgtta

SEQ ID NO: 550353 - DNA, 431 bp, Homo sapiens
gtgtatttgtgtgtatctttatgtgcggagtgcatgtgaatgcagaaccttgcagaagccagagatgtgagatccctctgggtggagctgcaggcaggtgtgaaccacacaacatgcatgctggactctggaaacgcagtacaggctctttctgctggaccatctcttcaggccccatgtaatgtttttaaattcctgatctatgactctagaaccggctcatgaacaaaggggaagggggcaatacaaagactgtctatgtatgtggtagagagcaagactttcagaaagccaagaagaacaagtggaaaaataaactttgaggaaatgaattcaaacagatcattaattgcaataaatattaataaattaaattcacatactgtaagactactagatctaatttaaaggtcgacgcggccgcgaattta

SEQ ID NO: 550354 - DNA, 1580 bp, Homo sapiens
atgaccctgatggagctgcctatcaaggtgactgagctggcagcggacttagacctacgactcgggtatccatttcggtgcgctgaacaccgtgcgtgccctccgatcagcaggcaacgtgtgcatccattggcatcgccacggattgcaggcctgctgtgtgcgcctagttactacggctctacagcagatagaccatcctacttaactacccaagggtgtgtgccccccaagctcgaagtgtagaccttgggagtaccactagtgtccacacattagctctagtggccaacacgggctgcttggaggccatcgtagctctagtgtcgcttgtcacgagctgatgtgaccatgcatacgctttgcatagcgtgagcaccaaccatgtgttgtgaagttgcgtgcatgagccatggcaacgcgtagcaggagctgacctttggcactatgccgtgtccacaagcttagctcatatgagttcgcgccgactttagttgccatcttattctaatctaccagtggaggaatagaaccgagaagtcttgcgacgcgtactacatcgatcgccatgctccccggtagacttcgagcccatagaatgtgatctgcataacgccagcgaaaggccacccccgggttgcgtgggtgttaccacaggggtggcggacaatgcattgtggtgtgcacagcccagggcttggtgcgacacaggcatagccgaagatgcgattcgcggtcgtggacgtgggtccccattggaattagtgtagcttccggagcacctcgaagagccatcgagtttggagcccgtgccttgagtcgggataggccggttcatcccaacttgacgcagagaaagtatacccaatagaccagtgaaggcccgtttggaaatcaaacactgggtcccccaggcggtagtaacacccagacctaattctatttcgcgttgacaaaacatagagtcgttcgttccccccaaagcgaacccagggggaaggggaggcttagcatgcaggcacaagagtccatattccaaaggatccggagaggttggcgaattcagcacttagtcggtccctcgcgcgttccaggacaaattggccttccacagagagatcccccacgcatggctaggactagttccggcggtacgcgtctggatgcctaatttcgccgcaacttcagcccgagtcaggcgttgagcatctaaatacgattgggctccaccttggctagcccaaagcggaaagggggaccggccaacaaggggaaatccggccacctgtacttgcgtggacccgttgtgaaccggatcgtcgtggacattgccacctaaaacgaagttgtgtatggccccccatgtgcgctgtgagtcaacaggcatatcgacaatgcccgcgcgatcgtgttttacacatgtggtcccagcttcataccgagctcggaatcgcttggacgcttgtgagagagtataccgctgtggtgcacttaaccaggcgcgagcgcaagtgcaggagctgaacaaacggctagacgacactactactgtggcacagaatgtggtggatgagccccca

SEQ ID NO: 550355 - DNA, 137 bp, Homo sapiens
ggcgacattaacttactgacctggcctgggctgctctgggacatggaggaaggcagtgaaggtggaggaaatgctcgtgtgcggaaccatgcaaagtgaggtggagggagtaaagaatataatgacccagaatgtgg

SEQ ID NO: 550356 - DNA, 219 bp, Homo sapiens
tcgactctagagatcccggagtagtcagatgtgtaactctcacatgtatttcttaataacctgacggcatgtcttatggcctttctctggcttaagtgcaaaacatgacataatattcattgatagtacatctcctctaagcagagtgtcaatccttggcttcctggctacaccagaagaagaatttcttgagccaccaataactgatagctatcatta

SEQ ID NO: 550357 - DNA, 467 bp, Homo sapiens
atatgggagactggtttcagtattatttatagttgcacttgattaccgttctctgaggcactggagccttcatacacctcaccctgccttggcaagcctatttttgtgacctggcagcacagatttaacactattcgttaaaagcactttttttttaatgcgtttaatcccttataaagaatgccaattaagttttattacctgtcatcaatttatcctagtatctcagtgttcattcttcttgccttcatatttttttcaaagaaacagctgtgctaatgtctttggtttcccgatgagtgtacactactgtataatttatgtttaccatatgagtcttgaaacactacagatattttgaatatcagtcatgatggcaatttctgtataaaagagccttaaatggaacattgttttgagatcaaactccctaccctcacaaaagtggccacgttgcaataaaaatt

SEQ ID NO: 550358 - DNA, 417 bp, Homo sapiens
  misc_feature (414)..(414): n is a, c, g, or t
ctaatggttagcgcccacctgtgaagagtcgggggtcggggagggggtctcgctaagaaggaggtttgcagaccatggcaaagactggagctagagattcgctggccttgaagaagcaagctgtcatgttgcgaactgcctatggagaaaactaaatggcagggaactgcagacggcttctagaacttgagcgcagcctgcagctgacaaccagtaagaagccagggccctcagtcacacaaccacaaggaaatgaattctgccaacaacctgagaggtggcctccagatgagaagacagcctgacttaaaccttgatagcagttttgtgagaccctgagcaaagaaaacagataaactgtgcgtagactcctggtctacagaaactgtgagataataaatgtgtcttaagatncta

SEQ ID NO: 550359 - DNA, 1362 bp, Homo sapiens
ggcatgtcaggaaatccctacagaagagaggccacatccatatgacatgggctcagacagtgagccagcacagatgtagagaccataaactggtcatgagggggttcacacagctggaaagtccactgcatatgtcatgacgtgtgggacaaccttccaagggcgaatcctgaccgttatacagcagtccaagtagtccacactggggaggcttccgttgagtgtagtgatgattgtgggacaaaccttcagccagaactcagttcttaacaaaccgacatcgactctcatatgagtgacgacacgcttaccagtgcagcgaatgtgggaaagccttccgagggcactcagcctttctcggcatcagagtcaccacagcagtgagaggcctaataatgtgtacctgactgtggcacagccttcagccagacctcgagccttcaacaagcaccaagaagtacacacactgacgctgacgaagcccctactgacgtgcaatgcaaagtagggacaggctaacaaggcaggacgcacacaaacgtccaaccaactactcacacggaatccaaccagcgcgacgacaacgaaagagcagcagcgcagcaggcgcggaaccaggcacaacagagcagacagccctccacaaccctacaatccacaccacaccacagcgacatcaccaaagtgacagacgcaaccccccagcgaaccagagggcgcacacacgacccgcacaacaacccactcaacacacgacggacacaccacatgcacagcacgaccaccccacgacagagcctccccccaccccaggacacgacaagaaagcaccacaccgaagcctggtaccacgcaaccgcacagcaaaccgacgctaacaacgagcacggcataccaacccacacaacaacacaccaccaaaagatgataccccaccggcgaccaaagacgcgccaaagacagacgccagcccactggcagagaaacacacaacaaaccaccacccccacaccaacaacaacacgaaaccagccccccactccaaccgagccaaacgcgcaccaccctcgcgcacgcgacggcgacacacgccagcgacgagcacagcgagcacaagacagcgccaaccaacccaccgcgcacaccgacaacaccacagcacagacgagcagaccacacaagcaccccaccagcccagcgcacacaaggcgaactcaacccaccaggtcaccacaccgtccacggagaaagacaaaaaatgaagaagagacagacagcgaacacccagccgcacagaccgacaaaccacacaacacaccaccggccagagccaccagctacgcacacacaccgagcgccgcg

SEQ ID NO: 550360 - DNA, 236 bp, Homo sapiens
cggtaccagccttacccttactgggatctccgaacttgactgacagaggaggctgcagtttgctgtgtatgagccttattatagagatggtgcagccctggcaggctcggggctcgcacctgtaatcccagtacttccggagaccaaggcaggtgatcacgaggtcaggagttcaagaccagcctggccaacagagtgaaaccccttctctactaaaatacaaaaaaaattagccg

SEQ ID NO: 550361 - DNA, 241 bp, Homo sapiens
ccccccgggtttacccctttagcttccgggttgttttttggggggaattgtggggggatacccatttccccccgggaaccggtttggcctggtttgggattttattcgcccccccttaggggatttggcccccggggcccaaaatttgggccgggggccattaaaaccctggggtttgtttgggcccccccgggggggggccttttgggggggccccttttttaacctttttttttcccca

SEQ ID NO: 550362 - DNA, 219 bp, Homo sapiens
  misc_feature (170)..(170): n is a, c, g, or t
  misc_feature (194)..(194): n is a, c, g, or t
  misc_feature (216)..(216): n is a, c, g, or t
agaaacgctgtttcttccctccaatattctataacataataatgtttcacatttctacagaactgtcttttcagcatgttttcgcattatgcttaatttcgtaagagtttctcagccccacataacgacacagttcaatgcaaaatcagatataaatctagcttaagggnctctcaacaggggttttcactttnaaactgtaaaatgtttaaaggntct

SEQ ID NO: 550363 - DNA, 304 bp, Homo sapiens
tgtggtcgtctctagcaggatcccctcacacgcctcttacagaactgtgcttggggaaactccatttgttgactgccactgaaggctattttgctacactgctgctccaggttttttgtttggaccatctatcacagtggggcacagctgtttattggatgagccgaatcgaccgatatgcttgtggcccccagagtgttttacggtctttcacgttgtatctaatggacctgctgaaccgtttaatgtcttctcaggatgccaagttggagcttaaatgtgacatcaaaccagttgcgaatag

SEQ ID NO: 550364 - DNA, 164 bp, Homo sapiens
atgcagttacaggatacaacagttcataagaactgagtatctatgcgcacaaattgcttaatacagtcaccttaagagaacatgcacagatcttggtggacaaaactgtatctacactgaaactactacgggactccatcaatgagtccaactttccaactccc

SEQ ID NO: 550365 - DNA, 1476 bp, Homo sapiens
gatggcgtgatgtctcacagaaatgttctccgtctcccagacatgggtccctcggcttcctgacctcggaagcgcagcagcaggtatcgtgggaaggtgaatagcttacccataaggatgacctctgtccaagtcgctgtgtccacctctacagactcttccctgggatacaaggctggcatgactcgacatcgtgctgggaagtcggactaggccggtggatccaaaggtgaacaaggaaggaggtgtgttggagtgctgtgaccattgtagagataccaaccaatggtggatgctggagcatttgtgggacatacgtgtgaaacatccctcgtcgagaggccatccgaggaccgtgttcgaagcacttggtcattgtgcgtagtagccaacaatcaacgttgaatgcaaatgcaaacgtagggcgttttcttatcatgatattggccatacaatcataagaacgataggcgcttttaacactagagttaactggccaatgaacgtggtcagggactgcatgtgaatagcgctatatgcaacgctaggcctagtgaggtaacgcgatctttgcatgccacgacattgacatgcacaggtatcgtgccgaagatcatcgcgtggtcagtgtgcacagcaacccatgattgcgacctgtttacctctgaggtcccaagaaagtaaagggtaccactcttgaaactggagagatcactagggtttgaaacagagaatgtggcgacctggtgagcaccgcatgagatgcttgggagcgtaggagacccccggccgaagacagggcttttgtaagccattgccagcgcttacccctggatgaatagctcacaagtgtgtagtaggtgcgccaggcattcgccgaacttgagtccgcgacaccggtgcattccagcgcggttaacccttagatggggggcacaaggtggtaacataaaggggggatcagccctaagggatccagtttaggggcacacaaggcatactgagaatgcttagtctcgcccacgaagaaaacccaccacccgtagggggccccttggcagcactactggatgggggtcataggtaattcggggcgggccatggcccaggttcactagagatcaagttgtagctccttgtcttccattggcttgcgaatagccggacatggtgtcccagagaacacagggcacttaaacaccacggttcgcaaaccgggctagcctctcgtatgaagtccacgacagcggcagagaaatctcaatacatcgcaattttgtgccccagaggttcttcacctttaatactacaagggacgcgagcataagcattgcatctcaatcgtatcaccaaatttgcctcttccacgcatagccgattttatcccctacatattgtgccaaggtgatccattcatagccagcctcctttgagtaggcatctgtggtccagatataggtaattagacattgtaca

SEQ ID NO: 550366 - DNA, 229 bp, Homo sapiens
gacaaatatctggtacactaaacccccacaacatgcaatttacccatgtaacaaactcgtatatgtaccccatgaacctaaaaataaaagtgggaaagaaaaaaaagtaaaaaactttggaggatgattaaaaaaaaaaagagaaaaggggtggaatcaaagaacacaagcttttctactattgggctcagggctctttcggaaatcaaaaccacctccttatactctg

SEQ ID NO: 550367 - DNA, 832 bp, Homo sapiens
  misc_feature (214)..(214): n is a, c, g, or t
aggttgcctcccgctctcagatggcacagggacctatcagatggcaggatttaatctggggagcaaattgccagactcatgcaaatggagttctcacaccgtatctagggacagaggcatctggatgcagaacgtcgtggcgttagtggtagtgcggcggaatcccgagggtggtgtgggggatgctccgttccgggcatgttggctgtctggntcctggtccttgacttcatgattttctgcctgttcttgagctctggccacgttttgtcgtggtaacgttgagcttcgtctccgaggttgtcgcggtccggtaccgttggttgcctgctcatttcagagggaccccggggactgccggatgagggtccagggtgccacctccgttggtccaggtcttgcccggttgtccctgtgcattgagtcttatacctggttggcacaaaagtccatgcagcttgtactacggtaatgacgactaccgcgtgatcacgtgccccatccatttcactagttccttcgccctaagaggacattggtcaaggatttgccacatcgctcgcggggaagtgaccagaaaggtcagcaaatttactggaactccagagcaaaccatacttacgcaggtggtcggtgtagacccatgtggcagtggtctaggcccaattcagggaccaggtccaacgaagccctggggagtccccccgggccgtcccctgaagaggttcccaggggggaggcttacactggccatttaggcttgtgagggtttacgctgtcgaaggttgtgactgtcacgaaagggcaggtcttccaggttgccgaaaaaagg

SEQ ID NO: 550368 - DNA, 286 bp, Homo sapiens
accttgtacctaccccttacttagtgcactaacttataacaaagcccatcttgcctacaacaaacgagacgctcaaatagctcattgcactactccttcaatcagccacatgccctcgctactaacagccattctcatccaaaccccctgaagctacaccggcgcagttcgttcttcataatcgcccaccggctatcgtcctctttactattctgcctggcgcactcgaactacgaacgctctctacagtcgcatcataatcctctctctaggaggctcaccgtct

SEQ ID NO: 550369 - DNA, 629 bp, Homo sapiens
caggctgatgcgcacccgctttggcattaatgctgcagcaagcatggttaagactgaagggaacacgattccttgcgggagtaagatagcaaggctacaaatgaagacctggcggctcatgccaggtcagggtaggcctcacactgaacgcttaacagaattcactgggttctaccggccatccaggtgtttttttctcgagcagctaaacaagcactggtcgccgtagtacaacatgttaaagcaaaatcccagcttgtcctgatccagatgctgactcagtgacccctgctccaccggcgctaactgcagctttgactgacgagaggctgatttcacaacttcctcctgatggcagaccctgaccacggactgctgctggctgttctagagaggctgggcactctgcagcattcacagctcctcctggaacctgctgaggacgcgtgctccgcacaagctcctgccctacccttcctcctctgaggtgcttccgggcctgtcaggctggccagcctgcaggctgcaaccctataaggataaggaatagtctcctttctaaatgtgcagatcttatgattcaccaattgagcacccgaggttaaaaccacacagtgtccttattacaa

SEQ ID NO: 550370 - DNA, 264 bp, Homo sapiens
cctgcgtacctgcttcacacgtcatctattttctgtcgaatatactcacttacccaccttattggctagtctggggcttctccaatcttacactcaactgaaaacagatctgcttataatacaccaatgatagaactagttatatataatctcagattctgccttgtcaagtacccgacggaacatttcttttaactgagcagactctatcttccagccgtcttttctctatcttctgcatcaatcaacttctgtatggtcatc

SEQ ID NO: 550371 - DNA, 353 bp, Homo sapiens
ggtcgacctagtccatgttctaggctctgggggtagaatggtgaacaagacagaaaaaaatggagctggccgggcgcggtggctcacacccgtaatcctagcactttgggaggccgaggtgggtggatcacttgaggtcaggagttcgagaccagcctggccaacatggcgaaaccccgactctactaaaagtacagaaattggctgggcatggcggcaggccctgtaatcccacctactcaggaggctgaggcaggataatctcttgaacccaggaggtggaggttgttgcagtgagccaataccacaccactgcattccagcctggatgacagagcgagactctgtctcaa

SEQ ID NO: 550372 - DNA, 282 bp, Homo sapiens
tgggtcgttctgtgagtggttcttcggtgggtgagtgagccccattgtgttgtggtgaatatgtatagggagcatagggctgtgactagtatgttgagtcctgttagtacgagagcgatatttgatcaggacaacgtggttactatcacatagagttctgccagcaggttaatatgtggggggtaacgcgaggttagcgaggcttgctagaagtcatcatgaggctattagtgggagcagagtttgaagtccttgatagaagattatgatgctactgtgagt

SEQ ID NO: 550373 - DNA, 402 bp, Homo sapiens
tatctgcagctggcttgctgtgtctccgtcacacagaggtttctcttttctattgcattgtcaggctgcgctcgtcctgagctttttagctctgcttcccatttatgctttggcttcgatcctgtgcatctctttgtgagtcccttcgtgtgactggttttacggtcagccaggttacttcttgaacaatcttgctggtttagaaatttcttctgctagagtaccctatttcatctctctcacgtactatatatctcgtagggcaggggcaaaatgctaccagtctctttgtaaagcatagcaagagccaactttattccagttcccaacaaattcctcatctccatctgagaccacctcagcctggacttcatttaccattatcactatcagcattttggt

SEQ ID NO: 550374 - DNA, 215 bp, Homo sapiens
tgactagcaggatccgtgggaatcctcctgctgctgtcagtggtcttctgaccccacagttgtagaaagagaaaagtgtgtgagagggtgcacatgtgtctgtgtgtgtctgcatgcatgtggctgggcatccatgtgtgcctgtgtgtgtatatgtagtctatttagtgtgactgtgtgtacatgtagtgcatacttatgcatgtagtgtacat

SEQ ID NO: 550375 - DNA, 431 bp, Homo sapiens
gtcactagtttatgtatttactatactttttactgttatttttgagtatactccttccaccaattaaaaaaagttaactgtaaaagagcctcacacaggtcctttaggaggtattctagaaggcattgttacagtaagatgacagctctctgtgtttattgtccctaaagaccttccagtgggacaaaaatgtagaggcagaagacagtgatattgatcttgaccctgtgtatgggcaggttaatgtgtgtatttgtatctttgtttttaactaaaaagtttaaaaaaagccccccccaaaatagaaaaaagcttataggttataaataaaatatttttatacagctgtattatgtattttatgctgttattacaaaagagtaaaaatttaaaaaattaaaaagtttataaagtaaaagtttacagttatt

SEQ ID NO: 550376 - DNA, 1231 bp, Homo sapiens
  misc_feature (292)..(292): n is a, c, g, or t
  misc_feature (1231)..(1231): n is a, c, g, or t
gccgagtcccggaggccagatgagcggacgcagccccacgcgcggggccttgcaggtggccgtgaacggtaaggcccggaaagaggcggtgctagactgctggctaaggaacttcctcaagttcagtggtaactcggagtcgctctctctttccagtgctgtggctgagtgcactggaaccgcacttctccaggctggcgttcagctgaacttcagaggatacctgcagtaacatggaactattaagcccgagagcaggtacttcatgaccaggaactcctcgaccactcantcagcgtattcgcgtgtagggggcctaggtacggttcctggcaagtggcattcagctcgtcactcagggtgccacgagcacggagcacgtcgcctgttctccgggtgaaaccgtcgggtctcgccggcaggcctatggtggggctgtccgagtcaaggtcggtgtggaggacctatggttggtgggatctggagcacctggtgtgaccgtgacctgagtctggctgagacggcgtcagttgtctaagtgcccatacctcaggtcggcgtggagcagctagcgtgtgtgcacgtggagcggaccattcttcggatccgagagctggccatccatctgcagcgaaatatcaacgagaactttgggcccaacacagagatgcatctagtccccattcttgccacagcatccaggaggagctggagaaggggactcctgagccaggggctctcaatgctgtgggtgagcggcacaattcggtgctcatgtcctgctctgtgcccatctgggggctgagcccaggcactcgtgggattggagctttgcctggagaaacccaggcctgcggcgtggggtggggccaatgatagagggtcacccttgggcgccctggggtggcagaactggtccaggtggtcttttgtgtcccccttgtggcgcctgttttgagaaccctgggtaggccccgttgtccttggctgcgcaaacactccctgtgtggctgtggtgtcgcctctgtcacacacagggtgggggtcttcagctgcgcaggcagcccccttgtgttgttaccaccgttgggtgctgtcctgtctactcagccgagccccgcgtggggcgcatcgaactgcttgtttcgggctagttctagtctctgcgggctggcactctgtcgctgcgtcgtttcactgagtccagttgaggtcttcctactagtgtggn

SEQ ID NO: 550377 - DNA, 101 bp, Homo sapiens
aggttgactagaggatccccaaaactcccgtgctgaagtagtgggatcgcgcctgtgactagccactgcactccagcctgggcaacatagctgagacccct

SEQ ID NO: 550378 - DNA, 449 bp, Homo sapiens
tctcgtctatgggtagaagtggtacacaaaaggatgcccagcaagccccatcaacaccttgaacagctacagacctcacccatggagtctcatgtagtcctcacaggagccaagtcccagctgagggacctgcctgaagtccacatagccgtgcttccccaagaaaaagagcaaccagtgtgacctgccctctgtggcctgcgcagctactgcgctatgccgtcttggaaatggagctttggctggagtgtctcttgctctgggagtgcatagctatgacactccatcactaaggctaagctaccgttgaaccacccgaacccagtggcccgacatccccaagccgagctgccagcaactgttccactcttccccatgggcccaggtgaaggtagagtcacttaatctacctttcaccctccccttcaggccagtgctgaagcagtacc

SEQ ID NO: 550379 - DNA, 101 bp, Homo sapiens
tacgagcttcagtggaggagaccgcaagttgagtggaggaggcggcggtggggccccggaccagtgtgcctccatggcaggctctgaagagctggggctcc

SEQ ID NO: 550380 - DNA, 580 bp, Homo sapiens
ctaaaacaatgtggcctctgctcgcttgtccagcttcctttcctcccagactccattcctgctctaacttcacaagaattccctccttcccccaaaatgacagattcttccagcctcaaggcctttggcatgcttaccctcttgccaggaactcaccccttttcctagttcactcttgtggttctctgagtttctgcttcgttgtacccctcaaggagccttaggagtttagctcgcggtaggaactccgcgctccaagagcccccacaccagatcaaaactggatcatccccaccccatacacacaccctcttaggactggtggcactcactcaaggcctgaccgccaaggccctgctcaggaccttatacactcagcagcaccaacatgggtcattagtggcttcatgtaatgactgttcgggaccagcctggactttgacaacctcaaggtcccaggcctcgcttttcctttgcggcccggttttcttgggggcctcacactgatttctggacttacactaagaggggttagccttttcccgggacccgtgttggagttttcgcgttcaaacggatc

SEQ ID NO: 550381 - DNA, 288 bp, Homo sapiens
aacggatcccctactgtacgatgggcgtaaactacagcggacaacttgcacggcgctgtcgtacttacagcggtcactatcactatacacgttggaggcggtcacaactctctcggtacctccaaattatagagatataatggtccgtcatatctggtataaggggcattttaaaagcaattatatggtcctcccctattttaagacgtgaatgtctcagcgaggtgtaaagtatgtacgccggcgttgcaaggtgagtgtgtcggtgtgctatgaaagcagcaaaga

SEQ ID NO: 550382 - DNA, 535 bp, Homo sapiens
  misc_feature (21)..(21): n is a, c, g, or t
  misc_feature (168)..(168): n is a, c, g, or t
  misc_feature (425)..(425): n is a, c, g, or t
  misc_feature (468)..(468): n is a, c, g, or t
  misc_feature (529)..(529): n is a, c, g, or t
ggggactgaacacagtcaggntcttctaaacactggcagggacctcccccacagccacccccacagggttctctgtttcccaagtcctgatggattcaggcaagaccttcacacattcacccactacctgctggagaggagggtcatgaggcagcctgtggtgcccanctcagtgtgacacactgccaatgtgccgcctcccccagcctctgatggggccgggccttgaccacgtgacaggctcaagctgccgtgcacatcccccaggaaaggggaagagctgctaaggtgtagaagtgaaaaaaaaaataagaaatgataatgtggaggttaaaaagatgattatttggtttttaaaaaaataaaaaaaaaaagaaagaaagagggaaaagggtgattgaaggtgggggaggagagggaatatnatatgtaaagtgattttaaagaaaaaggaaaataatagtatanaatggaaaaaaaatgtaaataagaaaggtaaggataagggtggagatggaatgaaattacnaaaaaa

SEQ ID NO: 550383 - DNA, 768 bp, Homo sapiens
aatatttatgatttaagtcaaggtagacctaaaatatcaaaaccaaagtgtattactgtaaagagaattctgtagcaaattgaattagtatatagtatgtatttttgtatgtgtgacttcatctttgtggtagatgtattgaatttagttactagttttcagagcattctcttagttttgtcaaatacattaaatctctaaatgtttttcttctttcctaaaacgtgatctatctacttggacttttcatgaagaccctataaggcagctatagaagttagagtatctgctctattggattgtctagcagaagttcgcgtttgcactgtacatctgctgcgtgcaaatctcgcgtcggtatattactactaattctatttaatattccgcttatatattactgtgtaggaaatgaatttattaattaaattaggatgtttgtaatctgttcatgagctactgagagacttataagtagtcgataatatgggcagtcatcttaaagtatatcattgattccataagaaatcatctccaaatgcaaagagttttcagtacttatgtcagtatcctagaggaggtgacgtataactctacggacaagctcggaagtatgttacaatgtactgtgaattctgtctataaagatatttataacttgtctttaagtaaattgtaattacaggccaggcatgagccaccatgcctcgccctttttcacgttacttgatagtgtcctctgataccccacgagcgctcatctctgac

SEQ ID NO: 550384 - DNA, 1365 bp, Homo sapiens
agcgggttggagcgcctgcgcagcttttccgcacgcgcctcgccggacgcgcggctctctcagcgtcccaagagccacatttctcgccagtacgatgcgtgcagcaggttttccggtatattccgcattcccattcagtcgtcagcatcccgatactcagttttatagccacgtgcttgccggatttattactatccgttcatcccttcatgcattcgtgatgcctggcgacacaacagaacggcatgacaacacgcggactgattagaccgacctacacttcctatccgggaacggaccctatctgtgccggacggacgttcgcggacacgctgatgatccaacgacacgcaggtggacgcccaatcagacgcggggatgaacgcttgactgcatggccaggatgccacggcggtcgctccgaaggcaagctcagcacccgacgagccgcggatacaacacaggcaactgcgtgggaactggcactggatagccgggaatacccaatcagccgcagacacagggctggcgatccaagagaccagagccaggacccacgaacacgacactacatccacgggccgccccatacgctaccagacttaccccccagcagcaaccaccggccgtggcctatgggccaagcgcgggcacatgaacttcggatggggacccccccaacaaaacaccaccaggacataaccaggcctggctccgtgcagccactgacaactccacgccttaccacttcaccccccatttcgcagacacactctcaccgcctcctccctcgcaaccccctccaccccgcagacctcactggccgtctccaacccaccagcggaccccagccgacaccagcggccccccttggaacccccacaacgactccccctgggaataaccccgggtgcggcacagaaaccacaaccatagcacctcgtccactccttaccagacgcacatacaaccattcttgggccagccggccccactaaacacaccctatggcacgcccacacttgtgaccacacccggcaccagaactggcaccacccgcgcgagacacagtcccaagcaatattgccggcacaacacccccaccacgccacccctggccaacacaccaccagcgcccccaaccgatgcgccacacaccacactccgcggcgatagcaaccacccccagcacacgacacaccgccacgcgcccgcacccaacgcaacaccccgccccacgcccaccaaccatccaccctaccgcgcacaacaaccgagcctaccacagaacgcaccaaccgccgcaacccgaacgagcccgacaccaaacatacgcagcccaacactcaccccagccgacctgcc

SEQ ID NO: 550385 - DNA, 324 bp, Homo sapiens
cacagtatatctgcatgcatgtgtgtctctctggctctccatgtatagaaatacccgcgcctctatctgcactcagtgtgcaccaactgagccgatcgtgtgacctgccgcccgctccggcaccaatgacctgtgccccagaacccctttcatctatcacaccaacttctgctctccagaagtaaccagttctgaccgtgaacaccagacagtactagtagaatgggtatttactagcgttgctgatacatctgtggcctcacacggtatttactcctgtgttactggctccattctcgtcgccatttcgtcagtggcaggttt

SEQ ID NO: 550386 - DNA, 611 bp, Homo sapiens
  misc_feature (593)..(593): n is a, c, g, or t
gttaggaaccactatgggagaccgatggccttgggaagcccgagaattggtgcctactgatccagttcctgacataattccagtccagaagacttctgggtcttgaaaacctctattactgaacaatactgcatagctagggaatgaaaagacttcaccatccctgtaggaaggctcaattgtctaggacagaggtctaggacagaggctgtataacggcacaacagggacagtcacctggtggggtctaaaccatactgaaaagtatgtaaatttccttcattacattccttcagtaaatttcctaaattacagattgcttggcccatccacaatctcatcgagactggacggctcctactggactatactggatatgtaggcacagagtctacactcagttacctgatcaatggccaggtagttgtgtcattggcaccagtaagccatccgttttcctactgcccgttagaacaggtgagcctcttaggtttccctgtctatgtctcccgagaaaagaggagcatagctataggaaattgggaaaggtggatgagtggcccccccccggaaagggatccacacagtactantaggccctgcccacatgg

SEQ ID NO: 550387 - DNA, 1003 bp, Homo sapiens
  misc_feature (1003)..(1003): n is a, c, g, or t
gttacaacgttgctaaagaagagaggggacgaactttaatggactgtgaatttcacaaaaaaaaaaacagacctgtcaacttgaccttttacagaattgctttacaaaaaaacacacaacccccgggtgtggtcccacaacccaccctgtccaccttatccactctggggtcattcaacacagggaaacatcaagctcaattatgtcacttttgtgtgtgcgaccacaatatttctggcacaaacactcctggcatcaaaacctgtctgaccttttcacgggcgacaattgtggaacacaaccaattcgaccaaacaccgtcgtaccaagaatgctaacaggactcactctgtctcgattctccaccagatgtttcataaacaagcgagtcacccgtgagtgcctcatacatagaatcccactcttcaatacgccagtgagttatcaacattatgctacgtgagagtctcaactctttgctcaagtgagggtcgtccgccaacaaaccaacatcacatatatactaccaagtggtgtggtgttacctcactataaaagatagaacaggtcattgagacgaaccacataacaccatcctgcaggcgagcacatacttactactaagagcaacaacagctgtgtgtgagatatactcaacgaatatgaacagacaacaaccaacatcatgtcttgatgtcctactcctgcgaacaaacgacaaacacgatgtcacacaatcacgactcgtgatgactgatccccagtcggagacagacaatcctactcctcaccgatcatgaggagcacagccgacactaccgatacaacgatcgcatatttaaagcaacaacacgaggagggcacaaccgctcctcacacagagacagcaactctcgagatgcggagctactcaccatgacccacacttattatacacacaatgacatggggtgacttgaccacgcacacacaataaatatatctcattaggacgagtggaacn

SEQ ID NO: 550388 - DNA, 449 bp, Homo sapiens
cacccaggcgcacttctgctgttcctgccaccgctgctgctgctgcttgacgtccccacggctgcggcgcaggcatcccctctgcaagcgttagacttctttgggcatgggccaccacttgactacaacacaggccatctatacctgcgggggcccctgaagaagtcccatgcaccgcttgtccatgtgaccctctactattaagcactgtgcggtggctgccaagccttcctgatccgggagctcttcccaacatggcttttggtccttcagatcctcaatgtcacgctagtgccctacggaaacgcacaggaaacaaaatgtccgtggcaggtgggagttcaagtgccatcatggagaacaggagtgcaaattccacaaggtgaagacctgcgtgttggataaactttacatggagctagccttcctgaccattgtctgcatcgaaa

SEQ ID NO: 550389 - DNA, 675 bp, Homo sapiens
ggcatttaagatgattttctttgcaggatgctgtccacagaaatatcagtcttacatgccggtgtccggtttcataaacaagccaaagcccatgaaacctctcacgctctcgcttgcacgggtggacaggggcactcggtgcaggggctttccggtgctagccaaaggaattcattcggcacgaaggaaactatttgtacagaggtgagtggtgtccttggaaaccgggtggaatcgtagtgttctcaccgctggttcctgtgtgagccagcactttggcaagcttctcccagcgagtgctttccaattagctattcatcctttgtaaccaaaggggatcccatgtttcacgacgttccgtgggattctcgaggggcatagcgtggaggtgtggctggtggctgcagggatccagtgcttgtccattactttctggactggaatagattgggcgtactttagggaattggccagtttgccagggggcccttccacttaaaggaattgcccaattctccacatggccccttttgtcccgttcaggaagccttattttaacttgaaccccttggggtcctggggcattttaggcagagatcgctccctttaaacccaaagaagatagggcccaaactcggtttgccatctattctctcgttctagggcaaaaattgg

SEQ ID NO: 550390 - DNA, 116 bp, Homo sapiens
  misc_feature (70)..(70): n is a, c, g, or t
gcatctaaagtgatgtttggatgtaagtgaaatattagttggcggatgaagcagatagtgacggagaagnttgagctaatatgacgtgaagggggtccagtggaagcctgtgctac

SEQ ID NO: 550391 - DNA, 419 bp, Homo sapiens
  misc_feature (8)..(8): n is a, c, g, or t
  misc_feature (19)..(19): n is a, c, g, or t
  misc_feature (25)..(25): n is a, c, g, or t
  misc_feature (41)..(41): n is a, c, g, or t
  misc_feature (46)..(46): n is a, c, g, or t
  misc_feature (56)..(56): n is a, c, g, or t
  misc_feature (61)..(61): n is a, c, g, or t
  misc_feature (78)..(78): n is a, c, g, or t
  misc_feature (80)..(80): n is a, c, g, or t
  misc_feature (87)..(87): n is a, c, g, or t
  misc_feature (90)..(90): n is a, c, g, or t
  misc_feature (105)..(105): n is a, c, g, or t
  misc_feature (109)..(109): n is a, c, g, or t
  misc_feature (111)..(111): n is a, c, g, or t
  misc_feature (127)..(127): n is a, c, g, or t
  misc_feature (143)..(143): n is a, c, g, or t
  misc_feature (151)..(151): n is a, c, g, or t
  misc_feature (159)..(159): n is a, c, g, or t
  misc_feature (167)..(167): n is a, c, g, or t
  misc_feature (175)..(175): n is a, c, g, or t
  misc_feature (190)..(190): n is a, c, g, or t
  misc_feature (204)..(204): n is a, c, g, or t
  misc_feature (217)..(217): n is a, c, g, or t
  misc_feature (237)..(237): n is a, c, g, or t
  misc_feature (248)..(248): n is a, c, g, or t
  misc_feature (257)..(257): n is a, c, g, or t
  misc_feature (264)..(264): n is a, c, g, or t
  misc_feature (303)..(303): n is a, c, g, or t
  misc_feature (320)..(320): n is a, c, g, or t
  misc_feature (343)..(343): n is a, c, g, or t
  misc_feature (348)..(348): n is a, c, g, or t
  misc_feature (389)..(389): n is a, c, g, or t
  misc_feature (417)..(417): n is a, c, g, or t
aagaagcngagggctcttnggagcngcaaggggccaagtgncaaanaggatgggcntgagntgggaaagggtggcatngnggaccanctngcattctcctgtggnaagncnagtgcctttgctcctntgtcctgcctctactncaaccccnactacctntgggaacnacagctcnaaaaggggaagaggnagctgggccaaacngaggtaacagccnctccaagtcctgccctgccnccctcggcctntgtcctggnagccccncccctttcctcctgtacataatgtaactggcttgttggnaattttaatttatcttnactcagcacaaagggcccccganactcnactcctgctgcccctgagctgagaagagtcattattggagngttttgtttttaaaacatttctttttcngt

SEQ ID NO: 550392 - DNA, 129 bp, Homo sapiens
gtggtgtactacttggcttgggctctggtgatgaccctggaatctctgcgagcagttctggattgtgggcggatgtcatggagaggactctggtacttgctgcttccttcagtgcgaagggcctctgcc

SEQ ID NO: 550393 - DNA, 295 bp, Homo sapiens
tgctcgtgatagtgagtgagttctcccaagattgatggtttacagggggctcttccccttaccctcctcactctctcgcacctgccgccatgatctgtttcctgaggcctccccagccatgtggaactgagtcaattcaacctcttttctttataaactgcccaatcttgagcagttctttataacagtgtgacaacagactaatacacccacctactcgggaggctgaggcaggaggattgcttgagcccagcagtttgagactgcagtgagccatgatcatgccactgcactc

SEQ ID NO: 550394 - DNA, 175 bp, Homo sapiens
aaggacagcacgcttgatctgtcacgaacacatttagcacacatagcagcaccatagagccctgactgacatgtatactctgttaatggaccaatctcataagaactttaggtcttacagcacgaacccctacgaagtctgcctgggaacacaccaaatgcagatttaaggtgct

SEQ ID NO: 550395 - DNA, 100 bp, Homo sapiens
tgctaagtgtctggtagtggaattaaaccagattggacataaaaatcacctctggacaaaggcaaagaatggggactttcactttttgctatcatatgtt

SEQ ID NO: 550396 - DNA, 339 bp, Homo sapiens
  misc_feature (279)..(279): n is a, c, g, or t
  misc_feature (322)..(322): n is a, c, g, or t
tgaacttcgcgcccctggagcgggagatgcctgtgcagttccaggtggtggagctgccgagcggccaccacctgtgcaaagtcagagctctgaataaaggggatgccaactctgaagtcactgtgtactaccagtcaggtacgaggagtctgagagaatatactcttatggagctgcttgtgatgcacatggaagagccctgctttgacttccttcgcaccaagcagacccttgggtaccatgtctacccaacctgtaggaacacatctggaattctanggattttctgtaactgttgggactcaggcaaccaaatacaacntccggaaacttgtttga

SEQ ID NO: 550397 - DNA, 110 bp, Homo sapiens
acgacaacactcacactcttcacgacaacggtacgacgccgacgggggactcctcgacgacgtcgacccggcacgggactgcaacgctgtggcacctgggccggtcgttt

SEQ ID NO: 550398 - DNA, 442 bp, Homo sapiens
atgtgggcgacctagaggaccctacctaaatggctgtccatattccctatgaccttaccacaagatgtccagagcatattcagcagtccgttgcagctgagcctaatttttgctggctcatccttgtgcctttgacagtaaggttaattgatagacccaccatctcttgcactcttgcttcgggagcacgttgcattaactatttcgagtctctatattgtccaagaaaagtagaactaataaatttactttccctttttctgtcaccttatgtcctctaccattttctccttcctcccttcccttattttctccttttcgtaccctgcgtcctccctgatttacctttcgtttcttctttatataatcccattctctgttacttgactcagtgctcccttcctctcctctccttctagtggatgcatacagccatttaggt

SEQ ID NO: 550399 - DNA, 508 bp, Homo sapiens
tgagagtccagttcagagttctggagtacgtgtagcagcacaccggctaattgtttgttggtatttgaagtagagacaggttgcatcaggtgggccaggctggtctggaactccggacctcgggtgatccacccatttgggcctctcaggtgcggggattacgggcgtcagccatggtgcccgacccctaaaaatttggctttttaaaacagtgatttttcacagaagtgttaaagatagtgctatgggacaaaactataacttctactcgggaagaggtgacttcccaaagtagggtgatggagggggagtagataaggcgttaggtagaagtagaggttaagggaggtgtgatggtgggttatgatggtggggagatagatgaggctatggtttttggtgaatccttcgataatggcccattggggcaaaaaagcgggttagggggggcaggcctcctagggaagaggagggtggatggaatcaaggggtgtaagtcatgtcagct

SEQ ID NO: 550400 - DNA, 423 bp, Homo sapiens
  misc_feature (318)..(318): n is a, c, g, or t
  misc_feature (396)..(396): n is a, c, g, or t
aaatttcatgtcgaattgtaatttccacagttcccacctttcatgggagaaacccagtgggaggtgatgaattatgggggcaggtctttcctgcactgttctcgtgatagtgaataaatctcatgagatcagatggttttaaaaaatgagtgtttccctgcacaagttctcactttgccagctgccatccatggtaagatgtgacttgctcctccttgccttccaccatgattgtgaggcctccccagccatgtgaaactgtatgtccattaaacctaattttcttcgagtctcgtagatgtctttgtcagcactatnaaaaatgggacttaattacaggagggctgtttgttcttactttaacttcgtttcaggaaaaatggcagcttttggatnaaaattttggaactaaaattgggagat

SEQ ID NO: 550401 - DNA, 332 bp, Homo sapiens
gccattctggagaatgaagactggaagagatgcctcgggtttcatgtcccactgcattgccatcttgaagatttgtcacactctgacagagaagcttgttgacatgacattggctctggggcaagatgaagacttcagccagtgtcagctacatcattgtggtggccaagcggatcagccccagggtggatgatgttgtgaagtcgatgtacctccgttggacccaaactcctggacgcagggacgattgccctgctcctgtctgtcagtacctggtgctggtgacaaggaatgcctgccatttatcgggaggcctggactggatttaccag

SEQ ID NO: 550402 - DNA, 1164 bp, Homo sapiens
  misc_feature (621)..(621): n is a, c, g, or t
agcggaaggcagcggatccacgggctggcacaggtaaggagagtagatcccctacccgcgttcgtcgtccctcgcgccgctatcgtgggcgctaagcgggagcaagttggtgacggcggtgtcgacctggggtggcgctgtgcgtgctggcacacgtgtggaggcggcgttagggggagacgcatggcgtctctcctggttggcggtcccgtggggacatctcgcgcgcagatggccctggttgggcgtcgaatggcactggtgtcaggtgggtgcacggagcgatgagcccgtcgtcaccggagagtgcgtggagagcttcttcgtggttactccggtaaggagactcctcgtaagctgcgtgcaggcggactaggctggccaggacggataggacgagatagacgtgaagtcagggaattggccgggacctacgcgacaccttgtaccagtcctgacccccaatgtggtacccagctgttagtcctttcgaggagacgctactcgccaagtgggccattgatgcgttcttggcaatgggacactagtcgggagttgggagcaatcgcgtatctgttaaaaaactcggttagcattaactagcatttacttcacgtacanttttccacagcgaggatggacgccacaatatgatagaacacgagagttatttagtagcatacacgcgtgttggcatcgacaaacagttcgtcgagaaagcaggaatattgcggggaacggcctccgaaagggcgcatttggttcgaggtaccttggctgacagccaattatcctgtggccgccggcactccttagtttggcgataccaaagggttggttccaagccggtttggctaccaaaaatttttgctatgccactacataacaggtacttggggaacgcgaaagcctggaaggaacgcgttggttgaaattcgagggtggtccccaatactaggacgaatgtgcttgggcaattggaggatttccggggacatgtgaggggcaccaaggaaaggaaaagggaaccagggggttcgaatagtggccacaaaaggttttaacttgtatgggccttgtggggcatcctttggtaaccttttttgaattctgggtaaacaaaaaaaggcaaggttttttatagaaaggaaaccgaacgcatta

SEQ ID NO: 550403 - DNA, 196 bp, Homo sapiens
agaaagggaagggaaggaacaatcaagtagtccatcagacatcaccaggtcccacagttaggacaatcaactcttgtgcacctgatttttcccactccttacgcctgtcattaccgtgtgagatgcccccattatccctctaataaatgcccttttttcatatagttagtatgacgcggtgtttctagctcctact

SEQ ID NO: 550404 - DNA, 167 bp, Homo sapiens
cctggcgacctggatgtctccgaatgttaagaggggcacagatagtccacaactattgttcacaggatcacatacatcacaatattatacagtccttttagaccatatggatcagagccaccaacgatgatataacttataccattcagaagcacacactcctagca

SEQ ID NO: 550405 - DNA, 101 bp, Homo sapiens
gcaggcggtagagcagctggcgataggttcatcgttttcgcggggccgtgcatgaaattccagaggatgtgatcgccctggatgtcgacgatcactagcag

SEQ ID NO: 550406 - DNA, 212 bp, Homo sapiens
ctcctgcccatgttgggctccttcatgttcagagtaacggtcccaagcagtgctgttgtccctgtgtgcccgggtacgtggtccagattctctttattcatcttctgtagccaagttggacagtgtgattcacatgagcggtttatggaactaagagtatgtgttaccagtctccccaggggaaacggcttggttcctgtatgccggagatg

SEQ ID NO: 550407 - DNA, 401 bp, Homo sapiens
  misc_feature (11)..(11): n is a, c, g, or t
  misc_feature (107)..(107): n is a, c, g, or t
gggaacttggnagttcagggggcttccacccatttcccagaactgatcaaagtaagcttactatatctaaactgtaaaacaatatagtttctcctgaacacctgctnttccttctgggagtctggaattttggtatgtgccaggcagagactacctttgtgaccagctcccagtaaaaaccccaggcactcagtctctaacaagcttttctggttgacagtgtttcacaagtgctgttacaactggttgctgggagaattaagctcatcctctgtgattccactggcggaggattcttggaagcttgcacttagtttcccctgacttcaccccatgtgtcttttttcctttgctgattttgttttgtatcctttcactgtaataaatcatggccgtgagca

SEQ ID NO: 550408 - DNA, 363 bp, Homo sapiens
  misc_feature (255)..(255): n is a, c, g, or t
tgactcccattttgaagggagtctccatgtggtccgagtgaggtgagacgcccttcgtcctggtgctcctgatcatcttgatagggtcttctggaactcctgtccccttagtcatgagatcagaaagtccaatatttcctttcacctgtgcaggggaggggggatttatttctgaaaggaaaatatagagacagatcctctacagtcatacttttaatcttctgatgaagacactgtccgatattcccttgcctnatgagctcttgcagcagtcgccgtttccactactttaagagaaactacaggtcttgataaagaacgagactgattcattaaaagctttagtcaacttgaaaaaaaaaa

SEQ ID NO: 550409 - DNA, 292 bp, Homo sapiens
ctgctagaaggaaggcagtgactaggctagtgccacacccggactcgcggagaactagtaggctcccgtcaggtccgtttgtataaactgatcgaaggggagggcaaccggcgagggtgaattctagtattcctcatcatacgtggaagtacatttggcttgaggacgggccaaggaaagtgtcattcttgatgccggaagactctgttgaggaccaggaaagccagcatactcgcagagactcctccccagtgctccataatatcatcctcctctttcgaggggactctca

SEQ ID NO: 550410 - DNA, 394 bp, Homo sapiens
cagttccatggccaggtgtaaagagaaattataaaatgaagatgtaatctgtaatactactaccttcacgccacaagataacagtttctatattccctgccggatcgttggcccacaaatacttaaaaattatatttatttaatacatttatttttatgtttatttaattttactgtgttttgaaattgaatttgtcagtaagggacacagcattactctaaatattaacaatttctagtggtggaattttaggtctccacaaaaagtctgagaaagacatttggggaatggggagatcttttcagaattttctgtcaaactaatacaaggccagtgtccacatatagctaatcttttatgatttaaatcataggatcttcagttgtagaaggg

SEQ ID NO: 550411 - DNA, 150 bp, Homo sapiens
catggttatgagccagctgagggctaagacgatggtccctaccctcagcattctgcatgaagtcatggagctctgcgcattcacctgcgtcattgacttcgcattacgcatagttttaatatagtgcttcgcgttgttgtccacttgttg

SEQ ID NO: 550412 - DNA, 150 bp, Homo sapiens
gttctcctctttgcaggatagtctcgaatcctcaactcacccctatcacggaaatctcgatcatagccatgctctcgatttcttgcgtctgctccatctatcatcccgatatctatccaaaggtgggagaggtgggaggggcggtaaagg

SEQ ID NO: 550413 - DNA, 399 bp, Homo sapiens
  misc_feature (35)..(35): n is a, c, g, or t
atacgaactgagttcggtaccgtctcatcttctgnaatcccgagggaggtgtgacatcatcatcatctctggccggaaagaagagtgtgaggctgccagggtagatctctgggatggcagttggttccgtgtcatccattgaacgttgaggtgacctttgaccttcacacgttacgttattgggcagaaaggaagtgggatccgcaagatgatggatgagtttgaggtgaacatacatgtcccggcacctgagctgcagtctgacatcatagccatcacgggcctcgctgcaaatttggaccgggccaaggctggactgctggagcgtgtgaaggagccacaggccgagcaggaggaccgggctttaaggagttttaagctgagtgtcactgtagaccc

SEQ ID NO: 550414 - DNA, 119 bp, Homo sapiens
gatcacatcgagtctgtggaggaaccccggaggccacattatcatatgaaagaggcgaggcgacatgcgagtgctggagaggaaggccggacgccacatttcaatggaagaggcaggga

SEQ ID NO: 550415 - DNA, 396 bp, Homo sapiens
ccattgcagtttaataaattctgatactattgatacaataccattgcaatttaataaactatattgagttaggctggatcaataaggctgtataaaaaggagcaaggccggcgccgggtgcagcagctcacgcctgtaatcccagcactttgggaggccgaggcgggtggatcactaggtcaagagttcgagaccagcctgaccaacatactgaaaccctgtctctactaaaaatacaaaaattagctgggtgtagtggcgcgcgtctgtaatcccagctacttgggaggctggggcaggagaatcacttgaacctgggaggcagaggttgcagtgagccgagatcgcaccactgcgttccagcttgggtgacggggcgagactccgtctccaaaa

SEQ ID NO: 550416 - DNA, 333 bp, Homo sapiens
accggacggctttttgcccaatatggccattatcgaagaattcacaaaaaaacaatagcctcatccatcccaccatcatagccacgagtggacctccattaacctctacttctacctagcgcctaatctactccacctcaatcacactactccccatatctaacaacgtaaaaataaaatgacagtttgaacatacaaaacccaccgcattcctactactcaacttaaactccagcgggacgaccctactactatctcgcacctgaaacaagctaacatgactaacacccttaattccatccaccctcctcatcctaggaggcctggcccccg

SEQ ID NO: 550417 - DNA, 868 bp, Homo sapiens
atcatccttcaaaaaaaatgcaaaccaagatttcactttctaccctgagtgcgattgcaactccaagaattatagagcttgcccacccaaggatcaagttagagggtctgtgctatgaaagacaaagaagtgaactgcccatccgtcctgtacctcctgctgccatgatagctaaacctagcccccgaacaatagctctagcgaagtccaagtctgttcatcaagattatctacctgaccgtgatgcccattggccagtatcttatgctactactcattccaaagcatcacctaggattcaggaactagctaatccaaataagagaggggtaataccacatagcagttttgaacttgagtttggaatcagatagaacctgaagttgtctctgtcatggattatttaccaggtatgtgatcttaaacaaatttcctaactccctgtgctgcagtttctttatgtagaaaatgggttcctgcagcattcttgtaaagattagatgataaaatgtatatataaagtatatatttgaaacaaaaatttttatttagaaatttagcttgtggctaggcacagtggctcatgcctgtaatcctagcactttggaggccgaggcagatggatcacgaggtcaggggttcaagaccagctgaccaacatggtgaaacccgtctctattaaaaatacaaaatagctggggggtggtccacctgtaccccgttatcaggaggtgggcggggatccatgaccgggggaggggctgagccggatggcctgtccccggggagagaccggaaaaaaaaaaattgggggccggaataaatggggggaaaaggacgaggcaggtcaacgggcaaagtatagacg

SEQ ID NO: 550418 - DNA, 435 bp, Homo sapiens
atcttgaggtagtgaatgggtctcatgagatctgatggttttaaaaatgggagtttccctgcacagtttctctcttttgcctgctgccattcatgtaagacgtgacttgctcctccttgccttctgccatgattgtgaggcttcccctgccatgtggagttgtaactacaattaaacctcttctgtaaattgcccagtcttaggtatgtctttatcagtagtgaaaatggactaatataccatatacaaaaattaatgcaaaacgaatcaaagacctaaatgtaagaggtagtatgttataaacatactagaagaaaacttgggactaaacaatagtttcttagatatgacaccaaaagcataaatgaccaaaggaaaaataggtaaattgggtttcatcagaattaaagacttttgtgctaaaaatgataccct

SEQ ID NO: 550419 - DNA, 157 bp, Homo sapiens
  misc_feature (15)..(15): n is a, c, g, or t
aatagatggggttgntatcagagcagtagctatagaagtaagtgatcagtgagcctgaagacaacaatagaaaatatcctaaatgaaaaataaaaagtaaaaatacttgatacaaagtgaacctgagggacgaagatggctgatgggagaagactgg

SEQ ID NO: 550420 - DNA, 1328 bp, Homo sapiens
  misc_feature (886)..(886): n is a, c, g, or t
  misc_feature (995)..(995): n is a, c, g, or t
  misc_feature (1041)..(1041): n is a, c, g, or t
cgcactgtggtcgatgaaatgccatgtcaacacgtactgtggaacaacgtgtccgctgcaggtggaagacttctacttagtagtgatggtcgattgaatggcacagttcgctcgaatgctattggagatcgaaatgtcgcgaggcaatggaccagttcaccactcatggtaggagaatcaaattcaggctagtgatgccaggacttggacgagtgccgcatagacaaagatgtagtaggttgaccgtgacatctgagagtaatatgtgcgcatgggggcatgagctctatacaacagcattcggggaagtgaacacaacgtaactttatatgacagatggaataggctttactgaagaaattcctgtggctctcaggaaagtagttgcaaggctgtgacccgaaaaaactcagtctagtgagcatcagttctaaaagggacatagagttgtgatgagtgcttattgcaacaagaacgaagtacaccgaggaaacgattaacaagaagccattgtcgcccacggtagtcttcttgaattactgaccgtaactgtttgtatatttaactggacgcaacaccactgttcgtcattatggatagtcaaccgctacccccaggggcatgccatagctgcatatggccgtgaaaggaactcgtaagacccagaagtttgtctggaacacgtcggcacacttggaggtgcccatcatgcaggcttgtgggagacggatgaagtttcacagcacaaccaacctgtttcctccctgttgttgcacgttgccctcttacatggacaaggtgttaaacacagtcctaccctggtggttgccacgcagtcgggacacatgcgctctaattcaattaaactagggttcattcaccatgntcccgaaaccccggtaactacatctcaaaaacggggggctattcatttggacattctcgaacgctgacgagggatgcccaagcacggcggtaaacctgggttaataggngcaatgcggaggaaaacaagccagctagggggcatggggcagacanaaccgtgagcatggccttgtcccgtgcacggccattactaaacatggaacaggctcacatacatcagagctcgggcagcagcgggctcaaaaacgcaaggagaccgccgactacataaaacggagaccaacagcacgcgagagaaagagataaagccagcggaacggcgcagcacatagagggtcaacaaagcgacacaaaggacaaaacaagaggcaagagagcggcccacgagcggaacacgacgcggcgcaccaacgcctccgcgagcacagacacaacagccg

SEQ ID NO: 550421 - DNA, 766 bp, Homo sapiens
gaactcggtggtggccactggcagaccagattcgctcgtactcgtgcgcctcgcttccgcttttcctccgcaaccatgttgacaaacccgatatggtgagatcgagaaattggataagtcgaaactgaagaagacagagaggcaagagaaaaatccaggtgccttccaaagaaaggattggaccaggagaagcaagcaggggaatcgttaatgaggcgtgggcggccaaattatgcatgtgtacatttccaacaagcatgggccttctatattaacttcttttaagctgtaaaaccttgtgtaaggatgcacaagaggtgggatcaacgttttaaatgactgtgtctgcccttttcacattcaaagaacttagtgaccaagcgaagggcggggccttggcttttcccatctgtcctatctatctggaggggcaggggacaggaaaaggacttgtgcttgtggggtgaagggaagaagttggggcttgacaaaagttgcggtgtggaaacggaccaggtgacaacattctacgagtaaagacaccaaaggtgtgacccaaaatggggtggtccccttggcagggctggctaagtggccggctttcaacatccagaagtgacccaatttctcgactcggggctcacacagtgccattcacattacgtgtggaagtgcaccacacttttttatcatgtttgccgtcttcaccgaggttttacaaaaccttccaaagcacaacgaccaaccttaacaaacacacacacgc

SEQ ID NO: 550422 - DNA, 152 bp, Homo sapiens
tatgtaagggagtcagggctgagtaggggtagtgttttcacggcggatactgcctccaatgaaagggctgtaggcattgtccgtgaaactagtagatctatgtcgagcttcagccttgcatgctagccagatcggaattatggtgaggggtc

SEQ ID NO: 550423 - DNA, 154 bp, Homo sapiens
  misc_feature (71)..(72): n is a, c, g, or t
gcttcaagcataagggagagctctggacagtttgagcagcatttttagagcctctggttacacttttcatnntttgttaactttcttcatttttacagaggattagtttaccaacggaggctttttaacctggtgaaagagagcctcttcattt

SEQ ID NO: 550424 - DNA, 572 bp, Homo sapiens
ctaagttagatcttagaggtaaatcatccccatgcttacatataactaggatatttgactccatctatccgtctataaaaaacaactgtagcaggcataagggcactataataaacagtagtagctagtatccaggaattattcctacaaattattcacttggagattctaaacggcacacgggataagttccacatcatcacaaattacatctttatcattaatctccaagcaatgcctagtagtctactcattacttttacttacgatttccactttcgcgttgtactgccttcattaagatgcaccaaccgatctacaaatgtctagttgtgcagccagcaaagaacgcataactctgacagacttatcacccttcaacaatgcttggatgaatcttactcattacgttcaagtacatctcatgggtctttggatctctctgctgaataatcttgatcttcacattccactatcacatacccgtataaataattagccagtgtagagttaaagcaggatctcgatatcaagaaggtacagaaatcttgtgccagattttcgccatctgg

SEQ ID NO: 550425 - DNA, 527 bp, Homo sapiens
  misc_feature (239)..(239): n is a, c, g, or t
  misc_feature (376)..(376): n is a, c, g, or t
ttctcctcctttccaccaagtgcccagcctcttttggaaaaaggcccaggggttccggaggaacctatttttgttttgtttggcacacaggcttggccttggaggtggggggtgagccccttacacccttgcccctccccaagggtgggaacctgccttccattgcccaaaaaaaagggaagggaacaggttcttgtccttccctgtggaattgccgagaaatttagccccttgcatgntggatttggggtggggggaggttttttttttccctggcctccagggccccccaggaggatttggggcgggtgaccagccccccagagcacacagccttttatttagtgggcaaaatttgggctggggttgtgccctnaaagatttttccccaggcaggggttttgtggaggaggccaaattcccctagttggcccttggggccccccccctgaccccccctgtgcccctcattttttttgccttttgaaaaaaaaaatgattaaacctttgggggtggggttgggtga

SEQ ID NO: 550426 - DNA, 162 bp, Homo sapiens
cctagaggacttcatttttgcgttcgcgtcacgattcagaaggttcatccagctatccagcaatttacagagcatgaaatttgcagatcaaagtccattaaatcctgtagctcttctagaagaactctacactagtcaacttatagatgcaacaacatgtat

SEQ ID NO: 550427 - DNA, 1662 bp, Homo sapiens
gaactcggtggtggccactacgcagaccagacttcgctcgtactcgtgcgcctcgcttcgcttttcctccgcaaccatgtctgatcaaagcccgatatggctgaggatcgagaaagttcgagtaagtcgaatactgatagaatgacagatgacgcaagagaaaaatccactgccttccaaagaaacgattgaacatggagaagcaaggcaggcgaactcgtaatgaggcgtgcgccgccaatatgcactgtacattccacaagcatgggcttcttattttgacttcttttagctgtataactttgtaagatgcaaagaggttggatcaagtgtaaatgactgtgctgcccctttacacatcaaagaactactgacaacgaaggccgtgcatgcttttcccatctgtctatctatctggctggcacgggaaggaaagaaactcgcatgtttggtcgaccggaagaagtggggtggaaagcaagtggggtgggaccgacagtgaactctacgagtagaacaagctggccaaggtgttctgcaggccgtaatgcagttaatcagaagtgcctgttttttgagtccacgtgactttacacttgtcgcactgcccacttcttgcaatttgcacattaagagggtttacacacccacagaaatataataacaacaacaaacggttgtgtgcccccgccaggaaaattccaaacactgtggggggggccccaggatatgacgggtagtgcaaacacgcgcacggggtggtccccaaaaagcgggcgggtacaaaaatgtgtgttatgcacgcactcgcacagcacatacaggcttcccagcagttgcgcgtgcgaggcacgtacgaaggagaggaggggagagggaaggggaagaggagagaggggagaggggggggaggagccgccagcggagacgcggccgacgggagacagagacagcgaaggaggagcgacgcaagacgaaagagacgagcgcacacagcaaccgacacgacaaagacgacaaacaaaggacgggcccagcggaagcagggagcgacaaacgaggcagggatgagaccaagacgggaggcggaacggagaacacgagcgcaggagacgaaccaagaaaagcagagagaggggagacgactggcggcagacggcagagagacaagacagagaagcgagaagcgaagagagaagcaggacagaagaaaggaaacagaagaacaagagcagcacagaggagagagagcgaaggcacgaacgagaaaagacgcgacgagaggcggaagcagaacacagacaggcaatacgacagacccacaggcagaacggacacgaaacagcacgcactgcagaaccagacaaggacaacaacagacacggacacaagaggacacacctcagcacgacgcgagccgcaccggccgaccaggcgacgacggaagacgagcgcacaagccgacagcggacgacgagcaccgcaacaggcgagagcaccaacagcagcacgcgagccacaacagcgccggggacagccaggccggaagccggacgccgcccggccggagcggcgggaagcaggcagaccggcgccacgcccagggcacgagcgcagcccgcacgagcagccgagcaacgcagcagcaccagggcgcacagc

SEQ ID NO: 550428 - DNA, 387 bp, Homo sapiens
gagacagagtccgctctgtcactcaggctagagtgcagtggcacagtctcggctcactgtaagctccgcctcctgggttcatgccattctcctgcctcagcctcctgagtagctgggactacaggcgcccgcaccacgcccagctaatttttttgtgtattttttgtagagacggggtttcaccatgttagccaggctggtcttgatctcctgacctcatgatctgcccgcctcggcctcccaaagtcttgggattacaggcatgagcaccgtgcccggccgcagttacctacttttataacatatttgtggaccagatttggcccctgaatgaaaatcaaatgattaaggaaatcaatgactattttcagcaatatggtaagtcag

SEQ ID NO: 550429 - DNA, 194 bp, Homo sapiens
taacggatttagactctgtctgacatatgcaccatgaagctttgagtgaagctctacctggggacaatgtggccttcaatgtcaagaatgtgtctgtcagggatgtactgtcgtgactagggtaagacagtgacgggactaaatgacccaccaatggacagcagctaggctatacacttgctacaggtagatat

SEQ ID NO: 550430 - DNA, 1132 bp, Homo sapiens
cacaggtgtcgtgaaaactacccctaaacagccataatgggaaaggaaaagactcatgatcaaccagttgtcaatcatatggtacacgtagattcggagcaagttccaccactactggccatctgatctatcaatgcggtggccattgacacataagaacctttgaaaaatttgagaaggaggctggctgaggatgggacaagggctccttcaagtatgcctgggtcttggataaactgaaagctgagcgatgaacgtggtatcatcgctattgatatctccttgatggaaaatttgagaccagcaagtactatgtgactatcattgatgccccaggacacagaaaactattatcaaaaacatgattacagggacatctcaaggctgactgtgctgtctctgattgtctactgcgtggatgtccgagtgaagttatgaaggctggtatctccaagaatgggcagatccgagaagcatgcccttctggcttacacactgggtgtgaaacaactaattgtacggtgttaaacaagaatggattccactgagccaacctacagccagacagagatatgaggaaatctgttacaggaagtcagcgacttacattatgaacctagtgtacaaactcgtacacagtagcatttgtgccaatctctggtctggcactgttgaccagcatgctggacgccaagtgctactagtgccttggctccacgggcattgcgtacgtctcccgtaaggattgggcattgcccgtgggagcccacgcttggttgaagggctctgggactggcgtgctagccaccaattcgttccagtggccacgccctgtggcctgcctcttccagggatgtcttcccaccttgtggcgtcgggcactgatcctgtctgaccacactggggacagggggtttccaaaacccggaatgtgtgacgaccttgggtcacaacaccgttctacccggagatacactcgtgtaactggacaaaaaccttctgtgacacactgtggacaaacacgggcgtcctgtgcacatgtctgtacgaatatgagcaacatctctgactaacaaaccacccactcagctgcttgctaggaataacactcggaaagaaccactgcattgat

SEQ ID NO: 550431 - DNA, 802 bp, Homo sapiens
ggtcacgtacgggctagtgagtgggccaagcctgaagagccacccaggccacagttcctgtgcctgccttccccatcccagcagtggccctccccatcccctccctctgttctgtcccgtttgatagaagacggctgtttacttggtgtgtggcggtggccgagctgcggcttgacgcggggctcagagacataagtgctatcaggggcccaacgtcagggagaagtgaccaaagtgtacgccagttcctctgagcttacccgctgtgctaccactggcccacgcaagacgcaggcgtctgcggcgccatggatcactcggaccacctactactccctgataacctgggcacacatatcgtcaccttcacctcccccgatcccacgctcgtggctaatcgacgacgcacgggtgcctgtatctgcatgtcaaccccatacagcgcaaacggaggagagacacacgattacacactgacatggctcttcccactccgctttatttaccctaataccctggcacgattcgactgccccacactctaacgacgcgtatgcgccagcatccatccctatggccagtggagcacccacggcaaccaagtccgcaacacaaaagacgacccacgcggccccagccgcgaagccaccacctcccaccctgcccaaacccccgaccccatcccgaccagccatagacacacgcaggaccccccagccgcacagcatggacacgcgcccatggcggagcaggcagcgtagcgcagcaggaccacaccaaccgcacgcagtcgggaagcacc

SEQ ID NO: 550432 - DNA, 185 bp, Homo sapiens
ctcgtaagcacatttgaatcatccagtgcaagttaaacagtcactggccgggtgccgtggctcacgcctgtaatcctagcattttgggaggccgaggcgggcagatcacttgaggtcaggagttccagaccaacctggccaacatggtgaaaccccatctttactacaaatgcaaaaattagctg

SEQ ID NO: 550433 - DNA, 182 bp, Homo sapiens
agcaccttgatctttgacttctaatctccagaatagtgagaaataaatttctgttgttaagccgtccactgtgggaggccgacgcaggaggattgcttgaggccaggagttcaaggccagcctggacaacatagtaagaccctatctctacccccctaataaattaatttaaaaagcccccc

SEQ ID NO: 550434 - DNA, 972 bp, Homo sapiens
  misc_feature (20)..(20): n is a, c, g, or t
  misc_feature (233)..(233): n is a, c, g, or t
  misc_feature (260)..(260): n is a, c, g, or t
  misc_feature (285)..(287): n is a, c, g, or t
  misc_feature (311)..(311): n is a, c, g, or t
  misc_feature (314)..(314): n is a, c, g, or t
  misc_feature (324)..(324): n is a, c, g, or t
  misc_feature (332)..(332): n is a, c, g, or t
  misc_feature (336)..(336): n is a, c, g, or t
  misc_feature (347)..(348): n is a, c, g, or t
  misc_feature (352)..(352): n is a, c, g, or t
  misc_feature (360)..(360): n is a, c, g, or t
  misc_feature (376)..(377): n is a, c, g, or t
  misc_feature (402)..(402): n is a, c, g, or t
  misc_feature (418)..(418): n is a, c, g, or t
  misc_feature (421)..(422): n is a, c, g, or t
  misc_feature (475)..(475): n is a, c, g, or t
  misc_feature (480)..(480): n is a, c, g, or t
  misc_feature (540)..(540): n is a, c, g, or t
  misc_feature (560)..(564): n is a, c, g, or t
  misc_feature (589)..(589): n is a, c, g, or t
  misc_feature (593)..(593): n is a, c, g, or t
  misc_feature (646)..(646): n is a, c, g, or t
  misc_feature (817)..(817): n is a, c, g, or t
  misc_feature (880)..(881): n is a, c, g, or t
  misc_feature (883)..(883): n is a, c, g, or t
  misc_feature (946)..(946): n is a, c, g, or t
atcagtgataactgtttgancattaaattttttaaacagccatgtcttggcattagttaatattgtgcatattggcctctatggcactacaagttaacagatgaaaatattgcccattttcatgcacaggtattcagctataacaccatttacaaatcattatgaacaagataaattctgccataatattcatttggatggccacaattaaatgagtgttatatcaagaaatngcctatgttcaatatactccagatgtnagattgtaaaatgtaatgttatttnnnacttaattctttattttccttatnggntctccttttntgtttttnggtnctctaatggtnncttnggggtgcnttctttggccataatnncaaaattcacacaaaagaggttgtntgcttcctcctctaanagnngccatacatttgctcataatctctctctccaggtatcatttctcatattattnatganaatgcttaccagcgccaacaccaaaattctgtcttcaagggaaggttaccaagttaaaanagagtggttcattatataannnnngacaaatcgtggcaacactattgcnaaanatgacatcggttcagcttcttagcatccacgaagtatattatttccgtgagtnttctattatgtggagattttccttaagaagtaaaatgaagtttgaatagtacagtctgtggggtggtgacatcagcaaccgccagttcttgtccatcaacaagccccaattctttcaatgttttggagagatttggccttgttcgttcttcaatagaggttaccgactgtnagttaagtgttctattttttccctctagggtggctgtgatggctggagatttcatttgcagannancactattggttagataatccaaacctcctgtagtttagctgatggagaaactgaatattttgnggagctggctaaagctgggcgttttc

SEQ ID NO: 550435 - DNA, 596 bp, Homo sapiens
  misc_feature (562)..(562): n is a, c, g, or t
  misc_feature (596)..(596): n is a, c, g, or t
tatagttttcctgaagccctaattcgttccatttaattgctataaatattcaaaggacatggaacaggatctggtaaatcaactttattaataccattctaaatatctttcatatgcttattattctgcttgatcagcaaataatgaactaatcacttccaaactgctaggtactatacattcaatgatctgagatttgtatcggcttttacattgcttgatattatacgtttgcaaataaatattcatataaatgtctataggtcttatagatctgttgtaggctacacatgaacagcaaccaaaatgaggaaagatcttctttgtccccaagctgtttccttgaatgctgcacttttcatattaacattagcccttgctatgtgattcgcctatgctctattgtaccctgtcgtaatcttaaccttcccaaatataaccatacagggtgcacctctcctagacaacacacagtgcagagtgtgcttcccatgtattcaatcttcgtctctttgaaagagaggtgccctcattacatttcactgagacacaggataccccnggatttcttgtacaatgtgtcttgctggtgtctn

SEQ ID NO: 550436 - DNA, 519 bp, Homo sapiens
aaaaccggagtgttagtaaattccacgtgtagcccattcagactggagatctgcacacttgagtgcagctacatccagactagcgcctggctgggactttcggggattccgttttgtggtcacaggactgggagaggagtgaggtcctcaccgagtgattccatcttctcttttttttgagacagggtctctgtcacccaggctgggtgcaggggcacagtcatagttcactgcagccttgaactgctgggtcacgcaatcctcctgcctcagccttccgggtagccgagactacactatgcctggctaatttttaaattttttatagtgagaccccgtctctacaaaaagtaggaaaaaaaaaatagcgaggtgttgtggtacacgcccatagtcccagttactcggaaggctcaggcaggaggattgcttgagtccgggagttcaaggctgcagtgagttattattccaccactgcactccagcctgggtgactgagcgagaccctgtctcaaaacg

SEQ ID NO: 550437 - DNA, 200 bp, Homo sapiens
ggaggaactataggggcgaagagccacgcaggtctccagtgcagatctcacagggaggtactaccactccgtagctacttcaacatgccttcccaccagagcctgacagtaaacaagtcgtcactacacttccatacctagcatcaaaaactagcccttttactaatcatataattagcctactcctcaccactacaact

SEQ ID NO: 550438 - DNA, 381 bp, Homo sapiens
cctccctctccgcattttttccttggttcaggacaggtaaaacggtttccctcccttcctgcctttatggattaccaagtcacggacagggcgcttttcttttcttggggggggggggttatttaaggtaatttttttccccctctcccttttttttttgggcccccctccctcccttttttgccatggaactggaggatgtgctatgagtttgccaacagctgggctgtcagggtgctttttttccagatgttcctcctttgcctccccttcccctcctctcccctccttttccttccttccttcctttccttggagccctgagccccctttggaagcttgagagaaacccaaatttaagagagaaagagagggggggga

SEQ ID NO: 550439 - DNA, 618 bp, Homo sapiens
  misc_feature (49)..(49): n is a, c, g, or t
  misc_feature (56)..(56): n is a, c, g, or t
  misc_feature (59)..(59): n is a, c, g, or t
  misc_feature (376)..(376): n is a, c, g, or t
atcgactcgacggcttctcattgggtacttcacttggactgcttggtangttatgnttntgctggaaatattccatccaaaatggctgccaagaaacctgccataattctgcatttgatggcacatcatacttgtgcaagatagagccagtataatgccaaattctgtatccattattaacccgtaacctgggagcacatgtagctgttaaaatatgctcaccatccgggcaccaagcaaaatatgtagaatcagaagccaccggtttagaaataagtttgtagtttttcacatcccacacttccatttgtcccctcagatttccaaatccagctaatactaatatatgtccatgagggctatagtaggctgcatnacgaggaccagttccaaagtcaaatacaggatcacattccaagttgaaaattgtcgcgtttggcaggcataaaaccatagtacagcacgatactcagtagaactagaattccaaactacatcataactggggccatttttaggtacttgcactacagcactttctccattagttgcactgtagtgtagagttagtactccatagtaggaagctcctgtcttgtcaaaatctgtgctagctat

SEQ ID NO: 550440 - DNA, 282 bp, Homo sapiens
aagggattaaatgaaatttgagggattttttcatccaaagttttgtacatcatgttttctaacggaaaaaaatgttaatatggcttttttgtattactaaaaatagctttgggattaaggaaaaataaataacttttggccagttcagtattgtttattaaatttgtattggcggtatgtataatggcctttgctggggttccaaaatacttcctttgggttataataatcttttgatccaattcctattgcttgtaaaataaagttttccccgttgatata

SEQ ID NO: 550441 - DNA, 1047 bp, Homo sapiens
  misc_feature (49)..(49): n is a, c, g, or t
  misc_feature (56)..(56): n is a, c, g, or t
  misc_feature (59)..(59): n is a, c, g, or t
atcgactcgacggcttctcattgggtacttcacttggactgcttggtangttatgnttntgctggaaatattccatccaaaatggctgccaagaaacctgccataattctgcatttgatggcacatcatacttgtgcaagatagagccagtataatgccaaattctgtatccattattaacccgtaacctgggagcacatgtagctgttaaaatatgctcaccatccgggttaataatggatacaaaatttggaattatactggctctatcttgcacaagtatgatgtgccatcaaatgcagaattatggcaggtttctcggcagccatttattggatggaatatttccagcattacaaacaataacttaccaagtcagttccaagctgaagtacccaatgaggaagctaaagttgcatacagcgttatagacccccagctttaagaaataaaccaatcaccaattccgaattgcgatgaagaggaaccacctcagaatatgaaaacacaatcaggaaacgataagccattatcaaaaacagttcttgaaaaatcaaaggaagcatgaagctaagaaagctgcaagacaggagagcaagaagtgacaagagtccagatttggcagcctatgcctgccccgatagagcaacctagaaacagtgtctctcagtcaatttctggggaccctgagatagagcaaaataatcaagaggctatagaagaaatgagagcaatcgaacgaatgacaagaactaggcagcaactgggatcttacaggtcgaaaaaaatgagctggagaaaactcaagaaggaaacagcttttatgcaggagctgtaagatttggaatggtatttaaagaattggggaaagcaagtgattgacagaaaagcaggcaacacatctgctgttaaccatgtataacaggatatcctgtgccacattaagtcactataatttagcttcaacaaaagaggggggggctcgagatctgggggcactagtccggtttggtaagcctaggtgctagaggcggtaagcgagaagtt

SEQ ID NO: 550442 - DNA, 156 bp, Homo sapiens
tcctctgcgccccgacagttcttccttctttgggggcccaccgcggctcatgtgccacttcctccactgctgctgccactgctgctgccaccacagtccacgggagtcaggcgaatggccctcagccgggggatgatgctgggggcgggcagaggg

SEQ ID NO: 550443 - DNA, 187 bp, Homo sapiens
  misc_feature (36)..(36): n is a, c, g, or t
ccgtgttgcaatggctcatttctttttattttcctngtatctcttatgatcatttctctactttctctttgctccatgtttcagtctgtattttctactgacctaccttctagctctcttacgtttttttctttgtcataggcccatgtatggcattgcaacacggtcattgcaacacggtctctca

SEQ ID NO: 550444 - DNA, 101 bp, Homo sapiens
tggaggtcagggtggcaggggtggcgtaccgaggagcaggagggcttcgccgactggtttgtcaaagccctggacgatctgcacgagatgaaccatgtgac

SEQ ID NO: 550445 - DNA, 181 bp, Homo sapiens
  misc_feature (129)..(129): n is a, c, g, or t
  misc_feature (156)..(156): n is a, c, g, or t
cgggtgaatatggtgatctctggtggactattattactacacaagtaactattcccaaagatttggctggatctattattggcaaaggtggtcagcggattaacacaaatccgtcatgagtcggagagncatatcagactccaaaattgatgagcnctttagaaggatccgaagatcggat

SEQ ID NO: 550446 - DNA, 707 bp, Homo sapiens
aggatatgtgaccagcgtcggttcttccgtccgtgatacttggctcgggggctcgtcgctgccgagcgccgcaccaggacgtgcgccggctccgccgtacaaaccttccgaggccctcgctgcgcaagccgggagcctctcccccctccgcctcgccgggaaagttaagtttgaagaggggggaagaggggcacatggacattgacagaggaggatcacctggagctgaggaaccggaacccggagtgtctgaaacttgtttggacaatggcaaatcatatgatggcaaaaattgagggcttaacagctgaatttgtgaacttagagtgcctcagtttaataaatgtaggcttgatctcagtttcaaatctccccaagctgctatatgacaaagcttgaactcagtgacaatagaatctttggaggtctggacatgttagctgaaaaagttcccacactctcacacatcttaacacttaaggtggacactaacatctgaccaccatctcagccaaccttggcacccttctgaacaagttcgactgtctgaaaagcctggacctctcttacctgtgcaggttcccaacctgaatgactaccgagcagagtgccctcccatcctccgtgcccccgcttacctactcgcgactgggtacgcaccccaggacccggaccgccctgactcccatgccgcgctgctggctgtc

SEQ ID NO: 550447 - DNA, 509 bp, Homo sapiens
gctgtgctgacttggcctcctaaagtgctgggattactggtgtgagccaccactccgtggcttccttttactttctttaaacttgcctagttgacctaataacggtgtgtaaaattaatctgcatctctcccctcctccctaccaatcagaggaccttagaatgctttaatgttactacttttccagtattttagtatctccctttgtttgatacctcccaaatgagttgctagtattgttattgtattagttcgtttgtattttacaatcaatggttgcttccattttccaacatttatgctaatatctttgctcaccattgcttcttgtgtgaaattgattgcctttgatttctcttataatatctcttcacttagaatctatgggggattttaggatctgtgaggggcttgagttcgttagctaaatcaagtatttagctctgacttctgaaagacaaatcacctcgcatttccctgtgtcggttaatagcaatgtccatttcctt

SEQ ID NO: 550448 - DNA, 323 bp, Homo sapiens
  misc_feature (15)..(15): n is a, c, g, or t
  misc_feature (56)..(56): n is a, c, g, or t
  misc_feature (310)..(310): n is a, c, g, or t
gaattcggcacgagngacttcgtagaacatgtggcccagatttagaaagagtgcgnttcccagaaacagtaccttctccagtcaggtgagcctcttgctgctcacatgaatgaatgaatgaatgactcaacgagtcagtcactctccaaacccagcacggggccaacatggaatctcccagtgccttgttctacttgctaacacaatgcatgcaggaagagttcatgcatatgcatgtgtgtgtgctcagtcatgtccaactctttgcaaccatatgtactgtagcctgtacattatggtttctcttgtncataagatcctcc

SEQ ID NO: 550449 - DNA, 185 bp, Homo sapiens
tacaatcgagctcggtacctacatatctttgagctcaacctttatacgtgtggcttggcacttcggtggctaaggtaagaacgtgcttgtggaagacaagtctgtggcttggtgagtctgtgtggcctgcagaaccgacacgttaataccctgcacagatcagaggctgctggccacacagactc

SEQ ID NO: 550450 - DNA, 361 bp, Homo sapiens
tcagtttaagttgagcccatcaggtgttactctttgaaaaatccagggctggacacagtggctcatgcctgtaatcccagcctttgggaagctgtggtgggaggatcctttgagaccagaagttgaagaccagcgtgggcaacatagcaagaccatctctacaaatttctaaatttatcatctctaatttttaaatttagcctagcatggtggtgagcacctatagtcccagctactcaggaagctgaggcaagaggattgcttgagcccaggaatacaaggctgcagtaagctatgaactgcaccactgcactccagcctgggcaacagagtgagactctgtctctaaaaaataaaaatt

SEQ ID NO: 550451 - DNA, 655 bp, Homo sapiens
ggatggactacaacgtcgagtaccagtacagtgctcctccggccatcgccaaacccagtcccggaggcgtgcccacatgtcctcagttccatcgtccaactccaagcaccagggtgggggtccaggattccgcgatgctgggtcctagatgtatatccttctagtactcgcttgtcggtgataggcatgcggatatgctaaccgtgcgtgctccatggtgcagatgcccggtcgtcagactcaatgctccatgcagcagatgcccagcagctccggtcatgcgcgtgcgatcgcatgccttctttcgcaggaggccgcttgtacgccccgagacgagcacgaatgatggatccagcgctgcaagcccaagatcaaaattatagcgcacgtccaagtgggtatgtggaacacagtgcatacctgcacgtacgcaccgcatagcagacgtgagcttgcatttggccccgaaggttatactccgcggaccccgccatgatttgaggaaaccatgatcgggaagcaaacaaccatcgtacagggttgcgaacgtgtacaacaccaacatctgcgaatatatatccacgggtcggcccagacaacaaattgcacgactcaaacgaaacgcaatagacagctggcgcatagtgaggaccac

SEQ ID NO: 550452 - DNA, 162 bp, Homo sapiens
aggccgtcgccgacaaggccgtagtcagtgtgccttccacaaaggtccttattcaggggcccttgacggagttcccctggggaccataacccttaaaataacacacgtcgcttcctgaggagaatgttcttagcctctcaaagtgcaatgatcttcactgac

SEQ ID NO: 550453 - DNA, 282 bp, Homo sapiens
acgcctagagtcccatctactcgggaggctgaggcagaatcatgtgaatccagggggcaggggttgcagtgagcggaagatcatgtcactgcactccagcctaggtgacaaagcaagactccatctaaaaaaaaaaaaaaaaaaaaaaaaaaaaaaaaaaaaaaggggggggggggggggccaaccccggaaacccaaaaatttggggaggcaaaacccaaaaaaaaacctgggggggggagtttaaaacccccccaccaaaaaggaaaaaccccctttttt

SEQ ID NO: 550454 - DNA, 239 bp, Homo sapiens
tctcccatgcccaccactctccctctcatcctgccccatttctctgttgtctttcctctattcctctcttcattgttcacagcactataaaatctaccttcccctctatacttccctatattcttgtactgactctattcccaggtccagagaggcccagaatcttctctgctcctgctccacctcctgacccactgccccctgggagcccctggtcatcccagaagcctgtaagtgca

SEQ ID NO: 550455 - DNA, 646 bp, Homo sapiens
gaagatagttttgatgtggtggatatcacacactctcctcgaggggggacacacgagataggtgtcttcttatatgtgggtagaataatctttggtaaagatattcacgcggctctctgcttataagggatgtttcctcttttgctatagttagaatttgtagaatgtagagctttataaagacttataaatatagttctcgtcgagttgtggggctgtatatataattggagatgagatgtgtataatataaatatgttgcccgcccgatatttttctagatatacattatgtgttgttatatttcttctgtggggagcgcttatatatatgagagacacccgcttctaatacagaattttataacacagaatagttctacaccttccatagagccaagattatgtatatagttctgttaataaaccatgttgaggtctcgtgttacatctctccacacaagatgtcttctaacattctcagaattattacaatatatatatgagagtgatatttatatcaccacagtagccattatatcttattacacccttaccctttttggtttcaattagaaacaatttttttaaacccattttttgttttcccaaaaaaaaccctgaataaaaaaaatttgtgttaacta

SEQ ID NO: 550456 - DNA, 933 bp, Homo sapiens
ggagaccagagaactagtcgtcggaaatcgtgctgtgtggagagattgctagcctctgatgaggcgaatccgtgctggtgtatcagagccatcagaagcgcaccatgacggagggcaagagcagcaggatgctgagcatatcgatgacgggatgaggtgcatcctggcaggcaaccggcgccatcttcatcggcaccttcaaggactaaagacaagcgcagtgaattatgatcctctgtgactgtgatgatgttcccgagagagatcaaaggccaccagaactccaacacagagcgaggagagagggaagacgcaagcgagtcctcggtctggtgctgctgcgagcgcgcgaagaagtctggtctcaaatgagcgaggtgcggagggaccctccctcccaaagatacctgagatattgcatcgaggttccacattgcttggaagcatgtccgggggagacccactcggaagtcagaggcacggtgcgttgctgggcaacgactgtgaactccgcagcgtgtgggtttccgcactgccccaaggcatccgtgcacaggaccttgctgggccaagatccgatgcggcttggggggggccaatccccaaacagggtgaagtgagccccacaaatggagagaggtaactagtatagcagggcggctgacacgctggctgccaacatggcagtatttggccggggggcctcccaaagcccagatacccaccctggggcgatggagggtccgtccccccacctacatgggcgcggagtgagcactccccatccaggcatgattggtgcccacctcctggtatgagaaccttcctatgggatcccccccaattggttgatccccccccctggaaagaagggactccacatgggcatgccccccatcccggggaaatgcgggcttctcttccccccatgag

SEQ ID NO: 550457 - DNA, 1400 bp, Homo sapiens
acggactattattgttgtagttttaaacttaagctcttagggcttaactatttgcggtttgctattgcggtgtccggctcccgtctccctggctcccccgcccagccatgcggtcccagagcccctcactctccatccagaccgcgagactgcaggactagataccgacctatataaatgcgagagcccagtgaagcagaggcagagatgacgtggtacgatgaaccgagcctctgcaatcagtaccctactaatgctcagcatagtggctcccaggactactcattacctcagatgcgtgacggagcaaacgaacagacgagatcagtacctacgagatatgaccagacatcaccataactacccgataacatcgaagacataacactaaataaccaaaatataacgtactcataaacacaaccaacaaaaataaccgagactactacaacattgtatcactcaaataacacctcacattatatctatacactactaaacagtcacttattaccatctacacctgaatactatagatatcacatcttatgtcatacaccacatcacacacatactataaacaacaacaccaatcagatccatagaacacgaaaattaaaacaagacaacacaattcaattaatgtttaaactaaatacattacatatcaatacccatatatccacataataataaaaacaaaaacaaattatcaaatataaatcaatacatcccaataccatttacaaaacaataaagtaccacacctatacataaagccacatcaacatatagaaacaatcataatactaatacaatatcaattataatcaatatagtatattatctcataatattataagatcactaacctaaacataataacattaaaaaaataatcacgaacttccaaattcacaccaaataataaaacaaaaaatatataacacatcaaaacaccaacaacaacatcaaaacataacaattacattaaaatcctaaaataccctcacgttcaataaaatatacaaaaaacgtatatataccacatgatctacccataactaacaataaatgacaccatcaccacaatatctacaagtctaacatccaccatactatgcaatactaccatctaatcacacatatacacaatcttatacataaaataacataacaacaagataccacaatgaacatacatatactaacaccgaatcagcataccaacaccacccatctcactcacaaaccaaccaataccactcaccactacatcaaagacactcaaacacacatcaattaccatctaactcatctacaccaccactaattcaaaaccaaaataaacaaaaccaaacacccaaaccaacagattcactatttctccattaccacta

SEQ ID NO: 550458 - DNA, 281 bp, Homo sapiens
ttgacattgatgtgttgggtgttggtgttccccttccctcacatcgtgcatcgccctcacgtttttagttaacttttttggtatccctcttgacattcaaaacagttacttaagattcagttttcccacttgttggtaatatatatagtgctgtgaatcatactgtgttgtttgtaaaaagaaattcagttggttaagctaataaggtgatgttttctaaggccctttttcctagtggtgtcatttgtgaatgcctcgtaaattaatgattgtgaagctta

SEQ ID NO: 550459 - DNA, 347 bp, Homo sapiens
gaaactgatgcaggttcttatagccttcttatggtagaagcatagaattgtgtaatttaaacctttccactgggcacggtggctcatgcctgtaatcccagcacttggggaggccgaggagggaggattgcttgaggccaggagtttgagaccagcctgggcaatatagcgagatcctgtcgctacaaaaaataaaattagccaggcatgttgacacatacctgtagtcccagctactcaagagggtgaggcaggagaatcacttgaacccaagaggcagaggttgcagtgagctgagaacatgccattgcactccagcctgggtgacaagagtgaaactctgtctc

SEQ ID NO: 550460 - DNA, 81 bp, Homo sapiens
ggatttgctggtgcagtacaactaggcttaatagggacatgttcattttagaaaaaatgagatgggaactgtgtaaaaaaa

SEQ ID NO: 550461 - DNA, 116 bp, Homo sapiens
tcacaggatctccttaaatactagactaaacggctcagacaggcagatttgaggtttccccctgtctccttattcggcagccttatgattaaacttccttctctgctggatacctt

SEQ ID NO: 550462 - DNA, 106 bp, Homo sapiens
ccttaacccccgaataagaggtcattcatttgttctcttagtctgtctagctttttcaactttcgagagtctttcattatcatcatctggaattgtcaccttaatg

SEQ ID NO: 550463 - DNA, 1120 bp, Homo sapiens
  misc_feature (8)..(8): n is a, c, g, or t
ccacgcgntcgaaaaaaaaaaaagagtcaaaaagttaataaaaaagtaaaagttcttgggggcagcccccgcccggtccatgccgccccgtccgggagggaggtggtggggcagcccccgacccggccatgccgccccgttccgggaggtggggggctgcctctgcccggccgccccgtctgggaagtgaggagcccctctgcccggccgccaccccatctgggaaggtatacccaacagctcatggtgaacgggccatgatgacgatggcggaattggtcgaatagcaaaagggggaaatgtggggaaacagagagagaaatcagatgggtgctgagtctgtgtagcagggaagtagacgtaggagactccattgggttctgagcattagggagtcataaccaatccctaatctcaagtacccagggacacaaacactagcggcaggccgcagcgtcctctgcctaggaaaaccagagacccttgtacacttggtaatactgctgaccttccctccatatggtcctatgacctagcaaatccccctctccgagaaaacccaagaatgatcactaaatactaacaaaaaccacacaccaaaacaacaggggcgcgcaggacaaaaaaaaatcccataagggggcccaaagaaaggaggaaaccaggaataccgagccgcaagacggggtcccaaaaagcacagcagaaaacaaaaaataagcaatgaccaaagaaaacaacacatagagccacggacacacgcagacccaggcacctgcgcaacagacacccaaacccgaggaggaacacaatgggcacacaccccacagagaaacacacggccacagaaaacacaaagatacaaggggacacgcggacaaccacaccccatagcgaaaaaggaaacaatgcaacaggaagaacacagacaaatacaggagcgacacagaaacacgaagcccgagcaaaaacccgccacccaaccaccgacgagacgtccgcgcacaacgacacaacgcacaccgccacaacaagcaacaccacacaccaaacgcagccccgaacaacaaagacaagaacacagcgacagcaaacaacacgaaagcaaacaacaacccac

SEQ ID NO: 550464 - DNA, 173 bp, Homo sapiens
catataggttggcgactgaaatggaacccttggcgcgatagatatagtaccgcgaagggaaagatgacagattagtaaccagagcagttatatagcaaggactaacccctataccttctgcataattgaattaatctagaaataacgtttgcaaggtagagccaaaggctaag

SEQ ID NO: 550465 - DNA, 756 bp, Homo sapiens
taaataatatttggctatgggggaggggaatatcaaagggacaagatcacttttaaatggtagttttataagatgttataaactggtatctttttaccattaaagtgcagggtatgttcaaaaaaaaaaaaaaaaaaaaaaaaaaaaaaaaaaaaaaaaaaaaaaaaaaaagaaacaaaaaaaaaaaaaaaagagaaaaaaaaaaaacaacagaaggatggcaacaagacacgaaagaagaatacgccagcaagaacgagcctcacacaatgagacggcactccacaacacgccaggccgacagatacgcgcagcaagacgggagtgagggagagagagagctgcgccaccgcgtcgccgtgcccggctccagcgcgaggcaggcgcgcgaggatggggcaagacagcgccgttcaccgcccaccccccactcagcacacagcgccaggccggacgcgcagagaccgaggagcagcgagaacagaggagaaagagtgaagagggcaaacataagggaagcacctgtcgtaagcacacaacgacgaagttaatcaagcgacagagcgcacgtcaggcgagcagtttggtctcattaggagggggagaacagaaatagcacatagcagcatcctcccatcgtcatctgcttcctagtctcgtaacgatggtgcagtttagaaaaaagagcgtcgtgctcgcgactgccacgggttcacgtgccacccatcgctccttgctccagctgcgaacgcgggt

SEQ ID NO: 550466 - DNA, 334 bp, Homo sapiens
  misc_feature (46)..(47): n is a, c, g, or t
  misc_feature (277)..(277): n is a, c, g, or t
  misc_feature (326)..(326): n is a, c, g, or t
tgagacagggtctcagtctgccaccccagctggagtgcagtggcanntagtcagctcactgcaacctctgtcagcctccaggttcaggtgattctcccacctcagcctcatgagtagctggggttacaggcgcatgtcacaatgcctggctaatttttgtatttttgggggtagagatggtttcgccatgttggccaggctcgtctggaactcctgacctcaagtgatctgcctgcctcggcctcccaaaatgctgggattacaggcgcgacagctngcacccagcctgacttgagcactttttcatgtatctgttgggccatttngtatgtgc

SEQ ID NO: 550467 - DNA, 90 bp, Homo sapiens
atgacctggaggtggctgagctcctgtctagagagggaggcaagcccctgttgacacagttctatcctaattaacacagtgggctgtgcc

SEQ ID NO: 550468 - DNA, 430 bp, Homo sapiens
  misc_feature (6)..(6): n is a, c, g, or t
  misc_feature (83)..(83): n is a, c, g, or t
  misc_feature (92)..(92): n is a, c, g, or t
  misc_feature (123)..(123): n is a, c, g, or t
  misc_feature (127)..(127): n is a, c, g, or t
  misc_feature (129)..(129): n is a, c, g, or t
  misc_feature (133)..(133): n is a, c, g, or t
  misc_feature (135)..(135): n is a, c, g, or t
  misc_feature (151)..(151): n is a, c, g, or t
  misc_feature (155)..(155): n is a, c, g, or t
  misc_feature (207)..(207): n is a, c, g, or t
  misc_feature (229)..(229): n is a, c, g, or t
  misc_feature (236)..(237): n is a, c, g, or t
  misc_feature (239)..(239): n is a, c, g, or t
  misc_feature (244)..(244): n is a, c, g, or t
  misc_feature (250)..(250): n is a, c, g, or t
  misc_feature (263)..(263): n is a, c, g, or t
  misc_feature (267)..(267): n is a, c, g, or t
  misc_feature (270)..(270): n is a, c, g, or t
  misc_feature (272)..(277): n is a, c, g, or t
  misc_feature (288)..(288): n is a, c, g, or t
  misc_feature (307)..(307): n is a, c, g, or t
  misc_feature (331)..(331): n is a, c, g, or t
  misc_feature (364)..(364): n is a, c, g, or t
  misc_feature (388)..(388): n is a, c, g, or t
tctgcngtgtcaaatggaaagcagcacacaagaattcccttgcagaccttgatctttcgcagaaatgccaagacgcctgagtnatacaactngcaattattattttctagacagaactgccantctngntgcntnccagtgtatcagtggntgcnacatctccttccttgtctccgggcttcatggcaggaaacagaagtaattccntgatgttgttggagtccgtganaaacatnncnactcnatcaangcccatgccccanccanctntnnnnnncagcccatatnccagggcagtacagaagtnttcatctatgaacatggcctcatnatcacctgcagccttggccttggcctgttcttnaaaaagctgccgctgccgcatggnatcattcagctcagtatacgcattgcatatctctttcttcat

SEQ ID NO: 550469 - DNA, 233 bp, Homo sapiens
cccggggggttttccggggcaccaattaaaccccccccccggggggccggggggtattccccccaaaaccctttttttttttgggaattggggggaccaaggcccctttttttttttttaagggggggaaaaaaaaatttttttttttttttttgccaagggggggggggtttggtgttggggcccccctttattttttttttaaaaaattgttttttggtggaccctgttta

SEQ ID NO: 550470 - DNA, 293 bp, Homo sapiens
atggaaggaaggaaggaaaaagaaagagaaagagagagagagagaaagaaaaagaaagaaaagtaagaaagaaaaaaagaaaaagaaagaaagtaagtcctggctaacacggtgaaaccctgtctctactaaaaatacaaaaaattagccaggcgaggtggcaggcgcctgtagtcccagctactcgggaggctgaggcaggagaatggcgtgaaccccggtgggggcggagcctgcaatgagccgagatcgcgccactgcatccaacctgggtgacagcaagactccgtctc

SEQ ID NO: 550471 - DNA, 124 bp, Homo sapiens
tttgagctgatgtggtgtagatgttgtccttcgatcgattgatttagagggtgaactcactggaacggggatgcttgttggtgtatcttactaagagctaatagaaaggccagccgcttagact

SEQ ID NO: 550472 - DNA, 571 bp, Homo sapiens
  misc_feature (52)..(52): n is a, c, g, or t
  misc_feature (221)..(221): n is a, c, g, or t
  misc_feature (257)..(257): n is a, c, g, or t
  misc_feature (365)..(365): n is a, c, g, or t
  misc_feature (384)..(385): n is a, c, g, or t
  misc_feature (427)..(427): n is a, c, g, or t
  misc_feature (510)..(510): n is a, c, g, or t
cgctgcggattatttgttgagatgcatgaatttttttctctatgctgcttgnaaaatttacaaatgtgtcttcgaacaatctacagtcaaaaagtgcactcccgatttcttcatagctctagattctgaaggtagtctcatccatgaggtttttctaggaattgagatgaactttgtctatatatttcttcaagatatgtaattagagaagtcctgcttcncttgctatttctatagagaaagaggaactttcacangttgcactctgtgtgtctgcacgtgctctctctttcacttgtctatatgaagtgtattactatttcatgtgtctgcgggtggcgtgtactatgattgcctgaagaggnggtttctctccttcctctnnttttcttttcactccctgaaaaatttacgctaaaatatatanaaccatttaaaatattggatatccattaaaggaaacagattacgtgttgtgactactatgaaaatatacaaactcaatatgcncaaaagtttttacaagagtcaaagagatattggcaaatcttcaacaatatagtcagcagca

SEQ ID NO: 550473 - DNA, 392 bp, Homo sapiens
  misc_feature (10)..(12): n is a, c, g, or t
  misc_feature (373)..(373): n is a, c, g, or t
tctgactttnnngcctaggctggattgcagtggcacaatcttggctcactacaacctctgcctcctgggctcaagccttcctcccacctcagcctcccaggtagctgagactacaggcacacaccaccacacccagctaatttttgtattttttgtagacgggattccgccatgttgcccaggctggtctcaaactcctgagctaaagcaatccacccgtctcggcctcctgaagtgctgaggttacaggtgtgaaccaccacgcctgggccaagcccaccattttaaaatgtattattggctccttgatgaggaaaggggcatattcatagttttaggagcctaggcaaaagttgttaagttagcatatggntttgaaaagtaactttaaa

SEQ ID NO: 550474 - DNA, 121 bp, Homo sapiens
tcgacggtaccaacatacaatcagagaagatgttagacacatgccaaaaaaatcatctacagaaatcttttcagtattgttttcaatactttatattcactttggtagagaaccttaggga

SEQ ID NO: 550475 - DNA, 649 bp, Homo sapiens
  misc_feature (630)..(630): n is a, c, g, or t
gcttggcatgacacgattattgcaaatcacagctccatcaaagaagaatctgctaaaaaatcacaattccattggaaatgctgcaaaaagcgaggattggtttaggaagaataaacacagttttatgtagctagtatattattcttcaattcaccagtgtcagatattgatgaaggccctttcacaaatgtcttcatgttagtgaatggaagcacagtgtctgacactcacagccatgagtagaaaagacaacaataacaagatgcatttggggtgataactgtcagaaagcttacacttgtgtgaaaagaaagaactctttgttaagaccatcttttctgagcatcaaatttagtcactgtgccacctaacaagccatcacagacttctatgagactaactttggctaaatggggaattgtttaatgagttagaagttattcttccaatgggccttcaagtaggtgaaatctgacatcaaagtcctcaagtcaagaattcacacatctagaattaaagtgagcagaaagatttacgttggaggaagatctagcatcattcactaaagcaagaaggtgatcaaaatcctagctgtctttcctttatatggtaagctacctttcgcacgcnaacatcaggggtaccgagc

SEQ ID NO: 550476 - DNA, 607 bp, Homo sapiens
  misc_feature (4)..(4): n is a, c, g, or t
  misc_feature (120)..(120): n is a, c, g, or t
  misc_feature (132)..(132): n is a, c, g, or t
  misc_feature (248)..(248): n is a, c, g, or t
  misc_feature (299)..(299): n is a, c, g, or t
  misc_feature (311)..(311): n is a, c, g, or t
  misc_feature (343)..(343): n is a, c, g, or t
  misc_feature (346)..(346): n is a, c, g, or t
  misc_feature (364)..(364): n is a, c, g, or t
  misc_feature (366)..(366): n is a, c, g, or t
  misc_feature (368)..(368): n is a, c, g, or t
  misc_feature (395)..(397): n is a, c, g, or t
  misc_feature (419)..(419): n is a, c, g, or t
  misc_feature (424)..(424): n is a, c, g, or t
  misc_feature (427)..(427): n is a, c, g, or t
  misc_feature (452)..(452): n is a, c, g, or t
  misc_feature (476)..(476): n is a, c, g, or t
  misc_feature (479)..(480): n is a, c, g, or t
  misc_feature (503)..(503): n is a, c, g, or t
  misc_feature (523)..(523): n is a, c, g, or t
  misc_feature (525)..(525): n is a, c, g, or t
  misc_feature (528)..(528): n is a, c, g, or t
  misc_feature (532)..(532): n is a, c, g, or t
  misc_feature (535)..(535): n is a, c, g, or t
  misc_feature (543)..(543): n is a, c, g, or t
  misc_feature (547)..(547): n is a, c, g, or t
  misc_feature (587)..(587): n is a, c, g, or t
tttntcacccaggctgcagtgcagtgctgtgaatcatggctcactgcagccttgacctcctaggctcaaatgatcctcccacctcagcctcctgagtagctgggaccacagggacatgcngccacatctggntaatttttgcattttttgtagagacgaggtctcaccatgttgtccaggctggtcctagactcctgggctcaagtgatccccttgccttggcctcccacagtgttaagattacaggngtgagccatggcacccaacgatatcccttttttttattggcaagaaagatntttccccttgtnaacaacttccaggcccatcaaggaaaacaggnggnaagactacctcaaatgantntnaacactcctcctggagtgtggcccttnnngggaggtgactgattttaactngaggnggnaccctggcatgcagacctgattggngtgataaggtaaggttcccacacnttnnggaaggtggtctggatctagganccagggaggaccagggggcntnccntgtngantagctcanaaancagccactgacaccaaagcacatcatgttagtttcgaggnttgctccccagggagaaatt

SEQ ID NO: 550477 - DNA, 546 bp, Homo sapiens
  misc_feature (303)..(303): n is a, c, g, or t
  misc_feature (316)..(316): n is a, c, g, or t
  misc_feature (336)..(336): n is a, c, g, or t
cgtgaagtatgagtccacaaagttacttactataggaacggatggttcctgaaaacacagatcccacagaagtaaaacaggcaaccctagcttcttcagagatgacattggggttagggtgggaacaattcagaacaggaaaaggtattttcctagcctgaaaatctgaactcaacatggagtaatgcgaatattgggagacggtgagtctgaaaggggggggtccgggtcacaccatctccggggttgggggcctcagtcatcttaccatcgatgtgtcagaatcctacacggcctcgagtntctaatcacggtnacgggcatcattcttccggnctctgagaacactcgggagacgccggttcaagctataccaggagctaagaaaagccggtccggcaccgtgcaaatgcatttctccctgcgaggttgtgtccgggcgcgggggggcatacgcctttagtgccaggtggggagtttgactggggcggtacacctgtcaacaggtaacgcatgtgtcctaaggcgagctcagggaggacagaa

SEQ ID NO: 550478 - DNA, 212 bp, Homo sapiens
taaagtgcagtgcactgagcacaaggactctctgtggggcccaggagcaatggagtcaacccttatggagcccacaacacccggctatccccagactacgtgtacagagaagatacgtgtagagggccctgagaggacatgcagcggcagtggatgccttgagcatggacaacggcaccccggacgtccaagcagacatcctagatgattca

SEQ ID NO: 550479 - DNA, 1197 bp, Homo sapiens
agcgggctggagcgctccctggcgagtggcgcagtgtaacatgaccgcatggcgcacagacaggcgggccgggaggaggatggcgctgtacggtgctgcgcttggggctagatgctcctgggcagctgaccttcgcaggctctgctggatccctcacatagtggtctagttgtgcaaaatcatagaacgccgaaacttgcgtctcgagtcatagattaccatggatgtctccagacactttaagccctgtgtgtggcacgtgaacatgtccacttatgccaattgaactgtactctgttgcatgaactcatccgggaccgcgttgcgtcactacactattaccacagtcacttctcacaactgggacccatgtcttgatcggcggcacgcttatacagacgacacccaagactggtcgcaggacacatccttccacctggacccgacctactcaatcaacttttggcatgttccgcacttagatagtctacatatgtctcccttgctggtattccgtgtttacctataggcaggatgtttacgttcacagccaccaccgatatttgtccttggcgcaaaccacgtgtgattgggacacgaactagaccacataattgatactctcggaatgggcattcaaatttccaacatgcaacaaacacagtgaaatccctgctgtataatcattaggcgtcccaacttaggactcccctgggaaccatgcacaggcctccaccgtgggccgccaacggtgtgcacctttggatggcacataggccatcctcactcttcaagttgtcggaccacgtcacactagtccaacgcacctccggacatatctacactacaaccagaaagcgcacccatcaataagacatgcagacaccacacacctactctgtcctacggccctggcatggcacacccgtgggacatttaaataggcaccgagacgacactataatcatacaagtctgttgcatgacacacatcgtgccgaacacgtgaacatacagtctgagctcacataagtcaaccgtgatgcgggtgtagacaataagcctcagaacacgccttatgtgctccacttaatatcttactatgctatgagtcacataacaacactacataccgactactctcccttctacgatgcctaacatagctgcagtcctatacctcgcgaactgaacacgt

SEQ ID NO: 550480 - DNA, 390 bp, Homo sapiens
cgcaggaactggccagctggtgttggagccagctcactccattcttcatagtagaagagtgcaggcttgagtgtcgcatgtgctgccacttttacggagtctgtttccttctttatcacctcctctaggatctcggttcccctctgttccttcttccaagataccagccgcatactgccatacccagtaccgacgtctgtatcgctcctgacccttgccgaccgcccgaagcatcttggatgagtgaagcagctttttgcgaatgtaccagctgacgcttgctgagttgttctatcttcgcgctctagctctgggatgctatatgccgtggcttccacctctccttctcttctacccctgcgggcctcccccagctgcggcggttccccg

SEQ ID NO: 550481 - DNA, 505 bp, Homo sapiens
tagattagacaccttagtatgatgaacaaaacaaaacaaggacctcagatacatatctgtctaggtcagcagactaacaatgtggatcacactcatgggaaagtgtagttgaggtagttgacaccttaggaagtatgggttttaaacttccctctgtggaagatattcacaagccacaagtggtgcaaatgtatatggtttttatttatcaatttttcatataggttttcttacaaaaggttgacatattccataacaggtgtaaggagtgtagaaaaaaaaaattcagattttagggggcagcgggggaaggagtataatgaaactgtatagcacaagggctctgatcaatccttcttgttctctttggcccacaatttaagcaagtagatgagcagaagacatggaaggattcagctttcagttcaaacagaagaagaagacatggcgaagagaaagttttttcacatttctttcttttttcatcgcgattgcgttcattctg

SEQ ID NO: 550482 - DNA, 1734 bp, Homo sapiens
  misc_feature (278)..(278): n is a, c, g, or t
tggaaaagggaaaaaaaactgggtctttatcacccaaatgacatgactatttacacagaaaacccttaaagatatctcaccaagaacaaagctactgagatattgcactaagtggatgttgaaggaagatgttggcaaatataacaatggccacattatttagaacacccacattggtgtgttcctataaatggacacaattcagaatattggaatatttcaaacaatatcgccagtgttatcataagggcatctcacaacacacacaccatgtgtgnagggcaccgtgagatagaagacacacaattaacagagagacgcagaccccacaaaacacccacagtgtgttctcaccagacactctcacaaaagagacatctcaaatatatctctttctcgcgtgacacatgtgcccctataagacaacacagagaatatctcagcggctgtggcgcccgcggggtgagtctctcacaaatctccctgtgtgtaaatgtgcgcacagcacctattgtgcgaggaggcgcccaacaggtgtggcggcaagattataccttgtgagaaactcaggagaggttattgtgagaaacaccagctctgtgggcccaaacatgtgtatgtagacacaccgctgtgtccctctctatcacactaacaatatgtggccaaacatactttacgcgtgaggtgtgtgtgagtgatggccaccgtgtgccctgtgtgataagtctcccccaaagacaactaccatgtgaggaagtagctcctgacagagggagaggcgacaacaaaaaatccacatcatgtggaaaaaccccccgagagagagagtgcgaacaacagggtagtggacaagcgttgaaagctccccccaagatatagcggcgcgcccccacacgtggaaacacctggcccaagaccacgtggggggacagcacactagcagaggggacaagaaaacaccgccgcggtgcctcaccacaaacaaaaccgaaaatcagcacaaaaagagaaaaagcaacaaacacaaacaagaggggggggcgcagcaatacattgtcatgatcaaacaaatcaactcctcgcgacccagagaagaaagggacatcccccaacaaaataaaccaacacggcactccacgcgcgaagcccaacccgtatggcgtatgtccccaaaaaatacaaggtggacgcaccaaccaccaagggagacagacgatctgacccccactaaagagcttatagagcacatagacaccaaacagcgcagcgagtcgacgcccgtggtgaacacaccacaaaggagccccccagaatgtgtcgcagctaaacaaacccccccacatacaacttagagtgaggaacaacatccacgagagacgaagacgaagagcacaccacacccctaggtgacgcaacggcagagcaacaacaaataaccgcgaggaccgacgaccaccccccacacgagtgaaaaaaccaacgcgcccacacggaaacacacaataaacaaacaaacatacaggcggacagcaacaggaggcagaacacacaacaggcgcaaccctagcgaacaccaagagacagaacacggccgacacgagaaagacataccacaaaaacagatcagaccgcacgaacgcaccagacaagaacaacatcacccgcagcccgaagcagacaagcagtgccgcaacacgaaaagaacacacgacaacagcaccgcagccgctc

SEQ ID NO: 550483 - DNA, 696 bp, Homo sapiens
cccaactagaccggttggctgagtgcaaaaggattgcctgagccctggaggtaaggctgcagtggagccactgcaccccagcctgggcgacagtgagaccctgtctcaaacaaaaaaaaaaaaaggaaaggaaaaaaaattttttttgtttaaaatatacatatttggcttaggaaaatattggggaggaaatacttggacaatattaagtgtccagttctctcagagttggtagcaactttatatttattccgttggatggttatatgggcctctttccaaattgtcttgtgcagcaaaacatgtcttactggggtcattaaggaaacaaattatttttttcctaacccaaaccaaaccctcaaaatacttccagacactttgttttcccaggagatgcgtacccttggtgatgtggggacagagggtccgggttcgggaagagagagccctggaaggtctgtactgcctgctcctgtgtgaccttgggctgcccattcaactgttctgggcttcagtgcctttaacttgtacacggggctgggagtggagtcttaatcccaccttactttccccacagggtgcgctgggcagatccagagagcttgtggctagagtaggggacagagggaggacgctaagtcttagaggattgagacgtactgcagagttgcatgatgccagctaacggatgta

SEQ ID NO: 550484 - DNA, 378 bp, Homo sapiens
caaattatcattcgtacattcccacgggcatgctcgaggtgtatagtcattgaattgactgcttataccattgttcctcttcgtacttcgattactttttaacacctgtgggtatctataaaccattacacttctatgcctcctccacctcgcactgccactggctgcctgttacaaacaaatgcacctcctccacgaattgcacttgggtgagttggagaagctgctggatgttgcccgggacgaataggtttagcaatctgtgcagaatgccctcttctggccatattctttgacctgactgcttcctttatgcgatctacttcttgctgatagcgtttgcgatcacgagatgcattttctttagcttctttcagt

SEQ ID NO: 550485 - DNA, 349 bp, Homo sapiens
acctcagatcggctatcggcgaacacttgagacgctattgctagagtctaaggcagcagtccgcaatctttttggcaccaggactggtttcgtggaagacagtttttccacggatgggaggatgatggttatgggataaaactgttccaccttagatcatcaggcattagttagattctcatgaggagtgcgcatcctagtttcctcgcatacgcagctcacaacagggttcgccctcctatgagaatctaatgctgccactgatctgactggctgtggagcccaagcagtaatgctcgctcatgccccctaccccaccttctgctgtgctgccgttaggccgatctga

SEQ ID NO: 550486 - DNA, 279 bp, Homo sapiens
ggtccaggggctcacaccattagttcgagaatttcggtaggatggtgagcacatgtcaccagcagtcagaatcttgatagcagtcctatcatcttctcaccacccagtctgcactaaagaagcataatgaggtacattgtggaggctcctacctggtagcccattatactcgtcccggccaagggaggtgattcgcatgactctggaaggtggagtttgctgtggaccactcatgggccattgcactccagcctgggcaacaagagcgaggctgtctca

SEQ ID NO: 550487 - DNA, 280 bp, Homo sapiens
tctgcggtcgctctagatgatccctactttccacaggccagtgatttcacaatgtgagtgctgtcagcaccaaagggaatggccaacaggcatgtgcggcctacagcgtccagcacccagtatgatggccaggaggcacggagcagcctggctgtcccagagaaagcaggagtcactggacacaactggacccaggtaggcatgtatgttactttcctgtggctgttacagcaaattaccaaaaatgtggtgacttaaaacaacagaaatttattttctc

SEQ ID NO: 550488 - DNA, 213 bp, Homo sapiens
gagaaacacagtaacaacctgatctctcttgcttttccccacaagttcaaaacagccaccctgcagatttccttgctcacctcttttgtcattctgtaacttttcctgtgcccttaaatagaacactgtgtaaagaaacgtaagcccgtactgctttacttcgcttagattcttactctgttcctctgtggctactctcccatcttgaaaatg

SEQ ID NO: 550489 - DNA, 172 bp, Homo sapiens
ccacaccccgtctctcaccaagagttactgattttgctcatccacttccctacacatctatgggtatcacacccaagactacccaccaagctcatacaggggaccacacccgacacttagacattcggacaagcagaccccagcggggggttcctttggcttcagcccctca

SEQ ID NO: 550490 - DNA, 442 bp, Homo sapiens
  misc_feature (2)..(2): n is a, c, g, or t
  misc_feature (136)..(136): n is a, c, g, or t
  misc_feature (200)..(200): n is a, c, g, or t
  misc_feature (209)..(209): n is a, c, g, or t
  misc_feature (222)..(222): n is a, c, g, or t
  misc_feature (272)..(272): n is a, c, g, or t
  misc_feature (282)..(282): n is a, c, g, or t
  misc_feature (344)..(344): n is a, c, g, or t
  misc_feature (355)..(355): n is a, c, g, or t
  misc_feature (364)..(364): n is a, c, g, or t
  misc_feature (376)..(376): n is a, c, g, or t
  misc_feature (412)..(412): n is a, c, g, or t
  misc_feature (419)..(419): n is a, c, g, or t
  misc_feature (425)..(425): n is a, c, g, or t
gnggggggtgggtggggagaggcccccagcctaagggcccaggctcctgccttcccaccacccgtccaggaagcagtcataaagtgaaagggctccagaggtgatgctcacagccctgggttcggctcctttcttncctccctgaagcgctgggttagacgggcaccatcagcccacctcacaggctcggcgtcgggtgngctcgtggncgctaatgctttntttccactctgaggtgctgctccagatttggggccctcccagagggcctnggagacaccnttggggaacagggagaggggctcggtccctgggccttacacagcacttctgctcaattaatnaattcaggttncctttcctnacgcaacagctnttcctccagagggggtgggactcggtactttttctnacacggnaatgcncccaggagctctctggc

SEQ ID NO: 550491 - DNA, 180 bp, Homo sapiens
gtgctctcaggattcccaatcttcagggtcaggatcctctttgctctgtgcttcgtcacccacgtagctgtcttttgtcccattcccaccatcaccccctgatgtctgggacgtcccacaactggatgggaaaacacgccctggtgagcactcgtccccacgcaaacgccggcctataca

SEQ ID NO: 550492 - DNA, 113 bp, Homo sapiens
gctgataggcggacactgtgggaggcagtgcgtactgaagccacacaccagagaggacacggccacaagagtcaccccaccccatctacctggcaccgctcaggccaggatgg

SEQ ID NO: 550493 - DNA, 941 bp, Homo sapiens
  misc_feature (764)..(764): n is a, c, g, or t
tattattattattatactttaagtttctagggtacatgtgcagcacaccaacatgacacattgtttgcttttgtaacaaacctgctcgttgtgcactttgtaccctaaaacttaaagtataatacataataaaattaaaaaaaaaaaagaatttcaggggtccgggataataagctcatggcattgtggctccaggttgtggctcttgaccccttcccacattttctccaggttgggtatctcttagaatgtgtttacccttcacagagttgagtgtgggagcgttaaagaactacgtgtgtgcataggggaatgtggaacttgctgtggccacacttccaaaagctctttgggccagttaatttccttggggtagagtgaggaccttattgagctgtagacttactttcctttaaagggttacgactgacttttttggaccccaaggttctcattgtaatgggaactaaaaacacattctagtgtgatcgtgcgcaatagaatttaacaatctcacacacaagggcgccttttcccccgttctctgtgttgcgcaaaccccctcttttgtgataactccccgaggggtgttcaaccttaagtggcctattgtgggatagagaacccccgattgtggaggatcatgctcggtcaacataaacttttactctgtccttgggggttcgaggaagcccagtgttttcccccccgcgggccctctccagcacagaaaaaattttttgcaggaagggcaggacacagangctgacacctccccaattagctgttgacaaaccgtcggggaacaaaagggttacacgttcgccatgggtcacctacgagaaactttaatacaaggagggcgacgccgcactacgatttgtacctaacgaaccacgagcagagttccttaattcccttttttgacaactggggcaccc

SEQ ID NO: 550494 - DNA, 944 bp, Homo sapiens
  misc_feature (773)..(773): n is a, c, g, or t
atgtctcgtagaacctgcccctatttttccccccaaaacaatattttgggaaacacatagaattggggcatccacgaattatccccgacaaaaattgtggcgcttaacaatatgacaagtgccatccctataagtctattccacaacgtcattacttgtaacaaatgcccccgcccttttttcccaaaccgaaatgttgcaatagattttcaagccgcccccctccttaatgatgtcccgcccgcccgattccttttctctgcagttctgtgcaccagcaaaaattttgggtgcctccgctgctatttaaagtaatgagcagcgccttgtggggataaagagagaacaatctcccgcttttggaagttgattataggcacctcccccccccttcgttacgtgggtagccacgccgggctccgccccttaggcagaagataatggtgttgaccctctcgttcggttaatttcgctcactgtttcccccacacaatcggggtgggcccccatttgttataaactttcttgggatgtgggtctgaataacatcacaagcgcatgtatttataatcgcgtggtgtaacaggagaaataacatttttaaatacatcgcgggacagacttgttcttcacgaggtatttgagcgcccccccgacgagtgttcccccgtcgtcttgggaggatccatgcaacatttcgcccttctatataggcacacaggggcttcacagaattatacataaacagggtgccgccagcttgttataacatntgtcgcgcccttactaatgcgccaatgctcgttattaatcaatctcctccggggcattattaaaaggtggtctttgtttacagtctatcttgggaaacggcgcagtactacagtcgtcggcttctaataatgtcaaaattaaacaattttccccccccgctctacaaaaca

SEQ ID NO: 550495 - DNA, 759 bp, Homo sapiens
tggataacaaccggtttaattaactatccaaagggaaagccgggtaggatattggggtaagggtcggtaattaggtagcataacttggtccccttgaatcaagcggggacccgatccaatctaaaacagaaatttcaaattatatttcccctcaaagttgaaaggggcggaggaagtcctccaaagtgggtggagacattctcaagctctacatcaacacacatcgggaccgggtgcagcatccatgttaattctaaaagaaggaggcttacggctcagaaagggggcagagatttcccagtcatcgtgggcttattaaaagcggtttagaataacgccacacttttagctagagtgtacacttagaacagcaagggtttataacaaggtctaagagacactaatacgggttttaacagatacgtagtggattacacaacttcagctccactccagtggcaaaagggcttctcaacgtgtgaatctaaaccgggtggggggacacccggggtgcttaccctcttttgaaatgaccaaggtgctttttaaaaggttttaaccactttaaggatgaaactcttttcaaaattgtggtgcactacattatctggtgttgtggccaatttcaaccttttactgtaattacctagaggttgaataaagaatatcctcagaggatgagtataggggggagggcccaagggggggtgacgggccaaacccaaggggccttggacaaggtatgggcccacaagaagg

SEQ ID NO: 550496 - DNA, 386 bp, Homo sapiens
gagcatcccctggacaggagatggagggtcgatgaaaagggagaggtcacggaactttactctctgcatcccatccctgctcgagtagaattgtggcattaggctatattattactctcaaggagtaatttgtcactcgggactctcctcattgcaactcacattctccccatcttccaataactatcacttccttcattcctttaagttcacgaggagccttcatagccaggtaacggttagcacatactcctttgatagacacaactcctctctcttctgctttcagtagtagctcgatgtgagtgtcgcttttctcccggaccccgtcaactcggccgtcgtgtctgatacgagagatgaagccccgcgtttcagcagtacag

SEQ ID NO: 550497 - DNA, 877 bp, Homo sapiens
gggcccaggcttacagttgtccacgacaaacccaacgaggattccgccagaccacgtgaacgtgccgacaacgtcaggtataccggctactacggtggctgcaggcgcgcccgggggctcgagtggcagcagtcttgggccacagtggcctgagacgggaagagcccccggggagcaccatgcgcttgggtcagccaacgtgctctagcacaagccgaagggtggcccaaactccttttggagtgccttccagctttccagccagcgtggcatgtgaggaggcatccagccacggggccagagcaccacagagccggaggcctccgacggaagggaagcaggcatgccccaggcggagaacgaggccccccagacccatgggcatacgcatcaaagtggagcccggcccgagggaaaccaaaggctccgaggacagtggacgacgaggatccactccagccacccggccacaccgaggcccgagttcacctctggtccataccgggcaggggtcctgaagcaggatccggtgcggcccatggggcctggaccacctcaccggggaccacccacgcccaccctcctgcacgcgggcttcctgccgcacggatggtgcggggcctgtgcacacccggcaccatccgtttacggccccgacggagctgggccatggtgtacccagcaccagcagaggcatgggtccgggccccgcgccatcccggaggcctttaacaccgcacactgggcactgcccatacccaggggcccgcagaggcaccaggctgccgcggaagggggactgaggactggcagagctgccggcgccagagcctgcgacaaccgggtcccccagaattgtccgcccgctctagacaca

SEQ ID NO: 550498 - DNA, 409 bp, Homo sapiens
  misc_feature (34)..(34): n is a, c, g, or t
aaaaggggcctttggggggggggcctcctgaccntgtccggccagaaaagttgccactgggaaacctggacccctactgaatggatctgctggcacctagacctcagagaagggggaactgaagactgaagtctgaccactgttctttgttgaaaatttctttctcaggggcttggagggatcacatctacaatcctgagctaatattctcttctgctgtccccaaaatttaaacgaagcttctcttaacccattgcaaatgagaaaaatctttgaatctacctatgactataagcccttatttcaagatatcctgcctttttaggccagaaccaaagtgtaacctccatctattgatttacaattttgcctgtaactttggctttcctgaaatttaccccagccttaa

SEQ ID NO: 550499 - DNA, 133 bp, Homo sapiens
ctgacagtctcgtggccggggcagccgctccccctccttgtctacttatgcaggatctgactgccgttgaggccgatccagtggctcctggcctgtaggtgaacatttcccacagtgtcaccccgaacagggt

SEQ ID NO: 550500 - DNA, 460 bp, Homo sapiens
attcgcggccgcgtcgacctggacccgctttacgtcacgggggttggcgatcaggatattgcgcccgcccaggcacatgaacatcaggcagttcaccgtcagcgacagcacgtgatacagcggcaacagggtgacgttggtttcctgctggttctcatccagctgattgccgacccaggccttggctgcatcaggttggcgaggatattacggtgggtgagcatcgccccttggcatcgcccgtggtaccgccggtgtattgcaggaaggcaatgtcatcgtgggccagcttgaccttcctgacccgcagcgttgcgccctgcttcatcatccgtggaaaacggatcgcccccggcagatggaaacgcggcacctgtttctggacatgccgcagcacaaagttcagggccgcgcccttgagcgtccccaccaggtcgccgatggcgtcgacgcggccgcg

SEQ ID NO: 550501 - DNA, 891 bp, Homo sapiens
  misc_feature (877)..(877): n is a, c, g, or t
tggaatgtggttcttttatatgttagggagaattcatgaggctttgtagctgtgaagaatgtctgttttggtatatatgcgtttgatgggtgagcaagttcgatgtgtggcagttaggatcagtgtatggtaggggaatgcgctgtttgtacatagggtaagcatgggcataccctagtccctcagagtctgttcctactgtgtactcaccatcggtgttcggaatcttgaaccttgtccttagtatatgtctttatcgtagagaccttcttgtcccgtcctagagggtgaaatcctggcacctggcacagctagcctcttctctgagctccatgtcccatgataaactcaggcctagacctgatgaaggctgccctcagaggctctctgttggcctccagctcctgggataagccgctctgcccacaccctactaggctgtcacattccctgccacgttgcgcaccgtgcaccaggtacactttcaagacactgtaaccactagatgttatttattgagctggcgcctgggacttgggatggggctctgccctacagtgagcagcctacacaggaacggctcctctcgcgagcggcccgggcagggaccgtgtccctacactcaacacctcgctctccagcccaatcttctgggtaccagacctgcttgtccctttttgtagaaaacacttttaaactttttaaaaatggtaaacgctttgtttcagcagatactggagagagtctgacaatcaattcacatttgtttaagccattattagctaaactgtcattgtgcatactctgaggttccctcatggagcgtccacagatccatttttagggaagggagttttggctcaaaacgatcgatacnccgagccgtccacc

SEQ ID NO: 550502 - DNA, 103 bp, Homo sapiens
agtatatgggactctggttcttggagcacaaacatcccatgggtgtggattcagccatcaggaggaggtttgaaaagcgaatttatatccccttttccagagc

SEQ ID NO: 550503 - DNA, 893 bp, Homo sapiens
  misc_feature (1)..(1): n is a, c, g, or t
  misc_feature (289)..(289): n is a, c, g, or t
ngcggtcggcggatcgttgtcccgtctttcttcctttggattttgtttcttctttgtctgtgtgtgctcgcacgtgttgtgaccgcgctttccggggccagtgtgaattgggggtatggtccgtagcttctgcattgggacccagggcatcactccttttcggagggatcccagatttggtgggtcagggttgcggccccggtgtcgctcggtgattaacctttttttaagccacgtgggggcccctggtcagttccagtgacctcgggaggggacattgccgctggcncccgtgggcaccctgataggggcatcttgatgtagcgttagcaaggtttacaaacaagggcgcgttagaagccgttgccagtgggggtccgctgaaagtaatcctgggcgaatgccgaccgcccgcatcttgtcttgctcgcgctgtatgaggggaactacagccaccctgggatatggactcctacgcccccgagtatcggatccgccagtgctcttggaaaaatgaagacaagaagggtctgcccaagtgtaccatttacacccaacgcgggccccatgacgtgggacgctatgatttgagagcgtcctgggtcaaactgggcacacacctaaggtcttcagccaatggggctgacctttacggggtcacacgaggaggcaacccctggagctttccaggccctgcataaggctgtgctgagccactcgaacgagaagggactgtagctgctggggcaacatgtttttatgaggccataacccacatgtctaaacccccccgaggtcaaagttcaaccaaccccttgtctttttaaagggtggcccaaaacccaatttcccctttttcatggggaaaatggtgaaatcccaaacaaaaaaaa

SEQ ID NO: 550504 - DNA, 205 bp, Homo sapiens
tctagaggatccctggccctcagttcataaccaccagtgtattcgccgcccctagagtagcgcgccctatcccgcatggtgggcagcacgccaaggacagccaggtacaacagcaactcatcgcaccgttcgcagaagacggatccgaccgtacgctgggtgcacagcgcatccagctgatagacggcggctacgagcgtactct

SEQ ID NO: 550505 - DNA, 304 bp, Homo sapiens
  misc_feature (51)..(51): n is a, c, g, or t
  misc_feature (149)..(150): n is a, c, g, or t
tttggggcctttgggaccctggggcaggggtgttttctccttaggcccaantgttcccctggaggaaaaagggaaaaaggggtgtttcccaacacctgcctttgaccccagcattttcaaagcaaagcctacaaaagggcagttatttnnaaaaggccacaggcagttcaggcctttttttgttccatccccctgcctcccattttggaccacacctgggatggtgcagggaaaaatttgcaccccttagttgggcagccaggagtgcccccgggaatggataataaaaatattaaagaattta

SEQ ID NO: 550506 - DNA, 173 bp, Homo sapiens
  misc_feature (62)..(62): n is a, c, g, or t
agcctttgtcccagacacacacacgtgtattctcatcttttcttttttcttttctggacaantctcatctgtcacccagactgagtgcatggtcgatctcggtcactgaactcgctcctgtatcacgcattctcctgcctcagctcccagtagctgtgatacaggcgcacaca

SEQ ID NO: 550507 - DNA, 207 bp, Homo sapiens
  misc_feature (161)..(161): n is a, c, g, or t
  misc_feature (180)..(180): n is a, c, g, or t
atatgggtgagcctctccaatccaaaccttttaaccagcaaaaccaaaaaagaggaggcaaaagttagatactgtaatcaaaaaaggtttctggggaaggatgagttatgtctgtcatcaggtttaacacgatgcacatcacataactatcaagattcccncaacacaagtttctgaatnggtgttcagactaaggctcacaatata

SEQ ID NO: 550508 - DNA, 1028 bp, Homo sapiens
  misc_feature (997)..(997): n is a, c, g, or t
gctgtgtcccctctggacctttgtgctgtgcccttgcgtcgtgtttcgcaatgccccctgaggcctccatcccttgtcttgcttgcactcgtgccattggctcctcatgtacctttctgggggaaaacatggcactgggagccaagataatggtgcttgttcattctcatgggacgtgaagcacctggtgtcctccactttagcacctgctgcctttcaaccgcgttagtcctgtgatagtcccgttctaaagtcccaaatcttaacgttgcgcttactcagctatcgacctcataggggtgagctgcccaagagcatcatcaaccaggtctctgtctccagactccagctggattttgccaaccacctgcgacaagcgcactggagtcccaccctgcctctgaagccaggtgtctgtaagaccagcctgctgttcccacactgtgcccacgctgcactggtacacacgctgctatcacggagaatccctatctggaagcctgcaagtctaagatctcctatctggtgacagtgggatggttcgacgttcgtgctttagagtatgacactatggattcagacttggtgaaagttcctctagtaccaatggataacagggatgaggctcttggattaaaaggtaacttcattcactgaatagctatgacatgagggttcaggcccctaaaataattgtaatactttctttctgggccctgtatgtacccacctaagaccatctttaaagtgctagtcggcatgatatggcgtgtggggagatgctaaccagcagggctctgagaagtcattgcttcatgaggctcaacgaatgccatagcgctggcagtacatgtgcacaaagcagaatctcagagggtctcctgcagccctctgctcctcccggccgcacgcacaagcaacaccacagaacaagcagcaccccacagtgggtgccttccagaaatatagtccaagctttctctgtggaaaaagacantacccccaggggggaccaagtgtctgtcccc

SEQ ID NO: 550509 - DNA, 200 bp, Homo sapiens
aatttcttcccccaaacttcttgcatgttgaagatatttgagctatttgtgatctaaaggagtagggtattaggcccttttgttgggagccccaattccctttttttcctaagttacaggggaaggaaggaaggggaaggccttaatttgttttccagaggaagaatggcatctttgcttaaaatttctaattcactggg

SEQ ID NO: 550510 - DNA, 114 bp, Homo sapiens
  misc_feature (8)..(8): n is a, c, g, or t
ctttcttnagctgaggtctgtgtcggttattagcatcagctttttcactttcctgggttcatctggaaagcctggtcacccactgtgttctcacaccacagagtcaggcagtag

SEQ ID NO: 550511 - DNA, 140 bp, Homo sapiens
taaaaataaggtctattaaggatgtgggaaaaaatcccctatgatttcattttattctcataaacttctcagtgaaaatttccagttcaggcctatactcttaaggtcctttattaaatgcccccaagatcacctcttgg

SEQ ID NO: 550512 - DNA, 192 bp, Homo sapiens
tcaggtttgcgacactggagctgagttacgaccccgacgagccgcctcgttgaagctgctggacatcgacacgcgcctgggacgctgtcgctggcggaattgcgccccacccgagcgcctgggggtagtgccgctcaatgtgaggcggcccgacctgctggccgaggagctcaccccaggtttcgcagatct

SEQ ID NO: 550513 - DNA, 359 bp, Homo sapiens
cacgagggctactctgagctgtgacagacacagtctcactctgtcatccagtcaggtgttgtggtgcaatctcacaatctcagctcactgcaacctctgcctcctggtttcaagcgattctcctgtctcagcttccctattatctgggattacaggcacatgccaccatgcccggttaatttttgtgtttttagtatagacagggtttcaccacgttggtcaagctgttctcaaactcctaacctcaaatgatctgcctgccttggccaatgtgctgggattacaggcatgagccaccatgccccgccctgaacttattaaatctttattattattaccatttttttttttttttgaga

SEQ ID NO: 550514 - DNA, 640 bp, Homo sapiens
  misc_feature (94)..(94): n is a, c, g, or t
cgggctcaagaattcggcacgaggtgagccatggtcacaccatgcaactccagccagggtgcaagagtagaccttgtctgaaggaaaatctaanatatacgaggaatatttagaactcaccattaagaaatgagggtgggggaaggagagccatcaggaagaatggctaatgtatgctgggtttaatacctagttgatgggttgacagatacagcaaaccaccatggcacacctttacctgtgtaacaaacctgcacatcctgcacatttatcctggaacttaaccaaaataaaactcaacaataagaaaatgaacaatctagttaaaaaatgaacaaaagatgggaacaggcacctcaccaaagaagatatacagatggcaaataagcatatgaaaaatgctttggccagacgtggtgactcatgcctgtaatcctagcactttgggaggccgaggtgggcggatcactgcaggtcaggagttcgagaccagcctggccaacattgtgaaaccctgtctctactaaaatacaaaattagccaggtgtggtggtgggcacctgtaatcccagctactcaaggaggctgaggcacaaaaatcacttgaacccgtgaggtggaggtgcagtgagctgggatc

SEQ ID NO: 550515 - DNA, 1144 bp, Homo sapiens
  misc_feature (399)..(399): n is a, c, g, or t
gtacatgggtagatagcatttgcaaggctctaaaggatttgagaaggataagatcggttcacgttagaaaggtagagaagtagaaggtatctgctcttgggttgcaatgaagcagataagtaactaagaatctaagattatcagggtaaaaggttgcttattatctttgtttcatttgtctatttttctatattctgttaattttggaccattagggggtactgcatctggtaatgtagccccatggtctagaaaatctgcaggaaaggacattagagcactagcagggcatacagaggacaagatctactgagcgcttctctagggagactccatagacagaattcgtcccagactttgacaagcttttcctcacatgctggctctgtcgagagaccnctacgtagttgtctgcaaacaacgaaaacaattggcactgagggacattaagagtagtcacacagggatggcccacgcgtgaatatttggaggtaacccaaaaaatcagggagagtgtgttccaacacgatttgtttttggccacatgtggactggggttccactcggatgagcattctcgtgaaagcacggtcataagagtgggatttccagcctcaaacccgtggggtcggctacagcatgaaagttgtgtttacagtgccctttaggcaaggggggccggtagaaagatccacatagtgagcgcacccacggagatttatccaaaccacggggggtatcgaaggggatttataacgggatgaatgaggtggttggtaggatatcgcataattttgaaacgggccgaattttggaagggaattttacaggtgtgggggctatcacaggagggacggcgtaacttttaagaacacagaaaaaaaatcagtttcaaaaatatggtcggcgcattggtaaaaacaccgggggaacatagaatcccatcttcggggtgaaagatggtctttcgcaaatagttctgagccagagttccaaaggacagaaaacggttcatctggcggaacctggggtggcggccatttttggtgatagggatcttccgccactgggacttgagttcaccgcttataagtgggtttaaggaccttgtacctttggtcaccaggggtaaccccccacttgg

SEQ ID NO: 550516 - DNA, 629 bp, Homo sapiens
  misc_feature (43)..(43): n is a, c, g, or t
  misc_feature (179)..(179): n is a, c, g, or t
  misc_feature (245)..(245): n is a, c, g, or t
  misc_feature (273)..(273): n is a, c, g, or t
  misc_feature (324)..(325): n is a, c, g, or t
  misc_feature (349)..(349): n is a, c, g, or t
  misc_feature (353)..(353): n is a, c, g, or t
  misc_feature (368)..(368): n is a, c, g, or t
  misc_feature (384)..(384): n is a, c, g, or t
  misc_feature (386)..(386): n is a, c, g, or t
  misc_feature (390)..(390): n is a, c, g, or t
  misc_feature (396)..(396): n is a, c, g, or t
  misc_feature (437)..(437): n is a, c, g, or t
  misc_feature (442)..(442): n is a, c, g, or t
  misc_feature (451)..(451): n is a, c, g, or t
  misc_feature (455)..(455): n is a, c, g, or t
  misc_feature (478)..(478): n is a, c, g, or t
  misc_feature (495)..(495): n is a, c, g, or t
  misc_feature (499)..(499): n is a, c, g, or t
  misc_feature (518)..(518): n is a, c, g, or t
  misc_feature (521)..(521): n is a, c, g, or t
  misc_feature (528)..(529): n is a, c, g, or t
  misc_feature (549)..(549): n is a, c, g, or t
  misc_feature (553)..(553): n is a, c, g, or t
  misc_feature (613)..(613): n is a, c, g, or t
tcagatgaggccagaaaggtgggtgggactggtcttcaggggngccagatgaggctgaggggctgggcctaggtcctggagtggggtcagctctgggacccttctggggctgtgtggggaaggggctgggggccaagaggtccaggaggaggctggcgatgagatggctggaagcaggnggttctagggaggccctaggctcctggttatcaggtgttcaccgtgctaataactgaggatccccngcccctggcacccagctggtggaggggntactgtcttggaggcatcactggttccacaaaagggagtggtgaatgggcnngatgggaccaccccatgcccccantaantcaaccagaagcttngcccggagcagcagcngnggantccagnagctgggggcaaacaggatgcaagggcggccacaacccagncagcngaggccganccancaaggaacgcaggctcagagcanacccccttgggacagangganaaggggagggggcggtgcntcncaaatgnnaagccgaacactgagcaccncacnggatacgagagaaggcaagccccttggtaggacagatagggaagatgccattatacctgngaggtctgtgaaagtg

SEQ ID NO: 550517 - DNA, 123 bp, Homo sapiens
gaggaggatacttctctggctagggacagctgggagtggagttctttgcatgagaaaactgtaaactcttgtgcatagccgggcctgtggatcatgtaatatgccatcctgcgaggggagcca

SEQ ID NO: 550518 - DNA, 1318 bp, Homo sapiens
caacgacggaggtggctctgacaggagcacaagatgtcagctggacgaggtctagacggaaatacaacacagactgtgtgcagggttatgacccacagcaaagcccaggagatcctggcccgaggatgggcctaacagcactcacgccacctgccataccaaccccaagagtgggtcaacgttatatgcctggatagactctatacgagaggctatcatccaatccatagctagtcggactcaggacggcttatacactctagactatccataggctcctaacgcgcaatacccagtgacgaggcaacaccgagtgaacaggacacacacatactaggatagcataaaacatagaaaccctaaggcgccaattacagaatgcctcgggcacggagatcagattgagatcgaaatcccaagtacaccttggagctctatggcctattcctacgcctaccataaacccacagcgaatagtggcccatacagacagacatacccacaaaggactaccacaatcgagacacgttaccaccatatacccagcgcgccccacccccacttggcattggaccacaccccccaacagccaaaaaaagacgcccatatagagagagttggaaattaccacggagaggaacacaacacgagacctcggcacagccacaagctcaaactaggcccaacaagccttagaaaaacacacgcaccacatacagaacatggaggaaggcagatcgccgatccagaggtatacccacgaagcaagactgaaccaccacgttggacagtattgcgagcacacagaaaattaccaaaaacctcggagacgttcagggggcaaacgtcaatacccttgagaacaaggaatatgcaccacaacaggactcatattggcacacacacgatatagcatcctgacgacacaatatacaaatgatctccattcccaactccgcgacgcctcctcaagcccacgtaggaacagtctaaggcccccaacaggaaaggaacagagagcaaaacaaacgaagaacagccacacaaccacccgagacccacacccgcccgtcgaacgacacagcagagtgcgaacgacgagacacacacacaagcagcacgagcaacaagtaaagcaccgaaaccacaaagagcaacacacgacacccgaagacgcagtaacaacgacagcaccacacagcacaacaaacacctggtaccacacatacacaggcaacagcacaacacgaaaccgagagaaaacaaacagcagcgcacaacgaaatcagatgaggacaaagacgagaaacaacaatag

SEQ ID NO: 550519 - DNA, 377 bp, Homo sapiens
cgacctctccctacgtatctataggtttgcatgatgtgtttccattttctgtttaaaaattttttttggatttccatcttaatttcttcattgacccaatgatcattcaagagcacatttaatgtccatgtatttgtacagtttccaaatttcttctggttatggatttcaagttttattccatggtggtctgagaagatacttgatatgattttaacgtttaaaattttgttgagccttgtttggtgtcctaacatatggtctatcctggagaatgttccatgtgttgatgagatgatggtgtattctgctgctgctggatgaaatattctgaaaatatctgttaggtccatttggtctaggatacagtagggaga

SEQ ID NO: 550520 - DNA, 165 bp, Homo sapiens
cactgggctgtttgaagagaacagatcatgaggcccatcaacataagatatgcaataagatttctttatacttggggtttaatgattcagttcatactgacattaggcattatttactttggctttgctttctgcatcatctcgcctccgcacccatgtctgatt

SEQ ID NO: 550521 - DNA, 259 bp, Homo sapiens
tagagatcccctatgtgtcgatcgttagaaatgcaggttatcgtcgattagatatagtgctgcagtcaacatccttgaacacaaatatttattccactgattatttctttctttcttttttttttttttgggaaagggattctcactcggtcccccgggtgggagtgcatgggcaaaatctgggctcagggaaaccttggcctccccagtaaaagggattctcggcctcagcctccggagaagcgggaactaatagggc

SEQ ID NO: 550522 - DNA, 219 bp, Homo sapiens
tgctatactgtacacagtcctggacacacaatctacaggccacactggaattttcaactaaaagaaaaaaaacaaaaaatgtactggggtgaggaaaggggttcccattgtactcaatcttcaaccaacctaatgcatctttattattccaacccttttcgaacgcaaatatacattctccttggtattatggtcttaattaatgactgagtcacaggg

SEQ ID NO: 550523 - DNA, 435 bp, Homo sapiens
cagtcggtctaccattaatggtttcaattacatggtgttattcagggacgtttccatgttcccctatccctgggtacttgaagttgactgtatgctaaaaaagaacaatcctaattattaaaagtcctgaatcataaaatgatatatataaactcattaaatggtaagaaaaaaaagaatgttctgattattttgcatatatagaattaattttgatatctaaaaaaaactccactcaattatttttccttgaaagtagtatattttttacttctaacccaatacagcagtgaaaatccagtcatttcagctaaacaatactgtggactcgtaaatatgagttcgatcataaatcctctaagtctgaaggttaaaaaaaaaaatccagtaacagacacttaaaaaaatacacaaagtggattttaagaaatccat

SEQ ID NO: 550524 - DNA, 439 bp, Homo sapiens
tgcaggtgatcacgttcagccccgtgtgggacgaagagcccttcgacatccccgaggtggtgctgcccactgcctgcattcacttcgcattgcagcctttgaggaggggggtaaattcgtagggcaccggatcctgcctgtctctgccatccgctccggataccactacgtctgcctgcgaaacgaggccaaccagaccgctgtgcgtgcctgtgcgcatgttcatctacaccgaatcctcggactacattcctgacgaccaccaggactatgcggaggacctgatcaaccccaatttagcacgtcagcctgatgaaacagagggcccggaagttggcccgccctcattggggagagtgaggctcaggctgggcaagagacgtgccatgagacccggtctcagcagctggggtctcagcctgtctcaaagcccatcccc

SEQ ID NO: 550525 - DNA, 396 bp, Homo sapiens
  misc_feature (6)..(6): n is a, c, g, or t
  misc_feature (376)..(376): n is a, c, g, or t
  misc_feature (379)..(379): n is a, c, g, or t
ttaaanccccaaaattataaaaacccccggaggacaaccctaggtaatacccattcctggaccctaggaacaggcctaagatttcatgacaaaaaaactatgcatctgagaaaggtctaatatccagcatctataaagaacttaaacaaatttacaagagaaaaacaacctcattaaaatgtggaaggccgaggcaggtggatcacctaaggtcaggaattcgagaccacctagtcaacatggtgaaaccctgtctctactaaaaatacaaaaaattagccacgagtggtggctggcacctgtaattgtgccacgggaggctgaggcaggagaatcacttgaacctggggagatggaggttgctgtgagccgaganttngccattgcacaccagcc

SEQ ID NO: 550526 - DNA, 278 bp, Homo sapiens
tgactctaaggatcctggctccacttggttgcagaggctgggggtagatattgtgttagaaacaaacaggaggggtggccaggcacagtggctcatgcctgtaattacagcactttgggaggccgagacaggtggattacctgaggtcaggagttcgagaccagtctggtcgacctggtgaaactctgtctactagtaaaaatgcaaaattagccaggcctggtggcacaatgcctgtgattccccgttagtcgcggcaggctcgaggtaggagaatt

SEQ ID NO: 550527 - DNA, 314 bp, Homo sapiens
  misc_feature (253)..(253): n is a, c, g, or t
gtcacccaggctggagtgcagtggcacatcttggctcacagcaacctccgcctcctgagttcaagtaattctcctgtctcagcctcctgagtagctgggactacaggtgtgcaccactacgcccagctaatttgtgtatttttagtagagacggggtttcaccatattggttggccaggatggtctcaatctcttgacctccggatcaactccccttggcctcccaaagtgctgcgattacaggcgtgacacncgcgcccggccgccaccttcaaatcttgttacgacataggcacattacccgtcttgacatg

SEQ ID NO: 550528 - DNA, 397 bp, Homo sapiens
  misc_feature (69)..(69): n is a, c, g, or t
  misc_feature (99)..(99): n is a, c, g, or t
ccgcttgagagtgccacgacagggagacaaagcagcaagaaatattaaaataacgtcaaaagttagttngtgataaggtttggctctgtgtccccaccnaaatctgacccccaactgtaatcctcatgtgtggggggaggatcctgatgggaggtgactggcccacaggggtagtttcccccatgctgttctcatgatagtgagggagttctcatgagagccgatagttttaagtgtggcacttccttgctcttgctctctctctcctgccaccatgtaagatgtgccttgcttccccttcgccttctgccatgattgtaagtttcctgagacctcccaagccaggtggaaatgtgagtcagttaaaccccttttgttcataaattacccagtctca

SEQ ID NO: 550529 - DNA, 106 bp, Homo sapiens
caattgccagctatactaccattgtctgtttaatcaagaatccttgctgctataaattggctgtataactcttggttggctctagtgaaaataagacaaactgtcc

SEQ ID NO: 550530 - DNA, 292 bp, Homo sapiens
cctgaatgcagctgtgtttttttttttcctctgctccaggctctcatcaggcttcatgcatggcattgggttgttctttctttctaggttaagactgatttttttgaagcatcagcccacttgtcttgtgtaatgccccacattttgggattaatctgatggttccctcacgatggggttcaagttaaacatttttggcaagaatacttcgtaggggaggtgtacattttcttgcaggggccagatcctaatattttacacttggcaggccatgcaggttctgtcacaacta

SEQ ID NO: 550531 - DNA, 510 bp, Homo sapiens
gaatcacaagcacatcctcaagtgacgtatttcggcagtctgcagatcaccagtagtcatgatccatctgagggtcatcagtattaaggtagggacatcctctaagtagtctggcatgactagtttttcatttggaagccaacagaccaatatcacagtgcccctcatctgccccactcatcaactacatctgaccactccccttctatcatcattccccacatcgtcatatggtagcctcctgagttcatgaactaccccctccctgccctatgtccgctgtcagaagcccaggagaggcctcttcatcagctttgcctgtagaagcccgagtgtacagatgagtgtctctgcatcagtcgagcctcacttctagagtcacccacaatccgcccagcttcccctaggctcctccgcaaacttctgactctgttaaaaaagaacctgttcttgcccagcctgcagtcagcaactctggcactgcagcatctagtactactgaggtgtaag

SEQ ID NO: 550532 - DNA, 147 bp, Homo sapiens
gctcggtgccacatcagatgtgattacttctcgtactgcattcatccacatcagacatcagcctccttgtcagaccttctccccttcctttcctaggtccattgcattgaagagggacccagcaaccaagttcctttctctagattg

SEQ ID NO: 550533 - DNA, 113 bp, Homo sapiens
gcccaagattctccttgactgcttgcaaaaacatattccgaacattgtgaagatccatgaaaaattcttcaacagacaacttctatggggtccagagaggaagtactcgccca

SEQ ID NO: 550534 - DNA, 869 bp, Homo sapiens
  misc_feature (147)..(147): n is a, c, g, or t
  misc_feature (261)..(261): n is a, c, g, or t
  misc_feature (287)..(287): n is a, c, g, or t
  misc_feature (289)..(289): n is a, c, g, or t
  misc_feature (291)..(291): n is a, c, g, or t
  misc_feature (357)..(357): n is a, c, g, or t
  misc_feature (359)..(360): n is a, c, g, or t
  misc_feature (374)..(374): n is a, c, g, or t
  misc_feature (378)..(379): n is a, c, g, or t
  misc_feature (383)..(383): n is a, c, g, or t
  misc_feature (393)..(393): n is a, c, g, or t
  misc_feature (428)..(428): n is a, c, g, or t
  misc_feature (480)..(480): n is a, c, g, or t
  misc_feature (488)..(488): n is a, c, g, or t
  misc_feature (491)..(492): n is a, c, g, or t
  misc_feature (509)..(510): n is a, c, g, or t
  misc_feature (521)..(521): n is a, c, g, or t
  misc_feature (531)..(531): n is a, c, g, or t
  misc_feature (547)..(547): n is a, c, g, or t
  misc_feature (550)..(550): n is a, c, g, or t
  misc_feature (578)..(578): n is a, c, g, or t
  misc_feature (635)..(635): n is a, c, g, or t
  misc_feature (714)..(714): n is a, c, g, or t
  misc_feature (738)..(738): n is a, c, g, or t
  misc_feature (742)..(742): n is a, c, g, or t
  misc_feature (770)..(770): n is a, c, g, or t
  misc_feature (775)..(775): n is a, c, g, or t
  misc_feature (805)..(805): n is a, c, g, or t
  misc_feature (859)..(859): n is a, c, g, or t
caaatgctaataaaacctttatttaaaaaaaaaaccaaactattctttatttgatagccctgggacatggtgccctccacccaataaagcaccctccagcaaccctcccacccctcacccgatacatagacatagggacacacacanacacacacacacacacacacacacacacacacacacacacacacagagatctggatccgtcttcacttcctgttggcctgagcagtaccaataacacactggttcaccttggangcaaagcgtagagagttgagggactngnanacgttctcttccagtggagaaatgttcacaaacatgagctttttagcactaccacccagagagttntnnagcaggtaggttantttnntgtnccggtaaggnacgtgggactccttgttgctcagggccatgataancagccccagcgtggacaggctgctgtaaatggccttttttttccgaaagttnttcccgcnccnngggggggaggggtaagnnggggtcaagtngctcactccnggccaggtccacaagnttnttgggggccccacactgcaggcctcggntggagttctccccagaaatttgtaggtggaatacactgtggctgcgtgatgaccgtncattctgggctgtgcgggccacagccgatctctggcgggccagaagaagcagggcgtccacttctttctcacaggaganagggacatatcgagcattggtganagtnagcccctcactccctggccctgcacggngaatntcacactcgcccccttgacccttccgggtnccagtggccagcaggtcccggacagtctcattgtagatctctacgtagcttgcnacaaagctgt

SEQ ID NO: 550535 - DNA, 404 bp, Homo sapiens
ggtccacactgccaaccctgtgctttgaagagaatgttttagttctgaaactaactatcccaggattattagatgttaaagtctcataagtagggacagagtggtgagttagcagttgagagcactgtggacttctggcctcccctggcagcaacacacaaattacttaggtatctgtgtatcggccgaatgtatagatgaccagggcaactgtaaatgggagtgggctccttggagttagaactacaagaggttgtcagccacctgatttgggtgttagaaaccaaactccagtcagtcctctggaagaacagttcacgctcttaactgctgagccatctctcctatggctggagatacatatatttaatatattgtataaatatattaataaaacatgtatt

SEQ ID NO: 550536 - DNA, 847 bp, Homo sapiens
  misc_feature (147)..(147): n is a, c, g, or t
  misc_feature (239)..(239): n is a, c, g, or t
  misc_feature (265)..(265): n is a, c, g, or t
  misc_feature (267)..(267): n is a, c, g, or t
  misc_feature (269)..(269): n is a, c, g, or t
  misc_feature (335)..(335): n is a, c, g, or t
  misc_feature (337)..(338): n is a, c, g, or t
  misc_feature (352)..(352): n is a, c, g, or t
  misc_feature (356)..(357): n is a, c, g, or t
  misc_feature (361)..(361): n is a, c, g, or t
  misc_feature (371)..(371): n is a, c, g, or t
  misc_feature (406)..(406): n is a, c, g, or t
  misc_feature (458)..(458): n is a, c, g, or t
  misc_feature (466)..(466): n is a, c, g, or t
  misc_feature (469)..(470): n is a, c, g, or t
  misc_feature (487)..(488): n is a, c, g, or t
  misc_feature (499)..(499): n is a, c, g, or t
  misc_feature (509)..(509): n is a, c, g, or t
  misc_feature (525)..(525): n is a, c, g, or t
  misc_feature (528)..(528): n is a, c, g, or t
  misc_feature (556)..(556): n is a, c, g, or t
  misc_feature (613)..(613): n is a, c, g, or t
  misc_feature (692)..(692): n is a, c, g, or t
  misc_feature (716)..(716): n is a, c, g, or t
  misc_feature (720)..(720): n is a, c, g, or t
  misc_feature (748)..(748): n is a, c, g, or t
  misc_feature (753)..(753): n is a, c, g, or t
  misc_feature (783)..(783): n is a, c, g, or t
  misc_feature (837)..(837): n is a, c, g, or t
caaatgctaataaaacctttatttaaaaaaaaaaccaaactattctttatttgatagccctgggacatggtgccctccacccaataaagcaccctccagcaaccctcccacccctcacccgatacatagacatagggacacacacanacacacacacacacacacacacacagatctggatccgtcttcacttcctgttggcctgagcagtaccaataacacactggttcaccttggangcaaagcgtagagagttgagggactngnanacgttctcttccagtggagaaatgttcacaaacatgagctttttagcactaccacccagagagttntnnagcaggtaggttantttnntgtnccggtaaggnacgtgggactccttgttgctcagggccatgataancagccccagcgtggacaggctgctgtaaatggccttttttttccgaaagttnttcccgcnccnngggggggaggggtaagnnggggtcaagtngctcactccnggccaggtccacaagnttnttgggggccccacactgcaggcctcggntggagttctccccagaaatttgtaggtggaatacactgtggctgcgtgatgaccgtncattctgggctgtgcgggccacagccgatctctggcgggccagaagaagcagggcgtccacttctttctcacaggaganagggacatatcgagcattggtganagtnagcccctcactccctggccctgcacggngaatntcacactcgcccccttgacccttccgggtnccagtggccagcaggtcccggacagtctcattgtagatctctacgtagcttgcnacaaagctgt

SEQ ID NO: 550537 - DNA, 253 bp, Homo sapiens
cttgaggaaggactgtttctgatagaccttaccttttgggacaaagtgcaggagtggacagggcacctttgctagtcatgaggggggctcttaaaccggactactgcccctttattttttgccctggcaggatgacttctcggaaccacctggtgcaaaaggggctgctggagctgtaagaaacagtggagtgcaaaggcctgaagggtctcataggtgctaacttggaggccaagcaggttctgtctacctt

SEQ ID NO: 550538 - DNA, 577 bp, Homo sapiens
tccggctcgctacctgttgggtagcaacaagagtgaaacgtcgtctcaaaaaaaaaaagtcggggcgttgagggctcacaccggtattcccagcacttggggaggccaagaaggggtgggatcacgaggtcaggagttcaagaaccagccgggcctaagagggtgaaacccggtctctactaaaaatacaaatattagcggggcttgggggctgcaccggttaattctcaactactcagaggttcgtgagtgcaggagaattgctgaaacccaggagggagaggtttacattggagccgagatggcaccacgtgcacttctagccgtgggcgacagagcaagactccatctcgaaagaaagaaagagaagggaattcccccagggaaagtaccttgggcggatttcataaacaggtaccggaaggaagcagaggcttgtggaggacttccccagctcatgcagctattggggccggggcgtcggaaattaataacttcagagtcacccctttgatgaccttagcaggggactgcagtcatctggttaaggcctctccagggcccacgtcaatgccgt

SEQ ID NO: 550539 - DNA, 405 bp, Homo sapiens
ggaaggcatcggagactcgtttggacaccgagcaaaagcgaggccctgtgagcctgctttgagcggaacacatacccgggcatcgccaccagagaacggctggcccaggccatcggcattccagagcccagggtccagatttggtttcagaatgagaggtcacgccagctgaggcagcaccggcgggaatctcggccctggcccgggatatgcggcccacaagaaggcaggcaaacgcggaccgccgtcactggctcctattccgacctgctcctctgagcctttgagaaggattgctttccaggtattgctgccagggaagagctggccagagagacggcactcctggagtccaggattcagatttggtttcagaatcgaagggccggacacaagggacaggcg

SEQ ID NO: 550540 - DNA, 277 bp, Homo sapiens
gaacctggggccttccgcgtgatacgcatgctgctgtgtatcaaagttaaatctcctcagaagccttaaaaaatttctggatatatatccagcaaaaggttttatcctaagcaagaaaaacaacataatacactcaatcttagccaaaaggccaaaaagtgatgaaaaacttcataatgaagctggcataaccatagtccagaacccaaatgtgtgcttcaaattagctgtgttctcttttaatatttaaacaataaccctgcgctaaccatgctca

SEQ ID NO: 550541 - DNA, 276 bp, Homo sapiens
  misc_feature (203)..(203): n is a, c, g, or t
  misc_feature (221)..(221): n is a, c, g, or t
  misc_feature (245)..(245): n is a, c, g, or t
caactgcttgcaaaacacatacagtttatataccattttcacctagcaccctccccctaacaacctccacctggcaacctccatttaacccaaaacaaagggcctcaatgtggccgggcgcgatggctcatgcctgtaatcccagcactttgggaggccgaggcaggcggatcacgaggtcaggagatcgagatcatcctggntaacgggggtgaaccgtncttccactaaaaacggcaaaaaanttagcctggggtttggttggggggttccttt

SEQ ID NO: 550542 - DNA, 648 bp, Homo sapiens
aagtagattaaggaacacatttacttaatatgaaacgtatataaaataaccgtcaaaaatataccacagttcacatgaaatacggtagtcaggaatataagagctctctagcacataatgatacacgagcttaagcagaatgtcgcacgaggacagagtctgagtctcgagctttccagattaacatggtcaagacagtgtctcagcataaagataagaaaattcccataactaactatcagtacagcacaggccatgcttaagatgcagtggctccacaggaatggaacagtctagttctcaggtcagctgagggcatgcaggttaggtcaggagtattccatttactcgcaatgcttcgtatttatcatgtacatgccatacatctaagtatcacaggatgaatggttttcaattgcaaatttctggtataaacgatatctgaactgaatgagaatatccaatgtagattagatcacctagattccggttatggctaaacgtaaaaacatcctatgcaatatgtaactaaggcactatacaggctgtatctcggttacattgcgataatgtatccagtaaaatgcattaaaactcgtgatcagtttagtcagataaacacaatattatatatcatgtccatagtct

SEQ ID NO: 550543 - DNA, 236 bp, Homo sapiens
  misc_feature (4)..(4): n is a, c, g, or t
ccanccgcacacataacgcactcacaccctcccctagaagcaggagaatcgcttgaacctgggaggcagaggttgcagtgagctacgtagtgtgccattgcactctatgtgagttatgagtaggaaaactccatctcaaaacacacacacacacacacacacacacacacacacacacacacacacacacctctccctctagaagcaggagcacgcgtcaaacatcggggtcacgc

SEQ ID NO: 550544 - DNA, 343 bp, Homo sapiens
  misc_feature (321)..(321): n is a, c, g, or t
ctgcagcccgcgaacagcatgccgcctccgaccaagacgcctgacgacacagcacactcaacgtgttcatgttgctggcctgtcatgggtccgcctggctcagtaccgcctttccgtcaagcagcgcaccccgtggcgacttaagcgatggtgaatctagtgcaccatgcactttcctgctagactctggcctagttcaagctgaccaatggcagaaggactgcctgaagagtaaaaactgtgtgaacaatgactgactgccagtgttttccatgtatgcataggtactaacagcagggttaggaaacctgtctctaagtnatgcattacttctgtcagaagt

SEQ ID NO: 550545 - DNA, 264 bp, Homo sapiens
ggctcggtggtgccaagacccacaacaccatgtcaggtgtggcccacagagcttttgaaaatgatgttgatgccttgtgtaatctcccggatttcttcaactaccttccccttagcaggcaaggcccggcttccgtcccttaggtccacggtttccagtgtaccgtctttggtttctgagcttttacacacattgtgcccctgtgagtcacacacaagtctcacaccaaatgtgggacataatacactctcttgtttatgatgc

SEQ ID NO: 550546 - DNA, 172 bp, Homo sapiens
  misc_feature (36)..(36): n is a, c, g, or t
  misc_feature (123)..(123): n is a, c, g, or t
  misc_feature (135)..(135): n is a, c, g, or t
  misc_feature (150)..(150): n is a, c, g, or t
  misc_feature (155)..(155): n is a, c, g, or t
  misc_feature (163)..(164): n is a, c, g, or t
atgaaaagttttcccaagaaaccacaaacgattgtncattttttctccttttttgttaactttttgccacactcaagtcagtttaagtcctagcaaaaagacggtagttaggataccactgtngctgtagatgangtgacactcgtcgantttgncccggccnntgtctact

SEQ ID NO: 550547 - DNA, 363 bp, Homo sapiens
  misc_feature (237)..(237): n is a, c, g, or t
tcaggaaggagagtggggcgggaaggggtgctgctaagaatcagtcagacacttacattctcagaggtggagcctgaggacatgctcaggcgaacaaaaagggtgttttcctgctgtttcagccagagaaagagtaagaaaagggctaagtcggccaggcacagtggctcacgcctgtaataccagcattttgtgagtgcgaggcgggcggatcacctgaggttaggagttcgagancagtctgggcaacatggtgaaaacccgtttgtactaaaaatacaaaaattaggcaggtgtagtggcacatgcctgtaatcccagccacttgggaggctgaagcaggagaatcgcttgtacccagga

SEQ ID NO: 550548 - DNA, 557 bp, Homo sapiens
ggtcgggcggcggtcggagcggcggagctgcatgggggcacgaggcgcagaggaacaatgaaaaagaagaaagaaggtgtcctgctgtttccaagcatcaaagatcattccctagagtgtccagacgttgcgcccttgaatgcatggcagcagtggcacagggtgtggcggcctagcctggtgagcggtccttgaccacccgtggagcgtaggttcaaccgtgctagagcggctgacgtgggtgtgatcgctagcagcttcgacgatcgggaacctggcgctcatcctcttcgtgatgctacttcgtgggcacagcgggcactcggcctgcgcctgatctggctgctggcggcatcgatccatgagcagctgcggcggcgcgtgcattgttcggctgctggcccggatgttgcgcatgaaccacaacacaagggtttgaatccaagacgggtttaaccctggaacggggctgtggtgctggaagaattcccgactaggggggctgcacgtatggggtcccgtcggacaggtctgctggcaaggtcagaacggtttgc

SEQ ID NO: 550549 - DNA, 203 bp, Homo sapiens
ataacacactttggaccagatgatctctaaggtcggcaagcacattgatgtgctcactggcaaggtgggtggcccagtgactgcaggcatcggggctggcgtggactcctaactttgagtacttggtgaaatggagccatccgtgcttcatggataaagaagctcagtggcacatgttccttagatgtataacacaagccatc

SEQ ID NO: 550550 - DNA, 145 bp, Homo sapiens
tggtcgctctagaggtccccctgtgggtttgcttttcatcttctttatgctcccaatgggttttgttcagaaaatacaagcatggtgacagaggcgaagttaatgtcccctggagaaagtggatggatgacttggctggatagac

SEQ ID NO: 550551 - DNA, 415 bp, Homo sapiens
  misc_feature (23)..(23): n is a, c, g, or t
  misc_feature (49)..(49): n is a, c, g, or t
  misc_feature (232)..(232): n is a, c, g, or t
ccgccttcctctgcagttaagtnaaatactactgttagccccagtggcnagaatactgcgggaccataaatccttaaaagcctagtaacatgttgttccttcctaggaattcccattcagcctacagatttaaggtttatcagtagtatttcccagaaagatggtccgacacagtggctcacgtttataatcccagcactttgggaggccgaggtgggtgaattgcttgagncccaggagttcaagaccagcctgggcaacatggcaaaaccctgtctttgcctgtagtacccccagctatttgagaggctgaggtggaagaatcacctgagcctggggaggtcagggctgcagtgtgctgaaattgcacaactgcactccagcctgggcaatcagagtgagaccctgtctttaa

SEQ ID NO: 550552 - DNA, 218 bp, Homo sapiens
gcgagagagggaggtggcttgatctagggcccgctgaaagaatagggtaataccactgaggaatcgcacttgttgaggtcctcacaactactcgatatcctacggcgccaacaccgacactcaacgtcttgggctgagagcatgcggaagatagtgagagaatggagctcccatgtgtggcactcgatatctatcttggcagtcgctcgtcatttgat

SEQ ID NO: 550553 - DNA, 884 bp, Homo sapiens
accccagagagccctagcagccccacctgcctgccgcctggcctagttaccatcacacccctgtggatggagcctgcagctgcctgcagccgtgccccagtcaccattcacctgcaaccaatgatgcatgctgatggcctgatgacccatgcatgcctgtcctggctagcctctccctgacttgccagctgcctcatcatgctgcggaggatatcaatggggctggaagtagaaggagcaggtggaagcattgggaagctggttggctcaccgggaagcgcgagccgtctagaattcaggatgagcgccctttgactagagagagatagaaaagagaaatgagtccagtgagcgagagcgagaaaacaggtatctatcgagagaagcagagaagagatagatagagttacagaagtggtaaaatggagaaagcaagagagtatagggattaatcaagttcgaagtcaaagagaagagtagtaagaagacacataggggaagaagatttaggatagatatagaggtaacaatcacagagaataattggagccagataaaagagagagtacagattaaagaagagctaaagagaaaagagataacacgataatcaagtcagagagagataacgcgaagaatttagagaaagaatgaagaagtaggtacaacggagaataagtagaaacagataaggataaataaagagagagacaacaagaatgtatgattagtagcagagagaggcaagagcgagtagaagtaagtattgagagagagagagcccatgtaggaaaggcagatgtagaacgaagaatacaagacaggggaaggagagaggagagagacatagaaagggaaatgagaggtaggagaagaagaagtcg

SEQ ID NO: 550554 - DNA, 121 bp, Homo sapiens
cacaatctgcttagcccgagtgacagcctcaccatacatcttgctgctttcaggaccacagtcctagcccatccagccagcaggtatgccagaagccatagtggcttggccagtcttggca

SEQ ID NO: 550555 - DNA, 674 bp, Homo sapiens
ctctctctctctctctctctctctctctctctctctctctctctctctctctctctctctctctctctctctctctctctctcgtatagattgagcggatagaaacaagaagatgtggcaagagttatatgagagaatacacgaggaggcaaaatgatatagatatttaaagcgcttctgcggtgtttttgttttttaaaagcaactgcggttgtgcagagccactctttcctacccaaaaaagacgagttctgaacaagacaagactgtcatattgtagagaccttggtgtgtgagaccataaaacacagagtggataggcaccctagtgacttaccaatactgacgagaagagaactcttaatactgagagatattaaaaagcacatatatactccttgcatggaaaagcaaaacaaatgcaaagggggagggcggataatttcagaagccaccgcataggaaagggtgaacatgggctcaaccctctaactctttacggggggagaagaccaacctacacccgtaaaattaataaagggtgaaagagagcaaaaaatggcgcacctataaaaaagggggtttgtactgaaaaagttttgaagagtttcaagggccccctatatttaaaaaagggagagccccgggggttatgtgatgggacaccgggccgg

SEQ ID NO: 550556 - DNA, 1477 bp, Homo sapiens
  misc_feature (1130)..(1130): n is a, c, g, or t
ttgccggcgtgcgaagacattgccgccccgccccatgatgaggactcttctttggtgggagtctgagtgaagctgtgtcttgttcactcgggggggcaaccacaacttgagggggggcgcgtattacaagagcatgtcgccaaagaagaaagagtgtgttgttagctcgtgtcatcaaacaggagagttgtttcgcgtctgtcctgtggcagcgcaagcccggtctgctggtcgctggggtgtgaaccaccgctcctgacgtgattgtggttggtccccccccccgccccagaattgtgggtaatgtgccgcattggcttggggcggctgttttgcacacgggtggggtgttaccacggaggtgggagtgttaagttccgtcctggagagcccccacttcgctccaggggcgcgcgaaatatatgcggggtccccggggtcttaattggcccccccctcgttgaagattggggaagttgggcgcacaccaacgggggcgttacgaaccacttgtggccaacaggcccacacgagtgttttgctccttggaaagtccttgtatatagggacgacaacagagagcttgttgtagattcgccccccgcctgttatctcggggttgactacaagagaagagccctcgggaagaaagagctggggcgcgccctcagaaaatgttctcctctcgaagagagatttctcgggctggaagagtcgcgtggggcacacatcctgcttagaaataatatcggtttctccctcgtgccacaaggcggcccaacatgtgtggtggctctgagagagaggctttttctccacgagactatttgcccaccccctctttgtggtgtcgctcgtctttgggcgtcgtgtgtcgctcgagataatatgagagagccacagagccacgcgtttgtcgcgcgcttggggctgtgtgtcactctcaacatcatccccacagtgtgggacccacacagagagaggcctctgtctctggagagcctctggcgcacacaggtgcacacgcacacagttcttctgcccccacagaatataaggctctcacagagagaggcgttataatatgagatattatagttccgctcataatatacctcgcgcacaccccnacacttcttataaatccacagctgggtggtaaagaaccgcgttctccacgaacactcgtttgtgttccacacattgccacacatcttataagtgttatagtgagagtataaaagagactcgggtgtatattgaataaccacattgcacttcgtaaaaccctctcacgaaaggaaaaggaagaaatgttttgtggagccacctcttggttttacttttttgggctgtggcacgctctttaaagttatattatagtttttataaaatcacgtactttttaatggaaaccaacttgacccaaaatcttgtcaccagaattttgagaccccctttaaaaagttaaatgaga

SEQ ID NO: 550557 - DNA, 272 bp, Homo sapiens
  misc_feature (214)..(214): n is a, c, g, or t
cgtaaaaacctcactggaacgagttgaaacgttggactcaatgcttgcttttttttttttgggggtataattggtaattttccaaacctgattcagggctcactcatctctctatgttaaggacaccctttgcaaacttgacaaatataatcaggtcactgttcccctttcagatctttctgctgacccctctttcacccactgccagtcaggncattccttcattctacttcgggagttctgcatgaagactctcccttcctttcctttgc

SEQ ID NO: 550558 - DNA, 464 bp, Homo sapiens
  misc_feature (17)..(17): n is a, c, g, or t
  misc_feature (172)..(172): n is a, c, g, or t
  misc_feature (176)..(176): n is a, c, g, or t
  misc_feature (218)..(218): n is a, c, g, or t
  misc_feature (402)..(402): n is a, c, g, or t
actttccaagtaatggngctgaaaccattatcctttattaaaatccggcttctaataaaagaagtaaagctttaaaagcttcagcgcctgctcctggtcatcactaaccagatttacttggagtacatgtgaaagaaaacgtcagtcttcctgtaaatttcagcggcgcggnttanatggggagcgtggaacatcaataaacacttaaataagtaccntttacttcatggcatgaataaatggatctgtgagacccactgctacctggtactactttcagtatgttccccctcagcccctccagcttgtgaagcatactctgagtagataatttgtcatgcatgccatcaattaaaattctcctaagcccccatcattgtgaaaaattacctcagtttccangacttggtgatcaagatccctgccctcactttattttctgcttattaaactttattaaactt

SEQ ID NO: 550559 - DNA, 468 bp, Homo sapiens
tgagggcagttcccaccctgttctagaatgctgtttgtgaagaggaatgactgaaaatctgaacaaaggaggattatgttgcagaggctcaaacatgtcacgtgaggaatggttaaagaagctggagaaattaagccagagaagaaaagacccaggagaaaagcagcaggtagtgatgataactgttttctcaagtaagagacgggctctcaggaggaagaggaactgatttcctttgtgtggcctcagttggtggtaacctcagtagaattttcagttaccttccaaaaggagagacgtgacctgccttttcatccctttaaacagtaaataaaacgtacactaacagcagtactcccactgggagtaccacttacaagtgaatactgcaggcgactgccagctaaagagactctctccttcctggaaaattaggagaccaatgtcctgaccaatgtggaagcatgc

SEQ ID NO: 550560 - DNA, 128 bp, Homo sapiens
tgatgtcgcgtgcatgtaggttgtcaaaatgcggaccagtctgtcgcagtgtcaagtggcgggaaggcacatcatgatgggcgaggtttgttatgtggttagcatggtggtggacatggcacgcgaca

SEQ ID NO: 550561 - DNA, 1318 bp, Homo sapiens
ggtggagagggaggcattctcattaacagtgcaaggtcgaaaggtttcatggagcgatacgcccctgtctgcgaatggacctggctgtctagagattgtggtgatcttcggtcgatgacttcgtggatgaatccgaggacacggaagaggctgtgggcctgagaaagaatcatgtcatacctatggagtgatggactcgagcgtacctccagagccaggtggacaacagcgtcgcgtgacctgtgtcatttacagcagactaggggcagtgactccttacgtcatgggtcggctaggagcgctcgactggaacggacgcctgagtacctctgtcgcgtccaccaagccgggtaggcaatgtactagacgagtggcggcgggacaatatgcgccagccgagaacgtaccaaggagggcgaggatccctgaagagcgaacgtgaactgggccagggaatcaggagtagtggcccggtccgtggtacgccatgtgagggaggccggccgtggtggcctcgagtgacatggtgtccaagccgcctcggggcgaaagctcgcttctttgggacctggtatgtctcttaggtcgggcatgtgcccatgagcagtcgaagagatcatgcaggccgtggagcataagagtcccatccaaattacaaccaggaacgcgtggggaacgaatctcgtcatgaatctgtgacaatatgcgcgaatttgctgattggaagcataagacacatcggaacatgcgactcaggcgatgccagaaggtcagatgccaatatcagtgcatggacgtgtacggggatgggacagcggtggtcgcaagaaaggtcgaggggaaaacccagaaagcgcatatggagaccttagaggcaccgaagaggctcgaccggggaatggcccggacgacacaactggtggagaccccggaacgcgagcaacctgagtctgtgcacgtgccagaaacaaccaacggaggacaagacacggcacgagtgaaggggaccgcacgcaaacgaaaacaaaaggaggacagaaagaagcaaacaaacagagaaagacaaccaaaggaggacacagaaatggcgcctagcggaccacggaggaggagcaacggatacgggagaaacagacaaccgggagataccaggagaaatagaacgacaacacaacgagaggaggcaatggaaacagaacaacacaccagaggaaaagacggcgaccacgcacaatacgacaggcagaacagacaccacagcaaacaaaagcgaaacagaggcatcaaaacaatagacctacaggtgagacacagaaaa

SEQ ID NO: 550562 - DNA, 137 bp, Homo sapiens
gttagaaaagcttaattagatacggtggacgtgttatacaatattttataacacaaagctaatgaatgaaataataaaaagatatcaatggattagcatatcaacagagttgcatgacatcagagaaactggtttag

SEQ ID NO: 550563 - DNA, 1025 bp, Homo sapiens
ggaaagaagaggaaaccagaggaagagagtccccggacaagatgatgcaaagaaagccaaacaagagccggaggtgaacggaggcagtggggatgctgtccccagtggaaatgaagtttcggaaaacatggaggaggaggctgagaatcaggctgaaagccgggcagcagtggaggggacagtggaggctggagctacagttgaaagcactgcatgttaagagggggcacagccctcctcccaagggaaagtgtatcgtatatcatgtattttttcactataaggaggattctctaggtataacttcaataaagattgtaagcaaaggttgaggctttgatggtctaattcttaattattggctgaatctgccttggagcactgctggtatacatatacttagccaaagggtaaaggaactgggccctactggtactgaatctgtgttccctgatcctaattcctatctgtctaacgtggaggttgatcaagtggaggactggaagggacttaggacggtccaaattggtagcaatattccaggtattccaaacaacttcaaacttgaaccccaagctggtcttggcaaactttcaagtggatgctagaccccctggaatggggggatatcacaaaaacgagcaaattggatgaaaagactccttgagccctatcagagcgcgtggaaatgtgatgtacatggaaccttttggcgtgtagtaaagccaaggcctctagagtgggttcttgtcccattatatcagcctatagttattaagcagtagggccagtaagacatgtgcccgtggcgataaggagatccttgtacaacacctgtgggtcacagaggaaaagtagtatcctatacggaacgacggggctagagcttataagaaccactgggatcgtcagaatggtccaaaggggagaagaagggagtggagaccacgagtatggttatagaacaccttatatggtagagatagtgctaaaggcaacgagtagacaatcatgtatcaagcggt

SEQ ID NO: 550564 - DNA, 215 bp, Homo sapiens
gataagcttctcgggtcttaattgtgtgtgtctcacgaaagaagcaagattagtatcctggctaattagactagtatctgtctctactgcttagtaaattattcatttcaacccagatctcttattcatgtcttgaacctctcttttatttattttggattgagtaaaagaccttcaggaccctggcaaaatcctgaaataatatcctgagctca

SEQ ID NO: 550565 - DNA, 118 bp, Homo sapiens
ggcagtcgagagtggacgggagcggcgggggcgtgttggcgcgcgcgcgcgcgtgtggtgtcctgtcggagtggctggcggcggacgggggtgtggggtccttcccaaacgcaagaag

SEQ ID NO: 550566 - DNA, 941 bp, Homo sapiens
gctgagacagggaatttgcaactaggtgactcagctagtgcaaagtaggtacgtagcaatactaatagaataacaacaaaccgggttaggatcagtgagtgcgatctctaaactacatacaggccacagaggtgtgcgacaccgaggcggtgctgaactgatgcgtataattcaattatctaggtcttataaggtatttacttcctattcgtactagaggcgagaatttggcgcagtaagacaactaatgagggggggggtctccgtcccatataatgtctaaccatttattatcaaaaggcttctatgacgtcgtatcgtctatgcattagcggttaaggcaacattggttgccacctttttagattcagttggtgagataataaacaatatgaagcacacatctggttcggaaagattcatactttctagtgcgaagtttggttaacctaattgaacttctctgcatattcccagattgcctgttgtggcctaagaatggggaaggatgaatgtgtgttgatgaatacagggaggggagaaagaggttaatacctgatcctttattgggaatgactcgtgggatttataagtggataggattttcctgggtcatgcattctttatgttgcagatatggtcttaatttctaaatatcagagagcgtggtggccgtactagtgatctggggggctcaaggcactgcaagggccagtgtggggacgtacggcaggcacgtagtatgtaaggatcaaccgtttgatcaagaaccgggcagcacgcatcaatcttcccaagtacacacagcgttcctacttcgggtgggggatggactcaagattggacgtgggcgcagttcccacacaagggacaatccaccaggaaggccagtccccagcctgagaagaagccactccgggagggctacaaaaaaacacaag

SEQ ID NO: 550567 - DNA, 796 bp, Homo sapiens
cggctgcgtcgggctggagcgagaagatgggggctctccacagagagtatacagttcctcgtaattcgcgcttgtggtaagagcttgtgaggatggacaaaactggatgtaggagacgttgacagtatagcgtgggcgcttggacgatgatggaagatatgacatttacaaggtggaccaggcaggtgattattgggccacacaaggagcgaatattatgaaagcatgaatatatagcctgaagagtagaatgtggacctaaataccgcagaagctcctccgtcagttagatttgtacgaagaattaatatgaaggaataaataattccagtgggatggtggagtgcccggaggatacagtgtgagcaaaaactggcagaattcatatagtcgattaaagttgtacttcaggagctaagacgttactgatgtccaaggaatatatgaagtttccatagtcagcagaaggacaagaatagcaacaataagtccagtggatctcaaactttgtcttaaatcaatgaacctgtctactctgtgttgccgtgtcttgccttaacatatcaccaagtggaaaatacacataagtaaactgaattccagctggtaagacatgaccctgacattgtgagaatatattactcattatggtgctcccattattgttgcaagggacaccggaggcaacatgcagcaccattttttcctctcgaaaggcctgcatttaaccattacctggggactcgcaatacaatcccgggtccaagcatccaacgggtgcaaatgcaaatgcgcg

SEQ ID NO: 550568 - DNA, 229 bp, Homo sapiens
gactagaggatccactgactttggacgcgcactgggaggttgcaggcgcccaggcagtcaagtcccctgctggcagagctggctttgacaaagtcagctactcagtgccaatcagccctgcacattcagcaggagacaggcgtgatgagctatggggccacaaccagcaatcagaggtggggaagaggccatggggcagagagccctgcataccaatgagggccttcca

SEQ ID NO: 550569 - DNA, 394 bp, Homo sapiens
cggcacgaggggctcatccacagtggcaatcttttgttttatgagaaccccccccctgattaccagattttagggggttcagtccgtcccctggtgttggttttaaaaggaggaggtggttttagacagggatggacccccccttttccctctttaccctgtcgcttttaatgaggcctcgtatatcctctctctttttgggaccccatagcccctgccccctcccctggatgcccggtaatgtatgtctactggtgggagactgtttggctccccggtttttttttttctggccccgagggccctttctggccactgggtgtttgtttccagtcctgtgggcttccctcttttaaaaatgtgtccctggttgtcaataaaatatttcctggca

SEQ ID NO: 550570 - DNA, 246 bp, Homo sapiens
tgtcgtttgtgtacagttgctgcctgggtgacctctggcccctgtgtttcagcgattctctcgtctcagtctctcaggtagctgggattactggcacagaccaccatgggcaggctcatgatttggtatttgacgtcgagacgagaattcaccatattggccaggttggccctcgaactcaccatatagggctcaggtgatccgccctgttcggcctcccaaagtgtcgtgactttgggcgtgacc

SEQ ID NO: 550571 - DNA, 711 bp, Homo sapiens
tctacaggatatctcttaacgccccaaactccactatggccaagaccaaagagctgtcataggacaccagaaacaaaatgtagacctgcaccaggctggaaagactgaatctgcaataggtaagcagcttggtttgaagaaatttactgtgggagcaattattaggaaatggaagacatacaagaccactgataatctccctcgaatctggggctccacgcaagatctcaccccgtggggtcaaaatgatcacaagaatggcgagcaaaaatcccagaaccacacgaggggacatagtgaatgaatgacctgcagagagctgggaccaaagtaacaaagcctactatcagtggctgactaaataattttttgccccactgtacctgtatatctctttacaattctatggtgtcttagcctggcccccagatctgctgtctagccaactcctactgtattgtcatagtcaagccaagcaacaatgtccatctgacaaaaacaataggagttggcaagatggcacaaacaaaccgggcaccaagttacccgtatctggtccaggtcaaagtatcaataagacaacatcacgttactcacttgtcgactattactcctggcggatgttttgctagaagatgaagtaggggggtgctggcatctcactctgtcaatagaggcagagaatggcccagggagggggggctgaagaaa

SEQ ID NO: 550572 - DNA, 216 bp, Homo sapiens
gacagtctggtcttcagtggtccaaagtgagcccctcacaacaggagacacttcagagatggtctgtccccagccacgcactcatgattgctttttatgcagaagtcatggtctgctgagtgccctgggtttggccaaaatgcacatgctgccagcagcagcacatgttcttggtatggtgtgggccactgtgctgaccctggcccccagatgcta

SEQ ID NO: 550573 - DNA, 436 bp, Homo sapiens
gatgcttaagtcctttgcataaaatggtgtatttgcaaataacccacacacatcttcttgcatgctttaaatcatctctagtttataatacctaatacaatctatatagttgtattgtctttttatgcgtattttaaaactgtattctattttaattttttccaaatatttttgatctatggttagctgaaactgaggatgcaaactggatatagaggaccaatttttgcgtgaaaagggcagagtcgcaccttatagttttatcctgcaccgtcagactctacacctgtgttctactgtatgccagccagccagcacaccagcaccataaggctttccgtcaaactcaaagcataacaaaatactgcggtctttgaaaaaaatattaaccatttctttacaacaaaaaggtcaacttctgagatgcttcttcctc

SEQ ID NO: 550574 - DNA, 197 bp, Homo sapiens
aaaaaaagggggaccccttttttcttgatggtgggccaagaggcccctgccgttggcttttacacaaaagaccttcgcccgtttggggggtaaaccacacccatgtcaatgtgtttgttttcatgggggaggtggagggcccctgttattgagccgcccgcctgtccccacccttgaataaattccatgttccccca

SEQ ID NO: 550575 - DNA, 250 bp, Homo sapiens
tcaacatgcttgcaactgagagtagctcctccttttctatctgagactcttcctcctccacatcacagcagcgaacacagctccagtgatcacatgctccaaagagaaccagtgccagcaatgatgcccacgatggtgatggtgggctgggaagacggctcccatctcagggtgaggggcttgggcaaaccctcatgctgcacatggcaggtgtatctctgctcctgtccagaaggcaccaacaccactg

SEQ ID NO: 550576 - DNA, 104 bp, Homo sapiens
tgggacctgtatttgatatttgtgatcagtgatcattgtacactgcgaaatagagtgtttgcttttgatatggacaattgtattcgttttaaaatccccggtcg

SEQ ID NO: 550577 - DNA, 255 bp, Homo sapiens
gggggccccccccccccccttttttggggttaaaaaggggggggggggccatcccccccccccgggggggggggggggggggcccctttccccccccccctaaaatgtttttttttttggggggggggggggccccccccccaaagggggggggttttttttttttggggttttttttcccccgggggggggggggcccccccccctttttttttccttttttttcccccggtaaaaaggcccccgggtttttta

SEQ ID NO: 550578 - DNA, 268 bp, Homo sapiens
aaatgacctatatccccataggaactgaaactcagtctaggtccagctgcagatggggagtcctctctttaattgctaaccatcctgcgccattatagctacactcaggagtgctcatcggacaagtcagttggcctgatcttctcttgcagtgtccctgaatggcaagtggggtaccttctgatgcagtctgcattcctgcactgctttctcggctcgcgttgtccttcttttgttctgttgaataaagcatattgagaagtgggga

SEQ ID NO: 550579 - DNA, 106 bp, Homo sapiens
ttcgattggcgggcactattaggcttgaactgctgggtgctaggatgacgtggcgtgaagagtctttcactgtggtaccgagcacacataaccaatgcttgaggta

SEQ ID NO: 550580 - DNA, 170 bp, Homo sapiens
tgggctctgcctcctgcaggagcatgcttatgggacaccgcttctgcgcgtctcttaacgctgctgtctgcgccgccacccctgtatacccggcaccgcatgctcggtccatagtccgttccgcccccaaaacgatcccgtcagcagactcatcgcaccgccccgaagga

SEQ ID NO: 550581 - DNA, 253 bp, Homo sapiens
tcagctaattttttgtatctttagtagagacggggtttcaccatgccagccaggacggtctcaatctcgtgacctcgtgatccacccgcctcggcctcccaaagtgctgggattctacaggcgtgagccaccgcacccagacaagtataaaaagaatcttaaggaagatagttcttagccactttccacgattttaagaacagataaaaataaatagctaattataataaaaagaagtatcagaactcaacca

SEQ ID NO: 550582 - DNA, 173 bp, Homo sapiens
ccggctcggtaccaggaaagtttatagggtcctgctgaagggtgctacgttggaatgaggtcattgtgcccgcaggttgtttgtgattagctgtttctaacaattgttcatacaataattgttcattattgttctcaacttggggctctccccaacctggggacccttcctta

SEQ ID NO: 550583 - DNA, 980 bp, Homo sapiens
ctgccaggttttttcattatatttgaagttatttattttacaacaatgggcgaaagatatggtctttaggataaggcagagaaacagatgtgcagactatccacggtgacccgggggagtggtgggtgtggacacatggttcggcaatctgattctcctgaattctcccagtcaggctcttgtggggaggcctgtggatggggggattgaactatttggaaacaaatgattctctatctcaggtgagaaagctggtcggaaacaaagggctggtcagctgattctaggccagcgaaaccaggaagctcttagaatcccaggcggacacccttgtgtcaaaagatatcccctaagagtcctttctgctttcttcacagatagatttgatgtaaaatgcagagtgggactacacgatttcttgccactccacaagtctgtcatcctagtatagatcatggtggtttccctcaagtgttatgttctcatgccctcaagtctgtaaattttgtctccagaaaaaccctcccaggatcccataccagtatcgttcctcatcactgtccatgtaccatgcagccatatggggggccgtgtgacacccaaaaccgtgagcttcagactttaaaactcatggggaggggccttcagagcagagttcacaggcgggtggtgctacatagaaagcttagtgtacaagtgtagaatcatttaggcagagactaattctagttcatggccatgtgatactgatgccagattagtgaacagcatggtccacatttaaaaagtgttcccagtggtctgcaatagagtcaggggctctccagtggggggccccttgaagaggggtggtcacgagccactggttcgaacgggaccctaggcacttggtcggggcccaggggagggggtgttccccaaagatggggagaagtggggatggggacaagggggggggtggctctctctcttacttcagc

SEQ ID NO: 550584 - DNA, 161 bp, Homo sapiens
ccggaccaccttacgaggctggacctcacacgagtgagagatggacaaggcatgctttgcagagagcacacgtgcttaggcttattaccaccaatatctaagggtcctctaaaattaatggactctccgtgctatacctgccaatctccctcgttaagctt

SEQ ID NO: 550585 - DNA, 369 bp, Homo sapiens
cccgggcataaatacactcttctaaagttgtatatacatatgcacattacatacattttaatttattgacaaaattaaccaaattaagatttggagatgtgggatgttcttgttttaaaatagcatgtttgaaaccatcagtttgtgtctaaaattagctgtagcacatggatgttgtccatattaagttattcgttgtattgatttatagaggtatacagaatttgtgttggcattattattttgttatcaaaagactacatattatctggatggctgataaactagatcttgtgtatatttgatctggtctgatttaaatcagactatagtgcatagagtaagttccgaagttcaaccgtctttccc

SEQ ID NO: 550586 - DNA, 105 bp, Homo sapiens
tagtatgcgaactgttcataccacgcgaagggagcgcccgtcggccccagctcgaagccatgcatccactgcaggatgtgagacccggcctcgctctgatggtag

SEQ ID NO: 550587 - DNA, 688 bp, Homo sapiens
  misc_feature (417)..(417): n is a, c, g, or t
gatggagaactagtctcgacgttggaacacttatacctattatctggcgcatgagagcgggagtcctaggcactggtctgggcctccttatcgaggccgagctgggccgaggcccaggggcgagagcgcgtgtctacgagtaactgacacaatcgaggagggtaaatcggtcgccatgcccccatggcgatatctgtagagtaatcgttcgttcgagcctattaaatatacgcccccgagtacgtcgcttttacaacgtaattgccctcagcgacgccaaacttacaagagcatgagttgacaaacgagtaaacaacgtgaagcaaagcgtagtccgttccccatacgaaggcgagagaaggcccccccacgtgaaaacacggaacttgaaacacagagtttaataaaagagaaaancccttgaaggaaaacccaaaaagaattggagagacgcggaaaaaaattctctggtatccgcctttccaattttccaacttttggcccccccgcaaaaggaaaatgcgccttaaaggggacgcttaaaagcccgggccgggcgaaggttcaccttggagttaccattatcctaaatagataccccccccctttctttaatttggagtcccccccgcaaacatttcccgagaaaataattcttccaattcaaaacaaaagcccggaagttaaa

SEQ ID NO: 550588 - DNA, 559 bp, Homo sapiens
  misc_feature (336)..(336): n is a, c, g, or t
tcggtcaaccagtgctggagtgcagtggcacaatcttggctcactgtagtgtagacttcccaggctcaagggatttctcccaccccagactcccaagtagctggaactacgggtgtgcaccaccaccacacctggctaatgtctcttttttttggtagacacagagtctcactatttagcactgattggtctccaactcctggcctcaagcgatcctcctgcctaggcttcccaaattgctgggattacaggcatgagccacaatgcctggcctctgctagttccgtattctctagagttgtctttactttgtgctagtgtgtccctcattgtgcngatcctctgtctcaaaaaaaaaaaaaaaatccagaatgactacagtgttaagctacggtggctcacacccaacatggtgaaaccccgtctctactaaaaatacaaaaattagctggatcgctagtgcacgcctgtaatcccagctactggggagcctgaggcaggagaatggcttgaacccaggaggtggaggttgcagtgagccaagatcacgccatagcac

SEQ ID NO: 550589 - DNA, 703 bp, Homo sapiens
tgtaaaactctgcttaggcgtgactgtttggaattccagccctgggaccgggcaggttgttgcatcacctgataatgatgaaattatctttaccattatgttcttacaaaggcttgaaactttgacttgcacattttagacatcgctttaagcagcaggattaaagcattgtcatctcgttacacctgacttaacgtggcagttcagttaaccctataccagtctttaagtttttggctgcattagcgtttacagtactttccacagcatttttatgggcggaactggtttgttcatcaaggagaagcagctcttctagtgaaagctgcaactccagttccctgaatgaagtagaaactgcactgaggcttcaacttagccgtgtgagcaatgatctggcctctagcaggctgtgtagatagtcacatgttttatgaaatttccctcagggattcccggggcatctgggctgtgcctcctggcacagagggcttccaagaggagctgtgttggatctgcagcctccctgcagggctgggctcacaaccaagccaggtctccccgctgggacaagggatccagagcccagtttctgaccccagtctgcaggtatctgccgtattcagttgagctgtgtaccaggtggaagagcggccaggccaccttactggcctgttaagttggaattccctatgggagttcc

SEQ ID NO: 550590 - DNA, 1218 bp, Homo sapiens
  misc_feature (698)..(698): n is a, c, g, or t
  misc_feature (989)..(989): n is a, c, g, or t
  misc_feature (1218)..(1218): n is a, c, g, or t
cttattaaacagatctgaaagccacaggggtgacagacagatttgaaatcacatcccagctgtgcaaaatatcgtctggaccatctccaaagccactaccttgctgatccttgagtttctcatctttcacaagggtagtgtggtcgtttgtatatgcatgatccagggagtggcgctatgaggaggtgtgtcctttttggagtagatgtggctttgctgaagtaggtgtaaccttgttagagcaggtgtgtcactgtgggcatgggctttaaggctgtcatcctagctgcctggaagccagtattctgctagcagccttcagatgaagatgtagaactctcagctcctcttgtaccattcctacctgaatgttgtcatgttcctacctggatgataatggactgaacctctgaacctgtaagccagccccaattaaatgttgtccttataagagttgactcggtcttggtatctgttcacagcagtaaaaccctaactaagacaggtagactcatgaccagatacagcactcagaggacttgaactagcagagcgggcgaggggtgcacctcacccaaggtgtacatctaataaatgatgctaacattaacatttttaagaccgactcctttattatctctgccaaaatgattacaggaaggtccggttgggcctggctaagagttcaagcaaccatnccgccggaggcaggttaccggtgagccgagaagggatatccagagccggggggcacacactccgagacacaggggccctggagccctaaaggacaagtcacacagtgttgttgtgttacccggaaaatgggggcagaagtggggaacctacccgcaaggcgtgaaccggagggaaacaccgagcctaagagagaaagatatatcactgcgaggggaaaaaaaggacgagccaaagcaaaaaacaaactaaagtgcgcacgcacgacagcagggggagaacatcgagcgacncgaaccgacgcgaagcaaacacaaaaaaaaggtgctgaacagagagggacacacacacaagagaggagaggacaacgagacgggcgcaacagacaacatacgacgaacgagcaggcataaagacacaacacgaaggatacaacacaaaatacgtgaacatgtacgagaggagacgagaccaccaaacagtgagagcgacaaacagagcaagccacaacgacacgtagan

SEQ ID NO: 550591 - DNA, 218 bp, Homo sapiens
acactgctgatggatttttgactaagacaggctgagggctctttccaggctagtgaggtccactgtaacatacatgcacacagaacacacactcatgcgcagcacatacataaacacagcgtcaactagcacacaaacagcgcaaactgctacaagtaacacacgaaaagcacagaaggagacagcacaacaaagaaacacaacacgaaacacaacag

SEQ ID NO: 550592 - DNA, 309 bp, Homo sapiens
  misc_feature (35)..(35): n is a, c, g, or t
  misc_feature (55)..(55): n is a, c, g, or t
  misc_feature (76)..(76): n is a, c, g, or t
  misc_feature (91)..(92): n is a, c, g, or t
  misc_feature (173)..(173): n is a, c, g, or t
  misc_feature (254)..(254): n is a, c, g, or t
gtcattaaagtataatcctgttgttatcgattttnagatgcagcctatccacgangtgctgcggcaacaagcctgngccatctggaggcanngcgccagaacctgcgccgcgccttggaccagtatctgatggaattcaatgcctgccgatgtgggccttgcttcaacaatgnggtgcccatcctcgagggcacagctgcaggtgcagtcccgcctgggtagcttgggtgctgcctgtgagcaaacacagacangaaggagccaaagcagatgggagctggagttgctggagctcctggtctgtatgca

SEQ ID NO: 550593 - DNA, 668 bp, Homo sapiens
  misc_feature (28)..(28): n is a, c, g, or t
aaaaggctgatagctggtatcacatagntggagtcagtgcataattccacgtggctttttttttttgggcacgggggacggatcaggaagatatattccggcataactcaatctgaaccagggatggtagttagttttcctcctggccttcccttcggtgtgaccgacccctgggccaaaaaaaaaacaaaaagcaaaaaacaaaaacctacccggtccgggttttttccctcccttaagtcccaccccaaaccccaatccccgggtggccttctatagagatgagaaaaaataataagggaaacatctttcatacgccactataaaataaggagaacctggatatactataatttttctcccttttcaaaggatggacttataaaacccctggaaatttatataggtggagacaatagaattaaaaagatcttcagccaggcctttctggagggagtaatccggctaaaaatgggtctaagtggtctgaaaagccagctctggaccctcttcacaacagtatcaccaggggctcccccgggtccatttaatgcgtgcaaaaagtcaggggtaccggcggcggggctaaatacataaggggtaccggctttaaaaaccaaagatggtaggcctgtgtgtgccctggttggcttcaccagtatatccta

SEQ ID NO: 550594 - DNA, 278 bp, Homo sapiens
ccccagtcttgtctcatgtagagtgaagatagctcacaccctcatttatctggccagttaatgaggctgactgctgctgcaaactgtgtgtgtgctttactatgttacaaattcaacatactaggtcattactttggttaaagaaaaacagaagtatatggtagaaagaagaccgatcacacggtctcagtggtaccacttcctagtgaaatgatcttgggccaggttcctcgctgtgtgacaattttcgtcatcattcaaatgggtaccaaagtttt

SEQ ID NO: 550595 - DNA, 107 bp, Homo sapiens
atgggagatgtcgaggtacacggcaggtctaagagaatgcaacagggctcagatgatgataattaagagtagccaacattaaagttaattttaaaaaatacaggtta

SEQ ID NO: 550596 - DNA, 750 bp, Homo sapiens
  misc_feature (394)..(394): n is a, c, g, or t
tcccatctctcaagcacgataacaagagtgaggataggttgagcccaggattgcgagaactgactgcgtaatgtctcgagaccccgtcttccctctgaaccaaacacatgtacctcagttcattgtctagagagccatatgagctcacagatgcctgcacatttaccccagtaggccctgaagtgtgggccccgtaccctctgtgcccagcggagttacggcgcctgctctagctcctcctgctttcacctatcccgcttcatgcatgcccagggtgttctctcctgaggctaagcccaacacacctgtcttttgtccacttctccaggcggaacattagattgggtgctctgggaagtgtgttgtaacataccaacctacttgcaagagcagncaagagggagctcccatgttgaattgttgttagctattttcccccctttcacaaaaactatttcttgacgacccttgagagaatttcaataaacaactttaactcagagcagaccatgacaaaaacacaacgccccacacaaacaaacaacttggccgcccccctcggccctcgggaagcctttcgcaaccacccgttgggcccgcggccccagtgttatcgtgacagggccatcggcggtccaaaagaaaccggcgcgaaaggcgtggctcccaccataaaaaggcgggggaacggcagctccgaacacatctgcatgggtcggggcatacgggcctcacgggcacggccctaaa

SEQ ID NO: 550597 - DNA, 384 bp, Homo sapiens
gagacgtacctctaacattccgacacgccagcttagatgacgcagaaagcggggggctaaccatactgtaggcacagagaagcgaaaacagagaggaatgagaagaagcagcagatggggcaagagtaacgtgagaagatagaggcaggaactggcaggacatctggcaaggatgttctggagctggagggacaaatatactcataccccaatgctacacaaccagaaagtaaggtgtactacttgaaaatgaaaggagatcatttcatttatctttcctgaagtggcatctggagacaacaaacaaaccactgtgtcgaacctcccagcaggctaaccaggaagcctttgaaattagtcagaaagaaatgagatgtcggacgg

SEQ ID NO: 550598 - DNA, 429 bp, Homo sapiens
  misc_feature (27)..(27): n is a, c, g, or t
  misc_feature (46)..(46): n is a, c, g, or t
  misc_feature (64)..(64): n is a, c, g, or t
  misc_feature (73)..(73): n is a, c, g, or t
  misc_feature (95)..(95): n is a, c, g, or t
  misc_feature (104)..(104): n is a, c, g, or t
cacaggcaagtccctaaagttaccttncccccggtttccagagganagatgggaatttgatganccttataanaaacctgtactctttggcccanacacggtgnctcatccctgtcattcccagcactttgggagacccaaggcgggcagatcacctgaggtcatgagttcgagatcaccctgggcaacatgctgaaaccccatctctactaaaaatacaaaaatcagccaggcatggtggcgcatgcttgtagtcccagcgacttgagaggctgagggatgagaatcacttgaacccgagaggcaggggttgcagtgagtgcggtggcagctgggacattaaccaggttgtgaaaggagccatgatgttattagctgagtcatgtcactgcacctccagcctgggcaacagagtcagactctatctca

SEQ ID NO: 550599 - DNA, 99 bp, Homo sapiens
tcgatcgagctcggtcctgccttctgtcgctagtgtaaggaacttgagcttttacagaggaaggccccaaaagccttctcccccagctccccttccctt

SEQ ID NO: 550600 - DNA, 129 bp, Homo sapiens
atgctttatttttccttgaaagctaggtatttatcaactgcagatgttattgaaagaaaataaaattcagtctcaagagtaaaccctgtgtcttgtgtctgtggttcaaagtcagaaatgattctattt

SEQ ID NO: 550601 - DNA, 643 bp, Homo sapiens
  misc_feature (590)..(590): n is a, c, g, or t
atcatgacggtaatcgctgtggggaggcacagctttatgacagagagaacccattttacagatgaggaaacagaggctcagggatgtaatttgtccagacttattccgcatgtggtgcaactagaaggaagggccgagcatctcctgcgtgcttgcctgtagcctgctgcagagatgtgaaccccaaatcccgtattcccacccggggaaggtgtgagctggctgaacccaagatacaggaagagggcagctcagctcagaccagggttttgcggaagtctgagtggatggcgccgtccatctgtttcccacgtgggcaggaaggcggatggtccctgctcctctcagtgggtggcgcacacggtgtagttatgtggcttgaggatctgggaaaggcacactcagttgcagctggtgtgctggcgtgtggcgttttggtgctctaaccattgtctgtgttcaactcccaagctacagacgggccccctccttgggagcgccagggatgttggcgccctggagccccagacagggagagactcagaggtgcctcaccctgacacctggggtgtatgtccagttctcccagngtagaaggggaaccacaggaggtggacacccggttctccggtggcttctttcc

SEQ ID NO: 550602 - DNA, 288 bp, Homo sapiens
gaggacccggctatacattatcctccccaataaagcaaaactcagctgcgttgtagaaaactccagttgatcacataatagactacgaaagggcttgaagatatgtgaacaacaaaaactaagagccaaacggggatatagataccccactatgcttaccctaaacctcaagagtaagatcaacaaaactgctcgccaggacactacgagccacagcttaaaagtcaaaggactggcggtgttcatatccctctagaggagcctgttctgtaatcgataatgtgatag

SEQ ID NO: 550603 - DNA, 157 bp, Homo sapiens
ccagttggcatgatccataggtagttcatggctagagtattatttgcttgatagtaagcccgcgggggacaagggaacttgcgtactttattcttattgtctatctctagcatctaacacacctgggcacagatcattgcagaacttgtcgcggatt

SEQ ID NO: 550604 - DNA, 834 bp, Homo sapiens
atgcgcctcatcgacataagtgtgatactagcatgtaccatctcatgtctatgaatgttagtatatcgatcatgcctcatatcctcgctagtatgcctagaaggaataatagtatggcggtacatgatagtctccgctcataaccacgttaagagagccacggcgcgctcttagcgcgaatattgtgcctagtggtcatacgttagatctttgccggccatgtgaacgccgcggtggtgctagcccctaatagtctcaatctccaacaaatatggctagacctacgtacataactaaactactccatgctaaaactaatcgtcccaacaattatattactaccacgtgacatgactttccaaaaaacacataattggaatcaggacaaccacccacagcttaatcataagcatcatccctctactatttttaaaccaaatcaagaaaacctatttagttgttccccaaacttttcttacggacccctaaaaacccccctctaatactaactacgttgattcctaccccttcaaatcatggaaggccaaggcattttattcggtggaccacctatcagaagaaaaatcttagctcgttaataataaatctcctaaaaatctctttattataactttcacaggcacagaactaatcatatttatatcttctcgaagcaattatcccactggtaatatcaccgtggggacagcaaagccgagcggaatcatccatctcaccaagggcctcctatatgatattacacaactggccaaattaaactccgcagattacggccatttgggaaattgcacctggctgcagtgcccggacttg

SEQ ID NO: 550605 - DNA, 738 bp, Homo sapiens
  misc_feature (3)..(3): n is a, c, g, or t
tcnaaagaagaagaagagcggacgggagcgaccacgcggcgacatagagccactcggtgccagtcgctctgaccctgggcgtctcgtggccgacgtgttgcccgaattgggtgccagtacgtgtgagagtgtgccataagtgagagttcctgtcgatactcttccaaggcccggagttcaaaaagccaagtgcgggtagattttaagggacagtgcacaggtcggggctgatttgcccctggtgttcttaataagaggccccccccgattgggatgtttcccacacttggggttatggctcttagcccccgtacctccccgagctttatgcctttcgcgcactgtgaggcaataaacagttgactttagccccccccaagcctccatcttgagctctagcactcaacactccgctctgggcccccggtgaaggaaccatacccacgggttctgcatttcgaaacacgacataatgtctttctcaataaagtaggcggacttacccccggtcttttcgtacccaagcaggcccccttatctggagttgccaacctcatttcctgtctgacatgttttaataacaaatcacccgcgatcttcatggttttcacctgggggctgggatgagaatgtgtccactaaggaccaccacaacgaggggaaactagaaagcccacctggcaaccaaaccgtgtcgtgccccccggcccaaaaacaaaaaaaaatcaaaccaaaaca

SEQ ID NO: 550606 - DNA, 148 bp, Homo sapiens
atccgggcaatggagctgtgtacttgcgaggccagaaggaacacaccttcaccatccaggcctatagactgtgtgctgagggccctgacggggcaaacaccaagaatgtcccacaagagccacttgtgcatagtgcgcggtcacacga

SEQ ID NO: 550607 - DNA, 206 bp, Homo sapiens
agcttctcggtcgcggaggtgctcacgccctgtaatcccagcagtttgggaggctgaggggggtggatcacctgaggtcgggagttcaagaccagcctgacgaacatggagaaaccctatctccactaaaaatacaaaattagccgggcatggtggcacatgcctgtaataccagttactggagaagctgtgccggccggaggcgt

SEQ ID NO: 550608 - DNA, 129 bp, Homo sapiens
gttggtcagggggccctgaaaaccctggtaatattaaaagtctttctcaggggaacttaatgtttttttaatgaacaatgtttccagctacaaatttttccaataaattgtcttcctttttgaaaagta

SEQ ID NO: 550609 - DNA, 272 bp, Homo sapiens
  misc_feature (154)..(154): n is a, c, g, or t
  misc_feature (232)..(232): n is a, c, g, or t
  misc_feature (234)..(234): n is a, c, g, or t
ctgtagtcccagctactctggaggctgaggcaggagaatcaattgaacccgggaggcggagcttacagtgagctgagattgcgccactgtactcctgggcaacagcgagactccgtctcaaaaaaaaaaaaaaaaaaaagaaaccatttatttnaaaaatgattagattgctatgcctcaactcatagaagatgacccttcaagaaaacgtgaagtagaacgggtgggccananatgaaacaggcaagtaaagtatttcttcggaaacattt

SEQ ID NO: 550610 - DNA, 985 bp, Homo sapiens
actattctctacaaaccacaaagacatgggaacagtatacctattgattcggcgcatgagctggagtccctaggcgcagctctaagcctccttattcgagccgagctgggcgagctcaggcaagcttcggtaggtaacgaccacatctacaacgttatacggtcacagcccatggattgtaataatcttcttcatagtaatacccatcataatcggaggcttaggtaactgactagttcccctaataatcggtgcccccgtatgtggcgttgccgcccgctatgaactaaagataagcttgctgatgtactatacctccctctctcctactcctgactcggatctgcttatagatggaaggccggagtcaggaacaggttgaacagtcataccctgcccttaggcaggtaactagtcccatcctggagcctccgtagacctaagcatcgtgctctcttacagccataagcaaggtgtgctcctctgagtctataaggggccatcgagtttctccatcacagagcaagtgatccaataataaaaacccccggccattaacccaattaccaaacgcgcctcttcggtgtgatccgtgctaatcgacgaggagtcctacttctcctatctctcccagtcctagctgcttggtatcatttatactacttaacagatcgtataactgaaaatcacctttttcgaacccggcggaggagagacccattctatatcaacaactattctgatttttcggtcaccgtgaagtcatttgtctaatctgaacaggtccggaatagtctcccatatggggtacttactaatgcggaaaaagaaccgctggggtcctacgggtgggtgagccaaaatatcaaaggttcccagggatcggtagccccgatatcggggaaaaagtaaaagaaattactcgcccaagtttccccgggaatttgaccccccaaaataagtagggggccaaaatcgagaggga

SEQ ID NO: 550611 - DNA, 109 bp, Homo sapiens
  misc_feature (64)..(64): n is a, c, g, or t
gttggaaaagtttatttattggggagactaagacgatgcaagaaggatttgcgtgggtttctgncagtctggatttttctcagcaaaggatcatttttgttttaccagg

SEQ ID NO: 550612 - DNA, 224 bp, Homo sapiens
ccagctaatttttgtatttttagtagagatggggtttcactatgttggccaggctggtctcgaactcctgacctcgtgattggcccacctcagcctcccaaagtgctggtattacagatgtgagccaccgaacccagcctgagtttctcgtctctcgtttaacttattttttgaaaaccggtagacttgtgggagcattttgtgataatttactgatctaagct

SEQ ID NO: 550613 - DNA, 187 bp, Homo sapiens
ccgatttcagggaatagacactggagacaatacttactcaggcatggctcatagaagtaggattctgtgtgtcttttgttccctatttccctccagctaaatccccaaccctggggaatcagaagaaagtcttttgggggatttttctccaattttttagggactattttcaagggggttattgagc

SEQ ID NO: 550614 - DNA, 1656 bp, Homo sapiens
  misc_feature (1197)..(1197): n is a, c, g, or t
  misc_feature (1405)..(1405): n is a, c, g, or t
  misc_feature (1656)..(1656): n is a, c, g, or t
taaaaactggattgtttatttcccatcaaccattttcccatggctgggttaagaccctatgcaagaacagcttaaaaccagtcaggtggtgtgcctccttacccatattcaggtggccgtgagcagtggggagctgcaaaccagatcttccggtggcaggctgagcgcctccagtctttcagtagggaattgctgaaataggcacagagggcaccgtgttacacctttcagaacacagtctgtgaaaccctcaggcgtgagatagcaggtgaacctcaggaagcgggaagcagttccattcacccgtgaaacattccctccgtgtggtcacgtgcctttcctcgagcagcgagcgcgtggcatcttctctttattttcaaaatcctcttctcagaggattcttctgtggtagaaagattacagaatctcaggcatgtgtacctctcccagtggcggtgttctcacgggggaaacagtggggtgccagcgcatgtggcgccagaaaaatttctcgcgagggcacaggaaatatcacaacccacacattttcaaaaaccccagcgtgtacgtgtgagatcctcccttttgagttgtggtgtgcctgtgtgagagtgggcaaatggtttcccaacgatttagcgcggcccagaagggaaaaaactcgtggggggtctaacaaacaaagagcggaccacagggggtatcagcggctagggcgttaacgcaatatacaggatatggcccatccccggtgaagcaaggagccttgtgagtggtgttaccaagcacccgttggagagcttcaaggagaaaaacccaacgcaaagaaaaaagccccgtgagggcatcccccccccgggaaaagagggggtggacgcagtgggaaataccgagggactacaagaagtggaacagtggggtaaccccaagcgtgaggtgtgaacacacgctgggcgcacagacacacatgttgcgacgaagggtggggaccccccacaggtgtggcgacaagatgaaggaccacaaacaatcttttacatagacaacacgatgcccccttcgtgttgggcacaaagtgattaattaccccctgggggaaggagaatatattatataccacaggcgttgcaagactactcaagcgacagggggcgttttacaccaaatgtgggggtacaaacaacaatgtagtggccncacgaagaggctactgtcccaagagcaaacgaaaataggcatcgtactccaccccaagaggagtccccaccttgggagagaaaatctatcagcagaaaatcattagaatgacggccacatacaacgatatttacacccagtttaataaagaaacgagtcagtcgtagtgccaccatagtgcgtgacaagcacccacagaacaagtggnaggtggccacacccacaatagacgaaggtcgaatcccacgtcgatgaggacgagagaaaacctaaaaggaggagcggacgcgcgcaaccacttctgatcgaggcggagacacactcaaggaggcctcgcagaacagtgtggcgaagacatcgcccgacgaaagaggagagagggaagaccaacaaaagaagagtgcgatgaccacctcgtgcctcaggcgaagacaacgagagacgataacccagcgatgn

SEQ ID NO: 550615 - DNA, 662 bp, Homo sapiens
agcggggctgctgcgctccctgcccccgcggtgccccctttcccgccgccccgctcctctctcaggcgctcaaagtggcctggaatttgtagaacgcccccctccaagcccgttggcagttgtcctagcccgctggcccttgcccccgcacgctggacgttgcccccgcgacgccccggaagccatggtcctgcctcccgcacctgccaagtccccgccctgccggagtctcgctctgtcagcccaggctggagtgtagtggagccatctcggctcactgacaacctccgacctccccggattcaaagcaatatctcccgccatcagccatcacccgagtacttgaggaattacagtgcgcccagcaaaccttcgacccggcatacattttagtacttatatacatagagacggggttacagccgatgtaggtcacagctggttctcaagctcctgaactcaagtgatctgctagcctaggtctcctaaagtgctgggattacaggcgtgagaccaacgaagtacggccaaaagcctttttaggatgagaaagaatcacttcagacttcgatcctgaagagcaagtgggctgggagaagaggaagagtatgaatgtgagatccaagaagcaatgttaggaacattaatacttacaaagaatt

SEQ ID NO: 550616 - DNA, 165 bp, Homo sapiens
cagttatattttcgcgccgtttctatgctgaataaggaaaaaaatgtacggttgaatctgtttcttctttaaattctgtatatttgaatgacgtatatcagcgccatgcattaacacctacacatattcctggtgtacctgagactctgaattctgtaactcatg

SEQ ID NO: 550617 - DNA, 148 bp, Homo sapiens
acgatacatgtatgcgtaacctggtgtaagtggggagctgtttcaaagtggtacctaacaatgctcactcgctcttctacgaagccagggctcaggtacccgtagcgtccggccccctgctccgcagatgggaaagtcagtgcgtatc

SEQ ID NO: 550618 - DNA, 330 bp, Homo sapiens
gtcgacagtttgaggcttaagaagctggatcgcctgccgggcgtggtggctcatgcctgtaatcccaccactttttttttaaggcaggcggatcacccgaggtcaggagtttaagaccagcctgaccaacatggagaaacctcgtctctactaaaaatacaaaaattagccaggcatggtggcacacgcctatagtcccagctactcaggaggctgaggcaggagaatcacttgaacccatgaggcagaggttgcagtgagctgagatcacgtcattgcactccatcctgagccacaagagcaaaactccgtctcaaaaaaaaagtcgac

SEQ ID NO: 550619 - DNA, 1567 bp, Homo sapiens
  misc_feature (266)..(266): n is a, c, g, or t
  misc_feature (328)..(328): n is a, c, g, or t
tcattatgccccttctgacatccaatgtagagcatgatctgtggactagagaccccgatccatgaactatgcatccctgctcgagatgctcaagcccccgacgcgaaccagcccaagaatgcgataacctccacctcctctctatgccaagctgtatccatatccatcattccaacgccgcgagcttgaagtatcttgattgcttgtgactccgctagtccactaaagattacacgattctagacttctttccgtagtgtgtcttngctaaggcgatccacgcagattagtggtctatctaccctcgccattattggtcatagacacncttaaacgctacccccacatgtatcgccctcgagacagagagggacttaccgatggagtgacccgcgcatacacaccatcaaagacataacaacacagaccacccatgaccaatcaccgtacacattctaagacaggaggcgtgcacctacatcttctttccgggggtgacacctccctagatgggtgtcaccctatcacttcaccccggagaattctctgtccaaacggcgacaggtcgtggccgccattgtgcagcctacgtctctcttatgtctaccaccatggggcgcccatgtgtcttttctgcccgatgttgtgggcccctcaccacgatggtcagcagtaggggggccgcccgccaaagaggagcgtcgcgagttgtgtacatctgcgtctactagcaataaatgttcacgccctctatggataacataatcatagaactaacaactcgtgtagcgccgaccataattgtatcgagccaaacgggctatttacaagagggggggaacaccacccacatgatgttctgaccctgccacacgtgttcaatgtcaccaccgggttatgggacctcgggcaacggagaacaaacgatgtgtccccggttatagaccacaaaaggagatgttgctccacaggatattctcggaacattgtcaaaccttatactattattcacgacacgctatcctctcggaaagagaacaatccacactggttgggagcagaagtgccgactggggaccacacactgggtgcctccctttcccaaacaagcgtggcacccgttagttatgccaatgagcattgcttctggaacacggaaagacaaaccaccaaaagaaagtccgtggtcaaacggacaaactaggtattaatatccatgtagacgcgtccaaacggctgacggggcaagcacgaccactggaaaagcttgcgtatggcgtcccacgtggcgaccccccaatgggtatagcgttgatagtagtagcaactaccgcgcaaggcacaaccattatttcagaggacgaacgggtggtgctgtcaaaccactatggttggctcgtatgattatcaccccctgttggaggggattcccatagcggaatgaggtgtccaccgacgtaatacaacaccgtctcgtgtgtgtacacacacccagtgttgtacacagacccccgtcgctgccgttctacacatagacaagacgtgcacaacaaggcttatgccatac

SEQ ID NO: 550620 - DNA, 160 bp, Homo sapiens
aggcgcgtctgaactgcatagggctctggtagcaggtattgaccaccagagatcatggataccctcaaggcaaatgcttacttctctgaatctacacttgctgtgtttctggggcctctaaggaattctttcatgttactgccagttcagaccgcggcct

SEQ ID NO: 550621 - DNA, 452 bp, Homo sapiens
  misc_feature (184)..(184): n is a, c, g, or t
gaccagaggaccggagtacgccacacattagtacctatagtaccggtcattagaaacagaaaaatatacgctatcttgcataaaaaaatctactaacagtagatataaattgactcatatgtttttctacatattatgtaatcagctcttaagcaagacggtggaggtatatgatctgtacaancttacgtagtgtatatccaaataaggttttctcctactatggatgacatataactgtttctgaatgagatacatgtaaggcttaggtgtaacacttgggaggcaacagctagtgaaaaattatggtcattacaatggtatcatttcataatagacccgaacttcaaattactgtgagaaacattacatcttactttctaggaaggccggcttatgtaaaaaagcgcaagtttaacccaccatatattggaaggcttctttcatagaac

SEQ ID NO: 550622 - DNA, 916 bp, Homo sapiens
  misc_feature (30)..(30): n is a, c, g, or t
  misc_feature (97)..(97): n is a, c, g, or t
  misc_feature (512)..(512): n is a, c, g, or t
  misc_feature (624)..(624): n is a, c, g, or t
  misc_feature (820)..(820): n is a, c, g, or t
  misc_feature (822)..(822): n is a, c, g, or t
  misc_feature (855)..(855): n is a, c, g, or t
  misc_feature (881)..(881): n is a, c, g, or t
ctatcttctgccattcaggtcataatcctncatttctacaactgtcctaacccaacttctgactgcaaaacaaccatcaattgttcatctaattttnattcttttctcattaccaaaactgggttacaagtatataacaagttttggaaatttgagcattgcaatttcaacgacgtcacaacccgctttaaggaaaataaactaacatactactgctgcaaaaaaaacctgtttaactttaacaaacaacttaaaaataattgaacatccttatcaaaaaaaacaattcttctacttgtaactccatttcttgcagcaccctgaaaccttcatccctaaatcaacaccaaaaaaacttctcccaaactccccgttcctacatatcctctttctctttcttccacattctaaattcttaatattttccaaattaatcctattggaaaaaaataaaattaacttaaacaacctagctaaaataaaaaggctctaggagactttgaagaccagtnctgtttacagggaagccccacttgaaggaagaagtctaagagtgaagtaggtgtgacttgaactagattgcatgcttcctcctttgctcttaggaagaccagctttgcagtnacagcttgagtgggttctctgcagccctcagattatttttcctctggctccttggatgtagtcagttagcatcattagtacatctttggagggtggggcaggagtatatgagcatcctctctcacatggaacgctttcataaacttcagggatcccgtgttgccatggaggcatgcaaatgttccatatgttggtntnattaaggacacaagatccttaatgcagactagnagactctggcagggaattggggaatntccagatagcaggcatgaaacttagagagtacaat

SEQ ID NO: 550623 - DNA, 399 bp, Homo sapiens
tgctggtcgatctctagcaggatcccccattggtccgagagaaattagaagtctttgaaggtgtgtgaggaaaaaaatcctacatacaattaacgaacatttcagaacagggtaaacaattctttactttaacaaatagggtatatcaagtgagcatctcacaaaaaggccactgcttggtgacctgggctagtctgccacgtaagtccatcttgtaaatagtgtgctggcgttagaaatacctagtcgccaaaagcatttcactttaacctctgcacaatgaactgtttcctctgcagcgtctatgcaggctatatccagtttatgttgataaatctacaagattaatggctctgttgtcatatactgcttatgcatcttatttctctcgtaccaatg

SEQ ID NO: 550624 - DNA, 144 bp, Homo sapiens
cgtagaaacgcggggactagagcctcctcagtgtacttgcctgccacttaattattctcacactccacaggggactgattatcccctggcatatttcacatgcgttccaagcggggctctcaagtgtacctcccacgccccatt

SEQ ID NO: 550625 - DNA, 101 bp, Homo sapiens
gtaatccagcactttgggagtcttgagggcagatcacttgaggtcaggagattcttcctatgacaaatctggttttcttaagacaattttggtttctttct

SEQ ID NO: 550626 - DNA, 193 bp, Homo sapiens
taagcgagcgaggagcaaaaaatcaaatgtatgacgattactactattatggcccacctcatatgccccctccaacaagaggtcgagggcgtgcaggcagaggtggttatggatatcctacagattattatggatatgaagattattatgattattatggatatgattaccataactatcgcggaggatatga

SEQ ID NO: 550627 - DNA, 928 bp, Homo sapiens
  misc_feature (497)..(497): n is a, c, g, or t
  misc_feature (583)..(583): n is a, c, g, or t
  misc_feature (770)..(770): n is a, c, g, or t
tatccttcggaaagaaccccggtaaaagaagcccaacaggtgaaaatggacgatatcagcagtggaggaaggggtgacagggctggaagagacaaatggtggtgagacattctcctggttccatcaggtggccatccactaacccggttttctccttctggctggcaaaataaaccactctggtcccatttttaactcctaaacagcatatttttggtttctccatctttcaactatcccaagcccaacctaattttatttggttcctttcatctggtgtactggctggctggactcttatccataattttccttccaaaccaaaacaaatggtatagcacaaaatccatggtctggtggacattccatgtttgtaacatggtaccttggctccagactccaactggccatttccaggttgggtattcataggtcccaggttcctttatccaaccattttaaaacccttataggccaatctcatttccaaactcttnattcctggccaacattggtcattaagcacattaagaggttcagcacatttaaccaaattttcatttttgggtaccaaccaggtggnacatctttcctggtccatggcatttatggtggcttggaggtccccttattaatctttatagcaccatggttgattagccacacaggaaaacaaatcaacggccaagagcactccatttttccggccttggactattgtttcactgcggatttacattttgggtccctgttgcctttctgttggaacncggagcttccctttgggttttcccttttcttggttcctgggtgggagcgcttgtgccgggagaccttatcctctcgacggtttaacccttcacatttcgtggggtggctgggcgggcctttccacgctgcttctgtgggccccggttttgcctgattt

SEQ ID NO: 550628 - DNA, 980 bp, Homo sapiens
gcacaagctaagagagctgcaaaaaaaaaaaagaaaaaagaaaaaaaaaaaccacgttcttggtggagcggggtctggaaggcaaaagaaaaaaaatttctaacagtaagtctttctgggtttctaagttggagctggcttggcggtgaatggcttaatttcctttaggtttatggataaatttcacttaaactttaaagactattatttggcacaaaacctttggtttaaagatctggcaataatttatctattattataatattattattatcaagaataaagaagaaaacggttatgtgccgaagggcagggagtaattttctggtatattaagaaagaaggcctaatttaaaaacaaaagagtggtcttccttggaactaagaaaagagggaaaaacatagtgggccaattttctggagtgtggccaaggtccaggaaagtgtggtggttattacctgggtgaaaggaacaacaatttacaaaggcagggggttaagagagttaatttatatcacaatgtgttggaggattattggcgactaatctttttacatattataaatatattgtccagtggctaggcttggaatgggaaatctttctcctggtggtcctggtcggagactttaaaggggaagaactggtcgggaatttccaaaaatttcgccttgaagggcagagggttgagcccccggggagtcttggcaaagaggcttggcctaggagcgggaggcgcttcccgaggggccatttgtccctgcaagagtggactgcttactggctagtgacagggttatcaccacggtataatattcccttaacgaaggggaacacccttttcccccctgtagccaagaaaagggctttaaattcacaaggcaatatgcgacagttacccacgggggcacccgagttcccagggagggggttgcctttccaaaaatgaaataactggcccgggagaaaaacaacaaca

SEQ ID NO: 550629 - DNA, 1066 bp, Homo sapiens
  misc_feature (91)..(91): n is a, c, g, or t
  misc_feature (250)..(250): n is a, c, g, or t
  misc_feature (1066)..(1066): n is a, c, g, or t
ggtgggttgaggagaggctccagacccgcacgccgcgcgctcagagctctcagcgccgctcccagccatagtctccctggcctcgctcagnttccaacatgggcaaaaatcttaagccctatagatgatgagctggtgctattcgcacggtgccgtgattgtcctgtctttccatgatagttactgctaggcaaaagggattgtttcataacatgatcacttctctacctaaagtacaagagttcccttnaatgctttcattgagattaccacggaactagattggcatttcatcacacaggaaatccagacacgtgacccttgtgttgtctcttgtaacccgtctttgacttgaactgaccttctgggatcatcccaacgagttgaatggtacacgctagaattcccctcaggaacttctctttaatcctagatgtggctgagtccttgaacttatgagttggtcaaatgaacatctattccttacaatggctgagtcaccttccccacgaatggcggcacctagtaggaaccacccgtttgaagtccctggactttatgcaaaaaccggcatgcaccgtttatcttaccaggaccttctctggtatatcatctaccaatagttaaacaatcctcactgaagcaccatatacacacttctcaatgaaggtccccgaacctggccaataagtaataaacgccatgtccactttttttaacaccaacaaaccacaagagaaaaaaacaatgtttggcggcggccgcgaccagagagaattttcaaaacccatctgtgtggggccgccggccattggtatggcaattggttgatgttggcccaaagaaaccgggcggacaggctcgttccaccaaaaaaacgcggcggcccgggtctgacataccaggctttcggttaggcggcctcaccgacaagacagctcgtacacccccgcgcgccgtagggatgacacatccaaaaggacacaacaaaccagactaacaccagccgacaactcatctgcaccaaactacaagacgaagcagaaagtcacacacttctctcaan

SEQ ID NO: 550630 - DNA, 366 bp, Homo sapiens
atgctcttggggtgtgtggaatcacgccagcgattttgcctgagccgagcccggtccgttcgaggatcagtggactactctggcaccgtacccgggctgctgacggtgctggagaggtcgttgactgcatcatcttcgcgtacatcagcgaccccaacctgtaccagcagcagccggccctggagtggtgcgtggcggtgtacgccatctgcttcatcctagcggacatcgcggtcctgctgaacctgggggagtgcaccaacgtgctacccatccccttccccagcttcctgtcggggctggccttgctgtctgtcctcctctatgccaacgcccttgttctctgggccctctaccagttcgatg

SEQ ID NO: 550631 - DNA, 279 bp, Homo sapiens
  misc_feature (2)..(2): n is a, c, g, or t
cntttgaggaccccttatgtctgacccacctaaagatattcacatttaaaaaaattttttggagacagtctgctctgtgggccaggctggagtgcagtggcatgatctcggctccatgaaacctccacctgccgggttcaagtgattctcctgcctcagccttccaaacagctgggattacaggcgtgcgccatcacacccggctaattttggtatttttagtagagacggggtttcaccatgttggccaggctggtctcaaactcctgacctcaggtg

SEQ ID NO: 550632 - DNA, 231 bp, Homo sapiens
caccctcagtggatattgccacatcgcatgcccagcctgtgcccagctacaaagttggggacaagatagtcacccgcaaggtcctactggggaggcactgtgccgaagctgggccatgtcgcacgtgaccgacatcatcgccctggtatggggacaccatacaattccaccgttcttcggagcatcttcataaaatggagcacctcgggaccgcctctcatcagaggtgct

SEQ ID NO: 550633 - DNA, 130 bp, Homo sapiens
tgtgtcctgtaaccaaatgcccctggtcactgtgttctctcctgttgcgctatttttttaagaggcttcggtatgggcaatgtaaaaaaaaattggcgctttggagattgatctggttggcccttgaaca

SEQ ID NO: 550634 - DNA, 827 bp, Homo sapiens
gcaaggttgaggccgagttccagcagtcatggggtctcgcgttgtcccagtcctatttgagtcctatatcactgcgcctcccggtaccgccggcgcagcccagtcaaagcctgacgatgccccagtctacacccgtgatgcgccgagcctccccatgtcaagaacacctgtctttatgaatgatccttgctggacgctgttcgcgctgctttctgggattggggctgattgggggcgggacgggtacgtgtacctgggatggacacggaaagcccaatgaagaatgggatagccgccccgtagtcccatggtaccaatgtacgtcacgagtggttcattcgggcctcagggcattgtgccacctgggtgtattcgtgttgtcactgtgtagtacccccaaaagcgcgaaaggctctagccgacgattgctatctgacacatgctacccacgcaggtgcaattcttgatgctgtcgtgatcatctagtcccattatccgcctggtggaacacactaggaggcaggcgcattggcaagttctacaatgcgcgcttgttcctgcgaacaggaacactttgctagcatggtacatggactattcagcttagcatgctgtgacttaacctatagctaaagaaactttgacatacaagtcaccgaaatcccgctacttgtttgcctccagttcccgtcgttgaggcttaatggcgaacggctggcataagggtagggcacctgtccactacagtgacactttttcgaacacggggtaaaaccccaagcgctgagaaagttcccccgttcgagcgaagcaagagcgtttacagc

SEQ ID NO: 550635 - DNA, 121 bp, Homo sapiens
ggggcgggggggcccccctttttttttttgggggggttttggtcccccgccccccccccccccccttttttttattttttggccccttttggggggccccctttcgtttttagtgggggga

SEQ ID NO: 550636 - DNA, 105 bp, Homo sapiens
gacgcactccgccaagttacatccttcccctttgactttcccgacttccggtccgagtattcgtagcctccgcggcgcctgcgggcggccaggaggacagtggcc

SEQ ID NO: 550637 - DNA, 184 bp, Homo sapiens
gaagacagcacaaaaccccagggacatattactggggttttttaaagttttacaaacattcaaaccaaaactttgttttttccttttttttgttttcaactttaaaaacaaaaataaacgatgataattttttctgggggaaaggatgggaaaataaatcccccaatgccacccgtttgtgaga

SEQ ID NO: 550638 - DNA, 80 bp, Homo sapiens
gtttcgagacaaacacagactcctcctctttttcgactgagccttcctccagatgtagttcttacccctattctttccgt

SEQ ID NO: 550639 - DNA, 193 bp, Homo sapiens
acgagagaggaattatttcattactctcagtattctagcaattaacctctatttccccagaattatacaatagcccatagagatgacaaaatcgtccataagaggcagagataattcaaatggaagaattaggcaggcaactactaactttcactattttttcttacagaaagagtgatatgaaaagtggtgg

SEQ ID NO: 550640 - DNA, 648 bp, Homo sapiens
  misc_feature (437)..(437): n is a, c, g, or t
  misc_feature (648)..(648): n is a, c, g, or t
atacttttacaattacttttacgggggggccttcttttatcgttttaaaaaccctcccagggcccgccacttttttgccaaaaaaggcccctaaggttttaaacccgctttaaaattactgttgccaagaagattgggccctaaaaactattaaaaaaagattccctccctaattttcctattggaaaggtaaaagggatctgggtgtattgcaaaaaagggagtttctaaaccaatgttaagggttccgggaaaaaccttcccttgctcccgtttttctaggaggctttccttcattaaaaatcttttttttttttgagattaagaaaaaaaccccaaattgttataaaactttgaattagccctactgactgaatctttcccaagccccctcctacaaaggctttccccccactttggaaggtctcctaattttntccccgaatctcttttggccttactcccaacagtcttttgcacacctttcccggaagagggcttgtatttcttttaacccacaaaacttgcccgactcacaaaaagctttttaaaaccccccccttctttttttttttcccagattttcaaaaaaccgggttggcttccaaatgttttctccccaatggtcttaacccaaaattttttccn

SEQ ID NO: 550641 - DNA, 1380 bp, Homo sapiens
aaaaacaataaggcaacaagaaagtaggctgggtgttgaattctggccgcagggtattgggcatggagctggggccttgtgtccactctgagtgaggccaccatcacccacacacaccctgcccactcctgcgcttttcatatgccattaccatatcccagcagctttggagacctccaggattatttactctgtcagccctgccacatatcactaatgacttgaactatgggcatctgtgctacccttatggttatgggggtctgcactgagtgtcccaccccaactaaagggctacccctagtgccatggtgtatacttgacacacatacaccagtaagtgagacctacagttgttatttggtgtactagtgtgaggaggcaggcccctactccccacaacctacgaccccaacagagactactgttatacttaagccgctcctttgtgcattgctgttgtcccatcactcatgcgttgacaccacaagacataccttggcagtgacaacattactatgtgcaaccccatgatgtggatgcaatgcactgtcacacaagtgcttgtgactgtggacggatgggaaccgcaaatggacccaatggctttgcatgtgacaggtgtgtgcgaacatgtgccatgggtgtattattcaaggggaatatctacgagattgcattatcctcccctccttgcgtgatgtgcaacaacggacgtgctatgagcatatccatgcgttggtcaccattccagacaggataacatgacccttgcagatgatagttcccccactgaactttaacgggggaatggattcacaacattacttatcgggagcttatggcaacaggaacgcgactggtgccaatttggtcaacgggtggcaaaggtgagcgtccccgataagggtgatagaccccacactatgagagtattactacccccacgtgtggactccttcctatattggacaccgttttgatggagagattccttatattgggattgctagaaatatgttggaattagagaacctacacaccaaacgtatactgtgcaccccatgtggtgatcccgtggaagacaatcatataatactccacaatggtgtgtacctgtaaagtaggattgagcccccgtccaacaatatgtgtccaataggatgatcattcgtctatgaggttatgattcgtacatatcaatattccaattcagaaagtcaagcaattcatctaaatgattttcaacgcccatgggcattgtggaactttcgggtaagggcttacccttcacgatagacaactaatacccactttgaagacaccaattcatctcatctgtcgtacatttatattagtccagcaattgttgcatacatg

SEQ ID NO: 550642 - DNA, 80 bp, Homo sapiens
tcgaccaacaggggagagtgttagagggagaagtgccccctgttgaagctctttgtgatgggcgagctcaggccctgatg

SEQ ID NO: 550643 - DNA, 159 bp, Homo sapiens
ttgtaatcaggattacaaaaaaaaaggggccagtattacaagctgctaaaatgcttttgcgtggattattgttttatttgaccccctgttccctttaaatatgatacatgctaagattttccatggcacagcaacctactaatatgtggtttcgcttct

SEQ ID NO: 550644 - DNA, 409 bp, Homo sapiens
ctcgagaccaggaattgggcacgagggccttcacagtggaagggggacctgcgcccccacatctgaatcgtgtaggtccccccagctcacttgccctgatggggcccaacactgtacccagctggttgggaggaccagagcctgtctcagggaattgcctgttggggtgatacagggaggaggggagttgcagggaagagggaccgccctcagctgtcaccagcacttttgtccaagtcctgatagtgcggcccctgccataggggtttgagcatggccttcctgccctgggggtgatctgggcccagggctttttggatgctttcctgctgccccagccagggttggagtcttagcctggggacccattgaagccggaagccaaataaacccaaaagctgtctcccca

SEQ ID NO: 550645 - DNA, 421 bp, Homo sapiens
  misc_feature (305)..(305): n is a, c, g, or t
  misc_feature (352)..(352): n is a, c, g, or t
  misc_feature (369)..(369): n is a, c, g, or t
  misc_feature (381)..(381): n is a, c, g, or t
  misc_feature (416)..(416): n is a, c, g, or t
ccagtttccatttgtggaatacatctaactcggtcatggtgtataatccatttactctgctgctgaatgtgatttgcttgtattttggtgcggatttttacatctgtatttataagggatattggtctggtgttttcttatgatgtcttcctttggttttgatatcaggataatattagcctcatagattgggttaggaaatgttctctcctccgttttttttggaagagagagattggtgttaattcttgctagaacctttggtaggaatttgccagtaagcctatctggtcttggggtctttngggaggattttgattcgattcaatctatgtatttgttatagaaccgntcggattgtccatcccngagtcagttgcnagcttgtgtgttcctgggagtttttcccctttggncccag

SEQ ID NO: 550646 - DNA, 461 bp, Homo sapiens
gagcgcggcccaatgccgacatacacttcaccactatttgttttatttttcttattaatataagaagacaggaatgtcaggcctctgagcccaagctaagccatcatatctcctgtgacctacacgtacacatccagatggccggttcctgccttaactgatgacattccaccacaaaagaaatgaaaatggcctattcttgccttaactgatgacattatcttgtgaaattccttctcctggctcatcctggctcaaaagctcccctactgagcaccttgtgacccccactcctgcccgccagagaacaacccccctttgactgtaattttcctttacctacccaaatcttataaaacagctccaccccatcttccttcactgactcttttcagactcagcccgcctgcacccaggtgaaataaatagccttgttgctcacacaaagcctgttaggtggt

SEQ ID NO: 550647 - DNA, 1015 bp, Homo sapiens
taacccctctttagtttatggcgctcaaaaaccaatttaaaccccccccccattgtaacgggggggcgggacaaaagcaaaaaccgcgaaacccgctgggaaaccccagttcttgccccccgaatttttggcccgtgagtggggtttgggtttcaatctgtcccgtgttgctggggttgagagttggaggggtggacccctcttgggggggcctttgcacatgtgagcccccttggagacacttcagagggggaggtggcaccagggccattgttccgcacgtggtgttctgggcacaggtgggtgtggttccccagaaagtctctgaggcacgaggggggggtggggccacgggtctcctacgggtgccaggaggggtgctcgagggcgcccccagggaggggggctcctgggtgtgttccttgagcgtttgtccgcagaggcacaacgggggtcaccccgggtggttgtccaccaagggggtgtccattcagggcggcgggagaagggggggccgccattccggacactttgagagaacccttccctttttcccgccggagacagtttttgcgccgcccttaaggacctatgctttggtcccccagaacgttcgagaccgcttttgtgggaccctttggggcgctcgtttgggcttatgcgccgggaataacggaagtacagggcaggttttgatcccccagaagcacgagaatctgccgggttggcccatggcccatgttgggtgtgcgcccgcggaccccaaggggctggcgttgtagcataaccaccacacgggaggtattaggctagggggactggctgggagggttacctcgcccgttggtcccgttaaccccttgagcgcggacaatagagcgaggcatggctgggacgggggtacccggctagtacccattgaggtctagcctgtgtcttgattagccagcgtagtgacctgtcactagcacgtatccatttgtgtggttgcttgtgtgttgttttcgctttgtcc

SEQ ID NO: 550648 - DNA, 243 bp, Homo sapiens
ctgatgcgacactagcggatcccttctgctgtcgctaggacaaccaggtgacagccttctcccactgcccgcggctcaacagaaccgcgcactgattcctgccccctcaggccagggccctcggcagagaggccagcctccatccagggcgtctctggcctcagtgtgctctactcacctgggctgtgtcacccacagcagaggcctgggctccgcctgccacatccctgtcctagggtgagg

SEQ ID NO: 550649 - DNA, 108 bp, Homo sapiens
  misc_feature (78)..(78): n is a, c, g, or t
gaagccaatccgcatcatgtggtctcagagggatcctctttgagaaaatctggtgtgggaaacgtcttccatcaggancctggacaaatctatagataccaaggcact

SEQ ID NO: 550650 - DNA, 671 bp, Homo sapiens
  misc_feature (125)..(125): n is a, c, g, or t
  misc_feature (151)..(151): n is a, c, g, or t
  misc_feature (333)..(333): n is a, c, g, or t
  misc_feature (386)..(386): n is a, c, g, or t
  misc_feature (396)..(396): n is a, c, g, or t
  misc_feature (416)..(416): n is a, c, g, or t
  misc_feature (429)..(429): n is a, c, g, or t
  misc_feature (475)..(475): n is a, c, g, or t
  misc_feature (478)..(478): n is a, c, g, or t
  misc_feature (514)..(514): n is a, c, g, or t
  misc_feature (527)..(527): n is a, c, g, or t
  misc_feature (531)..(531): n is a, c, g, or t
  misc_feature (553)..(553): n is a, c, g, or t
  misc_feature (560)..(560): n is a, c, g, or t
  misc_feature (573)..(573): n is a, c, g, or t
  misc_feature (595)..(595): n is a, c, g, or t
ggcacgagcttactcttaaagaagagcaggaggagtatatacgggaggatatagaatggctcacattgactacttcataatgctatcatttgtgactaatagaaaatacacaaatggatcctggncatgctggatgaagagtgcctcaganctggcacagtcactgatgagaccttcttagaaaagctgaaccaagtatgtgccacccaccagcattttgaaagcaggatgagcaagtgctctcggttcctcaatgacacgtctctgcctcacagctgcttcaggatccagcattatgctggaaaggtgctgtaccaggtggaaggattcgtngaccaaaacaatgaccttctctatcgagacctgtcccaagccatgtggaaggncagccatgcnctcatcaagtcttttgtccncgaaggaaatccngccagatcaacctgggcctctacagcaggctcacagtcaaggcatncgngccactctgatgcctacagaccaagaccccaactantataggtgatcanaccngatgatttgagaacgtcgatcngaggcangtacgcttcagcngctatgacctgctagaagtcanatgttgtaacaacatgctatgaagacagcagctgttgaggcattatgatagtcgtgagatctcttgagacagtatt

SEQ ID NO: 550651 - DNA, 872 bp, Homo sapiens
  misc_feature (387)..(387): n is a, c, g, or t
agcggcatcattttttcacagaattagacaaagcaattttaaaatttgtatagaaccaggaaaaaaaaaaaaacacctgaattagccaaagcaatcatgagcaaaaagaacaaagcttagacgcagattatagttaaacaaaacaggatgcgtattttgtattaaaaacaaacacattagaccaatgcaacagaattagagaattccagaaattaaattttgcattgttttacagacacactgatttttcaaacaaaggcaccaagggctcattacatttggcgggaaagggctcagtctctccaacaaatttggtacctacgttaacaattggcgaaatttcattattgcaagaagaattgaaacctgggacccattattcttctncaccattattagaaaacttcaactttaaaattagatttaaagacttaaagggtaacgatctgaaacctatttaaaattactctagaaacaactttctgagaaaacctcttcaggacacctggtctaggcacaagatttccatggcctaaaaccttgaaagcacaggcaaccaaaaagaacaattagacaattggggactttattagactaaaaaatctttgacacagcaaagaaaatcttatcaacagagtgaagaaacagcctggtcatacaggcgcccacttttttggcaaactattcatttttctagagactaattatccagaatatccaggaacttcaaataacaagcaatcccattaaaaatgtgggcaaaggctgggtgtggtggctcatacctgttaatcccagcactttgggaggccgaggccggtggatcccaaggcccggagattgagaccatcctggtaacacagtgaaaccca

SEQ ID NO: 550652 - DNA, 127 bp, Homo sapiens
gcactcaacgacaccagtagcttcatgccaaccattaccacaaaagatagcgtagcgtaaactgacagagatataggtccctatggataatggacatattccaggtatataggagggttcccgtact

SEQ ID NO: 550653 - DNA, 1420 bp, Homo sapiens
gggcggacgcgtagggcgagacgcgtgggaagctgctacatcgtcgcttgagagtctgtcacattcagtccagcatttgtattctgcgactgtcgagctatggcacaagtgagtgacaaacatgtttcaatacactcattggatctcttcatcatcctcttcctctcgattacagcgttattacccggagctgaaaacctcacgtcttactgtacatgaccagatgggcgatcttctcttaccatgtcttacattacattctctacataaaactgatcgagaacgagcttcttagagcttgtaccatattacacacgctgcttcatggcctctacgctgttaaatatatcccagtgatacttaaagcccactattaaccatggcacatgggacgatattcacttcctcgcagcgcacagaaactctaccgggcactctacttattccgtcgttgctatgcggacaacaagaacaggacgcggcctctgccttcgctaagctcggtcgagccacgtgacaaaagccgttgtgttggacgacacagatcggcacttccgtggatagccttacggcagctaatttgggtcaccacttgccacgctcatcgccacagccaacgtcatgacggcaacacctagacaccacgagtgaatacggctgcgctggactcctcatgggctaccgtaccaacactatcaaaggagccgtcacacacctgcctagcttctgggctccccactccccttcacaccctccctcttcttgcacaccaccaccgaccaccgcacgcaatgccccacgactcggacagccaatcacgtgacagaagcacggtcggcgccgttccctcgtctgtctatccacatatcggcccagcctgggtcactcctccgcgcggggcgtggtgccacggcagaggcgctgacgtcacacacgcgtctcacggtgcgaagcagtcgagctcaagagagtgacgaacaacagcacagggtgcggcacgactcgtccgtcgatgggcgtgtccgctcgcccgcctgtagtgttagtcgggcagcgaagcagcaccagcccggcgcccggcctccgccaccggcacgccgctcgacacacgaagaagcacagggagccgacgccaccagggagccccagccgagggcgcgaaccgagcagtcgccaacagggggagcccagcacccgagcagaccgcgggcgggcgagggagaccagatcgcgggcgcaacaccccgctgcgcccgaaacgaaggcggcggtgacacaaaaggcagcccgcagtcaccgccgcatcagcagtgcggccagcccacgggcgcgacagggagcacacacccggcagcaacaccaaacacacacacaggaacgcaaaccacgcagccgcgcacgaggagcagagcgcgccact

SEQ ID NO: 550654 - DNA, 122 bp, Homo sapiens
aatcctgccgtcaaatggtccagacaaaaagaaggtaaccccagttatagaatgaggtacaaatttaatcatcaatatatgtccaggattaagacgtactatagaggtgatttattctgtca

SEQ ID NO: 550655 - DNA, 998 bp, Homo sapiens
ccatgcacagagagaagggcggtgcctgcccacctcttgctccgacagcctcccggagctcccacgcatgcaacgactggccaaccactgcacccacacttctcacagccactgtgtctcactgcctgcctgtctgccatgcgtcgcgccgacactgacacacggcgctgcactgccctgctagtgccaggctttcccctcactccccagccccggggctcgctcgcccccgcgctgccctcctgcccacccggccacgtaccgcccactgctgccccccccacccacacacacacactccctgccccacaccaccccccccccctactacatccccccaccccccccctcccaccccacgacccaccacactctccgcactccacccacccacacactcacccacccacccacgccaccccaacctacactcgcctactcactgcccacccacccagcccccaccccacccctcatccctcacccacaccaacccccacacacaaccccacaccactaccacactctccacccaccccccccccaccacacacaacacccaactcacccaccccccaccatcactccccccccaccacaaacctgcaccacacaacatccaacacaacagcacctcacacagcctaccccacccctacacaacccccccactaccccaccacatcacccccaacaaccaccaccaatcccatcaccacaatccatcaccctacccaccaccccacaacacactaccaaccctataccccacccccctcacacctcaccacccccccaacaccccaccacacccacccaccacacccacccacaccccccacccaacaacccccaccacaccccacacccccaaaccacacccccccccacgccactcaaaacccccttacgccccaccccacacaccccccaccaccacccccacctccacaccccacaccacccacccacacaccacacaaccctcccccacaccc

SEQ ID NO: 550656 - DNA, 369 bp, Homo sapiens
aaagcagtggcaaaaaaggcttttggagctggcaaggtcccccagtttgcccagaaagctccgaagggtaaatgaatattttccctaatacctgcccccccccttttaatcagtggtggaaaaacggtttccaaactgtttgtttccattggccctttaagtttagtagtaaaaaactggtttattataaccatgcctcgttaaaccctccaaaagaaaagaaaattttttttgggcccccttgggttttttttttggggggggccgttttaagtttttaatttttaaaaccaggcccttttaatgggaaccacttgccccaaaatttgtccccaaatttttaggcccctttaaaaaatttaatttgga

SEQ ID NO: 550657 - DNA, 150 bp, Homo sapiens
  misc_feature (40)..(40): n is a, c, g, or t
  misc_feature (76)..(76): n is a, c, g, or t
  misc_feature (83)..(83): n is a, c, g, or t
  misc_feature (137)..(137): n is a, c, g, or t
ctttgtcgccgactcagcgagacaaggacccgtggttctngtctcaacatcatcattgtggctgagggtgcaattnacaagantggaaaaccaatcacctcagaagacatcaagaatctggtggttaagcgtctggnatatgacacccgg

SEQ ID NO: 550658 - DNA, 1143 bp, Homo sapiens
  misc_feature (1082)..(1082): n is a, c, g, or t
gacccacttccaccgttactagcagacaaccttagccaaagcatttacccaaataaagtataggcgatagaaaattgacaatccgtggcgcgaagtagatataggtaccgtctaagggagataagcatgagaagaaatgtagtaatgcaagcataatatagcaggggactaacccgtataccttctggataagtgaatgaagtagaaataactgggcgaaggagagccaaagctaagacccccgaaaccagacgatgctacctaagaacagctaaacagagcacacccgtctatgtagcaaaatagtgggaaagatttataggtagaggcgacgaacctaccgagcctggtgatagcgggtgtccaagatagacatcttagttcaactttagattagcccacagaacccgtctaaatccccttgtagaatttaactgttagtccaaagaggaacagctcttgggacactaggaaaaaaccttgtagagagagtaaaaaatttaactaccatagtagggctagaagcagtcaccgaattaagaaagcgttcaagctcaaggacccgactacctaagaaaatccgcaaacatataactgaagtcctcacagccaatgtggaccagatctatcaccctatagaagaacgtaatgttagtataagtaacatgagaacattctccatccgggataagccatgcgtcagattaaaaacagtgaagtgaacagttaacaggccaaataatataacaatcagacaacaagtcatattaaccgttaatgtgaacccaaaaagagatgatcaataagggaagggacaaaccgtaaagggaactcgggcgagatattacccgacgggttaccaaaagagatacccctgagaataccacgatgtgaaggacagcctggccaggaacaagggttaaggcgcgggaacacaagcggaaagggaccaacaacgggcccagaaggacacagcgactgaccccaagcacacgacctaaacaaacgaagacaagcgagaagaggaaaaaaaaagaaaccggaactagagcacaagccacacagatagaggatgggtcacncgcgagagagcgcgtcggcgaagacaacaccgaccaacacatcatacaagacgaaacacac

SEQ ID NO: 550659 - DNA, 1400 bp, Homo sapiens
gggctccctctctgctgcagagagctttctttcacttatcaaactttcactcctacctcaccctatgtgtccacgctccttaattctcttggtcatgagacaaagaacctccgcactgacacctcacaacagagagactgctacatcgctggtgcataggcggacgactgccaacactctctgatgctgccccacaacaccacgcgctccctcccgacgcgatcatctctccattgccaccagacctggcacgctgcacgcggccaccgacatcatacgcgcttcactggcaacacctcctgaactccctagcgctacacaggcaactcctcctcaccctccaggcctcccccaagtctagcctcggcgaattcaccacacatgactgcttgatcacacaaccaccaccacgctccccatctccacggcacctgaaacacgtcagcgcggctacccaaccctcttccttgtgcccaagcgactaggcctccctccgccaaacatcaccctgcaccccatccagacgctgcacctctccgaccccccaccaacaccagacacaccatcccacaacacacgttgcaccgtggccgcaacatcaacaacccgccagcaagcaacccccacccccacgacacacccacaccacacacccaccaacgccccttgcgccatcctagcactaccattccactgtgccactatcacaacgcaccccccaaactagatccaacctcccaacgcccacacgtataatacaacgtacaccttctctccttgccgtacaaccccacaacaaatagttatcccaaacacatgtccatatctacgtcctcacctccacacaccttctacctcacacctgccactcgcctatcactcttccaccacactccccttcgccaccccgacggccgcacataaccactttagtcactagtcggcaacactcatctccaccccttccacctagcggacaacgaaacacagtcccagatccttgctaagcagacgccatacatagcgctctcttgccaccagccgacaccctcgcgcgcccccccataacgtaacacacatactagacaccacacacacaaacatctcatctcacccacccacacacaccaacactccccaccagcaatatatcattacaacaacaactacacataatcttataccattaatacaatacgattcacaccccacatacatcacatcataccacacctcatcaaccaaccacagcacgccccactctccaatgaacacaaccgtcatagccaacactacctacacacatactatactcataaaacacaacaaaaaatctaccatacacaatacactttacatacatcatctctctctactttcataatcacattaaacatata

SEQ ID NO: 550660 - DNA, 125 bp, Homo sapiens
atatagtaatgacgtaatatatgtgaagtgcttggaacagtgcctggaccatagtaaacacgtcaaatattagctattgttgccattacaattaataatttttacttccatcacccatccaaaag

SEQ ID NO: 550661 - DNA, 1513 bp, Homo sapiens
gagctcttcaagcgcatctcggagcagttcactgccatgcttccgccggaaggccttcctccactggtacacaggcgagggcactggacgagatggagttcaccgacggctgagcagcaacactgaacgacctcgctctctgagatatcagtcagtaccaggcatgccaccgccagaagcagcgacgcgaggactctccgcgtgacgcgaggccgcaacgcacggcaggcctaccggccagcagcccccccactccaccgtcagcgcctctcctcagctctcccgtctaggcccgctccttaccttcacacctgtcccccgtcttccctcctccgcctccagcacactccggctgcttccggcgttggccctcctactccttggctccgccccgcccccttctccctctccttggcgcgggcgctccttagcacaccagctggccctgggcccacccttaggctacgcgccgccctcccccgtcccccctacctctgctctcggctcggacagtgttcctcccctccctcctcccctctcccaccctcctgcgcgccaccctccccctcgcggctcctccctggccccctcgccctgggcgctcggacccccctggcccctccccccctcccccccccgctcggcccccgcactcccccaactcctggcttcccaaggcgccccgcctaccgcttccccttcctcccaccgacactcgttcccatccgcgacacccttggggctcctcccccgccactccgcgccaactgggaacgcacgctgcccaacccccccgcggccggcccctggcccgccccctcctgccccttggctccggcaactccccgctcgggccctcacttccagttcccccttaccagcccgccccccgccgccgccgtcccgccccctcgcccttggcgcctcccgccaccgggcgctccaggcttgcgccgccttggccgcccccccccgcttccccccccctcccctcgcctcacccggccgccctcccgcgcgccctctcggcccgcctccccctccccgcccccgccttctccctcccgcccccgcccctccctcgcgcgcccaccgcgccggcccctccctcccccaccgcccccgccccccccgcgcctccggcgcctcgcccccctaccccccctccgtctccgctccccgctccctcctctggccccccccccccccccgcccccccccacccccgccccccgccgcccctcccccgccgctcctgccacgcggccgctcccccccccccctgcgctcttcgcgctccgcccccccccgcgcttcttcccggtctgcgtgccgctcgccccgctcccccacggcagccctccgctccacccctcctcttcccccggcgcccgccgcccgccccgctccgcgccccccgcctcccttccccggcctccccccgccccgtgggccgaccctgctccccgttcttccccccccgcctccgccccccacccgccctcctctcccc

SEQ ID NO: 550662 - DNA, 558 bp, Homo sapiens
ggacacacagtgaagagaccatgtgtgagttcatgggtagagagagaagataattcaaactttgggtgtggggaaggttctagaatctctcatgatatactggaagggtagatttccaaactttcctcccattttctttctctctttttttctttttctctttttttttcttttttgagatagagtctctgtcacccaggcaagagtgcagtggtgtgatctcagctcactgcaacctctgcctctcaggttcaagggattctcccacctcagcctcctgagtagctgagactacaggcgcacgccaccatgcccagcactttgggaggctgagggggaggactgctctagcccagtagtttgagaccagcccgggcaatatagccagataccatctcttaaaaaaaaaaaatgctggatgtggtggtaggtgcctgtagtcccagccacctgggaggctgaagcgggaggatcacttaagcctgggaggtcgaggcaacagtgagccatgagggtgccgctgtgctccagcctgggcaacagagcaagactcagtct

SEQ ID NO: 550663 - DNA, 419 bp, Homo sapiens
  misc_feature (32)..(32): n is a, c, g, or t
  misc_feature (36)..(36): n is a, c, g, or t
  misc_feature (39)..(39): n is a, c, g, or t
  misc_feature (52)..(52): n is a, c, g, or t
  misc_feature (56)..(56): n is a, c, g, or t
  misc_feature (209)..(210): n is a, c, g, or t
gtgctgcctagggcgctccaaagctgccttcnagcntcncagtagcctcccntgangtccttctgggtcctcctctgggtgcagagctcgggcaggtcttctgggcacacaggagatctggggggactcccaatgaccgttctcttggcctcggctcagcggcagattgcgctggtgccagtccttcccggcaccggtagcgacgcccnntgtccacctcatagcgcagccgtgggcggacgaacacttgagccaggggcagctcctggtgtgctggccacaggacaccagtcccatcttgcaggcgtaggacaggtggtagttgcagtggccactgtcactccattgtccctgatcatgccacaccatgaccacgcaggttctctccagacaggaagtcgctgtcgggctagtcgggg

SEQ ID NO: 550664 - DNA, 211 bp, Homo sapiens
ggatccttccagctactcaggaggctgagcgcaggagaattacttgaacccaggcggtggaggttgcggtgagccgagattgcaccacttcactccagcctgagtgacaaagcagaactctgtctcaaaaatacaaaacaaacaaacaaaacaaaacaaaacttacttgggtctctcgttgctatgtgtatggactggacgagacaggagg

SEQ ID NO: 550665 - DNA, 110 bp, Homo sapiens
tatcgatgccaccattgacaagacggaaattctctcccgtcttgtcaatgctgatgacatccatgaatccagcagggtaggttatatcagttcggtggcatcgataaaca

SEQ ID NO: 550666 - DNA, 370 bp, Homo sapiens
  misc_feature (1)..(4): n is a, c, g, or t
  misc_feature (19)..(19): n is a, c, g, or t
  misc_feature (36)..(36): n is a, c, g, or t
  misc_feature (39)..(39): n is a, c, g, or t
  misc_feature (234)..(234): n is a, c, g, or t
nnnngctacccattatcanagtggcccaccatattngtnatactatatataggtttgttgcctgatgcccatggcaagttaatacactgggacaccaggttgcagaagagaaagaggtttaatcatagggccaccaaacacagataggaggaaacctcaaattcgtctccaggaggactttgagtctcaggttcttaagggttttagagtggtcccaagtgtggagatcataanttggctgaagagtacagggcgaagtcatgggacagcgagatgaagaagctgtattctcatgctgattcccttcttctgtggcaggggtcttcaagctggctggcatcagctgtttcgctggaatttggcgtcggga

SEQ ID NO: 550667 - DNA, 208 bp, Homo sapiens
  misc_feature (65)..(65): n is a, c, g, or t
  misc_feature (85)..(85): n is a, c, g, or t
  misc_feature (94)..(94): n is a, c, g, or t
  misc_feature (128)..(129): n is a, c, g, or t
  misc_feature (134)..(134): n is a, c, g, or t
  misc_feature (142)..(143): n is a, c, g, or t
ccagtacggtgatcaggactttcagatggagggtaagagagcgcatcgggattactctgctttgngagcgtcggtggcacaggcnggtttgccngccgcatatttaaggcttgggtcaaccagcgcgnngaagngcttgagnncctcggagccgatcagcagcgggaactggaaggcgctgcgagcggtgaggttcacttcgataggg

SEQ ID NO: 550668 - DNA, 117 bp, Homo sapiens
tgtcactgaatgtagtcagttgatattggaaatttgcaagcttctccaagacagctttcagagctgttttcttcctctccaaagtcaggatcaatccgtattcaagatacctgtact

SEQ ID NO: 550669 - DNA, 211 bp, Homo sapiens
gatcaaaagagtgaaagaaaacataggaaaccaaacggcggcactcaacaatgtgggggaacaatgtaatttttaaatagtaagagcttgttccggtaaaccatgcactgaggctggtcacacggacctcgtggtctacctagctgagcatgtcacgaaatcccgacgtggcggtctgggcgccccggtttccaggggcgtgggtgtgtca

SEQ ID NO: 550670 - DNA, 187 bp, Homo sapiens
ggcagcactcaggagacacatgtcaggaagaactcatctggaaccatcccggaggattgctgagacggaacatataatcacattcgtaacttgcatgcagcggtaaggcttcattatctaagctgtacgcatggcactttaactaagatatccacaatattcaattccaaattagagttttagccca

SEQ ID NO: 550671 - DNA, 458 bp, Homo sapiens
tctgatgcactgcgtgtttaaacacagatcagtccttttttctggtgctactgtggaagaagattgtctttgggcatgctgacagcagatctctatagcctcacggatgagccctttctacgggagtgactccatgcttgtatacagagtatttatacaaatgttttagcatcttcatatgcggtgttaacccctagttctgtacagcatattctgttcaagtatttttttacaagcttgtgctgtaggcacatgccttctgccctggaactcgtgcaggtacgtagtagctgctactgccacaacggcaacaccaagcaagagatggtccatgcttttctgacgttctcagaatagtggctagcttcaaacctgacaagcgctgcttgaagcccgaacactagagaatgttgctgaaagcagaaacggccacgcgggtcacgactatgcgtgggaaa

SEQ ID NO: 550672 - DNA, 385 bp, Homo sapiens
aagtggatcctggacaccgacaccttcaatgaagggttgaatgaggatgactatgaaggaaatgatgacagaaaccctgtctcccgccgagagaagactatagccaagacactgacagatgaggtgaacagcccagattcagatcgaggggacaagaaggggggaaaccataagaagaggaagcgctcccactgtccttcaccaaccccagaagcaaagaagaaaaaggctaagaaaggtccctcaacaccttacactaagtcaaagcgtggccacagagaagaggagcaagaagacctgacaaaggacatggaccagccctcaccagtccccaatgtaaaagaggtgacacttcccaaaacagtcaacacaaagaaagactcag

SEQ ID NO: 550673 - DNA, 1144 bp, Homo sapiens
cctgtgtttgttttttcttgaaggattgtgttggtttgtgtagtgtaggaagtggtaggcgaaggtagtatgagcggcgctagagtagtggttgtgttgtgtgggtgcacgctagtgacagcacattacccaggtggcaatacgaagccgagtctcagaccggggtgtacccgcccaatattccggttaaggtacagccttggggcatctccccgccgccaaaaatagtcgttgtcgcgatgtcaattttttgcccctgccgttgcccttgtggtcaccctgtcccccctggtcagggatttcgcccccgttggtccaaacgcgagccttgtgttaagtcctttgcgttgaacccatcgttgttcccagggcacccccatttgggacacaccggtggccttgagaaccattccccctttggggagcccttggttgcacacgccctctgatgtaggcggccgccttcctttcccttgggacctctgggttatggagaaaggctaaaccgaggcctgccctgggaggcccccgagtcaccccctgtcctgaactgagcagccaccttgtttgagacgctgtgcactctgccaccgtgagacccgttgttcacattgtggagatgtctgccctgacacaggccagataccacagggttcccgaacactgggcttctcctaatgcctgaacgctcgcgtggagaaacccaattgtccgctcgtcacacttcgaggccccgagaatttggggcgttatacacaggttgttcctggaggacctggagccacccagagcgcccaccgccacggcaccctaatgaaggttaagaatttttcgacgaaggaagtcctacacgcctcctcacggaaggctccacgaaggaattaacgagggacactttccactcactcccgcccttctgtttacaacagtcacagcgtggagaccacatcggggcacacttggaaacgggccctgggtgtcccactgaaggtgctggctgcggcgatcggccttgttgatttacatacttggccttccaatgcgaagaaccaccatcccggcctgagggcgggccacccccgccctgcccttgcttcccttccaattaaccatcaccggacctgggactgcaccggacctggga

SEQ ID NO: 550674 - DNA, 84 bp, Homo sapiens
ggatttgctggtgcagtacaactaggcttaatagggctcgaattcgaggctcgaattcgaggctcgaattcgagtcaagcttct

SEQ ID NO: 550675 - DNA, 724 bp, Homo sapiens
cgacgagtacgactacctattcaaagtggtgctcatcggtggactcagtgcgtgggcaagagcaacctgctgtcgccgcttcaccctgcaacgagttcaacctggagatgcaatgatgcaccatctgtgctgtggatgttcattgccaccctgcagcatccatgtgtggactgtgcaatgaccatcaatggctgcagatctaggtgacacctgctgtgccagtgatgcgctacctgcggccatcaccatcctgctgtactaccagtggttgcacgtgtggcagccacatgacatggtagtactgacaatctgcacaaggcaccttgacctattgaaggaacagtgtgagctgctgggcttgaatgggagcttgcctggggacccactgccagagacaggcaaacattcggtcatacattgcattggggtgggtgcaagcaacggaagttgaaccattgacgacccaaacccattgccggagacatggatgacccccaacctttggaacttgaagaggcccccgggcgagccccataatccggcgactgcaggcagaagtgacaaccctagacgctttggatccagttctccaagtccggatgtaaacccattcaaatgcccctttagtgcaaatttacccagccattaagacaggttagagaaagggacagtgccaattacgaatggaatacacatttcgattcaccaacgaagacttctaacc

SEQ ID NO: 550676 - DNA, 286 bp, Homo sapiens
agaacctggatactgaaagcaggagagctggttccaaattatcaccctaagttagtccccctccacaactctgacaaatgaattaatatacaaaaacattactaataagttaaaatgcatctatcttctcctgggattttcttcttccatagaaatggagttttctctctccccagagtcggctgaagatttcaacagaaaccaaaattctaaaataagaaatcctttaaaatataagatccacatctcctacacataagaaaaaaatataaggccttttacatat

SEQ ID NO: 550677 - DNA, 246 bp, Homo sapiens
ggggccaaaacatacgacttgacaaaccaaattcttggtattggcacattccaggccaaaaggccctcaaagagaatgctatcagcggggcacagtggctcacaccggtaatctcagcactttgtgaggggagagataaagagaggctggttaatggggactaataggtaagaacatacagttagaggagtaagttctaatgtccgatagtagagcaacttcctgatggatttactgcaaggtgtc

SEQ ID NO: 550678 - DNA, 180 bp, Homo sapiens
tattataaatgaaacactcgcaggcaatcacagttgctctgccgactttctgaatttctctaaatatctggttcttgtgtaaaggactgccgaaaacttttgtgacccacggcccatcttatttccttgagcctagaaatatcagtgtataatctgttatcgtatcgaaatacactctct

SEQ ID NO: 550679 - DNA, 1208 bp, Homo sapiens
  misc_feature (605)..(605): n is a, c, g, or t
  misc_feature (743)..(743): n is a, c, g, or t
agcgggtgagatgcgatccggccctatagcttgcaatcattctccgctggaccctgaccctggatgctcctcgcgttggagggacgtcggacccccaacggccgcctcgacttcccgaggcgtgcctggtctgctacccgacgccagtctgccagcggtcggcctgcaggcggcgcgccgacgctcgcacgtgcccgcttccgtctttcctcacagcgcttctggaccgtggtgaggcgatccctcccggtcgcgtcggtcttgttttgcactggtgtctctgtcggtcagtaactaactatagcttttcaagctactcatacagttctaagaatactttaggacccatagtcagtaccaggctcagtcttccggttgcttgaacgtggagtgagtgcatcgttgagcccaacgggtgaacagacctccctgctgcccattgtacacttgagcctactaccatcagttcaagcccagggaaaccttgcttagagaccttttcattcgcccccaggtctctaggcgcctgggctggctcccatgcagatcatgtcccgtttgagcccagctatgcttatcgggtcaagggagatacgaccaagccnatattgcttgctgtggcccctctcacacgctcgccccaaggcacgctgtggctgagaacggctcttatccattttgcgatgttccgacctcattccattgtccttgggtgagaggaggttaggatgcgttgtgctccncggcgtttgttgcaaagcggctgctgttggctacgctcatcgagtggtcccattctcatcgactcagctcgtattgaggacctcgcaccccctgtcatccccggtgtcctcgtaaaaaccctgggccggatttgaaccttgcctcaggtgaccttgtcctgtaccccgggtaacagtgggtccagttgccgcgtgagacgcccttgcatcatcttatactcttgggtaggaatgggttcgcaacgggtgtcgccttccggtggttgtgaccgcgggtggataccttttggaatttgtccctgtgcgcctggccgttcttaggaacgcgtgatgcctgggggctttttctcccgctggatgggcacagggaagtccctttccttctggggcccagttcctacatttcgcccttggggttggacaactttctcagtttccgttgccttgtcgcgtgctcctaccccg

SEQ ID NO: 550680 - DNA, 850 bp, Homo sapiens
gcaccatgcagtcctcgccgtataaagaggcagcagttcggagagccggttcctgcagagatccggcggcgcgtcttcacaccgcatcgaatgcggcgtgtgtgacaatggtggatgtggtcggaagagcattgtcgcggcggcggagagaaaaagttacgccacggtagcaacagtatccaggcggggtgtgtcaggagagaatcaatgctagagttatgagatcgaaatgcccataaatagtggagaatgaacttctactaataatcgcagcgaagatatgggtttattcacggatagacattgtgatttatataccgatagttcccctgagtatggtacctagccaaatatcgagaatcatttgaaggagtggtgcttggagaacaagagtgaagtagctgaatgtagaaatcaactgagagatggatctggttgtaatgaatggagagaactagggacggaagtgttcgtgtcgaaagagccttgatagataagaatcgacagtagcaagcgctcctgtggagggagaatgtaacgtcagtaaaattagtgacctggatattctgtggtgatgagtttgctggatcctcaggacaactaccgaatactggaggtaggctgtgggtggtgggaaacacatgtcttggcaaaggtttagaaagagatacaagatgaggcaggaatctatgtgatggtgggattgtgcgatccacagctattagaatgggtcgagactaattcttggatatgattctactgggagtaagccttttgttgcgcgaaggtgggtgatggaagagagaagtaacgagggggccaaggggggttggaaattgtatttcgagat

SEQ ID NO: 550681 - DNA, 777 bp, Homo sapiens
cagaggcgagtcctgcgtgagtggtagcgcgcacgagctgcgtgtgtgacacccagcccctgccagtcccccatggccccgtggcaggccgagaggcggtgctgagtctctatcgggctctgttgcgccagggcctgacaagcttctgcatacactgatcgagaccttctacatttgggcctcctatcctgtcgctgaattcctgaaaaatatccagaagctagaggacgctgagtgcccgggcatgaggcacgctggcagaaggcggccctgggtctttctcaacggcaaattggggaggatcatttagtgcatcctccaaggggaaagaggacagaaggtgccttctgtagacactcctgctctcttccatccccatcttacagatgtattaagaagcctcagatgagcaatggcaggcgcttggctgagcgcaaaggcaagaaggatgacaatggcatttggcacggccatgactttgtgctctccaatgcccggcttggtgctgggggtgggtggagcggccatgctgggcatcggacacgcgtggtatttcagcggatgtacgatcgggcgagtcagtgcccctaccaggccccacccgccctgatcccattcgggggacatggagctgcgaagaacccaatggatgggctcccatgactgctgaccaggacatgaagacggcctgagcggtccttgcagacccttccaagactctccacttggcccaatctttttccgccgccagccatgcaggaggcggggacttacaac

SEQ ID NO: 550682 - DNA, 198 bp, Homo sapiens
acataggcatctattccaagcattttttctttttagcagagtcttgctctgtctcccaggctggagtgaagtggagccatcatagctcaaagcagcctccaactcctgggctcaagtgaacctcctgccttagcctcccaaggtactgggcttataggcgtgggccactgcacctgcctggccagcaaggaccttctt

SEQ ID NO: 550683 - DNA, 163 bp, Homo sapiens
  misc_feature (132)..(132): n is a, c, g, or t
cagtacggatgtcggattcacagagggttatggaatagagtatggttaccatcccccacagagagagcgtcatgcatccatgtttgtctttcttcctgcccccacagagagagcgtcatgcatccatgtttngtctttcttcctgcccccacagagagagcgt

SEQ ID NO: 550684 - DNA, 418 bp, Homo sapiens
  misc_feature (8)..(8): n is a, c, g, or t
  misc_feature (22)..(22): n is a, c, g, or t
  misc_feature (231)..(231): n is a, c, g, or t
  misc_feature (243)..(243): n is a, c, g, or t
  misc_feature (279)..(279): n is a, c, g, or t
  misc_feature (289)..(289): n is a, c, g, or t
  misc_feature (319)..(319): n is a, c, g, or t
  misc_feature (342)..(342): n is a, c, g, or t
  misc_feature (346)..(346): n is a, c, g, or t
  misc_feature (376)..(376): n is a, c, g, or t
  misc_feature (386)..(386): n is a, c, g, or t
aaatgaanccatgtgaccctgnccagggcggtgcgacggggaagcaggaggtgtggggttggtcccgcacgcaacctttgtggagccatcgaagcctgcctttagttatatctgtggcgttctcttgtaagtggaaatgtaattgtgtaccagtttccttaaaataaacaaagccttcatactgtgacagatctgtttccctatgaaaaccaaacaatgattcccacagtncataatgatggncaaaatcttaaaatgtgcctaacatttgagaatagnctcaccaagncaaaatatttaaagttaatgatggtgtagncaatgattgttgtctaggcctancagnagttgtatatgtaatgtatagtctgaaatncattaaatgnacattttcctgaaagttctttttgttttagta

SEQ ID NO: 550685 - DNA, 102 bp, Homo sapiens
attgtgacatgtatacttactatttatttattttacgttacaagacagacaatgagaggatattctcccatgtcaccttcaggaacgacccagagctaccga

SEQ ID NO: 550686 - DNA, 193 bp, Homo sapiens
tagatatccgagtgtcttcagacctgcagtatgagaagaatggtacacatccaagtttgctgacctctctgaggctggcagcggaacaatgacgccctgcgccaggcaaagcaggagtccactgagtaccggagacaggtgcagtccctcacctgtgaagtggatgccctaaaggaagcaatgagtccctgga

SEQ ID NO: 550687 - DNA, 244 bp, Homo sapiens
agatgcggaacttaaaacttgtttgccattctggcatactgttagctttcgggaaatggcaatcagacctggggaatctctgatacttaacacatcggcggattggagatggcccggaattattgatttgggacgagactgtctctcggggccaccccttactttggcgctatgccgtatcaatctaactgacctccatctgccgggggatcccctaatgacccgggaacggctggaccatggc

SEQ ID NO: 550688 - DNA, 1146 bp, Homo sapiens
ctcctcatactaggcctactaaccacacagactaaccatataccaatgatggcgcgatgtaacagcgagaaagcagataccaacgggccaccacacactcacctgtccacaacaggccattcgataacggtgataatcctatttcttaccctcagcagcttcagctatatcttacgcacggattttctctgagacctctttaccactccagcactagccaccttaccaccacccaatctcaggagggacaatggactacacacccacaaagagctaatcaacaccgcgtcacctcgccacacgaagaacagtccacacatatcagcaaacacaacaatagcggtacattactacgacactccaggcgctatcaaatcaacacgtggacgacctacacacacacccgctccttcacctaaggaaacaaatcaaatacgaacaaaacaacaaagtatacatccccaccgacaagcctgacctagcaatgacaccaagataatacaccaaagcgagctaataccataatatataccaccactatccaaaaacacacgcaccctcacagacagccaatcacaactcgaaggacttactaacgaccatttccaatcacgaataagctccccggaccccgggacacaatagactaaccgatggagcatactaaacaggtattaaaacactggatcacgccgtaaccacgcgccaaataacacaccaggcgcatacgctacaccagcatcacacataacgtccgggggactaccaactactatttcaagcatctcagacctaaatctccgtgctacgtccaaataccacgagcaaccacacctacaccgaataacattcacccccaccttgtttaacacgaacccacacaacacatagcaccacacacacatacagggcacaaaacacacaaacatcacaccgccacagtaaccgatcgaacataacatgaggagtcaaacctataggtaacagaacactcgtcattgccctccactgaaaccgcaacaccatctgcggtatattgcaagaactcaacaactatatcaaataccgaaacagtccaacacgtgagattacactacatagcataacgacatacagaccacacaactcagatcaacaacgaacgag

SEQ ID NO: 550689 - DNA, 436 bp, Homo sapiens
aatcttttaccatggttcttagcttcttgccatgggttagaacatgcttctttacctccttgaagtttgttattacccaccttctgaagcctacttctgtcaattcatcaatctttttctctattcagatttgtgccctttctggagaggtgttgtgatcatttggagaagaggcactttggccttttgtgtgttcagcattttttggttgattctttctcatcttcatgagtttgtctggttttgatctttgaggctgctgacccttggatgaagtttttgtcaggactttttttgttgatgttgttgctgttaccttctgtttgtttttctttcaatagtcaggttcctcttctgtaaggctgctgtggcttgttgggggttcacttcaggcctatttatccaggtcactcctgcatctggagatgcccacaga

SEQ ID NO: 550690 - DNA, 817 bp, Homo sapiens
gcgatgtgacgcgtgttcgcggagcccgggtttgacggaggagggcgtccaattggcgccaaagaagtttggccctcccaggtttgcgtcgttgtcaaagaggtggcccgacagtttgatgcttggttcgctatttgccccgcggatgaccaagacgcatgtggcaaagatttgaacccccgctggttttatccaggtatttagtaaagtcgcccaccacagtcgttgttcttaaggtgtaggtacaagaaatacaggtgggcgcgccccggccacgcaccacctgcgtctcgcagcaaattcatggtcgcccgcaaccaactcctcgctactaattaattcttggatataaatgcggaccaaataatgattcccagccgcgcgaacagaagataataaaagtaattgtcctactataaagtgagggcgcgcgacaacacttagatactaacaagaaagtagtgtatatctgttctatgatatcgagcttctcctccaactaagaagatcctccttcttaactagaggaccacccatgctctctccaaaaagatagataattgtaattacttaggaccccccgtcatcagggattctcaggagatatatgttgagacttgtaacatttccctcgcggcctattgtcttcgacgcacaattattttttggggaggctctcgctggcaaaccagaataaatcctggatcaatgactacgtgaggggttctccggtccccccctcctattatcacaggcctcaaacattttcgggccgttcatcacatgtaggagcccaacaaaaatttcgggacaatac

SEQ ID NO: 550691 - DNA, 1020 bp, Homo sapiens
  misc_feature (1006)..(1006): n is a, c, g, or t
tggtatgatctgttatgtctaagtgtacgagctcggttgctgtgatatacacactcgaactgcccaaatgttatgtacttccataattggttgagaaagggatctcccagttcattgttacggtgctcgtttcgaggctgagtgttcttggtgtgtgcatgtctaagtcgttcaatggggcgtgaggcgggactcattgacctcactttgtgagatctgtggtctcgatgggctactgtttgttaggagcatgaatgcagagagttgatggctccccagaggccttccttataggtcttgggctgtatcatgagtatctggctcgatatcttctaacgcgtattggtgcttcaccttcagtagaggtggtcaccatgatcgaggatcgatgtcacgcattgaatatgtcggagcgacgctctgtctaagctggtacctgtgaacggtatctcgtaagtcagagatagagctgctgaatgaagaatctgtataaatgtagggtgtagaatgcgatagtagaatagttagttcactcgagctcacacagctatgatcatgttctaagtgagctcactccaggctggagttgaaaggtctccatcagaggtaagtgagatgctatgcaagaagatccctacttggtagttaaccctaactacttgctcgaagattgagatagtgaaagtaactgatccagagcctgaggaacctgtggcacagcacctcgtggcctggatgtcctggctggagctctgttagggacataagtgtttctgcaagtgactgacttccaggatgtgttttcagaaaccaagaattgagttgatggtcctatgtgtcacattcatcacaggtttcataccaacacaggcttcagcacttcctctggtgtgtttcgctgtcccatgtgaagttggtaaccaatataatgtgtagtctctatcaccaatacctttgttattactgtgtaagaaaaggcccattacttttaaggtatgtgctgtcntatcggcaaataca

SEQ ID NO: 550692 - DNA, 497 bp, Homo sapiens
cgtctagcaggggtcagcaggaaacaacattggggtcataacttcgtctggataggcggtagtgtacatgggatgtaaaacaaacaagtgtatcaaaggtggatgattctgttagagtgaagttggagagtaaaggtcacttacgtttctcatagataatcaagagtgggctgtgtatggactgaaagaggggtaattctttcaaatatgcatttccacacatttaggtctcagaagatgcttagggaccaagggataccacggatagaaaatgctcactttacaggggcagaaaaaccccactcttccttatggactcttcagaaccctttagcaggtataagatattggctccaacatgctgaaaaagagttctatgcataagtatcagagaagtccctcaagcaatcagtaggtgtgtactattaagagagagttcacagttctcttagcatcagacaatggatccctaaggttccagggtgtcacaacaaaaa

SEQ ID NO: 550693 - DNA, 439 bp, Homo sapiens
  misc_feature (3)..(3): n is a, c, g, or t
  misc_feature (71)..(71): n is a, c, g, or t
  misc_feature (102)..(102): n is a, c, g, or t
  misc_feature (108)..(108): n is a, c, g, or t
  misc_feature (122)..(124): n is a, c, g, or t
  misc_feature (137)..(137): n is a, c, g, or t
  misc_feature (157)..(157): n is a, c, g, or t
  misc_feature (176)..(176): n is a, c, g, or t
  misc_feature (207)..(208): n is a, c, g, or t
  misc_feature (215)..(215): n is a, c, g, or t
  misc_feature (224)..(224): n is a, c, g, or t
  misc_feature (265)..(265): n is a, c, g, or t
  misc_feature (277)..(277): n is a, c, g, or t
  misc_feature (433)..(433): n is a, c, g, or t
canactggccggcccggattgacgagatgcctgaggctgccgtgaaataaaaagcaaaaaaataaaaagtnttttttttcgggacccaagagaaggcatttntgggcnccaaagaaatcttnnnttaagaggaatcnaaggagaagtttggaaagcncaaaaagaggaaagggttnagcgaggggctgtgggagattgagaacaacnntactgtnaaggctttnggctataagttttcccagaaaaagagttgtgtggaagagcntgaaccagagcncgaagctgcagagggtgaaggtgataagaaggggaatgcagagggcagcagcgacgaggaagggaagctggttattgatgagccagccaaggagaagaacgagaaaggagcgttgaagaggagagcaggggacttgctggaggactctcctaaacntcccaa

SEQ ID NO: 550694 - DNA, 574 bp, Homo sapiens
acgcctgcacggtatggtcaaacaaccatgagatcagagctcggcaactctctctggacaagagtcttccgggaaggggactccctgaatgccagcattgtggatgccatcaaccaagctgctgagtgctggggtatcggatgcctccgttatgagatcaaggatatccatgtgccaccccgggttgaaagagtctatgcagatccagttggcggcaagagcggcgtaaccgggccacagttctaggagtctgagggggacccggagagtcgggccatcaattgtggcagcaagggcacgaaacaggccccagatccttggcctcggattccagaccaggctgagcagataaatcaggcagcaggagaggccagtgcagtcctaggcgaaggcaagggttaaagttgaagcaatgcgaatccttggctgcagctctgacctaacataatgtagatgcagcacgttcactgactgttggcgagcagtatgtcagcgcagtctccaaagtgcccagggactccaatagtatcctactggcttccaaccctggcgatgtcaccagcatgttggctca

SEQ ID NO: 550695 - DNA, 100 bp, Homo sapiens
aaaaagctattagtgggagtagagtttgaagtccttgaggttgaggctgcagtgagctgtgatcgcaccactgcactctggcctggccgcgcagagttta

SEQ ID NO: 550696 - DNA, 415 bp, Homo sapiens
atatacatagtctgattctgaagtaatctcatccatgaggtttctggaattgaatgacctttgtctaatatttcttcaagtaagttatgaatgaagtcctgcttccttgcgtttcttaagaaaaggaactttcacagttgcatatggtgtgtctgccatgccactcgttcacttgtgttatgaaggtattacatttcattgtttcgggtggctgttacatgatcgcctgagaggggtaccgtccttcctctttttcttgtcactcctgaaaattcagctaacaatataaaccatttaaaagttggaatccttaaagggaaaagattaactcgttgactacatgaaatatactactcatatggccaaaagtttgtacaaagtccaaagatatggcatacttcaacaattagtcagc

SEQ ID NO: 550697 - DNA, 814 bp, Homo sapiens
agttttgatttttatattttattttgtttgttcattttgtttttttggtgatttgttgtttttgttttcattctatttttctgttttattgatattgttttctttatatcttttattgtatttgctcctcctaatgggggtacatcgtgtctcccccccacacagcggagaacactggggtggccccccccccccccccgctgggaatttttttataccccgaacgatataacatttttgataattagaaagatctcttcttgggaccacacgttagacaaaaatttttggggaaaaaaatttctacaaaagggtacaacctcttaaacacgcggttcacccccaatttatatattgccctcccgcagaatttatattaagccccacgcggtttatattattatttacaaccacaaagggttaattatatgtattaactcttccccacatttttgcccacgtctgttagaaaaaattatataaatataaaaaaaaggggaaatatataagaccaccggccttctacaattttcctcttgagcacaccacttcttttaactctcgctcagtccccccggcccacacgagtactatattaattctccttctccctcccccgcgggagaaaataataatatggatcgccgccttccacaaaggcgtttaataacacacacccccactggcttatagacaacaaacctttgttacggcggccttatatcaaatacatatcaggtgagagttaatcataccatccacaattttctcaaaagacaagtacccccccacttattgggccgccaaaaaaaca

SEQ ID NO: 550698 - DNA, 121 bp, Homo sapiens
agatgtagcgctcaacgggatctgctgcaccttgagtcatgagcggcacagacccatgcagagggacagcgccagtcgccaggagtatagaggccctgcttgaacatcaaggccaaccagt

SEQ ID NO: 550699 - DNA, 987 bp, Homo sapiens
gaccgagtgcgttggctcaggcctgtaatcccagttctcagggaggatacgaggcgggaggatagctgtgatgcgccagtgagttcgagacctgcctgggaaatatagtcgagaccccgttcctcctataatgaggaggcacttattacacgggtagggtctgacaaacatacattagtgactaacaaacaatgacatagttttgctggctcagtgcgagtgtataaaaaaaatttaataacatggattatatgcgcgtcatgccgtcccgcacagagtacataggacaccacgttggtggatcgcctgtaacctgaacagcagcaattcgggggcagcaacacagagcccaggtggtgttcccccactcgtagaaacgaatcccgaccggtaacaacggcaacttggctttgcacacaccatcgcattggttggcgtatgcgcgggccgcacctagccggctggaacaagacggtggttccaagcgcagcgccatctcttttatgaataactctctcccgcagtgttcgtgcgaacattaccacgaagaatggtggcgtcaatacacttcagagagcagcaacaatatcttaatatcctttaaggacgtggtgcgtccaggccatccagatagcaaactgctttacggtacccctcttggggacacggtggacctctgtagattcttaactggaaagattatgggcatagaaccatggacagacctcacacggcattcatacgagaccctgctaataatttgttgatcatccagtagtctctcaagggaacctgctcatccctgggttccgttgtactcaacaccccaagtccgaaatattatgaccctcctatcaccaccatttaagcaaatcgacagggtcaactctccgttgacaccgagctaaacgtcgcgaacatgcgttacaacacagctaaggttactatcccaaactgtctattcctctgccaaaagctaccaacacg

SEQ ID NO: 550700 - DNA, 195 bp, Homo sapiens
tcccaacatgagcgaaactccgtctaaaagaagaaaagaaactgaatttaaataacactgggttatttaaagtatttataaactgcagatttagggagagtacaccgaagggaagaggaactctgaagtggacatttaagggatgtgagttttatccattaaccagtcttgattattaggagtggttatttggcc

SEQ ID NO: 550701 - DNA, 133 bp, Homo sapiens
ccatgagcgatgaatagctcctaagttcatccatttccctcttcttctccatttcttctttttctcgggaaggggtctttttcatttcctggaatttgggcttttttctcattcctctcttcacgctccatgg

SEQ ID NO: 550702 - DNA, 181 bp, Homo sapiens
gggggggggggggcccctttaaaattgggggccccccttccccttttttttttatttcccaagttgggggggggggaggggggtttttttatttttttccaaccttttggcccccccgggcctttttcccggggggggggaaattaaaaaaacctttttttaattttttttttttttttta

SEQ ID NO: 550703 - DNA, 142 bp, Homo sapiens
tacagagtttatgtgacatcgtgatgtgttacagagagcgttcggctacttatccatagtctgagcacagcacgcgtcgaggggttaactgcaggatggctcaccgccaacttgaatgggtaccgtaggctcgtaattcgta

SEQ ID NO: 550704 - DNA, 572 bp, Homo sapiens
taagatccctcactcgaggttctagctggtctatgcagctggctgaggtctgcggaagacaggcctgtgtcatagtcaccaaagcatcacagagcataacatctttttgtgcagattacattgagcgcacttggttttggagtatcagcgctcagtctcaaaggcagatgcatcagatgcaagacccgggcctcatgtcctcctattagggcagcactagggctacctctttgtcagcagaacctttggatagccgctgatggggtgagtcagctttctgggcccggcagaccttttgggaatccctggcttttggggcacaacatcctggggaccaccaaaaaggcctttcacctgagctttgggaaagaggaacagctccggctgtgggtggctcatgtcaccatctggaagccagctgggtcacagcagacgcgtaagtcctgtattcattcatccccttctccttttggcagaaaagggatggcgtgggttggaggggtgtattcctgggttcttgcacaattgctcattagaaattcacttctgtttgggtgttggaagctgggcgc

SEQ ID NO: 550705 - DNA, 308 bp, Homo sapiens
cattagggaaaaaagccagtttattttatttttaacagggcctttttctcctttaattaaaacaaaccattttaccctttataaaaacataacttagtttttagtttttcaaaaagggaaaaattttggggggggggaatttaggaaatcaaattttttaaagggggtacctttagaagttcctttttcaatcttaatatattaacaggctggttcccaggtccattacccagcttttttttttacagggaatttatcaagtcctacccaacaaatagtctacttttaaaaactgggggtaaaaatgt

SEQ ID NO: 550706 - DNA, 1005 bp, Homo sapiens
gcagcttccccgcgagcggacgcggcaggcctctgtctcgcttattcttatttttcccccctttcccctttcttattgtctttctttctcccctcccccccttcacattcccctggaggggacccggggaaggggaagagccgggtctcacccagcagacagcacaagggcaacgcagagaacacagagacgaagaaagaccaaaccaaacacgtgaaacaaagcgacagagaacatacagagaccagagaagccaccagagcaaccagacgtgagaagaacagaagacagacgacacacaataacaaagaagaccgagaagacacacagcacgaaaagaagcaaaaccaccaacgaacacgcaaacacacagacacacaacgaaacagacagcccgtacaagtacaatagaaaaaccacatgccacacagacactcgataacgaaagaaatggagctaagaagacaagctgacattgggagccgccaccagctgaaccaggggtgaatcagcacatgataaacaagaacgggtgagaaaacagttaaagagaaaaaaagagacacagaggacacaacaggaacacaaggaggcagacaagagaacacaaggaggccaaatcaaacacagaagcaccgaacaggtacacaagagacatagagggcgtagaccaagggagcagaccacaacgaccgcgtggaacacacgaagcggacaaaagagacgataacagagagagccacacaaacgacgacacgacaacacataggagcaccagaatgacaacggcaaaaaagacagcccccaagaagcacaaaccagagagacacagaagaagctaatacaggccaacagcagacagaagcatagagtaacgagcgaccacaagaaccaaagcagagcacaagaacggaagacagcacacagaaccgaacacagaaagacaagacagacgaacggacaacaaagagaacacaaatactcaagccataccacgcagaggag

SEQ ID NO: 550707 - DNA, 286 bp, Homo sapiens
ctcacggtggcttaaagctgtaacctttaactttccatattctgcctggtcccagaggctcctggaaccacataggtaaaaactgctttcataattgtaacactttctaagttggtttgatactgctaacacagaatcagatctagagaatgggattagcttctaatatagagacatcaattcttggcttgtcaagaataaaaatctcatgagcataatacaagttgtactggtcttcagatttatataataaagggaaatttctttcacttccctcgtaaagctt

SEQ ID NO: 550708 - DNA, 107 bp, Homo sapiens
actagtccaggttggtactagtcacgggttggctactagtcacggttggctactagtccacggttggctcaattccattccagcgtactagccaaccgtggactagt

SEQ ID NO: 550709 - DNA, 365 bp, Homo sapiens
  misc_feature (6)..(6): n is a, c, g, or t
  misc_feature (19)..(19): n is a, c, g, or t
ggtatnattattggctttnctctccactgatgacagttgcactgacctcgactcttgaggatcccccatcgcatgtgccgctccctggacctgtacggtatgatcactgaggttaaggcacaccatgaggagatggccaaatgcaggcagcactgaggctgaagcctgtgaccagaccaagattgagacccttcaggcccaggctgggaagcatggggacgacctccggaatacccggaatgagatatcagagatgaaccgggccatgcagaggctgcaggctgagatcgacaacatcaagaaccagcgtgccaagttggaggccgacattgacgaggctgaggagcggagcggcacatccgttg

SEQ ID NO: 550710 - DNA, 951 bp, Homo sapiens
  misc_feature (8)..(8): n is a, c, g, or t
  misc_feature (131)..(131): n is a, c, g, or t
  misc_feature (153)..(153): n is a, c, g, or t
  misc_feature (185)..(185): n is a, c, g, or t
  misc_feature (220)..(220): n is a, c, g, or t
  misc_feature (283)..(283): n is a, c, g, or t
  misc_feature (287)..(287): n is a, c, g, or t
  misc_feature (338)..(338): n is a, c, g, or t
  misc_feature (370)..(370): n is a, c, g, or t
  misc_feature (397)..(397): n is a, c, g, or t
  misc_feature (506)..(506): n is a, c, g, or t
  misc_feature (522)..(522): n is a, c, g, or t
  misc_feature (591)..(591): n is a, c, g, or t
  misc_feature (604)..(604): n is a, c, g, or t
  misc_feature (606)..(606): n is a, c, g, or t
  misc_feature (620)..(620): n is a, c, g, or t
  misc_feature (630)..(630): n is a, c, g, or t
  misc_feature (636)..(636): n is a, c, g, or t
  misc_feature (654)..(654): n is a, c, g, or t
  misc_feature (657)..(657): n is a, c, g, or t
  misc_feature (690)..(690): n is a, c, g, or t
  misc_feature (710)..(710): n is a, c, g, or t
  misc_feature (726)..(726): n is a, c, g, or t
  misc_feature (730)..(730): n is a, c, g, or t
  misc_feature (757)..(757): n is a, c, g, or t
  misc_feature (801)..(801): n is a, c, g, or t
  misc_feature (807)..(807): n is a, c, g, or t
  misc_feature (809)..(809): n is a, c, g, or t
  misc_feature (811)..(811): n is a, c, g, or t
  misc_feature (813)..(813): n is a, c, g, or t
  misc_feature (815)..(815): n is a, c, g, or t
  misc_feature (821)..(821): n is a, c, g, or t
  misc_feature (828)..(828): n is a, c, g, or t
  misc_feature (830)..(830): n is a, c, g, or t
  misc_feature (858)..(858): n is a, c, g, or t
  misc_feature (885)..(885): n is a, c, g, or t
  misc_feature (908)..(908): n is a, c, g, or t
gttatatnatatgccttttgtgttagttccatgttattttaaaatttctattggctaataaaagcttttgctctatagatccagatatatctagaaaagcacatgatagatttttttgcaagctgaatgcntgagacattacatttaccttanggcacaatgagaaagttaccaaatccaatgtntgcgttagaacgatacagcgactattacagttgcnaaaccatttatcagcttatccacatatgttcagctgggtccccacgtgacataatctaaaggnagancagcatcttactgcacctgttctccatttcctcacagaaagggactgtganattttggctctttccatgttgttctgctcttnacgagagggcagggttatacgatactnaagatcatgggcaggtactgttcgttcgatatctgatttcagctgttctgagccgtgttgtgacggctgagttttttcgttaacctctgcggggcgatgcagcgctggntgaggttgtggaaggnaatttgctcccgttcctgcgtgttatactttcgaatgaggatgttgtggaagtggtgagagagctggtngctgagacctgananggcctgccttagcncgttcttatngatcancccggagttgttccggtngtncgttcgggagaagttctgccagttcgttaagtnctttcacacacccgttaacncgctgaagttcacgcnggcnttgttcttacggtcaaacatggatatnatcgacctgacagttactggatttaagggagttcacgtgccgtnggaganancntncngaagcncggtgtntnaaaaaacttcacttctgtttttattganccttttggaaacgttccaaagggagcnctggtccggcagcccgcgccttnccgcggggccagggccggccccagggccgggggcggttagagt

SEQ ID NO: 550711 - DNA, 227 bp, Homo sapiens
aatatgtgcacatgtatattatcaatatcactcatcctttatatttatcatcttttttgaatatatttgccaccttattgcatatcgaagaatatctccatattcttatagctcgtttttcttcggttcctttctcaatcctttcctcccttattcggttacctcatcgaattcgttcagttctcaacaatgatttctcaaattttcaatcactatagatcatattg

SEQ ID NO: 550712 - DNA, 101 bp, Homo sapiens
  misc_feature (2)..(2): n is a, c, g, or t
gngcaccatgtgctggcagtacaggtatgagtcactgtgcctggccaagaacttaagtacttttttcagtgcatgtctgctgtggctaaattctttccttt

SEQ ID NO: 550713 - DNA, 114 bp, Homo sapiens
tgtatatgacactatacaaatgtctgtagaagaatcaacccatctcccgtgaaactggggagccatatctgcctctctccagaacccactccttctggggggtctctgggtacc

SEQ ID NO: 550714 - DNA, 163 bp, Homo sapiens
gagccggccctccttatctgatagtgagctcaggtgattgatactcctgatgcgagtaatacggatgtgtttaggagtgggacttctaggggatttagcggctcaacatttttggtagccacaggcttccacggacttcacgtcattattggctcaactttcc

SEQ ID NO: 550715 - DNA, 426 bp, Homo sapiens
caggaaacagtatacctctttgacaaagccgtgacgatacatctgttgtcccgtggcactttcttggatatctggccatgtcatatatactcatgtctgctgttgtaggactgtattatgagatgttgctacccagaatgagggaacgttcgctttctcaattatcaagatttaagttgagttgtcttatcattgtctttggtctttaattgaggaagtttaattttaaaataaaagtggaagaagcacttgtagtaagggaatgaatacactcacactcaggatttattgacagtgagaacttacatggtatttccactgatcttttatacattcaataggtttttagaggttttggacaggatgctttaaaaaaaaagattaaaacattaaaagaaaacctttttattttgaagtaattataga

SEQ ID NO: 550716 - DNA, 746 bp, Homo sapiens
ttacagaaaacaccaacatggggagggagtttatgatgcaaaggctatggcaacacgtcggctagcttcagggtagcaccgtgagaaatgggctgtattgatactgtgaatgtttgttttccaagctgttttatacaggtttgttttttcatggtgtagggtatttatgacaaagtaaatgttgagaaggttaaagataaattaacattatccaccaaatgctaaaaatactgatgtgtaaatcacctttatcgcctcacctgttctacaagcttttgtggcttgagggcttttgtttttggcttttgtctggatgaaagctttgcccagctgtgtcttaaaaacaattcctcatgaacactaagattaattgtgtctgtatctctggaactgggtgctcatgttgcgtttaatgagcttgcaacccttccccgtttgctttgtttaaggaggtgcctatgttctttgtggaggaatgaaatggaacttctagtgtgtgtgtgatgtattgggcgtttgcacacacgcgtgtgctattgtagcattacaaaaagtggcatttccttgttcaccttaacccggtgtgagagttttgcagaacactttttttcgggaagtttaaggtgaatttgaaccatgcctattcctatgaacaatgttttcgacagggggactaaaggccacctgtgccaattacattttgtccggtttacggcaccccattaccaaattgcaaatgcttttcc

SEQ ID NO: 550717 - DNA, 804 bp, Homo sapiens
aaaaagtcagaggatggttcatggggttatcgcactcccatatatatgccaaatagagcgattagactacaagctgttctagagataatcactaaccaaactgcctcagccctagaaatgctcgcgcaacaacaaaaccaaatgcgcgcggcaatttatcaaaacaggctggccctagactacttattagcagaagagggtgcgggctgtggtaagtttaacatctccaattgctgtcttaacataggcaataatggagaagaggttctggaaatcgcttcaaacatcagaaaagtagcccgtgtaccagtccaaacctgggagggatgggacccagcaaaccttctaggagggtggttctctaatttaggaggatttaaaatgctggtggggacagtcattttcatcactggggtcctcctgtttctcccctgtggtatcccattaaaactcttgttgaaactacagttaacctcctgacaatccagatgatgctcctgctacagcggcacgatggataccaacccgtctctcaagaataccccaaaaattaagtttttctttttccaaggtgcccacgccaaccctatgtcacgcctgaagtagttattgagaaagtcgtccctttccccttttctataaacaaatagacaggaatgggaagattctcctcggggcctgaaagcttgcgggattgaataactcctctcctcaggccagtcccaaggtacaaacttgcaacagcagcagatagcagaggcaggaagagagtggtggaagacacgtaccccctgaagatcagag

SEQ ID NO: 550718 - DNA, 872 bp, Homo sapiens
gaggctcggaccggcccgcgagttgctgcagtccttcgcgccctcctcgcctcccaaccgaatcatgctccagttcctgcttggatttacactgggcaacgtgcttggaatgtatctggctcagaatatgatataccaaacctggttaaaaaaacttgaagaaattaaaagcggactgtggatgccaagaagaaaccccctagtgcatgagactgtgcctccagcaatcgcttcaggatatacgtgattctacggctctgtgaggggcctcgtttactatctgaaccaaaagctttggttccgtctccagccctcagcacttctcttctggctagacccgtgtgttttggcttaaaagcaagcaaaatggggccccaattgtgagaactaccggaatttccaaaatactcacctcttccacataatccctttccaactgcatgggaggttctaagactggaattatggtgctagattagtaaacaatgactttaatgagtagggtcttctaatcgtggggattttactaccttttttcaaacagaaaatggatgagttggtatagctggtcagatacaaattaatagtgactccaaggttaagtcattataaggggtacttgtaacattgtggtactaaattatgtggcttggcagtattaaaattgatctagagcacagttggggaataatcactatttggacggtggagcacacctggtgttgtaattaacccaaatgtattggctactgaaaaaggttgaaccgtgcggatggggagaaaacacacatggtgtgcgcaagaaaaaaaagggagggcaagagtagagagtcacaacacaacatgtattgtgtaggagagagagacccaaa

SEQ ID NO: 550719 - DNA, 637 bp, Homo sapiens
cttgtaaatattcttgtttggattttctgtatacattgaggaagcattaccggaatgaagagaaacaacccagtgttgcctttcaagtgtgcattgtgccctgtgggcccatgtcccctttcaggagcttcttgactagagagttactcgaaagaggccagagctgaaacttgtgtgtacattttgattgccagtatcagtttggaaaaatgtttaaacttaggtttaactttttggcatggtggcgcacatctgtaatctcagcactttgggagacagaggcaggagaattgtttgagtctaagagtacgttaccaacctaggtgacataacaagatcctgtctctaccaaaaacaaaataaattaggcaggcgtggtagcatgcacctgttgtttcggcctcccaaagtgctgggattacaggcgtgagccatcacacccggccaacatgttatatatgggatagaccctgggtctatcttaactttccaaccatgcttgttcctttcacgcaagattactacctaaacttgtcttctttcttattatggagtgacagttaaaccctatgccttgatttaaggtctcacttcttgtggaaaacagaacttcacctgaaaatcgaatttccaatgc

SEQ ID NO: 550720 - DNA, 414 bp, Homo sapiens
tgatagaagagaagaaacaccaaggctgttcctgtgtggctcaattgccttggccattccatacttcacatctgcctgtatctatgcccttcgctgtaagacttggcagtgtttctcaccaaaaagatctagtttgtttttttatgagactcgatgagagcagaaaatttctgcctcctccctgactcctgccaccgccatggcagcattcctctgtaggaatataagagatacaagaaggaaacgtagatcttcccaaatgaggccatcctggatcacttagccccctcagtgtccaccagctgattacagattccttagtgaacctagcaagatcagtagaacccagcccatatcatcagaactgctggattcatgagaaataataaataattgttgtttaagccaccaaaa

SEQ ID NO: 550721 - DNA, 521 bp, Homo sapiens
cttgtaaatattcttgtttggattttctgtatacattgaggaagcattaccggaatgaagagaaacaacccagtgttgcctttcaagtgtgcattgtgccctgtgggcccatgtcccctttcaggagcttcttgactagagagttactcgaaagaggccagagctgaaacttgtgtgtacattttgattgccagtatcagtttggaaaaatgtttaaacttaggtttaactttttggcatggtggcgcacatctgtaatctcagcactttgggagacagaggcaggagaattgtttgagtctaagagtacgttaccaacctaggtgacataacaagatcctgtctctaccaaaaacaaaataaattaggcaggcgtggtagcatgcacctgttgtttcagctactcaggaggctgaggtgtgaggattgtttgagcctgtgaggtcgaggctgcagtgagccctgattgcacaactgcactttggcctgggcaacagagtgagaccctgtctcagaaaaac

SEQ ID NO: 550722 - DNA, 266 bp, Homo sapiens
cccgatagcccgacaggacggaaaataaggccgggttgctggaccttgcctgacgcatctgtaattggctggagctccgatgatagaacacaggcagtgggcctgtatgatgaagatggaggccgagctcgtcccctccgaggtgctcatgcaccaggccatccagaccatcgagttctgcctgggctgcgtctccaacaccggctcctacctgcgcctgtgggccctgagcctggcccacgcccagctgtcgggctagtcggtgg

SEQ ID NO: 550723 - DNA, 147 bp, Homo sapiens
  misc_feature (110)..(110): n is a, c, g, or t
agccaacaccccccactgggaaacagcagtgatacctttacataactaagctatactaaccccagggttggtcaatccgcaacggcgtaagagtgtttagatcacccctnccaggcagcatgtgctattgaaacttctaaaactagg

SEQ ID NO: 550724 - DNA, 206 bp, Homo sapiens
attcgtagttttgcacttcagcctgggcaagagagtgagacttcatcttaaaaaaaaaaaaacgggaatttagttatatttaacaagtaatcattttgggaggccgaggcaggaggattgcttgaacccgggaggtcaggggctgcagtgagccaagatctcattactgcactctatcctgggtgaaagagtgagaccctgtcgca

SEQ ID NO: 550725 - DNA, 174 bp, Homo sapiens
tgttccgcggaatggatgacgccacgctggaagatcgcgtcgtcgggccgacccacccctacagggcggcgtggcctcacacaccacgacgctcgcccacgagctcgaggcgggcggtcacgacgtgaccctggtgtcctggagccacctctacccgagcttcttctacccggt

SEQ ID NO: 550726 - DNA, 1444 bp, Homo sapiens
  misc_feature (285)..(285): n is a, c, g, or t
tccactcagacacttatttaataactggtaaaaatccaaaaaaattagcatcaaatcttggaatgtctgtggatgtgagaacgctggcgggtgttgggtttggacgtgggcgctcagccactggacgctggcctcaaccgggccaaggaacggggatttatgagatgagactatggcgggatcttctattattggtcttcatctcatgggtggtggtattaagtggtatttataggttctcaattaacagcgcttttggtcccaagtgggcctctggagacgctnggagaggagaagagacttaaaggagaactggtgtgtacgtgagatctcttgagatgtaacagattgtacagaccttacggcgcgagccgagagagctctatagggggggggggagaagagatatttcacaacaaagagttcctctcatttctgtctctaaatatatatcccgaggaatagaggtcctagagagagttgggcgagttcccctatccacaagaggggggtccctatatggaggcgcgctaaaaacagaggggccctcgcgggtgtgtctctctgagaatcttatgagaagaattctgaggggtcaccctcccgagggggggacgcccaagggaggtctttggacacacctgggggagacgttttcgcgccagggagatttgtgaggccacctatgagaccacagggtcaatatttctgggagtcctcttctaaatcccgagcaaactctggcgacgccccatctttggattcgattggggcccgtgtcacgcgtctgagaatggcctaaacaccagcgacgggtcggcgctgtcccaggcaaagaaacccccaaatttcccatagaggggaactcccaaattcccaaaggggccggggggagagacacccagtgtctgctcggtgggggaaccacacgccctccacgtggggccgacaacacactccggggcactcggtgaaggaaaccccaacggggggaggaggaaccacccaacagggcggcggggagataaaacccctggtgatcccgcattagtgtagacacaacaaagggggcgtaccacaccaccgctgtccacacaagcaggtcaaactatcagtactatacactatgatgtacaaccaacgacaacagacaaacacagccctcaccccagcgcccacacccaaaaataaatgagagagcgcaggcagcagaggttgttaaatacagacgaccaagcaagcaaaacgtgttgttcaatgagagagaggagtatcatatgacagggagtagcacccaaagttatcttgctcgggctactaatggcaccctcacacgctgtcgactcatgatacttacgagcagcgtggactaagatggcgatactattcttaacgtgtagactacatctgcagcttcgtgcagcgtatgatcgtatctgtatgt

SEQ ID NO: 550727 - DNA, 430 bp, Homo sapiens
  misc_feature (41)..(41): n is a, c, g, or t
  misc_feature (81)..(81): n is a, c, g, or t
  misc_feature (176)..(176): n is a, c, g, or t
  misc_feature (181)..(181): n is a, c, g, or t
  misc_feature (241)..(241): n is a, c, g, or t
  misc_feature (260)..(260): n is a, c, g, or t
  misc_feature (268)..(268): n is a, c, g, or t
  misc_feature (278)..(278): n is a, c, g, or t
  misc_feature (367)..(367): n is a, c, g, or t
  misc_feature (378)..(378): n is a, c, g, or t
gagcggcggcgccatcgagacccacccaaggcgcgtccccntcggcctcccagcgctcccaagccgcagcgccagcgcccnttcagctagctcgctcgctcgctctgcttccctgctgccggctgcgcaatgggtatggcgttggcggcgatggcggcggtcgagcggccatgcgnacccnggtaccagcagttgcagaatgaagaagagtctggagaacctgaacaggctgcaggtgatngtctccaccttacagcagnatttctgnagagagcgcngatattttgactacaaggatgagtctgggtttcaaagccccatcttacaatgtagctacaacactgcccagttatgatgaagcggagangaccaaggctnaagctactatccctttggttcctgggagagatgaggatttctgggtcgggat

SEQ ID NO: 550728 - DNA, 412 bp, Homo sapiens
cacctacaagtccacccatccttcgtactcactcaccatacaatccatgaccattcaactgacgaataatccatcagatagatctatccatccaaccaaacaccaaatccgtacattttatccttccatccatttatctacccatctatctatttaactacaccctatctcccttaacgtctgtccacccaaatcatccatccagacatccatccacccaaccactcatctaaccaatcagcctatacaactaatctacctaaccatccatccataccatccatccataccatccatccttccataccatccatccatccatcaatccatccatccatccatccatccatatataccacaaaccaacaagttgaaaacaaaggtgatgaaccaaataaataaggaacattga

SEQ ID NO: 550729 - DNA, 100 bp, Homo sapiens
gtatcccctattctcattgtccatggatgccaggacagccttacggatggaggtggctttgtagtgcagcttgaggtggtccagcatcagggtaccgagc

SEQ ID NO: 550730 - DNA, 722 bp, Homo sapiens
tgccatggctcatgcgtgtaatccctgcactttgggaggctgaggcgggctgatcacctgaggtcaggagtttgcagccagcccggccaacatggtgaaaccccgtctctactaaaaatacaaaacaaacgaaacaaaaaacaccaaaaattagccgggtgtggtggtgcctatagtccccagctacctgggaggcacaagaatcacttgaccccaggaggtggagattgcaatgagctgagatcaggacactgcactacagcctgggttacagagcgagactctgtctcaaaaaaaaaaaaaagggaatttgggaaggcccctaagtagaaaataagactatattggggaagtaaatttgtggaaacataactaggtcatatgggaattattaacaaagggccagggggttcaataagatacggaaatgtctataacttagggccttaatcggtgaaggctaagggataatttcctcagggggtaatggagggattaaattaagattaagtaataaaaggtgtaaaggataagggccaggcaattaagctcttaatataggtgaatggtatacctcgggtataaatattttaacagcggggtaatgacactgggtacaccttttggctttaagaaataattcttaatctgggtaaagatgtcctgccagtataaccattttaatgggtaggtgcacctaggaccctaaggaagggaataaa

SEQ ID NO: 550731 - DNA, 916 bp, Homo sapiens
gatacgtccgaaagaggcatcatgatactgcgatctataaccgattactgatgaatcgtctggagaggttgatagcctggcagcgggaggacactgtcacgaagtattatgctaggtaccaagagcacatgggtcgccattgtgctagctgcatgaataagtgcaacttttggtcaggcgtccgatgtaacggtcttacagtcgaggacaggccgttcaccatactactataaatctcatggcctctgataattaacgacccacactgagtgaaatatgtggcatgtcgaaacatgaatagcatgcagttatcaccaaggacattgataagtacgaatcttggtagagaacgggtatgagtgcgaacaaatttgtacaactgtggtagaagggctacatactcccactgtttgtccatgctgttatcggtaattgagtaccgcacaatgggtgggtgcagttcgccttttgcaagagcacgggcggcaagtagactgctaatgggtgcgcaatcattgctggtgatactatgggaggccaaaaatatgtacgaaacacttaaatggccatttagaaatagtacacgaggcaccctggaggctatttggctcaaacgggtggggcaaattgatggttgctagagcactctagattgggcatcccaatgttaccatgatggaatgattcggtggagtgaagtcaagtatagacggcggtctgaccgctggttggaaagcagagtttcaaggccatgagtggttgaagactaacagtgacctggtacacatgaagttgagacgttcactcgaaaggggttgcatgaaaggcagaggcgcagcttaaatgtgacaacgaccgggtgagagtcaggggaaaactcccgaggaaaatcctgacggacagcttgtagacccag

SEQ ID NO: 550732 - DNA, 163 bp, Homo sapiens
gggggggcccccccccccctttgggggttggccccttttttccggggggggcccccccttttggggggcccggggttttttttcccccccccccccccccccccttgggttttttttttttttttttggggggggggggattaaataaggggttttttttcca

SEQ ID NO: 550733 - DNA, 407 bp, Homo sapiens
  misc_feature (2)..(2): n is a, c, g, or t
  misc_feature (107)..(107): n is a, c, g, or t
  misc_feature (114)..(114): n is a, c, g, or t
  misc_feature (116)..(116): n is a, c, g, or t
  misc_feature (366)..(366): n is a, c, g, or t
  misc_feature (376)..(376): n is a, c, g, or t
  misc_feature (404)..(404): n is a, c, g, or t
tnctacaacataccccgcttccacctcaaggctcatggatctatgttgaaatgtgtatgagagtcagaggtgatggatggctccatggaaacagtgtcttctagatncaacatngntggatacacatatgaagtcacaggaacagtgacaatatgaacgaaaccaatctacccaaactcaagctatataaaatggcagcctggaggaggaaacagggggataaagtcagacccctaggtgaggaactttgatattttattgctgctggaagagcacaaagtcagttttgttcaatagagtatcacctgggcttacaaccacactcccaaagacacgctccatggcccacaaagttgggacaacgcnaacttagacnttgaggggaccagaacttttggggattnttt

SEQ ID NO: 550734 - DNA, 182 bp, Homo sapiens
cggttgctggtttggggtttctttctggggtgaggaagtgttttaatattggccgttggtgatgtttgcacccctctgaatatgctaagaacaaaaaaattgcacactttaaatggatgaattgtatggtatgggaattacacaattatgtctcattaaagcagttattttaaaaatctaaa

SEQ ID NO: 550735 - DNA, 148 bp, Homo sapiens
gacactgcttttttgatctcttcaagttttttttctgtatctatcaaagcctcttgtaaattcttatttttttcttccagaatctgcagctaaggagaatgtttacagttattacacatgaatattaatacgctctatagaactgtac

SEQ ID NO: 550736 - DNA, 102 bp, Homo sapiens
caggacatgcaagctggggcgggaggtggaggaggaggaggaggaagaggaaacaagatagtgacaaggtgatgcagatgtgacctaggatgatggaccgcc

SEQ ID NO: 550737 - DNA, 942 bp, Homo sapiens
ctccagcaggtcgatgaggtaggcaggcctgatcctgggtgactatcctggtgtatctggacagaagtgatggtcgagtgagttggagcaggggcatggatcactgaccaagcactggatcacccgctaccttacagggctgagggagctgcgttcgagaactggcctcctgtcacatctgctttctctcactgactggctacatgaacggaagcagaggctagagctgggtgacatctcagaactggcatctggacctccctaactgggccccgcatggtcccatttgctcattagaatttcctctcacatcagtgggatacagaattcagtttctcccttgccaggtccttgggatggttgacccctgcctctgacagtagacttttgtgagtctgctaaggtagactcatcacaacaccatcggctctggggttgatacctgagcctgcaatagagccctgaaatcaagagcatggttgagtgtgtgaatatgatgtgtgcacatgcttaatgagcgtgaaagtgtgcaacgttttgtggagaggacggtgttctggctgagaaaggtaaagaagaggattgtccagtaactgcttttgcaaggcgtggtgtttgcatctttacccaatggacccatgcaacccagaaattggggagtggacaaagaacggaagatctttatgtgtagcccaggactcagaaaatttgatctggagggctatattgatgtattaaccaggtaaaagctccgatgggcaaactgatgtgtgcacgataggtgaagatacaagaatgagctattaagatcattgaaaagactaatggtgcagcgacaaattatctatatgtagtaaacactattaataaaagaaaaatgtaataaatattgttaagaaaaaaataaagaaaaataagaaataaagagaaaaataaaaaatt

SEQ ID NO: 550738 - DNA, 1037 bp, Homo sapiens
caaccccggtcatctactctaccattcttggcgggcacactcatcacagcgctaagctcgcagtgatggtttagctgagtacggcctagaaataagcatgctagctttattccagttactaaccaaaaaaataaaccctcgttccacagaagctgccatcaagtatttcctcaggcaagcaaccggatccatagatcgcttgtaataggctgatcctcttcaacaatatactctcgggacaatgaaccataaccaatacataccgaagtcaatactcatcattaataatcatgaagtggctatagcaataaagactaggaatagccccctttcacttctgagttcccagaggtttacgccaaggtcaaaccctctgacatgccggcctgtcttcttgctcacatgagaaaagactagcccccatctcaatcatataccaaattctgctcccgtcacgtaaacgtaagccttctcctcagtctctcaatcttatccatcatagcgggcagttgaggtggattaaaccaaacccagctacgcaaaatcttagcatactcgctcaattacccacataggatgagtaatagcagttcgaccgtacaaacctaacataacattcttagtttatctatttatatgatcctaactaataacgcatacgatatgcaattaactcagaacaagaacctactaatatgtcggagctgagagaagctaacatgataacacccgtaattcatacagcctctcttctaaggaaggctggccccggtacgggtttggcaagtggcatattgagaattttgaaaaaaaatggtcgttttccacaataatggcaataccccttagtattataacaaagaataaatccaaagaagaagatccacttatagaaaaatggagtgggtagagaaacccttccacaaggagaagcacatccttctatttttaaacaaaaaaggggggccgcggcgcacttagatcgtaatagggagagtagttatctatagcaatatatatatcgtcaaaacaaagta

SEQ ID NO: 550739 - DNA, 368 bp, Homo sapiens
tactcctacctctctctgggcttctatatcgaccgcgatgatgtaggctctggaactgcgtgagccacttcttccgcgaattggccgaggaagaatcgctgagggctaacagcgtctcctgacgattcaaaagcagcgtggcgtccgcgctctcttccagtgacatcaagaagccagctgcagatgagtgggtgtacaaccccatacgccatgaaatgctgccatggccctgtagcaaaagctgaagcaggcccttttggatcttcaatgccctgggttctgtccgcacggacccccatctctgtgacttcctggagactcaccttcctagatgcggaagtgaagcttatcaggaaagatgaggccca

SEQ ID NO: 550740 - DNA, 229 bp, Homo sapiens
ctaattggttcttcgatgacggatcccatgttgctgtggctatggcgtaggccagtggctacagctccgactggacccctagcctgggaacctccatatgctgcgggagtggccctagaaaaggcaaaaagacaaacatacacacacacacaaaacctcacaaaaactgtatttcagtgcaaaataccaagtccaacgtcatcgaagacgcacttaggggtacgagctc

SEQ ID NO: 550741 - DNA, 333 bp, Homo sapiens
tgtgaaagcacaccttggctgagagtcaaatcaagaacacagggcgtatttacaatagtcacaaagaaaatcaaatacctaggaacaccaagaaccaaggaggtaaaagatctctacaaggagcactataaaacactgctgaaagagatgaaagacaacacaaataaatggaaaaacattccattctcatggatatgaagaatcaatgtcattaaaatggccatactacccaaagcaatttacagattcaacgttattcttatgaaactaccaacattattcttcgcagaattagaaaaaactattctaaaattcatatggaaccaaaaaaga

SEQ ID NO: 550742 - DNA, 245 bp, Homo sapiens
  misc_feature (204)..(204): n is a, c, g, or t
tggtggccgtcgacctcggcgagggcgccgatgcccgtgacgttgcggaacgcggtggcgcgcaagcgcggcacatcggttgcatcgacgtggcgcacgacggcctgagcgagaggatgttcggactctcgttcgagtgcgcccgcgagcgccaggacccgatcgcgatcgaagtcgccgacaatgacgtccgtgacctcgggntcccccttggtgagggtgccggtcttgtcgaagacgacggt

SEQ ID NO: 550743 - DNA, 112 bp, Homo sapiens
ggtgctactcctcctcaaatgaacttacagctggacaacgtatgaaccctgaagatgcctcttctagtccagttgggtctcctcaattcagacagatcagcaggctccacct

SEQ ID NO: 550744 - DNA, 189 bp, Homo sapiens
tgtacctgtggttccagctacttgggagactgaggcaggaggatcatttgaacccgggaggtggaggctgcagtgagctgagatcatgccactgcactccagcctggttgacagagcaagactccatttcaaaaaaaaggaggcctatgagggtaccatgctgtggggattcaggagcaggaggatgtt

SEQ ID NO: 550745 - DNA, 142 bp, Homo sapiens
tagctaggattacaggcgtgcaccaccactcctcactaactctcgcatttttagtagaagcgaggggttgactatattagccagactcagctcgaactcatcaccttgggatacgtgagccgcctcctcctatagtaataaa

SEQ ID NO: 550746 - DNA, 1062 bp, Homo sapiens
atggagcccccggactgcacctggcccaagtgcttgctgcggggccccgctggctgctgttgctcgcagtcctgctggcgtgcgcaccacagatgcccagtgctggagtgtgcgctatgtcttgtacccccgctggtggagtgtgatgcgaggaaagtctgtcattctggactgcacccctacgtgggaacccacgaccattatatgctggaatggttccttaccgaccgctcgggagctcgcccccgcctagacctcggctgagatgcagggctctgagctccaggtcacaatgcactgacacccggggcctgcagtacccccataccagctggactcccaggggctgccttggtgctgtgcttgaggcccaggtgggcgacgagcgagactacgtgtgcgtggtgaggtgcatgggcgggcaggcacatgctgatgtgccactgcgcggctcagcgtgtatgcaaagccagaggccactgaggtctcccaccaacgaaatggacactgtctgtggatggaggactctgcccaggagatcgcaacatgcaaacagcggaacgggaacccggcccccaaggatcacgatggatatcgcaagcgggcagcgccatggaggtgcccggagagactgagcccagagggctacagtgaccagacggaaaggaccgggaggaccaacggggcctgatcgacgcgcgcaagccactggaacacacataagataggcagagtcaccgacagcggacttgacccgagaacggcgcagagagatccaaggtagcagccgggccgaagaaagccagacttgggccagaggagagcacggcccaacaggagacggcacataggaacagagcaaccacagacatataccaaccgatcaaaccccaaagaagacaagccgcgaagagggagccacagagaagcaggacgagggagtgggagcgagagcggagccaaagccaaggcaaaggggaatgggaaacaggaaaagggagagaagagggggcacaggagagggaagagccaagaaggagacggagaagcagcaagagcagg

SEQ ID NO: 550747 - DNA, 349 bp, Homo sapiens
ggctcacttcagttccttcagagaaataatagtgagctccttttcctgcgttttctgtggctggaacaacacggagatccagtgcggagtctggatccaggaccagggagtgcgctacactttgtctgtcagggctctggaggacatgaacagagaagtggtgaagactgactctgctgccacaaggattcctgagctagattttgaaattcctgcctttagccagaaaggagctctgaccactgttgaaggattgatcacccgtgctatctctggcctggagcaggaccagcctgcacgaagggcaaacaaagatgctacagctgaaagaattgatgagttcattgtc

SEQ ID NO: 550748 - DNA, 512 bp, Homo sapiens
tggcctcttctctgaatttgctctcccaaactttttcacagtttcccagaacaagctccaaactgacatgattcttcctcaagattctcgtcacttctgtttccctgggttggtttccggacaaagggttcctttttttgttaactttgtttgtgtgtgtacttgggggagggtgggatcggggtatgggttcagaaaggaggcaggcaggcatgcccttttgccattgcaggaggaaatagcagtccagggacaggactgttgagaaagcagccatgagcagcctgttgggctctttttaaagccgcccaactccaccctgcagcatgagaatctgagaaaaggatagaaaacagtcatttccaggcaggcgtggtcgctcatgcctgtagtcccagcacttcgggaggccgaggcgggcagatcacttgaggtcaggagttcgagaccagcctggccaacatggtggaaccccgtctctactaaaaatacaaaaaatacaaaaaaaaaaa

SEQ ID NO: 550749 - DNA, 640 bp, Homo sapiens
tcagacactatgcttgcctccccaccaggaggagggagagtgtgccgagctagaaacactggagagctagctgagcgctccgatgccgggcctgctgatccctgagatgaaggagacctaccatggagcgcttgcgggcagcccctgagcaaggtatatctgaccagctcaactgggcagctggaccccagtcacctgtgtgctccctgtgctgacgcccccagaccacgtcctttcggacctgtgctctcccgtgggcatgccccgtgagcatggctcgcgctttgcgcacctcttcgctgcaggtggctttcatgccccaatggacttcgtagccgcttatacgcgtccgcaccagtccgcggtcacctgtccacatacaggctgcgccgcgcccacccctgcacccttgcccggggcttgcgccaacccgctcgccatgtctccctcgttatgctccgtgcagcgcctgtctgtcgctcaaagcacctgccaatcaccggccgcgcaggacggacagatggtgcaccacgactgacagatcgtgctccccatagcacggcattacccactcagtggcacggtccttcatgcaccctcccagcgccacaccgtgtcctccttgtgtccacgttggctc

SEQ ID NO: 550750 - DNA, 135 bp, Homo sapiens
gtcccacttcatatagattgtttgggcatactgtccgcatgcgccgatcaagacgtagtttgacgttttatgctcaccctgcatcagaggattgagttaacgcgcatacgctagatgtggctaaaattaatagga

SEQ ID NO: 550751 - DNA, 228 bp, Homo sapiens
gtaattactgtaatcacagagcggggtggggcttctgcaccccagtgtcccggacacacttcctgtcaaatcacagagcaggatggggcttccacaccccagtgtcctggacacacttcctgtcaaatcacagagcaggatggggcttctgcacccctgtgttctggacacacttcctgtcatctctgcccctgtgtcggaggcttcaccttctctgctggatacctt

SEQ ID NO: 550752 - DNA, 1522 bp, Homo sapiens
  misc_feature (903)..(903): n is a, c, g, or t
  misc_feature (1279)..(1279): n is a, c, g, or t
tttgggatgaagacaattttgtgggtggtgtgtgattatatttttgttaacgtgcccctccccttttgtttggtcccctcctaaaggggtatttttcccctctagaagaggttgtgtcttcagagtagtgctccgttgtgtattattgaggttcgctgctgttgattttctttcaaatgggggcacacaccgacatagtgagtgtgtgttgagagtgcggccacggcaggaggaattgtttttaacccgtttttaaataagcccttttccccccgtataaaatggtcctcccacgttgggggggatatgttgttgcgcccccgaagatgttgtgaataacattggggtttccgcttatttataagttgttgggggaggaagaattaatttaaaaagacggctcttttttttttttaagagccctccccctctgggtagaagcgccctatattaattgtatttaaggggtcccaccaaaaattaaggtcttgtttaaagtatatattataacggtgataatcttttcgagaataatatagggagaaggaggtcccccccccccaacaccaccgtagtctggtggaggggcgactcaccggagttttatgaagagttttttcctcgcccctcgtgtctcttgttgttaaaatgagaggattttatattgtttaatatgttgcaaaatgttgcgtttgtcctccacctcttatagaggccccctcatcttttatatttataaataggagatgtgttaaaaaaagatatatttttatcagctccgctgatataaagatatttgttttctcccccaaccatgtggtaagtgttatagagtgggccgcaccactttgggactttgccccacagcaaaggtgtctcggctcgttttttgtcacatggagncctctggcacacccacacagtgtgtatataagcctctgtgagagagataaatttctataaaagggggtgtatatttgttttttcacagcccccgcgccactctggttgtgtgctctcacaccgccgctctgtgtaatactcgcccgcgccacctcttttgggggagaggcccacacacaggttgggtgttgggaatctcacacgcagaggtcttcacagagagagagtctcacacgagcccactctctctctgggtcacaccccccgcggtgtgacaccccccgctcttcttatctctataagatattatagagaaaaaatttatcgcccgggcacatatagtgtgttgtggtcgcccctgttatattctccccancgctctatcttctgaagagaggcgtgagggccacggagagagaatggcgtgaaacccacgtaaggcggaggcttgccacgtgaggccgccaagatggcaccccctgcacactccacgcctcgggcgacaccagggtgagactgttctccacaaaaaaaccacacaaaagggcttatttttcacttgtatatttatgttgtattcaggattttatgccattaaatctctctttttattttccca

SEQ ID NO: 550753 - DNA, 375 bp, Homo sapiens
  misc_feature (13)..(13): n is a, c, g, or t
  misc_feature (19)..(19): n is a, c, g, or t
  misc_feature (21)..(21): n is a, c, g, or t
  misc_feature (24)..(24): n is a, c, g, or t
tgattacgaattngagctngnctnccaatatatccggcctatcctttacttttaaaaagtaaagggtaggctgggcgtggtggctcacacctgtcatcccagcactttgggaggccaaggtgggtggatcacctgaggtcaggagttcgggaccagcctgaccaacatggggaaaccccgtctctactgaaaatacaaaattggctgggcatggtggcgtatccttgtaatcccagctacttgggaggctgaggcaacagaattgcttgaacctgggaggtcgaggttgcagtgagctgagatcacgccgttgcacttctgcctgggcaacaagagcaaaactctgtctcataaaaaaaaaaggaaggaaggaaa

SEQ ID NO: 550754 - DNA, 299 bp, Homo sapiens
cttcacattatctgcttcgttttagccaatagttcccctcctctaggctattgaatcagcgcctttggttgcagcatatgtccagggcttcagctcctccacgtttaccccagcgccacttccctgatctatgtttccagaatgcgtcgtcaacaatgtgtgtaacgtgattgatacggttggagcagtgtgcaaagatgacgtttttcccgcgcattaagacactgattatcgctattgttcgtctttcgttaagtatacttctaggcccctttctctacgcgtttccgttatgcacg

SEQ ID NO: 550755 - DNA, 336 bp, Homo sapiens
  misc_feature (25)..(25): n is a, c, g, or t
  misc_feature (37)..(37): n is a, c, g, or t
  misc_feature (109)..(110): n is a, c, g, or t
  misc_feature (128)..(128): n is a, c, g, or t
cggtttgtgggcgcccgccccatgntgccatattggntgttggtgttcttggctgccctaaatgccctgttgcagtggttgttggggccattggtgttttaggcacccnntgtgaacccccttcaggntggcggtggccaaccacccccttcccggtcagcaccgacaaggttaagcgccatttgggttatgagcccctgtttttgtgggagaatagccggacccgcaccattttttgggtacaggccgttacgggttaagcccagtgacggtggggttggggcttggaggcccaaataaagcaccctttcacccccaattaaacccagaaccctt

SEQ ID NO: 550756 - DNA, 136 bp, Homo sapiens
taaggaccctatggaatgccaatgtacctgcgtaggggcacaactccatagtgtatgctttttctatttctgtcacgtggttcatcattctgaccttgtgccttgcacatatgcaatggtgtacctgagctctgaa

SEQ ID NO: 550757 - DNA, 224 bp, Homo sapiens
ctgacagcctcccgagccagccctgcaacgaggtcaccccgccgatgtacgtgggcaacgcgctctgtggctcaggacatccccaagctgcagagtctaggcatcaacactgtgctgaacgcggctgagggcaggtcctttatgcacgtcaacaccaatgccaacttcttcaaggactccggcatcacatacctgggcatcaaggccaacgacacacagagatt

SEQ ID NO: 550758 - DNA, 413 bp, Homo sapiens
atctcactactgtatcctagctcattttactgctgctgataaagacatacccaagactggacaatttacaaaagaaagaggtttattgtacttacagttccacctggtaggggaggcctcacaatcatggctgaaggcaaggaagagcaagtcacatcttacgtggatggcagcaggcaaagagagcgcttgtgcagagaaactcccgtttttaaaaccatcagatctcatgagacacattcactatcacaagaacagcacaggaaagacccacccccatgattcaattatctcccacctgggccctcccacaacacgtgggaactatgggagctacaagatgagatttgagtggggacacagagccaaaccatatcattccaccccaacccctcccaaatctcatgtcctca

SEQ ID NO: 550759 - DNA, 1456 bp, Homo sapiens
ttttttttttattggctttcaatgttaaaaatatttattttttttcctaaaagatcacacaaaagtgtgggaagagaaggagtgttcaattagacatacatctcaaacactcgtgggcagaggggaggacagaagagcgtgcctaaagaaacgtgggtaccgtgggagcaaacgtgcagagatctcaagagtgaccctagttccaggggaaaccagcgagcccgaggttcagcacacattcagggagcaccacgcgagagcacggcagggaagagcaaagtgtgcgtggccccaattcattcctccttttctcagggccaggagaaggccaagagagctctcaacctctttataagaacatgtgttccctgtgacgtgggctctgtggtgcatctttctcatgtggacctgttcttccacaactgcgcgttgcccattgtgaatatctcctctcagtgtgaaccaaatacttcgcgcaacgagagtggccctcaattccgagagaccagagtggaggcgcgcaaaatctccggaagagaccctcgccggggggcattggaactcggtggacagataatgagaaaaggcctcgtgaagagcgccacaacaagtcgtacgtatcacgagcacaggggatatgtgacgtgagggcccttgcgggtgacacgatatgtggagacagcgtgtgttaaaagctcgtatacaagtgagtggccatcaagtactctcccgcttctcaagggaagccttttgaacacgccggaagtagacgccgtgggagaaacaagatgtggaaagtgtggttcacataactatccagggcgcatctccgttctccgtggggaccaacgattggccgtggtccacaatgttcgacggaggtctccacacaaattttattatgttgcaaaaggttctgatggcattggaaaggggccccccaaaaaatttttcacaaaaaacggaaacattgttggcctccccaacaaggtgtgggaccatgcccctccccttgggtgtgttggcgttttccaccccccgaagcggccccccgtggggggttatattatcagcaacacgggggtggtttctttagccacgtgggtaatgactgttggtgtgcaagggagacaccccccccacttcagggagaaagaggagtaaagaacgaggacatgtaacatgcagacccagggaagttgcctggggaggaaacaagggggtaagctcccaccacgaaacgagccacacccccccagacgatggcgtcacggcgccccagaggagtcccccaacgagggtttgtgtagcacgcgccacccgaagtgacaacagcgagtacaaggagggatcacacgagacaacagaacatagcactcaggaagagagaagagacggcgtgaatatagtatagatgtcacagcaatgacaatccagacagccaacattacagagg

SEQ ID NO: 550760 - DNA, 527 bp, Homo sapiens
atagcgacaccgtacccccagcactggtcaacaacccgtctacacagcagctcactcgacttgaggatgcctcccacgaagcgcgaatatggccgatatgatcctaaaaatataccgaagaaagagaggaccaaccagaattccctttggacatttgtgtttttatgttttttaattttgttttgttttatcttcttcttcttcttccttaaagacatttaagctaaaggcaactcgtatccaaatttccaagacacaaacatgacctatccaagtcgcattacccacttgtgaccaatcagtggccaagccaaccttggctaaatggagcatcgaaatctaacgagaaactgcactttttaaaccctcttcagagcaagcgtggaggatgatggagaatcgtgtgatcagtgtgctaaatctctctgcctgtttggactttgtaattatttttttagcagtaattaaagaaaaaaagtcctctgtgaggaatattctctattttaaatatttttagtatgtacggt

SEQ ID NO: 550761 - DNA, 305 bp, Homo sapiens
gttatctgatgtattacagaacgaacttaacaatctggcccgttatgttgtaaaatcacaattctgtttatcaggtatctgaattagcttatctgaatgcatgggttcctaacactggccgtcatcaaacatctgaaacctaggctgggaaccatgtaacccaggccaagaaagtactttaaagtgtcttagagttgtaatcaacttagggggaaacaacagattccattacatcccataaaggatttgttggtgtgtgaaaaagggcctgatgtaatctaggttaaactcaggatgcttcttga

SEQ ID NO: 550762 - DNA, 159 bp, Homo sapiens
actggatgcgccgccggcgtcgccagccgctggcggctggcgaaggcgcatccggccatcgcgtgctggccgatcgcttcactgcgatccagcaggcggtggcggcaccggcctcgcgacccgccgatgcgctgcgggcgctgtttgacgaggtggaaa

SEQ ID NO: 550763 - DNA, 289 bp, Homo sapiens
  misc_feature (129)..(129): n is a, c, g, or t
gcgtcgaccttctcctctttggctctcttgtcccctccttctgtggccaaggcctccgatttcccccaggctggtagcgggctcagaaagtgacttgagggcatggcagggctcaggctcagtttggcngtgtacataaactccagcacctgccccaggcctgcggcgttactgatgtccaggtgcacccacgtccttctggtccaccgaagaggcaatcttgaaagtactcgcgtgcagcgccgccagcaactgcttttatggagcctttaaaagtggaacaaccggt

SEQ ID NO: 550764 - DNA, 1195 bp, Homo sapiens
  misc_feature (793)..(793): n is a, c, g, or t
aaccagtggtttcgatagcgtcagagtggccatttactggtaacggggcgccaacacgggaactaatctcgagtgcatgggttgagtgattcagactgctgtttagccactggggggaggactgggatctgtgcgtctttcaagacaatgacatggtgagggagagtaatcatgctcatgtgaactacacgtgcacgtaagccgcctgatacactactcgtctttagtgataagctcaagtgtccttgttgacttgaaattgtcgtaggtgggaaatagacttacggagcgagagccccaagtctcaatggccaggacgctatcataacattggacaccatcgttgcctttcgtaagggtatctagatacgagttttggcgttcccccttcattgggcaaggactcataagagacgcaagccataggacctaagcttttggaggattgaagggcgtgccttgtgcattggagagaggtctaaggcgggaataggtaagcaaggaatagggcgataagggtgggaactttagcgtggcaccgtgtaatccggggttatgtctacgattaaattgcagcgagctatattgcaatggaacttatataccaggaaaaattatggaacagtgacgttggctcaaatttgattctaattaggagggcttcactgtgtcattacgggttgttcgagctttaagaataaagtggagagttttttgcaaaactttatttttagcgacgtaaaagggtaagggtaaactttatgaggtaaggtataaacattgtgttagcttnaataccaaagggaattgtgggttggcgcgagcgcacatgggtggcttccgtcgtggtgggtttacttcgttccctttgggttctttatgtgtatcttgcagtgttgattcttcagattgggtagggtggacacacattttaattcccaggtagggaagcaccattcccaagttaattggtcttccaattaataggcaatatgctccgaggagcgcagatgtgggtaagcacaacggttggaagggcttagaccagttttccaactgggggggaaacagccacaggccgcatgggtcgttcacggctgtgtggtggggcccacggagatgtcgacgcactgcattttacatttacgtggggtgtaactcttgggagagttggcctcgtattatttggagccgc

SEQ ID NO: 550765 - DNA, 854 bp, Homo sapiens
ggttcgcgtgcgcgtggaggctgctcccagtctgcgcccgagtcagactcgggtgggggtccctggcggcggtagctggcgtgcggaggtgcgatgcatgtcgtgagctcttcggcgttcacaatgggccccaaggtgtgaagtgcgctggggccggccgaccgagcatattgccgggctcgacgcgatgacactggggaccgcagggcggggccgtgggacctgcagtgctatgaggcagacctgagcgcggacagccccaaagagacaatagtggcagcaagcattcgaccccaacctggaacatggagcgcgcctgccctacggctgtggcgcgccgagctgggatgcacttcgctgttacagcgctaaggatggccctgaactctggcagcaggatgcacggatgcacgactgcgtggcagatttggagaccaacatgtcctaagatcaacagctggacgtgctacattggctgcacactacctcgggatcacatggcaaatccatcccatcccatctccaggagataccagagcggaatatcatcttggccctccaggccgtcgttggcaggtaccctcgggtgacattaccagggcatacgcctgccgagccacagtcccgtggcttgacagtcgctctgctagtataatgacgagtaacgcacagaacacgagcaggtatcaccttcccaggtagtattgtgtaccacttcgccttgggctacctgtcatacagcctgcccacagatagacttacacagaggttgactccctaggccccgaatcttgcacgcccctcatacatcacagttggtaagaggcacattctcacagcgtgacacatgtgtg

SEQ ID NO: 550766 - DNA, 507 bp, Homo sapiens
  misc_feature (74)..(74): n is a, c, g, or t
ctcagaggacggtgaaattgtagtttgtcagctgccgaatatataacagattttcagcaatggggatgattttntccataaggggggggggggagagtattcaaaaattacaaaccaaggggattccatcgaaaccagagaagcgacccctattttaaaagtattctgatatggggaagtatgtggccttaggctgaaattttattattctacaaagcatacaagagcacgcatcacaaccggggggggcaccaatggagaaggggaaccaaacacatacaatttatttctgaagctgtgcggtcagctctgggattcctgggtggagatcgaatgggatgacaaatgattggatgggggtgggaatataagcataatatatatactttaacaaatttcaatgagaaaggtaagaggggaaactttcttatcagtgatggggtggaatgagtatgtactaggggattataggagaaacataaaacaagtaccggtgaacggtacaat

SEQ ID NO: 550767 - DNA, 188 bp, Homo sapiens
cagtatctcagctgaaaggctttactcaagctgaaagggctactacctcaagctgaagggtactactcaagctggaaagggtactacctcaagctgaaagggctactacctcaagctggaaagggctactaactcaagctggaaaaggctactaactcaagctggaaagggcagtgtcacaagatgaa

SEQ ID NO: 550768 - DNA, 471 bp, Homo sapiens
  misc_feature (14)..(14): n is a, c, g, or t
gggattacaggcangtgccaccgcgcccagctaatttttgcatttttagtagagatggggtttcgcccatgttggccagaatggtctcaatctcctgaccttgtgagccaccgcgcccggtctgggggggcatttctaaacaacaacatctaggccgggtgcggtggcttacgcctgtaattccagcactttgggaggctgaggcgggtggattactggaggttggaagttcatgaccagcctggccaacctggtgaaaccttgtctctactaaaaatacaaaaagattagccagatgcggtggcgtgcacctgtcattgcagctgctcaggaggctgagacaggatgatcacccgaatccgggaggtggaggatgcagtgagctgatatcatgcccctgcagtccagcctgggcaacagctacactctgtctcaaaaataaaataaaataaaataaaacaacaaaatccc

SEQ ID NO: 550769 - DNA, 204 bp, Homo sapiens
  misc_feature (5)..(5): n is a, c, g, or t
  misc_feature (8)..(8): n is a, c, g, or t
  misc_feature (15)..(15): n is a, c, g, or t
  misc_feature (19)..(20): n is a, c, g, or t
  misc_feature (29)..(29): n is a, c, g, or t
  misc_feature (32)..(32): n is a, c, g, or t
  misc_feature (35)..(35): n is a, c, g, or t
  misc_feature (54)..(54): n is a, c, g, or t
  misc_feature (90)..(90): n is a, c, g, or t
  misc_feature (105)..(105): n is a, c, g, or t
  misc_feature (112)..(112): n is a, c, g, or t
  misc_feature (115)..(115): n is a, c, g, or t
  misc_feature (147)..(147): n is a, c, g, or t
  misc_feature (159)..(159): n is a, c, g, or t
  misc_feature (172)..(172): n is a, c, g, or t
  misc_feature (178)..(179): n is a, c, g, or t
  misc_feature (183)..(183): n is a, c, g, or t
  misc_feature (200)..(200): n is a, c, g, or t
ctcgnccncaaagtnattnnttgcaaacntantgncattttccttaagatggtnacagctatgtaacctgtattattctggacggagctnattaaaatagcaaanagacaanaanataaaacaaaagcttgagcttctattggaccntgacacattttntgcgtgttacagngcaaanngcangggtccaagggaaatgntttg

SEQ ID NO: 550770 - DNA, 173 bp, Homo sapiens
gatttctggatgatatggtagtctatatttagaggaacctttgctttatactgttttcatagtggttgtaccaacttacattcccaccagcaatgaaggagggttccctcttctccccacgctctccagcatttgatgtttgtagacttgttaataacggccattctgactgg

SEQ ID NO: 550771 - DNA, 1353 bp, Homo sapiens
  misc_feature (1119)..(1119): n is a, c, g, or t
ggttctcaccaccacttatgcccctataaggtgaatgggagagggaaacgtgccctctgttatgatccttgcttttgtgacggatttattgtgttcctgttctattgttaactccacaaggttaccgctacctggataacttcttctaaagaaactgtgtgtataaactatcgtgacgctctccctgtcctgtgatcacgacccatctgttcgctcctcgtaatgtggctcagggctcacaaaaggacatcggttgcggtcgaggcagaggcaacgcattcacaggcacaccgtgtgaccatactgcatgacctaggcgtggcgccaatctgccgcacgcggcgagtcgagtgcgcccaaccgcgaacaaagagacgccccgagacagtccggaagtatatgcactcgtgtgtgctcatgcgagctaaccgtatactagggcacacacagagcgcactaggcagcacgatagggtgcgcctcgtgagcgcgaaagaacgcctgagggtggcgacgcgtggagcgcagaacgagccttcacagaagacccctctcgctaaaaagacccccaacatattggatccactgagattgaagctagaccattcgagcgactttcagtggttgtctggaagcgagtgcatcaatgctatatcaaacgactttcgagagtcccacttttgtataacatcagtatgatgcctgaagtgttccgatctctgctctatgaaagaactcgtgtctgcgcattcacttacacatatctcgctgacctgaggtgtgccagctaaccccacaccttcttccccactttggtctcacaatctgcgtcaaacctcctctggtggcacgtcaatccttgccgcacttcacatcacgtgcgatgtacgcctgtgctctgtcatctcacatcttccttcacccggcattgcggtgcacgtatcatcgtgccaccctttgttctcatcgtccgtctaaactgtctctagcatgatgtcccgttgtgcctgctttgattggcgcccgctccgatagagcacctctgtcgccctcggtgtgtgcgtcactccaccgatttagccaaagcaaccagacactcctattaccctccctgtatcangacgtctgtgaaaaacctaccacgcctctacacttatctcaccgtcaatatgcaatatcgtctcgtgagttggtgtacatataacctacgctcttccttatacgaaccaccagaagtgcaccatagctgtgtgactccctagtaacgatctcctcagactgacatacagcattatcagcgtctagccacaacgactagcaacagcacgaatatcagcactagagtcaacggata

SEQ ID NO: 550772 - DNA, 784 bp, Homo sapiens
  misc_feature (1)..(1): n is a, c, g, or t
  misc_feature (65)..(65): n is a, c, g, or t
  misc_feature (95)..(95): n is a, c, g, or t
  misc_feature (97)..(98): n is a, c, g, or t
  misc_feature (133)..(133): n is a, c, g, or t
  misc_feature (153)..(153): n is a, c, g, or t
  misc_feature (155)..(155): n is a, c, g, or t
  misc_feature (167)..(167): n is a, c, g, or t
  misc_feature (170)..(170): n is a, c, g, or t
  misc_feature (182)..(182): n is a, c, g, or t
  misc_feature (188)..(188): n is a, c, g, or t
  misc_feature (191)..(191): n is a, c, g, or t
  misc_feature (234)..(234): n is a, c, g, or t
  misc_feature (311)..(311): n is a, c, g, or t
  misc_feature (318)..(318): n is a, c, g, or t
  misc_feature (322)..(322): n is a, c, g, or t
  misc_feature (388)..(388): n is a, c, g, or t
  misc_feature (399)..(399): n is a, c, g, or t
  misc_feature (404)..(404): n is a, c, g, or t
  misc_feature (451)..(451): n is a, c, g, or t
  misc_feature (461)..(461): n is a, c, g, or t
  misc_feature (478)..(478): n is a, c, g, or t
  misc_feature (496)..(496): n is a, c, g, or t
  misc_feature (544)..(544): n is a, c, g, or t
  misc_feature (565)..(565): n is a, c, g, or t
  misc_feature (577)..(577): n is a, c, g, or t
  misc_feature (582)..(582): n is a, c, g, or t
  misc_feature (637)..(637): n is a, c, g, or t
  misc_feature (744)..(744): n is a, c, g, or t
ngcattctatttttggtgggaaaaaaatgtaacatacatttatttagcacgacattgtgaaatanacaaaaaatgtaactaaaaaaacaggaatntnntattcctagtccatttctgagggctaaatcatganctgctcccaatgtgattggntntttcttacaatngtngggcaccaagtntaaggnttnttaattttctcctctcagtataggcggcaattcaccattttcnttcagttccttcacaatatccaatcctcccaccagctcccctttcacatacagctgagggtatgttggccaatttgngtcagcntttnatccttgccgaacttcttcatcctccaatatatcgcatgtttcatattcaacaccagttctatttngtatttccagnttttntttgctgaatccacattttgcttcctgtttgtttcctttcataaagngcgtcacagnagctttatttgtcagcnctttgagcctttcctctnatttgggagctttgggacaaattgtatctagttcttcagatgcttctngctccttaattatatcaagtnctcctatgagcnctccnggaacatagggctgggggtaggtaggccaactgggataggctttgagtgcctgtngacctcttcatctggggagatatcggaactgctaaactgaatattatgtttgtgaagaatttccaccatctgcttgctgaaaccacagcgtgtttcttgaggagttnctttcataaacagcatgcagggggaagaatgagtaaattt

SEQ ID NO: 550773 - DNA, 807 bp, Homo sapiens
gtctcgtgtctccgcgtctgccagcctggctggcagtccgtctgtccatccctgccgtcgccgcggcgcacgtctagtgctgtgagtcggtggagctatagtgctgtgcggctggcctcgaacgcgagtgagtgtctgtgagttgggtgtgcttggacccagagtgcctaccctcgcctgcctgaggcctcagtttccacatactgtcacaatggagggagtgaccatccctagccctgcttggctgccagcgagctggctagtgacgtcttacagagacgtggaatgcatgcctaggagggaatgccataagggcgcatatatcaacaaggccatagagccattcacacactggacggggagtggagaccagcaatcttgaaagagggacgctttacgtccaatcaatacacccttgcctattgctactatcagtaggacgctcaggctgctagcatgaggagcatactgtcgaatcccatgcccttgcacttttaactcagccgatgcgcagtctttcaccggcaacacacctatccccttgtttgcaacaacccacaagaggacaattccgtatcaatgacctaatgcaacgaggaaacccataaacaggaccaaacagacgcgataacaccaaagagggcaccatatgcaaggaggctttgccacaaggtcacctgaatgcttggcccattcccataggcatactatagcaccataacagccaccttggggcttcacaccattgcaccggtgacccccagcgccattaacaacgggacatcccatagaatagcgagaagaaag

SEQ ID NO: 550774 - DNA, 197 bp, Homo sapiens
gaggacaccaaaaccgtggactctagcgagaggaaggagtaggggaggggccaccaaagcccctgggccccataccatagccctgacctgaacctgcgcctagggactccaacctgggacctgcccggcaagagacggggggtagccgagtgggccgcagatagggccatgctacttcactttgggccagcacagga

SEQ ID NO: 550775 - DNA, 921 bp, Homo sapiens
ggatgaggatgattgtaagagagagagcgccgagtgacaaggcattctggaccctagctacgacattcctccattgagagagaggctctatggccgattaacccagattaaagggctcgttccagaaggagcgagacagctggagagagaacgccttgcgttctgtatgatgcccaggggcttggtcagttgtgcctcagctgttggtaggttcagtgccgggagtggttcagacagtctctggtgcagagtctacataagagatcaggcatagtatagtctggttcttggcataatattagtggtgcgccttattgatatatggtaagggtgtacataggggcatgtaggcatgcatggtgagagcaatgaggaaagatgaccaaagaggtaggtggatagggaggcttgattcttatggtgccaaagtgacttgagagaattacctttcggtttacaaagctatgatcaacttattccattaaatagatacattaaaaagagttgagaagactgaaaagaaataccacacacgacgagagccaaaagacaaaacacgaacccaccaaacgcggccccacaaaagaaacacatatccacaagagggacacatacagcaaagacatgcacgcccagccaccaaaggggggcaccttggaagacacgcgccccaccctgcgaacacgcggccaagcgaacataacacacagcgatgccacgcgcacaaggagcgaaccaaccaaccatcacatgaaaaaggcacctacggccaacagaccgcaacgcacaacgcggcacccggcgacaaacaaaacgccacgaccaacggcacacaccacccacgccacagggaaacagagcagcaaccaccacaccggagagtaaaaatcagaaacgagaaccagcaaacaaactcaaccg

SEQ ID NO: 550776 - DNA, 205 bp, Homo sapiens
tgctgcggtgatctagaggtcccgaagacgtggatcaggcactggcaggagaattgcttgaacgggggaggtggaggttgcagtgagccgagattacaccactgcactccagcctggccacagagcaagactctgtctcaaaaaaaaagtattgggggagaatacggactccccggccacagtcttcgccggatagcatgtatag

SEQ ID NO: 550777 - DNA, 436 bp, Homo sapiens
tctctgagaatagattttagctgttaatattatattacaacttcctacatagttgtaaaaatttaggttaatgattcctgtgaatttatttttatttttttgaaatggggtctcactctgttgcccaggctggagtgtagtggtgtgatctcagctcattgcaactttgcctcccaggctcaagcgatcctcctgcctcagccacgagagtagctgggattacagattcacgccactacacccagcaaacttttgtatttttagtagatatgaggtttcaccatgttgtccaggctgttctcaaactcctgagctcaagtgatccacccacctagacctcccaaagtgctgggactacaggcatgagccacctgtgaatttaaagtaaattaatattatgtacacagaagttacaataaaaatgcttctatttgga

SEQ ID NO: 550778 - DNA, 149 bp, Homo sapiens
tgttgaacatacaagattgacactttgataggtcgctaagtacatgattagtagatgcacatctcaggaatctattatgcaaatcccctccccaatagtttctatgaccatatagattgtccgggttattgtgtccgagttatagtcgt

SEQ ID NO: 550779 - DNA, 461 bp, Homo sapiens
cctcagctggttccagccgaccaacccacagctccctggcagccgccaccctgaactggagtctcgccataaccctgggctgcgggccctgctgggtgaggaagagaatgcttaggtagctgcagctgctgacccggaggaggaacctcttttctggaggcattcatcccccattctaaggaaagggaatggcccacttgagcccaggagttcgaggcaaggcaggacgccctgaagggatggggcagctgtgatctgtgggaagtggcttcctgctctacccgtctcggaacaggaggctttgccgtcctagaaacgcgttcggaagatgggacaccttcagcttactcaactcacccgcttaaatccctgagttaaaaaaaaaaattaactgatcgtccttaggagatcccggcaacaagcttacatttttaaaattgataaataaaagaaaagaatca

SEQ ID NO: 550780 - DNA, 572 bp, Homo sapiens
ctacgaatccaatccaaggttcccaaatcgcccgcacatccacggtcgctaaattcctacctaccgcgactttggtctaaacggtccgtggagggacggggaaagctaggactaggggaaggtgctgggatccgtataggaggaacggcggggaagccaatttctgggactacggggcgcctgagtgcgccattcgggtaggacatgaccccctagatcgtcgctctgaggaggtctatgcgtcgtcgaagctacgttactcgaacgttttctgggctctgggtttgcagactatgcgggggggttaatcttattatttgtgataacgtctcgtatttaggcccaaataatgtcccgcgattaagttcgattaactataggtggctacctattttcctgggtcgggcccgtcctcgggaagtaggagctcgccgccgtccgaagcgttcgaggagattcgctacgagtactacgaatgatcctcgggggtaaattccgagggtattttagacgctaacggcgtgtttagggtggataggtgttatcctataggggaggtgacgaagcttttg

SEQ ID NO: 550781 - DNA, 359 bp, Homo sapiens
  misc_feature (12)..(12): n is a, c, g, or t
  misc_feature (176)..(176): n is a, c, g, or t
cccccccccccncccctaatagggggggttccgccttgtacgggttccaaaggtggtccctaggaaaccaaatccccccgtcccccaacttggagatttaaaaagcccggggtagggagggggccccccaaaacccccgggccaaaggggggtttgggttggcccccgtttttttntccaccccaaaggcccccccttttttccgggggggttttttttttagggcgggaaacaaaaaagggggttttttttggtaaaaaaaagaaaaagggggggaacttaccccgccccttttcccgggttcccccgggggggtttttttgttttttggggccaaaaaaaaggcgggccctttccga

SEQ ID NO: 550782 - DNA, 357 bp, Homo sapiens
atccccctggctttctcaggtctgtggtaagggttgatatagtgggttgttagaagaaacattagtcatattgagtgatgggtgatggcctggagtacggttttgtatgaattgaaaaactaaatggcaataagagaaggagaaaaacaggtataaaaagactaagaatcgggaggacctaggacatctaattagagagtgcctcaggaggttcagcatagtcctgccagcaaagattatttatttacttcaagagttaagagtggcagttaggggatagcaggaggagatatcagctgtgatggcttggagaaacagtgtaaaccggcagtgtaaacaagagcagggcaagccagg

SEQ ID NO: 550783 - DNA, 1351 bp, Homo sapiens
ccgtgttgtatcttgtggttcttttgtctctcttgtttttgctcttctctgttgcgtgtcgcgctttttctgggctggtgtgtgttggtgttttctgcttgttttgctgctctgttgtttgccgcgtgcgttggttcttgtttgtttctgttgtgttttttgctctctctggtgtcggctcctgtgttgtctccgtcttgtctcctctgtgtgtttctgcttctcttttgtttttttttttccttcgtgttttgttttttgttttctctccttttcttttttctctttcttctcttgtatttttcctgttttcgtttattttaggtttttcctggtctgtgttgtcgtgctgctagtggtgtcgcttctccatgtatgctgtccccttgtagtaggtgtccagtcacatgtgtcatgtcctaatggctttacttctagtttttgttatcatcttatgttgtatttctttgggggtcgacttggctgttgctttttgtctatcattgctctctgttgtctcgctcttgttagtcttccgttgttcttttctggccctgtcgcgctccgtgctttccatcttctatgctatgttggtagtttgtgtattgccattttgtgcctgctagatctagtatgtgtttgttataattcattctatcgtccctggtctgtatcctctgtgtctgagctcagtgatcatctgtgggtgtcttctagttgggttctggtcatccctcgtctgccgttgaacgcattgtttgcttgtatagtgtatttacttgttacgtctcagccctggctctcttgtagccagctaaggggccagcttcataaaggcacaatggtatcatgggtgataacgttgtggtctcagtcatcagtgttgtctccatcttctttctcccatctcagcccaccagctaaggtgcactgagggatgatcttgatgcagtatgatttcattttatgggcctggcccatgtggtctgtatagtccatggccgtctcaactgttactgatgagccatctgcgacttcgctccagctagcattatctccatgacgagagtcaagagagggctttctcatcagtcccagggtatctccctgactgcctctctcgcctgtctgcaagactgcaaggcattctgatggggtcaaacgtggagtgaaagggaccacgggatgtcatgggatgtttaagttgtttcatcacaccatccccgtggcaaagaaacagtcagtcctcttcaggtgtcttctggatttctggtatactggacagagaaaatcattgatcagatgataacgaggggctacaaagataatgatttctcacctcccccttctg

SEQ ID NO: 550784 - DNA, 1293 bp, Homo sapiens
ttcagtttggggtttcgtgttcccccccttaccccttccccggggtctagggggtgacattgcaccgcgcccctcgtgggagtcgcgtatgccaccccacgctggactccccaagcatggcgctgccccatacccattttgcctgtacctaggatacaggccacccgacgccctgacatatacccacactgcatcagccaatggagcggctagcaggatagtacaaatactgcgctagcacatattcgtactgctgtactggtcgacgtgcacatatctgactgactaataatactatagcatacaccttgctagagactagaggggagccctgtctatacggcggataaatacgataacactaggatacaggcatgtgaggcaactaatatatactaggactaggtacataccccataggctccccatagagccctacatggttagtgtacctgtgcgatatacaaataacttataggggtaacccaaatagtctgaagctctagacagacgggagtgaccaatgagaattagccccacgtggcacgttcccaaagagtgtaacaccgagataacctgatcgacttagcgaatatcacaacctatgagcttagcactaagaccttcacgagaccctatactgtaggtacaccattataacatgtacgcaaggtggcacggggataggctaaccccagaccgttaatgtgccgaccttaacccatcacagcacagggtcagtcggctgattacacaacgcagaatcgaggccgatgcacttaggacggcgtagcgatattaacaggccaactttcccagaccatttggtacctactattggcgctagccagcacatgctgacagtggaagctccgaaactccgcaaaataccacttacccaacttccccctcggcccacatggcacgttggcggcgccattcagtatggcttatctacctacgggcggatacaatcccttacgcccattgtgcccgacagcataaacataccaactttccagacgtctatgccgtcatatgttaccactaccaatcactctgagctacaaacgttcccccaccgtaacatttccgtggacagcccgtagcgaaatctcggccacgcagttataggaagagcagccacacaacgaccgacatggatagatagacaatcggcgtgggacttcacccaaaatcggggcaaggaaaccataccaacactacaccaatcaattatacaccttattccacagtagtcaaccactcatcacaagccacccgctcttcccc

SEQ ID NO: 550785 - DNA, 165 bp, Homo sapiens
cccccaataactcatctccctgtcatcagaactgagctgcagccactggttctaagcatagctcatttgtctgccagagaagacacaccttaagatgttcccgagaacgcctggagtccggaatacattccctgttttcccaggaggagacctgagcaagccagg

SEQ ID NO: 550786 - DNA, 1154 bp, Homo sapiens
cggagccccgaacgaccccgactgctaatactaactatcgtgatcgtcctaccccgtcagcaatcactgggcaagcgcaggcgcccactgtaatgcgcagctggaaccgaccaagtcagcgaaataaaatactcgtgacctctctatactgaagtgcgccctacgaaatctccgttgaattatcacattcagagccagcagaaacttgagtcatgtcatctattcttcttcagaaagccacaagcatgtaatcgcccaagcgccttggcgtatcaatcgagcccgatgagggcgaagccgagcctagagacggccttgaacgcagggcgacagtacgtatccgtatatctcacacccgtaggagtgcgtccgctgtccaccttaggtcgatcggcactgaagttgtacgacgtgcacgagagcgacccgcgtgagagcgtcactagaacaattctgactaacgtcgagctgcgtcactggcccgaaggaacactatgcaaagctcccttgcaagcgcaacaactgtaatagggctagctgactacgatagcttttatagtcaagatacctctttacggagcgtcgcacttatgactaccctaaagcccaggtcgaagcccccatcgctgggtcaactagtactatgccgcaggtactcttaaaaactaggcggtataggtataatacgcctcacactcattctcaagcccctgacgaaacaacatagactacccgtaccttgtgcatatccctatgaggcatagagtcataaccagctccagccagctaacgacaaacacgagcctaaaaatccgctcatgggatacatcaacaagccaggcacaaaagaccgacggaagacaacaggcgaactcataccaaaccccctgaagctccccgcggcagacaatccataaacgcccggactgacaccaccacaaacaaaattgggcgcgcaaaaaacaactacagaaaaggcaacacaaaggccaccaaaatagctcacaaggaggcatagcatacacccaaaagattggaacagaaacaagccctagacaaggtaaccccaataaacggaacacggcacagaaaacaccgaaaacaccacagacaccaacgccacaccacatcaacggggagaacacaacagacac

SEQ ID NO: 550787 - DNA, 215 bp, Homo sapiens
tcaggagtttgaggcttcagtgagctaggatcgtgccactgcactccaccctgggtgacacagtgagacttggtctctaaaaaaattaataaaatgaaatgtagaaatttttaaattttttcatgggtgtttgggaaatgttgagtaacctgttttaataaaatacagattacagtgggtgcagcaaataaaggatttatgtatacatgaacacg

SEQ ID NO: 550788 - DNA, 186 bp, Homo sapiens
gctgagccatgtatcactggggcatgtacttttctcaccgtcccccgattagaataccccaatacttcctttctcctcttttcttttacctggggtcccacactcttatttggcgttctttctcaattttctggcatgtgtccccttcccactatttcctggaggttgccgagcaaccctcatggg

SEQ ID NO: 550789 - DNA, 162 bp, Homo sapiens
taatttcccccggaaccctttttgttttccccattttgttttccttaattccttttttttccctttaaaaggggattgtttcccccttccttttttcctccgggttttttgtgtttttggaacggagcttttttgaaatttttttaggtcttttaaggtgga

SEQ ID NO: 550790 - DNA, 914 bp, Homo sapiens
tgtgcagtggaacacaggggcccaggttcaggatcgtgaagccaatgatgctgggttcacccacatctccaaagccaggagttaatgcccagttcttacctggattaatgggggatagacagctccggtgactccacaacctcgatcaagttagtggcccttcagtaggagtaaatggaaagtgagatcacctttacttgccggtgtgggtccacacacaacagttgtaccagcgtcataaagataaaatggtgggctccaccagttagaagtatcatcatgatgacatttctagcccaggacttggatcaacacctttaacttcaagaagacagccaagacatttcagtaatgcagagtcctcttgtgggagttagcatcgtactcctggaacgagggcaaagtatgtcaagtccagcaagtatcggtcagccacgaacagacgacattatctcctgccagttggatccttgtgatactcaaggagatgctttgacttccgaagatcacctcgcttgactctggggtgacgactcgggtactccaggcatcagttcctacatatcactagcactcggccaggcatgggaatatcttcaccaccatgggaggctcattcccggagtagtgtacgcctatccggaacaattctaccggagggcctgaaagcctaagacacacatgggggagtttgtcgaaccacatgacgtggtgtcagacccatgttggaatcatttgtttgaaccggtgtaacgtgacacaatcaaggccaacgggttgggctcacaaatctatggtggcaaacgtcatgacagagcatacgagcctgcacacagtgacatcggaacgcctgcagcaccacatgtaccagattggcacaaggccgaacgacgacacatggggccaataggcaa

SEQ ID NO: 550791 - DNA, 302 bp, Homo sapiens
tctctggcaggtggaatcaggacggtgaaattaatttgtagatcgggctttaattatatattttttttatttaggaaacaaaatctcgggctatcatccaggctgcttttaggggtggcaatctgggctcacggcaacctccatctcccaagttcaagcaattcttcggcctcagtctccggagtagctgggactacaggtgccggtcagaacaccgggctaattgtttggattttaagtagagatgggtgtttcaccatgtgggccaagctagtctcaaactcctgatttccaccttgcca

SEQ ID NO: 550792 - DNA, 161 bp, Homo sapiens
  misc_feature (1)..(1): n is a, c, g, or t
ntttatttgagaggctaaaaatttcaaagtattaatttaagccactctaaccctgcatggaaaaattggagtaagaaatactgatttctagagaccaacgtataaccagtgaaaaattaagcttctggaggtaaatttctaaatttaatgcccctggctta

SEQ ID NO: 550793 - DNA, 320 bp, Homo sapiens
gagacagggtctcgctctgtcacccaggctggagtgtaatagtgccatttcggctcattgcagcctccccctcccaggttcaagcaatcctcctacttcagcctcctaagtagctgggactataaaagtgtgcccccccagccagctaaattttttagttttgggtatttgtttggaaaaaaatggggttttgccatgttgcctaggctggtttcaaacttttggcctcaagcaatcctcccccctcagcctccgaaagtgttaggattacaggcatgagcccctgcgcccacccttaggtgcttttatataaatttcca

SEQ ID NO: 550794 - DNA, 1150 bp, Homo sapiens
aggcgtcactcactctcaatgccattaacaagtgcctcctgcgtgaatccctggcggcccctgaccttctcctacgtgactgagccctgcgaaggacatctgctcctgaaccgtgctgtggagtcgcgtgaaagaatggagaaccgtgaatagtctgctgacaggatggcagtaatgtcaacgcgaggccctggaccagaccagtttctttgtcatgtcaaggaaagttacatctcctgaagctggactaggtcgtggtggctgcgtgcccacgtacagttccctctttcagtgtgtcgtaaccaacgactcctatttagatgcggagtgtgttcccgagagcttggcccgcaaacacgtatattgcccgtagtcaaccaatcgcccacatccctatggaaggacgggagaggactggtcatcgcatctggaggcctcccatgggacttggcgtatgccggcagggcggcaatcagttccttttcactcaatcggttaaacgatggttgcgctggtgttcggtggctcgtccttagttggaactgcgaaaaggttcccagtcaagcactttttccaggacataccttgatccacggacttaataccccggcgtatacttttttgacgcgagcgggacacacattacgatgtcagatttgcacaccttcgtgcaacccgaggagctaaccttccatgataggcatgtgagaggtgcggccaaggccctttcacaaaatggactctccttctagagagccgtgtgtcacagcatttgcattttcggatagcgcggctatagcagatgagttatggccagtacacaccttagtggcagtgcaacccctcacaagtacattaccagataggtatccattgtgcttgcggaaacgcgcaggggggaattcaagtgaagcgagaagggcctcgacttaatgaacaaagtccgagcgcgttcgcgcgattgtgaaccagaaagtaaagaggcgtatcgcccgtttacgcgaagctcccttactggtagtgacacacctcgaacaaaggaagcggccccgcatcggaaggttaaacaatataactcggtgtcccaagtcagttctttcccgttttaacatggaggatctattacaacacggcgtacgtagcgtgcgag

SEQ ID NO: 550795 - DNA, 474 bp, Homo sapiens
  misc_feature (296)..(296): n is a, c, g, or t
ggcatttatcctgtcatcaattatatgttttggctgtcgtatagcttgctttgtttgagacagagtcttgcgctgtcgcccaggatggagtgcagtggcgcaatctcagctcactggaacctccgcctcccgggttaaagcgattctccggcctcagcctcctgagtagctggattacaggggctcaccatcatgcctggctaattttggtatttcaagtagaggtggggcttcaccaggttagccaggctggtctcgagctcttgactttaggtgatcgatccgcctgcctcggnctcccaaagtgctgagattacaggcgtgagccaccgtacctggcctcagggtagatgcttaatgccttttctgtggtacacttattagcattctaagtaacatcattttaatgggtaatgagctggcataatcaatatttctagctatcatggtttacaatcttaccatgcttccaag

SEQ ID NO: 550796 - DNA, 135 bp, Homo sapiens
aggtgtccccacagtgagcgatgccctggtacacacgtgctaggggtcgcggaacgtcggacgatctggagcatatgaacgtcttgggacgtgccactctgacggcgtctctggctacaacaacggcccagtcca

SEQ ID NO: 550797 - DNA, 191 bp, Homo sapiens
acatgtccacagttgtcaaaaattgtaatactcaaatgagaaatcacgatggcttttcagtttttacaaataatttagttatgctgttgtctttcatctttcctggttaaaccaaactcaaattgcggagctaacaaaacaacatcatattattaacttgtaaaatgcagtaaatctgggctgcagaccag

SEQ ID NO: 550798 - DNA, 357 bp, Homo sapiens
  misc_feature (10)..(10): n is a, c, g, or t
  misc_feature (61)..(62): n is a, c, g, or t
  misc_feature (75)..(75): n is a, c, g, or t
  misc_feature (77)..(77): n is a, c, g, or t
  misc_feature (81)..(81): n is a, c, g, or t
  misc_feature (83)..(84): n is a, c, g, or t
  misc_feature (123)..(125): n is a, c, g, or t
  misc_feature (128)..(128): n is a, c, g, or t
  misc_feature (132)..(132): n is a, c, g, or t
  misc_feature (144)..(144): n is a, c, g, or t
  misc_feature (154)..(154): n is a, c, g, or t
  misc_feature (156)..(156): n is a, c, g, or t
  misc_feature (163)..(163): n is a, c, g, or t
  misc_feature (202)..(202): n is a, c, g, or t
  misc_feature (205)..(205): n is a, c, g, or t
  misc_feature (216)..(216): n is a, c, g, or t
  misc_feature (222)..(223): n is a, c, g, or t
  misc_feature (257)..(257): n is a, c, g, or t
  misc_feature (267)..(268): n is a, c, g, or t
  misc_feature (273)..(273): n is a, c, g, or t
  misc_feature (275)..(275): n is a, c, g, or t
  misc_feature (277)..(278): n is a, c, g, or t
  misc_feature (281)..(281): n is a, c, g, or t
  misc_feature (292)..(292): n is a, c, g, or t
  misc_feature (313)..(313): n is a, c, g, or t
tacacacaanaaaagaagctgttaccctcttaccatctggctccaggggcctccagttcannattcctccttctncncttnannaagtggggccacatgatgggacagccaggaatctgggannntancacnaaaacagactanaaaccccgcnanatttcanaaaagacagttatatatacttcacactggtgtaacaaantanaaatacaaaantacaannaaaataaataattcaacataactggcctaaatanataggaatanngaaangngnnaanaaagagactanaagaaggactctagaatccancaaagaacaggaacaacacaaatagagttggtaaagccgaaaac

SEQ ID NO: 550799 - DNA, 660 bp, Homo sapiens
ggggcagaaaccttctggctggtcgaggcctgggtttgaatcggccgagggcgcgcgcgagagagagagagagagagcgagagagagagcgagagacgagagagagagagagagagagcgagacgagagagcgagagatagagcgcgcagacgatgagagagagacgagagagagcgccccgccggcggggaggcgcgcccctcggcggcgggcgctgccgctctggtctctctcctcctgctctgtcggtgtgtcgccgcgccgtctcctctctctctcctcgcctcgtcggcctcctcgggcgggcagctgctgtcgtgcgtctgtatcttctgcttctgcagctctgcgcgcggctccgctgcgccggcccctccgcgcgctgccctgcgtcttctttccccgtgaaagccggtgccgctgatagctcgcttcgtcgctctgcttctcacctctgcccccatctactgccgagaggccagagagtccctcctcgtcatctacatcttcttcctcgttccttgcaggacgttccgccgtccgtcttcagtgctagatcattcattcctcattcacccacgctcgaataggtcgatggtaggacagacgccactcagcagccggcgccgacgcgggaggcagcatcatccttcatcctg

SEQ ID NO: 550800 - DNA, 1187 bp, Homo sapiens
tgggtatttaaactatttattaacaaacaaggcctacagatcttatttcttctgggacacacccagcggggcggccacgggggccaggggctctggggtggtgcgtggccctcggacacaaaggccccaaaagtgtgacgcagccctcttagtgggcccgaattcttcttaagtcgctctccaggtcttcagcggagcctgtggtgtgctccaaaccactgggcttaggaccgtggcgtgtattttccatccttttacattcctttcgtggtcgtgttcaaaaaccaggtcgtgggatctggatacgtggcggtggaattcgtgcaataagggggaatcacaaggtattccaccttcaatccttcgaggtgaagattcctccgcgcccctctggggggaaggctcaaggctcgtgctttacccctcaaaaacccacagtggaagcccatattcttctcggaccccacaaccccttatagaggtgcgaggtcattggcacagagggcatattattcaccggcgcgtgccacattcgaagtgttgggggtgctggaaagatacttcggccaaaaaatattgcggtggaacacttttcccagggggactcaccatagcacagaccatgtgggccgtgacagacaacaaaggcgggcgggggaccgacggagagaagagccccgggcaaagcgcgccgggagagcaccccgggccgtagaaacgcaccgtgggggcccccaaccgcagagaccggggtgccaaacacagtgcggggtgtccgcccgcgctcatcgtctagcgcgacatgaaaccccctcagagagacagcgcaaaaggggggggccaaggagcccagtggggaatggcgcacacaccggccttcccgggaacccggaaataaaccttgcccaaaacccaagggggggaaggcaccaaggagaaacatccggccccacagaaaggcactgcaacacaaatctggagaacacaatgtgggggccccgaagggaccccggggggaaatagacgaccacccacaagaatagatgtggccacgaaggcaaccatgctggggaaaaagaggaacaaagaagccagaggcgtaaccaaacaacgatgacggataacacacagaggacaacaacaccactacacacgacacgaaggggacagaacaacgacacaacctc

SEQ ID NO: 550801 - DNA, 117 bp, Homo sapiens
gttacgatcgaaaggctatccatgccgagggagtcccaggcttgcagactgaactccattcctgagcgagcccacgtaggtctatcttatatatccacgggcatcacgtccacgtaa

SEQ ID NO: 550802 - DNA, 730 bp, Homo sapiens
  misc_feature (369)..(369): n is a, c, g, or t
  misc_feature (383)..(385): n is a, c, g, or t
aggtttttcccttttgaagcgcaatggggacaaaccggggcccccccccgggggaaaaagggtggggtttcccagccctcccgtagattcccctccctccgcgggaacccggggtttttttgggccaaatgtggaaaaccaaacgtggtccaggccaaaaatgttgttaatccgcgggggggtttggccctggggtgcgcctcccaaaaaccgcccttttttaaataggccttcctttgggaggccccggggtggtctcccaaattcccccttcttgttgcccttgtcccccccccccctctccaggggggcccgggggcccccctttttttggcgcgccaattggggggggtgtgggggttttgcctngggccccctaaaannnccccttttttaaaggccccccaggaaaaaaaaccccccccccggcccggcgggggggggggccccggggcccccccccttttttttttttttttttaaaaaaaaaaaccttttaaaacccccccccttaaaccccaccccctttggttttttgcccaggggattttcccatttttttggggttttttttttaggggggggggattttttccccccctaaaccccccctttttttcccccccttttttttgggttgggggggggggggggggggggggtttttttttttttttttttagggggggggggcccaagggaaaaaaacccgggggggggccccttttta

SEQ ID NO: 550803 - DNA, 905 bp, Homo sapiens
gtggacatccccaagatggtggatgccgaagacggtcgtgggaacgtgcccgaccggatgagaaagccatcatgagcgttacgtgtctagacttctaccacgccgttctctggagcccagaaggcggagacagtgagctcaatcgcatctgcgaaggtgttggccgtcaaccaggtagaacgagcaggcggtatggagagactagcgagagagctggccagtggatctgtaggtaggtgggatccgccggcacagatcccgtggctggaggaaccggggtggccgaggaacagccatgcatgccatgcaagcagagagctggaggacttccggggaggtaccgggcgcctgcacgagccgcccaaggtgcaggagaagtggcagctggtagtatcaacttcaagcacgcgtgccagaccaatgctgcggctcacgtgaaccgggcctgccttcatgcccatctgagggcaggatggtctcgggacatcaaccaatgcctggggcttgccatggagcaggtggagaagggctatgaggcagtggtctgctgagtgcgatcctggcacggctgtggcgattggatcatctgacgggaaacatggaccgggagaagaggattccagtgccgacgaaggtgcgtggactgagtggagatgagggtcgaatggcttggggatggacgggactatgaagatcgcagactggtagtaaaatcacggggctgttaaacgacaggtggacggcttcgacgaaatgactggtgggcccaagtgatcgtgttggcagtagagtgtggggcatggcagggggtcaatggaggggttgttttgggaaaccattgtttagggagagaggaaaaaactgggcgggggagaattgggggcttaggctaaacaaaggaaatt

SEQ ID NO: 550804 - DNA, 220 bp, Homo sapiens
gcaacctttatattctagattctaagacattgtacagagaaattcagaagtgtaaaaatattgcacattgacaaataccaaggatttttgcggatggttatattggattggtcttaataatggggaggcttttaaattaggtcttgccaaccatggttattatagggggtattattttggtaaaattgctcttagagatagggtttatataaagtgtgat

SEQ ID NO: 550805 - DNA, 524 bp, Homo sapiens
tcatcctgtggttttcctaatggactttcaggaatttggtaatctcataatctttccaagctctccaccacttctccataaatctcttaaaaacttttaattgtgacagtttctcaattgtgaagggtgcgtgttgtgtagactttaacacccagtgtgaaagcccagccatcagtgacaaatctccttgaatgtgtctcttaagaaaaatgtgatgtgcgtggctcatctcgcagctttcagcattcctcctgtgtttttgtggagtgcttggggcctcccttcgtgcgtgatctcctcagtttctccgtggccttttctccttccccttcagcccctttcttcaccccttttgtggcgtgctccgtggtgttaggtgattgtgggggtgaaggaaatctcgttgtgctgtgcaccccttttccccacagaccccatctttatgtgaggttcctcaaggttttttattatatgtgggcaatttaaagcggtgccttaatgtcgccgggattttatctcccttc

SEQ ID NO: 550806 - DNA, 359 bp, Homo sapiens
tcccatacatcgtcgctgcttatattgcaagcatgcataatcaactccgtgcagattgtggaatgagccacatttcctccaggctcagaccttgcctgtattgttccttctgcgtgcaccagtctttaattcttagttttatactcttttgcctgaggcattttctcaaagaccccttccctgcacgtctcactcttttcccagatcaggtcatgtcccatatttaaatgattaatagaggaatgactttaaggtgtatctccatcactgacctgtaagcccctctcctgttcaccactggatcccagcaccaaggcacttattatttcttgggtgcgaacactgctcacatctcatat

SEQ ID NO: 550807 - DNA, 285 bp, Homo sapiens
ggaagaatcctcaggtttgaacgcggttgtgtgttggtgcaggcaatgactggagcagtatgactgagggcacccactgtttggcggagccggtatcaaagagacggtcaaatcctgggcaggagttccgatgccgatagtgccgaagtaactccatatccaggtaagttctccaggggctgtgcatctaccagggtgggagcctcccactgggggaagtactttctggctgggctgaggttgtgcttcttcaggaagtccttcagcagagcacacgcaactggt

SEQ ID NO: 550808 - DNA, 915 bp, Homo sapiens
acgcaagaagcaaagtcaggaagcaaagaagaggatggaagcagacaaaagttgtacgcacgttgagaacctatatgcctccggacatttgccggggcaatgttgcgtgcaccgggcgactctcccgccgctttggaaagtagggcgtccagataagttttgggagccacccaggatcatgcgtgctgttaaggcgcagccgttatttccgaaggcccctttgaaatgggccagacaacgcagggttttttttagggagccaaccccaccacttttaaagaatctgctccgcaccggggcctttatactcgggtggcttccgacgccaatgcccttgcccgggatactacatccgccctgtcaaccagccatgggacgaactacacccggcgtgccccccgcgggaattatgtagaactttttagtcgcccgcctatatttacgaggcggcattttatgaggccacacatcgtcgtgacgtcccccaaaacaaattgcttctttccatgcgtgtgtgttggcccccgacaacgtcccacaggggaaataagcgtctctcacaaaagatgctgctcaaaacatcgcacgtctaaatagtataaccctgaagaatggcgacatgtcctcgttcatctgagggcaaggatcacccacccggttctcacaatgggcggctgaaaaatgattctgtattgataaaaatatgggttacaagagaaatactccgagcgtgtcgaacaaagttgccagcaataaacaaatgggggaaaacgaaacaaaactggagtgcccctccatggtggtaactgtggtaaaaggaaacttttctctacgaacaccacgtctggtgtagaaaaaacaacttccagtggacaaaaaaccataaaaataaatttcctacttctcaacaaaaac

SEQ ID NO: 550809 - DNA, 422 bp, Homo sapiens
ttttttttgaaacagagtctcggtcacccaggctggagtgcagtggcacaatctcggctcactgcaacttctgcctcccaggttcaagcgattctcatgcctcagcctcctgagtagctgggattacaggcacaagccaccatacatggctaatttttgtattttttagtagagacggggtttctccatgctggccaggctggtcttaaacttctggcctcaagtgattctcccgcctcagcctccctaaatgctgggattcagccatgggccaccacgcccagccacccgtcaatgttaactctcaacaaatcgcttcatcctaccaccagctatttgggactccccactgcgaatactaacctcgcgacatactccataacagtgcaacgactttcagcaattcccaccatactacgcat

SEQ ID NO: 550810 - DNA, 332 bp, Homo sapiens
  misc_feature (81)..(81): n is a, c, g, or t
  misc_feature (100)..(100): n is a, c, g, or t
gggggcgccccaggggcgggtgcccgaggcgcgggtgagtgcccggggggccccggggctcccggagtaactcactattgnttgccctcggagtttcagngctaggaaaaggggattttttcatttttataatggaaaaactgttttgttgctttcccaacagcatggtggtggaacaccccgagttcctcaaggcagggaaggagcctggcctgcagatctggcgtgtggagaagttcgatctggtgcctgtgcccaccaacctttatggagactttttcatgtgcgacgtctacgttattctgaagacagcgcagttgaggaatggaaat

SEQ ID NO: 550811 - DNA, 454 bp, Homo sapiens
  misc_feature (78)..(78): n is a, c, g, or t
gcagaaaaactagaatctgaagaagatgtgtccccagctttccttggaggctgttgctgaggaaaagctcatgtaaanaccttatttccctaagacccttcgcgaattagaagttgtggagggaagtgctgctaaatttgactgccagattggaggataccccgaccccgaggttgtctggttccaagattacccgtcgatcagggagtcccggcacttccaaatagactacgatgaggacgggaattgctctttaattattagtgatgtttgcggggatgacgatgccaagtacacctgcaaggctgtcaacagtcttggagaagccacctgcacagcagagctcattgtggaacaccatggaggaaggtgaacggggaaggggaagaggaagaggagtgacaccaaagccagaagaaaagcagtttctcagtcatattacaaggcctattct

SEQ ID NO: 550812 - DNA, 306 bp, Homo sapiens
agtgctgtaatcccaccactttgttatgcgagggtagaaggatcagctgcggtcacgagttcgagacccgcctgggcattatggtgaaaccccatctctactaaaaatacaaaaattagccgggcatggtgcgcagttgcctgtaatcccagctactcaggaggctgaggcaggagaatcgcttgaacctgggaggcggagatttgcagtgagccgagatcacgccattgtactccagcctgggcaacagagagagactcagtctcaaaaaaaatcaaaattaaaaagtaagcatgtcttggcaat

SEQ ID NO: 550813 - DNA, 513 bp, Homo sapiens
  misc_feature (40)..(40): n is a, c, g, or t
acgaccttgttagccctctctccacacacaacttcatccnttgcccaagttccacagggtcacccacctcactctacccacctgccccgacgaacttcaacacaaacaactgaatccacttccatctcatcatttcccatagtaaagcaaaatgtcaactctagcctctagcccaaactgctcttctaaattacagaactgcagacacaactgcctcccctactcatctactgccacctggcatatgtttcatgagccttcaaacataaattgtccggaactaaaagacgctactctaccaaaagccatattacgcatatcctctaacctaccatatgcctagtcactcacgtaaaattcataaaagttttccaggaaccctcgattctcggtatacaaaatctaagacttaatcttgtagggtctagctcctaactcggtttagtatctgtccttagaattccaaccctcctcacttcttttttgtattactaacacagcttcctaatcaga

SEQ ID NO: 550814 - DNA, 686 bp, Homo sapiens
  misc_feature (27)..(27): n is a, c, g, or t
  misc_feature (74)..(74): n is a, c, g, or t
  misc_feature (90)..(90): n is a, c, g, or t
  misc_feature (135)..(135): n is a, c, g, or t
  misc_feature (162)..(162): n is a, c, g, or t
  misc_feature (182)..(182): n is a, c, g, or t
  misc_feature (196)..(196): n is a, c, g, or t
  misc_feature (211)..(211): n is a, c, g, or t
  misc_feature (213)..(213): n is a, c, g, or t
  misc_feature (264)..(264): n is a, c, g, or t
  misc_feature (304)..(304): n is a, c, g, or t
  misc_feature (346)..(346): n is a, c, g, or t
  misc_feature (351)..(351): n is a, c, g, or t
  misc_feature (366)..(366): n is a, c, g, or t
  misc_feature (389)..(389): n is a, c, g, or t
  misc_feature (391)..(391): n is a, c, g, or t
  misc_feature (429)..(429): n is a, c, g, or t
  misc_feature (435)..(435): n is a, c, g, or t
  misc_feature (442)..(442): n is a, c, g, or t
  misc_feature (506)..(506): n is a, c, g, or t
  misc_feature (591)..(591): n is a, c, g, or t
  misc_feature (606)..(606): n is a, c, g, or t
  misc_feature (617)..(617): n is a, c, g, or t
  misc_feature (648)..(648): n is a, c, g, or t
ctcagggtgcagtggtgcccggatgtncagtctgcgagttttgctgtccttgtcgatgaactccagacgcagcngggggaggcgcttctnagcctggggtgagggcagtactgggcttatgagtagctgcatgtntgagtactccaccgtgaagcgcaaagnacagccccctggcagcaggncctgcacaaaggcngcagcaagcaggttnancaaacggcgttctacctaaagtttgaaggagcgggcgccaaagtgcacaangtagccgtggaccagcacaactgcaaacacgcggtcccanagcagcgtgaagtagtgcctttgcttggctcttttggcccanaagtntagtaccttgtagangagttggatgagcaccgagtggnanaaggggaggaagtagacgaactcattgaaccgtcccanaaactnaaccctncggaagtaagcatacaggatagggcgaataaaaaactccttgaagtactttgagaaggtgaacnagtaactaaactggacaacccccaggttttcggcaatacggttacggctcaactccaaagcttcctgcctaagcagcagcgcgtncagtgcgaactcgtngctggccacantggagggcatgatgaagaaggcgttcttgcnatcaatggtcttcccttttccatctgttagccggccct

SEQ ID NO: 550815 - DNA, 483 bp, Homo sapiens
cagctccatcaaaggaaaaaataatcactgtgaaatgaatgcacacattaaagcactgagacaaataagtatctcagaaagcttctttacagtttttatctgaacatatttcctttttcagaataggcctttttgtgctacctagcatcactttgcagattacaaaaaaacagtgtttccaaacagctcaatcaaaagccacatttaagtcagtgagatgaatgcacactttacaaatcagtatctcaaaaagcgtctgtcttgattttttccaaagatatttcctttaacaccataggcttcaatgtgctcccaaatattctgttgtagattctacaaaagcaatgtttccaaactctcaatcaaaaaataggtttaactctgtgagctgaatgcacagctcacaaagcagttcctcaaaaatattttttctagtttttacactatggtatttccttttccaccataaatattagtatgctc

SEQ ID NO: 550816 - DNA, 199 bp, Homo sapiens
  misc_feature (63)..(63): n is a, c, g, or t
  misc_feature (66)..(66): n is a, c, g, or t
  misc_feature (89)..(89): n is a, c, g, or t
  misc_feature (93)..(93): n is a, c, g, or t
  misc_feature (144)..(144): n is a, c, g, or t
tgggtgatctagaggatcccgaagcacagaggaggacaggtaggagcaggcatggtcagctanatntggtgatacgtcaggataaggancccnagcttcccgacgctttgacccctggcaaagatctctgcacatcgcccgggnaagaaagcaggcccttctgatgctttgatcacatatccctcctctgtgctgtcca

SEQ ID NO: 550817 - DNA, 1858 bp, Homo sapiens
gcgcacagccggggccgctgtgagccgagaccgcgggccgcgcgagctcgcggcggccgcgcgcgcgagaactttgttccatgttgaagcagctggcctccctctctcctaactttccacgcactcccttgcagcgcttctcagcgcagctcctggctagcgctgacacactttctcataaccatcctacagcgacgcaaaccacgcctaccctggcctccgattcccctccacagccgccacagccccgtcccaccttgccctactgcgcactacgcgcacagctcccaccctctactctcctgtgcactactctcgtctaccctactctcacacgctacactctcgcacacagaacactcctccacaggcacccaacgcgcggcacacacgacaccctcaccacgcacgcacgaccaccacaccgtccacccaccagcgacactacaccccgacctgtgccacgccacgcggcctcacgacccctacgcctcctggctccacccaactttcgaacacgcgtcccccaactctgcgccacgcaccgccgccccgtggcctccgcgcgcacaccacctgcactctccctaacccttccgcgacacccagccacgcgcacaccggtctccaccgccgccacctgcacgccacacccttggacgcgccgcaccgcagcgcacgcccgacccacacccgacgaaccaacctccacaccaccggtgcccaccgccctccctcgcaagccccaccaagcgcctacgtaactcgctcccacaccggcaccgcggcagccactctcccgccccaacgcggaagctccaccgccccacaccgcgccacccaccttgccgcacgctgcaacccacctgctcgccttgcggcgcgaccctgtgagcttcttgccctcaccccacctgtcccattcacccccttcgccgctggctcccttccgagagccccggctcctcgcccccccttgcctctcttacccccattcctgccggacccccctgtccccatcaacggctcttctcccccccccgattcccccgaccacgtcgccgcgctatgaacttttctgggtccccccgcttcctttccaatcttctcccgccgctactcgcctcgtctcagcgcctcccttgacacccgcacaatcctctgcgcgctattgccccttggcccccacccagtccgtcggcccaaccctctgccaacgcgcccccttgtgcacacacacggcgcccccccctttctgcgcccctctgtggggtccctcgctccaacacactctgatctcatcacctctgcgcctctcgcgacaaccgagcgacgctccgcgaggccgcatctccaccttccatgcgctcagaacgttctccctttgccgcccccaacatctccgcccgccctcaactctttctctcccagacccatcactcgcctttctcccccgttctcccccgatcgtcgttcgcctcctgtcgtcggccacctgctcgtcgcacttgtcaacgccgcgcggcgcgcaccatcgcccctcttcgtgtggcgacgcgcacccacacccagcacccacaccacgcaagcagcacggcccaccacacccaccgacctagacacacagcagaggccgccggcgcgagacacgacccacaacccacgccctctctagcgggacacactgaccccctttctgacgcccccccaaccaccacgcaagcgccagcccactagagcgaactctatccacccgggctacgcgcgcgcaccaacatccccccagcgacttccggccacccacccaccccacctctcactcacccggcgcccccgcagcgccgccgcgaccacccgt

SEQ ID NO: 550818 - DNA, 88 bp, Homo sapiens
tatacttctgtgctctgagtgattcatacgggccttcctgtaagatcggggggatgttccgtcggtacaccgataaactcatctttgg

SEQ ID NO: 550819 - DNA, 456 bp, Homo sapiens
gctatacagcttcaacctccggggctcaagcgatctgcccacctcagcctccatgcgccagcacatccagctcattcttgcaattcttggtacagatggggtggcccaggctagtctcgaactccggggctcaagcaatccacctgagctcaagagttcgagaccagccgggccaacagggtgaaaccccgcctctactaaaaatacggaattagcggggggtgggggcacgcaccggtaatcctagtacttggggaggcagaaacaggtggatcacctgagctcaggagtccgagaccagcctggccaatagggtgaaaccccgcctctactaaaaatacaaaattagccaggcttgggggcaaacacctgtaatcccagctactggggaggctgtggcaggagaatggcttgaagctgggaggcagaggtggcactccagcctgagtgacaggg

SEQ ID NO: 550820 - DNA, 706 bp, Homo sapiens
  misc_feature (58)..(58): n is a, c, g, or t
  misc_feature (61)..(61): n is a, c, g, or t
  misc_feature (63)..(64): n is a, c, g, or t
  misc_feature (80)..(80): n is a, c, g, or t
  misc_feature (90)..(92): n is a, c, g, or t
  misc_feature (100)..(100): n is a, c, g, or t
  misc_feature (119)..(119): n is a, c, g, or t
  misc_feature (145)..(145): n is a, c, g, or t
  misc_feature (153)..(153): n is a, c, g, or t
  misc_feature (155)..(155): n is a, c, g, or t
  misc_feature (157)..(157): n is a, c, g, or t
  misc_feature (168)..(168): n is a, c, g, or t
  misc_feature (176)..(176): n is a, c, g, or t
  misc_feature (179)..(180): n is a, c, g, or t
  misc_feature (200)..(200): n is a, c, g, or t
  misc_feature (209)..(209): n is a, c, g, or t
  misc_feature (222)..(222): n is a, c, g, or t
  misc_feature (224)..(224): n is a, c, g, or t
  misc_feature (243)..(243): n is a, c, g, or t
  misc_feature (250)..(250): n is a, c, g, or t
  misc_feature (254)..(254): n is a, c, g, or t
  misc_feature (295)..(295): n is a, c, g, or t
  misc_feature (341)..(341): n is a, c, g, or t
  misc_feature (353)..(353): n is a, c, g, or t
  misc_feature (357)..(357): n is a, c, g, or t
  misc_feature (361)..(361): n is a, c, g, or t
  misc_feature (367)..(367): n is a, c, g, or t
  misc_feature (386)..(386): n is a, c, g, or t
  misc_feature (470)..(470): n is a, c, g, or t
ttccggcttttggatatagttaattatacagctaggatgacaacacaataatgaagtngcngnnagcagcgcaccgcccntgctggaaannntgcctgcngccatcagtgacatgagcnggccccccacagtcgtgacctttganttccaggntngncactggggtgntggggttnttnnaggcccatggtccctgaggnccctttggngcagcccttgttntnagaggtcccttttcttttntacctgntgcncagagcacactaggccagggagtttggtgagagggtgaganttgacttcagctctcagagaggtgcaagctccatcgaacccgtgtncagagagctctntgtntttncaaatnttggcaaatggttattttntattcacctgatacagaccataagtggatgcatcttgcattagcctttttggcaggtaggaaacaaagctagaaaacctctgtnagcactgactgccatggcctgttcccctttctttcagtgagacctgggtgtgggatgctaggaactgctgagtggagaatgccatcacagccatggacacagccaggaagggaggcatggtggggatggggcagggccagctttctagtgtggacggcctgggatgggccttagctggccctggacagcggctatggcagccgtctgtggcctgagggtgccagactgccccatcc

SEQ ID NO: 550821 - DNA, 872 bp, Homo sapiens
  misc_feature (30)..(30): n is a, c, g, or t
tgaacacgcgcatatataaatactcactanacacactagcgagtgcagagtagacatgaatcacacagacacacccccattcgactccccatgccgaccccaccatgatcgctatggaacacgcgaggaggatatctagaacagtggagccccgggctgcaggaatacggtacgagccacagtccagcctaggtaacagagcaaaactctgactctgaaaaaaaaaaaacaaccttgaaaattcaaatatggatggtgactctatcttcaggtgaagattagggattactaggacacaatggagctggaaaaagtacttccattaaaatgataactggggcacaaagccaactgcaggagaggtatgcgacatgagaaggaaattttattttaaatatagatgacatctttctataatacctatcagaaaatcaaatatcatattaaaaaatagatgaaagaattataaaatgactcttgcgaatccaaaaaatattgaagcttaatggccacatttaactcctatagaagaagggggattggagcaaaaaccaaaggtggaactgacattcatagacatgagcaggaggagttacaaggcagcagagcaatagaaggaaacagcatgacaacagcctcaagatcatggggaactgccacaggagaacctactgcggcccaagctaacaatgaaagagcactaggagacgaatgcacctgagaaaggaacgcggaaaagaagatgctgctcttagcattcaagggaccagaaagaagcatcaaaattagaagcaagaggaaagggaaaaataggcaattccttcactaaaaattaagaaggaaatattacaacaatggcttttatcacggcg

SEQ ID NO: 550822 - DNA, 353 bp, Homo sapiens
  misc_feature (65)..(66): n is a, c, g, or t
  misc_feature (88)..(88): n is a, c, g, or t
  misc_feature (160)..(160): n is a, c, g, or t
  misc_feature (216)..(216): n is a, c, g, or t
tttgatttatgccagagggtgctttcaaaggaattatcaaaacaatggcatgattaatgtggccnncgtatcttttatccttctgttnaaaaaataaacagcaaaatcattactcctctcctgtttgaactagaaatgttgggaaacccctgagtgcttntcaggtgaagttaagcagtggtgagtggtggtcacatgagcaaggtcatgcttgcncagccgtgttagttgagagttattgaggcatctgtttaacacagtggtgtcagccgctctacaatgttaacgcagtcatgaaggtctcttatcagaatggtataagaaagagaaaatagagtccctaagtgaggtct

SEQ ID NO: 550823 - DNA, 190 bp, Homo sapiens
gggatggcactgaccccttccttggtgacagtggagcaatgtttacctttggcctcaaccagcacagtatatggtttctagaatatgcgagatgttgagtgttcgacttaaagatgctctcatacagacccttgggacttatcaacaaattcgcctcttcaaaacccatggctttcagtgccacctgact

SEQ ID NO: 550824 - DNA, 465 bp, Homo sapiens
  misc_feature (11)..(11): n is a, c, g, or t
  misc_feature (50)..(50): n is a, c, g, or t
  misc_feature (102)..(102): n is a, c, g, or t
  misc_feature (107)..(107): n is a, c, g, or t
tgcctatcctnaccccccttcccaagaaaagtaagtagactggttaattnattaggatccttgaatgtttggtcccccatgttaatgcctgctttccatgtnaaaanagagcccagcaaatttccttgaaccatcaagataaagaaaagatgggtgtcccaaaaaaaatccttgggaactgcctattttccttttttcccagaagtttattccttagggccgggtgtggtggctcatgcctgtaatccccagcgctttgggaggctgaggcgggtggatccctcgagatcaggagttcgagaccagcctgaccaacatggcgaaaccccatatctactaaaatacaaaaattagccagtgtggtggtgcatgcctgtagtcccagctactcagggggctgaggcacaaagattgcgtgaaccttggaggcagaggttgcggtgggtggcagcgcgactctgtgcc

SEQ ID NO: 550825 - DNA, 608 bp, Homo sapiens
tcaggtgtcatcaggtccctgcagccagcgaagttcccctgatggaggactcaaggtgggcagcagagggaccccccaagaggcctggaggctcctcacccctgaatgctgttccttgtgagggtccacctggctctgaacctcctaggagaccgaccacctgtccgccccacgatggggacagaaaggagctgccgccgggagcagccgtctgcctccctggcccgcatgtggcacatgaactgatcacgaagcatacatgaaccgaggacacagagccttggccccagttcgtgccatcccgatctgaccatggtcccccgaagtccagatttggcagctaggtgcacaaagtgacctcagaacatatacagccctatgtggctagagagacacgcttgaaaagccagagcaaggagactaacagcgatcaggtcactgacggccattccatgatatcacgacgactgggcagcgtgcttcccaagtgctgctgcagtctgctgagccacaatccagagaaccgtggattctagggcactgtgtcccgagagcccagctcctcaggccagcgcctgtatcctgaggttttctatggcagtgctggg

SEQ ID NO: 550826 - DNA, 424 bp, Homo sapiens
  misc_feature (3)..(3): n is a, c, g, or t
gtncgacgtgcattgtctcaaaagctaagtgggcatctgcatctgaccctggcctggagggtgacatgccacggggtggaaggaattctttgcatttggtgatataatgcaaagtgcctagaaattgggaagaaagtgattgtatcattttttaagtttgcaaatcctaggacaaagaaagctgggtcgttacaaatcatctcaagaaacaatatgagtgattaattgaagaaaccagcatgaatgcataagatataaacagctgttctactgaaatgaagtaaaaataggtaacagagaaacctattctaagaatgtatttgctggccgggcgcaggggctcacgcctgtagtccagcactttgggaggccgaggcgggcagatcacgaggtcaggagatggagcccatcctggccaacatag

SEQ ID NO: 550827 - DNA, 529 bp, Homo sapiens
tcaggcttaatacgttcctcgctcttggaagccaaacacctccagttttcctccaggctattctttactctgaagtaacttttcctaagtgatgagtcctagttggttcactttccacttggaatttactaagagtgctactgggaggtgaacaggacattcgggatgtagtctaagtgggacagagtatcatggaactggttctgggtgccattttttttttattccaacccagaatggtgttacctttgggggcgggcatatcaggcctatggaggattttggcggcttaagtggtctcttaatatgtcggtatgtgtgccggtgtgtgtattggtgaaattaactttcctatgcaggaataaattacatatctttttctggagtaggcacaggtcaccggtgtgtatttcaaaatacagtcaggggcggcctaaggaggtttcggtcaaggatagaccttgtttacaatgggggcccataagattataacaacattttttactgtaccttttctatgttagatacc

SEQ ID NO: 550828 - DNA, 1734 bp, Homo sapiens
  misc_feature (135)..(135): n is a, c, g, or t
  misc_feature (360)..(360): n is a, c, g, or t
  misc_feature (462)..(462): n is a, c, g, or t
  misc_feature (485)..(485): n is a, c, g, or t
  misc_feature (494)..(494): n is a, c, g, or t
  misc_feature (499)..(499): n is a, c, g, or t
  misc_feature (503)..(503): n is a, c, g, or t
  misc_feature (547)..(547): n is a, c, g, or t
  misc_feature (572)..(572): n is a, c, g, or t
  misc_feature (580)..(580): n is a, c, g, or t
  misc_feature (604)..(604): n is a, c, g, or t
  misc_feature (773)..(773): n is a, c, g, or t
  misc_feature (775)..(775): n is a, c, g, or t
  misc_feature (783)..(783): n is a, c, g, or t
  misc_feature (812)..(812): n is a, c, g, or t
  misc_feature (917)..(917): n is a, c, g, or t
  misc_feature (921)..(921): n is a, c, g, or t
  misc_feature (1039)..(1039): n is a, c, g, or t
  misc_feature (1055)..(1055): n is a, c, g, or t
  misc_feature (1088)..(1088): n is a, c, g, or t
  misc_feature (1118)..(1118): n is a, c, g, or t
  misc_feature (1120)..(1120): n is a, c, g, or t
  misc_feature (1124)..(1124): n is a, c, g, or t
  misc_feature (1379)..(1379): n is a, c, g, or t
gtgtgcggtgttgtttacctgcatattgcaggggcgttgttctcagcggcctgtgtagaatctggtaccgtcgtcgtatcatcgggggagattgaatgtaccttctgagggaatacctatttgacgaaaacgtcnccataggcccatgtctggggtaacttgccgtcgtgtgctagtgtccgaacaaagccgcagaacgacgtttgctccctccggatcgtcctggggactcgacgtggtgcagtccggcgcacagcggaacccgtggtctcgcttcgctgtgaccgagcaccaacggaatgcgcgtcgaccgtgggctgcaaccctttcgcgaatccacagagctgttcgtgaaggtgngttcaatagcgatctttgtgctaagcgtctgggcgaagaaattataggcggtggcgtctgtaccagtagggacgccggatgtggacgcggtgcccatggatngtgcggacagacggcatgctttngttctcggnacagnaacncggcggcagaaccataagaggcttgcaagtgaactcccaattgnggacaattaggtattcgtgggtgtncttcctgngcctcatctatacatcggtatacngatgcaagacgcggattcgcgtaagtacccgcaagtgaggtataagttgggaaggggtaagctctcgcgcttttggggaagaggtagggcggcagtccacgaacccgcatctttcggcgcccttgcacagaattccctgcaactttggaggggctgtggcattcctcangngaagtttngtgataagacaatgttggctagcaacaanccaagcgaattggcaatggcgagaaaaaggaaaaaggccaataggtcggtttcggccggaaaagatagaaaattgtggcttaggggtccccgtattgtaactttntttntccgaagaggaagcgaaaaacttacacggtggttctttggctttacggcttccattggcggaacgaaggggtccctgttgccggcaatgaacttcaaaaggcaccatccgaaatggtnagacctccaagtggangtggcgtttcaccatgggaggcggcgcagacanggcaggtagtgtccctccacatggtgaatncncctntttgggtatctggcctcgagacatgcgtaagtcgcgttgttgttcctcccaacgcgccaaactcggagttaatcatggaaattcgtagtcgtgtggatttcatgcccgggattggttacctcaagggtggacaagggttataacgctttgcatttactagcgaggcgacttggggcaagcgatggagcttacatccccatgcttcagctgctgtctcgccattggcacatctgccgcgccagcgcattcggccantgggtgaatcggtatgtgccccttgttgtcgcggcgcaacccaaggtgcgtcacgcaggcagcgattgccttttgcgcctttgcatagcggaaagtcaagcgcgaagaaaggtgtgagcatcacagaaacgcggattgcaaagcgcggcggagctgcaatgtgcaccagtcgctagcacgagcaaggggcttcttgggccgaaaaagcgtggaagaagaacccgcggtggcccccagagaacactcacagagggggaggaggggggaccaccgagagggcgcacgcaagcgtgggcgcggagaccacctaatgtgatcagacagaaagaggaaggcggttcacgtcacccgcgag

SEQ ID NO: 550829 - DNA, 370 bp, Homo sapiens
  misc_feature (87)..(87): n is a, c, g, or t
  misc_feature (347)..(347): n is a, c, g, or t
cagtaaaatgcccctttaccagggaagtgaagataatttaagtttagaccataaaccaagcctgaaagaacagatttttgaagcccnctcaagcacaccttatcctgcctttaccctagtgcctgaagttttagacagtatcctctgaggggttatcctaatctcaacccctttcaataggtaaaatctttgggaggatccactatcgttaattttgttctgtgtataatttgtgctattggtttactgttcgtgtgtaaaattggaaaaaatattcttcaatccaatcgtgatcagtgccaacctatgattgctatggttcatttaaatcagagaaaagggggagntgtagggagaccccctgaaacta

SEQ ID NO: 550830 - DNA, 400 bp, Homo sapiens
  misc_feature (141)..(141): n is a, c, g, or t
ggcaaaccccccactgtccccttcaaagttacaggccccttcgggtttgtggtgggacccctcatccctgccccccgggggcctgggattgtttccccccctgtgcctaaaaaactgctcattaagggtgggattgatganttttaccccccaacccgggggtgccctgcccccctggggaaattttcccagggcccccctttatgccctttttaaaacccacaactacctgaccccccccctttggaaggagactggtttcccccagtttccccatcagggggttcctggcccccccgtccaaaccccccccaaagtttccgggcaaggggatcagggcccccctgggggtcccccaaaggggttttttcccaaaaaaaaaaaatgaatttagggggga

SEQ ID NO: 550831 - DNA, 191 bp, Homo sapiens
ggtctaagctggaatctggtcaccttccatccagtgcaacaactgtgttcaaaattctgtgacaaatgacaatgaagctcaagtgtgcatatggcattcaatcccacaccatcgatcatagcaccaccttatcagcactgaaaactctttggcattaagggatcatggcaagagcagcgtgactggacatt

SEQ ID NO: 550832 - DNA, 321 bp, Homo sapiens
tagctcggactggtgttgaatatattggtgagttctagagatggctcatgcttcacgtacaagggttttcccatgaaatttacattgagttgtccacctccagcttatagggcttctggaacagagtgggtcttgctcttaagtgattccatgggagaaaatggaattgtaggtactagtagaattcagggaactgtcctgtcagagacttcgactgtcatggatttggagcttaccttgccagttgcttgagttactgaacagagcaaacatagagcccgctatgctatgtagtaatatggcggataaagagctaatgtc

SEQ ID NO: 550833 - DNA, 128 bp, Homo sapiens
gcacttggaaagctatactggcgtgttttacactgaggaaagagctataactggcgtgttttaactgaggaaagagtatagatgggccgtcgttttaactgaggatagagctatgacggggcgtcgtt

SEQ ID NO: 550834 - DNA, 1191 bp, Homo sapiens
agcggagtggcgcgagccggcgaacgaagacgggccacgatcgcgcgtgagtcctggagtttccctggcccgtcctctatcaatgacacttccctgcggccggaaccctgcctcgtcggggctaaaacgtctgaccgacggactaccagaaggcgagctgtgggggttgacctcgtagtaagttgcggactcgatggcaccaacatatacaggaacccttccagaactgcagctgcagtccgatacagacatgaatgacggcaccatggtcctttgtcctcgagagaagcttcattgagtgtgcatgcgtgtagacatggtgatggacgggccaaatcagaccgtttcgctcgcgtgagaccggtgcgggggcccactcacgtacgagcggtgcagctccgcgccgctacggccgtcaccctatccgagctagttgtcctcggttgctacccggcaggaacgcatgatacgcattgctcgtgcggaacgccatgacagctctaccattccctagcggatgccttgccagggtcgcggtcaatcttgcgcatatgatccccgtaggctacaagtgttccgcgtacccgaacgctgccttctcccgctgggacttggttcatttctatccacctctcaggacatgggtcgagcgggattggcttatggttcggcacgagtaggggcacaagttgcttgagcgacgctggtgctcgaactagcggctacgcgggagctagatcacgggcggggagtcgacgcgaagcgcgtacgtttggccctagcgcctagggtagcctgcttcagggaccactagaccgtggtcaaggggaaccttctccacaggcttccgacctggcccggatacgagtcttcccctcgtggccaaattcaaaacaactaacgttatcgtcgcctggctgtcctctctgagagtctccgagggtcctcggaagggtcagttaaaagcttacctatgagacccccttgcgaaaggcagttagaacgtggtgaagagcccccattccatttggaaacactggagtcgtccgcaggggtgttctcttaacctactttctatacccgttccttatacccttccacttaacctttaggtatgtagagaccatttcagattctaccttcccgttttgtgactccaacggaccaacacccgaaggccaatgtggggtc

SEQ ID NO: 550835 - DNA, 251 bp, Homo sapiens
gaatatgtcatgcagagatacgtgactacaggcagaccagtatcatgaaagtcgccatggttaccaaagtcggcacattctcttacgtccaacaatgcacacttgaagtttgtgatgtacatgcgataacaagtgataaccacaaagggacccaggttagttgttttgttttattattatactttaagtcttagggtacacgtgcacaacgtgcaggttggttgcatgtgtatagattgttgtaaatggcg

SEQ ID NO: 550836 - DNA, 291 bp, Homo sapiens
  misc_feature (18)..(18): n is a, c, g, or t
  misc_feature (20)..(21): n is a, c, g, or t
  misc_feature (74)..(74): n is a, c, g, or t
  misc_feature (144)..(144): n is a, c, g, or t
  misc_feature (172)..(172): n is a, c, g, or t
  misc_feature (187)..(187): n is a, c, g, or t
  misc_feature (198)..(198): n is a, c, g, or t
  misc_feature (213)..(213): n is a, c, g, or t
  misc_feature (224)..(226): n is a, c, g, or t
  misc_feature (260)..(260): n is a, c, g, or t
  misc_feature (280)..(280): n is a, c, g, or t
  misc_feature (282)..(282): n is a, c, g, or t
aagaaacagataagtacncnnctgcttctgttgcaactgttgcctcaattcaggtgaatcttgaggtgttccangttgcaacagaagcagcagtatactaaccagcttgccaaagaaacagataagtacattaaagagtttggntctctgcccaccacccccagtgaacagngtcaaaggaaaatanagaaggatcgnttagtggaagagttnaaacatcactnnncaaacttccagaaggtccagaggcaggctgctgngcgagaaaaagagtttgttngncgagggggg

SEQ ID NO: 550837 - DNA, 322 bp, Homo sapiens
tggagcaggttgccattcttgagctgcgactcgatgatctgcaacgaggagaactgctcgcccgtgcgccgaccgtactcctgcatgacttcacccaacccattgaacacctggacgacccggttttccggccagtcgggcaacgatgtcagtacccgcaagcgcagatcgccctgctccagcgttcgcgatagcgcgtcgggtacctcgccgataaaatcgctgatggcctggtcgatcctgaagcgcttgatcgtatcgagcagcagcgcgggcaccggctgattgtccgccagggctttgcgcaagacaatctccatga

SEQ ID NO: 550838 - DNA, 191 bp, Homo sapiens
tctgtaagtcactatgaaatggtcaggctcccggacgtccctgctcctggctttatgccctgctctgcctgccctggcttcaagaggctggcgcctgtccaaacctgttcctgttatccagtgcttttttgaccacgctatgctccacagcccatctgcgcgcaccacgctggccattcaactgcctccga

SEQ ID NO: 550839 - DNA, 1146 bp, Homo sapiens
gatagccgtgccgcccttccatagggtgtggacgagtcgggccccgccctgaaggggcaccgtgggctgtgtgggcctgtttcgtgacgctaggctaccggtggccgagctccggtgaccagtgaaaggtccaaggctcatgtcccctgatgctcgaggacaactacatgttacctgtgctcattctgacggagcgtcacgcgcgaggcggtggccgctggacgtggctgtggtcccaagaggcttgctggatgatcgtgggccgggagggggtgtctctgagccgttgtgctgaccacccaccgatcattgtggacctcgcgtcggggacacacccggaggctggtcgtcggcttcgtcccgggctggcaggtgcttgggcgctggacgacgtcgcggtctgtctctgcgtgactgcgcagagctggtctgcgacggggcatggatgctgctgggttgtagacgcgcgactccccggggtaggggcaggcgggaggtgcggcgccccgcgtgctactcgagcccgaccacttcaccatggctaccggccgtttgctcctcccgtgcgacacgattcagggcgccccagtcccagcaggtcgcgattgcgcgtccgtgaccgacgcacgggttcacatcgcgtgcgggcccatcactgtaggcttacctttccatgttggccgaggaccggattggcccctgtacccctccctgaccgtgtttcctcgtgtgcggaccgccgttgatcgaggtgggccggggtggctagcgtcaggtgcgcttggatgtgtgcaagtggtccccagtcaggattgttagccaacgaagtgctttgggcccagagccgtggggttaccccattagacccaccccgaaggaaccgaaaggggtggttcataggcgggaccacaggaagcaccaacggctttaggaaaccctgggaagttgtgccccagaacaagtgggagccccctgataagcggaccacggttgagaagccacaaggctggtcctggggctaagaaggaggggatgagggattgacgtgacccacttgatgccgtccgaactcttgggcgaggaagcggctctaagaacccctttcttgacgggtggaaaaggaagccggttgcgcaagttcaacgg

SEQ ID NO: 550840 - DNA, 719 bp, Homo sapiens
cagacttggtgggggagcttttgggagatgcaagaagctcagcttataaccatcccaagcatatgtgcactgactatatagacagaggtgcatgtgtgggtgtatatatgcacacacacactctgtatattgtgtctgtgtgtgtgtctcactctctattactctctaataaaagagactcagtacactcctgcttgctagaagaagctgactaggcaactctcatgggggttcccgatagtatccatcacagtcccaagactggagttgtgaggaactcactggagcacaacactgatagcgaactggtgagagcgcgtgatactagctcacctatagctagagctcttgaaaccaatttactgagaactgatgcgctgaaagttattgacagacagactaatgtgccaaaagctcaagggcgatctgggtgcgtttatatccatatacaagtgcgatactgttttgtcatgcgctggacattagacgaatttatatctatacatccaagagtacttctgagctcttatgagcaacataaactgatgaaatcagcacaactctgtcacagatgagactgctggctacaactatagacgtgtgtccctatagtatccaccatgtagaaactcttgttgggtgaagctgctagcactaactacactcagagcacacattctagtggatatgttttttgtgtcttaatactatcacccctt

SEQ ID NO: 550841 - DNA, 265 bp, Homo sapiens
  misc_feature (31)..(31): n is a, c, g, or t
  misc_feature (108)..(108): n is a, c, g, or t
  misc_feature (149)..(149): n is a, c, g, or t
  misc_feature (220)..(220): n is a, c, g, or t
  misc_feature (235)..(235): n is a, c, g, or t
tttaaaaactaaaaactaaaaactgcaacangcaaaaaagaaaaccaaagtggtccacaaaacaatctcctttcgtactgaaggattaacgaagacattgtaataatnaaccagtattttactacaaaacttaaatggccaatagaaanaaacagtactgagaacgtactaccaccactgaataagagtagggatggcaggaataagggaaaaaatacanttagccttctgagcnttctgggcagacttggtgaccttgccagcc

SEQ ID NO: 550842 - DNA, 427 bp, Homo sapiens
  misc_feature (158)..(158): n is a, c, g, or t
ccacagccctgaccacacccagcggttccgcatccttgccttgcttctgggcgggaagccccccagcccttcaaccctgtgtcctggcttctctcctaaagaggaggctgcagtccgtcccgcgtgtctctgagcacttggtggacgtgtgggagatncccacgtggtgggacctcccagcctgtagagccctgagctggagggcctggtacagcctggggtcagagtcctcactgccccagcctaaccgtgtaggcctgcggtgcctgggaggcggcaaactcgggatttcaccgtgtggaggtgcgacatgaggctgccaggcaagtgggtcctctccccagggcccaggcgagtgaccctgaggacgctctggccagcgcagtgtctggaacccagcgcctacccagccgtccctctgcggccc

SEQ ID NO: 550843 - DNA, 1666 bp, Homo sapiens
  misc_feature (23)..(23): n is a, c, g, or t
  misc_feature (427)..(427): n is a, c, g, or t
  misc_feature (825)..(825): n is a, c, g, or t
  misc_feature (1244)..(1244): n is a, c, g, or t
agcctgtatcatccgcctcgtgntgtgccttggagctcgcgggcgacccgcgtgtgatccatgcagctggtttgtggggcgcgtgcccgatattgttgcgtcgttcgttgtggtactggcggctgcgttggggggcgatgtgtgcgttcggcgagggtgcccgtgttctgcgctcgtggtgtccagccgttcgtgttggctctcatgtgcgtaccgttctgcatggtgtctgttggcgagcgcgacgtaaatttgttttgtggcgggtatataatacactgttcgcgacctatgtggggccccaccaaggcttgttggttggggccccgccgtctgcggggggtgttttgttcagcagcccgctctggctgctgtggtgctcccgctactagtgaagatggtcgtttgttgttagcgctgccagtantggttgggctggctccttttgatcttctctctcctgcccacacgcgtcgttgtgacccccgtgtcgacggccgccttgtgtttagccagtggcactgctgggccctccagaagtcctcgttgtggggtgttcgtcgttcaacctactgtccgggggtgcttgttggttgagtgagcgtgagtggtggagagccccggcccctcctgttgctgccgcccaatttgtccgctagatgcccccccctttgggggtcaaaaaccggatgcagaatactctattaggggcctcccgtctcggctaatggttgtaagttgtctgtaggcgaccacctcttttttatggcctctttaactcgcggtgtttgtacactgccaagatgcaccgtgcttgggaacctncaacagggggttggagcccaactcctacaaaactcttcccaaaactgttatcgcccccgtagtaatccgtgcccgcaccaacttgccggatgcccactgttttgcgcccccctacacccgaagtctgttcaaatagtggagaggtccccccctttatgcccccattcaagtgtgctgtacgtaatttcacacccaatgtatcgtataataaagatgagccctcccacttttaaaccccgtttgtccccacaccccctggtatttcgcccccgacccccccagggaccacccctcctgagtgaacctccgtgcccactcacgtggaaccccttgggcccacataaatatgtgaatttatatcctccacacactctatgccacgaggacccacacctcgagaccccccctgtctgacaccnttgccagcaaagtggggagagtcccgagaactatgttctcacggcttctaaacactctgaattatcgcccgccacggccaccttctgcccctatatttcttgcacatatggccgagaatatcacccacaccacttatattaatataataaaccacccctcacccacctaccacatcttcctaggaaccaacatatgacgcactcttcccctgaactcttacaccaacatattttgtccacccagaccctacttcttaacctccctgtttttatgaattctgaaccagcatacccccgattccgctacgacccactcatacacctcctatgtaaaaaacttcctacccctcaccctagccttacttatatgataagtctccataccccttaccatctcccagcattccccctccaaaccttta

SEQ ID NO: 550844 - DNA, 599 bp, Homo sapiens
gagctcaggagtcgataccagtccgtgtgcacagagtgggcaaagaccccggaagtgggttgcagtgagctgagatcgcgtcactagacctccagcctgggcaacagagccagaccctgtcttaaaaaaaaaaaaaattatccctgatgatagaaagcgggtcacctctaggaagcaggaagccctccctggggaggagttcagtgtggatactggattaatggagcccatatgttaagcagagtttgccttatttatggtccttagggaaacaagatggttggtgggcttgggggtcaggttagggaaaccacaaaactatttacagctggccatcttgagtgatggctggtcaaaatagagtttgctataattttttttccatagactcctagagttccagagtggcacaatatattggtctggataatggcatgatcttaataggtatttaacctcctttagaaaaggcagcataaccaaaaggtaggaattatcccctataattctcatgtcttcctgtgtgcagaaatggggcagtgggaatagtctccttgtagtgcagatggagccattatttattgatttgacaatcatcg

SEQ ID NO: 550845 - DNA, 189 bp, Homo sapiens
gttttaaaaaaaaaaaaaaaaaaaaaaaaaagggaaaaaaaaaaagaaaaagaaacggtggccttttggaataaggcccagacctttgtggggtgccggtataaccccgcccccggttaagggtttaattttggtttaaccctaacgggccaccaaaggttttcccccggttggcccttccaaaagaaa

SEQ ID NO: 550846 - DNA, 649 bp, Homo sapiens
cattcctcaaagcttttttttttttccctggctggggggcgggaagggcagactgcaaactggggggctgcttacttgcaggaggcgcggtggggctgcgttggaggagggggccacgttgtgagagagaagaaaatgtgggtggccggaaattgggagggcccaaggaaccctccttgggagggggcctgcatttctagtgtgggtgggaattgggactgggcttgacgcccgtgcatttcagccgtgtgtgccttttccgtggggttccttttctgtcctttccggaggagagggcccgaaaaggggccattaccagggcgcggcgctgggtgccacatttgggaaagcagcccggagcttgggtgctggggaaggcggggcgcgttagccttcccgccgccctgcggttgggccggttggaggcccaggcgtttgctaggattgcttcagtttccctgttggccctattccttttggtaactttggccctgttgttgaagtattcggaatctcctccttgctctgaaatttcagggatcccatggtgataagcgcacaaacagcactgtctgtcggtaatcggtactactttattacggatttcctgttacactgtatagtatccttggggccaccctggaggact

SEQ ID NO: 550847 - DNA, 1292 bp, Homo sapiens
agcggggttacctggccgcctctgagtccagccggtcgacatggtgaccgtgatgggagagtgcagggggcgccgtctcgtacgctttgtcccgggcgtggtgttcgtagtgtgtctgggtcgccgtgctgcgttgccaccgcgtggcgtccgggagacggacgcgatcgagtcgtgtagtcggggcgctgctagcggacatcctgggcatccgtggcgcctatgtactgatgcgggccttggcgctcgaggatgaaacccccttggcgctgcgaccgctcggagggcgttttctccacgtcggagtcttgtgagtggacagtgggcgtcaacgcgtggtgcgagagtaatggcaggcccctagtttgtggccgtggtgagactttgggctggtacggcatgccgtgatggggcaaaaaggcttgagttaatccagagaggcgccggatgttactgccgccatactagtctgggccgctaacgttttcgtctgtcgatcccatcccaagggagctgattgcacgtagggtcaccctctcagagtgggagagaaggaagtgccagtgtctgggtgagtgtgagagacacaatctctctcggagtcataagacttgaataagtctattcagggtgaaagaggggtggagaccttttcccactgttgtgaactgagcgaaggggggtaaggagacactattatgagggaaagatagcgctatagagtgtgcttggctctcggcgcggggtagataataggggatctaaggtctttagaattgcagcggaccagtctccacggatggggtaggattctcggggggggcaaaggaaatcggataatgggtttaaattactcgctggggatgggtttttggcagtgctggatggtttatgtaaccacaaggggatactttaaaacagggcatccaagtttaagtcccttcgggtgacacagaggaggtccaaaccacccgggaatccctaaaggggagatttatgggcccttatgttcccttagaacaaaaacggtaagctctagaacgtggaaattccttgggcacattggcgagcactaagggactataccgtaacaatgggaaagtggctcgtgtaataaacctatttacccaattttccaggttgagccccaaaggtggagggctaggaccttgttgaaccaattaccggaaaggggaaattcgtttagagaatagccccgagagcgattggataagcaaatttcccttttggggatagtaacacgccgagttcgtgaatggggaattactcag

SEQ ID NO: 550848 - DNA, 190 bp, Homo sapiens
acccactactggcaatgccccaactaaatactaccgtatggcccaccataattacccccatactccttacactattcctcatcacccaactacacaagaacagaaaaacaaacaccgcatgttctcactcataagtgggaggtgaacaatgagaacacatggacacagggaggggaacatcacatactgg

SEQ ID NO: 550849 - DNA, 357 bp, Homo sapiens
tgctacagtccacaatagctctctcttcctacataacaaggttgtcgttgggctctttttctagaaagcgtctgcatgtaatacatagcattcacaatttttattaagctctttgaggaagacacacaacactgccatgtgtgctttgtgttttagaagaaatcctttttatttttatttttgtatggttggcagttgattgcttgaaataagaaatcttgtgaaaaggagggtcaaggcattctagagattatattggtattctttaggaacggaaacagtcatggagaaaattggcataaatatagtgtgagctctaaaatgttgtattgtagtcaagtgaagatagcaagatca

SEQ ID NO: 550850 - DNA, 1636 bp, Homo sapiens
acgatcaatctggtcggcgtagcaaggatatgtgttgggagttaagatacaaagagtgaatgctcagtaatgtgtgttccagatgtagtgtgtgtacgtacaccgtggttgtagatagcatataagaataattagtggtatgtgtgtggattgattatttcttctctggttggaggaagaatatactaataaatgttgtatctgtgttgtacgagaatgatagtgagtagagtgtggtggtgagtggggtctatgagattgtgtatgatgagtagatagcatagaggatgtgtggtgttagtacacaatcatggtgggttgtatttggtcgtgctatggtagcatagtttagaataaagttgaagatggaagtcgacatgtgttgttgttttgtatgattgtatgatatagcttagagtgagtgtcacaattagtgttgcaggtcacaacatgaggggagggtgtggtggggggcacaacccaagtgtcgacgtgattattttggttttggttggtaggggaaatagagctgatctctgtaggtggtgcgtgtggtgtgatgtcaagacacggacgcgtacgtgttgctgattgatagtctagtaggctatgtatagcagtctgatgtgtgtgtactatcctgccactctaatctggtgtcgatccgatcgtgatgagacaaggcgtcgttagcttggtcggtagtgagtagtgtggatgaatatagtgcctgtcctcctccatcggcagggatgtcttttgttggtgcatacctactcgtacgctggggtgggagtgcttatagtacgctttgtgtgcgttttgtggtttatattaggctccgcacgtacacgtgtttataagtagggggtcgtgcatgttggtggtacgtgacgcacacactctagcggtgtgggtcgcacatccaactatcagtatggagtatgttgtgatgtatgatacgcgcaaccgaccgtggcttatgattaagaataattaggtgtagatgttgacgtgtgtgtgctcacgaacagatagatgtcgttgtaacactagatttcttcatcttcagcggtctcctctcttcgacttcgtcacggtcgctgtgtgggtgtcggacactcgtgtgggcatgtgtgattatatgtgatgtgtgtggttgggtcctcctctctacttgggtgctgtcttcgacggtgatgattgttttgtcgtgttgtaagatgtcgacggcgatttgtgttgtcgtctgttggtgataaacagatgggtccgcgatattgtgtgtaggtatgagtagtgttgttcaccaaagtgaactctctctcatcgtgtgatacacctctatagatattgtttgtgtgagataaacaatggtgtgtgtctctgtgtatagtaagaggggtggtgggtaggttgataggagtacggtcggtgtgtgtgagaagtatgatgattgggggatgtattatgattagtataatagttgtgtgtatgatgatatgtagggaacaaatgagggttgttattgtggtgtgtgtggtagaaagaacgccctcgtgtgggaaaataaaagttgttggtgtgcaaccctctctggttaaaaataaataaataatataataaatataaataa

SEQ ID NO: 550851 - DNA, 537 bp, Homo sapiens
cgtactccccggttggtggggcctggagcatcattctgggccactgtttgactgtgtcatcatctttgcatatctgcgcgtggaatcgccccatattgacatccaggccttgtattcggtctcatctgattgggcagggcagctaattgatgatttagcggtttgtgattcgcgcgttagtgtaagagcgaatcacacaagtgggctaagagaatagattatgctgaaccacaccgtggttgtgcggtctgggctgggcttccagggccggctccatgtccatagcaggagcttgactaccttctcaaatttgggagcatgaagagcgtatccaaggatcgaagaaccgaggtggataaccatgaggatgacagtagtgtgattcataatgacaatgaggccatcgctcggctgttggaccggaaccaggatgcaactgaggacactgacgtgcagaacatgaatgagtatctcagctccttcaaggtggcacagtacgtcgtgcgggaagaagaaactttgggggaaattgagcga

SEQ ID NO: 550852 - DNA, 823 bp, Homo sapiens
ggaactcgagccaagaaagtgaagatggccaccaaatcatgccccgagtgcgaccaacaggttcctgtagcatgtaaactcatgtccttgtggattacgaatatttagttagcagaaaacttttaacatgcgaaatacacgtcagtagaacgtcaccaccttctacagagaaacacggaaaaggaaattgacatctatgctaacctgtctgatgaaaaggctttcgtgttgtcagtcgcctgggcagaagataaatagagaaaattatcaatcaaagacttattctctgatacttgtatgcaaaatctggctgaaacttctggtcaggataacatcagcaaattctcaagacatgttatggactctcaggagcatttctgactgcatcaataagggccatcgatcgtttctttctcgcctgtcagttgacgcctgtgccacacttcgggagcaaagctgtgtaggcttggactggtccgtgggatttccttgtttacccaaggagtatggtcagtgtctggtcgtcgggatatacgtaagtgtattctgccagcaacaaaaaaaaaaccaacaaaagaatgctgatggatgttcccggattacacacgtgatcgcgggtatggggtacagtatgacaacctagggtactaacgatgcctgcatgcttccaggttggcaccagtagatgcactttgtaacctcctgtcggaacagcgtgctttccacactctctttcagaatgcaggcaccagatgcttattccgcattacctattaatggcaccatttatgccgggccaccatcccgcatcgccccgcattcg

SEQ ID NO: 550853 - DNA, 111 bp, Homo sapiens
  misc_feature (110)..(110): n is a, c, g, or t
agagagagatagagagagagagagagagagagagagagcacaggtcctaaacctaccaaacctgcattaaaaatttcggttggggcgacctcggagcaaaaccccacctnc

SEQ ID NO: 550854 - DNA, 1026 bp, Homo sapiens
  misc_feature (45)..(45): n is a, c, g, or t
  misc_feature (89)..(89): n is a, c, g, or t
  misc_feature (98)..(98): n is a, c, g, or t
  misc_feature (119)..(119): n is a, c, g, or t
  misc_feature (124)..(124): n is a, c, g, or t
  misc_feature (129)..(129): n is a, c, g, or t
  misc_feature (223)..(223): n is a, c, g, or t
  misc_feature (232)..(232): n is a, c, g, or t
  misc_feature (306)..(306): n is a, c, g, or t
  misc_feature (399)..(399): n is a, c, g, or t
  misc_feature (407)..(407): n is a, c, g, or t
  misc_feature (454)..(454): n is a, c, g, or t
  misc_feature (474)..(474): n is a, c, g, or t
  misc_feature (482)..(482): n is a, c, g, or t
  misc_feature (509)..(509): n is a, c, g, or t
  misc_feature (542)..(542): n is a, c, g, or t
  misc_feature (573)..(573): n is a, c, g, or t
  misc_feature (606)..(606): n is a, c, g, or t
  misc_feature (614)..(614): n is a, c, g, or t
  misc_feature (621)..(621): n is a, c, g, or t
  misc_feature (628)..(628): n is a, c, g, or t
  misc_feature (638)..(638): n is a, c, g, or t
  misc_feature (648)..(648): n is a, c, g, or t
  misc_feature (660)..(660): n is a, c, g, or t
  misc_feature (673)..(673): n is a, c, g, or t
  misc_feature (702)..(702): n is a, c, g, or t
  misc_feature (720)..(720): n is a, c, g, or t
  misc_feature (753)..(753): n is a, c, g, or t
  misc_feature (757)..(757): n is a, c, g, or t
  misc_feature (763)..(763): n is a, c, g, or t
  misc_feature (766)..(766): n is a, c, g, or t
  misc_feature (781)..(781): n is a, c, g, or t
  misc_feature (786)..(786): n is a, c, g, or t
  misc_feature (798)..(798): n is a, c, g, or t
  misc_feature (807)..(807): n is a, c, g, or t
  misc_feature (829)..(829): n is a, c, g, or t
  misc_feature (842)..(842): n is a, c, g, or t
  misc_feature (850)..(850): n is a, c, g, or t
  misc_feature (858)..(858): n is a, c, g, or t
  misc_feature (865)..(865): n is a, c, g, or t
  misc_feature (876)..(876): n is a, c, g, or t
  misc_feature (909)..(909): n is a, c, g, or t
  misc_feature (912)..(912): n is a, c, g, or t
  misc_feature (916)..(916): n is a, c, g, or t
  misc_feature (933)..(933): n is a, c, g, or t
  misc_feature (936)..(936): n is a, c, g, or t
  misc_feature (940)..(940): n is a, c, g, or t
  misc_feature (944)..(944): n is a, c, g, or t
  misc_feature (947)..(948): n is a, c, g, or t
  misc_feature (953)..(953): n is a, c, g, or t
  misc_feature (963)..(963): n is a, c, g, or t
  misc_feature (1002)..(1002): n is a, c, g, or t
atgtgagtggggagataaagtgtgtgtgtgcgtgttctctgaggncacagggtggcataactcggcacactcataatgacacagccgtncacccagcnacagatagtgagagggcacanatggngaganccacatgtgcggagataaatctcccccaccatgatatgggttgagagaaaacacgcggcagtttactctagtatgtgtacacaatcagggaganagggccgtncaatgcatgtgacctacacccacactgagagtgagatctgctggaggtgctcagacacagcgacccaccgtganaggccgagactgatatatgtgagatgagagaggcatgcgtgcgagattgactgtgactgtgagtgctattcattcatcacctttctgggaganacactganatgtccaccctttgcaaaatgcacacacacgcgcgcgcgcactcgcncatgcacgaacacacgcgcncacacgcncacacacgcgcgcgggtgtacacacanacgagccactacgagaaaattattcaccatgantagaggtttttctatacgtgggaagaggggnaggttcacactaggctgggggggggggtaattncccgtttncgttggnaggtgcngccccatctnccaagttgtngctttggctgcnacaatgttctctnatttattgaggtgagggctgtggcatttnctgcagcccctccaagantttctgttcctttgtgtaaatgttttttatgcntgcnaatgtngtntctaaactatcaatnttgcncctgaacatggngatgctctnctgaacggaatcccagcctctnttctgtttttttncgcatgcntgttcggngtttganataatacaaanctcccttttaaagcccagcagccccttggacanctnagcntttttcaccatgatganggntganaggntgnngcggnggacaaaggncagggccagggggatgttcaggctcaggatggctctttncaaaccagcgggggaccggggtgg

SEQ ID NO: 550855 - DNA, 466 bp, Homo sapiens
atatttttttgttttcttgtattttttcaggggccaaaaattttttggccaggttgcattccatgctcaaaagccaccaagggcgaattttggcggcttctcccctggggcataaagttgacatgcttgctcattggtgaaacttggccaagggagtggcgcgcaaaccaatgatactgatggcttgccttgctgcataacactttgggactgttccctgctaaaagaggccaccggtttaactaaacaggttttcaaatccattttaaggtcagcaataaacctttgtacacttcctatgcttcaaatctttgacacctggtgccagatcgagaaaaactctacggtggtatacggctcatgtgattaacttaatcttagtcttaacggccgcctatttggcacgtgccattcaagagagctctgtaaagaaacatacccccaatggcttgcccaatggttagaa

SEQ ID NO: 550856 - DNA, 351 bp, Homo sapiens
gactctaatttatgcgggggataatatggctgttagctttactcttccacttccgggcctggagcttgtgttgtataccaagtcgctatggtgtgctttgcctaagaggaatacctctatttcacctgttctggaggcaccagaccttgaaaagaaaatgctcaaaataaaatgttatctgttatttttgtaaactcaaagttaagatgatcaaagttctaaaattccaagaatgtgcttttagacggtctcaatctaaaagccacttcaaggtgttcaaagggcaaccagctagggtgctacctcagtgtagtagtttctgatactttatgtctttgctcaccctcatcc

SEQ ID NO: 550857 - DNA, 155 bp, Homo sapiens
tcagtacgaaagatgccgtagcatatctgagacacagcgatagctaagacccagactgggattagatacctccactatgcttagccctaaatctcaacagttaactctacaatactgcgcgccagaacgctacgattgactagtatgtgtggcgc

SEQ ID NO: 550858 - DNA, 210 bp, Homo sapiens
ggccccccccccctttccctggtatttttgggccccgcccccccgggggtttgggggttttcccgggccctttttccccttttttttggggtggggggggggggttttttccttaaaaggggggggcccccaaagctttttttttttttcctccctccggccctggggtccccccctttttctttaaccccggttggggcccccccccca

SEQ ID NO: 550859 - DNA, 111 bp, Homo sapiens
acggccgtgtattactgtgcgagattcggagtccggagtcctccccatctcatggttcggggatcaaagtcggttggttcgggttggttcgacccctggggccagggaacc

SEQ ID NO: 550860 - DNA, 322 bp, Homo sapiens
aaaaggcacaggcgggtggatcacctgaggtcgaggagataagagaccgagcctgtctcaacataggcataacgcccgtgctctactaaggatacaaaaaattagctgggcatggcagcagacgcctataatcccagctactcggaaggctgaggcaagagaactgcttgaacctgggaggcggaggttgcagtgagccgagatcacaccactactctccagcctgagcaacaaggcaagactccatctcaaaaaagaaaaagaaaaaaccactgaactaagctcaaggaaggtagcaactcgaagtaaagaaaaaaacttt

SEQ ID NO: 550861 - DNA, 324 bp, Homo sapiens
attcgcggccgcgtcgactttttttttttagacagggcttgactctgtcactcagtcttgaatgcagcggcgggatctcagctcactgcaacctccacccccagggctcaagggatcctcccacttcagcctcctgagtagctcagaccacaggcatgcatcaccacaccagggttttgtctttttctattgttattagagacagggtctcaccatgttgcccaggctggtcttgaactcttgggctgaagagatctgcctgcctaggcctcctaaagcgctgggattacaagtgtaagccaccgacgcccggacaataatagt

SEQ ID NO: 550862 - DNA, 401 bp, Homo sapiens
  misc_feature (1)..(1): n is a, c, g, or t
  misc_feature (118)..(118): n is a, c, g, or t
  misc_feature (129)..(129): n is a, c, g, or t
  misc_feature (372)..(372): n is a, c, g, or t
  misc_feature (381)..(381): n is a, c, g, or t
nctcctgtacgtccattctgaaagaacactgtgcaaattcagtaccctgcacaccaacacacctacgacacctcccttaaacgtggaaccggaagcctggaattgccctggaggcagncgggacttttngctgcccccccaccggccttccagagcctccgaagccccctgcatgcatggcgccttggggcctttgcatggctgccccctggagctctgcgcctgcccaaccccttcactttgttaattcctgtcctgacgcggctcagacgtttcatctgggaggatggtttcaggtgcacaccaccccacccagccaatttttcaattttttatagagatgggagtctttctgtgctgctcaaattggtntcgggctcnggggtttcaggtgattcctc

SEQ ID NO: 550863 - DNA, 154 bp, Homo sapiens
  misc_feature (64)..(64): n is a, c, g, or t
  misc_feature (68)..(68): n is a, c, g, or t
  misc_feature (83)..(83): n is a, c, g, or t
ctggtgtaggatatgttgttcgtcatctcttgagttatggtgaccacaattcagagctctggtntgcnagtctccactgcgtncatcactggtctatggtaagttccgtctgacagaaaatcgagcacagcatcaactcatgcaaaccaaggtt

SEQ ID NO: 550864 - DNA, 321 bp, Homo sapiens
  misc_feature (2)..(2): n is a, c, g, or t
  misc_feature (313)..(313): n is a, c, g, or t
gncttcctgattccatattcgtctaagatttgcctctgaaagttgcttttgaaatacacattccgtatgggcgtggtgcctcacgcctataatcccaggactttggtaggccgaggtgggcagatcacctgaggtcgggagttcgagaccagcctgactaacatggaaaaaccccgtctctactaaaaatacaaaaattagccgggtgtgttggcgcatgcctgtaataccagctgctcgggaggctgaggcaggagagttgcttgaacccgagaggcagaggttgtggtgagccgagatcactccagcctgncaacaaga

SEQ ID NO: 550865 - DNA, 928 bp, Homo sapiens
tcaggaacacacaaagaaaacacttcagcacaacctgatagattaggctcaaatgaagaatcaatacatatgtctggctgatcattataaatttaatcttttaaaagcctgacctgctctttatactcagcttgctatgtgctcaatgtctacggtatctcaatagctattctaagatgaaatgattacaggtcaaatctttagagagagatcaacttagtctcatatgcaggtaaatgatagggcgcccagtataggtgtccctaccatgtcttctgcgtctcggctgcctttgttgacattattgcaattgtaccgacagattcgaactaccgagactagagaaaagcacagtacactgctgaatcttgtacctcgacaatttatgctcaattcacgtaggcagaatttattagctctcagtgagtacacatgttctaaacacattctaactaaaatagtctatagatctccacctttttatcataaacacgaggagaccttccataattcgtggatagttctccatcatagtgaaattaggctctggatgatggcaaactgcttcctagaagcattgaatgtaagcgtagacatgaacaatggggaacgagagaccttcttccttaggggaattaggaagagtatcattagtggggttgttgtaggccttctatgcacttgggcgcttatgtccgaagacgcaaataccatcgggcgcgcacaagtcttacatctggctcatccttgggtcccactttcgtacacactctggtttaagaccaactggaaaaaacaccctggcaaggcaagatgggggggcagcacgttgtggcaatcgcttttctttgctttgacttgggtaagggttgggtaaaagggctcgttatgaattgtttgttcaaaaagcaacaaggcctccaataaa

SEQ ID NO: 550866 - DNA, 115 bp, Homo sapiens
cgtcacatgtcaacaccgggaatatttggccaagagttaacctgaccaccaacacgattgctgtgactcatactctccctaatgctgcctaattataaccgcttttcatatgcaa

SEQ ID NO: 550867 - DNA, 923 bp, Homo sapiens
  misc_feature (142)..(144): n is a, c, g, or t
  misc_feature (215)..(215): n is a, c, g, or t
  misc_feature (221)..(221): n is a, c, g, or t
  misc_feature (223)..(223): n is a, c, g, or t
  misc_feature (229)..(229): n is a, c, g, or t
  misc_feature (241)..(242): n is a, c, g, or t
  misc_feature (246)..(246): n is a, c, g, or t
  misc_feature (249)..(250): n is a, c, g, or t
  misc_feature (252)..(252): n is a, c, g, or t
  misc_feature (254)..(254): n is a, c, g, or t
  misc_feature (258)..(258): n is a, c, g, or t
  misc_feature (265)..(265): n is a, c, g, or t
  misc_feature (755)..(755): n is a, c, g, or t
  misc_feature (904)..(904): n is a, c, g, or t
ggcacgaggccgataccggggacacagaattatagatgtctgagcacggactctcccaggcctgcatgcatggcatcagactagccacatcctgccaggccgccgggatggttcttctccagttagaatgcaccatggaacnnntgactccagctcgtgtgtcctcatggagaacccaggggacagctggtgcaaattcagaactgagggctctntttgtngnactggnttagaggagtcnngtgnctnntngntcanaattaancagcaacactgcagtcagatcctgttacttgcttcagtggaccgaaatctgtattctgtttgcgtacttgtaatatgtatattaagaagccaataactatttttccctcattaaatagctgccttcaaggactgtttcagtctgagtcagaatgtgaaaaaggaataagataaatacatgcttgcggctcaaatctaaagttcaaaagaagtacctttacttgcaactctcttctaagtgaccttggatgagaagtgtcatgtaaaattttcttcctttgaagctttaggcagagccataatggactaagaacattttgactaagtttttataccagcttaagtagctgtagtgtttcaccgtcgcagctgtgctcatgcttttcaaggcatttgtcttgtgtaatattattcacagtaaattttggactgtctatatcataactatacttgatagtcttggtctataagtgctcaatagcttgaagccncaagaagttcgtagtcgaaattgtgttgctcttgtttaaaccgcaagtgcgtgcatcaaaagcagatacttgagggaaacactagtttccacaagcacatgtatttggagcacacattaaaaatccctcatgggggtttcaattaacanagggattaccgttacctcc

SEQ ID NO: 550868 - DNA, 256 bp, Homo sapiens
ctgatgatcacgaaggctatagttccatacgccctctcaggcgatcaccagttgtaataggttagtagcgctcactaatcatagtctggtaattagtaagatgagtagatttttaaagaactgataattgtttgggtctgagtatatatatcacagtgagaattctatgatggaccatgtaactaacaatgctacaggtataaatattatggagaagtagtctagtctgaagcttagggagagctggatagttagg

SEQ ID NO: 550869 - DNA, 108 bp, Homo sapiens
gaattcctaagaagaggcctattttgagtgccatgagaaacttgttccatggacaacatgccatcgggccaggaacccagttggttagataggaatcccggcggacga

SEQ ID NO: 550870 - DNA, 521 bp, Homo sapiens
gcggaatttaattttttttccatcgctagggttccagagctcaggggagattgtggcagccagcgctctggcatccttggatgggcaccgcgcgcagaggcaattacatcacctatgatcgcctgttacaagtcactagagttgaacgtagcaagtgttggaatgacatggaccatggccagaaagcaaatcatgggggagcaggcccacacaagttcttgcagatcctgcacaagagactcgcagctgacagtatctatatgaccagcaatgggcgtgtataaagaagagccacataggatgctggcacatggtggcagtcctaagaaggccagtgctcacatgagccacgctgaagatagagaccagcagcttttatgacacctactccttgtgggctagcacacaacgctgatggcctgagtggataccgacttgtgaacaacggtgggaaggtgactgcacattcctggaattatcctgccaatcatggacgtggggaccgggcatcgtgggcttcc

SEQ ID NO: 550871 - DNA, 218 bp, Homo sapiens
aatgcttgatcttatgaggatctccgtcattcgccaaggccaatgcagttggggtaaagcagcatggtgcacgatatctagtgtggctggttcccgagtgaagataatcacgtacgaaatacgaaaagctaccatttcgagttgtgcccctctacttggcccttgtccatagtgcaaggcgtaccgacgctcgaacttcgctaatcttcgatcatagc

SEQ ID NO: 550872 - DNA, 905 bp, Homo sapiens
agcggagggggggagcaggcggtgagaggggtagggagcggtgtgtgcccgggatcgaggggcacagccagtgtgcatgtcatggctccacgggcagcgacctactccatttgtcgcgttgaacgaagtgtgcgctggtgacacgctcgctatccagccatatcgcctggccaggactggctcaacagctccatcctccactgcgtgttcacatatgaccacgttacttgccacccgacagtgtttggcctcagctgtgataccctgaggcagctcagatgcccggcaggtcctgctggtaagagggtagtgctggaccttggtcctgtctggggacccgggctgttgctggtgtggccggcacgggaccgtgggtagcctcgtaaccatcgctggcgagctgcgtcctggtctgtatcgaccgcggctggcctgggcataatgtgcgacgtggctcctccaggctccgtggcgcgcccgatgcccgtgccttcgtgccgatccttcctgggagtctcgtggcctactgaggactctaggcctgtcccatcctgtgcccaggtgtcactgctgagtgtcccttcagcggggctctggtgctcgtccccggctgtttcgccctccagactactgggctctgccccagattcccccccgaggcttctcccattcctggtcccaggctgtactagcgtatccgcacattgatgccttcgccaagccagccccgtgcctggtggatccaccagtcctgtctcctggctgctctgccccttgcccgggggctgggaaacctgggagtgacctgagggagggtccgggttgtgttacaccagcaggcaggtgacgagttcctgtgccggaagaactggccagggagagctgcgcctgtggcatctctgcct

SEQ ID NO: 550873 - DNA, 262 bp, Homo sapiens
gaatggaacaggcaccgaagatcttacactggaggacagaggaatggaacaggcaccgaagatcttacactggaggacagaggaatggaacaggcactgaagatcttacactggaggacagaggaatggaacaggcactgaagatcttacactggaggacagaggaatggaacaggcactgaagatcttacactgaaggacagaggaatggaacaggcactgaagatcttacactggaggacagaggaatggaacaggcact

SEQ ID NO: 550874 - DNA, 386 bp, Homo sapiens
tggccaggctagagtgtagtgcaacgatgagcagctcactgcagcctcgaactcctaggtaccagtgatcctctctcctgcctcagcctccaagggtagctgggactacagtcacccaccatcatgcccagtttattttattatttttttgtagagatggagtttcatattgttgccgaggttggtcttgaactcctggcctcaaatgttcccccaacctaagcctcccaaagagctaggattataggcatgagtcaccatgactggcccacactctttttgaaacccttttggatactacttggatttcctgctgacttctcagagcaggaacgcttagggtggcagagatgataccttcatgcttcgccatggagtaaatggca

SEQ ID NO: 550875 - DNA, 105 bp, Homo sapiens
aatcacgtgcattgtgcatggtgtgtgtgtggtgggtgtgtgcgtgtatatgtgtgtgtgtaccatagtcctccatccctctgcagcagtcggaaggggcatgga

SEQ ID NO: 550876 - DNA, 816 bp, Homo sapiens
tataaaaaaaagttttttattttttataacccggggcccttttggcccgagaaagggggggggggccaggggtgacaggccaaatatgaaccccaattttttggggggtgtattccctccccaatttgtgggtgggtctccgggggccacgaaggtgtgcgcgccgggggggagtgggagggtagacagggtgggaaaaacgagggaagaaaagaccctgtggaggaacccacaaggggccaaaagaaaacggggggttgcgggacacgagggacacggctgacacccagagagaccacgctgtgggtcccccggcggtgagacccaaaacgaggaccatgtgggcaggatgacccacagtgtgaggactgcggggccatacaaaacaagagagggggacaaagggcgattgacgacccccagccgacagatgaacagagcagcagggtgtgatcaaaggaccaggtgggcgaaaaaggaaggaactacacacaagcctcacccagcggaataaaaagtggggccacaccaaagagtggaacacagaagaagggcggggcaccaacgcacgcagaaatacgggggggtgcaccccaacgccaaaggaaaggagtaaccccaaggagggtacctaccgggagaaaagttagttggcgccaacaacagagctgaggatgggctaccagagatgtatgtgaggcgacgcgctacaatgaagtcgaaaaaacgcgagaacggggcggctacaaaaaaaatcccacacaagggggcacaaagtaagcgcgtcacccaagctttgcgtgtcacaacggggca

SEQ ID NO: 550877 - DNA, 202 bp, Homo sapiens
cgctcgcagaaaagatcgtcacatgcacatgaagagataaagacgtgactcaagagaggatcctggcatgggtgtggtggcacatgccatgtaatgccagcactttgggaggccacaggagggtggatcgcctgaagtccggagttcgagaacagccggggccacatggcaaaaccccatctctactacaaaattaaaaatt

SEQ ID NO: 550878 - DNA, 419 bp, Homo sapiens
  misc_feature (146)..(146): n is a, c, g, or t
  misc_feature (177)..(177): n is a, c, g, or t
  misc_feature (217)..(217): n is a, c, g, or t
  misc_feature (219)..(219): n is a, c, g, or t
  misc_feature (236)..(236): n is a, c, g, or t
  misc_feature (238)..(238): n is a, c, g, or t
  misc_feature (245)..(245): n is a, c, g, or t
  misc_feature (258)..(258): n is a, c, g, or t
  misc_feature (283)..(283): n is a, c, g, or t
  misc_feature (305)..(305): n is a, c, g, or t
  misc_feature (321)..(321): n is a, c, g, or t
  misc_feature (337)..(337): n is a, c, g, or t
  misc_feature (377)..(377): n is a, c, g, or t
ctggatcattactagtgccataaccctgcttcttcaacatttcacagaacttctcttttatataaaggcaagagcacaaaatgagttcagatgatcacaaacaggtgagttttgttggagaagaaagttggagtaggagactttcncaagtggtttccatggagatagaatgaagcnttctgtggtcaagtaagtttagggagctattcatgtttcncntgctttgtggagattcncnctatgcnctgggaaagtatntgaaaagtcttataataaagaaacnggcttaactttgtgtaagaacnctgtttatcaatgtcntttggctatagaaacnttttctcctgctgattgtgtgtgtgaaacatgtattaacnttccaatgaactagcctttaataaaaagcacacattttgtga

SEQ ID NO: 550879 - DNA, 162 bp, Homo sapiens
gactctagacggatcccccatcgtgagcctcctgtacatgtaggacagcatctacatccttcttcaggcatcacaaactcattctcagcagtggtacgcttgttgatttcatcctcatacttgttcttgatagtcttccacctaggtcctgctatgtttctc

SEQ ID NO: 550880 - DNA, 92 bp, Homo sapiens
actccccctcctggagcagatcgcgggcgaactgccgctcggcccggaagggggaaatgaaggggaccagggtgatgaggccggcatccacg

SEQ ID NO: 550881 - DNA, 123 bp, Homo sapiens
gcacccatgtctgctctgaaaattcatgatctgtctttggccttggcagacagagcatgaacccatgggataggaatagacattgaagctgactcaacagattacaggaagtgaaagtaagta

SEQ ID NO: 550882 - DNA, 1034 bp, Homo sapiens
tgactgcctgagacaaacctggaccctgcaagcaccatgaacagccacggtcactatccaacacagccaaactaccctgtgcagcctcctgggaatccagtataccctcagaccttgcatcttcgctcaggctccagcctatacctgatgctccagctgcctactcagagctctatacgtcctgagctttgtgcagccagggtgctgccacatgatcccctaccatgtacagcctgcaatttcctggagcctctctgtatcttcccatggcccagtcttgtggctagtacgggccttctcaggttccacaataccccatggcttattatccagtcggtcccatctatccacctggctccacagttgctgtgtggaactggagcggtctgcactgcagcgtgccacgatttcggagctgtcgtgctactcgcttgggccaccattcctacctccacctacctgcacttgccctcccaatgctgactcagcttgccactcctgcactggagcccaacgtcctcgtcaactccagcaggaccggccaacttctccacggcctggaccagcatggtgcctcacacctcaaccgactcaccgccaccacaggccacccttcgccgccggcgaactcccctcaccacacccttgcagccctctcctcacccccgctcacctgctcccctcactctcaaccctgacgcctcgctccaccctaccccacacctctcggaccgccgcacacccgcacccgcgctcccccctgcgtcccaccaccactatctaaacctccacttcacggcaccccactgttacagcgtctcacccgccgtccctcccccatgcagcgcactatccgtcccgcgtccccgagcagcattatcccacatcaccgacctacactacgcggtgaagcctcgccaccgctccccaacacagtcattcccgcccttctatattccacgtttcaccatctatagtccacagtccggtgcccactgcgactttctaccattgatacagtctatacatggagt

SEQ ID NO: 550883 - DNA, 233 bp, Homo sapiens
tcataggttcgcaggagtgcagcctggaaagataaaagacaaaaaaaaaaaaattaacttaaatttacaatgatgcaaatgaccttttttacaaaatagaaatagactcacagacgtaaaaaacaactttatgccaaagatgatagcagggtttaggtggagtgtggggttgggagagaaattaggagttggggattaacatatacacactaccaggcctgcaaacctattaa

SEQ ID NO: 550884 - DNA, 105 bp, Homo sapiens
ggacagtgcacgcaggtcgccgttggaattcatggacgacacgagccgatccatcatccgcaatgtaaaaggcccctgcgcaggcgacgtgctcaccttttgagt

SEQ ID NO: 550885 - DNA, 723 bp, Homo sapiens
ctgcgtggctacgctaaccccttaactcatctccgtctgccgctcccgtgcacacccacggtaggtcctcagcacaggggtgggccttgtaaagtgacaccagcagctgctacagctcccagcctcagcaacagtaaaaaccaaagtcttggaagttccccaaagctcccacacgatcggaccctcaccactcacctgtctctctccatctcctatccagttgcacatacacaaccctgcactgggcctacgcacttaccgtctgcactgcctggaaggctcttcctcccctcccccatggcaccctcgaacacccccccacacaccagcacacacacacaggcttacatgctcacacagacacacagatacacaaggctctgcccttcactctgcgcccaacccataaccgctcaggcccttctcgggccatcgcccctgtgctcctgagcctgaggtccgcccttcctctcagtgacccggggcgcgagcccacgcctcaccagagcgtcgtgtgcaccccgtggaatgcggatcgactagtggatcagcgtggggatgtggcgcgacagggatacactactgcctgaacgactcgtggcggaccctgacatgtcaaccctgcatcccaggacgccaaggatacttgacacgatcacgatagatgtaacccacatgacgaaacatgaaagctctcaaagatcttccaaaacaacatctcca

SEQ ID NO: 550886 - DNA, 106 bp, Homo sapiens
gggtaggacagaagattcatagagatatgaagatgggatggaggtggatacacaccaacagttgctggacagtttgaggatgcagatgttgatcactgaaaatgat

SEQ ID NO: 550887 - DNA, 406 bp, Homo sapiens
  misc_feature (6)..(6): n is a, c, g, or t
  misc_feature (31)..(31): n is a, c, g, or t
  misc_feature (44)..(44): n is a, c, g, or t
  misc_feature (91)..(91): n is a, c, g, or t
  misc_feature (129)..(129): n is a, c, g, or t
  misc_feature (167)..(167): n is a, c, g, or t
  misc_feature (187)..(187): n is a, c, g, or t
  misc_feature (238)..(238): n is a, c, g, or t
  misc_feature (311)..(311): n is a, c, g, or t
  misc_feature (351)..(351): n is a, c, g, or t
gcatgnaatgcatacaaaactgcaatatagnagacaatgtttgntaatgaattgttctattaacaaaggaggaggttctaagatataaagncctcagagaacaggaagtaaaaggtcgggtccataagnaagtatgaggttctaaccgggtaagatgctgtctgagnaaggtcagagacagtatgtnggaagtaaatctatcacccaggtcatgtgcactgaatgttccactgaagtngtcagtctacgacaaggatgaagtctttcattttttcaatgttttagcaagccattcctaaacagcccaactngcatttaattacccaatactgtatataaggcaaatatggncagttactttcctcttgcctgttcatatccttcagtgacattgtggaagcagtgt

SEQ ID NO: 550888 - DNA, 454 bp, Homo sapiens
gctgggcacggtggctcactcctgtattcccagcacttgggagactgaggctggtggatgacgaggtcgggagttgagaccagcttgaccaacatggtgaaatcccgtctctactaaaaatacaaaaattagctgggtgtggcagtgcacacctgtaatcccggctactcaggaggctgaggcgggagaatcgcttgaacctgggaggcggaggttgcagtgagccaagatcacgtcactgcactccagcctgggcgacagagcaagcctccatctcaaaaaaaaaaggaaaaaagaacttcaaattaatacatatctaggaggattaaaaagctcaaatggcttttcacttttttctggacttattttaccccactctgaaatgtggtggtcatgggaaacagacttcaaaaaagccaaaagaaaagacagaaaagaaaaacaacaaaaacat

SEQ ID NO: 550889 - DNA, 753 bp, Homo sapiens
  misc_feature (268)..(268): n is a, c, g, or t
ggcgggaggctggagtagagggaagcctgcaaccggaagtgaaggcgcattgtccctccttcgtcagctgttgcgtgccgcgcatacgcgctctccctggtgtagcgtcttctgttagaaatagtatcttaggttttcctttgctgtgcgtcaactcctccatactcgttcaccgcctggtatttcaccgtatgttggcggaggaagcccagtccagatcccgccttcctcttcttcgcccatgcacggcccagattatggcgagagnaacgagtgtggagcaagtgagctcttggactatggaacgtatgactgacggtgtgagacagacagtcgtgggaggagtactgggcgctcgaggcctcctgccagcgaagcggtgtcgataggggcctcgctatgtctccactccagcatgctctggcgttgcgctgactgtcctgctacaggccagagtagctccggggccatctgtctacatggttgggccgtacgcagcatccagtcagaagctctcgatgcagtggagtgctatcaccgtcagtgcctagtcctggcgtaatggatgtcctgtgaccaaggtgcaaagttcggggctagtgggtaataggacgagagggggtcagtcattgggcagcacttgtcatacagacgtggatacgacgtttacttgggcagggtgttctgtgtttggtgacttggtgtatagggactcgagaggtaggggagtacagactcagacatgaggaattt

SEQ ID NO: 550890 - DNA, 856 bp, Homo sapiens
  misc_feature (363)..(363): n is a, c, g, or t
taaattttaaaaaaaccttttttgacggggggggggttaaggattcaagggtggggatgggcccaggggggagaaacagatgtgggacgacgctcagtagggcctgtctggaaactggctcgctggggggtacccaccgtggcgctattgtacgccctcgtttttggcgggtagcctgactctatcgggtctcgagaatgtagcccccgtagtgtcgcccggatttggtgggtcaaaaacacccgtgttcgagtggttcctcacacccaaggtgccgtcgccccaaagttatcatcggggccacagtttgcagagacgccaaagtgtctcttcgttggggacgcaaagtggggagcactacanaggagcggggaagaaattccaccacgtgggatccagtagaatggcgaagtggcaccccagggggaaagggcacacatagaggcctcccctcaatatatagaagtgacatcaaattatgtggccgtaagaaaagacaggagaacggctgccaccaggtgcggaccaaaaatctcgcagagcgctacagaagcaacgtgcttcatagcaacagaggggcatactcaccgaggtggcaggaggagagcagcctactagtaaacagacccacacgtagccacttgaacgagagtgtgagacaaggagagcggcaaggaggctcccacaacaagggtgaaaagcatcctcaccccgggaggagacatactactaccaaaaaaacacgcagcaacagatggggcaggcgaaacacactgtgtggacagacacccccacgcggggagagaaaaaaagaagggtctccccacaaaaaatattttacccaccacatttagca

SEQ ID NO: 550891 - DNA, 122 bp, Homo sapiens
gttttgaaacggctctccaacctgtgggtgccctcagtctactgctccagtcttgctgcagcaaccatcgaccgcttcaaccctgaggattcttccacctaccagtccaccacgagacagtg

SEQ ID NO: 550892 - DNA, 823 bp, Homo sapiens
tggggggggcgggagtcacattgtggggcccccaaatagctttgctcccacggggagagagggttgtgtggtgacgacagagacaacacaggtgctctttatgtggggtcccacacgtcccctttgggcccgcgtgttgccccctccaccacaatttgtcgcgcggtttcgactcccaaaacagcgttgtttttgtctttctcaacacaccgttggtggggttgtctccctgttgtctcccctctcacaggctcccaataagtggtctctgcgtgagattttcccagacggtctccacttggggtgttttcgtcgccctctggcacacacaagcggtgtgttcgtttgtttttggtgtcgtgtgaagggtctgtgtggggacgagcttctacgtgtgcacgcggagatatcacgtcgggtcctctgtgggtcttctggaggaacgcggagaacacatgtgtgtcccgagccgccggtctcacatctcccgtctcgtctccttctccttatggagatgtcacataaaccctaccccttggtctttttttttttgtaaatatttcttttccccggtgagagtgagcttctttgggacacataaaaggataacttgtgaaaatataatatgtgatagcatagtataggagaagaccaagagttctcctagatgtttgtgatcttcgttgtgatagactgccctagagtgtcccacccaggaagacccctttattttggtttttgggacatttttaatgggtgacaagaagtgagccaattaagtggaggaagaaatctatatatgagataatatagattgtattga

SEQ ID NO: 550893 - DNA, 307 bp, Homo sapiens
atcgagctcggtaccagtgctactccacaaacagcacacatcattgccacatacaggtcacaccacacgtactctccactcacaaacgccattgcatatttgcagacaggcaacacgaactcgcacacagtacacaccagacatacatggcagacacaatacacacgtactacacgaacacaccacatacagcaccatgtatgccacagacacacctccagacacacacatacacaccagatacacaccacatacacacacatacacacacatacatacacaccacacacattccactggctataca

SEQ ID NO: 550894 - DNA, 269 bp, Homo sapiens
ccccctaaaaaaggggttttttttcaagggtttaaaaaattttaaacttttggtgaggggcacaacagggttcctttccctgtttttttaaaaggggggtttaaaaaaaccaaaaaaagggggaaaaccatcctttaaaaccaaacaaaaaaacccttccccccccccctcctttaaaatgccccctttggccccggggggggggccccagaaatttttttgggcaatggcccccgttgtttttaaaaaaaaaaccccattttaaatta

SEQ ID NO: 550895 - DNA, 218 bp, Homo sapiens
aagtgcagcacatgccttctaaagaagccaggcatggaacagttctgggaacacagcactgataaaactcttagggatgaatttacctatacctgtgtttcagccttgtgatctgggtttggcacgatgaaatgctactttcagaaagatgagtatgtcagaatccctggtgatttctaacgcttatggaacacatcacataggagcaatttagatga

SEQ ID NO: 550896 - DNA, 345 bp, Homo sapiens
tcgaatacgacggtttctcaatcgccgtgtcctggcatttatgcttgattctgggagcatggacaatagccaagaagtctcttgcctgcaggtatcccgtgacagaaagggaagagggggtggggataggaaagtaggggttccttgtgtgctcttgctacaacttgcaagatttcacctctcccctagatggagctgctagggaaacagcttgcagaaagtaaaatgggaagtctggcatggtggctcatgcctgtaatcccagcactttgggagggtgaggccggcggatcacctgaggtcaggagttcgagaccagccaggacagggtgagatgctgtctcc

SEQ ID NO: 550897 - DNA, 1484 bp, Homo sapiens
actgctgagaatgaagactattctcagcaatcagactgtctgacattccatgaaaatgtcgacattactctgacagtggacgcacagttatcgtgaagtggccccagactggaaccccatgtggatgtgtgacctatcacagtcacatttcaactgtacgacactacactgcctatctgtgggaaccgacaaacaacaatgacgtgctcctgtggtctgaccaaattggtttgggtgtacaccactgaacagggacacccttggcctaccccggtatccgcgacctactctcttgcaaggtacactggtaccaggaccaccactggactcaactggcgttgattaccgacttgtggccttcccgggtttaccaacgcaactgacgggttctgggtgtactttgacttcaacctttatcacacgctatttcaacacaggtcggactttacttcccaaggtgaggacaacttgtggcttcctccattgtgcgtagtgacacacatccccggcaaaattttcattttgacgacgctggacacagcaatgtacccatttctcaggcatggcgcttccggggaaatcgactggacaccccactgcgcattgagtctggcactatatggatataccaccgcttcattccataccaaaatggaccaccactggcaaatatcgtactcgacgatattcacattccccagtttgcacatatctggcacaccgtggaatcccgttctcggaccgccctcttgtatctcactcacaacaacttatccacgccgtgagcccttcactggcccgtatcaccaacgccacaacacaggcccacaaccacaacccagggtccaaacgcccaccgccaacagggggacactaatccaagcggaaccgaaccagcaacggggcccactgcgccacactcgtacaacggctcccgctcaatcggaaccacaacacggtggcaaaacattgagcacccacggccacgctccccctggcactgaccagtcaaccgtcacactcaccaaacgctgcaacgtgattataccccctgtgggtcccgcaaccaacggacacgccgacaccggtactgggccgcacgagaattgtcacaccacgatgaagagcacacgcatcaacgtcaggctggcaacacctctaccacaacctggcacggcaccagaccaaacaaagaagacacccataaataggaccctagcggccaacaacccagcgcaaacaacaacacaaacacaccacgacacacaacgaaccaacacacactagcgagattactggaccgaccaccacgaccaggcacacacaccgcgacgagcaaaacacgaccacaccaatgactccacccacatcgacagaccagaccggagacacgaccgacaccacacagagcgagcagacgagaacacacagcatgcaccaagacagacgaccaacccgacaagacacaccacacgagacaacaa

SEQ ID NO: 550898 - DNA, 122 bp, Homo sapiens
ggccattccagtgccatctgtgcgatcgtgccttctcgcgctccgtatcacctgggcgctgcacatgaaacgggcacatattagccgggacggcccccgcccacctgcggcgcgggccttag

SEQ ID NO: 550899 - DNA, 158 bp, Homo sapiens
gaatgtcgggctcaggcacacctccagaaggcccactcctgccctcttaatcatggactcaggtggtgtggactcaggtggtgtgcacaccacctgagtcctcccagtggcagattgtttcttagcctccctggatctcccagttaatttcctttgtt

SEQ ID NO: 550900 - DNA, 622 bp, Homo sapiens
  misc_feature (20)..(20): n is a, c, g, or t
  misc_feature (43)..(43): n is a, c, g, or t
  misc_feature (51)..(51): n is a, c, g, or t
  misc_feature (80)..(80): n is a, c, g, or t
  misc_feature (108)..(108): n is a, c, g, or t
  misc_feature (122)..(122): n is a, c, g, or t
  misc_feature (229)..(229): n is a, c, g, or t
  misc_feature (272)..(272): n is a, c, g, or t
  misc_feature (343)..(344): n is a, c, g, or t
  misc_feature (568)..(568): n is a, c, g, or t
  misc_feature (607)..(607): n is a, c, g, or t
  misc_feature (611)..(611): n is a, c, g, or t
accaccttaaaaatggtccnattagttccggacatgtttaagngcctctgngggaatggagcctccaaaccacggacacnaaatgtcatctttgccacacggaaccanattttaaggtttanctgaagcccatcaagctttttcttgaattccatgcaggagtatttttaattaccatttaaaacatggcattattttaaaaagtaatctatgtttttaatttaaaagncttacttatgctttacccatggtagagagtacaacttaaggangttttcttaacttgcctccctctttctttttcctaccccttacctaaatcataggctattaaaatgaaatnntgggccgggcgcggtatctcacgcctgtaatctcagcactttgggaggccgaggcaggaggatcacctgaggtcaggagtttgagaccagcctgaccaacgtggagaaaccccatctctgctaaaaatacaaaaattagcctggcgagttggtgcatgcctataatcccagctactcgggaggctgaggcaggaaaatcgcttgaacctgggaggtggagattngctgtgcaccattgcactccagcctgggtgacaagagtnaagntccgtctcaaa

SEQ ID NO: 550901 - DNA, 252 bp, Homo sapiens
  misc_feature (27)..(27): n is a, c, g, or t
ttgcgcagctgacatgccgccctgtgncctcggtgcaggaggaactggccaaggcagcagccaggtcgacctgctcaaggacattctgctgccgccaggccccggcgtgagcacgaagcctgcattgtcgcggacaccccgtcgccgccggccaaccgagccggtgcgcctgcctgagagcccggcgcccagactcgatgaggcgctcgcttgtgacacatgcgatggtggctgcgcttgctgatcgctgtc

SEQ ID NO: 550902 - DNA, 266 bp, Homo sapiens
  misc_feature (82)..(82): n is a, c, g, or t
  misc_feature (104)..(104): n is a, c, g, or t
  misc_feature (108)..(108): n is a, c, g, or t
  misc_feature (137)..(138): n is a, c, g, or t
  misc_feature (156)..(156): n is a, c, g, or t
aaaaatgttgtgcatttctttgtgcttggataataaggaagttaaccataaataccactataatggtcgacgtataggtgantcaaagaattaaatgtgggcancctnatcgaattactactgggaatccagtcaanngctgtcagctgagttgcnaagggtctagtttcaactcaggtgctcatgtgttccctgggctgaatggtgagcacaaaacagagcaacatcaattccagggcatcctgactatgggttcctccagctca

SEQ ID NO: 550903 - DNA, 828 bp, Homo sapiens
taattccggtccagtctaacccttttggtagtcactcataggccaaactaagggctaggatgatgattaataaaagggattgacataacttattaggtggcgaggtttagtgtgttgtgaagggctctcagtggtaggggtataaaagggagggcaaatttctagaactcaaataataagaagaggtaatagctacttaagaaagaaatttatagtggagagaaaaggggaccgcgggcgcgggggagatatattaggggctcagaacgccccgcaccctccgataagggggggtgagatattttctctatatgtgttacgcccagttgagagtgtgtggtggatacgctcaaaatgtgtttatatatattatattatagagatgagtatagaggtgcatagagagaagggggtgtgtgtgcatattattataaccaatttgtgagagcgtgctccgagagagcacagagagtctcgagccacacgcctagatgacacgcgagagcgcgccgcgcgcgttctccccccctttctttcgcgcactcgcgtgggcgggggcgctcccccccacgtgctgtgggtgagcacccccctttctcgcggcgcgagcagctgtgggtataccccccgcgctatattaatgagcgccgggccctctcttcttctcgacaccacgaagagcgcccctctctcgggggggcctgtgccccccgccgggtgatgtgcgcccgggagaggagaagagtgtggggtctccggcccaagaggtggggtttataaggggcgcgggtcaaacgcccaaggcgtgtgtgtaccccgcggggtgtc

SEQ ID NO: 550904 - DNA, 2218 bp, Homo sapiens
ttcagcaaaaaattaaacgatttaaggcaaagcagggccagaacaagttcctttcagagattgaggatgagctttttaatccagattatgtggaggttgaccggataatggactttgcacgtagcacagatgaccggggagagcctgtgactcactatctggtgaagtggtgttcacttccttatgaaggcagcacgtgggagcggaggcaggacatagatcaagcaaagatcgaggagtttgagaaactaatgtccagggagccggaaacagagcgtgtggagcgacctcctgctgatgattggaagaaatcggagagttccagggagtataaaaacaataacaaactcagggaataccagttggagggagtaaactggctacttttcaattggtacaacatgcgaaactgcattttagcagatgaaatgggtttgggaaaaactatccagtccattacatttctctatgagatatatttgaaaggaatccatggcccttttttagtaattgccccattgtccacaatccccaactgggaaagggaattccgaacctggacagagttgaacgtggttgtgtatcatgggagtcaagctagtcgtcggaccattcagttgtatgaaatgtacttcaaagatccccagggtcgagtgataaaggggtcctataagtttcatgccatcatcactacatttgagatgattttgactgattgtcctgagctgcggaatattccatggcgctgtgtagtcattgatgaagcccacaggctgaagaacaggaactgcaagctgttggagggactcaagatgatggacttggtcagtgaccatattggtgattgcactgaacctgaatagaattgttgctgacttgatagtcccgttgctcagaatttgatgcctgtaaacagtatttgaaaagcttgtcaaatattgtgatatattctctggcactttcagttattcaaaagttgttgccttttggattcttacattgttggctagtgtctgttaaacagttgtattatagcagagtgtaatcatgatagtttcactaaagtgagtttcaagtatttgttttaccctttgttcataaatacaggttgatcataccaaatacaaaaatcccagaatccaaaacgttttgagtacccacataatgctaaaaggaaatgctcattggagcattttggattttggattttctcatttgggatgttcaacccgtaagtataaatgcagatattccaaaatctaaaaatatctgaaatctgaaacactctggtcccaagaattttggataagggatacttaacctgtactgccatttcattaactgttgggccaagctttacttcagtgatgatagtccagttatttttcagtgctcataggttttgccatactgtggccagcaggacttgtagatgcaagttctcaatgagttgggtaggatatctggggttggtttagttcgcacagatgcttagaagtttggggcattacagtgcctcagatttgatctggagttttacaccacacttatcccatagtcttccagcttcccaagagatgatcaggtcttcctgattagattttctagatttttttttcagcaggagcatcatggaataacatatcgtaggagtagaaggatttgatttattttctgtctgatactgctgtgtgtgatttcctagtgggaattgcaacatgacctgtcatcctcaggcttcttttcactccatagtttatatagtggttatgatcacttatattttatttttaatgtacatttggaaagcaaagctcctgtcatttagcatgccttggatgatttgatgagtttcacggaagtacaaaaagggtttcaaagtatttttaatgctaatttctgcaggctaatttgatcttttgttaactgagagtttgagatgagaaggagtgttctgtatattcatggccatatgtttttagctgaagactggtattaccaaaaaacacctaaaagctttttgttgcagctgattctctgaaagagcagcttattttattcttaaagagattagaattgccagctatgcttttagtttaaaacaacaaatctagttttgcttaaaggaaaaagtctgactgaattatcctatttagggtgggatttcccatttttcttcctaatgaattattattaaagcgatcctaagatctgtctc

SEQ ID NO: 550905 - DNA, 765 bp, Homo sapiens
  misc_feature (51)..(51): n is a, c, g, or t
  misc_feature (62)..(62): n is a, c, g, or t
  misc_feature (100)..(100): n is a, c, g, or t
  misc_feature (138)..(138): n is a, c, g, or t
  misc_feature (142)..(142): n is a, c, g, or t
  misc_feature (157)..(157): n is a, c, g, or t
  misc_feature (191)..(191): n is a, c, g, or t
  misc_feature (193)..(193): n is a, c, g, or t
  misc_feature (199)..(199): n is a, c, g, or t
  misc_feature (205)..(205): n is a, c, g, or t
  misc_feature (252)..(252): n is a, c, g, or t
  misc_feature (275)..(275): n is a, c, g, or t
  misc_feature (289)..(289): n is a, c, g, or t
  misc_feature (296)..(296): n is a, c, g, or t
  misc_feature (305)..(305): n is a, c, g, or t
  misc_feature (321)..(321): n is a, c, g, or t
  misc_feature (375)..(375): n is a, c, g, or t
  misc_feature (409)..(409): n is a, c, g, or t
  misc_feature (423)..(423): n is a, c, g, or t
  misc_feature (442)..(442): n is a, c, g, or t
  misc_feature (445)..(445): n is a, c, g, or t
  misc_feature (448)..(448): n is a, c, g, or t
  misc_feature (450)..(450): n is a, c, g, or t
  misc_feature (511)..(511): n is a, c, g, or t
  misc_feature (540)..(540): n is a, c, g, or t
  misc_feature (545)..(545): n is a, c, g, or t
  misc_feature (548)..(548): n is a, c, g, or t
  misc_feature (712)..(712): n is a, c, g, or t
gggggggggggggttcaaaggggggagggggacttatggggggtatcgggngattcttagtnggcacaaatgccctgcctagcccccttaactgcgtcanttcacagatggggggtttggtggggggggtggtgaggnggcnggattgccttacacnggggaggaaagaccagcttgagtgaaagtccgcngngttttngatttngtggggatgggggttttaatgcaacaaccagcccacagtttccaagnggaaaaatattcagtagcatcangtacttgtactatnggtaggngcttaaaangaccatcatcaatcanggcatccacaaataagccacctgacacattaattaattcattccatcaaaagancttaaactagagaattaagcccactttatgaagngcgatttcacggcngcttgaaccattcgaattnggnttngngttcagcactttaaaaggttcaactttttgcttctacccagattggcctcaggcctgtctnctcatccatccctttctaaagccaaagcncattngtngcacataatccaggagaagcagaagtaaatgctatgactggtggtatttcttagcctggttttgtagtttttaggcagtaagtagattatgagcgaacaaatgtgaaggttcatgtggagtcataatacctgtgatctaggtatggtcttagtcaagctcaganacaacaaagccttctaggtcattaggcaatggtgggtttctagcaccatagac

SEQ ID NO: 550906 - DNA, 1212 bp, Homo sapiens
  misc_feature (1029)..(1029): n is a, c, g, or t
  misc_feature (1042)..(1042): n is a, c, g, or t
ttcagcaaaaaattaaacgatttaaggcaaagcagggccagaacaagttcctttcagagattgaggatgagctttttaatccagattatgtggaggttgaccggataatggactttgcacgtagcacagatgaccggggagagcctgtgactcactatctggtgaagtggtgttcacttccttatgaaggcagcacgtgggagcggaggcaggacatagatcaagcaaagatcgaggagtttgagaaactaatgtccagggagccggaaacagagcgtgtggagcgacctcctgctgatgattggaagaaatcggagagttccagggagtataaaaacaataacaaactcagggaataccagttggagggagtaaactggctacttttcaattggtacaacatgcgaaactgcattttagcagatgaaatgggtttgggaaaaactatccagtccattacatttctctatgagatatatttgaaaggaatccatggcccttttttagtaattgccccattgtccacaatccccaactgggaaagggaattccgaacctggacagagttgaacgtggttgtgtatcatgggagtcaagctagtcgtcggaccattcagttgtatgaaatgtacttcaaagatccccagggtcgagtgataaaggggtcctataagtttcatgccatcatcactacatttgagatgattttgactgattgtcctgagctgcggaatattccatggcgctgtgtagtcattgatgaagcccacaggctgaagaacaggaactgcaagctgttggagggactcaagatgatggacttggaacacaaagtgctgctgacgggaaccccactccagaacactgtggaagaactcttcagcttgcttcatttcttggaaccaagtcgcttcccttcagaaaccacatttatgcaagaatttggtgatctaaaaacagaagagcaggtgcaaaaacttcaagctattctaaagccaatgatgttgagacgtctcaaagaggatgtanaaaagaacttggnccccaaagaagaaactattattgaagttgagctaacaaacattcagaagaaatattaccgagccatccttgagaagaatttcacatttctttccaaaggcggtggtcaagctaacgtacctaacctattaaacactatgatggaattgcggaagtgctgcaatcatccgt

SEQ ID NO: 550907 - DNA, 214 bp, Homo sapiens
cctgctgctgcggtgttctacgacggactccccacaacggtgtggtggcacggtgcgtaatcccagctactcaggaggctgaggcaggagaatagcttgaaactgggaggtggacggtgctttttttttttttttttttttttttttttttttttttttttttttttttttttttttttttttttttttttttttttttttttgtattgtttta

SEQ ID NO: 550908 - DNA, 133 bp, Homo sapiens
tgccgcttgtggagggcagctgtggttctaggtgcctgagtagctccttgaccctccccagtgcctctcctggccctgcgggtgccactccatgtgcccaccagccttgttcctaataaaattaatgttgtct

SEQ ID NO: 550909 - DNA, 219 bp, Homo sapiens
  misc_feature (187)..(187): n is a, c, g, or t
cattgaggatcccagctcggtgtcgctggcagcctcgcttcgctgcgcaggtcacccatgtctgctccagccgagaaatctggggaggcaaactgtgagagaccagccaggcagagggcctgcaggggcaccctgctgccctgctgagtggacacccatgatgtgggatcgttattattattatggncatccttcatgtaccagcgacagggaggctgg

SEQ ID NO: 550910 - DNA, 165 bp, Homo sapiens
cggtgcacgctgatgctgcggtcggtctccaggatccccgtggggcagcgcaccgtgtaaaccttgtagaagttgaacaccaggtccagttcacagacacttgtggaaatattcgtttaagacctccacgaattgttgtgaagtggcctccaggctaagacaggt

SEQ ID NO: 550911 - DNA, 1639 bp, Homo sapiens
  misc_feature (829)..(829): n is a, c, g, or t
cggtgacaagtgcctgttcgtactgggtatctcacgagtctccgccagcactgagccggcaccacgacaggctacagagcagcggagctgtgacgcgcacacattacacatcaggcaatgcgggcgttttggccgcgctagctgtgtgcctccagcgtaggccagcttgcagtccagcaagcgtctgaaccgaagtctgcctgtgacaccattggtgcgggcgtcccgggagccgtcatcgcaggctggatcgcggtctcgctctgtgtctcgcagggccactacgactttgagagcttatcgtcttgtggttttgccgcggagctgctcgtgctgcccacgcggaccgactgcgcatgcagggcgtagctaggacacgacgcacctacgatgcacagtacagtccacatgcctctcttactatactagaagcgccctgtactggagctctgcctgtgcgacttcatccgtagacactagatcgcaatggtcccctgatacaccactatgtagcgcctcttctcgcgaggccccaaggggatgccctggacaagaggcccatcgtatatggctccacgtgcaggcgcataggggagctttggcctcatgagcggagattgagcgtcctcgcgccgacagccacacggtgtcccgatcatttgcccgcgcgcgcgaagtgggttcgccggacgagttcgcgcccgttcaagcggaattgcgttgtaggtaccgttcgtatcccgcgcttctagttggcgcatatccaaggagggagtcttccattacgtacctcgggggacccccacgaagaaggaaggcgacctaaggnctatgaaaggccgaggccctcctctacggataacaggcacaagcgctccattcgaagggtacagggtcgtatcgagagaaaacattccaccccctcccagtagagagcaactttatggggggaccaagatgtctgtgccgattatgggagcaccggcacgcgtgaggttcgccaagtgttcacttattaccacacggacatagagaaaaacgcttattgtacgccaacgatatccttgcgcaagcgaaattgagaagcggcttataattggccgcagacaggggcgcacaacagcgcggacacagggggggatatcctataccatattgggcgcacattataaccctgttggttccaaagcaagcgggcccattataccccgctatatgtggaatgagccccaagacgaattgtgttccccgaccatttatgagccccgtggatagtaagcttcttgccccttatatgaggagaaaatttctctcccatccgctttttttcggcgtcaagtagaagggccccccgctgttgagaagcgatctgagtaccacacgtcggttaaagacggcgggccccaaacacaagcgctgctttgttttattaacctcatccagatgaggccgccttcataatgacacgtgagggtggcgagcgcagtcacacatccctgtgtggacgcgcgctgagaatggagcgaccccgacgacactccacgctcaggcgggcagacagacagcggtctgtccacgtcatccgcaggagagaagatcacacagtctcgcagcgattgaagtcacgaccccatcagcg

SEQ ID NO: 550912 - DNA, 340 bp, Homo sapiens
aggaacgtcacttgggtctttcatcagaacatgttccaagatttctgacattcctttttccgaactttcgattttggtgcctttggattttcttggtagtagaaggtctttaacatttccactggttcctcaggccgatattcaaggatacacttaaatggtctccccatgtttggtaagtcagcagaggcaatatttagaacaggaggcacaaccaccaaatcgttcattctgacaggcatatacaacccgggggattttcatcaggcggaagagcagctgcacacataatggcacgggtccccaggtgacgttcctcatcccagtgacgttcctccat

SEQ ID NO: 550913 - DNA, 132 bp, Homo sapiens
caacagagccattaatcttgtatgcgttcatcaacattaactggctttgctttcatgacagctgctgaggaatcttcttaagattactgagtcactggtcttggcttaagtttttagccttaaagttttttt

SEQ ID NO: 550914 - DNA, 338 bp, Homo sapiens
  misc_feature (34)..(34): n is a, c, g, or t
  misc_feature (121)..(121): n is a, c, g, or t
  misc_feature (160)..(160): n is a, c, g, or t
  misc_feature (264)..(264): n is a, c, g, or t
  misc_feature (302)..(302): n is a, c, g, or t
gagatgaagtcgccctatcgcccaggctggagtncagtggcacaatcttggctcactgaaacctacgtctcctgggttcaagtgattcttgtacctcagcctcctgagtagctgggatttnagttttgccccaccacacccaactaatttttgaattttnagtggagacagggtgtcaccatgttgcccagggtggtcttgaactcctgaagtgctgggattacaagcatgagccaacatgcccagcctgtatatatatataanttttttattctgcattcttcgcttgacatttttaaggnagtattttctcgtgtcatttagggattctaggaaaa

SEQ ID NO: 550915 - DNA, 643 bp, Homo sapiens
  misc_feature (627)..(627): n is a, c, g, or t
tcatcttgggcctgtgttatcgagggtgacgatagccggtacggccatgatcccgatggcgccaccaagagctccaccgatgagcttgcgccgggaaagtctggactgctccgcgccgatacgccactgcttggcgagttcctcacgatcagcggcatcagaattgaccggatgccgctcctggatgatctcttcgtcacccataatctgtttggcccagtggatgcacgcgatgccgatgaatagcacagcgagccctgcgcacagccccagtgcgaaggtagcgacgggttcccggtccaggcttgggacctaggtcagcgagggtgacgatagccggtacggccatgatcccgatggcgccaccaagagctccaccgatgagcttgcgccgggaaagtctggactgctccgcgccgatacgccactgcttggcgaattcctcacgatcagcggcatcagaattgaccggatgccgctctggatgatctcttcgtcacccataatctgtttggcccaatggatgcacgcgatgcccgatgaatagcacaagcgagcccttgcgcacaagccccagtgcgaaaggtagataacacaaggcccatcattcttggggcctgtggttantaaatggggtgctttt

SEQ ID NO: 550916 - DNA, 223 bp, Homo sapiens
taagctgtatcccggcacttagggaagctgagtgggtgaatcacctgaggtcaggagatcgagactagcctgaccaacatggagaaaccctgtctctactaaaaatacaaacttagctgggtgtggtggcatatgcccgtaatcccagctactcgggaggctgaggtaggagaactgcttgaacctgggacacagcgaggtgaaatcgcgccatttcactccg

SEQ ID NO: 550917 - DNA, 230 bp, Homo sapiens
cggacggcgagttgtactaggaaggactgatccgtacactgttgtagtgagttgtatgcggtgcgggactggtatgagccacgggtctgtacactcacggccctgtcaacggcggggcttcccaccttgaggccatcaacaatcttctgtgcccgggctgggagtgactgatggcacaacaccacaagtggagccacatcattctacgaagccatgtgtgctgtgactgt

SEQ ID NO: 550918 - DNA, 909 bp, Homo sapiens
tctttccttaatgacgataatgatcatagttctctcgattcacttgatttctaagtatatctttcatgcatggacagctattttcaacctatgatgtacagtgactgtgtaaaattatgtctttcagtggctacctctatagtctttaaaatatgttgagcatctgtggtctgttgcgaaggggatatgacaggggttaaatctatcgagatggaagatcctgttacagaagttgaaaagcttgtggtaattactcagtgtgtgtggtgtatccttttttgcttttctcccttggtctatagtgaaattgttacagcagtgcaaagtaagatcgtatgtataaaagtgtctgtagtgtattatgaccacctgttattccaatgtacttttcagtccactaacagctgatgcatgggtttcagcatgttttggaagaagggtcagaatggttggcattcaaccctgttttaaaaagttgggtaaagatgcgagaagtctcagcatactgaaatattttgttgatggtgtagcagtgtagcatgtgttttctcctgaattagacagcaaaagcagtatatgcctgaagacgggcatatggagttcctagtctgactctaagtactttcattgcgtccatgggcttcaagtttctacaggtctcccggagattcagcaggactctcctgaaggttgaccgtaccttgtgggaagacccaagcggcataggggcaacggtccttagggcaagggcaggggagacgcaacactggtcaagagatgggcgcacccaaggtaacggggtaaaaacgggcgcacacgcgttacacggaacacagacagagatgccacaaagagaatgaagagcaccgaacaaaagaccacaacatatagaggccaacagattcacaa

SEQ ID NO: 550919 - DNA, 128 bp, Homo sapiens
aaacctgtctttgttccggatctgctcctctgacagctgtacttcgatgaaggactggccctggtggaagctttttaccacagagaggctcctcatcgaagtacagctgtcagaggagcagatccgga

SEQ ID NO: 550920 - DNA, 309 bp, Homo sapiens
acacggtcgctctacacggatccctgtcggacttcaccggcttgtaactactgttcttactgctcataaaacagctaaatactgtggtgtaacaactaaactgtgtgcccagagaaaagcctcagcatgttatcctacggtgaaactctgttcacgtgaacagaccagatcacacgctaccagtgaccatttctgccactgttaccacgtttcttaccaaagtgacgacacagtggctgtctaaaactcacgaccaacacggcctggctgtgtgtggctccaccgtgtataactcactgagcacctttg

SEQ ID NO: 550921 - DNA, 821 bp, Homo sapiens
ctccccgctgccaaaaaaaaaaaaggaaacgtttatcatgaactcaacagggtttcagtcctttatcaaagagagatgtggaaagagctaaagaaaccacccttttgttcccaactccacttttacccatattttatgcaacacaaacactgtcctttggggtccctttcttacaggtggacctcttgagaaagaattatcgtatttccacgtttttagcccttcaggtttcccaagataacttattttgtattttattaacctttattatggctatatcttgggtggataatacatttcaggtggtgctgggtgaatttattatacatctgaacctaggtatttccttgggtcttccacagtcattgttgaggtgggctccctggtatggtaaaaagccaggtattaatgtaactttcaccccagcctttgtactaagctcttgatagtggatatactcttttaagttttagccccaatatagggtactggaaattttcctgccctctgggtttccccattttacctatttaagaagaccagtgatacctttaataattgccaccaattctggcttagttaagtgagagttgtgacctggtgtggcaagagagccttcaacctcactaggttgcagagagccccaggccttattgttaaaatcatgcccttgaaaagcaaacctttagtcttgcaagaccagcagcaagcatttataccgtcatcttggattgatcccctttgaaaatctttatagggtcgctgggtttacaactcaaagcctgaggctggtgcaaccgttagctataaccaatattggg

SEQ ID NO: 550922 - DNA, 384 bp, Homo sapiens
tcctactgtgttcatcaatgaataatggataataaaatatgctatatacatcaactgaatattactcagcctcaaacaggagaaaaattctgaatatgggtgaaccttcaagacatcatgccaggtgaaatatgccagtcacaaaagcacacatactgcatagttccacttacatgaggaacctaaggtgtagtcaaactcacagagaccgaaaatagactggtgattactgggggctaggagagtagatgaataaagagttccgtttaatgggtaaagggagtttcagtttgggaagatgaaaaaaattctggaaacatggtatttggtgatggttgaaaaacaatgtgaatatacttaatgtcactgaactatacaattaaa

SEQ ID NO: 550923 - DNA, 822 bp, Homo sapiens
  misc_feature (226)..(226): n is a, c, g, or t
  misc_feature (228)..(228): n is a, c, g, or t
  misc_feature (327)..(327): n is a, c, g, or t
  misc_feature (396)..(396): n is a, c, g, or t
  misc_feature (421)..(421): n is a, c, g, or t
  misc_feature (593)..(593): n is a, c, g, or t
  misc_feature (665)..(665): n is a, c, g, or t
  misc_feature (752)..(752): n is a, c, g, or t
  misc_feature (809)..(809): n is a, c, g, or t
gaggcgccttgggaccgcgtgggagccgcagccgaaccgagtagggaccgggaccgcgcggcgccgccgtccccggccgggcccggcccccgcgagccgagcgcgcgcccccgtcgcccacccgggcgcggctggatgcggcggggtccccgcggcggcgacccccggccccgagcgcccggagcgcccagaggcggcgtgcggggcccggggacgccgcgccctntngtgcgccgaggcgcgccccgagacagccgggggcccgcgccgcagccgccgcccgcgctgagccccggcccggcccgcggcccgcgcccggcggcagcntgagccaggccgagctgtccacctgctccgcgccgcagacgcagcgcatcttccaggaggctgtgcgcnagggcaacacgcaggagctgcagtngctgctgcagaacatgaccaactgcgagttcaacgtgaactcgttcgggcccgagggccagacggcgctgcaccagtcggtcatcgtcggcaacctggtgctcgtgaagctgctggtcaagttcggcgccgacatccgcctggccaaccgcgacggctggagcgcgctgcanatcgccgcgttcggtggccaccaggacatcgtgctctatctcatcaccaaggcgaagtacgcggccagcgcnggtgtatgcccgccgggaccccggaccccggccctgcgcccgcgtcgtctctgctgtaccttcccgccaactacctcggtgcgcgcncggctcgcaggccccgccagaaggcccgtggcaacggcgaatacggcgcgtgcgtcncggccccagggtc

SEQ ID NO: 550924 - DNA, 280 bp, Homo sapiens
tctatcatcttaggaggtgggaaaacgatagagcccaggagctcctaggctcaagcaatcctcacacctcagcctcccaagtagctgggactataggtgtgtaccactaaacacagccaactttttgcaggggcaggggcagagacagagtctcaccatgttgtccaggctggtcttgaactgctgggctcacgcagtcctcctgcttcggcctcccaaagtgttggaattacaggcctgagccaccaggcccagcccagatttttatctttttctgtta

SEQ ID NO: 550925 - DNA, 484 bp, Homo sapiens
  misc_feature (358)..(358): n is a, c, g, or t
atgatgctcatgcctgtaatcccagcactttgagaggcccaagcgggtggatcactagagctctggagtttgagaccggcctgggtaacatgcaagactccatctctatttttttatttaaaaaataaataagtaaataaaattgagcctcattttttaacctaattgaaaatgggtgataaaaatgtatacattgcgaccaggtgcggtgctcacgcttgtaatcccggcactttgggaggccgaggcaggtggatcgcctgaggtcaggagttcgggaccagcctggccaacatggtggattcgtctctgttaagaatacaggaatcagccaggtgtggtggcacatgcctgtggntccggctgcccgggaggctgaggcgggagaatcgcttgaacttgggaggctgcggttgcagtgggctgagatcgcgccattgcactcctgcctgggtgacagagcaagactctgtctcaaaaaaga

SEQ ID NO: 550926 - DNA, 148 bp, Homo sapiens
ttaagttgggtgactggtctaggatcttggatattggaagtcattcctatgtggttgctggcgataggtccatgtgtcctacgtgtgtatactcgttgtgtgtctatcaccaggtgcatgaatgaccaggttgtgttcctatggtatg

SEQ ID NO: 550927 - DNA, 432 bp, Homo sapiens
ttatgggaatgtaaaacaaagtttaaccttccataattatgatttactttccaaggaataatcatacctaccgacttacttgcttatcctcccaacctgcaaggtaggcatcaattacccgaatccttacccaaagtcacatgtctagccaatggtggtgtcgaatattctgatgaaagagttctattggccccgctaaagagttgtggggttttttaaatctttaactcaagttgtttcagtgaacctagaactaagactttttcaaccactcccaaattattgatgcttgggttttgcaacaaatgccctctaagctctcaggataagttgggggaggaaaatgaaaacataatagggtaagggttgttctctaactattcccagaccagttctcaccttcaaactgctctctctctctgaaagatgagc

SEQ ID NO: 550928 - DNA, 829 bp, Homo sapiens
cctagcaccacagacttatccttcgcctgcactttccgtctttcttctctgggcgcccaccaacaatggatggcaactccctgctctcggtaccaaggtaagacccgcttctttctatgcccaataccatgtcgatcaaactccgttccgcgttgtgagtcgctcacctaacttgccccagagcgcttcggtttgcacggggctcccagcgaggagacaggggtcactgcacttgtaaataagtccggcccagcctcgctggagctacaggggaccctgtcaactgccccacaggtcgcgatgctgagtggggcctgtgcgctggagtggcacgggttgggggtcagccccgtgcccgcctctaaggcccaggacggaggtctgctctgccctaggtggagccaggagccggactttccgcggacacagcttggagaggtttcacaccttgtggagagacagattccaaggtctaaaacaggagggaaccgggctagggcaaagtacccccgctttccttccaccttgacctgggcgggtgtctggggctgctggggtggggaagattgtccctcacaccccgaccgacacctagactgcccccaaagcgagatcttaagacagggcagaaaacacctaggtcccctgcagttcccacagtcctccagcgtccccaaacccctgccagtctgcgagttccttctttaacaccctttggctttgctcgtcccccacaccggggtaggtcacggacgccacccaggcgctgccggggtgcgagtaaccgtgtctctcagggtgtgttcttcctcctgtctctttttggccc

SEQ ID NO: 550929 - DNA, 511 bp, Homo sapiens
acccaggccactttacaggtagctcatcgtagacaccgcattcccacttcccctcgaagccctcatgctaaaacaacgtttccatgaagcacaccctgtgacagcacgtgcgatacaagaacactacatccagaactgagaacagagccccctgctctctgtacgactgtgcgcggcatacgtgtagttgcgcgcaattagctaggccgtttcctacattttcaccggaagtggctggctatctcacccagtgagtttggatcgatgatttgacctggttagctgtcgttggcagcaccttcccaagtggtcgtgatcttcgaggccacggtgtgcagatagcacattgttaggtctacctggccaggtagacctaacataaaaaaaaaaaaaagaaagaaatccgttgtgagtctgatgggatcccctttaaaagaggcaattgggttcttttctctagctgcctttaagatggtttctttcacattgaccctgggttaggtctaccggg

SEQ ID NO: 550930 - DNA, 197 bp, Homo sapiens
  misc_feature (40)..(40): n is a, c, g, or t
  misc_feature (93)..(93): n is a, c, g, or t
  misc_feature (101)..(101): n is a, c, g, or t
  misc_feature (132)..(132): n is a, c, g, or t
  misc_feature (162)..(162): n is a, c, g, or t
  misc_feature (164)..(164): n is a, c, g, or t
  misc_feature (172)..(173): n is a, c, g, or t
  misc_feature (191)..(191): n is a, c, g, or t
gatcctgaaagaggacaaactacattgccttttagacctntgactcaagaagaagatgatgaccaaaggtgatttgtaacttaacatgccttntcctgatnttgaaggatttgtgaagggaaaaaaattctnggctctttgtatataataaaatgagactanangcattctnnaaaaaaaaaaagattaantttaga

SEQ ID NO: 550931 - DNA, 155 bp, Homo sapiens
ttcataacactgggaaagaagtaacagttgagtgcacgaattgatggctcagccaacctacaaagtcaggatagttcgtgacaagtttttgggacgatgttatcgttcacaaatcacatgctcgtgccatagctatgacgtagtgatagtctcca

SEQ ID NO: 550932 - DNA, 688 bp, Homo sapiens
atccactgaggggtgccggccgtcagtgtctgtctgcactcacgtccagaacctctagagcttgccccccagggcgggcactgctgggagggtgcgagcaccgctgcggcacagaggcccggttcttggctgatcttctggggcctggggcctgccctgaggtggtggggacaggctgtggcctggccctgctgggggctgctaggccaacgggaccctccccaagcgcgccgcacactgcagggtctccaggcacctgggctcagctagtgactgacccatttgtgtgctaaatacgcagttttgtttttaatacatactcgtgaaattttccagaactggccttggaccagagaaaaatactttgggaatttttcaaaaaaatcccttcagttccacttggaattaggaaaacgtggcagatgcacttgaatcattttagaaaccaaattcacccccggccacacagccgacccagaagacccagagacagatcaaaccatgctgttgcagggtgcacctcccccaggaggggctcacgcctgtgttgcccatgctctctggctctcctgagttctgggtggccatggaggctgtttccctggaattccccaggccccggaggaacgtagggcaaggagctgctctggtcccagcatccctccaggcacctgtgggcggtgggctc

SEQ ID NO: 550933 - DNA, 335 bp, Homo sapiens
aaaacttttgttgctgaatgacacttccatgggttggagtattctgactgcggttgctataatttggctgctcatcagttttggtctggctcagccgcgctatctttcgtccctagttttaagcctgcctgaaaatcgacaaacagatgaatggacttcacagcttttatctattcatggtattgaagaagtcgtggtgatgcctgaacagcaagtggcctacgttaaagttgataaacagcagattaatgatactgcgcgacaacaattaacgcacttgttgggtaaagaggtagccatttaagcataactcttataaagtaaaatgtcgacgc

SEQ ID NO: 550934 - DNA, 114 bp, Homo sapiens
  misc_feature (114)..(114): n is a, c, g, or t
gccaccagcagcttctgccatctctctcctcctttttcttcagccacaggtcccagacatgacagccatcatcaaagagatcgttagcaggaccacaagtgtgtatcaaggggn

SEQ ID NO: 550935 - DNA, 1290 bp, Homo sapiens
ttcgcaccatagaaccgtgaagaaggcgggccggcctcatcatagaaaagtactacacagcgcctgggcgaacgagttccacacgaacaatgcgcgtgtgcgaggagatcgccattatccgccagcaaaaagctccgcaagaagcatagcaggttatgtcacgcatctgatgaacgcgaattcagaagaggccctagctcaaggaaggtaatctccgatcaaggctgcacggaggacggagacgagacaaggagcagacgaattactgttccatgacggtctcacgctcttggaatcaaggcaaacttcattgaacagtagaatccctgtaccacttaaggcacaactgcctgaacagccttgtcagggaccttcgggaccagctcatgctccaacacgccttcaagggctcaacactcagcccctacgagcagtggggcaatgccaacgtttccaacaaaccgcctcctcgcgcgcgcaacccttgccttgtggcacattcccactgtcctgcctagcttgccctgaccaatgtcacctgctcccaacttacaaactcatgggcgcaaccaaacgcacaccaacccagaacaaaaccccagaagacaaagcccccagcgcgagctccccctcgacacccacacagggcgcgcctccccgacacccagaacaccaccccgcgctcacccgccacacacacgggcgtcaacccatcaggagggccccccacacaccccggagactcacaccccgaagaagacccccccaaaaacacaaatctcgaactccgcacacctgcacccaccagcctccctcaacaccacacctcccaccacaccctaaactcctccgccccccatatattcccacactgacaccacaccgcgccccatttcaaataccccccctacaaaacacaccacaccgagaccattaacaccgcccccacccccactccatcaccaccccaccccccacccaaaatcaccccctcaccaacaacccacccatcctctcccaatcaccactccccccactagccccacctcccccactcacacctgagctcaacaaccccttcccaccaccccactcagccctacacccccacacgcccccaccccctacggcaccacaaaaacctcccgcccccacacgcacacccccccctccctccgcacccccccccaccactccctaaccacaccttccaacccccctttcacccccatcaacccccccccgcaacccccctcacaaccggcccaccaccccccatccccccccaac

SEQ ID NO: 550936 - DNA, 1483 bp, Homo sapiens
ggcgaagcctgagtcctgtccgtttctctctccccggacagcatgagcttcaccagtcgctccaccttctccaccatgctaccggtccctgggctctgtgcaggcgcccagctagggcgtcccggtcggtcagctagcggcgggcagcgtctatggcagtgctgctgggggctctggttcccggatctccgtgtcccgctcactacgcagcgttctagggtgctggactatggtggttccgtgtgggcctagggcctagccggggtagtagcgcgcggtggatctagtggcagcgcaactggcgtatggctatcccacggaaacgcatgtaagggcaggagccaatgtcgataaggcacgtgaagcccgaacaccgcgctagaggccctccttaacacgtgggacacacgaagggttgacgcgaggcccttaggaagaaacccggaggaaagcccgggacgcggcttggagagaacggcacagaagtgcacgggcgaaggccagcctttcgtgaggaacaagacagggggaagcgcgccgaggggtgcaccgaaggaccgtgggaagcaccgagttttaacttttccgaaagggaattctatggcggcagagggaacctgtggaagcggggtcccttccagggagtacttgtcgggccaaaacacttaagcgtgactggagaaaccacacttgtcccacgggacacattctggctatcccctgagccgaaggacctgttgaaccaaccagatgggccgccccgactctgtttgtgcctaggcctttggattatggaccctttgtaacggcaggggcgtccaaaaggactcacctgcaccgcaaccacggcaggcccgtggtgccacaatttggccgttcccaaggcctccctgtggtggcgcaaggaagaacggatataacgttgcccaactgggggtccgttccccggcgaaacgggggctaccacttctgggcaattcgaaatcggatcccacacttctatttccatgcgaccgatacctgtggccgagtccttgcgaatccaacccggcacggcactccggaagggggttcttccaacgtgtgagtggcagccttggtctcctttccattgcacaggagaagtcaaacgcctacgggaaaacccacggggcacagttacgagacgggcctttacgaaaggccccaagaactgggccaggcgtccgcgcgctttggacccgctgtgcagggatacgaatggcccccacaagagtctctaagagaacctcgggccaagcgaacgctggcagaaccacaccggggccccacataggcccaaagcgggcgtccggcaagggacccggcgaaggaagctagaacgaagataacgggccccagccccaccggacgggcgaaggccagcacggtgacaccagaacagatcggcacaagcatggacactgtacggaaaacgccccaccacccgaacgtccagacagct

SEQ ID NO: 550937 - DNA, 571 bp, Homo sapiens
ggcatgggcggaatgggcattggtggtcacggctggacgcgagtccgcacccggttacggagtgccagccatacccaaggatcccaatctgcgatgcgaggagatcaccataccaatgtgtcggggcattggctacaacatgacatccttccccaacgagatgaaccatgagacccaggacgaagcgggcctggaggtgcaccagttctggcccctggtggagatcaaatgctcgccggacctcaagttcttcctgtgcagcatgtacacgcccatctgcctggaggattaccacaagccgctgcccgtttgccggagtgtctgagagagagcccgctcgggatgcgcacccatcatgcagcagtacagcttcgaatggccggagagaatggcgtgcgagcacttgcccccttcatggtgaccccgacaatctgtgcatggaacagccctcgtacacggaggctggcagcggtggcagatcgggcggatcgggtggctctggcagcggttccggctccggcggcaaacggaagcaaggaggcagtggctcgggcggcagtggggccgggag

SEQ ID NO: 550938 - DNA, 321 bp, Homo sapiens
ccccccggggccccccccggggcccccaaaaaaaaaaaaaaaattgtcccccccccccgggggttgggggggaaacggggaaataaatcggggccccccccccaaggggcccttggggaaaacccccccgggggttttaagggattgccccctaggggggcccccattttttggggtttgggggggccggtctgggtcccccccccccgtggaaagggcccccccctttgggggttttggggggttttcccctttttttttttttttgccccggggggggggggggttccggaaaaaaaatggggggccctttttttttta

SEQ ID NO: 550939 - DNA, 357 bp, Homo sapiens
  misc_feature (13)..(13): n is a, c, g, or t
  misc_feature (355)..(355): n is a, c, g, or t
tgaaatagtgccngcctatgaaaagccccccaataccttaatttttaaaaaattaaccatgtaaacatggatacccagctgtggatagacagattgtaaagaaccgtaagacataaaagtgagataaaaattcacttcttgaaagatatatatggacattttagcttagcagagagtcagctcaatgtctaatagggctttatttgtaaacactgtggcgttctttccatgtttggaaagcggagccatttatctttttatagggcttaaatgcagtatgatcaagtttataatgtcagtctaaccccttccatatgtgacagcaagccaaaatatcatcaactaagaatatggngg

SEQ ID NO: 550940 - DNA, 132 bp, Homo sapiens
agttacatccatatgggagaatagtctccagatcactacaatggggagctgggtaggagcatggcttggagcacttcctattccactggattgggaaagaccatggcaggtatggcccatctcctgtacgct

SEQ ID NO: 550941 - DNA, 288 bp, Homo sapiens
  misc_feature (41)..(41): n is a, c, g, or t
  misc_feature (92)..(92): n is a, c, g, or t
  misc_feature (94)..(94): n is a, c, g, or t
  misc_feature (98)..(98): n is a, c, g, or t
  misc_feature (101)..(101): n is a, c, g, or t
  misc_feature (160)..(160): n is a, c, g, or t
  misc_feature (165)..(165): n is a, c, g, or t
  misc_feature (169)..(169): n is a, c, g, or t
  misc_feature (176)..(176): n is a, c, g, or t
  misc_feature (179)..(179): n is a, c, g, or t
  misc_feature (189)..(189): n is a, c, g, or t
  misc_feature (233)..(233): n is a, c, g, or t
  misc_feature (237)..(237): n is a, c, g, or t
  misc_feature (240)..(241): n is a, c, g, or t
  misc_feature (243)..(243): n is a, c, g, or t
  misc_feature (246)..(246): n is a, c, g, or t
  misc_feature (248)..(248): n is a, c, g, or t
  misc_feature (250)..(250): n is a, c, g, or t
  misc_feature (258)..(258): n is a, c, g, or t
  misc_feature (262)..(262): n is a, c, g, or t
  misc_feature (281)..(282): n is a, c, g, or t
tcacttgaggtcaggggttctaccaccctggccaacatggnggaaccccatctctactagaaatacaaaagatgagccaggggggggggcanangccngtngtcccagcttcctaggaggctaaggtggcgcgcctcccttgccccccgccggccgcggntgcgnatgngccgggntcncgccgactgnactcccgcttgcgcgcccccgcagccccgccgcgcgcccctgcnctcnccnncngcncncngcacgcangccncccgcccccccggcccccnncgcgcc

SEQ ID NO: 550942 - DNA, 1663 bp, Homo sapiens
  misc_feature (138)..(138): n is a, c, g, or t
  misc_feature (527)..(527): n is a, c, g, or t
  misc_feature (545)..(545): n is a, c, g, or t
  misc_feature (668)..(668): n is a, c, g, or t
tttgggagtcagagtctgcgctctcttgtccaggctggatgtggcaatacgcggcagatctggggctcactggcgaacctccggcactccctggtgttcaagcgcaatttctcctggctcttgcctacctggatgtangctgaggagattacaggcgcggtgtgtgtgtcaccaacgctcgggctaaacttgtgtgtggtctttatatatagttagaaggcccgagggggttctccacccagtgtctcagagacgtggtctcgtgtgggacttcctgtgagacgtctcgtgtgaactccaaccgcgcactgtgtggaccctccccaaagagttcacgtggggaaatatcacgagccggcgtgtggaggcccaactgtgtgtggccccgggaccggggtattctcttatacaacgtgtggaaggcttatacattgtctctgtgagacctctcttaatagtgtgattctcatatattatgtgttaccatttaacatctctgtgtgtggatctccccccaagtgtctctntatatgtgtggcgcaccnatatctcgagggaaaacgacctttttatctatctagaatgtggagtgtgggcctctattgtataatgtctccatatatatatactgatgaggggtagggatatctcgagtgggggttctcccnatatatcacggggggcgctataattataacccgtattccaatcaccacagtgtgggtcccatgtataaaggctctgctgtgtgcgacacgacaaacaccacactcttctgttgtctcacacctctctcttcatctctctgtcgtggtgtcacacaccgcagtggggaggaaaaatatttgtctctcccttcctttaaaagaggccgaggggggcgctctttacaaacacaattctcttctctgggcgccaacaaccctgtttttgtggaccccagataagcggctaattatacacgaacttatttaggaactactttcccagagggatatttttataaacctcctaaccaaaaattgggggccttcaaaggcagcaaaacttatccactgctgtgctcaccagcgtctgtccagctgcggcagcacaacaccgctggggcgcaacacacgctccccactttttttggaggagcccgcctccacgcagggcggtgtacggcaccacccaccactttccggcagtttgggggcgcatttgtggagaagcgagcttcagccacaaagcttatgtttagacggccgctgtagtagaggagcaacctcttttctaaaacacagaacgtgtttgtctctagcgaacacacctttagtcagtctgcctcggtggcgtagaaccacctttacaaacaagtacgttttctcttttttggtgccaccagccaacagacagcctacacaacaaaacaaacaggggcggcgcgcggcggagcagaaaagaaaaagatgatatcaccctcaaggggggggggccgccacacagtagttattacccgcgtataacacacggcaggtctcttttggtttcgaaacgcagtcggggtcgccccacaatatggaaggacggcggcagcagtatcaataatacagacaccagcgagcagcaggagcgaggcgaggatgaatacacaacagcgcctggtgctggcgggacaacg

SEQ ID NO: 550943 - DNA, 113 bp, Homo sapiens
ttatgttctcatttcaggacgtatctgagtaattgcatccattgtgatgtgccaccaaagagaaaaatacttagtttacatagtcgagtataaccaaagtacttttctctttg

SEQ ID NO: 550944 - DNA, 354 bp, Homo sapiens
  misc_feature (1)..(1): n is a, c, g, or t
  misc_feature (310)..(310): n is a, c, g, or t
  misc_feature (318)..(318): n is a, c, g, or t
  misc_feature (338)..(338): n is a, c, g, or t
nattgatttcattgaaataattgacaatattgaggataatatttttatgatttttatttgaaaatttgctgattctttaaatggtttgtattctagatttatggaatttttttcttttaatctatctatagcttgtagcagttcaataaactatacttctgggaaccgtaattgaaacatttacttttgctctctacctgactgccccaggaattggggcaactattcatgaggtattgatatgtttatgggtaatacacatatttggcacaagtacaggtaaccaatctggctctctttgttacagggncacatttncaaatcattggggtatattnccccaggctttgccgg

SEQ ID NO: 550945 - DNA, 1289 bp, Homo sapiens
ttcctctggcctcttgttgggagccagagctgcctctgtagacctcttttggtgttcttatgccaatagggcgcgtgtctctcctgaaccaacagggggaggctccccccttgttagtagctcctttacaccggcttcttatgctccatgaatgctcccatagtcctttaatctcgagggctttttgcccctctctatacggccctcagatccgaccttgctttggatctcatcggactggaccggttatttggagcggggccaattccttgtggggtatttcacgcacttccctttagtccacccaattgttcagggtccctctacaaggccctttcagcgcattcaggacagttctgcggtcccatagagaatcctaggcaagcgaacgtgatgactcaatcggctaggagcacgtatgctcctcgtaattcctgggctagacatgttggttcccagtgcctggtctaggattgccgtggtggaagtcagggggagtctgttctagatcttcgaactgaatcagcgaacgtatagcaccaggacaaccccacttgacagcgtcttgtgccacgcgccaagtgccccacgtgatgtggttcgatctggcacctttaggtggctcctagcccacagccagccactttcggtgacaactgacgcctttcgcaagaatcatttagggttcaaaggagcaccacgttccctcttcattctctgaagcaggggagatacattcgacacgttggccttgtcgcccaggaagtgaggctcggcacccataactgaacacctcgccacccttgggaaaaccatgatccttactgaggaggtgaagatgaccaattgctgggtcctcaagactgttctcaaagaagagctccattagagctagactggtaccagaacgacgagtagggtacaacaggtggcagttacacacgtgacagatgtcatggcggagctggggcgggcccagcacaaacccgtccatcggtctccagagcccagccagcaggcaagaggtccatggacctatgaggacacgagaagttccagaccgtcacgggcacggtctagtgggccctagtgcaggaagtatgaggccagccttgtgtgttcacatcactgatttatagctgctgtatctgtcgtttgagggtattttgtaactggcctatatgtttattaggcaaaagcagcttcttaacagatggcatatttctgtgacatctaggcatcacaaaagagccagagttctggaccaatactcggaggtctgtagccta

SEQ ID NO: 550946 - DNA, 573 bp, Homo sapiens
gaaccatggggactgtgcacgcccggagttgggagcctcttccatcgaagtgtgacctgatttgtggaggattagagatgaagaagctgacatttgttgaacgttgaggccgtgaagcgtaacagcaggaacatttctgtgatatacaagcgagtgctggtgtgttcaagcagtgtccagttatcgagtggtcctctggtagaggacctaaacgactgtatatcattctattcgctgagagtcggacgactgtttgcagatggcgcaagataacctaaccttagacggtaatgccgtgaaatctcatgatagcccgctgcaagaaattgctcgcgtcttgcgaaagttctttatgcacacaagtaggcagtgctctctctgagtcttgaactacaactgttcgacaatgggctcgaagttggagcccggctactctttgcgcaacacattggggtgcttgtaggaacggtatcaccccgtgttgggagacgttaacctgaatatctgccgtgaaggacttaactggcggcagctttatagcaacacatggctgggtggaaccaatgcaatggc

SEQ ID NO: 550947 - DNA, 345 bp, Homo sapiens
ggctgaccatagaggatccccaaacaccgcaatcttaaaaagaaatgctagaatcagaaaaccatcattttacgctgggtgcagtggctcacacctgtaaccccagcactttgggaggacgaggcaggtggatcacctgaggtcaggagttcaagaccagcttggccagcatgatgaactccgtctctactaaaaatataaaaattaacagagcacagtggcacatgcctgtaatcccagctactcaggaggctgaagcaagagaactgcttgaacctgggaggccgaggttgcagtgagccgagatcacaccattgcctgggcaacagagccagactctgtctc

SEQ ID NO: 550948 - DNA, 232 bp, Homo sapiens
tagggcataaccctatttcattcacctccagaagtgaaattcttcgcaggatttttctgagccttttagcactcccagctagcccgtacccccaattaggagggcactggccccaaacaggcatcaccccgcataaatccccatagaagtcccactccataaacaccatccgtattcactcgcatccaggagtatcaatccacctgcagctcacccatagcaaaatcatctg

SEQ ID NO: 550949 - DNA, 646 bp, Homo sapiens
  misc_feature (608)..(608): n is a, c, g, or t
  misc_feature (646)..(646): n is a, c, g, or t
agcatcttatgacccaacttcaaactatactttaaggctatagccaccaaaacagtgcagtactggtataaaaataaacacatagaccagtggaatgaaatggagaacccagaaataaagccaaatacttacagtccattgatcttcaacaaagcaaggaaaacataaagtggggaaaggacaccctattcaacaaatggtgctgggataattggctagccacatgtagaagattaaaactggatcctcacctcttgccttatacaaaaatcaagtcaagatagatcaaagacttaaatctaagacctgaaactataaacattctagaagacaacatcagaaaaatccttctagacgttggcataggcaaagacttcatgtccaatcacccaaaagcaaatgcaacaaaaacaaagataaacagatgggacataattaaactaaaaagcttctgcacagcaaaagaaaaaatcagcagcctaaacagacaacccacagagtgggaaaaatttttcacaaatttgcatccaacaaaagactaataccccatatctacaaagtacccccaaacaaataagtaagagaaaagacattcaaatgactaacanacttaggaatggtcaacatcactaattatcagggtgcn

SEQ ID NO: 550950 - DNA, 301 bp, Homo sapiens
actctgaggatcccccagagtccaacagtgccgattagagggaggctcgccgagcatgggacggggagggcactgcccggctgtcagagcctgtgcacctatgcccactgggcacgcagaaaccccgagacgcccccatgtggacttcctggctgagaagggtcctgggctggttcaggggaaaccacaggctgggctgtatcctgttagcaagtgcaaaccttcacagtgctattcacagcctctgagaactagtggccccgggacacagccggcgcggtgacactggcctggtgacgca

SEQ ID NO: 550951 - DNA, 964 bp, Homo sapiens
cgttcctgggcctggagggctgctttggggcaggaaactttggccaccaggcctctgacctgcaccaggagacactgggaggtttagtccccaaacccgcacagagcaggactgcagcctgaggaaagagcaaggatttcaggagagaggcctgcgacaagtgagcaggaaatagaaacttaagagaaatacacacttctgagaaactgaaacgacaggggaaaggaggtctcactgagcaccgtcccagcatccggacaccacagcggcccttcgctccacgcagaaaaccacacttctcaaaccttcactcaacacttccttccccaaagccagaagatgcacaaggaggaacatgaggtggctgtgctgggggcaccccccagcaccatccttccaaggtccaccgtgatcaacatccacagcgagacctccgtgcccgaccatgtcgtctggtccctgttcaacaccctcttcttgaactggtgctgtatgaacccctgctgcctgggcttcatagcattcgcctactccgtgaagtctagggacaggaagatggttggcgacgtgaccggggcccaggcctatgcctccaccgccaagtgcctgaacatctgggccctgattctgggcatcctcatgaccattggattcatcctgttactggtattcggctctgtgacagtctaccatattatgttacagataatacaggaaaaacggggttactagtagccgcccatagcctgcaacctttgcactccactgtgcaatgctggccctgcacgctggggctgttgcccctgcccccttggtcctgcccctagatacagcagtttatacccacacacctgtctacagtgtcattcaataaagtgcacgtgcttgtgactcgagcaaacttatgcatgcgggccgaattcaagcttacttgggccaatcgccctggggggcgttacttcac

SEQ ID NO: 550952 - DNA, 179 bp, Homo sapiens
aactctagataatacagtaaaatgctatataataacacattaagtcttctgtagttaaatactagatattcttagctatctataataaagcctaagttatactatcataataaagtagtatagggccacagatcttgtacaaaatatgtccagtaatttatactagtggcatcataaaa

SEQ ID NO: 550953 - DNA, 1001 bp, Homo sapiens
cgttcctgggcctggagggctgctttggggcaggaaactttggccaccaggcctctgacctgcaccaggagacactgggaggtttagtccccaaacccgcacagagcaggactgcagcctgaggaaagagcaaggatttcaggagagaggcctgcgacaagtgagcaggaaatagaaacttaagagaaatacacacttctgagaaactgaaacgacaggggaaaggaggtctcactgagcaccgtcccagcatccggacaccacagcggcccttcgctccacgcagaaaaccacacttctcaaaccttcactcaacacttccttccccaaagccagaagatgcacaaggaggaacatgaggtggctgtgctgggggcaccccccagcaccatccttccaaggtccaccgtgatcaacatccacagcgagacctccgtgcccgaccatgtcgtctggtccctgttcaacaccctcttcttgaactggtgctgtatgaacccctgctgcctgggcttcatagcattcgcctactccgtgaagtctagggacaggaagatggttggcgacgtgaccggggcccaggcctatgcctccaccgccaagtgcctgaacatctgggccctgattctgggcatcctcatgaccattggattcatcctgttactggtattcggctctgtgacagtctaccatattatgttacagataatacaggaaaaacggggttactagtagccgcccatagcctgcaacctttgcactccactgtgcaatgctggccctgcacgctggggctgttgcccctgcccccttggtcctgcccctagatacagcagtttatacccacacacctgtctacagtgtcattcaataaagtgcacgtgcttgtgagtacaacctgccggtggagtacaacctgccggtggagtacaacctgccggtggagtacccgctgccggtggcgtactcgtggtcgtagctgtaccctgtgccggtggggg

SEQ ID NO: 550954 - DNA, 925 bp, Homo sapiens
cgttcctgggcctggagggctgctttggggcaggaaactttggccaccaggcctctgacctgcaccaggagacactgggaggtttagtccccaaacccgcacagagcaggactgcagcctgaggaaagagcaaggatttcaggagagaggcctgcgacaagtgagcaggaaatagaaacttaagagaaatacacacttctgagaaactgaaacgacaggggaaaggaggtctcactgagcaccgtcccagcatccggacaccacagcggcccttcgctccacgcagaaaaccacacttctcaaaccttcactcaacacttccttccccaaagccagaagatgcacaaggaggaacatgaggtggctgtgctgggggcaccccccagcaccatccttccaaggtccaccgtgatcaacatccacagcgagacctccgtgcccgaccatgtcgtctggtccctgttcaacaccctcttcttgaactggtgctgtatgaacccctgctgcctgggcttcatagcattcgcctactccgtgaagtctagggacaggaagatggttggcgacgtgaccggggcccaggcctatgcctccaccgccaagtgcctgaacatctgggccctgattctgggcatcctcatgaccattggattcatcctgttactggtattcggctctgtgacagtctaccatattatgttacagataatacaggaaaaacggggttactagtagccgcccatagcctgcaacctttgcactccactgtgcaatgctggccctgcacgctggggctgttgcccctgcccccttggtcctgcccctagatacagcagtttatacccatagcaccagcacgaattcccttagcaccagcacgaattcccttagcacgaattcccttagcaccagcacgaattccctt

SEQ ID NO: 550955 - DNA, 353 bp, Homo sapiens
tcaggtgtaccggtgggagtaggaatgggtagggtgacggataaagagaggtggttaattgttacagagttagacagaaggaataagatctagtgttctaacgtacagtaggctgactatatagttaacaataatgtattgtatagttcaaagtagctagaagaactggaatgctcctaatataaagaaaagacaaatgtttgaggtgatagataccccaattaccttaatttgatcattacacactgcatgaatgtatcaaaatatcatatgtgcccccaaatatgtacaactattatgtatctattttaaaaaatggccaggtgtggtggctcatgcctgtaatcctagca

SEQ ID NO: 550956 - DNA, 727 bp, Homo sapiens
tattagcctaattttggacttcatttgacgcagttgtaataggtttcaccacatcagagtaagattactacatgccagagctattctttaactcagcttgtaaaaccatgatagcatcaacaatatacatagcaaatgaatgccatctttaatccaattaaatggtttttacaaaatttgctcttgtaggttgatgctatctgcattgcagtaaattaccaggtgaggtaccacagaatgacataaactgccaaggttacaattacctatgggcaatttctctttagcagtacatgtactgtatacttactcaaaacatatgccaaatttagtgtcgaacaagctcattcaaatcaattgggaaagcacgtaaatgaacaattcataacagaaaagcatgccaatggccaagagcattagaaccaggtgctcaatccttaccaggtcattataacggaccatactgacactcggcggacattatcacactcacttacgaatactctattacataacaaacaattattggactttatatcccccatatcagattaccccactacattgcgctcacacctagtatttaccaacatcttacacactctggacttagtatcaaacctttcaggaaaaatagaacacaaccagtatgtacacacgtcaactatccttttggaccacacatatggtaaaatatacaatggaatacacgtggcgtcatcacatc

SEQ ID NO: 550957 - DNA, 1555 bp, Homo sapiens
tgctcccttgggctctagagaggaggcccctcttagccctcagcccctccttcctctctatcttaaagtaatttgatcctcaggaatttgttccgccctcatctggcccggccaaatcccgatttgacaaatgccaggaaaaggaaactgttgagaaaccgaaactactggggaaagggagggctcactgagaaccatcccagtaacccgaccgccgctggtcttcgctggacaccatgaatcacactgtccaaaccttcttctctcctgtcaacagtggccagccccccaactatgagatgctcaaggaggagcacgaggtggctgtgctgggggcgccccacaaccctgctcccccgacgtccaccgtgatccacatccgcagcgagacctccgtgcccgaccatgtcgtctggtccctgttcaacaccctcttcttgaactggtgctgtatgaacccctgctgcctgggcttcatagcattcgcctactccgtgaagtctagggacaggaagatggttggcgacgtgaccggggcccaggcctatgcctccaccgccaagtgcctgaacatctgggccctgattctgggcatcctcatgaccattctgctcatcgtcatcccagtgctgatcttccaggcctatggatagatcaggaggcatcactgaggccaggagctctgcccatgacctgtatcccacgtactccaacttccattcctcgccctgcccccggagccgagtcctgtatcagccctttatcctcacacgcttttctacaatggcattcaataaagtgcacgtgtttctggtaaaatgaaaaaaaaaaaaaaaaaaacaaaacaaaaaaattttttgggcggctcgggccctcaagaaaagtttttaaaccccatttttgttgggggggcggggccccaagaaatagtaaggtaaaccattgggcacaaagggggtggcccaaagagagagcaaccgggtggccagcagataggggtgcgggttgtctcaccccgaataaaaaaagggccggcgggagacaccgcgacgtgttttctggaaccaccaaccccgagagggagcgtctcggaggacaaaaagggcttccacaccaggggggtatccccaggcgacagtccccgaatacataatatagagccgcgctggtggaaaaagacaagacagacgacctagaacacagacaaggcagacgcaagcacatcacacacagaagaccaagacacaccatgcagagcacaaccacagcagaaataaaaaggaagaggaaggggagaaaacgagcagagaaatatcaacgacagcaaacaaagacgcggggcagaagcggaacacaggagaacagacagagaaaaaagaacgaggaggtaggagagaggacaaggagaggagacaaaaagaagaaacagaggaccaggaggagaacgagcaagacgtaccgaagaaaacagggaaaacacgaagaaaagaagacaagaagaagagaagagagagataagtggagggcaggcgcacggagcagcgaagggaagaca

SEQ ID NO: 550958 - DNA, 607 bp, Homo sapiens
  misc_feature (23)..(23): n is a, c, g, or t
gctcggtaccccttgcatgtacngggctcaacacttccttccccaaagccagaagatgcacaaggaggaacatgaggtggctgtgctgggggcaccccccagcaccatccttccaaggtccaccgtgatcaacatccacagcgagacctccgtgcccgaccatgtcgtctggtccctgttcaacaccctcttcttgaactggtgctgtatgaacccctgctgcctgggcttcatagcattcgcctactccgtgaagtctagggacaggaagatggttggcgacgtgaccggggcccaggcctatgcctccaccgccaagtgcctgaacatctgggccctgattctgggcatcctcatgaccattggattcatcctgttactggtattcggctctgtgacagtctaccatattatgttacagataatacaggaaaaacggggttactagtagccgcccatagcctgcaacctttgcactccactgtgcaatgctggccctgcacgctggggctgttgcccctgcccccttggtcctgcccctagatacagcagtttatacccacacacctgtctacagtgtcattcaataaagtgcacgtgcttgtga

SEQ ID NO: 550959 - DNA, 425 bp, Homo sapiens
ttgactcgcattcgcctgactcgaatcgctttgaaaaaattagagtgttcaaagcgatgcgaactctcgggccctgtctatctcacaaacaagagatgaatcactaactctactccgaaaagtcctgggtcctgtccactctctcttccggtggaatcagaagaaacaaagagtttcctccctgccactttgggaagtgttaagcgtctcatgaatattatagttcacagactgaaaagcaactcaagaatgcctcagtcaggttttcttctatgttccaaagagcaccaaggaaattctgggcacttgatagtgtccctgagagtaaaacatcagtattcaccaaattaccctctttgctgccaaagaacgatggggctttgataattttctccttttaaagccaaaaagataaggcatgactt

SEQ ID NO: 550960 - DNA, 863 bp, Homo sapiens
cgttcctgggcctggagggctgctttggggcaggaaactttggccaccaggcctctgacctgcaccaggagacactgggaggtttagtccccaaacccgcacagagcaggactgcagcctgaggaaagagcaaggatttcaggagagaggcctgcgacaagtgagcaggaaatagaaacttaagagaaatacacacttctgagaaactgaaacgacaggggaaaggaggtctcactgagcaccgtcccagcatccggacaccacagcggcccttcgctccacgcagaaaaccacacttctcaaaccttcactcaacacttccttccccaaagccagaagatgcacaaggaggaacatgaggtggctgtgctgggggcaccccccagcaccatccttccaaggtccaccgtgatcaacatccacagcgagacctccgtgcccgaccatgtcgtctggtccctgttatgaacccctgctgcctgggcttcatagcattcgcctactccgtgaagtctagggacaggaagatggttggcgacgtgaccggggcccaggcctatgcctccaccgccaagtgcctgaacatctgggccctgattctgggcatcctcatgaccattggattcatcctgttactggtattcggctctgtgacagtctaccatattatgttacagataatacaggaaaaacggggttactagtagccgcccatagcctgcaacctttgcactccactgtgcaatgctggccctgcacgctggggctgttgcccctgcccccttggtcctgcccctagatacagcagtttatacccacacacctgtctacagtgtcattcaataaagtgcacgtgcttgtga

SEQ ID NO: 550961 - DNA, 628 bp, Homo sapiens
  misc_feature (23)..(23): n is a, c, g, or t
gctcggtaccccttgcatgtacnggggagaaccatcccagtaacccgaccgccgctggtcttcgctggacaccatgaatcacactgtccaaaccttcttctctcctgtcaacagtggccagccccccaactatgagatgctcaaggaggagcacgaggtggctgtgctgggggcgccccacaaccctgctcccccgacgtccaccgtgatccacatccgcagcgagacctccgtgcccgaccatgtcgtctggtccctgttatgaacccctgctgcctgggcttcatagcattcgcctactccgtgaagtctagggacaggaagatggttggcgacgtgaccggggcccaggcctatgcctccaccgccaagtgcctgaacatctgggccctgattctgggcatcctcatgaccattctgctcatcgtcatcccagtgctgatcttccaggcctatggatagatcaggaggcatcactgaggccaggagctctgcccatgacctgtatcccacgtactccaacttccattcctcgccctgcccccggagccgagtcctgtatcagccctttatcctcacacgcttttctacaatggcattcaataaagtgcacgtgtttctggtaaaa

SEQ ID NO: 550962 - DNA, 419 bp, Homo sapiens
actctagaggtcccctccagctgggccccaagtcactccttaatgcaagaacaaaaccggaggcatcacgctacctgacttcaaactatactacaaggtacagtaaccaaaacagcatggtactggtaccaaaacagagatatagacccatggaacagaacagagccctccgaaataatggcgcattatctacaactatctgatctttgagaaacctgacaaaaacaagaaatggggacaggattccctgtttaataaatggtgcgtggaaaactgggtagccatactgtagacaagctgaaactggatctcttccttacaccttatacacaactcacttcccgacggattacagccttccctgtttagacctaaaaccactaaaaatcctagaaggaaaaactagggcataacattca

SEQ ID NO: 550963 - DNA, 282 bp, Homo sapiens
  misc_feature (178)..(178): n is a, c, g, or t
tagagatccgtactgcatacagatgtagattcttgattagtagaatctagatctatcgagcaaaaaaaaagagtgaaagaaagagggacaaaaagaagagatgagggaacagtagggaggaaggaaagaagaaaagaaacaagagaaagaaagaccactggcgaatgtatggttggtnaaaagtactttattcggtagttcaatttatcaaataaaatattctttcaataatatgagatctttcctaaagcgtacggatcatactgataatcttctgtcccc

SEQ ID NO: 550964 - DNA, 809 bp, Homo sapiens
cgttcctgggcctggagggctgctttggggcaggaaactttggccaccaggcctctgacctgcaccaggagacactgggaggtttagtccccaaacccgcacagagcaggactgcagcctgaggaaagagcaaggatttcaggagagaggcctgcgacaagtgagcaggaaatagaaacttaagagaaatacacacttctgagaaactgaaacgacaggggaaaggaggtctcactgagcaccgtcccagcatccggacaccacagcggcccttcgctccacgcagtgcacaaggaggaacatgaggtggctgtgctgggggcaccccccagcaccatccttccaaggtccaccgtgatcaacatccacagcgagacctccgtgcccgaccatgtcgtctggtccctgttatgaacccctgctgcctgggcttcatagcattcgcctactccgtgaagtctagggacaggaagatggttggcgacgtgaccggggcccaggcctatgcctccaccgccaagtgcctgaacatctgggccctgattctgggcatcctcatgaccattggattcatcctgttactggtattcggctctgtgacagtctaccatattatgttacagataatacaggaaaaacggggttactagtagccgcccatagcctgcaacctttgcactccactgtgcaatgctggccctgcacgctggggctgttgcccctgcccccttggtcctgcccctagatacagcagtttatacccacacacctgtctacagtgtcattcaataaagtgcacgtgcttgtga

SEQ ID NO: 550965 - DNA, 262 bp, Homo sapiens
agggacaagatacatcagtgagagagtgcagatacaatctgcaatgcatactagcgagacgtatagaccataatatgtgtgcagaagaacacagaggtattccgttctttcgctcatgcacaagtctccatcacaaatgaaatctatcagctacctaggagagccagaaactttcctcttctgtcccacagactactgaggcactttctgttatccaaatgtgtctcagtctccatatctcaggactgtgggtgaaaagctt

SEQ ID NO: 550966 - DNA, 887 bp, Homo sapiens
cgttcctgggcctggagggctgctttggggcaggaaactttggccaccaggcctctgacctgcaccaggagacactgggaggtttagtccccaaacccgcacagagcaggactgcagcctgaggaaagagcaaggatttcaggagagaggcctgcgacaagtgagcaggaaatagaaacttaagagaaatacacacttctgagaaactgaaacgacaggggaaaggaggtctcactgagcaccgtcccagcatccggacaccacagcggcccttcgctccacgcagaaaaccacacttctcaaaccttcactcaacacttccttccccaaagccagaagatgcacaaggaggaacatgaggtggctgtgctgggggcaccccccagcaccatccttccaaggtccaccgtgatcaacatccacagcgagacctccgtgcccgaccatgtcgtctggtccctgttcaacaccctcttcttgaactggtgctgtatgaacccctgctgcctgggcttcatagcattcgcctactccgtgaagtctagggacaggaagatggttggcgacgtgaccggggcccaggcctatgcctccaccgccaagtgcctgaacatctgggccctgattctgggcatcctcatgaccattctgctcatcgtcatcccagtgctgatcttccaggcctatggatgacgatgagcagaatggtcatgaggatgcccagaatcagggcccagatgttcaggagctctgcccatgacctgtatcccacgtactccaacttccattcctcgccctgcccccggagccgagtcctgtatcagccctttatcctcacacgcttttctacaatggcattcaataaagtgcacgtgtttctggtaaaa

SEQ ID NO: 550967 - DNA, 913 bp, Homo sapiens
tgctcccttgggctctagagaggaggcccctcttagccctcagcccctccttcctctctatcttaaagtaatttgatcctcaggaatttgttccgccctcatctggcccggccaaatcccgatttgacaaatgccaggaaaaggaaactgttgagaaaccgaaactactggggaaagggagggctcactgagaaccatcccagtaacccgaccgccgctggtcttcgctggacaccatgaatcacactgtccaaaccttcttctctcctgtcaacagtggccagccccccaactatgagatgctcaaggaggagcacgaggtggctgtgctgggggcgccccacaaccctgctcccccgacgtccaccgtgatccacatccgtgcacaaggaggaacatgaggtggctgtgctgggggcaccccccagcaccatccttccaaggtccaccgtgatcaacatccaagcgagagctccgcgcccgaacatgtcgtcaggatcccagtacaacaccctcttcttgaactggtgctgtcttcatagcattcgcctactccgtgaagtctagggacaggaagatggttggcgacgtgaccggggcccaggcctatgcctccaccgccaagtgcctgaacatctgggccctgattctgggcatcctcatgaccattggattcatcctgttactggtattcggctctgtgacagtctaccatattatgttacagataatacaggaaaaacggggttactagtagccgcccatagcctgcaacctttgcactccactgtgcaatgctggccctgcacgctggggctgttgcccctgcccccttggtcctgcccctagatacagcagtttatacccacacacctgtctacagtgtcattcaataaagtgcacgtgcttgtga

SEQ ID NO: 550968 - DNA, 443 bp, Homo sapiens
  misc_feature (12)..(12): n is a, c, g, or t
  misc_feature (20)..(20): n is a, c, g, or t
  misc_feature (79)..(79): n is a, c, g, or t
  misc_feature (89)..(89): n is a, c, g, or t
  misc_feature (92)..(92): n is a, c, g, or t
  misc_feature (101)..(101): n is a, c, g, or t
  misc_feature (139)..(139): n is a, c, g, or t
  misc_feature (143)..(143): n is a, c, g, or t
  misc_feature (149)..(149): n is a, c, g, or t
gattcggcacgnggggcganggggaaactgctccgcgcgcgccgggagcgaggaacctagtgttcctttagggtccggnccggccgcantgngatatcatnttcctgagcccgcgtcccactgtcttctgcttcttccnatgntgcctnctgctgctgctgctgctgccggccccggagctgggccgagccaggccggaactgatgagaacgactgggttcgcctgcccagcaaatgcgaagtgtgtaaatatgttgctgtggagctgaagtcagcctttgaggaaaccggcaagaccaaggaggtgattggcacgggctatggcatcctggaccagaaggcctctggagtcaaatacaccaagtccatttcagatcccccagaccaagatgacctatcttccttccagctctgagtcacttcccattgggacttgcggttaa

SEQ ID NO: 550969 - DNA, 103 bp, Homo sapiens
gaggacccggacaccaccatttcacataagaggcaggcgacatgtcgagtgctgaggaggaaccccggtatgccaccatgctggagaggaaccccggacgcca

SEQ ID NO: 550970 - DNA, 712 bp, Homo sapiens
gagagatcagtttacaactgcagcagagcagcatctaacagggcaaaaaataaatccccatgaaggaaaccttgtgtggtggaaagatgtcagaacaaagacctgggaagaggggagaatcattacatggggtagagggttttcttgtatttaaccaaggagaaaatcagcttcctctctgggtgcctacaagacatcttaagctgtgccgtgagtcagaatccaaggaagaggagaagacctcggaactttgcactcccaacttgcctgatggctcaaatgaagatttctgctgagcagaaggtgaccagcaagactcaccagtcaactccaccgacctgggggcagattaagagattgacccagcttgcagaagaggacctgaagtctcaggacaaaccgtggacctcctgcaatctgctggtagctatgatggtggtaattaccctggcagtgagtctccctgtagctgaggctgatcaaaattatacctagtgggattacattccattccctccactgattagacctcttacttggctgaactccccagtagaggtttatgttaataatagtgttaggatgcccggagcaactgataaccaaggcctagtcatccagaggaggaaggaatcaattggagactggtcattttagcgaggctgtgagagcaatggcatatttgcagatatgtccagataatttgaggaat

SEQ ID NO: 550971 - DNA, 601 bp, Homo sapiens
cctgaacaagagcaggtctcaacattgggcttgaaatattcagcaaaccacactgtaaacagatgtgctggcacctgggctttgctgttccatctacagagcacagacagaatagatttagcataatttttaacagccctaggattttcaaaattgtatatgaacagtggcttcaactcaaagttgccagacagctgtattagctcctaacaagagagtcagcctgtgctttgaagcaaggactgacttccttctagctatgagagtcctacatggcatcttccaacagaaggctgtttcatctaccttgaaaatctgctgattactggagccaccttcatgagtgatcctagctgaagctctggacaacttgctgctgcttctacatcagcacttgctgcttcatcttacacttttgtgttatagagatgacttctttccttaaatctcatgaacctatttccacagcttcctcacctctcttaacctttatagaaatgaggaggagtagggccttgctctggattaggcttttggctttatggttgatctggcttgatcttttatccaggccctaacttttttcctattagcaaataag

SEQ ID NO: 550972 - DNA, 693 bp, Homo sapiens
tcgagctcggtaccattaaacaggctgatgctgtttcaggagactggggtctctcttcccacctgggaagccagagaccgccttgcttgccccggaattggatggagaaccctggtgactcagaaatggacgtctcccctctacgccacctcccccgcaggacggcgtggcacctgtcacctggctgctctctggatgtctgtgggccttgtgttaaccccaggcagaatcctgaaggtcattcttgcctggcccaggtgtgctttgagctcttctaaaggggcttacaaatgcagagtcccactggcatgggtggattcgtgttcacctgcatctctagccaggccttccaattctggaaccggttcctccatctggaggacttgacgtgtctgaggaggtgtgtgtaatagtggctttgggatcactggactgaggtggcgtgaggggggtgcgtgctaatggtgacatagatccttccactttaatcatcacgtcctcacccccacccccatgttctcatctgtaagacgaggatgcagaggccctctggcagttgagggtgaggatgagatgctgtaatgcccgccacatgcccctgacgggtaaatgtcagatgcgggtgagggttgagaaggcctggagcgtggggtgagcccctgatgagtgtcagctgttactgtgtcgatcagt

SEQ ID NO: 550973 - DNA, 420 bp, Homo sapiens
  misc_feature (5)..(5): n is a, c, g, or t
  misc_feature (12)..(12): n is a, c, g, or t
  misc_feature (70)..(70): n is a, c, g, or t
  misc_feature (84)..(84): n is a, c, g, or t
  misc_feature (114)..(114): n is a, c, g, or t
  misc_feature (123)..(123): n is a, c, g, or t
  misc_feature (131)..(131): n is a, c, g, or t
  misc_feature (193)..(193): n is a, c, g, or t
  misc_feature (224)..(224): n is a, c, g, or t
  misc_feature (257)..(257): n is a, c, g, or t
  misc_feature (393)..(393): n is a, c, g, or t
  misc_feature (411)..(411): n is a, c, g, or t
aaatnctctgtnttgttacaggcaaaattctggtatggcgtgaatgccatggggtcattctgaatatatntccccctgtaattntatcattacacgatgtttgcaatacgtgcnttgtttttnaatttganagcaaactttcctactgttgaaagacattttttgacaacttgacccttcctagtattgagtnctaagttgaggactgcatctcctcgtttttnacagtatagagaacaaaatgacattagtttganaaatacatatcacttgggtattgctgtcttgggttgcagtgggtgatacaggaattgggtttcattaattcctacatgggttgaggaatcactggatccaggaaagtggggggggaaaaaaaacaaacgtttaaancctcaatcctcgtagggnagggtgggt

SEQ ID NO: 550974 - DNA, 355 bp, Homo sapiens
  misc_feature (14)..(14): n is a, c, g, or t
  misc_feature (113)..(113): n is a, c, g, or t
  misc_feature (216)..(216): n is a, c, g, or t
  misc_feature (222)..(222): n is a, c, g, or t
  misc_feature (256)..(256): n is a, c, g, or t
  misc_feature (261)..(261): n is a, c, g, or t
  misc_feature (267)..(267): n is a, c, g, or t
  misc_feature (271)..(271): n is a, c, g, or t
  misc_feature (274)..(274): n is a, c, g, or t
  misc_feature (282)..(282): n is a, c, g, or t
  misc_feature (308)..(308): n is a, c, g, or t
  misc_feature (339)..(339): n is a, c, g, or t
  misc_feature (343)..(343): n is a, c, g, or t
  misc_feature (349)..(349): n is a, c, g, or t
  misc_feature (353)..(353): n is a, c, g, or t
cacgggtccccgtntgacagtggccgctgccatattcaggtgtagctaattgctctggtgtgggaatgcaggcctaatgacagaaatctggagaagccagaaatacagatttntatgtcagatgtcctgattttttaagttgttggcagaaattaattcagaaatcaaatctgcaggccaaacaaggtgcaggacccagctttggcccatgccctngtaggnccctctgggcagtcaccgctggggtcctgggtgntctgncattgngggnggngggactgntgcgggtggcagggtatggggatgtnccagcaatgtggtcttggcccgttgcaagtntctnggcctngaangg

SEQ ID NO: 550975 - DNA, 155 bp, Homo sapiens
ggcggacctcttcttcagcccgcgatatgtctcctcgggggtccctgtcacccggtgtctttcttgaccactcgggtcctagatcaacctaaagctctcgctaggctgcccgaactcctgggttcggttgactggatagcaactgcgagtcatgt

SEQ ID NO: 550976 - DNA, 397 bp, Homo sapiens
gtagctgaaaggacaaccgtttgccagctaacaagccttggtgtgtataggcagtagagttaagcagctgacttggagatcaatacgaaaggcaagcgggtactgaggtcgaaaacgctatgacaactataggtgcttccttagccatggctgtatccccggaggtctttccggctgtgttcttgggcctgggggtcccgacaagcacagtcaccttgtaggtcacaggacatagggaatggggtgacccttttggtcttcactgtggaggtgcagcaatccccaccgtcatagttgcaaaaggctcggttggtgatggcatcacaataattgtctcccatgaagggctcacagcctttgacacagtgaatcagagcagggtgaggataccacttga

SEQ ID NO: 550977 - DNA, 851 bp, Homo sapiens
taagtgcggtaacaccgtcaaagagctagcggacgtcctccgagtcaagatattgtcaaatattttcagaagatggctgatcgtttggaggacatgccatggattatgcagtatctctagcaagacaaggtggagaggtagttgtgaagctataaaaaatggaagtgaatgttatgctgaaaagttctccagttgatagggtaagttgctacggacgaaaaagtggagaaaaatgttatctcttccataaaggatcagagtatccatctcacagtttcgattggtgaagaatctgtggccagcatggggaaaaaagtatcttaacggaaaccgcacatggtatcattgaccctatgtgagggaacaattaacttgtgtgcatagattccttttgtagctgtttgaaactgggcttgtggtgtaagataaaaggatggaatttggagttgtgtacagtgtgtggaaggcaagattgtagcagtgcagaaagggaaaaggtgctgtgtaatggtcaaaagctacaagttcagacaagaagatattacaaatctctcttggtgacttgagtgggtctgccagaaaacagaagacgggaggaatgggtcttcctaactatgcgaacacgcgtcgggcttcctgtcgacatgcatcctggacgtgttggaccacgcaggtgtgactcatgggcctcgtggcactggggggaccgaatggcatttcagagatgggcctccctgctggctgttggcggaccggcctattgggcaggaacgcgcgggcgccacggggtcacgggcgcggctgagcacgagacactcgggaaaagactcgcaggggacagaagggaccgg

SEQ ID NO: 550978 - DNA, 930 bp, Homo sapiens
gaaaatcacgaagatcctctggtctgtggatgaaatagtgaaggacctgaagcattgtagaaattgtgatgtggagcttcctaagcttaatttttccctagttagagggcctcaatcatttgcagtgcatctgtacatatttgtgtacgtatacatgacagcatcataggggaataaggaaggtatttgcagaaacatgatctatgttctgtctccgtcccatttagtaaagagattgttccaaaagggatcgctgtaacgagaatcggggcccacagtcttcccccatagatagcgcattccatgatgcagattgggcactgttagtaaatgtgacacatttggatctagctcttcagtttgaactgaggcagagatcgaaagacgttcctatacccaagaataaaggcatagtggtagttctttgggtatatgctatctgctagttcctgcattgccagcatctatactaagagtaaaagtttcggtacttgggtaagtatccgaaatcacatcaagtcggcccttcttctcaaggccaaatttgaaaaatcaactgggcaacatgggtctcgctaatgaaagttaacagaaaatcttcagacgttcagccaggacaacgcctaaaggcctctgaaagaacttccccttttggctactttttgggacaaactccacacgcatagaagataatataaggatacttattattccataaccaattttttatttggtccagcaacttttagcacctgaaaacttacggcagtttgtccaaaactacgccgtggagattagacttctggttgtcccttaaaatggggttggtgaaccaaatcctggtttttcctaattggctctggggttgacacttagacagccctgataggaaataacttacttgctttgccggaaattgcataaaactgg

SEQ ID NO: 550979 - DNA, 167 bp, Homo sapiens
atctgcagctaatcaggacatacttctggtgagcactgtgcggaaacttgaggatgaaatcagtgagctgcatgcacttataaaggcatggccctgtcctcctcacttgtagtgcaatggtccatcagaccacaagcccatattctagatcaattacatcatgatac

SEQ ID NO: 550980 - DNA, 155 bp, Homo sapiens
  misc_feature (123)..(123): n is a, c, g, or t
tattatttaaaaccccacataatacattatgataccctcaaccttaattcagtacttcatacttgtgaaacaccccataatgagtagttgaattttgggattttatggatcatccatatcaanagttatataacttgtggggttttttagttttt

SEQ ID NO: 550981 - DNA, 897 bp, Homo sapiens
cgtcctcaaggctctacctgcgtcagcttcccgagccgccatctccttccgcctctaccacgagctcgtagggcctggcacagattgtccgacgacgtgtaggagcacgacaagagaccgcagacaacggcgacgacacaggacagaggaaggagcggatagagaagactcgagaggagagcgacctgatagaaggactgaagggcgacagactccatgagggagcatgccgacatgacagaaacgggaacatacagcggcacgaacacatggaagcgcacacacataccgcaagggaatcaccggagagtcggagacagggcacatagcaagaatgaggcacccggggacaccgtgagcgcgatccgcaagatgacgcgcgccacgcgactgcaggcatgaacgagctgcacggacccacacagcgagagccacacgacagaggagaccacatacgtcgcatcccctgagccggaaggaataccaccagtacagaggccagcgcagtaactcaggaaggaacgtcctacccatcagaatacacaccagtaacagggcccctggacgcataaacgacagcggagcgacgcgcgaggaggacaggaagcgccccagtggagcacaacgaccgaagctccatcacagcatcctcgacagacccaggaagacacatgagacagccaagcgccaggcccagccccgcatggactgtggccctacatcggcaaggagccgacaggcgggcagcgtagacaagccgctggacggaccgccagcacacgtagacagaacgtgcgcaccgcggggacgcacgtcagcaccgagccccaccagcgtcgtcacagactgcacacgcagagcaagaccaagagcagagcctgcgaagacccaccgggc

SEQ ID NO: 550982 - DNA, 153 bp, Homo sapiens
ggatccttcgattggcgggaacttatgcagcgcttacctatcttaacaagctttgagtgccagacgattgaagagtacaaagtctgaccaagatgttgatgttggataagagaattctctgctccccagcctctaagttgcccgccaatcgaa

SEQ ID NO: 550983 - DNA, 391 bp, Homo sapiens
  misc_feature (135)..(135): n is a, c, g, or t
gaatgagttcaagaggtgtatgcgcgtgtttagtcattctccctttaaagtacggttaatgctgctctctatgttgtgcgatatggtcaacaacaaaccgcagccaagataaaccttccggataacactacgggntcgggtacgccgcttcactcctgctttcatgcaggcataacgcgttttggtctgaaaaaccccactttttgtcggatttgcaatccccttcgcaaaagatttgttcgtcagtagttgacctgaacggcggctcgctctatcttcttgcagccctgcgtatattgcggctcgcggatgcggacccctttccactcttcacgcactcttgcaggtattgacccttgacgccagggtaagcacatggcgtttgttacga

SEQ ID NO: 550984 - DNA, 269 bp, Homo sapiens
tttctctcacccagtacttttttttttcccccaaccccactttctgtaagaacagcctatttctaaaagctagttcaccaggcccagctccttgtctctggagcccacacctgtcatagccaaagccacagtagatgaatgctcaggacactactgttcccaggagggcactgcttgccaaggtttactgctctaagagtgttctcgggcttcagtctggttccatcaggcccagagaaaacagcagctgtaaaggcctggagacagga

SEQ ID NO: 550985 - DNA, 352 bp, Homo sapiens
gtatgtctcctaaatggacagatgccttccctttccgccctcccgtagggatcacaccaactaacaccagactcccaagcacaagattcttgctcccatctttctagtagggtttggggtgtggacccttcaggactgctgagtcatattgccatctggtgttctaactagatactatgctcatcttgattgcatatagtgtctcttatagatttgatctctttgtcatctctcatccaacttggctgtcattttgcacactgcgtcgtgtctgtgatcctcttggggatgctgatcaggtcgcacttcttgtttgcagtgggcttgctatccataatgttcttcttgacca

SEQ ID NO: 550986 - DNA, 160 bp, Homo sapiens
tgactctataggatcccagtccaacctgcacggtgcctctagtgagtgtcccccagctcccggtgccgtggtgagtgccccccagctcccggtgccgtcacagtgagtgtccccccagctcccggtgcccgtcacggtgagtgtccccccagctcccggt

SEQ ID NO: 550987 - DNA, 120 bp, Homo sapiens
gcctggtgtgataccgtcctgcgcgtttgttctctggagcagtgtctttatctccgaaccggcttctctcctacctaagtgcgtgccgccaccgcgatggacgatgcgatggacatgcaa

SEQ ID NO: 550988 - DNA, 291 bp, Homo sapiens
  misc_feature (192)..(192): n is a, c, g, or t
  misc_feature (202)..(202): n is a, c, g, or t
  misc_feature (228)..(228): n is a, c, g, or t
  misc_feature (253)..(253): n is a, c, g, or t
ctcctttgtagctgggattacaggcacatgccaccacacctggcttatttttttttttgtatttttagtagaaacagggtttcaccgtgttggccaggctggtctcaaactcctaatctcaaatgatccgcctgcctcagcttcccaaagtgttgtgattacaggcatgagccaccatgctcagccaatttnaaatattttnaaaatatttatgcagctctgtacgtngtcaaagcccattaagaagattttnacagagacagggggaggggatataagtctataattttt

SEQ ID NO: 550989 - DNA, 809 bp, Homo sapiens
ttcgacaggtcagccgcatcttctttatgcgtcgccagccgtagccacatcgctcagacaccatggggaaggtgaaggtcggagtcaacggatgtggtcgtatgggcgcctggtcaccagggctgcattttaactctggtaaagtggatatagtgccatcaatgaccccttcatgagccatcaactacatggtttacatgttccaagtatgattccaacccagtggcgaaattccatggcaccgtcgaaggctgagaacgggaagctatgatcgatcaatggaaatcccgatcaccatcttccaggagcgagatcccgtccaagagatcaaggtggtggcgcatgactgttgacagacgtagaacgatagcgatcggtgggacgtcccacttggacgatctttcaagcgcaaacgattgggacgacaagggcataggagagactacaattttttgcaccagggagagagaagaccacaacaaaaggtggatacatcgagttcattccatggatcacacaaatatcctggggatttgaatttggacacacaagcacaagaggggattgaccagatacccacatggccacgaacggcgttgaaacaacacccaaaatgggtaaacgccagacaggatcaattgggaaccacgcagcacaccacggcgacccagcattccccaaaaggaccaatctcacacagcatcccaacaggacaacacagtcggcacgattacccctagtgcgagcacccatgacccagagacgttgggcatgataaaccaacacgcccccgttggcccaaaggggct

SEQ ID NO: 550990 - DNA, 1283 bp, Homo sapiens
gggatgtgggaccctgggaacaggaacaggcagtggctgtgaatggtttcatctctgccccctgatcctgagatgaatcctgtacccacactgggtgtgaatgtctatcctgtctggtgtgtgtgtgcgtgatgtgtgagcagcatcgtggccagccagtggcacaatccactgacgcatgtgtgatcatagacgtgtgggatcatgtccatgcctcccatgcagtgacccaatactgtaatcctgtgatgaagactgacaaagtggacaacagtgggtggatccatgaggacatggccccacagccttgactcgtgcagtcccaagaaacctaccgtactctgacatgctcccttggcggcattgcaccttcatagcctgcatccatagtcatcccatggatgttgtgaccaggaccaccgggataggctttgccaaatcatatctacggcggagtccatccacaaccctgaacgctcactagtcacttgcaccacaaaggggacaaggcctccaaaggcaatgaaggcacaacacgcgacactgcttcacttgggaaggtcaccaaacaattgcacgagaggagcacgagagttgcaacaacgcttagaacacgctgggacggtacatacccacacgcgcgggactcccttgagaggtccctactttttccttgtacatcaaacatatacttagagggaatacgttatggaccacacgcagtttgtgaaaccccaatttggaccttggctgaggacccgcaacggcacccttccctccatgggcaacgctggcaaacacaacggagacacaacaagcacgacctacccaaacccgacgcaagtccacagtgcaaaaagcggtacagtagaggtgaaatggccgcaaagttgtaatacaccaaacacagtggaccctacaaagtaccccccggaaagcgaagcatcgacaagcaagcgagaaacacagagcagaacgcagaggcaaacggaaaaaaagagcgttcgagaaaagtatcgcgtaatttagtaaggacaagagagatactatggcgagcgtgaactacagaccagggccacaattgtctcaggggagcgccgaattagagaaatttgacgcgattacgtgcctgtgacaagacgtaccgagggggaaagatacatagcccaaccaagaggcgagagaccctagattaatccctcagggtaggaaactcccgagagaacagcaatcggaatcgagccaagcacgcaccagacactcactgagagacaccccaggac

SEQ ID NO: 550991 - DNA, 680 bp, Homo sapiens
  misc_feature (114)..(114): n is a, c, g, or t
acagatttgttcccgccaggagtttcttggtcagcccgtagccaaaaggccagaaggaccagtccagttgaggaaagttcttttggttttggcaagtttttggaagaagccaancagcatggtggctctaaagagccccagaatagcagccgccccaaggaccccgagcatgaaggcaagaagaggaggaaggaataggcccaggtctctccaaagtgaatgaactcttacccataaccctaatgatgcaagtcatatgggggaaccctttgtaaatggtcaggataaaaaccaaatctgggtgccagatcccagccctactttttattactggagaaatgggggggatagaaaattctcctttgaattatttagttttttttaaagagtgggttgggtttgggcttctcccccctttcagcatttatagaacatgctgccccccatacaaagtcaagaccccttacttttatgtgcccctagtagtttggggttaatgttttgggtaagacccgctgcatatgagtaaagttcccccccccccagtgaggaggaagatgttcccatactggaactgtcccgcccaataaattttgcccctattgtgctctgttttaatttggggtgggcaaagtaccctcttgcttggggccactttttgtttccaataaaaaccttta

SEQ ID NO: 550992 - DNA, 257 bp, Homo sapiens
acaatgtatggggaggtcaatggtcaagctcatcgtgcttggtactgatgccctatgatctactgggtgggcctggagtaagttccttctacctagcaggctctgatgcaatttggagctcattgatggtgagaatacccacaggtggcctattcagacgtcctggagctgccagagagggcgctgagccccgtggtaagtgtggcagccagggggcattggtgcagagtacggaggcttgcgctgacgtacgtggg

SEQ ID NO: 550993 - DNA, 401 bp, Homo sapiens
  misc_feature (387)..(388): n is a, c, g, or t
  misc_feature (397)..(397): n is a, c, g, or t
agattgctcgagtctgggagttcgaagaccaccctgggcaacatggcgaaaccctgtctccaaaaaaatatgaaaaagattagctgggcatggtggtgcacacctgtggtctcagcttctcaggagactgaggtgggaggattgcttgagcccaggagacagaggttacatcaaactgagattgcaccactgtactccagcctgggtgacagagtgagatcatgtctcaaaaaaaaaaaaaaaaaaagcttttgaatttcatccatgctgttgtgtgtatcagtagttgattctgtctttacattttagctattttagtggaattatggtactttttgttcttaatattcttacttggaaaaattgaaagtgtgaataaccctaaannaattcccanactt

SEQ ID NO: 550994 - DNA, 732 bp, Homo sapiens
ggtagtggcttcgtcttcggtttttctcttccttcgctaacgcctcccggctctcgtcagcctcccgccggctgtctccttaacaccgaacaccatgccttcaattaagttgcagagttctgactggacgacgactactttgacacgttgactgtggaacattggccaaacaactctgtgacctacttaagacccatgatggacagatttgggaactggactgactgaacggacgatgactgaccccaagttacctcctaccacaatgtgcaatgccagcaactattacaacaaaggtccattcacgttggtgcacccagagcagcaaggcatgacccgtccatccatccttgaagatgatgacgaacaagagcacacacagcgcaacagcatgcatatacgctgttatgggaccaaggaattccgtgaacagttgaccaagggaaccacgttcatatgcaactcattctggactggcgaaactcactttagaacatcaagaggttatgcttggatgtcgacattgcacagacgtgttggccaagtatgcatcaagagggacaaagtgcatggaggagcattcagcaaggaaccctttcacgtacttcaacacacagtgaacattagacacatcgtcgactacgggtaacaaggccaagtggtcgtggcacgtaagatacaaatatggtaccaaggtttcaacctgtttaggtggaaccctttgtgagaaag

SEQ ID NO: 550995 - DNA, 800 bp, Homo sapiens
ggcagcggggaaggcggatggagttatatcatcgcaatctgggaggacgggatccaaaaacgtgtgatacaggaaggccgaggagagctcccggaacttacaatgatgggaccaaggccacgtaccactaccggacgctgcacagtgacgacgagggcaccgtgctggacgacagccgggctcgtggcaagcccatggagctcatcatatggcaagaagtatcaagctgcctagtgtagagagaccatcgtgtgcaccatagcgagaagtgtgtgagattgcccaagttcctactgtgaacatcaaagcatagtggtcctagataaccacgctgagatggccaaagaagtactaccagcaaacatacagcacggtagggcaaagggacccctcactggaagtggagccaaaccggcaaaacaatgctagacagggtaaggaagcccaagaataacttagaaacacaaggatacaccacatgggccccaaatagctgaaacaagggggacggccccctagacaaaacaaagaaaaaccccaaaaaacccccctccatctatccaacattgcacaaatgctggaagagtaggaccaaggcccttgccaatgtaagcaagccagggaaccccaattggcccattgacaagacaacatggcaaggcacacggccaagaaaaacgtataattccaaccagtgcatgccaaaccagagtaatccagcgacggatcattgagaaaggaggaataaagccaagaacaacgaatccaattccttaacacaagaaccttaaaactaagga

SEQ ID NO: 550996 - DNA, 1029 bp, Homo sapiens
aggacagatattttgtatcaaaggaatactatgttttcacactacgtcaacttggttgctctgataccccagagcctgattgggggcctcccgagtcctgggctcacgccaagtccctggtgctgggtttgctctcccgctgaatgccaggggctgggaagctggaggggtctcttgagtgccatggacatccccagcttccagcccatgtacactagtggcccacgtagcaaggtggtcttcatttccatgaaaaagggactccaagaggcagtggatgagctagtggtgccccaacatttggtgctccagggctgtgtccagctgcttgtgggtggcacctgggaggtcaaaggtctccaccacatcaacctattttgttttaccctttttctgtgcatgtataatatatcctcctaaaaggaatttgcacgtgtgttttgtggaaggcactcagggggtggcacattttggcttgccatgattgcgatgattttgatggtacgattttcgatggctactttcgctcactttgaccttggccgatttgtcctcaacatggccagagtttcgtgccctgacatagcaccaataccctttgactactggcacatcccaatgtccccgaggccttaggagctctggaaattttcgtggtgaaatggtcttggccgggttggcggaggagtgccagccaaatagttcactgaatggtacaactctgtgtagctctcaaagactatatttttgtcactcaaacagttgtatataccggctcaactgttttattgcctatacgccatttgatgggtgatccttacggcatgttggcagagctctaagtgtggaatcatggactgacggtttgctgttggatcttttcccccacttgcaagggttaattctggatccccgggggccttggcttttaagaaaaaccgccgccaatgattttgtcccagaacaggggcccactgtgcatccccgtgggaaacctgtgctcatcttcatgtcgacggtaggctggag

SEQ ID NO: 550997 - DNA, 456 bp, Homo sapiens
ttaggagaagcgccggcagcgcggtggaaatgaaaaccgctgccttaacccaatagtttcgacactcttcgctgagacgcctagagggcagcagtgcgagttctcctaactctcccagacctagctgctggcatcactatactactaacagaccgcaacctcaacaccaccttcttcgaccccgccggaggaggagaccccaatctataccaacacctaatctgaattttcgggcaccctgaagtttaaattcttaacctgccaggcttcggaataaactcccatattggaacttactactccggaaaaaaagaaccatttggatacatagggatggtctgagctatgatatcaaatggcttcctaggggttaacgggtgagcacaccatatatttacaggaggaatagacgagacacacgagcatatttcacctccggtaccataacatcggtaa

SEQ ID NO: 550998 - DNA, 486 bp, Homo sapiens
  misc_feature (41)..(41): n is a, c, g, or t
  misc_feature (139)..(139): n is a, c, g, or t
  misc_feature (154)..(154): n is a, c, g, or t
  misc_feature (183)..(183): n is a, c, g, or t
  misc_feature (199)..(199): n is a, c, g, or t
  misc_feature (227)..(227): n is a, c, g, or t
  misc_feature (239)..(239): n is a, c, g, or t
  misc_feature (247)..(247): n is a, c, g, or t
  misc_feature (288)..(288): n is a, c, g, or t
  misc_feature (359)..(359): n is a, c, g, or t
  misc_feature (377)..(377): n is a, c, g, or t
  misc_feature (394)..(394): n is a, c, g, or t
  misc_feature (449)..(449): n is a, c, g, or t
  misc_feature (472)..(472): n is a, c, g, or t
aattcgcggccgcgttcgacacggctgcgagaagacgacanaaaggggggggctgctggggactcgcgtccggtttggcgacttcccggacgtaagtaagtttttttgggcccggtttcttgaagcctttgctttctcntttaatttttcccanttctaaggcccaacgattaccgcaattanccaagaccttgggganggagtttcaaacccgccgcttgcccgangaaagcttttancttcgctngaaccctaatgaaaggcaagttgtgggtttcttccaaatantaaggcaattcttgctttgggaaacttgtgttgtttaaaattaaacaagattgaattttaattttggtttnggtggttaataaaaaacnagaccccaaagcctccnaagattgttaaaaggaaagaatttgaggaaaaatttcccaacaagttccaaattnaattgccgaaactttaagggttnccccgggcccccgg

SEQ ID NO: 550999 - DNA, 424 bp, Homo sapiens
  misc_feature (25)..(25): n is a, c, g, or t
  misc_feature (27)..(27): n is a, c, g, or t
  misc_feature (34)..(34): n is a, c, g, or t
  misc_feature (45)..(45): n is a, c, g, or t
acgcgaccgctggcttgaacgcttntngaactgncgctggctgancttcatagcattcgcctactccgtgaagtctagggacaggaagatggttggcgacgtgaccggggcccaggcctatgcctccaccgccaagtgcctgaacatctgggccctgattctgggcatcctcatgaccattggattcatcctgttactggtattcggctctgtgacagtctaccatattatgttacagataatacaggaaaaacggggttactagtagccgcccatagcctgcaacctttgcactccactgtgcaatgctggccctgcacgctggggctgttgcccctgcccccttggtcctgcccctagatacagcagtttatacccacacacctgtctacagtgtcattcaataaagtgcacgtgcttgtga

SEQ ID NO: 551000 - DNA, 744 bp, Homo sapiens
tcccggttggggccccgcgcggggaggttgtctatcccaccctcggacccatgccgcccaaggccccgttgcatctgtgcgggtcttcgaacccaaaaaaacagcaacagctttgtgtggccgcacttgcaaacgcggaaatgtggtcttctctcattcagggtttgaacgggcggcccctgtggaaattgatttgacccgccgcacgtcatacagatacacggcgtgctgtggacccagtttctgctttctctcggacaagagagcgattgtgctgggtgttaatacatctccggtgtctccgttgataaagaggggtggctgggctcacgtgtgcgccccaagatattttgtgcttaactccgctcaggtctccatctctctcacaaacacgccctgtggtgtgcgcctatatttttcccccagagaaacatcttttgttggggatatgaagggctttctcacaaaaaaggggaaggatctccaaaaagaaaatctcccctacatctcccaggtatattgtagcaccgggaggaccccttgtgcgtgtgggatcagctgtggaccctttcagattccggtttgcaggaggtctccacaaagttttttgtgagagcggccgctgtgtggtgccccggctgcttctgtttacccaagaaaattccctatccccggattaagcgcccattcgggtgacctcaagaacctccctgttggttttatctaccccccgctttttggagg

SEQ ID NO: 551001 - DNA, 704 bp, Homo sapiens
  misc_feature (495)..(495): n is a, c, g, or t
tgggccctaaagggggtaaagggggtgctatacgggtaaatacggccccgtatttcaaagattttataggggaattaattctaggacgatgggcatgaaactggtggttggcctccacagattttcagagccattgaccggtagtatacccccgagtcgtgtagcggtgaaaggtggttgggttatagacgctccgggaatttgctctctgttttataaccctaagtgtggggacagcctcagtgagttgcaagacgtcttgggtgagtgttaacttatttattacgaatgtggggggctctcaacctcgggaagtctacatacctcgaagtgtgtcaacgtctcagaggagtttcgccaggttcgcccgtggtctctagggaaataacgtggggggaacgtattgtgtaggaagtttgaagatattagtctcccgccgtatactcgggtgttacctccgtaggttctcagtcacccatgtgggtgcgcccacantgtggacttgtgagtgggttaaagggcagggaactcgttggacccctcgattcgtgtaaatgttaacagggtatgtcgttagcggaatgggcaaggggccgaaatgagggcacttagggattgattgggcgggcgcagggaatagttttcacaacacggggtccatattcccctggaagcgttctgaaaattgtccgagcattaaataa

SEQ ID NO: 551002 - DNA, 924 bp, Homo sapiens
cgttcctgggcctggagggctgctttggggcaggaaactttggccaccaggcctctgacctgcaccaggagacactgggaggtttagtccccaaacccgcacagagcaggactgcagcctgaggaaagagcaaggatttcaggagagaggcctgcgacaagtgagcaggaaatagaaacttaagagaaatacacacttctgagaaactgaaacgacaggggaaaggaggtctcactgagcaccgtcccagcatccggacaccacagcggcccttcgctccacgcagaaaaccacacttctcaaaccttcactcaacacttccttccccaaagccagaagatgcacaaggaggaacatgaggtggctgtgctgggggcaccccccagcaccatccttccaaggtccaccgtgatcaacatccacagcgagacctccgtgcccgaccatgtcgtctggtccctgttatgaacccctgctgcctgggcttcatagcattcgcctactccgtgaagtctagggacaggaagatggttggcgacgtgaccggggcccaggcctatgcctccaccgccaagtgcctgaacatctgggccctgattctgggcatcctcatgaccattggattcatcctgttactggtattcggctctgtgacagtctaccatattatgttacagataatacaggaaaaacggggttactagtagccgcccatagcctgcaacctttgcactccactgtgcaatgctggccctgcacgctggggctgttgcccctgcccccttggtcctgcccctagatacagcagtttatacccacacacctgtctacagtgtcattcaataaagtgcacgtgcttgtgagtttaagcaagttatgcttggggcccaattggaggtccttggaacattgccttggaggcgt

SEQ ID NO: 551003 - DNA, 264 bp, Homo sapiens
tgttggtgtctctacaggtatcccctgcagcacacaacagcaggctaggggatgctccaggcggcactggtgcactctggtccgcgcattcactgattcctttatcaatgcgatgtccttgtgcaaccattgctgtccccaccggaagaatgggcagatttccatgtttcataggcatctctgcagtgatcccaccaatggccgaggtcagtggtctctgagtgtggcatgcagggaccccctgaccatcttcttcgggatctc

SEQ ID NO: 551004 - DNA, 308 bp, Homo sapiens
gcggccgcctactactactactgctcgaattcaagcttctaacgatgtacggggacatgaccattggattcatcctgttactggtattcggctctgtgacagtctaccatattatgttacagataatacaggaaaaacggggttactagtagccgcccatagcctgcaacctttgcactccactgtgcaatgctggccctgcacgctggggctgttgcccctgcccccttggtcctgcccctagatacagcagtttatacccacacacctgtctacagtgtcattcaataaagtgcacgtgcttgtga

SEQ ID NO: 551005 - DNA, 561 bp, Homo sapiens
  misc_feature (480)..(480): n is a, c, g, or t
  misc_feature (537)..(537): n is a, c, g, or t
cgttcctgggcctggagggctgctttggggcaggaaactttggccaccaggcctctgacctgcaccaggagacactgggaggtttagtccccaaacccgcacagagcaggactgcagcctgaggaaagagcaaggatttcaggagagaggcctgcgacaagtgagcaggaaatagaaacttaagagaaatacacacttctgagaaactgaaacgacaggggaaaggaggtctcactgagcaccgtcccagcatccggacaccacagcggcccttcgctccacgcagaaaaccacacttctcaaaccttcactcaacacttccttccccaaagccagaagatgcacaaggaggaacatgaggtggctgtgctgggggcaccccccagcaccatccttccaaggtccaccgtgatcaacatccacagcgagacctccgtgcccgaccatgtcgtctggtccctgtttcaacacccttctttntttgaaattgggtgctgttctggggtttcatagcaattggcttaattccgttgaaanttctaaggggggatggtttgggcg

SEQ ID NO: 551006 - DNA, 605 bp, Homo sapiens
cgttcctgggcctggagggctgctttggggcaggaaactttggccaccaggcctctgacctgcaccaggagacactgggaggtttagtccccaaacccgcacagagcaggactgcagcctgaggaaagagcaaggatttcaggagagaggcctgcgacaagtgagcaggaaatagaaacttaagagaaatacacacttctgagaaactgaaacgacaggggaaaggaggtctcactgagcaccgtcccagcatccggacaccacagcggcccttcgctccacgcagaaaaccacacttctcaaaccttcactcaacacttccttccccaaagccagaagatgcacaaggaggaacatgaggtggctgtgctgggggcaccccccagcaccatccttccaaggtccaccgtgatcaacatccacagcgagacctccgtgcccgaccatgtcgtctggtccctgttacacctctctgactgtgctgtctggctcatagcatcgctactcgtgagtctaggacagagatggtgcgacgtgacgtgccagctatgctcacgcagtgctgacatctggctgatctgcatctcatgacattgatcatctgt

SEQ ID NO: 551007 - DNA, 761 bp, Homo sapiens
  misc_feature (23)..(23): n is a, c, g, or t
  misc_feature (470)..(470): n is a, c, g, or t
gctcggtaccccttgcatgtacnggggagaaccatcccagtaacccgaccgccgctggtcttcgctggacaccatgaatcacactgtccaaaccttcttctctcctgtcaacagtggccagccccccaactatgagatgctcaaggaggagcacgaggtggctgtgctgggggcgccccacaaccctgctcccccgacgtccaccgtgatccacatccgcagcgagacctccgtgcccgaccatgtcgtctggtccctgttgcccctgcatggcgctgggtcattcattaggcgaattcgcgcattactgccgtgagagatctagggcatcatgggaatgatgagttgtgcagagcgctgacgcgtggggcccagggtcgcttatgtccttccacacgccaagttgcctggaacatctgggcacctgtattctggtgcatcgctcatgatccattctggctcagtactgntcatccacacgatgactagaatcttgccatggcgcctactggtactaggagtccaggatgggccaatcatcgttgacggccagggcacgctcatgccacgaatggagccggtgtaatcccgaacggtaactcctagatcttcgcgattccgtcgacccgtgcccccgcggaagccgagttgccgtgtagtcagggcccctgttattcctcgacagcggctttttctaccagagtgggcattcaataagagtgcgacgtggtttcctgggcatcacatataatacaaccaag

SEQ ID NO: 551008 - DNA, 195 bp, Homo sapiens
ctggatacagtatgaaataatagctaaccatgactgatggcagtatagatagcagtactctggaggtgacctctgacacagcccatcccaggagccggagtgaagctcattccccacactctcctgtgaacactggagtcttgcaacacccagggaagaacccactgtctttccccaggagggctccaggataag

SEQ ID NO: 551009 - DNA, 275 bp, Homo sapiens
gtcgacttttttttttgaatttaaaaaattccacagtctaatataacccaacgttctgctacccctgcaaataacaataataaaaattatgtttaaatgaggacaaagtttcggtatattgtttagatccgttaaattttcgatgcttttaaagatttaacaagcgctctattacgaggtcttcaaattatggctgcttctaagcccatctccttgtcgacttaaattaaaaccttcttaatttcacttaacaataattttggaacctgtcgacg

SEQ ID NO: 551010 - DNA, 677 bp, Homo sapiens
gtgaaaaactctgacacacacacactagtgtatgcctgcaaggatgagaattaatatcactgtgttccaccttcacatcttgttccactggaagggcttcagggacaataacactcttggagctgtcatttcgtatgataacaatgccttcttctggaatacctcctgaaggaactgcctaaggctctttacaggtaactcttttggtttatatgtagaaggagtacagtctatattcacaattaaaagccaagtatgaatggttacactggcattgctgcaaatacaacagctactacgccattatgcgatatgaatttctcagctccataatcttatggaaccactgtgataatatgccatctatcctcaactgaaacatcattattcggggcatgacatggttctcatttctaaatttatgcgagaaacatggccttatatctggtttttaaaaaagccatcattaaattcctccaaactcatatttactatctctttcataccaaaacacttcaaatatcacagtgaaatatccagttagagagtcatataacaaagtggatttataatgagctatgacttaaagttaacacaccaaagaagtcttctaaaaagtcttacccatacatattacccgatgaatatgtatgtggcatttctaacccacattcctg

SEQ ID NO: 551011 - DNA, 137 bp, Homo sapiens
  misc_feature (6)..(6): n is a, c, g, or t
  misc_feature (40)..(40): n is a, c, g, or t
  misc_feature (83)..(83): n is a, c, g, or t
  misc_feature (103)..(103): n is a, c, g, or t
tcaagncttctaacgaatgtacgggggacatgctaacaanattaaataacttaggttgaaagtggaccagatttctagaaagnacacacaaataccaaaactngattcaagaataaataaaaaatcaaatagaccta

SEQ ID NO: 551012 - DNA, 883 bp, Homo sapiens
  misc_feature (607)..(607): n is a, c, g, or t
agtgaaatatggctctgttctgctcagcccacaggcagccagacttcaaggttatctcacttgttccctgaacatcgctgttatcctgtttttttttttcaaggtgcagatttcatattggtttaaacaatttgtgcagttaacacaatcatcacagggtcctgaggtgacattcgtcctcagcttaggaagatgatggtattaagagattaaagtaaagacaggcataggaaatcacaagagtattggatcgggggaagtggtaagtgtccatgaaattttcacaatttatgttcagagattgcagtaaagacaggtgtacagaaattataaaagaatgaatttgggggaactaataaatgtctgtgaaatcttcacaatttatcttcttctgccatggcttcagctggtccctccgttcggggtccctgacttcctgaaacatttagatgtgaattggggagctctttaactataaagtttaatatctcaaaataataagagctatttatgacaaacccatagccaatatcatattgaatgggcaaaagctggaagcattcccttttgaaaaccagcacaagacaaggattgccctttctcaccnatcttattcaagcatagtattgggaagtcttggcagagcaatcagtcaaggggggtattcaaatgggaagagaagaagtcaaatggtctctgtttggccggtgaattgactggatactttagaaaccccattatttcagggggcaaaatgtgttagctggaatagcaatttcaggagggcccagtgatacaaattcatgtggcacataacagcttcttatagcattttgcagggaaaccaattgtgaggccccttcaaatggtcacggctaaaggc

SEQ ID NO: 551013 - DNA, 130 bp, Homo sapiens
aaccagcatctaaatctaaatccccacaagggatccgttagagcaagagaggccaacagagaagctggattgagcagccaggagaagcatccagaatcctctcacagtggggtcacacaccccatgctta

SEQ ID NO: 551014 - DNA, 926 bp, Homo sapiens
  misc_feature (358)..(358): n is a, c, g, or t
aggggttacagatctaaaccatatcattactcaaaaaaaaaaaaaaaaagaaagaaaagaaaaccccggaaaaggaactcacctcttttatcatcttagtatttagtactaattggtttaaagcaggagttgacaaactgtggcctggactcatggaccaattctggcccaccacctgtttctcagaagcaaaattttatgggaactcagccacacttactcatttacatgttgtccttgactgccttggtgtccagtgtcagaactgagtagctgcagcggaggttgtgcctctgggcctttaattattcacaaacagagcagccttataagccaacagaaaccttacttctcacangtttgtggaggctgggaaagttccaagaatcaaggtgtgtcaccattatttagggtctagggcaaggtctgcttctgggttaatagaaagcacctttcactgtgtcttcacattggtaaacaggcggagagctctggtatcttcagccccttataagggcactatatcccattcatgagagctccaccctcaggacctaatcacctccaaaaggccccatttcgtaataccgtcagtaaagttccattatatgactttgatggggatatagcccatagtaggtggtatgtccctgaaagcctaaaatatttcccgttgggctcttcacagaacacatatatcctgggcccctgttccagagcattcatcaagtcagataaagggttaaaaccagtcagagaacctaggtgccactggaaccatgtcccgacacataatggcgggaccgaaaattttaacgcgatgggaactgctgctcaaaatatccctactctacgatgtcccataatctcgtacggacattcagtattgaacttgccaatccttagtgcacaggaatcttggaaac

SEQ ID NO: 551015 - DNA, 127 bp, Homo sapiens
ccgcatgctcttttgtacgatgtcacccttccgccacaacaccacttcctgctgcttgaagtagcgccactcctcctcgtctatcatcaccagtttgaggtaatagcgcacagagaacttcttgttg

SEQ ID NO: 551016 - DNA, 141 bp, Homo sapiens
tacgtaggcaagagaccagtcagtttctggttgctttactggacggctgatgactagtactctgttcgcttggtaaaattctcagaagccagattgactctctatgtatcttgttgtatcaggattgaaccggatagcttg

SEQ ID NO: 551017 - DNA, 1102 bp, Homo sapiens
caactacagaatactcctatatttttgagtgcatatggaatattccacaagatagaccatatactgggccctaaaaccagtttcaatagatttcaaaagattgagatcttatagaactgtgtactctggccacgagtaacagtaaaactaaaatcaataacaagaaaatatctagaaaagcccgcagagtacctggagggttaaagtatcgtttcttctagttaggccataggtcaaacgaagaaatcaatacacggcaaattcagaccaggcatgatgccatgcacctgtaatctcactgactagggatggcgacgatcttaggatcacttgcagaccaggtgttcaagaaccagcctgggcaacagatacatgatcttgtctcctgatatggtataggttgtgtccccatctcacatcttgtcttgaaattgtagttccaaataattcccatgtgattgtgggagggacccagtgagtaggtacattgaatcatggtggtcggcgatcattctcactccttaccatggcagatagtgacataagtctcacgagaatcataatggttctctggacgaggagttccccttgcgttaagctctctgcctttgcctggttgcatcaggcgtcagattgtgactgtggtccttccttgcttctcctgccgtggtttgtgaagtgttttctctgcccctcgtggacaagctggaaaaattcagcattagatgccgctctttccgtctctggctagacttggctcccagcacctggagcatatagtccgttgcattcagatctgtgcttgggttaactgcgggaacgtaagttcagcacacctcttcagtaacaactacgaagaagcatggttacgacattccgacgactgatatgagtgttactgtttgcgcccgcgagtctgcatacatgggacatttagcatcccattgtcaagtcacccgcagctaatcaatcaaggaaagcgacttatctctccacggtgacatattcattgcagctccacgatggaggttcacaatgcgattcaggcctgcaactcatatttagcctgccgcattctcgaaccagctgtgcctacgatggt

SEQ ID NO: 551018 - DNA, 251 bp, Homo sapiens
tatgctgccacagttctcagttcatatggctatcccatcaccctttatttggagaagtgaacgagagaaggaaattagtgatgataaggcaagagaacagagaaaggtgatacagaagcggaagcttaagatgctcacgaatagccctagatcgaagatgtgcgtccaggtgaggtggatgacagccgtccggatgatgatgaagcatcctctgaagctcaatgagcaatactttgatcaggcagcaccat

SEQ ID NO: 551019 - DNA, 161 bp, Homo sapiens
  misc_feature (38)..(38): n is a, c, g, or t
  misc_feature (141)..(141): n is a, c, g, or t
agacagagcgagactctgtctcaaaaaaaaaaaaagtnttgcaaagttggccaggctggtcttgaacccttgggctcaggcagtctacccaccttgacctccagaagtgctgggattgcaggcatgagccattaagccctnctggccattcagaaatctaa

SEQ ID NO: 551020 - DNA, 500 bp, Homo sapiens
tacttacatccgctcggtacctctactcgcgggtgctgtagccccagctaattggaggctgaggtgggagaatggcgttaaccccaggaggtgcagcttgcagtgaactgagattgcaccactgcactccagcctgggcgacagagcgagactgcgtctcaaaaaaaaaaaaaaaagaaaaaaaaaagaaaaaaaaagaaagagaccatgggtttctgaaagcaaaaaagaggaatttgggtttcgtgaaactgcaggttccattctctcagggcctctcatttggtttctggtgcccatgatttggcctgtgagagatagggggtgtgcctggtcctcaaagctcatgcaaatgggtctctgtttctaacaatcatttgtgcccagatttggatggtgactgatgctctactaattgctgaaaaagggcagagtggaagcacagaaaggggggctctctgaggagggtgactttagagcccatgttgaaaggcagaggc

SEQ ID NO: 551021 - DNA, 279 bp, Homo sapiens
  misc_feature (54)..(54): n is a, c, g, or t
  misc_feature (118)..(118): n is a, c, g, or t
  misc_feature (197)..(197): n is a, c, g, or t
  misc_feature (267)..(267): n is a, c, g, or t
ttgggatttcaccatgttggccagggtggcctcgaactccagacctcaggtganctgcctgcctcagcctcccaaagtgctggaattacaatcatgagccaccactcttagcctctanaaaaaaaatttttttagttagcaggtgtggtgatgtgcacctttagtcccaggaggctgaggtaggaagattgcttgancctggagaggtcaaggctgcagtgagctatgattatgccactgcactccagcctgggtgacagagtgagnccctgtctcaag

SEQ ID NO: 551022 - DNA, 453 bp, Homo sapiens
ctaccggggcccctctacacctgcgccctttcccaaaccaggcgtggataagaacgcgtgtttctaaacgcaccgggatgtattagtacctgagcccccccttttaacaataagggttaaaaaaattgcaacacctacttgttgacccggcgatcaagttttcccagcaaggaaactaaaaaagaactcctttctctttataaaagaacacacacccagggcagttgttctacatccccaaaagcacagtgcgttccattcgggatccctgcgccccaacctgccccgctttctcactcaccaaaccgttgataaatataaactctctgtacacctatatccggtcaaatacacccaccggaattgtccctcttttcgatctctctatacaacccttttcccaaaaaaaagggcgtaaattttgaaaaaaaaaaaggaccttccccaaaaaaa

SEQ ID NO: 551023 - DNA, 120 bp, Homo sapiens
aggtgaggatccaggagagagaggccactatttctcctggaaatatcaccctgcatatgtggaacagtttagagtattgctcggtaattgcaatagtgcatctcccggtggtgtaagaac

SEQ ID NO: 551024 - DNA, 1158 bp, Homo sapiens
  misc_feature (1158)..(1158): n is a, c, g, or t
aggtccccggcgccagagacgcagccgcgctcccaccacccacacccagccgcgcccgtcgtatcgcctcttcgtccgggacgccatctccgcgccaccgccgtccgcccagacccagtcgcacacccgtccgtcacgtccgatggtccaccagggtccgctggtccgtcgttcctgcctgatcgccaggagtgtctcggcggtgccggggcaccgaagagaccggcgcgacgcctccaagcctgagcagcgtacgaatgacgtacggtccgacccagtcaccatacgagccgtgggcgagcagcgctgagccaccgagcaccatgccgcagggcgtcttacagccgtcgggtccgccggtgccggcggtgtactgccatcgctgcatccgtcgttgctcgctgcgagccattgcgaggaggacagggcatgtgccgcgggcggttcgcgcgcttccctgcacaggacctctggtcggagacatttcttctgcttcgaggcccaggaagtggcccaattccaagagctaacgcggacgttgtccatagggataacaagcacgcagccattggcaaaacagaccgaaaatgggtcgaggacgccttggcaccgagacgcgctagtaagtgggaccccggcgtataaccggaaacagagactgcaaccaatcggcacgcaaagagatcggccgacctacttccccattgggataggcccacggcgcaagcaaagttcaaagccattcccataggcgtacgggcccctggtaagcattccggccacgcgataggatgtccgaaagggcggcccccaaaagggccaagaagtgcaagcgcggctccattggtggggggagaaacacattccgtaaacgcgaaaaggaagcaaggcgaaccgaacctggccaggggcggaacggcgttggagcggcgcccagcggaacagagagggaatgcagaagcgccagcgccccatagaaccccacaaaatgcgcgagaaccgaacaagagaggcccccaaggagcggtcacccggaaagggaggtcacggagaacggccgaggccaggaatcggagacccccgattggggcacccccgaagggcaaaccgactatctcaaatagctagcccatatcgccccgggtgacaaagatcacn

SEQ ID NO: 551025 - DNA, 474 bp, Homo sapiens
gtgccagaaccctttggtggccgggagataacccctttgggctctggcatcccttattcaaccgtccccccaacttcttatgatccaaccctgggcctccccctaaagagggggcacagtgtttataggctttccctataaaattaaaaaagcgcaagtcctattcttgccacaggggagccctaccccccttatccccatcttagttattttggaaaccatcagcctgctctttcaaccaatagcccgggcggtaggcctaaccgctaacatttttgcgggccccctactcatgcccctaattggaggcgcccccctagcaatatcacccattacccttccctgtacccttttcattttcccaattctaattctgctgactatcctagaaatcgcggtcgccttaatccaagcctaggttttcacacttttagtaagcccctcccggcggggctcccaaaaaaaattataaac

SEQ ID NO: 551026 - DNA, 106 bp, Homo sapiens
gtttcatcttgcatcgtgtgtgtgtagactttggagtgatagcaacctttgatcctaagcccattccttggaactctgaatggtgcagaactgtcataccatctgt

SEQ ID NO: 551027 - DNA, 901 bp, Homo sapiens
cgctgttaattcctgcccgggcccccttgtgcgcgctccccgaaagtgggtttcgggggagtatacacccgcggtccgcgcggacgggagagaaaggccgtgccctgcttcccccaggggaggactgaccaaattggcaaacgggcctgccttgtcaggcaaaaaacgcatggaccccctgcgtttacaggaccccaacgagagactcttgtcgtggggaaaagttcaacccgcgcggggtcacctccccctaggggacccgcacgtcctaagtcggcggtacgaccaagtaatgccaggcgcacgccccttctagaagtcgcctctgctccctccggggtggccacctgagaccattgctcctccctctggaagatggtcgccactgcaggcccctagggtggggccaccattttccacgctcacctggaataggtgccccacctcatactcggcacacttctggtcggagagtcaccccccctgccccaccgtgcccccttttgtgcggaccgacgacaacttgccgccgccccacttctctgcgagtaggtctcaagcagtctctcagggagccaccggccggtctgtctccgccttaccaccacgagcccccaatggtccacgcgggtcgatccctgcgaacacccccggccgacggaaaatggtggctgcgatgcagtgcaaggggtccccgccataggcgtggtcgaagaatgaattttccgcctggaggcggcgactcaccgccgagacgttgcggccaacgccttgctacatcgctgcggggccgattgttgttgccttgacgacccttctctcgctccttcacgcatactgtggtcgcaccgcttcccctccgggaaggtggggcgccctaaaagacactcaccacatgaca

SEQ ID NO: 551028 - DNA, 254 bp, Homo sapiens
  misc_feature (4)..(4): n is a, c, g, or t
cggntggggacggctctcacagtacggtgctgaaactccctactatattggtgtcctctcagcaaggctcaaaagcacggacggggtctcattcttttggtatccctaacactgagcaaccggcagggcagagaacagaataaatatgggctaaattctagagattccatcattaagttctgcccaccaggtcccaaggattccggctcaccggtactggtgagcgcaactgatccaggtagagagccgggcag

SEQ ID NO: 551029 - DNA, 448 bp, Homo sapiens
  misc_feature (125)..(125): n is a, c, g, or t
  misc_feature (243)..(243): n is a, c, g, or t
gagcttaagtatgccaagcagttcgccttgagcccagtggccctgaagaagctccgggttaaaaagctgaaaaagtttttggatgcctggggggaaccatccaaaggctgggcagaaaagtttgnctccatccggaagataaatgaattgatgcctaaatatgcccccaaggcagccagggccggggccgatttgtagtttgcccaatttttgttgcccctgagggggaaaaaccggttcaangggttactcccaaaacagcccttttggaaattttttttttaagggggcccccgccaaaccgggatcaaatgtgaagcctggggctttcctgatgatgcgggccctccgggccccccatggggggattcccttccttttgtgggggggggactctagggcttcaaagggggtttgggattttttttttaaagaaaaaaaattttta

SEQ ID NO: 551030 - DNA, 429 bp, Homo sapiens
  misc_feature (258)..(258): n is a, c, g, or t
  misc_feature (388)..(388): n is a, c, g, or t
  misc_feature (396)..(398): n is a, c, g, or t
ctcgacgtacagctgtttgtgtgtgtgcccgcgacagtctcgggttttgatgggcacaggatgggcggcaaaaaggcaacatttggtgggcaaaaacagaaacgcctgtcctcatttaggtccatggcacaggcccgaggttggagcccttgccagggatcctggccttctgtactcagcacttcgctgcccctctcctgaatcacatcaattaagaactttcttcaccaccccttcgctgtcatccttctctctccnctattcacccaacatcatccgggaccagaactaatgtcagcaaagcaggggaaggaagtaaacttctaggagtagaagaaaggatgaaaaagccaaccacaaccccctttcttcattaaaggcttccctntaccgtannngaaaacaactttgccattttgataatcaaaa

SEQ ID NO: 551031 - DNA, 218 bp, Homo sapiens
ctatgcatacagcctatttcagaacttctggcatgttgctgtaatatttatgacctgaaagagaatcaagtatttatctgtctttgagtcacatttagagcaaagtgactggcacacagcaataaatgaatgcctgtatgttatagctcagcaatcacaggatcttctttttcctcgaatcttaaaaacatatgtttcttacaagggaggtcttatgc

SEQ ID NO: 551032 - DNA, 458 bp, Homo sapiens
ggaaaaacagggggcccactttgttgccctggcttgtttcaaactcctgggttgaagcaatccttttgccctggcctcccaaagcactgtttttacaggggggagctactgggtccagcctgttttggtttttaacaaaaaagtttaaaaagtaaaaaaataaaaactttaaaaattggaaaaaacttttgaaataaagattttaagaaaattttttggaacagctattccatatgtttgttttaagctaagtgttttaagagtcaagagtttcaataaacttaaaagtttgtaaaataaaagtaagctccgggttacatttttgaagaaagaaacttttttttattaagttaggggggcctaagggtcccggggttttaaaggcaacaggagggggtgggaatggcctaggcctttacattcacttttcccttatttactggctcaacccaagcaac

SEQ ID NO: 551033 - DNA, 137 bp, Homo sapiens
atccaaagaattcggcacgaggctccctcttagccaatattgtgcctattgccatactagtctttgccgcctgcgaaggcgggtgggcctagccctactagtctcaatctccaacaaaaattggctaggctacggac

SEQ ID NO: 551034 - DNA, 311 bp, Homo sapiens
catgtcagtatgaagtagacattatctatagatatcaaaccaagtctgaattcaatcataagtcttattgagtgaacataacggatcttccactctcccaagaatcttatgtttttaatttaatttaatttcttttagagatggagtctcgctcttgttgcccaggctgtagtgcaatggcatagtctcggctctctgcaacctccacctcccgggttcaaagcattcatttcaaacatgaatatattaagtacagaattacaattccttagcttgaaattatgctgtgaaagtttggttcatgctttgtg

SEQ ID NO: 551035 - DNA, 227 bp, Homo sapiens
ggttcagtcggctcatgctggtataccagtactctggaaggctgaggcgggtggatggcttgagctcaggagttcaagaccagcctgggcaacatggcaaaatcccgtctctacaaaaaataaaaaaaattagccaggtgtggtggcgcatgcctgtagaccaagctactggggagacaggtgagaggatcgcttaagcctgataggcagaggttgcagtgagccga

SEQ ID NO: 551036 - DNA, 979 bp, Homo sapiens
  misc_feature (77)..(77): n is a, c, g, or t
tccgcgggggcgttgctgtggtgggggcctggtcctctgcaggtttccagcgtctgttttgttgggcggtcttcttntctccgtgtggggggaataatatggggcgcaagattgcttgccgcgacgcgcggataggggcgccccgccacggtttgtttgaggaagagttgttgtcgattgtttcttggcgccgccgagtgttgttggctgccgtgttggggcgcccccggatgggtgagttgggcgcccccctccgttcccccgcaggggcgccctcttctctccgccgaccgcttggagatgtgtttttttttagtgaagattgctccccgctcacggggcccctgtcggttttcagcaccttcccgcacgctttctctcgataggagtggttacaaccccccccgactggcggtctgtgggcccaaaactggtgtgggggcttcctcggagaccgtctcccacgagggccacgcgaggtgttccgcgagagcgcagcagtttgtgttggtgctgtggtcgcaacaaccgcaagtggggagaacccctctcgctggtggggacaacccgcgtgagttctcaccccctcggggagtgggggagttcctcgccagccccccgcggtgtgacttcttatcacctgatgaaagagagcagtcgtattccaccctgtctcggagcaacccaggggcctcccaccgcgttattggggagtttttcatccccctcctcgagagccccccacatttgagggagggttagttcgtgccccctcgacaagaaagtggggaccgaggacccctggagggagagggtgcgcaccccacctccacggggaccctcttttgatggtatttaaaccccgaaatttttttttcccccgaaccctttccttatcccccccccccccttccactccctttccaattaagggcccaaatttttccaagggtttcccctaaggaattttgggacccca

SEQ ID NO: 551037 - DNA, 432 bp, Homo sapiens
atgtggtcgatctctagcaggctcccccgttactggcatttaggggtgtgtaaaagaaggaattggaagagtgataggcatgggagtgccttcatagcaaacgacttcttccgcttctgtccttgtattttccctacggtgcttcatgtgtgtacttcattacatcatcagctcagttgttcagaagtttgtcctactaattctatagagaaagacttacagtagccacctagctgagagctctagccctgtgcagagtgttgctttaaatttggttttccataatagatgtacgttgatggtgaaaagcgttcattcttatcaccttccatttccacttctttacatgaatactgaagaaaaatccaaagcttaaaggaaatgtgcccttctatatgatgggtgaggggaagtagtacatttgtacatttc

SEQ ID NO: 551038 - DNA, 170 bp, Homo sapiens
  misc_feature (42)..(42): n is a, c, g, or t
cgcatcttctcccatcagtcatcaggatcaagcagaagggancagaactgaatgactgaaaaattacaacgttaaaagtcagtgctcactctttctgcttctagaaaggttttgctgtgtcagcatgaatagcgaaagaaaattgaaaacagaggggctgatggaacgca

SEQ ID NO: 551039 - DNA, 844 bp, Homo sapiens
  misc_feature (115)..(115): n is a, c, g, or t
  misc_feature (228)..(228): n is a, c, g, or t
  misc_feature (272)..(272): n is a, c, g, or t
  misc_feature (375)..(375): n is a, c, g, or t
  misc_feature (397)..(399): n is a, c, g, or t
  misc_feature (402)..(402): n is a, c, g, or t
  misc_feature (406)..(406): n is a, c, g, or t
  misc_feature (408)..(408): n is a, c, g, or t
  misc_feature (411)..(411): n is a, c, g, or t
  misc_feature (414)..(415): n is a, c, g, or t
  misc_feature (417)..(417): n is a, c, g, or t
  misc_feature (621)..(621): n is a, c, g, or t
  misc_feature (642)..(642): n is a, c, g, or t
  misc_feature (709)..(709): n is a, c, g, or t
  misc_feature (714)..(714): n is a, c, g, or t
  misc_feature (734)..(734): n is a, c, g, or t
  misc_feature (736)..(737): n is a, c, g, or t
  misc_feature (755)..(755): n is a, c, g, or t
  misc_feature (840)..(840): n is a, c, g, or t
gcgactgagagagccagaggcagagaggggagggggaccaaagccgggacggggagaggaaggggacgcggggccggtagcggccaagcagggggcaggggcgccaggctgtgancggcacccgcggaccccggacagggaccgccgacccggaccccggccggaccaagccagggcggaacaggaggcgcaagccccagggggccgggggcggcccccggacaggcnggcagagcagggggagcgggggggggcccagcagccgcggcgcncggcgcgcggcggcggcggggccgggggcctcggggcaggcgggggcgcgggcggcgtggcacggcgggcaaccaccagcagccgcgcaggggaagggcggcnagcaacgggcacggtgcgcggnnngcnggcncngcnggnncnggggaaacagcggaggagcgcggcggggcaggacaggaacggcatccgccaggcccaccagggggcccggcggcgcagggggggaggggccgacgcccgcggggggcggcgcaggggcctcgtgctgctgggcaccggcctgaccctggccgggctggccgccgcccctgcccctgctcggccgctggcgccatgctgtctgtnggcattgctctggctgccttnggctcgcttttgctgctgggcctgctgctgtatcaagtgggtgtgagcggacactgcccctccatcngtatngccactccctccacccacantnnccatttcttccatttcancatcttcatcatctcattacattattcttctttccttcttcactataccacatccatcatttccatcctcatcttacttatccanatcc

SEQ ID NO: 551040 - DNA, 812 bp, Homo sapiens
gggggaagaagttggtgtttcgctgggaccctgggtactgaacgtacgcggctccggggctcggacccctatgatgttatcctactcacccaactgccccgacacccgctcttttactcgtctctcactctggccagagatgaaggcgtgcaggcactgtggtgaagtgagataccgtcctggtccgaactatggagaactatgagtctatgtctaagtagttgtggtatcagtgcctgtgaccgaattaacaatgagtaaggctcactgaatcatggctctagaggaagacactacctaatctgcttataaaatctactttcgcgattgatgtttaggcgcatgacagttcaatacccaggtaataaattaattaagctgtaaactggatgtcacaagatttgatctccactaactggcatttctacggtaaataactatggggcaagactgaagatttgtatccacagggagccaaacaaagctgctgtgctatatgatgctgttttctttatttgtcgtctttacatcaatcttattcggattattcaaactgtaggtgatgcatgtacattgtgaatttggaactttgttccagcttgaatggcttgcagtaccactttgtactacaaatccagcgtcaaaaacattcctagtgtacaagatactgtggcatttgtccacttgaaaattgctgaagttttgcttattttatcaactcccgattagttaagtacaagtgagtctttgaatacgcggttcttaatgacctcattttagcccctatttccaggggttactgaaagggtttt

SEQ ID NO: 551041 - DNA, 938 bp, Homo sapiens
  misc_feature (365)..(365): n is a, c, g, or t
  misc_feature (807)..(807): n is a, c, g, or t
gatgaccgagcaccattgagccttgcgcgaaggaacaagcactgttagcatgggcggttaaaacggagaccacgaaacatgagtgagttcgccactcgcgagtctatgtcctgatccatgaccattccggtccatgtctcctgagacagtgacctgcctgttgctcgtctcatctcatgcgagaatctctaggctatggtgagcctcgcgatctagctccagcgatgctctaaacgagagctccgagtatatttagcgattcattatctgtgtcgtctttatggtgtgctgttgctagtcttagagtgccgatgtctttgtcgcggttttgcagcatttgctttcacgctttgcattcctccganttattcctttcctggtccttttcttttcttcgcattggttccccgtgtggtttatattccccatggccatgcaacctaatgcgtgtgctctctcgtgccgagttggggaattcctatgaacgcgcggtgccccgacacggatggttgattgccgccgctgtgttcgggccctagcttgtgtgacgtagcccagattcggatttttggataccccttctagccggtttttgcattccgtttctaacgtatcttaagccacgaacttggggtctcaccatatgtccctacggggcgttgtttcccttgttgctattgttcctctccttcccttatagcaatatcaatcgttatctttgatctccattgacatatcggtgcagaggatctcttcggtatatttggcgttcgagggacctttcaccaaagcgatcacagacccaangaatgctcgagcattgaacaacggaatggggttagagccaaagctccgaaatggaaccctcttttgtgtatgggcttgctaccgaacgacatggttgaactttcgtgattacttcaagaaggatgagtcca

SEQ ID NO: 551042 - DNA, 203 bp, Homo sapiens
gagctcggcaccccatgcatcaccacgcctggctagtctttgtatttttagtaaagatggcgtttctccatgttggccaggctagtttcaaactcctggcctcaagtgatctgcttgccttgactcccaaagtgctgggattacaggcgtgagccactgcgcccagcctccaccaaaccatccttgaaaaatcccagctattc

SEQ ID NO: 551043 - DNA, 193 bp, Homo sapiens
aggcgaggtcggattcaaacccttgccttgcggatgatgcctgggtggcagagtcctcgttcatggagcgcaagtatgatgtctagtccctcttctggcaacccaaggtaggcgaaggcgagccaaacaggatggatagacatgggcgatgggatccctgtgttgggaaagtgcaatgcatccacttcgagca

SEQ ID NO: 551044 - DNA, 271 bp, Homo sapiens
cttgccagcagtatgattgagatgggggctagtttttgtcatgtgagaagaagcaggccggatgtcagaggggtgccttgggtacctctgggactcagaagtgaaagggggctattcctatgttttattcgctatagaccattatgatatattaatagatgagatattgatatggtagtattaggttataggttcacttgtccgagacgacgtatacttgttgaagaggatagctatctagaaggattgtggactgcggttgcttgccgtg

SEQ ID NO: 551045 - DNA, 798 bp, Homo sapiens
tccccccctatttttcccgcgctttcctgcccccctctgaatttccccacaattttcacccccccacttgtctttccccgaaaataagtttatacaagtcgttccctgtaccccccccccaaatcggttaagtttcccccaaagccccccgcataacatgtgtgccaacaggcgttgcacaaaaaaaacatttgtctatgagaatcgcctccccacacttgtgttttaagtcacgctccacgcacgcggttttccccgcgatttttcttcttttatttttcgggggcgacgtttggattaactacttccagaaaagtctttgtcttcccgcccccttgtttttctttctacgcgcgaaaaaaaacagactgtgcgtgtgtttttttagtgctgactacacgcgggagaacccacactatccgtcctattggtgaggaagtaccacctccgtggtaggaggaacaaatctttttcgagattttttttaataatacaaacatatatatccgtcgcgtttgtaactatgctcactcgatgaaaacggaattccacccgaacgactgtcgccatcacaaagaagatatgaataagtatcaaattctctctctccctctaattatgcgtgttattattaataactatatcttttcctataattgcgagtttctttatcacacaatgtgttctacctcttattttaatttcttaatcttgaagaggttaatggttttattctaaaaacaaaatcctttttaaaggtaaaaaagaaaaaaatcgaattatcgtcgcacaaaacaa

SEQ ID NO: 551046 - DNA, 791 bp, Homo sapiens
  misc_feature (260)..(260): n is a, c, g, or t
  misc_feature (266)..(266): n is a, c, g, or t
ggtgactcacccggcagctaggtagatgcgaactgtcagaactcgtcagcgtgatacacgactatccatgcagccgttggggtctgcgctgtgatcgtgcctggcatcgaggtacaaactcaacaggctatctgtaccgagaggatcgtcgacaatactgtacgcagtgacacgtgttcacggaaccgccactgccggtctgcgtcgtgaccaggttgacatgctgactatctcgcctagactaattgattatggcatgncattgntcgcctgtggggccactactgatcacgctcgcgtgcagaggaatgacgttggggacctatgtcaggcgatgggtgaacaatacggttgaagtgtgtgtaccgaagcggtgcggaattgagaacggcgtggcagaacgcaaggtggcgcgcaggttccctcggggaatcgtcataattcatgctatcccgagccatggcatggggccagagtagggaaacctattacagtgccactaggtgggccgaatccttgtacagaacggttccatgaagcaaggttgaatggtctgcaacaaagcgatgatattttacggtctcctgccgccagaactggcgacactagggataacggaactggagtatgagttttaccgacggctggtggacaaagccagttgctcacctatcgcctgcacggtgagtcgtggcgtgaacaacgtgatcgaaacgtccggtggtacatacagattaacgatgaacaggcggcgggcggtattgtcctgtgtggatacttaccggtcaatg

SEQ ID NO: 551047 - DNA, 373 bp, Homo sapiens
  misc_feature (40)..(40): n is a, c, g, or t
  misc_feature (78)..(78): n is a, c, g, or t
  misc_feature (94)..(94): n is a, c, g, or t
  misc_feature (164)..(164): n is a, c, g, or t
  misc_feature (237)..(237): n is a, c, g, or t
  misc_feature (263)..(263): n is a, c, g, or t
  misc_feature (315)..(315): n is a, c, g, or t
  misc_feature (339)..(339): n is a, c, g, or t
  misc_feature (365)..(365): n is a, c, g, or t
taattgactctccacacttaaagcactgggtatgagaaanagccacaaatatacataaagaattcagatcacaaaacnctctaggacattggcngggcgcgggggcccaagcctgtgatcccagcccttcgggaggctgaggcagggggatcacaagggcaggngaccaagaccatcctggctaacacggtcaaaccccgtctctcccaaaaatacaaaaaattagccggatgtggnggcgggcgcctgtggtcccagccacngcgggagggctgaggcaggagaatggcgtgaacctgggaggcagagcttgcngtgagccgagaccgcgccactccnctccagcctgggcaacagagccagantctgtctc

SEQ ID NO: 551048 - DNA, 685 bp, Homo sapiens
cctcaagacagcccagggtcaaactttggcacttcaattcaaacaagtttccccccggtttagccatccgggggcatttaagcaaaaattgtttcttgcgtgtatcacaaagttcaatattgagagtaagtccacaaacaaagtcccttgtcagggcctccaaggctccccaaacatttaagtttctcaaaaagcaaaatggaagaagcaggttcaccacggaaaacttgcgcagcaaagaaaatcaagtttttttgttttatgctaaacttttacaaactgactgtggtagtcgtggcaatctcatgccattcagaacctttgattggcaacagtatctttgttcatttgataacaaataactcaaattttaaattaaagttagtcgacaacatctttcaaaatcttggaatcgtgtcgggggaaacaaaatacaagagatatgatttgatgtgaaagaatttaggacctcttggctttgattaaattagggtgtgcttctgttgtttcactgggattgtgaaatgttgggatgaggagatatgaaaaatctatagctgaatattctgttgatggttttaaaccatagaaataaatattcaggaagtctctattgagtagctctatagggtaatgctagctgctagagcaaataaactcacgtcttaaccatcttggccccgga

SEQ ID NO: 551049 - DNA, 665 bp, Homo sapiens
ggaacaatggtaattgtgggacttaacaaagagtgagtacagctgaaggagccggggagcagaaagtatatgcgtcaggtatgaggaagaaaatagattttggaagttatgagaaatgtagagagtgagttgagcatagttcgtgatttttagggcctctaaaattattaaagcagcggcagctgctgcatgcagacatgagggctaggctaaaacagtaaggtcaagtcgttcggacagaaaggctacagggtgcggtcctggctcttgtgtaagaattctgaccgcactaaccataccctaggaaggaaacggagtcgtcgttctcgtacgggattcgcggtctcgcggacgattcctcagaacgacccatcagcacgggagggcaacctgatgatcccagtgaacgacctgcatgccgaccgctagagtaaaccgggcattgggcacgaaccgcacccccttccggacgcccccccggagcagggcggacttcaccccccgaacatccccatctccgcgacagacaatgagcactccggctcggaacggccacgccacaacccgccactcgaaccgcaggctcagcagcacaagaataccacgacacgcaccgcagccacacccaacagcacacgcacgccaccccgcacacaacgcgccga

SEQ ID NO: 551050 - DNA, 343 bp, Homo sapiens
cagtagtccctgtgcctccttatagctggttttattaaaaatatttattgagagccaggtgtgatggctcacactggtaattccagcactttgggcggccaaggcgggaagatcacttgagcccaggggtttgagaccagcctaggcaacatagcaagccctgccctgtctctgcacaaaatttaaaaattagacagttatggtggcatatacctgtggtcccagctacttgggaggcagaggaaggaggatctcttgagccttggaggttgaggttgcagtgggctacaattgcaccactgcactccagcctggacaagagagtgagactctgtctccaaaa

SEQ ID NO: 551051 - DNA, 740 bp, Homo sapiens
ccaaaagctaaccagccaattgctctctctttgtgatataattactcccttatgaatgaagtatcaactacataagagaaggaaaagaacgatttcgtatgtatactccctaaacacaccgagtttactgcgtacagatctagactgtgagcatatatatgcctacttcgcagtgcatcgcctgctgatgtatcactgctgctgctttcgttgtcttgagtcctcaaactctgctttggtagtgcttctccgaggggagaacatactggagctggtgttctgcaagacaggccattctttccgaagccttttcttctcaggtcctctttcttcttggtgacctctttcgcctcatcctttgtgaggggacggcactcctcatcattttcaggatatttgctgccaacccatagccttcaatatgctgtcctctgcttctagatgatgtgtgagagaacctcttctttcttccactgagcgagggggggcaacgaccattttgatggccgtcttcctccccatctccgttgcttctaggtgtgctgtcgcctccatatcttccagttgtgactctcttattcgctgagatgtccccttccgttctcctcgagttgcagcctcctctccgtggttgtcggcgaccattcgcaaggaggttcatcggggggggcggacgcctctggggaacggctcaccgcctgtgttcacggtttgtaaccccgaagaagagctcccctaca

SEQ ID NO: 551052 - DNA, 818 bp, Homo sapiens
tcctataaccaaccttttatggggtgcttccaaggtcccaggccccaacccaggcccggtaatccaaaattctccaacacaatcttcctttcccctcagaagaagccttcacgagttctacgtggggaagaagtgaccatttaggccaggcaagtgtgaccccagaagtggactcgtggtcgtagtattgcccaggatgtggaggagtctcgggaagggagaaaagttttagcccaagagccctccctaggtagaaagtctcagagttctaaattgtgtgaaaatttgcgcaccagatagaatagacgttcacccctttgtctctcgtgtgtgacacccagaacagacaagaggggaggaaatctccagacagtgtgcgccatgtgagtgagagacgccccacgtgcagtctcttcggtgggatatccctagcgggagcgcgtggtggacacctcgatgaaacatgtggacaaggaagagaggcagagtcctggatgattggacgcacctccccatacgagacgactggtgatagcgaccgccaagagggcgccacctctagtagacgatacgaccccctaatataggaagagtttcactccaaaccagaagcgccccagcatcgctatgaggagagcgggtcgtccccaaagagactattataatctactccccttcataggcaagtgcgcgcggctaatcgccaagtaggggagaccagccccaaaacacacgaggaagaggcggctcgtctctatattaagcggccgggcccaacaagaaagagaagtgatgacgcacctctatatgatccaccg

SEQ ID NO: 551053 - DNA, 124 bp, Homo sapiens
gtgggtacgtctggtgccctcggacatcgcgtgcttggcagctcgccgggcagcagcaggcgcacggccgtctggatctcgcgggatttgattggtgcgacgctgcttgttgtagtgcgccacg

SEQ ID NO: 551054 - DNA, 649 bp, Homo sapiens
atggcgagcatgttctgcgtgcatgtcgataagcagagctgtacttggggagaaggagggaggtctcgggagtgtagcaccatgccaaccagccctgcgcgaagacagagtgagccacgcccggatggcagggcatgtttctgttttggtgtctcactttcctcccagcgtgacttatttggggattcctcagggcctactggaatgtgactgacccactgcaccagactgcctcgggatacaagtcctggccctatgtcccagctgtcagagggcatcagaggaatccatacccagccacactgtcctgggatggagtgtcagcaatccaccccattggttgatcatcgagagccgaccatccacagtcctgggtgaagatatttggagccaccagggactccacttgagccaccttcacgataggaaatagacacgatgcttatttaatgcaggacactttgagtgttacaaactctgtagacctggcagataacggtcatgaatgcttcgggaagcggtgtagtgccctaggattggtagacagaagggacagacacttgtgcacacggtgtctttggtgatggggtaacaaacattacataccttacctcaaaccaacaaacacgtatgtcgcacttcccacacc

SEQ ID NO: 551055 - DNA, 457 bp, Homo sapiens
  misc_feature (124)..(124): n is a, c, g, or t
  misc_feature (163)..(163): n is a, c, g, or t
  misc_feature (279)..(279): n is a, c, g, or t
  misc_feature (317)..(317): n is a, c, g, or t
  misc_feature (358)..(358): n is a, c, g, or t
  misc_feature (450)..(450): n is a, c, g, or t
agagcacaaaggaaaaacccgcaaggacagcacacacccaagcccaaaccaaagccacaagcggagcagggccacgaccagcccacaagaacaggaaccaaccagcgggatggagaccagaccnagcaaaagcaaatggaacaggcaaaccagcagacaggcnacaccgactcagccaccaagcgccccaagcacccccaggcccggcaaccagcccctggacaccagacaaccccccagcacccagagcagaggcagccagcaggaaagacgggcaangcagcaaccacccaaccgggccccaggctccccttcanccaacacagccagaaccccccccccaaacacaagtgaccancagaaaaaaaaaacaacaccacaccccccaccccatcgtgggtgagggtatcccctgtgtgtcccaggccaataaaatctacctgcccctgncaaaaaa

SEQ ID NO: 551056 - DNA, 114 bp, Homo sapiens
cccagtccaggaaagctcagggctgacaaaagagcagtttgctcaggacgacacctgggaactcgccccggctctacttctcagagggtttactaagaggggcttacaatggtg

SEQ ID NO: 551057 - DNA, 131 bp, Homo sapiens
  misc_feature (21)..(21): n is a, c, g, or t
  misc_feature (29)..(29): n is a, c, g, or t
  misc_feature (124)..(124): n is a, c, g, or t
acccaaccgggcggccgccgngggggggnccacccccgagggattgttcgcctcaccccccaccccatcgtgggtgagggtatcccctgtgtgtcccaggccaataaaatctacctgcccctgncaaaaaa

SEQ ID NO: 551058 - DNA, 857 bp, Homo sapiens
gcaatcctccaacctcagcctccaaaagtgtgggaaatacagtgtgtgagccactgcacccagcccccaccccttagcctttggctctcgggtcacttcacctgtccaggcctcagtattctcatctgtaaaaggggagtgagaactcctgccctgatgacctaagtagggtttggtgagactcaaaggaatcaggggccagcatagagtttcacgaggctaaaatttcactcgacaaatttaagatgtggggtaatttatcagcaatttatgggtcgagtctggaagtcttctggtgcccagattctaaggggcagtgggtctggaaggctgaagtcctacctggctatgaaaatgtggctgggaggccagttagcttgaacctccagtgcgaccattctgcagactggacaggccgctgcctcctgcctcccagttcgcccctgcctgcttgcctgcctgtccctccttcattaccgtgtcctgcttacggggggaccagcttatagggacatgcgtgggtatccacttctctcccataactgcaaagcgcatgcaaaacaaccacgaagggacggtggggaacacaccagctggggatgaagagaaagggcacgtggggctgaataggggggaactgagaaatagaacccccgtgctattgaaccaaagcgaaggcgggggacaccaaacggacacgacggtatctaagaaggcaaccgtaccggacccataagtccctccgaaggggaggcggacacacagggactacggacaggcaactaaatcaaaaagaggcccagttgctctcacgacccaatcacaacgatagagcaaggccgcaaacgacagagaaa

SEQ ID NO: 551059 - DNA, 625 bp, Homo sapiens
  misc_feature (252)..(252): n is a, c, g, or t
  misc_feature (348)..(348): n is a, c, g, or t
  misc_feature (367)..(367): n is a, c, g, or t
  misc_feature (489)..(489): n is a, c, g, or t
tgaccgagctgatgtcttctgagggcctgcttcctagttcatagacagccatcttcacatggcagaagcaggctaggaagctctctggggttccttttataagggctctgatcccattcatgaaaactctaccctcatgacctaatcacctcccaaagggcccacataataccatcacattgggggccagaatttcaatatatgaattttgagggggacacaaacatttggtctcttgtaggctaggacacngcaagaggtgggggagaattgtacaaaatgaggttggaaagggaggcagacaccaaatcaggtaggcttggccatatatacctctaatctttctanttgggacccttctagcttngcaaactcaagatttacctcctccaagaaggcttcctgtataatacataccacattgttctaattattattttattttgtttgagatagggtctcactccttcacccagtctggatgtagtngtgtgatcttgtttcactgcagcctcaaccttctgaggcaggagaatcgcttgagcccaggaggtggaggttgcagtgagcagagatcgcacccctgccctgcagcctgggtgacagagtgagaatacatctcaaa

SEQ ID NO: 551060 - DNA, 541 bp, Homo sapiens
tgcagacggggctcccagcctcgaccagccccggaacccccagcacggggacgtccaatcttttggcttccgtgggccacactggaagaagaactgtcttgggccacacataaaattaacactaacagtagctgatgagctaaaaagaaggtctgtgcctaaagctcatgttttaagaaagtttacgaatttatgttgggctgcattcatggccatcctgggccactcacagttgcgccagagcctcaggagcacaggccgagcacctgccctgcttcacccagggacggggccctgcactgaccaggaggctgttgccctccaagtcgtccctgccgggaacagcaaagcacacaaacctccgagagacctaatggctgcatcctccgtgcagtgggcaccacgcttgccacctagaagagtgggtttggcagatgtcagttaataacaaggatgtaagttttaaaatcacgtgggggtttgtaaacttgaggaattacagcacaaacacttccatattattaaaagaaacagactggga

SEQ ID NO: 551061 - DNA, 237 bp, Homo sapiens
  misc_feature (77)..(77): n is a, c, g, or t
  misc_feature (89)..(89): n is a, c, g, or t
  misc_feature (125)..(125): n is a, c, g, or t
ggaaatacacacatggggcaaagatatttgctcaaggagccttgagatatgggtgttctatataaccaaagctattnaaaattatattnaaaatgtagccaggcacggtggctcacacctgtaancccaccagaggctgaggctggaggaccgcttgagcccaggagtttgaggctgcagtgagccatgctcacatcactacattccagcctgggtgacaggaaagaccctgactct

SEQ ID NO: 551062 - DNA, 300 bp, Homo sapiens
  misc_feature (259)..(259): n is a, c, g, or t
ggtcgacgtgcagatgtcgcgacaggcgacataatgtacctccggcgtgcggccatccggtcgttgtgcaccagacctcgcggagtcttgaatggccttgcggaatcgtcgctacacactgaaaccaaggttcgttccagagtccacgcattattcgttctctccctcgtggtcatcctcgaccggcatcggtgcgggtcacggcggcaccgtgctggcgatgttgttgcacgcgatccaacacctggcctatggtatnggcaggacagcctcaccagccatgaaagcttcctgtcgacg

SEQ ID NO: 551063 - DNA, 1892 bp, Homo sapiens
  misc_feature (1138)..(1138): n is a, c, g, or t
  misc_feature (1244)..(1244): n is a, c, g, or t
agagatttctgagatctcgcacgctccatgactcctggattcagacgatgtatcgacatctacgccaagagtggaaccaagtctctgtcacggcaagatccccgtacgacaatcacgccaataggatttttcatgcgattacctgcgacaaacctagctctgtggcaagcccgtgatgcgtggctaattcgacacgaaattctgatatctagtcatttaataaagcatgtcaagcgcatatatacatctcgcttgtgagcaatacataggcgtgttgcatgtcatgaacttatgatatagaagacaggacagtcaacacagagacagagcaggcgaaggtcctgcaaaatggatgatacaagtgacgccactgagtatctgacgagtgcacactaaccataggaagctattgcaccaaactcaacgtcactacacgtacaatgaactgtcctttgtttggaggttgaatacggcttctcgttacatgaagctgagtcgtgggaattccgggtatcatacgcgacgcagttagaggaaattaaccactacaagtcgggaagggtaccattgtgggaacatatagccgagcaaggatactcttttcgtgcgacccaattgtggtgctaaagggtgcatggcacctatacgacatatttctcacgtgccatgcgttagttttgaaatggactcatgcgtacgcggtgtgcacggcggctgcggacacagtgtccaggcgcaatttctcgtgcatggaattgcgtctatcacagggcttacataacctttaactaatcaaataaggacttaaaaaatcgttgagcgtgaaatcgccacgagtttggtcttttacacaacacactaaatgaccatagcagaatataaatataagccgttgggcagcagacgccgggatcgtacactgaaagaatagtttatattgcacccccataacggagggagggggggaccccctccaagatggtcttttaaaacagcccgatattaaatccacaagaagactatattgcgttatggtacaaaagaaaagaagtctagtggggggcgacccccccaatatatctaaaggtacgacaagaagtcacgcgagacaaactttatcatcattaaagggccgagntctataaggaggacacaacaatgtgttgtaacccacgggagtgacagtagtatatatatacaaccaaaacagtggtttcgatgatagacacatgtgtggacagaanacacagctagggcgatgtgaccgccacatgtgggggagcacaacttccatatggagtagcaaaagaggaaaccgccgattgacacatacccatgtggtcagagtggttggaacccaacttaaaatttgggtgaccacaacagtatacaacagtataagaaagaatattataacagcccccttataagtggtaaaacacattatcacacaacgactctacataaccaacatgtactacaaacagtaccgacagtacaaacaaccaacatcacacagtccaacatcaattagacactaaaaacagcaatatgacacaacaactatactagcctaaccaccaggagtacactcgacatacataaaaacaatttttacgggaacacgtagagcgaagaaacgacatacacacaacaagcgcagcagcagaacaacacgaaagacaaggaaaacgagaagcagaaatacagacagcagcaacacgtgccagacagacacaaagaacaagaacaacagaacagacgaaagacaaacgaaaggcacaaaacgaaaaacaacacaaaagacacacacgaacgaggagaaacaaaaaaacacagacagaaaccaaaggtaaagcacacaagacgaccgagcaaacagcgacacacaa

SEQ ID NO: 551064 - DNA, 268 bp, Homo sapiens
cccgccccccccccccccatatggacaaatgataatagggggtggaatgtcgtcagtggccaacctttcccagatttttattttgtttctgtcttcaacatttttgaccctggggtaatagttatattcaggacatgaaaaaaaactcctgtgttgaaagccttttaggaaattttgccaggatttttggcccaaacctttttttgaaaaaaaacttgttaatttattctattttaatttgccaatgtccataaaaagttaagaaata

SEQ ID NO: 551065 - DNA, 110 bp, Homo sapiens
gccaagcactctttactacaatagggcaataaggatagcaattcacatacagtgtgattagtttcaccataccacacattatgggggatggcaaaaacggggtctaaggc

SEQ ID NO: 551066 - DNA, 137 bp, Homo sapiens
gggatctatacaacactagaagccaatcagacccagcaggcatatatacaacactacaaaccaaccgggggcgcaacaggcttatatgcagcactacacaccagtggggcccagcacacatgtatacaactctacaa

SEQ ID NO: 551067 - DNA, 136 bp, Homo sapiens
tgacggtgttaagaaggtcatggaagagcggtggaaccaggcatagtcccagcagctgccattcccttcagatagtctgagcctctggggaggcgattcgagcacaagccaacggccgatcattgactataatctg

SEQ ID NO: 551068 - DNA, 552 bp, Homo sapiens
ggacgcgtgggtcgacccacgcgtccgattttaataaatgctcattagtctgtaaaaaaaaacaaaaaaaaaaaaaaaaaaaaaaaaaaaaaaaaaaaaaaaaaaaaaaaaaaaaaaaaaaaaaaaaaaaaaaaaaaaaaaaaaaaaaaaaaaaaagagaaaaccaaaaagagaaatacaagaaacaaaaagaaaacaagcgaagaagaaagagcgacatcaatgacaaaaaagagagcacagcgagacgagggacagagatgaaagcaggaagaacgacagacgaagcgacccgcgcacgcgcaggcagagacacaagggcgaggataattaaaggatactgatagattataaggagatactaaggtagacacgtgggagtgtgatgacaaatatgaagatagtaatgatgattaggtagaagtggtggtgtataaatgtgtagttagtaaaaaagaagtagaagagagtaaatatagaagaggatgagcagtgttttttttgtgtgttgttgtttgttgggtgatgatagaggaggtagataataatatg

SEQ ID NO: 551069 - DNA, 372 bp, Homo sapiens
  misc_feature (15)..(15): n is a, c, g, or t
  misc_feature (18)..(18): n is a, c, g, or t
  misc_feature (27)..(27): n is a, c, g, or t
  misc_feature (46)..(46): n is a, c, g, or t
  misc_feature (180)..(180): n is a, c, g, or t
  misc_feature (243)..(243): n is a, c, g, or t
  misc_feature (274)..(274): n is a, c, g, or t
gcggaaatggcttantangcagatgangtggtctttgacaaggttngattgaaccagagcacttattgcttaaagaataacagagttctagagctgggggttcttgggccatgctccgtgtgtggataaggaaagaaatactgtttctgggactctcccacagtcacaaagctgttttcnctgtggcccctacatctcttaacttttgctattactcctatgctgccttccggattactgctngtctatcttcttgctccactcactgaagatnctaattataatcccatgaaaatgtaaattacagtttacttgggagagccagattttctctgtgctcttgagttttttattcattcaagaaaccttggg

SEQ ID NO: 551070 - DNA, 351 bp, Homo sapiens
cagaaaagccaacatatcacttggctcatgattttcattcacaagacacttttgacaattgaggccaatatccagaagagcccttataatctcgtcttaagtggtcccttaaatacgttaaaagcccacaatataggcatttacaaggcttttctaagacttccagctcttgaaaaattcacaccttcacagtttcaaatcacccacttaagttgttaagggacagcgaagtatgttgatctgctgcgtatgcaagtctgacgcctatctttcaagtgtctaattcacttgatcacacccacaccacacacaacacaaccctctgacacaggctgtcgtggacaacaggag

SEQ ID NO: 551071 - DNA, 1321 bp, Homo sapiens
  misc_feature (306)..(306): n is a, c, g, or t
  misc_feature (420)..(420): n is a, c, g, or t
  misc_feature (458)..(458): n is a, c, g, or t
gctcaggctggaagagttccttggcctagcatggcagcgagtaccattctggtgaaactgttgggccctgacgtgcggagtggccgaatgcagaattctcaggagacatggcgactgcatggatcctgtgtcctggtcgaggagtcgctacgctgcagcgctactagcttcagacgttggatagtctagactgtgtgccctgagccgaatccgcgaactaggcctgtcgtatgactgtatccatacagaccaataatgtgagttgccccgctgattaccctggcattgaggtagcgcttgacggtngtatcgtatctggtgtgggacttctcaagttgacgagattggtgtaagctagtgccccggtaacctgcagggacattacggatcggacaattggttgcccaaggcgctggctcntgatagaagctgtcttggtcaagttgtggccactcatnagtttccagacacaatcttggcctcttgcatcggaagggtgcgtaggtagccctttgcagtggcgttgatgcctttgcgacgttccgtcggaagcattcgtgcattccttagcgtatgagtgcacagctttggacgcccaggacccattgaggcctttcttaggtgccccaaaactagtcctcgcggcatggaatggggactcgtttggtttcaataggtaccccctttgtaacgcgaaatccgggcgcgcacaacccgcgttatgggccccagcgttgcctttgtcccctttatggacagcgtcccaccccggaacctaatctcgaccggttggacccaagggacgcatctttggcgatcgcgttggttgccccgggaagcattcgcacgggacggtgaagccattgagaacattgcggcgcacacacgtgtccgacttctctaggcgcaaaggaaaagcgttaagcaaacgcgagagagtagctcccctttggggccacgggggtacacttcctttggcgtttgtgaacgaaactgcccacgtttggccccctggggcaagttgggtcccttagtacgcggattttccccgccaagtttcttttccaaccgagcagtggttggcgtccccattgtgtgaaactggcagacacccttgtgcgtgcgacatgggcagcaagttgtgttcagagccgacactatatgggtgcgccccaacgagccgttgggctgtctccgcacctgagagagttccgcacaagaccaccgaaaggggaagcacaacactcggttgaattccggcatgggcggatgagcgatcgtactcgtagtggacacacgcgttttccgctggtcgagcgaa

SEQ ID NO: 551072 - DNA, 460 bp, Homo sapiens
  misc_feature (143)..(143): n is a, c, g, or t
  misc_feature (168)..(168): n is a, c, g, or t
  misc_feature (423)..(423): n is a, c, g, or t
gacttctcaggaccgggctggaacgtgcagctcctggccgggacactctgtctttcggggaagggaagtggcgccgatggatccgtgccgctcgggactgagccgccacgagggccctgtgcagctcgccattgttgcctgtngcttaggcgctccgctgcccgtcgncggtcccagcgacagggtctcttatccatccctgcaagttctgggctcagaatttgtcactaaggctgctaactctaccttgattctgttctgccctcggtgcagcagcctttgatatagtgtccttgtgactctagcatgagacttcaagcagttggctcactactggagaaataaaggatattgccagattgactctcctgtctgtagcaatgttagcctcaagcaagaggatgaacagttcttgacgttctnaaatgcttctaaggtggaagtcagacaaggctcagag

SEQ ID NO: 551073 - DNA, 82 bp, Homo sapiens
acggaattttaatctttaaagcgatacattgtctattattttagtacatgacgtaaaccttgtccccttctgtcgtcttctc

SEQ ID NO: 551074 - DNA, 187 bp, Homo sapiens
ccccaattgaatccattatcctgactgactcttctgatatacagcagttggccagtcacaatgacagaataatctaaagttaaccagccagatacctttatttcattaaagtggttttgattctccaataagttattgtggcgaaccagtgtggtacttgggtcacgagtgcagttgtgttcctata

SEQ ID NO: 551075 - DNA, 210 bp, Homo sapiens
gatgctgctggttgactctatgagtgatcccctgttaaccagtctattgggatcatgactacctggagtggcactggaccctgactgtgcagacccactgtgctgcctgccgtgggttctgtgccctgcctgtcccgcatccctggccaggtgccggatactggggcgaatacatgcaatgtgtgacctgcccctgaggaccctggagag

SEQ ID NO: 551076 - DNA, 793 bp, Homo sapiens
aatctggcacgaggctgaggcggcggtgtgagactccctctttccctccctcctcctccgtcctgccctgtcctgtcctgcgcgtctgtcctgttcggccctggtcctggccctgaagcatggcctggctgtcagcttcagctggccacctgcctggagctgctggctggcttactgatggatgtgtgatcctgatgatggagatgctgctggcctgactggtgctctgtacacatatgaatgatggctccgatgacctcaatgcttggcagcatcatgtgatgaatgtgggtgcttgcagtgagctttcgtggacacttttgagaaccagaagtgtgatgtacggcttctgcagtgtcaatggactcccaatgctgctctgccaaaatactgtgctcatcaacttgggtgggctgaagatgtgcctgatgccctgcaagtgcgcttgtgccagccacgtggctaagtgtggcagagttcttccagtggtgtcgacgtgatcgtgaacgccagcagctgtggaagacatagacgcgggtgccatctgggcagcgtgctctctaactgggctggctgctgactctccagccctgtgctgcaccgactgccggctgcgagaggatgagaacgcagagcccgtgggcaccacctaccagaagacggatgcagctgtggaaatgaagcggataaccgagagcaggtcggggacaggcacgaaggagaagagctgcggaagaggaggaccggaaatgcgccggtgagaggccaggttcgacatagcggtgggcaggcg

SEQ ID NO: 551077 - DNA, 224 bp, Homo sapiens
ggtatttgggtgcgaggggagtgacggagatgtagtgttttggatgtgaggggagtgaggagatctcagtgtgtttgggtgctgaggggagtgaggagatcacagtgtgtttgggtgccgaggggagcgaggagatcacatgtgggttttgagtgctgatggggaatgaagaagatcgcatgtgtgtttgcggtgcctgagggggagtgaggcagatcacagag

SEQ ID NO: 551078 - DNA, 178 bp, Homo sapiens
gcgaatgcggtatataggatagtataaactagttaaatgaagaatggttatgttagggtttgtacgggtaaaactgctattattcatcctatgtgtggtaattgagtgtgtatgcataagattttgctgtagtctggagttatggtttaactccactctcagcgattcctcgacaagc

SEQ ID NO: 551079 - DNA, 748 bp, Homo sapiens
tatgtgtcatgtatgtgatgaagtctgtgtgtgtgcttgtgcacacatgtgtgaaaatgctgggcacagaagaagtgttacaagttgccagttatcgtaagtcctttaaaggggcagaaattatatgtacggccaagtagaatccatacattaggtatgatttaaagacttactgatactctttaagcctctcctgcagataatagttcgctttatttcttactcatttcaagtttatgggtttgcaaaattttgtaaacttttgtgtttttagccttgtattttttacagcctagaatcttgcaaaagtctgaatattttttaaatgttctatcttaactaggttcactaatacagtatttttagcagacagcattttcagacagcattttcataccaagttgacttgtggtctccaatcttactgggaaggccctggtagtgtaattcttttccttatcacacaggtaaccaagtgcctctaagtcatgcttatttgtaacaacaaagaagagtatattgtacctgctcaaaattttcctcggataatcgttatataattaatttctaatgatgaggacatgtacacagttgccagtaagaacatagtatgcatctcacttcacctcacgcatggctactggaatcactttctcccggttcttgccaggtggaaatcgattaagccattctccttgcggttgttcgcagtcaatcccctcgcctcagatgccgcccacatctcagg

SEQ ID NO: 551080 - DNA, 540 bp, Homo sapiens
actgtaatgttatccttaggatatctctgtttttacaaacttagatgaccttttcttcactgcttcatttgggttgtggaagttggtcatacaagttgagtgttgtgttcttactcatgaaaaatgtttgcatgaatttttagagtttttacatatttcattgagtcagtgggtttcactaaaacagctgtgtgtcttattctccatgtctggaaaatcctgccgtaataattacatttaccccagacgactactctactgtgttaaaaagtgaaaatatttataaaagattttgtggtatttttaagtccttaagttagaggactaaaccttttttatgaatgaaaggataatctctaggaaatgttagtttatgatagtttgtaacttgtgaattttggtttccagacatggagacaaaaccaaccaaaatactgtcaagtggaacgtaaaaatattaattcagaattcattttattttggcaagataaatttaatgaagaataattaacatgctttggagaaagtgataaaaacatg

SEQ ID NO: 551081 - DNA, 737 bp, Homo sapiens
  misc_feature (17)..(17): n is a, c, g, or t
  misc_feature (19)..(19): n is a, c, g, or t
  misc_feature (24)..(25): n is a, c, g, or t
gcccatgaaacctgagncnttatnnactcgtacgcctgacctgattacgccaaccttggcactaggcggacatcgcagagactgcggaagatctgacccggctgcgtgcgctttagaacgcaggatcccccgggctgaggaattcggcacgaggttcgatacctaaccctagcccagtaacgctcctggtgaaaagcccaaaccagtgctaccgcgacttggacctgagtggctaccgcggatggagtgtgggccaccgttaagcccacactgaaccgagtctaccacctaaggttcgcgttcagaggaccataagtttattaatcttgggaaggtgatgttggatcaccgatgtttcagggacttgcttacaaagtcatgaaaaaacatgcatgcttagcatctggagtgcaatgtgaagaagacctttatgaatgccagaaataaactctaaagtggttgaatccacagaggatcctgctggttctaattgctgacagtattctgaggattcctaagtgatggtttaaggcattcggaagttcttctgaactcttcttctcctgggtgggaattcatatttttgccttgagatactcaatagggcttttaaggccagggttctggtttactcctgttcattacccttgggagtgttatagctattcctgatatcatatgttttaattctctatttaatttcatactaattttactaagctaatgttagtttttgg

SEQ ID NO: 551082 - DNA, 291 bp, Homo sapiens
gcaacagaatgaaactttgtctctatctttttttaagttgtttccccaagatggtagattagagactttcagcttgcctcagccacttggaagtagcaagatagtgcataaagatcaactctgcaagctttaatttacaaaggaaagtgggaatccaccagaatcatgaatgacatcttagatcccaggacggagcgcagaggctaacagactctgtgacagcacctagctaaaagaagtgagggaagccccaatacgtgagaggcagaaagcctccctctgtgatgcacc

SEQ ID NO: 551083 - DNA, 211 bp, Homo sapiens
acaaaagagacgtgtttccacctgcccatattttgttggaaccatgtaagctctggttgccatttctggagcgcccgcattccagaatcggcgctcaagcgtgtaatactgtcgttgctcagcaatcgttcccgttgcgggccagggcggtaaatccggctgaagagtattcacaacggtcttcatttcagcagaaataaggtccagaaca

SEQ ID NO: 551084 - DNA, 932 bp, Homo sapiens
cgcttcaacctcctagtgtctgttagcatcttccttttcatggggggagggaagataaagtgaatgcccagagctgcctttttcttttctttttaaaaattttaagaagttttcttgtggggctggggaggggccggggtcagggagagtcttttttttttttttttttaattactaaatgggaacttttaatcccatattaatacaagggggttggaactgggacatcctaatggatgcaattacggtcatcacccagctggattccaggggggtgggcaaactcatcgggttctggtccggagaggctccacaaggcccacccgcatcgccattctggtagtctctcagggtcagcttgtgataacaggggcaggcttgcgttaatggggcctagatttggctggcagatataaatccgttggaggatctcttctctttaaccatttttcggggtgctcatcactctctctttctctctctagcttttaattcaggaatatttccgggtctgggctctctctctctcggggtttcctccagccctggtctcggagacggtggtttcctccctggcccattatcttttcacctcccaggtctaccattcatgggggtcgggggtccaggctaagggatgagcgttggcatggaaagcatagggggagggacatcccggtcaatgtaggacgggtggctaaccacgtggcatactagagggaggtggtgctaaaagtgtgggacccgtgcccaattggcagaatggggcagggcgttcaccacaaggttacttgtgggacgcaaaagggcccaaagttaaaggataaggcggcaacagggaaatcccgagaggctcgggaaaccgaagaaacacgcagctaaccgtgatacaaacgaaaagtaaaacgaccgagccgcggagtatgaacaca

SEQ ID NO: 551085 - DNA, 184 bp, Homo sapiens
  misc_feature (182)..(182): n is a, c, g, or t
ggaacaaaattctagggttaatagcatgggatattagttcaaatggaccttcttctctactttccaacctcactgtccccctacagctttatttattcacacaaatatcctaaatactgaaaataattgagattaaaagatctagtgtaaatatccacaaagaggtacattttttttttcanaa

SEQ ID NO: 551086 - DNA, 145 bp, Homo sapiens
ccgggcagaatggctccctgatcagacgacgcaggacgactatgacgaacccatggatgggggacggacctctgtgccagagagcatgtgtgagtgagcacccaagggcagagggagaactctggtcagagcaggaggaggcgat

SEQ ID NO: 551087 - DNA, 1134 bp, Homo sapiens
cggaggaggcaggaaccggagacgcgagcagtagctgggtgggcaccatggactgggatcaccaccatcgaggcggtgaagcgcaagcatcccaggttctgcagccagcaggccagcatgatgccagcaggcagcagagctgagcgccatcccagcgcagaagttgagggcagcaacaggcgggcccgggaacaggctgcaggctgcaggtggcctccattgcaaccagtaggcatccagcgtggttgcaagcaagcagctggcaccgtgcatcaaggcagcgcctggcgcactgccctgacaaaagctggcaagcaagctgaacaacagctgctgatgcagagtgcagcagcaggtcatgcacaggttcattgcaaaaccgggccattcactagcatgcaagcacaccagcatggcaactccaggcaaatccaactccaacagcacagctcaagcacattgcgagcacgcaggcagatcaggcaagtcatgacagcaaggtggcatcggtaagttggtgcatccattgcaacggcagacttggaccgcaaccagaggaacagaagctgcagctggcagaaggtcccgttgccgcagacgatggactgagcccgacttagacctgactggaaccaagaactctgacacggtgtactgagaatgctgagtgaacgacacacgtacctactcacaaaacgacgatacatactgacggccgaccttcaagattccttactgattaaactcaaggcagggcactagaagccgatgcatgacgattggcttgagcaaatcaggtagccacagcttgagaaacagacacaatttgatggaccatggaaagaatacaatggaattgccaccaaaaaggaaaacatactgaacaaaaggcgatgtgatggacacaaaacccagattgtgaccctcactgcaaaattatgaaacatcaccaaatacccgaacacaataaatggcttacctaaaattatagaccacgaaatccaaacatgagagctaaactctacaaacaagacatccactatatacaacagcgaataaattctaaagtgcgaaaaaaaaacacacacaataacaccactcacatctgtaccaacctaaatagtccgccacaga

SEQ ID NO: 551088 - DNA, 127 bp, Homo sapiens
tgatgctgcggtcgttctagacggatccccctccagctggcccccaagggaagcgtgctgcgcacagtcagcccgggtacgttcttggtatgggtggcgcaggtggatctgcctgtcctgtgggcgg

SEQ ID NO: 551089 - DNA, 518 bp, Homo sapiens
tcgtcggggtttcctgcttcaacaggtgctgtggacggaacccggcgctcgttccccaccccggtcggccgcccatagccagccctccgtcacctcttcaccgtaccctcggactggcccaagggccccgctgcgctccagcgccgcgcagacaccgtcgcgacggcgcatctccttagtcgccgccatgacagaccgcgtccacctcgcaggtgcgccagaactaccagccaggactcagaggccgccatcaaccgccagatcaacctgtgagctctacgcctcctacgtttacctgtccatgtcttgactactttgaccgcgatgatgtggctttgaagcaactttgccaaagtactgttcctttacaccaaagtcgtcaatgagggacgacgcggacaccacttgtcttggaggaaaacgctggactgacacgctgggcatgaaatcccaagcggacggttgtggcccgaaagtctttccctttcaggaatattcaagaaaacgcagacctggtg

SEQ ID NO: 551090 - DNA, 700 bp, Homo sapiens
  misc_feature (202)..(202): n is a, c, g, or t
cacccaccttcctgacacctactaacccacggctctcaggcctgtgcaagccttcagtctgcccctttgaagattttcttggggttggggcacacttgggcatcaccacatgctggtcctgggccggtgagcccaacttcgatgcctggagagttatcccataccgaagcccggaaccgcccccggagtgggaggtgtaagnccctgctagagaaggtacctgcagagcttatttgtctggacccccgagccctggccgaggtggaagtcatctccctggagcagggaaagaaggaccgatagagaggctgggctatgaccccccaggctaaggctccccctcccagcccaagcccatagccgaagggccgcagctccacggcaagcctggtgaagaggaagaggaaggtcactggatgaggcacaccaacgggacaaggtcccgcagagccttcagcagcagcatcataaggaggcgaaggcccagcccacgggggcccggccatctgcctggacagaatttgtgcgctgagccagactcccgggttgcctgggaaccaatctctcccccagatcacctgtagggaaatgagtgttcctggaacaaggaggtgggggccatgtggccccttcccccactgggggtggacaactgtctcctggggtgggttggtattaaagaggcaagcgattttttgga

SEQ ID NO: 551091 - DNA, 416 bp, Homo sapiens
tgctccttgggtaggggaaagcacagacaggctcccagtgaccacacgaaatatacctctatctatattgagaaatccgagttcccagctgccgctacctgaagtagccacacgactagccacccaaagtgcggcgcatggggtgtgttcactgtgtttgcgaaattcacagcgcttgagcctccataatgaagctgtggctgcagagacacctgggcactgtgctccaggctcccagctcccaatctatgaactctccctgccctccactctggttggtttgtggttcctctcgagcgagggtttctagaatcagggaccttgtctaacttttgtttgcccataaccctacgagccacccgaggtagccacacaacgagccacgcgaagggccacaccacgcgccccacaacgag

SEQ ID NO: 551092 - DNA, 125 bp, Homo sapiens
catccaagcagattcatagtatctcttactacgtctaacagtatctgaatggagatcgctccagaaaatagtcctgcgattagcatattacctgaaataagagcgacattttacagtagagttaa

SEQ ID NO: 551093 - DNA, 558 bp, Homo sapiens
aacaaccagttaatttatttcaggacaagaatttaccatataacactctttttatgtaaattctgccccttcttttttttttttcctgaagatgataaccattcttttccaaagcgaacttcttttatgtctgtggactagactgtctgaggccacaagatcagaaattactataatacatgttacactgttaacttttagcaaactttacttttgttgaaaaccttgtaagcttgggattttaattatcctttgctattagtaagacctcgttttgtcaaaattaacttagaattcgtatagatggcttttttttttttctttaattacctgggaggaaccatagatcatcctttcctgaagggagttcctcctaggtatggaagggcctttgtacggtaattaagattaaaatcccctgttaggaaacctgttgggttaagggaattttcagtagttaaagttaaatcatcctttgtttttttttccctaaggccccttctggacttggggagggggccccacaatagggttccctgaaaagaaatttttaaatct

SEQ ID NO: 551094 - DNA, 205 bp, Homo sapiens
tctgaggtatcaagtctaaattgaactagagatttttgtccttagtttctttgctatctaatgcagactcagatgaggggaatcgattgcgcttcattgcagactcgtctatgcacacttgaagatcctcagaatatggagctatgcacattgcccgacactcaaagaggccttatctatggggctgcattaactgctgcgtagc

SEQ ID NO: 551095 - DNA, 1273 bp, Homo sapiens
  misc_feature (463)..(463): n is a, c, g, or t
  misc_feature (543)..(543): n is a, c, g, or t
agatatcgtactacacgacacgtactaagttgtagcacaattacatcatatgtcctcatcactaggagccgcattagccagcctaggaggcttcatacactgattgcccctattctcagagttacatcctagaccaaacctacgtccactacaatacactaacacttagtgactatttcagtcggtagtaagattcttaagcttgtcttgccgcaacaaacacgtgttgcgtgcgcgtacgtactccagcgaatgctccacgactgctaaactcgagtattgagccccagaatgaatatcacactaaaaatgaaaaacactcactactcaatgtgttaggcctcaattcgatctctcctcctaatcagtcatgtatacattactaacatgaaactttgtacattgactcttgaagaaacgcctatcgtcctgtacgatacgacgaacaagcctcctacatagntacgtaaagtacatcccgtcacattaataccctggtagctagatctataatggaatgactcacaccaaacacatacccantatcagttttcgataggaaccacacgtattacataacaaaatctaggactcaaaaaacaacacaacttaacgtgggtgagcgtacgcctacctcaagaagtactcctcactccgcatggggggacctcacatggtcaaagggccgttgaacgccaaaggtttattttgcggtatgcaaaaagcgtggtggatcccactgaaaaagagagaagagctccgtaaatcattacataccgtgaattaaacgtggcaattccgtggcgcccttgaccagatatttcctaccccatacgggtcttctgatgaacccgggtgtgcaaacaaaggtcgcgacctaaggactgctgggaggtcccccttattgttgtagaaaggtgcatcccctttacagatataccgcgagggggtttgtgatgacccactaaattgtgtgagccataattcatatccattacacggaaatgaactgtggacaaaagccgcatcgccccacaggagtccggcccttggtaaaacagactttgtggcaacaaagttggcttattcacctgggtgtggcttaaaaaacccacatgaagttgaagagtattttccggcttttgccccccgctttaggaacagagatgcggcagcgggacaaaatactgaggcaaggtttcaagagaaatttaacccccgaaagagggtcttcttcattaacacacccagggcgctaataggtcacacaacg

SEQ ID NO: 551096 - DNA, 463 bp, Homo sapiens
gcgcatatataggttttactgaaatttgggaactcctattatagagagatttatagtaagatttgacctacttgggctgattgtatgagagattctggactaagttatacgtagtgctgaactccacagatgagcaagttgatatccagtcatagaaattctgtgggcagaaaggggaaagaactagtctttggtcctcacaaaccaaattacacataagttgattttgcacagagatgttttgatcatgatacatggttccatggtttaagtcaccgcctttcctcgaccttctgtatacattaacaagccagccattactgtcctcatctttattccctactgaaacttgaccaatactgttctcctttttcgtcgttatgccaaggaaagacagtattgatatgggaatttatatagctggtctgtacctagtattaggaagatcctccaccgcatatca

SEQ ID NO: 551097 - DNA, 372 bp, Homo sapiens
tctttccataactaaagaaaaaaacaacttccaacacaatttaatggggcaatatttttgatctgctccacgaggatccataaatctcttctaaagagggatgttttaaaatactgtatatgctgtttgtattgttctaaggaggtttagaatatcttggctactttactactgtagactgtctttttaacctaaacactgatttatttatttatcttcagagatggggtcttggtatgttgcccaggactggactgcagttgctattcacaggtatgatcacagcctcaaattcttaggctccagcaatcctcccacgtccagagtcactgagaatatacacatttgtcactgcaccaagcttaacttata

SEQ ID NO: 551098 - DNA, 584 bp, Homo sapiens
agactcggtagagcttggttttgctttggtttgttttaattctacaactactgcgaacaagaaaataaattagctttgtgctgcacccgcagtttaaattatcatttggaataactgcttcccaatttcttagactgtttgaaaactttccacacaaagtcagagctgacataagccaatgggatagctacttctctttctttttgcagcgcagttgtgttcatttccactggttggccatccaaataatctagtctcaatatatgaataaaaggataaatgaagggaccattcttgtcgtaactgcatcactatttttgagtgtgtgaattttttccacttatctgtggcaagtatactttgtgtttagtttataaaataacctctacctctctaaaagaagaggaagaaaagtgatcattgtaggaagttggtttacaaatttcatctttcaggctcattgtgaagctgagtatatttttgccactttgctttaaagtagaattaactggttaatacttctcttccctcttctgtcttcctccgtgagtcctgttaataaaaataattggttcttggataat

SEQ ID NO: 551099 - DNA, 244 bp, Homo sapiens
ctttgggacgacgatgactgagctagtaacctgtggatatgcaagtggggagaatcagagagcgagacacaatcagaagtactgtaggcagaggacgggcgtctcattgaagcacgcgaggcacgtgccaggctggaagccacgctagcaggcactggatgaaggcgtcccttactcttacttcttgtccatgggaccatctactgcagcctgtagatatgagtgctctctccagcaagctggc

SEQ ID NO: 551100 - DNA, 148 bp, Homo sapiens
agacgctgtttgccaagaaactcgccctgcactcaggcatgggggccacgtccccgcctgtcatgatggcgtagtccatgcctgagtgcagggcgagtcttggcaaaagcgttcccggtgctggtggcccatagaggatgtgcctgta

SEQ ID NO: 551101 - DNA, 204 bp, Homo sapiens
ttttttttttttaagaacaaggaaaagggtggggggggggtttcccacactttaccccacggggaaaacccaaacttgggtggggccccaccggggttttttttttgttttaacccccccctttggaggtcaaccccccatgaaaagggggccccccgcccaaatttttttgtgcccaaaaaaaaaaaagatccctctgtgtga

SEQ ID NO: 551102 - DNA, 527 bp, Homo sapiens
agcaatacctacttataattctcctaacacagctcactgcgttttcacatgctgtcttcactcccagaaatccctttcctgacctttgccacctataaacttttattcagttttcagaacccagctcagatgttacctgcttcaggaaggcttcctaatcaaccctgccccgaaagagagaattactcctttgccaccttttgaatacttctgtttttatatttaaaacatccattgcttgttcaggtgccattttgtggctactacttttgtgccaggtactgttaaacccctggaggaagcacgcagggacattagtgtgctgaatccctcagaagcatgtgcatactctaccctgttgcctggcctggagaggttcttgttcgcttgtgcatgtccccagctacactcagagctcttgacgggcatcattgtgtcttactgatttctgtagccccaatgccaagcttagaacctggcaccatataagtgctcaataaacatttgttgaattgaattgaaaaaaa

SEQ ID NO: 551103 - DNA, 1049 bp, Homo sapiens
gggtacgtggggcgaaacaaaacctggtcgatggacatcagcggagtgaggagagacgggggccccgaagggccaaatcgcgagcggggcggggcggtctgcgaccttcgcaagtgtatatattgttctgagatgcactgcatcggggaatgctgtggtcaagttgtgtgtggccaccgtgtacttgtctggccatgtcttcatcaggtggctggagacacagtgccagaacggcaagacgtgtccagtatgtagaaggctggcgatcacgcatcagaggacacggtctgtcccgcctctaatgagggctgagggcagccaggatacgccccaagggattcccaggacttaaagaaatctcctaccgccctgtgccctcaaggggcgcacgcagaaccagacgtctctggagaaagcaggtaggcggggagttccagacccagtacaggtggagtacccgggggtgcttccagctctactcgagtcagggggtcaggtggcatttgccccttgggtgctttatctctcacgcgaccaggtggttcaattgccccaagtagatgccgtttccctgccttgaggggtatccacggttgttgtgatcctaggggaccaacgtggttccaccgcgattgcccattcccatggccgtagtgactcctgtgattgcccccttccgttcacgtggatctggcactcggggccatatcgttagcgtaatcctctatctattatcgggcctggcgctccagtggctaagtcttagaggaccttcattgatctttggcgtgtccccgtgggcgcccaactccatctgcagtggcaccaaggtatgtagatgcaaacttcgattgatcattcttgaacaggggttccccgtatggcgttgaatcagcgctgttatgcatgtgttaacatcccagtggggaaacacacccacattctgaaacacccccccgtcgtaagtttggtagcatggatttggggcacttaaaaggggcgccagggaccccttggggagcaatttggttcccaagaggaaaggggcc

SEQ ID NO: 551104 - DNA, 409 bp, Homo sapiens
gtccaacctgaagttgccaaattatttttttttacttttattaggttcagaagtacatgtgcaggtttgttatacaggtaaactcctgtcaccagggtttgatgtacagattactttgtaacccaggtacgaagcctagaacccaatggttattttttctgatcctccccctcttcccaccttccaccctcaagtaggccctactgtcggttgttcccttctttgtgtccatgtgttctcatcacttagctcccacttataagtgagaacattcggtacttggttttatgttcctgcattcgtttgctgaggataatggcctccagctcccaaccacgttcttgcaaaagacaggaggatctcattctttcttacagttacatcgtaccccatgatataaatgtaccaa

SEQ ID NO: 551105 - DNA, 1453 bp, Homo sapiens
  misc_feature (140)..(140): n is a, c, g, or t
  misc_feature (290)..(290): n is a, c, g, or t
tgtgtgggagagaggtgtgtgtgtaaaaaaaagggagaaaaaaaggggaaaaaatataaattttctctctctcaccccaacaccatgtgggggggctcaactttttttcaataacaaacagtgtggtgcgggcgcacaantataaacacacactctctctctgtggaaagagagtgtggcattattatttcaagagtgggtgtattgtcggggagaaatctcaatatgtgtgtgagagaaagaggtggggagcgctctctctatatatatgtgtgtgcgagaatatatantttgtataaaaatatatatctctctctcatatatatctatatatacttttatatatatataacaaataaagaaagagaggcgcgggcggcgcgcgcgctctactgaagaagatatatctctctgtcggagggcgcgcgcacacagagatctagtcgcgcgcgcgctcccccacgcgacgtatattgtgtgtgtgaaacacgagagagggggggcgcgcacactatagtagagagagagagggcgttgtcataatttcagacagacgagacgagagagagcgccgcgagcgcgcgccgcggtgtatatataacacaacgcagcagcgcgcgcaggagcagagcggggggaaaaacacaaaaagtggtgctaaacagcaggtggggggacaacacacagtgtggggagagagaggagagacaccacctcctactcataatactgaagctgagggggggggggggaggggaagccaaacatatatgtgggggggcgccagacaccataactcatacccaaagacgaaaagaggagcagatttaatactaacgcaaacccgccccccagacgggaggggcaaaaactcacacttatcctcacagaatgatttcacaacgaacgaggcgagcggcgcaatcaaacctggaggcgggggggggcgtgctaaaccaccaacatacgatggcaggcgccgcgggaagacaacaactagcgggacggacgcccgtgctgaggcgggaacgatgcaggcacagaagaagaatcatgctgggcgctacgctcaccacacacgcggcagggcgagagagaatcacaactcaacatcatgctgcgctacaacaaaaaacacaacttataatcatataaacaccggcggggggggggaggagccataggccgactgcacgacgcgacaagccgatcagacaacagaacaagacactaccaacgcagcgcaagcaagaccacacgccaggccaccacaaccaagccaagccgaacgaactagcagcacagtcggcagcgacagaccgcacgacacgaatgcgacacagcgcgacggcagcagccacccacctacacaacaaacgacgcagacagaacgcgaacgacacgagccaccgcagcaccacgcacacagtacagagtagccagcacaagacac

SEQ ID NO: 551106 - DNA, 782 bp, Homo sapiens
cgcaccctgtttaccgggacaaccttttagccccaaccatggtacccccaattaagtatagtccgatagaaattggaacctggcgccatagatatagtccccaaagggaaagatggaaaattatagcccagcctaaatatagccaaggactttacccctataccttctgcgataaatggaattaacttaggaaattaactttgccaagggagagcccaaagcttaagaccccccggatacccagtacggagcttaccttaagaacacagcttaaaaggagcgaccacccgtttatagttagccaaaatatagtggggaagaattttatataggttagaaggcgaccaaaccttaccggagacctggtgataagactggttgtccccaagaataaggaatatttttagattccaacatgttgaaatattggccccaccagagacccttctaaatgccccttgtaaaatttaactcgttaagtcccaaagagggaacacgctctttggaacacactaggagaaaaaccctctgtaaaagagagtaaaaaatttaaacaccccactagtaggcctaaaagcagcccacccaattaagaaagcgttcaagctcaacaaccccactaccttaaaaaatccccaaacaatattaaactgaacatcctcccaaccccaattggacccaatctatccaccctatagaagaactaatgttagtataagtaacatgaaaacattttcctccgcataagcctgcgtcagattaaaacactgaactgacaatta

SEQ ID NO: 551107 - DNA, 145 bp, Homo sapiens
ccaggcactgagaggcttgttcagcctgcagcacagactgggcatcccagatctttgaagaggaaccagagcgcaagcgaaagaagggcccagccccgaagatgctggccacgagcttgccggctgtgggacaaggcctctagcg

SEQ ID NO: 551108 - DNA, 203 bp, Homo sapiens
cttgcgtgactacgtgcttccctggactaacatggcgattggctatgccatgacttgtgacggggtacggacgtcaggtacgttagtactatacggcgtgggggtagtaacgggggtcggacggcacacggttggggacacccgctacaactacggttgtccgttgactttggttaacaacacactacgtacgggggactgac

SEQ ID NO: 551109 - DNA, 347 bp, Homo sapiens
aagcctgtactgtattccataactttttacaataacttttacaatcaataaaagcatttttgtaaaataatgtttttttcttacaattcaatttaactgcacagttacgtagtgttctataattcggttaatacatttctagtttagatttggccgctaagacttttgccatatttctttgagaaaaagcctcaccgagatcatcatcaatccatggagatggtccattacctcagtgagcaaataaatgaaacattctgtattgtgattaaatcaacctctagataaatcagctcccagggtacagcagccaaataattttgaaatagctcacgattaaatctttt

SEQ ID NO: 551110 - DNA, 1149 bp, Homo sapiens
ggcgtgaacggtcgttgcagagattgcgggcggctgagacgccgcctgcctggcacctagtgagcgcagacggagaccccgacaccgccgcacgccgccatggagtccgagaccgaacccgagacccgtcacgctccatggatgaagagccccaaccagcgaccaccgcagacttgcgagctgagtggcgaccgcgtgtttggagtgtgggccaccatcaatggcccacctgagccgcgtctaccccgagcgtccgcatccagagagaacagaggttaatttattctgggaagctgtagttggatcaccaatgtctcagggacttgcttccaaagcaggaaaaacggcatgtatacgcatctggatgtgcaatgtgaagagtccatatcaaaaatgccagaaatcaacgccaaggtggctgaatccaccagaggagcctgactggattctacatcggaggacagatatcctgaggatacctacaagtgatggattataaggcaaagggaagttctttcgagaacctttctacccctggatgggaaaacaattctcaaaggccgtgaacgcttgacccaggaaggcaaaccaaaggcctggagatccatggataatcatccggttacacacaccgtaatggaatggactccaagcatataccttggttccaagcgagaatacttcttgcacgaacacggtcattaacaagtgcaaaacaattataggcaagcacacatgctagcaatcaagggagattatacggaaaccagacagacaaaagagacacaaagaagaataccatagaggatcctccatggaaccactgctacaaggccacatattcaaaaacacaggaatccaaggcatgagcaacccacggccgtgacaaccagacaaggcaaggcgtcacttaaaggaggattgggtcaccatcccagtgcacgccacaataaaaagactattggcaggacatcaaagcgcccaagggagtgccccctatttgtgtcaacgaagaaccgtaatgaacaaaaatcgcgaaaactgcgtaggagaatggacaacatagacagacacacatcgagtcagctatatcacaaaatcatgtacgataaatcaacaatgagaataccacacatgatcaggcaagca

SEQ ID NO: 551111 - DNA, 125 bp, Homo sapiens
  misc_feature (5)..(5): n is a, c, g, or t
  misc_feature (42)..(42): n is a, c, g, or t
catcncaaagcaggctcatgcattctctgactcttctgctgncctggtccctttttttggaaacaggtcttggctgtgttgcccaggctgaagtgcagtggcacaatcaaggctcactgcagcct

SEQ ID NO: 551112 - DNA, 461 bp, Homo sapiens
atgcatactgggtgtatgaggtaagtcaaggtcaattttcacattttcgctttttaaaattaggtataatttgcataggtagaattcaccttttctagggcttttttaaatgagatggagtcttgctctgtcgccaggctggagtgcagtggtgcgatctcagttcactgcaacctccactttccgggttcaagcgattcccctgcctcagcctcctgagtagccgggaccacaggcacccgccatcacacccggctaattctttatattttagtagagacggggttttgccatgttggccagtctggtcttgaactcctgacctcaggtgatctgcccacctcggcctcccaaagtgctgggatcacaggcgtgagccaccgcacccggcttccaactgtggttttttttttgagacagagtctctggctcctaggctgacgtgcagtggcgccatctcg

SEQ ID NO: 551113 - DNA, 116 bp, Homo sapiens
aagtgaatgtgtgtgattccattgccgttcgttatatgctcggatttttcttacgacaaggcaattcctgctaatgagcatggtgttgctttctaaaattagattgtggtaatgtt

SEQ ID NO: 551114 - DNA, 233 bp, Homo sapiens
atgggatttattggcaggcctaccttacagattccaccaacacttccgtagaccaggcattgtgagcgcagttgcgtaacatggatggtaccagacaatgcagcgagattgtgcgaaccatgctccgaatgattgagattaccacttcctctagtggatcatctgccagcagagtgagatactgatcaagaacttgcttagagatgttctagccaacatgtcgggatctcgaa

SEQ ID NO: 551115 - DNA, 896 bp, Homo sapiens
  misc_feature (235)..(235): n is a, c, g, or t
  misc_feature (285)..(285): n is a, c, g, or t
  misc_feature (360)..(360): n is a, c, g, or t
  misc_feature (511)..(511): n is a, c, g, or t
acattttactttaatttaatttctggaagaaaaagaatctccttggcgtggttaaccaaggctgggaggtgtaatgggtgagaatcatagactcaactggaaggctctgaaactctctggggctccaagctaatctcctcagagcttccacgaagcctgggaattacacggggcatgaggccaagcggcggccctggggcacaataatccacacggtttaattcctggtaagtantataaacattccacaacaaatttcacgaagacaagggtgagaaaggtcancaaacggttactctccacggtctccctggtgtggtctccctggtctcaacacttgttggggggggaattaatccntctccatggtatttccccccttacattaaacatcattatattcatggttaaggtgggtcatatacatgggtcattcattaatatcccatcaatatctcgtcgcgtccccttttcaacacacatggggattacaaaggtagagggtgggggnaccagcatctttcgtccaattaaccaatatcttatcaaagatttatctcctccgtccttttttaagaggacatggggtgggaaattttcatacgcggtggcgtaattcctttagaggggaatatgggaaatggttatttcctttaatcttcattggtgggtaggtgggatatgttggggtggggttaaacaggccaaggcacgtacacactccatgtaggctgtacattttcccaatagaataccttgggctgtgttgccaggaatgtccccattatgggtgtaacagttttatccaaattgaagattggtccttggacttggtaacaccacccctaggtcttggaccacgagatggaccctgggctctggggggtgctccggtc

SEQ ID NO: 551116 - DNA, 440 bp, Homo sapiens
gggccaaggccaaggactggcggacggggaagccggacagggtggtgcgcaatgtcaagggtggcaagaatagcaagtacgcccccgctgagggcaaccgctacgaaggcatctacaaggttgagaaaaactggcccgaaaaggggaagcccgggtttctagagtggagctacctacctgcggagggacgacgatgagcccggaccttggacgaaggaggggaaggaccgaaacaagaagctggggctgaccatgcagaatccaaaaagctacctggaaaccctgaccaaccgagagcgaaagaaggagaacaacaagagggaggaggaggagcaacaggaggggggcttagagtcccccaaaacgggcaagggcaaatggaaaccgaagccgactggaggcggcccaaaacaagggaccagataccccaacaccgggaa

SEQ ID NO: 551117 - DNA, 426 bp, Homo sapiens
  misc_feature (35)..(35): n is a, c, g, or t
  misc_feature (54)..(54): n is a, c, g, or t
  misc_feature (203)..(203): n is a, c, g, or t
ttaagtaggtaatatactttggaatacccaggtantaaatgtaggaatttgggncattcctaggaaataatataaaagggcttaatatccatggtaaaaatcctttaaatagttaaaagggaagcaggattttttgtaggatatagtcctaaacagttgcaactgccatcattaagaacaaatatggtttctcaaagcacatncctaggaaaactgttggggactaaatactagactgggccttggcaatctttttcgtgtgtgtatgcgtgtgtgtgtgtgtgtgtgtgtgtgtgtgtgtgtttagtagagacagggttttgccatgttgcccaggctggtctcaaaactcctgggcacaagcaacctacctgccttggcctccgaaagtgctgggattacaggcgtgagccaccatgctcgact

SEQ ID NO: 551118 - DNA, 760 bp, Homo sapiens
agcatccaaagcacccaaatgaccaaggacatatatacgtattctggaggaatcaggggtctaggacggagtagggagcgagaatgaagagaacaatgcaagccagcatgattataagtgtgtcacattgagcataaaagtagaaggcacaggagaggtagcaaaggccaggcctttgccacgcgcgctgccattcaaacgatacgctgaaacaaaacactagccatacacaaggtcacggcaacaccagggaccagcactgccaacgccgtgggagcacagcatgcacgcggcacgcaacaccatgcctgcggcgcacttgcagaggaagcaagatcacatcggcaacgagtaaggtagcgtacacaagcacacgcgccgcgaaacagcacggaccaacgcgcccgtcggtaacgaacggccagaccgacagaacaccaacctacgcaccatcagcaccgacaagccggccaacgcttgcgaagcgccaatatacacatcgcacacacaacctgacgacccacggacaacaccaacatccagaggcatcccgcaaccgacggcagacgcgcaacaggctggcgcagcaaccaaccgaaaccgggaagaaccacgcacgcgacagagcgagcagcatcacagacgcccgacctagagcaaggacaaagacaccccggcgaacaagaggccagcaacgacacgcagcaccgggtagggcgtaagagacacggccacacgagcgacacatacaagatagcac

SEQ ID NO: 551119 - DNA, 171 bp, Homo sapiens
ggctccttttgggcgatggtgcgacgacgtgtttcgttcggttcaaggtctttgctgcagctgacgtcaaggtggtcgtcgccaacagcgcaggcgtctgagaccaccctgtgtgctcaactccgactactcggtcaccctgaaccccaaccaggacacaagccccggcgg

SEQ ID NO: 551120 - DNA, 254 bp, Homo sapiens
tcgcttagtctacctgttttgagtgactgaaagttatgctgagggtgctttggagctgggtttagaacttgaattggggtggagccatgactgagcagagacagaaatggagctggggtcaggatcaggaaggaggttagagttggagccaggtcacgttcccacctgttcattgcccaccaggtagaccttgatgtcaggtagagagaggcctcgagacaaggtagagccgaggggctaccgcgcctcgaaac

SEQ ID NO: 551121 - DNA, 889 bp, Homo sapiens
  misc_feature (8)..(8): n is a, c, g, or t
  misc_feature (10)..(10): n is a, c, g, or t
  misc_feature (34)..(34): n is a, c, g, or t
  misc_feature (41)..(41): n is a, c, g, or t
  misc_feature (62)..(62): n is a, c, g, or t
  misc_feature (79)..(79): n is a, c, g, or t
  misc_feature (135)..(135): n is a, c, g, or t
  misc_feature (137)..(137): n is a, c, g, or t
  misc_feature (146)..(146): n is a, c, g, or t
  misc_feature (148)..(148): n is a, c, g, or t
  misc_feature (179)..(180): n is a, c, g, or t
  misc_feature (243)..(243): n is a, c, g, or t
  misc_feature (248)..(248): n is a, c, g, or t
  misc_feature (283)..(283): n is a, c, g, or t
  misc_feature (330)..(330): n is a, c, g, or t
  misc_feature (344)..(344): n is a, c, g, or t
  misc_feature (373)..(373): n is a, c, g, or t
  misc_feature (397)..(397): n is a, c, g, or t
  misc_feature (406)..(406): n is a, c, g, or t
  misc_feature (414)..(414): n is a, c, g, or t
  misc_feature (417)..(417): n is a, c, g, or t
  misc_feature (421)..(421): n is a, c, g, or t
  misc_feature (423)..(423): n is a, c, g, or t
  misc_feature (437)..(437): n is a, c, g, or t
  misc_feature (465)..(465): n is a, c, g, or t
  misc_feature (473)..(473): n is a, c, g, or t
  misc_feature (500)..(500): n is a, c, g, or t
  misc_feature (607)..(607): n is a, c, g, or t
  misc_feature (633)..(633): n is a, c, g, or t
  misc_feature (719)..(719): n is a, c, g, or t
  misc_feature (721)..(721): n is a, c, g, or t
  misc_feature (736)..(736): n is a, c, g, or t
  misc_feature (758)..(758): n is a, c, g, or t
  misc_feature (762)..(762): n is a, c, g, or t
  misc_feature (867)..(867): n is a, c, g, or t
tgcatgantnagaaaaatgaaacatctattttancagcaanaggctgtaagggatggggtanaaaaggcatcctgaganagttctagaccgacccaggtcctgtggcacactatacgggtcaggaggggtggaananaggcctaancnctaggacggtgaatctcggggctatttgtanntttgttaaaaacagacattcttttggccttttcctggcactggtgttgccggcaggtgggcanaagtnagccaccagtcactgttcagtcattgccaccacanatcttcagcagaatcttccggtaatcccctgaagtatctcccgaaangtcgtggtacagcnacttgccgtacatccgcttataccctganctgatgtccaggaggtcggtctcnctgcgaaanaccatgangcnaatnanggtccggtcctttnttcctgcccccctcatggcctttttgancctctccncaaaaaaggctggggtattcttgaaanatttcaccacggccaacatgccctcctccaggtccccggacatctcccggcaaaagctcttctcaatttcccggcctttcattctctggtactcattgaaaactgcnaccaggtgggcccggctccgggagcncagaaccgcattgaacttggactcgtctgttcccaggcggttctccccggccgcatacagctcctgggcatctctctgggcgagtnanaagtccacgtttgtnctttcatcacggtttccctganaaanaaaaaagaggagccgctggaagtgccccgatgtgtcgcttcgaatggcctcttccagggtctttttgaattctgctttgtaggctctgtttaattctcggatgtnctcattgctgccggaagcgagg

SEQ ID NO: 551122 - DNA, 261 bp, Homo sapiens
cagtatatcttcctatagaaaaccaagtcaggcgggcatggtggctcacacctgtaatcccatcactttgggaggccaaggtgggcagatcatgaggtcaagagatcaagaccatcctggccaagatgctgaaacgccgtctctactaaaaatgcaaaaattaggcaggcgtggtggcaggcacttgtagtcccagctacccgggaggctgaggcaggaaaatcgcttgaacctgggaggcacagatgggtaccgagctcg

SEQ ID NO: 551123 - DNA, 111 bp, Homo sapiens
  misc_feature (102)..(102): n is a, c, g, or t
agaacttcgtgcactttaaatgccacgatagtcgaatcacacaagcattagccaatttgttgaaagcataggtactggagcctcaaaggcccaccatgtggnggagcaatt

SEQ ID NO: 551124 - DNA, 365 bp, Homo sapiens
acaatatatataccatcgacgagctgtctttcacgcagtggaagatttggcactgcaaaaccatgattcaggagcaagtcatctccatcgaggactcgtatgtgaacagccaggagtggacgctgagccgctccgataccgagagcttaaagtgtgtgcatagtggggaacctgtatagcgagaagtcaggccatggtgcagcgatatctgacggggacctatgtccaggaggagtcccctgaaaggggggcggtttaagaaggagattgtggtgaatggacagagttacctgctgctgatccgagatgacggaggcccccctgaagctccagtttgctgcctgggtggatgcacaaatccggaa

SEQ ID NO: 551125 - DNA, 204 bp, Homo sapiens
aggagggggatttcgtgtgtttgcatgagtgtgcgcttccgcccttgggagttggcaaaagggagggaaggaaggaaagcaaaatcttcggaaggtgttttttggacctgaggggtccccccctgaatccccaaagtctcccctgtgaactgaggaggggaggggtgtgctggggaataaatcttgtatgagacccatctttta

SEQ ID NO: 551126 - DNA, 1032 bp, Homo sapiens
tgctgtagctggattcgtggtggccagagtccgtgatacgatgaccgctcgtcatccttgtgacccgacatattctctaggcgagcgagtgcgcggataatgtacttcaggaaccgtgatcaggccagtttaactcagggccatgagaactacttccacccgctggggatcccacaccttgggagtaacgccacattggctgtgtacaagtaatgctgattggaatactatatatgcatatggggacctgtccttttataatatgtgggtgaatctgtcgagaccattgggaatgagatagcgtgggggcctttcctgcgtggaaccaccccggaggagtgaccacgtccgttcgatgtggaacgaacctgcttaccaaagctacatgtgcagcagtctcggaccccaggaaaattaaccatcagtttctggccattgcgtgaatggcagtgctgatgcctacatgcgcagtaattgtgcattgcctgttggggagaagacatcatgcttgggctgcttggtgggatcgagctattgtgtggaggctttcggcccctgcatggataccataggtcttcgaacgagccaggacttccagatcatggtgtcccaggaccccgtgttggaagacgctggcatggcataccagtcctggcgaaaggctaggttcttctgctggagaacgtcagccatggttgccgtcatgggcatgacggtgtggggtgggcccgtcctgggtgtagagaggagatgatccttatcacaggtggccgaggcatgtacgggcaggccatgagagggtgtacccaatttgaccgggggcctcagggcatccgcacggttgtgtgtttgggattcccctgaactcagtgtgaacggcggattaaaggtacggtgcatatcaggctggccccttggttaagagaatgaaggactctaaacatgagatcttgccaagtaatcagaggcgtgtgcacctgaaacgttcgtcacacacagtggcgcacgagtgtaaaaaaacccggtattgac

SEQ ID NO: 551127 - DNA, 840 bp, Homo sapiens
ggccgggcgcggtggctcacgcctgtaatcccagcactttgggaggcagaggcgggcggatcatgaggtcaggagatcgagaccatcctggctaacacagtgaaaccccgcctctactaaaaatacaaaaaattagccgggcgtcgtggcgggcgcctgtagtcccagctactcgggaggctgaggcaggagaatggcgtgaacccgggaggcggagcttgcagtgagccaagatcacgccactgcactccagcctgggcaacagagtgagactccgtctcaaaaaatacactaaaatttttttaaaaaggtcaacaatgctataaaatttaacatctactatttaaatttataaaggagatgcagtgataattatgcatatgcgttttgacttgttagctacattcttttttactatacttgctttcctttattaagttctacatttgtcctacattaatatgaatcatttgaagtactttattctaatttacattttgaaaatactattttctggaaaaaatgtattttattttggaagctctccacttttaaaaattggtggttaatatcctgagcacattaacagtagctgtctggcccttaaaacatgttacgagaatctgagtgctacagatttatggccactaataacattacttgacctgtttaaatcactactacattttttatgctgctaataaagcggatattgcgccgtggtagacaacactctagcctgatcggcacacatacacggggcgcacggacaagcacaacgcgccctcacacacgtcaaaggaagggcaatccgacataaccaacgggtcccccaacggg

SEQ ID NO: 551128 - DNA, 379 bp, Homo sapiens
gaatcgagccggtccgagcggacagcaaagccctttccacatcatcaatcatcttagaaatacacgaggaagtagagaggtcagtttatgagaggctaaaaggctcctcctcctctacccaactgcgcagaaaaaatagaaatagaaattttaaaaattacatcttaaatccaggtcccggtttgggaaacaattaaaaaaaaaaacaccggtacattggcggtagggcacaccaagtggcatcatgatgtttaaaaggtctttataaaatcagttggggaagggcaggtgtgtgtccgggaagggtggggaagggaggttaaaaatcaaagctgagctccagtgagtagggatggggttcgcctggcttgtaccgctg

SEQ ID NO: 551129 - DNA, 350 bp, Homo sapiens
gagaatattcgtggtcaccgtggcctcatctttgaggcaaggacctttctgtgttcttcgatagcttatagtatagctggtcggtgtgactttcatcccaaaacctcatgtgtcggaaatttatatcctcagtgctcccagtctttagaggtgggacctttttcatatgattaggtcttgcggggtgagctccctcatctcaattagtttcgttcttgagagagtgtgttccattagaatattgtgtttggccctctctggctctcccttgcatgctcccttgcccttctgccatctgccctggaatgactcagcctggtccttgcctagatgtttgcccctttacctta

SEQ ID NO: 551130 - DNA, 295 bp, Homo sapiens
agatataaagtatatgaagtatgctttgttgctcatagagagaacccatgacagagttaacccaagaatatgtttggttaaaataaaaatagaagcttaataatgggcattcatactttttaaagagaaatgaatgacgaaatcggttatcctgctgtagttaactattgggtaagtcttagtaaagaagagaatgctgaagtcggccgtggcgataccctcctaggaactgagaggtgtggcttgcccattacccgcttgaagctcacatctttaccctcctctcccactgtgg

SEQ ID NO: 551131 - DNA, 274 bp, Homo sapiens
aggaaatgactcagaacgggttggggatcaaattcttaaagacagattgtggggagaagctagaaaagaagacccagagagtatggaggttaatgtttgagcaacctggtgaacatgtgaccacatgggacagggtgttccagtgaatgatgtgtgaatcatgtaagtggtgccatggaacagctgtgacttgcaaagcaattgttgagagtgaacttgatgtcttgccaaggtcttgggcagcatgacgggtcttgtagtagatgctgggcca

SEQ ID NO: 551132 - DNA, 241 bp, Homo sapiens
ggggttcccccaaaaaggggccccttttttggggggggcttaaaaggtccccatgtttttaatttgggggggccttaaaaaaaaaccgggtttaatttccccccgttttggaaaatcccccccccaatggaaaaggggggggggggggggttttaaaaaaaacccccctgaaggggattaaagggggggtttttgggggccgtaaccctttgaaaaccttttttaaaaggaatttttttta

SEQ ID NO: 551133 - DNA, 317 bp, Homo sapiens
ttccaattaagttttgcttttgttaaagtgtggccccttttttctgtttggagtaagccaaaaattgttttgccataggttccctagggtccccttgctttagcatcctttaaaggcccctgttgcaaagtttcccttttatgctgaatttgccttttgtcaggcccccgtagaaagcccccagtacatgctttgccctttcctttgctccctttttccaattttttattgcatatccttttgttgtaatccagaaagcagcatttttaaatgtccgtgttaagaattggccccctggtccccacttttaacccata

SEQ ID NO: 551134 - DNA, 132 bp, Homo sapiens
caacacacagtatcgtcccctggctgtgttcgagaatgagtattcctatacacccagatagactacaaccccgaggaccgtctgctctattgcctggtcacaatggccaccaggtcacttaccatgtgccct

SEQ ID NO: 551135 - DNA, 1414 bp, Homo sapiens
  misc_feature (179)..(179): n is a, c, g, or t
  misc_feature (378)..(378): n is a, c, g, or t
  misc_feature (409)..(409): n is a, c, g, or t
cgctcattaaatactcactacgcatcccgaagacgtctctcttcggcagtgaactctcgattcccatcagtctccgtcgcgctttctgtcaacccctcgttctttccctgatagacgcactcccacacagtccacgatgtgtgttagatctgccaggagatcgcgctcagtggttcagnggagctcgcgacacctcggggaggtacaagtcacgtggtcggtctatacaaagtcggccgtggtgagcatcatggcaatcgactagaaggaggacttgacaacaatctatagacttatgtgataacatggtaggactggcgagtacagatctgatgtacacgtacgtctacacgaacatcttgtgtgcccgtataacantccaggaactgtgtgactcgtgacccttgantcagtaaaataccgctaagcgcatcgccaagattcaattcatgcacgaagatcacggacagagcttctacatctctacacgtgcatacgctcattcatgaggctcatgtgcgcaagacttcctacctcctgcggcatgaagcttttgctttaccaaactctcacggactgtcagcgaggttgtcgagcacatgttattgtttgtgtcgcaacgtctcgtgcattctgtcttgcacaatcacccgtgcaggctccttaccagtattcatttctgtccacgaaccataggacctatcctgacgcgttttcattgagtcctttgcgttcctatttgtggactacatcaagcatcaggagactggtcattagtggactccagttacattgctgaaggcattgccatatgggattaagccatgatgaaagctctgctgaagagaaagataatgaatgattcagtggaaagagagaattgaaagggaatggattaatttacagtgaaggcaaaccacaccaggaaaagcccgctgtttcacaatttctgacagagggataacacacggaacagtattttgaggagattattgtagaaatgaaagacacgaacacggcatgattatgataagatagaaaaggagaagaaaaaaattattagagagaaacacaggggaaagtaatataacaagatattataaaattataacacgtcttgatgaaccaaggagcaactatatttgaagcagagggataacccccaccacaagtatattgaaaaaggctctgtttgtagataaatagatataagaaaaacaaaaaagaaacaaaaagtagaaaacaacacaactagacggaatgatcaaaaaaagaagagaaaaaaagattattataaaaagagagaaacaaagtaaaataaagatagaaactcaaaaaaagataaagaaaaagaatagagataaaaaagaaaaagaagacagaaaaaagtaatatataaaaaaataataaaaaa

SEQ ID NO: 551136 - DNA, 121 bp, Homo sapiens
catccctcgaatgggtctctgcggagtattcatctgtgggttcggggcctggcccacactggcttcctgtgacttggctatgatcgcagttctagagatcgacgaatgatcgagaatgcca

SEQ ID NO: 551137 - DNA, 465 bp, Homo sapiens
  misc_feature (44)..(44): n is a, c, g, or t
  misc_feature (56)..(56): n is a, c, g, or t
tctcgaatcgacggtttctctgcggtggggattgatcctgtgcnatgtaggatttngttttttggttttggggttttttttggttgtttttttgaggtggagtctcactctgtctcccaggctgagtgcagtggtgcgatttcagcccactgcaaactccgtctcccgggttcaagtgattatcctgcctcagcctcccgagtagctgggatcacaggcacccgccatcatgtccggctaattttggtatttttagtagaaacggtgtttcaccatgtggttcaggctggtcttgaactcctgacctgaagaaatccacccgcctcggcctcccaaagtgctgggattacaggcatgaaccaccacgcccagccatttcttggtatttctagtagagatggggttcaccatgttggccaggttggtcttgaactgagctcaagtgatccacctgcctcggcctcc

SEQ ID NO: 551138 - DNA, 183 bp, Homo sapiens
gcgggcctgacgtcagccctgcatcccccaggcctcgggccagcggccaggagctgcctccccagcgtggggtgacggtatgcggcgtgagtgagtggagaactgagacaggaggttgagcagctctggatccagatccgggatgcgtgaaaagcatgtggagagtcaagaatgagaaagatc

SEQ ID NO: 551139 - DNA, 459 bp, Homo sapiens
taataaattcattattaaaagctatggacacattcgttagatcaagcgagatacatgtatgaacaggcatgtggtcacagagccagtatagtctctggccacgctcagtacatgagtattcccccaagttcagcgtcctaggtctcggtgtcaggctttacggcagatctgtgaagaatctctcgaggcgtgtgaccagcccttgtgaaagagccagtgtgtgatggctaagataattgcataggctcacaagacagtgactgacatacagcgcaactctggcttatgaaccaggaaaggatcagtagtgagttcacatatttgactcataggataaggccaggcagatccctctgggtaggtcctggaaatacaaaggtcattacctttgaaggtcagtccatcgacagaggcctgtaaaatacgcatgacgatgacctcgagtgcctaacaggcttg

SEQ ID NO: 551140 - DNA, 138 bp, Homo sapiens
  misc_feature (38)..(38): n is a, c, g, or t
  misc_feature (67)..(67): n is a, c, g, or t
  misc_feature (110)..(110): n is a, c, g, or t
  misc_feature (126)..(126): n is a, c, g, or t
  misc_feature (135)..(135): n is a, c, g, or t
gacaagtcgagcggcaagcactacggccaattcacctncgagggctgcaaaagtttcttcaagaggngcgtccgcaggaacttaacttacacatgccgtgccaacagganctgtcccatcgaccancaccaccgnaac

SEQ ID NO: 551141 - DNA, 415 bp, Homo sapiens
  misc_feature (47)..(47): n is a, c, g, or t
aataaacagaaaattcggctggtctctagagaggttaatttgtgtanaatccactgagctatatacccctcattaaaaatctctgaccattgtgcatactgctctcttgcttcacaagatcacccacagtattctcatctcctttaccaagaacctgaacttcattctcctgcaaaagctgcttgctcttacacctgttcctgtttgacccggttctcaaccaggcgcacttggcctttaaccggcatctgctcctgggcacagtcctcagagcgccaaaatttccctgcccattatcagaccggtggtaacaagaataactctacacacctttgccatgttcccccttgaaaaactctagagtcaaatgtgagtcagagacacagctcaggttccatacacacactctgcttcc

SEQ ID NO: 551142 - DNA, 895 bp, Homo sapiens
gggcgggctaccgcgcccgggccctacccgccctggcgcactgctcttcccggtcatggaggcgccagccgccggcttgtttctgctcctgttgcttgggacttgggccccggcgccgggcagcgcctcctccgaggcaccgccgctgatcaatgaggacgtgaagcgcacagtggacctaagcagccacctggctaaggtgacggccgaggtggtcctggcgcacctgggcggcggctccacgtcccgagctacctctttcctgctggctttggagcctgagctcgaggcccggctggcgcacctgggcgtgcaggtactagggagaagatgaggacagagaacaatttgggaagtacgtgaaaccaaaattaagggtacaagtgggagattcttcacagtcaagctcccagtggctcttgatcctggggccaagatttcagtcattgtggaaaacagtctacacccattgttgcttcatccgtattccaagccagattcacccagtcagagacaccagattgtggtgttgaggggaaccattatttctaatcttccctatccaaggaagacacaaccatgcgtgtgaagcttggctctcgaaatgtggagagctacaccaagctggggaaccccagcgctctgaggacctagtgaattcatgggcctttcagagatgtgcctgctaatagtcaggatactttaaagtacattatgagaacaacagcctttcaggaccatcaccagtttgacccggagtcattgaaggtctctcactgggtaataatggtgtggaagaaacgtggacttaaagccacaggaactggataagggcctctccaggctatgatcccagaacgccaatagggatatccccaccgcttgaaacatctcc

SEQ ID NO: 551143 - DNA, 872 bp, Homo sapiens
taggcagtacgaggctggggttaaatcggccgagggaggcgccagccgccggcttgtttctgctcctgttgcttgggacttgggccccggcgccgggcagcgcctcctccgaggcaccgccgctgatcaatgaggacgtgaagcgcacagtggacctaagcagccacctggctaaggtgacggccgaggtggtcctggcgcacctgggcggcggctccacgtcccgagctacctctttcctgctggctttggagcctgagctcgaggcccggctggcgcacctgggcgtgcaggtactagggagaagatgaggacagagaacaatttgggaagtacgtgaaaccaaaattaagggtacaagtgggagattcttcacagtcaagctcccagtggctcttgatcctggggccaagatttcagtcattgtggaaaacagtctacacccattgttgcttcatccgtattccaagccagattcacccagtcagagacaccagattgtggtgttgaggggaaccattatttctaatcttccctatccaaggaagacacaaccatgcgtgtgaagcttggctctcgaaatgtggagagctacaccaagctggggaaccccagcgctctgaggacctagtgaattcatgggcctttcagagatgtgcctgctaatagtcaggatactttaaagtacattatgagaacaacagcctttcaggaccatcaccagtttgacccggagtcattgaaggtctctcactgggtaataatggtgtggaagaaacgtggacttaaagccacaggaactggataagggcctctccaggctatgatcccagaacgccaatagggatatccccaccgcttgaaacatctcc

SEQ ID NO: 551144 - DNA, 950 bp, Homo sapiens
tggtaattaacatgtcctgaaggttccaatggatttttgaaatggactggtaagacgcattaagttagaaagatgttaagcgcattcagtcccattagggtttccacttgggtgttaatctcattatacaggctattagaatgggcgggcagtaactatttcctctttctggtagaagtccataaattaatagttatagaccatatttacgcaatggccttttgaaaggggattattggttactccagggtcaacattcaatggttatcacctaaacacagagaataagctcatctttggcctaatcgaggctgtgtaattggactatctatgtaaacttctgccctatgtaacatagggatatctcaatataaacatatctatacaccaccatctttctaagtctccttaaaataatattggtcgcttcctgagacatacacatagagtttaaaacgcgaatatatttttgtgcaaaatgtttccttggcgactaatccaccaatgcgctttataagttatatttcctcaagaaaacgcatgggttccggttatttaagaagacaaatatctggtgtgtaaccaggggagggcgaagaaattaacggcgccaatgtcctctggggctaatttttaaatatttggggcaaatatgggcgctttctaaaataacgcccatggggctcttcccatggtgtggtgctcaccctaaatccagctataatattctgggtgctgggaaatcatctttagcacactattttcacacacgatgtacacgcgccacgggtgggttacaaacatcccctcgaaaagggaacaacctttttatcgccaggaagtcacatcacttcgggggggtgcaccaagttttttaaaactatcctgtttgcacaaatgagagaggcgcttatttttctaacccaaatgggatttttcaaaattttggg

SEQ ID NO: 551145 - DNA, 275 bp, Homo sapiens
tctacaccaaaaatataaaagtacattctagcccagatggaacggagatagtggtgctcaaatcttcatcaagtgtgttgtcccttatcacatggctccatgtcgcctagatcccccgatcgatccagtgttctatggtggtctccgtctctcattaggtgtggaatagtagttatctagtgattatgtgtatcatcccatattgctcatcttaatttcttcccgatcaggttacttatcggagtagaggttccgggtcaatgtgtagaagttga

SEQ ID NO: 551146 - DNA, 487 bp, Homo sapiens
taggcagtacgaggctggggttaaatcggccgagggaggcgccagccgccggcttgtttctgctcctgttgcttgggacttgggccccggcgccgggcagcgcctcctccgaggcaccgccgctgatcaatgaggacgtgaagcgcacagtggacctaagcagccacctggctaaggtgacggccgaggtggtcctggcgcacctgggcggcggctccacgtcccgagctacctctttcctgctggctttggagcctgagctcgaggcccggctggcgcacctgggcgtgcaggtgagtgtgggcgacccctcgccgccgctcccgggacccttcccgcctcccttcctggcggtccccgactccgcccgggccctctaggcctcaggaaatgcggagacccgggcggcgggaggggcacagggggtccgtgggattgcctcggggcccgcgaggagtcctgggtggccaggggccccggcgcctcc

SEQ ID NO: 551147 - DNA, 232 bp, Homo sapiens
ataatgttgtgataatatgttgcactgcgcagctcagcatagattgtgctactgtcacgaggcaagtctgtagtatagtcattacggtcctctgtgtgatttttttctccgaaaagaggtcattgtgcccgcaggttgtttgtgattagctgtctctaactattgttcatacaataattgttcattattgttctcaacttggggctctccccaacctggggacccttcctta

SEQ ID NO: 551148 - DNA, 87 bp, Homo sapiens
aatttgaaaggggttgatttgcaaatttggatttaccccccttgttttggaagcccaccagctgaaaaaagttggggttttttttta

SEQ ID NO: 551149 - DNA, 913 bp, Homo sapiens
  misc_feature (58)..(59): n is a, c, g, or t
  misc_feature (67)..(67): n is a, c, g, or t
ccaagtttgtaccacaaagcgtgtattaaacgacggcatactatacgactaggtacgnngctggtgngatcggccggaggcgccagccgccggcttgtttctgctcctgttgcttgggacttgggccccggcgccgggcagcgcctcctccgaggcaccgccgctgatcaatgaggacgtgaagcgcacagtggacctaagcagccacctggctaaggtgacggccgaggtggtcctggcgcacctgggcggcggctccacgtcccgagctacctctttcctgctggctttggagcctgagctcgaggcccggctggcgcacctgggcgtgcaggtactagggagaagatgaggacagagaacaatttgggaagtacgtgaaaccaaaattaagggtacaagtgggagattcttcacagtcaagctcccagtggctcttgatcctggggccaagatttcagtcattgtggaaaacagtctacacccattgttgcttcatccgtattccaagccagattcacccagtcagagacaccagattgtggtgttgaggggaaccattatttctaatcttccctatccaaggaagacacaaccatgcgtgtgaagcttggctctcgaaatgtggagagctacaccaagctggggaaccccagcgctctgaggacctagtgaattcatgggcctttcagagatgtgcctgctaatagtcaggatactttaaagtacattatgagaacaacagcctttcaggaccatcaccagtttgacccggagtcattgaaggtctctcactgggtaataatggtgtggaagaaacgtggacttaaagccacaggaactggataagggcctctccaggctatgatcccagaacgccaatagggatatccccaccgcttgaaacatctcc

SEQ ID NO: 551150 - DNA, 1186 bp, Homo sapiens
gcctccactgctgggctgcacacacacatatcagtgctatggactataacatacaatgatgcatctcgaccggatgtgactgagcaggctcaacataaggaggtagagcactgcgacaaggcgcaaccgaatgaggatgaggaggatacctggtgaagagactattgcatagataagcatgacatgagtggagtgactgcaatagaagactgttgagcacatgtcagtctcaaaagcgagggaggaacggaatagaaggcttaacacgacctgagcgagcgattgtaagatctctaaagccgccaagatcaactgcaagagaagcagcaaaggctacatcgaaccgtaaggcagcgtaacaccaaatgcatatgaggaacaccttggagtgcatagcttgagtctttccttctacctcggttaccacttcccctgctaagtatggtggctcccctatggaagagggacgcttgcgcacgcctagttgggttgagcaactctcaatgacttacacgttactagagcaagcattttcatccgccagtctaagaccaggcttcccagctggtagaggcggttaagcttgcaattgtcggttaaagcattggtaaatctcttccaatcgaagtaatcatactgtgcccatgtagtgactattcaaggagacccgtggtgatcctgtagcaagaagaactactatggtaacattgtatgggtacgtggatactgtaagcaaatgaacgtcaatctacgcgacacattctgggttgaacttccctggggctgtatgggttgccctggtcacaagggtttgccagagccgtgcctcagcatgaggttaacctagaacgtttccgattcggcggcggggcccccagttagtcacgcgaaataaaggaccgttagggggagaccgaaaggggaggcctgggtcaatgaaaaatgtgcttgattcgtcgcgcatggaaaacagcccgggcgccagggccgaaaggagaatcccgttgagggcgaggcctggcggggcaaaccgcgggccgccgctggatcctcgccgcggggagggcgggaaacccatacataaggcggggagtaaagaaacacaccggtgtacaccaagtgttcgcaccaagaggggagagacaacagaagcaaggaggaaagagacaacacaccacagcattaa

SEQ ID NO: 551151 - DNA, 117 bp, Homo sapiens
atcagtgcgaagactgtggatcggcgaagactgtggcaattccccgtgagtttttgtagggaaacacagccaaaccatattattctgaccctgacacccccacagtcttcacctgat

SEQ ID NO: 551152 - DNA, 603 bp, Homo sapiens
  misc_feature (603)..(603): n is a, c, g, or t
gtcgtgtggtggtggctgtagcgcttcggagagactgtctccgccctttcccggtctggagccggagtccgagggggcggccgggggatcagaacccgaggctgtggacagcgacaccgagggggaggacattttcaccggcgccgcggggggcagtaaacatcagtctacaaagataactacatcccttcttccgatcaacaatggctccaaagtgggatccatgaagaacaagaccaagagccacaggatctctttgcagatgccacagtggagctatacttggacagcacacacaatatttagacgaaggtgctagtcccaacctatgaggagctagaggaagatgaacaggaggatcaatttgatttgacagtcagcataactgatcctgagaagatagctgatggattgaatgcatatgcagcctacaaaggtacatcacaggcaagcttaccattgcttagatgcaacaggttgcagtacaacgtagatttagtgactgtgtggagcgttatgagacgctatgcgagcagcactctcagaatgcttcattgtgctgcaccgctgaggagagtctcatatgcatgacagagtggttgn

SEQ ID NO: 551153 - DNA, 550 bp, Homo sapiens
gattgccgatgacccacgcgtatgctaagttgtggaccacatgctccccgctggcatgaacgccccgtttatgtcacggtggatttataaacaacgctccacttgagggctatatcaaggggggtgacttcaaccacatttgtgcactactgtggcgacactcatacgcggactccggccgttgtggcatccctttccccgccgtttcccagtggattactaatacagggtgccaatgcagatgcagcctttcttcaacacaagaggtagcaaatcgattctgggcggtgtacccaccatgatgactggaaaatatatggggagacaaagttttattgtcccccctttactggtcggtgagacagtacgccacccctcatgactaccatgtttctgctgcccaccaggtacgtcaaatctgtacaagaagggttcttgtatcaagacctccggcgttttacgagcctcccttctagtcgtcgttggactcaactagacacggtgcaaagtagggcgtttgcgtggcgtccgtttttttagaccccaagca

SEQ ID NO: 551154 - DNA, 307 bp, Homo sapiens
caggcgttcctttagaactgtgtctgaaactaaatacaaacatgctaataccaactgtgtaacatagtctctcctgcttttctcttctacaccactcgtctcaatgtctcatatgcagaatacatcagcaagaatggagggcatatcctcacgaaactcactaatgtcactaagaacatcagatgcctgctcatgctccagacctcctctaattacatgatatgacacactcctagagagcctgctggaactccctccatgctgaactatcatcgctctcattttcactgaggatccgacataaacg

SEQ ID NO: 551155 - DNA, 720 bp, Homo sapiens
ttaaatctgggaagcacccgggaccaccccgtctgtgggacgccccttaactccaggaacatatcccgacccttcccagcacaatggatgggattttcaatttaaggtaattggggccagcaatcactgctggatggtaacggctttttaaatcctatggggtctcctgcaatgagaacattctcccgacgagctctctttcgctcccataaggggctggttcatctatagaggtgccagaaatccttgtttttctttttgagaccggagtctccgccacatgttgccccaggctggagacaccagtggccgcggatcttggcatccacctgcaagagctcccgcctcccgagttcaagccattctcctgcctcagcctcccgagtagctgggattacaggtgcctgccaccacacccagctaatgttttgtatttttagtagagatggggtttcaccatgttggccaggcagatctccaactcctgacctcgtgatgcacccccctcggcctccccaagtgctgggattacatgcgtgagcccctgcgccctgcctgtttgtagtaatttttaggcacccaatttccctcatcttttagtgcccttttcctttctgttcaggtaaatgtcaccctgtgcccagaatggatgacccggaaccttaaagagtggctgtaaaagattgcagagttatcataattaattgcttacttgcgtta

SEQ ID NO: 551156 - DNA, 112 bp, Homo sapiens
cagacaaggcatctgcgggaatgccaatttcgcacccatcgcgtacggcaacccgacgcccatcgtccccagccccccgtgagttgagccagcgacgcggttcgtcgaaacg

SEQ ID NO: 551157 - DNA, 936 bp, Homo sapiens
gggacgtgccggctcccctcgggactcctcgccatggacgcggacgactccctgtggcccccaagggctccttgcggaagttcctggagcacctctccggggctggcaatggccatctgggtgctgaccagcggcggggatgctcaatggtatgaacgctgacgtccagtgccgtggttgctgcatgggtatctactgtgtgggtgccaatggtgtacttcatctactgatgggctaccagggcatggtggaccggaggctcaaacatctgcagaaggcctgactgggagagttgtctccagccatcctgcagagtgtggcgtggactgactcaatttgtgccagtgccgcgggtgcccaagggcctttccgaactgcgggggaaggccgccctgaatgtgcatgctttggcaaacttgctcgcagcgcgggaatcaccaagcttgtgtgtgatcggcggggactggggagccttcaccggggccaacacttcttccgcgaaagggcaggtggaggtgggcatagctggaggacgcttgggccactgagaacggacaagatcagatacatgggatgggcccgttgcagaaagtgtaacgccgatacccatccaaatcgtggttggggcgatttggttggggactccaattccagaacacatggaatctccttggcaggggacagcggactattggaaaccgaattcgggaccacgtgactccggggcccgtggtgaaagagggatacaatcgggagggatacggatcgagaggccaacatcgataggaagcacatgggtgcacatcaaagaccacccaagaaggaaccctatacgatcaccttgggcagggttgattggggacgcgacaacctagtgggggtaacctggagccctggttgacgtcgcttttgcgccttggagggtgacggacatgg

SEQ ID NO: 551158 - DNA, 555 bp, Homo sapiens
  misc_feature (15)..(15): n is a, c, g, or t
acgcggcaccgcggntcaaggaagagctaacctcactgcttgtaggtagaaggaaaaaaggctctaaggtagcaaaagcttctcatttcagagagatgccaggatcctaagtgcctgccaaacttaccaattctaaggaataagtggatggatggcattactgattcctacattactgaatgattctgcatccgaaaatggttttattaaaaacattctacatcatgtgtggggagataaggaggataaaatgaagagaaagaatattatggaggggaagtacttctgaatacaaaatgtgttgaatttgttaaataagtattacattcacagggttcaaactatttgaggtaaagagattatatatcaagaatccatccctcaacttacccaggtggtcacttgtcttttcctggtgtatctgcccagtattcattcctgctgatatcagtcaagaatgaatgatacgtgtctccttcactttatttcattctagccaggtagcagactgtgtagacttttctgcactgcccttgtcataacaatctatctcgc

SEQ ID NO: 551159 - DNA, 393 bp, Homo sapiens
gcagcccctactactactaaattcgcggcctgcggacgagaataattacagatcattctctgagaacactgtcctagtaggacgagttatagttcataggcacttgggtataaacaggaaagccaagataaataaagatggtagtgcatttacactgaaatttctccgtacaattttggttaccgcttcacttaagaaattcgtaagggtcagttacagtgcctcacacctgtagtccctgcactttgggaggccgtgaggggaactgcttgaacccaggagttagaaaccagcctgagcaacatagtaagaccccatctctacaaaaaaaatttttttaattaggcaggcgtggtcatgtgcctgtagttctagctacttcggaggctgagg

SEQ ID NO: 551160 - DNA, 150 bp, Homo sapiens
gattaaggatgacctcaggcacatttggggacaacacacggtagactttcaaaactcccaaatggaaggtggctgctgtcctagggcaggggactgctgttccctgacgtgctggggtagtttggtctaaggggcccctaggctgcccac

SEQ ID NO: 551161 - DNA, 262 bp, Homo sapiens
  misc_feature (7)..(7): n is a, c, g, or t
aacaagngcagttaacccactggttcccctgaacaaggcagttaacccactgttcctagaccagttaacccactgttcctagaccagttaacccactgttcccctgaacaaggcagttaacccgctgttccactgaacaaggcagttaacccactgttcccctgaacaaggcagttaacccactgttcccctgaacaaggcagttaacccactgttcccctggacaaggcagttaacccactgttcccctggacgtcgacgc

SEQ ID NO: 551162 - DNA, 474 bp, Homo sapiens
  misc_feature (13)..(13): n is a, c, g, or t
  misc_feature (220)..(220): n is a, c, g, or t
  misc_feature (230)..(230): n is a, c, g, or t
  misc_feature (248)..(248): n is a, c, g, or t
  misc_feature (262)..(262): n is a, c, g, or t
  misc_feature (269)..(269): n is a, c, g, or t
  misc_feature (274)..(274): n is a, c, g, or t
  misc_feature (349)..(349): n is a, c, g, or t
  misc_feature (374)..(374): n is a, c, g, or t
  misc_feature (432)..(432): n is a, c, g, or t
  misc_feature (466)..(466): n is a, c, g, or t
ggctggcagtganactgactgcgtcggggttgagactgggtggatgaggctcaccccggcggggagaagggacgaggaggggcggacagcggggtccgggagtgtccgccatgtcgtttgaggtgaccgttgcgtaattgtgagtctgtgagagaagatgtgaagtatggcctcgtcccggtcatctgggcgtgcgggtcccgggttttgatcgcgcgtnagtgtagttntaacttctagtcatggcnaatgatcgcagganagcacanactgnaccctgctacgatctctcttggagtggatcagactgatgatcaccaacaaccaactcattcccggataaatgaanaatagagtgttacctacttcagtgnggtttcaaccctacttcttgcatcttgacactgtatggtttcagcgtagtgcccctgntcattagtccccctgatgttccattcctctctcntctttctc

SEQ ID NO: 551163 - DNA, 368 bp, Homo sapiens
  misc_feature (6)..(6): n is a, c, g, or t
  misc_feature (20)..(20): n is a, c, g, or t
  misc_feature (66)..(66): n is a, c, g, or t
  misc_feature (134)..(134): n is a, c, g, or t
  misc_feature (146)..(146): n is a, c, g, or t
  misc_feature (153)..(153): n is a, c, g, or t
  misc_feature (188)..(188): n is a, c, g, or t
  misc_feature (217)..(217): n is a, c, g, or t
  misc_feature (336)..(336): n is a, c, g, or t
  misc_feature (358)..(358): n is a, c, g, or t
ggaganacacgctgggccgnccccagagcggcgctggacagagccaacacaatctatagatttctnttgaactcggaatctcatagcaccaatattttttgcacagacactcttacttacatgtctcatcgganactccagaacanacatcanaaggaaaacatttaaagttgatgatatgttatcanaagtagagaaaatgacaggagagcaagantctcatagcttgtcagctcatttgcagcttacatttttggtttcttccacaaaaatgataagccatcaccaaactcagaaaatgaacaaaattctgttaccctgggagtcctgcttgtnaaagtttgcacaaaaaaagaanggatgtatgt

SEQ ID NO: 551164 - DNA, 281 bp, Homo sapiens
ggcacgagggaggcaaaagacacttcttacattgtggcaagaaaaaatgaggaagaagcaaaagcagaaacccctgataaactgatcagatctcatgagacttattcactgtcacgagaatagcacgggaaagactggcccccatgattcaattacctccccctgggtctgtcccacaacacgtgggaattctgggagatacaattcaagttgagatttgtggggggacacaaccaaaccatatcagcatccttccaattatctaatattcttgctcgtgc

SEQ ID NO: 551165 - DNA, 317 bp, Homo sapiens
  misc_feature (128)..(128): n is a, c, g, or t
  misc_feature (143)..(143): n is a, c, g, or t
  misc_feature (317)..(317): n is a, c, g, or t
agaacaaagaaagaataaggcaggtacgaggctgggttggtgcaactctcgcactctgtacttccgccgctccgccgtcgcgtattctacttgcccgggatcggcaaaattgtggaacaggaaacgcnggaattccggcccgncggtcctgggtttcatttttggaaccaaatgtgggggcttaccctggggcaattggtttggccaaaaatggccttgtggtttttattggcgttaggggggggggaaacctggaaactgggcctctccccacccccgtggaagggcccctcggtttggtatttttccccttttgn

SEQ ID NO: 551166 - DNA, 145 bp, Homo sapiens
agttacttggctgttcaatcatctccagtgtcctcgttacattctctttgcacgcattccatgtccattgcagggcctcttgtgcctcccacttgtctccagtatgaggcacacaatttggtgtgcagggcggcagtcatgtgca

SEQ ID NO: 551167 - DNA, 349 bp, Homo sapiens
gtggctctggcctatggactcagctgtagttgactgaagtcgctaaacaggacggatttaagtagaggtgatatgtccagtcaccggcatagagacctcctctgcgtcaccatccacacacagggcttctggtagacatcaggcaaagccctccatgttaatattcatctgaatatggataattagggtggctagcaaaactatcactgttaaaatagtggagatttctgtctaggccatctatggctttcatgtcctctgcagtcaactggaactcaaacacctgcacgttctgtctgatgcgctgctcattgtagctcttggccagaaccacaaatatcggcggatc

SEQ ID NO: 551168 - DNA, 152 bp, Homo sapiens
gtgttccttccatcgtcgggcgccgagaaccgggcgtcatggtggcgcttgggccagaaggactcctacgtgcgcgacgaggcccagagcaagcgtggcactcctgaccctcgaagtaccccatttaagcattggcactcgtcaccaagctg

SEQ ID NO: 551169 - DNA, 677 bp, Homo sapiens
gggtgtcctctcagccccatttctgagaacaggtgaatggcagaacagccctggccttggcccaggcagtctctctgtgtggcgccctatagagacctctgtcgccctcagttccgtcctgctcttggcaaattccagaccctttgcagaaatggccgagagccctaatgcctctccgtcgactctgcactcccaagaaacagcaacgaagtttaaggatgcttctctttcgggtggtggtggttgtagaagttctcaggaatttagaagaatcattgctccgaccaaaaagaagaagaaaaccaacaaaaaaaaggggggggagcagcacgagaagagtatgtcccccaagcgaggggccccaacgaatcatcacccgcaacgccccaagtgtattccgacgtcaaaagagtgggtacccacaatacaggggggagatcagaatctgaagacccaaatccgccagtaggccacgatctcgctacccacaaacgggaccgcaaccccgacgcgccaaaaccagcggctcaacaccacggagaacaaccctctgcaacagcagagagcccccataaatccaacccggaggagcgctgccaccaccacaggggcgcaaacaagaagccccaaagaaaaagaattatcacaagcacctcccaggggaccaccctctcccc

SEQ ID NO: 551170 - DNA, 162 bp, Homo sapiens
ttcccagggggggggttgggggggggggggccggggcccccccggggggggcccgggggggttttttttttgggcctgggcccccccccccccccccccccttgggcgcggccctttttccccggtggggtttttttttttttttgggggggttttctttta

SEQ ID NO: 551171 - DNA, 293 bp, Homo sapiens
ctggctctgaacttaggggaccaggtgcatcgactgtcatattgaaatacacgtcgtctgtaaggtcccgcggaagttctgtggacgcgcgtgtgatttctggccagtgctctgaatgtcatagtggagacattctgtgacgcgcggtatatacggggggagcatctatgactctcttaaagtagccaaatgcctcgttatctaattagggatgcgcatgaatggatgaggcgagattcctagagtccgtacttatggagctaggtctaagtacagagccagggggtaccgag

SEQ ID NO: 551172 - DNA, 201 bp, Homo sapiens
  misc_feature (86)..(86): n is a, c, g, or t
  misc_feature (197)..(197): n is a, c, g, or t
tgagaccagcctgggcagcatggtgggaccctgcctgtactaaaaattttaaaaagcattggctgggcatggtggctggtacctgnagtcccaggctgacgtaggaggatggctcgagcctgggaggtggaggttgcagtgaaccatgataggccactgcactgaggcctgggcaacagagcgagaccctgtctccnaaaa

SEQ ID NO: 551173 - DNA, 272 bp, Homo sapiens
ccccccagaacccggcagcccagcccccggtgagggggccagtggggggaaaagggggggggtgccccgggatgggccccgggcagggaatgggctggctccagggctgggcccggggcagatttaggttgggggagactttgggttttaagcaaatgggggcctggattcccgttgggtttttcgggggccagacaaaatggtggccttcccggccctgggcgggccgggctttggttggggggtggcccattaattggcccccccctcca

SEQ ID NO: 551174 - DNA, 431 bp, Homo sapiens
gaaaactgaccaagggttgtcagaggtttgttcaggggacagtgattgactagagaaagcacaaaagaatttttacagtggtagaactaacctttatgactttgtagaggtggatacatgatgctatgtatttgtcaagtccataaactgcaaatcataaagagtgacctttaatgtatgcaaacaaaaataaatcaatcaggagatgtggaaccctagaatggaatgcagactgtggcaaatgactctcctagtaataaaaatgtatgaaataatctcagtgaaattgatgtaaagaaaattaagatctaacatagaaaaacataattttgaaaaagaatggtttgactagaaattataaggctaaagaccaaaggaactatatacataaacactgcattccagctggtaaatttgtttcccataaggct

SEQ ID NO: 551175 - DNA, 512 bp, Homo sapiens
  misc_feature (286)..(286): n is a, c, g, or t
  misc_feature (308)..(308): n is a, c, g, or t
  misc_feature (466)..(466): n is a, c, g, or t
  misc_feature (489)..(489): n is a, c, g, or t
tcgtgccgaattcggcacgaggagaagtcgactccctagcagcagccgccgtcagagaggcccgcccaccagttcgcccgtccccctgccccgtccacaatgcagcctgcttttgcaaaggggtccaaccgaagggactatgtcttcttgaattttgggttgaagacagtaaggatgttaatgtaaattttgaaaaatccaaacttacattcagttgtctcggaggaagtgataattttaagcatttaaatgaaattgatctttttcactgtatgatccaaatgantccaagcataaaagaaacgggnaacagatcaaacttttaatgtttggtttacggaacaaggcagaatcgtggccgagtcatggtgcaaggtttaacaaacagaaagggcaaagcttaattggcttagtgtcgacttcaagtaattgggacaagaaactgggcaaggcactgaactttcangactgacacgcacatgtcttaanttcttgaatccgtttcttctgga

SEQ ID NO: 551176 - DNA, 1063 bp, Homo sapiens
ggaacggagccgagatagcaggctgccggcacggcgacggactcgctgtaccccatcgcggtgctcatagacgaactccgcaatgaggacgtacagcttcgcctcaacagcatcaacggaagctgtccaccatcgcttggcccttgaggttgaaaggacccgaagtgagcttctgcctttccttacagataccatctatgatgaactatgatgtcctcctggccctggcagaacatgctgggaaccttcactacccctggatgtgtggagtcccagagtacgtgcacatgcgctgttgccaccgctggagtcgctggccacagtggaggagacaagtggtgcgggacaaggaagtggagtcacttatgggcccatactcaaacatgatgacactcggaccatctgagctggaaaggcggccacatttagtagacccggcatagatgaaagcgactggctgggcgagcgattggctatcaaccatgaccagagagccttctgagccatgacgagactcattatccagatatgataaaccacaagcagtgtacaaagctaagtgaaaaggaagaaacaatcagacagcgaccttatacgaaacacctgtgcttcacgaatgaccaccgaccatggatgcaggagagggtaaacaccatccacgataagggaagtgatggccaagtagctggagactggaaaagtcccaaagtagatattcatccaaatggtactacacaacttggagctataaagagaagacccacgtgcggatgactgcagaggacgcagcatgacaatcgaacaatagagaccacaaaaggatccgaggcacagaataggaagacttgacagacgaaacaacaaccagggacgaagaacaggtgagacagacagggaaaacaccgaggagacacaaaaagcgtccacccaggaccgtatacgtagggaggacgacacgacagaagagttgcacacacgagaaaacatccaaagacgaacgaacagacagctacagccaccgcacagcaccataaaggcctacaatccgaacagctagaagaac

SEQ ID NO: 551177 - DNA, 123 bp, Homo sapiens
tgtgacgccactcactgcctggccttttttgtactactttgactttttacttatacgtgtacgtaacgtcttacggttaccaacacacactcaaacaccctgacttacttaacttaacactaa

SEQ ID NO: 551178 - DNA, 489 bp, Homo sapiens
atttcagccccaattctctcaattcctaatgattgacactggacaaattaccctaacttctatgtgctccgttttatcatctctaacatgcgactagctaccacatgagggtgctgtccgcctgcactccactccttagcctcacacttgctgagccaccactctcgcacatagtacgcccctcaataaatatttgctgatagaacaatttattaatgggatagtgatataattccatttccagagtggacttctggtgggcacatagagtttgatggaaatactagtttttcaattctgtgaagacactctatttgcaccactcagtacaatctgcatccctaatagcaattatcgctactcaactcaacttctcactttttttcctgcgaaggcaatcttgctctgtctcccaggcttggctcagagatctcggctaaaggcaacctcccacctcccgggttccaagcgattctcctgcctcagcct

SEQ ID NO: 551179 - DNA, 279 bp, Homo sapiens
atccaccatcgagctaacctgactagaaaagctactagctaacacaacaacacagaaacaaagacaccaccaccatcatcaccacaacccaaaacggcataattaaactaaaactaccactctaacttctacccactcatcctagccctacacctaatcacataaccaatacccccaagcaatctcaattacaatatctacaccaacaaacaatgttcaaccagtaactactactaatcaacgcccatagacatacaaagcccccccgagtattgcgga

SEQ ID NO: 551180 - DNA, 132 bp, Homo sapiens
  misc_feature (71)..(71): n is a, c, g, or t
gtgagctggcacctacttgagaagagacgagatgctggtggcagggcataggacagcaatggttgtatcanactatgaaagagctcgtccgcgctggtgctgaatgggtgaggagcttcctcagtctcccca

SEQ ID NO: 551181 - DNA, 653 bp, Homo sapiens
  misc_feature (222)..(222): n is a, c, g, or t
  misc_feature (564)..(564): n is a, c, g, or t
  misc_feature (566)..(566): n is a, c, g, or t
  misc_feature (570)..(570): n is a, c, g, or t
  misc_feature (572)..(572): n is a, c, g, or t
  misc_feature (588)..(588): n is a, c, g, or t
  misc_feature (590)..(590): n is a, c, g, or t
  misc_feature (628)..(628): n is a, c, g, or t
tggacactgattgatttgcataaagagttcttgggcctggagtaaaactatgtgctctattaaaatcattggtactttttgaataaatatttcattgttatagtaaaaatctcaatcttaaacaataaagccagaaggaggcgggggatggaatcgtagttgactgaatctggctctggttcacactgatgtgggtatgatttttgtggccctcagaggtcnacatgctggagcttgaactccgtgtggggtagtgagagcagagagatagtgggagatgctgtggtcagctgggctgggctctgtgctgaagaggctaagagttcttagtctttccccagctgctcgatagctatgtgatgtctcgatattcccccaccccatgcgggctccacggtgtgatacaccaggagggttgtcaccagagcttcaccgatggtagtgccttgccattggatctcagaattatgagctaattaaaccccatacctcttcataaaattaacctgccttcaagattttgttatagtaataaaagcggattaattcaaaaaaaacggcacnanctcntncccccgaaaccaaacnantacctaaaaacaattttatgaatcaactcgtctatgtngcaaatgtgagaagattttaggtag

SEQ ID NO: 551182 - DNA, 112 bp, Homo sapiens
gactgtctgaccagtgttgtgtccataatcccctcagcctcttctctgcacgttgcttaaggtccagtgcttgcctcacagttccatgcttgagcaataaagtggaaactat

SEQ ID NO: 551183 - DNA, 572 bp, Homo sapiens
agtcacttgttcccatccaagccccaggcaagggcaggcactccctggctcctgcgtacctcagacacctccagcagctcctaccatggacaggtggtacctgggtggcagtgcaaggggacagagaatcccttcgagtacgactatgaaaccgtccgcaaaggaggcctgatcttcgcgggcctggccttcgtcgtgggcctcctcatcattctcagcaaaaggttccgctgtgggggcggtaagaaacataggcaggtcaatgaagatgaactgtgacagaagagccggcagtgcccacgggtgcatgggcaccagcgatgaccaccttcccccagtgcgcaccacagaccccagcacagtcagcatgggctgaaggaagtgccaggcatcctgggaaccccttcatggtcatcccctcctgcctcagatccttaacttcctctcttccccagcttctctaacaccccactccctgttccaagttgaggagcatgtgtagcctcatccccctggttttcaatgaatccttgtataagcaactgccaatgaaatcgggctcgctgtggtca

SEQ ID NO: 551184 - DNA, 112 bp, Homo sapiens
ggatttgctggtgcagtacaactaggcttaatagggacatgtagtaaaaagtatacttatacaatgttttgtacttgtatttcatgaaattaaaacagtgatgctaaaacca

SEQ ID NO: 551185 - DNA, 287 bp, Homo sapiens
tttgggagatcccctctgctcttcctcccttcgctcgcaccatggctgatcagctgaccgaagaacagattgctgaattcaagggggcattactcattgttggacaaagatgacgatggcaccatcacaacaaaggaacttggaacgtgacatgagagcactgggtcagaacccaacagaagctgaattgcaggatatgatcaatgaagtggatgctgatggtaatggcaccattgacttccccgaatttttgactatgatggctagaaaaatgaaagatacagata

SEQ ID NO: 551186 - DNA, 474 bp, Homo sapiens
agtcacttgttcccatccaagccccaggcaagggcaggcactccctggctcctgcgtacctcagacacctccagcagctcctaccatggacaggtggtacctgggtggcagtgcaaggggacagagaatcccttcgagtacgactatgaaaccgtccgcaaaggaggcctgatcttcgcgggcctggccttcgtcgtgggcctcctcatcattctcagcaaaaggttccgctgtgggggcggtaagaaacataggcaggtcaatgaagatgaactgtgacagaagagccggcagtgcccacgggtgcatgggcaccagcgatgaccaccttcccccagtgcgcaccacagaccccagcttctctaacaccccactccctgttccaagttgaggagcatgtgtagcctcatccccctggttttcaatgaatccttgtataagcaactgccaatgaaatcgggctcgctgtggtca

SEQ ID NO: 551187 - DNA, 1102 bp, Homo sapiens
tccagccctggccgggaggatgggaccggctctgctgtgagcggtggactcggtggcctcgtgctgtgtggcgcgcacacgcagtgcggtggcggccctggggtgctggggcctctgcgcggctgaccaggctccacagagcatgtcgagcagccgacacatggcctgagccagatccagccagacccctggggcggacgagtgactgcgtgcggaccaagctgtggagacgccgggctggaaggccccggaggacgccggccccagcccggaagttatgagatccgacactatggaccagccaagtgggtcagcacgtccgtggagtctatggactgggattcagccatccagacgggctttacgaaactgaacagctacattcaaggcaacaacgcagaaagagatgaacacatcacagatgacagctccagtgacaagctacgtggagccctggttcaggtccttatagtgagtctacacattaccatgtccctgtatattcccgtctgaacagcaatttgatccacccaggcctttagcagtcagattgtcttcattgacggatagaggcgaaatgactgtgtgtgtacggtctattcgatggattactagtgcccaaaagaatcaagaccaactcatgacattagcacgcatctcacgggacgatggcacacgtcgccacgagaagggttactacactgccaggctacaacacgacctgaccacttgcttaactcgcaacacatgcactgcgggtggctcaccacacctgacccccaccacagcacaccgcccgaccaacactcccgcacgccgcgcgccagcgggccacaccggcaccagcggcctcaaataccaaacgcaaggcgaccacacaccacacacgcacacacgcagaccaacacagggggtcgcaccacacacacgagggcacagcagcaccacaacaacaggcgccagaagcccaaacaccggcgaacaaacagagccacacaggcacacagcgcccagctgagatgaaccaacgcacgagcacacacgacatcaagaccgagagccacatcgcaaacgctaagccgacacgacacgacaacgcgac

SEQ ID NO: 551188 - DNA, 144 bp, Homo sapiens
gactcagactgaggctcgcgccttgctgatccccacagctcacatggtagaggctgctcctcctctcctagcactgtatcagccttgtcctttggtaccggacactatggctttggccctgtgtagggagaaacggtgccacag

SEQ ID NO: 551189 - DNA, 286 bp, Homo sapiens
agaagtttcaatagctggagatagctatcatgggaataatcaaggaaaatatcctgctcgaggaaaaaaaattaaacacgacacacgagaaacagaacagatagaactggagagcgtcccagtccgtaaataggttatatgccgccagaagacctcatcatattagacgatctgattataaacagataaactttgggtaatgaggcatgtcactatagattcatctaacctacaacacccattgtgcagaaacattccagttgctattgaaacttctagaaactag

SEQ ID NO: 551190 - DNA, 317 bp, Homo sapiens
tgtagcacaataaggaagggtccccaggttggggagagccccaagttgagaacaataatgaacaattattgtatgaacaatggttagaaacagctaatcacaaacaacctgcgggcacaatgacctcattccacacgtagcacccttcagcaggaccctataaaactttcctccagcccttgcctctttgcaggtagccccttctctgctgagctgcccactgcaacatattttcacaatttctctaataaatctgcccttctttacctacaactatcttggtaaatggctttaccacctgcaaaactgaccctagg

SEQ ID NO: 551191 - DNA, 165 bp, Homo sapiens
catcttcttttcttcagatgcgacggcgcgctctttgctggtgctgcaacgagcaccgtggtttcttgcacctgtcatcatcaggtatgcctcccgccgggatcattgagccctgccggagctagtggggagaggtttacaaggtcaaggttgtgagcgccgtcc

SEQ ID NO: 551192 - DNA, 255 bp, Homo sapiens
ctctagaggacacccacgctgcacgacggatcaaagttaagaacgggaagaatgggtgcaaggtggctcctggaagagctcacccagcacaggtgccctgagctcggggccttagtttactagtccctaggggaatatttatatattaactaacattgtttctatagaagtacacagaagaaatagagaaatataaaaatctcgaggggtatggggaagaaaacgtgaggggactacagcagggaagccagaagc

SEQ ID NO: 551193 - DNA, 104 bp, Homo sapiens
tcaggagtgttgagaatgagtgtgaggcagtattataccatagccgcactaggttttaatagtacttgcggcaagtactattgatccatgacgagtgggggctt

SEQ ID NO: 551194 - DNA, 113 bp, Homo sapiens
gactagttctagatcgcgagcggcgcccttttttttgtttttcccttacaggataaaagcctttatacagaaacaaattggaacctttcatataaaaccttttctttaaaggc

SEQ ID NO: 551195 - DNA, 959 bp, Homo sapiens
gtgccccatcgtcaacataaatataatactagcataggaacatctcacttctaggaatactaatatatcgccatcatgcctcagtgttctccctacctgatgccgtagaagtggtagtaggtactatctgcgtgtacatttatagctaaaactctgtaactcgcttcattacccgacatcgccgtctgtatcccagtatggtggcctattgcacatactggattcttggccgcgctgtgaagcccatgttgggcctagccctactagtctcgatctccgtacttcattatggacattaccattacgttcgtaacctaaaactattcctaatgctcatggacgtactctgtcccagcaattatttttacttagcattggacgtgagttgccaaagatacacattaattttgaatctaacatcggccaccacaagcgcttagtaattgagtatcgttccctcttacgtgattgtttacccaactgtcaatcaacaatcgctatgtgagcttgttgcccacaagctttaacctccgagcccgataaaaacccccctcctaaatataactaacttgatcctatcccgcacacatcatcggatgacaaggccattatccagtgggccactatgacgaagaaagagtctaacctgtctatagtaatttaccctgcaaatcgccttagttatacattcacaggcacagaggtaacagtatttatatcttcttggaacgcagatatcccagccttggtatctatacgatgaggtacatgcagatgctgaacaggcctattctattataaccttataaggtactcccatctgaaattactgaacacaggcaaaattaatgagccctgccaaataaacggccatataaaatatcaaaatatgaaactggcagaaaacaagggcacgaacaggacaaagggaaacaccgcacaaccaggaaagaaaaagc

SEQ ID NO: 551196 - DNA, 347 bp, Homo sapiens
agacagggtcttgctccgttgcccaggttggagtgcagtggcccatcagggctccctgtaccctccgattcttgggttcaagtgcccctcccccctcaccctttcaagtagttgggactacaggggcccccccccccctggctaatttttgtattttttgtaaaaaggggggtctccctgggttgcccaggctggtttcgaactcctgggctcaagcggtccccccgccccccccccccaaagggttgggattgcaggcatgagccccggccccccccccggtatttttatttttcaaaaatttattttttttttccctgttttaaaataaacccaaagttttgata

SEQ ID NO: 551197 - DNA, 304 bp, Homo sapiens
cacatgtggtacccactgagatagttataatggccaatatagtaaggagagtataagctagacgacccgcttcgagaggtactggacgtaggagaagacacgtgctcaggctagggagagtcgtgggttctgctctttggattagatgccttagaagactccctctgcggcgacagagacaaactgcacctgtcgtggacccagaggcatttgtggtccagaggggcagagaggcaggcacagcgaccaacaaagttcaccagctagttctccaaaccttagtcctcccaccacaaacgtggga

SEQ ID NO: 551198 - DNA, 216 bp, Homo sapiens
caatagtcggctcggaccacgatatcggtcacaatgaactagttattaacagctacgtgacagcgacgatagaaccgttggctagattggtcccacctcctctcgtgtacaaagaaggaaatggaggccacgtcctatctcaactgcaaggttccttggtactcctatttccaaaaacctgctctaactacttttatgagcaatacaggtaactgg

SEQ ID NO: 551199 - DNA, 152 bp, Homo sapiens
tctaccagtcttctcccacagtctccctgtcttccaattccagttatttttcctttctagtagagacaaagaagacacattttatccgtggacccaaaactccggcgccagtcacagactcgggaagatagtcttcccttggtgtttaatcg

SEQ ID NO: 551200 - DNA, 229 bp, Homo sapiens
aggtgtctagagatcccggctgatatgatgagggagagatgactgaggctgctcatcgaggaacatgaggcgagctggtgatggactccacgtcatcagtacgggacttacaaaatgaagtgtgggaatcatttaacctatgagcatctcatgggggcccaggactctgacgggacggagactgggccatgtccgtgctgatgctgacggctggccatcttcagaatgg

SEQ ID NO: 551201 - DNA, 435 bp, Homo sapiens
gctggctctagtgtggagaaatgcagacatgctccttacactgttttcccattccttggtatttctaactgcatacccatcatccccagtgttgacttagcctcccaggagaaggcagcaaggaacagcaactattaatagaaggtgtagaggccgggcagtggctcatgcctgtaatctcagctctttgggaggctgatgcgggtgggtcgcctgcggtcgggagttcgagaccggcttgacagatatggtgaggccccgtctctactaggagtgcaagaacgagctgggcgtggtggcgggggcttgtggtcccggctgctcggggggctgtgacgggagagctgcttgagcccgggaggcggatgttgcggtgggccaggatcgcgccactgcgctccagcctgggcaacagagtgagactctgtctcaaaa

SEQ ID NO: 551202 - DNA, 1250 bp, Homo sapiens
tctctgttttctcttttgttctatgtgtgtctgtttctgtgggtgtttggtgcggctgtcctggttgtttgtgtggtgctgttttttgttttgccctgtttgctccgtggtctggcgctttctgtgttcatacctgtggtttttgattccgtgtcttttgttggatatgtgtgtatcagttttcacccttctggtgatttttttacgccgttttaggctcctgttttggttgacggctgttccttgctcattgtgtctaccgtgtgttatacgtgtgtactgctcacggttatgtttcagtttgatgtttttcttgtgtttaaccttctagtagttctttagtgtactggatttattgaagtttgtgctctataatttggtaatctagggttcaatggaaagtcgttcagtcttcggtactatgacctgtatgtctgtggcacttccagtgtaataataaggtgatgaataagatgagctaagtatgtttatggtgaatgattctcctgcctgccctatctcagagccatgaaggtcatctttgtctagagctatttttacctatgtatttatcgttctgtgatcatatatgccgcttgatttacgtatcatgctatctcttaaggacctagtagcactttatgtagtttttaatttaatcttaagatctggttacggtgactgattatgcctgtctgccagttcctttggaaatcaagtggcatagatctgtaattggtttttacggggccccacttcccaattcatgtaggtatgacatgtggatatacacgacaaggatcttagattgatattttgggcttggggcagtgatgggcttagtacaccccaagtggtttgggaaaggaggaaggtgagtggtgggtttatagggcggaggaggaggccaggctggtctaagtgctgactggcctacgtagttcgggcaaatcctccataagggaaagggaggatttgcttagaaggatggcgctcccagtgactactttttgacttctgtttgtcttacgcttctctcagggaaaaacatgcagtcctctagtgtttcatgtacattctgtgggggatgaacaccttggtatctggttaaacagcctgtacttttgatagctgtgccaggaagggttaggaccaactacaaattaatgatggtgtcaaatgtagtgtgtttccctactcaccgtgttcctgagaacaaatatcgtcccgctttgtctgtcctgtctccc

SEQ ID NO: 551203 - DNA, 1002 bp, Homo sapiens
agttggtggcaccacagaagaatctttgatggaccgtgtcataaaaatcggggggtgagataaatccttttgttgtgggggaaaaaaccattgatggttgtgagatgggaagccaacctccggtgcacaccaacgggggttctctctctttcacagggtgttgttaaagagatctttctctcgcgtagacattatataggggacggcgggccttcgtggttgtttggggagaccctcagaacagatgatttggccacacgctggagtactcccctctctaaggcgctctcaacgaagacccctctcggggagaattcacggagggcacgcgtcgggccacagggggtttcacctctctatcaaatatccctctggcagaaccccccacacctgggtttccacacaccgcgtgggggagaactcacacagaggggggaatataccgcagggacgcactatcacacacgctcttggggggagacacaccaacagggccacgttgtgcacacacatggcgtgagtctaccacgcgcattggggaagaaattttttgtgtatacaggtctgttcgccacacaccccaagtcttctacccccacaagcgtttatagcgcccccgggagagagccctgtgactgttttttctcctctagtcttctgtgtaggcgccaccagccctgattaagaatctctgtaatagttgggataaacacagggggttaaccacacaagtgggttacacatggagataaatagtgggacattggcttcataggacaccaccctagggggacccttgggccccccaaagctggtggtgaaaatgaaggagaggagccccacattttagaagagccccttatttggaggagccctgaaggcttcacgaaaatggtagggtttatcaggggggtataaattgtccaaattgttaagggggcttacccagattatttctaatttttaaaccctagaattaaaaggacacccggggttttttta

SEQ ID NO: 551204 - DNA, 925 bp, Homo sapiens
tctggggagaaatgttcttgggggtggcccaccgaggaggggtggagtttgttcttcgggcggcgtgattatgtggtcttccccgcgcgatccaacctgctgatgtgtttttcttggggggggggcgcgtcctttttttcccctcgctggctcaagtgttgtgcgcctacatacggtcacccccctcgcgcggtatgatgtctttcattgccgctgtctgttttgatggagagggaggtacccccgcgcggcgtctgtctgtctgtctggctgaatggcgcagccccccgctcttgtctttcgcgtgcgtgcgcggggtgcttcctctcccatctgtggggggtcggctgtgagagtaggagagcgggcacgacacgatatgagatgaggctgcgtgagtgtaatgaactctctctctggtcgctcccgcataatgatagaagaggaggtgatttttttcttagagagaggagagctccctccgccgcggaccccgacggttgtcttcatcacacgtggtggggtttttgtcccacagtaactcactccaccacccagcgatctgtcggcgggggtgtatatccgaccgccgcgccgcacctacatctgtgtgggttccgcacacaccacggcggtggttgactcattcctcgtctgctgtctttgttcgccccgctgtgatggttccccacaggaacaactgatttctttgttcttgggctgtcttcctcgcaccgcgggggtggagccctcccgccgcccctcgtacagagaagggaagagatccaccaccaagggaccccagtgggggcgtggggggcggcgggaaaacaacgaagaagagaggggaaaaccccccccccccccccggggggggggttttttttttttttccccccaaaaaaccggggccccccctctttta

SEQ ID NO: 551205 - DNA, 588 bp, Homo sapiens
ctctttccgtgctgcggagtcgtagctcatggctctcttggctacacacccaagactccttggaaagctttctagtactgcttctccccaaactatgtcgagaggaagaaaagtctggtattctgagttctactttttttcatttccagtagtaagtaagtgctgctccaccaagctgagaagaaatggcccttggctgtcctcggggccagtgctaggaactctggaccagccgtctgtagtggggcatgacttcgtgctcgggcaagtggagggcgaattccaaggccactaacaccgggaattcaaaggcaatcagttctcgcctgttcagccggaacttctcttccagtttgtcaattaaatgcttgacttcgtgttttttgaggtcacttccaattttggctgctaacagaacacatgccccagcacacagcttccggttctgtttgttgagttccccttgagggcgagcttttcaaagtagacgaagggcatggccaccgtgggctcctcaaggccacagtcctcctgcgcaagtttccgaatctctcggttcagactcctaatttggctgagtgtcagctt

SEQ ID NO: 551206 - DNA, 326 bp, Homo sapiens
ttggatgcaatcttggcgggcaggtggaaacccttctccggtgtgtgcaatgtgttgaagcttgtttcctgcagccagaagatgggttttcttcttattctttcctttcttatttccttatttttttttttttaaattttttggtcttgacaagacccatccccgggggcgtaatattcttcaaaggacacggatctaataggtagtagagtagtgtgtagtgtcctatgctcgcgtgtgtaatgggaggtaataattaaatgagtagccggtgcggcggtgtactatggccgagctactgtgtctccaagccccccgccaggggg

SEQ ID NO: 551207 - DNA, 213 bp, Homo sapiens
ctctatttcagcagagagagaacagattgaactatcttggctaagtgtcatcctgccagtcaggaagaagccaccctccaggtaccacagactcaaagtggctgtggtaggagacccaccgacctgggatagggtgatgtcacagacactagagaggtttccagtctgcagatggccaaggagctgcagccttctgccactgctggagcattg

SEQ ID NO: 551208 - DNA, 1276 bp, Homo sapiens
  misc_feature (556)..(556): n is a, c, g, or t
gcaggagccaggtcggtatagagcgccagacggtccgtcggccgtcggcgtcaagctggtccacatcccctgggctctagcccgcacactagtcagcccttgaccgtgcgttacgccacaagatttacttgcaatcacatctgaataaatcacttgaagaaagctatatatgcgtgctactggcgaccaggtgtggcgatatggggccgcgtgtttggcatgggactgatctgaccgttatcgtgatctcaggtgatctgaggtgctatgaagacttgcatcaacaaggaggtccaagaatgccaattaccgtttcgacgaacgtgtcaatatggaatactaccagactgctagtctagtgagatttccagcctggtcttgcgcgggctagtatgaccctgcttgttgcgtgaatagcaagcccaattctgacgtagaaggaaatatccagtatttcgtagagctcatgttcaccaatgggtgcacaattctcacaaacctattagaggagagaatgcaactagccatttaaggatatctctggagatcaccaagngacctaaagttgggatgcgtgcagaatgagatctctgtccatcgtcttcattggactagaagagcaaggacaacttcgatgacaaaacagagtattgatactcgtccggcatgcggtgggggtacggcaacttggggtgtaatgactcggtggactaacatgctcaagtagaggaacccgtggttctcctggcgatcatgacgatgacactaattgtgcacggttcaacgcacgcgttgtggtttgtaaaacagctacagtggaacaacgaaaaggacatcgagatataggcgtgaggagacgatgcatattagatgaccgacagaacatagcggtaaacagacgatcctcacggtggccatcgatttcgcacaagggcgacgctacctccgtgaagacattccccatctatctcacaacacacggctgggatacgccccctttagttctctttctctcgatgggtgaacacctctcattgtcaagcatctatcggggagctttttcacaacaggcgcgaaactgcgggacgaaagagaactggcaatattcgcgccgcggacaaacactggtctcaatgaacgtagctgcagcatcacccagtgtgtcacgtagtgcacatgtaaactccccgcctgtgtaaaagccccactgctgattgcaacaacaggatgggacgcgaaaacgcatcttagatccaacgcagatgtgccgtcatta

SEQ ID NO: 551209 - DNA, 378 bp, Homo sapiens
  misc_feature (258)..(258): n is a, c, g, or t
  misc_feature (303)..(303): n is a, c, g, or t
  misc_feature (333)..(333): n is a, c, g, or t
  misc_feature (339)..(339): n is a, c, g, or t
gctcagctagatccgagttattgtctcatgaccaggaaaaattaggcacgggaacatcaaagagtgagtggaatagaatttattaagcgaaaaggaatgatctcagcaaaaagagcggtcctgaaagcaggttgctggttgtcttccttcatagttgaacacaagggcttctatatccgctgatggggctgggttccctatttgcatagggcatcaattcttggttggctccaccccatctttccagtgcgcgtgcgngtccttagtctgagccactccacattgatttatttcctttacttncggcatgtgtttaaggggacggaatttttncattgncggggcattgttttggggcaagcctttctgttgccacaa

SEQ ID NO: 551210 - DNA, 423 bp, Homo sapiens
gtagactataggttgaatcgaatataaattgtatgatatgaatatgctacagtacatgtatccagtctactagttagtggacattgggtacattctgaattctaggcttatacaatgaaagcttcttttctccttctgctgtgcttgtattcacacttctgttgagtacagatccagaagtaggaacgctgggtcagcggcccagtagagtctgcgcttgtggataagtctgtctctaagttctgtaactttatggttcacatactttgatcattatatgaagtgcattgctctcttattgataattgtataatctacctattgaattggccttcgagtgagatatgaaatgcctctcttcctctaacatcgctcaccacctgcagtacgcagggtctgatgatgagttaaactgtggaagct

SEQ ID NO: 551211 - DNA, 323 bp, Homo sapiens
  misc_feature (59)..(59): n is a, c, g, or t
tggggggggctttccccttttggtttttttacccccggggggggggcccaaaaaaaaantttggcccccccccaaaaggggggggggtttttttttttcccccccttcccctagggggggatcccccccccccccccgggggggggggggggggaaaggttttttttttttgcccctcttttggaccccccccccaaaagagggggggggttttttttttttttttttttttttttcccccccccccccctttggggggggggggggggggggccccccttttttttttgggggaggggttttttttttctgggggcccccca

SEQ ID NO: 551212 - DNA, 341 bp, Homo sapiens
tcatgataatagatggcgaaggtggttatgtgtgtagatactaataaaatatagtaaaataattcgaacatgaagatttttgagtattatcttgttttaatatagtttagttggaagtttatgtactataattttcttttcttttttttctttttttttggagacagagtttcgctttggtcgcccaggttagagtgcaatggcactatctgggatcactgcagtctccgcctcccaggttcaagtgattctacggcttcagcctcccgagtagctggaattacaggtgcctgtcaccacacccagctaattttggtatcttaaatagacaaagggaaaca

SEQ ID NO: 551213 - DNA, 495 bp, Homo sapiens
gcagccacagaactcatttgggtgaagcagtggtccaaatttgtccaaatatgtaagcatcagttaaagaaaaatctcttccacagactctaccctcatttttccaggaatgtgtatggttggacatagtgggaacaagtttaaaaagtggggacttctgctttcaggaagatggagtagatgtacattgccctattcctcccactaaaacaactgaaaaccttgagcattatatgtaaaataaacataagaagactgaaaggtggagagaaggcatacacactagggacctcagcacccaaggaataacacggtggtgagttccatgggttttctttttgcctaatatatcccaggcttggaactgaagaagctggcagcctggaaacagcaatgggtacagacttgaaaaaccctgttctctttaactcgaaggacgaggaaaaagacagcctagcaagccagaaaacttttagaccataactgctgtgctct

SEQ ID NO: 551214 - DNA, 758 bp, Homo sapiens
gacgccacaggggcaagagggtggtcagaatggtcccggggaataatggagggtcacaagtatgcctcgatcggacatgtatgccagaaagggctactgtacaaagaggacagtacttgcagcccagctaagatccaacggtagaaatagataccacacgatacggagaagggttctcgacaaccgtgattacagaaacgcagttgtgctgcgtgacacacgaagcggcgcgtatcccggggatgagttaaacatatcgcacagaactgccgtagcaatattagtccgtacgtgcacagactgatagccgtcggaaagacatgcttgcaggaccaccgagacgcaaaagaaccgcgtatcaggctcaggcacggtgaccgagaacacgtgagcggacggccaaagacactaacacacacccgccagcgcggagaccgaagtcccgtaggagagacagaataagcagacaacgcgaacagcaggccagccgcgggggaggcagacagaagagcggtaggagcggaaacacagaggagaaggcaaggacgttggagccattaagcataggaggaatctacgataacagcatataggcgaggacctcgcgtagacgtatacagctattcgttagccacgctgccaagcataccgacccgagggcttatcccgagtcgtaaccggcaaccagagaacaatcagccagcgcacaaaggacagacagttggtaaggcgccatctcgggcacaacgcattaccca

SEQ ID NO: 551215 - DNA, 126 bp, Homo sapiens
atatgggtgccagtattattaggggaactagtcagttgccaagctccgattactctgggtattactatgaagaagattattacaaatgcatgggctgtgacgactacgttgtagatgtggtcggta

SEQ ID NO: 551216 - DNA, 177 bp, Homo sapiens
agtggtctggctctctgccgcacattcggcttccttcgtcggccatgtggcattcgtgctgttttccacgcattcgcttctccatcctgctcccccccactcagtgccgcaggccgcctcatctgtctgccccaaaccttccgtcctcaggggctccctccattcacttcagggcac

SEQ ID NO: 551217 - DNA, 104 bp, Homo sapiens
atcagtgggcaagcattttcaggtagcaggcgacaacactcacgcagcctgtgtgcgtttgctgcatccatggtggcatccgtctcagcatgtcgcaccgtgcc

SEQ ID NO: 551218 - DNA, 333 bp, Homo sapiens
aaaccaccaagccctcccgcctgcccatcatatatgtggcccccccgcatgttggggccccgccccaggaatggggtttggacgtgggcccggtctggttcgtgtaaagtccatccatcccaacctggctccgtcccacccaaccaactttccccccaccccggaaacagacaagcaacccaacctgaacccccccccaagccaaaaaatgggaggcaatttcacatggcatgtggaaaatatttttttcttttgcattgatctctcaaactaagttttgatttttgcccagccgaacaggaccaaaacccaaaagtgcattgcactttacca

SEQ ID NO: 551219 - DNA, 418 bp, Homo sapiens
aaaaaaaaggtccccccccccccccctgttaaatccgttaatttttggaaaggcaggggaacccctgccttaggttgcaaaaaagcatcccccccatcctgggtcaaaaaccctggtttccggggcacttgtaaccccccgggctgttttttggtttgggggggtttttcaaaccagctttagggttcaggccgagccaggttccccctcaaaaaaaggtttccccctccccctttgggggttacaatgggggggttatggctgcccccggggggccttagttctggtcccttttaggcagttgacggggcagtcaaatttttaaagttttggacaaagttttcctttggaatccctccccttttttcttaaccacccacctgttgggggttttatttttgaattcaaaggttgtgga

SEQ ID NO: 551220 - DNA, 685 bp, Homo sapiens
ctatgagggtgcctctgtgctccatcctaggcaacagagtgagacgctgtttaaaaaggaaaagaatccttccctagagctagtatcctaaagctgcagagctagcccagacctcattggtttccttgtccttggggtgtcttgtcctgaatctttgggggtgaagggagtgttgctcccagtccagagggcctgattctgttcggactgggttctcaaggagcacgagccaggttctcaggacgacgagtccccttgtgcctccccattaagagggggttcgtcagaagcaagaacagcccctctccgccgagtcacagtctgcaagggtaaggccccgagagcttccatcacattcgccccctagctgctccattagcttctcatgaccatgcattgtgtagaactggcagttcatcgtttgaagggaatgggggagggagcctgggggacacaaagccttattatacgaatagcaatagctattgcatttagagctaagatattaagctctacgcattacgccactttcaatggcgagaaatcgtgcgagcatactaatgggggtaagaaagagcgctgtcggccctaaggaaagcgttgggaggatggttggggacatcgggctccatggtagggtcagatgaggacggaaggggaccaggagtgtgggcggaccatgtca

SEQ ID NO: 551221 - DNA, 380 bp, Homo sapiens
gcgttactcaaacagatcacactggggctttgcctatggagctgtctagaagagggcactatcctccagaccccagaatggtagatccacaaacagcttgcgccattgcacctggaaaagctgcagacactcaacagcaacgccatgaaagcatctgggaggggagctgtatcctgcaaagccacagggctggagctgctgaaggctgtgggagcctacctcttgcatcagcatgatctggatgtgagacatggagtcaagaggaaattatttcagagctttaagacttaattactacctcattggatttgagtcttgcatggggcctggagtccctttgttttggccaatttctcccgtatggacattcggcgtgtgca

SEQ ID NO: 551222 - DNA, 328 bp, Homo sapiens
  misc_feature (91)..(91): n is a, c, g, or t
aaaggtggcctgtcttctccctgctctgatgggaagaaagcaggaggccgggcgcggtggttcacgctaataatctcagcactttggaggnctgaggcaggtcaatcacctgaggttaggagtttgagaccagcctggacaatatggtgaaaccctgtctctactaaaaatacaaaaattagccaggcacggtggtgcatgcctgtagtcccagctacttgggaggctgagccaggagaatcgcttgaacccaggaggtggaggttgcagtgagccgggattgtgccattgcactccagcctgggcaacagagcaagactctgtctca

SEQ ID NO: 551223 - DNA, 119 bp, Homo sapiens
  misc_feature (31)..(31): n is a, c, g, or t
  misc_feature (69)..(69): n is a, c, g, or t
  misc_feature (78)..(78): n is a, c, g, or t
  misc_feature (94)..(94): n is a, c, g, or t
ccctcaacaggcagaagtgtccgttgtcctnggggaagccaagacaggaagagtcataaccatgttgtnggactttanaaactttcctagcctnttgtccagcacatttccaagaacaa

SEQ ID NO: 551224 - DNA, 184 bp, Homo sapiens
gctgtgtgtaagcccctctcataaagggcttaagctcattcaccatggaagagctctcatgacctaatcacctccaaagaccccacctcttaatactattgcattgcagattaagtttcaacatgaattttggagggatacaaatattcacaccatagattatagtaatatagtatagtatata

SEQ ID NO: 551225 - DNA, 251 bp, Homo sapiens
agcttgctgagtagctgggattacaggtgtgcaccactacaacttggctaatttttatacttttagtagagatggggtttcaccatattggccatgctggccttgatctcctgacctcaggtgatccgcccgcctcggcctcccaaagtgctggggttacaggcgtgagccaccgcacccggctgagaatatgtatatttattaagataaagatttgatttagatgtttgtaaaactttttattaatgtca

SEQ ID NO: 551226 - DNA, 231 bp, Homo sapiens
atttgattttcttttttctttctttttttggcctccttaacctttcctttgaaatgcatattgtttttgaaggactttgtttttagcataaatgttgggccttttattttagtgtttggatggaaacctttgtgttggttagctttcctttgctttgtatatttaataatgggcctttattttcccgtatgcctaccttttgtattgccccataaatttttttttagctga

SEQ ID NO: 551227 - DNA, 840 bp, Homo sapiens
gttcttggacaaatggcgccatgtgtgctgctcggtagcggcggggggggggcccagtcggtgtatgccttctcgggcgcccgtgccggcgtgagcctgtgagcctgggctccctgcgggccaaggtactacttatcgagaatgtggcgttccctctgaggcaccagggtccgggaactacaccccagatgaacgagctgcagcggcgcttccggacccgtgggcccttgttgtgctccgggttcccgcgttgcaacccagttgtggggcattcagggaggaacggccaaggaaacggaaggaaggattctggaattccccttcaaagtacgtccgggcctggttgggtggggttccgagcccaattttcaatggctcttccgagaacagtggcgaggttgacacgggtggcggggggccgccacccttcttcttcggccttcctggcgggaaggccctggccaagctcccaggggaaggagcggccacccggggctttatgaagccggaccccaaaagttcattcacctgttcctccgggcgtggtggtccggcacaccgattgttcgcctcttggaacctttcgtggagaaagttcccgtgggtgggggggcccctcgacagggtggttggccaccttaagggcagggtacacgcgccggcgggtttcccaagaaccatgtggaacaatcggaggccttggacatcggaagacccttggtggtcctacaaagggggacaagttgttgccttaagggggggccctttctttaaccgggggttggttgggaattcgcaggtgtgcgtgactccgggggggggtacaccacaatgaggggg

SEQ ID NO: 551228 - DNA, 345 bp, Homo sapiens
ctggaaaaggtgggccctaaatccagtgagaggataggaaggccagcactcttattctgtcctaataagagacagagacgggcacgcagagacacagaagaaggccatgtgttgatggaggcagagactggagtgatgccgtcccaagccagggagtgcctggctccgccaggcactggaagaggcactgaatggatgcttctcgagagcctttggagggagcatgaccctgctgacaccttgattttgcacttctggcttctggaactatgagagggtaaatttttatggcagccctagaagacgaatcccagagccaataaagatccctcttcccctgaaaaa

SEQ ID NO: 551229 - DNA, 239 bp, Homo sapiens
cgcgtcggttatgaactatgtgatctcagttctctttcaatatccagtactgtaagtttctgtgacctgtagtgtaccattctcaggtggtgttatggtttggatgttttgtcccctccaaatctcatgttcaaagtgtgactttcagtgctagaggtgggcctagtaggaggtatttgggtcatgggggcggatcccttatgtatgactttgtgccatccacatagttcagcgtctga

SEQ ID NO: 551230 - DNA, 244 bp, Homo sapiens
gacttgttgaggatcagcggggcggattccagcacgaggagtataccagcactttgtgaggccaaggaggacaagttgcttgaggtcagaagttcgagaccagcctggggaacatagcgaaaccctgtctctacaaaaaaaaaaatggaaaaattggcccggtttagtggcaggcgcttgtggtcccagctttccgggaggctgaagtgggagatttgcttgagctggaaagggggaggttgca

SEQ ID NO: 551231 - DNA, 801 bp, Homo sapiens
ggagcagaagtggagagggcccgtcgtgacagccacagacggccatgcgcagctggctagcgtgctggcggctaccaccatcaccgctcgcacccctagccgtccctggtcccgcgaccaggcagcgagctggcctgcctggcgtgtgtactcgggacgtgatggctggccggagcaggctgatggatgcgacgtgagcagtgacgcgctgctgccagctgcggtccacgctgtctcatgcacttccagtactcaaactccgtgcactcttccatcaaccccgtgccctggtgcttgggtggctccgtatgatgctggccgtcggaacgctgatctccagagtcctcgcgctctgacgtcgctttgctcagctctgccccgcgcactcctcgaggctccgtgcccgcagctggctgtcggtccctgctctctgctgcccacgtgtgctgcgcttccacggacaccccggtcccccagcagccatgtgatcgaagacgccactgaaagccaggcgctgctggaaggtgatgacggatgaatcgagaatctgccgtgatgtgtgctggccgccttgcttgggagtccgtttcatcctgcgtcatcgttctactttccagagacgtatcgttgcacccccagtcatgcgggaggaatccctttggttgttggacagtctgctgccggatcggtggtcccgatagccccctgcatggaactctacgagcccaatccagctggagcttctcgacatctgctgtcctgcaccaggatgcgggtgggaccctgtgactgacacgtgcg

SEQ ID NO: 551232 - DNA, 378 bp, Homo sapiens
ttctagcaacactttcttttctttttctttttctgagcccaggctggaaatggtgtagcacaagcatggctcactgttgccagatctcctgatgtcaagtgatcctcccacctcagactccctagtagctgggaccacaggtgtttgccaccacacttggctgcattttggtagagctgggggtcttgctatgttgcccaggccaggctgaggcaggcgaattgcgtgaacccaggaggcagagtgtgcagtgagtcgagattgcaccactcttcccttctaggataacagtacctataagcaacttgtcactatcggttgtttttttttcccccacctcttgatagcgagggtctatcggaagtataaagcgtttag

SEQ ID NO: 551233 - DNA, 378 bp, Homo sapiens
cctgcttttttcccgttttccagatttcctaataagcgatgtgacttcacagcgtgacctttttatatacattttatatctggtatttgtttagaccttagcagtgttctgaggccgggcgtgtggctcatgcctgtgatcccagcactttgggtggctgaggtgcacggatcacctgaggtcaggagtttgagaccatcctggctaacgtggtgaaaccccgtccctactacaaatatccaaattagccgggcgtgggggtgggcgcctgtagtatcgcatgatctgcagggtaaggcggaacaatggcgtgaattcgggagtggagatcgagcctgtgcactccagtctgggccgcagaacaagagtccgtctcaa

SEQ ID NO: 551234 - DNA, 304 bp, Homo sapiens
  misc_feature (73)..(73): n is a, c, g, or t
gttcttgaaaaaaaaagaacccgggtttttccctaaaatgggataattaggaaaaaaatcctttggtcaaaangggttaatttcctttaaaattcccggtggccttattaacaaaataatcagggcctttgaatattttttaccccgccctagggggccctttcccctttcaaatgggcacagggttgggcaggggggctcatcccaaaaattccacccctttgggggggtaaaggggggggatcccttggggccaggagtttgaacccaggtggggcaatttagtgagccctttttttcccca

SEQ ID NO: 551235 - DNA, 933 bp, Homo sapiens
gagcggggtaatacggctgagtatggtggcataggtgcagcgcgcagcggtgaagtggatgcccttaaaggaaccagtgactgccctggaagcgccagatgcgtgaaactggaagagaagcttggcctgtggaaagctgataatctgacacaatgaaactatatggaacagtgcgtgacagggagtgagattcagaatatcgaaggaggaagatggctcagtcgaaccttcagctgtataccaaagagacatgataaaaagttatagaatgtgccccttggacaatttgagaatatgtctacctagtgagtgaaagcctgacgtggaaaagggcggatgggcgagagcacgggaaattataataatgcaactgcattgacaaataggtgatagacagttcaccttgaaaggcctgagagggaaaagcgtacaatcctgggacttaacagctatgccctgatggggtgacttaacctaggttcacaataagaggaaaacatttgcatgaatataaaggggaaagcgaggtttggaaaaccttaagaaggaatgagaacaagggggtagtatacaagagagaaaagaatattgtcaagataatagtccggaatgaaacgcagtagaaagtaaaggagagtatggggagcaacactttatgctatctgatgaaatattaataaaccaagaagacaggagacttatgctataaacgaatccttccaaattgtccatgtaacaaaggaagaaaagtgacttcgcatagggtgacagatatctggccgaagttgttgtcagggatgcggcaaagcaatatgaaattagggggaaataagggcaattagaggcatcatagatacattgaaaacaaaacggaaaacacggccataacggaagaaatattgagaagagaaacagagttacaaccaacataat

SEQ ID NO: 551236 - DNA, 152 bp, Homo sapiens
cactgagcacgacgagtttcccagggcgtgactgagcaacacctgacgaaagtcattagaactgctttgttcttttagtggtgactgtgcagctgtgtttttttgttttttgggctagggggtttgaagttttaaacttttctttattattc

SEQ ID NO: 551237 - DNA, 223 bp, Homo sapiens
aggatatggcccgcaaggaatgtgggtgccggcaggacaggcgattggtggctatggaccgccccctacaggaagaggagcccccacgttgtaccaaacaggaggttgctacatgacgggcaagtgcctagctaataatacgactcactatagggaccaatgagcagaagaaggaggggggtggggggcgcgtgtgggtggtgggtgtgctgtgggtgtggcg

SEQ ID NO: 551238 - DNA, 385 bp, Homo sapiens
tttcacgtgtgtggcaagatgctgagctcggcttatatttcggaccacatgaaggtgcacagccagggtcctcaccatgtctgtgagctctgcaacaaaggtatctggtgaggtatggtccaatgtgcggtcggccagcggcagccggccggacagcggcagacagcggtctagccagtatgcaggaccctcccacaggctgtgggctccctctcgggggcggccgggcggtgcctgtgagctctcagacaacttccctcccaaccctggtgagctccaagattggttgcagggggagaggggagaatggagtagagtcccttgggtacagagctcctctccccacctcatgtacccaccaaatccgtatatacctaccaaacaa

SEQ ID NO: 551239 - DNA, 200 bp, Homo sapiens
tcgtatagcatacagtctttgtgcattcaggcaatacagccactagactttcttcacctgtttgttaacacagtcaggctctgtctcactgaagagaggatgaatcatgacatttccttaccagccacaggctggcgactaaatttgccttgatatcgtacaacgtctgtcaggtcttaccatcgattaatctttattag

SEQ ID NO: 551240 - DNA, 235 bp, Homo sapiens
aactcagcaaacagtctccagcagtaaggtactcaggactaaactactctacataacaacctccgtggtgtcagggcgcctacttactggcatgaaacaatgctcctgatggagtcttaagtaccaggtaagtatatgtacagtataaacatatacaggagcggagcaccactgggaaggtagaccgacacccattactataccgagccatgggcagagggcttttgggcgccat

SEQ ID NO: 551241 - DNA, 274 bp, Homo sapiens
  misc_feature (191)..(191): n is a, c, g, or t
  misc_feature (202)..(202): n is a, c, g, or t
  misc_feature (238)..(238): n is a, c, g, or t
  misc_feature (240)..(240): n is a, c, g, or t
tttcacgtgtgtggcaagatgctgagctcggcttatatttcggaccacatgaaggtgcacagccagggtcctcaccatgtctgtgagctctgcaacaaaggtacatgccaagggctgccgggagggccaagggcaaaaggtgggcacctgaccaaacaccttgccacagatacaggttaaaggtgctatanccaaaaactcntaacgtctaaattcctacaaaaagtcaaagaaacancnaggggacacctaaataaacatcattaaactctaa

SEQ ID NO: 551242 - DNA, 401 bp, Homo sapiens
ccgcgctctaggcgtcagcgagtgcgcggtccactgcggtcgcaacctgtcgcaactcctagagcgcgccttgtggagacacgggtcccagacctgcggcttctacatgggagtgcgctcggcggaagatatgctggactcgctggagagagactacgcaggaaagcgcccaggcacccatcaaatcagagagaagggattcaccttcttacgctatggcaggttagaaagtactcaatggctatgcacaccaggaacccaaggctttcaacggatccttgagaaatgtggctgtagatgaactgagcacgcagggctgtaccgtgacagaggctgagttgtatgccatgaactctgagccgcgggccacagacgatatcactggtactctctcttcctgg

SEQ ID NO: 551243 - DNA, 384 bp, Homo sapiens
tgtcgtcggtagctcggctggttcatggagcgcgccgaatctgaagacccagaactgcagcgcatggttcggatgatcctggatcgtgtccagcccaagtaattcgttcgaatgccgctggcaggcctcacggttgctgctggcggcgtatctccttgcccagctgtttgcgctgggcgcgctgttgtcgctcgacctgccttattcaagcctcggaatgctggtgtgcatggcgcacgctgcctgggtcttgccgcgtcatctgttactgactcaccgttcgtcgattcgtggcttgcgtcgcgatgaagatggctggcaattgtacagtgacgagcgcggctggcactccgtgcagttgcgtcccgatagcgtcgcattgcc

SEQ ID NO: 551244 - DNA, 137 bp, Homo sapiens
ttcttggagatcactgtgcagcatggtgactatgatactgctatgtttatttaaattttcagaagagtagatctatgtgtttcttttccccttctcccagtaaaaggacattatttgagggtgatgggatatgttta

SEQ ID NO: 551245 - DNA, 2248 bp, Homo sapiens
caggcgatcgtgacatgctaaccgatctttgcgggccagactacatcagagagcgtaggcttcgcaactgatatggtaacgctgagttaggcataccagaatgaatagatgcgtagtcgagttattctcagttgctaatccacgaaaatgaaatatatacccgctcgcatatgccataatgcatacgacgtgcctaggtcaacgtacttatgcttcaaccgcaacgctacagccgaagtctcacataatgtccttcgaattcagactagtcctcatgtgaagcaagtattactttctccaggaccagatgaatgcatagagccacatatatgtaccgcacatcaacgatatctgtcattcaactaagtcataaactaggtcgtatacgacacattacaccatgtaagcgcatatagcacgccactgttcagcttcctgagttgcgcaggaggattgacctcaatgggcactcgctctacttgataatgccgtgtgctgtctctcgttctacgaaatgcaatagaatatacttaggctcaccatcttcagctcatataccgaaatctttatcgctcacgtaccatggtaaggcacgttcgtcgcatgcaccatcgtctcgaattcgtatatccagtcatacgcgggacaagcatcgacggtggactgtaagatcaaatgccagactagggcaaagaatcgttagcaataagtccctcaaattagccacactcggaaggaacttcaaaagggggaactactggtaccaacccttataggtaagccaattctaaacttgacgtatttattattattcccaagtaattaccgggattcctacgtgagtcataacaaggtcaaagccaagaccgtgataagattcttcgcctctgacaaactgacttggtatcaccctatatgcgaaccgcgctacatggggtggcccgaacggttttggcatggcgtcaacatgcaaaatagtgtctccccagaagcaggaacctagccattcacgcctcgacgcccagctaagaggcagaactccccctgcctctcttatacgctcagtcagttcgttgttcgcgtctctttcttcacatacatacacaataactaacacacaatccaatacaaacagtcaaaacgctaaaagtcaaaacaaaacaataaaaacaatgacaactgaaaaaaacaataaaaagaataaaaaaaaacaagaataaaaacaaaaaaacacaacgaaacaaacaaacatcagcgagtgaaatataaataagcacaaactaaataaaaaataaaaaaataaacaacaataaaaaatacaaacacaaacctaaacaacacacaagacatagagaaaaagaaacaaaaagaagcgaagaagagagagagagcaaagagaccaacgagatagaaagaccagagagagagaagaaaaggaaggaagagcaagaggagagaaagacagaaagaagagaaaaagaagaagagaaaagagagagacacaggaagaaaacaagaggacgagagaagaagaagaaagacaggacgcaacaggaaagaacagaagaaaaagagagcaaacaaaaaaagaaacaaagagaagggaaagaaaacagaaagaggaagagagaaacgagaagaaatagagaaaagaaaagcgaggaaccaaaagaagcacaaagccgaaagagaggaccggaaggagaaagacaaaagaccgaagagcacaaaaaacggaaaaggaacaacacaaagaaaagaacaagacaaggagaaaacagaaagcgaaagagcggacaaaaagaagatagcaagaaaaagagcaggagaagacgagcaaagcaggggcagaagaaagaaaagaaaacgaaacacgagaaaagagaagaaaaggacgacgcgataaagagaacagaaaagacaagaagaggggaagagataaccgcaagagagaaatagcagatgagaaagagcaaggatagacgagaggaaaaacaaaaggagaacgcacaggaagacacacgaagaagagagaagagagcaagcggaagcagagagcagagagagagagagagaagaagcgaaggagaaggaggaggcagaaagacagagagacagagaggagcagagacgagagaaaagcgaagaggaaaaacgaagagaaagaaaggagaacgcagcagaggaagaatagaacacataggagagagcagaacgcagacaaagaaaggaaagacaacagagaata

SEQ ID NO: 551246 - DNA, 189 bp, Homo sapiens
tcccaagtgtataatgtgggtgtggagtttcatgacagaatatacacttttggtaaatctgtactttttccaaatatggaatgccttattttggaattcttaaggattttaaaattgggagaaaagcacttaaagtttcgtatatatgaatatacatgtaaagctgttaaaatacgttaactctcagtg

SEQ ID NO: 551247 - DNA, 99 bp, Homo sapiens
gacacgaccttgatgaacatcagaacaaaatatggcctgtctaaagaagaaaacccgtatgctagatttgacaacactaaagcgctccacacatcagtc

SEQ ID NO: 551248 - DNA, 412 bp, Homo sapiens
atgaaatttttaaattgtagtaaatatacatgagaaaatgtagaattttaactattttgaagggtatgatgcagtggcattaaatacattcacaatgatgttttgagaactactttcatcatcccaaataggaactctccccattatatagtaacaccccattctcacctcccccagccccttgtacgttcttaataatctttttgtctcaatgaattcgcctattttattttattttatttttgagactcagtctcactctgtcaccgaggctggagtgcagtggcccagtcttggctcactggcagcctccgcctcccaggttttaagtggattcttcctggccttcagccttcctcaagtggctggggactacaggtgtggaggccagtgtggccgggcctgggaattt

SEQ ID NO: 551249 - DNA, 1177 bp, Homo sapiens
gaaaaatggcggctggcggtggcggcaggatgcagatacgaacgggaccggaggcagcagcgggatggaggtggatgcagcagtaagtccccagcgtgatggcctgcaggagatgactgggagatgtaaccgtcgcttctccatccccttgtcatatctcaaacgatcgtcagaccacttggaatccgaaatgcagctccacaggaagggggcggacctgttgcgaggtgaattggagagctctgattgggcaagccaggaggtgccgaacatatcgacggtgaatgaaactccatattgaagcatggcatagtcccaacaaccagatggaacgcacgaacgattaatcatttgaacaacggacatattaattatacaccgaaggcaggcagcaagtataaaaccagagtgtccaacgcgagctgagaagattctggcgagatatgggtattaccaacaagaggggggccaaccttgtaccccctcggggaacaattcacaacgttccaattaaagcacgcgctgatgctgaaggaatcgatcgagagaggcccacacaaatcatatatcctgcaaaggtctgaaaacgccattaatgaaaccaaaggcaacaacagacaatctatcccatgctacaagcagatacactacggaacgcactcctggctccaattcggaatagattacattcgaactaggcgcaacaagggccccagaaaattggcctggatgacaggccatgacggccttgaaaccattacaacattccatgtggccccacacaagaaacgagacaaacaggccagtgaacaagcggcgcccaattggggcacacggtattaagagaacccccaaccggtatagacaccgccccgggacaaacgtttggcacacccaagtgctacaaaaatcataacgtggggcacacatggacgtgagtagaacaagcaaaaagtgtgacaaaagccttcactgccacaccagcagttggacatgagcagccacattgggatacaagcacagagccgccttttagtacatatacgtgactcaaaagcaccaaagcaccaacccacacatgcacgcagagaaccacgcaacgtacatccaacaacacgcgcacaacttagtactccattgtgacaccacaaaccaaaggttgaaacctcgataccgc

SEQ ID NO: 551250 - DNA, 133 bp, Homo sapiens
atcatgaacgacaccgtaactatccgcactagaagctcatgaccaaccgactacttcagaggaaacaaatggtcattgatgtccttcaccccgggaaggcgacattaccttatgacaagaaattcgggaaaat

SEQ ID NO: 551251 - DNA, 190 bp, Homo sapiens
ctggccaacatggtgaaacaggttctctactgaaaaatgcaagattagccaggtgtggtggtgcgcacctgtaattaggaggctgaggcattataatagcttgaacctgggaggtggaggctgcagtaaggcgaggtgagatggggccactacactccatcctgggcgacaaagcaagactctctttcga

SEQ ID NO: 551252 - DNA, 248 bp, Homo sapiens
caaaaggttgggggaagggaccaaggaaaagggcttaaaaaaggtcttttaacaccttggttggaatgggccaaagccccggaggaacattaaattacaaaactggctccttgagctgagtggaacagcagcaaccaggcatttgacctcggtgggaaagcacccatgttgcacgaggcttcataaatttctggttctccctggagtctctgcttctagaacacattagccacacaaaatcctcaaaa

SEQ ID NO: 551253 - DNA, 137 bp, Homo sapiens
gtgatgagaggattggttatgaggttgagactgtacctgtctgatctcaggcaactgccgcgcagtacccagggatgagggcgatgtggtctttctgcgtggtcaggtctgatgaaggggagatcatggtcgagatg

SEQ ID NO: 551254 - DNA, 395 bp, Homo sapiens
  misc_feature (13)..(13): n is a, c, g, or t
  misc_feature (122)..(122): n is a, c, g, or t
  misc_feature (154)..(154): n is a, c, g, or t
  misc_feature (200)..(200): n is a, c, g, or t
  misc_feature (232)..(232): n is a, c, g, or t
  misc_feature (361)..(361): n is a, c, g, or t
  misc_feature (376)..(376): n is a, c, g, or t
  misc_feature (386)..(386): n is a, c, g, or t
ttcggcgacacanggaagaagaaaggaaaaggcgagaggaagaagaacttgcccgaagaaacaggaagaggctctgcgtcgccagcgggacaagaaattgcattaaggcgacacgatgaagnggaagaaagacagcagcaagaagaagctcttngaagactggaagagaggagaagagaagaggaagaaaggcggaacanggaagaattgttactcaaacaggaatacgganggctgcaaaatgggcccgggaagaagaagaaccccagcgtccgattagaggaagaacccggcttgccggattggaaagaggaggcatcccagactcccggcattgaaggaaagaatgaaccggaatganaaaaggagcttgganggttccaccnggccagaat

SEQ ID NO: 551255 - DNA, 875 bp, Homo sapiens
tcaatttgaaagcaggtactgtttattaaccaaccagcttaaaaaaataatcatggtagacacctttagttcattcttctaattaagccgtgtttgactctggtccctcccgtgttggccagcatctccaccttctacaaaagtggggtggtctttttcttcattccacctcggtggagaagacaattgtgaagggccacaggaagttattggccctctttgaagcgttttccaacagtattaaatcctcatgaattcaaattcctccagtgcagatgatgccgtatttaccaagagactcgagcaattcaaagcgtttattctggtcaaagcaattccgctttcttaattggattttggccataaaccacgtcttgtagattaagttccatttatctggatcttcgagatattgggggtaaccccctatgcaattatatggctctacgaatcctcaagcgagtgtttaatcgaagcctttggttgagcttcacaagaggtcccatgtgaagaattggacgaaggcgaaagaagcgtgcaacaacctttcgaaccttggggcctcacctccattgatacctcgtgattctgatgacaaacgccaattggggtctctgcaggtacatagaagttgccagcttttcattggcatcctcgcattcgaatttcagtcctggacatctgcctaatatccttgagatagagaatagcttttcaataagataaggtatctcctagcctttcgagcctctttggggaaaattttttctcaggcgtgaattgcagttttggaagtacttgggtttactaaggggtctggacagaaggacctcccttttctcttgaaagccgttggtttgaccccagctcagtta

SEQ ID NO: 551256 - DNA, 168 bp, Homo sapiens
ctacggacctcctccagagtttcctcttgcttagccctgctccaggcataagtcaccatctttcgggttctaacgacgtgcgctcgtgctccacctcacctgcgcggctgttgagactggtccggtggtctcgtccttctgcgcgaaactcataatcgtacccaggtt

SEQ ID NO: 551257 - DNA, 477 bp, Homo sapiens
  misc_feature (279)..(279): n is a, c, g, or t
gcgtggtcgcggccgaggtactgccttggtcatggggcatttttggaggtctcggggtgtgcaagaaacctccagtaaggggggttgagtagacagggaaaaactcagacgcggagactggcagaaaatgggaaacaggaattctaggcctgggagccaaaggaaagagggagccaaagagactccgtctgacattcccctggatagtcctttggggagattgttgcaggtttggtggaacaaccctcgaaccagggacaaggaaaaggaaaagatgantaagtattgctgttttgtctggcccaaagaccccattcataagccttctgtcttttggcctaagtttggctcagatgaggattgtgttctaagctttaattctctctgtgaataataaaacttcatcctcacaagaagagataggttactctctgctgaatcaaggaattagcccccatgatccccctcaaaaaagaa

SEQ ID NO: 551258 - DNA, 180 bp, Homo sapiens
aactgcagtctggccagctctcccttgctcattaacctgatacataggagctagtaccattcatttccaaatgctcccctttgtggagtgcataggttggcctgacagtagtcactgaccccagggctctcctatgcccctggaagtacccacatggccttgagtcaccatctattaaat

SEQ ID NO: 551259 - DNA, 106 bp, Homo sapiens
gcctggcagtgcagtgagctgtctggccttttgtccttgatccttggttaaggaaatgaccaaccagtacggtattctcttcaaacaagagcaagcccatgatgac

SEQ ID NO: 551260 - DNA, 668 bp, Homo sapiens
  misc_feature (259)..(259): n is a, c, g, or t
  misc_feature (472)..(472): n is a, c, g, or t
  misc_feature (538)..(538): n is a, c, g, or t
  misc_feature (574)..(574): n is a, c, g, or t
tattcctgcgccggcctcgcctcgcttctcaatccaaggctcgtgacactaaggtattgatagaagacacagatgatgaagctaacacttgaattttctgaagtctagcttaacatctttggttttcctactctacaatcctttcctcgaccaacgcaacctctagtacctttccagccgaaaacaggagaaaacacataacacattttccgagctcttccggatcggatcctatggactccaaacaagctcactgggnttcttttcttttcttctgggttaattttaattttctattttcaaaacaaatatttacttcatttgccaatcagaggatgttttaagaaacaaaacatagtatcttatggattggttacaatcaccaggacatagatacctatcaagatgaagaacaagccttgcaaggaccctctgatgggacggtactgagatatcttggctttcgctcaancccggtttgacttggttgaacccgacaattggttttaaatttttttgcagtttatggtgagaaatntttttttttcttcatacccaacggcaaaggactggncgaacttgcagggggaacttaaagcagtccttcaattatggactactttttaattggagtaacctttcttttttggggttgctggggggggggg

SEQ ID NO: 551261 - DNA, 695 bp, Homo sapiens
  misc_feature (299)..(299): n is a, c, g, or t
  misc_feature (317)..(317): n is a, c, g, or t
  misc_feature (348)..(349): n is a, c, g, or t
  misc_feature (352)..(352): n is a, c, g, or t
agcggagctccagcaagagcgcgggcgggtggcccaggcacgcagcggtgaggaccgcggccacagctcggcgccaaccaccgcgggcctcccagccagccccgcggcggggcagccgcaggagccctggctgtggtcggggggcagtgggccatgctgggggcagtggaaggccccaggtggaagcaggcggaggacattagagacatctacgacttccgagatgttctgggcacgggggccttctcggaggtgatcctggcagaagataagaggacgcagaagctggtggccatcanatgcattgccaaggaggncctggagggcaaggaaggcagcatggagatnngantctgtcctgcacaagatcaagcaccccaacattgtagccctggatgacatctatgagagtgggggccacctctacctcatcatgcagctggtgtcgggtggggagctctttgaccgtattgtggaaaaaggcttctacaacggaggcgggaccgccaagccgcctcaatcttccaggtgctgggatgctgtgaaatacctgcattgacctgggcaattgtaacaccgggatcttcagccagaggaatctgctgtactacaagctggatgaaggactcccaaatcatgatctccgacttttggcctctccaaggatggaggaacccgggcagtgtgctcttcaa

SEQ ID NO: 551262 - DNA, 528 bp, Homo sapiens
actgtatccacctctacctgcagtaagagagcaaggagcgggtccggatgtaagctaggaaggagacgctgtcctgatgagaggtgctagactctggtttcggagattgagaccaagccatcaggatccaggctatttcagaggaaaggcggtggagatacaagagatcacgctgataggagcagagcatctgtggattccggcagctctgaggaaccatggtggagctccaggagcgttttttccaaccttggtgcccctgggccttggtgctggcagttgggagccgtggctagtgggggttggccagagctcgggcacaggaaagaacggtcgacccggagttcaactccagacgctacaggacaggacattaggctagtcagacttctgagaactccaggggaatttgggagcccaatgacaaaccttggagccctcttcggatcactccaggagacatccctcggaggaaaagaagagtatgttgccacccacttagagcaccacagagaccacagaacccaa

SEQ ID NO: 551263 - DNA, 339 bp, Homo sapiens
ggaggctgaggcaggagaatcgcttgaacctgggaggtagaggttgcggcaagccaagatggcgacattgcactccagcctgggcaacaagagtgaaactccatctcaaaaaaaaaaagattatattatcggtcggacattagatattttcaattaatctcttattgttagacatgtcatctgttccaaataactgccactcatacttctggcagagccagaactagaatacaaacacccagtagatatatgtaaaaatgtctctactaaaagtacaaaattagctgggcgtggtggtgcatccctgtaatcccagctacttgggaggttgaagtggga

SEQ ID NO: 551264 - DNA, 1158 bp, Homo sapiens
gggcctaacgccaggcgtataaaagccggtacggaactagctaccggagggcacggcgctaccgtaaggccacccaactagcaaggacccctaccccctacgggcgctacccataggcacagtatacgcgtatcgagagtagacctagcactacgctagctatacagctaggatagcacccatacccaatagcaccccctagcgcgctaggcagcgcaaagccaaggaagccgcaggcccggccccctacacccatagccgggccgccaaccgatacccacagcgccggcaggactaccgggcccgaactacctaggcaaataccagtatccaaggtatacagaccactacctaagcaacacctaggcggtgaccgctatatacccccatacgccagtagctagcccacgataggcagtaggcccagctaacctacctagagcacaggcagaaccaggcctagaaaacagcccagcacgccccacccaaccaccggaccccatacagaacagcctaggccctatcgcaaccctagaacccggcctaccggactagtacccacggacagcccaccaataccctaacacgcgcctaccagcgggcccaaccacccaccaacatcgatagccggcccacaaagtcgcgcttactacaagcacaccaggaacctggccaacagtaacctaccttacacaggcccctatcatcgcactgggcctcacctttacccttaggctcattacgccattgccccgggcacattgaacccctagccccggtcatcacccacttacaccccttataccccctatgcccccaagaaacatccggctaaattaccccttaagggcaactaagccgacccccttatagcaccttctttcctcccgcgcacactcctttggaaccttaaccttatcaacctccttatgcacacaccccttatagctaaggggactctccggccgcatcggttaatccttaataggggtgccactacttatcgtaaacaccttagcgccctcctgttttagagcccccacctcaagagtcaatcataaaatctctccgtctaggcacaggtcaagcccccctatgcatgatctgtaacatgttatagctcctcgtgccttcaaccaccgcagttcttggacacca

SEQ ID NO: 551265 - DNA, 441 bp, Homo sapiens
tcgtgctggactacaggcatgcacacatgccagctaatttaaaattttatagagatggggtctctatgttgcctggtagtctcaaactatggtctcaagcaatccttctgcttcggcttcccaaaatggctgggattctagtgtgaaagctggcgagtgtctcatcaagacactggcagacaagggccactgacttaatataaatggtcacatatctgtacatagctgctcccctactcacctggtggactcccatgtcctgctgcagctgtggctattgcaaaagcagaagccggtgaaacagagcagtgggcattgtccgccgtctgtcctggttatttgaaaagaaaggaaatggaatggtgaggcaaatggataatattctgtaacaaaaatcatcatttttcttcctgcaccagatgaaggactgggccaaatgcc

SEQ ID NO: 551266 - DNA, 106 bp, Homo sapiens
tgactgtgtattatctttgcgagaagcaaagatatggccaggtggtatggtgacgatagtggtggtgatggtgatgtgtgacgatggtggtgatggtggtggtggt

SEQ ID NO: 551267 - DNA, 266 bp, Homo sapiens
tacgctgactcttctgaactgtcatgtacacccgctttatgagagggattccacttcatagcactgaacactcatagatgtgtcctgtagctaaaattcaataatgtcaataatgtttcctgggcttgtaaggaaaattctcaagtgaaattggctttgcttttttacagtgagtgacagtgcctggctctgaggaacacagtgactattagtgcagtctgatgttgctgcatgtgtgccgaggttaccagttttacccaccacgg

SEQ ID NO: 551268 - DNA, 824 bp, Homo sapiens
  misc_feature (209)..(209): n is a, c, g, or t
ggtcctccgtgcgatctgtgcatgcgtgcattacaaagtagagatggatcacaccgctcgtgccttacagggacgctttcacgtggtgcgtatcccttgatgtactggtagactcaatgagtgcccatgtgcttaggtcactctatgcaaatgcgatacactcacgtataacgtgagttagcaggtcctgtgaactgctcgagagtgcnatctatgtgaattctgatacagtcgtgacaaatgtcgcatagtgctgtcttactcactaagtatagattcttgctgaagagggtaccatggagcatgatggttcgtagcttggttgcgacatgtctacgagttgccaaatggttgtgtgcacgagtaagtacagaatcctcgtgtgtagagtcctcgacgatagtgactagtcactacccagcgaaatacctgggtcaggaggggtcggtgggtgtttggcaggcttgcgtgtctcgccgcgtgagagcccacactgctcaagtgtaccttgagcgcgtctttcaaacattcactgtgaacacattgcgactatatcctcgtaagtccgcaggcaagtcccttctggccgagtctcgacgcgactatccttgatgcaattactcgacgcccaagcgctgaactatctagcgctcatcaacggcagcgcagtcatatactgtctacacacatacccataacctatatgccgctggtcgtacacaccaagattcctcctttgtgacgcttttgtgtcacgcttgccacttgccaatgactactgacacaaggagagcatcaaattcagtggggcaccacttgtaatg

SEQ ID NO: 551269 - DNA, 258 bp, Homo sapiens
gtcgagaactactaatttcatgctatttctttctctctccctttgttgttatttgatttgggggaagggagtgaggcttgtccaaattcgagctatctgaacacatcaacagaaatcctatgccgaccatctgaactgagccttccattcagaagcgaacacacttgcgggctgaaccatatctgagcaacgagactctgctgccttgcatatgttaatgtctcatgctgtggcttttttttacagctttatgaaact

SEQ ID NO: 551270 - DNA, 474 bp, Homo sapiens
cagctgccaagtaaaattgatgtttgatacttagaatttttggagtgaaacagcttctggttgaatagttgaattagataacccgactcacctctgaaaggcctactgtgataaagcaatgacatttaaccaaggctgtaatttaattgtactgtaccctttagcaatagctcattgatctgtgaaaatatttgctgcttggtttaattaatttatgatgttagtgagttatttgcaaaatgaataactgcatgttccaaatttcaggcttcagtttataaaacccactttctttggaaaagttgttaactttttcaatgtggttggacagtaggtgtttctgattccatagagcttagaagtagctcagtccaaatgaagccaccaattttatatttccaccaattttatatttcaacttcaacacttgaagtgccacaattacaaactactttacaaagcaagaattcattg

SEQ ID NO: 551271 - DNA, 233 bp, Homo sapiens
ttccccttgcccctgatttttttttaaatggtaaaagcccctgtaaataaaaattgccaaatcatgggacccaaaaaggtgaaaaatttgtttttatgaaaaatgtattgtgctttgaaactaaaaatctgtaaaatgttagttttggtaattttttttttgctgggggatttacaaattaaattttttttgctgggggataaacattaaaattaatcatgtttcaaagttta

SEQ ID NO: 551272 - DNA, 965 bp, Homo sapiens
tgaggcggcgctcgacagttccgtctgcttcagccgcagtgtctccctgcccgtctcgttgcattctccagagaggggacggacctccacttcctctttcagaaaaatgtctgctccagctcaaccgcctgctgaagggacagaaggagctgcccctggtgggggtcctcctggtcctcctcccaacatgaccagtaacaggcggttacagcagacccaggcacaagtggaggaggtggtggacatcatgcgtgtgaatgtggacaaggtcttggagagggaccagaagttgtcagagctggatgaccgggctgacgccttgcaggccggagcatcacaatttgagagcagtgctgccaagctaaaaaggaagtactggtggaaaaactgcaagatgatgatcatgctgggagctatctgtgccatcatcgtggtagtgattgtaatctacttttttacttgagaatgtgccatcccttccctgttctccattgccacccaagctcatgtctcttcccctctgtttgctttctcaacaaactcctccatcctccgttctccatcctggccaggcttctccatgacccttcctttactgttgcgttcatttgcacccttcctcaaaaatagaaatgctgctcgtggtccaagtcctgaagtcactaccgaagacaacggtggagctccctccttacccatttatcgttgtgcctggacctaaaagagttggttgcaagggacggagggccggatggccacgctgactgtcctagaagttagcatactggggagagaaaggatttggtgccgggggtccagcagctgggcttggggagcgccaaaatgaaatagtccacgagtgtttacagttttcggcggatgtatagagaggggctaaagcccacaggtggcacgcgaacacccaaagtgtctctgcaagtggaaccgtgagagaaagcctcacg

SEQ ID NO: 551273 - DNA, 136 bp, Homo sapiens
tcagcaatgtttcccccccgcggacgctagcggagagtagagggcgctgcggtagccttgaagctatggcgcgggccggagattggaagcccgggcctgaccaaaggtgcagatcttggtggtagtagcaatattc

SEQ ID NO: 551274 - DNA, 961 bp, Homo sapiens
  misc_feature (352)..(352): n is a, c, g, or t
  misc_feature (724)..(724): n is a, c, g, or t
ttctgcgcaggagccgcagggccgtaggcagccatggctcccaggccggaaaagcataggacgaagaaggctcgatcaaccatgaaaaacaaggaatgagatgatcaaagctacggaggatcgactgatgcgcaatccaaaagaaccacatgatgataatatagcgccaagaaaccagatggacggcgcacatacatccgcacacctccacgactaatacccaatcatatcctcgaacagatcgacatccccgatcgagtgcagagtatgcagatcagataagggagcggcagcgaggttcagctggtttaatcagtgcctagggagatacttctctaaaatagtccaagantacgacggaaggataggccttcaaaccagacatacaaatggaagaaaaaccggaagggaagcgataatgagaatacctgcaatgatgccctacgaaagccaagcggaacttggcatacaagagagaaaagctgagcgctaaaggacaacctactaaccgcaaaaatgcccgacaagccccctagaagaaagggagaagactggacaaactgaagcggataagacaatcctatcccagcaagagccaatgggcagacggaacttggaccattaactttcaaaaataacaaaaaggcacgaaacagacacgggatatttaatatcgagatttgtcattaatcctggcacattaacaccatgaattatgccctgnatggatctgcccaatgtaccaacattcaaagagcagaggcaaaaaagaatgccagatgaaaatttcattattgcttcaaaaacgaggatttgcggccatgacactttgggaatttttgcccacccaaaaaaaaacagaaaaatacggtatatgatatgttgtcaatttagttggtttaaattggtgttggggttgtaaggggatataaatttttatcttgggcgggctttaattttg

SEQ ID NO: 551275 - DNA, 151 bp, Homo sapiens
tatgttccactatgaagaaggcatgggaatggccggaccgaaacttttctttttttttgatgggaccaaactttcaagccaggaacctgcaacttaacttggcattgaaacttgggaacttaatgaaggcctgggcttaccacccacttcc

SEQ ID NO: 551276 - DNA, 314 bp, Homo sapiens
caccggcatgctcatgtcctcctttaattctaccacactacagtactcgcaatcggcactgaaattagaacgttcaccatcgtacttcaaatcttcggggcatgaagagtcagctagaacaaggaaaaagaaacgtcgcaggtaagtaggtaacgtagagtgggcacatgacaagccaagctgctctgtccaacaccagtgtacatatgctttacactaaataaactccagaggccaacagcagcagacctgctcaattcaccttccatatcagaacaagaccaaaaagctcaggcttgagttgtcaactatgc

SEQ ID NO: 551277 - DNA, 178 bp, Homo sapiens
ccgggaagcgcacggaggcggagaccccgctcatggcggccgacaccaggtgggtgaggaccccgaaggcggggggggtcagctcgagggcgcggaaacagatgtcgcattttgcctcgttgccgacgcagcaggcactatccgtagtctccaccagctgcagcacacacagtgcggc

SEQ ID NO: 551278 - DNA, 545 bp, Homo sapiens
tgtgtagagagtgtgggaggggtggaaggtgcatttgagaaatgaagcatctctctttcggtgaggtagtaatgagtggttgcttgggtaaagtgtctcgttgcgtgatagcagaaaggatatattcattctctccccagcctagagcagaaatggaacagaacatatttctctattttaatgagtatagaattaagtgcacagggttcagaaaaacacttaaagctgtataacgagcactttctcaaaaattggattttgctctcctgagctctcccctagagctttctaccatgtattttagaacgggggggaaaaaaagaaccaccttcacttcttctctcagtggtcaaaacaagacataaaatagatctttctttaagaagagttgagccatttcccagcgatgccactttatctttatggagaaggaagaaatattaccctggggactacaaggtaacatagtgacttaacagcaagactggtaaatactcctttcctgaaaactggtgtaaggaaccaatcactaaaatagaggaaag

SEQ ID NO: 551279 - DNA, 226 bp, Homo sapiens
tgcaaatcatcctcaagcatttgtctggttattgaatcctgataaatagtatcgacaaagccagtacagaagcttctgagagtatttgccagtgtattcagtgcaatatgtagtaaaatatcaatgtagaggtttcctccaggccattctatgaatataggtattagcagttatctcatcgcgtactattaataaatatagcgttcctctagaacatgcacaagat

SEQ ID NO: 551280 - DNA, 221 bp, Homo sapiens
gcgctagcggcattagtgaacgagctcagctgcaatagctgaccgattagcaaaggctgaacatggctgggagaacagcacaaaatccttggggcactggaaatctggggagtttacacactcaggcagactctctctccatgagctgtaccaggctctcagggataagatcagagagccatgagaagttcttcatgccgttcacttaatgccgctagcgc

SEQ ID NO: 551281 - DNA, 818 bp, Homo sapiens
caatagtgtgtacgtgcgaatccggctcgggagggtccattatgccttagctaactgtagctttagttatgggagaagttgaggtggactctatagcccagcatagagtggagcaggtgcgagtcgatacgctacgatagggagaagacggtggagattgctctggagtgcactgtgatcttcaatggtctcattctgtgtcgagttgcggggacgtgcggtgtgtgtcactcatgcacaccgtgactaatctggagcgtgggtattatctgcggagaggagacacgatagtatgagcggtgaagtctcccagaggtagttgtttggaaaaatatggacagctgctggggaccataagtgggagcacaggaataatcgggcaagtgctcagatcagagctgtttggtgcacggggatctgctaaagaatggagttcttaatgcgtgtccacaagaagttcctaggaatcataaatacaggggagtctacatggacctgtctgatgcagtaccgagaccttgaatagcatcgcataaaccgcaggtacagagcatgtttgagagactatgtcccaatagcatgtggggcatgtccctgaagttgactaaaaacgacgggctgcggtgaccttgcagaggcataaggtggcgggcgccaagaaacagctcagagggacgtcactggcaatctcttgacgacggttttgtagatttgcagggatacggaatatgtaccgtgtgtggccaacatgacgacggcatggcaaacgtgagggagggttgcacgaacaaacttgcttcctgctgccagcactcctg

SEQ ID NO: 551282 - DNA, 573 bp, Homo sapiens
ggttgtttcagcctgctgctgctgcttgctgttgcggcataggggaaccgtcgtggggaacggactggtgtgctgaaaaatgtgaaaagaaacttggtacgtgtatattcagtgtccaggaataccattgtgacaagactgggatgctagggaattagcccgaagccaggggacacaaggctgggcttgggcacaacgcaaacaagtgtctttgcaacatgttgaacaatattttacaacagggcctttttgtggagagcattttgcacaagattactatcgaacatagagggccaagaagggacactgggggggaagcttccccaattaaacatctgggcaaccaagaggggcaaaacaattttttaaacggacggggggattttaatccgccatttttccgagcacgaaaacgcgcgcgtcttcgcggggggcactaccacacggggaaaaacaaccgtcttatactatgcgcgagggcacattctaaggcagtgcacctcaaacgagggcagtattttctgtcgccccctttttgggggcctttgtgcgccccaaagtcgccgccatcaa

SEQ ID NO: 551283 - DNA, 1172 bp, Homo sapiens
tacacggacgccctgtgaccccctgtgcacatcccacatcgtgcgtgacggtggcagctgcgtgctggcagtgtcggatcgccatccctggggcctggcggtgtggcaggaaattctgtattgctggtcagcaacctcaacccagagagagtcacaccccaaagcctactttattcttttcggctgtctacggatgacgtgcatgctgcgtgaaagatcctgattcaactaacgaacggagaacgccctagtgcaagatgagctggactgtgaaaccatgtgcccatgcatggccactgagccacactgaacagggcacacaatgctgacactggagaacgccgatccgcatcaactgctatcgaaggcaccagaacgtgcagacttgcacccgcagatgggccacggaggaccaagggacctgacccaaggacctactggcaactcagccccatgtcaaccgcattcaagaagccgggctccaagaaagttccagaacatattcccgacacttcggccactcatgaacctacctccaacatcaccgaacctcagaacataccgagagcaggaacgtccaacggtcactagacaaaccaagcaaatgacaaggcagtaaagacacaagagatcacaagatctatccaagaaagagacccgcaaaaaatgagcactgaaaccacgattggacacaccgaagaagagaagccggaccaacagacacacaaaagaaactgaaccaaacaacagacccagacgatagaagcaacacaaccaacaatacagagacaaccaacatcacaaaacacaagcaacctacgggccaaaaggaacaccacacgcacgagacacaatggagaccaaccacaaaccatcccgaagataacagccccccctaacacaagaccgtcacgttaactaaaccaaacagaaaaatccaatcgaccaaaaacaaacaaaaaacacagcaccacgactacccaagaacatacacacacacaaccacagcagcccagccgaagccacacgcccagaacccacgtgaacagagcaaccaacaaaacgacaacacaaaacagcaaacaaaatagagcctcactcaacaaccaacaaacacaccacaaaaagactccaaaacaagaagaacacacaacagaaaacaaagagaacag

SEQ ID NO: 551284 - DNA, 465 bp, Homo sapiens
ggccctccactacgtatcctatggcagggcgtctccaggatggaaggatacaacattctaatagtgggttcggctagacggggcatagcggcatggccctggtggggagcacagacagcaggataggactccatttctggctaccattccttcatgtctaggagtcactagctttcttctttcctgttactccgggctcaagcccatgaatttcttcttttccggcaggggttgagagctttctgccttagcctaccatgtgaaactctaccctgaagaaagggatggataggaagtagacctctttttcttaccagtctcctcgcctactctgcccctaagctggctgtacctgttcctcccccataaaatgatcctgccaatctaatgtgagtgtgaagctttgcacactagtttatgctacctagtctccactttctcaatgcttaggatacagtagggaga

SEQ ID NO: 551285 - DNA, 564 bp, Homo sapiens
gaccttgttgcccttgaaacttgaaaatagggattctggggtgaggatacaaagacattgtcttgcatatccataagcaggtcttagagcattattccaaactctagctgtttcagtagttctatgaggattgcaagtcataggtgtgtgtggcatatcaatccatctccctcatctccattctcagtttcttccccacaaaatttggaatcaaagcttttatgacgtttgccaattgcagaacttcttcagctaaggttaatttgacgccttttataaaactgagagatgtcaaaaagcctcttaaaaattttaatcttgaaagaactttcagggtttctcattttttaggtggggggtggcaagggttatttcttttttaacaaataaaagggatttaagtaaaactaaaaatgaaaaaaattgggcctttttaacattgtgaacttggggggtttggacccctttggcttgtaacaaattttaatttttgttacccaagaactgtatgaataaaaaaaaaatcccaccccgattatgtgttgaataaatatccaactgtgg

SEQ ID NO: 551286 - DNA, 517 bp, Homo sapiens
gcctgtagccagcactgaggaccgagagctgcagcactctctcatgatggagtcggacctgcccgcctggtgcgcaagggtctaccatctttactggccaagtccaagagccctcgggaggttccttctcccaaagtcatcaagactcgcgagtggtgaagaagacagagtcacccatcaaactctccccggctacccctagtcggaagcggagtgtcgcagtttctgatgaggaagaagttgaggaggaagctgagaggaggaaggagaggtgcaagcggggcagatttgttgtgaaggaggaaaagaaggactcgaatgagctctcagacagtgctggggaagaggactcggctgacctcaagagagctcagaaagataaagggctgcacgtggaggtgcgtgtgaacagggagtggtacacgggccgtgtcacagccgtggaggtgggcaagcatgtggtgcggtggaaggtgaagtttgactacgtgcccacagacacgacaccaagagaccg

SEQ ID NO: 551287 - DNA, 105 bp, Homo sapiens
cagctcggtcccctgatctgcccgcctcggcctcccaaagtgctgggattacaggtgtgggccaccatgcccagcacccctcacttctgagaaacagaacaagaa

SEQ ID NO: 551288 - DNA, 102 bp, Homo sapiens
ctttgccccaatatagcgataccagacatatatggaactcctctggtccgaggttaaaggtctccactaacccgtaggtctcttgccgatcagtagcgtaaa

SEQ ID NO: 551289 - DNA, 1159 bp, Homo sapiens
acaagaggttctattgactgtaaaggagctatacacttgtatgctggtatcaatagtagttcatgtagccgaagaggtggcaatgattacagtgaaaactgcttcaaagctaacagacagttgtatacgcactttacacacaacgagcgtttatgtgatgtaaaattatcggctagggaagcagcagcgggccaggtgtggtggcttacccctgtaatcccagcactattggagaggccaaagcaggacgatcacttgagcccaggagttcaacaccagcttgggcaacataagaagaccggtgatctctggagatttagagtaatgatgaacattagccgaggtcacaagaggagcaatgcgcgcctgcgaaatcaccaggataattgtggaacggcttagacgtgaacccaggacacacatcgaagggacaaatggcggcattggcacaatgaagcccaagtgtgatacttggcgcacactgttaattccaaacccttggggtaaaacaagggtcaagagcaaccaaattcctcaacataaacacaaagaaagcgcgtggcgcgacggacgaaaatagcgccacggcatagccagatagagagccacacagacgggaaacaaaaagacagagcaaggacggagataactagcacaagacgacaaggggagcaaccacgggtaccaacgatgacgaaaaccagtcccacaaaaggaagagcacacaacagagaaagggaagcggcaccccaaaaggagaaaaaaacacaaaaatcaagaggacaaggcgcaggaagacaagcccacaaagagaagaggagggagacgacaccaagggagggacccagggacacgacccaagaagagtaaaacacaaaaagggcggacgctgagggagcattagtgtaccacaatatattaaagaacaatagaacaaaatagagaaacaaaaaatcgggatgacgaaccgagggcgctagtaccccacattagagtaactgaaatcacaacaaaatgggaagaacacatcatacaaccgccgttcaaaggtggggccgcgatcatgtaattcaaagaaatgtagtataagaaggggcaagtcactcgtaatgagcagcgcaggtgatggtcggcaagtcgacgagagacaagaattgca

SEQ ID NO: 551290 - DNA, 668 bp, Homo sapiens
  misc_feature (495)..(495): n is a, c, g, or t
  misc_feature (514)..(514): n is a, c, g, or t
  misc_feature (531)..(531): n is a, c, g, or t
  misc_feature (616)..(616): n is a, c, g, or t
gactagagccttgaagatgaggagtgcagtggccagtcatcggaaatggataatgaccaattgagaacatcatcgaagctgatcctcttacaactataagagagctgcccaagaactcaatgttgaccattttatggtcgttcggcatttgaagcaaattgaaaaggtgaaaaagctcaataaatgggtgcctcatgagctgagtgaaaaataaaaaaattcgttgttttgaagtgtcattttctctattctatgcaacaataatgaatcatttctctatcggattgtgatgtgtgccaaaaggtggattttatacgacaactggcgatgaccagctcagtggctggactgaaagaagctccaaagcacttcccaaagccaaacttgctccaaaaaatggtcatggtcattggttggtggtttgctgccagtctgatccactacagctttctgaatccaggtgaaaccattacatctgataagtatgctcagcanatcaatgagatgcacaaanacttgcatgcctgcaancggcatttgccaccagaagggccccatgactaattggctatgaagtttgcctatctgcatatcacttgactcttgccacaactancactcttaagcatctaacacgtttgagggaaatgcttcacactggcggaaca

SEQ ID NO: 551291 - DNA, 762 bp, Homo sapiens
gggcaaaaaccctgtctctgctaaaaatacaaaaactggccagacatggtggcacacacctgcagtcccagctactcgggagacagaggttgcagtgagctgagatcgcgccattgtactccagcctggacgacagagcaagactctgttctcaaaaaaaaaaaaattgccaagacaggctaaagggctaggcctcttaccccggtaaaccaagttggtgacattgcaagggaacaagttcttgcaaggacgttacacagtgctactcccagtaaacacagggccctaacttccctttcaaggctataaaggcctgagcaggtgaggaagctgcagaacgacacgtttggaagttcacccaaggttgggctcccagtgaaggcttcacgcgggagcagaagccgtgctattcttgttctaaccattaaacaggtgttacggaattacaggcgagcacagctgcagtgaactgggagcaaagcctgccacgcaaagtttatctccagcatacatctgagctgacagaggtgggccacacagtataaaccaactgacaactttctccccacatgcgtcagcgattgaacaaacctgggcccttctcaagtggggcaacacattagaaccacccaattgtgaggggaacttcccccaattaagttctaggaacgcacagcaagttccaatggcacctaagctcaggttccacaaacacaggcaaccgggtgctagactcccccctagcgttgcaacgacggggct

SEQ ID NO: 551292 - DNA, 104 bp, Homo sapiens
gaggtgaacatgagaatcgcgtgggcctgggaggctgaggtagacaatcgactgttggctagtgtctgatctattcaaaatcccatcttcacatatgctaatga

SEQ ID NO: 551293 - DNA, 945 bp, Homo sapiens
tggcggaagtggcgactaggctagtcgaggctcgtgtaatcggcacaggctgagtgcggccttgtggcaacggcttctggccctgacgtggctgccaatcggctgtgggtgactcccggggagcgggagcccgccgtggcgccggactttgtgcccttcgtgcagctgcgcccgctgagcgcgctggctgaagctggagaggcggtgctgctgctgcgggaggggcttctgcgccgcgtgcgttgcctgcagctggggtccccagtgtcctggccccgtggcccgccggcccgggcccgcctccgtctctggccttgccgcggggtccggccgcgactgcgtgctgctgcaagaggactttctggcgcacaggggccgaccccacgttacctgcagcgcatcagctcaaaacccacggagcgcgtggcgcgctgcagactgtggggcccactgccggccagccccaaggccttcaccaggtacccttggagaagggtcggagaccatacagttcctcctcttactcaggccggtccccgctacgcccacttgggtttggtgcaccctgggtggttgtggccgccaagaagctgggtgaaccgcctccaaagttgctccaagaaggcagttgattagacggtgctgtgggtggttggcccgttctcttgcccccatttaaaccccaaggttctcaaaaggcaaagcagccaagggaggctcaagggcgcttggcgggaattgcccggaagggacatgctggagcctcttggacattccagcggcggagctgttaagaaccaccagatctctggcgtaagtcttcagcccaggagtggatttagcaagatcactgaaccacagcccggtggcttcacgtgaactgagcgctataatgctctccggtgcagccaatgtaccctcctaccaggggggacaatggcaccc

SEQ ID NO: 551294 - DNA, 152 bp, Homo sapiens
ccacctctgcctcccaaaatgctgagattacaggtgtgagctaccggacccagccccaagggcaccattttctaagaggagagggcccagcagtgacaaacctgcacggatctgcatggtctactcacagggcaagaactaaccaagaattg

SEQ ID NO: 551295 - DNA, 162 bp, Homo sapiens
gggggggtttttccccccccccccccccccaaggggggggtttaaaaaatgtttcccccccctttttttttgggggttaaagctggcccccccctgggggggggggcgggggggggggtttgccccctcccccctttttcccccaaaagttggggggtttta

SEQ ID NO: 551296 - DNA, 124 bp, Homo sapiens
  misc_feature (13)..(13): n is a, c, g, or t
  misc_feature (82)..(83): n is a, c, g, or t
  misc_feature (85)..(85): n is a, c, g, or t
  misc_feature (101)..(101): n is a, c, g, or t
  misc_feature (106)..(106): n is a, c, g, or t
catggcacctcangactgggtactagttttaatacttaacacttacggacccaacagaagttgggacttacctggcatatannantggaggtgaataaaangaaanatggtggtgttctgttac

SEQ ID NO: 551297 - DNA, 266 bp, Homo sapiens
gtggtcaacagaacagacagtgaggacaacggagcgatcaggatagttcttctgttgacttgtgtcatcatgcacttcagtctcaggaatcctcttggttgaagtccagagtgtcctttctgattcctgaagtatattagacaggcctgggcgccaaggagatacgcctgccgcagtcgatatcagcctgcgcatctccgactcagcattttgctcggtgcagattcagaccgtgctctccgttcccctgtgtgagtggcttgtcc

SEQ ID NO: 551298 - DNA, 389 bp, Homo sapiens
caatcgtctttacttgtcttgactctttttcaggctaccagttgcaattttaaatatggtcgtcaagcaggcctcactgaggtgacatgacgaccatattcaaattgcaatggtaccctgaacaatcgtcttacttgtcttggatcgtttccatagcatacgttggccacatatctagtatctcagatatagatttactctattgatatctagctgttatgatactagtagataccatgcatagaatctatgtaactgatgagggtaagcacctattgattttgtgcgctgctgtaacccaagtgtttcagaacgtgtacctagcacacagtaggcattcaatactgtatcatatatatgtgttaataaattaaagatatttagaatga

SEQ ID NO: 551299 - DNA, 285 bp, Homo sapiens
  misc_feature (109)..(109): n is a, c, g, or t
  misc_feature (137)..(137): n is a, c, g, or t
  misc_feature (176)..(176): n is a, c, g, or t
  misc_feature (195)..(195): n is a, c, g, or t
  misc_feature (202)..(202): n is a, c, g, or t
  misc_feature (212)..(212): n is a, c, g, or t
  misc_feature (215)..(215): n is a, c, g, or t
  misc_feature (235)..(235): n is a, c, g, or t
  misc_feature (238)..(238): n is a, c, g, or t
  misc_feature (243)..(243): n is a, c, g, or t
  misc_feature (246)..(246): n is a, c, g, or t
  misc_feature (257)..(257): n is a, c, g, or t
  misc_feature (260)..(260): n is a, c, g, or t
  misc_feature (267)..(267): n is a, c, g, or t
cttttggggtctttgctcttttggggtctttgctctctctctctctctcctgtctctcagagtccagcctgggcgacagagcgagaccccgtctcaaaaaaaaaaaggnccccttttagattatatggaaattcatnggggctgcccccttacaatttttttcacaggcctggcanggggcctcatgcctgtttncccagcntttggggagnccnggccagggggtttgcttganctnagganttnaagaccagttngcngcctggncaacatagcaaagacccc

SEQ ID NO: 551300 - DNA, 369 bp, Homo sapiens
accttctttagtagagactgggtttcaccatgttggccaggatggtctctatctcctgaccttgtgatctgcctgcctcagcttcccaaagtgctgagatgacaggtgtgagccatcagacccagcattttttttttttaatttaaatttaaatttttttcatttttttgagaggttttttttgttttgttttgttgttgttgttgttgttgttgttgttgtttttgagacagtcttggctctgtcacccaggctgggagtgcagtggcgtgatctctgcaacctctacctcccaggttcaagcaattcttgtgcctcagcctcccaagtaactgggactacaggtgcacgctaccacacctggctgat

SEQ ID NO: 551301 - DNA, 215 bp, Homo sapiens
acagcgtgctatctccactgtgaattctggaaaacgcttctgaagttctcctttagtaaacactcgaagagaactatagcatgggatcgtatcggagaagcctgtgcagttctctaagagcactaccaatcatgttctcttttctttgtttagtatgcttcttgagacagggatctcactcgtgtcacctagggctgacagtgcatgtggtgtga

SEQ ID NO: 551302 - DNA, 231 bp, Homo sapiens
atttccttcaaagtttgctactcattttgtttctaatagaacataaaggaagagacatctaagagctaatgtactgatagtttatgatatcactcaaagcagtttaatattttgtggtttagtatcttcagggaatgaggaggttccttctcttagtttttttatttgactgaggccagactggtatgaaagaagtttattttacaattctaaaatctatagccaaaaaaa

SEQ ID NO: 551303 - DNA, 197 bp, Homo sapiens
ggcgctttcgggagccgcggctttattggtgcagacatggccaagtccaagaaccacaccacacacacccagttccggaaaattggcacagaaattggtattaaggagaccccgattcacacagatacggaatctcttaaggggggttggacccaaggttcctgagggacatgcggctttgccaaggaagcacacaa

SEQ ID NO: 551304 - DNA, 156 bp, Homo sapiens
aaatggggagagatgaacagaaaagtacggtgtgtattgtagtggccacaatgaagctgttagtcattacaagttgcgcttcagcagacagaaattcacaacttgatccagaaaattggcaacttctccatcgtgcgactgcttggattacaagga

SEQ ID NO: 551305 - DNA, 988 bp, Homo sapiens
  misc_feature (83)..(83): n is a, c, g, or t
  misc_feature (546)..(546): n is a, c, g, or t
gccccgatagcgttagctgtgcctgcagcactcgcgatctggctctcagtattagtttgtgcttgcgtaatacgctgttgtcnagtcgtgtgtgccacatcccgtcgtgtgttgtaccgcccctttccgatgtgttggcgtcttctacacaccccgccgttgtggtggttggccacaccccccccggtttgtgggcacacatgtgggggttgaataccttccgctcttaatggggcataaaaaactccggcggctcttaagagcttagcgccctgggtaaattttcgccggcgaccacaacccgctccgtgtggttcgtaagccccaaactttgaccgggcccttttcctctcccgggaagcacttttctccgtcccaaggcacgttgttttaaaccggacaaatctcctcgggtattttaattggtcccttggccccccccctctccttttcaggggtaaaaatacttagagggttcccccaaagtctctaagatctgttgtctaaaaaccgaggcccacgaacgccccattgtggtctgaaaancctttgcacgcacctacatcatacttgttagcaaacagtattcattcgacaccttgtaaaattattcgttcgccacacaaaaaaaagattctgtgttgtcccttagagagaacacgagagtctcaacgttgctgtgacccaccggtcagggggccaaaccggtcccacccaaaatggctctgcgccacatgcgcgcccaccctccgcgccgccccagggggtcgctccccccacccgcgcgcgtctcctccaaatgacgtgtggatgtacaatcgccagagggctcccgcaccaccgctgggcgcccaaacaagaaacagagggtgcacaccatctgagcaaaacacatggcaccgcaaggtcgcttcttcaagagagggcccaactgcacctaccactcttttttttttaaaaaaaaccgaagccctaacaaacaaaacaa

SEQ ID NO: 551306 - DNA, 998 bp, Homo sapiens
aaccgagattgattgtcggaccagtggatgctcctaatcaacgacgccaagcgcggaaggtatgctcctcggagtcacagttgaactcgccaacattttgggaggccagttaccacctcagtggatcacagcagtcgcgatattcctaattactattagttgcgcgaatatctacaatggtagcgagtctcctactctccgactcgcttcgggatcatttgtaacactcccacgtagtggctgccaacacggactcatttgagcaggattctggcaagatgcagggactccaaaaagtttcgtacagatgaatgcatgtagtttcagtacgagtgggccttctcaagagtacggaagagtgtattcatagatccatactttggccttgccatgtaggatatgactggtgacattagggtccatagcattcacacaggacgccgttcccctctgttccctagatattcgattgtaataagcgtaatcgagtgaatcattggcacatccctgtccgagagaatgacgggtatccagcagatgaacgatgaaaaggtgcatgccatgtggacaggagtccggtgggtcctgtgacaggtcctgctaagaagctgaagcctgtcatagtccctctaaccacagatacccactgggcaggaacttggatgagatatcagggtaattcatctctctccagggtaaccgccgacaaaagggatggcacccaggattgatagggacggatggcgcaacgcgagagggtcctgcagacatccggatcaaaacgcagacaacactttgccgaagaactataacaaccaccccgaaaggagaaaactcgacacaaccagctagcttggaagggggcgaagcaagaataggagcaccgggtacgcaaaccaagcacgggcgcaccatcgatgggtcccggtaaagaaggacacgcagacaccgcaacaacgaaacccggcctcacttaccacacccgcaacccgggaaaa

SEQ ID NO: 551307 - DNA, 243 bp, Homo sapiens
gtaagtgctaacatttagaggctgagtgtggtggctcacacctgctaatcccagctgggaggtctaaggcatagaggattgcttgaagcccaggagttcaagactagcctgggcaacataggccctatctctacaagtaaaaaacaaacatagctgggtgtgatggcgtgtgcctgtggttccaggtactccaaaggctatagcgcaagcattggttgagcccaagaggtccaagtcttccgg

SEQ ID NO: 551308 - DNA, 920 bp, Homo sapiens
  misc_feature (23)..(23): n is a, c, g, or t
  misc_feature (112)..(112): n is a, c, g, or t
  misc_feature (147)..(147): n is a, c, g, or t
  misc_feature (337)..(337): n is a, c, g, or t
  misc_feature (384)..(384): n is a, c, g, or t
  misc_feature (497)..(497): n is a, c, g, or t
  misc_feature (528)..(528): n is a, c, g, or t
  misc_feature (535)..(535): n is a, c, g, or t
  misc_feature (539)..(539): n is a, c, g, or t
ggactctatgtggcggtgaggancaggaagccctgaagggtcaaaagaaatacaaaagcaaaggctattttctttttttttttctttctttcattccttccttcctcgtgtntctttctttcttcctttcatttttttttctttttnaagagcgagcggctctgcgggggcggatgggggtgggcgccgccgaggtgaggtcgtctcgcctcccgcgcgccggtagaatggtggtttcattatggatggaggggatgatggtaaccttattatcaaaaagaggttggtgtctgaggcagaactagatgaacggcgcaacaaggaggcaagaacgaantgggagaacagttcgaaaacctgaagatccagaacgaatgtccaganggaggttatatgaccctcgatctctatatgaaaggctacaggaacagaaggaccaggaagcagcaggagtaccgaggaacagttcaaattcaaaaacatggtcagaggcttanatgaagatgagaccaattcctgatgaggttnctcgacnagcnggaacctattagaaaggcacgacggagacacggaccttgaacgagaactgagggaattcacggaaggttaacctcaagaaggtgggattcctcaagagacaaggaggcatggacaagaactgcgtgtggagctatgaaatccagaacagtttcccagcggagttgttggcaggagctgggaagctataagctccggaagggcacgtgtgcaacggactgaaccgggcctggcgaatgaagaataaggacgtcacgggatgtttgggaaaacccgtagggcccaccatgccctgggggtgtgtggaccccagcggggcctgggagccgcatcaaggggccaacggaatgttctgcaaacttgctgtccagggccaagatagg

SEQ ID NO: 551309 - DNA, 675 bp, Homo sapiens
agttgcttcgcatattcgtctccaatcacactcacttacacatacacccactgtcctggcttgcgacaccgatatgacgtgatacatatgactgcatatagctcgctagcgtccacatggggaccgtgtgttaacaagaggatggcagattagaaggctggaagagtctatgccccaatgacattgttgagctgctgaaccagccctgaagtcacttgtctctaatctcctatgtaagtaaataatacatgtccttatagttaagccattgttatttgggttttctgctacttggagtcaactgcatgcaaactaactgattcatgtattaagggatgaatgagaggcagcagggcagaagctactgtcttgatcttcctgaggatgtcctacttctaacgagacatgctttgaattttctgacattaaaaattaccataacagcatcagcacagaaatcctaattattacagttgcccactatcttcttgattgattaacaggcaactgaatgtattcattcactcatactcttgtgcaaacattcctatgtatgtgtgtggtgcatctagtactcacgtgggatacagagaattctcacacaggatctttacttctaggaggatattgtgtcaaagggaaccaagtcaccgcaccagatgataccggcatgat

SEQ ID NO: 551310 - DNA, 523 bp, Homo sapiens
  misc_feature (54)..(54): n is a, c, g, or t
  misc_feature (71)..(73): n is a, c, g, or t
  misc_feature (87)..(87): n is a, c, g, or t
  misc_feature (94)..(94): n is a, c, g, or t
  misc_feature (153)..(153): n is a, c, g, or t
  misc_feature (156)..(156): n is a, c, g, or t
  misc_feature (158)..(160): n is a, c, g, or t
  misc_feature (169)..(169): n is a, c, g, or t
  misc_feature (185)..(185): n is a, c, g, or t
  misc_feature (188)..(188): n is a, c, g, or t
  misc_feature (194)..(194): n is a, c, g, or t
  misc_feature (196)..(196): n is a, c, g, or t
  misc_feature (209)..(209): n is a, c, g, or t
  misc_feature (288)..(288): n is a, c, g, or t
  misc_feature (363)..(363): n is a, c, g, or t
  misc_feature (406)..(406): n is a, c, g, or t
  misc_feature (433)..(433): n is a, c, g, or t
  misc_feature (446)..(446): n is a, c, g, or t
  misc_feature (517)..(517): n is a, c, g, or t
tctgggtaagtgaggaatattcacagcttcttacacagtgtcagagaaagtgantatctgagctcaccagnnntctgctgtgttgtnggggaanctgtaaaacaagcaaaagtataattacaatctggacttttttcttttttaaataaagtnttncnnntcttttttncttctcatactgtganttnttcttnantccttttcttgtnattcagttttcagaatttccatctttcttctggaactaatgtgtctgttctcttgactgcctgctgggccagcatccgnttgccagccagaaacgtcacactgtcccaggatggccaggttacttcaagggcgggtaacatgttgagctgagtncagtagacatacatgagtcccagcatagcagcatgtcccaggngaaatataatcgtgctaggagcaaaantgaagttggaganattggcaccaatccggatccacagagcgaagagcagaagcaactggcgaggaggatcaggtgcatgtgaantgtatt

SEQ ID NO: 551311 - DNA, 1040 bp, Homo sapiens
  misc_feature (23)..(23): n is a, c, g, or t
  misc_feature (112)..(112): n is a, c, g, or t
  misc_feature (147)..(147): n is a, c, g, or t
  misc_feature (457)..(457): n is a, c, g, or t
  misc_feature (504)..(504): n is a, c, g, or t
  misc_feature (617)..(617): n is a, c, g, or t
  misc_feature (648)..(648): n is a, c, g, or t
  misc_feature (655)..(655): n is a, c, g, or t
  misc_feature (659)..(659): n is a, c, g, or t
ggactctatgtggcggtgaggancaggaagccctgaagggtcaaaagaaatacaaaagcaaaggctattttctttttttttttctttctttcattccttccttcctcgtgtntctttctttcttcctttcatttttttttctttttnaagagcgagcggctctgcgggggcggatgggggtgggcgccgccgaggtgaggtcgtctcgcctcccgcgcgccggtagaatctggcccggtcgctcaggctggggtgcagcggtgtgatctgggctcacggcagcctccgcctcccaggttcaagcgattctcctgcctcagcctcctgagtgggctggggattacagatgggtggtttcattatggatggaggggatgatggtaaccttattatcaaaaagaggttggtgtctgaggcagaactagatgaacggcgcaacaaggaggcaagaacgaantgggagaacagttcgaaaacctgaagatccagaacgaatgtccaganggaggttatatgaccctcgatctctatatgaaaggctacaggaacagaaggaccaggaagcagcaggagtaccgaggaacagttcaaattcaaaaacatggtcagaggcttanatgaagatgagaccaattcctgatgaggttnctcgacnagcnggaacctattagaaaggcacgacggagacacggaccttgaacgagaactgagggaattcacggaaggttaacctcaagaaggtgggattcctcaagagacaaggaggcatggacaagaactgcgtgtggagctatgaaatccagaacagtttcccagcggagttgttggcaggagctgggaagctataagctccggaagggcacgtgtgcaacggactgaaccgggcctggcgaatgaagaataaggacgtcacgggatgtttgggaaaacccgtagggcccaccatgccctgggggtgtgtggaccccagcggggcctgggagccgcatcaaggggccaacggaatgttctgcaaacttgctgtccagggccaagatagg

SEQ ID NO: 551312 - DNA, 164 bp, Homo sapiens
gcggtgtctagaggatcccgttgctaggtgagtgaggggtgatctcggtcatgaagctctgcctccggttacgcattcttctgttcagcttccgagtaggtgggaattacaggcgcccaccaccatgcctggctaattttttttgtatttatatgtagagtatg

SEQ ID NO: 551313 - DNA, 351 bp, Homo sapiens
  misc_feature (60)..(60): n is a, c, g, or t
  misc_feature (123)..(123): n is a, c, g, or t
agattcaattagattagataattagagagagacacatataaaacatcaatgaaacaagancttgttttggggattgtccttgttgttgttgctgctgtttctgagacagggtcttgctctgtnaccccggctggagtgcagtggcatgaccttggctcactggaacctctgcctcccaggttccagtgactctcctgccctagactcccgagtagctgggactacaggtgtgtgccaccatgccaggctaatttttgcatttttagtagagaccgggcttcaccatgttggcggaattccgaaaagatgcttatgatttcaaattacacaaagtacatggcatgagcaggg

SEQ ID NO: 551314 - DNA, 409 bp, Homo sapiens
  misc_feature (19)..(19): n is a, c, g, or t
  misc_feature (99)..(99): n is a, c, g, or t
  misc_feature (197)..(197): n is a, c, g, or t
  misc_feature (199)..(199): n is a, c, g, or t
  misc_feature (201)..(201): n is a, c, g, or t
  misc_feature (226)..(226): n is a, c, g, or t
  misc_feature (342)..(342): n is a, c, g, or t
gaaaaaggatctggaaggncccctaaattgtgtcgcacagacgaaatgccttcgactgccttggaaatgaccccacctttctgctggaagcccacatgncccgggaatgcacccaaagtctgaatctgtcagtaccttactatgctgcaggaaaacaaagtcccacccagaactccagtgcccaggcaggaccttcncntnctaaacgcgctttagaatgttcaantctctctcttctttgtaagcactgtggccctgtggtaaatccatcacagataaaatggcctctacatgagccatgtgctaaaaaaggatacgtacacccattgtgtgttgagtctnaaagttgtttctcaaaaagttttggattgtcccaaattttatatgtgagtttgctgattcagtcatt

SEQ ID NO: 551315 - DNA, 601 bp, Homo sapiens
agaatcactagaaccgggaggcggaggttgcagtgagccgctgaaattgtaccactgcactcctgcctgggcgacagagcaagactccttcttaaaaaaaaaaaaaaaaaaaaatagcgccaggtgtggtatctcattcctgtaatcccagcactttgggaggccgaggtaggtggatcacctgaggtctctactgaaaataccaaaattagctgggtgtgatggcaggtgcctgtaatcccagctgtttgggaggctgaggcaggagaatcgctggaacccaggaggcagaggttgcagtgatccgggatcgcgccactgcactccagcagcctgggcgacagagggagactccatctcaaaaaaaaaaaaaaaaaaaaaaaaatacaccctccaatgctgaaagctacgaaggaaacaaaaccatgtgcgagtgatagggcagcccctctgggaagtgacatttgtgcccagatctgaagaaagaaaaggagccactcatacagaaagactgagacaagatgagctttcgggacaagtcaggctctagggagaacacctgacgaggaaaatgcctgggcagtttgaggaactgaaaagc

SEQ ID NO: 551316 - DNA, 618 bp, Homo sapiens
aattcagtggagcaggaggaggggatatcatatatgatcggggaagggggtgtatatttaggggttgctgattcttcaaagaggcacagagccagatggtagaggaaggatgcaaagtataagattagtgtaatatgactttaacatgcccatatgtcacttggaaatattgacaagaaagggttctgtaaaatggaagacttagtgtgtgaatcgatttagaggagagggtgtctcttttctcggacacttaattctgttctggtatgaatttatcagatggcttgtgtgcattggataacaccaccattcacaagttaagattcttggtatttggatatctgttagatgctactaagaaaatagagatgagctttctttttaaagcttttgatgtggtgtcatagaatagcatgttgtagatacaatcagctgctttgttaccttaaaactaggcatttgtaaatattaaaccataagatggcaggtgatgtcctgtaaacactcagctgttcagattggacataactgacttagttcttcccttctctctctctcaaaattataggagacttgtagttcagtgtggtttcctgtttctaatttgctgctgataat

SEQ ID NO: 551317 - DNA, 865 bp, Homo sapiens
gacattggtcagcaggaattctcgaatgtgttgccctccctcttatggccacaagggtcccccggaaactggaagttgtccagagaaccccgagttcttctccccgcccccgatggacgtgctccgagacccccgttgtggccctcgaaaaaacttcccccttggggacgcgcccctcttttcctgggcgggcttccaccccttctttcaacgcactctccaattccaaagcaatttccgagagccgggcggcgggccgcccgcgggggctgatgtgggccagccctcttcgccgccggcccaattaggccgccttggatttttttttgccgaaaaatgcgaactaactccttttccacacgggcaacacacccgcttgtggaaaaatcaggtgtgcacctccgcagggacactcgtcatgccacaccttctgccacccccgtggggttattttaaaaacaatcgcttcactcccccccacgttaattacatgcgacaacaccttgtctagcagactttcatcataggagacgggagaccaccacatggaaattcattactctggggggaacccgcccgcggtggacagtagcctcggcccccatcaccccatttctgtgtctacacacatgagaaatacaaatttcagcactgcataatgcatcagtttcttgtttgtcgagatttttaagacataggtttttctaaaaatcgtggaatcacccttcatgcatttcgacaacgcgccgacgacccccccacctctttgcaatctcttaataaggaatggcacgacgtatcgagagaacccgtaattcccaccaaccgcacccaccctaaaaaacaaatttaaaaaaaacataac

SEQ ID NO: 551318 - DNA, 112 bp, Homo sapiens
cctgtgttatcctgtacagaacaaattctaattattataaatgcatatataaaatcaaaattcacaataacaatatgattggcataatactccacaataatctggattaact

SEQ ID NO: 551319 - DNA, 166 bp, Homo sapiens
gtgagcggggttaggtgggaagttttacagagagggcctcccatctgccctggactttcccatgagcctcctggaactgccagccccttctctattacaccatgttccatcgctgtgcatgctgacacacacgctaacggatgcctcttagccttggctggggcgc

SEQ ID NO: 551320 - DNA, 662 bp, Homo sapiens
ggaatctgtattttttcatagcaacctcaagtaatctttatcctgagggtcctcgggattgcaggttgaaaaacacaaccttaatcagcaagtaaattcttctctactcggcaggcgcagtggctcatgcctgtaatcccagcaacttgggaggccgaggtgggtggatcacaaggtcaggagttcgagaccagcctgaccaacatggtgaaacgccatctctactaaaaatacaaaaattagccgggcgtggtggtgctcacctgtaatcccagctacccaggaggctgaggcaagagaatcacttgaacccgggaggcagagggtgcagtaagccgaggattgcaccactgcaactccagtcctagcgacagagcgagactcggtctcaaaacaaaaaccaaaaaaaaaagagaatttcttttgctacccatttggcgggccttaggacacttctcccaaaaaagttgtttgcgttatttcaaaaaattaatacattagtaatggaaagcacaaattgtagcagggggaaaattccttttaaaagggaattctttggcttttttggcaccacttgaaaagaagttgcctggacttgccaagggtacatccggcaaaaagttataggggcgaaagtttggaacggtggaaatccagctaaa

SEQ ID NO: 551321 - DNA, 423 bp, Homo sapiens
gttctgcctcatgctcaatatcaatcttttaattggtaatatctctaataagggatatactgcatcatcttctccagtgacctgtcacttccactcgggtgacaggccctgactgtgttttgtcttctcattctcttcccccccattacccctttctctctgacatttgtactcttcagctttcattattatttcaagctaagtgactttttgttccagacacagagcattcctctgccatatacacagagaaaccactcacctgtagtgggtggcccttatcattaatcttataatttatgatatatacatttttttaacccaaatttaaggggcattttcccattctgatcaccatcctcattcagaccaatgcttcaagactgttatagtacatattttaatattaatatacaaatcaag

SEQ ID NO: 551322 - DNA, 726 bp, Homo sapiens
gggtcgcgcgcgtatggccgaggtatggaagcggcgggagctactatcccctgatctaccaccatctgctgcgtggctggctatgtgcgtgcggcgcgggaagtgaaggagcacgagcggtccagaagtgtttcctggctcagcccgtaacccttctaggacatctatacacactggcaacaagacctcagagcttggtcggaagcggaaggcagaggaagatgcggtcactgcaagcctaagcaaaacccgtgtgtcagacccctatcagcacctcggagagctcggcaagaggaggaatgaatgcataagccgaagaccgccaaagtccatcccaagactagcgatctagccaactacctctagttcctgggggtgcgggcacttgccatcaaagcatgacagatcaatcgccaaggccagagacagcagaaagctggcaagactggtgaattccatgccacaaacctgcccacttgggaaagcacggtggcccaaaccttctattactggcgaaggtctccccaggtacgtccagcctgagccctcagccaatttactacgttggtctcaggaaacactgcaggcaggagggccagcgtcccggccttatggagctgctgccaaaccctgggatggtgtcagcggcaccaggaccgacagctacagcgagggacaccttcggttcagtgatgagccagactgtcggggaaccctcagtaaacg

SEQ ID NO: 551323 - DNA, 906 bp, Homo sapiens
gggtcgggtgcggcgctatgccggggcagacgttctcgagtccgggcatgtacaagcgcgtttgcagctgaccgtggtctgcccccggacctcaaatccctggggatcagtaggtgaaagacgaaatttaggaggacttaagaccgttggttctgacgaggcacagggtgtcttgcaagaatgggaggtgtatgcaagagggttattgcaaaggctaagaaaatagacaaaattcaactggtgaaagtgtgtttggaccttcgctcccagtaagaagaaagttaatgacttgggtgatgaacaagatgggagcagttgcaggagttgatgcaagaaggccataaaaaccaatagggaagttcagtatttctggagtctatgaaatccagaagagttgaggtctatacaagaaaaggttaaataagacattgcaagaagatttaggaacgccctacttgaactgtcatgggttgttgtgaaatactattttaaggcttggaaaaacacctgtgaattaagtgaaatgctcttggattttggggtataatgatgccggatattggatcaagatccctagtgacaattgaacaagactatggaattagtagcacttgtatgaactcgagtttggacttaaagagaaagttcttgaattgctgagatgttgaaatgcaatctatccaggcatataagtcttgtgacgttgcttaggtaatcaataagcggttgggtagggtggtgtcatccacagttatttttaaaacatgggtttgactttccttcgttaaaaacacaagtgttggaggtctttccgcatcgggcacaagaaggggagacgaatatatacactgttattaggaaaaaaaaaatggggcggtatatggacgaaaataagagtacagacga

SEQ ID NO: 551324 - DNA, 253 bp, Homo sapiens
ggttggtttttgccccccccttcccccccgggggggggaaacccccccggggggggggtttttttttgggggttttttgccccggcccttttttcccggggggccccccccaggggggattttattttgggggggggggcgcccttttttttttttttttcccccccccccccccggatttttttttttttttgggggggggggggttccccggggggttaaccccgtttttttttgttttttttttccccca

SEQ ID NO: 551325 - DNA, 230 bp, Homo sapiens
gacccccccccttgggagttttccccccaaaatgttcccggggaaaattttttggggttaagggccccccccccccccttttgttttttttaacccaaaaatacgttttgcccccctcttggggttccaaagcctttaaaaaaacccgtcccccattttaatttcccttccaagggccagcccgaaggtgttttttaattcccaaaaaaaggcctttttttgccccttta

SEQ ID NO: 551326 - DNA, 1143 bp, Homo sapiens
  misc_feature (1143)..(1143): n is a, c, g, or t
gataggcggttgtagctggacggcttggaatcctcctttgtgctgtgatcatggcgatcttagaacacagatgtacctagttctattagtgcttcgtaatcgatactcaagagcctggaatcgactgatcaatgcggacgcttgtgttgcgacatgcacagttctgtgcgagtcacttggtgtatcctttctagatcatagtgactctagctacgctgcgatcaccgaaggtcatcattcctgtacttggattaagtagctaagcgcgactcactcgttacgctttgctatgaaatcctggatggaaccctcgctgactttagcctgagattactagacaagcatctagctttgagaacgcttatcggtaatgattattgggacccatgttattaatttagtggctagatggggatctttgcgcaatggcctattgttttcactttagtagtttgcaaatgggaggaacgatgttagagcttaacattaaatattcccgtggcggaactcagactcagtaaaattgccaccaaaaaaataattccgcaataaaacatccaatttaggtatctcactcttcctttgctggctgttcctttttcgtaggtttccaggtcgtttggttggtacccctaatttgagcagttgggctaaccattggggcatcaagtaagttaatcctcacatttagcgacacgtggataaacccttgcgtcgggtgggttttagtccttgacttggcgcatttaacgaaattagaggctgatcgagaaattcaaaagtatttgttagcgatttactatgggatttttaggcttcctcgttgttactagtacacgattttcattaaaatgcgtcgtggtaccgcgtaaataactcttcataaattatttgtataattggttgagcacaaatggtagatgtgagacccagagcgaggtgggttgagattcgaaaggtcatttgtaggtttacacaaagaaaaccatttgagggggaaggtaacatagaaaggccttttgggagataatcgaaattagggtcaagtgagggattttgaaagaggaaagaccatggttttaataacacgagagaaatttaaacatgttcattggatagtgtgactatttagattataacctn

SEQ ID NO: 551327 - DNA, 277 bp, Homo sapiens
tagaggatccatatcgtagcatcagtctcgaaagaataaatgacttcctcgacctgtttcttggtatggtggtctcaatgccaccaaaccttaactgaaataaaccatggtcactccattttatattcatccttcttgccagcaaataaaccaacaaatacctagagataagtagtgtgtagaaccaaacaaatctttctgctctcacagagcttttattccaagaatatatcactaccttcctagccatatgctgatggttctgatacggttttga

SEQ ID NO: 551328 - DNA, 520 bp, Homo sapiens
  misc_feature (409)..(409): n is a, c, g, or t
  misc_feature (411)..(411): n is a, c, g, or t
aaattaggcggcccgtcgacgtcagcaccgcgagcaaagaaattccgcaagcagagcaagaagatccaggttgccatgggtgacgtcaccacgtcgcctcggaaaccatccagggctaccgcgtcgtgcgcacttcggcggtgaggtgtatgagcagaagcgcttcctcaaggccagcctgagcaacaccaacaagcaactgcgcatgacccgtaccggcgcgatctacacgccggcgctgcaactggtgatctacagcgccatgcggtgctgatgttcctggttctgtaccttcgcggtgatgcttctgcaggtgacatggtggcctacatcaccttggccggcctgttgcctaagccgattcgccagctgtccgaagtcagctcgaccatccagaaaggcgtacgantngccgaaagcattttcgagcagttggacgaggatgtagaaatcgatcgcggtaccatcgagcgcgacaaggtcagcggccgcctggaagtgcgcacctgaacttcactac

SEQ ID NO: 551329 - DNA, 828 bp, Homo sapiens
ggcgggaccagaggcggtcacgtgaggggctctgggctaccgggtcacgtgaccgaggcacagatcagctgatgccggagggtttgaagccgcgccgcgagggagcgaggtcgcagtgacatgctggctgggctgatctggacccaggcttgcccctgcctgtaccctgcctgctgtccctgcgctccctgccccaggcattgacatgcccctggctgggtcctgcgctggggtcgagagacctgagctggcttcttgagccccaaagccctgtggtatgggggacccatgtgcgtgggccctttcacgcgtgccccgtcctgacagccccgcagacagagcgacactgacccttctggcccgtacgttctcaaaagtagcttattttcattgaggtcaccttggcggagcaaagctattcgagagccaagtggcctggcaatgcgcctgcaaagcttgatgcgtgcacagtggtccagagatcctgggtgggtcacgggtgccagctacatcgctgtcatggggcgtcagtaatcagactgggctgtgacgattccgggacgaggaacacgcatcgtgccttcccgaaaccgtcttcgctgctggagctactcgggacggagctggatgacagccttacggcaggcctaacacgcgtggagccaggcttgtagccaagggccattcttcacaatggcatgtgggaaccaggataacattggcgttaggccttgacgggtcgtcaccttggtgcccgggtaatagctagtaattagtacctgttggattggaaggggtgacccctttgggacccaaatgggttccagg

SEQ ID NO: 551330 - DNA, 1154 bp, Homo sapiens
  misc_feature (652)..(652): n is a, c, g, or t
tcggggcggggtgatagataaatagtggaaagagagggttttataagtgggggtgcccgcggagacacacacgagtgtgtgtggggggaagacgccgcaaacgcaaacaacgagagcgtgtgttttctccccccccctcgttgtgaaaccacacgagagggggggtgttctttttagtaccccccctctggggctgccggtgtgtggcacactcgtcgtcttgttatctgcgagggttatatagagggcgacacatatatttgcgtggttatcacgcgcgccccatctgcgaggtatatactttgtgagagagaactatatatatatagagagggatatatacacagcgctgtgtgtgtgtgtgtgtgtccacactgtgtgtgtgagagtcgcccccactattttctgtgagcgcggtgtgtctctcacaaactgtgtgggtgtattagtgtgtgataatagaatagagagagagagatagtagagagatattatctctctctgtggatgcgtgtggcgtgagagtatctactcactcagggggcgcgttggtctctcacctctctgggggcgcgccgccacacatagagagagtgttcacgagacgagatattttctcgccacacactgtgtgttctcacatctgtctttnttagagagagagagagagagagagatgttcgccgcccccctatgtgtgtgtgtagagagaggaagagcgcccctcttaagataaagagaagagaggataagaaacacccctgctggggcgccacaacgccctctcccagagatattctggcggttttttgtttctcccaccgcggtttctctcgcggcacccacacacgcggcggcgggatattgtgttctctctagaagaaaacacgcgcgcggccccacaaaaaaaataataagaagaagaggggtgccacacagaaatatgttttataatcatttgtgccccacagagagaatataagagagagaggttaaagagagaaagagcccccgcggccccaattcgcgaagaagaaccccgcaattttcctctttgcgcgagagtttttaatttttagagagttgtgataccccccccggaataaagaatatttttgggggcacacacaataaaaaaagaaccgggtttgtga

SEQ ID NO: 551331 - DNA, 132 bp, Homo sapiens
aagggcgtccccagggggctgcgggagctgcagcttcgaagcctcacagagatcttgaaaggaggggtcttgatccagcggaacccccagctctgctaccagtgacaggggatcctcgtagagtctgatcct

SEQ ID NO: 551332 - DNA, 392 bp, Homo sapiens
taccaaaaacatcacctctatgcatcaccgagtattaagaggcaccgccagtgcccatgtgacacatgtttaacggccgcaggtaccctaaccgtgcaacaggtagacataagttcacttgtgggtcccccctttttaagaggggaacaccgtggagataccttggaaaactttgggccgttccccaagcgaaaggggggtttcaagcagtggtcatcagttacatgttataacccagggtgacaatctgaaccatgcacccggtggacaggaaggccgggggcaattacacgaacaaaggcgagagggaaccggaaagcaaaagggaacacccctgttaaagttggaggcaaaggggcccaattattgttaaacaagttttatttcttaaa

SEQ ID NO: 551333 - DNA, 106 bp, Homo sapiens
catggatttgctggtgcagtacaactaggcttaatagggacatgcataaaaatgactgaaaactaggagaatgtgtgagaaattacttaagaactaagtgggaaaa

SEQ ID NO: 551334 - DNA, 254 bp, Homo sapiens
  misc_feature (193)..(193): n is a, c, g, or t
  misc_feature (197)..(197): n is a, c, g, or t
ccaaggagacggcacggcgggctgaccttgaaggaggacggagcccccagaccctcgcacctgttggagaagatgctatgaagactcccagcccggctgccgaggacgccagggaacccgaggccaaggggaacagctgacggggctcgagggggaaagggggtgggacagggactcggggctggggacgggngggnttgactgcgggtgctttgccttaaaaagaaataaaagatgtgaacttgggctaagtt

SEQ ID NO: 551335 - DNA, 852 bp, Homo sapiens
  misc_feature (547)..(547): n is a, c, g, or t
agcagaaatcatgtcactgcaccctagcctgggcaacagggcgagactctgtctcaaaaaaaaaaaaaattgttcagagacgtcgaaggtgttagggagactaataggatgggttatgggggggggacgaattgaggggaaagattgaagttaaaataggatagccagattgggccttaaatgagaaagagacatctgggctgggtgtggtggctcatgcctggaatcccagcacttggggaggccaaggcgggcggatcacttgaggccaggagttcaagaccagtctggcccacgtggtgaacccccgcctctactaaaaatataaaaattagctaggtgggcggattcttgaggccaggaattcaagaccagcctgggccgacatggtgaaacccccacctctattaaaaataccaaaaattagatgggtatgggggcacgtacctgtagtcctagctactcaggaggctgaggcggcaggatcacttgaaccatgaggttggcggtgcagtgagctaagatggtgccactgtactccggctgngtgacagagacagtgtctgaaaaagaaatcaacagacaaatgggactctctgacagcagtgcgttgccgccgcgtttcggatgcgaaaccccgttggagggctcgtggggaccaattgtccagacccgatggccgttggttaaggtggacaggcgtgtttaggccggggcacatttgggccattttgccgattggaagggcgctgtttggctggaccgggcaagcagagtggggatcaccggggccccgaccatcctggggtaggcatggagggctttcgggaagggccccttgtgccgagatgt

SEQ ID NO: 551336 - DNA, 464 bp, Homo sapiens
tcacacaactctgaatatgcttaagaccattgaattacacactttacgttggtgaattgtatggtatgtaaattatagttcaataacatagttacaaaagataatcaaaagcatgaaagcactattgatgtggtttggatctgtgtcctcaccgagtctcatgttgaaatgtaagccctctggtgggaggcgatgggattatggggcagagtcctcacgaacggtttagcaccacccgctcagtgctgttctcctgatattgagtcctcatcccatctggttgcttcaaagtgtgtggtgcctcccctctatctccctcctgctctggccatataagatgtgcctgcttctccttcgccttctaacatgattgtaagtttcctgaggcctccctagaagcaaaagctgctgtgcttcctgtaccatctacaggaccgtgagccaattaaacctcttttctttat

SEQ ID NO: 551337 - DNA, 106 bp, Homo sapiens
tcgagctggtaccgaatatattacttttaagtcctgtctttacatcctttgaaaacttgtattaccatgagtttggaaaaaggacaacgaaaggcttttcatgtaa

SEQ ID NO: 551338 - DNA, 1106 bp, Homo sapiens
  misc_feature (45)..(45): n is a, c, g, or t
ggccctgaaggtgccactccaggtgcccaccagcctgttcctaantaaaattaagtggtatcattaaaaaaaaaaaaaaaaaaaaaaaaaaaaaaaagtgtgagagagaagaaaagagaacaacaaaaaaaagacaaaaagagaaacaaaaatgaggagagggaggcgagggagaacacaaaagagagaaaagcgagaaaacaagggatcacaacagaccggagaaccaccatgagagaaaaaccgcgggccaccaagcacaaaacagtgcgtgaggaacgtccccccccccactccacaaaaaagcgccgcgaggagtcacaaccgcgacacgcttcgcgaacaacaatccccccaccagcggacctcaccacggcggccacaacgtgggaactctatacaaacccaccgagaggagagcacgacggagcagaccacccgagagatattcaagaataacacggccacaggccggtgcggacccacgcgacgacgccaaccagagggacagccgggaaccgcgcgcccaagaacgacaaccacgtcgcccaccacacatcacgacacaccaacacaacccgccacgaagaccgcggagacaacacgccaacgggcacaaagtgagcacgaggatgtgaagcgacgaaggcaggacaccaacggtagagcaacgaacacccgataggggagaacaacaaaccagaagcagacgcggaaccgatcgacgaccccacgaagcggacggcgcgcagctccacgacaacatgaagatgtgtgtcactataaccagaacaaccatatttcacaccacatccacaccacattcaaagcgcaatcacctacctcaacccacattacatctacaattcacacaccagactcccccctcacatcacttctaccaaaaacccacctcctcccattgaaagccgaccacacaacacaagcggcaggagagcacgcaaacacaaggagagtggcaggaccacccgccagcacggctcgataacaaaggaccacagccgcaagggaaaggaaggcgcacaaccaaggtagcacacaagggggcacagacagaagcaaggcgggaacaaccagcgggacaa

SEQ ID NO: 551339 - DNA, 676 bp, Homo sapiens
ttggtaagaatgtggaggccccccccccattgtcttgtattcacgtaaggtcgcgcaccacagtcgccccaggagattgcgagggcaatagggattctgtctcccagggagagtgcccaaatacttgtataaaggcgctatgtttcttccctctgggcatagtagagacgaccattggcctctcgcgcgcgagacaatacactgtctgttatatagtagcgacacagggggggaggccaccagcggctgttgtggggccgccaaagagaggtgtctgtttcctcctgccactctctcgggccaaaggcggactctcttcgtccgcaagaaggaggtgccaaacggcgttaaatcagtacacatcgcctctctctcccggagagagacaaagccagtgccgtgtggtctccacgcgagaggaagttaatatataggatgaagtgcaccttcggtggaagaaacgcttcctccttttgttcgtatagtaggattacaggatgtagtctaggacaagggtctaaaggtctctgtgctctgtgtgctctagcaaagagaaatagacaatctctcctggagtatcggctatcccgtgggctacaaccgggagaacatatggacgtcatgcaaaatataagacacatccgcagtccagcggagcacgacaaatgtcagaaca

SEQ ID NO: 551340 - DNA, 1709 bp, Homo sapiens
  misc_feature (1709)..(1709): n is a, c, g, or t
tgtcttaagcaaacccgggttctcggggtggggtgggggtataatactaagttggaagatggatatcatttacgggggagaagggcgctttggtgagaatgtaggccttatttctctaggtcctttcggtacaggggagggaatttggaatgtaagataagaaaccggacctgggattacctcgggtactggaactcagatcacgtgtgggacttaaatcggttgagaacaaacgagaaccttaaatacgcgggttggcgccaatcggggatggtcctggatccaacatcggaaggtcggaaacaccctaattggtggagattatgggactctaagaaatgaggcatgcgcgcgctggttatatcccctaaggtgtaacactgggtgcccctgtgtggcgcacaaggtatacatatggcgtatcccatattggcgagttataaggacagtctcgggcttaggcactgcggtgcgagatgtcctttaagcttatgtgtaccctcgggcctcagagacgagttcgcgcgtgtcccatgggcctcacagagagtgtccgcccccacaagcgcagaaaaatttctctaacaatccgcaaagtgtagagcggacacatgttaagcgagactctggggggggattacgggccagagagtacacatggggtgcggcacataacaagcataacaaagattcaacaagggcccccaaaatagggcgaggaacaataacgatgcaggaccctgaggaacgggagtgaaaatatgaggccccccggcaccctccatcacacaagcgggggacagaagagttcccaaagatgtggcacacacgtgggatcaaacaacaagcgcgatcaccaggaagccacgcaaggtgtgggaacaaccccgcatatcggagaggggaaaggccccaatattatcaaacaaaaccagaggggatccccgccatcaacattatacagcgaggaacaccacacaggggtggaccactcaacattcgacgcaaaccccgtgtgggggacagcgggggtcaaaagcgggacaacccccgggacgcgcccccgggatcaaacacaccacttagtcgtttcgctcacccacgtgagagcacacagagagcagggggcagcgaccccacccacataataaaacagcgtggggcacgagcaacgcgatcacgagagagcgagaacaaggcgtaattgtgaggcgaacaaccaacaagcgacgggcggacaaaaaacagcaattgagcacaggcgaggccacccattcaagacagctgtagactcaacaaaccccgttgcccttatatagagaacacggaccagggaacgatggggactcgcaccagcagcgggcgaacacacagaagaaagctgaagcaaacacggcaacgaagacgaacagaggccccagtaccaccactgagccgacggcacacaactgtcgacagcagcaacgcgcagcgaagagagacacacaaaaagacgacagacagcgctgccacactaaaacccacactgagacgccatagaacctaggggcgcgcagacaaacaacaagtgtggcacaccagcgcacaacacccccacgagtgaggcacagcacacgaaggcagcgcgagacgccacctccactacgcagacgcaaagacacgcaacccgtaagcacccaccacaacagacagcgagaacacagccgatn

SEQ ID NO: 551341 - DNA, 245 bp, Homo sapiens
ggcgggtgcggcccggcccggcccgtgagcggcgcacagaatgggccgattgcttgctttttacacggcgggggaccgttgtccctcttcctgcttggtaccagcgtacggttgctggtggcccgggctttccagaggccttatggcagaggatttaggaggaaatttgttaaggaattggaccttgggacatttacctctggagagaggccccctctccctgtatatactcagtaatatttcta

SEQ ID NO: 551342 - DNA, 103 bp, Homo sapiens
cggctcggacccacaggtccttaccagtggcagtagccttgggagttatcccagctgcggtggctataatggtcctaattacttccgggcatcaacttcacag

SEQ ID NO: 551343 - DNA, 354 bp, Homo sapiens
ccgacgacgtgtcaaacggcgagcgattagctgtggtctatcacacagtgtacttatacattgacgaggactgcgagaccagagctcttgtgaaactcatgagcggcgtgcagacaaagaaccgctgactgagttggaggggatatctgaactggaaactaaggggctaagttaactgggccagctttaacagaatattgcagattttaacattgatggtacatgactacacacgctcaagtgaggctgtgggcaagtccatctatggggagaaatttggggatgagaacgttatcctaaagccttcaggtgctggcattttgaacatggtgcgctggaccccacactgctggc

SEQ ID NO: 551344 - DNA, 245 bp, Homo sapiens
  misc_feature (81)..(81): n is a, c, g, or t
gggaacaggcgccaggcagtggcccaggacggcacggacggagtgcataaatactgatggccaggcggggctcctggctgncgccagtgtgggtgggtgaggctgtccatcgagcgctcttgggggggcgtgggctctgggcactgccggctgagacatgaaaggcagaggcaggacattacccagcctcctggatggtactgaggtgacttgagttttggcaatttgcgtttccccaagccgcc

SEQ ID NO: 551345 - DNA, 188 bp, Homo sapiens
acgcaaaacacacacacgcacgcacacacacacacaaaccttcaaaaccctaataaacatagggccacttgctggagtccacgttgtattagaccttacggcaggtcttactatacactcgtctctcttatttcacactttccaattggcaatacacagcaaccacattcaggcatgggtggtcatca

SEQ ID NO: 551346 - DNA, 189 bp, Homo sapiens
cagcctccgcagccttgtgggcagcacgaggtcgctgcaggaaacgtgcaaggggaaccctgcagtttcgccgctcacatgcgcttccgatgactgagtgctccgatggacggaggacgagacatatgccagtgtctgcgcactggcttcttacgaggacccgggtggctctataattggtggatccgt

SEQ ID NO: 551347 - DNA, 517 bp, Homo sapiens
  misc_feature (139)..(139): n is a, c, g, or t
  misc_feature (354)..(354): n is a, c, g, or t
  misc_feature (400)..(400): n is a, c, g, or t
  misc_feature (423)..(423): n is a, c, g, or t
  misc_feature (452)..(452): n is a, c, g, or t
  misc_feature (469)..(469): n is a, c, g, or t
  misc_feature (482)..(482): n is a, c, g, or t
gatttagaagagaggttccagtgggtgtctctgtgtgtgactgagctgaagaacaacgtggctgcttacctggacaatctgcaggctttcctctacttcaggccgcacgaatacaatctggacatcccccgaggggccntgcagtgcagtattgcaatttggcaagagaccttcaccttgaggccttcctgaaatttaagcaacggctagaaggcctggtgtggcagccactgtgcagcctggccaaaagcctgcttggcctcagaacctgatcaagaagcgtctggacaagctactggactttgagcgggtggaagagaagctgctggaggtgggcagtgtgacctaccaggnggaggccgccccggcacacataccaggcactcaactccgctgctantggctgagctcccacagtttaancagctggtcatgcagtggctgggcagatnctgtgcacattcgtgancctccagaggganctttgcaaaacaagttgctgcagagggcagaggga

SEQ ID NO: 551348 - DNA, 919 bp, Homo sapiens
  misc_feature (11)..(12): n is a, c, g, or t
ataaattatcnngcctatctatccagatagtactccggcgttttctacaccggtcttttcacctccctccgcgatttcaactctttcctcaaaatttctacctttgcaccaacccacccgttggtgtgattcccgcccctaacttttcgccccctctctacaagtgcccccctatttggcccttctcttctttaatcggcctcctcaaacaaaagtaaatgccctctttaaccccaactaaataacgggtcttcccctcccccccttcatccccaggaaccactgtccccgccaccaacaaaatgtaacacggggacactgtccctttgaatcgctttttaaatgagcccccgcccccttctttcattcataaccagaagtgctctggcgaaaattctccccacccatgtacttgcaggcaaggttgtctccacatcctcatacgtccacccccccgcggtcttggcctcccccggatagaaaatgtccacttgcttgactacacaccacccacacactgaattatatctgtatgagagaagcaaaccatctttcccctcataccccaggcgtaatttcttttattccacaagtatattaccagacacctcccaccatgtaaaagcagatctcgccccctgtaactacaaaaaccaacatggtgatcccactctggttcgtattccgaacagcaagtgtctgtgattataaagccagaaaagccccagaatacaactcttaacattacagaccaatttagtataatcactcttttatcctagtcacttcctggatatatctagcttatttgggaacctcactttgtgatgtcacaagaacaaataaattccccatactgggctaaacaacacaaacaacaaacctttaaaatatttataataaataagcgaacaaaaca

SEQ ID NO: 551349 - DNA, 327 bp, Homo sapiens
tgcctggatatggcatgtccgtgtccactgacggatagtgcctgactatagatctcagtagccacgggggccatttgcctccaaatgcttgtgtctcccctcagggagtagctgctggccagagcttctgaatccctggcagtcacattggcctagtcaagggctgttagtgccatcctcactgaatttgccgcccgagaaacccgtgtagggaaacttagaggtgcttcattcacatctgtcacaataagcgtgaacttggcaatagaacttgccttgtacttcacagccaaaccctagaggctcaggatatactgctttgaacac

SEQ ID NO: 551350 - DNA, 1744 bp, Homo sapiens
  misc_feature (191)..(191): n is a, c, g, or t
  misc_feature (320)..(320): n is a, c, g, or t
  misc_feature (329)..(329): n is a, c, g, or t
  misc_feature (1744)..(1744): n is a, c, g, or t
ggtacaagcgtggcgggccagctagccctagcacggggccaggagcgcttcgccctttcctcttcgatagctaccgaggttggctgtgctgatcgtgtcgagcttcctgtggtagggtcgaacggggtcatcagctcgctagcgacatcctccagtcgacactacgagttaccagtgtcgtggtgcacagntgagggcaggtcgccagtgcgttctgctgccagtgttctaccctggggcgaactgggcaacaaccatccctagcggtgatgcattgtagactgtccacgacgcgctaggaacccaccgttgctctatcnctcgcgcancgtgctgtcaaggcttgtcatcttagcctcgtgaacgaagggcctgcatgtacgttgcgacgccgtgcacgtaccggtggattagatgacacacgcgtaatatcatgccgcctacacagacacagtagcggcgtgtgtgccacgccgtcatcgagggccaccacttggcgctggcaaggtgtacgctgagagacacgaatgcgcatgcgacgaccgaccacagcgacctatcactgccatgacgtgcaccgacacagcgacgacgaccttcatcttcgactggaacgcccggtccacgcctttgggccaccaagctcctagggttgccccttgcgaacgcaaaaccactcggaactacataaaaccatcctcgtgcaaggacgtccctactccaatgctgcggagacggggtcttttcaagcacggagcgaattgtgggagccgttgaggaacgcaacggccttgggttgcgcgtggtcccctggtgaccgccggcaggaacttacaaaccgttgggcggccaattctccgggtaggaaaagcgctagggcgggccttggttctcccaatcgcaccaagttataggtttcccaggcattggaggttccccggacagggcgcagaagcgttggtttccaaggcacgaggccacagcgcaatgcctttggcaaagtgtttgaacccgccccaggaacgaaaaccacggggcgcggacagggcgttcttggggccaacggggcccctgtgggggccccttccagtttcgcggatttcccccggactctcaatgagacccaatctgcaaggggcagtttctcgggctggcagcggcgtccccccggccacgcagagtgagcctgcgggcccatttccctggggttggcgccccggcgaccaggccagaggggcgtcgccacgacgccccttctccaccgctgcagaccatctcacccgcagcgtgctaatcaccccccaccgagtcgccccagacagtcgtcggcagtctccatggatcgagcgccgcgcgccctcgtctgtcccaggcccctgccgtggcacggaacggagacgcgccgaaccaaaccacggcgctccccgagcgtagaacaaccccccggggtaatcaccgagcgcgaacactacaggccacgaatccgtacctcgcacacacgacggccccatcggcgggatggtctttaccttctgcaacacaccacagcagcagacagcagagcagcgcggcagacaacacgccacaagcacatgcgggccgtgacaaagtcaagcagcgtacgacgaacaagtcacccgtaagatcacggaagcgcgaaacgaaatcctcagatcagccacgaagcacaaaagggctactatcacgcacgctagtagtcaacggcctgtgactcggagctcan

SEQ ID NO: 551351 - DNA, 919 bp, Homo sapiens
gaggcggatcataaggtcaggagatcaagaccatcctggctaacacggtgaaaccccgtctctactaaaagtacaaaaaattagctgggtgtggtggtgggcgcctgtagtcccagctactcgggaggctgaggcaggagaatcgcttgaacctgagaggcggaggttgcagtgagccaaaattgcaccactgcacactgcactccatccctgggcgacagtctgagactctgtctcaaaaaaaaaaaaaaaaaaaagaaattttcagttaaacagccctccttggggtgcttaaagcattctcagcttctccttcaggcgggataattatatattaattcccgtgaaaaggggtttcaggtcaaaccctttaagaacaattcgtgaagcttgcaaccgggccttgggttgttggaaataggacgggttaaacggagactctacagcattttaagacttttttttataaatagacttatttcccttggtaaggtatgggccatttaagtggagtaagggcgggccagaggtgtgcttacaacctttgattcccctttctcccgggactggatctggcggtacagaggctaggtggtcctggggggtgccttatcagggctggatacttctgattctggttctctccacgggggcgcaacagacaggaccaagaaacccacggatccggcgtaaaggcaatgttacactgtgcgggtccaaaggaaccaaaccgtgtatggtaaagagcaccggggcaagagcactcatggaaaaagacgggggataatcattgaggaaaacacggcacacataggacccaagcaaggtggatagcaaagagatggaataacaaacagcgaagccagggaagagaggcgaaacaaaatcagaacgcataagaaggatggccaataaagag

SEQ ID NO: 551352 - DNA, 91 bp, Homo sapiens
ggcacgaggtcatgtcacaagcaaatgtgtcgaggagcaaaggcagtccgagccatgaagaccaacagtaatgatatgtaaatgcgatgat

SEQ ID NO: 551353 - DNA, 128 bp, Homo sapiens
acaggctccacatggctgtgtgcaatctacagacttgtctctgcatcccagaccactccagccgtcattaccaggggctcagagacagcttgggctgttgcttcaggagagtggaaaaccaagccttg

SEQ ID NO: 551354 - DNA, 169 bp, Homo sapiens
actccagttacttagaaaccactgataccgtcaagagccagaaaaagtgtccattgtaatacaagagtcagcagagtatcttaagatgtctttctttaatacaaagttcagaggtagagttagactaccaaatattcgttggttcactcagcaaacatgtatttatctt

SEQ ID NO: 551355 - DNA, 447 bp, Homo sapiens
cttgaggatccccgctggcccacaagtggcagaaagcacaacccccaaacgctggccttgaagtgcatgcagctgtgccagagcaggtggctacagggactgatgctctccagtgctgctggcacagctccctccccaagacatggcccccaaaaatcggacacgtgctctcacgtggcactgcacaaccacgtacacagcccagcacacctcccttactgacacggtctccctgtgggaccctgtcagcatgtccatgggacttggtcctgatgttggaccgtaagactccagggaaccctcgtcccttccgcagtcccccaaggaaggtcacatcatccacccacttcgtgggcagcgctgcccacgaagtggctgcccgaagtgttctgagcccacagatgtagacacgatggcatgattgtcatcaataatctcttccaaggt

SEQ ID NO: 551356 - DNA, 363 bp, Homo sapiens
  misc_feature (63)..(63): n is a, c, g, or t
  misc_feature (125)..(125): n is a, c, g, or t
  misc_feature (183)..(183): n is a, c, g, or t
caatggctgcagccagcattgttacagaaaaagggcccagttttttttccacgaaaaacgccntacacaacattgcacacccaacgttcaaagttggatgaattgggctatgatgtcttgcctcntcagccatattcacttgccctttcaccaactggcattttcacttctttaagcactcgncaacttttgcagggaaaacggctcccacaaccagcaggatgcagaaaatgcttttcaagagtttgttgaataccgaagtatggattttttatgctacgggaataaacaaacatttctcattggcaaaatatgttgattgtaatgggtcctattttgattaataaagatatgtttgagcct

SEQ ID NO: 551357 - DNA, 185 bp, Homo sapiens
tgctggttggttggttggttggcatgtaggtgtgtgggtgtataggtgtgtgtggagtgtgtgtgtgttatttttccccatgagtccttttattaatcctagtggctttttcacttacaactagtacctaacccatgtaattttcctacatcaagaaaacaatcacaaagtagtggtttaaatat

SEQ ID NO: 551358 - DNA, 297 bp, Homo sapiens
tcgagctcggtcccgattgactacgcggctttgtagaatagaaaggggggaggtggggaaaagattgagaaatcgggtggttgccgtgtctgtgtagaaagaggtagacatgggagacttttcattttgttctgtactaagaaaaattcttctgccttgggatcctgttgatcggtgaccttacccccaaccctgtgctctctgacacatgtgctgtatccactcagggttgaatggattaagggcggtgcaagttgtgctttgttaaacagatgcttgagccgcgtagtcagatcg

SEQ ID NO: 551359 - DNA, 438 bp, Homo sapiens
agcgatccttagaggctgaatgtagtttgtctggacagcacggcatgcctcgatgacacagatcgcgcagctccgcacagtgcggcagccccttatcaggcggctttggggaggaagaggacggtgagactgggcaagcagaccccagaccccacttcccatacagtgcggagaccaatgtgaaggctgaaacccctaccgctcaattccctgatgtggaggcctccaaacccagcctccgcctggtagctgcctcagcctggggcttcctcagagcagcagctcacacagggaccagagcagctgcagcttggaaactctgccctagatctcctgtgaactctagggatggattccttgtcattttcacgccctccttgtaggtgagagtggggctggggcacagatgaagccagaactggagaatcccaccaggca

SEQ ID NO: 551360 - DNA, 155 bp, Homo sapiens
aaaaccccccccccccaaggggggcccccgggggagagggttggggcccccccccccccttttggcccccgggtttttttttcccaaaaaaaaaagggggggccctttttttgtttccccccaaacccctttttaaaaaccctttttttttttta

SEQ ID NO: 551361 - DNA, 514 bp, Homo sapiens
ccagttacaacagcctggcagagttaaaggtaaatgagggctgagtggtagagtggggtctcagctgcacagagttcgagggcagcatctctcttgtcctccaaggcctggttgaaccactgtattgatggctacatcactaagtctaggtcctcggcagtgatcgaatagccaagctggggaggtggaggcaaggtcagctgttcccctcgccgagaaggcagcagctgaactttccgcttacgctgcccagagctgccaggtgtagactgagaattcgagtttagtttcttccttggggttgtatctgcagccttttctccctgggactccttgtctgctgccaatggagttgaagaactggaatgatgacacagctcttcttctcttattttctttgctggcctctccggtgtctgggagcgggatgaggctgggctagagaagggtgatgaactggggccatttctcttccagagctgtgagatgcctcgagtggagctgttgtaactgg

SEQ ID NO: 551362 - DNA, 133 bp, Homo sapiens
tcacgtctgtcagaccaccgactaacaccgttactttgacgggacgctgctgttccgtgcctactcactactcaacacgaactcggtcgtctcactgcacactgactcgcctggggactcctcgtacgacgtc

SEQ ID NO: 551363 - DNA, 233 bp, Homo sapiens
  misc_feature (44)..(44): n is a, c, g, or t
ccgtgtaagcggtctggtagagcggtctgtcatggtgagcaggnagggagagctcagtgtggggagaaggaagaggatgtggggcagaccctgccttggctgccctgtgggcagtggtgccacttgtgaggatgtggatgcaggagggaggtggagggaggagggcgtggatgcaggaggaggaaggaggaggccgtggatgcaggaggagagaccgctcttaccagaccgct

SEQ ID NO: 551364 - DNA, 938 bp, Homo sapiens
catggtggtgcatgtccataatctcacttactggggaggctgagacaggagaatctcccgaacccaggagacagagattacagtgagccgagatcgtgccattgcactccagcctgggtgaccaaaaaaaaaaaaaaaggttacagttagggcccttttaaaaaaaaaaaggaaaagagaaaaagaaacccttacaccaacctctccgagttttccaggggtgtttgatattattatatctcctggacgagttcctttggggctccttctaaaatacactttcaatccacacgtggccattagaacccaggtgataacttccctcacaattatattattggatacttcacaatttcttaatccattcctgtgtgccattatttttagcgcattttaaaaccctcttatttatccattcccaatctcgtgggtccaggtgtattctcggggaaaaattcccaagagaagtggcactctttagagtttataggggcggaaattaccttaaagttttaatctcattctccccattaaacgggggttaataaggacacaaagaactataacccttacgggtctgggaactttctttaccacaaattttccaaggcaacacagaaaagaagaggaggaaatattgggcaaagcccaggtttcttccatcctaaaagggacctaaacgttacccctcctttagagaggaaggtggattttcacagttcccacaatttggttttaacaaacctactttctatttctccctacccacaaatttcctaaaaaaccccttggtatttaccctcacaatctggcaaatgtttccttggacaaggaaatacgggagggaccgggcgcccactggtagccaccacttggaggccaggcggaaacctggaggcacgagattgaacgttggcaaccgtgaacccgtccttttg

SEQ ID NO: 551365 - DNA, 185 bp, Homo sapiens
gggggggggggggttttccccccccccccccttttggggggggggggggttccgggtgggggcccctccccccggggccccccccctggggggggggggggggggggcttttttttttttggggggcccccccgggggttttttttttttttttttttttttggggggggtccccccccccccca

SEQ ID NO: 551366 - DNA, 551 bp, Homo sapiens
ccgcacattttacaagagcagacaggcaggcgcagtggctcacgactgtaatcccaacactttggaaggctgaggcaagtggatcacgaggtcaggagttagagacaagcctggccaagaaggtgaaaccctatctctaataaaaataaaaaaattagccaggcatggtggtgccacgcctgtaataccaggttacttgggaggctgaggcaggagaattgcttgaacctgggaggtggggaggttgcagtgagagccaagatcgcgccactgcactccagcctgggcaacaagagcaaaactccatctcaaaaaaagaaagaaaagatgaaacaaatttgggggccgtgaagttctctctcctacttctctctgttcctgttttatgtcctcaatgtttaggaggatgtctcttgaaaatcactcttaattttcatcagaaattatagataaagatgactttttctgggagtgaaaatttcactcctagtttctcatgtgtagaagtgtttttggttagtttgttaattaacccttatggaaagttattt

SEQ ID NO: 551367 - DNA, 892 bp, Homo sapiens
cagatgaagaagcctgatgtcagagacagtggtgtccagggggcgggcacagtggctcaaacctgtaatcccggcacttgggaggctgaggctggcagatcacctgaggtcatgagttcgagaccagcctgggccaacatggcgaaaccactgtctgtactaaaagatacgaaaattagctggggcatggctggcgctactatgccgtgttaatgccaagctactcaggtaggtcggtgaggcatgaacacatgtgcttggaacccaggtggcggtagggttgcgagtaagccgagatcaccccacgtgtcactccagttcctaggtgacagagctaaacagctccatctctataaaattgacaaaagaaaagatgacaggaagaaacagaaacagtaagagttccttaatccaaagtccacacagcagagtcagacagagctaggtctcatacctgaatctctttgatcctaaatccagtagttgtttctacattaacataagtgaaactggggctgggcactagtgactcacacctgtaatcctaacactttgaaaggtcaaagcaggaggatcacttgaacctaggagttacgagatcagctggacaacgcagtgagaccctgtctctattttttgtaacgttttaactaacaaaaatgatggaatggggattgaatgcaggtcgttggattcctaaccaactatggtaattggatactgcatatatactaaagtaagtccatcctcccttatccagtgcatgcctggaaccccaatagtacaaactctattttcctaaggttcctatatttacttacctgtattaagttactatttaattaggccggacgagataaaacaaggtgtgtgtactgacaattttccttac

SEQ ID NO: 551368 - DNA, 436 bp, Homo sapiens
  misc_feature (422)..(422): n is a, c, g, or t
aggattctctctctctctctcctatcatcccttacccagccaacctccccttcccgaacctgctaaagaccctaaggatctcccaaaattctcccattgttggccacctcatccaccatcaaagcctctgagagggtttttacagggccgtgttagagccttcacccatggaacagtacaagacatgatgctactccgagaataccgacagctccagggaacagcagtccctactacccagcctctccccccaaccatcgcccctattcagcaagaagcagccagaggacaacggcgcccctcttctattacctattaaaaggctgggaatgttagggaacaagttgcaccagaacccttccccaccccaatggcaggtgttccctttaccctggattattttgcaggtggatttctggggnctttattttggggg

SEQ ID NO: 551369 - DNA, 825 bp, Homo sapiens
tagctactaatcgacggcctactctattgacctctatcgctatccacaacctaggcaactacactaacgaccacccgtatgcctgcttaaatataaccagccctctattctatttcttatagcataatgtaatattttacttggcttcttttaggatgcggtaagaggtttaaaaaggagtattctgtagggttcgtaagcagtgaaatgttcatatggtccagctattctgtgtcatatatatctctaggtggtattcatttcccaacgtcagtgtctaacttctgacacttgaaaactaaataaattgagtctgataacagggcatttcaccagttatagatcggaacactacaccttattactacaatgatcttggagccgcattttaaacagctttattccaaatttactctcttcgttccgacagtcagcttaacagtatgccccacaacagaaaacatgtagggctcctaatacacaacacacacaaacagcatatacacacacacacacacacaacagtacaacgtcaactaacgaagggaaaactggtataaatattcgagggcattagtttgtaaccagcactcgccatactaggtttacccagctgttgacagtcaactagaacactcttcctgaataacaacagttaatggccgtgcacacaagcaagggccttacactagagcgaacgaagtaatgacataggggagatacacacccagggacaaggtgacgcagtaagaagtgatcagcagttaaacggagttacacaagaggcccaagggggagaccacgagaaagatggacacaaaaccg

SEQ ID NO: 551370 - DNA, 1922 bp, Homo sapiens
  misc_feature (711)..(711): n is a, c, g, or t
  misc_feature (1249)..(1249): n is a, c, g, or t
tgttctcgctcaatgatatatattaatcgtctttggtgtagatctatttgctacttgctcgtcttattctgtgttggtgcataccacctcttcgtgggggggagacgattctcttctgctgtggtgttttgtggggggaccctcactctgctgatctagtcacatttgtgtcgttcatctgtgtttctaattaagatgggcctgttcgaggagtgtttcttcctcctgccttctctataatgggggggtctcctctacggcctccatttgtttatttttggtgacagcctcgtattttcccgctgttctgcgtggagcgacacctcacaggtgtgtgtgcaccaccatatcgagggggggcggggtttggtttgctccgctccacagcgaggtggttttcctccacacccttcagtaactattggtgttttgttgttgaccagaacacacgcgggggggggcgttctacatgtttgttataagctcgctgtgtgtgcaccccagcaggtggttccttctttgtagttggtccgcccctcgatttattttagaaggtggtgtgtgaggacacagacacgcaccccgccctttctgtgggcgtttacctaacatggaataatgcccctcacaaggaggaggggcgggtgtgtggttgttccccccctcgttctgtttttcgcccttcttgtttttgcgacaaccgtggggggnccgcagacccaacagacgcaccccgacctcgttgtcgttcgcttctctcttcgtccctcgtggtgggggatatttgcggaggggagaaaaaaaaaaaaatatgtggggggagttattagtgggagaagagaactcctcagctgtctcgccaccatcattagtattggggtgcccacacagcgctggggtgagagggccccccaccacgagaggagcccccctcgtttggggggccgccccacgcaaccacctcgacgagaagatgtggtgctctttgaggcgaaggatagcgtgtcgtgtcgccacctcgtcgagtagcacacagcatatacttttgtgctattttcttcgctcccacactttctgacacgcacactttgtgtttccccccctctctctctctcacacataggggtggccgccccccactgtagaacacagagagagagttttctcacccctgtgtcgctctcgcttctctccgcacacgcccatcctctctctgtgtttttctctctctctctgtgtcgccctctcnctcacagagagtatttgtggagtgtctcccacatattgtctctctctctgtgtgtctcacacacacacagtcacactctttgtgtggacacacagatgtgtgtgtttgtgtgttgttgtgtgtctcacaaggagtgtctcacacatatgttttgtcgacacacacactctcttctcatgtgtgtgtggtgtgtgtgttatactacacagtgggcgcacacacatgggggtgttaatatctctctctcttgtgtccgctctctgctgtgtgtgtgtgtccgcacacagagatatcctctctctctctcctcacaagatatatctcttttgtgtgtgggagaagagagaggggtttgtggggacatgtgcacagagggtgtgtggtgaaccgagactaacccccagctgtcccacagcggagaagagtgggggcctctcgcccctcaaggagatctgcacaccacagagagtgaagcaaagaggggcgcccgaaattggagccacaaaaagaggggtaaggggcgcacccccctccccccgtgttttttggggagagaggggataccacacgagagattgttccacaccccggggcgtcccttctttggtgtttctatatttgtcacggtatacttgtgaattaaaaaaaaaatccttttttgggaaaaaaaaaa

SEQ ID NO: 551371 - DNA, 491 bp, Homo sapiens
ttgaggccctcaacatcagggaagagaatccaggtatttttgcagggttgaaggaaaagtgcggacaaattcataaagctttacaaggcatttctggataaaaaggggggggggagtccctttctccagcctttcacctacaactggaagagagcactgggtctcgcgagcaagatgtcagactgcttcaggaaattgtagaacaatgcatgaacagaaagatggcattaactcaggcgcgctacttggagaaagaagagaaggggctccctcctcccagcattcgggttgggggcacgggggaacaaacagaggaagaactggagagagctgcgtccaccatcaaggaggtagcccaggccggccggctttaggcagagacccgggaccaagggctccctggcaaacaaaaaggcgggggggctaaagaatcccggtggccaaggagtgggccggaaggagaggaagaacatgggggaactttggaaagg

SEQ ID NO: 551372 - DNA, 416 bp, Homo sapiens
  misc_feature (103)..(103): n is a, c, g, or t
agttaaacagaattaagagtgtatgtttacaaacgttgtgaggtgacttaagaatacatttgacaggcgacatcgttcttcaaacacagcagcattcaagacngacagcgtgcattcaagcaggcaccgttgcaacatcccatgcacgccagggcagcacattgctcgtcattgcaacagccctcagttagacgccatttgactcaaagcgccagcacgcaacacatggcaccagccattcaatggcggcagtcggtcaggcatgcaaacaattctcggagaagcatacgacagtttgcaacgtggcactagattgggaagcacagcacagtcacgagccaccacacctctcccctcctctcctctccccctcctcttctctctttcccttctctttcctcctccctctctcttcg

SEQ ID NO: 551373 - DNA, 116 bp, Homo sapiens
tggcgtaggataccggtggtttttaccgtacgttatcgggtacacggttacgtattatgtacgactgttttgacgtttggactacttactacattacgcgactggttacgacacta

SEQ ID NO: 551374 - DNA, 110 bp, Homo sapiens
  misc_feature (3)..(3): n is a, c, g, or t
tantacttcatcaccagtgcatacctcttatgtcaacacagacagcagccaggcaagcagaacaaatgcacttcaagtattttacttttaagtgctcggtggtatcagct

SEQ ID NO: 551375 - DNA, 166 bp, Homo sapiens
caaagggggggtccccccaaaaaaaggggtcccttgcccccggggggttccccccccccccgttttaaaggggccttttgggtttccccttttttttcccccggggcccccccccccttaagtttttaaccccccccccccccccaaagggttttttttattttta

SEQ ID NO: 551376 - DNA, 373 bp, Homo sapiens
  misc_feature (66)..(67): n is a, c, g, or t
  misc_feature (202)..(203): n is a, c, g, or t
  misc_feature (205)..(205): n is a, c, g, or t
tcacttggtttcgggtgtgtcgcaaaaatgttgcctggaattttaaaaatttcttggggggccccnngggggggcccctacgcagggacaccccccgtttccagccctttgaattggggcctgacattaaacccctttttttttaagggcccagttgtgcttggggggcccctcctcccccgggtgtttggcaattacaaanntnttttttcgggggggttttcttttataagggggtttcctttaaacccccggggggggaccccctttttttccaaaaaaaccccccccaaaaggggggggggtctttttgttcccgttttttcccagcccaggggggttttcccccctaataaagggcggggggtcggca

SEQ ID NO: 551377 - DNA, 310 bp, Homo sapiens
cgtattggccgcgtccgtgatcgccagcgcctgttccatgttgttgatgttgaaggccggtacgccgtaatcgttctcagccgcatggtcgagcaattgacgcaacgtgatccgagccatgtgtctttctctccgtttgggcctgcgacgaggccgctgacttctcttcttgccgacgaaattatttggtgcgaagcacctcgacgccgggcaggggcttgccttccatccattcaagaaatgcgccaccggcggtcgagacataggtgaattgaccggccacatgggcctggttgagcgccgcgacggt

SEQ ID NO: 551378 - DNA, 740 bp, Homo sapiens
acttggcactgagtatataacatgaaagtgatagccagggtttctgccctcaatgagctaacatcagaatggtagtgtggaagaggggagggtttggtgtaggtgcaagggcagataaacacatctgaacacatacaataaattcaaatggtgttaagctcctaatgtaacagttgcttggaaattagttaattgtgaggttacttatgattatgcaaaatataaaccatgacttagtgtcttcagttgtgtcagagataactacacttaagtgttttaatcaaccttattgatgtataatttacatgtgataaaacacacccatattgtacagtttgatgagttttgaaaaatgtatatagtcaccaaaatgtatactaccaccataatcaagatgggactctttattgcaaaagatttgcctccgcccttgccgccgattttcctcacctccagacaaccacaaaatcctttctggcactaaaaattagttttgtcttttcactgatttcatataggtggaattacacagtattcacagttttgtatctggcatctttcactcagtatattttgaaattcacgcatgttccatgtatcagtagtttttattgctaagaattagtttattttatgtatatataccacaaattgtttcagtttgcctgttgatggacatttgggttgttttcactttggggccattataaataaagctgtttatgaacattgatttacaa

SEQ ID NO: 551379 - DNA, 111 bp, Homo sapiens
ctagatataagaaccgagcgaggtctacgagcgattgagcatcatcaaaatttcgccctcgccttttctctgattacaagctccctttcgattttaaacggtaggtacaga

SEQ ID NO: 551380 - DNA, 804 bp, Homo sapiens
  misc_feature (16)..(16): n is a, c, g, or t
gatggtctctcttgtntttcttagctaatgtaagtaaaattcacttggtaatttatgtgtcacatagaattgaagtttttctcttgctaatattattcctattttcaaatttggggttcctgttagcctgattttcggatagctgccacaggagttgtccttgatctggataaatccataaaaatgtgaagaaattaaagctaactggttttccatataaaatttttaagaacacttcatttattaaggtctgtatatctatatattctcatatttatagatctccatattgttgagaaaaggaatgaaatacctctaaaatatgggcctcatatttttagaaaagtgtttgaaatcttttataaacttcatatttgtgtttgctcctttatattctgtattacttaaatatgctcagaaaagcagtggtaaacagctatttaggaatgaggctgttactcctgacttccatgtgagactgcacagaatcatattgaaaatatgtcattttatccactaaggtttttgtttcctactttttaaattgtgtgttaagaaagggaaaaaaatcacaagtttgtctaactcagtagaaaaattcgacaaagcatttggagaacaacttggcaagggtacagagaaacggatgtactggttttcagtatgtggggaggggggttgagcagcattatggcatttcttagtgggggtgtttctattgaaacggttggaagttaaaatgtctgcatttgggtaaatacccgggttttatggtcgttaggggcttagaaaggtggggcctgg

SEQ ID NO: 551381 - DNA, 954 bp, Homo sapiens
gctcgactgaatcatgcagaatttgaagatcaagatgatgaagccagagttcagtatgagggttttcgacctgggatatgcgtctgaagaaacatcgctggtataagaaaatcctcaagtcccgagatccaatcatattttctgtagggtggaggaggtttcagaccatcccgctctgttatatcgaagaccacaatggaagacaaaggcttctaaaaccctatcactccacagggaactggtttcttggcaatacagtctgtcagtggcataatgcctgattttcggatagctgccacaggagttgtccttgatctggataaatccataaaaatgtgaagaaattaaagctaactggttttccatataaaatttttaagaacacttcatttattaaggtctgtatatctatatattctcatatttatagatctccatattgttgagaaaaggaatgaaatacctctaaaatatgggcctcatatttttagaaaagtgtttgaaatcttttataaacttcatatttgtgtttgctcctttatattctgtattacttaaatatgctcagaaaagcagtggtaaacagctatttaggaatgaggctgttactcctgacttccatgtgagactgcacagaatcatattgaaaatatgtcattttatccactaaggtttttgtttcctactttttaaattgtgtgttaagaaagggaaaaaaatcacaagtttgtctaactcagtagaaaaattcgacaaagcatttggagaacaacttggcaagggtacagagaaacggatgtactggttttcagtatgtggggaggggggttgagcagcattatggcatttcttagtgggggtgtttctattgaaacggttggaagttaaaatgtctgcatttgggtaaatacccgggttttatggtcgttaggggcttagaaaggtggggcctgg

SEQ ID NO: 551382 - DNA, 148 bp, Homo sapiens
  misc_feature (4)..(4): n is a, c, g, or t
  misc_feature (88)..(88): n is a, c, g, or t
  misc_feature (130)..(130): n is a, c, g, or t
  misc_feature (146)..(146): n is a, c, g, or t
accntaactgggacacctctgaaacagagaagaggaaagtttatagcattaaacacccacatcgagaacttagatctaaagttaacancctaccatcatacctagaggaactagagaaaaaaagagcaanccaacctcaaaagtancc

SEQ ID NO: 551383 - DNA, 3430 bp, Homo sapiens
tttttcatgaacaatgactatatttttattttagcaagaaattcgtagctgatcgctgggactgaggaggcaagaagtgagtgattgggaaaatggattgattgccatggttcatacttgtctctttttctctctctttctctctcagcttgcacctacaaaaaccaggagtgccgtttgaccatacattatgagaatggattttctattaccactgaaccacaggagggtgcctttcccaagaccatcatacagtctccttatgaaaagctcaaaatgtcttcagatgatggaatcaggatgctttgagaaaagaagggctgcaatgccaccagagaacgtgatgtcagacaccatctgtagtgagcagcgcaccagatgtagcgtgctacagtcagctttagctctcaagagtcgtatgtaactgtcccagactcctctgtcagtttcagcaactacaagggataccctgcgaaagtaccatgagaaatatcagagtaaaactttctagaacagtacaaggttaaagaggtgaggtgacgggaaatacacagcatagctttgaaataatgacaaccaaggacatgaccattagaacagcatgtgcagatcttaatcatcccagttcctaggcaacttgttcaccaggtacgcaagggccgaatagttgagaaatggacattcttacctactcctcctagccccctatccccagtaacagtgatcccttttcttattgtgatttatttcctaattcttgctgagttgactttcccttgtaggaaaagaaaaatatttcaaatagaaacccaccttttatttaagtatgaagcagctgttactttttaaaaaatgaattatctttcaatggtgtagaatgattccaaagtgtctccattagcatatactgagcaggaattaaataaagcatcagatactgatctgagctgtaagctggtagaatctgagccaaagtagactgcttaaattgataagctttgctaaagagttgtatgcacaaaggatgattaattctgggactatactcacaccaaggtctgctgtcttatagccaagaattacagctttatttatagagagtgaattatgggtattttttcagaaaatattgtcatctgatatacacataaaacaactcacattgttggagttaactaattatccccatttcatggttttcagtggcaacttactgacccttgtttttgcctgtgcttgtatgcatgcattttcaagcaagtaataaagcagcctcatttaattctggataatgctgggttttacatatagactgaatgctataatcaaatctattgacagtatctgcagttctttcagaattccagggaaataatataacgacctgatatctttctacaggaatattttcagacattatatagcacattactgatttaatgcttttacttttatctttcaaaacaaattcactaaaaataacacctatgattttgaagtcacttttctcaaaccttgaaaatgagctctaggatctctataaacatttctaacacttttcctgtagtttacatagacagacatctgttgttagacctgtgtgtttttaaagaatcatatgttaacaaatacccatgcaaagagcttcaaaaagtgaaaccgtgttaaaggaacacaatttttctcactcagacatatttgtttattgaattgcaaagttttattttaaatcagcatttccccaaagaatatatcatatgacgctagttccaaggggcttgactgagtggtgttttgctggggggagacaggggtttgttaatacactttactaaatactgagctgaaaaatgttaaatagatttcacgattgcctccttgaagattttaaagttcattgtggttcttcaaggcgaaatccggtgaaccattcctcacacttacctacaggactcttttctaatggagcatcttgtgaagctagtgggtttttttgttgttgttatttgttttttttttttaatgctttagaaaacacagctttaggatattgactttttgtttatttctattttcaaatgctgaaaagtcaagtcccagtttgaataccatagaaaagctttgatgcatttgtaaattatattgcactctttcactatatattttcaaaatcactggaatgttgttatacaagagaattataattgtgtattgtaaataacatattaaaatacatatattaatgccaatagttaaattcaacaatatgtaatctaaggtgctcggttctacatgaagtatgagttaactgctcataattaagttgccaagattctattatatatttatagacaaattaaaatgatcataattacaaaatatgatttctttatcacttaagctttgggctgattaatatctgtgtggggggtcaatggaaactacattctctacatttataaacatttaatttaattatttatattttaggaaaatatatttgaataaaattaatgcattttctagagtaaattaaaatgttattagcaagaaatagaaaatttgactaagataattgtgtatatgaatcatttttcccccaagttaaaatgtatcataatagagaggctctaatgaatcaatttccaatactcatttctttcttattttgaattcaagttacaatgactttacactgtagattttaatcttgtctgatgtgtgctggtgtgtatgacacaaactcataagtctggatcatgcttgggtacagtcaatgaatcaaccgagtcactttgaggaatttgtttttgtccaatttgctctgtgctcaatcccatgaattattaaatttacaatgtttgtccccaaatgaaaaccaatataaatgaatgatgttttaatctgtactttatgggaagttgcctatttgtcagtagatgtggttaagtgagtcctctggtgcagtgacatccttttaagccatctcatagggatttaaagaaggccaataggaatatagatattggtttttctttctctgacttgaactaagtaggagaaaccaaaccataaacctattacaaactacccaggcagaggcatttacttaattcatcaactagtgcaattaaaaccctgaaaacacatgatccttgttgactctgcttggttgaagcaggaaagaatggtcttgatggtcagaaagttttaaaattaatgggcagggcctttctggaccctgttttccaaacacgttagatattccgtcttgaggggattggagtaggctacagtgagggggtaatttttggatgtatctggacttttaaaaaatgtgcctatatttatagcaccatgaatattatgtaaaatttatatatgaattaaataaatattcacctctgatttccagtgcaaaaaaaaaaaa

SEQ ID NO: 551384 - DNA, 307 bp, Homo sapiens
tgatgacaatgaggctactggaaataagattgacttacatttacaacactgaccaaagcaaggatagtttggtggatgtaccctttcctaattcataccagtacattgcagctgtggattacaaccccagggacaacctactttatgtatggaataactatcacgtcgtgaaatattctttggattttggacctctggatagtagatcaggtaagttcaaccttttatggtactctttggggaaatatttactgtttgttctcagcaagttcattttatgtttttattaaactttatttgtggtaaa

SEQ ID NO: 551385 - DNA, 2557 bp, Homo sapiens
  misc_feature (24)..(24): n is a, c, g, or t
  misc_feature (46)..(46): n is a, c, g, or t
  misc_feature (50)..(50): n is a, c, g, or t
ctgctccgcggctccccttgcttnggggtttgaactggctgctggntttnttcccctcccctgtctcggtctctccttcttcttttaggttgctccaccccggtcaggatcaggcgagggggaaccagcctgagtgcagctgccaactcccgccgagtgcgtctgcgaactcccggagcggagtcccgcgtgccgccacctccccgcgggacgcactctcctcgctcccccgggccccgcgtcctccccccggccacccttccccacgttgtccccccttttccaatcacatggcattttaagaatgccggaaagatggcggtagcggcggcggcggcggcggctgggccggctggcgcgggaggcggccgggcgcagcggagcgggctgctggaagttttggtgcgggatcgctggcacaaagttctggtgaacttgagcgaggacgccctggttctgagcagcgaggagggcgctgcggcgtacaacggcatcgggaccgccaccaatggctcgttctgcaggggcgccggggctgggcacccgggcgcgggcggcgcgcagcccccggactcgcccgccggggtccgcaccgctttcaccgacctgcccgagcaggtgcccgagtccatctcgaaccagaagcgtggcgtgaaggtgctgaagcaggagctgggcgggctggggatcagcatcaaggggggcaaggagaacaagatgcccatcctcatcagcaagatcttcaaggggctggcggcggaccagacccaagccctgtacgtgggcgacgccatcctgtccgtgaacggagccgacctgcgggacgccacccacgacgaggcggtgcaggcgttgaagcgcgcgggcaaggaagtgctgctggaagtgaagtacatgcgagaagccacgccctatgtgaagaaaggatccccagtatccgagattgggtgggaaacacctccgcctgaatcccctcggttagggggcagcacctcagaccccccgtcatcgcagtccttctccttccacagagaccggaaaagcatccccctcaaaatgtgctacgtcactcggagtatggccttggccgaccctgagaacaggcagcttgaaatccactctccagatgctaagcacacggtgatcctaaggagcaaggactcagccacggcccaggcatggttcagtgccatccattccaacgttaatgacctgctgacccgagtgattgctgaggtcagagagcagctggggaaaacaggcattgctgggagccgagagattaggcatcttggctggcttgcagaaaaggtgccaggggagagcaagaaacagtggaaaccagccctggttgtgctgactgagaaagaccttttaatctatgacagcatgccacggaggaaggaagcctggttcagcccagttcacacataccctcttcttgccaccagtcctcatccgtgaacattatcttcagattctgagacattcccgcaacagaaaccaaagaaagattagaccacagtcactggattccagttactaagaagcaaagttggacccaagcatcttgaaatgattctcagaaacaaaagttgaaataaggtagtttctgcaactctcaggcaacatgaaaataaaatttaccctcgtacatagccttgttctcacagtttctgggcattatgaacaatggggactgctttttcattcattcattcattcatcagtcaacatttataaatcatctactatgtgccaggagttataattgggacaagggataaagaggtgaaaaaaattcaaacttgtgaacctagcattatctggaacaaagtgtgttgatgtgcaggaacacataaggaaccatttgcagtaaagacaacaaaaaatgccaaactctgcctggacagtggtggaggactccttgcagtagaagtcatgttgaattgaagcctgagggaaaactcaccagaggaacaagggaagggagcccagagaggggcacgagcattccagacttagggaagatccaagcacagagctcgtgcactgctgcatggcccagttagagcaccacatacggccctggggaatgaggggaaatgaatcagatactcactaagtacccagcacttgacacaagttaccacttacaacgtgtgtatccattctgcaaggccggtattagtgtgcccattttgcagattaggtacctgaggctcaaaagagttcaggaatcaccccaggtggtgtagcttctgagagatggaggtgggattccagttccgggactgtgtgtcacttgcatacctgtgccttggtaccacagggggttgacacagaggtgggagatggggaggaagacttttcactagcgtatccttttctaccttttgaaattggaaccatggggaacagcaggagtctttggggatgataagagtcatggatgtgatctgggtagatatttttatatttggtgtcaaataacaaatgtccaaggagtgactgctgaatccaattttgcagtgatcctgattccattgtaaagaaa

SEQ ID NO: 551386 - DNA, 172 bp, Homo sapiens
  misc_feature (30)..(30): n is a, c, g, or t
  misc_feature (52)..(52): n is a, c, g, or t
  misc_feature (92)..(92): n is a, c, g, or t
  misc_feature (124)..(124): n is a, c, g, or t
  misc_feature (155)..(155): n is a, c, g, or t
cgtttaacctgtggctggtggccacctttnttgatttgggcttacgagtttnatagtagccagtcttagaaaattgggggagtaaaattttnaagtaaaaaaaaaaaaaaaaatgacaaggganccaaatgctccttctccccttagtacatttncattacttaatgaagtt

SEQ ID NO: 551387 - DNA, 544 bp, Homo sapiens
tggctaacagagtgagactcttctcaaaaaaaataaaaaccagtgaccacggaccacgggccactgtcacatctgagccaggttcactgccgctcctctgccgactgactgcctgacagtggctgcgcttctccaggtgtctcctgcctgctgtgtggacggtcccgtcagggttgggatgcgcctgctgtcccctctcctgtctcgcagtcttgggttccccggagttgcaggaatcagggcatttgcccagtggggccttgctgctggatcccctggtcgggactgtgtgcctgccacgtgtcccgtggccacctggccatgtggccggccaaggccctgtgagatgtggcaggcaggcacctcgggggcctgggtctcctggaaatgtttctgtcactctgggcgcaggtggcgccagctgggttgtcctcataaaggccccatccgggatactaggaaggccatcctcaacctgtccgcacacgtcacctccatgtggcctggccacagctccttcaggcatcagtctgcaggcggccgc

SEQ ID NO: 551388 - DNA, 1808 bp, Homo sapiens
  misc_feature (24)..(24): n is a, c, g, or t
  misc_feature (46)..(46): n is a, c, g, or t
  misc_feature (50)..(50): n is a, c, g, or t
ctgctccgcggctccccttgcttnggggtttgaactggctgctggntttnttcccctcccctgtctcggtctctccttcttcttttaggttgctccaccccggtcaggatcaggcgagggggaaccagcctgagtgcagctgccaactcccgccgagtgcgtctgcgaactcccggagcggagtcccgcgtgccgccacctccccgcgggacgcactctcctcgctcccccgggccccgcgtcctccccccggccacccttccccacgttgtccccccttttccaatcacatggcattttaagaatgccggaaagatggcggtagcggcggcggcggcggcggctgggccggctggcgcgggaggcggccgggcgcagcggagcgggctgctggaagttttggtgcgggatcgctggcacaaagttctggtgaacttgagcgaggacgccctggttctgagcagcgaggagggcgctgcggcgtacaacggcatcgggaccgccaccaatggctcgttctgcaggggcgccggggctgggcacccgggcgcgggcggcgcgcagcccccggactcgcccgccggggtccgcaccgctttcaccgacctgcccgagcaggtgcccgagtccatctcgaaccagaagcgtggcgtgaaggtgctgaagcaggagctgggcgggctggggatcagcatcaaggggggcaaggagaacaagatgcccatcctcatcagcaagatcttcaaggggctggcggcggaccagacccaagccctgtacgtgggcgacgccatcctgtccgtgaacggagccgacctgcgggacgccacccacgacgaggcggtgcaggcgttgaagcgcgcgggcaaggaagtgctgctggaagtgaagtacatgcgagaagccacgccctatgtgaagaaaggatccccagtatccgagattgggtgggaaacacctccgcctgaatcccctcggttagggggcagcacctcagaccccccgtcatcgcagtccttctccttccacagagaccggaaaagcatccccctcaaaatgtgctacgtcactcggagtatggccttggccgaccctgagaacagccataggaatcacagatttgaggaactgaaggcgaccataatgaccatgtggtttgaattctcctggattccccgaagttgctgcaagccagcaagacttcatcctcctgactagtttcatctgtgttttctccagagtcacttggaggggaaaggcagcttgaaatccactctccagatgctaagcacacggtgatcctaaggagcaaggactcagccacggcccaggcatggttcagtgccatccattccaacgttaatgacctgctgacccgagtgattgctgaggtcagagagcagctggggaaaacaggcattgctgggagccgagagattaggcatcttggctggcttgcagaaaaggtgccaggggagagcaagaaacagtggaaaccagccctggttgtgctgactgagaaagaccttttaatctatgacagcatgccacggaggaaggaagcctggttcagcccagttcacacataccctcttcttgccaccagtcctcatccgtgaacattatcttcagattctgagacattcccgcaacagaaaccaaagaaagattagaccacagtcactggattccagttactaagaagcaaagttggacccaagcatcttgaaatgattctcagaaacaaaagttgaaataaggtagtttctgcaactctcaggcaacatgaaaataaaatttaccctcgt

SEQ ID NO: 551389 - DNA, 114 bp, Homo sapiens
gctcagtatatgaaatcccaacataactgtggcatacttgtgcaggtgttatcttctccgcttagaatgattcctctggccgggcgcagtgggctcatgcctataatcccagca

SEQ ID NO: 551390 - DNA, 339 bp, Homo sapiens
cttaataacaaccctaaaaacacccacatatgcttttcgatggaaccggagagggggacgctaaagttcttatggaaaactacacactcaatagctaggaaaacacagggaaagaatagttctgagcagagcctattcttagccaatattaaaacatactatgaagcctctgatacttaaacagcatggcgctggtatgtaaatagaccaatgcagttaggtggctctttccaagactctgctgaaaaaagtagtaaaaagctaaatgcaatcaatcagcaattgaaagctaagtgagagagccagagggcctccttggaggtaaaagagatttgcatt

SEQ ID NO: 551391 - DNA, 394 bp, Homo sapiens
ggcctattgggggggaaaaaaccccctttaaaaaacaccccctttttttggggggggggggcccccccccctccggcgagaaaaaaaaccccccttttttttccccacctttttttttttttttttgggggagctttttttttaaaaaaaaaaaccccccccttttttaaaacccccctttttttttccccccggaaaaaactcccccccgggggtaaaaggggggtcccccccttttttttaaaaaaaaaccccccaaaaaaaggggcggggttcccctttttggggttttcccggggcggggtgcgcttttccccccgggaaaaaggccgggccccccttgttaagaatcccttttaaagaactttaggggaatccacccgcggattctcaa

SEQ ID NO: 551392 - DNA, 160 bp, Homo sapiens
agacacttggtcaagcatggaaacagggtaaaactagttatggcagtagtatgcacagcagtgttagccatttaatattgtatgttatatagcacgtgatgatgatcccatctgacctgtgagcatgccatttgaactctttgcgaggatgagctgccgt

SEQ ID NO: 551393 - DNA, 308 bp, Homo sapiens
cgtcggatgtgttcatttattatgatttattgctagctaggtctgccactctctggtgctagcggtgggagttggtgacgaagacttagtgaatctagatcatctcggaaggatcgaaagggtgctcgtagaggcatgcagctattttaacgtgtggactatgaacttgcgatggtggtcgcagtgcctatgatgttgagcacgaatgaaggagcacactctctgttcgatcaccgaacagtgtggctagagtatacggataagatatttagagaaaggccgcgggctgtgactgtgaagcgatctcg

SEQ ID NO: 551394 - DNA, 123 bp, Homo sapiens
agagaccaataagcgaccctcgcaagggtgaaactgcaggtagaccacgcaacgcaaaaatctaaagggtacttagccaaagacgtacaggcaagtatgtgactatataggtggtgcagcggc

SEQ ID NO: 551395 - DNA, 355 bp, Homo sapiens
tggtacgaggttgggacagtgtcagtgtgctccagctttggtgatagtgtaaggttctgtttcaataattaaaaaaaaaaaaaaaaaaaaggtcagggtgttgggattgcaggtgtgagccattgggccttgcttgtattttttattagccacaaatccagcaacaagctgaggatttagctcataaaacaggcttggtgttttggtgatctcacataaccaagatgttaccccgtggggaaccacatccccttggatgccctccagccttggtttgggcggaggttgcagtgggccgggacagtgccagtgcgctccagcctcggtgacagcgcaaggctccgtctcaataatt

SEQ ID NO: 551396 - DNA, 842 bp, Homo sapiens
cctgggaggctgaggtaggagaattgcttgaacctgggagctggaggttccagtgagccgagatcgcaccactgcactccagcctaggcaacagagtgagaccccatctcaaaaaaaagaaaagatggaatctatctcaatcagagaacaggtgaactagccctcctaaccgggaccatgcacaagacaagaaattctagcgctttttttccccttccagggtgcaatgtgaggacttaagccgacactggtattctggcctccaaatgattacacagttttggccccggctcatctatctggaggagtacgggttctttccactacggtattgccacatgttctagtagaaagggatgctttcaaacggggtccagcaccttaggaatctggtctactcagataggatctggaagatctacagggtttttacacttcgagcttcacaatgccattctgagaaggatctgtcgccaaagaagcctttaattagccccaccttgtctgcagaagctagagttcattatcacaaccttacttctccatttcagtattagcgtcacaaatctttaacaatctagggcatggccaactaaattaacttggattctggttacccttctcctgatgacaaattccatcaagcttaattaggaaaatgtcgcatctgggtattatcactgtgtgggcatctcatcggcagcatctgactggcggctttgaaccggggtaaattgtgatttcatcgaaccttaccaaaacgccggtggtcccacaagagagttcctgacaggtggacttcctgagaatcagcccggctgaaaaaggtagaaaccagaaag

SEQ ID NO: 551397 - DNA, 562 bp, Homo sapiens
ggggagagtcaatgctgcgccttcgactgaaacatccaggtactcacattgggactaaccaaggaaacaacttgacccagggagaatgaagaaaagaaaggcaaaatgacagcccacctgggagtaccacagagccagtggaacctccctcacccagggaagcagtgagtgaatgtgtgaccctggaaacccatgctttttccatggatctttgcaatccttgggttgggagatcttctcatgaacccactttaccagggccttcagtctgatggagctatgtggaatcttggcacagcagccactcaggcacacatggagacctgggagccttaggtacctgggctttcctgcagaagtagctgcaactctggcaaagtgggaggttagaccctcatacatattcctagggaagaggctgaattcagggagctgagcagcaacagcctgcaggctccacttccacagaacctcacaggataagagccactggcttggaattctagccagccaccagcaacactgttgagactccctgagatgaagctcctgagggaaggag

SEQ ID NO: 551398 - DNA, 1563 bp, Homo sapiens
  misc_feature (230)..(231): n is a, c, g, or t
  misc_feature (234)..(236): n is a, c, g, or t
  misc_feature (241)..(241): n is a, c, g, or t
  misc_feature (253)..(253): n is a, c, g, or t
  misc_feature (261)..(261): n is a, c, g, or t
  misc_feature (265)..(266): n is a, c, g, or t
  misc_feature (271)..(271): n is a, c, g, or t
  misc_feature (552)..(552): n is a, c, g, or t
  misc_feature (554)..(554): n is a, c, g, or t
  misc_feature (577)..(577): n is a, c, g, or t
  misc_feature (594)..(594): n is a, c, g, or t
  misc_feature (740)..(740): n is a, c, g, or t
  misc_feature (742)..(743): n is a, c, g, or t
  misc_feature (747)..(747): n is a, c, g, or t
  misc_feature (758)..(758): n is a, c, g, or t
  misc_feature (776)..(776): n is a, c, g, or t
  misc_feature (783)..(783): n is a, c, g, or t
  misc_feature (785)..(787): n is a, c, g, or t
  misc_feature (799)..(800): n is a, c, g, or t
  misc_feature (810)..(810): n is a, c, g, or t
gcatcagcttcgggaacagattgttcccgtggccgagtctgtcaccgtacacttcaacctagcctgcggagtgactcgtgccgtgacccctacaccgtatgactccgggacgcacgtatggagatgacagggtacgaatgtttgaaccagatcatcttcactggtgagtcagtgatgaggcattggaagtggtcatttcaagatgtgattcatctagatggagccatgannatnnntgtgnctactgctgganagaagtgngacnntcagngagaaaatggccagatgatgagctgcacatgtcttgggaacggaaaaggagaattcaagtgtgaccctcatgaggcaacgtgttatgatgatgggaagacataccacgtaggagaacagtggcagaaggaatatctcggtgccatttgctcctgcacatgctttggaggccagcggggctggcgctgtgacaactgccgcagacctgggggtgaacccagtcccgacaggcactactggccagtcctacaaccagtattctcagagataccatcagagaananacactaatgtgaatagcccaatnagatgcttcatgccttnagatgtacaggctgacagagaagattcccgagagtaaatcatctttccaatccagaggaacaagcatgtctctctgccaagatccatctaaactggagtgatgttagcagacccagcttagagttcttctttctttcttaagcccntnngctntggaggaagtnctccagcttcagctcaantcacagntnnntccaagcatcannctgggagttnctgagggtaaactcataaatgagggctgaaacattgactgtgctagtttcgaagtatcaaaaccgatcaggtaattattacatgaagtgattctaaagatatggtcatgagaatcaataggaaaaggatatgcaaggcaaaataagaagacaatgtatacgaaatgatatgacaagaatttaggtaggaaagataacaaagattattgattcacttagtgtatgacctgacagtactgttgaaggaaacaaggatgcacctggttcatggaataatttggagatatcagggtaccaactatgtgaacataaatcatgatatatgacaaaaatattaagtagacgctgagaaactaaaataaacagatattatacgagcaatgtgtagtacaaataagtaagagtagaaaagagaaaattaagcgataaatacacaaatgaaccgccaaccgagaaacacgtacaagcagcgccacagagagaccaaaaaaggagagggaaaaatagaaagcagacagacacaagaagaagaagaatcgaagaaatgcaagagcactcaccacaccacatcgttgatgtgtttgttctctggtgatacttagactaagtaaactacaagatgaaaaaaaaactacatcaacagtaacagaactatcgcaagaaacagatacaaataacaaatagaagataacagaaataagaagctagaattacaagatgaaaacagagagaaaccaacagactaaaatctgtg

SEQ ID NO: 551399 - DNA, 124 bp, Homo sapiens
  misc_feature (7)..(7): n is a, c, g, or t
ggctagnttctccaaaagatgcaatattcagactgacgtgacccccgtgacctaaatatcaccaaagacacggatgcatagtacaccccggccttgttacataccaatgggccgtagatacacc

SEQ ID NO: 551400 - DNA, 132 bp, Homo sapiens
ggcacgaggtgtactgctccttggccaagagaggccatttcaatcgaattatctcatggcctaacagggactttctgcagtgcctctgaagaacttacgcagattcagccgattaatgctaatgtaacacgt

SEQ ID NO: 551401 - DNA, 148 bp, Homo sapiens
gtagtccagtacacatctttctgaatcagctttaccccactaatacgagattacatctttatcactggttccccaaaatggcgagtaaaaagatcaactcttcaatttgtctacaaacaaatcatggcatgccggctttcaacaagag

SEQ ID NO: 551402 - DNA, 311 bp, Homo sapiens
agcgagcaccccatctcagaaaaatttaaacttggcttggcgcagtggcttcatgcctgtaatccagcactttgggaggctgagggggatggatcatttgaggtcaggagtttgagaccagcctggccaacatggtgaaaccccatctctactaaaaatacaaaaattagccgggcatggtggtgggcacctgtaatcctagctactttggaggctgaggcgggagaatcgcttgaacccaggaggcggtggttgtagtagctaggatcatacattgcagtcagcctgacagcaaagctagactcatctca

SEQ ID NO: 551403 - DNA, 649 bp, Homo sapiens
tgggccccaggacagtgtcagatgtgaacctgctttgatggctgtgttgttcagtgtactcagtgggtgtctcacatggcccgaggacccactgtgatgcactccgccctgctaggtggcacagaacacggctggtgtgtcatcacatgcccagtgtctttatttgaaaggctggctcatatagaacccattttggccatggtctgggccatctctctgcctctgccctatcttgtgctgcctggaggtgtgcccagtgcccaagaggattctattacccctggaagagctccccaggcattcagcctatggcccttgacattttggctgcaggttaccgtcagacaaaacatctctgagacaagaaaatgattacaaaacaaaaccgcaatttgtcttagacactctaatcaatgctaacacagttcagtttcttgagggaactagttttgtcataatactacacccctctatagtctttaaaaacaacactcaacaaatcttctgcacatacgttcatatcatatctattctacatccagttatttgtctcccacttatgacccctttatgttataggtacgatataagatggcggcatcaactggtgattcgccatcacatgggtgcagcatagagtaagacactc

SEQ ID NO: 551404 - DNA, 258 bp, Homo sapiens
  misc_feature (102)..(102): n is a, c, g, or t
  misc_feature (104)..(104): n is a, c, g, or t
ctcaatgagatttatacaaagacagatagcaagtcaatcattgagtttgaagagtggacagatgtttgccaaggaagatttgaaacggaagaagcttgtacntnatgggagttggtttctgaagaatgcacgcagaaggttgaaagaggttcaagcagtttttctcactgacattttagtgttccttcaagaaaaagaccagaagtacatctttgcatcattggaccagaagtcaacagtgatttttttaaagaagct

SEQ ID NO: 551405 - DNA, 918 bp, Homo sapiens
tccccatgcaccgaaccctttattacctttttgacgcgggtcccgctataacggaagagcttgtaattccaaactttaagttggggcaaagggctatggtgcccacataatacctcctgggccgtgaatgccgtgatgaaaaattaacagccccccctcaggcgcaggaccaaggtagcagggtcagactctttctgggattgttgtagtcaaaaagagttgcggccatctcccagctgctatgcctgcaaaaatagagcctctagtagagacgggggaaatggcttcttaatctggggatctgggccttcacatttcagatagggtgtcactgggccctccacctccagagtgatggtcttgccggacagggtctccgcgaagatctgcataaccacctctcaaacgcaggagcccaggtgcgaggatcgaccccttctggattgttgtccgtcagaaagatgtcgcggccatctcccagtgtttgcctgaaaagataagcctctgtagatcgaagagggatgcctctttatcctgaatctggcgcttcacatttccgatggtgtcagtgcgctccacttccagagtgagaggcttagccgaaccaggtctccacaaagatctagataccacccttctaagaccgagaccccgagtccaggctcccctttctgatatttgagccgaacgagtcagcgctcccccagcagttctctgaaaataagccctctcgagcagagagaacgcttctaactggacctagggcccctgacccagtccgatggcccccaagggagctcccgacagtacaaatccgtttgccgtacgacacagtcccgcaccccatccccaggaaagacccaatctccgctttgtggacaaacacaacacattcccctaaagtgccttgactagcac

SEQ ID NO: 551406 - DNA, 246 bp, Homo sapiens
gtatggtgtgagtcagccatcacaacaaatcccattagtaggaaagacgaagaagtgaaaaacacaccatccttctgcttaaggcagtttcagatatgacacgctatttctgcttacaacctgatatggtttgaatatttagcccctccaaatctcatgttgaaatgtaatctccattgttagaggtgggcctagtggaggtattggatcatgaggacagatccctcgtgaatggcttagcgccat

SEQ ID NO: 551407 - DNA, 794 bp, Homo sapiens
agacgggcgtgagcctcagtggcctgggatggctcctgggccccgctgggctgtgtgtgctgtgtgtgctgggatgcctgttgggctgagtctgggatctggggactgtctgccctgatgatgcggtggacgaggatggtgtctgggctgctggtgttcgatgccctggtgtctgtggctggctgttgaacttgttctgccaactgactggcatgcttccttgtgagcttgttcaatgctggaaggattggactggagtgatgcatgctggcatgctgtgcagtgagtgatgcctgccccctgttgtcctgcatgcgaccctggaccagtctggcctgcctgcacgcttggccccgtgggatcctgaaagattgaatgtgtgcttgtccgtggcttccacacttaagcttctgttggggcaaagctgcatggacgtgcgtgtgaaacaaacttaagcccttcaagactgtggaataagtacggcccaaggaatgcaagaaacgacgggagtcgattgaccgtgtatttacacaagttaaatggttgacgccgttgggccaatgtacattggccagaagttgaaaaaatgtacaaaagctcacccagttgccggttgacgatagataaaactcgtgccctggttgaaaatgaacggccactcccccacctgcccattgcgctggaactctctgcgatggtacattaaactatttaattgcagcgagagctgggcgacagccttacctgagaggacttaaaaggcagaagggaaacgagatgcttcccgaagacgt

SEQ ID NO: 551408 - DNA, 82 bp, Homo sapiens
gcaccaaggaaggagggtgctggggggacaaccccccaccatttctaacggtatgggcccaaacttccaattccaacttccc

SEQ ID NO: 551409 - DNA, 861 bp, Homo sapiens
ttgattttacgggctataagtttggtttattaatttgatggagtttcgctctggtggtccaggctgaaatgcaatgatgcgatctgtggctcactgcaacctccgcctcccggttgttcaagtgattcttctgtctcagcctccccagtagcaggaattacaggcatgtgccaccacaacgggctaattggtatttcagtagagacggggttctccagtgtggtggccaggcgggtctcgaaattcctgacctcaggtgatccgccgcctcggcctcccaaagtgtggggataacaggcgtagagccaccaaacccagccagtgtccttttaaaaggcccttaaaaaagggggatagaggtaactacaggctgtgacccagttgctattgggttctccttcctagtggctgcaagggcttggtggatccagggtgctttgagagagccatgaggaatccatagaaggtcagtctctgaacatggctgagggcctctttgacaagtgctggggatgggacagctgtacttggtgtcgatacccagaggttttccagacacgtggtgacacagcgacgcctccagccctccagagtgcgtgccccgccaaatgcaaggtccgttagatgatgctgcccactggacacgacgtcggacaacccctagtgtggggagtcacgtgcctgaaacaaggtcctcataaatggcacccacattgccagcaatctacatctaacacgggtcttggagggaagcgggaattggaaaaactcagattccagatttcatagacaaccggtggtctaataccccaggaatcagactatgctgacgattctatcgtgaatcccttgccagcgcag

SEQ ID NO: 551410 - DNA, 329 bp, Homo sapiens
tgcttgaaaagaatctgctctctgcagttgctggaatcagtgtctgtacagacccctctgatagaagtatacgtcgcgtgttcattaaacatcctggtgacctgccactccctgagggaggtgttagaaatttgctgacaacggactaatctgttcctcctgtagcgttaccagttttggagacgtgttcttaggggcataggacatgaggttcgtctgtttgttttgggaaactgaatttcctaacgcgatggactcgctctttatctccagcattgcccgctgccttggtgtctgctttgtttatcacacagtgatgctaactttca

SEQ ID NO: 551411 - DNA, 286 bp, Homo sapiens
gcgcaccgggagtgatgactggagatggcttctttttttttacagcctcatgaacccaacctctgctatcttcacacttctcttatgcagcttcctcactgtctctcagcgcgtggatagaattgcacagagagttcggctctagtacatggattaggattgggtttcaagggaatattatggctgcgtttgatcttcgtgtcttgcatcactaaaactttcgtgcatcattcgtcatgttcacgtggcagtaggattttcaaatttccccttccacaacttttgg

SEQ ID NO: 551412 - DNA, 131 bp, Homo sapiens
ccacttatgccgtggggaaggaagtgtgagtgaaggttgagaagtgtggtttctgcgtggagcgaagggccgctgtggtgtccggatgctgggacggtgctcagtgagatctcctttcccctgtcgtttcc

SEQ ID NO: 551413 - DNA, 1154 bp, Homo sapiens
ctgtagatgagtgggtggcgactctgatgagaaaccggagagctgtcccgaaagttgcacggtcgatctaatacatatgtagaaatgaacatttgagagtgtatagtcagtgaagtgcgccgagtccaagagttattattggagaattagttatgtagtgcgtggattagttcgatcgaaattaaagtgatgtgacaatgatggatagattggggagattaaattcttcacaaagcgataggtattgcgagttggtataataacaagtaatctgtggtccctgtaaatatcatcggtttcagcagtcggtcacggatgtccagcttatcaatatgcgcgaatcagttcatggtgtgtaggaagtgaatcacagggtgatgtgtgtagggcattatgtttagcacaaatccttatagaacagtaaccttcgtcttaggtcatcacaagggggactgtatgtatggtgattcgagcatttgataggaaggcaaagggaaagtatacgaggagtacgacgttataaatccacgttgaaattcatgacaaggacaaggcgaggatcattttattgaaggttgatattagcatactgggcccactgagtcgattaaactttagtggaactaaataagttgttaactgtggtaactccatcggaaattattaagcacgaagatgtaatcccaaacctcactataattctgtactacttccaattgatcagctcaggcatatctgcaaaggagtgccttcgtacggtgtaccatgtagagacactaagttcaagattcgccgtgaccaatcactggtacttgttagaaacatcccagcagccgggccacttttgtttgcgtgggtgacttactggaatttaaatgtcacagagatagttcgacgatgttgtcacctggagccacaacactcgcgacatgggaagtgtaaccaagcgtaatcctcaggagggtcaccgccctatttcgaacgcactcttgacatccgggaccttcgcaagcacactgatgtcggaactggtcggaaaaccatcgggtagagtgcctcgcctgcaccctcacgtggcaaatctggtgggacataaaagaagtcatgctgcacgggcgcctgttcatctggctcagatcctgtagccaatggac

SEQ ID NO: 551414 - DNA, 351 bp, Homo sapiens
acggcagtatgtcgtaaatggcagatttatgccgaggctcgtccagggaaatcatagacacgggttgtctttaccattctataagcgtatctgaacaaaccaggtggactcacggatttagaatctattgatcgagaattttacaattctctcatcggggttaaggaaaacgaatatggaggaatgtggttaggaaatgtacttctccgtgtgacaaagaaattctaggtgaaattaagagtcatgatctggaaacgctaatggtggcaatattcttgtaacagaagaacataaagaggaatacatcagcaatgggagcggtggcagcaatgatgcgggtaacaggggacg

SEQ ID NO: 551415 - DNA, 414 bp, Homo sapiens
tactgtgtgtatccccaacactaataatcatcaggaaaatgcaaatcacaacagaatgagatatcatcttagcccagttagaatgaccattactaaaaagataaaaaataatagatgctgttgaggatgtagagaacaggaaattttttttttttttttttttggaggcgaattctcactctgtggcccatgcggaattgcagggcattaatctcagcccactgcaaccttctgtttccccatttcaagcaatttcctctgttttcagcctcctccagttagctgggatttccaggcattgtcgccacaaccccgtgcttaattttggttatttttagttaaagcacgtgtttcctccatgttgggctcaggcttggctcatcaaacctccgcgaccctcaggttgactccgcc

SEQ ID NO: 551416 - DNA, 1002 bp, Homo sapiens
ttctagatcgcgagcggcccctttatattgtcttcatgttacactggtgcatttatttacaaagaggttagaaaaacacacagaatcttggccccccttgtgcacgggggagtcaccatcgtcataataactacagtaatttaaaaaagaaaaaaaatactagatgggaacagctgagggtcatcaggcttcccccattccctctcacagggagtgggggctcatgagataggaaaccatcttccttcccctcttctacctccgaatcctccaataagtggtccagggtactcgaacgttgaaagagtccgttctttccacgggtggttacacaaccgcctatttgtgacccttcaaaaccccacaaattcaggtgctcccttccgcttcccaggggcactcgtgcgagggacccaccgtgagctcagaaccacagaagtcctcgtgaccaggggtgccaaggggcgatatctataacgggctccagggcacctgcgagggggccacttgtgcgcaatgcaacagggggccaataccgtgggcacaggcaacggacggacttgccacgggcctccctcaccggcacatgaccacgtggatcacgcgcgtgcgatggtggcaacacacacacacactcaggctccataacacctacaacgacgggggaaacttcaaacccgacattacccccttttggccatcacccgtgcgcacactacaacgggtaccacgaaatgcagcgaacagctgcaccgccccccacacacagcgggcggaccacgtgtcttcgtagtgcccccgcaaagagtgacctctccccaacgctgcttaagataatctcgtgaaaacccgtggagcgctcacacatcaccagggagctgtcccttccccccgattactccctcctactggtatactatgtcgatgtgtggagcagcagccctttttgtcccacacgccgcagcgacattaggttaagagcgaacttgtggtcacacacaa

SEQ ID NO: 551417 - DNA, 177 bp, Homo sapiens
ctaaactgactttcccctgtctaacgctttggtttccccgtatggcatgttttctgagcgttcctactttaaagcatggagcatgcagagtatttgggaagtgataggacatcgacctgacgataacgagccgtgttatcagaggcaatcatctgtcgcgacgagagttacttcgga

SEQ ID NO: 551418 - DNA, 1459 bp, Homo sapiens
  misc_feature (153)..(153): n is a, c, g, or t
  misc_feature (575)..(575): n is a, c, g, or t
cttcctttcgtcgggggatggtcacttgttctggggcgtggtgcgactccttctccgccacggccttgggggtggtttatttttggtgggggccgcctgtgtgtgccccgtggtgatgctcgcccactgtggtcgccctttgtatgtgccgcnccctgtttgtgtggtcgccgcggggggggatgacgaccagagcccgcccccccgttgtcgtccccgacgcaggggagagtggtgcgtcgttgattgggggggacgacttatattataatgtgcgcggttgcttgaggagagcctttgtcccctcgtcctcgctcgtgttagcacaacgaaggtggaggtgaatctcttgtgggggagagaaagggccttttccttttgggaggggcggcacaacccgtggtggtgggggctcgtcaataaaaggggggggcgctagtgttgctacccagaggaggccgcgcctattgtggggggcgcccgtgggtgcgcccacgacaatggtgttcgacaaccccaccacggtcctggcggcgcacaagagatttgtgaggagtggagaccacaatgatggnctccaccagcttgggtgtgcggcgccctcccccactggtgcgcgtggcccccccgccttgggtgtctctcggcccaccaggggtgtgaaatatgcccccagcgccccacggagcgtctgtgggggtcgctccacagagtgtgaggcgtcattatgttgggcgccgcacccgtgggcggcacacacgcacacgctggggcgcacttggcgagagtgtgatatcacgtcggctgttatatatagcgcgccctctgtgtggggtgcttctctctctctcgagtttcgcgtgccacctcggcgcggctgagagttctctctcgagatagagagccctctgtgcgcctcgcgctctgagagagagagacccacaggtgtaggtctctctgcgcacatgtgtgcggtgagaaaagtaatttgggcccgagatctctccaccggcctcacagggttcttgtgctctcacagggtggcacagggtccaccgcccgggaaaggtggggatttgcacatctccccacaaagtattcccctcccttttctgagaatcccttcacgagaacacatccaaggtgttgttgagacttctacccctttatagcccacagagaagagagagatgaaagcacacgcttaagtgccccctgagccccaaaattggagagaataatatattgggccctaatgcttactccgggggagatgggaaagaagaggtctcccacagggagatccacagggccatccctcttggatccccctttaagtgagcccctatctgaggagcccccgcgtttttggcctcccttcccagctctcccagctaatgaggtcccgcccccaccgaaaaagaggagattaaattaacccccttggagccatcccatt

SEQ ID NO: 551419 - DNA, 140 bp, Homo sapiens
  misc_feature (7)..(7): n is a, c, g, or t
  misc_feature (61)..(61): n is a, c, g, or t
aagctgntcccattgggtgtgaggagttcagttatatgtttgggattttttaggtagtggngttactattagtatgctgggttaattggtggtgctaaaactattctgtatcccaactgcgatagatactacacaaatct

SEQ ID NO: 551420 - DNA, 253 bp, Homo sapiens
gcgtggctcagtgatcctccttcttcaccctcccccaccatgctcggtaatttttaaaattttagcagaaatgaggtcttgctgttttccaggctcgtctcaaactcccaatctcatgcaatcctctctgcctcagccttcccattagctgggattacaggcatgcgccaccaggcccagctaatttttgtgctgttagtagagacggggttccaccaatcttgggccaggctgggtccttgaaattccttga

SEQ ID NO: 551421 - DNA, 151 bp, Homo sapiens
ttcttaggatttccaggcaacgctctacagctctaaaatgctaccctcaagttacttggcatgaacatttcatagccctagaaggatgttggctcatttctgtgtcatcctggtttattctttattgtattattccgccagtcattttaac

SEQ ID NO: 551422 - DNA, 158 bp, Homo sapiens
cgggaggagggaagatgatggcagggaaagagcatcgtataggctaggggattgacacgtggactgattccgtgtaaataaaaataaattaacaggtagtagttccggtcagttctgttggaagcagcccactccctcacttttactccttcctccaa

SEQ ID NO: 551423 - DNA, 137 bp, Homo sapiens
gcctagaggatgcctctccctactcaacagtatttatatccatgtggttagttactcagttatgtgagaagaatcggagctaaaagcagagatgttggaggtgacggtaggaaggtgagtaggatacagtagggaga

SEQ ID NO: 551424 - DNA, 257 bp, Homo sapiens
agcccaggcttaataatagaatgtcatagattatttggccttataccaaaacatttattttttgatgttctgaagaatgggatgatgaacaacaaggtgtcagtagacattgtacataatcagtttgctacttcctgactagtaggtaactgccattgtacatggcctttcccgtttgaatatgcatgtaaagaaaaagcctcttgtcccttttcttcttacaattgcacatatcccattgtaaaaggcttgccctc

SEQ ID NO: 551425 - DNA, 258 bp, Homo sapiens
tctcttgagacagggtttcaccttgttgcccatgctggagtgcagtgtgtgtgatcatgacttactgcactcttaacctcccgggttcaagagatctcccacctcagcctcccaagtagctgaaactacaagcacgtgcctgtaatcttagcactttgggattataggtgtgcgccactgtgcccagccctgctatttccatgttttatttcagggagggcttgcattacaattggttgtcttctagaggcatgctgt

SEQ ID NO: 551426 - DNA, 297 bp, Homo sapiens
tccactagtgtacgctgagcaagaggtgttgaggttgatcggggtttatcgactacagaacaggctcctctagagacatatgaagctccgccaggtcctttgagtcttaagctgagactcgtagtgttctgacaagcagttttgttgatataactgttgaggatcaggtctaagcatagtgtgctatctaaacacagattggctcttagctattgcgcgttcgaatatgctaaagccactatcgtagtctatatcgtgcaacgtgagtttttacaactcaagcgagaccaagtttta

SEQ ID NO: 551427 - DNA, 156 bp, Homo sapiens
atcactgcctcaggctcctaaggtgctgggattgcagtgtgtgagccaccacgtctggccatactgcagcactttaaaggactggtgtctttttcttggacagctgagttctcatcaaacggtcggggctgtggatacacttggagagggctggac

SEQ ID NO: 551428 - DNA, 371 bp, Homo sapiens
atgtgtttctacaccaaagattccaatgacagacctgaatgctcagaatgtaaaaatatttgtgcaaaactgcattaattgttcttaccatctaataggggtaaatcttaagatctcaaccaccatggattattctatttctaaccattgaaaaaaaaaaacgtggcaccttgagagcagcaggaccaccaaatgttttgccaattccagctaaagaaagctgacactggaatatgccaaagttactctccacagtaggcatccctctgaaaagtctggacacatctgtagggcttcacactcaccacagtgtctatactcttgaatgcgcgggtcatatatgatatatttaagaatgtcttttcctcgtg

SEQ ID NO: 551429 - DNA, 1015 bp, Homo sapiens
aacttcatctataagaaacaccgtgggctgggcgcagtggctcacgcctgtaatcccagcactttgggaggctgaggcaggtggatcacctgaggtcgggagttcgaggccagcctgaccaacatggagaaaccccatctctactgaaaaaaaaaaaaaatacgaaaaagatttaccggtgtgtggtgcccgcctgtaattcccagccacttggggaggctgaggcgggagttatcgctggaccctgggaggtggaggttgcggtgagctgagatcatgccatgtgcactccagccggggcaacaagagtgaacctccttctcaaaaaaaaaaaaaaaagggcggggttgggggggcccccccttgttttccccagcctttggggagcccgaggcgggggaccccggggctcagggaagactcaacgaccccctccgtgcgtttacccgcggggtgaaccctctacttctcttatcacttatatttcccacaaaattttcgcgcccgggcggttgggtgcgcaggcggccgccttgttaaccccacgccatttggggacaggcttgggcgcgaggaaaatgggtattgaccctgggcagggtggggccttggcctgtggacgccggaatatgggccccattgtcctcccgaagcctggggtggccacgacggcgagaccccttctcaagaagaggggaggacagcgaacccccccgggaaatttagtggcgtgccagtgggcccccttcgcgttagagctttaaggctgtgtccccccttgaaaccccgggggacggtgtctggaattaggacccctccgggaattgggcaatgtggtttcccagttttcccttaacccccctttattttacccttttggccttccggcacagtgctggtcccctttggacaagagccccgggggactctcgcaagcataaggcctcacgcggaggacttggccacgggagcctttggcagagtaccacccgcatccctcgggatgtggtcaccc

SEQ ID NO: 551430 - DNA, 300 bp, Homo sapiens
ctaaggacgggactctggggtgtgtcgcccccaggagacgcggggctcgtaggcaggtgccgttggcgacgtcgctgggacgacatggcaccacctggtgaacgggactgtcggggcttgacgggacctggggacccccggggagcccggtgtgggagacccaggcaggggacgtacgctgggcttgaagccgctggcatctgacgcagcacttgggaacgacgacgccggatgccctgggggtcattccactcccaacactgggtgaccaggcgccatacggcaaggggtttgcaccct

SEQ ID NO: 551431 - DNA, 289 bp, Homo sapiens
ctacaggccccagtgagatgaacctggtatttcagttggaaatgcagaaatcacccgtcttttgcgtcgctcacgctgggagctgtagactggagctgttcctattcggccatcttccgctttaagttttttataatctttttgggaaggaaaggccatgtgaaaacatggcgagaagacagtcatttgcaacccaaggagagagacttcaccagacactgaccctgctggccccttgattttggacttccagtgttcagaactataagaaataaattcctgttatgta

SEQ ID NO: 551432 - DNA, 366 bp, Homo sapiens
caggaacatcagcctcgcagcactatctgggagacaccgaccggaggatcacctgaggacaagcgtttgagaccagcctggacaacatgctgaagccctatctctactaaaaatacaaaaactagcccggcttggaggagcttgccagtccctgaagttaaaacaataaactgagtttattggaaatgaaaactttttcctttgtttctggctaaataactggtttctagagcttgataccccagacactgactgaaattgagtgaatgagtatattggtcacaaatggtagtttgtgagtccttgagcctggtgtgtagcgactgatttgatgactgttctccagttccctgtcctgaaggtgtt

SEQ ID NO: 551433 - DNA, 118 bp, Homo sapiens
gatataatgctactccctaggtcaccacttgtctccttattctcaaatctttcttctgtttctcattctttcattctgtctctttcattcataatcatttcatacgtgctaggcgcga

SEQ ID NO: 551434 - DNA, 955 bp, Homo sapiens
cgtggcgcccgagtgctactgaagatgggggatgctgtaggagggttgctccagtggcgtgcggtatgcccgagcatgtgagtgccattccttggggcattgctggcactgcaggccctcagggcctgctgcatgtggaacgaagcgaactcgttgaccaagagtatgtatagtggtactctgggttcctagatgcgaggtgtcccatgatttatcaccagcaaacagtttccctcgatgcccatggtgatccatggcttgtcaggccagcaatgcgaccctaattgttaagggggtagcagccgtccgtccatatgggcggagtatcataggacctaagaccaatgtatgaactcttaaggggtaacagttattcggtgctttcgttctatgcctttgggatggtgcaccttttgtgtgtgctaccgcagaattgttcgtctctgtagtggacaaaagactgacggattgcatgatgtgaatctggttgaagatgtcgcagtgctcagagggatttgccaactttggggccatgctcgtgctggatcaaatgacatccaaggaaggaatggtggttatgggggccacatgacacatgggcgctctgtgtccaggacttcaactaagcaggtttcgcggagacaacggtgtgctcgtgagaaggtcctgggctgcactaagaggtctcttcataaatgacgcaaggagtcctcagcattgggcgtcaaggagctcccagtggggcgacgtggaagaaagctcgtcggggactggggctgctgtgcaccttggaagcgccaggaaggacacggattctagaaagaagtcactgtccgagcccagaaggaacaaatccgggttgccttcaggaagcccgggacgctcatccaggtgccgggaacgggcacagcaacaggggggaacagggcacaacagcaggggaacacaaaaacga

SEQ ID NO: 551435 - DNA, 106 bp, Homo sapiens
ttgtgtgttgatctagaggatcccagtgggaacaatcacttgaacaatcactgacaatcacttgaacaatcacttgaacaatcacttaatgtgattgttccctgtt

SEQ ID NO: 551436 - DNA, 153 bp, Homo sapiens
tgagtacgtcgtggagtcactggcgactacaccaccatgagaagactggggctcatttgcagggggagcaaaagggtcatcatctctgacactctgctgatgccccatgtccgaatgggtgtgacatgagaaggttgacacggctcaggtcat

SEQ ID NO: 551437 - DNA, 432 bp, Homo sapiens
cacacacacacagcagcacacacacacacacattttatttcctattcctgtgtgaaaatttttcctaacataactcacagaacaagttcattatggacttctttacccagctactgtctgtctccccaggcagagtcaacccacaaggttgattttgctcaccctggtgttcccaaggcctggtacaaagtagatcctcagaaaatatttgttaaatgaataattaaatgacttctcactgtaagcaattggcaccacttaggctagcactcaagcaccttctatcctcttgaccataccacaaagttaaccagttacacgatcagaacacctcttcttcatttgttccttcttatgatgttcagtagagagaggctcagaagagcactgcagggtgaggctggagctaggagtttggaacacaggtgcagg

SEQ ID NO: 551438 - DNA, 246 bp, Homo sapiens
tagaggatccctcagcagcatggaggttggtccatgaatagaacgggcaaacccttcccaggtctgtgaatcagccatgtctaaccccttctcgccaacccgaaacatgacgagtcccataggctgactttcctgcacctccatcttactctgcagtcactcctccccctgaggccttctcgagaggggtttcaagtccgatagctggcccagcacagccccctccagggccccagccggcccctt

SEQ ID NO: 551439 - DNA, 527 bp, Homo sapiens
  misc_feature (7)..(7): n is a, c, g, or t
  misc_feature (28)..(28): n is a, c, g, or t
  misc_feature (72)..(72): n is a, c, g, or t
  misc_feature (108)..(108): n is a, c, g, or t
  misc_feature (114)..(114): n is a, c, g, or t
  misc_feature (124)..(124): n is a, c, g, or t
  misc_feature (221)..(221): n is a, c, g, or t
  misc_feature (233)..(233): n is a, c, g, or t
  misc_feature (326)..(326): n is a, c, g, or t
  misc_feature (419)..(419): n is a, c, g, or t
  misc_feature (504)..(504): n is a, c, g, or t
agggttnaatgtgcccatgaaggtaagnagcccaattgattgcaagaaccctgcaattgccaccactggtgnaaattgtaagcatggaaattggaaaccctgctcccnacctgnaccctggccnacagggtacaaagtgcacacaggaatgcagcagctcgacttctgctggtacccccaacccccacccaaggcataaagcacccctgcgcgctggccanaggtgccagaanacgtgagtgagcacagatcctgctgccaccgccccaaagaagcactttgtctggcaccacccatcagagggttgtggctaatggaccaggaanaccttggaccctctgatgcagcaggttcccaatctcacggggccagataacaaagctggggtcctggtaccaactccccagacttagagtccnccaggagtgctgagctgagccgtggcccctaaaatcttccagaaatgaacccagtcaactgaacctaccttataccgcaatgaanacccccaagggcagcaaaaaaaa

SEQ ID NO: 551440 - DNA, 359 bp, Homo sapiens
ggatcgaccttttggcccagcaactccatttttaagggtttctcctagagaatatttacccaagttagctgggtgctgtggctcatacctgtaatcccagcactttgggaagccaaggagggcagatcacttgaagtcaggagttccagaccagcctggccaacatggtgaaactctgtctctactaaaaatacaaaaattagccaggtgtggtggcacatgcctgtaatcccagctactcaggaagctaaggtgcaagaaccaggagacagaggttgcagtgagccaagatcacgccactatactccagcctgggtgacagagcaagattctgtctcaataagacaaaaagtcgacgc

SEQ ID NO: 551441 - DNA, 121 bp, Homo sapiens
gtggaggttggcggcccgggagctcgaaggctagcaaaccgagcgatcatagtcgtacgaaacaaatttcttattgtggcaaatacgacgatgaggagtttgagtatctgccatagtaatg

SEQ ID NO: 551442 - DNA, 206 bp, Homo sapiens
ttttttttttattttattgggcttgacccaggattaaaaaactggaacggtgaaggtgaaagcagtcggttggagcgagcaccccccaaagttcaaaatggggccggggactttgattgcacattgttgtttttttaaaagtcatcccaaaaaggggaggggttgttaaaggaagtcccttgccatcctaaaagccaccccacttc

SEQ ID NO: 551443 - DNA, 737 bp, Homo sapiens
  misc_feature (303)..(303): n is a, c, g, or t
ggaacctgtctttacccagaggctagcatgagcaaatggaaccagtgtatcgtacgtgcgggcaggcgagccggggtgtcgtgggcgcgctttgcaagggaacgtgttctgcgctcagcagggaggggagcccaccgtagagagtcacagacgaattcagcctcaggaccccgagatggaaggatggggatcacagtcgatccggaagaacgatgagcagctcacgtggtggttttaaacaaagggagacctgtccagttgaagaacgtcatggaaaagacttaaagcagaacataaaggctngcaatagcagatgaagaagcaattcggcagccgatggaagaatcatatatcgaaaaccagtcgagcatccctcagatgaagaaatatgcaggtttaacagcgaagctcaagaatgaagaagccaaatgagagatgaagtgagatcaggactcggtcaagaagaatctcacaaaaagtgattagaaatagtagcctccttgctttgtgacaagcgaagatgacaacatgagtaagtgtaaactctttgtgaatttagtcatagttgtgaacagtgatatggaggtgtgcattagggatcacaatttgggtcctatttataaagatactaacaaggttcttaatagaaagtttcaggacataggagaaaaaaaatttaataagatagatctattcatacaagtacccgtctgagttaagatgcgaatctattgaaa

SEQ ID NO: 551444 - DNA, 906 bp, Homo sapiens
  misc_feature (426)..(426): n is a, c, g, or t
  misc_feature (430)..(430): n is a, c, g, or t
  misc_feature (447)..(449): n is a, c, g, or t
  misc_feature (469)..(469): n is a, c, g, or t
  misc_feature (527)..(527): n is a, c, g, or t
  misc_feature (535)..(535): n is a, c, g, or t
  misc_feature (543)..(544): n is a, c, g, or t
  misc_feature (550)..(550): n is a, c, g, or t
  misc_feature (566)..(566): n is a, c, g, or t
  misc_feature (569)..(569): n is a, c, g, or t
  misc_feature (575)..(575): n is a, c, g, or t
  misc_feature (615)..(615): n is a, c, g, or t
  misc_feature (631)..(631): n is a, c, g, or t
  misc_feature (633)..(634): n is a, c, g, or t
  misc_feature (654)..(654): n is a, c, g, or t
  misc_feature (667)..(667): n is a, c, g, or t
cccctagcaagcccctgcacgtcatcaagggtcacagtaaatcgatccagtgtctgacggtgcataaaaacggcggcaagtcctacatttactctgggagccacgacggacacattaattactgggattctagagacgggggagaacgactccttcgctgggaaaggccacacgaaccaggtgtccaggatgaccgtggatgagtcggggcagctcatcagctgcagcatggacgacaccgtgcggtacaccagtcctcatgctgcgggactactagcggacaaggagttgtgaaactggacgttcagccaaagtgcgtagccgtcggccccgggggatacgccgtggtcgtgtgcattggacagattgtcctgctgaaggatcagaggaagtgcttcagcatcgacaaccccggctacgagcccngaanttgtggcagtgcacccnnngcggggacacggttggcaanttgggggtgtggacggcaacgtccgcctgtattccatcctgggcaccacgctgaaggntgagggcnagctcctnnaggccnagggccccgtgaccgnacngttggnccttactcccacgacggcgccttcctcgcggtgtgcgacnccagcaggtggtcacngnngttccgcgttgctgacggcntactcggagaacnatgtttttatggacaccatgcaaatcgtctgctggcctggtccccagacaatgaacactttgcctccggtggcatggacatgatggtgtatgtttggaccctgtagtgacccggaaaccagagtcaagatccaagatgcacaccggctgcaccatgtcagacagcctggcctggctggacgagcacacgctggtcacgacctcccatgatgcctctgtcaaggagtggacaatcactac

SEQ ID NO: 551445 - DNA, 966 bp, Homo sapiens
attacagcttccttatgtacgactgagtgggtcaaggtggtgcctaattatcctaatttgtatctttcagtgtttaagttagcaccgtagtgtttatatctactgtcaaatttccatcagggcccagctgcgattcgtgcgtatattgccctgtgcttaatgatgttgctcgtatgttgctcggctttgtaatgacgtactggtgtgacagtacgtggttcaatcatcttgaggatgtaatgtcttggggtagctctttccatcctcatacttgaatgtgttttgtactagttcatagtgtttggaacagtatatgcctatcactgagactgcatcagagctcttggctattgttgtatgtttcattgccagagaaggcttagtggttgttgactgtagtatgagtcagctttgctgtagcataagattcgattttcccatacttacttcacttgttatacatcactgattatttggcgttaaactggactcatttcaagcagtttgctgtttgttcggaatcgtgtatgagaaacctaatactgtaatttgatttgagccatgaataacacattttaatagttagcttgtattatagttagttaagctcgtttttgctggaatagaaaccttactaaagacctaggtaagctctagattaggcccagtctcaggtgtatgtttgtactctgtagtaactggattcactactcgtgataagaactagagtataacgttgcggaagatgatacttgatttatggcgtgtgtctgttgagggaagagggtcatgtagtcttagaaacttacaatcttttggttattgtgttcacagtcatagtattcaagcatcattcatagtttggtttggagaacttttctggtattacgtttatggcaaatgtataaaagaaacaagttattggttatatttttatatttgtaaagtacagtcttggttaaagtt

SEQ ID NO: 551446 - DNA, 439 bp, Homo sapiens
tcccccgcgcgcacagattgtacctaccttctacccgacctgccctgcctctcagttggtatcttcactagagaattaaagcacggaagatcacctaatgttctctaaatgtacacttggtagcccatagatcgcaaaagtatcacaaagctaatatgtatagtcaaagatccaacatgataactatggagacggcttacgcacttagacaaatctgaggtaggtgataactgtcctgaattcagctgaacacaaagatatgaccatctttaagaatcccagtggagtccataaacccaaagggcatatttaagattatacctgataagacaatataagggaaatgtgatgaacacgaacttaaacatctgcaattaacttacttaacgtggcaccttagttcaaaatgaacaaaacaagtcgactatttaacataatg

SEQ ID NO: 551447 - DNA, 1390 bp, Homo sapiens
  misc_feature (5)..(5): n is a, c, g, or t
  misc_feature (10)..(10): n is a, c, g, or t
  misc_feature (1112)..(1112): n is a, c, g, or t
  misc_feature (1137)..(1138): n is a, c, g, or t
  misc_feature (1166)..(1166): n is a, c, g, or t
gagcngctgngggtctttccctcactcgtcctccgcgcgtcgccgctcttcggttctgctctgtccgccgccatggcccaagctgacatcgcgctgatcggattggccgtcatgggccagaacttaattctgaacatgaatgaccacggctttgtggtctgtgcttttaataggactgtctccaaagttgacgatttcttggccaatgaggcaaagggaaccaaagtggtgggtgcccagtccctgaaagagatggtctccaagctgaagaagccccggcggatcatcctcctggtgaaggctgggcaagctgtggatgatttcatcgagaaattggtaccattgttggatactggtgacatcatcattgacggaggaaattctgaatatagggacaccacaagacggtgccgagacctcaaggccaagggaattttatttgtggggagcggagtcagtggtggagaggaaggggcccggtatggcccatcgctcatgccaggagggaacaaagaagcgtggcccacatcaagaccatcttccaaggcattgctgcaaaagtgggaactggagaaccctgctgtgactgggtgggagatgagggagcaggccacttcgtgaagatggtgcacaacgggatagagtatggggacatgcagctgatctgtgaggcataccacctgatgaaagacgtgctgggcatggcgcaggacgagatggcccaggcctttgaggattggaataagacagagctagactcattcctgattgaaatcacagccaatattctcaagttccaagataccgatggcaaacacctgctgccaaagatcagggacagcgcggggcagaagggcacagggaagtggaccggcaatctccgccctggaatacggcgtacccgtacacctcattggagaagctgtctttgctcggtgcttatcatcttctgagaggatgagagaattcaagctagcaagaaagctgagcggtccccagaagttccagttggatggtgataagaaatcattcctggaggacattcggaaggcactctacgcttccaagatcatctcttacgctcaaggctttatgctgctaaggcaggcagncaccgagtttggctggactctcaannatggtggcatcgccctgatgtggagagngggctgcatcattagaagtgtattcctaggaaagatacaggacgcatatgatcgaaagccggaacttcagagactcctactggacgacttctttaagtcagctgttgaacactgccaggactcctggcggcgaggcagtcagcactggggtccaggctggcattcccatgacctggtatcagcactggccctctccttctatgacgggtacagacctgagatgc

SEQ ID NO: 551448 - DNA, 1324 bp, Homo sapiens
  misc_feature (5)..(5): n is a, c, g, or t
  misc_feature (10)..(10): n is a, c, g, or t
  misc_feature (1046)..(1046): n is a, c, g, or t
  misc_feature (1071)..(1072): n is a, c, g, or t
  misc_feature (1100)..(1100): n is a, c, g, or t
gagcngctgngggtctttccctcactcgtcctccgcgcgtcgccgctcttcggttctgctctgtccgccgccatggcccaagctgacatcgcgctgatcggattggccgtcatgggccagaacttaattctgaacatgaatgaccacggctttgtggtctgtgcttttaataggactgtctccaaagttgacgatttcttggccaatgaggcaaagggaaccaaagtggtgggtgcccagtccctgaaagagatggtctccaagctgaagaagccccggcggatcatcctcctggtgaaggctgggcaagctgtggatgatttcatcgagaaattgagacggtgccgagacctcaaggccaagggaattttatttgtggggagcggagtcagtggtggagaggaaggggcccggtatggcccatcgctcatgccaggagggaacaaagaagcgtggcccacatcaagaccatcttccaaggcattgctgcaaaagtgggaactggagaaccctgctgtgactgggtgggagatgagggagcaggccacttcgtgaagatggtgcacaacgggatagagtatggggacatgcagctgatctgtgaggcataccacctgatgaaagacgtgctgggcatggcgcaggacgagatggcccaggcctttgaggattggaataagacagagctagactcattcctgattgaaatcacagccaatattctcaagttccaagataccgatggcaaacacctgctgccaaagatcagggacagcgcggggcagaagggcacagggaagtggaccggcaatctccgccctggaatacggcgtacccgtacacctcattggagaagctgtctttgctcggtgcttatcatcttctgagaggatgagagaattcaagctagcaagaaagctgagcggtccccagaagttccagttggatggtgataagaaatcattcctggaggacattcggaaggcactctacgcttccaagatcatctcttacgctcaaggctttatgctgctaaggcaggcagncaccgagtttggctggactctcaannatggtggcatcgccctgatgtggagagngggctgcatcattagaagtgtattcctaggaaagatacaggacgcatatgatcgaaagccggaacttcagagactcctactggacgacttctttaagtcagctgttgaacactgccaggactcctggcggcgaggcagtcagcactggggtccaggctggcattcccatgacctggtatcagcactggccctctccttctatgacgggtacagacctgagatgc

SEQ ID NO: 551449 - DNA, 263 bp, Homo sapiens
acgacgacgtcgttccgccggtctcacaaggctgatggatcctgaagaaaacaagctcagattgccctgcgttcggtggctgcccttgggatagtaaggtcacaggattcattttacttataatgttctcctgatcccacatcagaggactttggttttggctaaaagtaaactgcaatcaaccaccacgacgacgacgtcgtcgtcgtcgtggtttaccccggcgacaacagatgtggttaatgaaaccttgacagagaatg

SEQ ID NO: 551450 - DNA, 347 bp, Homo sapiens
acagtatccccgtcactgtccagctccttccacagatggatcttccatcacttggtctgtgaacactcgaccttccaacctctggtaccacttggtgatctcctcatcattcgggctgttactgagtccatagcacagcaccttaagccacttggggatgaactgcttctcaagacgtcccatcaggcttgagacagacatcatcccctctccctgtctactcaccccttagcaactgcatccctgtgctgctcgtggtggttaatggctcgctcaccaagacccatcccgcgcttgcggcactatcttaccgaccattaatgcttccctcgatgctcacaggtctc

SEQ ID NO: 551451 - DNA, 973 bp, Homo sapiens
ccgcttaaccccttccccccgatacctccttccaagtgtgctttcaaccccaattccctgcctaccaactgcggtacaaccacacgcacctgtactaccgccgtcgttcataaatccttcttgctacacagtactctacataccgaccacgctttaattgttctcacttcaccgctaacaacgctttgcccgccaaccttgtaccttccctcttcccacgtcacacggtttttctactccgttcacgaaaccgccactttccctgctaatgtgttcctcacaggggaatatagtataacacgcacctgcaatcccatccttacgaggacacgtgcatcttgggttgctccttttgcactctctctttttcttttccgcctcgtttcgcttgaccatttcgttatcctgggaaacgtttactccacacttgtataagccaaaacctatagggacaaattgcgtcacataccttgcaactactgttaaacagaccaagattccattcacagctctatcgcctgacttgtcagatacaattacttaccctgggacattatctaacgtaaagccgtatatacgtatcagaacctattatacagtaaattgtactatggtagccaagttataaatggtaaacagtttagaaaatcagaatgatttacttcatgtccacatcatgaataaacaattaccatgtatcaaatgggtgagcgcaattaatatctagtatagtatctacataaaagaactagacagtaaatgtagacgggcatatatgagctaagaagacatttttagagcataaaatatgaagagatggaattgaacagaaaatactatatatcatgtacaaacttgtgtgttacaaaatactacaaaacaacaatacaaatagtaaatttctgaaaggtgtatggaagattaaagttaatattagtttaaaaacacttagttcaaagtcttaaagacacta

SEQ ID NO: 551452 - DNA, 2085 bp, Homo sapiens
  misc_feature (1906)..(1906): n is a, c, g, or t
  misc_feature (2085)..(2085): n is a, c, g, or t
acctggtagtgtgtggtcgtttcgttcgcatgttcggatgcttggtctggctgttgtggtgtttgtaggagtgcggttgttacttgagtgtctctgcagctgtggggctggcttgtgttgtcgttccgctcggagtgtcgttccggctgccgtgattgttgtgtggctgctgtctcctccacctgtggtgctgtgcgtgcgtgggcggcgacggcctgacgttgtgtggtggtctcgtctcctcgtgtgtgcggtgtaacacgctggtttctgctgcgatccgtgcgagtcgcctgatgcgtgtgtgcctcagcgtgggcgaggttgggccgcatcggtgttgtgcgtgtctgtgggtgtggatgacgtggtggtggccacctggtgggttggaatcgccgggggtttgcctgtcggttgttgtgcgcgcgggggtcgttcgtccgtcggcgcgtgtgggtctgaccccagtcgcggtgttgtctgctctcggctgttgtttgtgtttgcttcgactgatggttgtgctgctggcagtctctcgtgggtgtgtggtttgtgctgctcggggggggcgcagcacacaatatagttggtgggcgtcttggtgtgtcacaatgtgtgttgatgtgttctggctggtctttgggtggaggttgggtgtgcagtggggtggcgcccctcatgggaggtgtgtgatgttccccccggggtgtcgccaccctcacgtgggtgtcccacgctggtggtgtcggtggtccgcccctcccgctggttaggttgttgtgcgccccacgttgtggcgcgtgtcgtctgcgggtttgagtagcgtggtgtggcgtctcccacagggctgggctccatgcggtatggtggtggagtttcgtgtggtggtgcctggccgtgtcgtgttggcggtgacgacgcgctcgccgtggttgtgtggtgggtgtctggtccgaccgtgggttgtaggtgggtgtggctactccatgcagtccttcgtctgggtatgtgtgtgtggggtgtggtgtcagctggggctgcctctgttgttgcggtactggcgtcgctcgcgtgggtgcgtccccccagtagcgccgcaaagaggtgctgagtactgtgggcagttgttgggagaagggagggatcagttgtggtcagcaggtgtgactccccctgcatgtaggagggtggaggtggttcttctccgccgtctgagttccccacgttgtgttggtgatgttggataggaaggttgtggctaacagctgttggtggtgttccgacacgagttttgacgctcccacggagtgtgttgagcagcgagcgacaccaggatggccggcagtggttggctcctctaggggctctcttgctcccgcacccgcccggacgtggcccccccgcgtgggtgagggcctgtcgtgtggcgggcatatagatgggatacccgtcggcgcgggcccctgtgtgagtcttctcatgtcgtgttctcagagtgtccgctgtgtggtcacagtgtccccgtctgcgtgcactgtgttgtcttgtctcctgcgcgcgtgtgtggtagatgtttggtgcgtcccgtttgtggcccacgtcacgcggaaccacacgtgtgaacacacgagccacacagtgtgttaagcctatgtgaggctggaggccacgtcacgccacgcgtgatgttgagcgaccacgttgggtgtcacgtcccttaagagaatgtgtggcacagtgtaagtgagtggggcacagagtgtctcgctgttctgtctgtgtgttgttgaagatcgtgtgtctcccccccgtgtctcgcgtgcgaacacatggtaaccccacccgaagatgccacacgtgtgtgtgtgggtgccgcttctgtggtcccatatcacggtgncttgtgtctcgtcgtgagggagaccgactgggcgcaccagatattcccccctgttttgccgaccttgtccccttcaccccagatattttgggattagttaaggaaaataagcctacactgaaatagattaatatatactcgagcattaactcgggcggattagaggagggcccctccgn

SEQ ID NO: 551453 - DNA, 800 bp, Homo sapiens
attcagaatattaagaaaatgaagtaactgattttctaaaaaaaaaaaaaaaaaaaattttctactttataactccacaggctttggtcccattggcagggtttcggcacacttgtttgggggtgtcagcaggcacggtagaccttttttttcaggtaacccatctatttgctgtcgacctcttcagagatggcgataataaggggctgggcctggaggtcgcgggctatctgtgacgattggtgcccggtgtccccttctccttttttttttcttcacatctacctttgaaagaaaggttttttccccccccctttccggtagaaaccaccacctctttttggagccttccgtgctatacaacaggggagacccccccaatttgttgcttcgtgcgcgggtacacaccagagtgtgtggggggaatataaagggactacaaataagacactttatttctctctaccacaagttcaaccaaagagcggggggggaggggggaaaacaacacgagtgcgcgtgggtggagaaccaaacagtgttgtctacagagagcgcgttcttccccttctataaacagacaacgtgtgggttatctcactttcgcacctattaccacttgtgagacaccccagcggggatctggacaaaaacttattcacaggcgggtaaatgaaggacaactcttatttttctcacgcccaagattttttttataagagaagtgtcgtacagccacatagtgttgttcgaacagcactaaaaaatgtggcgcgtatataaattaaggtggcgggaaa

SEQ ID NO: 551454 - DNA, 603 bp, Homo sapiens
  misc_feature (315)..(315): n is a, c, g, or t
  misc_feature (336)..(336): n is a, c, g, or t
  misc_feature (338)..(338): n is a, c, g, or t
  misc_feature (384)..(384): n is a, c, g, or t
  misc_feature (393)..(393): n is a, c, g, or t
  misc_feature (395)..(395): n is a, c, g, or t
  misc_feature (415)..(415): n is a, c, g, or t
  misc_feature (446)..(446): n is a, c, g, or t
  misc_feature (493)..(493): n is a, c, g, or t
  misc_feature (498)..(498): n is a, c, g, or t
  misc_feature (507)..(507): n is a, c, g, or t
  misc_feature (523)..(523): n is a, c, g, or t
  misc_feature (542)..(542): n is a, c, g, or t
  misc_feature (573)..(573): n is a, c, g, or t
  misc_feature (575)..(575): n is a, c, g, or t
  misc_feature (600)..(600): n is a, c, g, or t
aatcctaccctgtgggagttgcaatacagttgtagtggaatgctttcttgtacaaacataagttttacttttcccttctcctggactctccagtcaactgacggttgggttacttctttccaaatagtacctggtagtgccccaaagccagaggtggatgccatcctttcttgagtgtcaactgacacattggcctgggaaaagattctaaactacaactaattaactagaggagagatgtccttcttagacttggaatcaacagctggttactagtaaaagaataacagtagtcattggtaacctgacaatcgnatttcacaaaaacaattctgngnaaaaaagaagcctggcacagtggttatgcccgtaatccagcacttngggaggccnangagggcggatcacctgaggncaggagttcgagaccaggctgccaacatggngaaaccccgctgtctaaaaatccaaaattacccggcatgggtaatgncccgntaattacangcgggtgcctgtaatnccagttctcgggaactgangcaggcgaatcgcttggcctgggaagtggangntgcaatgagccaaaacacgctttgnact

SEQ ID NO: 551455 - DNA, 305 bp, Homo sapiens
ttatatgcaaggcaagtagccccaggtgacactcgtttttttgtttgtttgtttttgagacggagtcatgctctgttgcccagcctgaagtccaatgccgtcgtctcggctcactgcaacctctgcctcctgggttcaagtgattctcctgcctcagcctccagaggagctgggactacaggtatgtgccaccacacctggctaatgttcttatttttagcagagacgggatttcactatgttggcccggctggtctcgaactccagacctcatgatctgcctgccttggccttgccatatgcaa

SEQ ID NO: 551456 - DNA, 529 bp, Homo sapiens
ggtgaagcagaaccagctatcttacaggagaaacagcaagaaacagcaagctgcagggctgcgttgcatcgtgcggctctcagcactggctgaatactaacattgtctacgaagttaaaaacatcaacaacaacaaaaaacccgctctgcccaaacccatccactgggatggatgcagcttgtgggggtggggccagtcttctgaatttttaaaaacttgcctcggtgattgtctttgctcaggatgctgtaacaaatcatcacaggctgcggggctgaaaccacggggatctagtcctcactgttctggaggctggaatctgccatcagcgtccgaggacggggcggggagggccctcttcctggctgtgggtgacgccttcactctgtgcactcccaggggtctcccttggcctctttggtgagggcactgatcccatcggggggaccccagcctcctgccctaactggcccccgaagggcattcaccctcccccgaaggccactcctcacttaccctgcccgaagg

SEQ ID NO: 551457 - DNA, 366 bp, Homo sapiens
  misc_feature (12)..(12): n is a, c, g, or t
  misc_feature (327)..(327): n is a, c, g, or t
  misc_feature (334)..(334): n is a, c, g, or t
ggtttcaccatnttggccaggctggtctcaaactcctgacctcaagtgagctgcccacctcggcctcccaaagtgctgggattaaaggcgtgacactcacaccggcctggttggttatcttgtaaaggtggctaggctgtttccaccagatgcctgtagactcaatatcagtttcaacttgtgcagcatgataatagattgcagcttaggcgtttcttaaaggccttacattttctgtttcatggcatttaaaagacactatgaattaatgttctggttaatttttgtccaggcagcaggtataattgtgatggggcccacatctanccataangagacggcagcttcctacagctctgctcccag

SEQ ID NO: 551458 - DNA, 304 bp, Homo sapiens
ggtgaatctagaaggatcccccagaggacaagggagggggacacaggcagtaccaggggcacagcagcccaccagccccttgcggcctgtaccttgtatctccctttcgccagggcctggtgcttgaacctgaggcactgcagacccccacactcatgacacactgggatcctgtaacccaaaccctatagctaaacaagtgtaatccaatcaataatcaatcttatggtttggtaaacaaatgagagtttctgacaaacaacttggtatcagcccaccctctttccctcctgggtgcctctgg

SEQ ID NO: 551459 - DNA, 449 bp, Homo sapiens
cgtctctcaagaataccccaaaaattaagtttttctttttccaaggtgcccacgccacccctatgtcacgcctgaagtagttattgagaaagtcgtccctttccccttttctataaccaaatagacaggaatggaagattctcctcggggcctgaaagcttgcgggatgaataactcctcctcctcaggcccagtcccaaggtacaaacttgcaccagcagcaagatagcagaggcaggaagagagctggctggaagacacgtaccccctgaagatcaagagggaggtcgccctggtactacatagcagtcacgttaggctgggacaattcctgtttacagaggactataaaacccctgccccatcctcacttggggctgatgccattttaggcctcagcctgtctgcatgcaggcgctcattaaaacagcatgttgctccaaaaaaaa

SEQ ID NO: 551460 - DNA, 120 bp, Homo sapiens
taacttctccacgaagctcttctctgaatgctaaagagacaccagcactcctcgtccagcagggccagaatgcccggggggcctgctggcttctcaatgaggtccgatgcggggctgcag

SEQ ID NO: 551461 - DNA, 389 bp, Homo sapiens
gcttcactaccacgctcaccatgcagttcttgtacgaatagtcattactagattaagatctagtgtgttagttaatagtatgaagtgcctgttttgggataatagataggtgatttagattaatttagggggaaaaaagttatcttggccggaaatgttgagggccccatctcttcccccacaaccccacagaagttactgggttaccgtgttttatcctgaaagtttccaattccactagtcgttgtgtgttcacgtgtgagaataactttggctttttcctttggaggtgccaatttcttactagtactatttctttaatgttacatgtttaccctggaatgtttttttaactcatttattgtatatgtgtgtgactgtgaacattc

SEQ ID NO: 551462 - DNA, 109 bp, Homo sapiens
ttagattcaccatttacttattatagccagtgatgccttcacttttcctggggcagcgatcaagttcagtacctcattctccaagaaatccttccccccaaggtctctg

SEQ ID NO: 551463 - DNA, 192 bp, Homo sapiens
cctgactgacacgatggacaacccgtctctactagctcatacaaaattagccgggtgtggtggcgcatgcctgtacatcccagctttccgggaggttgaggcaggagaggtgcttgaacagcaggcagaggtgcggtgagccgatatcacaccattgcactctagcctgggcaacgagcaacactccgtctc

SEQ ID NO: 551464 - DNA, 346 bp, Homo sapiens
gggtgatactagggtggggggatgacttgaggtaaggagtttgaaagcagccgggtcaatcatggtaagatcccatctctactaaaaatatgaaaattagccgggcatggtggtgggtgcctgtaatcccagctactgaggaagctgaggcaagagaatcacttgaacccgggaggtggaggttgcagtgagccgagattgcaccactgcactccagcctgggtgacagagtgagactcgacctcaaaaaaaaaacaataaaatattaagtaaaatatatgatggaaattaatttaatctgcttttctgcattgggagagaccaggccagtggttgggcagaagat

SEQ ID NO: 551465 - DNA, 109 bp, Homo sapiens
acatactaaccaacaaaataaacatataccaatgatggcacgatgtaacacagagaaagcacataccaaggccaccacacaacaacagatcaatgggccatcgagacgg

SEQ ID NO: 551466 - DNA, 313 bp, Homo sapiens
tcatatactagcagtgcggaggtatggttaagagatttaggcgcgtcagtggttgtcgcttacctagtacttgggaggctagaggtgggaggatcgcggagccaggagttcaagaccagtttaggcaacatagtggaacctgtgtctacaaaaaataaaaaaatttagctgggcattttggcatatgcctatagtcccagctacttgggaggctgaggagggaggatcacttgagcccaggaggtcaagtttgcagtgaactacgattgcaccattgcattccagtctgggcgacaaagtgagatcctgtctc

SEQ ID NO: 551467 - DNA, 1131 bp, Homo sapiens
gggggccccggcagccgggcaggccggcctgacctcgacctcctgcctgtgctgggccctgaccggtgatgtccatgccctggtcagtcgcaggaccctggccgccagcctctccctccacctctccctgcccccagctgccatggctgcgggctgcgctcggtggctgtgcggctggggccctcaggcggccatggcggcaggcgccggggccgggtccgcgccgcgctggctgagggcgctgagcgatgccgctgagcgcggcgcaagctgcgcgcgacttggaggagcacctgctaacagcgcggcgggcgtctcgcttggtcgagcccgccgctgcgagctctacctggacctggctggatccagtggatcccagctctggatggcccccaattccatcaccctgctggggctcgccgtcaaacgtggtcaccacgctcgtgctcaatctcctactgtcccacgggccacccgaagaggcaaccatactgggacatgaccttccactgtgcacctgggaactgcgctcgactttcaacccaggtcacctggattgctactcgactggggacaaccaacagccccagcaaggaaacaaagctcttggtacgcagctatcagtgggaacgctcatttgacccactggggtgtggactcatctttcccagccaggcacattactctggggacagctgaggaaagcattccaaattggcccgcctcgcctgtaaggcaacaccttactaccctgcacatggatgacacgccacccgtgcactctttccattacggggcaatggtcaggacgatacaaactatgcgagctacatctgggcagagaaccttaaaagggagtcagaccaggggccactgcatcgcacgcactacgggacacaaccgctggccactcgctcgcacgggaaacaatacacacaacagcagctgtgacgcaggcaaccaggcacaacggcgagataggagcgcaggcacgtcggggacgggcaccacacccaatgctgggcgcaccacacacggagagatcccatacattcgccaagcaagactaaacagggggcagcgagcccctccacgacacatcggcccacaccagacgcggacgccacgcca

SEQ ID NO: 551468 - DNA, 525 bp, Homo sapiens
gttgattgtcggcagcggagatgaataagtgccttgatatgaggtagagctcaggtttcagccgtacgtgttctggtctccgacttagcctcctggccccctaacatacgtggaggcagtcccacgtagagtgagggtgtgcccgagctgctggagagtaggacatccctcaccgatactctatgtctcacatcgtgttcctgggttatgtgcggtttgagagagtgccaggaggtcttgtggtggggaggagtgttccttattctctgcggactcaccctaatccacaggaagctcccacccacctggaagccccttccacacaagcagcagtagcaccacttggctagacggaccagctggaaagatcatgatggtggcccagccttgggatgtcatgtgggactgtgtcctagggcgatccagttgtgcagccttctgaccatcagccaagggaagcaggcctctgatggagcaggctctggctctgtaaggagaggtgcagctgcagcagtgttctaccgg

SEQ ID NO: 551469 - DNA, 191 bp, Homo sapiens
  misc_feature (68)..(68): n is a, c, g, or t
  misc_feature (172)..(172): n is a, c, g, or t
  misc_feature (187)..(187): n is a, c, g, or t
ctttactaagagatgctccgaggcatttgtcagggagccctccaagcacagtgtgggcgagcttcagnatatgatggctgagtgctccaaataccatggccagctgaccaaagaagcagcgatgggccagggctttgaccgacacttgtttgctcctacggtatctggcagnaggcagaagggggtnaacc

SEQ ID NO: 551470 - DNA, 234 bp, Homo sapiens
atgactcctccgctggtccgcgcggtgcgcgcgccgtggggtgcctcgggttgcgcgtcgcggccgggcggtgcgtcgattgggcccgtgttcgtacgcgtcgccggtgggcgtcgcgcgcgagagcgagccggggggtgtctgcgcgcgtgatcacggcgtgatccggactggtggcggttcgctgggggctcctctacgaggtcaccctgcgggcttgagggcttggacctg

SEQ ID NO: 551471 - DNA, 98 bp, Homo sapiens
aattcaagcttctaacgatgtacggggacatggatatcaagtctgctttggacatcctctgctaagtgttacagatggaaataaaaccattaatttga

SEQ ID NO: 551472 - DNA, 321 bp, Homo sapiens
agaaataccgtgtaagacccaatgcctcacgctgcaagggttcccctgatccctctctcccttcctgagacagtcatatctatctgagaatacattgagcttcacgtatggacacagaggcaaggtatcagacggtgacaacgggggcagaaggagacagcctatccggggacccgcgagcagtcgagcggcagggctgctaactaggaagcggcgggggccagacacagtggctcacacctgttaatcccagtgccttgggaggccaaggcaggaggatcatttgaggccaggagcctgataccagcctgggcaacatag

SEQ ID NO: 551473 - DNA, 278 bp, Homo sapiens
gctaaactccacctcccagttcaaacaattctcctgcctcagcctcctgagtagctgggactacaggtgtgcgccaccacacccagctaatttttgtatttttagcagagacaggctttcaccatgttggccaggctgttctcgaactcctgacctcaagtgatccacccacctcggtctcccaaagtgctgggattacaggtgtgggccagcactcctggcaaggctgtttttttgttccgttctgttttccttttttttgagaccgtgtctcactc

SEQ ID NO: 551474 - DNA, 100 bp, Homo sapiens
ttctcttggtactcttaatgtgtatttctaattattccatgagctcttaattgtgcattttcctctcaattgccttcattggtttcaatatcgtctcaga

SEQ ID NO: 551475 - DNA, 163 bp, Homo sapiens
ctgatgatcatttgactcatagaagtcattatagtctgacattagatctgggtgttagaagcagagcagatgtttgccagatgtcattctgatgtgtcagtgactgatacagcctcatcagatgtatcagtatctagatgttagcaggcattttactcataca

SEQ ID NO: 551476 - DNA, 380 bp, Homo sapiens
  misc_feature (24)..(24): n is a, c, g, or t
  misc_feature (173)..(173): n is a, c, g, or t
gcccaagttcagggtgatcaccangatcaaaaccattggtaggacgtatatggtgggttcagagagtcacccccgatgtcaacaccattggatttgacaggtccaacaagggaaggacaagtccgcgagagagacgctggtcagacacctggctgacctggccgactatcgtnctggccatagaaggatgcgctcaccaacatcacaaaccagtccttcattcgcttcatgatgtgcataggcatgaacaaaggaggggttctggttggggtcatcggagcccggaaaccacactacgacatctgggggtaatacagtcaatgtagccagcaaggatggagtccacggggggtcatgcgcaacatacatgtgcgtagaag

SEQ ID NO: 551477 - DNA, 532 bp, Homo sapiens
gactaaggctgtatgtaaactgatgtagaggcatgtagatagaagcattgagaacaagatctctctatacaaagaactagtagtataaaatacaatagagaaggtagtcattacaacttacataattaacaacaggaaaatgggcacaagcacttcataataggaaatgcaactggccaagaaacatgaaaagatgttcctcctcattcaatcatcaaagcaacagcaaagcaacattttgcctacccagcattggccaacacatttttcatggcatcagggttggcagcactcataggcaacacaggccatcttactaatgcatggagttgtaatagatgaaatcatatatctggtcgtagtattcaaaactgcacactgtgcaccacctgatccaataaattactcgttcttacatcctacagaaatacccacaacaagtagcaaaatacctgtacaggaatgttaattacacttctatctataatgaacctaattatcaatccataggggattacataaattacagaat

SEQ ID NO: 551478 - DNA, 431 bp, Homo sapiens
ggatgttatcatcagtgtgccacgggtagtacatacaagtgatgtgatgccgtcatgaggccaagttagagcggatcgatacctcgacagtgtagccgctgacacacagcatacatacatcagtcgtgtccaggacgttgactatagcaactagtggcacatggtggtgcgggctgagcatcctgaccttggtagaggtctgtggtactgcggtacggaggtctggctcatgctgatctgacatgctcgatttaagtcattatcagaagcgtacactggctagtccgggttaatgacagtatcattataagcattaatgtcagcgtcacgatgaaagttgcattggggcaggtacagcgttgcaagtgatatagtgcttctcggtctctgattgctctaatcaatgctgctaatgcagtacagccgttgcg

SEQ ID NO: 551479 - DNA, 1327 bp, Homo sapiens
  misc_feature (20)..(20): n is a, c, g, or t
  misc_feature (50)..(50): n is a, c, g, or t
  misc_feature (182)..(182): n is a, c, g, or t
  misc_feature (185)..(185): n is a, c, g, or t
  misc_feature (411)..(411): n is a, c, g, or t
  misc_feature (429)..(429): n is a, c, g, or t
  misc_feature (443)..(443): n is a, c, g, or t
  misc_feature (915)..(915): n is a, c, g, or t
  misc_feature (943)..(943): n is a, c, g, or t
gattctcctgcctccacctncctagtagctgggattacaggcatgcgcanacagcccaagctaatgttgtatttctagtagagacgggggtttctccctgtcggtcaggctggtcttcaactcctgacctcaggtgatccacccgccttggcctcccaaagtgctgggattacaggcgtganganccgcgcccggaccatgctgtatccttatctgttgtctgttgttgtttgtttgtttttgagcccagaaataacttctcacctatatgttccaatgatttttcacatgagtgctaagaaagctcattggtggaaaagcagccttttcaagaaatggtgttggagaaacttgatttccacatgcagaagaatgaaggtggaccctatgtcacaccaggtgcaaaaattnacacaaactggatcaaanacctcaccccaagngctaaaagtatcatacgcctaaaagaaaacattggccacgctttcatgacatcagattgggcaatgttctctgggatatgacaccaaaagcataggcaacaaaagaaaattagattccttggattacatctaaatgacagacacttttgtgcagcaaaaaacactgtgaactgagtgaaaagataacccatggattaggaacaatatttgcaaagcatatatctgaaaagaggctgatatccatcatatataaagaacagctacaactaaacaacaagaaacccaaagcatcccatcaacaatggtcagaagacttgagtagacgtgttcctaaagaagatatagcaatggccaataagcatctaaaatgatgttcaaagtcactcatcatagggaagcacaaatcaaaccaagaatgtcataccacacattaggatggatatgataaacaaaaaagcattggtgagactanagggaagtaggaatgctcgaatatgatnggagggaatgtaaaaccatgaaggaacggggaaaatagtatggcatctactggaaaatttagaaacagaatgatcagatgttcccgcagtttcatttgtgggtacctaccaaaaagaattagaagccaggagtggaagacagatttgtgtacacccatattcatagcagcattagtcacaacagccaaaatgtggaagcaacccaagggttcgtggacagatgaatgaaaaagcacactagagttcctttatacaatggaagactattcagccttaaaaaggcaggcacttctggccagtgcggtggctcacgcctgtaattgcggcgtcttggaagaccgaggtgggcggatcacctgaggtcaggaattcaagaccagcctg

SEQ ID NO: 551480 - DNA, 1269 bp, Homo sapiens
  misc_feature (20)..(20): n is a, c, g, or t
  misc_feature (50)..(50): n is a, c, g, or t
  misc_feature (182)..(182): n is a, c, g, or t
  misc_feature (185)..(185): n is a, c, g, or t
  misc_feature (411)..(411): n is a, c, g, or t
  misc_feature (429)..(429): n is a, c, g, or t
  misc_feature (443)..(443): n is a, c, g, or t
  misc_feature (915)..(915): n is a, c, g, or t
  misc_feature (943)..(943): n is a, c, g, or t
gattctcctgcctccacctncctagtagctgggattacaggcatgcgcanacagcccaagctaatgttgtatttctagtagagacgggggtttctccctgtcggtcaggctggtcttcaactcctgacctcaggtgatccacccgccttggcctcccaaagtgctgggattacaggcgtganganccgcgcccggaccatgctgtatccttatctgttgtctgttgttgtttgtttgtttttgagcccagaaataacttctcacctatatgttccaatgatttttcacatgagtgctaagaaagctcattggtggaaaagcagccttttcaagaaatggtgttggagaaacttgatttccacatgcagaagaatgaaggtggaccctatgtcacaccaggtgcaaaaattnacacaaactggatcaaanacctcaccccaagngctaaaagtatcatacgcctaaaagaaaacattggccacgctttcatgacatcagattgggcaatgttctctgggatatgacaccaaaagcataggcaacaaaagaaaattagattccttggattacatctaaatgacagacacttttgtgcagcaaaaaacactgtgaactgagtgaaaagataacccatggattaggaacaatatttgcaaagcatatatctgaaaagaggctgatatccatcatatataaagaacagctacaactaaacaacaagaaacccaaagcatcccatcaacaatggtcagaagacttgagtagacgtgttcctaaagaagatatagcaatggccaataagcatctaaaatgatgttcaaagtcactcatcatagggaagcacaaatcaaaccaagaatgtcataccacacattaggatggatatgataaacaaaaaagcattggtgagactanagggaagtaggaatgctcgaatatgatnggagggaatgtaaaaccatgaaggaacggggaaaatagtatggcatctactggaaaatttagaaacagaatgatcagatgttcccgcagtttcatttgtgggtacctaccaaaaagaattagaagccaggagtggaagacagatttgtgtacacccatattcatagcagcattagtcacaacagccaaaatgtggaagcaacccaagggttcgtggacagatgaatgaaaaagcacctcgggctcccagagtcctgggattacaggctggagggcagttgtgcgatcttgattcacttcaacctctgctctccgggctcaagccat

SEQ ID NO: 551481 - DNA, 165 bp, Homo sapiens
ggcacagggagaagggataaccctaaacccagaacccaggctggacatgcggacggtcctctcccctccagcctttgggctgggcttttctagcctatttacgtggagggtgagcactctcttccctttcccagaatcctccgcaaagaagagccatgttttcac

SEQ ID NO: 551482 - DNA, 382 bp, Homo sapiens
gttactcttgggcaggacgggcagtgctggaagtcttcttcagtcccctcatcttctcgcctccttgggaggggtctgatgagcagagccggtcaagtgagacagcattgaatggggcctggtgccggttgggtccagaagccctttggggagaggctggtccttgctgtaatagcgacccggtgacgctggcgcaactcggaaagaagctgcctcatgctgatggtcatctgtgtagctcaggcgccacagaaatatgcagctgtccccagacaacagagatgagatgtttaccaatcattactaaatttcatgccagtgacaatctctgagtggacaaaaatggtggacaagcaatcgcctgaggagaagtcaaaatgga

SEQ ID NO: 551483 - DNA, 138 bp, Homo sapiens
  misc_feature (15)..(15): n is a, c, g, or t
aaacccagactcggncacagtagaaatatgacagaatatctaaccacagtattcatcccactaaatcccattcttcatgtctctgagttgtagcattcaagtgcagagactgaatctcttttatcatagcagagcaaa

SEQ ID NO: 551484 - DNA, 454 bp, Homo sapiens
acacacagtgagagggagggctctggggcggaaaagcatccttagggtcttcttggaatgaaattcctccttccccccatctctgagtggaggaagcccaccaattctgccctttgcaggtgtgagggtggaaggtaagaggttggtgtggagttggggctgccatagtgtctgcagcctgctgcggctacagcggtggaggaagactctgtcactccaggcatatgtttccccatctctgtctggggctacagacatagggtggcagaagtgtcaccctgtgggtttctccctcggggcctcttcccctagacctccccctcacttacataaagctcccttgaagcaagaaagaggtcccagggctgcaaaattggaagcacagcctcgggaatggggagggaaagacggtgctatatccggttcctgctctctgctcatgtgggagcaaggg

SEQ ID NO: 551485 - DNA, 194 bp, Homo sapiens
cagttctaagtcttattttggttctgggcacatttcagttctgctccaagtccgctttgctcccattcagcgatgacagacatatatttgaactcatttggtctgaggttaaaggtctccactaacccgtagtctctttccgatcgtagcgtagaagactgacttggttgcatcctgggactcctctagtcgcc

SEQ ID NO: 551486 - DNA, 1102 bp, Homo sapiens
  misc_feature (20)..(20): n is a, c, g, or t
  misc_feature (50)..(50): n is a, c, g, or t
  misc_feature (182)..(182): n is a, c, g, or t
  misc_feature (185)..(185): n is a, c, g, or t
  misc_feature (411)..(411): n is a, c, g, or t
  misc_feature (429)..(429): n is a, c, g, or t
  misc_feature (443)..(443): n is a, c, g, or t
  misc_feature (1102)..(1102): n is a, c, g, or t
gattctcctgcctccacctncctagtagctgggattacaggcatgcgcanacagcccaagctaatgttgtatttctagtagagacgggggtttctccctgtcggtcaggctggtcttcaactcctgacctcaggtgatccacccgccttggcctcccaaagtgctgggattacaggcgtganganccgcgcccggaccatgctgtatccttatctgttgtctgttgttgtttgtttgtttttgagcccagaaataacttctcacctatatgttccaatgatttttcacatgagtgctaagaaagctcattggtggaaaagcagccttttcaagaaatggtgttggagaaacttgatttccacatgcagaagaatgaaggtggaccctatgtcacaccaggtgcaaaaattnacacaaactggatcaaanacctcaccccaagngctaaaagtatcatacgcctaaaagaaaacattggccacgctttcatgacatcagattgggcaatgttctctgggatatgacaccaaaagcataggcaacaaaagaaaattagattccttggattacatctaaatgacagacacttttgtgcagcaaaaaacactgtgaactgagtgaaaagataacccatggattaggaacaatatttgcaaagcatatatctgaaaagaggctgatatccatcatatataaagaacagctacaactaaacaacaagaaacccaaagcatcccatcaacaatggtcagaagacttgagtagacgtgttcctaaagaagatatagcaatggccaataagcatctaaaatgatgttcaaagtcactcatcatagggaagcacaaatcaaaccaagaatgtcataccacacattagggtgactgttattttttaaaatctagaaaattaaaaattgttggcaaggatgtggagaaattgaaacccttgtgcactgttggtgaaaattaaaatggtagggccactatggaaaacattaaggcagtttctcaaaaaattaaaaatagaattaccacatgacctagcgattcttctgcatgtatgcaccaaagaaatagaaggaggatcttgaagaatagctgn

SEQ ID NO: 551487 - DNA, 500 bp, Homo sapiens
  misc_feature (366)..(366): n is a, c, g, or t
  misc_feature (377)..(377): n is a, c, g, or t
  misc_feature (399)..(399): n is a, c, g, or t
  misc_feature (407)..(407): n is a, c, g, or t
  misc_feature (419)..(419): n is a, c, g, or t
  misc_feature (456)..(456): n is a, c, g, or t
  misc_feature (461)..(461): n is a, c, g, or t
tcctgtctaataacccctctgagaggcagacagaggagtaagacacacagaactaagagtgccagcttgctccttcctgtctttattcctgattcagtattacccacagctagaaattgacaactcagtaacttcagatgtccctcatagtagcagatgggaatgtaccccctctctaaaggcaaaagcagatcaagagaaaagagagcccagatgtctcttagctgagggcaggcctacctagttttttctcccagattctctcttgtggggaggggtgggtgaggataagaatagccagtagttcagtagttctcagccttctctgtgcatcaggaatcatctggagggagctttcttaaaaantacggcatgtntgggcatccacatccaggaggntttagganttcactttgttntggggggtgggtatttttccatggaacggtttttttngggtnggttttaatttgttaccaaccaggggtaggaggattcca

SEQ ID NO: 551488 - DNA, 227 bp, Homo sapiens
aaattccatgccaggtagaatacatttaaaaattggttaagatattttattggtattttatcacaatagaaaaagttcagaagaaaaatatataaatccaaagaagggaaattttaaagcatcgaggtggaagtttcagatggaaataagtggtacttgacgtgggactaggcatgaacatggatgtacacaaccgaggccaactcaagcagctgtagcagcaatgc

SEQ ID NO: 551489 - DNA, 362 bp, Homo sapiens
atcctatacagcttgggagagggcagagaagcaatgaactcaaaacattttcttaaaggacaccaggctgggcgcagtagctcacgcctatatcccagcactttgggaggccgaggagggcagatcacttgaggtcagtcgttcaagaccagcctggccaacatggagaaaccccatctctactaaaaatacaaaaattagctgggtgtggtggcgcatgcctgtaatcctagctactcaggaggctgaggcaggagaatcgcctgaacccaggaggcggaggttgcagtgagctgagatcgcaccattgtactccagcctgggtaagaagagcgaaactccatctcaaaaaaaaaacaaaa

SEQ ID NO: 551490 - DNA, 288 bp, Homo sapiens
ctatggcgaagttttaagtgtggggtcctaatcccttccttctatgaagaagaacggtcatgagggatacatgtgcacagagaaaaggccgtgtgaagaccaaatgaaaaagtggctgtctacaagtcaaggagagaggcctcgggagaagctaaacctgctgacactctgaccttggaatcctagactccagaactgtgagaaaataaatttctgttgtttaagccacatggtctgtgtattagattatggcagttctagcagactaatatacagttgctccttgaa

SEQ ID NO: 551491 - DNA, 159 bp, Homo sapiens
ttgaatctagagttatcccccctatagcgccttagcctacagcgccttttgggatgagtcgcagctaagggaagcgctgactcctcggtgcagcattggggttgatgagcgtatttgccccctttgggagtgggaagcgagtaccgcaggccgcggggg

SEQ ID NO: 551492 - DNA, 361 bp, Homo sapiens
tgtctagaggatcctataggcgctaggtggttcttctgagcactcagagggctgctcctgattcagacactccttagtgagaaaatgaccaagaattgcattgaaagggtttaaatggcagacactgtcaaggaagatgaaaagatgacccacagaatgggagaaaatatttgcaagtcatctatcaaataagagtgtagcatccagaacatgtaaagagctctttcaactcaacaataaaatgacaaataactcacctgaaaaaaatggatgaaggattcggatatgtatattttatctctaaagaaagtatacaggccaggcgtggtggctcacgcctgtaatcccagcactttgggag

SEQ ID NO: 551493 - DNA, 298 bp, Homo sapiens
tgggtaaaattttttttttgttgaaacggattttttatgttgcccaggctggtttcaggctcctgggctcaaatggtcctcctccctcagcttccaaaggcacaggccaagttgtagctttgtcccttcccatcatgccccacaaaaggttttaacccttttaaagaaattgactttcaaaaattggttatgttggggggcaagttttttaaactggaaattgtaaattcctcctgaaatgttttttcaaccagttcccatgaactaaaactccaaaaaaggatggttttgggggtca

SEQ ID NO: 551494 - DNA, 126 bp, Homo sapiens
aatccattacattgaagaggcaggcgacatgcgagtgctggagaggaaccccgttacgccaccatttcacatgtgaagatgcagtgcgacatgcgagtgctgaggaggaacgcttgacgccactat

SEQ ID NO: 551495 - DNA, 401 bp, Homo sapiens
  misc_feature (20)..(20): n is a, c, g, or t
  misc_feature (33)..(33): n is a, c, g, or t
  misc_feature (52)..(52): n is a, c, g, or t
  misc_feature (315)..(315): n is a, c, g, or t
  misc_feature (332)..(332): n is a, c, g, or t
  misc_feature (337)..(337): n is a, c, g, or t
  misc_feature (339)..(339): n is a, c, g, or t
  misc_feature (342)..(342): n is a, c, g, or t
cgtgactgtgtgactcctgngcgtccaacaggngttgtcagtggtactgccnggtgcaaccttggtctctctgactccagcccccccacagtgtgaccgtccgtggtacctgccgggttccaaccttggtctgtctgactccagcccccccacagtgtgaccgtccgtggtacctgccgggttccaaccttggtctctctgactccagcccccccacagtgtgaccgtccgtggtacctgccgggttccaaccttggtctctctgactccagcccccccacagtgtgaccgtccgtggtacctgccgggttccanccttggtctgtctgacnccagncnccncacagtgtgacctgtcgaggtatcttgccgggttccaacccttggtctctctgaccacg

SEQ ID NO: 551496 - DNA, 150 bp, Homo sapiens
ctaggtggaaagctgacgtgacggacgagggacgtgttggtgaatggggaccggctggtggatcacgcagtctgcacttcgccttccatggatgagaactacctgtacctggctcatgggtgtattacgtgtggcggggaccttgctgac

SEQ ID NO: 551497 - DNA, 389 bp, Homo sapiens
gagtagctgggattacaggcgcccgccacactacccagctaatttttgcatttttacgtagagaaggggtttcaccatgttggacaggctggtcttgaactcctatgctcaggtgatctacccgcctcggcctccaaagtgctgggattacaggagtgagccactatgcccggccttcattggattctttctagggaaagtcatcttgtagagcagagcatgcagagtgctatttcttttttatgtttctcttgaggcagaagactggtgtttacctaccatttcatgggtcgtagggccggcggtgaccattatgtggtgtgtgtacagcgtcgtacaggcttggccttgaatgatctcttatggttagaaaagacaattaaaaacaa

SEQ ID NO: 551498 - DNA, 1394 bp, Homo sapiens
  misc_feature (591)..(591): n is a, c, g, or t
  misc_feature (798)..(798): n is a, c, g, or t
tgcaccaatttgttcacaacaggtgggcccacgtggcgttgtatgctcgtctgtccgggtgcgtgtgtgaaacgcctttgtggggacacacaaccgccgttgtcccaacgtgtgcgccgaacgccggtactttttcctgcgtgggacgtcggcggtgtctttccacggcttcccctgtgctcacaatggagggggggtctttaaatgatccatcacgccgttcccccctgtttttttcacgcgggcccatcggttgttccagagacaaggctgttgtgccccgaaaccccccgcgagtgggacacactggggtggcccccacccggccgaaaggttgcgtctgttcgccctgtggtgcacagaaccttgggcgccgttgttctcgggcaattcaatttgggacacttggtttgtttccgggggggttttggcggccctggacccctggggggccccgtgtccccccccacacacacaggccccacgcccccctctgcctgtgggtgtccccagaggtcccgcaagagaagggacacacttggagagggactcgcctcggccccctgttgccctaaactcgcccctgtgggncttgtgagagagaagggagagtctgtgagaagaggggcaccccttgggggcccgcacactcccacccctcggggagaccccccacgcggtgtggccccccgcgagagtccacactcggggttagaaaggttgtttgcccaccactcggggccacgcgaccacccgccgactgtggtctctgccacacactcgttgcccgctcctcgngaaccacactcgcgggtttcacagagaccacagctggtccccgaagagtgatataccgcgcggtttctcggcaccctccggtttgggggaccttgtgtgtgagaggcacaccacagggtgaaagagaggcacagggcccccctggaccccgaagcgcccttttgtcctggccctgttgtgtgaattgtgggagattgaagattgtggggcacacacagggggtctcccctgcgcctaagagctctgtgttgacctgtccccctcgggggaacagggggaaacccacaagcgattgaaatttgcgctctgtgaaagagagttcctctccctctgaggaactctggacacacaggagaagagaaggctctgaacccagaaaggagagtgcatccactcggaaggaaccggttgagaaccatggaacccggactcccaagatgaccgattcttaagaccccgggagccgagaaacccaaggccccggtttttgggttttaagggccccaagaagaacaccagacaccacagccccgaggcccccggtgcctggcctggcctagacctttggaattgagattaaaccatttggagttgga

SEQ ID NO: 551499 - DNA, 173 bp, Homo sapiens
  misc_feature (124)..(124): n is a, c, g, or t
  misc_feature (135)..(135): n is a, c, g, or t
gcactgtccccgtgctgtcatagaaaatcaagcaatggagtgcccctggatggtaagggatgagctacgtatttaagttatcggatctacttttcccttttactttagccaaggccatttccanaaagcatccangacatctgctgatgcgaggacggaggcctgagtagcgg

SEQ ID NO: 551500 - DNA, 1445 bp, Homo sapiens
gtctctcggccttagcgccatattttttggaaacctctgcgccatgagaagccaatgtggaggaagaagcgacatgcgcacggctgaacgcgcacacacgaacgaaacgatgaggcaagagcgtccaaagataaaaccctgatagccatgtcgcaacccgagaaaggaccacaaggagcagaaacactggcactggccagaagctggaggactgcacggctaccaaagatatgggcagcacatgccatgcatcactgatcataatacgcattgaaattcaaatatgaactcataagacacatttaacatcatgacccttccttgatatcagcacgaattaaaccttcctgagaatcccaagccattgcctcaattacacacacgactattgacgacatgatctggatacctacttgcacctgcgacactagtgaacatttcctgggaacatatacaacaagtgaatacacttcccgcatgggcaccgacgcatgaacacccaggcacaaataataaaatgaacaaaaaaaaagcacaacaagcaaaaagaaaatacaacaaccacctaaacatcgagcgacgcacacaccacagccacccaaacaacgacaaagaacccaactaacacccacaaccaaacaacacgcaagccgcgacacccacccacaaacatgacacagcaataccaacagacgtacgaacacaagacagaacattaataccaacacaatagccacacgcgccgccggagtaccacagacaacaaaaggagtgacgatatgccctattaccttcaaccaacaatcaaataatgatcacttccacgccagagtacacagcacaagcgcgtcgtatggatcgaaacatacaattcgcgcacggatgggaggcgacagagtagcatagtctcgaaggcagcactgtcatcacgcacgaatacgacagacgaccgacgaaatcgacgactagcgcactatacactggtaggagaccaccacaactaccacatcgccagagacacagacatagacacgcgacaagccgcaagccacagaaacacgcagagacacaaacaaaacacacacaaaatgcagacaccaaagaaagcacaagcaaccgcgagcacaaccaaacaaagtcagacgtctagtgactaagggagcagtaacgtgagagtgatctggacggcatgcgacggtcagctaacacggagtgtgagatgtaaacgacaagaagagagaagacgcggaccgagtgagctaagtgctgaagaggcaacgaggtggagtagtgagatagcgagagacttgactcggctaagcaaaacacgagatcgataaattaatgaaatagtatcgcaacataacgtagttctcgcagacacagctggtacctagcgcgctatcggatgaggaagggagaatagacgaagatgtgggagggaa

SEQ ID NO: 551501 - DNA, 121 bp, Homo sapiens
tagagtaccccgcgggttcacttgatgagtttcattatcaattgcttctgaccaagcttcttttgctcacgcctcaatgcagcctcctccagacctgcgcagtatctcaggatcttcctca

SEQ ID NO: 551502 - DNA, 107 bp, Homo sapiens
ggcgtcactttaaccttctggaaccggccaccactgccaagcctcactattgaatccacgccgttcaagtgtcgcagatggggaatggatggtgcttcttacttgtc

SEQ ID NO: 551503 - DNA, 776 bp, Homo sapiens
gggggggcacaaactttcaaaggcgggcagaggcacacaagcttctaggacaagagccagaaaagaaccaccggaaggaaccctctcactgtgtgtaaacatgacttccaagctggccgtggctctcttggcagccttcctgatttctgcagctctgtgtgaaggtgcagttttgccaaggagtgctaaggaacttagatgtcagtgcataaagacatactccaaacctttccaccccaaatttatcaaagaactgagagtgattgagagtggaccacactgcgccaacacagaaattattgtaaagctttctgatggaagagagctctgtctggaccccaaggaaaactggctgcagagggttgtggagaagtttttgaagagggctgagaattcataaaaaaattcattctctgtggtatccaagaatcagtgaagatgccagtgaaacttcaagcaaatctacttcaacacttcatgtattgggtggggctgttgaaagggtgccaaatgcatacaagattcctggttaaatttgaatttcaagaaacaatgaaaagtttttcattgaccctgaaatatccagacatacttttttggtaagggttttttatttgaatctacaaaaaacaccaaattttttttaaaaataaaggatttcctaatattggccgggggaatattccaaatacaaaatgagggccagggcccgtaaaatttcccactttaatttttggaattgatggggttggctaaaaaggaaatttaaaccaccc

SEQ ID NO: 551504 - DNA, 835 bp, Homo sapiens
cgcagtggctcatgcctgtaatcccagcactttgggaggcccgaggcggcgtggatcacctgaggtcagaaattcaaagaccggcctggcaacgtggtgaaaccccgtctctacaaaatacaaaaaagttagcccggcatgatggcgggaggttgaagcagcgagaatcgcttgaacctgggaagctggaggtttcagtgagatgacaatgcaccattgcactccagcctgggcaacagagcaagaccttgtctcaacaaacaaataacaaaacgacaacgacacagaacacaagaaaccctgggccaggtgcggctaggctcatgcctgtaatcccagcactttgagaggcggaggcggcgttggatcacctgagcgtcaggacttcgagaccaacctgggcaacatggtgaaacccccgcctctactgaaaatacacaaacattagctgggcgtgcgtgagccgtgcacctgtcaatcccagcttcacttgggagcactgacggcagcgacgaattgcttgaacccaggaggtgcgaggtagccagtgagccgagcttgccgatgggcactcctaggccctggaccaccaggagccggaaactctggtctcccaggacaacgccgacgcaaacgccagagtcagaggaccaaagccaccttgggcgcgctctcaagcacagcgcgagaccaaacacgggccaaagcccagcactactgtactgtcgcgaacttatgcttagaacccctattacgaagcggtgacgactagctcaaggggctatacgtgggctaccatagccccacaagaccccacgggaagccactagcggaa

SEQ ID NO: 551505 - DNA, 289 bp, Homo sapiens
  misc_feature (71)..(71): n is a, c, g, or t
gcgcaggcagactctgaacctcatctccctcctggccttgcgtgttctggcggaacaaaacatcatgcctngtgccaccaacgtcaccttttactaccagccggccccttacgtaagtgatggcaacttcagcaactactacgttgcccatcctccagtgacctacagccagcgttaccctaacctcggctggcctgtaactaaccttgagacctgagggcttcacagtgggggccccactagggctaggggtctcacggtagggggggcctcctcctggatgtagggg

SEQ ID NO: 551506 - DNA, 581 bp, Homo sapiens
  misc_feature (581)..(581): n is a, c, g, or t
agacagagtcttgccctgtcgcccatgttggagtgcagtggcgcaatctcggctcactgcaacctccacctcctggattcaagcaattctcctgtctcagcctccctagtagctgggattacagtcacacgcccagctaatttttgtatctttagtagagacggggtttcaccatattagtcaggctggtctcaaactcctgacctcaggtgatccacatgcctcagcctcccaaagtgctgggattacaggtgtgagccatcacaacccacctcaaaatatcatggcatgagccaccgtgcctggccatttttctttttctctagcagttattgataagcactggccttgagataagcaatattgaaaacagttgcagctcattcaccaccaaatgctaacctactgattcctgttccacaagccgtaactacagctttgactggacaagagagctatttcagtagctatcaacaagttagtggtctcctgataagagaccactgaccatggactggttctgcttgtttacagaggctgctcacttgacttgccttgtgtcccttgttcacccttttgcn

SEQ ID NO: 551507 - DNA, 1189 bp, Homo sapiens
ctatctgtaacaatatccgacttgacacgggagggggtgaggtgtgtgtgtgtgtttctatccaacttcagaaggtttggagtcttacaatggaacaaaactttgtcctagaaatgtatccattagttcaattttacttccagtaatcccacccgagattaggtctaacgactgaatgtttttctcctttaaacctgtgtctctgtttacgtatgttttcttttacacgtctggatagtgggtttcttgtacactccgatggtctccgatcctctgtccgtaccttgtctaagacagagtaccggcagtcttccttggttgtgacgactgtggaactaaagtctgaagatggaggacttgaaactctatttacagacaacaaagtcggtggatgaaacgccacgaagtaatctcgtcatgatcctttgattacgtctgtagtttttcctggactagtgaaaaatcccgattttccttcttttagattgtgtctgaaagtaagttaagggaagggagggaagaagaaaggaatggacagtcagatacttcgtaaaaaaactggtgacctattagaagtccctctagtaggagacttaatctactgaacctacaaccctgaagtttagatgtgtctactccccttcccagtcctttagtcgggagactaggattacgggggtgcgtatggggtgagtgtagagacctccttcttccctactctgatatggggtcttttggacggataattacccttgtttccacacccgggtcactcttgcactaccgataccgtcgaccactcttttcctcccttgtcttttcaccttgagtggcagaggtacagaaggagtataggatcctacccgtctttgtttgtacctacactcgagacccgaagtaagggaccccgtaggaagggatagagaggggaggagtccactcaagacagactcaatcgtcacagggaggagtggaaagtctcactagagtggagaaatgtgtgacacgaggaaagggagagtaagaggaggaagtggaaagtactagggaggaaggagagtggggtagtgaaaagggagtaggaggtagtgtgtctggtttgtgtgtgggtctcgggagcccgattctcaaccatatattttcggaatgttatttcgacgaaggggagaacgttttttttttttttttt

SEQ ID NO: 551508 - DNA, 824 bp, Homo sapiens
tcgtctggacccgttatagtctggaacatgactacgtggtgaagacatcttaacctggaccccttcctagtatgaccgggtcacgtccctcgtgtcgtccttctagtttactctccaacagagcaaacaccccaaccccctccttctcactccgactagactgaagctccctcctagatacttcgtaaaaaaactggtgacctattagaagtccctctagtaggagacttaatctactgaacctacaaccctgaagtttagatgtgtctactccccttcccagtcctttagtcgggagactaggattacgggggtgcgtatggggtgagtgtagagacctccttcttccctactctgatatggggtcttttggacggataattacccttgtttccacacccgggtcactcttgcactaccgataccgtcgaccactcttttcctcccttgtcttttcaccttgagtggcagaggtacagaaggagtataggatcctacccgtctttgtttgtacctacactcgagacccgaagtaagggaccccgtaggaagggatagagaggggaggagtccactcaagacagactcaatcgtcacagggaggagtggaaagtctcactagagtggagaaatgtgtgacacgaggaaagggagagtaagaggaggaagtggaaagtactagggaggaaggagagtggggtagtgaaaagggagtaggaggtagtgtgtctggtttgtgtgtgggtctcgggagcccgattctcaaccatatattttcggaatgttatttcgacgaaggggagaacgttttttttttttttttt

SEQ ID NO: 551509 - DNA, 1133 bp, Homo sapiens
  misc_feature (255)..(255): n is a, c, g, or t
  misc_feature (411)..(411): n is a, c, g, or t
  misc_feature (485)..(485): n is a, c, g, or t
  misc_feature (591)..(591): n is a, c, g, or t
gagaacgaactcgctgaacgacctgcgtggccagtggctgggcccctcggggtcatacactttacggagtacctgagacaagaacagagaccactgtcgtattttataagcctgatgcggccatcgccaggaggactccactacacttgaaccttcctagtgtcaagaagtactcgcctgagttgcgttgagtgtggtcgtatatcactgacgccggtcaccgttgatgcgagcgagacacgcaggtttgccaancccagaccctcacgtgggtaagctctaacatgacgtatatgaggccctccaatgaggtcaatcgacactcgttgaaaagtcgtcagtcgagacacaatacgattgggtgacccaaggtatatcactatgggtcccgcacgtcgcgaatcgaaaacngctgacaccgaaaggggtgtgaaacgcattgaaaaactagcgctattgctaacagacgcattgcccaatctctnttctatctgtacaataactatacacaccctgtacggtcccccaagggcagaccttgcgcgaacttatcactggcccactttaagtcaaatctaaaaaagttggttntcacgtgctgagaggacggacggaaagcctccagcgcgggcatgggacaggacagccagtggcatccccagagccagtcagagtctcacgccgaaagctaatgaaggcactggctcatggcacacgggaactatctaaggcggcagtccgttgcatggggacccacagggcgacgccggggggagccatggtcgtgtgcaagaaggcttgcaagggccaacgcaagacccttaggaactgggacagaaacactaaccagaacaaattcactcaatggaaagccctgggcacctttccacggtgccatgggttccggccatagggtcggcggattgcgcaaataactaatttggcagggggcgtccccctaagccacaacgcaaagttggtcaaaaggtggtccggaggattcttacaccgggtagagaattccgggggcaccccaggcgtgggactttgcactaccctgggcaattaccttcccaattcccacaggtggttcccccaatgggaaccggagcgccggtttcgggggggggaat

SEQ ID NO: 551510 - DNA, 118 bp, Homo sapiens
gggtggaatcaggatttatgttgctgcacggtttctgaaacactatttgatactgcgacgttagagtgtctgccacttagattaccatttgttgactattaagagggtagaagggggt

SEQ ID NO: 551511 - DNA, 84 bp, Homo sapiens
aaaggcactttattgcattaccattcacaattaacagtcaagaacaaataataataacaaataaagtgcctttgttagatggtg

SEQ ID NO: 551512 - DNA, 335 bp, Homo sapiens
  misc_feature (137)..(137): n is a, c, g, or t
aacagcttcattacaacagcttctgtccaggttccaggcaaggagttagcatttcctttacttaagtgcaaaacatctttctttgccctgtttggctagacatttcctcatctgccctttgcagttctgatttgatnagcatacattcttctgctctttctgcacgcctctccacagctttttgacgaggtcttgatatttctcatcttatttttgcagtccagcttcttcacttgagtcttcactaagtttagtctttagccatgagccctgttccacctggtaattctactcgactgaacaatcttcatcactccttatcatctttccttgac

SEQ ID NO: 551513 - DNA, 238 bp, Homo sapiens
acggataattctcccccaaactctgggcctcggcttttcctctggtagctgggtcctcgggtgtgaccaggagcagataacaaatagcacctagctgggtgacaacccatagaaggtatgcctataaaatgccaggggccattgagttgtcacggtgaggatgacactatgggcagggagtgatgattggtatgtgaccaacttgattgagaaatggctccagagtggggtacggacc

SEQ ID NO: 551514 - DNA, 213 bp, Homo sapiens
  misc_feature (43)..(43): n is a, c, g, or t
  misc_feature (79)..(79): n is a, c, g, or t
  misc_feature (92)..(92): n is a, c, g, or t
  misc_feature (139)..(139): n is a, c, g, or t
  misc_feature (177)..(177): n is a, c, g, or t
ggccggggcatttgatctcaaggctgccgtactggaggccatncctgccttccgcagagcaggtgctgacatcatcctnccctactacacanccgcagctgctgcagtggctgaaggaggaatgatggagacagtgccnggcccaagaactagaactttaaaacgttcccggggccncagacaagtgaaaaccaaagtaaatgctgcttttag

SEQ ID NO: 551515 - DNA, 869 bp, Homo sapiens
gaggtagtcaagctgcgcatctcctaagcggctcaggcctggaccccacggtgacaggctgctgagggtaagcgccatccctggcatggccagggcacacaggatgactgcccgatctgacagctcctcggtaggccatgatcccaggaaatggcatgctagtgccagagattaatggcggggcactcaagcagctctcctgagagcgccgtgtgagtatggtcgagcgtggagcgcaatgttgcttgtgacagtgtgggccctgtgtgctcccgacagggatggatcaggggactgtcccacctcagacccttgatacactcgtcagaccgtctgagccgtcggagtaaccgcccctgcgcacctaggacttcctgtggtgccctagtattgattgacaagactctgcgtgtgtgagaagtctacactcgtgtgggacacccagtgatcacggaagtcgcacatccgtgaggcactttatcgttggcgaaattgtccaagagttacacaaggacggggattaacgtttactatccgttgataccaagaaaaaggatcacattgcatacattaacacaagaagagaataaaacaacaacagagacaacacaacaaaacaaaagaaggtaaccaggggacaagggaacaccttgcgcgtctaaaataggcagagcgcatgagggacgcgagaacgagcgaggaagccccaggcgaacagaaacacccgggggaaaccgaaagggcaataggaacccgcggggaaactgcgagaagcgggcaccgaaggaaacgggaacagggagagagacaaaagacttgacggaatgtggcccaagacgcaacatcgggagggggccaaggcaagagaa

SEQ ID NO: 551516 - DNA, 127 bp, Homo sapiens
atgtacaaactgcggacgacgactggactggacttcactcagactgtggcaagctgtgaggtgttccaagaacggctggttctaacagctcgtccacactactggggctgtagaagaacttgcaaca

SEQ ID NO: 551517 - DNA, 101 bp, Homo sapiens
ggctcgtggtgggacctgccgctcataggccgctttgttttcgtagagcaccagcccgtattgtggggcacgaggctgaagcggttttcttccacttcttg

SEQ ID NO: 551518 - DNA, 124 bp, Homo sapiens
attagtgtatgtctctacatggccaacaagtccaacaccaattgtgtaataccagtggttctgcatataagttcaacgctctgaaatttacatttcaccctggcattgtatgatctaccgatga

SEQ ID NO: 551519 - DNA, 1162 bp, Homo sapiens
  misc_feature (638)..(638): n is a, c, g, or t
tggtcttggtacaaaattttattaaaggggtctttagaagagcaacattccaaaacctccagaaatatacagctgtgccaaggagaacccggttaagtgcgtggtgggagacgtggctgtggggcatgtggacagggcggcctcgtggctttcccaccctttcgtgtccgtgagaagtggggggtgggtgggcagaaatcctcactcttgtgggggtctctccacacaatgtgcctcacgtgtggttcacgcgcagggcgcttcatatagcggccaactctataccagttggggctcccaggtgcagagagtgactccttcaccttggtagtgcccagaaacaaccgcggtgtctgtgagccacaacagcgtgtggggccacagaagagtgtgctcacagcgatagatagttataaccaggggtctccgatgtggtggaaatacaatcgagggccatccaacaaatctctcgagggaatttaagaccctctgtggtcctgcggaagtttttccccagaaaaaccaacgaaacctctcgaaaggcctttgtgtgccccccaacttctctccatgtggattgaaaccggaagacaacaaccatatggccaggggccctctccggacaacagaacacgccncttcctatgggagaggtttggtaaacgcgcaaagaggactcctgggcctgggtggccaatggcgcaccaaagaagactctcatcatgtggcgcaccactctttttttcccgcgctctcaaaaggttttcttaacactgtgcccctcttggggaagagggccaaacacttcttttcttgggacctcaacaggacaagcatcaagttccccggaaatccgggcgggacctttcttccaccagaagacaaccattcttctcggtggcagcgtcgagggggggctaacagaatcaaatgagaattatcgcgggccgcgcgatacgggggtagtaactctccggcaaccttccaacttcccagaaaggataaagcgcactttcttcaagcccagaggttccccgaaagtttaagaaaaacactccttctccagatctcacgagtttctggcaagattggctcttcaagcgacaaaaatttccctcttctctggggattttggcactggggcccattttggcccgagaag

SEQ ID NO: 551520 - DNA, 994 bp, Homo sapiens
  misc_feature (292)..(292): n is a, c, g, or t
  misc_feature (349)..(349): n is a, c, g, or t
  misc_feature (895)..(895): n is a, c, g, or t
gggcaggcggaggattgtcctggctttcggaacccctagcgtcgcgagatggtgaatagtccctcccttgacagacaggatcactcaggtatcccagcatgccttccgcacgagcagcaggcacgtgacacaggggactagaagcgccacgcgacctacgcaatcggcacgccaaggctctgtcgacgcattgcactgggtgcgcataagaagtcgcatggcaccaggcgcgccggtcagagggatggcgagacacgttggaagacgacttcccatggggtcattcctcttncccacattgcttcgtgaagatttagcaccctgtgcgtgtcactggtgggacgtccgngttagcggatgcctgccgcgtagaaattggcggctcgcttgctagccgcaaagcacacttgaagaagaatacacgcagaggataggtgcctgagggggacattcacatcgatcgacgggagtcacctagaatccttatcacggcgttagatcctaattgcgtacttcactgatgatcgggcggtgcaaatggttgcaagagggacacataaacagtccaaacgaccaatgaccgagggaattctcgagacttgtccagtgccagggcgtcgacacgaaacggcccaacaaacgcgagttaactgtgcgaaaccaggtgcctgaagtggtccgcgtcacgcccattcgtaccagtacgcaggacttccacaggagcgcgaccgacggcgtgcccaccgaagggggaagcaagggtaccacgtctttgctagtttgcttcgcatgcgcagattacggcttggaccggaagccaagcattgccggtagaccggacacaattgtcgtgtccacttttgggctttacctatcagaatgagacccgccgaanggaactaggacgctcggctctttgcgtctcggaaacaccttgcgagcgtgaaattaagggggcttttgaagcatccgtggagacccgggggccatcacc

SEQ ID NO: 551521 - DNA, 96 bp, Homo sapiens
gtattgtaattaaaagcaaatcattcgtttaaaaaggcagttcgcaaaaaagttttggtcttttataattctcattaaaagaatatctggcaaatt

SEQ ID NO: 551522 - DNA, 243 bp, Homo sapiens
tagagtagggtaggccgaggacgctccgggccatgacatcacagagcactctgctctgatccatgagcactacacccgagaggcccccagcctcatgcacctgactgtggacacatgcctacagatcggtcgcatgagcctgacagcctacaccagcacttctatgggagtcacttgaagcaccatgggagtgaagatcacgcgtgtgacagtgagatgcgcgaactacgacactgtacgcat

SEQ ID NO: 551523 - DNA, 1227 bp, Homo sapiens
  misc_feature (15)..(15): n is a, c, g, or t
  misc_feature (178)..(178): n is a, c, g, or t
  misc_feature (193)..(193): n is a, c, g, or t
  misc_feature (208)..(208): n is a, c, g, or t
ggggcccagactgcntgcccgtcaggcacaggggcatctacctagacaggacagcagggtggaccccagtttggaagctgagcccccagccacgaacatggatctgaggaggggcccttgggtcgggccctggagacgacacacggcagcccacaggccacgacagacgctggatgcnctcctaccgccaganacctccccaaaggcnttggacctccttaggcgactcctggtgttcgccccggacaagcggttaagcgcgacccaggcactgcagcacccctacgtgcagaggttccactgccccagcgacgagtgggcacgagaggcagatgtgcggccccgggcacacgaaggggtccagctctctgtgcctgagtaccgcagccgcgtctatcagatgatcctggagtgtggaggcagcagcggcacctcgagagagaagggcccggagggtgtctccccaagccaggcacacctgcacaaacccagagccgaccctcagctgccttctaggacacctgtgcagggtcccagacccaggccccagagcagcccaggccatgaccctgccgagcacgagtccccccgtgcagccaagaacgttcccaggcagaactccgctcccctgctccaaactgctctcctagggaatggggaaaggccccctggggcgaaggaagcgccccccttgacactctcgctggtgaagccaagcgggaggggagctgcgccctccctgacctcccaggctgcggctcaggtggccaaccaggccctgatccggggtgactggaaccggggcggtggggtgagggtggccagcgtacaacaggtccctccccggcttcctccggaggcccggcccggccggaggatgttcagcacctctgccttgcagggtgcccaggggggtgccagggctttgcttggaggctactcccaagcctacgggactgtctgccactcggcactgggccacctgcccctgctggaggggcaccatgtgtgagccgccctactcccttcacctggccctctgttcctgccccagccccttccccagacccctctccagtctcctgcaccccttagccctccctgctttgcctggcccgttgaagttccagggagcttgcccgggtctcctcgggggagcagatgagggccctgcccccgccccactgacttcctccaataaagtcatgtctgcccccaaaaaaaaaa

SEQ ID NO: 551524 - DNA, 112 bp, Homo sapiens
cgtgcattatattgttctattgtttgttggatccgggtattctgaatctgggtattcacatttctaaatcacttgattactataggtttgatatatctcttgttagctttca

SEQ ID NO: 551525 - DNA, 193 bp, Homo sapiens
tcatcgagctcggtccctgcttagtcgggtgaataggctgctggtgggtgacagtgctcatcatgagcaggacctggagtggctgcagcaggcggacgtggtcgtggcagaagtgacacagccatccttgggtgtagcgctatgagactgggccgggcctgtgagcctttaacaacgcggatcctgctgcctg

SEQ ID NO: 551526 - DNA, 306 bp, Homo sapiens
accgcgcgtggatcggattcgaaaaaatgaaagggcgcttgcggcggcgcgccggcggcagcgtacccggtatcgtgggcgagcccgcggcatttttcggtgcggccgcccggttagagacacgcggcttcgacggcatcgttttcgggcacacgcaccacgcgggatccgcgcctctaccgctcggtggcatatatttaaatcctgggtcgtggatgttaggctcgaagtacgtgctgatcgcgaacggagcggccgagatgcgggatgtccgctcacgccgcgggagagataggcgtgccggat

SEQ ID NO: 551527 - DNA, 275 bp, Homo sapiens
gtggcgaagactgtgggttccaacaaaggtgccatcattgtgactcatgggtgggcggtgtttgtcataggcgacacgtgactcgtcatcaccttgtgtgatgcttgaagaagaaacagtacacatccattcatcattggctgtggtggaggttgacgcctgctgtcaccccatgaggagcgccacctggtccaagatgcagcagaacggctacgaaaatccaacctacaagttctttgagcagattcagaactagaaccccggcaaagtcttcg

SEQ ID NO: 551528 - DNA, 228 bp, Homo sapiens
ttttttttttttggctctagagggggtagagggggtgctatgagtgtaaatacggggccctgatttcataagatattttagagggatattcaattcatatggacgaatgaggacatgtaaacttgtgtatttgctaccactagagtttcatgagcgattggcctgtagtatacccccggtcgtgtagcggtgaaagtggtttggtttagacgtccggggtcgacgcgg

SEQ ID NO: 551529 - DNA, 891 bp, Homo sapiens
  misc_feature (18)..(19): n is a, c, g, or t
  misc_feature (26)..(26): n is a, c, g, or t
ctttggttacctgcccanncgcgtantggatatcgtcgacccaggcgctcggctagtgcgctcttggctcggcgcggtccgctgcaatccgtggaggaacgcgccgaccgagaccaccatcatgcctgggcacttacagtgaaggcttcggcatgcgtggatcaccaacctgattcgaccagttatttgacgacggaatcggaccccttcgaggtgctgaatggcagcagagaacaatgaaaaaacgaagccggacgggtggcggcgttgggggccctggggccaatgagcgcagctcaggcctgtggcccagaccaaactccaatcgctggacatggcaaacatgcttgcgcaatggagtcccagaaaagaccgcacagaacccgcatggcccccaggcgtaggcggtggcttgacacgaaatgaggagacgcaggccgcccgtgggcgcttacagaaagaagggaatactgacgagttggaacgaaggacctgatcaacaacttcagggtgaagggacaaatacctcgctagcaagaccagagaggcgaccacctcgtgaacgacgcttccgaacagcccacttgaaagcacacgggttgaccggacggcgacatgttacagttgatagacccgcactactttgacccgaaccttattacgagtgctcgtgtgttggtcttggaaaaacagtccgaggtgtggcccgatgcacgtggaaatggggccgcagcgacgcatggcagtttcgagtacctcggtgggcaaacgcgtgcacttcgaatagggccattggtggacacgtggctagcgtcgttcttgatgccacctttaccacgtgaccattcagcccatcacgcacacaccgttggtggtagcggatcaaccaca

SEQ ID NO: 551530 - DNA, 261 bp, Homo sapiens
gcacctaagaccatccacccctacagtgctattggcagaagtgtcataattgatactgtatctgttccttcaagtatagagcttttgggaggaagtattgactggggttggctgcctactggctgacataaactacattatgggaaatgcacaagtagtttggatatggtagtgtgtggttctcttttggaatttctttcaggtgatttaataatgatttaaaactactatagaaactgcagagcaaaggagggatgagca

SEQ ID NO: 551531 - DNA, 583 bp, Homo sapiens
aaaggcagagaagtatatggaaatatgttcaacatcactaatgattaggaaaatgcaaatgaaaccacaatgagatactctacttagaatgttcttactaaaaaagataaaaaacaacaaatgctgatgaggatgtggagaaaagaaaactttcactgttggtgaaagtataaattagaacaactactgtggaaaacagtatgtagatttctcaaaaacctaaaaatagaaccaccacatgatccagcaaaccaagtataaccacaggaaaagaaatcagtatatcaaagagatacttgcacttgcatatttatcacagcactattcatgataacaaagatatggaattaacctaagcatccatcagtggacacagggataaagaaaatgtttatgtacacagtggaatactatttggccataaaaaagagtaaaatgttattgctaacaacatggatggaacttgaggtcattatggtaagtgaaataagccaggcacagaaagacaaataccacatgttctcacttatatgtgggaggtgaaaaacttcacctcctggagaccaggtagagccgaggggga

SEQ ID NO: 551532 - DNA, 162 bp, Homo sapiens
ttttgaggatagcttaaactccttatgatttcatccccgtaccaaccaatcagcattctcgcttcccgagccccctgccgccaaactacctttaaaaaaccctagcctccaaattttcagggaggctgatttgagtaataataaaacccctgtctcctgttt

SEQ ID NO: 551533 - DNA, 467 bp, Homo sapiens
gcgtcgacccagcgctgcatttttaaaggaacatgaaagactccaggagtctacttgtaagagtctatgaatttattcacaaagtcgtgctattctaccatcacacaaacagtctgtcactcacagaaatgtttgatccatggccgggcccatggttgcgggaaattgttacatggaaaagccgatactggcttccctccctccacccacatctaacttcctggtcttccctgatgacatcctgcctttatggctttatacatccctgactgcctgcctaaaatgccattgctctcttttcttccaacatcctgtccctgagaacgcctagcatacttacagcaaatgtctacactgcctctggagcctttctcatacctttcccccactccaggcagatggaagtttcttccgtgtcttccaattgccaactggtcaccccattagcatgttgcagtgacacctcg

SEQ ID NO: 551534 - DNA, 1061 bp, Homo sapiens
ccattgaaagcagaaagcagtagtgacacagctttcccttcaaacgagccattgagaaacatttctcaaacaggaaatccttcttttactaatgtggacatatagattattcgctattatagtttgtagaactacctagttcagaatcttgactgccagttttcttggtttcttaggcttgaacttttcatacgacaattgcacacagttctagatgccttcttgaaacggaactgtaatgaagattcagcatctgactactactgtgtgtctatcctgaaataataatggagagtatactgtagattacatgtttacccatcaaatctgacttacacggttacatggaacggttttataggtacaggtacattgattgggaatggggtagggggaggagttgtgggggcacatacactgtgcattccagtctcaacgcatagactacatctaggggaactcggcactgtattattcaactttgatttgggttgtaacaactgtgtcaaatcctgttcatcgaactcccatcaactcttatcacaatttcatgctgactcttcattaccgtctgcatgattggaaatgtccaaaaccatgtacagttccagtatagacgaactgtcactggctctcgtggcccagattcctgtctggcatgtacatccgcatttctccaatacctgcatcacgtaatccatcagctaccataagttcactcctggtacatctccttatctataacaacgcggatcttctcgagaattacattcctgccaaactcacacctgcacagcctcaaaatcactcgcgcacatcagcactctggctcaacttgctccactaccccggcgaaaacgcccccaaaccgcaaccagggcatgcgggcccaccgctcaagcgccataagactaccacggcccgaacacacactcacatccacacagcaccaacccccccaccaccagcaccccacaccgaactaacagaccacatactaacacgcgccacacccacatcacgccaaccccacacacacatctacacacagcacatcaccc

SEQ ID NO: 551535 - DNA, 237 bp, Homo sapiens
cacccaatattaagatcacgctcgtcaatgagtgttgaaagagatatcagatttgaactgttagcacgactgtgtccaaatagcactggtgctgagatagaagcgctcacagaggctggatgtttgccatcagagcacgggaaaaattgctccgagaaggtttcttgaagctgtaataaggtattaagtttatgccaaatcagtgctactcctcgtacatattacgggggaccggct

SEQ ID NO: 551536 - DNA, 229 bp, Homo sapiens
  misc_feature (5)..(5): n is a, c, g, or t
cgtancagcagacttctcagcagagaccttacaagccaaaagagattagggtcctgtcttcgacctcgtttaaacagaacaactgtcagccaagaattttgttagtcccacaatagactacgttttgtaacatgaaggagaaataaagtcattttaaacaaatgccaggggaatttgtccctaccaaaccagcactacaagaaatgctattgaaacttctaaaactagg

SEQ ID NO: 551537 - DNA, 522 bp, Homo sapiens
  misc_feature (522)..(522): n is a, c, g, or t
gattgtgccacgtgcatttctagcctggggcaacaaagtgagactccagtctcaaaaaaaaaaaaaaaaaaaaaaaaaaaaaacctggtgtgcggcggcggccttgggccccccgcgaaaaaacgttttacaagaacacacattcgcggtgtgggcgcgcgcgcggggccccaagggaggggaaaggggaaaagtgggcacacaaaggcggtgatcccccatagagagaagacactccgggggccagagaaacaaaacggcgcgaggggagaatttcctacaccaaaatatacaaaaaaaccgccgcgggggggaacaaacaccgagcacagggttctctgtgacaacaaataccccagaaaaaggggagagatctcagagagagcgcccaaatcacagggggggacaactctaaatatacaacacacaggagagagagtccacaaaaagggagagacactccagaaaaatatactcacaactatatacacgccccccgggactccggggggggggaggggn

SEQ ID NO: 551538 - DNA, 931 bp, Homo sapiens
  misc_feature (227)..(227): n is a, c, g, or t
  misc_feature (672)..(672): n is a, c, g, or t
aaactcgcgtcggcgggcgcgaagaggtgaagctctcggaggctcctcccgcaggtccgcctgggaagggcatctctagcatcgagcagaagaccgtatcctccgaaaagaggttgtaggtgatgaatggacatatctgggagaatgtggagtccggtagacatgagaatcacgatctgtgaccgaagggtgcttagtgaatggtttggatcaaattgtttagatangtcgaaatgcatagtaagtcgcagtagtagtaaggtcgtgtctatcctgtaaaatgacagggtggagttatgttctgggtgccttggtggaagttgcagttgtggtgatgagcggagaaggaacgatagtatatattccactagaggaagtcgtttaccgaaagaggacatgtgtgatatatatgcctaggaatatgtagattgccaatccaaagagctcagatcctggcgtggggctcgtgggcatttaactgttatctggtagttttactatagagattctttaataatcgcctaggaagttggggctgagacgctggtctaataaccgggtttctgatcgaagggcgatagtcttgatgttgagagacggaaatgaaagtaactcatagaaagatagcatgcttgatcagtggcagttgcttggaggacaagctattcaccntggcgacatctgaccagtgggcgcgaagaagggtggatgccaggcgaaacgggtgagaaggtaaaggcggacaggtggtgacccctctttctttgaagaacactttttacagctccagtccttatcgactggattctatagggaaaaacccggtctgtgtttgggatccccgggttcgcttcacccctgcgggttggggacctccctccggatgggggccggggccccggggcgcaccggcgcaaaaatattaccttcc

SEQ ID NO: 551539 - DNA, 416 bp, Homo sapiens
  misc_feature (93)..(93): n is a, c, g, or t
  misc_feature (110)..(110): n is a, c, g, or t
  misc_feature (117)..(117): n is a, c, g, or t
  misc_feature (158)..(158): n is a, c, g, or t
  misc_feature (230)..(230): n is a, c, g, or t
  misc_feature (250)..(250): n is a, c, g, or t
  misc_feature (277)..(277): n is a, c, g, or t
  misc_feature (340)..(340): n is a, c, g, or t
  misc_feature (385)..(385): n is a, c, g, or t
tgaagattgaaagtcagaagttgaacttcaaggagaaggcccaggcaaggtgggatccctcgataatgtgggccacctacctgcaggacagtnctggtgaagactgttantactatncagcgaggctcctctgtgtccgggtccccctgctgggaagngagccggccatctctgaggcagcgctgaaagctggcgcccccacttcagccagtggccttcaatggccaacnccaccctgttcaggggggtngttgaccaaagggaggcccagaccttnggacagccagatccagggagacaaatttgagaccttacaaggttgacgtttccggggcaaatnccaggggccccgcaacgaccaaggggccgaatttttttttcccgncccccacatttttccttggggggggccccaa

SEQ ID NO: 551540 - DNA, 418 bp, Homo sapiens
  misc_feature (385)..(385): n is a, c, g, or t
  misc_feature (389)..(389): n is a, c, g, or t
attcgccgccgcgaccccagcggtagaaacctgggcttcacccaggtccagttggtcgaggcgtaccgtcgactgaagctggcattggacgcaccggcctaaaccaacggctggtgactggtcacacaatgaatccccccaccacccgccgcgattgcatcgatattgagctgcaccacctcgcgctccgggtagagcctggacagtagctcaaaggcttttgcgtcggccaacttgtcgccgaactcgggtgcgatcaccgccccattgatgacgacgtagttgatataacccggcgcgaaatccggattgttccgcctgaaccggctcttgcgtggattaagcggcggcgacacggtgtgcacctgcagcggccggccgtccncatnggtggcctgcttgaggatgtcgaggtgcg

SEQ ID NO: 551541 - DNA, 922 bp, Homo sapiens
agcgggccattgtctctcgctgcagccggcgctccacgtctagtcttcactgctctgcgtcctgtgctgatcaaggctcgccgctgtgaccctgttacctgcaagaacttggaggttcacacgctacacgccgccacggcccccctggacacgcctagaacactgggaccactgaccatttacgggactgtgacacacatcgaacttactcgtctcgacgcgacacttggcaactgccctgcgaccacctgccgcacgacgcgacacttctactactacgacgacactgtgacctgcgttacgacgacaccctacccacgacacaccctgcgatcgtatccattgcgctcacttcgctcgcatcgtctacacgaccacggaacctgcacttcacccttggcctagcgcacgcacacgggccagtcacgaacgtcacccttgtgaccactccttgacactgaatcgaaccctcgaccgaacttgcgctcacgaaccaaactaacccgaccccaccggtttcacttgcttgcttccttccaccttctcatcttggccgcccacacagcacttggcttccattgagaccccactgcacaggcccacccactcgcacacttacacgcacaactgcaatacttacccttactgcgcctctcgcataacccaccccgtccgcgactacccctttgacatccactcaagcccaacgtttccactcggccgcccacggcgacgccagtcaacactcgaggggccccccgcaactttggcacacgggcaccacctcgacctctctacccgcatgggccccccccccacatggccaacccaacccaccgtgcaccctcccagcatctacacaaaacaccgtcgtcggaactctcgggcacgcctgccccccgaccatgtgggcatctcgccc

SEQ ID NO: 551542 - DNA, 138 bp, Homo sapiens
cacgaggcctaacttcacggcttgttggtggtgtttgcactgctttttgtggagagggtcacctactagaagaaaaatgcccagtcttagaggtgggtcatcgcgcctcactggggggggtccctgtctgctaaggag

SEQ ID NO: 551543 - DNA, 263 bp, Homo sapiens
cctgccccaatccctaaaacacagacctattttaccaaggagacctgcgtgtccatttgccatgggagacatggtatagaaaaagctaagatcaattctggtgtgtgggtatgcttgttgctactaagcgatgtcaattgcttctggccctctcaggcattgagcgaactagtctgttgatctgtctgtctgtctatccatgtatctatctacgtctctctcattggaccatcttttgagtgatctatgtctatctaatctat

SEQ ID NO: 551544 - DNA, 978 bp, Homo sapiens
gcaggataccagggggagatcaccagtgtgtccacagcatgccagcagctagaagtgttctcgagagtgctccggacctctctagctacaattttagatggaggagaagaaaaccttgaaaaaaatctccctgagtttgccaagatggtgtgccacggggagcacacgtacctgtttgcccaggccatgatgtccgtgctggcccaggaggagcaggggggctccgctgtgcgcaggatcagcccaggaagtgcagcgctttgccccagggagaaagggcctgaagcccaggctcgaatcaaccaatgaccctggggaaaaccagtgtgccctccataccacgagggtctgacaggctctcggggccatgctgtccaaaggagcctgaaccctgctgacatcaccgtcctgttcaagatgttcacaagcatggaccctcctccggttgaacttatccgggtttccagccttcctggacctgtcatgcagtcactctttcaaccaagggctacggatcaaccaggaccacaagcacaaactacatccacatcttggcgtaacgcaggcacgcgtggttgagaccttggaaagaagaacaacgcgagtgagcatcacctcaagatgagctgaagtcaaacgtcaaaagctgtcgaagcgtcacaacttgtgtgcaccgagaaccaaggggctctgaactagtggcacgaattgagaactttatcaggtataggttccagtggtagcaatgggtgtgatgaaatgggtggatggactggatagaacaaggaattagtgagatggagatactgtaactgaggtgtgcaataagatgcacagatctgaccggacgaggtgtaaaaagaagaaaccactgcgtgaactgatacaaatggacatgcctggggaaaaacgagacaagtggaagaaaaaagaggaggtggattgaaacgaaaaaggtcacatcaactaaggggaaag

SEQ ID NO: 551545 - DNA, 1042 bp, Homo sapiens
ataaaaaacccccagagatggcgaacataggctaagacagcctggtgttaattggcgaggccttctctcgtaggccttctaccctcccgaagcgggctccgggttcgcttcacaggcgcccctctcctccgagatcaacgcctcgccctcggtaagaggcccaggactcagcccacggcccgcccccattggtagtcgccctgggagaccctgtctcacccaccaggacttctcgctcccaggccgggtcctctcaccgtcaaggcccgccccctgcaacggtcctcacccattagccgaaggcccggccctcacagattgccgcaggcaaggggcggagacagcccgggccgtcccaggctccgccccggaagcctcacttccggacgcgagcagcccccggtcgccccggcggcaaccgaggagactatggacccggtcaaggaggcgtgctagaggcaagcccctgaggagggcggcgggcttcttgatatcggggcaccatataagcacgccagaggccccaggcagctataagacagcccaggctgtggcttggtgccccgggagggtcaccaccgcaaagatagggggcggccaagataccggggatgggtgcaccacttgaagttgggacccaagaggggacccctgggaaacgtccatttggagaaccaatgcggaatttcttgccggcccaagtaaccatggtatagtttcccatttcaacgggcggaacccaccagccggggtgttcggcagggagccctgagccacggccaatcagtggtgggccgaacgcgggggggggaaaacatgggttgaccacaggaagaaaggtctcccttcacggcggcgccatgggaaaaggcgtgagggcccggcgccagaaggggtggcaagccccagtagggccccctggagggagcgcaggagaaccacagaccctgggaccggcctggggaccgcaaaacaacccgggaacggctcaacgaggcgtcaacaccctggacaagcgctggggggcaccacctgcgggctg

SEQ ID NO: 551546 - DNA, 284 bp, Homo sapiens
ccctggtgtggtcccttcttgcccgtgtggtacgctttgctggtgtactgtcttcttggcccgtgttgctgtatgccttttcgccctggagtgacatgctgctttctcgagtcttgtgtggtcactgtccccttttttgttgggttaaacgaccaccttctttgctgaggttgcagcagccttcttgcctttcttctgaggtatggcgagctcttctccactgctatcatcttcttcatcttctgacatctcctcatcttcactatcttcttctacctcctttg

SEQ ID NO: 551547 - DNA, 663 bp, Homo sapiens
gtatcgtctcttattgtcgacgacggtatgtgttcagtacagtgtgtcagtacgagcaaggtcgcatatatatattggtgaattaaaatctgtagctgagtctactatgttatgagtcagcatattgcacacaacatcatgagtctgcactgtaagtagtttcatatagaattcggttgagaggaaagattgattttgtgtagatgtttaatataactttacaactatatctcattgacaagataaagtctatggggatttttacctctaagttggatggaaagcacaagaagccagacattcattaatatggaacaaatgtggtattgatgttactgaatattgctatggattaaaatagaaaaagtctaggtgatttttctcttgtaaattttaataagcaggttcagccagctggtagaaaatagagacacatgagtgatttgcagttgtaataatttctgtgtgtatgtgtgtgtgtcgaggtgtttataaagaagagtgtgttgtacccatgagttcagcatttcgtgcatcttgctattttcattttcccgtgtggaagatgcatggttgcatcctttttccttctggaccaagactttaaggtcttgaaactttggtagaggaccgggtttaaagggttcaggggttgaaggagta

SEQ ID NO: 551548 - DNA, 206 bp, Homo sapiens
cgaggcgcctacttttggcgcgcctagcctcctctatggtatgacaccgttatttccgtgcgtgggacaccgagtggtttaaaaactgcggagggatttatattcaaaggcccgcgccccccgccgtttacgccacctcccgttctcccttttaaaaagggggaaagctttaaaaaaaaaagacaaaggttaacataacaataaca

SEQ ID NO: 551549 - DNA, 758 bp, Homo sapiens
  misc_feature (30)..(30): n is a, c, g, or t
  misc_feature (81)..(81): n is a, c, g, or t
  misc_feature (140)..(140): n is a, c, g, or t
  misc_feature (178)..(178): n is a, c, g, or t
  misc_feature (185)..(185): n is a, c, g, or t
  misc_feature (190)..(190): n is a, c, g, or t
  misc_feature (197)..(198): n is a, c, g, or t
  misc_feature (203)..(203): n is a, c, g, or t
  misc_feature (208)..(208): n is a, c, g, or t
  misc_feature (211)..(211): n is a, c, g, or t
  misc_feature (225)..(225): n is a, c, g, or t
  misc_feature (295)..(295): n is a, c, g, or t
  misc_feature (314)..(314): n is a, c, g, or t
  misc_feature (319)..(319): n is a, c, g, or t
  misc_feature (327)..(327): n is a, c, g, or t
  misc_feature (332)..(332): n is a, c, g, or t
  misc_feature (352)..(352): n is a, c, g, or t
  misc_feature (385)..(385): n is a, c, g, or t
  misc_feature (394)..(394): n is a, c, g, or t
  misc_feature (414)..(414): n is a, c, g, or t
  misc_feature (425)..(425): n is a, c, g, or t
  misc_feature (438)..(438): n is a, c, g, or t
  misc_feature (465)..(465): n is a, c, g, or t
  misc_feature (472)..(472): n is a, c, g, or t
  misc_feature (523)..(523): n is a, c, g, or t
  misc_feature (536)..(536): n is a, c, g, or t
  misc_feature (555)..(555): n is a, c, g, or t
  misc_feature (570)..(570): n is a, c, g, or t
  misc_feature (660)..(660): n is a, c, g, or t
  misc_feature (677)..(677): n is a, c, g, or t
  misc_feature (685)..(685): n is a, c, g, or t
  misc_feature (696)..(696): n is a, c, g, or t
  misc_feature (730)..(730): n is a, c, g, or t
tctctttcggagttgttccgtgctcccacntgcttccccttctccactggctgggatcccccgggctcggggcgcaaaaanaattattcaccatgcatcggaaaaaggaggataaccgaatccggattctcattgagaanggagtagctgagcggcaaagatctctctttgttgtagntggggancgagnaaaaaannaggtngtaanacntcatcacaagttanccaaagcaaaatgtgaaggctcggccttacagtgctgtggtgttataaaaaagaactggggtttagcagncaccggaaaaaaaaaaaangaaantgcaaaanaaaanaaaaaataggaaaactgaanataaagcaagacgacccctttgaacatcttcanagcagccanaaacattcgctactgctaanaacaacgaganccacaagatcctnggcaataccttcggcatatgtgtgctncaagatnttgaagccttaactccaaacttgctggccaggactgtagaaacagtggaangtggtgggctagnggtcatcctcctacggacnatgaactcactcaancaattgtacacagtgactatggatgtgcattccaggtacagaactgaggcccatcaggatgtggtgggaagatttaatgaaaggtttatnctgtctctggcctcttntaagaagngtctcgtcatngatgaccagctcacatcctgcccatctcctcccncgttgcaccatagaaggcctgcctccca

SEQ ID NO: 551550 - DNA, 218 bp, Homo sapiens
gtcagcaggatccttcaacagtttgaagacgccccccgcctctccccaagaggaactgaatcagcatgaaaatgcagtttcttcatctcaccatcctgtattcttcaaccagtgatcccccacctcggtcactccaactcccttaaaatacctagacctaaacggctcagacaggcagatttgaggtttccccctgtctccttattcggcagccttat

SEQ ID NO: 551551 - DNA, 122 bp, Homo sapiens
cagtaaaatggttcaatgtaaggtacggatatggtttcatcaacaggaatgacaccaaggggatgtatttgtacaccagactgtcatagaggggggtaaccccagggaggtaccttcgcagt

SEQ ID NO: 551552 - DNA, 164 bp, Homo sapiens
ccctaaactgagtacgattagttggcatgatctatccgccttaggtattgattcctctcatggtacctgccagggtcgcagccatgccaaccttccattgttgaggatgtgcgacttgctaccttaaagccactcccaagctcaccctgcacgttctccgatgg

SEQ ID NO: 551553 - DNA, 389 bp, Homo sapiens
ggaggctttggcaggccggctgttgacaaaatctgtctgtttaaactgagccttcttgtaggcatgatgcaggtgcgtgtgtgcccacagagaatacagaaggacggaagcagctttactagctttgttggaggcataggcatcgcctgcactaatggccataattttctggatgcccacgatgtttagaaggtcgcgtgcattctggcaactgatttggattatgttgttcaatgtgtaacaggcagagactgtagtttcaatgagaaggtcagtactcgggactgtgtcagaaatgatggaaaccaaatcagggagagcttctttggcaatttcattctgcagagaaagattccgagacagattcctcagcagcgagatgactgtct

SEQ ID NO: 551554 - DNA, 142 bp, Homo sapiens
tttttggggcccccttgggttttttttttggggggggccggttttaggttttaggtttttaaaaccgggcctttttatggggacccccttgccccaaatttgttccccgattttttggcccccttaaaaagtttttttggga

SEQ ID NO: 551555 - DNA, 680 bp, Homo sapiens
  misc_feature (56)..(56): n is a, c, g, or t
  misc_feature (133)..(134): n is a, c, g, or t
  misc_feature (158)..(158): n is a, c, g, or t
  misc_feature (163)..(163): n is a, c, g, or t
  misc_feature (172)..(172): n is a, c, g, or t
  misc_feature (174)..(174): n is a, c, g, or t
  misc_feature (606)..(606): n is a, c, g, or t
tcaccaaaaacgcggggccaaccggcctacatgccgccccctggtatgatcccccncgccaggccttgcacctggccagatcccaccaggggccatgcccccgcagcagcttatgccaggacagatgcccccnngcccagcctctttctgagaatccnccgantcacatctngntcctcaccaacctgccagagggagcccacgagctcaatgctgtccacagcgttttcaaatcacgttcccggcttcaaggaggtccctctggaacccgggcggcactgacatctgcccttcgctggagagtcttgaccaccacatagagaggtaacacacaggcacggggcacagctcgcgaatgccctcgcagggctttaagatcacgcaggacacgccatgaagatctcctttgccaagaagtagcaccttttccccccatgcctgccccttcccctgttctggggccacccctttcccccttggctcagccccctgaaggtaagtccccccttgggggccttcttggagccgtgtgtgagtgagtggtcgccacacagcattgtacccagagtctgtccccagacattgcacctggcgctgttaggccgnaattaaagtggctttttgaggtttggtttttcaccaaaaacaaaaaaaaggacgccgctcgcgatctagaacta

SEQ ID NO: 551556 - DNA, 692 bp, Homo sapiens
  misc_feature (56)..(56): n is a, c, g, or t
  misc_feature (133)..(134): n is a, c, g, or t
  misc_feature (158)..(158): n is a, c, g, or t
  misc_feature (163)..(163): n is a, c, g, or t
  misc_feature (172)..(172): n is a, c, g, or t
  misc_feature (174)..(174): n is a, c, g, or t
  misc_feature (314)..(314): n is a, c, g, or t
  misc_feature (618)..(618): n is a, c, g, or t
tcaccaaaaacgcggggccaaccggcctacatgccgccccctggtatgatcccccncgccaggccttgcacctggccagatcccaccaggggccatgcccccgcagcagcttatgccaggacagatgcccccnngcccagcctctttctgagaatccnccgantcacatctngntcctcaccaacctgccagaggatgactcaacggagcgtcatgactgtaccattgcatgtctctcaagtgccagtcttcccctgagcctcttcataagtgacggatccgttcgtggtacccgggcggcatgacatcgcctncgtggagtgacaatgaggtacaggcaggggcagctcgacgagtgcccatgcacgggcttcttagagactcagcagcagtaaccaaacggccatgaagatctcctttgccaagaagtagcaccttttccccccatgcctgccccttcccctgttctggggccacccctttcccccttggctcagccccctgaaggtaagtccccccttgggggccttcttggagccgtgtgtgagtgagtggtcgccacacagcattgtacccagagtctgtccccagacattgcacctggcgctgttaggccgnaattaaagtggctttttgaggtttggtttttcaccaaaaacaaaaaaaaggacgccgctcgcgatctagaacta

SEQ ID NO: 551557 - DNA, 665 bp, Homo sapiens
  misc_feature (56)..(56): n is a, c, g, or t
  misc_feature (133)..(134): n is a, c, g, or t
  misc_feature (158)..(158): n is a, c, g, or t
  misc_feature (163)..(163): n is a, c, g, or t
  misc_feature (172)..(172): n is a, c, g, or t
  misc_feature (174)..(174): n is a, c, g, or t
  misc_feature (314)..(314): n is a, c, g, or t
  misc_feature (591)..(591): n is a, c, g, or t
tcaccaaaaacgcggggccaaccggcctacatgccgccccctggtatgatcccccncgccaggccttgcacctggccagatcccaccaggggccatgcccccgcagcagcttatgccaggacagatgcccccnngcccagcctctttctgagaatccnccgantcacatctngntcctcaccaacctgccagaggatgactcaacggagcgtcatgactgtaccattgcatgtctctcaagtgccagtcttcccctgagcctcttcataagtgacggatccgttcgtggtacccgggcggcatgacatcgcctncgtggagtgacaatgaggtaacagcagctccgatgcctgcacgtttaagatcacaaacaacgccatgaagatctcctttgccaagaagtagcaccttttccccccatgcctgccccttcccctgttctggggccacccctttcccccttggctcagccccctgaaggtaagtccccccttgggggccttcttggagccgtgtgtgagtgagtggtcgccacacagcattgtacccagagtctgtccccagacattgcacctggcgctgttaggccgnaattaaagtggctttttgaggtttggtttttcaccaaaaacaaaaaaaaggacgccgctcgcgatctagaacta

SEQ ID NO: 551558 - DNA, 339 bp, Homo sapiens
  misc_feature (7)..(7): n is a, c, g, or t
  misc_feature (20)..(20): n is a, c, g, or t
  misc_feature (147)..(147): n is a, c, g, or t
  misc_feature (188)..(188): n is a, c, g, or t
  misc_feature (240)..(240): n is a, c, g, or t
  misc_feature (285)..(285): n is a, c, g, or t
atttctnccttaattttgtnagttacccagtagtcattccggagaaggttgttcagtttccatgtagttgtgtggttttaagtgagtttcttaattctaagttctaattgattgcactgtggtctgggagggtgcgtgtaatgattnccattcctttgcatttcctgaggagtgtttcacttctaatnatgttgtcgattttagaacaagtgctatgtggtgctgagaagaatatatatngttgatttggggtggagagttctgtagatatccgtagggaatgtnaggattaaataacaaggtactcagcacatactgagcactctgtaaacagtttgt

SEQ ID NO: 551559 - DNA, 802 bp, Homo sapiens
gaccccatctctacaaaaaacaaacaaagaaattaaccaggcatggtggtgcgtgcctgtagtgtcaactacttgagagtctcaggcaggaggatagcaggagtccaatagttagaccctacagtgagccatgattatgccactgcaacttctatccgtgggcgacaaaagtgagacctgcctcgaaagaaagaaagaaagaaagaaagagagagagagagagagagagagaggagaaagaagaaagcagagcaaagaaagaaagagagaaaataaagtaaaattaaaatttaaaaatacaatgtgagtagaaaactcatttctataaagaaaagatgaagtggctgcaaaaatcaggcaagcagcagtgcatttatgatcaggggagcatgtgagatattatctgaaaaagcaaaagtcaagaaacaaggcactagatttatgtcacgtgggaaaagaagatgtcacaccattcagcacagtaagagaaaagagaaccaaaaggtcagcaaaaaactctatgtattaacgttaattaaaaattaagtgtattaactcccctctggtttgaaaaatctgaaatgtgggtgataacgaaatagtaagaatggggtattcatactaacttaggaaatgtgggctttgggagaaacactccatttttctcatagaaaatacttcctaaagggggcatatttggtggcatgacaggaactttgacaattggtaaacattcacgaaagatggggggagatagacgaagtttaagaatctctgggagagataggccattagggaccaa

SEQ ID NO: 551560 - DNA, 300 bp, Homo sapiens
gctgaggcgatgcgctgcgcatgcgggagtgcgcgcgctcgagcggaggctacgtctttgtacagagcatggctgcaggacaagctgataaggacagtgagagagacaatgctaacgcccatctctctcacagagagctgggctacagactgctgtgacccgtatacacagacactttacgactaccgccacaagccatggacagcaggttgtcaatgctgacgggttcagtggttttattctcgagaaccttactgccaatgtgctgaagataggcacgaatgcgtttcggctcgtgtg

SEQ ID NO: 551561 - DNA, 886 bp, Homo sapiens
acaaagtgtctataacatcatttcttgtcctgggatgtattgctgacttctttataatgaatctgatcctctggggagaaggatcttcagcagctattccttttgggacagtggttgccatatggcccttggtgctgcatatctgtgcctctgacgtctcatggtgtataccttggttttaagaagactgccattgaacacccagttcgaaccaatcagattccacgtcagattcctgaacagtcgttctacacgaagcccttgcctggtattatcatgggagggatttgcccttggctgcatctttatacaatttcttcattctgaatagtatcgggtcacaccagatgtatacatgttggttacctatttcgtggtgttatcatttggtaattacctgttctgaagcaatatatcttccttgtctatttcccacctaatgtgcagaggaattatcattggaatgggtcataccttagagtggttttaatgagttaattcttatctatgcagtacactaacttcttttcaaaatgcagatcacgggaacagaagcacaattcttgtaatttggtatacaatgataatgggtggatcttctttcattttgaacaggaccaattgtttcttgcatgttttggtgtgtaacaaatatcagtgtggtgaaggtgattgagactcagtgtgtccagttaagagagaataattaaatttgataacaagacgtctggatgctgagttatagaatatggctagtatctcagaacacggaattagatattcttaattccgaggtgtgtacgtaagctgttgtgtaatttgggggccgcacaatattgttgaaggtacattgggagaaataggaggtgagggggattatttatgg

SEQ ID NO: 551562 - DNA, 285 bp, Homo sapiens
gacatggtggcatgccctgtggtttcagctactcagaggctgaggcaggaggatcactcgagcccaggggttcaaggctgaagtgagctatgattgcaccagtgcactccagcctgcatgagacattgggaccttgtccccacccccgaaaaaagaaaaattaatcaggtcagatgcgatggcttatgcctctaatcccagcactttgggaggccaacgcagtaggattgcttgagagttaaggagtttgaaaccagcctaggcaacataaggctctgtctccac

SEQ ID NO: 551563 - DNA, 507 bp, Homo sapiens
ttttttatgttatgaatggacgggtctgtgattttttttttcaccacgctgtcaccaactgacgcggtcgatgccatctgaagccaaggactcgtggcctcaggtgctcctatagcattgagtgctccaaagcgctgaaatgacgggctggtcacaccgtccctggactgagccgctgaagctaacacagtgaccattctaagggacagctacccaatgtgggcactaaaagcaactccctcaaagttagaatattacccgaacggctccaaaaccaccgagcttttccaccttacatactcaaatggctctcgcattgaaacgcactgcaaacgaaccttacatgccctggtgtagagccattctcgctgcacttagaggcagatataggcgccttcctggcaacgaactcctactgcgtaggttgccaagaggagaagcaaagtcgtcacttgatggagtgagcattgatgctatacccaacggtctcgagcttgatcgactttt

SEQ ID NO: 551564 - DNA, 195 bp, Homo sapiens
tcgacggtaccaacactgacaacggctagaaaaccaaaaggtctgtagagtcagaggcaggcacgagattgggagagctggatgacggtttgtaagagaatattaagggtgtcagtcttcctgtgtatcctttggattctgttatgctgttgcttgtagacgggaaaaagttcatggtgtcatttatattacaag

SEQ ID NO: 551565 - DNA, 864 bp, Homo sapiens
ggctccagccatgctctccgtcctcgcccggcctgtcagcgctagctctccgtcgaagcttcagtatcctcgggccgagaacaatgctacaagtagctgtgtctaggggcctctggagtgcatctggggtagcccacatttcacgtgtctccttgtaacgaaaactagcccctatgtgctgaagccgtcttgaccccgtcttgattggattatcagcgcgacactacctcgggagatggtctcagcgagattcttgagacccactatcgaagaccgaaaagctcggcttgatgaagaggcgtacgctgcggtaccttgatacagcatgcctggacatgccgtgagaaggtgagtcgaatgtgcgtatgtcattcacgaggttggatgtccctcagaaaagccgaggcgaatgacgccagggacgtgagctgattcataaaacagatagccaccgatgtgtaggacatcctcatgtagacagcatggatctgtgcaccagctactgcaccggaagccatgatctgcgtctcattggcaagtccggttaaattctcacactatttcactcatgcaagcaggcatgatatgtttgtgcaagaaggcaattggaggttgtacagaaccaccaaatcgagaaatcgttcgggcgtgaagacccgtggacatcgtccagagcccaacaccttatgttcgccggaagctagaagcggtttggtgatccatgtgcgaagtcgaaccgtccgctgtcattggggtaggcgcatggctggggaaagaaccatcatccccctggatctctcagtgcaacccccgaaggtgggacatttccccaggaccatggtgacagaactcactgggacggac

SEQ ID NO: 551566 - DNA, 1873 bp, Homo sapiens
gagaccacatgttattatgcaaattatcaggcttttaactctgcttgaggtttgggccttatgaagatcaagatttcttaggcatttatataaaaccactttcttatttctggttttatatcaacaaccacataacctagatacgaaaggagcattctcgcggatttagtgttgacctaagttaacagacttttaaaagacagaactcttacaaaggggcttgagtttttttttttttttgctttttggaagacgtttaaatttagggtttccagaccctgaacctcaatagtgtgcagtagatttccaaagtatgaatcttagaccttgaaaaattctgtatctctgaccttaaaagttttgattattttattctgtttccaaagtgtataaccagttctccaagttctaattggagagctcattagttatcagcctcacagtcacggactctgggatgtcttatttcatatgcctgtaaatttgtgacttgcagtgtgactggccttctcctgtgtgtttatgtagcacaaccacatttgtcttgttggaaggagagccaggtatcatagacagcacattcatttagagccagtcttgactttagattgacctccatgttctccagggagaaaataattatgcaactgtgaacagagaaaaagggcaaggcacactaaccaagggataataaggatgtagtggcatttctaactctgtatttattggttttgtggttttgagatagatgcttaatgttatttctgggcagtttttaaaaaagagatgaaatctccagtgtcataaagactaatttcttcttattttttctaccttaacatcccactatttccaatggcaaaaataggaaacaactgtgttatttaaagtgacttataaatattttgaacaaatcctctgattataataagcctttgctttattttttaaaagaacatgttctgcattcttttctctccaacacagaagtcatatgtgaggcattaatggagggtgggtttactctttcaggccagtagggcattaccatggctgctttaaacttacacggttttttagactcctgaaacagctaacgtcactcatcacacacctgccatactagctgggagtgacttaggcacggcggaaagtctgactcactaaatgtaatgaatgtgactgccattattgagttggagagcagccgaggaggagggattggttcatggtacgtgttgaaaatctgtaaagtcagattttattggatcagtgtggaatgggaattccagagagcagagccttccagaatatttgcagtagaaatatatgtatggccccactgatcactggtagaaaatcagctttgaaaatctcagggtaacagtgactattgtaatctgcatttctgagacttgaaatatttggatggttatgagctacattggaatttacacgtatcagaaatctatgagagtaaactttgaaatgatctttatatctgtaagaaacatttataacacttgtgtcaagacgtatctacaaaaatatttattagaaacacatctaaaaattctaagtacctaagattattaaacagtgcacaaaatagggacagtgtaatacctttatattctattgcatgagtctcatttaatgctaatagcctgcattcaattcagtagttcaattagtctgacatttaaaatgatcatatgtagaggtaataagtgaaatgaaaccgttataaactcaaaatcaagaattttaattccaggccttcctgatgataatgaattaagtaaattattatatttattggatttatctgtatcacaccatttagcaaaagaaagtatctgagaccatttac

SEQ ID NO: 551567 - DNA, 669 bp, Homo sapiens
tcctgagatgggtactcactatattgtccaggctagagtggggtgggtattcacagattcgaacatagtacactgcagcctccaagtcctagcctcaagtgatcctcctgtatcaacctcccaagtaggattataacgacagtgcgccgacgatgacccagaatccacgaacttggtctatgactctccccaataaactagatctgaacagagaagtaccttcacccagaaaacagggaaagccatggaacgtgaggtacatgggtcgtattaccaattcattgggtccgaagtttcacacgggtccgtgaactgggaaaaagccttggcgttacccaacttaatctccgttgtcatatatcccccgttacgtcaggtggatgtaataggcaacaggcccgtaaccgatggcccattccgcaacaaattggcgagctgaaatggcgaagtggcaaatggtcagggtgccgatagggtgacaatgcgcgcttgaattcctgtcgacaacgggggcaaaccataagcggaagggccggaaacacgggcttgcctgtcataagcaacagtgcttggccccgagagacacggttcaaccgctcggtccactgttggcatcccaggagttctccctatagcccggtggcaccccacaacgtcccacgcggcgcc

SEQ ID NO: 551568 - DNA, 347 bp, Homo sapiens
ccgcagtctggcggcttggcctgtttcacgcccccagcgccgccgcccttcctgagtggagatgaggatcccaaggcttccacgctacgtgttcgtgatctcttggctcctatcgcatttcacgggaaggtggctcgggcgtacagcaaccttcggtggttggagaacaatcgcccactcctcatacggttcttcacaacttcatgttcttctatcgtgccttttaatgcgaagtcatgggacctgccctcgtgcctggtcaccccctcggagcctgactccctcacctcccgatcagactcccctatgcacgcctgccctttagagctgggcaccaccccatggga

SEQ ID NO: 551569 - DNA, 280 bp, Homo sapiens
tcccccttgtttcgggggaccgtcgtgtcagcactgtctgcagtgatgtcttttgtgtctttgatcgttacttcatggtcttgattgtatctcctttgtgagcggcggtttggctatgttgtctttcaatactatttcccttcttccgtgaccacgatgctctcctgggtttccttttgaatcaagacagagtctgctccagcccggacctctctagcctcgtatcaatagccgtgcccatgcccgtacatgcaagacatgcaagcccggtacatgcaag

SEQ ID NO: 551570 - DNA, 138 bp, Homo sapiens
agcctatatctaccttcggtctatattctattactacctatttattaatgactagcctgttgtaagactttagccatccatgtattacatgtatttcagacctaggtgatcacattaagatctcataatattctaaga

SEQ ID NO: 551571 - DNA, 310 bp, Homo sapiens
gggggaaaaaggctaaggggggggggggggggggcccattttccatttttttccccgggcaaattggggtttttcccccccggtttgtgttcccccaaacccccccgggggggtaaaggggttttggtttttcaaccccggaaaaaaaattttttttccctttttcccccccccaagaaaaggggggggggggggggaaaccctttttcttggggggttttttttttttccaaaagcccccttggttgggggggggaaaaagggggttttttcccccccgggttttttttttaaaaaaattccccccgga

SEQ ID NO: 551572 - DNA, 210 bp, Homo sapiens
tctcttcatggcgagggggtgatctaaaacactcttatacgccggacttctattgactatgggttaatcgtagtgaccgctgtggctggcacgacattgacccaaccctggggttagtatagcttagttaaactttcgtttattgctaaaggctaatcactgctgtttcccgatggggatgtggctacggataagccgttttgagctgca

SEQ ID NO: 551573 - DNA, 877 bp, Homo sapiens
attgattctttaaataagtaaccaagagttagccaggaaaagaggggtggaatcctttcttagttattttgcattatagaatctaatttcttctttatcataactctgtaagaagacataattgatttttgatattgctatattattttctgtataatagaatttataaaattatacttagaaacaactttattagttaggctgttgagctctagacagacagtgaagaagattaagtgtggtaaaagaagaagcatcagcaccagctggtgccctaatttgcatcttagcatccacttaactcttttttcgccttttctgccgtatttaaagagagctactttgacctctcttgctctcatacactttctctgttgagattccctccatagcagcaaactctgtccatatgcaagatatataaatttttctattggtaatgtatactggatgcattttatgttgcatttattactctctctttataggaatgcttgtgtggaaagtttcagtgttggagaatgtacaagagatacctgtatttggacattgtgcctgctattatttcaacgctagtcgaggaccaaatgtttggagtgtggaatttcccgggaagatccggatggtccaggatcctgcgaaggactaacgaagcccaaaaagtggtgctggaaggaatacaatatttttattgacacgacgacgcaagtgcacacgattagcatgcagggatgctacagatgagacgcaccaagtataaggagggaaagcaaacgaagaaacagcaaagggaccaacgaggccaccaaccaccaaagggccagatgagaaagagaggagagacggttacagggacgaacaatgagaaaagaggcaa

SEQ ID NO: 551574 - DNA, 331 bp, Homo sapiens
aaggaacaattgagacgctatagctagagtctaaggcagcagtccgcaatcttttggcaccaggactggtttcgtggaagacagtttttccacggatggagaggatgatggtttgggataaaactgttccaccttagatcatcaggcattagttagattctcatgaggagtgcgcatcctagtttcctcgcatacgcagctcacaacagggttcgccctcctatgagaatctaatgctgccactgatctgactggctgtggagcccaagcagtaatgctcgctcatgccccctaccccaccttctgctgtgctgccgttaggccgatctga

SEQ ID NO: 551575 - DNA, 286 bp, Homo sapiens
gctgtgctggtgaggcagtctggaccagtccactggctcacagatgttcgtgacgagcctggtcaaatataatatagatcccagatctcctaggcctctagctaccaggcagagggcagcatgccggtgtgtctgctcaggtgttcattgagatgtctggggtgtggaggttgggagccttctgtggcccacttgggaacccacgtgttctcgccactcctgactgccagctgacagaaagcacgggcagtcagcacatgaagttgctattaaatggacttcgtga

SEQ ID NO: 551576 - DNA, 439 bp, Homo sapiens
  misc_feature (415)..(415): n is a, c, g, or t
agcagacgtctcactcttgtcgcccaggctggagtgtaatggcatgatctcgcctcactgcaacctccacctcctgggttcaagcaattctcctgtctcagcctcccgagtagctgggactacaggcactcatcaccacacctggctaatttttgtatttttagtattttctggtgagggtccaggtttccggaaacaactcagagacatatgttaagatgttatctttagttttcacagggaaccaaatatgttacgactccaatttccttggctattgttttaagttaccattaccttctcgttgatcaagttgctcatttacttctcaagcctagctagatgcctggaatttcccttgaaggaagtcaagattttcctttatctccatactggctgatggtgatcgagtaangccctaagaggggtccctgctcca

SEQ ID NO: 551577 - DNA, 90 bp, Homo sapiens
ggcacgagcacaaccgtcgtccacatgatgccaaaccagtcccccactggaacacgatgccactcgctgtagcagctactgcatgcctca

SEQ ID NO: 551578 - DNA, 333 bp, Homo sapiens
gggcacaagctcgcatccgtccgccgctccggctaccagcagcccgagcaccagcaacgcagcccagcgccgccgccgcagcagccagccccacgctgggccaggagtcgaggcgggatgaaggcgccgaggagaagccgggtgaaagcgcagcggcgccccggccgcctgcagctcgccggctccgcgaggcgccaccaccgccgccggcgactcctccggccgcccccgccgcctcagacacgggctcccgccgggcgccagcctggtcccatcggcaccggcggcctccggagctctgatcccggctgcgttccctggttccggttattt

SEQ ID NO: 551579 - DNA, 1323 bp, Homo sapiens
  misc_feature (579)..(579): n is a, c, g, or t
ggcttcgaacctgagtgtgtcctgaatgagtacacctaccccgctgagagtagccatggggaataagatgcggatcaggttagggatcttcgccagtgttctattcgaggccagtgcatgcgaactagtgtgttcgctctgaatccatgagtagcatcgcttcgagcgagatctgacaacaaaggagtccagatattaagcatagtttgcatgaccgggaggctgctgcaccagtgtgatcatgcggttccctgccacgatcatgctctcgtgtctcttgctgggtagagcccggtacatgcatgtatccggtgaacgttgatattcatgcaagtacgtgtcttgcttagtgtgaatattagaggtatcgacaagtaccccattgtcgtatcaacctacttggtggaccttttttgcaatgagtctcgtcccacgcacggggactcatccaggacgtagcgtctataattacacggcaggtcccatagttactctaagcaagggagaacaatcattccattgtctagagtgctgctggctagagtgcgtcgcatctgtggggctagactgcggtggtangcggagagacgttttccaccgctgagttctacttcccacaaagagtcgtggttgatcactcgcagaggaagtcgttcgtcgccatgtcgtagggtcgtcaaccacgacttgtggttggttcgaagaaaccgatgcttagactgttgttcccgagtgcttgaaaacaagacggttggcatccgtcacttcgaaggaactattactcgttcatagatgcaacatcaaaggtcacggacctagtgagaccgcgagaagatactctcggtcaatagggagataccgctttagagacaagccctaagcgaatttttcatttagaaccagtgttccagaaggggttagacacaaaggcctcccccccaatgggattggcggcacaagagaggtatcttcgcttagccgcgaagctgtctatcccataagagaggcaagggagcctcgttgttaattacaacggacttgtcgtggagcgggctccgtggatgcctttgtggcgatggctctcgggtgtcgcttaccgcttatttgttcaggaatgttcccattctcccgttgatatggatacattgggcgcgatgggccactttgttactattctccccgtcgatgacgatggagcgcctgtcctggtgggcctcgcgagttaccgttaacctcctgggaggctttcgtgtggcagggctgctttccaaagagccgcttttttcgccccgtcggccggtccgtgcgaggggatctgtccca

SEQ ID NO: 551580 - DNA, 287 bp, Homo sapiens
gcgaagcacgtggatcgcctggggtcaggagatcacgaccatcctacctaacccagtgacatcccatctctactaaaagtacaagaaattacccgggcatggtggcatgcgcctgtaattccagcatactcatgaggcagaggcaggagaatcgcttgggccagagaggtggaggttgcagtgggccgagatcgcaccactgcactccagcctaagcaaccgagcaagactccgtcttgaaagaaagaaaaagagagacagagcgagagagcgggtctctggcccag

SEQ ID NO: 551581 - DNA, 316 bp, Homo sapiens
tcttacgccaacaacatcaacacccacgaaggcggcgcgcgcgtttccggtttccgcaccgccctcacgcgcgtggtgaacggtttcggtaaagagaacgacatgttcaagggcatggcggagcaactcacgggtgacgacatccgcgaaggcctcaccgtggtgatctcggcgaagattcccgatccccaattcgaaggccaaaccaagaccaagctcggcaactccgaagtggagggtctcgtatcctccatcgtgagcgagaaactgcgtatttacttcgaacagcgcccgcagatcgccaagaagatcattc

SEQ ID NO: 551582 - DNA, 182 bp, Homo sapiens
  misc_feature (164)..(164): n is a, c, g, or t
tgtgctgcggtgctctcgcaggctccccagcggggcccaatccattggtggcttttccttggctgtcacatccagctttttccattccaggtccatcctcattggttccactttggcgtcaggtggcctcagccaacacagtgcattggttccgccggctgggntcaccggcagctcgcaca

SEQ ID NO: 551583 - DNA, 235 bp, Homo sapiens
tagtatttatagtttggtctagtcagcaacgctaagctgtctgttatcgctcttgtcacagggtcttgccaggtggggatgccacggtcagtccttccagtatagaaacacgaagcctacgagccttgctcctaagtaagcttgaattctagacatcttcacgcattgccactcaacaccagtccccaggattcaagccctaccaggacctgtcatgctatatctattccagcgt

SEQ ID NO: 551584 - DNA, 714 bp, Homo sapiens
  misc_feature (505)..(505): n is a, c, g, or t
  misc_feature (515)..(515): n is a, c, g, or t
  misc_feature (614)..(614): n is a, c, g, or t
  misc_feature (640)..(640): n is a, c, g, or t
  misc_feature (642)..(642): n is a, c, g, or t
  misc_feature (654)..(654): n is a, c, g, or t
gtggtccggtaccccgttattagctgggcaatgtggcgcacacctgtattcgcctgctagttcaggaacctgagatggaagaattaattggggcccccgagtttcaaggctgcagtgagtcgtgagtgggcccactgcacttccacgccggggtgacaagaagagaaccttgttctcgaaaaggagatttttggaaaccaccatgggacccatgcctttcataagttctagaaagttattttcacactgataaatctatattcaccccaataatcaagggtgtaaggcttaaaataatacattttgtagacacagccaagacttcacggggttacctcccactgggccctcttttagggaagtctgcttgggagaaaatatctccacgccaaatgtaagagggagtatcacccaacctacgaggagatgaagcactgtatcccacgccaattatggagtcccaacaccacggcatattccagctatggagctagctttaaaaggnacagtaaaantattaatcggttagctgggtggaatggcccatgcctgtagtcccagctactcaggaggctcagcagcaggacgacttgagcccaagagttccagaccancctggccaccttagtgagatcccttntnttaaaaataatnacttattgccagatttggggcatttggaaagaagttcattgaagattaagccaaagtata

SEQ ID NO: 551585 - DNA, 84 bp, Homo sapiens
  misc_feature (68)..(68): n is a, c, g, or t
gccagcaccaaccagacatctatgtacctctgtgccagcacccgccccgggcagggttcctctggaancaccatatattttgga

SEQ ID NO: 551586 - DNA, 940 bp, Homo sapiens
ttgtcccgtgcgcagtagtttcccgtgggccctcccctggccggtgtgagtggacctgtgtgtgttaaaagagggttacgcccgcgtgggctgtctacacggggactgtagcccccgtttttggaccacctgggctgtatccctccccccacaagtttatctctcctgcggctgttgcgccgcgcacccctatgcccccccgttgggggagaccgctccccctgttgagacacacaccttgtgtggctgagagaagttcgggctgagggaactctctttcctcgggtgtataattctcgtcgaggagttagaaaaataaagatcacaatgtcctcgggaggaaaacacccgcccccatggggaacctcccccccctcctcaaaagtgtttccttcggttatgctatttcaggcccttctaaacttgtcccactggccccctgggttaacccagaacaacgctgcgcaccaccctgcactcgaggttgttcaaaacacacattccttcctatacacaaaacaaaagcccccttaaatatttttttccgtgaataataatctcctatgacaaatatgttcctgccaaaaggagattttctccgcaattattgtgttttactgaagtaacagtagttctttctccccccgcatctatcccaatagtctcttgtgcatcaacaggggtcgattcatcgccgttaatccccccgcgactctcctcctcgctatatctcgatatttctccgccattactgcggatagaacgatacagacagaccagtcacgctcatagtgagtgaccaccccgaggtgagtgaggcggagctagcctcctacgcggcaagcccagaaaaagactctgaagggcacgacgaagtcagatcgaccgcgtagtatcgcccgcgccccactttccctcaaaaagcatacattacaaaaag

SEQ ID NO: 551587 - DNA, 466 bp, Homo sapiens
  misc_feature (13)..(13): n is a, c, g, or t
  misc_feature (27)..(27): n is a, c, g, or t
  misc_feature (202)..(202): n is a, c, g, or t
  misc_feature (257)..(257): n is a, c, g, or t
  misc_feature (267)..(267): n is a, c, g, or t
  misc_feature (366)..(366): n is a, c, g, or t
  misc_feature (392)..(392): n is a, c, g, or t
  misc_feature (394)..(394): n is a, c, g, or t
  misc_feature (406)..(406): n is a, c, g, or t
ccgctcgaaaggnatctgaaacatggncctgccttcataattctagaaagttacaactgataatctatattcacccaaataatcagggtgaggtaaataatacttagacagcaagactcaggggttacctcctgtgcctttttagggagctgttggagaaatactccgcaaatgaggagtacacaaaccgagatgactgaanccagcaataggatccaacacggcatattccagctatggagctagctttaaaaggnacagtaaaantattaatcggttagctgggtggaatggcccatgcctgtagtcccagctactcaggaggctcagcagcaggacgacttgagcccaagagttccagaccancctggccaccttagtgagatcccttntnttaaaaataatnacttattgccagatttggggcatttggaaagaagttcattgaagattaagccaaagtata

SEQ ID NO: 551588 - DNA, 83 bp, Homo sapiens
aattcaagcttctaacgatgtacggggacatgagataatgttagaggttttaaagtgattaaacgtgcagactatgcaaacca

SEQ ID NO: 551589 - DNA, 795 bp, Homo sapiens
cttgtggcctatgtcctcctggagcccgaggagggcgggcgggcctaccgggccctgcactgccctacaggcactgagtatacctgcaatggtgtaccccgtaccaggaagccctggcctgtgctggagccctacgctgctggcttgcccccgcacaagcatgtgggctcgtgcccactgaggtcctggctggtacccatgctcctctacgcctttttcactctggacccatggggacatgcacatgcctggtgctgaagcctgccacctgtatccctgagcctgagtgctgcctgtgctcttcctgccagatggccacctgccctggctgcactgtcaccaggcacggtctggtcctgcgtgatctcaagcttgtgtcgctttgtcttcgctgaccgtgagaggaacgaacgctggtgctagagaacctggaggactcctgcgtgctgacttgggccagatgattccctgtgggacaagcacgcgtgcccagcctacgtgggacctgagatactcagtcacgggcctcatactcgtggcaaggcacgcctgatgtctggagcctgggctgtgggctcttcaaccatgctggcctggccatacccccttccaggactcggagcctgtcctgctcttcggaagactccgcctgtggggcctacgccttgcttggcagcctctcggccccttgcccggtgcactggtgtcctgctccttcgtcggggagccacgctgaacggctcacaggcacagggtcttcctgagcccttggttggagggaccggtgcctatttc

SEQ ID NO: 551590 - DNA, 1009 bp, Homo sapiens
gtgccaagggaaagttttggaaagcttttcaaaagaagatctacggctgagtgcggtggctcatgcctgtaatcccggcgctttgggaggctgaggcgggtggatcacttgggacgaggagttcaagactagcctgggcaatatggcgaacccccgtgtctactaaaaataccaaaagaaaaaaaaaaaagccaagtgtggtggcacagtgccaggctgaggtgggaggatcaccttgagcccgggaggtggaggttgcagtgagctgagattccaccactgcactccagtctgggcaacagagtaagacgctgtcccccattccttgcccgccccttctcaaaaaaaaaaagatccggggaggcaaagggtttataattcagggaccctacaatttacagggatattgaggccttttcccataatcagggttgaagcagttacaaattaattcacagaaggaggggagtacggcttgacaccagccatttttattattttctggacaaggacttcctggtacaattttgttggccaatgtttaattgctagaaaactggctgtgggaaatggggttagaagcgttggatgttgtagaaaaccaatctgtatattaatgtttacacaaaaagttatcctccaggaaaacagcaaggggaggcggaccagacacttaaacattaaaccccaggtatggcacgcatattgcaggactctatcaactgacaggttcaggactcaactcttgtggaccacttggtattccacatcatatggccaaattttaaagcacgcctggtgggtgatactttaacacaaatttctgccacgtagacttctcggtgtaaccaaaaggatcatacaggctggcccctataaaaggggcctttcatacagaatctcacacggtttggacacatttttctacaaacgtggtctaagattgtttcccattgtggagaaatttccccctacagaggttccgtgcgtataccacaatggaagactg

SEQ ID NO: 551591 - DNA, 2567 bp, Homo sapiens
agaacagggacgcaaagttgagtaattagcaaggagaccagttagaaggccactgcagtaatctaagagagacaactctagcttggaccggtgtcatggtgatggggatagtggaaaggagttgaattctagatatattttgattgcatccacaggatttgctgataggtagcatgtggaatgtgagagagtggccaagagtgactccaaagtttttggcaagtgggcaggtgaatatatggatttggagctcaagggagcaatccagcctagagatacaaatttggaagttgtcacagtgcagatggtacttaaaatcatgagaccagatgagatcaccaaggaaatgcaaatagatagaaaagagaagaagaccaaagcctaagccctggggccctccaatgttaaaaggttgaaagatgaggcagaactagcaaaggacactgagaaataaataatgagatataaagagaaacaagattagtaagtatgcatcatgtgccagacaccatgctccagacaaaggatgcaaagacaaacacaaccccgtcctcatcatcctcatgctctaatgcagcagtcaggtactacaccttgaaataccattgtgattggttcagggataggtgtaaaatgtcagggacagtgagaccacaaccttgttacttctgtgaatgattacacacacacacacaatcagccatacttgcctcttctgagtgattctttttgtttatttattcttttgtctctaacaggcaattggttaccaaaccttgaagaatctacctttgtaatatctcttatatgtgacacctcctgtccattttctcagccaccagtctagatgaagccctcattaaagatcacctgcagtgttgcagaagctcctaaacatcctcgttccctccctttaaccctctaatcctacttttttcattactcttcttcctcgcagttaactctcctgagcaaaagtctcaccacctctaggatgcagcccaggtgcctaaacccgttattgaaggtgctccacaaaccgatactaccctgccccgccagcagtgtcttcactcttcccagtgttctctgtttcctggacactcacatccatgcttggtatcacactttagcctgtgacacagactcccacctggaatgcctatctctattccaaagtgttcatatgccatttccttcacaaagcttttcccctgctgtagcctgcatggttgtctgtgtctccaaattgctgtatcacttggagtctctgacactcatttttgtatgtaggtatacgatggcacgagtagtcactaaaatacattcatattcactacttcattcactttcatttaaatgtgcctcctccttttaaggataagcaactttccgtgcaaggcatgatactattctaataatagattctaaatgaatagatgttagattttttttaaaggtgagtaaatatataaagtataagactgtaataaaacactttgtcgtatgcaagttctaccaagctccaggaatatagtcatgaaaataattcaaataaagtatttactcttttaataaatagttattaagttttatgtgccagccatgtgcaagacactaatgattcaaaaataagtcataattccaaggctcaagaaacctgtaatctaatgagaaagacatacagatcgttataatataatctgacacctgtagttgtagatatatctatgagtgcatggaagagaaggcttcctggaggaggtgatacatatggtgattctcagaggatgagtagtagttcgatacagtggaaattgaataggaggaggaacagcataggcagagggcacagcagtggaggtgagaaaggcatggtgtgtggagatggggaggccagatgatggagagccatgtatgtcctgttaaggtacttgaattttaccctgtgggtgatgccaacgatgtccatatagaaaagccttggaaggattttatgtatagaaagagcatgatcagatttgcatgtttgaacacttggacaacctaaaagatggatttgagagagaccagagttggatgcagagagacaaattatgcgccattccagtagaccaggtaagagatgctgagggcttggattaagtgaaggcagtaagagttgggtggggaaaaggagataaattcaagtatcacttatggggcaaaattcacaggatgcagtgatacagtcactgtggcagcctaggggagggtgtggaaagagccaaagatggcccttacttctgaccttgaagattgggtgagcagtgggccaccccttgcagagagacaggggaagacggcttggtttatggtggaaatgatgagttcagtttgagccatatggagtttgaaatgcctctggcattccattcaaagtaatccccttaaatggtcattgagtgactcaaatagtgctactgttcttggaacttttcagagacttctcgaaaaaccattaccaaagacattttatcagctacataaactagtcatgcattttatagacacaactctccttttgg

SEQ ID NO: 551592 - DNA, 124 bp, Homo sapiens
acacggctcttagcacactcacagaggttggaggctctcagaagctcttctaaaaaaggatacacacctttcacaagggcaaactttttccttttcccggtgtattctagtggaatggaatctc

SEQ ID NO: 551593 - DNA, 414 bp, Homo sapiens
tgtgcgggtatctagaggatcccttatatgctgtctcaaaagaaagaagaaatgaagattcggtcctcagttgcaccacatttcacatgctgagcagcagactgtgctgatggtccgtgttctcgacagcacagatctggaacatttaccccacacacagaggtctggagggcggctggcttgggacaagctctcctagcggtgtgggatgggcagatggtggtgtatgtggcaagtcaggatttagaaggaccacactggccatgaaaggtcacatcctggcagggagaggggccccgtttttcaagccttcatggctttccagctccttggaaaaggaagtctctgtgtcactctcttacctctcatgtacctctgatctttcttaggaaaaacagcaagggtggggtcatt

SEQ ID NO: 551594 - DNA, 142 bp, Homo sapiens
ctagaggatcgccaaacactgcagtctagctgaagagacagacatatagcaggcaatagttgataggctaaagcgatggtaggaatgaaagtgcacaagggcatggggggactggaagtgaagtgagacaatactgtctcca

SEQ ID NO: 551595 - DNA, 270 bp, Homo sapiens
taagagtgaatgtgcatattcatattacgttaaattaacaatatatctttcagatatagtaaactgaaagtgtacactcttctccgtgcattatcttagtatgtatgcctgcctccccatataattgactctctgtgctttttttctctttatggccatttttggttcttaacttccattcccagtgtaatgcaatctaacactttccgtgttcttttaagaagggtttgtctcagatttcttatgaacaaaaatatatggttctggtgt

SEQ ID NO: 551596 - DNA, 236 bp, Homo sapiens
  misc_feature (33)..(33): n is a, c, g, or t
  misc_feature (56)..(56): n is a, c, g, or t
  misc_feature (116)..(116): n is a, c, g, or t
  misc_feature (178)..(178): n is a, c, g, or t
  misc_feature (211)..(211): n is a, c, g, or t
cggcacgagcctggcgtgtgcttggccctcctnctcgcccacgggcctcaaatttnaggaccctcctcctcgcccacgggcctcagacctcaggaccctgccgtctcacgcctttntgaaccccaaatatctgagaccagtctcagtttattttgccaaggttaaggatgcacctgtnacagcctcaggaggtcctgacaacaggtgcctnaggtggctggggatacagtttgcct

SEQ ID NO: 551597 - DNA, 154 bp, Homo sapiens
gatacggtggaggtgagtagatgtcataacctgacccactcaccacaggcctagccttcttctggcctggctattcctgaggtctctgaagaaagctcagaaggttgactgttgcatggtttcctttcccctagtttttctaacacagaatcct

SEQ ID NO: 551598 - DNA, 488 bp, Homo sapiens
cccgacggacctactcgtggactactcgtgggacacactcactcgtggacactcacgagctcccgtctctgtcagacacgtgtacctctgctaaccaccactcaggcatctccgggaggacaggacctgtcatcttctccaagatggttctgctccacccaaaccaggctttcctaaagccccaaactccacaccggaggcaacgcctgctgaagccccgtacccgccacagcatccaccttaaccttccaaatgccactgctgtgaagaggcgccatcgcagatcgccatggcgacagagcccttctgacccaggggatccactgctctcaggcactgtccacccgacacctggtatagccgatagtacaacccaaaggtccactgctgggatcctcctgacccgtggccttacatgagccgagacgggtctgatgagcgagactctgacatatctagacaaaggcaactatatacaaccaattcat

SEQ ID NO: 551599 - DNA, 244 bp, Homo sapiens
cccccccggggtccccccaggggtcccccccggggtgggggttaccaaacaggaaaaaaattaaaccgggcccccccttttccccccccaagggtttttaaacccctttctggcccccttttttttttggccccccccggggagggcccggggggttttcccccccggtttttttcccacccttccccccccaaggtttttcccgttccccttggggtttttttttatttttgaatggggccca

SEQ ID NO: 551600 - DNA, 640 bp, Homo sapiens
gcctggctctagatgtgaccgagcttgacaagcccagtggcaccggtctcggagaatggcagcgacggttctgcatcctttacgagcacgggctcttgcgctacgccctggatgagatgcccacgagccttcctcagggcaccagtcaacgatgataccacgtgcagcaggatgtgggtggatggggagggccgcacgggccataagttctccctgtgtattctgacgcctgagaaaggagcattgctatccggtgcggagaagcaaggatgtatcgtgcgagtcgagtgagcgtggacgatgctcatgtgtctatccccggtagcaacaaggcagagatcagacagaagaaacggaatagtggagtccccccacagcacaggagcctgggcctgccaaggtggctggttaccagcagcagcagcagcagcagcatgcagcagcatccccagtgctgagaaagtccccacacacaagatccacaatctgggaggaagacatgaggaccaagggacgcagccagatggcagcagtctgagtgccagctcagagtcccagccagagccaggctcctggtgccagctccctgcgggaacctgggctagagagcaaagaagagggagagcgccatgagtagcac

SEQ ID NO: 551601 - DNA, 460 bp, Homo sapiens
  misc_feature (12)..(12): n is a, c, g, or t
  misc_feature (38)..(38): n is a, c, g, or t
  misc_feature (157)..(157): n is a, c, g, or t
  misc_feature (164)..(164): n is a, c, g, or t
  misc_feature (438)..(438): n is a, c, g, or t
  misc_feature (460)..(460): n is a, c, g, or t
cctcatatcacncctattaggggtaggaacagatgtantattatgagaaactgggtagaatttataagaataatatatggtgggtaacccctggcaaacatcaccctccctctggacatcccttaattacaaactattaaaaaatgaattagatgcnacgcaancttttgccttaagatcagtggtttcaggcccaggcaacaagtgcacgccagtaatccaagcactttgggaggctgaggtgggcagatcacttgaccccgggagttcaagaccagcctgggcaaaatggcaaaaccctgtctctacaaaaacttaggtaggcatggtgacttgtcctgcaggccagctactcagtgggctgaggtggaaggatcacttgaacccaggaggtccaggctacagtgagccgtgattgcatcctttactccagactgngttaacagagtaagaccctgtn

SEQ ID NO: 551602 - DNA, 137 bp, Homo sapiens
  misc_feature (38)..(38): n is a, c, g, or t
ttctgccctctgtattatgtggcattgccatcccatgncacatcagggagctcactcagtggttagatgtaggtggatgctggctcgggaagtcctgcgcatgtgtggccatttccgtgacacccatgggaggtcat

SEQ ID NO: 551603 - DNA, 603 bp, Homo sapiens
ttgggcatcaaaaatgctgcccatttctctgttgctcccaagctggctggcctttgcataggagcagacagcagatgcatagttgccgcgaaaggcacaacagttttcaggttttaggctgccgtctgagggaagacgcataataggaaggaaccccctcctgcttccccctattttccccccacattcgctcctagcgacctcccacccaccctactttccaaaaaccctttcgtagcccgaccgaccttgagcaatccccttgtcttccttctacgccttaccatctcatcctctcctttcccatccttcatctctcatcccctgtctctcttccatcccttcctcagataaaccccttgattctttcgctccatgctgtgcccttggccgattaatctagttatagtatcccttaaatttccacccacctcaacttctctcccaattatacttcatacctcgccctccctttctcatcctacctcctttccctgcacatcacatacttatcgctttttatctcttccctaaccttctactatacactcaccagcttctctatcttcacaacttcgctttcatttccgccacccaggtgcc

SEQ ID NO: 551604 - DNA, 368 bp, Homo sapiens
catcgcgggaggcgcatgcgcggggtatgggcgctggcgcggggccctttggaagcaagattgttccttggttcctaccttaaccaagtaaccttccttgggttcaacgggcgctttttaaaaatcctctgggaagcccctggggaggccgggaccgggtttttcaaatttcccatttctgggttttcccatttgtgggggatatgggacacttttcacacagggttcacgttttctacatcccccccacccacatacatgggcggatatttcgcatctaattgttgtaaaatgcgtaacaatgacccaaagtttgcgcgccgggatcacgggggttgccttgggcgggcggcccaccctcttacgaa

SEQ ID NO: 551605 - DNA, 236 bp, Homo sapiens
tctcaatccagtccatggtaggtgcagtaaggcatcacgatatcaaaagaacacttgcgtgacgcacaccaagtgacatcatataccacctcagtatagtacctttgataatgtgcctgaaaaatcagtgttcaggggtccttattggagctctataattagcatcctcaaccaactccatgcattttccatcaagtgctttactgtcttttatcaacctggtatcatctgtagtc

SEQ ID NO: 551606 - DNA, 196 bp, Homo sapiens
ggtagcacctttgccaaggtcactgacagtgacagcagtaaaaagggacgtatttgccaaaaacaagattggacactctctgtaaacctcactaccaacggctggttaaacatttacaaatgagagcaggttccacatacacaggtccgttcgtgggtaagtgtgtctgtctttccctcctcgaggaagcacatgc

SEQ ID NO: 551607 - DNA, 508 bp, Homo sapiens
  misc_feature (151)..(151): n is a, c, g, or t
  misc_feature (428)..(428): n is a, c, g, or t
ccagcgacatttgctagttagtttgagaaagattctaactggagcagcgcttggttggaggaggtcaattgtatgtctgcggaaagggttcagacagacttgtcatcagtttcctggcgctgaccctgggtcttacctggaaaggcccttnaaacacccaccccagggatccacggtgcagggaaggtggtcatgcagaaaacaacctctagcgagttgctcggctgaggccctctgtaggtgaccttgtcttgcctccaaaagactggacctccttttcttcttcagtggtaaaaggagtttcttggtgccaccgtgggctctgggcagagactgtgccttcctcccttttgtgtctgagtcgccccgaatgctttggcgcagggagtttgggtcagagcgatctccagccccttccagttcactgngctctgtgataacggttcctggggaattttgtgtcatgttgcttggaaaccagatggaaatagggccaattaccattgaa

SEQ ID NO: 551608 - DNA, 633 bp, Homo sapiens
  misc_feature (1)..(1): n is a, c, g, or t
  misc_feature (61)..(61): n is a, c, g, or t
  misc_feature (139)..(139): n is a, c, g, or t
  misc_feature (341)..(341): n is a, c, g, or t
  misc_feature (559)..(559): n is a, c, g, or t
naagacctcggctttaaccgtcaacgccaggttaagggttacaagcattgaggccacatcntagccattttgatcccaaagcacttctccatgattatgagagaatcatggcacatcgtcacagtgctcaggtgtccgncccgaaggattccctacctcatccatattggtccagcaatttgcgcttgtggcttcacaaaggtctgacatcagacttcaggcctgggaaaaactggtatcaaaccttcatgtctctgccaagtttttgtgaatacttgggtcaaccaaaaatccaagcacaggattatggcctgtattggagacagatgaagtcgtaagangtctgatagatggaatacttaccaataagaaaatgatttttgttccatcgtatatcaatatctttctgagactacagaagtttcttcctgaacgcgcctcagcgattttaaatcgtatgcagaatattcaatttgaagcagtggttggccacaaaatcaaaatgaaatgaataaataagctccagccagagatgtatgcatgataatgatatgaatantttcgaatcaatgctgcaaagctttatttcacattttttcagtcctgataatattaaaaacattggtttggcac

SEQ ID NO: 551609 - DNA, 372 bp, Homo sapiens
ctggaccggacttcctgtgtgtgttggtatgtagcaccagttctttcagcagagtgtacaacgttatatgggctcggcaaagccatagccatgttgcctgtttttgaatatgacacaatgctttacttcgccgtccaccactacagagcaggcatagcagccctgtttactgctctcccggacaagaaaagtgccatctcgcttccctcgcaacaggttttcagctttgtttcggttgctgcttccaacattccatgtcttctcatcatgatggggcaaatcttcatcatcttccaccagtgaatattggtcttcagtgttttcattgcccaaccactcgttcaacttcttttgccgaacacctttttgagt

SEQ ID NO: 551610 - DNA, 133 bp, Homo sapiens
cagccggaccggaaaaggcaaaagaatgttgttctaacaaatccacaaatatcactgctaaatactggggtccaagagtattagaccagcaaggttccccacacagatgctgcgctgatttgctgcatctgct

SEQ ID NO: 551611 - DNA, 721 bp, Homo sapiens
gactgcgcaggcacaacagagccgctcccctctcctcgtcccgacaccggtgactggagagcgcccgacgttgcatttctggcgatatcctcgcagtcattcctgcggcttgcgcgcccttgtagacagccggggtcctgcgtgagaccggtgcaggcctggagcgtatgtctcctgtctgtgacaggagaagagaaaaatgcaggtacactggctcacgtagtgccgtttgcattggttaggcgtttggcgtactcagcactggtgtcgcttctggtgggatcataggcctaatgtaaaagcatgcacgcgtgccgtcccatggttgcagggctgctctataggcagtctacgccgagcctgggtgcattacctgaactgtctcacggatccaaggaacgttgtggcgttatcctatgactacatctggtaccttgagcgtggcagtagtgggaattgaggttctaccacatctggacagttcagtggcctgcaggttcgaattgcagggtgccagttggctgatggtcgccaaaagtagagagtcagtatgttcgaacagagcccctattgagcaagaagtcatgtgccagcttgagactgatgaagaattaatatctctggatcttccactattttcactcatatgaagagaacatacgtgcgcattttgcaatctgacattttacctaaaagtgaagacacatacttgggcaaagag

SEQ ID NO: 551612 - DNA, 825 bp, Homo sapiens
  misc_feature (1)..(1): n is a, c, g, or t
  misc_feature (75)..(75): n is a, c, g, or t
  misc_feature (84)..(85): n is a, c, g, or t
  misc_feature (90)..(91): n is a, c, g, or t
  misc_feature (119)..(119): n is a, c, g, or t
  misc_feature (134)..(135): n is a, c, g, or t
  misc_feature (149)..(149): n is a, c, g, or t
  misc_feature (169)..(169): n is a, c, g, or t
  misc_feature (178)..(178): n is a, c, g, or t
  misc_feature (196)..(196): n is a, c, g, or t
  misc_feature (238)..(238): n is a, c, g, or t
  misc_feature (241)..(241): n is a, c, g, or t
  misc_feature (268)..(268): n is a, c, g, or t
  misc_feature (274)..(274): n is a, c, g, or t
  misc_feature (280)..(280): n is a, c, g, or t
  misc_feature (284)..(284): n is a, c, g, or t
  misc_feature (286)..(286): n is a, c, g, or t
  misc_feature (300)..(300): n is a, c, g, or t
  misc_feature (308)..(308): n is a, c, g, or t
  misc_feature (325)..(325): n is a, c, g, or t
  misc_feature (346)..(347): n is a, c, g, or t
  misc_feature (359)..(359): n is a, c, g, or t
  misc_feature (384)..(384): n is a, c, g, or t
  misc_feature (401)..(401): n is a, c, g, or t
  misc_feature (422)..(422): n is a, c, g, or t
  misc_feature (486)..(486): n is a, c, g, or t
  misc_feature (513)..(513): n is a, c, g, or t
  misc_feature (597)..(597): n is a, c, g, or t
  misc_feature (601)..(601): n is a, c, g, or t
  misc_feature (661)..(661): n is a, c, g, or t
  misc_feature (664)..(664): n is a, c, g, or t
  misc_feature (708)..(708): n is a, c, g, or t
  misc_feature (729)..(729): n is a, c, g, or t
  misc_feature (755)..(755): n is a, c, g, or t
  misc_feature (761)..(761): n is a, c, g, or t
  misc_feature (795)..(795): n is a, c, g, or t
nggcggcaagggagccctagggcgaggggaaagcagggtgtcggcagcaagatggctccgggggtttagacactnctggcttcnnccccnnccgccacctgcctctcactccagctgcnagcagcttcacttgnngccctgggcctccnactcctcctcgtcgtcttcntacatctcnccctcttcctcggccgtngcgtcctggtactgctggtactcggacaccaggtcgttcatnttnctctcggcctcggtgaactccatctcntccatnccctcncccntntaccagtgcagggnggccttgngccggaacatggccgtnaactgctcggtgatgcgtttnntcagctcctggntggccgtgctgttcccgatgaaggnggaggacatcttgaggncggggggcgggatgtcacacncggccaccttcacgttgttgggcgataaactccacgaagtagctgctgttcttgctctggatgnacagcatctgctcgtccacctccttcntggacatgcggccccggaacacggtggccaccgtcaggtaggcggccgtggcgcgggtcgcaggcggccatcatgttcttggcntcgnacatctgctgggtgagctcgggcacggtcagggcccggtactgctggctgccccgggctnttnggggggcgaacggggcatgaagaagtgcaggcgcgggaagggcncatgttgacggccagcttgcncaggtcagcgttgagctggcccgggnagcgcnaggaggtggtgactccgctcatggtggccgatancaggtggttgaggtcccgtagtggggcgtg

SEQ ID NO: 551613 - DNA, 217 bp, Homo sapiens
atccctacgctggtcgcagtcaactttcaatctggtactcacagtgaatctcttcctaaggtgaaagaaaaaatggttatattaaaacaggagatagtctctgtcaagtatccagtgtggcatttggctaaggatttcataagaataattcttgaataccaagattttttgggaaatatggttggtaccggaaaattgcaacaatttaactaaaaaa

SEQ ID NO: 551614 - DNA, 306 bp, Homo sapiens
tggactctcctacgtatctactccaactccaagcgtctgtcattcctgagtgaaggctgaactaacttgggagaaacttagtttatagtttaaacaaacatggtagcagccctttcccaaagcagacctccttcttgcctggtgactagatcgccttggtaggactaacattagccacaagattagaaattatggtttaggagtcatgcagctggaggatacaagattctgaccctccctaaactgctcctaagatcagtgcttgagatattctgcagactctgcacttaggatacagtagggaga

SEQ ID NO: 551615 - DNA, 248 bp, Homo sapiens
cctgttttagcacgctggagtcagggtgggtggatatgagtgtcaagagatcgagaccatcctggccaacatggtgaaaccccgtctccactaaaaatacaaaaattagctgggcatggtggcacgtgcctgtagtcccagctacttgggaggctgaggctggagaatcagctgaacctgggaggcagaagttggcagtgagccgagatcatgccactgtactccagcactccagcgtgctgatacaa

SEQ ID NO: 551616 - DNA, 160 bp, Homo sapiens
  misc_feature (88)..(88): n is a, c, g, or t
  misc_feature (128)..(128): n is a, c, g, or t
  misc_feature (131)..(131): n is a, c, g, or t
aaaacaaaacaaaacaaaaaagaagggaagacatacaaggccaggtgcaggggctcacaactataatttcagcatttggggaagccanggggggaggatggctggagcccaggagttcgagaccagcntgngccaaacaggaggacctcatcgtgattta

SEQ ID NO: 551617 - DNA, 332 bp, Homo sapiens
cgtgagtcaccatgcccagcctacgatgagtttattaagatttggttatgctggggacatgggaaaagccacgttaggggcacgcatgctggaggaacggggactgagggggtggatggatagccatcgaagcacattagaacctcatggcgaagagtctggctaagcgatgacgaagcgctgaggcatgggagcactgtggaatgaccctgaaggcgatacgggatgatgatgaccagacataaacagatctcgttcaagacgtatgtgaggcccgctctcatgagcaagaggctatatgagaataccatgaggcccatagagaccactca

SEQ ID NO: 551618 - DNA, 555 bp, Homo sapiens
accttgaatgttggccccaacccggcatgggccggctggttggaggcgttctggctggtttccctggctcctggccgggttcgtgctcgcagaaccgggggacacagagaagtcgaagatggactggcatgggtgggcataagtggcaccatttacgaatacggagccctcaacattgatggggaagagtacattcccttcaagcagtatgctggcaaatacgttctctttgtcaacgtgggcagctactgaaggctgacggggcagtacattgaactgaatgcactacaggaagagacttgcaccaatcggtctggtcattctgggctttccctggcaacaatttggcaggaaccaagagagaactcagagataccttcctaacctcaagtatgttcgaacaagtggagggtttggcccttatttccagctctttgagaaaggggatgtccatggagagaaagagcagaaattctacactttcctaaagaactcctggttcttccaactcggagctcctggggacctctgacggctcttcgggcccgtggtccc

SEQ ID NO: 551619 - DNA, 314 bp, Homo sapiens
ggcggttcgaccctcagcaaaccctgctgaagatggcggtatatagcctgagcaagaggtggctgaggttgatcggggtttatcgatcacagaacaggcccctctagagggatatgaagcaccgccagccctttgagttttaagctgtggctcgtagtgttctggcgagcagttttcttgattcaactcttgacgtttagggctacgcatagtggcgcatctaatcccagtttccgtcttagctattctctgttcagatatgttaaagccacttccgtagtctatctcgtgtcaactgcgagtttctgtcgacg

SEQ ID NO: 551620 - DNA, 313 bp, Homo sapiens
  misc_feature (10)..(10): n is a, c, g, or t
tttttttttntgaattaaaagaattggtttattcatagcttgatttggtgagtttctataataccttaattatatcaatagttcatcccactagaagtagcttcacttgttctaatcttttggactcctactgatgaaataataatggctttttttctctgcatcttttcatttatggtattggtttcttggttttttgactcaatataaactagaaaatcctatgaagagtattcaatagaaattaactgtcaactaggtatgttccaatttagtcattaaacgtatattgtctgttgaaaaagcagtcgac

SEQ ID NO: 551621 - DNA, 228 bp, Homo sapiens
tgagaaagaaacactttccagagttccctgcaatcctgtgcttatgcagatagttactattatgaagatggaggaatgaagccaacgagtgattgaaagaagctgtatctactccatcacgaatggcccacatgggatccaggaatggtattgcatgcttgaaattgccatgaaaactcgcaacaagcaagaacttttcgtcgctaccaggtcggacattgagagcct

SEQ ID NO: 551622 - DNA, 467 bp, Homo sapiens
agcatgtgctgggtaatcggctggggaactacagggaaaaaaggttgactctggaagctcccttgtctgccaaatggacaagacctggattcagataggagtggtaagctggagctttagttgtggccagcgccacttccaaggtatctacaccagcactgcccacttcaaccagtggatcaggactgaggttgctaacataaggttcatcagtagggctggccctgccttcctgagcccagttttcctcactggctacattctactgggctccttgagctccctgtggctcctgtgagcggtgtttcaaggacagtccctcccagaggctgcttctccctcccctctgttctaccctcagaagtggagacgagaggttgcccaggatggcagggcagagtgagggggagggtccgagagccactgttactttctgatgttcaatgaagatgcttttgaactttaaa

SEQ ID NO: 551623 - DNA, 268 bp, Homo sapiens
atgggccccggggagggggggcccccccatccgcccatttttccttaggggtccgaggccaaggttttcctttttttccgggctgggccctacgatatccttttcaaataggggtgggtccagcccccttgtgccctgctgccccccttttccagggggtaaacatggacaaaggtttttttgtggttgttaatgggccttttttccccccttttttctgttccatgaccccccccccctgttttttttaaagggggggtgggggtga

SEQ ID NO: 551624 - DNA, 669 bp, Homo sapiens
  misc_feature (64)..(64): n is a, c, g, or t
  misc_feature (68)..(69): n is a, c, g, or t
  misc_feature (71)..(72): n is a, c, g, or t
  misc_feature (74)..(74): n is a, c, g, or t
  misc_feature (86)..(86): n is a, c, g, or t
  misc_feature (88)..(88): n is a, c, g, or t
  misc_feature (92)..(92): n is a, c, g, or t
  misc_feature (123)..(123): n is a, c, g, or t
  misc_feature (174)..(174): n is a, c, g, or t
  misc_feature (176)..(176): n is a, c, g, or t
  misc_feature (179)..(179): n is a, c, g, or t
  misc_feature (205)..(205): n is a, c, g, or t
  misc_feature (251)..(251): n is a, c, g, or t
  misc_feature (277)..(277): n is a, c, g, or t
  misc_feature (296)..(296): n is a, c, g, or t
  misc_feature (318)..(318): n is a, c, g, or t
  misc_feature (323)..(323): n is a, c, g, or t
  misc_feature (351)..(351): n is a, c, g, or t
  misc_feature (397)..(397): n is a, c, g, or t
  misc_feature (455)..(455): n is a, c, g, or t
  misc_feature (463)..(463): n is a, c, g, or t
  misc_feature (528)..(528): n is a, c, g, or t
  misc_feature (531)..(531): n is a, c, g, or t
  misc_feature (544)..(544): n is a, c, g, or t
  misc_feature (560)..(560): n is a, c, g, or t
  misc_feature (571)..(571): n is a, c, g, or t
  misc_feature (637)..(637): n is a, c, g, or t
ttattcaaaagaagcagtccaaaatgatttgaccttaaaggaaaaatcaaatttaagagtatanacannanncntctcctcccccngnaggngggttgccccccggcaggcttcgttccaggngcgggattcttgggagcagcgggccggggtgtggcccaccagaggcttccncngcntctcaacaccaacagcagccttcttnccttccttacccaccacaggcctcttgcctgcaaccgccgccttcncatctgatttggcttgtagtgccgcngctgcagcagcggccttanccacccggagcttgtgattccnggccnggcgaagaagggggtgccggcgcagggncttggcaaaggggtttagcctcaacatgattctcaagtttttcagngggttcttctttaggactcggcgagggatcttcttgcggggggcccgaagggcccttnggatctcngggcttttcaagattctgccaagatctgtattaatcatcttgggcatgggaagattggaggaacnctngagggaagcggcnttacgccaagggccgnacaaatcaccnaactcccggaaagcacttccagtccaaatgcagaaacgccccacatgcccaccaggagcaagcttnaaaatgttcagcttgcttacattaagcagagt

SEQ ID NO: 551625 - DNA, 111 bp, Homo sapiens
gggagtggcattacgtgcatcctaactgacgagatgctgccccaggactctctaacacatgcacacagtctactaaagaagcaggctgaccatcatgacccccacccatcg

SEQ ID NO: 551626 - DNA, 1070 bp, Homo sapiens
cggtgcactgccattcgaagaggtcgcaatctacatatgaagtctctccttcgtcagcattgtactatcaacattactaataagtggcgtcctctagaaacttctactcgtagcctgttcattactatagcatgatacatctctgattgttacctgtccatcatggacaccttgagtggatcattgatcgattatatcgtaccgagagcattaggcgtgaggatccaaaacaggaggactcatcctatacgtagactgtggcctgaagggggtgcagatacctgaggcgaacgttctggacggtcggtcgcactaaaccgattttggccgacacgataggggtcgccgtctacgaaccataattggggtgcataaaggcgcgagtcaacacagagacatttattaatagagaaaggcgtcacttcaaccaggaactaatggtggccgaggagtcaaccatatgacgcaggtctccgcctgaacgtctgagacaaacgtgattttgtcaaccaacgcaccctactctctaatctaccactgtactgaatgaatctcagaacagtatagccccgatttcacgtacggagcaattcatacacactcctatgacaaaacttcctaccagtgaccctagacatattcgtatgacatgtcgtccataccgcataacggatctccagaatacccactcagaaggcaaaagcgatacaaccacgcagagatcgaacaaaccgtgggccacgacagggcacacacaacaaaagttgaaacacaaaaaacagcgccagggcaacaaaccacgtcacactgctgcagcgtgtcacacacacgacagcgtcacaaacagcacgtgcaacacaccaagaagacaccgggacgacaggctcacacgaccacgtgcgaacgccaacggcaacaacgggcacgacaaaaaacatcacccccgtgagcgaacacgacaagcgacgagaacacagcacaaccaggcacgcacacagtccctcgccatagcctcgcgcacaacaaaaggagaccaacaaagcgcaactacaccaccgacgagcacagca

SEQ ID NO: 551627 - DNA, 416 bp, Homo sapiens
gtcgacctgaaccacaaacttcagtggactactcttctctgcagtatgtctaagccacaatatagtgtaacctaccctctcagcctgaaatctgactgatcaggtttgactgttagcactaagagagcatcaggggtggagcctgccaccctattgttcttccactcccactgctactacctgcaacctgctgttccagagccaacatgtggttacctgaaactggactctaaggatgatttggtgggaatgggcccctcccccttcttcataacccagtgcctgaatagtaaaattgaaccttgatcagactaatgtcttggttccatcctttcttgcaccaccttgtctgacctctagcattgggcctcttagctatacttgtacagggtcacctgcctcactttttgtggcag

SEQ ID NO: 551628 - DNA, 893 bp, Homo sapiens
  misc_feature (11)..(11): n is a, c, g, or t
  misc_feature (257)..(257): n is a, c, g, or t
  misc_feature (297)..(297): n is a, c, g, or t
  misc_feature (367)..(368): n is a, c, g, or t
  misc_feature (372)..(372): n is a, c, g, or t
  misc_feature (466)..(466): n is a, c, g, or t
cacacttactntttccaaattgatctacgctggtgtaatcagagtgaatctcagaactttggacagagctgtgagcagagactgactttcctgctgtctccaggtagctgcaaggctgaacagcagcacctactttattaccatcttactgtcattcaaagaaggcagagctgaatgctggagaaaaactgagtactagcaacagtttttgaaccctgaatactgtcataactgaagctagaattatccctggactngtttgccactaaaatttccttgtttggcttaccctggttncagctggcaccctgatcacttgaaaggaacataactgatatactgtcctttgtttttctttccttcctcnncgcngcctttgatgattttaaattagaaatctacctgcctctaatctctttaattttctcatttatttactgctgcctattttccaaaacactgcttntcgaatattcctggctcaaaaacatctatgtcttcatgacatatgaaacccctagaatccagcctttccccagcttttaatatctcctaattgatttctcaattccagtgaaatgattccatttatttttttcccaaacacatcacaaatattcctaactcttgtgagcaattttctctcattcttctcaacttatctaaatcctaacttttcaaaagatctagctcaagttctgtcttatcatattttgagttcctttctttggcattgtattattttgtatctttccatgtacacatgtgtgcattatctccctgataaaactaactggctagaggataggagtaaagactcaattctaatatccttgttacctaataatacacaaacgtgaaacatgtttgaataaatcactgttaaatatttt

SEQ ID NO: 551629 - DNA, 531 bp, Homo sapiens
gccagctcgcctgaccgccagtgagcagccagtgcatccgtgcagtgcagctggagaggctagcctcagagcctcgctccggttactttacagcaagtagatttctgggtgtgtcctaaaggtcagaggtcaggtctgcatgcttgagcaggtggaggatttgcccctccccaactgggacccacagtggcctcaggggctctgggccgcagctctgggtctgggtcgagtcaggctgggctgtgtgtctgcctggttggttagtctctaaccacctgtctggcctctgcgccagggtggggagtgaggacattggtgtcccgccctatgtgggggctcacagacgatgataaggtaacagctctcagcagttaggcacgtgagggcacggttctcggtagtcaccacaatgttcacaatgggaaattatatcacacggtagcagagataggcattttatgtgttccttatattttacctcaaattgtagatatagggtaataaataaaatccatccatgcctttcacatg

SEQ ID NO: 551630 - DNA, 840 bp, Homo sapiens
agagagaggagaagaaagggctgggctgcccctactcaagctcttcttccaaaagcagtactcagatgggtcactccataattcccagggtccagtcagggagcggtggggagaggctggagtggcctactaagggagagccctgttaacagagcctcctacacaaggaagaatcactaggagaggggaaggaacgtgcgaggcccctgccaactcctcttccatactcgttcgtttgcgcattcaacacacttttgagcaccttcttttcctctgtgctctgtgacaggaattcaaacatgaaactagatgtggccttggtttcagagaagtcattcccttagtagtgaatactagttccctgaagtttaacattggaggagaaggagttattaaacacccattctaagcaagaacatcagtagcctacaaagggccttttttcacactttgagtctgttgaagaaaactcacagttggtatcacttgctttaaaagtgccccccactctgccttgtacggtccggattgctgtgaggccatgacaaggaaccaagttctgtttttctgtgaagagaatggaataatcatttacctctttcctgtggctgccagctggtcccttcactcagtcactccctgtttctccttcctccctttcctctccccttccagtacacagaatcccttctccatatccccccatgatgaaggaccaccagtcattggctcacctctcttccaaaattccaatgactagagtctttctcagagtatgtataactgatgtcacagacccctgagtctggaagagtctaagtaaaagtgggtgttgacctg

SEQ ID NO: 551631 - DNA, 819 bp, Homo sapiens
agcgggagacctagacctcggtcagcgccccgccgcccctctgcgtgcgacttggtgaggccggtgggtgcgcgtcgagagggccgagggacgagcggaagagaagctgctgcgaactctgggccacccagatgggccggcggagttccctggtgttaggcgcgggctcgggcactttcgccgaggagcccgggaaagggtctagctttccacgcctgagaaaccacctttgggcagtttctcgcgctgccggggtgctagacgcccgggaggcttcccgggtggcgtctcccgcgtgatgccccggcagtctcagtcgtccctggtggggagcgtcatcccaaaacaccaggtgtgtcgccggggaggcccgccgcaaccaacgactgtccttttattggagaagtccccgctgtcccggcgagcgaagacgactgggcgtgttctacctaacaaaaacaagacgtgtcgccactgtttgccgcacgggctggggcttgaagctccttgggcgtcaagtgatgactccttggcgttgggcgtcctccacagtgcgtggggcgttacaacggagttatgcaaatcctccccttgtaggagggcgggtagaagtttccacgcgacgactgtgaaatttgggtgccggaggtatctgcggggggggtggggaggacacatggttgtgcatatctaccttattactccatttctcaacaaaaaattttaccgagagacttgtggggctcttaactattgggtctggggctcggggaggtatacaccatcttacagagctggagacccacgtacttattccct

SEQ ID NO: 551632 - DNA, 604 bp, Homo sapiens
cagtaaccaccctgcctgatatgcccactgttggtggagacatcaccccagcacagacctcaattaagacgactacccctccgacgactccccctcccttcactggaggtgacttcacgcacttcttcagaacctcctcagcagcgatgcccatagactggggttcctaaggcacaaatttgatatttgagattctgtgatgagctgagcttgtgtccgctaacccgtgatcctggtgtaatctcaaccaaaacccacagccctgcaccccttgcctgtaggaaaatctggtaggagttagtagtgtctgtgaagtctcaataattgataccaaaatgttttgtttcaccaggaggtgcccgcctcctatcagcctctgggaaggccactgtctccccagtgccttctcctccgctgcagctttccatctcatctccttactcccttgacttggcttcacacagagcctcttctttacacatactaactgtttgcttcataccctcctgcagcagaactacagacctgccatcctgataattgtcaaactcatccctttatcacctttataactcctcaaggatattatcattggacccccaac

SEQ ID NO: 551633 - DNA, 324 bp, Homo sapiens
tgagtactctagacctgtgtctgctgtatcaggagtgtgtgctcacaataaatatatacaagatacgtctcattctaactgtgatctcggaatgcatgaggatacacacaggcttattcattttttctcagtctccccctgtatcacaaaaagtttgcctcccaacacaaggggctgggaggtccagtctaaacagagcatgctgttggggtaaacagtaaccatgtgatcccatgattcccagagctctgagcacaaagcttttcatcccagtggcaactggaatgtgggtaattctgtaaactccagaggcaggacaagcag

SEQ ID NO: 551634 - DNA, 897 bp, Homo sapiens
  misc_feature (109)..(109): n is a, c, g, or t
  misc_feature (118)..(118): n is a, c, g, or t
  misc_feature (231)..(231): n is a, c, g, or t
  misc_feature (288)..(288): n is a, c, g, or t
  misc_feature (293)..(293): n is a, c, g, or t
  misc_feature (302)..(302): n is a, c, g, or t
  misc_feature (305)..(305): n is a, c, g, or t
  misc_feature (360)..(360): n is a, c, g, or t
  misc_feature (364)..(364): n is a, c, g, or t
  misc_feature (384)..(384): n is a, c, g, or t
  misc_feature (390)..(390): n is a, c, g, or t
  misc_feature (393)..(393): n is a, c, g, or t
  misc_feature (414)..(414): n is a, c, g, or t
  misc_feature (421)..(422): n is a, c, g, or t
  misc_feature (438)..(438): n is a, c, g, or t
  misc_feature (461)..(461): n is a, c, g, or t
  misc_feature (470)..(470): n is a, c, g, or t
  misc_feature (481)..(481): n is a, c, g, or t
  misc_feature (550)..(550): n is a, c, g, or t
  misc_feature (552)..(552): n is a, c, g, or t
  misc_feature (572)..(572): n is a, c, g, or t
  misc_feature (584)..(584): n is a, c, g, or t
  misc_feature (592)..(592): n is a, c, g, or t
  misc_feature (599)..(600): n is a, c, g, or t
  misc_feature (624)..(624): n is a, c, g, or t
  misc_feature (648)..(648): n is a, c, g, or t
  misc_feature (697)..(697): n is a, c, g, or t
  misc_feature (707)..(707): n is a, c, g, or t
  misc_feature (801)..(801): n is a, c, g, or t
  misc_feature (849)..(849): n is a, c, g, or t
taattagaagttgtggaaagtagaccctctctgggacagaaacgatatacgtggtccatgtggtttgagtctgtcatgaatgacactaacggcacatggactgctgatntttgcgtcntagacacgggtgagctcatggtggaactcctccttgtctgtaggtttccaggctgggcacttaggtgagggcagaatgttggtggtcccagtggatctccccacaacttcctncagggcaggattttcacccaggcccaggctgcccgttcctctccttctccgccagtntgcgntgcggctgncanggctcacaccagagggatggggtaggaggcgcaggcagccaggccacacatgttntttncgcgctcgatgaggaagtanccgttnatnccccactggggaccccaaganttttttnngattcagtaagggatnacatttttttctccatacccaanagccagtantgcatggtttnttttatctggagttttatggcaggaagtactggagtagatgcccgttctatacatcatgaagtcctgantnatctcaaaggcaaagctcanagggttgtaganggccacancctccannatcgcttcctcgtcatagattgtnatgttggctacatccttgacaaanccgatggcctttccaggttggaacttgcaataaacatccttgccctggnaggggtaggngtcttcacccatgatccccttgttgtacaggatatactcgaaagcctggctggggagaccccttggcagccgtgattattgaagtcctgggcgngtcaccagctgctgttccgccaaggacagcatctttccggttgcgatngcgatcgcagactccagggccccagtggtggagaaagtccagcaatgc

SEQ ID NO: 551635 - DNA, 121 bp, Homo sapiens
cttagaaggagagagctttacgcttgtctttcttctccgcctctatatgcagaattttgatgctgtgggtttggatatttagaggacaatattcatgggtgacggggtccagttattacag

SEQ ID NO: 551636 - DNA, 448 bp, Homo sapiens
  misc_feature (297)..(297): n is a, c, g, or t
  misc_feature (329)..(329): n is a, c, g, or t
  misc_feature (362)..(362): n is a, c, g, or t
  misc_feature (374)..(374): n is a, c, g, or t
agattgtgagtccatgttttgtctgttgtgcctataaaggaaatttgaaatctgtatcattctactataaagacacatgcacacgtatgtttattgcagcactgtttacaatagcaaagacttggaaccaaccaaaatacccacaaatgatagaccggataaaagaaaacgtgacacatatacaccatggaatactatgcagccatagaaaggatgagttcatattcctcacagggaccatggatgaagctggaaaccatcatcctcagcaacttacacagggaaccggaaaccaancaccggcatgttctcactcataagtggggaanttgaacaatggggaattacatggacacaggganggggaacaccanaccccttggggcctgtttggggggggatggggggctaaggggaagggataagccttagggggaaattacctgat

SEQ ID NO: 551637 - DNA, 306 bp, Homo sapiens
  misc_feature (33)..(33): n is a, c, g, or t
  misc_feature (35)..(35): n is a, c, g, or t
  misc_feature (40)..(40): n is a, c, g, or t
  misc_feature (82)..(82): n is a, c, g, or t
  misc_feature (95)..(95): n is a, c, g, or t
  misc_feature (291)..(291): n is a, c, g, or t
gggaatcctacctgcagtggttgcgggatcagnanacccnggctcgcaggtccgaggccccagcagccccggaaagccaaanacacatgcacccncggccacagcagcagcctccagtggcctggaggaggtggactagccggtccccgcggcagaggtgtcagcctcgtcaccttgagcaccctgagctgcatgctgaattgggcatgaagcccctttccccaggcactgttttagctcttgccaaaaccttccttcggcccttgtgggccaggtacaaagcaagtcagnttctcggcaaggggc

SEQ ID NO: 551638 - DNA, 155 bp, Homo sapiens
tatagaggatcccttcgattggcgggcaacttatgcacgcttaactatcttaacaagcttgagtgcaggagatgaagagtcaaatctgaccaagatgttgatgttggataagagaattctctgctccccatctctaattagcccgccaatcgaat

SEQ ID NO: 551639 - DNA, 935 bp, Homo sapiens
  misc_feature (1)..(1): n is a, c, g, or t
  misc_feature (102)..(102): n is a, c, g, or t
  misc_feature (128)..(129): n is a, c, g, or t
  misc_feature (131)..(132): n is a, c, g, or t
  misc_feature (154)..(154): n is a, c, g, or t
  misc_feature (163)..(163): n is a, c, g, or t
  misc_feature (181)..(181): n is a, c, g, or t
  misc_feature (197)..(197): n is a, c, g, or t
  misc_feature (199)..(199): n is a, c, g, or t
  misc_feature (219)..(219): n is a, c, g, or t
  misc_feature (223)..(223): n is a, c, g, or t
  misc_feature (238)..(238): n is a, c, g, or t
  misc_feature (256)..(256): n is a, c, g, or t
  misc_feature (263)..(263): n is a, c, g, or t
  misc_feature (293)..(293): n is a, c, g, or t
  misc_feature (313)..(313): n is a, c, g, or t
  misc_feature (356)..(356): n is a, c, g, or t
  misc_feature (358)..(361): n is a, c, g, or t
  misc_feature (383)..(383): n is a, c, g, or t
  misc_feature (448)..(448): n is a, c, g, or t
  misc_feature (465)..(465): n is a, c, g, or t
  misc_feature (515)..(515): n is a, c, g, or t
  misc_feature (525)..(525): n is a, c, g, or t
  misc_feature (558)..(558): n is a, c, g, or t
  misc_feature (609)..(609): n is a, c, g, or t
  misc_feature (626)..(626): n is a, c, g, or t
  misc_feature (926)..(926): n is a, c, g, or t
ntccccaacatactatgcgttctcgacattcgctccttgtcatcccaccaacccccaaccctcttcctcgcatccaccctaaatgcgacttcattaattttntattttctcacggtttcttattcctnntnntccgccgaattctcacacattntacatacgnattttttttttcttgttnttgcattctcctcctnanctttcttcccaccaccattnttcntcccatccgggtacntcctcccccacccgtttnctccccntttcttctcctactttgccgcttttccagntttccttcttcctaccattnccacttatctcttttttattccatttttccttcttttacatcntnnnnatcttctcacaccctttctttntttaaaatatttttttcttactcttctccttcacctttgaggtctttcttttattcttttttttnttttttaggtgcattantttttattttttcttcgctctccttcccaccgggcctatccccatctggnctttgcctcngtctctattctcctcggtctctgttcgcctctntcccgcctctttcaccgggtggcgtctcctctgtatttttctttgttcatntttcctcgtttttcccntttgtggatacgctctcgcgcaccaggtacgcctggtgtttctttgtggtttttcggattctttttggggagtgcggggagtcacagttagaaggcggccgggtgttgctggaggaaagtgctgaggtccagagcgtagtccgagggctccgaagtcagattaaagggctcgaggacgggggacacaggggtgggcgccagggatgcggcgttaggggcgtcctctggaggcaggggcgccggcacaccctcttcagccatcaggatctggcagaagacgatggtgagcagcagaaaganaagcctttt

SEQ ID NO: 551640 - DNA, 109 bp, Homo sapiens
accaggcgatttacggtgacagctcccatggaacagcacacacatcgcatggaatggcacacacgtcccatggaacagcacactctcccacggaacagtacactctcgc

SEQ ID NO: 551641 - DNA, 754 bp, Homo sapiens
  misc_feature (534)..(534): n is a, c, g, or t
gtcagctagagtaagatcatttaaagcacagttttttgctgggcgcggtggctcactcctgtaatgccagcaccttgggaggctgagatgggcagatcacaaggtcaggagatcgagaccatcctggctaacacggtgaaaccccgtctctgctaaaaatacaaaaaattagtcgggcatggtggtgggcacctgtggtcccagctactcgggaggctgaggcagaagaacggcgtgaatcggggaggcagagcttgcaagtgagccaagatcatgccactgcactccagcctgggggacagagcaagactctgtcaaaaaaaaaaaaaaaaaaaaacaaaaaaaaaaacaaagtttttctctatatatacttccttgtgaattgctcctatattccctttgtgttggggaaaagtcttccctttttgggtggtggtttgtgctttggtcttgtgtgtttggagaaaccagaagttcttggcccccttattgcgccccgaggctcgtggcaccttgtggcggtggccaccgcangtgtggtgagcctccccggtggaaacccctctttggggctctacgtggaaaacacctctcccaacgctttcacgcgagagccttagaacgccaaattgttctcgcggtgtcctcaagacctcttcccgagagtatgagccgtgggcaactacacagggccgttttgtgcgccacgcaaagagacccagctataaaatcgacggcgactattactagcggg

SEQ ID NO: 551642 - DNA, 313 bp, Homo sapiens
aaagagctgaacatattgaacaggtggtatctataacatccacatgtgaatagcttaatccagaggtttgattctaaaatgttttgcttttctaaaatcctaaatatcttgggctattaagtgatcatttgattctgaaaccccaaatgttgcaatttgtctacatatattttcttttttgtgcatcaggagaaacttgagtatagttatagagcaggtacaagctaaatcttgaaatagctccttttgttctatgtactctgaagaagatacgattttgaaggtcatcccaatgaaaacattgctgatacat

SEQ ID NO: 551643 - DNA, 102 bp, Homo sapiens
gagcattggtgctcagtgtagtattgtacatgtcaaaaaatgtgtgaattttagatgtcaggagatattccaggagatcattacactactatggtacctgat

SEQ ID NO: 551644 - DNA, 570 bp, Homo sapiens
gagttgaggacccaaagtgtcaaaatcctaaagggcgaggcgccaccggcatttttcaacttctccaatcaagaatggcaagtaaatccacttctggctgccatccgtattcctcatcaggctgggattcaagcaggtgcttcaacccccacaaatgccacagcagcgtcagatgctaatactggagaccgtggacagaccaataatgctgcttctgcatcagcttccaactccacctgaacagtcccgagcagccagctgcacaggaaaaaccaccagttacttgagtgtcactcagcaacactggtcacgtttggaaagaatattaaaaagagaaaaaaatcctgttcattttagtgttcaatttttttattattattgttgttcttatttaaccttgtaaaatatctataaatacaaaccaatttcattgtattctcactttgagggagatccagggggtgggaggggttgtggggagggggaaagcggagcactagaacatacaatctctctcccacgacaatctttttttattaaaagtctgctgttgtatactttaaaaaaaaa

SEQ ID NO: 551645 - DNA, 1383 bp, Homo sapiens
ccccaggtgggtgtggcggaacgaccgcgcaagaagagtggtctgacaacagggcgcgcctgtgagcatagacggagcggcggggtggcaaggatcaggcgggcgaaagatgccaggcggtcgcagcgggggaggaggacgcgggcgtggggcgccgcgccaaaagggggctcagcaaagtgtgcgcggagaacccagggctacagagcccacgggaaggtgttagaagggccacagatggcgccagccccgtgtgaagagagtaagaaacgcgcgcggggagacgggcggacagcttcaaagcgcgcctaacgtgccacgggggtgctgtaacgcgcccccgagggtggagcaaagggcgctccacaattacgacgcggtgtaagttgctcgtgtgtagggtgcaagggggggccgcaggcggggtatgttcgccacttacgtgggctaggaacagcgggctggccaacaagtggccgcgtgccacagagattgttgccgtgctgccacggctgggagctgtttgggtttgtcgggaaacgcggcgcagaatggacaaaaaaaaattctgcgggggccgtaatccccacccacgggagaccccaccaggagagggagagagaggtgagatatatacatggtgagcacccgggtaatatggttaaggaggccacggagagactggaaaacagcgggaaagatatatgtagaggggcctccacaaatggagaaacaccctcgacgcctacagagatgactctcgtgaaatatactgtgggtgaagtttgggctctcccacggagatatgtgcacacacaggggcaacggcctttgacacgggggagagataggtgtcacactgtgggaggcgcacagcacacgctctgtcacagaggacacacatgtgaacactagcgcactcttgagaataacacacacacgttccacaagttctgaactcgtggttgcctcaaggggtcgcacgaacaccccctgtttctcttggtaatagaagaagagaggtccacaaaggcgtctggtgttccctcgggagagaaaattaagtgtttcgcacttaaaatgtataggaggtatgtggcattgtgttttctttcttgttatccccctcggttttgtgttcttgtaaactaagtgtgcgttctcacttttaaattttcacgctggccacccactcattctttcgcatataatgcaccacattctatcattctgtcctaccacgttccctgagttcttttcatggctgaagctgcacattctaacacctttactgtacctttataataagggccaattctttcattgtctattattatgcttaagaaaatattccagttaatccaccacagagtattttatgta

SEQ ID NO: 551646 - DNA, 1284 bp, Homo sapiens
gagttgaggacccaaagtgtcaaaatcctaaagggcgaggcgccaccggcatttttcaacttctccaatcaagaatggcaagtaaatccacttctggctgccatccgtattcctcatcaggctgggattcaagcaggtgcttcaacccccacaaatgccacagcagcgtcagatgctaatactggagaccgtggacagaccaataatgctgcttctgcatcagcttccaactccacctgaacagtcccgagcagccagctgcacaggaaaaaccaccagttacttgagtgtcactcagcaacactggtcacgtttggaaagaatattaaaaagagaaaaaaaaaaaaaaaaaaaaaaaaaaaaaatttttgggccccctggccggaaaagttttaaacccatccgtggggggcggggcccaagtgtgtatgtcgactctgggccatagctggttccaaagagaaatcgggcgccattgcatttaagtgttgggtttctcacccattaaaaaaggccgggggacaccagaggggttctggacacaaattccagaatgggaagttccggacgggaaaataccggggttcataactcaccgcgggtccaaggacgaagctcgaatattaaaattaagcgcccccggcgctggttgaatacgacaaaacaaaagcagaaaacgggatggagacaaagacagaaatgagaacgaagacaacaacaaggagagaagcaaaacgaaagccagaggagagaaaaaaagaacacagtagaagaagaggaaatagaaagggacaagacagagacaagtagaaagaaacagaaatgcacgacaacaaaaaagaacaaaagaaagacagaagaaagacgaaaggaaagaagaaacagacaaaaaaagagaagacaagagaagaaaaaagaaagcgaaagagagaaagagagccagcagaggagaaggccagccgaccgagagcaagaacggaacggacagggacgagaagccaggggacagacgagagggcaacaggagaagcgaacgcaacacggaagggacaggcaagaaacaagtagaaaggaacggagagcacagaagaaagcaaggacacgaaaagaagacgaaaggaagcacgaaacaagagagagaaacggagacccgagcaacaaagaagcagagcgacagaagaacagaacgcacggaagagaacaagaagcacacaacagacacagagagaagaccaaaggaggaagagaggaagaaaagacgaaggagaaaggacaacgcggaac

SEQ ID NO: 551647 - DNA, 832 bp, Homo sapiens
cggaatcctaccaggcttcggaataatctcccatatagtaacttactactccgaaaaaaaggaaccatttgggatacacttaggtatggtctgagctatgatatcaaatggccttcctagggttgatctgtgtgagcacatccatatatcgagcacgtagggaatagacgtagagcagcaccgagcatatgtcgagccatcgggcgtaccaaataagtcatcggctagtccccaccggcgtcaaagtattctaggcgtgactcgcgcagagatccacggaacgcaatatgaaatgagtctgctgcagtgctctgagccctaggatacatcttactttgtcaccgtaggtggcctgactggcaatgtattgagcaaactcatcactagacatcgtactgcacgacaggtactacagtgggtagctcacttccacatatgtcctgatcaataggagcggtattgccatcataggaggcgacattcgacggagttcccgtatatctcaggctacagcctagaccaaactacgccaagatcgatttgactatcatattcatggggtacatctaactttcttcccataacacttgctccggctgtcggaatgcccggggtactcgggagtacccgatgataagtaatgaaaatctatattggaagtcgttattcgctagagcagtgttgagaattcatgttggaagctcgttgaggaaagctaaagtgaaacccaaaaggggggaatggagcccacacaaattggaacgtataattaaaaagaggttccgttgtaacggtctttttgaaaaaaaaaatgggggaagaaagggggaaa

SEQ ID NO: 551648 - DNA, 704 bp, Homo sapiens
  misc_feature (329)..(329): n is a, c, g, or t
tggaaatggagtttcgcctctggtttgcccaggcttggagtacaggggtatgatctgggctcacgtgagcctcgtgccctccgtgggttcaagcgattctcctgtgcctctgcctcccaagttacgcgggcgttataacgggcacccactcaccattgcccacgcttaatttttggcgacttttaggtaaaagacagggatttccactatagtgtggcgccagggtgtggctcctcaaaagcttcctgtgaccttcagaatgactcataccagcctctcgggccctaccgtgaacaggtgccgtggcgacaatcccggggtgtgttganagcccccaacgtggtgccccccagccgaggggaagtgcctcccaattctttctcctagagaacatttcactcctgcggcacttggggacactttatatctcccataaacagtgttttccacaattttacgttggtagcgcttagtgcacacaatctacgaatcgtggcgctttataaaccagaaagttctttgctctttctttaaaccacaaaaaagttcgactctccgtgggtgtgggggaaatttatgactacctgagcggcggcctcttatatcccactgtgtgggaatcttgacttctcccccgaggggtgtttcgccaatcacacgaggacgttctcgtggactaaatataatagccgtgccccttgcag

SEQ ID NO: 551649 - DNA, 542 bp, Homo sapiens
aagatggtcctcagctgtacgaaagaccattaaaatttattcctccggtcaaacggaaacggtatccttggaccaacatctcgcgctttcctcattgcctacccggtccacaccccacgcaccagcgctcggtgtaatcgactgttctccatctctacttctatgaagttggagttttctagaaatccatattataagtgagaacatgtttattcacttatgcatgctgtcctccaggtcttccatgttgttccaaatgagaggagtatcttctttttaaaggcggaatagttatcctgtggtgtatattcatatataccacgatgatctctatccatgtattcactgatgaacacttacatggctgccatatcttgcttatggtgaacaatgggtcaatggatactggagtgcaggtatctctttaacagacggatttcaatttctttgggtttttttatttgcagttgtccctaatgactaaagatgttgggcgacctttcatttgcgtataggcgtggtgcatatcttctcctgagaaa

SEQ ID NO: 551650 - DNA, 93 bp, Homo sapiens
ccgcctactactactactgctcgaattcaagcttctaacgatgtacggggacatgacttttccaaaaatcatcaaaaaaaaaagttgtactgc

SEQ ID NO: 551651 - DNA, 84 bp, Homo sapiens
cccgcgttgatctgatgttgctgtagctgcgattggacccctagcctgggaatctccatatgccacgggtgtggcacccaaagc

SEQ ID NO: 551652 - DNA, 671 bp, Homo sapiens
ggactaacgctagaaacagtggtgcgcggagaggagaggcctcgggatgtctctggcagatgagctcttagctgatctcgaagaggcagcagaagaggaggacaggaggaagctatggggaggaagaacgaggagccagcgatcgaggatgtgcaggaggagacacaggtgggtctttccggggattcagtcgagagcatggtcgaagctatgggatagtaagatgtttgcgtgagattatgatgaagattgaggagtatatgagcaagggaaagccaaatgcttcagaagtgatgggaccgagtggacgggcggcctgaatagcgcgtcaatcgtggatgccagagaagctgaccgtggagatcgaagaacgagctgtaagcatcatccgataagttcatccgggcataagtactcggaagagattccctgaagctggagtccttggtgccccaatgcacttggattacatccgcacggtcaaggagctgggcaacagcctggacaagtgcaggaacaatgagaagctggcagcagatcctcagcaatgtgcacatcatggtcgtcagcgtccagcgctccaccacccagggcagcagctgtccggaggaggagcttgcgagcggctggaggacggctgcgacatggcgctggagcttgaacgcctcaag

SEQ ID NO: 551653 - DNA, 239 bp, Homo sapiens
tcgatagccaatggtttggtattgacagcgcttaaggaggaaaaaaaatacgggaatgaaaataagaaaaggctggtgacacccccctggtgttgtttgatctggctcccagttagcagtccctatgggacagcagagctgtcaaacagaacccattgatgacggctgaaaatcaagccagactgctgtgcggtcagcttgccgccgtggaatgccttgtgttcttggccttatccgag

SEQ ID NO: 551654 - DNA, 569 bp, Homo sapiens
  misc_feature (540)..(540): n is a, c, g, or t
  misc_feature (553)..(553): n is a, c, g, or t
atacatcaatgacctccttatgtgtagtccctcctttgatctatccatcaacacatcacccaacttctaaatttcctctatggccagggatatcaggttttacctacaaaggctcaagtagcccaaacccaagtcactaaccttggactcaccctaacccctaattcttgagccatgccagcccgatggaaggagctaatacaggatgtgccccttccccacaccaagaaggacccttcctttttgggccttgtggggtacttccagctgtggatcattaactttggcctgttgaccaaaccactctgcacggcatcacgtgggtccatcctagaacatttggacccagcttgcccattaactcccacttctaaaaactgaaagatgcccttttaatgtcccagcactaggactacccaattccattaaaccctttaccctgatgttcattgaatcaaggccttgcccttggattctctgccaaacccgtggcacactccagaagccattgcatactttttgaaacttgactctatcatncaaggctggcctncatgccttgagttctt

SEQ ID NO: 551655 - DNA, 331 bp, Homo sapiens
taatcagacgcgggatcaggacatgcgtacggcaggaaactggacaagattacatctatagagaggccgccaagaaaaacagaatggaatgactggaaaattaaaggtaaacgaagaagaggaagaaggtggggacggacagaggacggacgaagtagacaggtgactggtgaggaagaggctggagatgacgatgaggacgctgcgtcagctacgggcaagcgggcagctgacgatgatgcggatgacgatgtcaataccaagaagcagaagaccgacgaggatgactagacagcacaaaaggaaaagttaaactaagaaaaaaaaaggc

SEQ ID NO: 551656 - DNA, 420 bp, Homo sapiens
  misc_feature (96)..(96): n is a, c, g, or t
  misc_feature (290)..(290): n is a, c, g, or t
  misc_feature (317)..(317): n is a, c, g, or t
  misc_feature (407)..(407): n is a, c, g, or t
aatctccctaatattctttacaagttaagaatgttttaaatgttgatttggctcacatacttttttttcatgaaatggaaaatgcaggtatatttnccccttgtaagtgcaatgtctttaaacattacagtttaggacttacatgaagatttgcattttgtctgtcgttttattaattatttatttatttacttttggttgagtgaatttatgtgagaaaagagaaagtagatggttgattctatttttcatttttgcatctcattctaaaatctgatcatttttaagtngcttttttaactgagcgagagtgaggngtcatcaaagattgacatcctatttgccatccttctctatccaactacttctgattctttctgggaagcttttcaggcaataggccagtnctgtctaatttag

SEQ ID NO: 551657 - DNA, 698 bp, Homo sapiens
  misc_feature (379)..(379): n is a, c, g, or t
ctttaagagcatgatcataaagagctattttgaccccccccccccaatttttataacatttagagttagtaaggggttttaatatctcttcgtggtccatactgggttttaaacaggaattgagggtgtttagggtggctggaaaagccattgggtaggaagcttagattgtgaactattagaccaaggggggtatattcacgttgagaagtgtacttgtgaagaagtggccgtgttgaagccagggtggtgggattcataacttctaggtggccattaggaaatagaaacgtggaggtctattctctcttcgatagggggtttacgccattatgaacagataagattaactttgtgcactttcgtggaaaattgttcnagcgatttttaagagtgtatcttgtgacgttttatatataccgatgaaccctttaaaaatttttataaaagaaatcctgtgggaaacaacacatatttttgataatatctgtgtgaaaggtgcgatatctcctacaccgcaactggaaaaaatttctgttgcgtgtgaatatttttataaaaaaatttttcataactattcaagttggcgcacgattcactttttaaacgtggggagcaaggcaaaaaagtgcgtccgtggggcgcacaaaggggtaaaattggggttaaaacagttagagtgggactatgtgctaacc

SEQ ID NO: 551658 - DNA, 834 bp, Homo sapiens
gccttaacgatgctgctggcgaacccatgagtatgcgtcaggcttcagaaagaggctcgcttctagtgtcctccgtgtgggccaagaagcaaggtcgtgggttgagacccactaatggagaccatattgaaatccgccagtgtcgaactccacgtcagccagatccggagaggcgtcattctaacagatggggttgatcatccgtggatgcgctgtgatggaccaataccgtgggggtcggatgtgtgcaaaacaaccgtatggcccttctgtaaaggtgtaggcagcttagcggcgaatagggtaaccgccgggagatggcgtacacggcacatatagtcgcagtaactggctcaagaatgagaggtgtacctccagtgcggtggtgagacgtacgaaatgagaaggatttgcttcgcaaccctgccgttgcaacaacgaaatcgtaattaaccgcgggtggaattgtcttccattaaacgtattgctgaatcagtcccactatgtcgctaatacagagaggcttggagccctttggacgcggtgttggacgtggggactaacgtgtgcgtcccatagagatacgagcgggccggggttttctccatgggagcgtgtacattccaaaagagggctgagattgggcaagactgtggcctctgctaagtagaagcctccgtgggctagaaccatgtggttttgttggccccataagggtattaaagcacccaaggggtaaggcattgccacatgggcggcgtgtgaaggaacttgtttggaataggcccaaacaaggggtggcggatcaagcacaggattgatatgccagggaag

SEQ ID NO: 551659 - DNA, 212 bp, Homo sapiens
ctctgtgcacatccattcatgataattcctctaatcgtcagctctcatatatacccccagtatagtcttttgacatccagcattccaaggttattgagacatattactgcaattaagatatattactatcattgagaactacatcttttaagattgtacttttatcttatcagggtggtagttttccctaaaatacttcttcatgtatgggt

SEQ ID NO: 551660 - DNA, 115 bp, Homo sapiens
aaaacatttggttgtgtgattgaccggaatgacagcttgacagcagatcccaggtacagagggcacgcattgaggcagccaactttgaaatacaggtatggctatttggattcct

SEQ ID NO: 551661 - DNA, 140 bp, Homo sapiens
gggggttaaagacttacctgcaccagcgacagaaatcgaagctgcattcgaacaattctggaagctgtatccgaagaagaagagccgcaaggatgcccaaaaggcctgggtcaagctcagccctgatgctgatctgcagg

SEQ ID NO: 551662 - DNA, 651 bp, Homo sapiens
tgggctgcttacgaggaccttcccaaactctttctgcctgcctgggacggccgtcggtggatcaggagtgagtctggaacacacacaatataataacaaagagaagtgggcataagagggcaataaaaacacatttaaatgagacttcaaatgtagctttccctggtatcaaggaaaataaagcacacaaggcaaaataaagtaatgcgaactgatggtcagaataagctgtgtagccaatgggaagtgaggttagaggtcagtgtgtctcaccttgcaggtgagtgatcgcgtgcaggaccttttgctctccgggtcctggactccacagtgcttgttcgggtcaaacaccctccctgtaaacaccagacggagagaaaaaaaaaaaccaggtcatcacggctgatttcagaattttgtcttccggagtaccacgaagacatcttttgccaatacatggtgaatgacaggagagaagtgtcttacaaagtggtgttataggacctacagtagactgttgttcgactgaaacttcccaaattctcctgagaagttttccccctgagttaaacacttcaattgtgcctgtaatcttccacatgtcatctctatatctagctaggagtctgagttgggcgtaagcggtacgac

SEQ ID NO: 551663 - DNA, 354 bp, Homo sapiens
  misc_feature (1)..(1): n is a, c, g, or t
ngggttacgtggcttcctttaaaatgcataaagatatagaacatcacaggccgagcatggtggctcacacctgtaatcccagcactctgggaggccaaagcgggcagaccacctgaggtcaggagttcgagaccagcctcaccaacatagtgaaacccccatctctactaaaaaaaaaacacacacaaaaattagctgggggtggtggcatgtgcctgtaatcccagctacgtgggaggctggggcaggagaatcacttgaacccaggaggtggaggttgcagtgagctcagatagtggcactgcactccagcctggagacagagcgagactcagtctcaaaacaaacaaacaa

SEQ ID NO: 551664 - DNA, 374 bp, Homo sapiens
ctttgaggtgctgggagttagggcttcaacaaatgaattttgggggggacacaattcagtttataaccctgggaaataatctaacataggctggacgtggtggctcatgcctgtaatcccagcactttggaaggccaaggcaggtggatcacttgaggttgggagttcgagaccagcctggccaacatggcaaaaccccctctcttataaaaaaaatacaaaaattagccaggggtggtggtgtctgcctataatttcagctacttgggaggctgaggcaggagaatagcttgaacccgggaggcaaaggttgcggtgagccgagattgccccattgcattcgagcctggatggcagagcgagactctgtttca

SEQ ID NO: 551665 - DNA, 589 bp, Homo sapiens
  misc_feature (558)..(558): n is a, c, g, or t
atatgctgcaggtcatctaaggatccgtggcgtgaggcaacatttgcatttggtagagacaggtttgcatgtcggcagctgtctcgaactcctcactcaagtgatccacccactcagctctcaaagtgctgggattacaggcgtgaagccaccgtgcccagccatttttgtctggtatttgattcttaataatccaaccttgccaataaacagttggaatcctctaacccagaagatctaagcaatatttccccaacttccatgactaatccagaaagatatgcaaagtcatgaaatggtattgccattaatgtattcaatatttaatttctaactacttcaaagcatcctcacctgccattctctccatggcaatacaattggagatcaaatcctatttcccttatctgggatgccaagaggaccgttccgagtaaataaaaatcaatgcctttttcttacttattttcagatacctccattctctccctctctaccctagcctctcctctaacaaaccggcctatctcagagacccatcataaaaaatgacttggnctgtattagagattttgggggttggggaagt

SEQ ID NO: 551666 - DNA, 248 bp, Homo sapiens
gacctggcgcataatagtttcaccgcacatctttttgttcattgtttaaatgactctgtgtctttccagagaatttcctctatcttctcctggtgtcagttcctctatttgaagaggttcagcttctagttttcgctgatgaaccattaaaggactgtatctgccgctttgaggacctgtattctagctgttgtgacaaatgaccgaacgtctggcaccacactctcactaagaatttcactgataag

SEQ ID NO: 551667 - DNA, 399 bp, Homo sapiens
  misc_feature (280)..(280): n is a, c, g, or t
acggaccacacgctgactcttcccgggccctccatcgtccacgcaaatgctttaaacggactcagcagatgcgtagcatttgctgcattgggttaagttgagaatagagatttgcccctaggtatatgcacacatcctcatgctagcctcacgaaactggaataagccttcgaaaagaaattgtccttgaagcttgtatctgatatcagtcactggattgtagaacttgtcgctgattttgaccttgtattgaacttgactgttccccttggtatttgtntaataccctgtacatatctttgagtcctacctttattacgtgtggcttggtcatttcgtggctcaggtaagaacgtgcttctggaacacaagtctgtggcttgggagagtctgtgtggc

SEQ ID NO: 551668 - DNA, 311 bp, Homo sapiens
agtcggcctaagttaggtcccaggttggggagagccccaagtgagacaataatgaacacattatgtatgaacaactgttagagacagctaatcacaaacaacctgcgggcacaatgacctcattccacacgtagcacccttcagcaggaccctataaaactttcctccagcccttgcctctttgcaggtagccccttctctgctgagctgcccactgcaacatattttcacaatttctctaataaatctgcccttctttacctacaactatcttggtaaatggctttaccacctgcaaaactgaccctagg

SEQ ID NO: 551669 - DNA, 406 bp, Homo sapiens
  misc_feature (4)..(4): n is a, c, g, or t
  misc_feature (106)..(106): n is a, c, g, or t
  misc_feature (134)..(134): n is a, c, g, or t
  misc_feature (176)..(176): n is a, c, g, or t
  misc_feature (332)..(332): n is a, c, g, or t
  misc_feature (344)..(344): n is a, c, g, or t
  misc_feature (350)..(350): n is a, c, g, or t
  misc_feature (378)..(378): n is a, c, g, or t
cggncgccacgaacctgaacattggtctgtctataaaaaatatcttgaattctatgttcttgaatcaaaactaacaaaatttcatggtgcatttcctgatgcccancttccttctaaaaagatcattggccccnaaaattatgaattcttaaagtcaaaaaaggaaaaattccaanaatttctacaaaaacttctgcaacatccacaactgaattatactcaacttctggcagactttctttcccctaatggtggggaaacaccatttcttggataagatactaccagatgtttatcttgggaaaattataaaatctgttcctggaaaactnatgaaagaaaanggtccncatttggaaccttttatcatgaatttcnttaattcttgtttagtctccaaaagcct

SEQ ID NO: 551670 - DNA, 452 bp, Homo sapiens
  misc_feature (378)..(378): n is a, c, g, or t
  misc_feature (402)..(402): n is a, c, g, or t
  misc_feature (404)..(404): n is a, c, g, or t
  misc_feature (414)..(414): n is a, c, g, or t
  misc_feature (444)..(444): n is a, c, g, or t
ttttagaggtacttctcataagaagcatttttattctggcttacgctatatatatttatgcacttacctaattcccctccttcaatgaattctattttttttttccttgagacggagccagctctgtcgcccaggctggagtgcagtggcgcgatcttggctcactgcaagctccgcctcccggcttcacgccattttcctgcctcagcctcctgagtagctgggactacaggcgcccgccaccacgccaggctaatttttttgtatttttttagtagagacggggtttcaccgtgttagccaggatggtctcgatgtcctgaccttgtgatccacccgtcttggcctcccaaagtgctgggattacaggcgtgacanccgttgtcccgaccaatggaattntnatttaaattnatttatcatctgtcttgtttagccttaatntttccctt

SEQ ID NO: 551671 - DNA, 301 bp, Homo sapiens
  misc_feature (47)..(47): n is a, c, g, or t
  misc_feature (124)..(124): n is a, c, g, or t
  misc_feature (135)..(135): n is a, c, g, or t
  misc_feature (160)..(160): n is a, c, g, or t
ctcctcttttggtaccttttaaaaccatacctatatggttttacccntgttgtttaatatttgccatgttgtttcccccacttgaatgtaagcctcccaaagattttatttttttaaactgaantattactgtantcccagaacaattcccctggcaaanatttggtactcaatagtaatgcctaagttagtaaataaatgatgaatttagaatcaaaataacgtgtctatggccaaaataaaacctgaaaaccctgtcctattttcccagaggtaactgctgttaatagtttagttgtgt

SEQ ID NO: 551672 - DNA, 169 bp, Homo sapiens
ctatcgctggggttactttgtggagtaagaaggatgatctgcacacacccctatccccagcatcctggagctgacactatagtggggaggagagaaggggcaggttaataagcaaacaaagaaaataaatgctgtatatagttggatgtagatactctctgtcagctca

SEQ ID NO: 551673 - DNA, 156 bp, Homo sapiens
  misc_feature (25)..(25): n is a, c, g, or t
ttaaaggaagtagtcacatatctcntcactgttagatcaaagagctataaagtgattaatcattagggaggaaggtatgtcaaaatgccaatgatatggctaaagaagctatggcctcattgcaccttagttaagcaatgtttgtgatgtgcaaat

SEQ ID NO: 551674 - DNA, 589 bp, Homo sapiens
ttttcctgacatctttttttccttttaggattcattaagtcatatacttagtcccctgcaaagaagaagacagatgtcccagagcagactgaaagcggggcgtgggatcctaggcaatgcaggagggcaggtgggggagctgtagcagaacaagggtgctaggtgggaagctggcttggggaccacacgtctggctgactcacagggctatagcagcagacagagagccagatgctctactgcaactggtgagttggaggcttgcccacataacactgtctttctctccacccgccaagcatccagggcacagggctggttgctcacagattgagcgaggtagcacctcctaccagcactcaagtttatcagggccgcgttctaaacattctactgaagtttgctaagaaaccattaggtgaggctgagccaccgtgcctggccaaatgtcacttttttgataagtcagcagatccagctcttgagcacatcagaggctagataatcgggacagaaaggaaaaatcaatccatcagaaagtttatacatgcaattatgtaaaataaaatcaagaacaaaaagcataaaa

SEQ ID NO: 551675 - DNA, 138 bp, Homo sapiens
cagcagaaacgatgacaagatgagccttctcttctgctcctggtcaaggagatagcagaatttctcattctgccaggtctgtgttgcacatgcaaatacccgggtcaactgagatgggaactctgggctctccgatcc

SEQ ID NO: 551676 - DNA, 433 bp, Homo sapiens
ctttagctgcagtatatcttttttccagattcccccatgcaagcatgtccacaaaagacaataaaatgacatgtgtgcaggccacacacaccaaatggcaggttccccacagtgccccacatggggccaagacctacgtgcatgactcactctggttttgttttgttttgcttattctctgtggtgtaaagatactgttacaaatgccaaaaaggcctgcagatacccttatgggtaatagtaataagaaaaatgaagcatttgtgtttatatataacagagaaagtcaagcggctggagaaactggacagtggtgtaaatgtgaaatgtcttacaaaagaatagggtgttgggatcattatatatatgacctgaagaaacagaaacatgaactgttgaagttctatgttgaaaggataaagagaagtcagtg

SEQ ID NO: 551677 - DNA, 751 bp, Homo sapiens
ttttcctgacatctttttttccttttaggattcattaagtcatatacttagtcccctgcaaagaagaagacagatgtcccagagcagactgaaagcggggcgtgggatcctaggcaatgcaggagggcaggtgggggagctgtagcagaacaagggtgctaggtgggaagctggcttggggaccacacgtctggctgactcacagggctatagcagcagacagagagccagatgctctactgcaactggtgagttggaggcttgcccacataacactgtctttctctccacccgccaagcatccagggcacagggctggttgctcacagattgagcgaggtagcacctcctaccagcactcaagtttatcagggccgcgttctaaacattctactgaagtttgctaagaaaccattaggtgaggctgggcacagtggctcacgcctgctatcccagcactttgggaggccgaggcaggtgggtcacttgaggtccggagttcgagaccagcctggccaacacggtgaaaccccatctctacaaaaatacaaaaaaattagccaggcgaggtggtgcatgcctataatcccagctgctcaggaggccgagacaggagaattccttgaacctaggaggcagaggttgcagtgagcctagatcgtgccattgcactccagcctgggcgacagagtgagacttcatctctgcaaagcttgggctcccttccgacggagacaggcgagcagctgcc

SEQ ID NO: 551678 - DNA, 969 bp, Homo sapiens
  misc_feature (678)..(678): n is a, c, g, or t
tcactgggacaagattgcagtctccctcccccgctctgagaaactccgttccctagtgctggctggcatcccacatggcatgaggccacagttgtggatgcggctctctggggcgctgcagaagaagaagaactctgagttgtcctaccgtgagattataaagaacagctccaacgatgagaccatcgctgccaaacagatcgaaaaggacctgctccgtaccatgcccagcaacgcctgctttgccaatgtgaacagcatcggtgttccccgcctgcgcagagtcctccgagcactggcctggctctacccagagattggctactgccaggcacaggcatggtggctgcttgtctcctgctgttcctggaggaggaggatgccttctggatgatgtgtgccattattgaggacctgctgcctgcctcctacttcagcactaccctgctgggagtccagactgaccagcgggtcctgcgccacctgatgtccagtacctgcctcgcttagacaaactgttgcaggagcacgacattgagctgtctcttatcacgctgcactggttcctcacggcttcgccagcgtggtgcacatcagactgctgctgcgcatctgggacctgtttttctacgagggctcctggtgttgtccagactacgctgggatgtgggccttaangggggaagagctggaacaagctggaaaacaggttcaacttcaaaacgccggagagattctggcagatggtagccaaaagcgtgggggaagcccaaagcgggggggccccaaagaaggccgggaaaccaagggaggaacggccacctttggaccaggaccgggaggggcgccacaacacagggagaagaacacaggaaaggtgacactggagaaacaactgagaaaaaaacagaacgaagggtgcacaccacagggacagaaaaacaccaggctctccagccgcccacggct

SEQ ID NO: 551679 - DNA, 205 bp, Homo sapiens
ctgtctaagcaggtggcacactcagatctgatgcacagtaacacgacgtgcactagtatagccagacacccaggcacactcgtctctacgcacacagtggtcacaagtgcgcacacatgcctccatgcacacgcacacaggtacattaacatgcatgcatgcctccacgcgcacaaacgcctcctagaaatgctgagcacacacg

SEQ ID NO: 551680 - DNA, 100 bp, Homo sapiens
cttggacacagcatctagcaggagtacaaataggagctcttcaagcagcacatgaagatggccaggagcttcagccatcagagcagagagcagcactaaa

SEQ ID NO: 551681 - DNA, 191 bp, Homo sapiens
  misc_feature (38)..(38): n is a, c, g, or t
  misc_feature (42)..(42): n is a, c, g, or t
ggccaggccctggagagacagtggggcctcagtgggtncccnaagagaggagagaaacgcatggagacccaagagtgctgagcggccgggcacagaggctcatgcctgtaattccagcaccttgggaggctgaggcaggaggatcacttgagcctaggattaagaagattagcctgggaacccatctctac

SEQ ID NO: 551682 - DNA, 2129 bp, Homo sapiens
actgtttcacacttttctgcttctggaaggtgctggacaaaaacatggaactaatttccccaacagtgattataatcctgggttgccttgctctgttcttactccttcagcggaagaatttgcgtagacccccgtgcatcaagggctggattccttggattggagttggatttgagtttgggaaagcccctctagaatttatagagaaagcaagaatcaagtatggaccaatatttacagtctttgctatgggaaaccgaatgacctttgttactgaagaagaaggaattaatgtgtttctaaaatccaaaaaagtagattttgaactagcagtgcaaaatatcgtttatcgtacagcatcaattccaaagaatgtctttttagcactgcatgaaaaactctatattatgttgaaagggaaaatggggactgtcaatctccatcagtttactgggcaactgactgaagaattacatgaacaactggagaatttaggcactcatgggacaatggacctgaacaacttagtaagacatctcctttatccagtcacagtgaatatgctctttaataaaagtttgttttccacaaacaagaaaaaaatcaaggagttccatcagtattttcaagtttatgatgaagattttgagtatgggtcccagttgccagagtgtcttctaagaaactggtcaaaatccaaaaagtggttcctggaactgtttgagaaaaacattccagatataaaagcatgtaaatctgcaaaagataattccatgacattattgcaagctacgctggatattgtagagacggaaacaagtaaggaaaactcacccaattatgggctcttactgctttgggcttctctgtctaatgctgttcctgttgcattttggacacttgcatacgtcctttctcatcctgatatccacaaggccattatggaaggcatatcttctgtgtttggcaaagcaggcaaagataagattaaagtgtctgaggatgacctggagaaactccttctaattaaatggtgtgttttggaaaccattcgtttaaaagctcctggtgtcattactagaaaagtggtgaagcctgtggaaattttgaattacatcattccttctggtgacttgttgatgttgtctccattttggctgcatagaaatccaaagtattttcctgagcctgaattgttcaaacctgaacgttggaaaaaggcaaatttagagaagcactctttcttggactgcttcatggcatttggaagcgggaagttccagtgtcctgcaaggtggtttgctctgttagaggttcagatgtgtattattttaatactttataaatatgactgtagtcttctggacccattacccaaacagagttatctccatttggtgggtgtcccccagccggaagggcaatgccgaattgaatataaacaaagaatatgacatctgttgggcctcacaaggaccagggccttctggaggagtggcactaccccacctggcagcacctagacctgagctctacaaaaacacactgcttcactttgttttaggacttagttcaagaacacattcaaatggtgcatgtgtttggtatcttcaacagtagaccaagaatctaacatcactctcagtaatatagagaccggaatacatggtttataggaaatgatcaaatgatccaaaaaaactccacattttttaagaagttggaatttgatttcatgcataactgtattaaaacattaaatagaaataatgtcatttgaatgaaaatcttatcacattaaattcactgtgaaggcagcatacttaaaggaatttgatttcatgcataactgtattaaaacattaaatagaaataatgtcatttgaatgaaaatcttatcacattaaattcactgtgaaggcagcatacttaaatttttattttgaaaagtctaaaaggcttagatttttaaaatttaataattatttctacaaattttctatttttcttgaggtgattctcaactagcaattggaactcctaggctctattaacataattctttattgtaaacgtatctaatgctaaaagtaataaaatggtagttttctgagacctgtgaggacagg

SEQ ID NO: 551683 - DNA, 201 bp, Homo sapiens
tggtccggtcggcggcgagacggcgctcgttctcttcggaactgtcggggtcggcgtcgaggtcgtcatgcacccggtccagcagcgacagggcttcgtgcagctggatcgaggcgttctcgatcaggccgtccacctcgcccaggcgcgggtcgtgttcgatcaggcgcgacagctcgtgccgcacctgctgcagcaggt

SEQ ID NO: 551684 - DNA, 212 bp, Homo sapiens
tataataaaggaatataaacttgttctattataagacacatgcacgtgtatgttcactgcagtgctattaacaatagcaaagatacagaatcaacctacatgctcatcaatgatagactaaagaaaatgtggggccgggtgcggtggctcacgctaaggcttttttttttttttttttattaacttttaaattagacttttttttattgtgt

SEQ ID NO: 551685 - DNA, 502 bp, Homo sapiens
gacatatcaatgacacgtgatggctgtgtggcgaatgggaggactcaggttctacaacttgaaacctggggctcatgtatcatgtaccaggtggctagaagtgtagcaaatctcagtgccaatttgaggggaagccagtcattccaggagaatcagctgagtggaaagagctgtagacttccatattgcagtctcaattatccagtcaccctcctgcctagatggaaaaagccaggtggcagtgatggtggtgggggaaacaaaacacacagtctctggcaagccccaccgggaaaggagggctcagaaggcgtagcgcgtccggatatcctcgagttccttggacacttcgggttggggttcggcccaagttctccagagacgtcctatggtgggtggggttccatggacttgaactgctcacagaggtctccatcaatcacattcttcacagggaagtagtaggagcgaagctgagggtggtcccgccacacagagaggg

SEQ ID NO: 551686 - DNA, 137 bp, Homo sapiens
tgtgtattgatcttcactgtgtacgctgtctcctaaaacataccgttacctgtattagggccttatctaatataataaacactattcctgaaaaatctattttgtcaccctttatttcaggaagtttagttatagga

SEQ ID NO: 551687 - DNA, 427 bp, Homo sapiens
tattgagatagtcagatttttaattctaaaagaaagccacatgtagcggggtgtatgaggggggtcatcataattatgaataacatgcaatattatggtcaaaaagatgaaaaataatatgattagtataggtactttacttatttggccaaaagtctgttggttggatttttaactcagataatttttcttaaatcaaggtataaataccatgcctgacatattttctacggtgtactatgcggggctctcattgggtaaggataagcctacgttatgctgcatctcccaagtccatcctatagctttggtatgtcccactatcggcagcatcatcactaaatatctccatacttctcactatctcaatctttttcttctacaacatggtacaagggtggtctgtcaccacctaaccctatctatc

SEQ ID NO: 551688 - DNA, 243 bp, Homo sapiens
aggaaggaaaagataaaaggtgctaaagacaatgacggaggtagagatgaagctactcatggagataaaaaatgtatgaaaagaaaaattgagagaaaggactacagagccccgaactaataccaatagaagggcaatgcttgagatagacatgacaggtgactgaaaacagctaacaagtcacagtacacaagatagtaggtgataaaacataagtagaaggcgatgctaaacagcagaaga

SEQ ID NO: 551689 - DNA, 1500 bp, Homo sapiens
tataactaaccccccccctcatctctctctctctctctctccgacgcgggggggagagagaacaaaaagagagagagagagagagaaaacaacagctctctgcgcgcgcgcgcggggagagagagagagagagagagggagaaaaaagagagagagagagagagacgacacccttcgctgctgctggcgcgggggagggagagagagacacgcccgcgggggggggggggggaggggggggggagacgagagagagaaaaagagcgagagggtgtcgtagtgtctctctcgtcacagcggagagagaagagggtagggagaggaaggagaagagagagaaaacgcgagcaaccaactagcgcgagggagacaagcgcccgagagcacgaagggaagagagagaaacgaacaccgcgacacgagggggcgagagggacgagcagagcgaggaggcaggagagacacgaggcagacagatcagccggagaggcgtgtgctctctctgtgtaagagagcgagggacacgtaccaccgcacagagacgcaacaaacaccagagagagtgagcgggagagagaggcgaaaaccaacacaagcgggagcgccatgagacgcgcaagaaaatcgaataactcagccccactacgcgcacagtagaaaaacaacaacacacaacagcagcgctcaactacgagaagagacgagaacaaagacaacaacacacaccacaccggcccgccgaaagcggcgaagggcagaccaccacgacaacgcccaccagagggcagcgagaaaccaccaacaaagagagcagcggcgcgccccaccactactacaagaacgcagccgagaagagcgacacgtatcgtgtgacgagaagcagccacaaaacaccacgggccacatcatgatgtgaatgcagcacaataacacaagcgggcgcaccacacgcaaatcaaacaaaaagcatatataaacactgcacactcctcagatcgccgcaactccaaaacaacagtacgaacgcacaaccacgcggaccgacttgacaggcccacaccacaaccagcacaacaacgaccaggaagaaacacaaatcaacggacgccaggctacgagaccaacagaaaacgaacaggaacgcgaacgcgacacgacacaaaccaaacaaagaagaaccggacgccacaaaaacaacgaagcagcagaacaccgcaaccaccgacagcaggagaggagacgagagcgacgaacaaaaaaacacaaaaatcaacacaacgagcacggaagcgagcgcgcacaggacatcaaaactaacaccacgacgtgagaggcgagagcaggaacacaaaacacgacgccgacggcaaccaacgcatagtacaagaaacaaaggcgacagcccaacaagaccagacgaggaaggcaaaaatacaaacaacgaacacagcaggcgcagcacatcacaaacaaaaggcaggggagcgaaacaaacaacgc

SEQ ID NO: 551690 - DNA, 800 bp, Homo sapiens
tcgacggtccccttcattaatcatatttgaagagaggagccgagtggttatcagggtacagctattgtaaaatttaccatggcttacatccaatggaatgagtagatgtattttattgctataaaatgttagaatggagcctcagctaatgccagggttacgtatatctagaccataaagcagtttttcacaaatacatctttacagaaaaacagcattctagcttagcatctttccccttttaatttgtaggcttttaaaggcaaatcattcccaccatcactttttgccgggattatacacattctagaaatgattctgagaggagtgtatagtatggtgcctatctacactcacatgatattcttattcacgtttttttttaaccataagtggcaaatattttaaaatatttgaaaaacactccagaatctagtacgctttatttttagactgaacctaaagtaggttgttcttttaacaaagggtttaattcgggtggggaatataaccatatcaaaatacctgaacaaatggaacgttacttctagaaaagccaagaaatttgctatcatttttgtttcttgggaagctaattttgttgactgtttcgacctgcaatgtccgacggggggacctctaaagtcacctgcggcattcaacttggactggccctctttacacacttgctggacccctccgaagaagaaacaaaaaacacctcacaacaaaaaaaccaacaaaacaaaacaaaaacaaacacaaaacacacaaaaacaaaaacaacacaaccaaaccac

SEQ ID NO: 551691 - DNA, 114 bp, Homo sapiens
ctctttttcaagggctaaagggtttttaaaatttccaactgattaatatgtttctgctgttttgggttttgatggcctttacaataaaaccacctacctttggctttggtttta

SEQ ID NO: 551692 - DNA, 320 bp, Homo sapiens
  misc_feature (222)..(222): n is a, c, g, or t
  misc_feature (257)..(257): n is a, c, g, or t
  misc_feature (316)..(316): n is a, c, g, or t
caataaaggttcttgaaattgttaccagtgaattcagtttataaatcttattacaaaagacttacccacgtacctgaaatagctgccgatagaccagtgagaggtaggttctcctctgcccgttattaccgaccaaaaaaaaaaactggacatcaattttttagtaaaccaaaaaataagtctcaacaaatgcctttgccaaaataaggttttatttttganagtctttgatggaaagtcatttggaaggacactgngggggggagggggcctaaggccccacaggtgtagggtcccggtctggggtttcgtgccngccc

SEQ ID NO: 551693 - DNA, 777 bp, Homo sapiens
ggagagtagtgtctcgcatgttggccaccccctgcatgtcattctcaatgcgctgcatggtccagttttgtgggacgggaggccaagtacagtggtgtgctgagctccatgggaagatttgcaaaggaggaacgggctgggtgggattcttcggtgggacttaatcccctcaccctcctggtgcgagtagtgggtgttgcttggtggggctgttatcctgtctggggccacttcatcgaatgcctacgcgtggtggatgacagtctgtgagtgacacccctaggggaggctggggtaaacgaccagaatccatggtttcccatgttcagccaggccctgggtcatccggagctataccgaagttcgtgatggggattgcaagtgagcatgcgtgacctacccccttgctgtctatgttgggcgatcctcatggcttgtggagcaatctgcgggctgcaccgctgggttccccccttactccccagtgttcaaattccgggacttcacctgctggaagtacctgagtgtgcagggccaggtcttccgaggctccaggctgtctttatgcgacgggtgtcatccaaggatcattgcttgtgccctgggagtaacacctgaatctatcgtggacacacacatattggtcgtcaacacgtggtccaccgtgggtgaggctgaccaccttgggacacgctgccaggaagactacaaccaaaaagaacgagatgtggctccaggaccagacgggggttccagtggcgtattgccatgtgtctg

SEQ ID NO: 551694 - DNA, 406 bp, Homo sapiens
cagcggagtgacccagggacggaggacccaggctggctggggactgtctgctcttctcggcgggatccgtggagagtcctttccctggaatccgagccctaaccgtctctccccagccctatccggcgaggagcggagcgctgccagcggaggcagcgccttcccgaagcagtttatctttggacggttttctttaaaggaaaaagcaaccaacaggttgccagccccggcgccacacacgagacgccggagggagaagccccggcccggattcctctgcctgtgtgcgtccctcgcgggctgctggaggcgaggggagggagggggcgatggctcggcctgacccatccgcgccgccctcgctgttgctgctgctcctggcgcagctggtgggccgggcggccgc

SEQ ID NO: 551695 - DNA, 430 bp, Homo sapiens
ccatatattcatgtaccacatatatttggcaactggactcttatttgttttttttttttggaaacgagagggcaagggggcgatctcagctcactgcgacttcggcctcggttgtccaagtgattctccggcctcagcctccggagtaaaaaaacagttcctccagcgtccaaaaacatggtttaatgctcattgggaagtcagagcttcccctttctttactctcggcccttcactagtctgtactctatcacatcattgggtctttcccagaggggaacttccatagaaggggatgcagggtaatacgcctgggggacaagcttcttccgctaagttggatgcttgtgccatccggccatggtggtcacacagttgggtcccttgccctgctcagtgtggtctcataatataacaagtacccccatgg

SEQ ID NO: 551696 - DNA, 154 bp, Homo sapiens
tcatttcagaagaaaaactgaaagcaagactgtcagccattgagttccaggaacctaagagcctggatgcattatcccaccattgattcatgcagtgtgtagtggcaccacaaggactggcctcaggggccagacactgagagggagtgggagg

SEQ ID NO: 551697 - DNA, 304 bp, Homo sapiens
aacacactttttatttatttatttacagacagggtctgctctgtttcccaggctgtagttcagtggcgcgatcacagctcactgcagccttgaactcctgtgctcaagaaatcctcctgcctcagcctccagaaaaaaaaaaaaaaaaaaaaagggaaattttttgggttccctcgggtagggccaaaaaatctttttcgggacggggagggtatttaacacttttgggtggtcttttgggggcctgtacgtagtaaatggagggcccaattatttataaaggatggcacaattgggtcgagat

SEQ ID NO: 551698 - DNA, 267 bp, Homo sapiens
  misc_feature (254)..(254): n is a, c, g, or t
cagaacaaccagatttaaatgatgaattaaatgcccaatttgggtgaggcatggcaggtgtaagagaaaggaaaagcttaagaaaacatttcctgtatgataccaaccgtttctttcatcatctactgtcatttgacagataattaatccttttagaagtttttacccggtgacactttcatttccttgtacaatgtaggtgtaacatctccatcttctgtatttatgtcaaatatacatgtcgttagtcacangctccctgacggc

SEQ ID NO: 551699 - DNA, 786 bp, Homo sapiens
ggaagtaattagagcttgaaaaaatctgttggttcaggcagagagctatattggaggaagcattacagaagaaagagatcttttaggaacagttgtggggtgggcctgcaaatttagaggctatggctaagaaaggaaaatttaataaataatgggtttttcgtgtggatgtactccaagtaaagctccagtgactaatatgtataaatgttaaatgatattaaatatgaacatcagaattactttggagggtactattaatatggcgaattaattttaatctcctatggatatactcggcgaactccatttacctcatttctgtgccaattactcacgtggggtattagtgcgtaatctggaacatttagctaaaatatacactttggcttaaaaattatggctgtcaattccaataataattcttagcttataaccaaagagcagtgtttacaaggagagcttctataaaaactattcctgggttacttttcatacaattttgttctgttttacctggaaataatttaccaaaataactgagtgtgtgctgtaaagaacaaaagtggggaggtatcagggaacaagaacacaagaaagggtatgatcaatcattttcttctggtccaaacagctgggttacattcatggggaatggccttcatttaaaaaagatgtgcctcaataccatacaaattgtggactttgcgcttttcataataagttctattgtaattactaatacaggcggtgccagacatggagccatggtctcaagggcccttg

SEQ ID NO: 551700 - DNA, 972 bp, Homo sapiens
  misc_feature (632)..(632): n is a, c, g, or t
tagtttgaacccagagagtgatgaggctgcaaagattgtgccgagtatactcgaatctgatacgacagagatgagatcatgtctctaaaaataaagctcttctcatataactagtgactgcgtcgtagtctggagtagccccaggtgctgcatcgagaaaacggcccaaacgttgtactgacgataactcttacctagcttacagtagtgactttgtgtgccgttccttcgactctaagttgcttctaactgttataaaagaatttgggttactacctgggtattattagaagtcaatacaagttctaacactggcgttacacctttgtcgacttgtcagttaaggtcctgccagactagggtgcatctgtgatatacattgacaatttggtcaggaaagctcggtaatgcaacatgtattttatgtgtcgggtccatcgcactcttcgtggacttctggacggggatacaaggctttgtgccgtaacaactgggcatgtgaggttagtatatcataaggcagtatatattatttgtttcattgcaactaagttgagaaaagagcaattggagtttacggacagagagtagttagaacctggttgcttatattctggtaaaattccagatgntgcaattatctcaattgaggtgtcccaagttcgaacttgttttaaaggcatggggttaaatattggagcttggggggttcttggcggcttttatcatggcgctgctgctccttataactacgactcttgtcacagtgagaagcgacgcctaacccttctgcacgcgaagaactggtaacactggagatgcgccacattcgcggggcttcggcacaacgctttgccaaggcccccaccggtattccacgcgtacacagactctatggcgacacactcctccatgagactggtcactgcatcgcaccagatatcacatctgtcctcacccactgccgccgcc

SEQ ID NO: 551701 - DNA, 198 bp, Homo sapiens
gaaatctctttctgctcactgtgctttgcctgatgcatggcgagtgccccgcagtagccttggctccgtgcttggtcccactctggggttctcgctgtgggcgcaggctggtgtccgtctttcctttctttatccgagtgctgagggccctgtgcatgccctgcaaaccaacaaccctgtttcagcccctacaaagtt

SEQ ID NO: 551702 - DNA, 980 bp, Homo sapiens
atggcacatgcagcgcagagtgggtctacaagaacgctgatttgccctatcataggaagagcttatcaccttataacatggatcacggcccttcgataaatccaatattgtcctttgatcttgggttccctaagtcccttgtattgcccttttttctctagacgaatcgacaaacaataagtaactgaatactgaacaatcgtcagacggctcaggagcatacgagaccggtcgtggaacttatccttgctccggccgatccatccatagttccgtctatcgggtcccttctcgagtcccttgacagcgtcccttttaccagtcaacaaggacggagggctcaaacaggaaagttccacattcccctttataggcattcaaagatctaattgggcgcggccaaatggctagctgtaaacctaacgtagcataacacccgggataacttgcaggggaataaagtcttggcaatattcactaccgatttacttttccgccgcattataatgtcctagacatccggagacgaactatgagaattccttaggaagagttggaacaatagaacgaggtttagtaatctgccccgtattggaaagaaaccctcaattctgtaatataatattttgccgtcacaaaagaccgtctgggcagcccaattgaggcatgccccgcaatatttagggctttaagataggaggattgctaatactcggtgagggtcataagaggacacaatcaagtttatcaggtacaacgactcggggagtaatactaacgggagatatgctcctgaagatcctggtggagcaaactcaatagttgtctgacgcatcgtcgtagaatttatttccccttatcaattgttgacaaatgcgggccgttcaagtacctaaattgaacgcctgtagccgtttaaagagacatcaaataataagtgaggacatacacgattgcgccacaacaaaactcttagaacc

SEQ ID NO: 551703 - DNA, 345 bp, Homo sapiens
gctcgactattaacgcagtggagaatcgaataattctttgaaaagataggccaagcgtggtggctcaccctctaattacagcactttgggaggctgaggcaggtgggtcacttggggccagaagtttgagaccagcctggccaacatggtgaaaccctgtctctaccagaaatacaaaaattagctgggcatgatgacgggtgcctgtagtccccactgctcaggaggctgaggcaggaggatagctcaaacccgggaggtggcggttgcagtgagccaagatcgcaccattgcactccagcctgggcaacagggtgagattctgtctcaaaaaaaaaagtcgac

SEQ ID NO: 551704 - DNA, 775 bp, Homo sapiens
  misc_feature (9)..(10): n is a, c, g, or t
  misc_feature (21)..(21): n is a, c, g, or t
  misc_feature (80)..(80): n is a, c, g, or t
  misc_feature (443)..(443): n is a, c, g, or t
  misc_feature (553)..(553): n is a, c, g, or t
  misc_feature (560)..(560): n is a, c, g, or t
  misc_feature (574)..(574): n is a, c, g, or t
  misc_feature (634)..(634): n is a, c, g, or t
  misc_feature (640)..(640): n is a, c, g, or t
  misc_feature (652)..(652): n is a, c, g, or t
  misc_feature (665)..(665): n is a, c, g, or t
  misc_feature (678)..(678): n is a, c, g, or t
  misc_feature (686)..(686): n is a, c, g, or t
  misc_feature (690)..(690): n is a, c, g, or t
  misc_feature (694)..(694): n is a, c, g, or t
  misc_feature (705)..(705): n is a, c, g, or t
  misc_feature (712)..(712): n is a, c, g, or t
  misc_feature (735)..(735): n is a, c, g, or t
  misc_feature (757)..(757): n is a, c, g, or t
gacgccttnncggtctttttnataatgaattagtaagatttcatttttttttggctaatcaatggagggggagatgagtnaaaccagtatgttattgactgagttaaatcttacaagttgccttcagttgaaaataggtatggaaaattataagtgtctttttgttcaaaataacattttaccttaaaaactaaacttaaatatgaagcaataaactataatgtacataaaagttttaaagagatattcacataaccacaatttcctaattttctctattcccactactcagagggaaaccacagcttaattttggcctgatttctacctagatgctactttgcaatgctgatgcctttccatgattttactgtagaaatgtctatccagataaaagtcaaaagtccttttagtttctcagcgatgcttacagcctgtcttanattcaatcactggttatctgttactttaaaatacaaaacacttttttctgattcatctgctcacttctgttttatacaaagattagaaatgacttataaaattatataanaaatggnttggtaccccctanaatggatcatttttggtaatacacctgccttccccccataacacacgtccttaaaatttnccattntttaaccaaccngtcctttttcctnaaggcatgggttnttataatnaccnccgnttggtgggttnaactaanttttttaccaattttaccttttnaaattttggaaaagttttgaanccctttgccttcaaaatt

SEQ ID NO: 551705 - DNA, 358 bp, Homo sapiens
gctcgaccgggttcaagcgattctcctgcctcagcctcccaagtaggtgggactacaggcacatgccaccatgcccagctaattttttgtatttttagtagagatggggttacaccttgttagctaggatggtctcgagctcctgacctcgtgatccacctacctccgtctcccaaagtgctgggattacaggtgtgaaccactgcacccagccacgtacattgtgcttttaattgtcaggatgtccgcagtgatgacacctggccctagccttgccggaactcgcccggactgaacagggagctgggattggaacctgggattttggtttctgagactgggctctcaacagtcgacg

SEQ ID NO: 551706 - DNA, 367 bp, Homo sapiens
  misc_feature (325)..(325): n is a, c, g, or t
ggcacgagggtctagtggctgagtggtgggtcacaccctgtaatcctagcactttgggaggccgaggcaggtggatcgcttgaggtcagaagtttgagaccagcctggccaacatggcgaagccctgtcttcactaaaaatacaaaaaaaacccaactaaacaaaaaaaaaaaaacaaaaacaaaactagctgggtgtggtggcacacacctgtggtcccagctacttgggaggctgaggcatgagaatcacttgagcctgggaggcacacgtggcagtgagctgagatcgcaccgatgcgggccagcctgggtaacagccaccngggggggggggggagcgaaggcgcggggggcgcttcaaccgc

SEQ ID NO: 551707 - DNA, 413 bp, Homo sapiens
ataccttcataatgatctccagctttactaaatgaaaaaaacaattgacagaatatgattcatagtgtgctgcctctctagtgcaagaaaacaggaaaagaccatatattgcttatatctgcttgaagaaatgctacatcgaaatagatgtataggaaataaaaggggttacctggtggaggggaggaaccaagtgattgggatgaggggaggaggacttctccatctctacttttttatgttgttttgtatacctatttttaaaacagattgaaaaattaagaaaaatgtgtactttgttctagagtgatgatggttgtacaactgtgaatattgtaacaaatcactgaatggtacactttaaagggtgattttatggtatttgaattatatttcaataaaataattatttt

SEQ ID NO: 551708 - DNA, 620 bp, Homo sapiens
agttgggcaacgttcttgaaggagcggacactcgggtcaagtcttgaagatgagcagaagtgtttgctagatggggaagaggcagggtaggtcatcctaggttttccctgctcctagtgtgaaagggcatgatgtgtttgaaaattcatctttgtagttgcacataactaatgcctcagatatattggtggcctttatctaatgtagctgcacagtacgcccatggacttctaagccagagagggcctaatgtggggcactgtagctcctacagggctttcgggtccctccgccaaaaggtgggcaccttcacgttctcagaagtcccagggttctttcgcgggaacaccgagaagataatccctgaggtcctctcagccttccaaatggagcttagctctttcaccccagtccttactttcctgctgcgtacacttcggcggtgtcaaacaggtttacacatgctcataggctacagtcagcacatcctctgctgtctcatctgagatctgagaacaaaatgtgacccaggtacataggccaagacaggatacccgaagcaccgacttccctaggttcctgcaagatacagaagcagagggaaggggtggagctccatt

SEQ ID NO: 551709 - DNA, 469 bp, Homo sapiens
gggctgacccgaggttatgtgatttatcccaacacctcaggagtaaaggcaggcagatcatctgaggtcgggagatcgagacccacctgaccaacatggagaaaacccgtgtctactacaaaattagccaggcgtggtggcgcatgcctgtaatcccagctactcagaaaggctgaggcaggagaatcacctgaacccgggaggcagaggttgcagtgagctgagatcgcaccatttcactccagcctgtgcaacaagagaaactccatcgttaaaaaaaaaaagggaggctttccttaaagagaaaaattaggtaacgggttgtgtggcatgtgccggcccggtttttaaattccttcccagggtcttggtccctttgacggttagggaaagggacctttataagggtttgcggtttaagaaaaacaattcttttggagaacgaggttttccttttggtaaggccaca

SEQ ID NO: 551710 - DNA, 588 bp, Homo sapiens
ctttctgcattggtctagacgctggtttgtaacccaggtgcagctcattttagctcattgtggtcatctcctcggaagtcccacagcgagcgtgcactcaccttttagcccagtcctggatggggtgtgactgtgcacacacgactggcgtgggtcccagatctgagtgccccagtaagcccatttcctaaacaaaaagggtttgaagaggctatctagcctaaccctctgccctgcaaacagagccaacggccttgattatcaaatgagaatgtggacttcggaggcaaactggtaggggcattaagaaaccagaacttaaattgcttccacatctggaaaacaaacccagcagccagccccaagaattccaggcatgccagctcaaagagaagctgcaggtcaaggggaggcttttccctcttagctttcagtccccccatcacctacctaaagccacagagatctcctgtctacaaataggctgtggagccacaaatcagaagaagagaacaaagttgaaatactagggcgcctaccatgtggccggtctgctctgtgctttacagaggtggtaacttccatgct

SEQ ID NO: 551711 - DNA, 276 bp, Homo sapiens
aatctatggactgagatactcctcctgaaggactcctagctagaccccctgatgatagtggtcaccaagatgatggtcctcagcagagagcaccaaaacatggatggccatcaccgatatcctcgcccacctccttttcaaaatcagcaacgaccaccccaacgaggacaccgtcaactctctctaccccgatttccttctgtcagcctgcaggaagcatcaacattctatccgtagggacacaccagccggcagatccccaagaggaggaggaat

SEQ ID NO: 551712 - DNA, 237 bp, Homo sapiens
cccaaacccactccaccttactaccagacaaccttagccaaaccatttacccagataaagtataggcgatagacattgaaacctgcgcattagatatagtaccgcaaggaaagatgaaattataccagcatattatagcaaggactaccctataccttctgcatattgattaactagagataactttgcaggagagcaacagctaagaccccgaacagagagctactcagacagcta

SEQ ID NO: 551713 - DNA, 247 bp, Homo sapiens
cattggtccgagagaaattagttgtggcaataaaaataattaatcgatactagtataagagatcaggttcgtcctttactgttgtgtatcgttatcatttgttttgaggttagtttgattagtctttgttgggtggtgattagtcggttgttgatcgcgatatttggaggtggggatcattacagggggaaatatacattgatccgttctgcttgcgcggtagcgccttatttctctcggaccaatg

SEQ ID NO: 551714 - DNA, 241 bp, Homo sapiens
atgccaatcatttttcatccattttcctcaaaggttggtgaacaagtgctaattcctcgggggccaatcgggcctttcacatcttctctttgtcagagtggtctcttccccaaagagcattgattccatccgcggcactaggaggtgaaccatacccaaagaactttgcctctttagctctttcagcacaattccaaatggatctgtggcgttcctcaaccgtgttatgccctgttcaacc

SEQ ID NO: 551715 - DNA, 282 bp, Homo sapiens
tggcagtcgtatttattttaattcataaattacatttaacattagcagatttaggcaattggtataggctaaatttacaaattactttaaaaaactcattacaaaaggtggccgggcaggggtggcctcacagcgtgtaactcccagacactttagagaggctgagggtgggcggatctcacgaggtctcgagggagtgtgtgagaaacgagccgtggcccaatcagtgggtgaaaccttcatcttctacctaaaacaaaaacacaaaaacaaacaaacaga

SEQ ID NO: 551716 - DNA, 291 bp, Homo sapiens
ggtcaggcgaggtccactttgggagactgacggcagatcatttgggctcaggagttccagaccagcctgggcaacatggcaaaaccccatctctacaaaaaaaatagccaggtgtggtggtgcatgcctgtggttccagctactcaggagactaaggttggaagacggcttgagcccaggaggctgaggctgcagtgagctgtgatcatgtcactgtacttcagcctgggtgacagagtgagaccctgtctcaaaaaaaaagaaaaagaaaagaaatacagagtagttgcc

SEQ ID NO: 551717 - DNA, 946 bp, Homo sapiens
ttgacgaaaatacatagcgtgcgtcgttcttcaaaaatggtattatccctgggggatgtccccgctcgccaagtggtgctagatccgtcacgatagatcgttttgatggctcctggtgggcatcaccaggactattaggtgtttattccccatagcgagctcccttgtggacaatgagataggtctatttggcgggaactcaactctaaaagtggtttcaattactccacaataatcacatttctgggaggcaacgccctaattctcttaaaagaggaggggccacctccccaaatgggaccgatgctacccaattttgctccagggccggtttaacactaagcgcggaactcaatgtgcggtatccaaactggattttgacacccaaacgtcctaaaatagttacgcgttgaaatttccactacaacggggtgggaaatttgaccaccgtaacgtgggaaaagaactatcttgggaaaaggcctccattcccattaattttccgggaaaaagaggaagagaccgtggaagcccttttaagcctgcgctttaaacccgggaagggaatggcaacctcaggagcaaaccagacagtttcgatggtgggagaattcctcttttacagaaagttttcccagctagtaaaactgtcaaaggaataacacaacagactattaaactttttagagaatttctaattaatagattgggctgggcgcagtggctcacacctgtattcccagcactttgggatgccgaggagggcgaatcacaaggtcaggagttcaagaccagcctggccaatatggtgaaaccccgtctctactaaaaatacaaaaaattagctgggcatagtggtgggcgcctataatcccagctactggggaggctgaggcagaagaataactgaacccgggagttaccgaggttggcagtgagtcctcga

SEQ ID NO: 551718 - DNA, 171 bp, Homo sapiens
  misc_feature (23)..(23): n is a, c, g, or t
gctcagtatcccccacgccaccngagaagggctgtgttcctttaaatgtggttgctgaggtgctgtgggtggggaaggctctggaacggataactccagcagtgttgtatgaggggggaggaggaccgtatatccaatgctttccttctccggtggcgtgtggaagccctc

SEQ ID NO: 551719 - DNA, 1858 bp, Homo sapiens
cctttgtcggaggcgtttgtttcgctgcgtgctgtttctgtctgttcagtatgtctgcgtctgtcgttgtttctttttcgctcctgcggtcatcatagggggcacacttcccggctgtttggttggatttcgccgtcgctatcatcttgtatagaggtgatcagtttttgcacctagttcgcgcggttcctcatgttgtgtgtctctccctcgtttgagtgaggtggaggggattgttccctctgattgtgttcttctgttctgtgcctggggttccgccgcctcgatgtgggggtgcgcacgccccacatatgtctgtggacctgttccacaacgggggacccctcggtcagatgctgtattatcaagagggataataagagttggattggcccaaatgctcagatgtgcccgcgatgaacttctcctccgaaaaatgggcccacactcgtgcggatgacaaaccgctgtttcagtctgatgtgccccatagcttgagttgtgggtgccctcaatattgtgtggtgccgccccgtgtgggttaataccctctgtctgtcgttgatgatagtggttcaagcggtggtgattatcttccctctcccccccggtgttaatgtattcgttgggggcccccgagagggggcgccgtgtgtgttggtgtcggaaaagctggttgtttgactagtgcggtggtgccaccatcattggtgaagccccccatcggttgcccacaatattgtttgtgtctgttgtgtgccgcgcgtgctgtcgtgtcaacgacttctcatctgtgggggacgcctcccgttgtctgcgcgttattactcccttcaggatgttgcttccacgggggcatgcgcccgttgtgctcccgggtgttagtgcgacacctcacggggcggttgtgtttgtgttttggtgtgtggtgttccttggaggtcctcctcctccccatgtggggggtgttggtgtcccctcttccccatagcgcatttgtgttcctcgcctggtggagtggtgccacttctgttgtagatgggtgttataatacccttatgctctcacaccccctttgggtcggcctctgtggtgtgttacacccccaacggagttttttggcgcttctctggcgcggtctatatagtgtgtgggacgcacttgtgtgccgcacttccccccactgttctcctgtgccacacaccacacagtggggagtgcctctcacacttctcacagtggggggttgtgtgagaaaggttgtggttggtgatatgtctacggggctctcgcgggagaattgtttctgggccgccacatgccgctggggcacaccactgttgccccgctgtagacacacacccactcggagagaggtgtcacatggcctctgatatctgcgtgatactgtgtctgacacacagagagagttccctcgaaagagaggattttgaaaaaacagaaagagcgcacggctcgctcgcgctctagagaaagcgcacagtggcacacacacaggagaggaattttccacaggggttgaattggacttgcttccccggctccctgcgagggtgtcctctgtgcgtaactcacccctcgagaggtgtccacgagctggttctcgaaaggtgtaccacaggtggccctcctgtggcctattcacccacattccctcatctgaaagaactggaagcgctcacagcctgccaccggaaagaactggttctccacagctccccctgctcacggccacctgaatgggtaggagccacccctgactggttttaacctcgtttttgcataggctcttaagccgcctggaaaaatggttgatggaaaataaacctccgttttt

SEQ ID NO: 551720 - DNA, 505 bp, Homo sapiens
ggagagagatgaactagtctcggtctagattgtgtttcttttataagaggaaaacccggtaatgatgtcggggtgaagggataggaggaaaatgggggataggtgtttgaccctgagggtgtattgactcgtggtgactggagtggtttgcatggtaggtcacaggtgaggtggagtgtagagtggacgtccccgatgtgttgtgtgtgcgtaacatatttgtacgaaggagacgtactagggctggtagagatagtcatcgtataagatgtcccatagtaaagtaggaggaaaagtgacaatattggagcatccgcagtagacaatatgcgtggtgcaaacgaaaacacctacacggtagatagtgccctcccgccatcgtcagttccaacataatgcgaggaggtgggtcaaagcgtcaacgcgccaaacccgtcgcgccttggctgtactacccgccagcaccgacccaatccctttcacgcggagcgctccccacgtactg

SEQ ID NO: 551721 - DNA, 346 bp, Homo sapiens
  misc_feature (346)..(346): n is a, c, g, or t
acgagagaaaacctgtgttggagtgaccagagcgcgaagtgtttattgagcacattacactctcagatgaagagagagagagttataaatctgtgatgaaagcagagccactattggaagaggttttaatggaaggactgtgctgtgacaatatgcacaagtgccgggtcttttggttagactcggggaaatttgtgtggcatacttacacttttacaggaaggttataagggagatggaggttattctgagcttaaggtcagatgaggaatgtgcaatttggctggattctttaacaagttctgtgatatacacaatgtgcacaagtttttgtgccctgtgtttn

SEQ ID NO: 551722 - DNA, 201 bp, Homo sapiens
caggatttaggtattgagtggcatgtgcaggagtgtacaggtatggggaaaggaaggctggcttggcgagagggcaggtttgcgggctttcgacccccttattccaaagtaccaacaaagagtccttcccacaactcccaagctcaacccctatttggcaactactgtgtaggtggttcgggacacctgatgagtcagcat

SEQ ID NO: 551723 - DNA, 543 bp, Homo sapiens
gtgcggagccgcaggtcctggtacaatacttgtgtgttacgaaatggatctatcacaatgctccgttctcctgtgccggcgtggcgcactggtagctgcaggcttgtcacgcggccaccgcggccttgcacactcaccgctgaccaccctgcacacatgcctgcttacctccaagatgcttgggtgctgcatgctgcaaatgtgtgtcctctgaggccccagatgagaccaccctaaatggagcttggcctgagaccctgcaaacatgaatgaacatttgaccacatgctgtggcttgagcaaccagagaatatcgccacttgtatatgctctccgggccctaccccaaggaagaatttgggccagtatttgaagaagttccagatgtgttcaagtaacttgctgctttgatgtgtatagaatacgcaggccacccattccaaagcatcatgtgtaccttgcagatgtcagcattgctcccgtctttcagttgtgacaatttcttgagggttaagcacatgtcatattaaagttgtcattaat

SEQ ID NO: 551724 - DNA, 301 bp, Homo sapiens
cacgagctgggtgtaggaaccccgggcctggcgtcccctttaagccacgccggccccacagctggggcatcgtcccttccccccgccaccccagcaaactgacaccaaacggggaagaccacgatgcccaggaagatgcccacgaaggtgacgcagtcctccagcacccacacctccagcacaggacagcctcccacgcccacgatccagttggcaggccagccgccccgcgtcccgcctgtggatgttgtacacctggcgatggtgggtgggtatccctgccacgaggtaggggtagggc

SEQ ID NO: 551725 - DNA, 775 bp, Homo sapiens
  misc_feature (18)..(18): n is a, c, g, or t
  misc_feature (29)..(29): n is a, c, g, or t
  misc_feature (45)..(45): n is a, c, g, or t
  misc_feature (54)..(54): n is a, c, g, or t
  misc_feature (56)..(56): n is a, c, g, or t
  misc_feature (63)..(63): n is a, c, g, or t
  misc_feature (67)..(67): n is a, c, g, or t
  misc_feature (78)..(78): n is a, c, g, or t
  misc_feature (82)..(82): n is a, c, g, or t
  misc_feature (91)..(91): n is a, c, g, or t
  misc_feature (93)..(93): n is a, c, g, or t
  misc_feature (420)..(420): n is a, c, g, or t
  misc_feature (425)..(425): n is a, c, g, or t
  misc_feature (459)..(459): n is a, c, g, or t
  misc_feature (764)..(764): n is a, c, g, or t
gcctttacattaattgtnacccggcaggnttttacacacattttngaattaagntncaatgantttnttaattaaccnccgntacagcccngnagcgcctccaccccagagacccggaccaagttcacacaggacaatctgtgccacgcccagcgcgagcgcctggactcggccaacctgtgggtgcttgtggactgcatccttcgcgacacctccgaggacctgggactccagtgtgacgccgtgaacctggccttcgggcgccgctgtgaggaactggaggacgtgcggcacaagctgcagcaccacctgcacaagatgctgcgggaaatcacagatcaggaacacaacgtggtggcactgaaggaggccatcaaggacaaggaggaacctctgcacatagcccagacccggctgtanctgcnctcacaccggcccaacatgcagctgtgccgcgangcagcccagttcagccccagctcacaccccccaacacccccaagctggtgagtgaggtggaggagctgtacaagtccatcacagtgccgcgggagaagcttctacaagcagagcagtccctgtgcaacctcgaggacatccacatgagcctggagaaggacgtcaccgccatgaccaacagtctattcatcgaccgccagaagtacatggcccatcgtacttgctaccccaccatcctgcagctggctggctaccagtgagcagcggcacggtgcttccccccaatcccccaaataaaccagggngttagctttca

SEQ ID NO: 551726 - DNA, 155 bp, Homo sapiens
  misc_feature (9)..(9): n is a, c, g, or t
  misc_feature (21)..(21): n is a, c, g, or t
cttaaacgncggcgtcctttnttccgggtaaactcataaaacaaaagttaagcccgcgatcaaccataagcctaatcctaacaacacttcatatcatgcctacgatgaacaggttactaccatttcccatcgaatgaccaacaggaggctaagtc

SEQ ID NO: 551727 - DNA, 1222 bp, Homo sapiens
  misc_feature (439)..(439): n is a, c, g, or t
tgtgtaaacaccgggtaacccagtgtttattataaaaaaatgcccctttactctttaatttgagaattgcgagaagccgccacgcaccgggccccttttctcgtcacaatgcaacggggggcactgcacggcaaggtgggcaccaaaggcaaaggggcttcgcgtccctgtggccagagattgcagtgtgtgaacgccttggtcctccaccatatccagttctcagcactataacagagtcacaggaaagccccctctctgtgcgggagtgccctgtggggagccacagcgggtctctgtgtcacacaaatgtctctctgtgcgtctcaaacagagaaagcgctcataccatatgtgagggaggcgttggtgtgcgctctgtgaggagaacacccttgtctggcgctctcaggagacacatgctcctccacaacgagcngcgacgaacatgatgttgtgtgtacacacaaacgcgtgtgtacaaatgaggggaccacacaagttgtcttacacggggtctcaacatgaagttgtcttcaccacctgttgtggtgtggggcctctccccaaacgaggacgctatatgtccggggacaaaaacaacgcccccccactgggttctcctgtgggggccaccaaaagaacactctgttgtggggtcaccccaagagatattttttgtcgtgctgtagtgtctcccccaaagatattaattatctcttcccccaccacaataattttatcaaaaggcctctttcattctcaacacaacatattctacccagagaaaagaccccgttatctgtgagctctacgaggggggagatattaaccctattctcaaaaaaatgtggtccccaaggggagggatgatacccccaccagatcagcgacttaagacaaaagaacctcactttttgacccaggggttcgacgagggggcgccccatatgaggaggaaacataaatcaagcacggagtaccacagagaggttacaacccccaggaggggggcgcaccacgagacgaccacgacaagacggtgggcccccccctgaagaaacgatcgccgccggggcccctttgtgtgggtgagcacaccccccgacatgtttccccccccgaggacacacatccgcagttgcaacaaataaaataaagtgatacaccacccggtgcgggaacacaaataagattcccccctactgctgaggcgccacca

SEQ ID NO: 551728 - DNA, 192 bp, Homo sapiens
cgatcccttgtgactgtggcgtaggtgggcagctgcagctctgatttgacccctaccctggagacttccatgtgccgcaggtgtggtcctaaaaaccaaaaccaaacaaattttaaaaatgcatagaaaaggaaatttgcaaaacatatatcaccactttgggggaaataaaaatgtttttgaacttgatgg

SEQ ID NO: 551729 - DNA, 654 bp, Homo sapiens
  misc_feature (133)..(133): n is a, c, g, or t
  misc_feature (135)..(135): n is a, c, g, or t
cggacgtgcggatcccagcggctgtcgtgtagctgagcagcctggggcttggtgctatgtacctgtgcgttatgtttccagctgtctctgggtgtgccaagagcgaataagagacgacataaatctctgcccngnagcgcctccaccccagagacccggaccaagttcacacaggacaatctgtgccacgcccagcgcgagcgcctggactcggccaacctgtgggtgcttgtggactgcatccttcgcgacacctccgaggacctgggactccagtgtgacgccgtgaacctggccttcgggcgccgctgtgaggaactggaggacgtgcggcacaagctgcagcaccacctgcacaatggtgcggcaccctgaacccacgaagacggctccggcgcctgcccacgcactctgacccctctcatcacctggccttgggacctcaaacagccattaactcacgtcgtgatcccagctatatcccgagggaacccagaagcaagtgtcacactctcccaaaagcctatgtaaaaccaggtgacactgggtatgatcgcaaggtgatgtagcaaccacccagtgactgagccaggaggagctgatgggagcaggatgaagggcaggagctggactaggggagacattgaatgccgg

SEQ ID NO: 551730 - DNA, 387 bp, Homo sapiens
gacaacacaaatttgggagggtgagacactgcacagaagacagcagcaagtgtgcgcctctctgacatatgctaacccccaaatactctgaatttgggagtctgacttgtgccccaagtgggtccaagtggctgtgacatctacgtagggttcaacacttcaaatgctgcctggaaccaagggtaaaagtctgggtcaaggcttgcaatgtgcgcctcaagtgtatgaaaggccctcctgctgaacctttcctgtggcccaatcaacggcaagcttcccttaattcccctatccaattctccttctcaaggaaggggtcatagatcctaagccataaaataaatttaattccaaattaccaaattaaataatctactgtacacaatc

SEQ ID NO: 551731 - DNA, 675 bp, Homo sapiens
aggttctccaaaccctagggatattggccaccatggttgcaaacctcttgattccaaggaaacccctgggcactattctatctatctttgtttttaaccagttatgtttgtggattataatttgccataagcccaatgttcccggagtttgccaaaaactttgagacagggggacaccctttttagtttggaagtctataaaacaacgttcccaaacagtttaatgttgaatcattccccttccatccatatatatgcgcgctttgttacagtacgtggcatatcaagaaccaatctgcgcttgttgagctagtcaaacactagcccaagtcgtctaacttgcaagtgaagcctgttatgtatcatttcccagcttgtgtatagaagtgttgcaaggctgcgcataaggagactttcttttccaaggagggtaaaaaacttgttgttgcaaggcaagctccgtaaggcttataacatcacatttaaaagcgtgtcagcctcccttttttgttatttaaacaaaatgaaaatcaaaagcttattcatctgttttgcttttccgttggtgtaaagccaacaccctgtcttaaaagcataaattccctccccccttttgcctcttttatcggtgctgcaattaatgggaaatggaaagcctcttaaaaaagtaaaata

SEQ ID NO: 551732 - DNA, 491 bp, Homo sapiens
  misc_feature (18)..(18): n is a, c, g, or t
  misc_feature (29)..(29): n is a, c, g, or t
  misc_feature (45)..(45): n is a, c, g, or t
  misc_feature (54)..(54): n is a, c, g, or t
  misc_feature (56)..(56): n is a, c, g, or t
  misc_feature (63)..(63): n is a, c, g, or t
  misc_feature (67)..(67): n is a, c, g, or t
  misc_feature (78)..(78): n is a, c, g, or t
  misc_feature (82)..(82): n is a, c, g, or t
  misc_feature (91)..(91): n is a, c, g, or t
  misc_feature (93)..(93): n is a, c, g, or t
  misc_feature (480)..(480): n is a, c, g, or t
gcctttacattaattgtnacccggcaggnttttacacacattttngaattaagntncaatgantttnttaattaaccnccgntacagcccngnagcgcctccaccccagagacccggaccaagttcacacaggacaatctgtgccacgcccagcgcgagcgcctggactcggccaacctgtgggtgcttgtggactgcatccttcgcgacacctccaagctggtgagtgaggtggaggagctgtacaagtccatcacagtgccgcgggagaagcttctacaagcagagcagtccctgtgcaacctcgaggacatccacatgagcctggagaaggacgtcaccgccatgaccaacagtctattcatcgaccgccagaagtacatggcccatcgtacttgctaccccaccatcctgcagctggctggctaccagtgagcagcggcacggtgcttccccccaatcccccaaataaaccagggngttagctttca

SEQ ID NO: 551733 - DNA, 313 bp, Homo sapiens
cgctacgctcgcacagattttttacctgagtaggcctagaaataaacatgctagcttttataccagtatctaacctaagaaaataaaccctcgtaccacagaagctgccatacaagtatatcctcacgcaagcgaccgcatccataatccttctatgtaattcaagactctcctagatatatttaaccacatctccaattaatcctgattcatttctaggcctctaccaactgcccacctataaaatgtatcttccatgtttaatttagaattctgtatatacagttcagcttgtattaaaaactaagaattt

SEQ ID NO: 551734 - DNA, 155 bp, Homo sapiens
tcagctcgtactggctgctgcttgcgttcgccgttgaccgccagccagattctgccttccttgtagtggcctggtctgggccaccggattgatctgggccgatcggcgccgcgtggtcgaagctcttgccgatctcccacggcttcttctggtcg

SEQ ID NO: 551735 - DNA, 481 bp, Homo sapiens
tatctcactagtcaataactggctcactatgtatcatgtatacgaatggcaaattattataaaactttatacaacctagccacttggagctcagacaccattttgatgttctaaaaacttactgagatacacctgttcatttatagaatagatatccttagtaaagaaaaacatcagtgtagccaagcttacgagtctgaggctgacagtgcaaactacacttgccttattttctaagccataaaaggtataacaattctctgattcacaggcaaagaacacccaaagtagttcataatatttattcggaaaatacctgggacatactttacataacgagggctcggaacctgtgtgaccaatttgccatttcacaaactcccgatttaccttgtactgacagcagtgattcaggttgtcacgattgctttaccgtggatcaaaattctgcttagatagtccttatctagaacccggaaat

SEQ ID NO: 551736 - DNA, 373 bp, Homo sapiens
gctgtgaacctgtgcgggcctgctaactggccttccacggttggcactgctgttgcaggtccaacgttatcatattaagtcaagctgtcagctttttcacttgttacaaggtcggcgataacagacttccgtgggagtttagatattttcccgtgttgtagatcttctcagggtttaataaaactggttaaaaattgagtctttccctgaagtaagtgctctttccagatgaaaactactcttttggttttgtttgaaagtaagaaagggaggggtaactttgctcttttaataattatgttcagcctatgatgaagtatttgattattagacagcaatgtcactaataagttttaagttgtccggggttgtt

SEQ ID NO: 551737 - DNA, 203 bp, Homo sapiens
gactgctgtcgctaggggagagctgttatgggccacagtgtgacaggagagctggtgagagcgaggtactgtggggaaggatagcgacagcaggaaggtctctctcaccttccccccagaggtaggtcatgagacactcatgtgagatctgtcctttctgtacccagagggaaagaacatccttatctctgaagacacaggga

SEQ ID NO: 551738 - DNA, 112 bp, Homo sapiens
gttgcgcagaacacaggttcgtgaaactaccctaaagcaaatggaaggaagactcatatcacattgtcgtcattggacacgtggattcgggtagctcccccactactggcca

SEQ ID NO: 551739 - DNA, 186 bp, Homo sapiens
  misc_feature (164)..(164): n is a, c, g, or t
aactgccatgaagtaacctgaaggaggcgctgactggagggattgattacaggatcggaacactccacactcgccattctctgcatataccggttagcgaggcgagcctggcgctcttcttcgcgctgagctaaagctacacacaatgctttgcgaccacaatncacccttcatttcgtaactgct

SEQ ID NO: 551740 - DNA, 407 bp, Homo sapiens
gtcaagggtgtgtgtggccacaggagtggctctgcgaatgtatggctgaatgtacgacagacctccactactcactgacgcggcagtactcgggttgatcgcaagcatgcgctggaacgttgactgaaactatcctaacgctgctgggaacatgaatcgccttgacgtgctcctgggatccgctgatgcagatgtctctagctgccgtgcgctgcacttagtacacctagactcgacatagaccagtctgatgacacgcgtgagcatctgcatgatgctagctatgctgctcctgacactctctggcacagatagctcgagtgtatcctgttcttggtgctcaatgatacttgcagtgatgagactgccacctatgctgtccctgagcttgatgtgacttatgttcg

SEQ ID NO: 551741 - DNA, 112 bp, Homo sapiens
gaccctagtatcccaacacaaataactaatgaaagacgttgtctccatctctgtcaatgaggaaaggcaaagtgattctttgattccaattcgaaatggtgttgggcgataa

SEQ ID NO: 551742 - DNA, 201 bp, Homo sapiens
  misc_feature (165)..(165): n is a, c, g, or t
gcgtaatttttttttaaagggaaagaatgggtatattaataatgtcggtttttctaaataaccggtggacaagggaagccccacggatttactccctctcttccccactccctgtgaggctgggctgaggcacggatcccgggtgccacatgagcaagtctccanaatcagacagcgtgcctacagccccttgggatgtgt

SEQ ID NO: 551743 - DNA, 469 bp, Homo sapiens
tgcgagatgacactccatgctgacacataccttgaggaaacgacgggctctgtagagagcgacgtgaagtcctgcaagtgggcagctgtgtgagtggcagccaggcaggctgagctggccagggggacttgtcactctcgttccgaaagtacatctccactgagcaattcccagaatcttcctggtacagtgcaaatatgtggcaggaggcagatcatggggcttgtatcaccattgtagacatccagtgccattatgcagggcaaccagggtcagtgtcagtgctgcagagtaacaccagcagcttggggaagctgggaggtggtcgacacgagggtcaggttcttccttatctagagccagaaggactcccccctgaagccgggccttctccgcctgctggtcagattccgaagaggaagctggaagctgaagtcctttagccggatgagacgctgcatggtattgg

SEQ ID NO: 551744 - DNA, 153 bp, Homo sapiens
attattgcaaaatcatgtggttagacgagctgacctctagatcccttctgtgatcctttaggggaactgaaaccgtttaggaataataaggccacatacccactgctgtaaagtgtgttacgaaccaccttgagcgagagcttgctcctagag

SEQ ID NO: 551745 - DNA, 369 bp, Homo sapiens
  misc_feature (62)..(62): n is a, c, g, or t
gcttgactatggcaatttaaacagtggcaacacgaggaggggtggagaaagggagaacgggnggaggacaggtgtgaacaaagagaattgggactatcgagtataaggttgtcgagcaccaggatcgagggtcgtgaagtgcaataaaagtggcaccatagtcaataagtgaccggggcgggggataaatccaaagtgacgggatacagtaagtcaacgagggaaataagatcggcagcaagtggaggccggacagtgcagaataggcggacggaaacggttgcggcgggcaaaggtgggtgagtaatagtcgtgacccacggtaacatgccgcattgtgggacagaaagacgagtggggacatggggc

SEQ ID NO: 551746 - DNA, 401 bp, Homo sapiens
tctgtcctactaaaaaaaacgaaacaaatctgaaactgccttttcaaagaggccagtgaacttgtctatcctccacattcatgtgtttagcgtttaccgttttcaccatgttcatctacacagccaggcgacagaattcccgttgcttaaactatgattccagagaaccaaagccagtgatgtgaaatggggcttcttttttcttttaaaaattctgctttgttttttttcctccccttcccttcccactagctttccaagtgaaaacctgcattttatttgtccctcatttttagttgaaagtgtgaaaggctgcaatggggacgcctggaaatgaggaataattcagtcttgctttttgtgacaaaaaagcttttaaataacctttttttataaagaga

SEQ ID NO: 551747 - DNA, 111 bp, Homo sapiens
atgtgcagtgcatagtgctacctcttctcagtctgaggcccctacttccctaggagctccccccctcctcagaccctccccacatctgaaactgcctcctgagtagctggg

SEQ ID NO: 551748 - DNA, 194 bp, Homo sapiens
  misc_feature (15)..(15): n is a, c, g, or t
  misc_feature (38)..(38): n is a, c, g, or t
  misc_feature (41)..(41): n is a, c, g, or t
  misc_feature (46)..(46): n is a, c, g, or t
  misc_feature (65)..(65): n is a, c, g, or t
  misc_feature (68)..(68): n is a, c, g, or t
  misc_feature (83)..(83): n is a, c, g, or t
  misc_feature (131)..(131): n is a, c, g, or t
  misc_feature (182)..(182): n is a, c, g, or t
gtagttgttggagangaagctctcgttcaggctgacgnagncgcgnttcagcggcggcacgaacntcngcaccttgaccgggnccttggtgctggccacgaactcgaccttggcgtcgatgttccacaggncgtcggtttcatcctcggtcaccgggaagccgaggaagaagatctgataanccgtgaccgcca

SEQ ID NO: 551749 - DNA, 755 bp, Homo sapiens
atcggccataaggccggggacagcggcagacaaccggaagttcagcacaaaccaaggcgggcgcaggcgcaagaggaaagccaaaaagcaccgagagacgaagaacgaaaagagacgagaacaccgacacaaagaagacgaggcaaagcagagagcgacagcaaccagagccacagagacagcgagaacaaacaagagaaggagccaaagagaacggaaaacaacagagaccacagaaaagacgaagaagacgagccaacccgagaacccacggacgggaagcaagaggacacacagacaacgcacgaacgaccgacggaacagaccacaggcccaacgaaccacggagacccgaacgaaaagaaagcgcaggacagcgcgcaagagcaacgaaagcgaccgaaaccgatgacagagagggcgaaaacaagacaagggggcacgaccacaaaggcaatctctgataacagccgacagcaccccaaagatcggacaggagcagcaagaacaagggagaaaaccgacacagaagggagactcaacaaggcacagaacgcagcagacggggaaagacaaaccaaaacgccacgaaaggacgaaagctggcaaatcaaaacgaaaaggagaccaaggaaaataaacaagggccaacacaaaaaggccaaccccggaaaaaaagccgaaaaaccccagaacaagcaagacgacaagcgatgcccacaggccacaagacgcaacaaggccagcggacgcct

SEQ ID NO: 551750 - DNA, 196 bp, Homo sapiens
tcatctggtggcgcatactcttttgatttcagttcacacaccagagcgggcgcaaggggcataggtcagctgggcggcggcagggagggtctgctctgacctgggtgctgatgggtccctccagctgccacacctgcaccaggcagtcccgagtggtcacaggctagcccagcacactgtcattgaaggccaggca

SEQ ID NO: 551751 - DNA, 251 bp, Homo sapiens
tggagagctacatcgagcggctgctggtgcggatcatggagaacctcacccaagctgctgcagatcccgccgggaccccccaattgtagtcttactcagcctaacaccaggagggtgggcatggacctatggtgactgcccctcgctcctgctgaactctctcatgcctgcagtggggcatcgtagtgtctttggcctggtcactcctggctcctctcccatccatgcctcagcgtgggggctgctgcaag

SEQ ID NO: 551752 - DNA, 119 bp, Homo sapiens
tgcggtgtgcgcgagtgcgcctggtgtccctcaaggaggcggagttctacgacaagcagctcaaagtgctcctgagctggagccaccttcctcgtcacgtttggaaactcagagaaacc

SEQ ID NO: 551753 - DNA, 390 bp, Homo sapiens
gctcggcagaactggacggccgagacaaaaaccatctgggcctcaaagcgagaaatatgtactatcggtcccctgaccaacaatcataaatcctttacccacccctcatctcacaacatgaaacattcttcctctgaacatttctcttttgtttatacaaagtcataagttaaagggtcagtatctttatatattaagtgtacagcatgtagtcacacttgcttctaaaaaccaaacaaaaaattccacatctgcagaacaaaaccaatatctctttagaattccacaagtgaaactatgcagcatacagccacatctgctttggatccttcataacttatcacaatctttagtaatttaattcaattagagatttccctttaaaatagg

SEQ ID NO: 551754 - DNA, 591 bp, Homo sapiens
cagttacggcctggatgccagtcgccagcccagctgttcccctcgggaacatgagtgtggtggtggcgcagcagactgcgatcaattctgcatggtcacagtagagatcccctgcaacatctgcttgtccttgggtcacccatgcattccatagccatgtgcttgtcccatgtgctcccactggttcccagggtgccagtgctggtgagcccacagccaccccactatgcctgcaggcctgccctacccaccttcagtgcatgcctattgggactgcatgtgggccccaatcttgtccctctggtccgcctgttgttggccaagagttgggagtcctgtctgtccccaacaactccgttgctcgctcagcaccactatatgggcagcgactgtcttgggggcctcaacacacgcacgtggagcggcgttgcaaagccacggggcagagcgggcccaaccttagaaccccagcatgccccctctgggaagcaccccagacctacttgtgtgctgaatggtagccttcctccttcccctcatgccttgcaaagggtccccgatttgcccatccgacaaatgacaaccttctag

SEQ ID NO: 551755 - DNA, 155 bp, Homo sapiens
caaggcgccgcggggccaccagcacatgcctgggctgacctaggtccaccctgtggccgagaaaggggcgtcgcccagcccttccaccccattggcagctcccctcacttaatttattaagaaaaacttttttttttttctgtagcaaatatgag

SEQ ID NO: 551756 - DNA, 921 bp, Homo sapiens
acttgggaggctaggtgggaggactgcttgaacccaggaggcggaggctgcagtgagccaagattgcgccactacactccagcctaggcgacagagcaggactcccatctcgaaaataaggtatttactttcgtaaattatttgcaatattagaatatctgtcagcctacagtatttctctgctgttattctgaccttaacacattgaaagagttcttaattttgcttcgccatcccttacgcatacttaaactctttcgtctactctcgccaaacttcccatttactctttacacagatcaacttctcattcctcaacagaacctaaccaagacaagaaaatttgcccttggttattccccactttcctatattagcttggctggccaaaccctttatgcccattattctcatcaagctcattcctcacgggggtttctcctgacgccccatcctattccagtggccctctacttgacctttcctgcgcccggtctcatgctcctcttcactacgcttacatttcccctttcaaccacccttcccccctctccttcccttggtgctgtcctgcgttactccttactacgccaacaagcctaacagattcatgtcaacctactcttaagccgcagtcgaggagagcttgcccccatttcccctcttatcacctcaatattcccaccccctgttcttccctaccaaacacccccggggccgccacatccaatggccctacacggcgcgtacgcgggacccggacacatcgaaccccccctacaacgccccccaccctagggacctacacgcccccgcctgaggaatatataacccccccccccctacaccgaccccacacccacacaccgccccaccgacacccacccccaacccccacccccgcccgctaccatcacaccc

SEQ ID NO: 551757 - DNA, 767 bp, Homo sapiens
ctgacagcttgaggatggccggagccgagggcgccgctgggcggcatggtcggagctggagcccgtggtatcgttggtctgagcgtccttgcatggaggacgacggacgctggagacatgagtgcgtgcgctgtcctgggcggcagcgcacctccgagaagtgctcctactctcagggcctcagtagagagagacaagcactagtatgcctgtagtacctggcaccccagtagggagaagaaccgagcagggaattctgtgttagcttggcagttatgaatgtcatggaagtcacaaactatttgagctatacacaaaaagaaatttgcgttgtgattgtggaaacagcaatgtctagacacacattctggaatgcaagagttacgtgtccgtgacaaagcaagaggtacacattctggcaatacagtacaatgacaacttttcggattgtactgcatttgcaagagaccttatcctgatcctgaagacgagattccagatgagatgatccagatgcgtagtctgtgaagactggttccatggaaggcatcttggtgccattccccctgagagtggggatttcaggagatggtatgccaggcctgcatgaaacgtagtcttctttgtgggcttatgctgcacaatgggcagtaaccaaaatatccactgaggatgatggattggtgcggaacattgatggcaataggtgatcaggcacgtgatccaaacgtgcaccaatgcgacgagcatcaacgatagtaccctca

SEQ ID NO: 551758 - DNA, 152 bp, Homo sapiens
acagcatataaaatacaaaatagcgggcatgtggtacttcctgtacccctgctactcaggagctaaggtacagagtcacttgaaccaggaggacgagactgcagtgagatcgcaccactgcactccagcctgggcaacagcaaaactgtctc

SEQ ID NO: 551759 - DNA, 215 bp, Homo sapiens
gtcatgctataatccagcaccttgggaagccgagcaggaagatcgcttgagcccaggagtcagagatgagcctgtgacaacatatgtgagagctcagtctcttacaatatttaaaaaaattagctgagcatacaactgtgtgtctcagctacacgggaggccgaggtgggaggactgtttgagcccgagtggtcgagccgcagatcgccccttag

SEQ ID NO: 551760 - DNA, 1747 bp, Homo sapiens
  misc_feature (1694)..(1694): n is a, c, g, or t
tgaaaaaaccacactcgtggtggtaaaaaaaaaagggaatgaggttgggggaacagggtgggggggggcgcgaaaaaacacacccacaccccttgaagtggggagggagggggggaaaggaaagcgtgcactttgcgaaaccctcctgtgccccggacgcaacactctcttggaagacaacagagctcgtgttgagtgacatctctctctcacactacaccgctgtgggccgagagaacaagagtaggagagagaggtttacacagaggacagacgcccacacaattctccacacctccccgagccaacgagggatatataaacaataacacaccccgagacaaactttctcttgtggcggcgcggcgcacccaccatatactctctctccacaaataaaacaccctcccttaacagagagaagggtacacaacatctctaggagcaaaggaacatctagagggcagaacaccactaacaacctcctcctctctgagggggggacagtggcacgaaaacaacaatacgacaaaatctctacaattcaatataggcgagtcacgaccaacgcggcgctctcagtaggcgcgaaccaaaaaatagacggacgcatgaatcatcatcagagaggagatctacgtacagcacactggtacgatgaaggagcgcaccaccaaactaaagaacaccctttctggaaccactgcaagaacatcatatctatggcaacaacaaagaaccacgccacaaccactacattgtgtgatattaccaggcgcagagggtcctccgcaccacagaagagagaaccaccactctgtaatgagaaccacctcacgctgcagtgagcggacgcgacccacaccagtgtgatgtgaagagagccatagaaacaggaaactcaactacacgaggagagcagagaaggaaagacgcgtacgagacatcaaaacagtacgaaacgatgcactctttaaaacacgcatgaatgagacatatggaagagcgggaggagaaatatacatacacgccacgagtatacgaccacaagcaaaggtaccagatacacacacatcagttgccgcacgacgcaacacaaatccattggtgggcgtggcacgcaccactaccacacaccagacgtatgatctacgagttcgtcgttcaacaaccacgatatcacagcaagaacgcaacgactgccatcatcacaactgcagagactaatcaaatccagcaagcatgtagagaaagtgagattgtagcttgatcacacagcaccgagtctgtcatgcacaacacagagaggatatgtaaatcgcaaccgaccgataactgagagtggagaagcacaatcacctacgtcaagcacagccctccgtaacgggggcgagacaaaaatccaaccaaccacgctgtctgagtgtttacaacaacaaccgtacaaagatgtagttgtggagggacaccacccaagacggccacgccgacaaaccgctcgatgatagtatagtaaatgaaagacaccacacacaggcgacgcgcaacgcaccacacactcactgcgacgtacgagcacggagatgagcgaatagcactatacccagacaacatgtgccaacactagtagtagcaaacgccacacacacgtacctgatgacgctagtgtcgtggaacgcgcacagatacggtgntaggcacgtacacaacagacatagacctagactgccacacatacgtgagttgt

SEQ ID NO: 551761 - DNA, 486 bp, Homo sapiens
  misc_feature (204)..(204): n is a, c, g, or t
  misc_feature (242)..(242): n is a, c, g, or t
ttttcccattccagcctcgcccctccccccatttagaaggggtgtggcccccaacaggtttctccccgtttattcccctagaagtcccattcctaaacacatccgtatttttcgcatcaggggtatcattcccctgggctccccattgtttaatagaaaccccccgaacccaaataattcaagcccggctttttccaattttanggggttttttttttcccctcctacaaccctcagagganttggagtctcccttccccatttccgggggcatttaggggtcaactttttttgtacccccaggtttccccggacttcaggtcattatggggtcaactttcccccaaatttggttttttcccccaaataatttttccttttacatcccaacatccttttggccttgaaccccccccctgaaacgggccttttgtaaatggggtttgactttttttgtatgtcccccttttttgatgggggttttta

SEQ ID NO: 551762 - DNA, 146 bp, Homo sapiens
caagagactctggtaccactgctggctcatgagggaggattattccttatacctaaagtctccagtctggggcaggcgggagtgggccctggtcaatgtttcctgatggggaggatggcaaaacaagcctccccaccagaaaaaaa

SEQ ID NO: 551763 - DNA, 299 bp, Homo sapiens
agactgtactagtcatggctgtaggaacaggctgcacagaggaggtgagtggcggtgaccggtgaagctgtcagtgttatagccactcgctattgcttgattaccgctgaacttctcatgtccgatcagcagagacattagatcctcacagaagcatgaaccctattgtgaactgcgtgtgcaagggatctagattgtacgctcgtcatgagaatctaatgcctgattatctgtcactgtctcccatcacccctagatgggaccatctagttgaaggaaaacaagctcagggctcccgg

SEQ ID NO: 551764 - DNA, 577 bp, Homo sapiens
gtgaatcggaaataagggtcaatgtgaaagcggggcgtggtgaacccattgtgtgggaaatatgaaagggagacagattgtgcatatatgttagtcctgcaagtagtgcttgatatgtatcgaagacgtggttctagctacagagtcgcacagtagcttatatggtgggtatgaaaggccatcagacttgtataagtagcatcacacaattagtggagtatagtgttagtcttcagacagcattactatcgactgtaagtgcgatcgtagtgtgagaatgctaggccacggtagtaatgaggatgtagcccagtggctgataatgagaatgtagggcgcgttgaagatacagattgtcttcattaaaactaggtatctttgtagtagagaagtgtcagcttgttagacaactgccaaataggaatagccaatggaaaggctaggatatgtgtctggtcaatgggatgaggatgagagttaggcggatcattacataggggcgaggattgtatagtactgcgaaatggcgtatcctcccacccgtcagtctaagacatggtctgtacatacatctaag

SEQ ID NO: 551765 - DNA, 858 bp, Homo sapiens
  misc_feature (292)..(292): n is a, c, g, or t
ccggggtcccgtgttctcgtgtttctttgcggaaggaagcccccgtggagactgccggagacccggggttctctagaggatgtacaactgatgagggagaaagggagtggacatgggaaaggggggacagtattggaccccaagtgaactgtaacttccttggcaaagacgcgcgagggccgagtgccgacagtgggacagagacgtgcaagatacctgagcctaagaagtgagagacaagagccccttccagactggacgcaccacttacttgactgattgacgcatctcntgacctgatactagctgagccagcctgataatggagggacgaggggacaggggatgacaccggggttgagtgcaacctcgggaacatcaggatcctcaggggatactgcctaccaagtagcgggtatcgtaaaggcatgtacccataacataagcggaatgtaaggccagaaagtcgagtcggaagaatgcgaactgagtgaagatggtgccgctgatgatgtaactgaaaaagtcagtagtgcagcctagaggcagaacgccaggagaagcgtattctggaagagacttgcaatctagaggaaagttacaaggaaggatcatattgtagaattggaggggagagttcgtaaaattgaaggggtgactaggtgaggggccagagggaagtctgctgtgcttctctatgtaggatgtcagccctgccctgcaacgttctctttttaggccaactgtcattgttcactatgtcctgaccctgttagaatcatccccagccagacgcaatcatggaagttgcctgattgtcaactggttaagaaacttaacgcccctgaggggctatag

SEQ ID NO: 551766 - DNA, 408 bp, Homo sapiens
  misc_feature (57)..(57): n is a, c, g, or t
cctcctgaaagaccccgtcgggcttctgcttctccagtctcagccatttacacagcnccgcagaggccttggaagtcatatgcctatgaggttccagccagagagaagcccttgaccacgtagccggtcagccaggttctgggtgcccgtttcacaaagcccgcaaagccagatctgggttgtctagaggccagctgctgggtgtaccccttctttatgagctccaagcgccccctgccgcttctctagcccgaccttctccctgtgctccgtttcatccaggtaatgcacagcaatgcccgtgggcgtcatgccgtctcatgttctgttccccacagcccgagggggtcactatgaggtgcctcagccgttgcgcgtccacggcatcctgtgtcatctggccctctg

SEQ ID NO: 551767 - DNA, 486 bp, Homo sapiens
tgagacagagtcttgggagtgcagtggcacaatctcggctcactgcaacctccacttcccaggctcaagcaattctcctgcctcagcctcctgagtagcgccaccatgcccggctaatttttgtatttttagtagagacagggtttcaccatgttggccaggctggtctccaactcctgatctcaggtacccaaagtgctgggattacaggcgtgagctaccgtgcccagctagtttggtattttattaaacaaatgatatgtcctctactttttgcctctatgttcatatagcctaatgtcatcaagggtcatctatgttgagacaatgtgccaagtattcttcccttataaggctgactaatattctactgggtatatcccgggcgttgttgcccctgggcttgcttcttctttagattcagtaaataatgtggaaaaaacatagtgaacaattttgcttccaaccctgttgtaatggtgttgg

SEQ ID NO: 551768 - DNA, 382 bp, Homo sapiens
  misc_feature (24)..(24): n is a, c, g, or t
ttaattttttcctctctctaaggnggtatgcataggatgaaataaaaatccgatgatctcatagaaaattaatttcacaggtttccaatccactattaaaaatgtatccagatcctacatttatttactttctaaatatataggtatttaacccgtgctttacagaataacaaagatataaatggagacacatgtaaaatttaaaaatagaggtgctgatttttcttcttgttagtgtgtgtataatatttaatcacagaaaaaatgcttatatgataaatggcttgcttttggtttgtgtcatttcttggcatattttgactgggggatgttcgtgggggcaaattgacctgaaataaaatcactacattttgtttgcttt

SEQ ID NO: 551769 - DNA, 654 bp, Homo sapiens
gaacccgggagctggcgccatggtgctgttgcacgtgctgtttgatcacgcggtctgctaggcgctgctggcgctgaaggaagtggaggagatcagtctgctgcagtcgcaggtggaggagtccgtgctcaacctggggcaaattccacagcatcgtacgtctggtggcctttggtcacctttgcaactcatcccgaggttgctcgttggaaatatgccaactgccagtgttctgaaggggttgttcatgaggatctaccgcctgctcttggagatccaactgccgtccaagagagagaagaagagtactcttggaaatcggggatcccaagattggtgccgcaatacatcggacggagttcagggtacaactgccagacctggacggcagtcatagcctgagatcctggcgaggaagttcgtctgcgacttccacgaatctggttgaagggtctgaccgatctgtcagcgttgtaaaagcacagtctgggggctggggtacacaagctagttacccgttgtccattgagttaagttctaactgtgaacgcgggttggacatatagtgatcagtccacgtccgattagtcgctccttggacgcacgctggagtaacggacagtcgaactaccgttcatctgatgcgtgtcaggg

SEQ ID NO: 551770 - DNA, 507 bp, Homo sapiens
tccggagggggtcctagtcgctcctccttcccagggaccagcaccttcaagcgctccaggataaggagggcaagagggggacctgccaccagggagctaactggctctgggggacccaggtgggacttagcagagaatattgcaagtacttgggttgatctcttaaaaggcatgggacctcctccctcattcatcttgcaagcaagtgccatttcttgagaagtcatgtagaactcggtttggtagacttggacatctctctggcttctgaagagcctgaagctggcctggaccattcctgtccctttgttaccatactgtctctggagtgatggtgtccttccctgccccaccacgcatgctcagtgccttttggtttcaccttctctcgactggaccctttacctccccgacgtcaatttcactccctcttgggatttattaaatttgccctgacattttattttgggggggtctgaatattaaaggcctctcattcttgggaaa

SEQ ID NO: 551771 - DNA, 242 bp, Homo sapiens
  misc_feature (7)..(7): n is a, c, g, or t
  misc_feature (208)..(208): n is a, c, g, or t
tcggcanaggttaacaaatactttggacacagccagcccaagaaaaaaggagaaaaatctttcctccacataaatcatctattcaacattaaactcagcactgaaataaaagctctgtttgcctagctccccaaacctcttcagatagaacgtcttaaagtggagaacacctctttcaaccagtggctttgacggagcattaaaaaancctttgaactgtaacattttctgcttttctaaaa

SEQ ID NO: 551772 - DNA, 416 bp, Homo sapiens
aaaaggggggaaaaaaaaaaaaaaattttttaaaaattttttttttaaaaaaaaggttttttaaaaaaaaaaaaaaaaaaatggttttttttctcccggaaaaaaaaaaattttttttttcctcttttttggggggggggtcaaccctccctcccttttttgggaaaaaataaaaagggcccccccctttaaaaaaagggggggtccccccctgtggcccccacccggagaaaaaaaaaaaaaatatgataaaaaattcccgggggctttaaaaatttggcgcccccccgggaggacccccccacaaaagagagttgagaaacttcccctgctctggaggcgcccccccctcaaaatattttaaggcgcccccccccttttcttaaaaaaattcccccccaaagttttttaaaaaa

SEQ ID NO: 551773 - DNA, 198 bp, Homo sapiens
aatatggcacactagctgttaggacttcaaccccctcgagtggggagggagcgctgagacacagcagaggcagagagcccaccctaacaggggattccaggagaactggcagcagaccaatcctctacctccacctgtcatcagaaccatggggaagcaagccaggaaagagggacgtggcgaggttctggtgccgat

SEQ ID NO: 551774 - DNA, 84 bp, Homo sapiens
ggtcccctttcagcaataaaagcttccccttgatatccatccctttgtagtttgaacaaatatatttatatgatatgtaaaaaa

SEQ ID NO: 551775 - DNA, 281 bp, Homo sapiens
actggtccacccatggtgtccagcctagctccgctacgagtgtgagggccagtgcaaccgcctagccctcatctggccctgcacgtgaattcctccccactgcattcattccacgaggcatttatttgatgcatctacgtgtgtgccatgatgcaagagcagacagtgggatacactgggcaaggagcattccagggctgagggaacagccagtgcaaacgttgggagatgcgggtccagtgaagaaggagcagaggagaccaggagttgaggcgactgcg

SEQ ID NO: 551776 - DNA, 880 bp, Homo sapiens
ggtgttcactaaaaaaaaccgtttgtttctttagtgggtcttcaccctccttataagaagtgtgtgggtctcaggcaaaaattaacttcgtggtgcaatgttattaatctttgtttaccgttaagtccagcgtgtggggacacccagtggagttctccttgctacgccaccaaacaaaagagaagggtgatgcatccagagctggttcatctacgtcactgccaaaaagacaagtgtccccgcacgttccattgtgaacttcaggatgtttcacacatcttgttgagtgccttcaccctctgtgtgagaagtaagccttagcgcccccaccttatgcataagaacgttctgtgtaaagacattgtcaccggaggggtcgtacctaaagcttattccgccccgtggtcctataccgtccgggtctgtacaagattggagagagactttcgatggtgttcacacccaagacaatgagaggggtttgcacgctaatattacccccacgtggacgactccacgttatgtcctctaagaaacacaccgttttgttcaaggaatgacgtgttactccccgtctgcgagggacatatgagtagccacgcgcatgacacgctctctccaactagattcctttcatctagtcacacactgaaggagtactggagggtcaccccccacacgcctgtttgagtaaagtccacgttgtgtcattatgttgttatcttcttcacaagaggggagcaccccatgggtagttttattcatgatctattcgctgtatttcattaggtaagacagtaatccactctttgattgtttatcaggtgagagccattgttgttctagtgaccacgcctcacaacggccccaacaatagaaa

SEQ ID NO: 551777 - DNA, 771 bp, Homo sapiens
  misc_feature (446)..(446): n is a, c, g, or t
  misc_feature (515)..(515): n is a, c, g, or t
  misc_feature (759)..(759): n is a, c, g, or t
tcgccggaatctcgcatcattaattggtttcattattctgcctagtaagctcctctacttttagtattagcatctctgcacactcattacttttctccaagttcttcattgagcccttggattttctgtaaatggaaagttatgtctaaaagcacagttagattcaggttgaaattttggcaagactaatagttgatactttatacttcttattcacggcattaggaggtgcataatgtctggtgatcctgcttttagtgatgctaggatgactagccatgtgcatgattgtattttcctcatggtttagctctatttatgatgattgccctgaatcacttatttcattaagagttgcaaatggccatttttctgattcttttattccttctaaatttagtgcctggaattacagtgtaatgaaggtctcatcactcggatggttnggttaccaaaaatgcaatttagtattttagcaaaaatacagtgggaaggataggacatatctgattgtngattttttttttttggagacagagtctgggcttggtaacccaggctgggagtggggggggcatgatctgggctcatggcagcctcggtcttcggggttcaaatgattctcctgcgtcagcctcccgagtagctgggattacagacacacgccaacacacgggctaattttggtatcctcagtagagacggggtctcaccatgttggccaggctggttccgaactcctgacctcaaatgatctgnttgcctcgggct

SEQ ID NO: 551778 - DNA, 311 bp, Homo sapiens
acatcactagcggaggaaatcatcacattgtattgtccctacatcgctatcagaactaaacgccatcaatctcaatctacgtccgtggactatcaagcacagagctataatcatgcgtacctgtgactgtgcgaccaacagacgtcacagatacttacatatcacattacagttgctgcaggttgctctaaatatcttctatgctcatcacaacttcaaaaccatggttgtcattaggcccaatgctagatcttatttaatacattgaatcacgcagcacatttaccacaatttttaaagtattttgctat

SEQ ID NO: 551779 - DNA, 166 bp, Homo sapiens
tggtccacatacatacccagtcttacaaaggagctgctgtgtcatatgaaacatgcatattatgagaaaaatagtatttcgtgtgctgtctgcttgagtatcgatctggagatgcaagttaaccgaaggtgctctgccaatccatcagcgtgagaaaaaaaaacca

SEQ ID NO: 551780 - DNA, 149 bp, Homo sapiens
  misc_feature (140)..(140): n is a, c, g, or t
actctagaggagcgagctgatacacccaaatctttatttaaaagccgaaatatcagccttctctctctctttggctatttgaaaggtagtcttcaattgggcaggcaactggtttctctctccaaatagtaacaggtggngtggtatag

SEQ ID NO: 551781 - DNA, 274 bp, Homo sapiens
atcagcgcaacagctcgtagactagggcgcggccccgagtgataccaaccaagcagcagtgattggagggagtactgactattgagacagcatctttggggtgcccaagggccacggcaggcttaccaacagctgctgaatgttgtcctcgggtgacatcggaaatcatggtgctcctccgagcctggagcacgggcagggcagcccgagtggccccaccagcaacactcacgatgcactgggtgggaggggaagagagaaggtccctaaccgc

SEQ ID NO: 551782 - DNA, 300 bp, Homo sapiens
  misc_feature (30)..(30): n is a, c, g, or t
  misc_feature (36)..(36): n is a, c, g, or t
  misc_feature (56)..(56): n is a, c, g, or t
  misc_feature (78)..(78): n is a, c, g, or t
  misc_feature (83)..(83): n is a, c, g, or t
  misc_feature (130)..(130): n is a, c, g, or t
  misc_feature (146)..(146): n is a, c, g, or t
  misc_feature (264)..(264): n is a, c, g, or t
  misc_feature (266)..(266): n is a, c, g, or t
aaggtggtgagaaaaattatgtttttattngctttntggtaatattatgtaggccntggatcaaggaattagcatttngtatnatggacatatttttattaagtgttatttgccaattatggaaatgtcnttggtttttccttagntcataggtaatagatgcagaaatatagtatttaaggaatccgcatccagcataagatggatttgcatccagaaaaacattacatatcagtttgaagcaccaagcatgtgtaatatggntntaaacaatataataaatgcataatgttaagcttt

SEQ ID NO: 551783 - DNA, 350 bp, Homo sapiens
  misc_feature (344)..(344): n is a, c, g, or t
cattcctattattttatggttattataagtgtaccaggactctaaaagaaacttgtttgtataatgctattctatccaaggtatgtagcccaggaaataaccaacttgatgcgtgttatgacccattttaagcctcccatgatcacagtttttaaaatacaattaaggactggtccttttctaggtgacacaagaaaggtaatagctagaacagaagaaagaggggtccccaaaaatgtaaccttaaaatttgacacttgtgccactattgatagtaagcagcatggatgaggatgtggttctctaaattggaaaaaaaagttacacagtaaaaaaaaataacnactaaa

SEQ ID NO: 551784 - DNA, 347 bp, Homo sapiens
  misc_feature (99)..(99): n is a, c, g, or t
  misc_feature (104)..(104): n is a, c, g, or t
gtgtctctgggcgacctagaggatcccaagctccaacaagacaaagtaagaggaaatattaagagacggctgagctcgcacacaatagaaaactctctnggcantataaataatctcagaaagaaggaaaatagaaggcaccagccaaagattactgggttggaaccaagggattggcaaagacaaaaaaggtgacggaggagaaagttgtaagggagaagggccacggaaaggagaagctttcatcctcgtccctccagatagacctttgccatccccagcaaccttctgcaatcactccaaggtttgccaagaagaaaatcttgggaggggaaaagaacgccaaa

SEQ ID NO: 551785 - DNA, 101 bp, Homo sapiens
acggagtgctgtgcttctgttcttctgattttcgacagcgacatcagaaccttccacagtcattttagtctacgtcctgaaatcgttcactcccagcccgg

SEQ ID NO: 551786 - DNA, 263 bp, Homo sapiens
  misc_feature (90)..(90): n is a, c, g, or t
ctagtacttctgagctctgtaatgtccgcggtcgagtacgcgtatcgatggcgcagttgaggtggcgcatatgatctaggctataaatantcggagtatacgtagctggtaatgttaacaacggtacctctagaactatagtagcatgcgcaaattaaagcgctgatatcgatcgcgcgcagatctgtcatgatgatcattgcaattggatccatatattagggcggggttataattacctcaggtcgaggtcccatggccat

SEQ ID NO: 551787 - DNA, 100 bp, Homo sapiens
acaaaatgtagggttataataatgttaacatggacatgtgttatttaattctgtattgtttcttatatttgtagtaaaatattgaacaattaaaaaaaaa

SEQ ID NO: 551788 - DNA, 267 bp, Homo sapiens
ccttgagcgatgaagctcagccacagcccattgagctgcccacttccaactcttccatcctattttaactcaaaccattccttagggcacagggagcagaaattcagctggttacataaagcaaataattcacaattgagaaaggagacacttcctagggcacactctgaattttgggggggggggagagaaggggggggggaatagttatccttacccactgaaaccaggttgctgaaattctccaacatcacttctttgtataaa

SEQ ID NO: 551789 - DNA, 109 bp, Homo sapiens
tgtcactcccggtagatagtagcagtgcgatatagcagtgcgataatagcagtgcgatatagcgagtgcgataatagcgagtgcgatgatagcgaggtgcggataatag

SEQ ID NO: 551790 - DNA, 443 bp, Homo sapiens
  misc_feature (69)..(69): n is a, c, g, or t
gttcaagatccctcctttaccatcatatcatggggccaccaatggttttgaacctaggagtaccccgantaggggggactatttttcaattcctacatacttcccccattattcttagaaccaggggacctgggactccttgaggttgacaatggagtagtattcccgattgaagcccccattggtataataattacatcccaagaggtttggcattcatgaggggtccccccattgggtttaaaaacagatgcaattccgggaggtttaaaccaaaccattttccccgttacacgaccgggggtatactagggtcaatgttttgaaatttgtggagcaaaccacagtttcaggcccttggtcctagaattaattcccctaaaaatttttgaaatggggccggtttttaccctatggccccccttttaccccttttagggcca

SEQ ID NO: 551791 - DNA, 241 bp, Homo sapiens
atggcagataatgcattgattttattttaatggcatgatctatgtcatcaccgtaggccattatgtacagacaacgtggggaggttcatttcttggtctcttcctccttggataaggtcttgatgatcaacactccttcttggcctggaggcgctcttcacggcgcttgcgtgcttccttggtcttagacctgcgggcctcagcctggtcagccaggagcttcttgcgggccttatctgcg

SEQ ID NO: 551792 - DNA, 883 bp, Homo sapiens
ggccatcttctgttttgtgtgtgcggagaagttgtaggtttatgatggattagtgtgttaaaacacgtcctccaggggtaagggcggtaaggactctaacgcttttcccacatatgtgttgatacaccatagtggggttaacatggaattattggccgccgtattcctggtgtctctgaattcaccagcttcagatagaggtttaagttagacattgcaggtggaaaaaagctatctctgttggttccacacccaaatcaggagctggagactaattctattggctcttagtcactggaactgattaattctgactttctgtcactaagcacttggtatttgccatctccattctgagcacccaacggttaacacgaatgtcccctagaactctgctgtgtgtcacccctaaacccgtctaaatcttcccgaccaaagccaatggcatttatggatttaagtcattagattttccactgaccttaagtaatccctcttgagttgattatatcatccagtatttgatatcttaaataggaggtaggatcttctgtgttaagactcttatttgtaccctataattaaagtaaaatgtttttctatgagtatccccttgttttcccttcttaaagtgttactccaaaccatcttgttataatgaaatctatcttgggaaattagaaagacaacaatggccaggtatttactgttctgtttgccatcatttagactcacacttaagtattttgtagttttacattcctttttaaccccttcagtgggagcaatgtcacgcttttctccccagttgtatgttaagtctattctaatatgtactcaccatccagttataaacatgtaataaacctggaaattaagttta

SEQ ID NO: 551793 - DNA, 772 bp, Homo sapiens
  misc_feature (50)..(50): n is a, c, g, or t
  misc_feature (145)..(145): n is a, c, g, or t
  misc_feature (451)..(451): n is a, c, g, or t
  misc_feature (459)..(459): n is a, c, g, or t
  misc_feature (478)..(478): n is a, c, g, or t
  misc_feature (588)..(588): n is a, c, g, or t
  misc_feature (652)..(652): n is a, c, g, or t
  misc_feature (657)..(657): n is a, c, g, or t
  misc_feature (721)..(721): n is a, c, g, or t
  misc_feature (730)..(730): n is a, c, g, or t
  misc_feature (761)..(761): n is a, c, g, or t
  misc_feature (763)..(763): n is a, c, g, or t
ggaccactatctttaactaatggcgaggagggcccgttcgttttaaaatnagagtatcatccggtatgcgaacgttgctctcgaggcagttaacgcacccaactactgacttgattacccttcctgtaacttatataacttctgnacccagatccccttaccacatgtttttaaaatttttagcggtaggggggcgtcgagacccaacccctcattggtacgtagcaaattttttttttgttgcgccgttttgaccctaccggaactgctattaaataataggttgcaatgcataacgtgcctttttgcttcatccataaatagccgacttgcaggaatattgaatactgccccgtctctggaagaggtctaatacatagatgggcccttgccacaaagggcacacccctttccttagctggttttgttttttgagccatgttgggtaggngccctttnccccccaagcggaaatcgnggcccctgaacaaaaaatcagcttatgcccggatggatactccggagggcccggctcgattaagcaccgttaatccacggatcgtggttttgtatcaaaaattccctcanccaaatctttcgggaatagcgcaagagaaacattaaaccatttcaaataagggacgcccgcganaaggntcctttcaaataaaacccggaaattccggggggtctcctttgcgatagacggggttatactttngtaatcagnggagttcaactccttgtttcagccgcccccncnagtattttg

SEQ ID NO: 551794 - DNA, 309 bp, Homo sapiens
  misc_feature (91)..(91): n is a, c, g, or t
  misc_feature (116)..(116): n is a, c, g, or t
  misc_feature (157)..(157): n is a, c, g, or t
  misc_feature (184)..(184): n is a, c, g, or t
  misc_feature (195)..(197): n is a, c, g, or t
  misc_feature (201)..(201): n is a, c, g, or t
  misc_feature (206)..(206): n is a, c, g, or t
  misc_feature (229)..(229): n is a, c, g, or t
gagaaggcgatcccatcaaggagggctcgtcgtcggagaagattggggggctcgcgctgaggaaaaatcgtcgctcggtcggtaagctgcngcagcccttggcaattcgctttttntacgtaggtctctctcgcgcgcacattcgtgcttttccccnctcgccctccgtcgcacacgcacgtcnccagccacgtnnnctcncgagntcgcatcgctcagcgcgctctgntctcctcagcctcctcatctgggggagtggaatagtatcctccaggttttcaattaaagggataattttttcacgaccgg

SEQ ID NO: 551795 - DNA, 393 bp, Homo sapiens
ggtcgacgctgaggcacaagaatcccttgaacccagtgggtgaaggttgagaggttgcagtgagctgagatcacaccactgcactccagcctgggtgagagagtgagactctgtctcggcgggagggcagggaggcggggtggagactgaaatctaaaacacaaaactaaaaaaccctggtgacaaactaagcaatatcatcccgaacataggaataggcaaagatttcatgacaaaagacaccagaagcaaccacaacaaaagcaagaattgacaagtaggatctaattaaacttcagagcttatgcacagcaagagaaactatcaacatagtaaacagaaaattcaaagaatgggagaacatgtttgtaaactgtgcatctgacaaaggtc

SEQ ID NO: 551796 - DNA, 163 bp, Homo sapiens
  misc_feature (83)..(83): n is a, c, g, or t
tggtcgaggtttgggaaatggtcttggcctgctgcctcgtgaagagtatcaaaagtggtctacgaggtaatgtaggggtctgntctcctcagcctcctcatctgggggagtggaatagtatcctccaggttttcaattaaagggataattttttcacgaccgg

SEQ ID NO: 551797 - DNA, 1430 bp, Homo sapiens
  misc_feature (528)..(528): n is a, c, g, or t
  misc_feature (616)..(616): n is a, c, g, or t
ggttttggaggtcagctctccagtccattgtctcgtctattgctaatgtctgaacggtacactagcgtgtatcaatttaacgcgtctgcgtatgtctctgtctgtggtcgagtttatggtactgggtacatgggtcaggccgatgatatgtaatcatggatgcgcagctgcggcgtgctgatgagatgtattgcgcaaatgctgttgctagtaggttagaactaggtgcagggtgcgtgtgtaggcgagttggagaggcggattggacgttaggtggtagttccgcgtgagaactggtagtgaaggggaaggggggttcagaatgaagcatagaaggccatatgcatatggctgggaagatctgataggtcctctggaggtccttatactcatgcgtatgacgtatgatgcatgagagaccccttgagaaggaccccgaacgtagatcctgtgaggggtatggcgaagtatgactaatagagttccagcgtaatcccacctttgcgagaccgacaggtgtagctccgnagggttaaagatcacctaggatatgggcatgtaaattattacgagacgaactccctacgaaggagacatcttagaaagtgggcgaccnaagaactcttgacggacaaattattcccctagtggggaccctatggggcccctgacgacttcggttcttatggaacaagaactctagtacctactttagcgcacagtacattttgcaattggtcttgggattccccgccttgtggtcaccaagctttccaataggttattccgtaatgcaccaacgtatgccggttgtgtccccatgtggcctgtggtccacgctaaatgggtgcgcgcaagggattaggaaggaatttgggcaacatacttggcgcgcaattcctggccacatatgggttgtgggtaccgaagataatagagcacaagttggctaatacttatgggggcacgttgggaaaaacctaggcgaggggaggtgaaacgacaccaggtgaggtaatccctgcccgaaggaattctaacgggggaggtaacagcgcatagtaaaccggttttgcaataaacccccttgtgttaccacgttgaagagaggagacccaaaccggccaaattgcacgaaggaacagcggaacaaatatagggatgcccaaactgataatagaaagcgcttcaagaatgaggccctatgtgccgttccctgccagattccgtggagccagaatgtggcaagagggccagtgaaatggcccccttgtgggacaagttccacacaaacgagaagccagcggggccacatgtcaaaggggacagcgcgttatggacgggacagcggcgtgtaaggggctcaacaacaggatgtgatcccaacgaactggagtccattaggggggagagacacacgctgtaacgaa

SEQ ID NO: 551798 - DNA, 250 bp, Homo sapiens
  misc_feature (17)..(17): n is a, c, g, or t
  misc_feature (77)..(77): n is a, c, g, or t
  misc_feature (116)..(116): n is a, c, g, or t
  misc_feature (118)..(118): n is a, c, g, or t
  misc_feature (133)..(133): n is a, c, g, or t
  misc_feature (163)..(163): n is a, c, g, or t
  misc_feature (196)..(196): n is a, c, g, or t
tccgtgggtagggaganactgaactagataacgtgctcagttcaaatcagagactattttaatatggttataggcantataacgggcttcactcgtgtgctttcctatgccttagnangtctgcacaggtttnccagaggtctgctctacgacactgtaaaanggaaatagaaggatagatcagagctgtgaaaanctccacgttcttaacgtttgcccgccacacagacggtattcaccacagtacggg

SEQ ID NO: 551799 - DNA, 873 bp, Homo sapiens
ggcggagtatggcgtgcctgctgcaaactgtgcctctgtggcctgggggctgatgcagtccccgtggagtgcctgagtgcatctgttggaccgtgcgaggagaatgaaaaaaaatatcggccagaggagaggaactaacctgaacattcttcctccctaccttatagaggggagtggtcatctacactaaagcaaatgtgttatggctgctgtccgtgcgaagagaccacgcaaacaggctttgtgttccattatcacacggaagaaaattttccttgacccttctaggtgctttttatattcatctcaaaacacaaagattctgaactcaggacttggcaagtgtctctatgtctgtctccatagatgtggggtagtccttgcgtatccttttagcccagttacttttcccgtgatttcggaaactgtgggcatatcgaacgttcgtctaccaaagagttaacgctccgagtgatttgtggacatggaaaaaggcacacattatgcttagaagtgttacgtgccttctcaaagttcaacgcacagagggagactcactaagtgattccagattatccgtgctagacatactccagtgaagaacagcacgcacagctcactatggtgtctctattggctgtcatgcttcaatttataaaacgaccatcatctttgcaaagcacgagaggcctgcagtttcgatttggaaacacacggtggcctaaggtggtgggcattgtgtgcaagtacatttaccatctacgacaggcaggacagacttattgacagttagccaagttacttgacttgaacatccaggggtctaacataacaaagtgtctttccaagtattcacgcacctacccatgacta

SEQ ID NO: 551800 - DNA, 423 bp, Homo sapiens
  misc_feature (6)..(6): n is a, c, g, or t
  misc_feature (11)..(11): n is a, c, g, or t
  misc_feature (19)..(19): n is a, c, g, or t
  misc_feature (22)..(22): n is a, c, g, or t
  misc_feature (32)..(32): n is a, c, g, or t
  misc_feature (40)..(40): n is a, c, g, or t
  misc_feature (48)..(48): n is a, c, g, or t
  misc_feature (52)..(52): n is a, c, g, or t
  misc_feature (61)..(61): n is a, c, g, or t
  misc_feature (63)..(64): n is a, c, g, or t
  misc_feature (75)..(75): n is a, c, g, or t
  misc_feature (78)..(78): n is a, c, g, or t
  misc_feature (85)..(85): n is a, c, g, or t
  misc_feature (106)..(106): n is a, c, g, or t
  misc_feature (115)..(115): n is a, c, g, or t
  misc_feature (128)..(128): n is a, c, g, or t
  misc_feature (155)..(155): n is a, c, g, or t
  misc_feature (159)..(160): n is a, c, g, or t
  misc_feature (201)..(201): n is a, c, g, or t
  misc_feature (258)..(258): n is a, c, g, or t
  misc_feature (288)..(289): n is a, c, g, or t
  misc_feature (294)..(294): n is a, c, g, or t
  misc_feature (317)..(317): n is a, c, g, or t
  misc_feature (328)..(328): n is a, c, g, or t
  misc_feature (335)..(335): n is a, c, g, or t
  misc_feature (349)..(349): n is a, c, g, or t
  misc_feature (351)..(351): n is a, c, g, or t
  misc_feature (360)..(360): n is a, c, g, or t
  misc_feature (364)..(365): n is a, c, g, or t
  misc_feature (372)..(372): n is a, c, g, or t
  misc_feature (383)..(383): n is a, c, g, or t
  misc_feature (385)..(385): n is a, c, g, or t
  misc_feature (399)..(400): n is a, c, g, or t
  misc_feature (423)..(423): n is a, c, g, or t
tcagcnttaangaaggggntanaaagggttantttgggcntaggaaantttnccaaggcancnnaagtaacacanccnaaccccncaatgggacaaaattttaaantccaaaggngagggctttaaanaaaacttgtatattacgaaaccgttantttnntggttttacatctagcaacagatctcttttaaagaaggggncatttactagtaaatatgtctaccacgtaatggtctagttgtttttattgttttttnttgaattccccccccctttttaagtgttgnnaactntaagtatcccagccccttaaggngttaaaaaacnctaaaangttccctccttctntnttttacctntttnntcccccncaaaatttccngncaggaaagaacacnngttaaaaggaatggttgtctttn

SEQ ID NO: 551801 - DNA, 601 bp, Homo sapiens
  misc_feature (589)..(589): n is a, c, g, or t
aaaaatccacacagcttctcttggtttctctggcccgaaaatccaacgttggtccaagaaggctctggcgtgtgccaggcactcgctgatcatctggtcttagggggtcgcctctaagccatttgatcccgttccaggaacgaaaaaggcagcggtgatgactgcttcttttatcgtctccctccagccatgcaggacggtctccttttccctgttctcctgagcctaccctcttatgggaaattctcagtcttcctttccaaaggacagcccgctaggctacctcatagaaacctgcaaacctcaggcctcaggcaagatatccgccctaagcgccttgtctttttttcaattcagtctggccacagtaccaactagataacgggtccaaatggcccgcaaatggaacattcgactttacagttttacctgacttaagcaattatttccgacgactggagaaatggggagagattccttatgtccttctgtccaggcctttttgcactcagatcacagcccgacctctgctgttcttgcttacctgtctctcctccattcttccaccttgatcgcgttctcctcccanccttactcttct

SEQ ID NO: 551802 - DNA, 177 bp, Homo sapiens
  misc_feature (63)..(63): n is a, c, g, or t
  misc_feature (66)..(66): n is a, c, g, or t
cgcagttctccttcaaggatctcaacttccggatgttcgatgtgggcgggcagactcggagcnaangaagtggatccactgcttcgagggcgtgacctgcatcatcttcatcgcggcgctgagcgtaccagacatggtgctagtggaggacgacgaagtgaaccgcatgcacgagag

SEQ ID NO: 551803 - DNA, 310 bp, Homo sapiens
agctgcagcatttcggttaatcagcagtaagcttacatatctagagaaacaacatagtggaaaacgaaaaaaaaaaaaacagaaaaatctacgggtaatttcccaatagctttgaatattcacagcagcgcttaataacttgagagaaagacgggcaacactgaaagccacttcggctttctaaccccagttccttaaatctggacatctggtacaatttggtgaaattccagactgtcaggcttaaggggttaataaaattagttggcatcagtgtagtcattgagtgagggggagatataagccaagg

SEQ ID NO: 551804 - DNA, 229 bp, Homo sapiens
tttttaaaaatttccttgggccggtattgggttcttaaacggtattgggggtttggttggaccggcggggttttttttccccagaatgggaggggttaccggggacccttaaaaagttataaatttgggttggttgggaatgccttttaataagtttttggggcccccagcccttaaatattaaggttccccccttccggcaggtttgaaataaaggttggttttttca

SEQ ID NO: 551805 - DNA, 345 bp, Homo sapiens
  misc_feature (286)..(286): n is a, c, g, or t
ataaccaaaagagaggccaggcgcagttgctgacacctgtaatcccggcactttgggagaccaaggcgggcagatcacgaggtcaggatatcaagactagcctggccaacatgatgaaaccccgtctctgctaaaaatagaaacaattagccgagtgtggtggcgggtgcctgttagtcccagctgctggggaggctgaggcaggagaatggcatgaacccaggaggtggagcttgcagtgagccgagatcgcgccactgcacttccagcctgggcacagtagcgnagacttccgttcttcaaaaattaaataaattaaataaattaatcctaattactttttaa

SEQ ID NO: 551806 - DNA, 390 bp, Homo sapiens
tggttggtgagtggatgacaagcagaagcagttatgatgacacggtgatatatccaagcataattggcacatttgtcaacattggtccatttctagaccatccttaaagaaatatcatattgtggggtcacaccatcctcacggtatgtccgaatatagcaaccatgccatctggattcatgtttgtcaccaagtcagaagaactggtagttatcgaaattagcacggatgtgctagatttgtactgcagcccctgtcatacaaggttttactcttactggtctctgtacttcaagtgtcccttggatggatttcatgtaatcttggatgtacttcttgtaggctctcttttgtgaaacttgttccctgcaggtgatggttcatgacatt

SEQ ID NO: 551807 - DNA, 634 bp, Homo sapiens
gggtgttcgatccagtcatcaaaggcaaacgggaaatccgggccgaagatggtgatgggtttcttgccatcgcccgggtggcgattgggcttgctgagggtgctggacggaatgctcatggctgaccttactgacggctcggcgggaggagggcccgttgagtataggaaaagatggcagccagtttagggaacgttacgcgcgttaataagacgcaatctgtcgtcggattgcgctagttttagtcaatgtgacgagctaagtggtcagattggttgtccgcgatccaatttgttactgaggatgatcgaggtggtggttttctccacgccgtcgacactgccgatctggtccagcaattggtccagttgctccggcgaatcggtgcgcagccaagccacgtaatcgaactccccactcaccgcgcacagctgctgcacttgcgccatggcgctcagcctgcgcaacacctctttgccggagcggggttgcacggtaatgcccacgtaagcctgcaaaccaccatccgcaacgcgctggcccaggcgcacgccgtaaccggtgatgacctgggtttctccagggggaactgaatgagccggtacgagtcgaatcggaacagggcaagtgttcg

SEQ ID NO: 551808 - DNA, 131 bp, Homo sapiens
gacaaggccatgctttacaagtgctgcagctcactgatttcatcctcagataccgccctgtgcccaccacgaagtatgtgcgacaagcctggcagaaggcagacatcaatactcatgtaacagcctggtgt

SEQ ID NO: 551809 - DNA, 322 bp, Homo sapiens
tttttttgagacagcgtcacactccatcccatgctggagtgcagtgacgcgatcatggctcactgcagcctcaaacccctggactcaagggatcctcccacttcagcctcccaagtaactgagaccacaaacatgcaataccatgcccagctaattttttatttttcttggtagagatggagtctccctatgttgcccaggctggtctcgaactcctgggctcaagaaatcctcccacctccgcctctcaaaatgctgggatacaggcatgagcaccatgccctgttgctcctattcctttttgtttgttttttggtcgacg

SEQ ID NO: 551810 - DNA, 131 bp, Homo sapiens
ggatccccggcctcttctgtggctcatagtggtggctctttgcgtggctcattgggtggcccttagtggggcacctggggatagaagtatgtagtttctcagcaactcattacagtctgtcacaccacgcg

SEQ ID NO: 551811 - DNA, 244 bp, Homo sapiens
  misc_feature (33)..(34): n is a, c, g, or t
ctgtactctaatctatcaggatgtcttctcgtnnaaggagatgggcctttgggaggtaaaggataaaatgaatgagtctgtcatgattcactattctagaactggcatgacctttactgtgttagctcttggaatgttcttgaaattttagactttcttggtaaacaaatgatatgtccttatcatggtataaaagctgttatgtgcaacagtgtggagattcctggtctggatagattagaga

SEQ ID NO: 551812 - DNA, 475 bp, Homo sapiens
tgaaaccccattccatatgttaaatcggcggcggggggcttagtcttcatgttccctgggcgtcccctcgggccctgtccatcttgtgaccatgtgtcctgagggcgagtcacactgtgtcttgagtctgctgtaaggtgttcagtctactcaaggggtcatcatggtaagctctatccccgggcatcctccgcccatccccacacacactggatggatccccccccgccttgccctttgaaaacctcctgaccttgtctttcctataatccccccaaactcctagggcaaaatggaagctgccttaaatggggaaaccattggtccaaagctataaaacctgaataaagctgaagctggatttaaaagccctggtgcatatgagccaaaagggccaaaagctctaaataatgaactaacctgccactcgtataaatataaatatatataaatatattaaaatcagactgttcta

SEQ ID NO: 551813 - DNA, 232 bp, Homo sapiens
  misc_feature (173)..(173): n is a, c, g, or t
ctaattggttcttcgatgacgcctcccgaccccacccttgggggagggggtctcagcgcccttgggatcccccacatctgctgccatcccccatcgcagtgtttttctcagcaccccctcgtggttttctcccaacaacccctttccgggtctccagccaccgacagcagtgncctcacgccctgggatgggaggatcacagcgccccctccgtcatcgaagaaccaattag

SEQ ID NO: 551814 - DNA, 309 bp, Homo sapiens
ctggcaacatctgtttaaattaaaaatataggccgggcacggtggctctcgcctgttatccctgcactttggtaggctgaggcagacagatcacgaggtcaagagggcaagatcttcttgtccttcgtcctgcaaccccgtttccactaatatttcccatgtaaactgggtggggtgcccggcgccggtggtgcctactacttggtttttttagacacaggccctctttatcatggccggggtgggttgcagtgagccaatattgcccccctgcactccagcctggtgacagagcgagactcggtctca

SEQ ID NO: 551815 - DNA, 137 bp, Homo sapiens
  misc_feature (48)..(48): n is a, c, g, or t
  misc_feature (62)..(62): n is a, c, g, or t
cagctattgtgacagaagaaattgcagacttgttttgttcatcctgtncgtaaggggtcagngctcttggtttggtcttttcaatgaataggacttatgttactggtgtccagctgaatttctcttggggtattaag

SEQ ID NO: 551816 - DNA, 1098 bp, Homo sapiens
gcggagcgcggcggcaagatggcagcgcaaatatccaacgaagaggaagtttgtcgctgtagtggcatcttcagaagctggaagctgaactgagtttctctactcgggagtctggctgaagatggctagctctggagttgaggtgcgaggttacgaccgagagccatggacagaaatcgattatcttagtccaagccgagaacagcagaatgttcttggtggagaagggccggctggattcgggaacttgactgctggtagtttcagacgaggttgggctttccagaagggcagtgtagacgctttcatgctgaaaaggtgggccactagaggtctgtgtgccattgacccgaggcaggagtctcgtgcgttacagaacctcctaggagcggcttgactagtagcgagtagaggcctgacttatggtgtgctagcggttcatcactggagagtggggccgaaggctgcgagggttgtggtgctctgggagaaactccggagggacagcaggtgctcaattgccatttagagttcggtggaatgggctgaatgcactccacgagtgggcacgatcccatggtatagagcttacttaccgttgcaccacatggctgatgccgtccactgctgtgagctcaggaagagggcgtggtagcttggggccgtacatagggctgcaatgaatcgaattgctggcaccttggagggaagaccgaatattggggtataggaattcgggcccgtgaagcagaaggccggcgagaactttggacgcagcggtagaagcaattgagtgggaaagcctcggaagcatgaatggataggatcccttgggaccattcaagaacgccacgaggacgaactaggaaacaacggaacgggaaaggcgaatacgccagtgaagttccgggagctgaccaatgcccaccaaagccaaggtccgacaagggagcaagagaaccatggggacattcgttggagcaagagacggggattaccaagggaaggtacagggcgagggtgagcgtcaccaaaaacgaacccatttcctggaagattggagtaccatagaagagaaatccaaacagaaggaaacca

SEQ ID NO: 551817 - DNA, 120 bp, Homo sapiens
atgatggagtctcccgctgtctccaactggagtgcagtggtgggatctccactgcgagcttttgtgccatgttgaggagtctgagaggcatttaggaagtgtagaggtaatccgtgaggg

SEQ ID NO: 551818 - DNA, 968 bp, Homo sapiens
aaagatattggccttggagggatgaagaactgccaaagtgtgtggtgcatgtgagaaggtgcgtggagatcggtgctgtgcagaccccaaggcggaaagtgaagtggcgaacctccgcctggagcttgtggatgcagtgagcgaaagtaccggggtgccgaggagcagctccggagctaccagagtgagctggaggccctcagtgaggcgaggcccccagggtgtgaagtcaaagatggtgactaaggaagtcattaatgtacaagactgacccctgagatggagaaggagcttcagcggctcagggagagagatctgtggacaagaccagactgatctgaaaggtgtgatttaggagatctaccagctgaaaaaaggaaatccaggccctgaaagagaccaaaccccaggtccagaccaaagaggtggtccaggaggatcctccaattccaagaagaccctcaaaccaacggagtgagtgtggcgtctctgagtggcaaagctctcagaggagcagaacgaaacaagtggatctggagacgggaaatgagccccccatgaatgagcaagatctgcccggaaagaggaggatgctctcgcgggttgaaaggaacagggttggtgcacgcagggaggtggtcaggtatagggatgagcccagggcttgtgtgggctaaggcgaggccgccctttttcggaggagcatcgatgtggaggctgcggggaggaattgacaagtctgctgggcaagaagcttgcgtgcgactgtgaggcgccgtgcgccaccgaagctttaatcgggcagctttgagggagcctaaaagggcgtagcgtgaggcccacatgtgaggtccggcggaggtacggggtgaagcacggtgcaacacttgacaggagaactactccgtgaagtgacccaacccaggggtcttaagaccgatacggcaaattcttccacaggtgaagcg

SEQ ID NO: 551819 - DNA, 267 bp, Homo sapiens
ctcggacctcttcttcacggggtcatcccatggtctcatgtgatgatgacgctgaggtgctctgcaggctgtgcttctcagtggctcccaccagatacccgatggtcctgttgatttgctgaatcatcaacttcctgttctctgcctctggcctgaatcgatgtcccatgttatctggctctctgtagtacagagtcacaaagtcaaattcttccttggtgaaccagttcaatacggtatcgatgttctccctccactatgcacgct

SEQ ID NO: 551820 - DNA, 220 bp, Homo sapiens
tgctgatccttattgtcagtgggaagctgagtcgaggaggtagtggttcaccagattaacaaggcctttatgaattcaggacatgccatgcccattcgctccttgacttttccccgtgactcccagctccttgtcactgcttcagatgataggctacatcaaagatctatgactgtacaacatacccaattttggctgggcacacgtgacaagcggcctg

SEQ ID NO: 551821 - DNA, 422 bp, Homo sapiens
gctagatgactatatcgattgagttcacatgtatacctttgcaaagactgcattcacaactatgtattggcactttagaggttatcagtatacaagcctgagtaacaaaacttagtcatccaatgtccaggctagattagtattaaaattatgtagatcagtaattcagcacaatgctggaacacattactcacatttgtctataatagaccctttactgaatcaatggaatctttaattagataagcaagtctaaggggagagaccttatataaaaaaagctcctatatactgaatatattatgagccctgattatgaagtgagggacaaggcttttctttttgaaatacatgatggaggacatagatctgtggtagccattcatgctacataatttagcattttattgttaatatgttag

SEQ ID NO: 551822 - DNA, 817 bp, Homo sapiens
ctgggtgttaatcggccgagggcgacagtgcacgcagctactaggtgtggcggcgacccttgccccgggttccctgtggctacctgtggcgctggcctgcccccgcgccgcagtgcctgggaccccgtgtgtgccagaccccgaggacctcctgacccctgccggtgtgcatgctgtgtgacctgctgctacgctggtgctaagcatgttctgctgctgttactgtgctgcctgcctcctggggtgtgtcccctgtgttctgttatggccgtctgcctgtgagcagctgctgtggatgcttggatggcctgaagaactgcgaatggtacccgatgcctggctgaccatgcaggagtcgctgctgggtgaatgcagctggcctgaagagcagaatgctgtctgtggaagatgtggatggcagcacatctgcaaaatgtgcattgtgccaagatgccacaagatagatttgtgaacttgtgcatgcagcatgcatgctggtgatgaacttgggatgaatgtgcccagtgctgacaaaggatgatgtgatgtgggccctgactgcaggcttgagtgcccatggagctcctgggctaccatgtggacccaatggagtgccctgcttccagtgagcttgctccaggacctagagaagaagtgagctgcaatgcgcctcagaggaggaaaaacatgaaacggaagaaggagggcgcgagctgctgcattggctgcagctgtggctcaaggaccagcagcctctggggcaccagctcctgatggctttgtccttcccataaaggctgtaccttgcagtaccctt

SEQ ID NO: 551823 - DNA, 546 bp, Homo sapiens
ttattcatgatatagggagaggcattcgggggctctaagaaagttcttgtggtgttctgtggagagaatgattaacgtgtccggggaaagagtcccttggtgtgtgcctgcaccacccacgtgccttccttcagcacctttaggtggatttgtatgccagtggttaacccattgccttattcatattagcatggtcatgccccacccatacacgtcataggagaaaaaagggggggttctttttgatttctagtggagatttctttgaccgcgggaggactaaaggggacttaatgttactaaggttaaagccgggccattttccatttaaaaatattttttaagaggggagagggcgtttagccttttttaaaaactccctttatattacatttggacccatgatactttaatcagaaggttagccttgaaattgtgaacttttggaaatgttattagggaagtttgcaactaaactaaacctggaaaattatgatggttggattcaaaagattaatgaaaaataaacatttttgtccccctgga

SEQ ID NO: 551824 - DNA, 551 bp, Homo sapiens
  misc_feature (3)..(3): n is a, c, g, or t
  misc_feature (68)..(68): n is a, c, g, or t
  misc_feature (89)..(89): n is a, c, g, or t
  misc_feature (155)..(155): n is a, c, g, or t
  misc_feature (160)..(161): n is a, c, g, or t
  misc_feature (209)..(209): n is a, c, g, or t
  misc_feature (222)..(222): n is a, c, g, or t
  misc_feature (241)..(241): n is a, c, g, or t
  misc_feature (268)..(268): n is a, c, g, or t
  misc_feature (273)..(273): n is a, c, g, or t
  misc_feature (278)..(278): n is a, c, g, or t
  misc_feature (295)..(295): n is a, c, g, or t
  misc_feature (304)..(304): n is a, c, g, or t
  misc_feature (317)..(317): n is a, c, g, or t
  misc_feature (375)..(375): n is a, c, g, or t
  misc_feature (377)..(377): n is a, c, g, or t
  misc_feature (380)..(380): n is a, c, g, or t
  misc_feature (390)..(390): n is a, c, g, or t
  misc_feature (399)..(399): n is a, c, g, or t
  misc_feature (407)..(407): n is a, c, g, or t
  misc_feature (417)..(417): n is a, c, g, or t
  misc_feature (439)..(439): n is a, c, g, or t
  misc_feature (475)..(475): n is a, c, g, or t
  misc_feature (548)..(548): n is a, c, g, or t
tcncatacagtcgaagatggattcataaatttagaaaacaaggatgaccaaagaagcagctgagtgtnctagacaaaccaacgataggngggagttggggaggacgaacaatttaagcagcagagaagctcccagcaaacaggaacagtctacanagatnngacagcaaacaagcatcccgaagaagataagcacattttatggcacangccaggcccattntcttgatggatctcttggnaccacactccattctgcgttacacttnctagntaaanttcaggtgttctaagtntcagtaacnctccttacttggntttttccttacttagtcttatggttgtgccttctcaatgtcctattgtctaatatttnanggncagatagttntactgcagntattaatnctcttccttnacgtcagctattctttttaccntgttttgacaagccatgcccattgccgaatactttntattttgcccttccccttgttgaatgcttggttcaccaaagtttgtaatttttgttccattaagctgccacangcc

SEQ ID NO: 551825 - DNA, 330 bp, Homo sapiens
ggccgttctacgttctccccattgctgagcgctccgcgggcgcgatgaactgggagctgctgctgtggatgctggtgctgtgcgcgctgctcctgctcttggtgcagctgctgcgcttcctgaggtgcctgaccggccacctgacgctactattggccgcgtgtcagggacgacgccctgactgggcgctgactgatatggtggtgtgggtgactggctgcctcgagtggcaattggtgaggagctggcttaccagttgtctaaactacgagtttctcttgtgctgtctgccagtaaaattggatcagctggacccgggtgcgaggaaga

SEQ ID NO: 551826 - DNA, 234 bp, Homo sapiens
ctccctagtgtatctactaaacatacaaaactagccggagtatggtggtacatgcctgtaatcccagctactcaggaggctgagacaggagaatcacttcaacctgggaggtggaggttgctggtgagctgagatcgtgccactgcactccagcctgggcaacaagagcaaaaatccctctcaaaaaaaaaaagtaaatgaccctcgttttacagataggatacagtagggaga

SEQ ID NO: 551827 - DNA, 147 bp, Homo sapiens
  misc_feature (1)..(1): n is a, c, g, or t
ncgatggttacgaatccataggaaccatgaggttgccggttcggtccctggccttgctcagtgggttaaggattggcgttgctgtgagctgtggtgtaggccgcagacgcagcatggatcccacgttgctgtggctctggcgtaggc

SEQ ID NO: 551828 - DNA, 974 bp, Homo sapiens
gcactacatatgagcagcctaaccctgacttccctaatttccccccatcgcttatcagcctcgttgaccctaacaaaaaaacactcattgcctccattatgtaaagatccatggtcagatccacctttataatcgagtcatcgtctccgcctaggaaggaatattcagtgtgccttcaacaccgaagcaagttcattgatcgtccgaacatgacactggaaccacgcaaccctagacgaacccgagcatcgtcctctaagcttcacaactcagcactacgttcatccgataatattcatcccttgtggccagttgttcggttacgatggctccagtcataggaacttctcatctgatggatatactagacacctcgagacccaagacgattagatcagttctcattccagagatactctatcgtctatctatcgccataaattaaccattgacttcaactctttcaagttatcgcgcgtaaacgaacactattcacaatactgatatcagtcggacttgagaagaggcggtaggtaagtatatagtcctttcgtgtggctcaggtcaagattgaagtgtatacgggcgcctgaacgcaggactgccaaagcgaccatgcagccacaatgtcaaagggcgaagtcgcgtaaataccatacgcctgctatgtccgaggtcgactcattcaggctgtgtcaaatcgcgtccgaccgttatatggcactgagtgtatactcccttagcaacgtcgcaaatctacagtgatgaacccgcatgcagaacacacatttagcgcacttcgtacaaaacggcttaaattcccaaaagcacctgcaaggccccgaccgttaccttaaggccacttccctaccctaaggcagccatggcagggacaaattcaatgacccaatctaggagtcctacgaagcccatggaaagttacaccatcaagtgcaataggaaagggtaccccg

SEQ ID NO: 551829 - DNA, 1140 bp, Homo sapiens
agaaattgcaccacagatatatgggttaaggtgggtgcggcatgctatttggacgagagttccccactgacaggaccttctggtggtctgggatgccttgtatgcaagacggcctcagcctgggtttagtacgattatatcttcgatagaccatgatatcctttacactccgagatgctattgactctctagataactaccagacctgatctcgagcgcttctgatgcattaacccagttcatcggggatgtacacatcactgattcttaaggctctgtatccgttagagatccacaagagaaagtccaagaccagttgactatactcaaattccatccaaaatctagattcattacaaagcacgaggagcgagaccgtcatgaactcaaagccggaccaagtgccaaaggtgcatccccatgcaatatcaaataaggtcatctcaatcagcctgcatatacatatctaggcacagcaaagtcagataaaccaccagcaataggcctccaaggcacagagcaaggatgggaccatgtaaccgtggcaggcaaaagccaagacaccagatagacagtcgctccacgtcatggtcgggtacagtacaacataccaagggaaacactcaacgccaagcaggcccacccaagagaaccagtacaccatatggcgaacacaggccaaccaggcaggcacgaaggacgggacatgcacttagcacagatcaagaaaaaggccactggccctggataggcccacagctaacgaacagccacacagagggcctacaacgcatcacgtaaaacagacaccactgtcgagacttcccacatcgagcaccacaagcgcgattgacacgcacgcatacaggcaccccattgggcaagcgggaacacggaaagaacacccatgatcaacgcatgaggcacctcccgcacccaaaaaccatttccaaaaccattggccgataacaaaacaacccgacaaacgaaaatcccagtagacaagaaggaccaaacaggatgcacaacaaacggcataacagacgggacatacagcaagcacagacacacaaaaacacaaaacacggagcacaggaaaagcacaacacacacttcatggaacaacgcaagagcaacatg

SEQ ID NO: 551830 - DNA, 638 bp, Homo sapiens
aacaactcaggcaaaataaaattcctgttaattgtgggacaccattgtttcacacatacttcaaacaggccaaaaaaaataaacagcaacttcatagacgaaaaaaggagaaaaaaaagaaacctttcatcttgggcctttttaacgcatctcatacaaaccaactacttatagtacagctaagtacatacacaaaaaagttactggaatgctcggaataagatggtcttcctgtggtcattttggctttttttacaaggtttttttcctccttgtgagcattataatgaacatggtcacaccacaagtaaacgtcagaagtaggacagagaacgccccgaaggctgggttagggtcatccgagatcattaacacaagggctgaccctaacaatatgtccacaaaattataacgctggtccaataaacaaatacaacacaaattcccttttgaaagtcacttttaagaaaacaaagcaggggccttggacagtcatgggtccttttttcctcccctgtttgcaaattctcatggttggggtacgcgtgcgtggaacagcgcgtgtcatctgcgggtgggcactgcccacggtggccggcgggccctctctactcgaaggtgcccccgttaccattctg

SEQ ID NO: 551831 - DNA, 630 bp, Homo sapiens
  misc_feature (9)..(10): n is a, c, g, or t
tgttttgcnnttattcttaaataagcaagcaaaacctgcacattggattcacgtgagatgataatgaaaacttttagtttaagagtgaagggttaagtaacctaacagagctttgatgttatagctgcattaaagaaggtgattgtcaatattacagaaaacaaaaatggattgcccctccaaggaccaaacagattcaaggagcatcatttaagctaagaagagacctaagtgatgaaactagctgtaagaatgtaacaggggttgtgtttgaaatatttatattcccatcggtgtgtttagtcctagaaaattgctagcagcagtcttcttcacagtgccttgggaaaagacatttcaagaggaaacttgataattttaaactcttttccccctttaccgtcatctatcctctatctgtatcaagctcactgcggatcctgctgtaaaactggtgggtagctgggctgtccattaccaccacagctacatcttctgtttctttgaatagaaagcaccacagtgttttgcacttgcctccagtaaagtgccctgggaagggagctgggcagtgtttgtggacgagagactgtaacgatggctaataaaagctgcgggtctaaaaaaaaa

SEQ ID NO: 551832 - DNA, 185 bp, Homo sapiens
  misc_feature (166)..(166): n is a, c, g, or t
  misc_feature (174)..(174): n is a, c, g, or t
tagaggatccccgtactgtggtgtacctgtcttaccccgtttttcccccctccccaaaagctgcaggaaatagaaagctacggaatgtaccttccaggccagaagcaaaacattgaggatggccagcaaagggcaggggccatttctcattctggggtgatgatgnggtgtgtntctcctccttc

SEQ ID NO: 551833 - DNA, 253 bp, Homo sapiens
gggttcacgccattctcctgcctcagcctccggagtggctgggactacaggtgcatgccaccgcctggttaattttttgtattttttagtagagacggggtttcaccgtgttggccaggatgctctcaatctcctgacctcgtgatccacccgccttggcctcccaaagtgctgggattacaggagtgagccactgcgccctggccaactatgtgtaatactcttaagtgaggtgatctgaggtgatcttctg

SEQ ID NO: 551834 - DNA, 1165 bp, Homo sapiens
gggttaccaggcactacttatcaatgtagtagactcagcagtatctatatcatgcaaattgtaaatgtagagtagaatgtaattgtaacgtagaatgttagaaccaaagcatcttcagaagttattatctgcctatacccagatctcctgactgatttagaggatcttttctttgtatacccattacagacttcacaggagacaagggttgtggtggtggtatacagaggacagacccttagtcatcccaagagcactttagatgcttgatacccatatctactacatatcacacccagccacagatcatcataaggccagagacatcttattctctagctcaggcattattagacaggataagatccatggacatacagacaggatctggtgaaagtgaccaaggtactctaggcacacagaagttactactagtcaggaatacccacccgcagtgcttccaaataacaaggtaactagtcatagttgatactcatatgtatcctcttagaccactaggtatcaatcctaaagtcattcaaagataccaacaggcaataagaaaccaccatgtagtacaactcaacataaactaccctagaactatcattacaacgaaagaagataaagatcagaagctaccagggtcatggtaaagaaagagagcttattaacgcgcagaccacccttgaaacaaaagatgcaagcgaactcagcaatacaagaaaaagaacgcccaaacaacaaaacaacgaataaaaaaaagaaaacacaagagccataagcacccatcacacaccagcaaacagagccaacaaaaacacgcccccaacagatacaaacataacaaaaaagatacacatagaacaaatataagacgaaaatagcaaaaacgaataaaaaacaacaaagaaaaaggcaaaaacaagaaaaaaaaaacaaacacacaaaaagaccacactcacaactcaaatatcaacataaacactacatcataattcacgcacaaacaacaactaaaatacaataatgataacactatgtatcacaatactcccataaaatacaaactacacacctaacaacactaacccatattatatcttcctcacgaccacccaccaatcatcacaaatcaaaccactccacaccctaaaccaccaaa

SEQ ID NO: 551835 - DNA, 183 bp, Homo sapiens
caaatgctttcatacatctcaggtggggggacaaaaaggggggaggggggggcacgaaggctcatcattcaaaataaaacaaaataaaaaagtatgagggcgaagataaaaaaagtttggcataacataattaacacgaaagcaaggctatcacctcccgggaggggagcccaaggggtaccg

SEQ ID NO: 551836 - DNA, 411 bp, Homo sapiens
  misc_feature (168)..(168): n is a, c, g, or t
cgcgacatgggcctgcaggagatggccgggcagctgcagcggccacgcaccagggcctgcactttatagaccagcaccggcgtggcttatcgcgagggtcacaaacgttgagtggctgctggatgctctgtacgggaaggtctgacggatgagcagtaccaggcagtngcgccgagcccaccaacccaagcaagatgcggaagctcttcagtttcacaccagcctggaactggacctgcaaggaattgcttcttcaggcactaagggagttccaatcctaacttgttgaagaacttggaacggacttaagcttctttcccagaaaaattcgggtcaacccttgcaaatcccaccaaatcatcctgaatctgatctttttatacacaatatacgaaaagccagcttgaaaaa

SEQ ID NO: 551837 - DNA, 102 bp, Homo sapiens
agataacccggacgacaataacccggatgataataacccggacgacaagtacacccggacgacaagtaacccggacgtacaataacccggacgtacaataac

SEQ ID NO: 551838 - DNA, 121 bp, Homo sapiens
cttcgtcgttcatgctggggttggtgagcgagaactgctaactcccgaacaaggctgtaaggtctgggaggctcaggagctggttgtatagcttctcgggcacgacgctgaggatcaaaag

SEQ ID NO: 551839 - DNA, 571 bp, Homo sapiens
ctgcctacaatccaatccaggttcccaaatcgcccgcacatccaaaagcgcctgtagcccgcccgaaccgagtaatgcgacctattactcctaaaccgcgcgcctatgcgacgtatagccacgctaggtgccacgaacggttatggcgcgataataggatgtttatatttgcgggcgtgaagggaatgcgatggggctgtaatgttgcggtattgtaaagccgccatcgtatggataatgtatctttagcgagggcgtaattgcataattcgtagctatgtgttcgctaaggagtgatcggagctgggagcgcgttgagacgggttagcccctttggcgtatagttgttatccggttgggagcgattagtttggatgacgtagaatgttgttttgtttatgttcagtctatattgcctaaagtccgatgtcgggtgtgtccgcgttctttgtcgacggacgttcgtaaccgttcgaggagggtgggttgaatggcttagtggtggaactggataaagagatgcctattcggtgactcgtgtgtcagatgccctaatcgtgcgaaggcggat

SEQ ID NO: 551840 - DNA, 166 bp, Homo sapiens
actctatgaggatccccttgcaggaaatgggctggaacctggtgggaagtgcacaaggttggcttgctttggtgacaaggggaagggtccaggcagaatgtctcaaaccgttcaaccgggagtctatattgtccttgacctatgggaggaggaggtctctagtttg

SEQ ID NO: 551841 - DNA, 449 bp, Homo sapiens
ccagagcacccccaaggctggcttgggagcaaatggctctggcttctttttgttgttgtgccgtttgtgatactccagtgtcaaaaagccagtgaaaaaaataaggagcagagtcctcctggccttcgaggcggccaacttccctttccattaaagaaaaaaaaaaaatgcttccccccacaaagactgtgcattcaatcccttaatggaactcgaggtggagcttatgaaatttgtgtccaaagtgcggaatttttaacgtgccatggcaacaggtagtggcagtacccccaggcttcgaaagtcaaaaatgcctgcagatccatcccatgtcccgatttgtgaaatatggggaaaaaaaagctctagctgaatggatttgtgggtcaggaaaaaaaaaagttgagtgttgcccaactgtatgccaactaataaaacttttttgaaga

SEQ ID NO: 551842 - DNA, 156 bp, Homo sapiens
ggaggcgtctagaggatccctaccctcagtaccaggtgcctttaaggacgagttaagaagccccgcgcgacagacacacacacacacacagcacaaaacacagcgaggtaaagtgtaggtaacactctgggtacaagtgtaggggggagaagtgca

SEQ ID NO: 551843 - DNA, 156 bp, Homo sapiens
gtcccaggttgtgctgtccaggttgtgctggtccaggtgtgctggattacaggcatagccacggccagccactctcctgttttaaatcctttgattttccccccattgctttcaggcaggaaaagactttatacaacttataaagaccccctggga

SEQ ID NO: 551844 - DNA, 1535 bp, Homo sapiens
tctaattttataattttcgggggcccttagtttcatggagaattttttttttttggaaattggcaggggtctctcattattgtttcccaagaacatagagtgtgcaggtggattatttcacaggcgccgtttatagcgcactatacaacctttaaacctccgtggctcaagcaatttcctcctgtgccctcagccttgggacgatagcgtggaattattcaagttgcccgcaaccagcgcctgtggttcgtggcccaaaaataatttctccatagtcgagttcgtgtaccagtgttatacagtgttgggctcttttcccctcacagtagcgagacagagtctattttctcctatctcttcgaggtaggggtctcagagcctcccaatgtgaaccccttttactgtgtacaacgagcctgttgcagtatttgggtgttcaccaggtttagaaaaagggggtgcccccctgtgagatcttaacaattttgtctgtgacacacaggatataactacaggggctcacaggtcttcatataggccagagtgtctgttcattatttataattccacagtctcacattgttgtcccccgagagagctcgtgacgcattgcgagaacaatacacaagtagtggccccccgcgggataaaccccaccctttctgtgcacaagtaccccccaaagggtgttatacaaaacgtcgcttccgttgggccccccggtgggaagaaatgatccccacgaggtgagacacaaatgtcccgcggaatactagtggggagcacgagacctcgatgactgttgagtgatgagactcaacatggccgcccgccgggtgtcacatcaaagacctatcctttatctacacaagcatcgctgtgtgcaaggtcttcacccctttgaaagggggagtaatagcacgacagcccgcggggaaatataagcacatcccggtgaaagatgtcagcaaaaaggcgctccaccagcagtggggttccccacatcaggagaagaggcgccactgtaggttacatacaggggttgaagaacaaagctcaccgttagtaggctggtgttccccacgcgacaactatttggttagtgcgcagtaaaccaggagtgggtgtggtctctataagaagtatacacagcggcggcggggaacttactatgaagaccccaaatctttttcgcggaggggcatatctttatccgggagcgatcatcaagtgagcactgacacggtgccaccccttcatataaggaagggagaaattccccgggcagcggtggcacaaaggtaacaaggccctattggggctggacccgagttataaacaacacagatcgcggcgagcactactgtgtcaccaggtggcgcccgggcaaaaaacgggtcctcctcaacacgggaccacgctatataagagacccacccgaggggatcactaccgagacgcgaggagcagggaacaacactcaaccaggagcgcctatcatgagagaggggaaccactgtggaaaaacaaggcca

SEQ ID NO: 551845 - DNA, 180 bp, Homo sapiens
gcaagagagaccataagcaaccgccaggagacctgagcaagccaggagacctgagcaagccaggagacctgagcaagccaggagacctgagctagcctggagagctgatcaagacaggagatcctgatgcaagccaggatacctgatcaagccagggaggactgagcaggcagggtgttt

SEQ ID NO: 551846 - DNA, 968 bp, Homo sapiens
gtgggggagagtgctggcactgcatcaattgcagctgatggatatcctgtttgcaaatcccaatgatttttgttggagagaatattctggaacagagtgagaacctgcacaacgctgaccaggcactgcgtgtccgtggctgcatcctaatctctggtggaacgaatggatgaagaatttaccaaaataatgcagaaagtacggatgcctcagctcccaagagatacgtggagcacttgaaggatgaggcccaggtgtgtgccatcatcgcatgcgtgtgcagcgctacctggtaggagaagggcaactaccgaggaggtctgccagcatctacctgcttgcgcatccttgcgcacctacatacaagtgtgattacataggccatatcagcgacagttgaccccgcctgagggctcctctaagtctgagcatgaccaggcagaagatgtagggctgaggactcggcttgtgtttgatggaagagactgtgcaagtactattctacagccaaggaccgcaggagaccggatccgcacatgtgccatcctctgccatatctaccaccgatggtctgcattcgcgctggtaccagggcccgggacctcatggtcatgagccacttgcaggacaacattcagcatgcagaccggcagtgcagatcctttacagagcgtacccagggtgccgctgggcgtctgtggcttccgtcaagggctgcacgatgacgctcgactacgcctgtggacatccagtcgagtggctgggcgaggagttctgtgccaaggctgtgtgggcggctgaggaggcacaagagtgggaagtggccgccgatggtccttcccttggatagctgggccggggggtggtcccggggtggcggctgggtcctattgggcctataggagcccggtgtaggtccccgtgtgggggcaactctggcccctcggcttgtccagaggccccaaggg

SEQ ID NO: 551847 - DNA, 161 bp, Homo sapiens
accacttctgcctatagcctagctcagcccaccatttctcagtccctatgcagctacacacttctaccttgcccctcccaacatagcccactctggaatccagtatccataaactattacctagtccaactaagcagacactacatccccagtctaatagg

SEQ ID NO: 551848 - DNA, 140 bp, Homo sapiens
gactcgtgcgtcactgcccagtcttcttcgtcgtatcgtggtggtgcctgggccgacttggtctctgtagaccaggaggaattcggtcttccagcatggtgatgaagaacaacgatcttgatatttggcctctttgaaga

SEQ ID NO: 551849 - DNA, 347 bp, Homo sapiens
  misc_feature (162)..(162): n is a, c, g, or t
ccaggaggtgctgacctttgggtctgtggtttactgtgatgtactgatgacaaagactgtcacagcatcttagaacgggggaggcacagcttccaagaaatgatgcaaaactggtggcgcaaacagaggccaccaagtggcaacaatgggcagggcatttcnctttgttggctggtggtcacggacaacttcgtggtctcaagtttcccgaatgagctatgctaagacaatttaccgagaaagcaaaataatgccatgcaaaacagcgatgacaaatgcacttgtgggtatccgatgcaaagtgtgcagttcccgccttgtccagctaatttgtgtggagccaaata

SEQ ID NO: 551850 - DNA, 206 bp, Homo sapiens
cgttccgcgcacggcctggcggtgttcgacgtctgagcacctgcccacccacggcggcagcctgcgcgtgtatgcccagcggctcgacaccggcaagcacgatgtgacggcggaggttgcgcgcacgctggacgaggagcaacaggccggcatgaccggcgcggccttctacgagcgcttccagcagcaggccgatgcgcatcaag

SEQ ID NO: 551851 - DNA, 557 bp, Homo sapiens
  misc_feature (222)..(222): n is a, c, g, or t
  misc_feature (267)..(267): n is a, c, g, or t
  misc_feature (318)..(318): n is a, c, g, or t
tggtggaaacggggtatacattttttatactcaggctaaaagtgcaggggcatgatctgggcttgctgcagtttgtgacctcaaccaagagttcagaatggatcctggtcccaagatcgagcctcccaaggaagcgtgggcacgacgtgtgacagggagtcgatccacgttcgtggcataatttgtggcatatttttctccttagaatggggtttatcaccnatgtgttttgcccaaggtttgggcctgcgaaatctgccacagtgntctacagaggcgaatacacaccgcggctctaacgaggtctaccacaaaganggcgccgcggggacatctaaatgaggcctatgaagcccaccaatatcgcgtcgcttaatttaccagtgtttaagaagatggtggtctcattctggtcaccccaatgggagtgtagcagtgtgatcacagcttagtggacccttgaatttctgggacttaagtgatcctcctgcctcagctcccgagtagcagggaccacaggcacacaccaactaagtgaggctagcttaaaaaaattt

SEQ ID NO: 551852 - DNA, 296 bp, Homo sapiens
  misc_feature (28)..(28): n is a, c, g, or t
  misc_feature (211)..(211): n is a, c, g, or t
tttggttggcgatttccagtgtgtaagnaggttcctcaagtataatgctgaaatgctgtctagtatttcctaagcacaagagggctatgatgtgccttttggagaaaatacacgttagataagcttctttcaggcttgagttatggtgtcattggccatgagttcaatgctactgaatcaacaatatgtattaaataaggtgtcgttaagnagaaatacacataaaacaaggttatgtattgacaaaaatattgcagccatgcctgggcaacatagccagacctcatctctactag

SEQ ID NO: 551853 - DNA, 104 bp, Homo sapiens
cgccaatcaaccagtcgtacagccataaaactcttcaccaaagagccctaaaacccgccacatctaccatcaccctctacatcaccgccccggtgttgttgggc

SEQ ID NO: 551854 - DNA, 348 bp, Homo sapiens
tcgggtaccgtatctctaacattacatgtttctattctattcttttgattcaaatctagttttcagcctgtaatcctagcactttgtaagcacaaggggggaagactgcatgaggccaggagttcgagaccagcctgtacaacatagaaagacctcatctccaatggaaaaaaaaaagtctaattttcctttattcataaaatgtagtctaaacatatttgagacttatgtaatgcaggccttaccctacattgtattcaccatttatttcctaactgaaacaagactgggaaggaggtatacataaataaaaccaaagaaatacccccaactctaatgttagagata

SEQ ID NO: 551855 - DNA, 376 bp, Homo sapiens
ggcacgggttttgtccctattgcccgcctcacagaggaagctccacacttatttgtggctcgtgctcctcggtgctctgacctttcactttgtataccctgtggaaatgagcacaggagggacgcgacgcggctgtggttaatttggggtaaagacccctctggtccccggcgagtacccggtcaggtgtcggcccccgcgttcgggctctctcaccctggcggagaacccccttcaacggcagaaagcctctgcacagcaccgcgcacgggaggtgccggtctctcgcacccccgaacctgctctcattcccaaagaggagagcgctggccgcgtcttgaaccggggtcgcctacctcccccccccaccccccct

SEQ ID NO: 551856 - DNA, 723 bp, Homo sapiens
  misc_feature (458)..(459): n is a, c, g, or t
  misc_feature (466)..(466): n is a, c, g, or t
  misc_feature (477)..(477): n is a, c, g, or t
  misc_feature (481)..(481): n is a, c, g, or t
  misc_feature (483)..(483): n is a, c, g, or t
  misc_feature (485)..(485): n is a, c, g, or t
  misc_feature (498)..(498): n is a, c, g, or t
  misc_feature (512)..(512): n is a, c, g, or t
  misc_feature (516)..(516): n is a, c, g, or t
  misc_feature (523)..(523): n is a, c, g, or t
  misc_feature (567)..(567): n is a, c, g, or t
  misc_feature (575)..(575): n is a, c, g, or t
  misc_feature (578)..(578): n is a, c, g, or t
  misc_feature (652)..(652): n is a, c, g, or t
gcatcctggttgttgctgtgtcctgatagcccccccgcagggcctgcacctgtgtgcccaccccacccacagcggccttctgccattccgacctcgtcatcagggcccagattcgtggggacacccgaagtccacccgacccccttatacccgcgttatgagatccagatggcccagatgtataaagggttcccaacccttaggggattcccctgacatcccggttcgtcttacaccccccgcccatggagagtgtctccgggatacttcccaccaggtccccaccaaccgccagcgaggagtttctccattgctgggaaactgccaggatggactcttgccacaatccactacctgccagattttgtggctccctggaaccagcctgagcttagctcagcgccggggcttcacccagacctacactgttggctgtgaggaatgcaccagtgtttccnngtttatncatcccctgcnaacngnanagtggcactcatngcttgtggacggancagntcctccnaggctctgaaaagggcttccagtcccgtcaccttgcctgcctgnctcggganccngggctgtgcacctggcagtcctgcggtcccagatagcctgaatcctgcccggagtggaagctgaagcctgcacngtgtcccccctgttcccccatccccatcttttttcccggaccaatgaaataaagagttaccaccccagcca

SEQ ID NO: 551857 - DNA, 444 bp, Homo sapiens
  misc_feature (179)..(180): n is a, c, g, or t
  misc_feature (187)..(187): n is a, c, g, or t
  misc_feature (198)..(198): n is a, c, g, or t
  misc_feature (202)..(202): n is a, c, g, or t
  misc_feature (204)..(204): n is a, c, g, or t
  misc_feature (206)..(206): n is a, c, g, or t
  misc_feature (219)..(219): n is a, c, g, or t
  misc_feature (233)..(233): n is a, c, g, or t
  misc_feature (237)..(237): n is a, c, g, or t
  misc_feature (244)..(244): n is a, c, g, or t
  misc_feature (288)..(288): n is a, c, g, or t
  misc_feature (296)..(296): n is a, c, g, or t
  misc_feature (299)..(299): n is a, c, g, or t
  misc_feature (373)..(373): n is a, c, g, or t
ccagtcgacatcaccttcaatgggtaaggcactttcgtgcatatgtactttggtggtgtgagagcaagtctcccgagtgggtcagtgttgaaagatgagtagaggaaagttctgctccagggcagatgcacggagaagccgtcagagatgtctccctcctgccttccagcgtgtttccnngtttatncatcccctgcnaacngnanagtggcactcatngcttgtggacggancagntcctccnaggctctgaaaagggcttccagtcccgtcaccttgcctgcctgnctcggganccngggctgtgcacctggcagtcctgcggtcccagatagcctgaatcctgcccggagtggaagctgaagcctgcacngtgtcccccctgttcccccatccccatcttttttcccggaccaatgaaataaagagttaccaccccagcca

SEQ ID NO: 551858 - DNA, 206 bp, Homo sapiens
tttttctgacccaccttatgttctgatccaccgtggggggcctaagtacttctgatcgatgcccagcccgtgcacggtgtgagcgccggtagcggcccccgtgcgctgccgggcccgtggtcttcccggtagtcgggttgctttgcggaacttgcagcccaatagcgtggtggtaaactccactctaacggctaaagtaccaggca

SEQ ID NO: 551859 - DNA, 963 bp, Homo sapiens
cagatgcgcttttctcagaaggtggaagaaagtttgagagatctgtgctcaggatcaatgtgttttgatagagcggtgcctggtaaccatcacatctgcgagatccgtgggtcctggcaagattgttacagtgactgggaatccaagaacctggtactagcacctgtctgagggatcatgtcatctctgtggaataagactgtcgtcatggtgtcactcgcgcctctgaaacactatgcgagttggtctatgcgcaatgcagaaaaaggacttggttgatgtttacatgtggtgtagctatcaatgggcatgaaatacctagtttgcagtacagtgtccgtgatcctgaattgcaatgaggccactctggtatgttttacgtgactcgacttctggaaagaacttttcgtagtcacactttgtgggtggaacgtgatatttatactcagaattgtgtcacttgacaaagggaacagattacgataatcttgcagacgcgcgttgaaaactaatgcatgggtatttcagacccggtgctcgaccaattatcttgcctccaaaattctgagcatatgggaattataacattccttgactggatggcccaacgtttccgtctggcttgatgcaagatgtcgatggatcataacctttactggatcgccagattatgtcggatgcttaacccctcaactccatttgaggtgacagtgccgtagtcataagtaaaaggaaaaggttccagctattcggtgttaagcttgcttgttcaagggatttctcaacgtagagactctcgatcaggttctagagctggaacgggcttcttaaatttttaaactgcgcagggggggccaacgcattgtggcccctgggacgggttgagggccctttatgaacatttgtctggtgccaaggagattacaactctcgacaggggtgggggaccgttggaccgaaagg

SEQ ID NO: 551860 - DNA, 228 bp, Homo sapiens
  misc_feature (19)..(19): n is a, c, g, or t
aggctctacaagacgctancttccacctatcatagaagagcttatcaccgtttcatgatcacgccctcataatcacttttccgttatctgcttcctagtcctgatatgccccttttcctaacactcacaagcaaaacctaactaatactaacatctcacgacgctcagcgaaatagaaaccgtctgacactaatcctgcccgccatcatcctagctcctttcattctg

SEQ ID NO: 551861 - DNA, 264 bp, Homo sapiens
  misc_feature (18)..(18): n is a, c, g, or t
  misc_feature (31)..(31): n is a, c, g, or t
  misc_feature (79)..(79): n is a, c, g, or t
  misc_feature (95)..(95): n is a, c, g, or t
  misc_feature (101)..(101): n is a, c, g, or t
caggcggtcagtaggcgnggaggtgaggtanaatataaacgcattagagtaaatgatccgggcgagatcatgtatacgnatgacgtgggtggggnaagggnttattattaaggatataaatggccgtggtggcaatgcattaaataagggaggtggcagcagggtgagtgtaaaagtaatatgaagagtggtggtggcgcggcgggcgggccgtcgcgcgcgcgtgtggacccacatccgcgtcaagcccatagaggttattat

SEQ ID NO: 551862 - DNA, 478 bp, Homo sapiens
  misc_feature (27)..(27): n is a, c, g, or t
  misc_feature (76)..(76): n is a, c, g, or t
  misc_feature (173)..(173): n is a, c, g, or t
  misc_feature (197)..(197): n is a, c, g, or t
  misc_feature (262)..(262): n is a, c, g, or t
  misc_feature (265)..(265): n is a, c, g, or t
  misc_feature (267)..(267): n is a, c, g, or t
  misc_feature (276)..(276): n is a, c, g, or t
  misc_feature (328)..(329): n is a, c, g, or t
  misc_feature (337)..(338): n is a, c, g, or t
  misc_feature (349)..(349): n is a, c, g, or t
  misc_feature (352)..(355): n is a, c, g, or t
  misc_feature (367)..(367): n is a, c, g, or t
  misc_feature (467)..(467): n is a, c, g, or t
ccccactcaggagtgagacccagtggncaataagctctgggacagacgaatgggcgccctcctccttccttctgtngggctggagtgagtggaggagagtgactcagctcctgggctcaggcagggtctgagagagggccaggatggtctcgagttcttggcagctgaggaangtagctgggcacgggtagtaacancagcgaggggcgggccagggtggccagagcccggggccaggaatgtgcagctgaggtcaattttnccngngtcctcccnactcggggtcgggcggcgggaaggagggtggccgtggcgggggtggaggttnnttcccaannctcagagcttnttnnnnttcacccacttntaggtgccctcatactggaaacccactctcttcatcagctcgtctgcctccgtggggcctcggctgccataaatataggggatgggcttaggcttctccngcacaatctgg

SEQ ID NO: 551863 - DNA, 719 bp, Homo sapiens
cagacgtcggggggggaggagccagcatgaccgatcgctgcgtacgctactatatactgaggggcccaagatgggacccctacccttattgagacccacatacacgtctatttgaccacatgttcaggctcgctctgctgccggaggatgtggctcatgggataggcgtgggcagatgtccaagatacgtgcgacccctggcccccgactgcatcgtgagccgacaactgtcagggcccgactacaatcagcgcgctcacacggcaactgatctaaggggtctcggacatccgggacactgccgctcgatggcgactgtccatggatgtgaccacttaccccctgacgagatgacagtgaaaccaacgattgagtgctggacatcaccgactaggactatgagcggcaagacgagcatagcttcatatcccattgtttcacgcggatatacactgctgaccccgatgtggtagccgaccagtttgcttctgcctgggcgctgaaggcacactgacacgagacggccttatgcctaatgtatgcacgcaggacatctcaccgtactatgcacctgcgaagaatgggtccaacttgtgtgcccagatgctgaatatacgctggactgtacacttgtatagtgtctttaaacattatctttctatgttaacaaaggagaagatcactgtaaagaatgatgtgaggggggtcggcacaggtgt

SEQ ID NO: 551864 - DNA, 153 bp, Homo sapiens
gacataatcaaaagagctatatttaaaaagatcccgaacagcttagaggttttttttttgaagaaaagggccgaaggcccccgctgcgcccaaccccaggtctgtttttggggcgcagggtttaacaccaaaaaaattgtatctgggcccccc

SEQ ID NO: 551865 - DNA, 426 bp, Homo sapiens
  misc_feature (134)..(134): n is a, c, g, or t
cagaagcggtgatagcgcccagggacgaggttgtgcgctcgcgcgggcacggaggcactgccggtgctagaccgagacaactaccggaccacgggcagcaccgtaggcttgcttctgctgccgatactgcatgntactgatggcgactggagctgtgcagggctgagagacagaggagaggcccacagactcgcgaagaggagtgccactcttacgcaactggacaagagcacccatgagaggcatcccaggtcacgatcggcgatcactgcctgcagctaggcacagcgaggatgtccaagtcagcgcccatactgaaaggaactagctgagaccagacggacaagttaaggacctgaagttaaactgttatggtgagaagaacctggttggcctcgacccactcgagcacacttgagagaccgc

SEQ ID NO: 551866 - DNA, 202 bp, Homo sapiens
gggcagaacaccaattttattataaatatcaagatcctaccgggggtttatgggcccgcatatgccttcagttatgttaaaatagctgatcatctttccggacattctgaacatttctcaatttcaaagggctggccacaccaaagcattagccctggctttaaactccgttacagaaaggaattacctactctggaaaggg

SEQ ID NO: 551867 - DNA, 1020 bp, Homo sapiens
  misc_feature (535)..(535): n is a, c, g, or t
  misc_feature (594)..(594): n is a, c, g, or t
  misc_feature (744)..(744): n is a, c, g, or t
  misc_feature (860)..(860): n is a, c, g, or t
gcggatgggcgacatttcaatctccattgagagaataggtaaaactgaaggcagaaggctgggtgcggtggctcacgcgcataatcctagacactttgggaggccgaggcaggtggatcatgaggtcaggagttcgagaccagcctggacaagatggtgaaaccccgtctctgctaaaaaatacaaaaattagccaggtgcatggcgggcacctgtaatcccagctactcgggaggctaagacaggagaatcgcttgaacctgggaggcagaggttgcagtgaaccgagattgcgccactgcactccagcctgggcaacagagcaagactgtatcaaaaaaaagaaacaacatacagtgtgtgagcctggcttaagtgccctgtccttgggtgcccagagccagacttaagaggtaacacccttagcaggcacgttcctttcaccctgtggtgtggaatttgtatgtgatgtattttttctttttccaaaaatggggtggactttggaacagcaaatatttaatcggagcaaatnccccttgccagaatcctgctagcttgttcaccttggaggttctttgcccaaaaatactnaccacatactgaaaactaaatgtgctaagtcacccacagagtataaaggaggtcttgattaggatttggagcagggggtttgtttacctgtttttgatgaatatacagtgtcaatgtactcaccctgtgatgagccttaaagggccctgnccgcattccagattctggagtaagcaaacaagggaggggatttgttggggatggtggctcagcctgctgctgttagcattctccttgaaatggattttggaggaagaaaaaagagntagggaggtagagaaggtctaaaggtgtaagatgggctggtatagatgaaagaggtgctaatgtgcatgtgttatggggaagatgtggttcaggaattagagttgctgatggagtagaagagagaaggtggggagaaaataatttagggaatgttttaga

SEQ ID NO: 551868 - DNA, 430 bp, Homo sapiens
cgctatatgtctcgacgtaaaagcgcttggtattagttaatctctaaggattgggagagctggaagaaaaagatctagctatgttagtagagattcttcacagacgcagattttcccacacaaaggatggctttgcagggccatttcaagatatggcagaaaaacgtgtttgggggtaaaatatttggattttcttccttgtgtggtagtgttatgccagagtcagattggaaagtaagtcacgatatatagaattaaataaaacccatctgatgagaatgtatagtttgtagggcacaactctccagaccccttagacaggaatctgggcaagattaaaaaatagagcttagtcctctcctcaaaaggacagacacaagagtacccggccttaaagaggaggctagagagagagagatcagcgtagaaa

SEQ ID NO: 551869 - DNA, 340 bp, Homo sapiens
gaaattttttttacccttagttgcgcgcacaggaaaagactgttatcttgggagctattccaggtctctaaactctcttcctgcgccttgtccttgtgtacctcggctaggcttaacctttcttgaagtagcgttgatcgccttcggataccattcgtgtattattttagaataaaaaatactatgaataagtatgcaaccttcttaatgattaaagcccgtaatcttctttaacgacaaccaagaataaccaattagaaaatcaaccaaaactagaagaaagatcagatactcaaatgagatcaaattcaaaaaaaaagaaaccggaacaacatgtcaa

SEQ ID NO: 551870 - DNA, 147 bp, Homo sapiens
  misc_feature (19)..(19): n is a, c, g, or t
cggacctttgatgagcccntctctctagacaattcccctccccattaatctcatcactatttgctttatttctacagtgattctactgctggaagttcttctgtcccaggaagagataccattctttacaggagaggggctctcaaa

SEQ ID NO: 551871 - DNA, 393 bp, Homo sapiens
cagcaattgttcgctactggacagatatcatttgttaatccatggctaaaaagttttaatgaagcttctattactctattattcgagtttacagtttgctatctacttaggatttttacgtttcttttaattagtattactttcgagttgtctttgtttcactttgatatcggggttatactaatcccttaatatgcttttcaggtatacttctattttctgtgtctcttaaacaggctctgtggcattataattattgttgctgaaaggcccttatatacaccagaaccactgtttatgaacttgaattatgcaatttggaaattatatcattcaaatatttcaattttttggctttttgtactatatgtgtaatactaggaaatcttaatt

SEQ ID NO: 551872 - DNA, 832 bp, Homo sapiens
gcggcggcggcggccgggacaatggcggagtgcgacggccgcggggacagcgatgtcagccaacgcccggagcgcagtccccgaaggatgataatgaagataattcgcatgatggtgacccagccatccataaggtggcgaatgggctcaggagatagttctaggagttgtgaaactttcagagtcaagatcttggtacatagttacgtatccagcaaaaaacttgatagagtagcaaatggcctaccatgatgacgacatggtagaatactatatgcttcaagaacaagtcagtgaagtatttgggtgtgacctcctttaaaaggaaatatccagatgtagagcgacgagatgtgtctcacaaggagaaactctacctgagagagctatatgtcattactgaacgctcagtgcgctctagggcttaacagcattgcgcagtgatgaaggtgatagagtttaatgataaaacgaatatccagtcaagcatgctgagtattctgtgattctacaaggacagaagaagcgtcaacgaattacagaccattataaagagtattcccaagatgcgacatacagaatactcagaaagtagaagccagtaaagtgcctgaagtctatcaatgacaagctgacacaagaaagcagcagaagttaatagcacacttaaaacccgggtaactgcaatggaagaagagaaggaggtgtattgggaacttgcagtacacaatgtgataccagggtagctacaagggaaagttaaaacggtgtgggccagacagagaggatcaaggtcagttcgtacccagtggcccacaccccggacagtccg

SEQ ID NO: 551873 - DNA, 256 bp, Homo sapiens
  misc_feature (63)..(63): n is a, c, g, or t
  misc_feature (93)..(93): n is a, c, g, or t
  misc_feature (108)..(108): n is a, c, g, or t
  misc_feature (196)..(196): n is a, c, g, or t
  misc_feature (217)..(217): n is a, c, g, or t
  misc_feature (223)..(223): n is a, c, g, or t
  misc_feature (252)..(252): n is a, c, g, or t
cccatcccttgctactcttactaatgcattctgccctctagccaccagaatacttgctttctnctggaggtagcaaagctttcaagccttttnctcacactgtttctnctgcatagaacacctttggcaactttcttcaccaagcaaatatcttttttaatgtccagttttaatgtaaccttctctgggtagtctngactcacttatactgaaatantccttnccttaatgtgatccctcagcaccttgtgnaata

SEQ ID NO: 551874 - DNA, 800 bp, Homo sapiens
gccaaaacgagctgggcgcccgcggtccgggtgcagcctccacaatccgtaccatattcaacggcctctgtgacatcataatgttggatgtcatatctaagagttacttacaagaatgtgcctaattggatagaatctggtacgatgctgctgacaagacattgcccaatggggtggtagtgatgaagcagccaaaggtgcgataccttaacggaacacggaacacgtgaagggctgacccaattccagtatgtctctccgacgcgggacaaggtagacgagagtctctcagttacttgacagaacaatatatcgtcgccagaacaggtaaaacctaacggaaactgtatcgacaaagaagtcccccgtatacaccatccgttgcgaacattatgtccttagagggacatgactttccagtaaaggggaaggaaaccacccattataggcgtttggaggaacacttttaatctgggatatgagcaccacttgtatccccgtttgagcatttccttcgatcccacacaccagccaagagaacaagctgtgtagtacgatttggagaaacgccccaaggaccaatattgtcgagggcaatggcaaacggaggggacaatttcgaccagacaagcttgcaccacttttaataggaacagggtataggcattccaaagagaacaagaaaacatttggctttcattcaccccagaaggaaatagaaagcagactttcgaacttcgagccgccttggttggcaccgaagaattcgaacatagcgccattcgaggcggggcccacag

SEQ ID NO: 551875 - DNA, 205 bp, Homo sapiens
cttggccatcatctcgcatcgtgggctggggcctcttaggtgtagcaacaggaagtcatgtcctgcgtgccggcgttctgactggttgcctcatcgggtgatgatagccagaggtggggatccgtgtggttacgaagacagctctactctctgattcgttctgtggctgcgcctgttctgcttcaggagcattagtagggagcat

SEQ ID NO: 551876 - DNA, 291 bp, Homo sapiens
ctacctcctactgggaccacagagaacgcccagcgggacgcgtgagagagtacctaaaaactgacggacgccaaggtgggggaggatgcctgcgtcatagacaccctgactcatgaccacgtccagcagcttcctgacagagttcatcaaggtacatcaagactagtcaaggttgtgctcttggaagacctggcttagcaggtaggcctatgcattccggacaccatacatcgcatactggacctgctggctgaggggactcatcccggtttgattgacgaccggggcaag

SEQ ID NO: 551877 - DNA, 1031 bp, Homo sapiens
gcgaggtgtgaggtgaacaagtgcagtccgctgtctcgaaggggcctgtgtggtcaacaaggcaggatgtggggatgtcacctgcaagctgcatcggatggccgggtgggccccagctgtctgacctgcgtcgtgccagctgcagcaatggccggctcctgtaccatgaacagcgaaaatgatgcctgagtgccagtgctcgcactccacatgacagggccccggtgtgaggagcacgtcttcaggcagtcagcagccaggacactatcgcctccatcctaatccgtctgctgctcgctgcctgctgctgcgcttctggtggctcgcgccacgctggtacttctagtgtataatgcgtgctgcactccacaggaggcctaaggggccttccacgcactaacggcactgacgcacacgcgggccactgacacgtgccacgattggaaaaccccccaccctacacagatcgccacgaaggcgcgaccagcctcgcattgatcgtgcggcacgccctaactgcgcccggctcgcccttttgcccctggcacgcctgaaccaagcctcacctaaactttccacaaatccccgcgtgtcatgcctccacctcctacaccggcggggcccacatgcccacgctccgccacgcctcccctgggcttagccaacggcaccgaagcacacgccgagaacccccctgcgccccgggcggcccctgaagcgcaccgaagcaccaccgccgaaccccccttgccgccactagcgcggcccctgccccccggtccccacattgtacccccgccgacaacgccccttaccactgccccccccttcctctcagcaccgcaacactaccccttcccagccctagcacacacccctttccaccaccacgtccaacgccccctttccccactgtctccccccggcctcagagactgcaccgttacactatcgccacaaatctgacacacgaaatttaccacgcttatcaatttcttctgaaacaacaccggaacaccccgcccctcccc

SEQ ID NO: 551878 - DNA, 336 bp, Homo sapiens
ctagattatcaaactcacaaccataaccatcaggagacgcattcttcaaggtcacttccaaagactctaccgtcttgtcgttaaagacgacatcaaatccaagcattttgaaggtaggcaaccattattcatcagaccctactgctcacaaacaactttgcagcccattgagactttgacaaatcatgccccacgaggtgagacccaacagcatcaagctgctgcaatttaaccatcactgttactccagaccttcaaaccacagacatatcaacgtaggccacatgtaagcagtcagtacctggcatgccaactgtccccagaagacagtactac

SEQ ID NO: 551879 - DNA, 410 bp, Homo sapiens
acaccatgatgtctaattatattgctttcacttgtggcaactgaagtacatccctatatcatacatggatacttgggttacagatctgcttgtacacttcagacagggcatcatttctagcctttatagaatatacatgcttcccacgtttcagagaataaggcttattttcttcaatcttgcacaatctttgcattcttgttttctaaattatttttttactatcgaatggtcttgggcatttattattccttcctttccacatctgctgtgcatcgtcccccgatgtttaagactttgatttttcttggaaagccttggttgaacatatattcctgggctggtgttaatcttcttggacgaatcaaatgagcctcatgtatgtcataatgcttattaaaaatgtgtcg

SEQ ID NO: 551880 - DNA, 724 bp, Homo sapiens
ggtgcgggtgcctgggaatttgctgaggaggtgatcgtaggaagcttcagaaggacctgtagggtctgatccaggcggcatgaggagaaggtggcctggctacgacaagctggagaagatcaagatgcggatgcacgacaggagcgtggagcgacctgctggtggacctggaacacctatgcgctcatgagcagcgtgctaactcgtggatgcatagaagcgataacgaatgtttgaccagctcctggcgcgaggagaagaccatctctggcaattatgcagaggagctgtgacctgtggctgaggcggaggtcctgagtagaaggagaccaaggggtctgtcgctgggccgggccctgtggatgaacgctcatggtcgccagaaaggcgcgatgtggatcggctcaacaatgcagttccgctcgtgcggatggtggaccttatgagctccaaggatgatgtgggcatcgagtgtcctaggagactgtgagacagtccacatgcgggtcctagaagtcagcacgtggaggagatgaaagacgcagctggaagagttggcggatgaccgtgtaggtccaccgaagaatgctcattgcatgcaggttgccagggctcaacgctggatcgtgcctgtaacgggccagcttctacgcggagatctgccttggtcgcgaagagttgagcgtcgagatgaacgaactctgatgcggtcaagaaccatgtg

SEQ ID NO: 551881 - DNA, 459 bp, Homo sapiens
ctacccccattaccacagtcttgactaatatagttatgtaagccttgaaattgaggagaataattcctcttatttgtctttttttcaaaattgttccagctattctgattcctttgacttgccattataaatttgagaatggtctttgctatctcttaaaaaaaaacttactggaaatttgataggaatgagtctttctcattccaagctagtggagtttctactttttgaacatcctcaaaaaccttgtgggtctcctctgtatttcacagggatttcacaggggacaagagggccctccatagatcttacctgtgcggttctgtttctattcctggcttttgctgagagggttgaggggattcatgagtgacaggcttaaatctcttcaaagagctttctgtgtgaatggatactctcaccttttaattcttccagcatactagcaaaacattgacc

SEQ ID NO: 551882 - DNA, 1012 bp, Homo sapiens
  misc_feature (11)..(11): n is a, c, g, or t
  misc_feature (65)..(66): n is a, c, g, or t
  misc_feature (72)..(72): n is a, c, g, or t
  misc_feature (121)..(121): n is a, c, g, or t
  misc_feature (411)..(411): n is a, c, g, or t
  misc_feature (433)..(433): n is a, c, g, or t
  misc_feature (436)..(436): n is a, c, g, or t
  misc_feature (442)..(442): n is a, c, g, or t
  misc_feature (464)..(464): n is a, c, g, or t
  misc_feature (466)..(467): n is a, c, g, or t
  misc_feature (477)..(477): n is a, c, g, or t
  misc_feature (495)..(495): n is a, c, g, or t
  misc_feature (502)..(502): n is a, c, g, or t
  misc_feature (506)..(506): n is a, c, g, or t
  misc_feature (516)..(516): n is a, c, g, or t
  misc_feature (529)..(529): n is a, c, g, or t
  misc_feature (531)..(531): n is a, c, g, or t
  misc_feature (584)..(584): n is a, c, g, or t
  misc_feature (593)..(593): n is a, c, g, or t
  misc_feature (617)..(617): n is a, c, g, or t
  misc_feature (665)..(665): n is a, c, g, or t
  misc_feature (776)..(776): n is a, c, g, or t
  misc_feature (936)..(940): n is a, c, g, or t
  misc_feature (944)..(945): n is a, c, g, or t
  misc_feature (947)..(948): n is a, c, g, or t
  misc_feature (953)..(953): n is a, c, g, or t
  misc_feature (956)..(957): n is a, c, g, or t
  misc_feature (959)..(959): n is a, c, g, or t
  misc_feature (961)..(961): n is a, c, g, or t
tttctgttcanaagttatagtgacattgctcttgcgtaaaaaatgcctgcttcccaatactttgnntgcatntaagacattcttaacagggcggcagtctagtgttgaaagttttattttnccatttttcttttaagtaaattttttttaaaaaattctgatttagggctaggtgtggtggctcaggcctgtaatcctggcactttgggaggccaaggtgggaagatcgcttgaggccaagagttcaagaccagcctgggcaacatagcgagacccctatctgtattaaaaaaaaatctgatttaattcttttatttatcataaggggtttaattcctgaagtaaaggtttgcacctattaaacttaaaactgccaaatgatttttgttcttttatgtgcgtgataaaaanacaaagaatggtgtggccaccnccnccctcncaagctagggcagcaggtagcncnncccagccccngagcccagcccccccccnagtggtnccgnacaaaaaacnacatggccctccncnccctgggggtggaaagggagggatgaattggggtgatagaaccctggtgaatncagagtaanctttctttagaaaactggtgtttnctaaagaaacaggataggagtttagagaaggcaccaaagctttcactntggtttggcaccagtttctaaccatctgttttttctaccctagctatcttttattggtaaaatataaatgtataattatgtttgtagagctttaccaaggagtttccctcnttttttgtttgttgattagcaaatttttgattctccattttccaaaagtaagagactccagcatggccttctgtttgcccgcgcagtaaagtaacttccatataaaatggtatttgaaagtgagagttcatgacgacagaccgttttccatttcatctgnnnnncatnngnngaccnacnncngngcgggcccggtctgtttatagatgtgtataataaatcgggggattagcttc

SEQ ID NO: 551883 - DNA, 1090 bp, Homo sapiens
  misc_feature (11)..(11): n is a, c, g, or t
  misc_feature (65)..(66): n is a, c, g, or t
  misc_feature (72)..(72): n is a, c, g, or t
  misc_feature (121)..(121): n is a, c, g, or t
  misc_feature (662)..(662): n is a, c, g, or t
  misc_feature (671)..(671): n is a, c, g, or t
  misc_feature (695)..(695): n is a, c, g, or t
  misc_feature (743)..(743): n is a, c, g, or t
  misc_feature (854)..(854): n is a, c, g, or t
  misc_feature (1014)..(1018): n is a, c, g, or t
  misc_feature (1022)..(1023): n is a, c, g, or t
  misc_feature (1025)..(1026): n is a, c, g, or t
  misc_feature (1031)..(1031): n is a, c, g, or t
  misc_feature (1034)..(1035): n is a, c, g, or t
  misc_feature (1037)..(1037): n is a, c, g, or t
  misc_feature (1039)..(1039): n is a, c, g, or t
tttctgttcanaagttatagtgacattgctcttgcgtaaaaaatgcctgcttcccaatactttgnntgcatntaagacattcttaacagggcggcagtctagtgttgaaagttttattttnccatttttcttttaagtaaattttttttaaaaaattctgatttagggctaggtgtggtggctcaggcctgtaatcctggcactttgggaggccaaggtgggaagatcgcttgaggccaagagttcaagaccagcctgggcaacatagcgagacccctatctgtattaaaaaaaaatctgatttaattcttttatttatcataaggggtttaattcctgaagtaaaggtttgcaccgtaattaagagcttcaagagatctgccctaatagtggaattcttgttcgtctcctttgatactggtgtcgtagattacaagaagtagcacaaggacaatggtgtggaccagcctcactgcccttgtacaacgctacgggcacgacagagtagctacgtttcccaagcctccatgagccacatgcaccctttaccccaatgtgagtgtacctggatcaatagcaatctatcactggccctctatcagatgtctttgcgggagtaggaaagggagggatgaattggggtgatagaaccctggtgaatncagagtaanctttctttagaaaactggtgtttnctaaagaaacaggataggagtttagagaaggcaccaaagctttcactntggtttggcaccagtttctaaccatctgttttttctaccctagctatcttttattggtaaaatataaatgtataattatgtttgtagagctttaccaaggagtttccctcnttttttgtttgttgattagcaaatttttgattctccattttccaaaagtaagagactccagcatggccttctgtttgcccgcgcagtaaagtaacttccatataaaatggtatttgaaagtgagagttcatgacgacagaccgttttccatttcatctgnnnnncatnngnngaccnacnncngngcgggcccggtctgtttatagatgtgtataataaatcgggggattagcttc

SEQ ID NO: 551884 - DNA, 121 bp, Homo sapiens
aatgatgcgccatcggccgccacatatcccaccttataagtcccccaacttgagatgtatgaaggctataggtctccctgggagtgggtggaggcagccaagggctatacctgtacactga

SEQ ID NO: 551885 - DNA, 112 bp, Homo sapiens
taattaaaataagtgctggtcaacctaaataactaagcaaacatgaaccaattgtgttatgaaatcaaattacttatatttatattttgtattattttaatagcttattttt

SEQ ID NO: 551886 - DNA, 135 bp, Homo sapiens
ggccgcactcttcaggtggttgtgtctagtgtcttgaatccccatcatggtccatctcgcataaacgccatgatttaaagcctacataggcttatttacaagacctttcagcttctaggaatcattcatcctcag

SEQ ID NO: 551887 - DNA, 124 bp, Homo sapiens
aaattccataagatattactatatcttcagttacaggacaaaataccacagaaaggagtgtactttgcaagaaatgtagttcatcttaaggtttccaaatactttatgaaggctaatgcagcag

SEQ ID NO: 551888 - DNA, 321 bp, Homo sapiens
tttttggggcccccttttcaaaaacaattataaccccgggtcccctctttttagggcctggatttgcttatagagccggaagaataaagccccccacttttccctagcccggctaatcatggaagggggtcccggcttcaaggaacttgagttttaattttttttttttcttggcagagtaatgtaaaatttaaatggggaaagatatttaatatttaaaactaagctttaaaaagaaccccgctatccttgctatgttttttgatgcaaagactatgatgttaataaaagaaaggacagaaaacccttggccttcaaaga

SEQ ID NO: 551889 - DNA, 513 bp, Homo sapiens
gagtggtgtcacttctctaaaaagggggtggaaggtatagacttcaaacatccatctctgctatatctttctctcctgggttagcttatagaccaagctgccatgttaacagggccatggtaacaaggagctgaggatggctcatggtagtagtatgatgaatcttataactgaacctcacaagaattaagtaaaatcaattgactcccaacttaaatataatttggagctccttatcttactaagtgaattggccaaggaaaattagctccacccaatgttcaatcactttgtcatcctttcttacaagactgttaggtatgatgggtttctcttcaaagtttaacttccttgttctttgttcttaaggtcaacttcctcataccttcccactcctaattacccattctgtaaacatttctcccaccaatcccaacctgtaacccgcatttgttccttatctggaaaagtctccctcgctcgtggcaactgctcttcccactcccgtaccag

SEQ ID NO: 551890 - DNA, 196 bp, Homo sapiens
ccttagtgcaatgtggacatagtggtagatgccattgtgagaactattgtttcagctgggcatggtggctcactcctgtaatccccacactttaggaggctgacgtgggcggatcacgaggtcaggaaatcgaggccatactggctaacacagtaaaaccccatctctactaaaaaatacaaaaaaaactagccag

SEQ ID NO: 551891 - DNA, 192 bp, Homo sapiens
atgacaatgtcgacatctgcaacctcagtgagtaagctcagtgcctgccatgtcccaagacaagtccttgttggatggggagggcccccagtgcagtagggggccaagacgtggccttcagcctgaagcttcctcccagtgaaaggggcctggccgcgcccaggacaggacgggcaaacaggatggactcag

SEQ ID NO: 551892 - DNA, 653 bp, Homo sapiens
aagcaggctggtacgcccccgcgttatgggatattggctatcggtatgtggtggagtgctactcttcaggaggaaggcctgctcggtggcctagcttgctggtgtcggtgaccagcaagggaccttgtgacgtgcatgaggaaagtggaggaagggcagcctggagccaagagcatcttcgtagcatgatggagactggcagagcgatgtgggcaaggtactgcatgcctccttgcagagctgttctgcacaagggagagaacagcctggggcccaagagacagaaagttggattccatggtgatgatttgcacatcaagctgctcaactgtggattgtttttgttacttttccttttaaatccggttcgtagtgtgtttgctctgtcagcatgtgacgaatttacagcagcatttggtactatgtaaaagttaagaggcctagttgtaccctggggtcaacagaaataccccagaaagtacatactgaactgaataccagaaagacaagttcaccagcagaaagagaactgcactatcaaaacaccacaataagatggtcacagtaaccataaaccaagaaggaagatatcaatgcctgccagaaaggaaggcccaatgaaatgaatgaacaatcagccggaaggaagccct

SEQ ID NO: 551893 - DNA, 438 bp, Homo sapiens
  misc_feature (57)..(57): n is a, c, g, or t
cagctgaaggaggcagcacattgctgaggattcagaccgcaaatatgaagaggtggncaggaagctggtgatcctggagagagagctggagcgctcggaggagagggctgagggtggccgagagccgagcccagacagcgtggaggaggaacttctgaaccatggaccaggccctcaagtgtcctgattggctcagaggaggagtattccaccaaatgaagataaatatgaagaggagatcaaacttgttggaggagaagctgaaggaggctgagacccgagcagagtttgccgagaggtctgtggcaaagttggagaaaaccatcgatgacctagaagagacctttggcagtgccaaggaggagaacgtcgagattcaccagagcttggaccagaccctgctggaactcaacaacctgtgagggccaagcccaaccc

SEQ ID NO: 551894 - DNA, 779 bp, Homo sapiens
  misc_feature (46)..(46): n is a, c, g, or t
  misc_feature (137)..(137): n is a, c, g, or t
gggtgtctccttcacttcgccctccagctgctggatgctggagccncgaacgcgatgcgtcgcaatgcgtgttcagcagctagcggagcggtggcgggggccccctcaggaaaccacagattccctcttcccgcggnctcgccatggcgaccacggacagacttggcgcgtcaatgtgtattcctccatcatatgctgacttggcaaagctgcagagatattttcaacaaaggatttggtttgggttggtgaaactggatgtgaaaaccaaagtcttgcagtggcgtggaattttcaacgtccggttcatctaatacagacactggtaaagttactgggacttggagaccaaatacaagtggtgtgagtatggtctgactttcacagagaaagtggaacacgtgataacactctgggaaccagaaaattcgcggaaattttgcaaagcacccaagattttgtccaaggtttgaaactgacatttgatactaccttctcacaaaacaggaaagaaaagtggtaaaatcaagtcttcttacaagagggagtgtattaaacttggtctgttggatgtttgaacttttggattttttggtgtggaaccttgggaatgccagtgggtttcaaggctgtgctaagggataatgaggggcttggctttggttgggtaaccaaaatgaccttttggacagtggggcaaaatcgagaggttgacaagggaattaacttttgcagtgggctaaaggactggggaattccaggtacacataatgtcatga

SEQ ID NO: 551895 - DNA, 438 bp, Homo sapiens
gaattccggttctctggaagagaagtgctgtaacggctcaggaggtgctggagggcttcaacatggccatcggttgctggcgtcctctagtcatgactgggacgatgctgaggaggaggagagggagaataggaagaacaggcagcagaggaagaggcggaggaagatgaggaagaggaggaagaagaggaggaggaggaggaagaagagcctcagcagcgagggcagggagagaagtcagccacgccctcacggaagattctggaccctaacactggggagccagctcccgtgctgtcctccccacctcctgcagacgtctccaccttcctggcttttccctctccagagaagctgctgcgcctagggcccaagagctccgtgctgatagcccagcagactgacacgtctgaccccgagaaggtggtctctgccttc

SEQ ID NO: 551896 - DNA, 345 bp, Homo sapiens
tgtcccgaggactttaacccaaataaccctcactaaagctatactctttcaaatctatttgtattagtcgacacaagagtttacagcaaatgcaaactatacctatgtaggtacatgacacttgtctcactcgaaaataactgaaacagaactcaaagaattctcatatgggaaaattctacatctaaggccgggcacggtggctcacacctgtaatcccagcactttgggaggcttaggcggcagaatggcatgaacctgggagttggagcttggagtggagccaaggacgcaccacggaactccagcttggcagcctgggcaacaagagcgagactccgtctc

SEQ ID NO: 551897 - DNA, 183 bp, Homo sapiens
  misc_feature (24)..(24): n is a, c, g, or t
  misc_feature (120)..(120): n is a, c, g, or t
  misc_feature (123)..(124): n is a, c, g, or t
gctcggacgatcatcctggggacngtacatggtagtaacctattgatggcaattttgctgactgtggaagctgactcatccaaactccatgccagctgtcaacattcacgtatgaagtcntcnngtaattactattcgtccgaggggtaccgatgcctcgaagttctgtaactctgtggctca

SEQ ID NO: 551898 - DNA, 346 bp, Homo sapiens
agaagcagagacctattagcagatgctaaaatggggaagcaagagtcagcaggaaaacaacagctacagaaaggagaaacagtggaaaacaggagaagcagaggccatgaacagatgctgaaagaagggggaagtagggcagagacagcaaaagtgaaaacagcagcagcaaagagcagcaccggaaacacggacgacacgcagacgaccaaattacgcagatgctaaaactggggaacgcaagacgtcagcaggaaaaaacacagctacagacaccggagacaccatacggaccacaaggcgaacgcagacggccactgcctatttctggcggagagcaggggta

SEQ ID NO: 551899 - DNA, 219 bp, Homo sapiens
ctgcaggcggccgcaatagtgattaattcgcggccgcgtcgaccatgtcgcacttgttgaggaagacgatgatgtagggcacacccacctgacgcgccagcaggatgtgctcgcgggtttgcggcatggggccgtcggcggccgacacgaccaggatggcgccgtccatctgggcggcacccgtgatcatgttcttgacgtagtcagcgtggccgggca

SEQ ID NO: 551900 - DNA, 421 bp, Homo sapiens
  misc_feature (79)..(79): n is a, c, g, or t
  misc_feature (133)..(133): n is a, c, g, or t
  misc_feature (159)..(159): n is a, c, g, or t
ataagttaaggaataaaaaagaagccatggtgtccattaacgccccatttcccgccatggttgggtaataatgcctccnccgtaaaagatccaattccctagggggtaccccatgaacgatcaacccgaacgncccctatccgcctggaaggtcttgancttgaagatggttggacagtaggtaagagaattgtcacaggttcagagggcggcggttcaggtggtttcttttcggtatcctatgaggttcgtaggaatggtcaagaagcattcttaaaagcatttgatattgttaaagcacttcaaatagcagcacaacaaggtaaaacgctaatagcgcgctgcaagaacaggctcaagctttcaactttgagactgcactgcacgatttgtgcttgggcgccaaaatgagaccgtgttg

SEQ ID NO: 551901 - DNA, 449 bp, Homo sapiens
  misc_feature (69)..(69): n is a, c, g, or t
  misc_feature (446)..(446): n is a, c, g, or t
cactaggggaacagggccctgaacttcagcctggagggaaacctgcggggcagccggcactctggaggnacagacaggccacccggtgcagacaggagagggaggcagggggacagaacggaagacacctggggtggatggaaggtcagtgcccttgggcactggtatctgtcttccctgccacagctagatcaggcttctcaaccagttggctgtcagggccagagtgtactccgtaggcgccatggcagtccccatgaaatccaccaggtgtcaccaggcagcatacaggtaacaggcctggaaggtccccaacagcccagctggacatgctgagacactctggggctcctcattcagtgggacaaactgcaggacccagtgagggaaatgggaacataccaggccgagcagtatggctaaatccatttattccaaaatcaaangca

SEQ ID NO: 551902 - DNA, 453 bp, Homo sapiens
  misc_feature (2)..(2): n is a, c, g, or t
  misc_feature (74)..(75): n is a, c, g, or t
  misc_feature (349)..(349): n is a, c, g, or t
  misc_feature (401)..(401): n is a, c, g, or t
  misc_feature (451)..(451): n is a, c, g, or t
angtttacattagggttcattcactcttcgtgttgtacattctatgggttttgacaaatgtcataacatgtatnnataattatagaaatatgtagaagagttttattgctctaaaattcctctgtgctccatccattcatccctttcttctcccagtctcttgaaaccactgctactgttacggtctccatggttttgccttttccagaatgtcatatagttggaatcataccgtagaagccttttcagattggcttttttcgcttagtaatatgcattttaggtttctccatagcttttcatggctaaaataagctcaatttccttttaggtgctaatattccattgncctggatgtaccataagcttatttatctgcttatttacttgatggcatcctnggttgcttccaatattttgcagttattaataaaagctggctataaacagnaa

SEQ ID NO: 551903 - DNA, 559 bp, Homo sapiens
atcgatagcaccaaatgaagaatgggatcaaggggagacattaccttcccaaatggacatacagtagttaaaatgatttcggcaatgataataattagataattagattgtgactctgtaggcaagagacagaaaccggtctcagctaagtatattgggtagtgaaatgcgcttagttgtaaagggagtgtgttctcagcagttatatttcaaatgggttgaaaaaaattactggaataaaattgtgcatcggatgggtaaagttaagccagcaaaagggattgacctggggctccatgaaagccggcagtcctaagtcgtattctcaatcccagcatcaccattgtgcctccatcaacagattttaatgcaagccaatgcgtttagagtacaattccgtggtgaataacctttaaggttacatttgccttttccctgcttcttgcaaacagtgcgtaatccacaagcagatgggttggctgtagaggtgtacaacagccatttgtgccaggacagtgcggagagggaatatgagatctgtgtgctaatgagctgacgc

SEQ ID NO: 551904 - DNA, 709 bp, Homo sapiens
tttatgactctagatcaccaacttggtgtccatgaccatgcattccaggaatgggagcatctgtgacattcaatattggtggcctggtatgcccctatgagaggcttcatatataattattattaatctaatgaggaaatatcactgaaatctgtacttgacctgtgtaccaccaaatcaataattatgtcatgtgaacatgtgttagcttcattactgtaaaacacttgctttcctttcccaggtctgtttagtgtttatatatatccagagaaatatgataactttgaagatgcccagacactctagtttcaattagcaaacatactagctatttattactttaattagggctgaaataggaagccagtgtctcaaccatagtattgtctctttaagtcttttaaatatcactgatgtgtaaaaaggtcattatatccattctgtttttaaaatttaaaatatattgacttattgcccttcataggacaaagtaatatatgtgttggaattttaaaattgtgttgtcattggtaaatctgtcactgactatagcgaggtataaaagtacgcagttttcatgtccttgccttaaagagctctctagtctaacggtctagtagtaagagatctaaatgacatttatcatgttttcctgcagcaggtgctagtcaatcccaaaattcacgctgtccataataggtgctac

SEQ ID NO: 551905 - DNA, 118 bp, Homo sapiens
  misc_feature (58)..(58): n is a, c, g, or t
  misc_feature (90)..(90): n is a, c, g, or t
gcaaagactgtctcttttcacatattaaaaagaaaaataactaaaatctcacgtagtntaatcagctggctttctttggctttagtcatntcttagctgcttaaaagtttgtttcaag

SEQ ID NO: 551906 - DNA, 100 bp, Homo sapiens
actcccctcctgagctctctggtatgacatctctgtctctctctctgctctcaagctgtgtctactcatttgaacaaattgaattattagaggaaaatat

SEQ ID NO: 551907 - DNA, 339 bp, Homo sapiens
gtacccttctctaaacgtcaggcctggacttaaaagattttttaatacctccttcagtagtccaggggcggtcgtcacgcctgtaatcccagcactttgggaggccgaggcaggcggatcacaaggtcaacgagatcgagaccatcctggcctacatggtgaaaccctgtctgtaccataaatacaaaaatttattgggcttggtggtggacacactgtattccctgctactagggaggctgcggcaggagaattgcattgaactgggcggcggagatagattaagcctctactctacaacatgtgactgtacttgaaaaagtactcagtaataatttt

SEQ ID NO: 551908 - DNA, 516 bp, Homo sapiens
ttctttgattgagacagagtcttgatctgtcgccaggctggagtacaatggtgcgatctcagctcactgcaacctctgcctcctgggttcaagcaattctcatgcctcagcctcccgagtagctgggactacaggtgcatgccaccccgcctggctcattttttgttttagcagacacagggtttcactacgttggccaggctggtctcaaactcctgaccttgtgatccattcgcctcggcctcccaaagtgctgggattacaggtgtgagccaccgcgcccggcccaattttttgtattttcagtaggcagggtttcaccatgttagcgaggatggtctcaagctcctgaccttgtgatctgcccgcctcactctcccaaagtgctgggattacaggcgtgatccattgcacctggcctactgttggtgttttacacatttttttccagaattccactgttggacatgtgtcttaaggatatgtgaaaatgaatgcagagaaaagatgtttacc

SEQ ID NO: 551909 - DNA, 684 bp, Homo sapiens
  misc_feature (633)..(633): n is a, c, g, or t
  misc_feature (643)..(643): n is a, c, g, or t
agagttagagagagagatagagagagagtgagagagcgagagagagatctgttagagcagatgaatgacaaataaattaggggttgctattttcatgtcagataaaacagactgtaaaccaataatgatcaaaaagaacatatgatggcattacacaattataaaatattcaatccaacagaaagacttaactattctaaatatatatgcacccatcatccaagtacacgtatacataaaactggtttttcaagatctattaagagatttagataaccacacaataacattgggggacttgaaaaccccactgatggtattaggaagatcattgaagcataaaactaaccatgatattcaggacttaaatttgacacttgaccaattggacctaatagacgtctacagaacactccacacaatagaatatacattcttcatatatgcacacagcatatactataagattgaccaaatgctccaccataaagcaagtttcaacacattcatagaaattgaaatcatatgaactatattctcagtccacagtgcaatatagaaatcaatgccaagaatatctatcataaccatacaattgcatggtaacccgacaacttttcctgaatgactttngggttaagantgacacttaggcatacattaacaccatgaagcttgccagcc

SEQ ID NO: 551910 - DNA, 427 bp, Homo sapiens
ggaggctagattgtttcctggtactgtcactgccactggggctttgatttggaggaatggggcaggggactatctaagcgcttccatcctaaagccataatgaaaatatcttcctctcttccccaatcctatacaaaatactaagtggtttctttgctccacttcctaccccttagttaaataggggtggatcacccagccccatgccttttttatttataggtttttaaattatagactgcataacccagaggtttgatagttttaggacagacataggtaaaactagggtaaaggagaggaggctctttttaaagcagccggccgcctataaataacctggggaaaccaaagattttgcaataggggatcatccacacatactactcagagaggcagataaattccccctcctcggcaacagcac

SEQ ID NO: 551911 - DNA, 921 bp, Homo sapiens
gggtacagaatgaggtgcggacgtgctgtaggccggaatgtaaccgggtgtggcctctgtggatgaggacgaggatccgtgccggaaggaggatggtcctagaatgggttcccgatgtagagtacggacgcaaacggcgaggggagagtagcgacaaatgtcatggcctcgtgggctcgagattcccactccacaataaatcaaccggggtatttgagggtgctgggaagatacgaccaatttcggaagtatatttttgacgacgaggacaacctagatacataggagtaagccgggtgcataggtaagagtgaagtctcgtggggcaagggaagatgctgctgtacgaaaaatccgatacgcctagatcaggacgtaagggtagagacgatgctccgtagtgaaaagacgtagtgctggcaagttgaggaaaagacgaggttggcgctctggcaaggccccacggggaaggttgacagagaagctgttgtctatagtttgttgtaccatcgggtttggtaagaagaattgtccatgggatcattgtatctcccaggcatttcatctcttaccgtatgaagttccacttatcctagaatgttacacaagtgaggcttcactcgaatgtacatccggtcatagcaacctatcgcggtattaggaccgcactacaactgaggagaagcaaccacagtttgtggacctgcttcggatcctcgaaaagatgtgaaaccggacgaaggggagggcaccgacccatgcgtggtatggcgacagtggctgcacccaggatgtccaggaaagcaggcaggcacagacgtggaaacctcggcaagagaaagcccggggcccgagggtccaacagtcgagggactcggggcacacgggcaattgccgggcaagcagcaatcatcccgggcc

SEQ ID NO: 551912 - DNA, 255 bp, Homo sapiens
ttcgtgcctcatagtgtaggaccgtctcgtgactccaaaatcaggtatgaatctggggaccaggtggctgtgtacccagccaacgactctggtctcgttaaccagctgggcgaaatcctgggtggcgacctggacgtcatcatgtgtcgtgaacaatcttggatgaggagtcctaatcaagaagcagctcattcaccgtggcctacgttcctacacgcacggtcctcaccttactaactgaacacgagtgtacat

SEQ ID NO: 551913 - DNA, 134 bp, Homo sapiens
  misc_feature (62)..(63): n is a, c, g, or t
  misc_feature (71)..(71): n is a, c, g, or t
gtgatttagaggatcccgcatttgcgtccatcagctagccggatggtgactttgaagagatnnattggacngaggaaaaggagtatgagtttgatggctttgaagaagtggccctgcctgatgggagcaagatg

SEQ ID NO: 551914 - DNA, 298 bp, Homo sapiens
atcccaggaagccgcgtctggttgtttctgagccagggaggggagtcatgtgtgtgctgggcattgggcccgattgtgatggggcccgaggtggtgccgctggctgcctggtgcagggcccaggagtcacttgacttgtgccagtggcagccgactgcctggcctcgggaggcagcttctggcctggacttggagctggagagagcaggcagggtcctcgactcgggaacagaccgggacacggtgcctgggttggacatggcattgggtgttcacaatgctgccttgggtggctccc

SEQ ID NO: 551915 - DNA, 864 bp, Homo sapiens
  misc_feature (624)..(624): n is a, c, g, or t
atcatgagcatcatcacaaacatggacatcagcaccttgggagcagtgagctttcagaagaatcagacaaccaatggagcaccgaaatgctcctactcatcctgctcctccaggccttcatcaccagcataagcacaagggtcagcataggcagggtcatcgccagcagaacacgatgaatatgcctagtcgaagtgatagatgttactatgatgtgacaaaagaatgctctgtcgaaagagatgtataaatcaattactctgtagaattgtcccacagggttcagacgatgggctcctaggagctgatgctgccaatggtcgacattcgtgactactttgaaaacatacatgggtctgcagatcctcctgatctacgctgtaacacgaacacaacctctccattctgtactgttaggctgagcagggaacgttcggggcagaccgatgatagcattaagctggaagtctttgatcacgagatcgtttgccgtccaggctgtcctgagcaaaactaaagtcatggcagtcgtttataatccgcacgagaaagccaggtgccaggttttgactgctcgaagggaatcatggcataaataagtggagaatggatcttcaggacctnaaaggtatttgagagactagaaccaattagtccgcaatatgaagtctagacacacatttcattttcccatgcattttctattcaaactaccaaaactttacgatgaacgccaagaaaagtagaagccttagcattttgttgcaaaacccctgggggaggaagaatctaactgaacttggggtttccaggatttttaacattttttatggtcccttagaaaattttgactcaaaacccata

SEQ ID NO: 551916 - DNA, 411 bp, Homo sapiens
ccagcctggggaggcccacgctgtgaccaaccgggttgggggccagcgcaggtaacgtgagctgccccgtgagccagaccggaggcctggggtgcccagatcgatcatgcactgtcctcatgccacggctttggtggggttggtctaagccgcacggcaagtttttgtaaagattgaggactctcagtctggggcgtcccgccgcagcctttccaagcctgcgtccagcgagcgtcacagcacaacctgcaaaacggagctgggtgcagtggggctggcatggactttcatttcagagattcggtttttaagaagatgcagctaatgtgttcttttttttttccaatgatttgtaataacattttatgactggaaacttttttgtcaacactccaataaacattttgattt

SEQ ID NO: 551917 - DNA, 177 bp, Homo sapiens
  misc_feature (53)..(53): n is a, c, g, or t
atgaccgcaccactgcactccagcctgagcaacagagccagaccctgtctcanaaaaaaaaaaaaaaaaaaaaaaaattttttttttggcccaaacccggggcccccccctttaaaccccacctttttggggggtaaaaaaaaaaggcccctttgcccccggggtttaaaacccccg

SEQ ID NO: 551918 - DNA, 265 bp, Homo sapiens
tagagttacgcgggtgggtctgctggcttcactcactgtgctgtttcctttgagtggccgcttgggagctccgggcatgtgaaggagctgcaacatgagaactaatgaaccaaggcggctgccaccatggagggaacagaacgcaggctacaaccatgacgtctgcacagtgttagtacatgtcattgtggtttcgttctcactgtggttacaatttatttcctggagacacttaaaaacagtgtttgcatacccgctaaactcg

SEQ ID NO: 551919 - DNA, 433 bp, Homo sapiens
gctcgacctagaaatcgacaactgcacccgcctggggtatgacgcggtgattgtaggctagaacgataccgccttgcctgactgttcccatcacgaccttgagcatgcaaaaaacccggcgctggccaggacagcgtctacgcttcaggacggtgcacagcagacccggatcggcggcctacgcagcccgtccaacgcgacaggcacttcacttaacacagctgaaggataaggatctatggacgtatttctcggcagtatccagatgttcggcttcaacttcgcccctaacggttgggcgctctgcaacggccagttgctcaatatccagcagtacaatgcgttgttcgccttgttgggaacgacctacggtggcaatggcagcagagcttcggcctgcccaacctgcaaagccgcctgcccattgcccagg

SEQ ID NO: 551920 - DNA, 154 bp, Homo sapiens
acaaggaggcacagagaggtggattgagtggtataaggtcacgaaggtaatcggtgacagcttggcttgtgattttttttttaaaactactctccttcctgtgtaaaaaagaaacagcgtgacctcgtgttagcttctcgcttttcaaggccac

SEQ ID NO: 551921 - DNA, 372 bp, Homo sapiens
tacagctctacatgcactggccgtcgtgtacactaacatgcgtataccatgcactggccgttcgttgtccactaacaggctataaccatgcactggccgtcgattaccactaaccagtctatatccatgcatcagtccggcgctgtacactaacagctatccccctgcactaggccggcgttatccacaaggagccttaacgatgcattggctgtcggtctactcttatccgcaatggcctactgcaattggcgacccgtttatccagattacaattaatcagagtgagtctgacttagtcagtgatctacaccattactcaattcttagaaattagaaattgctgtagctgtcttcactataacttaacac

SEQ ID NO: 551922 - DNA, 897 bp, Homo sapiens
  misc_feature (828)..(828): n is a, c, g, or t
tctcgaggtttcttttttattttttttcccaaaaaatggatatttttttttattcaagaaagtgcaaataggaaaccaaaaagggacccccagtgctgggacaatatcatggttcacccctccccaacagaaacgagggggagagaggtgggccccttacaccctttatatgagtcagatccgtggcgccccctttgctcactcttgctgaagacatccaattgtgggacagggccccaccttctccctgtgtgacatgggggctacgtcggagacacccgagccttgcacagtgccacaagccctatctttcccaacaaaagagatatcatagcgtggtgcagcaggagactcatgggatgcccaagaacaccgtggacgagctaatcgagaagtgatagaacctctttcggtggctcgcttgtctaaaaccaaacgaacgacaattagaacagggatttgtccacacaacaactgggggaaccttttgagacaaaccaaaaaaaaccaaaaaacaacattgtgtccacacagaaaggcgtacgtctctggtgaggaaccaaagatagagaaaacatctatgtgggaacccacaataaaacacattgcgagtgagagcgcaagaagaaaggagaaagcaacagtgaacggcgtagtgataataacagtaacaaacaaggagcaaagaggagagaaagaagccataccttactggatataattggttggtcggcccaccaactactagacataggcacgcgcggctacaaaaccactcggtcatcgaatcttgcgcgagtacacagacaaaagtgtagagtgttatcnagggtgtcgactaagcaccacaaagccacacataatcagagttgtggttgccgcgcaccacacaggtgg

SEQ ID NO: 551923 - DNA, 582 bp, Homo sapiens
gagaatgacagcctagcaggtgcagctcagagaggttctgagacggccatgaatgatgaggttgcggcctttgtgaacaaaggtaagcagcatgagtaatcacgatgcccttccttgatctgccgccgaaaatacaagagcgcgttgtttgctcgattacggctgccgtcaagtacgaagtcccagcaaacattgtattggcagtagccgaacaagagggcggcaagccaggccaatgggtcaggaacacaaatggcacacatgatgtgggaccaatgcagttcaatacggcctatctggtcgagctacgtcaatatgggatcacgccacaagacgtagcacgaggtgggtgctattcctatgatctggctgcgtggcgtttgcgtggtcacttacgtaatgatcaaggtgacatttggacgcgggctgcgaattaccattcgcgtactccgcaatataatgctgtttatcgcacctctctcattaagcgtgccggtaagtgggaaaactggctcgtcgctcgctttcccacgtttgacaccatacaagcgagtaagccgggtatggcagctaatacgacac

SEQ ID NO: 551924 - DNA, 234 bp, Homo sapiens
tctacgacgactcctttacctggccattaatcaaatttgagcgagttgctcatattcatctggcaaatgagaataatccatttccgccacagttgcgccaattcagcagaacgattgacgtgcgcatttggtatattgtcagggggcgtttgatgagcaagcatggttgctcattgccattctgaaacctgaacctcataaactggctcgagataacaaccaaatgcataaatt

SEQ ID NO: 551925 - DNA, 1450 bp, Homo sapiens
cgcggtgatagatcagtctaaatatagtgacgtctgcggacctcgtaatcaaacttgttgtggcattggctcctcctggagaggacaacccccgccattgatgaagcttttaaagggccccttataattgggggaacatcacccacgttgcgttaagacgatatatgggatattatagggccacgcttgtcaaaacacgtaaatggtggcccttttagaagaaacccctgataggcccacaatgtgtccccgtggggcccaactgatgacgcccgggggaagcccccgcgaagtgaacttttttggaaaaaataccacgcgatgaggccttggcccaattttgtgtgggaaaagccccccccccgtttctttcatttagggagggaattgaaaaaggtgacactgttataaaaaaaatgggggttcgcacgatgggtggccaccacaggcgtaatacgaggaacctggcgctttggaacaactagtgtggctctgttaaaatttttcttgggtgtgttcccacataagagtttggcttcccgcacatataatccccgccgagatattttatagggctccccaacaggttttcacaaaagttgtttctccggtaaaaaatttgggcctctttttggaatccccacagagagaatatataggggagagaccccaaattcctttataaagcacacatattttcttttaaagcgcttcgggtaagggagtttgatcacacagagaagatcatatcatggagagttcgaaattgtgagaaaggggggagagaaaatgagaaagattttcgtgtgttttaaatgtgttataaatgtataaaggtagaaaaatgtagagttttccgcgggagaattggtcttgaaatatattgggtgcacaccctatgcgcacgagatagatggtaatttagacgtgtttgtgtgcacaatggtgtatattatattgggccttgagcacactttgttgagaggtatatttctaatggtagtaaaaaataataaataatggtagatattataaaataatagtatatgtggcaataaggagcacgagacttatgggagagtgttttgtgtttatagaggccacgcttataacacttctgagaagtgtttctataatggcactctaaactcttgtgttagaaggtatactgagaatagacttaaataatggtggggaaaccctctttggcgctggttcctctatgggcttacacacaatgtggcacctcgagatcgctgtttcactagtgaagaatatcccaaatggtagcacccacttaacgacggtgtctttgaaataataggcactgtgactcttataatttttctatatattgtgaaaccttggcatagtttcttgttttgttatataaaaaaattgtaaaagtttaatatttgactgaaatttaacgagcgaagatgagcaccca

SEQ ID NO: 551926 - DNA, 468 bp, Homo sapiens
cctactactactaaattcgcggccgcgtcgacgaaatctgcaagtgtgtctttaaaattcaactgcctgggctgggcgtggtggctcacgccagtagtcccagcactttgggaggccgaggcaggcggatcacctgaggtcaggagtttgagaccagcctgaccaacatggaggaaccctgtctctgctagaaatactgaaaattagccaggcgtggtggcggcaacctgtaatctcagctactcaggaggccgaggcaggagaatcgcttgaacccgggaggcggaggttgcagtgagccgagatcatgccattgtattccagcctgggtgacaagagcaaaactctgtttcaaaaaaaaaaaaagtccaagccgccggcaatttagtagtaagaggcgacccgggaattcccgaccggttccttggagcgttccaacttttcctatagggagttcgatttgaaact

SEQ ID NO: 551927 - DNA, 365 bp, Homo sapiens
tctggaggatgaggcagctgctcagtaagacacaaggtaacattgacgactcgctcattggtggaaatgcctacgctgaaggccgcgagggcgaaggtaccgaaagcacagtaaccactggagtcgatattgtcatgaaccatcacctgcaggaaacacgttgcacaaaagaagcctacaagaagtacatcagagagtacatgaaagcaatcaaagggatacttgtagaacagagaccagaaagagtaaaaccttttatgacaggtgctgcagaacaaatcaagcacatccttgctaatatcaaaaactaccagttctttattgttgaaaacatgaatacagatggcatgcttgctctattggac

SEQ ID NO: 551928 - DNA, 392 bp, Homo sapiens
  misc_feature (376)..(376): n is a, c, g, or t
  misc_feature (383)..(383): n is a, c, g, or t
ttaagaaaagaagcctgggcagagcacggtggctcacacctgtaattccagcactatgggagtccgaggcaggtggatcacctgaggtcaggagttcgagaccaccctggccaacacagtgaaaccccgtctctactataaatacaaaaacatcagctgggcgtggtggtgggcgcctgtagtcccagctacttgggaggatgaggcaggagaattgcttgaaccttggtggtggaggctgcagtgagctgagattatgccactgcactccagcctgggcaacagagtgagactctgtctcagaaaaaaaaaagaacctctagtataatgttctaagtacaggggataataagcatccttctctttcattcttaanctttcangggataaat

SEQ ID NO: 551929 - DNA, 251 bp, Homo sapiens
acactgatgatgttcatacctccttccagagaaatctatgttttcctcttgaggtgattcgttgtatgtcaatgttaatggcatggtatagaacatataagatgatcaagatatcattaaatgtcaaaactatgactctgttcagaaaaaaaattgtccaaagacaacatggccaaggagagagcatcttcattgacattgctttcagtatttatttctgtctctggatttgacttctgttctgttactta

SEQ ID NO: 551930 - DNA, 101 bp, Homo sapiens
tggtcgggtgcggggagccgggggccagagaactcaggaggctggagctccagcgtctgttttctagtctccggaagagcactcatcatttctggcccacc

SEQ ID NO: 551931 - DNA, 943 bp, Homo sapiens
  misc_feature (232)..(232): n is a, c, g, or t
  misc_feature (270)..(270): n is a, c, g, or t
  misc_feature (335)..(335): n is a, c, g, or t
  misc_feature (431)..(431): n is a, c, g, or t
  misc_feature (514)..(514): n is a, c, g, or t
aagtagcccctgttaaagatttgtggacctacgttgcaaggattataatatctaagatgaactatatgtatattacatatttatattacatgatcttacgtgccgcatgccattaagcgcgctaccaacacagcatcgatgacaatcccacctaggaccaacgtctagggcaatggccgtagcactagggttgggatcatttgaagtgtccatgcgaaggtttcgtagtaanccatgtcctagggcacaatggctgcgttggtaaatccnaccatcgactgaacttaatgtgagtaccagatgacattaaggccatcaactactgggtggaatgnctgctgaccatgtatagttcgtacagagtctaacgtatgtgcgaagtggtgtgaccgggcattgactatgaaatcgcgcgtagtaagtgtccagangaggttggcagatgacgttcccaagggggctcgacagccaccctggcatctgacgcatggggagtggtatgagtatcgagagnaacgtacctaatcgtgcaagagaatcgagagcagaatatagaaggaaaccaaaaacacacggacactatgtctattggggtgcaacaatcgcgccaactcttcgtaacatacactatataattatctacaaaattgtatgtcctggggggcagtaggtggggcaggaacagccggttaaagtcgtcagcttgactcagagggaggggctgcactttcgggggaagaaacttcggcgttgagaacccatgaggtgagggcgggatggctttcgcccgatggagcatgaagaatctgtggcgcagctgccactttccgcaggtctagggccaatagtacacaaagagtttctgtcgtcgagacactatagggggaaattataattaaaataggtgatacctttatgggtcaatttaaacctataaaaccag

SEQ ID NO: 551932 - DNA, 332 bp, Homo sapiens
tactatctccctacaaatctccttatactagcattcacagacacagaaccaatcatattaatatatcttcatatcgaaaccacacttatccccaccattggatatcatcacccgatgaggcaaacagccagaacgcctgaacgcaggcacatacttcctcatctacaccctagtaggctcccttcaccctacatcatcgcataataatgaatcaacacaaccaccacacagactacttattcgcatcatccctctactatttattaaccaaatcaacaacaaactcttcagctgattccccacactatacatccgaacccctaacaaaaccc

SEQ ID NO: 551933 - DNA, 104 bp, Homo sapiens
acgatgtgcacggatatctatgtgtggtggtgaatgattatccacgtcacgaaataaatataagctacctaattgtgcccctatttggtccttcccatatgcta

SEQ ID NO: 551934 - DNA, 428 bp, Homo sapiens
cccctacatgtatactcaagagaaatgaaaacgtgtccacacaaagacttatatgcaaatatttattgaaaccttattagcaatagccaaaaagtggaaacaacccagatggccatcagataataaatggatgagcaacatgtggtatagccatacaataaaaatattattggtggtaaaacggaaccaagtactgatacatgctagaacacggatggcccttgagaacattatgctacgggaaagaagccagacacaaaaagtcacgcattgtgtgatttcgtttctgtgaaatggccaaaataggcaaatgcatcgagacagaaagtgggtcagtggttgccaggggctagagaggatgggacatttgaaaggcgactaatgagtagtgttcccttgggggtaatgaaaatgctcctaaaattgat

SEQ ID NO: 551935 - DNA, 443 bp, Homo sapiens
  misc_feature (101)..(101): n is a, c, g, or t
taagcatatgggaattatttctatcctactgctcaaggtcatcgccaagatctgattttcaaaatccaaaaaattgcaaccttcaggcataaatgggctanggggccatgtgatgaggaatatgggcagcttttgtgatcttctcatgccgtataggggctgtcctggatatggcagaccctgattataaatcaataggcatttgagtgaggtaaaaagaaagcagttttattagggttatgtactattgtaggtctccccaagtttatgctgcttcccagagggtccacatttttctgtatgcactagaatatgatgaatgacacacacctgagaagttcacattaatggcattgtgctctctgttactgacaccatcaacatcgaaataaagcatgttcttctcttgtcaagaccactgtaaggagtgagactccgtctca

SEQ ID NO: 551936 - DNA, 1172 bp, Homo sapiens
ctgatgttattcacaccttggagagttgcaactgccacatacgaaattagtctcatagtgtagtgaacttcaaccccaaaattttaaaaatgtattccccccagttttaaattgccttcgaaatttaaaacaaaaaatttagcacttagctaccagaatccaaaaatacctagatttgtcggagaacttagttacatacatagaagacatgacatatggtttaccactgtgctgtgtgtaggatgttagaattatctgtcgctccgatcgttgtagggtgctttttcttaacatgtggttctacgttatactgatattgcttaatttccatcttccatgcaacctcagagctgaataaaccccttaaattggctgctggttcgaacaaagtctaaagggtttatccaggggtagtcaacctcgccaaatatctcacaatcgaaatcctctaaagtcacgcaagcattacattctctcgtgcattagaaatatttggcggaagcatcggctacaggacggcagggggattctacacaaactataaacagccaagttcttgcatacttcctaaggtgcatattcagtcaacatttcacagcgggatcgacacgtccacatgtacatctcaattcagccaccaagacttcaggcgcagctcacagcaaaatagcacaggaagtaacactttcacaaactccattacgataggtcgcacactagttgaccccttaggatcacttctgactatttcattgatcatgaccctctctcgtagaaaccacaactggctatgctcgttaacaaagctggaaaggctgaatctacaacacagtcactccacaacttaacgaaagtttactcgcacacagacttgccatttctttaagcacaccgcactatcagcataagacacgcggcgccagcgcgcacatcaaaaattctaccccccatatccgcccctcgacctctgggaacacctcctgccaccgcaacaccttcactgtggcccacctccgcacgcgcactaacgctccaaatcaacagcgtcacaccaactagttggggaagccaacaccagcaacataagcgccacgcccctcataccacgcattatcacgccccgagccgcatccagttttaggacgcacgccccaccacctcccacgctgccc

SEQ ID NO: 551937 - DNA, 1646 bp, Homo sapiens
  misc_feature (244)..(244): n is a, c, g, or t
ccagcgtcagtggcagtgatgtcacgattgagtgctccatctacagtacttgcctggaacgtagcacgaatagctgaacaagatcgtacatatctataacactagcagtctagtatcgcctgggaaccacaggatagtagttcctgatatagtggttacgagagaagtcgcctctccgcgaattctaggactcgctgtgcttcgcttacatagtcgcgagacaatttgagttgactcggaaggnatcattgcgtatgacgatggacctgtgtgtgtggcttggagaattggagtcgggcagcggcgtctgggatgtgggagctcctctaccagttgtgccatacagttggtgatcgccaatttggaggagtcagcaagatcccttggaacgtcatgagtctcactgggtgagtcgagctccattgacgggtcttggaggtgcggaccggcaacaatggaggaaatctcctcataatgacgctatctcttgctgcgtgttgctccgctgaggtgaatcgcatgccgcgcaaacagtggggacgtggaaccgccgcgatttgcctcggcaaggtaaggtttgaccgagcgtgcaggtggtactagagcctagcgaaatggtatagggcaagggcgtccctaagatagcttttgcacatagagatagcaattggcggtggcaagcgccgcgcaaggcgcaccccacattcgcgttccaagtcacattttgcaagaaccacgggtcacataatgccttgtcctgcatctgacagatcgagaccacaagccatagtgtgagccatgtgaaaccccacttgtctgtgaacagaacctggagagaagtgcccccaaggaatttcgaggggtgccataggtcctggagataccttcgggacctagaccccaaccaatttttgcacagaccggtcccgtggattgactgagggtaaaggtaaccctataatcacggttacttggttacttagccacatttggggggtggtgtggcgcggaggtttcacacatagaggagacacagggtacccattagttgggggagggaactacataggcgcccataattgtgacgtttaaaccaaagaaaattctttgtgtggcacacaaagaagtggccccgggttgggaagagtgacgcctcaagggtccttaaggaaggcccacgagaaaccactgggtatcgcccaaagtggctaaggaccggcacttgacatcaaagggagggctaagcctgagcaaaaaggggtacaatgggggggaaaaagccttgaagatggggcggggcgtcacacatcgacaaattgtgtgacaaccttatttacacacgtcaacgtaaagcaccacagtgcgcccccacagccgagcaaaccgggggacaggggggttaaccgagccaccagggctcaccctatcaggaaacaacacgctaagtgcacggggtgggaacaccactggtcacacggcacgacgtccgacacccacacaaaatcactccaacactggatcgcgagaacagctggcggaacacccagcagcggagacgatcagcatcgacaacggatccgatcatcagcagagccacacacgcgacctatcctagccaccgagaaataaacatctctctcctcctc

SEQ ID NO: 551938 - DNA, 791 bp, Homo sapiens
  misc_feature (1)..(1): n is a, c, g, or t
  misc_feature (212)..(212): n is a, c, g, or t
  misc_feature (283)..(283): n is a, c, g, or t
  misc_feature (319)..(319): n is a, c, g, or t
  misc_feature (357)..(357): n is a, c, g, or t
  misc_feature (362)..(362): n is a, c, g, or t
  misc_feature (391)..(391): n is a, c, g, or t
  misc_feature (503)..(503): n is a, c, g, or t
  misc_feature (558)..(558): n is a, c, g, or t
  misc_feature (561)..(561): n is a, c, g, or t
  misc_feature (564)..(564): n is a, c, g, or t
  misc_feature (567)..(567): n is a, c, g, or t
  misc_feature (573)..(573): n is a, c, g, or t
  misc_feature (592)..(592): n is a, c, g, or t
  misc_feature (641)..(641): n is a, c, g, or t
  misc_feature (646)..(646): n is a, c, g, or t
  misc_feature (652)..(652): n is a, c, g, or t
  misc_feature (654)..(654): n is a, c, g, or t
  misc_feature (664)..(664): n is a, c, g, or t
  misc_feature (697)..(697): n is a, c, g, or t
  misc_feature (728)..(728): n is a, c, g, or t
  misc_feature (746)..(746): n is a, c, g, or t
ngctatggttacagataacacacatctcaccctatattccgtgctttccatgcagtcccctaagcagactcagccaccctttccctccagtatcacttcttgtcttcctccttcattgtacttcttgccgtccttggtggcctggagagcgcccaggtgatgcccatagacatttcgaatggcttcattgttgggatccacacctgggaggntctctaggacactctgaagggactcggggtcctgcatcacgtcgtaatcatcctcctccttggctggctcngatgtgtccatagctgagctggcatcaatgtctgcngattccgcctggccaaactctgctccctgcagggacanctgcntggcataagcaatctgctcttcctcagtnatactgcttaggtcaggaagcccagttcggccaaactcttgcaggctgatggtcatcttcacgcagcgcgcatcgctctgagtctctttcaccttcagtcccagtcgtagcnatcccggcctcagcagcagaagccgcagccgcccgccgggcctcctcctcctgcngcnggngcngctctnccatgagaaacacgaaggnccaaggccagcgcaggatcagcactgggatctactccaaattcaaagtnactcngcaccnanacccagcatngcaccaccttcaccagcaaaaatcggagaactnatgagagcctcagccaaactgggcccaggangcactgttaccagatganaaccggttccatctttgccattaaacgtgtttacaaaggctgtaa

SEQ ID NO: 551939 - DNA, 307 bp, Homo sapiens
acggttattgtcattggacgcaaaaatatcgttgacggctaaatacgggggtggcaaagagtttgcgcccgcgttcagtggatacaagcagtataagtaggacaggcgacatctttagtaaataggacaggaaaaggaggacttatcaggatatcacacaaacaatggtacagaacaatgaatcggtttttttcgttggatgcgactcttataaggagagcccttccacttcaccaatacgcttggacgacctggatggaaatgacgatgtgtcggatcagggtttagctttcgacggggacgtagg

SEQ ID NO: 551940 - DNA, 193 bp, Homo sapiens
ggcacatgggtggacacggatctgctgggctctgcttaaacacacattgcagcttcaacttttctctttagtgttctgtttgcaactaatacttacccgagtcaagcatttgtgttcaatttcatttcaggggcttgggctgcctcgtggcgttccccacggtgcctggaggtgggccaaaggggaggtacaa

SEQ ID NO: 551941 - DNA, 386 bp, Homo sapiens
  misc_feature (105)..(105): n is a, c, g, or t
tggttgaactggcttcgtcagcagcgcctggcggtgtgggacgccggctggctgatggtgcacgcgggcgtgctgccgcagtgggacgcggcgcgcaccgtggcnctggccggtgagatcgaggccattctgcgcagccccgacctgggtgacttcctgacgcagatgtacggcaacgagcccgcgcgctgggacgacaccctcacaggcgtgagccgctggcgctgcgtggtcaacgcgctcacgcgcatgcgcttttgcacgcccgaaggcgagatggaatttgccaccaaagaaggtgcggggggggcgccccaaggcttcgtgccttggttcgaggtgcctgctcgtgccacccaaggcacgccggtggcgttcggacgctg

SEQ ID NO: 551942 - DNA, 156 bp, Homo sapiens
  misc_feature (91)..(91): n is a, c, g, or t
  misc_feature (134)..(134): n is a, c, g, or t
  misc_feature (149)..(149): n is a, c, g, or t
atactgacattcttacttcacaataatagttcccacaggctgctggatattggatgcgtggctcgaactgacgcggcattctttggggttntgccatgacctgcatagaaacaggaaggaaaaaagaagtcacnatgagatattcactngaaagat

SEQ ID NO: 551943 - DNA, 109 bp, Homo sapiens
gatttccgtgcatagtcgatctctagaggtatcccaacgatgggtcagtatgacaacaagtgtctttgtcagtaactgttacagtgctctagtacatctattggggctc

SEQ ID NO: 551944 - DNA, 485 bp, Homo sapiens
  misc_feature (63)..(63): n is a, c, g, or t
gggggccaagtatccccgtcccctttggttccaggtggcggggaccttgttcacctgccctgntgagtcccagggtgagcctcagtttccctcccttggggcttaggaaggggtcccccacccccaaatttgggttcacccctggtgggcaaaagggtagggagggggctgtggggatattggggcttcccaatgtaagcctggggattggtccccccttgttgtttaagggaaaggtttccagacccccaagccgggcaggggattttttttaattcccggccccccgcccccccttatcaaaggacccctttttggcaggttttttccccagggggccaaatttcctcaaggacccggggcccatattatttatcccccccgcaaagcccggcttgaacccttcctttgggaagggattggggtcccctttccccctcccccttcctatttccccaggggcccaataagggccaagggtttta

SEQ ID NO: 551945 - DNA, 410 bp, Homo sapiens
  misc_feature (10)..(10): n is a, c, g, or t
cgagacgtancagaatgtggaacactgagcaggacagctgacctgtctccttcacatagtccacgtcaccacaaatcacacaacagaaaggagaggagatattttgggttcaaaaaaagtaaaaagataatgtagctgcatttctttggttattttgagccccaaatatttcctcatctttttgtcgtcgctcatggatggtggtgacatggacttgttgatagaggacaggtcagctgtctttctcagtgatctacattctgaagttgtctgaaaatgtcttcatgattaacttcagcctaaacatatagccgggaacactgcagagacaatgctgtgagtttccaacctcagcccatctgcgggcacgagaaggtctagattcgtccatcaccattatgatatcagga

SEQ ID NO: 551946 - DNA, 149 bp, Homo sapiens
gatcccccccgtgtcccgccataacagtttcagaaaagaggagttggatttttataaaaattcagtgttgctttcagattttcacgttttaatatgtaaaacaacacagagaatttctgtgcccaagccatacagcacatccgtactgg

SEQ ID NO: 551947 - DNA, 458 bp, Homo sapiens
ccattattagaagatgaatcaacagaaccagactcacaaatgacacagatgttggaactatcacagagggacttaaaataattataattactatggggtctggtggggaagggtgggcaacttgcatgaacagatagggaattttggcagagacatggaaactaagagaaagtgaaatggggctggacgtggtggctcatgcctgtaataccagcactttgggaggccaaggcgggaggagcacatgagcacaggagtttgagaccagcctgggcaacatgagacctcatctgtactaaaaatacaaaaattagccaggtgttggtggtgtgtgcctgtagtcccagctactgcacaggctgaggcaggagaatcacttgaacctgggagggtgaggttgcagtgagctgagatggccccactacactccagcctgggcaacagagcatgactgtctc

SEQ ID NO: 551948 - DNA, 818 bp, Homo sapiens
  misc_feature (68)..(68): n is a, c, g, or t
  misc_feature (121)..(121): n is a, c, g, or t
  misc_feature (142)..(143): n is a, c, g, or t
tcccgggagctgcccgttgccctttgccttgtccgtccccggaaaagcttgggacccgggccctcagnattgaccaccgaaattttttttaacaacacgaggctgtggagttaagaggggntgggagtggaggacagcagcnngggccgacgggaccctatatttcgtgcttcccgccttccagacagatgaccatgccgtgtggcgttcacttggaggccagtaggcctctcgctcgcagtttaggaagctgacattcaagcacaggtgcactgtggccctgtgcagctttgtttgaacagggcagcttgcaggggtctccccttcgttgtgtcataccaccctgttttgagagcagcaactttttgtttgaggggcaacgcattgtgatatgaccgcagggtgaggggagactcccgggggcctttgggggttttagaccacaggagaccgggctttgaaaattcccgtgcgcccaccagggggccctccccacatacatgtgacacacgaccaaacagggcttgtgggcttctggggcctcagctatctccctgtgtgtggcccatatattacagacagagagtgaacagaaggagacagagaaaccagcgtgccaacagcgggttctatcgaacccgcgacccacaagagaggcgccgcaccacacgatgtggcgcccgcggtgcgaatgtgcggacaacgacaaaaaaccgcgggttgaaaagaaagaggggcggacccgcggggtctacagatccactgaggaagagcaagtttacataaacacggcgcccctgggggcaaaaacgaaaacc

SEQ ID NO: 551949 - DNA, 931 bp, Homo sapiens
  misc_feature (640)..(640): n is a, c, g, or t
tcggcagcggcgccgggcggagggggagagcgcgggcgggcggtcgggaagcgacgaggcgggcgggccagcgaggagcgcggggagaaaaggcgcgagcggcaggagggttcaggccgagacaccttgcaagtgccggggtgccaacgagccgcgcgtgtgcttcactgagtccgcctcgagggccacctgctcagtgtcgatgccgcgtgtgggaagaaggatgtccaccaggacgtccaggtctgccaaagcaggagtcatctttgccgtggggcggattgctgcgtgtacatcacgaatggccaccccaagtacaggattgggtggggggcaccgcgtgtacatggccgcgtcctggaatacctgacagcggagattcgtggagctggctggcaagtgggtgggagtagacaacaagaatgggacggggtcacacccgggacatcctgctggtgtgggcaatgatgaaagagctgaatcgagtgctaagaggagtcaccatagccgtgtgggttgtgttacccaatatcaccccgatgtttgctagcgaagaagcgggggatccaagggaaagtttggctgccatcatcacagcgcacccccagccgaggagggccaaggtctccattcccagaangaacgctgttcttagaagaggccgggagggagatatggggccggaaatcccaagaagacgcgggtgaagtctgtaaggggacgcatgggcgataggagaactgggggacacctgcgagcgggtcgagggtcctttccacaagaggcttttccttgggacaaggtgacctatcccggggaacgtagtaagccggttgaggggggcgtaaaacacacacagtgcgttggtaaagttgcttgaaccggttaaagggcgagtttgactgtgtatcaaaaaggctttattagggca

SEQ ID NO: 551950 - DNA, 499 bp, Homo sapiens
ttgtgtgcgcttttaatgccccaatgtccacctgaaggagggagaagggttttctgaagcagagtggggcagagagaatgggctcttatgtaacaaatgtttttgcccactacttctttcttggttatgttgtgggagcgaattttcctggtctaatatggccggccccaaagacatgggtataatccccggaggagccactcgcgacacggcttctaaatggtgcgtgcgcacgagggcctcgtgtgttatggtccagacgtgtttctctgcacggctttctgttgggtgcggggccccgtccctccgagtgtgctctccacgtgtgtttgtttccctccgtgcgtaatcacgtgggcggattctttttttcccgcccccaccttagtgggcacggcgtttgaccactttttcattggtccccacactgggggatttttcccccccaaattttttccacattttttccccacccccccccctcacaaaaaaggtttta

SEQ ID NO: 551951 - DNA, 524 bp, Homo sapiens
  misc_feature (162)..(162): n is a, c, g, or t
  misc_feature (233)..(233): n is a, c, g, or t
  misc_feature (244)..(244): n is a, c, g, or t
tgtgatgttatctgcaataccctagaaggatgttactcctaatatgtcacaggggtgtacacactttgatattatttgtcatctcatagagagatatgacttcaaatgtcacagtggatgttcacacatagtgtataccctgtgatattattcataatatcntagggagatgcaactcctgatatcacagtgtgtgtacccggtgtgtgtacacccttgatatgagtcgtganatccagggaanatatgactcctcatatcacacagtatgcacaccctgtgatatttttcatcatactttagggagatattgcttctaatatcacagtgggtgtaccccatgtgtgtgtactctgtgacagtatattctgtatcctaggaaggtattactcgtaatgacacaatgggtgttcaccctgtgatatcattcttatttgaccttgctgccttttttaacccatcctacaaaaggaatggaacagataagaagatattgagattagactgcgctgctgtgcggccgc

SEQ ID NO: 551952 - DNA, 944 bp, Homo sapiens
ggcggggggagctgcactcgcccgggcgtggcgcgtgggatcctggaagctgatgcagatgacatgcaaaaattgttaccgagccatgtgccagtatgaattgatacacaatgatcgaacaaaacctaagggactcaagtattgaggaattacttagcatagtggaaagacatatacagctagcgaaggggatgatccggaggcttgagcacgggggtgacaacgaggctcaccggatgaggactgcctagcattcaagaagagtgatattcctgcaagacagtagatgagcatccttatcagtggagactcctgaggatgacaggcacgtttgtcaagatatctcctgtcgtaggaagtgagctcgaaggttccttatgagatacaaaaaaggacgcacgcgacgttagtcgacctttgaacactacgaagacagtggtcaaaactgtggtaagcatgtagtaacacactcatgtagctgatacaaagatgtaaatcgggaggtgacgggcaaggcagtgccagttaagattcgggagtcagactccaggttgatgtaagaaagtagtaaaactgaaaatgagtgttactgaaattcctgtacactattggggtggacgatcaattgcgagacaaggttagtagcttgagctttttcaaagtcccgaaatggaggcggagagggtggaccggtggactatgacagaaagtcggaagtgcagtcattacgtgtgggggcttcgagggttgccagatttcgaacagaaagataccttttgttaaataagtggcgtgagaggtctgtttccataccggatacatggaaaggtacgaatttcaggacttgaggacaggttgaaggagggggtacaggtaaaggggggagagaaaaagggaagggggagaaaggtggttgaaaattgagaaaaagaaaaggggggagt

SEQ ID NO: 551953 - DNA, 913 bp, Homo sapiens
cgcccagtcccgcggggaccttcttggcgcgtcttcttgtgataaaacgcgggcaacgtgtgtgagatacatatccccgcccccttatgtgcctggttgcgcagaggacatcctgccttcccgccgtggggtatacctatggtgcaccccgcgtgtcgtccgcccctcctttgggggggggtaacaacatggctcgtctcattccttccgttgcgggtggcaacagcgcacccgatcgtccctttcccgggatgtacgccgcctcgctaccagttttatacacgggagggtccagtcatcctgggaggccaatgacacacggccaacgcagggggtcgctcacacacacacacgggtcaagtctccgacccccgggaatatgacactctctcctgatggggtcctcaacccccccccccccttctccccccgggggagtttgtcccgtgatagagttgcgtcctccctcaatggcatcgacgctcgcccccctaacagcgggtgtattccctcggggagccccaccagtcggtccggcgcgtccttcttcgcccaggcaccaccctggcgagtccccctccccttttgggggcatctggtggtcccgggtgtcttcccaccacagagctgcgcgttgctcgcatccgccgaccccggcagctccccccgtcgtggctgtcctcccctggggctcctacaggtttgtgggcccccctcctcctggcggtctgctgtatacccatcgtctcgcgcgcacacccgccctaatgctccccccgggggtgatgacagaccacgtttgcggtcgttctccgtcggtcgtttacaggagcaggtggggtggggcttgtccaaagcgcgtcatagcaacttctttggcgcccgaaaaaatccgaaaccaaacaaacataca

SEQ ID NO: 551954 - DNA, 231 bp, Homo sapiens
ccaatgtatttcaagtcagtgaccagaaaaatcccaccccttgccctttccccaaaggaccttttctgtacatgacacttttttgttgttttttgtttggggttttaccatcgtccggacttttccatttgtcttcccgggcgcccttcgccgccaaatctttttaaatcgcagcttctagcaagccccccaccccaatcaacctttatgcttttttcttaaaaaaaaaaa

SEQ ID NO: 551955 - DNA, 196 bp, Homo sapiens
tacagtcggtaccgattacgctcctagacggggtctagatttcaactcagagctcgtgtatgattcaaatacatgctccggtctctgtggtgttacagattgctcattggcctggggacttgtcatggacccttgcctcggatgcgtgttcccagatttcactttaggatgaggagattaactggaatcgactttg

SEQ ID NO: 551956 - DNA, 109 bp, Homo sapiens
gttactctagaggaccccgaaggcgcacgatggccgtcctcgagggccggtcagtgcagtgacagtctgggggtggcagcatgagggagatggggtagtgtggatgttg

SEQ ID NO: 551957 - DNA, 461 bp, Homo sapiens
atctcctcgaatcgcggttctcatgtgcaggctgcttgaatctgactcaggtatcgccgctcggctcccaaagtgctggatacaggtgtgagcacgacccggcagtgcttctattttaatctgaactttggaaacactttctactttaaggcacaggatcaggataagaacccacatgtacgagctaacagagctgcacttcaaatttactaagttaatttaattttcccttcattggcttggctcaaggtagaaaagtacaatttcccttttcttagataaactgattattaaaactgaaaattaacgttttgacaactcaagagtgtctgacatcgctgggatcctggagtgctgagtgtggcctcgatggtgacttcactcctccacatctgggaggcacttcagtgcctcgaaaatcacccccttttttaaaaagagaactggagcgcagctactgg

SEQ ID NO: 551958 - DNA, 151 bp, Homo sapiens
cctctcccaacatggcgcgcctcagcagaaaagaagaataagaagggggaagactatctccctaacagacctttcctcgcctgagggatgggggtacctggtggaggaggcacctatgtttccaaaccaggtaagctggctctgtgaaccg

SEQ ID NO: 551959 - DNA, 246 bp, Homo sapiens
  misc_feature (92)..(92): n is a, c, g, or t
  misc_feature (149)..(149): n is a, c, g, or t
  misc_feature (157)..(157): n is a, c, g, or t
  misc_feature (213)..(213): n is a, c, g, or t
acgtattctgggccaagcagccttcgacctgacgctcgtgatgccggtcgccgacagtctggcgcgcattttttcggccgcatgcagaggcncgcgtgtgctggtgcttgatctcgacaacaccctctgggcggcgtggtcggtgacgnggcgtcangtctggtcgtgggcgagggcggcgcggcggcgaggcttaccgggcgtcagcgcgtnctcgactgagagcgcgcgtcgtgctgcgttgtc

SEQ ID NO: 551960 - DNA, 315 bp, Homo sapiens
gaatctgacctgtcctggtccgccgcgctgggcattgaacgccccgcagctgctcaggcacctgccccgccatcaatgaagtgccccaccggccctgggaaggacacccctgcagcgggagcctacaggctgtgccattgtcttggggacatagctcaccaggccgtgatattacgggcgcaagccatctgcctcgagttgccacagagcttgtagaacgtgggcgtcaggtccggctactaaaacgtctcctgcctcagggccacaagcttggcgctgccggtgcctcctcctcctcccgctatccgtcgggta

SEQ ID NO: 551961 - DNA, 167 bp, Homo sapiens
gcgttactctctgcgccagattcctcacaaagttaagaaagtgaggcggcacggtggctcacacctgtaatcccagcactttgggaggacaaggcgggcagatcacctgaggtctggagttcaagaccagcctggcaacacggtgaaaccccatctctactaaaaat

SEQ ID NO: 551962 - DNA, 316 bp, Homo sapiens
tctctgtcacccaggctggagtgaagtagcatgatcttggctcactgcaacctccacctcccaggttcaagcaattcttgtgtctcagcctcaaagtagttgggattacaggcatgcagtaccacacccagctaatttttttttttttttcctgtagagacagggtttcaacatgttggccaggctgatttcaaactcctggcctcaagtaattcatttgcctcagcctcccaaagtgctgggattacaggcatgagccaccatgcccagccaactgtaagttttttgtaggtgctctttaccaatccatttattc

SEQ ID NO: 551963 - DNA, 86 bp, Homo sapiens
taaaaaggggcaaaggatttatgggttcgataatcttttaaaaaaataagaggagggagtaaaattaaagatgaaagaggattttt

SEQ ID NO: 551964 - DNA, 1706 bp, Homo sapiens
  misc_feature (1626)..(1626): n is a, c, g, or t
ggggcgcccctcccccagcctcgttgccgccttgcagtttgatctcagagtgctgtgctagcaatcagcgagattccgtgggcataggaccctctgagccaggtgtgggatatagtctcgtggtgtgccgtttcttaagctggtctgaaaagcgcaatattcgggtgggagtgacccgattttccaggtgcaaattgagcatgacccagaattagaaaaagaaagccctggcttgaaaaccagtccaattgatgaaagtgaggtgcaaacagcaactgatagtccctctgttaaacctaatgagcttgaagaagaaagtactcccagcattcaaacagaaactttggtacagcaggaagagccttgtgaggaagaagctgaaaaagcaacatgtgattctgactttgctgttgaaactttggagcttgaaactcaaggagaggaggtcaaagaagaaattcctcttgtagcatccgcttcagtcagtattgaacaattcactgaaaatgccgaggagtgtgctttaaatcagcagatgtttaacagtgacttggagaagaaaggggcagaaattattaaccctaaaacagcattgttaccatctgacagtgtgtttgcagaagaaaggaacctcaaaggaattctagaagaatctccatctgaagcagaagatttcatttctggaattacacagactatggtagaagctgtagctgaagtagaaaaaaatgaaactgtttcggaaatattgccatcaacttgtattgtgacgttagtaccaggaattcccactggggatgagaagacagtggacaaaaagaatatttctgaaaaaaaaggtaacatggatgaaaaggaggagaaggaatttaatactaaggaaaccagaatggatcttcaaataggaacagagaaggctgaaaagaatgaaggtaggatggatgcagaaaaggtggaaaagatggcagcaatgaaagaaaagcctgcagaaaacactttattcaaggcatacccaaataaaggagtgggtcaggctaataagcctgatgaaactagtaaaactagtattctggctgtatcagatgtatctagcagtaaaccaagcatcaaggctgttatagtctcttctcctaaggcaaaagctacagtttcaaaaactgaaaatcagaaaagttttccaaaatctgtgcccagagatcaaataaatgctgaaaagaaactttcagccaaggaatttggtctgcttaaacccacaagtgccaggtcaggcttggcagaaagcagcagtaaattcaaacctactcagagcagtcttaccagaggaggcagtggaaggatctcagccctgcaaggcaagctttctaaactggattacagagatataacaaaacaatctcaggaaacagaggctagaccttccatcatgaaacgggatgacagcaacaataaggtgaggagggtaggaagaatggcacagtgtgtctttgaagtgattagctccgctgctgtagctatgtagtaggagatgtaattttgtttcatactttcatctcctcactctaccccggaagctcccatttccttttcttaaatgattccattgtttaagccagtagacattcagantattaaactcaagttcataatttattgacatgtttgaaaagcattatttggatacaatttggaaataactgtggtttaaa

SEQ ID NO: 551965 - DNA, 788 bp, Homo sapiens
cagctaggtagtggagcgccgctgcttaccatgggtgcaggagacagccggagtcgctgggggagctccgctgccgccggacgcccgtgaccatgtggagagctgctggctcgcgctagtgcgccgctcctgcgggtgcccttggtcagacttcctgggcactcctccccggccagtgccggcgtaaagacactgctcccagtaccaagttttgaagatgtctccattcctgaaaaacccaagcttagattctattgaatagggcacctacttgtgccaaatatgtaagaatgagaacctaaaaaatttaagtgacatacggggaccttccactgaagtctacggagtttacagaaggcacttttgcaatcttggcattgggctggtggcatacctgcattgtgggccactttgaacatgatgcgcctgacaatcaagcctgctctagtggatccctcaagaacatgtttgtccatactggcgagtatccagcccctttcatgcccatcactctgcaaaagtgttgggcatcgcatggggggcaggcaaagtgtgctattgaccacttagggttgacaccttgtgaaaggctgtgccgcctgtgtttgtacgacgcatcggagtggagcgctagtagagagttgtgacatgaatgttgcagagggttctcctttgaccagcgttgcccacaagtttgcccttcgcagcgacggctgtgagccgcgggactctagagaagatgcgaaccagatcacgaggaagtgagaacctaacaaaccagaacccct

SEQ ID NO: 551966 - DNA, 1396 bp, Homo sapiens
ggggcgcccctcccccagcctcgttgccgccttgcagtttgatctcagagtgctgtgctagcaatcagcgagattccgtgggcataggaccctctgagccaggtgtgggatatagtctcgtggtgtgccgtttcttaagctggtctgaaaagcgcaatattcgggtgggagtgacccgattttccaggtgcaaattgagcatgacccagaattagaaaaagaaagccctggcttgaaaaccagtccaattgatgaaagtgaggtgcaaacagcaactgatagtccctctgttaaacctaatgagcttgaagaagaaagtactcccagcattcaaacagaaactttggtacagcaggaagagccttgtgaggaagaagctgaaaaagcaacatgtgattctgactttgctgttgaaactttggagcttgaaactcaaggagaggaggtcaaagaagaaattcctcttgtagcatccgcttcagtcagtattgaacaattcactgaaaatgccgaggagtgtgctttaaatcagcagatgtttaacagtgacttggagaagaaaggggcagaaattattaaccctaaaacagcattgttaccatctgacagtgtgtttgcagaagaaaggaacctcaaaggaattctagaagaatctccatctgaagcagaagatttcatttctggaattacacagactatggtagaagctgtagctgaagtagaaaaaaatgaaactgtttcggaaatattgccatcaacttgtattgtgacgttagtaccaggaattcccactggggatgagaagacagtggacaaaaagaatatttctgaaaaaaaaggtaacatggatgaaaaggaggagaaggaatttaatactaaggaaaccagaatggatcttcaaataggaacagagaaggctgaaaagaatgaaggtaggatggatgcagaaaaggtggaaaagatggcagcaatgaaagaaaagcctgcagaaaacactttattcaaggcatacccaaataaaggagtgggtcaggctaataagcctgatgaaactagtaaaactagtattctggctgtatcagatgtatctagcagtaaaccaagcatcaaggctgttatagtctcttctcctaaggcaaaagctacagtttcaaaaactgaaaatcagaaaagttttccaaaatctgtgcccagagatcaaataaatgctgaaaagaaactttcagccaaggaatttggtctgcttaaacccacaagtgccaggtcaggcttggcagaaagcagcagtaaattcaaacctactcagagcagtcttaccagaggaggcaggaggatctcttgagcctaggagtttgagaccagcctgggaaacatagtgagaccccatcgctacagg

SEQ ID NO: 551967 - DNA, 112 bp, Homo sapiens
tgcttatcacacagtctgctgtacaaatgtcacctgcagtcggagtaattctcatcgcgttcctgaacctctagttaaagtgaacccaatagtaaataaacatttctggcca

SEQ ID NO: 551968 - DNA, 753 bp, Homo sapiens
  misc_feature (489)..(489): n is a, c, g, or t
  misc_feature (626)..(626): n is a, c, g, or t
  misc_feature (746)..(746): n is a, c, g, or t
gtgtgccttgctctgtctgccggggaggagctatactcaggggtggcagcagacctcatgggacgagactttaccatctttcgcagcctacggcaacgtccaagtctccgaacagagccacacgactcccgctggctcaatggtgagagggctgatgggttagtggatagaggtcgtcaccctcccacagggcaggtgccaagctaggctcatatagtatgtgagcagaggcgtgtgccaggtcttaccacataccctccttaatcaggcactcgcgtcacagagacagatcagacaggtatgaccgtgacctctatgagtgcacagatcacatacatgataagatcaagcacagtgagcttgaggccagagagagacaagggaggagggcaataggacactggctggctcgagggagttgcgcaaaggaagcctgtaggctgaggtgagcatgagctaatttcccagcacatgacagctagccggcanaatttatgcgatgagcattgcaggcagagggagcattccatgcagagggagctactagtgcagaggccctgatgcacgacatgcaaaggaatgacttgcagagctagcagtggggggcctcgactgtcaggggccanatgcatttattctatgaggcatgggggctgtggcaatggcttgcacctgtaaccccacactatgggaggctgggcagacagattgcttgacacaagagtttatcccctgcgctcctggcnggcccct

SEQ ID NO: 551969 - DNA, 863 bp, Homo sapiens
  misc_feature (331)..(331): n is a, c, g, or t
tggctgtaacatgtgtttattggatgatgagtccagtgctcctgctgaagccctgtgtgggggaggggccacagagcgaaatggggctgtaagggaatgcttgaagtggtttgcctcctgtgatgtcgggctctggagctctccagactatggcgatggtgcatggggtgatgtgccctcggtgcacacatgcctggccgcccatgtccaccctgtgcccatgattggatgtggctggccggtggcccgtgcacatgtgcactgtgccaggtgtggtgctctccacactctcacgcgcaacaaccctctgatacctgtgagagacctccanagtgtgcgcgtgtctctcccacgaaactctccaaacccagtgtgggcgaatatttagacctataagtgtgcaaacatttataaaatttctcagagacagtgtggtgacgtgggtggggtgaaacacacccagagatgctctggggtgggaggggcttgtgcggaaaactcttctctgcgagaaacacacaagaggggcacaagacacggagtgaaaaaggccctccagaaaaacacccaagagagagacaccgagcgaggcggggtgttgacacacacaggaccaccgaaaacgcatgcgagaaggggttggtttgagggagcaccggggcgggctccatatccccccctgcagtggagaacagtggaacggcctcaatggcctcttgtgggggaacatagcaattgtgtagagcttagcgcgttggggtgtgtgctacaaaacgcgggtatcccaggcagctggccaagggggagggtgttgtgccccattgtgcaacataattttggggattgattccgcccctgggttg

SEQ ID NO: 551970 - DNA, 337 bp, Homo sapiens
caacaggacatccattctataagcctatgcgagtcccctagagagaggcatgtactgatatataaatattatataatatatacatgagacatactgacagaatctgtaagactaataaaatgtaagaaaaggttaaaaaaagaataggtaaatagacaagaagtatttatagtttaaccatatagctttattgccttcctaggggataaaacaattcctatccttatatatatgtgtaagtacagcctgaagtgtagggggccttagaacttgaaagcagacagggtctccttgccctggactaggccttccctagactgagtggggctcagcatag

SEQ ID NO: 551971 - DNA, 739 bp, Homo sapiens
  misc_feature (651)..(651): n is a, c, g, or t
  misc_feature (664)..(665): n is a, c, g, or t
  misc_feature (697)..(697): n is a, c, g, or t
  misc_feature (719)..(719): n is a, c, g, or t
  misc_feature (727)..(727): n is a, c, g, or t
ctttggctgcccgtggtcgactctcgaggatcccctcatcttgggcctgtgttatccaagaagatctccccaaatcatggaattacatggaaatttaaaaactttctcctgaatgacttttgggtatgatgaaattaaggctgaaattaaaaaaaattttttgaaataaatgaaaacagagatacaacataccaaaatctctggaatacagcaaaagcagtggtaagagggaagtttatagcactaaatacctacttcgaaaagttagaaagatgtaaaattaacactctaacataacacctggtggaactagaagaacaagaacaaaatcccaaaactagcagaagaaaagaaataactaaaatcagtgcagaactaacaaaattgaggcccaaaaatccacatgaagaataagtgaaaccaaaaattggttttttgaacagataaacaagatcgatagacaactagctagactaaaaaagaaaaaaaagagagaaaatccaaataagcacaatcagaaatgacaaaggcgacattacaactgatcccacagaagtacaaaagatcctctgagactattatgaacacctctatgcacacaaactagaaaatctagaagaaatggataaattcctggaaacacacaatctnccaggatccaccnnggaagaaattggaacccttagccgaaccaatncccaagttccagaattggaccngtaatggnaaaaatcttccc

SEQ ID NO: 551972 - DNA, 537 bp, Homo sapiens
  misc_feature (85)..(85): n is a, c, g, or t
  misc_feature (141)..(141): n is a, c, g, or t
  misc_feature (151)..(151): n is a, c, g, or t
ctcttttggtttttccccattgtgacacttctgttcgaccattgtagtagtactttttccccgaagagctaatatgctcagaccngtcatctgcagaatcataaggtgcatctgaagttttgcttgggttattgcttggantagaagaatntgatttgactatgaagagcactgtggttgtgtgaattttcttgtggagagtaactggtcccaccatccctctatctaactctgtgagtatgcacatttttggccttactgtgacttgtggtgtctctgtatttgtattcaggactatcagatatgcagcagcagttcatggagtggtgaaggatctaaggccgtctcgcatcttttcatgtggtgtgatagccgccacatggggtgattctgccatgaatagttcagtgcgtgtaaaacatcaccccgctggtaaggttgctagtcccccgtgcggttgcggcagccatccctgagttttggatgtatcatcgcacacagtgcgagccaggaaaggcctgtgagtgtgagtagggg

SEQ ID NO: 551973 - DNA, 1291 bp, Homo sapiens
gaagcagtggtatcaacgcagagtgcccattacggccgggacacgtgcctacgacccgccgggcgcctgcgcggtagcatcgcggagtcggtgctttagtacgccgctggcacctttactctcgccggcgcgcgaacccgtttgagctcggtatcctagtgcacacgccttgcaagcgacggcgccatgagtctgacttccagttccagcgtacgagttgaatggatcgcagcagttaccatgtgctgctgggacagctgcaatgtggttatctagcttacaaaagattttatgttaacagatcatcgaaataaagctatgataaaccttcacatccagaaagacaacccaagatagtacatgctttgtgacatggaggattgggagataaagctgtgtactgccgttgtgtggaggtccaaaaagttcccattctgtgatggggctcacacaaaacataacgaagagactggagacaatgtgggccctctgatcatcaagaaaacagaaacttaaatggacaccttttgatgctgcaaatcagcttgtcgtgaagttacctgatttgtttaattagaatgactaccacctctgtctgattcaccttcgctggattctaaaatgtggtatattgcaaactgcagttttcacatttatggcattggtcttgtggaaacatcgtggttgcccattttgtttaaacaaaaaaaaaaaaaaaaagggaaaaaccaacctcagggccggggggtaattggggtctggtaagggatccatttctttaaaatacggacatatagacgtggtacccttatattagaatataagtggtatctggaagtccaccaatatttaaatttattctcaaaattaacaaaaacaaaaaacaacaaaaaaacaaaaaaaaaaaaaaaaaaaaaaacaaaacaaaaaaaaaaacaaaaaaaaaaaaaaaagaaacaaaaaaaaaaaaaaagagaggggggcgcgcgcgagcaaaaaacgttactcactccgcgagggggcgaccaccataagacgcaggcccgcccaccgcagtcatgagtcggaaaaaaggggcaccgcaccacccaaaaaggggggaactgaattaacactaacagcaggacagagcgcagcggggctgcgtcataaacaaacaacgaaccgggaggaagaggaaaagcaacagcgaccaccgcagcgaaaagacgtcagtcgctcagggagaaaaccccaaccacatggttgggcatggtgggaaacatgtcgtgagccgacgaccaccataaaa

SEQ ID NO: 551974 - DNA, 928 bp, Homo sapiens
gcttgtggagctcggcgccggaggagacgcacgcagtctgacattagtcgttctccgcatcgactgtttacacgagcgtctccagagcacttctctctcctgctgcacagaatggcaagatctgtataggaaaaagctcattgacaccagtgtgcggaagagaaaggaatatagcttcgcaaaagctaataaatgatacagctgtagatgaggattgtatggaccaaagattgggtgatgtgacagtgttgcatatatagacatatctaggtgagtagttctactgaaggcctttggatgaaactttgcgtgcgttggtgggatgtttgtaggaaggataagccttgaatggagaaatagatgcgatctgtcagcatgggagctctatttctctcatgacaccgtaaaattgtggccagagttacaagattcattctagtgaccgcccaatgtctagagatttgtaagtggtaaacatgcagtgagtctcgttcgagtcagagaagggggagaggtcgggcctcgaagttcttggttgccagcgagacaagtgctttacatgtcgttcaaagattgcagttaattgcctcagtatcgatcgaatgtacaagtgcctgcatgtggcgatcataaatctgtaggttttccacacgccagtgggacattgctctactgttatgttgaccatggaaaactacagtggaattacccaaaaacaccgcgtggatgtggagagtggatgtaactctgggatatctgctaagaattgtcgctagcttatgggtgaaaaacttggcattcatcccaggaagtgcatggatggattttgggggaacatgggactcaagtgtggtgtgtggaggtgggggtgatgttggagtgtgtctctccaggaattgaattccgaatggggactggaatgatagtg

SEQ ID NO: 551975 - DNA, 753 bp, Homo sapiens
cattacatgaaaaattttagacactaaatagcaagtcctactgatgttagatgcagtttcatttctgtaacattattttcttcttagatgcttggtagaataatttactttcagaatcatcctgacacattctgacatttaagtagtttgattttacatgatatattatcctttaaaaaaataggacaaatgccaaatgcctgtatcaacttcagtgtttacagcacagaattattaattaaatttagttcttcatttgaaaaataagtttgctggactctgccagttggagtgtggattaatttaatgtagtttgaaatataggaattaccaaatccagttaagtttttattatgctatttctatgtcttgaggcatacacccctgtttagagattttttttctctccaggctaagatttctgttcttttttatttagccttcttgggcatgttgcaaatattctacctagttatgttttccaggtctattgtagtagagccaattcttcattttctctgcttctcacctgttttttgtctatttatttgtgtataaagatgtctacaggacaatgaacaagtaacacctcaaaataccaccttgaaaaggaaaatgcaacaaattcttttctgcacctgaagcttttaattctttaatccaccatggaatgtttgcttaattacatattttattatgcattaactgaaaatatgtactttaggtttccccaatgatatgaaagctgtattg

SEQ ID NO: 551976 - DNA, 439 bp, Homo sapiens
aaaacctgtttccatttccttctatattaactaaagtcagtttgagcaactattaaaggaagttaaaattctcttgtgttttgtctacctgtgggaactataaccagacctcagtggaaacaggaaatgtacaataagtcccccttttatgactgtaagtgaatatattttatggtgtttgcaatagcctcttgtaggagaaacaagtaaattaaatttttacatatttctaaatagcctctgctgaataataacctgttttgtatatttagcaccttttcataaaaacagcttgtgtctgcactgtaggtagcagttaatcaactgtgatattgaaatgaagagaaaagacgcatttgacactgagcatgtgaaaggttatatgcaatggggtttcccactgagcaaattagacaacaaagatctagtttttgagcca

SEQ ID NO: 551977 - DNA, 1356 bp, Homo sapiens
gaagcagtggtatcaacgcagagtgcccattacggccgggacacgtgcctacgacccgccgggcgcctgcgcggtagcatcgcggagtcggtgctttagtacgccgctggcacctttactctcgccggcgcgcgaacccgtttgagctcggtatcctagtgcacacgccttgccaaagccgaggggccgccccattggaggtcctgactttcccaagttccccacgcgttcacggcaggttggaattgcgattcgccaggcacaggtttacccatttttgctggctgggggacccactcttggccaacattgggggtttaatcctaagcttttaaccaaaaagggactttgtatggttaacgaggcatcatcgaaataaagctatgataaaccttcacatccagaaagacaacccaagatagtacatgctttgtgacatggaggattgggagataaagctgtgtactgccgttgtgtggaggtccaaaaagttcccattctgtgatggggctcacacaaaacataacgaagagactggagacaatgtgggccctctgatcatcaagaaaacagaaacttaaatggacaccttttgatgctgcaaatcagcttgtcgtgaagttacctgatttgtttaattagaatgactaccacctctgtctgattcaccttcgctggattctaaaatgtggtatattgcaaactgcagttttcacatttatggcattggtcttgtggaaacatcgtggttgcccattttgtttaaacaaaaaaaaaaaaaaaaagggaaaaaccaacctcagggccggggggtaattggggtctggtaagggatccatttctttaaaatacggacatatagacgtggtacccttatattagaatataagtggtatctggaagtccaccaatatttaaatttattctcaaaattaacaaaaacaaaaaacaacaaaaaaacaaaaaaaaaaaaaaaaaaaaaaacaaaacaaaaaaaaaaacaaaaaaaaaaaaaaaagaaacaaaaaaaaaaaaaaagagaggggggcgcgcgcgagcaaaaaacgttactcactccgcgagggggcgaccaccataagacgcaggcccgcccaccgcagtcatgagtcggaaaaaaggggcaccgcaccacccaaaaaggggggaactgaattaacactaacagcaggacagagcgcagcggggctgcgtcataaacaaacaacgaaccgggaggaagaggaaaagcaacagcgaccaccgcagcgaaaagacgtcagtcgctcagggagaaaaccccaaccacatggttgggcatggtgggaaacatgtcgtgagccgacgaccaccataaaa

SEQ ID NO: 551978 - DNA, 182 bp, Homo sapiens
  misc_feature (21)..(21): n is a, c, g, or t
caattttttaaaaaaggtgtngggccccccctggttagggggggacccttccaggcaggaaccggctcccccccctttgcccggtaaggggggcccaaaaaagcattaccccccctcggggggtggggttgggggggtcccggcccctggggtgggtttcaggtatgaaaacataaaattga

SEQ ID NO: 551979 - DNA, 197 bp, Homo sapiens
ggtggtggtgttatatggtgatgatgatggtgatgtgatgggcattgggggcaggaaacaggtttacactgggaatggggctgagtgggaacaggacaactggtttggatatctgccagcagagaggtggtggtagcttggacaagtgtggtagcaggaaagagggcagagagagatgtgagagatctttaagaggg

SEQ ID NO: 551980 - DNA, 772 bp, Homo sapiens
agaggatgtatggaaatgcctggatgtccaggcagaggtctgctgcaggggcaaagccctcatggagaagctctgctagggcagtgcagaaaggaaatgtggggtcatatcccccacacagaatccccactggcacaccacctaatggagctgtgagaaaagggccaccatgtccagaccctagaatggtagatccaccaacagcttgcaaagtgcacctggaaaagctgcagacgctctatgccagcccatgaaggcagccaggaggggggggtttaccctgcaatgccacagaggtagagctacccaaggctgtgggagcccacctctcgcatcagtgtgacatggatgtgaaacatggagtcaaaggggatcattttagaactttaaggtttaatgactgccctatggatttggacttgcatggggcctgtggtccctttgtttggccagtgtctcctatttggaacgggtgtatttgcccaatgcctgtgccccagtgtatctaggaatgtaactaactttggctgtgttgaattttgcaggctttataggtggaagaagacttgtctgtgtctcaagaacacttttgggactggggacttttgaggctaaatgcttggaatggagtaacgacttggggggggactgttgggcagggtatgattgggcttttggaaatgtggggacctggaatttggggaggcccaggggtggattaaatggttgtgaatcccatcaaattctcattgaatggtttccttatcccatt

SEQ ID NO: 551981 - DNA, 111 bp, Homo sapiens
agaggatctccagctgtttaggacgggtctggaatacacaccttggttatacgccggctccagtgctgagggctcgatggggctcctgatttccaccttgccaggttacct

SEQ ID NO: 551982 - DNA, 321 bp, Homo sapiens
aggcaaagctctacggagctcaggtgtcatttatgggttgcagagcacgctgttaaggggaatttggtagactgagctcagagacctgggtgtgaggggcaggacttgtgggcacagcggaggcgattagaggagggtccaccttgaattctttgcagcaggcacagagcttcttggttgattcccagaagggggcagacgcacaggccagggaacccggggctctaggctgtgggtccgaagtgtccccttgtgaactggaaaagcctgaggggggaggcttggaagctgataccaggattccgggtgtgttggtgagac

SEQ ID NO: 551983 - DNA, 121 bp, Homo sapiens
attcttcgtgcctacagtactccccagtagctttggaccacaggtgcccaccaccacgcccggactaattatatatgtatttttgggtagacgacggggtttcaccactgtcacaccagga

SEQ ID NO: 551984 - DNA, 168 bp, Homo sapiens
gcggacttcactggccacgaccgcgaagcctcgaccctgttcacccgcgcgagcggcctcgaccgcggcgttgagcgccaggatgttggtctggaaggcgatgccgtcgatgacgccgatgatgtcggagatcttcttcgacgattggctgatcacgtccatcgtggc

SEQ ID NO: 551985 - DNA, 161 bp, Homo sapiens
gaccttcagcctggacaaatctgaaataggatccagtatgtctgaaatactgctttctcaagtaacaaatatgaggaccgcaactctcattcaacatccaagcccttgcagttcgtgccaatatatgtgtagcaacaaaggacagagctgcatggatccaa

SEQ ID NO: 551986 - DNA, 229 bp, Homo sapiens
cgataggacaggatggtctcaaacttctaacctcaggtgatccgcccacctgggcctcccaaaagtgctgggattacaggcgtgagccaccatgcccggcctaattttgttaatcttgccagtttcaagccatagacacaaaaacatcagcaccatcttaagcagtcacactctgacctataaaatgtgacagccccaggagaccgcgtccaacacgggggcacctctc

SEQ ID NO: 551987 - DNA, 81 bp, Homo sapiens
gtgaaaaagtaaagtttaatttaaaaatcatatacataaagcttctgattcattttcagcgctcccttctgtcgtcttctc

SEQ ID NO: 551988 - DNA, 732 bp, Homo sapiens
  misc_feature (230)..(230): n is a, c, g, or t
  misc_feature (638)..(638): n is a, c, g, or t
  misc_feature (713)..(713): n is a, c, g, or t
  misc_feature (716)..(716): n is a, c, g, or t
ttcttttgttattattatactttaagtactgggatacatgtgcagaacgtgcaggttacgtgcaggtttgttaaataattatacacgtgccagggtggtttgctgcacccatcaacctgtcatctatgttaggtatttctcctaatgctatccctcccctagccccctagcccccaaccagcctctggtgtggtaatgttcccctccctgtgtccatgtgttctcattgntcaactcccacttatgagtgagaacatgcagtgtttggttttctgttcttgtgttagtttgctgagatggtttccagcttcatccatgtccctgcaaaggacatgaactcatccttttttatggctgcatagtattccatggtgtatatgtgccacattttctttatccagtctatcattaatgggcatttgggttggttcccagtctttgttattgtgaatagtactgcagtaaacatacgtgtgcatgtgtctttatagtagaatgatttataatcctttgggtatatacccagtaatgggattgaacttctggttctagatccttgaggaatcgccacactgtcttccacaatggtttgttctcattctttttccttttaaaataaatactgtctaaaatgaagnaatagtgcagcatgattcttacaacaagtaatttggaaagaagttggtttaattaattccctatgaggaaaggcngcnatgcgatcatttattt

SEQ ID NO: 551989 - DNA, 426 bp, Homo sapiens
  misc_feature (2)..(2): n is a, c, g, or t
  misc_feature (4)..(4): n is a, c, g, or t
  misc_feature (191)..(191): n is a, c, g, or t
gnanccagcctgggcaacagagtaagaccccgcaaaaaaaaaaaaaagtgccgtttaactctttgtcaacactaggctgaggcaggacgatccattgagcccagaagttcaagaccagcccgggcagccatggcaggacccctttctacaaaataaaaaaagttgactgggtgtggtggcacgcgcctgtnagtcccagctactcagaggctgaaggtgggcaggttgctttgagcccaggaggttgaggatgaggtgagccaagaccatgtcactgcactccagcctgggcatcagagcaagaccctgcctcaaaaaaaaaaaaagtgcagtttaactctttgtcaacactaggctgaggcaggacgatcacttgagcccagaagttcaagaccagcccgggcagcatggcaggaccccatcccc

SEQ ID NO: 551990 - DNA, 174 bp, Homo sapiens
gcagccttgaaatacctggactcaagggatcctcccacctcagtctccccagtaactaagagtacaggtgcgcatcattgcatacagttaattaaaaaattttttatgtagacacggggtctatgcatgttgcccagactgatcttgaactcctggtctcaagcaatcttcctg

SEQ ID NO: 551991 - DNA, 455 bp, Homo sapiens
tatatgtatcgattttacagtcgttcctccatatcactggtttccacatggcaaattcaaccaactgcagatcaaaaatacttggaaaaaaacaattaaaataataaacaattaaaaataatacatataaaaaactatatattataacatctatttacgtagcatttacattgtattatgcattataagtaatatagagatgatttaaagtatacaggatgatgtgtgtagtttatactcaaatattatatgccatttcatataagggaagtgaacatctatggagtttggtatttatgggggtcctggaaccaatttactgcagataccaagaaagactctctgtatacatattatatattatatatacatagatggtgaatatttattctcagattgagatatatgagtaaaaaatgtgaaattcaatcactgtattagggtagaatgcaaaa

SEQ ID NO: 551992 - DNA, 315 bp, Homo sapiens
ccaaaacccccggggcagggttaaaggcctttggccctccaccccagcccgggttgccttcttttttttgctttgggctgttggccctgccttaggggggatttttggggcccttaaaggcccttaatttgggggtttttgatttcccccccccccttccctaccccccccttgccatgggcccaatttgcccccccctcgctttttttttccccccgggccttttaatttgtccccctggggtggtttccgggggttttttcctttccccgggggggggggtttttggccattaagtttttttggtccctccca

SEQ ID NO: 551993 - DNA, 816 bp, Homo sapiens
  misc_feature (6)..(6): n is a, c, g, or t
  misc_feature (99)..(99): n is a, c, g, or t
  misc_feature (148)..(148): n is a, c, g, or t
  misc_feature (158)..(158): n is a, c, g, or t
  misc_feature (178)..(178): n is a, c, g, or t
  misc_feature (180)..(180): n is a, c, g, or t
  misc_feature (184)..(184): n is a, c, g, or t
  misc_feature (189)..(189): n is a, c, g, or t
  misc_feature (192)..(192): n is a, c, g, or t
  misc_feature (196)..(196): n is a, c, g, or t
  misc_feature (204)..(204): n is a, c, g, or t
  misc_feature (207)..(207): n is a, c, g, or t
  misc_feature (214)..(214): n is a, c, g, or t
  misc_feature (217)..(217): n is a, c, g, or t
  misc_feature (242)..(242): n is a, c, g, or t
  misc_feature (247)..(248): n is a, c, g, or t
  misc_feature (260)..(260): n is a, c, g, or t
  misc_feature (274)..(274): n is a, c, g, or t
  misc_feature (283)..(283): n is a, c, g, or t
  misc_feature (306)..(306): n is a, c, g, or t
  misc_feature (324)..(324): n is a, c, g, or t
  misc_feature (346)..(346): n is a, c, g, or t
  misc_feature (351)..(351): n is a, c, g, or t
  misc_feature (354)..(354): n is a, c, g, or t
  misc_feature (361)..(361): n is a, c, g, or t
  misc_feature (402)..(402): n is a, c, g, or t
  misc_feature (472)..(472): n is a, c, g, or t
  misc_feature (492)..(492): n is a, c, g, or t
  misc_feature (499)..(499): n is a, c, g, or t
  misc_feature (516)..(516): n is a, c, g, or t
  misc_feature (527)..(527): n is a, c, g, or t
  misc_feature (530)..(530): n is a, c, g, or t
  misc_feature (600)..(600): n is a, c, g, or t
  misc_feature (619)..(619): n is a, c, g, or t
  misc_feature (625)..(625): n is a, c, g, or t
  misc_feature (673)..(673): n is a, c, g, or t
  misc_feature (678)..(678): n is a, c, g, or t
  misc_feature (714)..(714): n is a, c, g, or t
  misc_feature (720)..(720): n is a, c, g, or t
  misc_feature (726)..(726): n is a, c, g, or t
  misc_feature (729)..(729): n is a, c, g, or t
  misc_feature (748)..(748): n is a, c, g, or t
  misc_feature (764)..(764): n is a, c, g, or t
gtccgngaattcccgggatggactggccggccgcggccgtagccgtgtgaacgctcttcgggctcgcgtcgtcgacccgcagccgcggggcggactaanaagggagccgcctgctgcgaggccgccgggctcccggtttaaatgtganactggtgtanatctccttgttctaaactanantcanccaanaanccanaaaaccanaangtggtanaanatcctttttgaaaggtgaatattantgaannaaaaaggctganaaaaatgggaaaantattccaanacaaatgtatattgaggtggaanatgattatgaatatgaancaaaagacaaaaaaattgtganaaaanaangggaaangtacatcttggtgaaaaaaaccaatgatgactggtggcaantcaaaccagatgaaaactccaaagacgttttatgtgccagcccagtatgtgaaggaggtcacgcgcaaanctctcatgccacctgttaancaggtanctggtctgccaaataantccacgaaaanaangcagagtttgcatcttcagagatcaacagaaaatgtgaacaaattgcctgagctttcaagtttcggaaanccatcgtcatctgttcaangaacangtcttattcgtgatgccaatcagaattttggacccagttataatcaangtcanactgtcaacctaagcctggacctgacccataataanggaaantttaanaangactcacattctcctaaantttccagccagaatangacacgctcatttggtcattttcccggtccagagttcttggatgtagaaaaa

SEQ ID NO: 551994 - DNA, 226 bp, Homo sapiens
  misc_feature (22)..(22): n is a, c, g, or t
  misc_feature (134)..(134): n is a, c, g, or t
  misc_feature (173)..(173): n is a, c, g, or t
cccataatgaaaggtttaaccnagtcacagtaaatattccatatccctgaaaataagccatttaatgagaatagaaccatttaatgatccatgagccctaaaaggatatctgccccgtattgccaagtttaagncaaaggtgagatcctgtaccaataagaagacagctttcntgtttgacattggtaagtaccaagaattctaactcaccatatagtaggaaaca

SEQ ID NO: 551995 - DNA, 1077 bp, Homo sapiens
  misc_feature (337)..(337): n is a, c, g, or t
taacccttctttagcttttagtgcgctcgagaaaaccaaatttaaaccccccccccgagtgtgtaacgggggggcgagggcacaagagagcagagaacacgcgaggaagagccgagcgggggagaccaccgaggttcgtggcccccgcgccattatatcgccctgtgagtgtgggtttgtgggtttccactctctgtgctccctgtgtgtggctgtgggggtggaggtgtgagaggggtgtggagcgccctccgtggggggagccgtgggccccgtgtggcgccccctctgtgtgtgagagaattctcacagaggggagagtgggagagaagaggcnccagtgtgtctcgcggcgcgtgggactctcgggggagacacaggggtgtggggtctccccagaaagatctccgagagaagcgcgcggaagagggaggagagttggaggacaaagaggactcctccctccgagagtgtgtctcagagagaggggtgctcacggagagagccgcccaagagagagagggggggccccctggggctggggcccgatggagagctgtgcgccggggagagggccaagaggcgcgctataaccgaggtgtgtgtgttacaccagagaggagggggtctcccccacaagaggctgggggagcaaggggggtagggcgcccgagcgtctctccgggagcaacatctttgtggaatgagaaaacgcatctccccatactactacacccagtcggggggagaaaattttattggcgccgccgccacttttagaagagacaccacctgggccctttggggacccaccacaggggaggggatcccagaaaaaccccttcgggggggaacacccctcgttgggggaagccaccacagtgtcgggtgagtttacagcgccccgcgggacacaacacgagaaaggacaccaggcggggagaacatgtgagacgacccccaaaaaaaagctagaaacaaacatgccacagagatctgggccccaatccgaccacagggtgttttctgtggacccccggaaaacaccaacagacaactaagcggaaaggcacaaga

SEQ ID NO: 551996 - DNA, 236 bp, Homo sapiens
ggcagcatttaccatgtatgcccgaccttaggatatcactggcgttgaccagatgttgcctgacgttgtgtgtgagactaattatctccaaataacccgtccatatctcagaggcgcagttgtcaatctgaagcgcagctgacatgcaagcatgattgtacgcattaagccttgcttactgaggtggtaccaggggggattagaggccagaatgaaaaagccaaggccacgtggca

SEQ ID NO: 551997 - DNA, 313 bp, Homo sapiens
  misc_feature (1)..(1): n is a, c, g, or t
ncgtaaagataatcttcctcccaagaaatgaagagtgtcgcctttaacccttaaaattcccctgtcagggagcctttaaaattttggaaatgtatgccaccaaaatgtaacctcggtatttttggcgcattctaatgtttgggtttaataagtttaagaaattgactctgggaattttcttttccctgaacctttgattccccctagtaagtcaaagttctaaaaaatgttctagctctttaagccttatgtgctcttactgattgaaagattttttatgtttcccttgtaataaaggccctaacccagaggt

SEQ ID NO: 551998 - DNA, 1366 bp, Homo sapiens
tatgaactgggaggcagaggttgcagtgagccacgattgcgccgtatgtactccagcctgggcaacagagcaagacccatctcaaaaaaaaattttttatatacctagagaggaagcctgaggcttgaccagactctagggagtataagtaaggcaggtactgttattactcctaaggccctagagctataactagacatctactgagtatttgtcttaagtatggcaacggacgccagggtaatcctggacctagagccagcaccttaacgctactataggttatattagctaggccattacaggtataaggcaagggtaggtagtacctagactggcactataccagataggcaggcacccaataacaccacacatacctaggccccaacacaggactatactacccgtagcagccacgagcaacaggaaaatcgtaccatctagccaatctgtaactactacatcattccttactaagtaccttactttggtaggtaagctgcattaaccttagaagggaacagcttagaaacgcactgcggggatagctatccctatacccaccaaatgcatttacagttggacctaatcggggaacttgttggcgtctagccaccccattgtttccaccaatcaattagcgacatgcgataccacatagccaattttaaggtagcatacacaagtgggcacccaaactacaataagacccatgcgcagacacatcacgttcacattattaccacaaattctatgggcacccatgagttaacgatatattagacaaacggattaacaaaggcatcaacaagataacagtactcgacacaccaatcaggaccagtagcatctacgatagagcgcccatacgtacagtgaaacccaaagggacaaaggacccactgaaccactggcatagacaaagtaatggaccaaagggcgaaagatataacgaaaagacaaatgagtggaatagcgcacaatggccgccagtaatatgagaaaaagataaaaaataacacagaataagcacaaagcttaattacccttgatgtataagtgtcgttatttaatctcactgtaggatgagacacataaatatatttgtataacacacacctttaaaactgccacacaccacacaccacattattctaacaccccaatacatatacaatcctaaccacgaagtaacacataacaactaacaaactctgtagatcaatctattaacccacatttatatataaatacactatcatttaatatcaagaaatcaattaaaacatatatataatcactaactaaccaataaaataatcacacataacaatcttaaatcacctatataaaacaattctat

SEQ ID NO: 551999 - DNA, 361 bp, Homo sapiens
atcgagctcgcgaccctgccatttactccatggcatgggcgtgagcaacagcttgctaactgatctgctacatctatcaaacagacttggcatatggaccagcaagacgcgggacaggccctaactcctatgcgcacagtgcctaacacctcactcaccattgcagcagagcgaatacacaatctgagttgacctgacacacatctcactccgtgctgtgttacagcactagcctggtgcgactctacacgcagctggctgaaggtctttgcactcactgctcactgcctatgtactcacagatgccttcatggctcctctctgacgtccttaagatatccctactatatcgtctatacaa

SEQ ID NO: 552000 - DNA, 687 bp, Homo sapiens
  misc_feature (513)..(513): n is a, c, g, or t
  misc_feature (589)..(589): n is a, c, g, or t
  misc_feature (655)..(655): n is a, c, g, or t
  misc_feature (687)..(687): n is a, c, g, or t
ttcctctttaaccatactgacagatgcccacagaatactgaaaactcacagcctgcaggagtctctctagcatgcccctcaacacttctgctcccaactgctgagctgtatattcactcagaacaatatttgttccaaaacctcaacaggggagttttattgttattgtaattagctaatttaattaaatatcacataaaccataaaagcaaaaataaaaggtcttgtatctttaaaaactaagtcaaacgcattgaaaagacttgataaaggcaagtcactgcaaaatactgctgttgaaataggcaaagataagagaaatatttttaaacctgggaaaaataataaaatatagaatataatgtttctgaaaatgtagcatggaagccaagcatagaatactgagccccaccttccatagtttctgattcagtaggtctggagtaaaaccaaagaatttgcatgctatgaaattcccatgatgctgaagctgctgggctgggaaccacactntgagaaccactgctctgcaagtgtctcaattttttaatctatattaaagaaataaagcataaactggatatgactngttatagatgtagatttatataagacttgcaagttcaatcagcaagcctatattgaaggccctggntcctagtcacacagtctatttatacttttgcn

SEQ ID NO: 552001 - DNA, 890 bp, Homo sapiens
tcctcccacctcagcctcccacgtagatgggaccacaggtgcacaccactgcagctggctaatgtttgtattttttgtagacacggcatttcaacacgttgcccaagctggtcttgaattcctgggctcaagtagtcttcctgtctcagcctcccaaagtgttgggattactggtgtgagcatcgtgcccagccttggtgtcttatttagttgtttgatgaggtcatgtttccttggatggtcttgatgcttatggatgttgttcatgtctgggcattgaagagttaggtatttcttgtagtctttctagtctgggcttgtttgtatttgtctttcttgggaaggccttgcagatattcaaaaggacttggattttgtaatctaagccatacctgcagtaaaggacaacccaatcccagtaacactgtagttctagtagacttgttagaggtacgtccttggtggtcttcaataagatccaaaagaattccctgtatcataggcagtctcttattctcttcctttactttttcctaaagaaacatcatttctctctctgttctgagctgactggagctggggaggggtgccccaggtcctctgtgggcaccgtaccaggacgtgctgggtccgacagaagccagcacaagactgggtctgcccaggcccgtgtgaaccctactggtactgctatgttgctccagacctggtttcggatcgcggactgcggagcgcccggggtggctccttggggggaggcctaaccaggggtcacaggaccgtggaccgggcgctaaacccacagcggtcggggtgcaccgccaccaggacacggcgcccagggagcaccccaaaacccgacaagggggcccacagaagcgcggcgccaa

SEQ ID NO: 552002 - DNA, 461 bp, Homo sapiens
  misc_feature (31)..(31): n is a, c, g, or t
  misc_feature (348)..(348): n is a, c, g, or t
  misc_feature (409)..(409): n is a, c, g, or t
  misc_feature (419)..(419): n is a, c, g, or t
aaatgacattaggtagtaaaagttaaaaaanaaaaaaaagtagttgctggaaaatgttcagaataactgagtaggaaaaaaaatcacttccaaaggaggccattgccatgtaatgtcatgggttttaaatcttaaactcttttccatggaaaatttaaaaagaatgcatttgattttgcattaattagacaatattttatgttatctattagttttagaaaataaaatctgattttcctttagttttctttactcagtaagtgtattttgccttcatctaaatgttttacatttatagttcttaactcttgtaattagatgataatcttaagaatacattgctggctnagacctgtactttaaccaatgtagtttttaagttttatgtggccctgagtggtttgcctcncccggtatcngtgtgtcatgtgcatacagtgcccacggaggccacatgcagg

SEQ ID NO: 552003 - DNA, 388 bp, Homo sapiens
gatcaccacatgtgtgtgtctggcttactgtggctccctccctctttcggtgcagagttccccagcaggcctgaaggccctgggcttttacgtagtataatcattcttaacagactattccagtgcttaggttttgaataggatgtagcagaagactcagggctagagatcttcatacatatcaaactgtatgattgccagaagcgtaaagtcacagacgaaatacacacccacgttgggattagcagtgacctgtggggaagctggaggccaggagaggacctcccctcatcactcagccagacagaaaaggatgcagctctttcccagccgctctgttcctctctgtccacaatgctggagcatgggcagatcaaacaaaactcct

SEQ ID NO: 552004 - DNA, 418 bp, Homo sapiens
ggtcggtcctgcttactgggcgttgggcatgacctgcagggtgaagctgagctacgctaccaggagatctccaagcgaacttctgcctcctcccatgctccctgtgggtcctagccacaagctctccaacatttactattgcactcgcgatggccgtcgggaatctgtgcccccttccatcatcatgtcgtcgcacaaggcgctggtgtcaggcaagccagcacagagctctgttgtatctgccactgagaagaaggcggtgattccagctcctcccataaagaggtgggagctgtcctcggaccagtcttacctgtgacactgcaccctcacggacaaccgagtactttgcctccttggatttcctccaggtagaatgtgacctaatttatgactaatacatacgcccaggtacgca

SEQ ID NO: 552005 - DNA, 426 bp, Homo sapiens
cattagaacccctggatcagagaaagtgtatgtgtgtgcgcgcacgtgcgataacgtgtctaaggtatcggcctggtgtgtgtagccgtactgcggtaagtctcgtgagatgtggtctgggtttcggtctgtccactgcgtgggtttcgtgggatccaggacactcggtgaaattctcatctagaccggatcacagcccatacggtccatctaaagacttgatgaacaagaaacgattcttacctggtctgaaccctgagccatggaaataagtaacaaaagaaatatctgaaagttgaaagctgatcccctggaaaagggggtgggagagggccatgctcttctccataaagtttatgtaactttttgcctttaccaaatataaaaatgtgtaatttgattatattcaggttaaaactgcacaca

SEQ ID NO: 552006 - DNA, 1377 bp, Homo sapiens
  misc_feature (566)..(566): n is a, c, g, or t
gctcgacttcttagctgtaggtgtgcacccaggaggtttcttctccctggcatggcttggctcccaagcattgtcccatggtcgccgacgactagtgcctgcctggggttggaagagacttgacgtttgttgccttaagggtctagctcacggtgcgctgggtgaatgctcatgcctcatgacccgttcaaagcgctctgaaccaggtagagggagcagttgggcgcacgataagtctcctactatgcctatgacgtgcatcgatagtattgcatggaagtacggaagattcgcctttctgacgtcccccaagaatgggctagttgcagtgctatccccttggcgctgacgttacgctggaggaagctgatcttgtgagtggctcaccagttgagtcacgatgcatgcaacgagtccactttcgtacatcgtgcagacacgtacgtgacgacaggtgagaatcccgctactaacggcacgaccatgtccttgcgctctttggccgtagggttgagtgcagggacttgctacaagctactgtctttgtatcgcccttgtgttcactntgaacgttgatactgtacagatctagcctaaaataggttgcgagtcggttacacgagccaatgggggtaccctgacacgggacattgggacatgtggacttgggagccaaagggcaaccaggcttctaccgaccgatgaggtgcccacggcaggtcgatcggcgcagtgctccgtacctaaccttttggccaggcgcatcgatggcgttcctactttgagcgtacattgggattgccccctttccgcatgtggggcgagtgggctctacggccgcagggaccccctagtggccgccggcttccctcaccatgcattccggatcgatctccttcgtggctctcagcgcgggagacggtgcgctgtgtctttttcactctatgtggatgcggtcattcccgttttgaaagcctccggctttccatcctgggttcgcgtgagtgcgctgtggcctttatgccgcttttgtctattaacaggtgcgccacgtggcgttcctagtggggcccgacggccgatgcctggtcatgcctcgctatacccaatgttttaagcgcccagtgtggtacattgttaccatggggcgctcccccacggacagagttgatgtgatagacagcgcggagaggtatgggcgctaggcttccaattggcgcgcgggctgtggataaaagccatgggacagcgtcttgggtttagtgttatatgggcacgccgcgaattgcaaccccacgtgataccccagaacaaggttggtatacccccaatgtgaaattcgtaacttgttgggacgtgacccttgtctacgtacct

SEQ ID NO: 552007 - DNA, 1332 bp, Homo sapiens
gacacacctttcagcaatggcttggtgactgtgatggttccccagctgcggagggcaaacagccttctcctgtggaatgtctttgacttgaacacccccagtccacaccttcgtggggcatgatgatgtgtgtcctggagttccagtggaggaagcagaaggacgggtccaaggactatcaactgtgtgactgtggtcccgggatcagaccttgagaatgtggcagggtggcattcccaagatgcagcaggcttttgtgcaaaatgaccatcattcaagcatggtgttgcatgcagttccattgcaggagtcatataccctatcattgcctggcaaccatgcaggaagcacctgcaaccacatgcacagcatacgagcatccaccagcaacactgccagccatggggcaggccagcagccctagaacagcaaggatccaccctagaaatctacctgcgcacgagagtgaacatcaagatacaccattgtggcgctgcctcaagcaccttgcagcaatgggaatttctacccatgatcaattgttgcacaatcccgcgcaactgtaccaagtcgtgcgcaggcatgcgatgacgggcaagaccagggcagcattgcacacaagcaggttctagactgacaaacttgcgagaacaaacacaatacgagagtgacaacgcagtgcttgggagtgacagtatcgcactgagcgacacgatacaccaccacaacaacaagaccacgaacgcaaatgtcgacatagacccaaggctcagacaagtcaaaaaccccgccaaggccaagacgccacatacagcaatgccacgcgcacagatgtacacgcacaggacataaaaagggcagtggacatcggagcagggaaatccccgtcggaaaaggggaacaaaccaagaccccgttgagcgagcacagcaaggatggaaccgagccggaatgcggacacaacggcaagggcaatgacaccattggggacgacccaccagtagaacacataggcaggcacgcacacacacagtccggcacagaaccaaagtacccctcagtgaacagaattcccgcgaaaggatggcaaaagcacacagggaaaagaaacccaagacgacgttattaccaaaagagaaaaaacaccacggcaataatgaaagcgatcaccaccaaaaacggtaccgtagaacccaacataccccgacaccacatgaacccgagcaagagaattcagacagacacgggacgtgtgaacccaccaatagggatgtatacaacgaggaggatacaggcaagagcaagtagcagtcgcccgaacagaaaatgccc

SEQ ID NO: 552008 - DNA, 144 bp, Homo sapiens
gtgtgaaaaaatggagtctgtaataaagagggtacccaggtgtgaagagtttatgttctcaggacttggaatgcattctgtcttgacccatcacatttctccgactgccaacttcagactctcccactgcaaccccgaacacgg

SEQ ID NO: 552009 - DNA, 258 bp, Homo sapiens
agcggggattggggtttttatcacccagcagatccccctttcgcatcgccgcggcgccctagctgcagggacccgcggggacgagaacgggaggcggcacgagcagatgcggattgaggattcccccgagccatgacaccgaggaccaagcgctgcgccccgcaggagcaaaccagacgccgctacacagaacacactccaatccaagccaccaaagccacaacgaccaaccccgagccacccacacaaacacccacc

SEQ ID NO: 552010 - DNA, 813 bp, Homo sapiens
ggctcgttctcgtggtggattagagtacggtggacatggtctcggttataatttgatgaggaaagaagctgatcaaagagccaatacgcgcattgctacagcaggtacttttatacatgtactattggagtgagcgagacgagtctctgcgtccgcaggtaagatggaaggaatgggcgtttgtaaatcgaatagtgacgcatcagttctgggcactgctcccaaagagatcgatgtatccaatctgctgccgtcggtgcctgagtgatgcctggagctatgctgggattcttgatgctcctgagcattgagttaataacatggatggttgtgggggtttgatatatatgaaaacctagggatattgagtgtggtataacattctttgtttagtctcttgatggatattaattttgagttgtgatgtgctttgatgaacgatattgtgttcccttcgctatgttgtcccgatgttttaacatagttgctctgtagtgattcttatagtatataaaattatagtgtaaaatagaatgactgccgtctatctcctgctgagaaaaaaatggttaacgatgaattctgcttgttccttagtttggcgaaaagagtgtgctcgcgagttatctactattgttgtatccagcgagtgttgagcttccagcaacctggatggttccccccaattgaaatggttattgagttaacggccttacttaatatggaaaaccgtgaacacattacccaacgggagggacaaaggcatcagtgctgtgtggccgtgcaatttgccaagcctgtccgagcttgaaa

SEQ ID NO: 552011 - DNA, 209 bp, Homo sapiens
  misc_feature (11)..(11): n is a, c, g, or t
  misc_feature (67)..(67): n is a, c, g, or t
  misc_feature (173)..(173): n is a, c, g, or t
attcggcacgngggggaggatgtatataggttacatgcaagtgctacatcattttattttatataangggacttgagtatctgtgaattttggttatcagcaaggggtcctggacccaatcccccacggatactgagagacaactgtattaccttgcatagtatttattcagntccaatctaagtatttaatgtccaacagttatatga

SEQ ID NO: 552012 - DNA, 438 bp, Homo sapiens
tggctgcatgtattcggcacgaggtgtgtgagagtgagagagagagagagagagagagagagagagagtgagagacttacagcccgtgagagtctgtgcgctggttgggttctgtgctgaggtgatatagatgcccatgcattctctcttccccgccttcgttgcctccatgtatgtcatccctgccctgtttctggtggtgcccatttcgattcactatgtccctcctacgtcttatgtttactgtgaggtgtgtgtattcctggtgattgaggtgaccaatctgattgtcatcatcccgtctgtgatttgattacttcgcgctttttactttttgtgcttctatcttgccatttccctgttgggagttcccccatgtggtttccacgttctggtccttcctcctttccatccttctggacgggtcttcccttgtct

SEQ ID NO: 552013 - DNA, 1528 bp, Homo sapiens
  misc_feature (1035)..(1035): n is a, c, g, or t
tgtgctgctcgtcttgcttttggctgtgtccaactatggcgttagtggtgtcgagtgcgtcgtgtctgtgtttacgattgagatggtcggattagatttgatagcattctactctatggtctgttatctgtgattgattttcgtctgggaagcggtcctcttctgcgtccctgtctctacagacgtgggtggtgtagccctacgcataacttcgttgtttaatggggtgttcttctctgacacagtttgtgttgtcttcgcctctctctcgactactctgtgttgtcggccgtctgcaccgctcgtggtgtgttttctcccacagtggggtggtttgtaatctttctcgctgcgctccccctagcggtggggttgttttgtgccaacgggcgctgtgttgctgtctgggtgggtaatagtatgttttgttgagtagcacatctgtgttagtgtgtgtaggttaatgtgctcctccttcggggtgtgtcttgcgccgcatccatgtgttgccgcccgccgcacactacgggggccttgtttgtgttggtaccgcctcccgtcggtgtctccccttgggttgtctcccttcgtgtgagttatttttgttagtcatcctcgtttgtggggggctgtctttctttcgcccccagggcttcttgtggttgccgcgcacgaggacgcgtgtatctgtggggtgttggttgtccgccctctccgtcgggtgtgacaaccccgtgggtgagttgtgtgtacgcgtaccgctgttttctgctcactcattgttgcgtgtgttgtttttctcctcggtgttctctttgaggagtgaggctcgtggtgcccccgcacgcggtcgctctgtgttttgttccccgcttatagggagattatctctcgcctttttgtttcacatccacccggctctccactgagagaggctgtctctctcacgttttctcacgggcacatgctcctgtggagttgtgaacaggatattatgtgtgcgcttgtgtgttgttttctcttgttgtttgtgtngtgtgaacacatctctgtttgtttcacactctctctatgagcgtctttataaccccactatgtttattgtggctctttatattcgcctctctccacgagttctctatatatacctcgaggagggcgcactgggggcttattattttgagattctcctcgtgatagcgcctcgaggagatctgagggctattgtagaagaggagttcttattttaacctcgctggttctgagactttaatggagttgagcacctcgttcctctttttttatttttgagaaaaaaaaaaaacccctgaaagttcttgggaacccccctaaagttcttttgggaatcctttaaaagccactgggaagttaagtatttagctacataaatgttgtaagatcatattcttatgtatagaagtaataagaccctttggaattactggactaattgaatagttaaggtttttattcgggaccataaaatgtattttgaaagtgctgctta

SEQ ID NO: 552014 - DNA, 804 bp, Homo sapiens
  misc_feature (177)..(177): n is a, c, g, or t
  misc_feature (198)..(198): n is a, c, g, or t
  misc_feature (265)..(265): n is a, c, g, or t
  misc_feature (314)..(314): n is a, c, g, or t
  misc_feature (452)..(452): n is a, c, g, or t
  misc_feature (490)..(490): n is a, c, g, or t
  misc_feature (508)..(508): n is a, c, g, or t
  misc_feature (521)..(521): n is a, c, g, or t
  misc_feature (561)..(561): n is a, c, g, or t
  misc_feature (573)..(573): n is a, c, g, or t
  misc_feature (588)..(589): n is a, c, g, or t
  misc_feature (606)..(606): n is a, c, g, or t
  misc_feature (608)..(608): n is a, c, g, or t
  misc_feature (663)..(663): n is a, c, g, or t
  misc_feature (665)..(665): n is a, c, g, or t
ccgccggagatgcctgacgcatctgtctgaggagcggtcagtgacgcgatggagcgggcaagggatcgcttacacctgagacgaactacagaacagcacgtaccagaggtggaagtccaagtcaaacgcagaaggactgcctcacatgagcaaccaagagtgtctagttgtaccgcngaggcgttctcagcgaggcangcaagtacctgttggtggatttccaggctgaactgaggcaggctattcttagctgagacaccaaganggtggttaaacgccagtattggagctagcgaggaattctgattccaagncaagaaagccagggctccatctactcatttggaagcttctgcccagcgttgcaattgtgtctagtgagaagcctgcgtcagtagcctttactcgtatagccttccgcctaggtcttcagaagcatcaagcttttaacntgtggacattggattaggtggaaacagcaatcatgacntgttggcaagagtagcangatgctgcgggcnctattgactataggaatgagatgtatcctgcgaagatggncgaatcttcatnggcacctttaagggnnttggacaagcatatgantntgatcctctgtgattgtgatgagttcagaaagatcaagccaaagaatgcgaagcnancagagcgtgaagaaaagcgggttaagggtctggtgttgctgcgctgcggagaacttggttatccatgactgtggacggggcagcccccatagatactggcattgctcgggtaccacttgctgggagctgctggaggccc

SEQ ID NO: 552015 - DNA, 230 bp, Homo sapiens
  misc_feature (2)..(2): n is a, c, g, or t
  misc_feature (22)..(22): n is a, c, g, or t
  misc_feature (27)..(27): n is a, c, g, or t
  misc_feature (39)..(39): n is a, c, g, or t
  misc_feature (42)..(42): n is a, c, g, or t
  misc_feature (54)..(54): n is a, c, g, or t
  misc_feature (59)..(59): n is a, c, g, or t
  misc_feature (70)..(70): n is a, c, g, or t
  misc_feature (81)..(81): n is a, c, g, or t
  misc_feature (85)..(85): n is a, c, g, or t
  misc_feature (91)..(91): n is a, c, g, or t
  misc_feature (112)..(112): n is a, c, g, or t
  misc_feature (121)..(121): n is a, c, g, or t
  misc_feature (124)..(124): n is a, c, g, or t
  misc_feature (141)..(141): n is a, c, g, or t
  misc_feature (148)..(148): n is a, c, g, or t
  misc_feature (155)..(155): n is a, c, g, or t
  misc_feature (162)..(162): n is a, c, g, or t
  misc_feature (166)..(166): n is a, c, g, or t
  misc_feature (189)..(189): n is a, c, g, or t
  misc_feature (204)..(204): n is a, c, g, or t
  misc_feature (212)..(212): n is a, c, g, or t
  misc_feature (218)..(218): n is a, c, g, or t
  misc_feature (225)..(225): n is a, c, g, or t
cnaggtcgcacgcgtgagactntcttnggccgcctccgncgnagacgccgccgngatgngctacgtccgncctcctacctngctngggctngccccaggggggcaactcccnccccccagncgnccaagggacatccaagnaaggatncttgggncaggcgngggntatcgagggcggacgacgacccnccctcaacaaggttnatcagtgnagcctngaatggnaaaaa

SEQ ID NO: 552016 - DNA, 199 bp, Homo sapiens
aagcgccggcgaaaaaaaaaaaccgaaataaagctgtaatagatatacagctatgaaaagtataatgtgttaaatgggttttggtaaatttcgattgatcattgtcatgtcaggtttgaatttttgtgttttctcagtatgctcatgtattttgagagtatcgcactccgtatacatttaagtaacagttagtactgcc

SEQ ID NO: 552017 - DNA, 370 bp, Homo sapiens
  misc_feature (343)..(343): n is a, c, g, or t
gatacaacagttgatatacctccttttaatttcacacagggtcttgctttgtcacccaggctgcagtgcagtgctgtgaatcatggctcactgcagccttgacctcctaggctcaaatgatcctcccacctcagcctcctgagtagctggaccacagggacatgccgcacatctggctaatttttgcattttttgtagagacgaggtctcaccatgttgccaggctggtcctagactcctgggctcaagtgatccccttgccttggcctccacagtgttaagattacaggtgtgagccatggcacccaacgatatcccttctttttaatggcaaggatctttncccttgcaacaactttcaggcctcggc

SEQ ID NO: 552018 - DNA, 138 bp, Homo sapiens
gcggccgcctactactactactactgctcgaattcaagcttctaacgatgtacggggacatgtttttaatgttgtctgtcttctgtgctgttcctgtaagtttgctattaaaatacattaaactataaaaaaaaaaaa

SEQ ID NO: 552019 - DNA, 474 bp, Homo sapiens
  misc_feature (117)..(117): n is a, c, g, or t
ctgacatgatcatccttgcacggctataagcgcgtctgcgtctggtgtctaacgtgcaccgtgtgaagctctctgcgtcctggtgtctgatatgcaccgtgtgaagcgctctgcgtnctggtgtctgacaggcaccgtgtgaagctctctgcgtcctggtgtctgatatgcaccgtgtgaagcactgcgcgtcctggtgtctgatatgcaccgtgtgaagctctctgcgtcctggtgtctgatacgcaccatgtgaagctctctgcgtgctggtgtctgatatgcaccgtgtgaagcgctctgcatcctggtgtctgaaatgcaccgtgtgaagcgctctgcatcctggtgtctgatatgcaccgtgtgaagctctctgcgtcctggtgtctgaaatgcactgtgtgaagcgctctgcgtcctggtgtctgatatgcacatagttcagcgtctgaggggatcctcagagtcgat

SEQ ID NO: 552020 - DNA, 490 bp, Homo sapiens
  misc_feature (14)..(14): n is a, c, g, or t
  misc_feature (62)..(62): n is a, c, g, or t
  misc_feature (65)..(65): n is a, c, g, or t
  misc_feature (195)..(195): n is a, c, g, or t
  misc_feature (204)..(204): n is a, c, g, or t
  misc_feature (206)..(206): n is a, c, g, or t
  misc_feature (223)..(223): n is a, c, g, or t
  misc_feature (248)..(248): n is a, c, g, or t
  misc_feature (260)..(261): n is a, c, g, or t
  misc_feature (283)..(283): n is a, c, g, or t
  misc_feature (338)..(338): n is a, c, g, or t
  misc_feature (366)..(366): n is a, c, g, or t
  misc_feature (480)..(480): n is a, c, g, or t
actggggatatggnagggtttcgccttcaagcacagccaagagaccctcctttgcccttggngtnttctcctgaagagcatggctgttttccccatggagaaaatgaggtctccagaggtttcctgccttgcccaatatccaccaaccccctcagaatctagaccccccctgtttgttcctcatctcggccaggntcgggggananccccattttgcagagtnagccccacccccaccttagcagganaaaacaaaaaannaaaaaataaaaaataaaaaaangagcggataaattctattaggttctccaactgctcctccaggcgctgtacaactncatggttctcgatgacccagtcaaagtncccgaagttgtacaggccacattctgactgagcatcgtccacccctggtgtgaacacccagccccgctgctgttggctcttctccaacgctacaacgcggaccgtctgcgttanggccccatag

SEQ ID NO: 552021 - DNA, 696 bp, Homo sapiens
  misc_feature (334)..(334): n is a, c, g, or t
  misc_feature (525)..(525): n is a, c, g, or t
  misc_feature (596)..(596): n is a, c, g, or t
gcggtggggtgaaggatggcgagccggacataccattgttggatgtatttttcttaaaacagcaataattagccatattcaaaggacgggatgtacctgtgctgtgtgcactgtgcaccgtgtatgaggcgtgtgtgtggtgtgtgcaaagtgggttcattggcatatgtagtagctgtagagacatgtgtgctatggtgtgaagccttagtcgcacgatgcagtagtagtaggttgcagtaaggcatgctacagggctgctgagctagtgcatagtgctggtgtacgatctgttgtatatagtggtggtactagtgtttgaagtgagtgttgngtggtacgatggctgatgcagcggacagctgttattacgagtgctgacgggtgctgagtgatagcagcaatgatgctgccgatggtagcagtgcatgacttaaggtagatccttaggggatactgccgaatagatgcgaattgctagcgatagatgctaatgacacatgctgacggtgagtgaatgatgcnactgcatgcaagctgctatgtgctagtcgtagctagaatggccgacgagtgataacgttcgagtggttacntgtcgtgcatcgaaggggagaagcaacaaatagtggtcatttgaggtggatcattgaagatgacgattacgactatagacataatggatagtacagtgaa

SEQ ID NO: 552022 - DNA, 531 bp, Homo sapiens
ggtttcctgtggaaaaccttcagtggggttttgcccttgggctcttggctctgggctggaggtccccgtgtaagggaggtacccctagaaggtctttagtacaaaactgctctaagggccacctggtgattcctccccaagggatggtttaaatttcccataaagagttttccctttcccaaggttttcatgaggccaggcgccatatatgataaattatgttccgtgataacttggttttcagaaatcagccagggggttttcccccccatgattcccctttgatgggtttttaaaaaccaaaggggttttgaaaatctttaatggctccgaaaataaaacccccccgtttggggagggctatatttagatttttttagactttaggggaagccctttggaaaggccctgccccccgggcttggactgctaaaagccctttttgtttcccttttgggggaaatggatttatgggggggctttaaccaaatacccatccttataggctgaaataaaatgaaccttccaata

SEQ ID NO: 552023 - DNA, 785 bp, Homo sapiens
atcatttatggggtgattcatctcaaagaagcaaatggagggtgggggcggtggctcacacacctgtggtcgcagcactttgggaggctggggcaggcaaatcacctgaggtcaggagtttgagaccagcctggacaacatggtgaagcctcgtctctactaaaaatacaaaaattggccgggcgtggtggcgggtgcctgtagtctcagctgctcgggaggctgaggcaggagaatcgcttgagcctgggaggcggaggttgcagtgagccgagatcgagccagtgtactctagcccggacgacagagggagactctggaagaagcaaatgggctgcagaacaggttgtctctgggcccggtgcggtggctcacgcctgtggtcccggcactttgggaggccaaggcgggtggatcacaaggtcaggagttcgagaccagcctggccagcatggtgaaaccctgtctctactgaaaatacaaatttagtcagggcatggtggcggtcacctgtagtcccggctgctcgggaggctgaggcaggggaatcgcttggaccgggtggcggaggttgcagtgagccgagattgcgccactgcactccagcctggtgacagagtgagactccatctcaacaattacacacaagacacacaaaattatctgtggatttggcctggcctggttgaacctcacttcttgcttgtcctaacacatagcttgaaccagataattctcttcgaattttctaccctagatgatcttgtgggccaaaacaggaccca

SEQ ID NO: 552024 - DNA, 154 bp, Homo sapiens
cccttcgacttggcgggcaccttatgcgcgcttacctatcttaccaacgcttcgagtgtcagagattgaagagtacaaagtctgaccaagatgttgatgttggataagagaattctactgctccccagctcgtctaagttgcccgccaatcgaa

SEQ ID NO: 552025 - DNA, 317 bp, Homo sapiens
caggagttacagaccagcctggccaacacggcgaaaccccatctctactaaaaatacaaaaaattagccaagcctggtggtgcacgcttgtaatcccaggttcttgggaggctaaggcaggaggatcacttgaacccaggggaggctgccttgagctgagatcgggccactgcactccatcttggacatcagagcaagactccattttataaagaacaaagaaagaacttcaattttttaaaagttttttcctttcattgaactccattcataggctttccattcagagcataaagattaattttaaaacaaggctt

SEQ ID NO: 552026 - DNA, 309 bp, Homo sapiens
tgtgcctggcgcactatactatagtaccgccggggagatgatgaagagattataaccaagcatcatatagcaaggactaaccccatataccttctgcattcatgaatttatctaggaattaactttgcaaggatagcccaagcttataccccctaatccagaccagctacctacagaacagcttagagagcacacccgtctatgttgcacaatactgggaagatctataggtagaggcgacgaacctaccgagcctggtcttagcttgtttctctgcttgtagtgtcatagttcacttttaaatgtgcc

SEQ ID NO: 552027 - DNA, 193 bp, Homo sapiens
cgaaacagtgtgtggtatgtttggaagaggtacatatactgctgttatcattttaccagcaaaccacctgccatgcaagggctttgacagcagcaatagctgcagcaattgatgggcgcttcacatacacattgccctgagctgaatttttgtcaagcctaaatttgaataactcctccatgtttattacatt

SEQ ID NO: 552028 - DNA, 428 bp, Homo sapiens
tcgtgacaaattttggtcaagtgtctccattaaaaagtactgatgttaaaaactaataacttaaaactgtcatacgcgataagagactaacaagagtggtccacaaagatattctcctttccttctgaaggttttacgatgcattgttatcattaaccagtcttttactactaaacttaaatggccaattgaaacaaacagttctgagaccgttcttccaccactgattaagagtggggtggcaggtattagggataatattcatttagccttctgagctttctgggcagacttggtgaccttgccagctccagcagccttcttgtccactgctttgatgacacccaccgcaactgtctgtctcatatcacgaacagcaaagcgatccaaaggtggatagtctgagaagctctcaacacacatgggct

SEQ ID NO: 552029 - DNA, 858 bp, Homo sapiens
  misc_feature (13)..(13): n is a, c, g, or t
  misc_feature (438)..(438): n is a, c, g, or t
gggtgtggggtanaagtgggggggggcgcccttttcctctttcctacccttttatggctctgtgcaccgttccacagtggagattatggtgacaacttgcagtctgttcagccactctgtccggtcaatgactctgggcaggtaactcgctctccaaccttattacaacagtatcttctgggggggcgcggctaacttgcgccgaacgcctgcattagggagggcgcaagatttattacttgcgttgcgctcgcctcagaccagttgcccacaaagttactagaaaaatgccttaccaatcgcgaaaggattgcttagccccgtcgatggggcacgtgcccccaactctgaaccacgtgtttcagatcgtgccaccgcccctggcggcttgttttcttatccagctttgccctcccgcaacggtgaaaaatacccgcntaattttccggggcatctgtgcctctctaactacatgggcgcgaaagctagacccccgccctccaggtccaggaaatttgggtccggggaacgtccaaatcgtttcttatctgcgtaaacgcagtggataatagccggccgagcttgtaataaaaggctataaaattccttcgcgccccggtccctactgtgcaagaacgtctcagtctcgcagagtgtggcgggtaattccgctataattattcatccacaaccttgtataataaaaaaaaaaccttatgacagactctttcaccctcttaaccgttgcccaacacacatatgcaccaatccattttcagcttctgttcggcgccccttaggtatatatattatcttggtggccattctgccgtgccacgggagattaacaaattaata

SEQ ID NO: 552030 - DNA, 693 bp, Homo sapiens
atttttgtacagatggtgttttacacattgctcaggctggttttgaactctggggctcaggtgatctgcccatttcagcctcccaaagtactgggattacaggcatgagccaccccgccagccccatttcattacgtagccacatggttgtgtttcacagttcactgcagcctcagcctcctgggctcaagcgatcctcccaccttagtctactgagtagctgggtctacaggcacatgccaccattcctggctgatttttaaaaaatttttttgtagagacagggtctcactatgttgtccaggttggtctcgagctcttggtctcaggcggtcctccctccttggcctcccaaagtgctgggattacaggcgagggtccccacacccggcatcacatggttaataactatgacttccgacgtgggcgcaggggttcacgcctgtaatcctagcactcacgggaggctgaggtgggggaatcgcctgaggatcagggagttcgagaccaaggtctgggcaaccataagtgagaccccgtctgctacctacaaaatccagggtaaaagccagcgcggaacgcgggggcactgctgctcggcccagccagtgccacccaaggtcgacgttcggcgcgcggcgccttgacctgctaggaggccggcgcagcgccggggctatggcgcggcgcacc

SEQ ID NO: 552031 - DNA, 1381 bp, Homo sapiens
gtggcggtgcccaggtggagcgcgtcgggcccctggatccgcgggagaacggacaaggttgcgggaagtctccttcacatctcgtctcaacagcccaatttctgtgtgccgctgtgtgctgactgtcatcataccggaccataatattgcctcagtagaattatgcggagcaaggcatccgaggcccatgaaacgtggaaccagagacacacagagaacggagcctggttgtccacgaacagcatggttcagcgtgaggacgtgcaataacataggtgccgtggtcacacgggtagagcttgccaacagagtctcactcgccaactgtgctctgataagtgcactgacgccgaggacattctctcgacctagggacgacgaaccgttggtgtgtcgatcgaactaagtccgctacgggtcgtcaccatggtgtcattgtgctgggcctcatggtggtccaaggcgtcttgcattcagcgtgagtggatactaccgtatccgtggccaagagatcgcttccatgggcaccactacacggccatggagccccttgccatctagttgccgaacggagcatggaacaaaggaacaaccaacgagagttgtaaatcggtagtttggctgtcggggcacaaccagtgacgatcggtcacattcccacagtccaaacgacgtctgtcttaggaaccctgtcaagcgctgggtgacacgacaagtacctggcgccgatcacttgtgcattgtccctcaatggacccttcagcaagtggacgtccgatgggcactatcccccattcgtgcgcacgacagggacggcgccaagcggccccagcacgccataccgccacacaaggatgcacccatttggtgccccccgaagattactcgtgcatttgcacccgcacggggcacacctcggctggtcacagctggatcgggcgcacacccgggactggtcgccacattgagcttcacgtccccggacccccggtgtcgcccagcagacacacctcttatcctctcgaggacatgcctgatgggagaccgtcccaagacgccaatcatggggggaaataacaaacatacaactccgacgccgtccaacggaacatatcgggccaggtgactggtgatcaccacgtggtgggacccaggccgcgaccggacggaaatggggtccaccccaaattcacgttgtggaccccaagaaacagggggtcgcacagcggggacaccgttttcccaggaggaacggacggagagacaccgggtcgagacgaacacaaagtcgcactgacaaccataccacgaagagacagcgagacaacacgcgtgagcgacgaccgagcgaagagcgtgagcagccacacagaacaccaca

SEQ ID NO: 552032 - DNA, 185 bp, Homo sapiens
cccacaaagactcgaaggagcaagcactgatgagcgagaagtagaaaaacagggcgcttcgagcgctaaacgaccagcttttggcggagcttgcccgaatcgcttctgtaaaccagcgcctccttttcgaaatggctgagttaaaagcggtctccagcggaaaggttgtggctctgactcagaag

SEQ ID NO: 552033 - DNA, 318 bp, Homo sapiens
ataaaccggtgctttttgatacattgttataccattttagacctggtcacacttaaatttcattcatggacctgctgttttactagacagcttttcaaatatattcatgctatgccaaagaaaaatgtttcacatttattcttcttagttacacatcttttatatctgaaaatagtgttctcattatttagaacaatggaaaagactacttagttcaggttaaaaatcaaagaactgaattagtttgccaggaagaatatctgaaaacattattcctcaaaccttggtaatgaactgtgtctccacagatttacacac

SEQ ID NO: 552034 - DNA, 648 bp, Homo sapiens
ttaccgtaagcataaccaacccagtgatgtatggacctcgctgattggtagcatgttgggagggcaccgcaactacctcaatggtgttcggggctggtgctgcactagacggaacctgtgcgctctgcccgtcgatacctggccgcctttacaaggaagacgatgtggtattcaagaaggcccagaaatttggagaagcggatgaagttctcctttaattacgaaatcagctccttggtactcccgtagagggtgatcttgaagtactccctgtattgagaaactttcttgaagaacaacataacatgctagttataattagtgctcaccactcggacgagataactcgtaaatccagggtaaatccttatgttgcccaacataaactcaccgggctggcaacctggaacaaaagtcctgatccagtaatcacacttcttttacctaaacaggacggaggtgaaattgtagctctaatactatttcagctcatagatagtgacatacatctttagcgagtctttatcttctcagagaattgcatccctgccaggcctaccacataccaattcccctggaattagttgtcctgaagtccgctgtgaaatacaacggtacgaactcaatcgaactggctactgaaaaagg

SEQ ID NO: 552035 - DNA, 159 bp, Homo sapiens
caaggttaagagaaagcatcagcgtcagacattccctgaacagaaggagggctggatggccttcatgacacctcacaaatacaacactttcacatgatttggccctatactgttaattttcagtacagacattatagaataagtcacttcattcttttc

SEQ ID NO: 552036 - DNA, 988 bp, Homo sapiens
  misc_feature (988)..(988): n is a, c, g, or t
agcggagctgtttgtctgttcgacacaggcttggggccgaagggggagacggagccccaggagttttgaagcctggaaatcccctcccttgtgtgatctcatgagccaaaaagacagtgtcctgggtctagtcagcaaacaagtatggagctagcacaaagagctagagagataacctccgatccctacaccgtcgagacacacaagacccactacggtaacagcaaactgagccctggcctcccaaagggctggctcacatgacaggatccgtcatggacacttggaaaacagctatcaggaaacaaatcaccaggcaggatgtaagcacactgagacttactacacccatactcctgggtgctatgagggttaaatccacctacaggacatatagccgttcgaaaaagaagactcatcttcacgtttcggactataaaaggtaccaaaggacagaagacttacgtaatctattggatccctacgattcaactaggagtatccctccacaaagcttctgcagagagagtggctgctgacgtcctgtacaagtcaccactctgtgacttgtgtagcagccccctgttacttgaagccgaactatgaatacgtctacacgaggattgcagacgaagtgtgtggatcctggactggcaggcaagaggtaacaggtgaaattacacttaagggccctggtcgaagaactacagacaaggcaagaagcgaaacagagaccgaagaaagaggtaaaaaaggaggacaaaaagtatagaagacatgagcatccagaacgaaggaaagatccattgacgacgaaaaagaggcgcaaacgaacaaccgccaactaagaccctcacaaacaataaaggagcgactccaaacataggtatgacgacaatatgcggcaaatgatagcacagaaaaaacgtacgcgaagatctacaacaacaacaacagaacaagagagaagaaagaatgatgtcctatn

SEQ ID NO: 552037 - DNA, 387 bp, Homo sapiens
  misc_feature (60)..(60): n is a, c, g, or t
  misc_feature (65)..(66): n is a, c, g, or t
  misc_feature (70)..(70): n is a, c, g, or t
  misc_feature (72)..(72): n is a, c, g, or t
  misc_feature (74)..(74): n is a, c, g, or t
  misc_feature (87)..(87): n is a, c, g, or t
  misc_feature (98)..(98): n is a, c, g, or t
  misc_feature (119)..(119): n is a, c, g, or t
  misc_feature (132)..(132): n is a, c, g, or t
  misc_feature (169)..(169): n is a, c, g, or t
  misc_feature (218)..(218): n is a, c, g, or t
  misc_feature (251)..(251): n is a, c, g, or t
ggcagctgttaacagataagttaacttgcatctgcagtattgcatgtaaagggataaggntagtnnttancnangcgggagtctaantatcaccaggnacttctccgaccccttcctangggattcaggatngagaaatttccatcgagccttttaaaatgtaggactngtacctgtgggcttcagtgatgggatagtacacttcactcagaggcatntgcatctttaaataatttcttaaaagcctctanagtgatcagtgccttgatgcccactaaggaaatttgtttagcattgcatctctgaaggctctatgaaaggaataccgtgatgtgctgttgtctgctgctgcagcagacgacagctaacggaagccaagtaacttta

SEQ ID NO: 552038 - DNA, 201 bp, Homo sapiens
gtttcaacccacggggaggctgggctgggggctccgtgcaggagtcgagccacaaggcatcttgagcgtcccctgcaagagcatcaagataaagccaggataattaacgccgtcaggcctggggcgactccactaaatcctttgtggcggcctgaggctgccgtctctcctccaagggctgggggtccccttcccatcttt

SEQ ID NO: 552039 - DNA, 664 bp, Homo sapiens
agaacacagattgatgatttaacgaaactttatgaatgattttagggttacagccaagatcctacttctgtaatctatggatcaactactaaactaaactagagagggagaaaaatcagacgagatttgatcgatagacgacaaaattcgtacaccagagtgctatggattctttcattgaaaactagcagcagcgaactgtagccatgtggcagcagcaaggccgaactatgccccagtcatttccccttcacatgacttacgtaacacggagcacaagaggggacctgaggtcaccttcccaatgggggttcatgcacttccatgtcccagcatgttaataccatgataaagacgatcaggaacgcacaagaacagacgcagactgagcaagttaggaaatcatacattgaatcccaatgcaagacggagttcaacccaacgttaccttctctcgagccaagagccttgctactaccccaagcttcacctcgggctcaagcacaacctagcccatctatggtgggtcatcaacagccaactccagtttatactcagcctgtttgttttgcaccaaatatgatgtatccagtcccagtgagcccaggcgtgcacctttatacccatacctattacgcccatgccagtgaatcagccacgacat

SEQ ID NO: 552040 - DNA, 625 bp, Homo sapiens
  misc_feature (9)..(9): n is a, c, g, or t
  misc_feature (87)..(87): n is a, c, g, or t
  misc_feature (242)..(242): n is a, c, g, or t
  misc_feature (276)..(276): n is a, c, g, or t
ggggtccanaaaccgaacccgttgtttttggtaatttgtggcgccccccattgttttcccccggagaagggcccctccaaggggggnatttttgcgcgggcccaaaaagcgtttcgccggagaggggtctcttttttggggtgtgtccctcccaggggtggttttctccccaaatagaggcgggggccccccccaaaaaaggggctttcctggggtttttgtggggggggcaccacccccgngtttggttttctaaagagaggaggagggcgcccngggatttttgggtggggggccttttccccccccccaatggggggggcccccccgggggcgccccaaaatttaccccggggggttttttttccccccccccttggggggggaggccccccaaaaaatgccccccccacccccggtttttttttgggggggggccttaaaaaaccccccccccccttttaagggtgtgtttttttttccccgggggggccccgtttttttaaaaggggcttggggccgggggggggtttttttttttttccccccccggggggggggctttttgggtttttttttgggccccccggtttttttggccccaacccccccttcccccttttta

SEQ ID NO: 552041 - DNA, 104 bp, Homo sapiens
ttgcatcttgcatggtcgtctctacacggatccccttcagcatttatcatacagtaccttcctacagtattactgactaattttggggtgggtgtttatcacta

SEQ ID NO: 552042 - DNA, 166 bp, Homo sapiens
  misc_feature (147)..(147): n is a, c, g, or t
cacgtagagccgtcccaatcaggatcccgggattgaaggtctgtctaggtcggcctgttcaccaccaactctacaagttgctgtcttccactcactgtctgtaagctttttaacccagacagtatcttcataaatagacaaattctncaccagcacatcttctagg

SEQ ID NO: 552043 - DNA, 1854 bp, Homo sapiens
  misc_feature (336)..(336): n is a, c, g, or t
  misc_feature (340)..(340): n is a, c, g, or t
  misc_feature (348)..(348): n is a, c, g, or t
  misc_feature (386)..(386): n is a, c, g, or t
  misc_feature (553)..(553): n is a, c, g, or t
  misc_feature (571)..(571): n is a, c, g, or t
  misc_feature (1245)..(1245): n is a, c, g, or t
  misc_feature (1279)..(1279): n is a, c, g, or t
gacactttaggttccggatgactacgctgtgaggtgaagcatgtctcgaaggcgccattcgcacgacgaggcagaacgacggttggccgatcgcggctttccgtgaaactggagacagcctgattcctgtgcaaagcttgtaccaggcgatcaagtgtcgtgaccggtgacgcagcgtgagcccgtgcatggtgaccgacggtacccgtctcaggtgatgtaggcaagacgtagggtgtaagaccttgcttaattgcaccatgagtacactcgtctgatctcttatgatgtttatgctctgctgtgggacaacctccggaatacaatcctctaggngtgnattggcgntttgtctgtctctataatatggtcgtctgcctctgagntatctgctcggaaagactagtgaagaacgtgccaagcaaccgaacacgtctcgggccggtgcacacgggctaaccccacgacagacgtgcatgtgtggcatgaggtgaggtttccattcacccggagtgttcatgtacatgcctggcatgtgcgtgttatctatacntctctgtctacgcaagcntaaaaaccaacagttatctctggtaaacgtgcgaagcatcacaagggggatagacggtttggtgggctctctcggacagtctaatctgcttaccaggtgggaaagcgcacgcaaaaaccatgtggtagcgcccaagggctcttcgtacccagtacgagtttactcgccccagtgatagacacccccacctgggatcaaccggtggtactgggttccgtttgtcggaccgacttcctatggaggggttccgttatcctatccaatctgtctcgtgttttggtaggctccaaaaaaagcggggccctattgttgggcattatgtacacttggaacaaatttgagggtgggctttggcgaaggaatgaaacaaacgccatgggtccgttggaagttagacggggaacatgttaggagcagcttttcggttaaaaggcccgtccgaatagtctggttgatttgttagaggatttacggccaggtctctgggggaggcaaaattaacgtcgttaaaaaagaccagtctattgctgtaaggacacgaccaaaaacaattgtgtttagctttggcggagcagaatgtatcctacctctggtaaccccacatatagggcctggtgtaagccacgggagacgacttttttttgccgacttcgcgacggcaacaaaataggaancctcggtgtctcaggtaacttcaaagagaaacgngttattctcacgcagggcgcgccccttgtatattttcgcgggcagtccaaacgtttatctctagaaccacacttgtggtggctactccctttttatgccctaaagaccaggctcttgagaggcagattttctttctgtgtcccccggttggggcccatgttctgtgggcccgttgtctataactcgcgtgggggtggggtgggggggagtcttggccctttaatggccccgaaccatagagttggaggaatggggctcaaaggtgttgtaccccaagcggagccagtccggggggcaccgtacccccggtgtgtgtcaccgaacaccccaacagcagaggagtagctcactgcccaacaaccctggtggcggtgggcaactacccaaaaagagagggcccgtggaacaggagcccaacacagagtgtcacagcgagacgacagcgagcgaggcagcggcggggaacaagcaccaataggaacatactcgaggcgaaacgcagaggagtcacccgtgaaaagtaggacatagtcgagcgaccagagcaaggactgtactacatcagcggacgagag

SEQ ID NO: 552044 - DNA, 1015 bp, Homo sapiens
tggaccacgcgctgtagtatccgtctgcgtgctgtcctgtgcccaatgatgacttaccaatgacagacgctatgactgagtgctgatgtgaatccaaatggcctatccccttgcctgatgcccacctcaccaatgaagctactgtgacctctgttcagcagtcatgtaactataagcatgctatcgtgaaaggagccaatgagtgccaccaaaaccctcaacatggggcatctctgatgttcatctgttgatgcgctagcagactgcctgagccactggcagatcattcttgcacctgcctgctgctagtgtgaagacaacgaatgtgccctacgtgtacctgttgcgctccaatgcatggccctgtggtgagacgccatgttggtggtctcccatgtgcctgtccatctgcctgcttcttgtccacccatctaaagaatggctctgctagcttgcacacacagccagatccaaatccatatcagacacgtacaccattggaatcaggctactatagtcctcacacacctgtcgcgccttcttgcaacacagatagctaccccttgacccagacctataccaccacctagagagtactgttgtatccatatctttactcctagctgtctccagccaatttgtaacggcacactcctgcaccaccgcctaaccctgcttcttaattctgattcaacgtaaaacaaacttgttacaggtacccctaacacactcctttgggcctatcccatcgggcactccttccccggcacgtttctgctcacacgcgtaggctgtacacttgtgtaggatgtaaacaatgacgagccatttcgagccgtaaatatcgcccccgacctttgatacccataatatccacgctatccccctgtccacagtttccttgttgacaacttacgccattccaaataacccctcatgcacattaccctccgcaccatgttgacacctgggaaacacccaccaggtgcctacgaggaaagcaccagcacaagac

SEQ ID NO: 552045 - DNA, 928 bp, Homo sapiens
tggtggagaagtgagtgagtgctgtgctgagcgtgcattagcgaggagtgagtgcgtgcacagtatgaccggcagatccgcctgtggggactggaggcccagaaacggctgcgggcctctcgggtgcttcttgtcggcttgaaaggacttgtgggctgaaattgccaagaatctcatcttggcaggagtgaaaggactgaccatgctggatcacgaacatggtaactccagaagatccctggagctcagttcttgattctgtactgggtctgttggcctgaaatagtgtgctgaagcctctttgcgcagcgagctcacgaatctcaaccccattggtggcactgtgacaggctggacacttgagtgatatacgagaagcaaaccacgagctcattatttcactcaatatcgatgctgtgtcgtctgacttgctgctccagggcatgtcatagttaaacgttgaccagatctgtcacaaaaatagcatcaagttcttcacaggcgatgtccccggctaccatggatacacatttgccaatctaggagcagccatgagtccgtagaggagacccctaaagttgccaaagttagccacggccgtcgcccgatgtggccctgacaccaagagatcaaaacttgattcttctgagacaacgatggccaccccgaccgtggtcttctgcctgtccaagaaccctgaaggtgcacctggacgcacagagcaaagcacgcgctagatcctgaagcgtccacgagctcggactaactatcctagcttcaggctgcctcaagagggttccgtacagaattcagcgaacgacgatcccagctactgtcatcacctctcgtgtacgactccgcgaagtgactgccccaccctcagcacaagagtcagtagcacaaagagcacgacagatccagtgccctt

SEQ ID NO: 552046 - DNA, 151 bp, Homo sapiens
atttaaattgatcagatggtaagatggtttgttgctggagggctgctgttggtcttggagcattgtgctactatggcttgggaactgtctaatgagattggagctattgaaaaggctgtaatttagcctcaagtatgtcaaggataagatt

SEQ ID NO: 552047 - DNA, 116 bp, Homo sapiens
ggacgggccagagaagatcgtgggcatgtcccaaacttgtactcaatgttcttaattattaataatgtgaaggaaaaaatgtatgagtaaaacaaaactccaaaaccgtttaaaca

SEQ ID NO: 552048 - DNA, 518 bp, Homo sapiens
caggaatcagaaaggcgagatgtggcagaaaggcagaatgtagggaatgtgtgagtatcccacagccagctcacagtgcagcttgcactccgaacggagactcaggcacacaaggtctcaggatgcacagtatcagctatggccacatgtacctaggctggggagagggagaccattcacacgcctgtgcttggccgggtgtggtggctcacgcctatacatcccagcacttagggcaggctgaggcgggtcagatcacttgaggtcaagaggttgagaccagcctgaccaacatggtgaaaacccatctctactaaaaatgcaaaaattagacaggtgtggtggtactgcacctgtaatcccacctactacaggacggccgaggcaggagaattgcaagaacctgggagtcaggagagttgcacgtgagccaaagatagcgccaatgtactccagcctgggtgacagaatgagactctgtctccaaaaacaaaacaacaacacacaaaagctgtgct

SEQ ID NO: 552049 - DNA, 453 bp, Homo sapiens
  misc_feature (406)..(406): n is a, c, g, or t
  misc_feature (424)..(424): n is a, c, g, or t
gccaatttgctcgcagtcttaattccactctctaagaatgatgagtctttccgttcacttctgcacagaagacaataatccccagcagggtagggtggtgtcctatgattcatgccaaaactaaaaggagtctcgaagtagcctccgggggcggcgccgcccgcgctcgcgcccgcgccgagaggcccgttggccgccgccgcgccgcccaccaggcatgccgcgctgcccggggccgccaggcccgcggcctgggaaccgcgcagcgccgccgccgggccggccttgccgctgctcgcgccgccgttacccccgcccgagccgccgccgccgccccgcttgttcttccggcgcttggccccgcgcttggcgtcggctgggctcatcgcgttctgacgcagggcgngaagagcgggcgcggggnccgcagcaggcggcggagggcggggaagg

SEQ ID NO: 552050 - DNA, 140 bp, Homo sapiens
cgggcatgcggaacaccgtgggacgctcaaagataatgctatgttgtaatacctgaagattgctcaggacctggagatggatggaatcaactatttcgagacaaaaaacaagaaaggaacagacctttggcttggagttg

SEQ ID NO: 552051 - DNA, 181 bp, Homo sapiens
aagatttaaatgttctatataacacttagatttctgatattttggaagaagttagaagttaatgaaagcaaactcagataccaattttctggaaaatatccatgtggtaatggtagactttttaggtggcactgtttggactctgggcactgtttggactctgagcactgtttggactctg

SEQ ID NO: 552052 - DNA, 131 bp, Homo sapiens
  misc_feature (63)..(63): n is a, c, g, or t
ctaaggatccgggatggagctgagctggatcaatctgttctgctctatgtcctattgagctgnataaatgtactacgtgtttcagatctgcaacattacaggcacagggcgtcactatcagtcccagctgc

SEQ ID NO: 552053 - DNA, 180 bp, Homo sapiens
gaggtcggtctatgaggactcccgattcctgtactaagcacatccacaatggcccttttgtcgagatatcatattcacaaatgagggggggtcaagatgtgcactctctgattatcttctattatctatctcgatagatagatcatagattatctatctctctagatagataattagatt

SEQ ID NO: 552054 - DNA, 648 bp, Homo sapiens
atagctatcctgttaagtgtcagaggagactatggaaagccattacatttcttcaaagcgctactcgataaccagtggtaaggagatcacagagaagtgattacagacattgccgggtaataccagctgagaaaattgatggagtatttgctgcctgtcagagggctctttgacaaactagaagctgtggtcaaggtaaagtcagcttactaactttggggaaaggaatattaagtcatcataccaaaagttttttttattataggatttaatagatgagggtcatgcagcaactcagctcgtcaatcaactccatgatgtggttgtagaaaataacttatctgataaacagaagtctattatcacagaaaaacttgccgtaagtaggtactttgcacatgtcaatggaacatttaactacctgaaggatgctaatttcttaaatttttctcgtaggaagttgacaaatgcctagcagatggtgctgatgaacatttgcaactcatcagcctttgtgcaactgtgatgcagcagttatctcagaattgttaacgtgaattatctcagaattgttaacgtgaatatatctggatggggggttttgtaaataatgaagttgtaataaaaataaaatgaccaaaagcaaaa

SEQ ID NO: 552055 - DNA, 473 bp, Homo sapiens
acggcggccgcttcgcacgcaacgcagcaccaaatcgtagtcctgcgaaccgtcgcactcgctacgcgtcaagcccactcgcttgatcagatcgtgttcgaaactgaccaggtgtcccaggtacatctgcgccaggaacaagtcgtagttccaatccggcttgaagtacggattacgcaaccggccatcctcacccaacatgtcgtggtcggtatagacgacagcgcttcctgtcttgatatggcaatccactaccgccgccaacgcgttgcggtcgagcacgtcgtcgtgatcgaggaacgtcacccaccgtccgcgcgctgacgcaagcgctgcattggtggtggccgcgatgccggagcgcgtttccgaccgagtgacacgcaggttgggaatgcgcttcttgaactcggccagtatccggcccacgtggggctcattggacgcgtcgtcatggatgcaaatttcccagt

SEQ ID NO: 552056 - DNA, 266 bp, Homo sapiens
agtgaggtgaggatagaggagagggcaagggagagcaagtcgattggggatggagaccgccgttcgtggggtatggggaggggcggtcggcttgtggcagaggagatagctcatgagggagacggtagggaggtattctcctagcgtgagcagttagaagggggcctgcttttgtaagcaggaaagggcgtgccgtatattaactcacaatggacgtgaggaaggagggtgcttatgggacgtgggtcctctgctctccagtgggt

SEQ ID NO: 552057 - DNA, 439 bp, Homo sapiens
gggaaccctcccttttagtttgcccgtttgcgcggttttcccccccccccccgggggtataaatgtttcccccgggggggggggccccccctaaaaacccccccccttgggaaccaaaagggggggccacctttttgttagggttgataagccagtggtcccgtggcccaatattcccccttttgtgaaaaaaaaaagattgcccccggggttggggggtgccccttattctcccccgtttgggggattgtctgcagggtttttcttcctgcccggagcgcatttttctaggagctcatttgtttccccgcccaactctctgggggcttgaggacagttccccccccccggccaatgcccttctttgttctgctgatgaggcacgtcataaaataatggtacaacaaaatcttcccgtcttgttcaaaaaaaacagagt

SEQ ID NO: 552058 - DNA, 261 bp, Homo sapiens
gaaaaaaaaaagaaagaaagtctgggaacagtagctcacacatgtaatcccagtactttgggaggctgaggtgggtagaggtcaggagttcgagaccaacctggccaacatggtaaatgaaaccctgtctttactaaaagtacaaaatttagccagacatggtggcaggtgcctttaatcacagctactcaggaagccgaggcaggagattacacttgatcctgggtttcagaggttcacagtagctcacatattgtaaca

SEQ ID NO: 552059 - DNA, 398 bp, Homo sapiens
gcttggactgcagagcccggcccgacgccgccatgagcgccgcgctcttcagcctggacggcccggagcgcagctgcgccctggcctggcggcagcctaggagccgccgtggttgcccgcgtgcaggtttcgttgggacataggagcgcaaagaagctacagccttggacgttacgcacacagttaaactgcgagagaagctaaaccgtgtctatagtcccttaaacttatattcggtaatgttaggcttctttctacaatcttacttccgtgtttgcatgcagtctaccggtaccatttgctaaggagcgaccccatctaaccacgagcttttcgagacggaagccctttgtagtggctcgactaagaggaaaagactgagcatgctcacttatcta

SEQ ID NO: 552060 - DNA, 846 bp, Homo sapiens
  misc_feature (157)..(157): n is a, c, g, or t
tgtggtgtgattgcttgtgtgacctcttggtcggccccgcgattctttctgcgggattctcgtgcccggggcccccgtctctctccgtgactggcaagttctcctgccccttgtttgccccgccgggtccgcggcacgcaggcattctcctcctctngcacgcaggggatgtctgttctgtgtgcaccgccccagcggccctgtgtcgttcctggacagccgccttctgccgcgcctcacttgcccccccccaggtttcttggtgcgacggggtgtgccccttgcccccagtgcgacccccccattcctctcatttacaatgtgaagattgttacctcccccgagattgccccccccacggaaggcgcttattttccataatactatcgacgaccctgtgagagagaaatctcctcttgataacaaaaaaagtggaccacccaattctggtaagtacaaaatgcttctccggctcttcatactcaacttcttcttatcatccaccccggagatgcaactcggccctccctcttttgacaagtctcacaagagatacatcttcccgctccctctttcatacaaaaaattgctgctccccaaagttgtattatcccacaaacaggtttcttttcccacaacaacccccttatgaattttttaataaaggcatacacccccccccatcgttccagtgtttacaatagcatataatacttgtgccaatctgtattgaacagcacagacaccttatggtaggcgagcagacacacggatatgggggaagccccaaaacaaaaaactggccaacagcccggaatcttcaaaaaaaacgcccacaaaaagaca

SEQ ID NO: 552061 - DNA, 283 bp, Homo sapiens
tatttgtggtcgatcagaggatccccgatgggcacactcgggcgcgctcccacgcttcacggttctggatgacaaagaccgtcaggcactacacaccttcttcacgaagtttgcgctgctctctgcgcgagttgctgtgcctggcgcaaatataataattgcgtctaacccactgctgtcgcacatagtcgctgacgcgatgatttccgcaggtttggagctacgtggatacgtcgcacgccaagtaactgactatccaaggttaacgggatcctgctagctc

SEQ ID NO: 552062 - DNA, 206 bp, Homo sapiens
tggccaggctctctactttccggctagctgagctctcaggtggtttggtgggtagaaccttcttcaagttggaattaccaggtaaaactaactaggggcccacggcgggggattctttatgttttcccaggaagcagtagagctcaccgggctgggcatattctggaaaaaagagagtctggctgtgatacagaaataattcagga

SEQ ID NO: 552063 - DNA, 160 bp, Homo sapiens
ctagttatcccagatccggctgttgaagggccgactgaggcatacagatatcgcaggctctctcccagaaccatctgctcctggacgccctgtgttagaaggctgaagctcacccgagctgcaggccctcatctacaatgtgcagcatgtgaaatgggaa

SEQ ID NO: 552064 - DNA, 246 bp, Homo sapiens
  misc_feature (213)..(213): n is a, c, g, or t
taaatcccctttctgggatattaatacgggtatgtcagcttccagtgtttaatagcattggcaccttttactttttcacttttcattttgagcattgttaaattgtttcattataaatgtagtatactataaatatataagtatttatattcagcgtaaaaatcatttcttagtcgaaatatttaatctaattgtaactgatgtaattaatgntacatttgcattgaaattaaccatcttaatagt

SEQ ID NO: 552065 - DNA, 321 bp, Homo sapiens
gggaggggggccccccccgaaaagtttttaaaggctggggggggaggctcccaatggccgggttagattttaattttaagggtggggtttttaaaggttttggggttaaaaaaccccggttgaggccatttggggctttaaaccccggccttttggttttaaaaattcccctggtcggggggtccaatttggtaggtttggggaaatttccccctggggggggggggttttttttttttttttggtttaccaaaaatgggggggggggccttttcccccttttttccccccaaaaaaaaaaatttttccggttccccggga

SEQ ID NO: 552066 - DNA, 583 bp, Homo sapiens
  misc_feature (142)..(142): n is a, c, g, or t
ccacccccgtccccccagcgcatccattaggcgacgcacgttttgagactcactctggggcggtagggtggccttggaggttgtggacccaggcaagaatatcacgccctcctttaaccatggtgtggtttgcagcctgttntagtgggacaggccagggcttggttgcccattttttggccccacccaatcaagggaaaaaggaggaattctggactggaggcccctggagccaaatggcaaaagggtgccagcttccttttctgtgtggactttgtccagttcctttagaaaaaatggatgcccagagggcttccccccctgggttggggtcaagaaaccgccagcaaaagttaggggccttagggccctggggtgttgttccattaaaaccgactttggccctggcccctaattgtttttttagctttttaggcctttccagtttggccctgtcccccccctccactcaggtgtcctgcagcaaacactcccccctcccccttccattttccccccctattgcagcccctccaggcctgttggtatagagcccccctgtatgtcaataaaccacaggtga

SEQ ID NO: 552067 - DNA, 406 bp, Homo sapiens
cgtggtggctggcgcctgtaatcccggcactttgggaggccgaggcgggcggatcatgaggtcgggagattgcgaccatcctggctgataaagtgaaaccccgcctctactagaaatggaaaaattggctgggcgtggtggcgggcgcctgtagtcccagctactcgggaggctgaggcaggagaatggcgtgagcccgggaggcagagcttgcagtgagccgagatcgcgccactgcactccagcctgggtgacagagcgagactctgtctcaaacaaatacaaaataactaaccataacgcttcctttgaacctgcactcattcgctctctctgtagtcttggcctgctgtgcacttcaactacagactcaagtagttgccacgggagactgactatactgtga

SEQ ID NO: 552068 - DNA, 376 bp, Homo sapiens
  misc_feature (335)..(335): n is a, c, g, or t
gggtttcaccacgttggccaggatggtcatgatctcttgacctcgtgatctgcccgtctcggcctcccaaagtgctgagattacgggtgtgagccactgcacctggcttagtgttagtgtattttatgtgtggttcaagacagttcttccagtgtggtccagggaaaccgaaaattggacacccttgctccaagatctgggaatatgacaaggatgcccactgtcaccactgttattcaatgcagtacttaggaagtcctaggctagagcagttcagacaagacaagggtattaaagggtattccagattgggaaagggaaggaagttcaaattntccgtttgtttttaacaggatgggtgttaatttttattatt

SEQ ID NO: 552069 - DNA, 979 bp, Homo sapiens
ggtgcgcatccagaaagccagcagtgtggtagcacacgccacctcttcaggaggtggagacaagatgaaggattcggtcgtcgtgacttcgtttgacattctgtagccggctaactgtaacctccacctcgagtgcagcggactccgatcacgtcgtgggtaccagtctagcctgggatacagggaacaggttagaaaaggcaaggtggaatagctactctttgacggcattttgcaaatggcccgaggataaacatcacattgatgcgagtttgcggtttctgacatgagcaagttgaccacgtgtatgttttcacctaggggggcaattattggaaaacaatgccaaagtacccgaacggagtggtcacgatcgacctttgcgtgcaatagtatatcgactacaggattcggaaggcatactcctgagattttacctgagaggaggtgaacgccagtttctaactccctgaaggtgtaccggagacacgttggcaatagacagaggtttcaaaacgaaggtcattgggacttaaactaccggtttgctcagcagttaggtcttcccttccaaattctaagagagcggaatgatacaaattcctatgaggcccaaggctccagcctttggtggagcaaggttacgattgcttacctttactagatgccagaaattacggacgggtcctttaccctcactcatgggaagacatgtctaatcaacagaaagacggttccaggcaatctgtaaaccttttgtcccagaatttatcaggagagaccacgggactgctaggtggaacgggcctcaacctttctaagaagggtcctgccaggaaacgttgtcccgtgcatgcactggccctctgcaacacttgggtgttcccaggctcagacacttgccaaagggcggacccgttggacggcatcggctcccctccctgtgcggagccactgtcaaacgcgccagattaacgca

SEQ ID NO: 552070 - DNA, 564 bp, Homo sapiens
  misc_feature (9)..(9): n is a, c, g, or t
  misc_feature (183)..(183): n is a, c, g, or t
  misc_feature (188)..(188): n is a, c, g, or t
  misc_feature (212)..(212): n is a, c, g, or t
tggaacctnactttcagctgggaaccagtggctcatgccctataatccccagccactttgggaaggcccgaggttgggccggattcatgaggtccaggagatcgagaccatgctggcttaaccatggtgaaaccccccgttttctaccttaaaaattacccaaaaaatttagccaaggccatnggttntggccgccttttagtccccagctnattcgggaggcttgaggcaggagaatggcgtgaacccgggaggcggagcttgcagagagccaaggtcacaccactgcactccagcctgggggacagagcgagactccatctcaggaaaaaatacaaaagaaaagaaaggaagcctcagtcatatgaagctatcacacctaaacccagtaccaaaagatctctaatttcaaaactattcagctctccacagcaaagatcaaatatttgggccaggcgcagtggctcatgcctgtaatcccagcactttgggaggccgaggcaggtggatcacgaggtcaggagatcgagaccatcctggctaacatggtgaaaccccgtctct

SEQ ID NO: 552071 - DNA, 136 bp, Homo sapiens
tcagctgacttgggactggctcagctgattctagcccctacccagcgctctagacggtcaaggtgtggtggaatcagcggggaaagaagaccctgttgagcttgactccagtcccaagtcggcgaagaagcgaaga

SEQ ID NO: 552072 - DNA, 326 bp, Homo sapiens
tcaaatccagagtactcagtaagtccagagctgaatctagacatccagacaaaagctaattttcagaggaaccaaaaatcagactaagcctcgggttctagcggcttatttacacggactaggagtgctcttggtgtgttaggtctacctggccaggtagacctaacaatctcatatgaagatcaccctagaccatcattctactatcaacattactaataagaggctcctttaatctctaccacccttatcacaacacacgaacacctctgattactcctgccatcatgaccctaggccataatatgataaaactccacacaaga

SEQ ID NO: 552073 - DNA, 394 bp, Homo sapiens
tcactacctgggtgatgggattattcagtggcatgcatgcaacaaacctgcacatttatgcccttgtgtcttatattcataagattaaagttgaggctgggtgctggatgttacgcctgtaatcctagcactttgggaggccgaagcaggcagattacttgaggtcaggagttcaagaccaacctggccaacatggggaaaccctgtctccactaaaaatacaaaagttagccaggcaaggtggtgagcacctgtagtcccagctactggggaggccacggcacaagagttgcttggacccaggaggctcaggttgcagtaagccaagactgcaccactgcacactccacactccagactgggtgacagagcgagactctgtctcaaaaaaaaa

SEQ ID NO: 552074 - DNA, 176 bp, Homo sapiens
agcaaggcagagatcgaacccacatcctcatgaatactagtcaggtcaattctgataagccaaataggaactcccagaactatgtctcttgatgtaggttctccatcctcatggcttctagcatacctccagtcgccagcatccctatagctacccagctagaaggtagcctctcc

SEQ ID NO: 552075 - DNA, 780 bp, Homo sapiens
  misc_feature (211)..(211): n is a, c, g, or t
  misc_feature (360)..(360): n is a, c, g, or t
  misc_feature (535)..(535): n is a, c, g, or t
  misc_feature (642)..(642): n is a, c, g, or t
  misc_feature (651)..(651): n is a, c, g, or t
  misc_feature (749)..(749): n is a, c, g, or t
  misc_feature (768)..(768): n is a, c, g, or t
ggggggggtaacttattcttttaatgactagaggcaggacgtgatacattctcctggtagactacttgggctacaaaaccagctgcacagataggctaacgaactaaacttatttcaatcttactcgtgtgtcagtccactagtaatggatcgacttctacttctcaagcatctcaaggggattttgagactatgggtggaaaattgttgnatagaagatattcgtaaaacagggcttcttttgtgggattgtcatttacaacttgctatggtgtaaacgactaccctaaaaactagatactttggagtgcccgaccttggttaaaggtggtcacttcaacgagggaattcttattcacntcgcatcacgactatagcgatgtctatatccttgctcaaaaatatgcaggggtctttccttattcaaaaaaatgcaaatattcgaagagggccccgtttgaatttttcattcaaaccgttgaactccgaaggtaacggaatttttaaattttcacggtattcctttttaaacctnactttctatttacacaaaatggggagattgactcattcgggtacacccggtagtagatggatttttgggaaattccacacaaaacagacagtaccctatcttcggcntggaaaccnaggattttcctttatgaaaagagaggtgtgggcaattaaaacaccggctctctaattcaaaacggaaaaatagcgccactctgagcgtttaacctaanggggagccccaaacccttnctaaattctttg

SEQ ID NO: 552076 - DNA, 105 bp, Homo sapiens
gctggtaccatgccgatttctcctacgcagattgcgccgtgcccgctgggattgcgcgcactttgaacgtacccagtttcatcgctgcctgctggacaaggccgg

SEQ ID NO: 552077 - DNA, 358 bp, Homo sapiens
aggaccagagcactgcagcagatcatttaatattgcttccgtggagtgtggcaagtcagctaagatactttgacgccggtgggatgcgatgagttattgtaacggagtgtacaatatgctcgtgtgtctacgtctattcctactgtatatatatggtgtgctcacacgtataaagccctaggaagccaattgatatcatagctcagacctgtcctataatccatatggttctttatagccggagtagtaagtcagcaatatgggagattattccgaagtcctggtaggataagaatataaccttcagggtgaccgacggttcagaataggtgtaggtctacaaagaggtctcctcctc

SEQ ID NO: 552078 - DNA, 274 bp, Homo sapiens
tcacaggatcccccaagaggctattgagggggaacagtgcattgcgtggccattgattttaatttgaatttttggacggggcaagctacgttactttatggcagaaaaaaagtgcaactgacatactacaaagagattttttaagttttaaaaaaagttgggatctttgggattcctttttttttttggggccttattgtcgctaattaccggctgatttttatttacgcacacaattaagaaaaggttaattttttttcctgggcccactcca

SEQ ID NO: 552079 - DNA, 284 bp, Homo sapiens
ggtagaggcgggtttcaccatgtaggccaggatggtctcaatctcctgaccttgtgatccgcctgccttggcctcccacaagtgctagggattacacggcatgagccaccgaccccaaactcttgtaatattttttcttttttattatatatcctgctaataaatttatatcaaggcaaaatataaccctcaccagttatacgtgaggtaggatgaccatgttccaggatttatattacgcctgtaaactgaaatatcggtggctgacccattccaagcctaac

SEQ ID NO: 552080 - DNA, 376 bp, Homo sapiens
tgtgataaccctatcggagagggggttgttagtagagtcggaccgtaagtgttggtgaacagctaagtaggttgttgttgatttgattaaataaattgttgaggcattatgctaatgattagtgctgtgagtgtttgtgttgattcaaattatgcgatgagtagggcctgggagcctactacggtgtagaagtaggaagtatgtgcctgcgttcaggcgttctggactggttgcctcatcgggtgatgatagccaaggtggtggagtagtgtggtttcgaagaatgatatcaaatatgattagttctgtggctgtgaatgctataattgaggagatttgtagggagattagtatagagaggtagagtttttttcgt

SEQ ID NO: 552081 - DNA, 223 bp, Homo sapiens
ggggggggtaacattttcccccggggaccccttttgccccttgggcccttttgggggcccctttaaacccggttgggcccaaaaaccggggggggccgggccgggatttcccggggttttgtccccccccgggccccccggtttttttttttaaggggggccctttttttttttaaaaaagacctgggggcccataaaaaccccaaaggggggccttttttta

SEQ ID NO: 552082 - DNA, 215 bp, Homo sapiens
  misc_feature (142)..(142): n is a, c, g, or t
  misc_feature (195)..(195): n is a, c, g, or t
actgtatcggggagcacgtaacagcttcagaattcatcaggaccaagaaaggataagggtatttggctcacctcgttccacagctccaccttcctcttctcatcaaagcctaccatggatacacaggcgagcttctttctcncttagccgagtaatcgtgcccagtgatgatcccgtgacagcaaacaagtttcnttttgcgcggtaccgagctc

SEQ ID NO: 552083 - DNA, 110 bp, Homo sapiens
ttacatagtaaattctataattaacaaaagatcttgatcttacttgaagttacatgagggaaagaccccctcagcaggtgtcccgttgcttaagaagcaaatagaggact

SEQ ID NO: 552084 - DNA, 823 bp, Homo sapiens
aagacaatctagggagcccagcaggcccatcctgagcctcactctgagatttgtgcctgacctaatacggactagttctaataagactgttactgatgtgtggttcagtcgttagtaactgagttgtctagtcgcagaactgcaggaatgccaaggcttgtggtagtgtcgaactacgagtcgcgctaggattggatctatgtaagagtttctcccgtcccaacggggctattgaggatcacgcaaggttaagaccccgagcaggattagggaggtcagctctggggctcatacggtcgatggcaggggtccctcggccagacccggtagaatcctgagatacggagtgtctctgaccttggtgtcatctagtcgagtccgttctcattagtaaaggagcaatagtgaaagctgggggaggagaaggacttccctcaggtggcacacgctgtttcaggctactagactatggctgtgtgaaaccattatgataatgcctagtagatcacagtgtcagatgaacgttgaaccccaaaagatggtcgtgatgctttggccaaaaccggacactgtgcagaccctctactctccaactcagcacccacccacatctcccagagctatagccaggcagaacattgggtcagggtggagcaaggcactgcagtggccccagagggcatgtgtcactaatcactgtccatggtctacgcaggaatcagcggcgtcaatggactcttctggaagcccggggccggccccaactgggcccataggaaggcaccgggcaggggcagcagagagagaccaaagcctaaacacg

SEQ ID NO: 552085 - DNA, 351 bp, Homo sapiens
agtgaggctctgacaacccggcgtggctgtcggcgacgctgctacgggcaagactagacacaagccgggcgcggtggctcacgcctgtaatcccagcactttgggaggctgaggcgggcggatcacctgaggtcgggagttcgagaccagcctgaccaatatggtgaaaccccgtctctactaaaaatacaaaaaaattagccttgcgtggtggccggcatctgtagtcccagctacacgggaggttgaggcaggagaattgcttgaacctgggaggcggaggttgcagtgagctgagatcgcgccgctgcactccagcctgggggacagagcgagattccctctcaaaaa

SEQ ID NO: 552086 - DNA, 225 bp, Homo sapiens
catttttataattgcaagcaggttgttgattcgagtaattacaagtacttgtacaaatacattcacagcgcctgtgaggagccttctgtgctggaactggtgacacctgtgccgtctccggacgagaggagaggaagtcccaccgccgccttccagtcagcagcgagccgtgtgtcgtggcattcccttgttccgctgctcccacccttcactgtggtggaaggg

SEQ ID NO: 552087 - DNA, 305 bp, Homo sapiens
gtaccttactacaatgatggataccatcattatacatttgtccaaattcacagaatgtacaacaccaagcgtgaacccttatcccttatgtaaactatggaatttggatgctgctgctgatgtgtcaatgtaggttcatcaactgtaacaaatgcaccactctggtgggggaggttgacggtggggcaggctgtgcatgtgggaatagggggtatgtaggaactctctctacctttctctcaattttgctgtgaatctaaaactgcttaaaaaataaaatcttaaggttgtaaccctttaaaaaa

SEQ ID NO: 552088 - DNA, 531 bp, Homo sapiens
gattaccgcttacgatcggcaagagccaatggatgaccggggcaaccatgatccctagtgaagcggccccttgctccaccggcaggtcaaacttgtggatcgtatggacaggaaatcccactggagatcgagtggagatttacgtgaagcaggagagcgggtacgagtctaccacacgatcagggaggaattatccctaaagcgcgaatttcccagtagtctgatggcatcgtccctgaaacgctggattgatgggtgcccacaagacacatcgaggtggaagatagcttctagacagaagcctatgtgtccctgtctcaaaagacgactgcaggaggaggtgatggaggccatggggatcaagggagatcccggtagttagtactggaaggtctattggtattgagcctggggcagagcagctcctccccaattctgtcccagccttgaaggctgaggcacttcttttgcagcatgccaataatagagcactttgatgagtcaaaaaacaagaaggaaaacataaaagga

SEQ ID NO: 552089 - DNA, 1343 bp, Homo sapiens
tgataacggatccggaactttttgggactatcaggacaaagatggactatctgagctccctgggcaagacagcagactgccgtggtgcagagagatgctgacattagagcgatggacgaggactgaaacgggacgcagagcatccgggaagctgagtgacaagaaggagatgctaggatgtgaagttcatggacagacacccaagcattgcatagactactaagccagagaccttcagagcatgcaaaaagtcagaccttcagctgaggacggttaacaatcacagacagactgcaggcccagatatggcacatactgacgctgcaagaggagagcccgatgacacaagacaagacacgatccgagcaggaaagagatagaggaattgacggattgatgccaagcggcaagaaaaccgactaagccgcatagagcaggcaacaagagaagaatccatgcggataaccgagaacaaatgggaggcatccacatcagccataccaaagatgacggcacagagcacatggcccgacgagccccgaagagccacaaacacgacaatcacaagcaagcactatgcacctgacagaggattgaaacaacaggattgaacagactacgagatcgcatctatattgggagaaccacgaggacaactgcaaacgggccttggacgagtacaaggaaatcaccgcacacacaaagctaccgaggagacaagaggcccagggaaaagcactgggagaagcacacaattcaggaaagagacgaaacatgggcacaaacgggcacgcacaaacgacacatggaacacgaggacatttgtcaaccggctaccacccagggctacgacacagacccaatccacccagcaaacacttaacactacaagaatttgcacaatacaccaacacaacatacgcaccaatatacagcagacaaatagcaagaggacaacacatagtacaaacccaaaaatattagcattatgaccacataaaaaaatcatgaattcaacaccaaagactattcaaaccataaatgcatactaatttcaccatcacttagatgaaaacacaaaacaaataaataaaaacacaaaaaaaattaacgacgtacctacaaagacacaacaaacaatgagaaaacaaactttgatataaacaactcaaacaagaacacatgaaaaaaaataaaaacaaataacccactcaacaacacaaaaatcaccaacacaatactaaaacaaaaaccacatataacaaaagaacagaacaaataaaataatcaaacaatatatcataaacacctcaaatccataacacaatcattatctaacaaac

SEQ ID NO: 552090 - DNA, 489 bp, Homo sapiens
  misc_feature (1)..(1): n is a, c, g, or t
  misc_feature (390)..(390): n is a, c, g, or t
  misc_feature (452)..(452): n is a, c, g, or t
ntacgatcttaaaaataaataaataaataaattcatactacatatcaaaggaggagaaaatagctctgaaaaaccatcaataggtaatgcacagattattatcttctaataaatttcagtgagaaaggaaagaaaggacactcatggatttcaatgccataacattttgaatatattttattttgtgcttcgggaatcatgtgttaaagggattttattttctctaaggcctcataacacagtcaagacttttccaattactttcatttcatctggatcacttacacttaggaaggatttaatgtttcaataataataattgggaaacaaaacatgtcacctaaaatttggatcttcttttttggttctgtgttgactttatatactatnctctactccttctctgattatctattactgcataacaaactgcattcaaaattggagaattnaaaatagtcttgtgtacaatcttgtgtgccagaattt

SEQ ID NO: 552091 - DNA, 156 bp, Homo sapiens
tcagaacctgagcatggtggaggaaacttatactgactttggactggacaggctatgaaccctgagggatggtgctgggacacgcatagtctgaatagccataactccctctctgatataactgccctcggtcatcctccagtggatgtctagaga

SEQ ID NO: 552092 - DNA, 164 bp, Homo sapiens
tataacgtataagtaaataagttagaaggaatatgtaactgcactggtacattttaaaggtgacacatagctccttataaagttattacaaattacaggctaagcttaaatgacgtagccagtagtctcacttcatatgatcaatattgatatagttgctgcac

SEQ ID NO: 552093 - DNA, 278 bp, Homo sapiens
  misc_feature (94)..(94): n is a, c, g, or t
  misc_feature (99)..(100): n is a, c, g, or t
  misc_feature (205)..(205): n is a, c, g, or t
  misc_feature (215)..(215): n is a, c, g, or t
gaaagaatgatttgagaataagtttaggtgggaagatgttggatttatttatttatttttgagatggagtctcatctcatctgtcactcacgcnggagnncagtggtgccatctcggctcactgcaacctccacccgccgggttcaagcgattctcatgcctcaccctcccgagtagctgagattacaggcgtgtgccaccatgnccagctactntttgtatttttagtagagacagagtttcaccgtgttggccaggctggtctcaggctcctgacg

SEQ ID NO: 552094 - DNA, 316 bp, Homo sapiens
ggtcgacagagattaagaggcatgcatcaaccttatgatttaaggttatttgggaggccaaggtgggcagatcagttgaggtcaagagttcgagaccagcgtggccaacatggtgaaaccttgtgtctactaaaaaaatacaaaaattagctgggtgtggtgttgcacacctgtagtcccagctactcagaaggctgaagcaggagaactgcttgaaccctggaggccaaggttgcagtgagccaagattgtgccattgaactcctgggtgacagaggtagactctgtctcaaaaaaaaaacaaaaagtcgacgcg

SEQ ID NO: 552095 - DNA, 512 bp, Homo sapiens
ggagagagagaactagtctcggttgagtgtctatttctctattttggaaaatggaatcaaaatttttttcccctgttggttggaaaacaaaaactatgtgggtggtttgtttacagggaaccccaattcctctaaccccttccaaagaaacacataaaaaaacaacgcggcccacacaagtgtgtgtctcccttacgtgccacacaaagtgtgaaaaagagacccgaagagaggtctacacggcgagacgtggacgtgaggcgaagacccgaaggtgtgagacgccagccaggccaccgggcaaacaagggggatggggaggccggctctgcaacgagtgaccagcgcgcggggcgcgagtgcacaacgggtggcgcgagcgcccactggtgagggcgccccaggagagagtaattgaagagaggagcagagaaaaaaaaggtgcagcaagggggacggatagtcgaaatgaggggagagtaaagcggagtgggagcacagcagggccttgg

SEQ ID NO: 552096 - DNA, 105 bp, Homo sapiens
  misc_feature (33)..(33): n is a, c, g, or t
tcgctctagaggatctcccgctctccacccacncccattaggctcacccctgcagcacacctctgcctggacatccaggcatttgatacatctctaaaatctagg

SEQ ID NO: 552097 - DNA, 309 bp, Homo sapiens
tcgctctagaggatccaccttatgttctgacccaccactgattaagagtggcgtggcaggtattagggataatattcatttagccttctgagctttctgggcagacggggtgaggttgccagctccagcagccttcttgtccactgctttgatgacacccaccgcaactgtctgtctcatatcacgaacagcaaagcgacccaaaggtggatagtctgagaagctctcaacacacatgggcttgccaggaaccatatcaacaatggcagcatcaccaggtgggtcagaacataagggggaccgagctcg

SEQ ID NO: 552098 - DNA, 924 bp, Homo sapiens
  misc_feature (662)..(662): n is a, c, g, or t
tcagtggagctctgagtttcgaatcggtggcggcggattccccgcgcgccgggtcggggcttccaggaggatgcggagccccagcgcgggtgctgctgggggccgcatcctgctagcagctctctctcctgcagtggcaccatccaaggaaccaatagatcctctaaaggaagaagccttattggtaaggttgatggcacatcccacgtcactggaaacggagttacagttgaaacagtcttttcgtgtggatgagttttctgcatctgtcctcacgtggaaaactgaccacgtgtcttccttccaattgtctaacacaattgtgtttgtggtgggtttgccaagtaaacggatggccctgtgggtcttactttttccgaactaagaagaagcacccctgttgtgaattttacattggccaatctggccttggttgacctcctctcgtgtcatcctggttccccttgaagattgctatcaatatacattggcaaacaacctgattaatgggggaagctcttgtaagtgtgctttattggctttttctatggcaacatgtactgttccattctctttcatgacctgcctcagtgtgcagaggtatggggtcatcgtgaaccccatggcacttccaggaagaaggcaaaccattggcattgtgnttctccctggcaatatgctgctgattcctggtggtcacatcctttgtttgtcgtgaagcagacaatctattctgcctggaaatcacgactggcaggttggtgctggacagctgggggcagccatgtcaatcatccctctctggcatgggttttggccacctcccaggcttcattggggacaagcggcttgccgtgacccagagagaggggcaaattgtccggcgtggccaaccgttggatttaaagcacgtgtttgctcacc

SEQ ID NO: 552099 - DNA, 137 bp, Homo sapiens
aaaaggtcatggccagaagtcgggctacttctcccgtcggcagcctcgaacgaagctgacctggagctcatcggccgcgcacgacctcgcgtcgatgcgcccgggcggtaagacggcgtatcggccaggacgaggag

SEQ ID NO: 552100 - DNA, 343 bp, Homo sapiens
tcaacagagcgtctatccacagttcctgctcaataccttgcacctggtatcaggactgggtcatcatcactgtcatctgtgtcctgaagaccaaagtccttggtgaatgtttcttcatgagctgaaggcccagtggcttctgtttgaaactgaggctcaggattggtgttatttccaccagatgaaccagattcttctgaacccccacaagaccgatcaagattgagtgtcatttctttctcctaagttggaatccaatggcttgcctgtgaacttatctgattgtgatatattgatatggttctcatctgggttttccgcagatactccttccagatattct

SEQ ID NO: 552101 - DNA, 380 bp, Homo sapiens
  misc_feature (54)..(54): n is a, c, g, or t
  misc_feature (89)..(89): n is a, c, g, or t
  misc_feature (113)..(113): n is a, c, g, or t
  misc_feature (121)..(121): n is a, c, g, or t
  misc_feature (136)..(136): n is a, c, g, or t
  misc_feature (193)..(193): n is a, c, g, or t
  misc_feature (195)..(195): n is a, c, g, or t
  misc_feature (197)..(198): n is a, c, g, or t
  misc_feature (201)..(202): n is a, c, g, or t
  misc_feature (205)..(206): n is a, c, g, or t
  misc_feature (284)..(284): n is a, c, g, or t
  misc_feature (300)..(300): n is a, c, g, or t
  misc_feature (316)..(317): n is a, c, g, or t
  misc_feature (319)..(320): n is a, c, g, or t
  misc_feature (365)..(365): n is a, c, g, or t
  misc_feature (375)..(375): n is a, c, g, or t
ccggatggagccgagcccctccgtcctcgcgtctcggtcctcgcgtcgccccgncccacccgcccctgcttcggcgggaatcgtgtttncccggcgtgtagtccctgacaagngtgccctntaggagaaaagtctntgtcctgtgaagtgtgaccgtgtagtgtaggggggcgggcgggggggcggatgggcngngnnggnnggnnggggaggggcgcggcgcggcgactcggggcggggttcttttttccattttgaaagaaagcgtcggggttggggtgggnggagtttcagtcctcnggatcagccctctccnngnnagaagcacaagcgcgggcctggacggagtagccccccggagcccntccccttttntaaac

SEQ ID NO: 552102 - DNA, 98 bp, Homo sapiens
gtttttcccctaaacaagtttttttaaccaaatccttgggttttgggggcccttttttcccctcccttatgttttatagaaaaagggttaatattttt

SEQ ID NO: 552103 - DNA, 436 bp, Homo sapiens
  misc_feature (53)..(53): n is a, c, g, or t
  misc_feature (339)..(339): n is a, c, g, or t
  misc_feature (425)..(425): n is a, c, g, or t
gcccatttgaattaatgtatggatgccctttcctcttacaaaacaggcctccntctgagaccctttcctcttacaaaacaggcctccttctgagaccctttcctcttacaaaacaggcctccttctgagaccctttcctcttacgaaacaggcctccttctgattctcaattaggagagtacctcccagcactctccctcatccgccatctcctctgcaaacaggcacaccaggccctcccaataccacataaaggcctcactgaccagaccctcctaccagggggaacatgtttttctaaaaacccttaaacccggctgggcacagtgggcttcacgnctgttaatcccagttacagtggggagggccaaggctgggtggaatcacaaggttcaaggaggttggaggaccttctggggccaacntggtggaaacc

SEQ ID NO: 552104 - DNA, 1098 bp, Homo sapiens
ggtcgacccacgcgtcgcatcaggctggtggctgagaagatgatctggctgggcaaataaggacccactgcctcccctggacccccaggccatcaagcccatcctgaaggctcttcttgacaacaccaaggctaagaacaccgatggtcagggcctacagcgaccaggcaattgtcaacctcctcaagcatgcggcagggctgaagaggtgatctcagctccctctccaacgatcctggatgtggacagctctggaggtgctgacccgaggcttcaccgacaggtccctgcacacgacacgctggccagccacggccgactccacggagcaggctggacgacaccactcctgacactgagcagcgccctgggcccagccagcagcatctgccgcctccacactcattcgcctccctgcttctccatcttcctgacaaaatacactaagcttccacatgggcgcagctctgcgcagactggccgatgcccaggaacagctctccctcactactcacactagacgcatcagcccaagcgccgttacccctcccgcaccgcaccaccacccccctgccaccactctggcctcccgtccaatcctctacaccctatctaccatgatgggacaacagcagaacgggaacacacgccccaccgcaatgacagcactcacgcaaaactgggcacgcccccaggcagcatgaccgaccccacgcttacacgccacatgggactaggcgcaccttggcacacctaatacaatagcccacagcgacatcaagcaccctggatgggctctacaaccccttcacttcacttgctgcccactgacaaccctcgaatgaaccaagacagacaacatggcgcgccacacccaaacaccactctccccgacctagtgcccggcacgcataggaggccccacacccacacggcagagacaaaccacacatgcacacaacccagacggacgaaagcaaccagagcccacacgccacaccccgccccctccctgcgacacacagcacgcaacatgcaagcagaacccccacaggcaccacctacacaagcgaaccaacaacaacacacccaccacac

SEQ ID NO: 552105 - DNA, 360 bp, Homo sapiens
  misc_feature (48)..(48): n is a, c, g, or t
  misc_feature (52)..(52): n is a, c, g, or t
cccattcggcgaggcagtctctgaaagtggatctgaactacagatccnatantcaaggtaagcatctttgcagacctcgctgtggtttaggaatgagtattgtcaatactcagaaaaaggagatgccttgcaagcaaatatgttgcttgaaggtttttttttttttttttttgggccaaatttagaaatttggaaaaaaaaatttaaaggtggggttgggaaaaagtttttcccaaatttttgggggggatttttttttttttttggcaaaaaacggcggaaaatttttttttggtttaaaaagtttttttttggctctttttccccgggcccttaattttttttccatttaagaccccg

SEQ ID NO: 552106 - DNA, 117 bp, Homo sapiens
tctagaggttcccctccatgaaccggtgggagggaagctattgacaggtgtgctttcattgttacccacagcagggtacatctggcactggcccaaggaacttcctcacaatgtgct

SEQ ID NO: 552107 - DNA, 159 bp, Homo sapiens
ttatgagtatcacgctgtgtttttatgtgtgctacattgtgcatagaacactattaatcgttgggaatagtgctttgtcattaacagaaagtcccaattaacaacagtcaaaagaaaataaccatttgcatacccgaccaggaaatttgttggtaggta

SEQ ID NO: 552108 - DNA, 979 bp, Homo sapiens
gaaagtagcaagagaggctattcctccccagaagctgacaatgcaagactcctctggaagtgaagctcaatcagtaaaaccaagtacaagaacgaaagaacaggcatagaactgggagacattcagagttccatcgaatctatcacaacaccaaacaccaggcacagcaacattcaaccagcaaatcattcatggctcttcgacaatccattctcagtttccaagccaaaaccggcccacggcattattttctgccaaccaacacacagcactcacttccatcattttcctcctgcattttgcttcaagtccatcaatcaacacttccatgttccacagtcagacagttcctcgtcacccattgcaatcaagtgcaactcagcacacagcaatctgattctggccgtgggcacccagtgttccaagtcggtcttggctctttcatttcacacaacatcaccaatcattccgcacaaaaccacaaaaacacaacgtcaggcagccatcccacactgtccagcaggtccattgcacctttctcagctcatccttttcatactttcccaccacttgcacaacaaagccagcttcatacctcattctggcatctcatctcacacaggtgcaggcgtcatgctgcttcaagctggcccaaaggaacccatttctccctcagcttcttcaggtcggagcaaatggtgtcctcacatacattgcaggtcatcaacatccaaaaaccccaaaacactgctcatcaccaccacacttgctcctccctctcatttgacaaccttcccctaacccgtggaaccgagactaccctgccctatcggtacactctccttaatcacggctcacatggtccccgccagcatcacttaacaccggctctaccaccacattccggtctacccattcaaccccaacaagccccagtggcctctatcgcaacatcgttcaataccaccttcactcctgg

SEQ ID NO: 552109 - DNA, 1043 bp, Homo sapiens
  misc_feature (1041)..(1041): n is a, c, g, or t
  misc_feature (1043)..(1043): n is a, c, g, or t
ccacgcgtccgtctctctggctccttcactgttccctctgtgcttcccataggtggggcctgggaggtttccccctggccttagaaggggcccatgccgcatctcatcctggcacgccctactccactgccctgtgtagcagcaggtgtggcgcatgtggaggggggtgcatggcccccaggattccgccagccaaactgtctttgtcacccactgtgggtgctcactttaacatccttccacctaacttccactagtccccgtacctaggtttggacgagccccgcgtatacgggctacaaggataggcaggcaggagtcgagtccccctaattgccgcgtcttcacttgtgtgccccagcccgccttgcgcctccgaactggtatctggagtacatatagttggtgatggagatgcgagtcacgttgattgtccaggtgaggcctgaagaggccctgtgggcctgccactctgaggtgtgggctcgtggctgttcctctctgattcctactttgcttccagtcactcagccttttcctcccctcctcagattggggcagccgattaacaaggaagctcaccctgcccgttcccagatcctccttgtgctcctcgcttgccgcgccaaggtttctggttccgatttttcctctgttcacgactactctgggaaaggggagggcgtcatgtccatgcttcgacatccgtcatcgctgctgaaagcagcgcccaaatgtgcatcctgcattgctcctgtcctgccacgatccctccccgagatacacttgtgggaagagggctgtgatggaaggttggtgacgctagccagtccaaggaaggtgggcctgcccaacgattgttgggggagggaaagggccagatggacaaaggtggtggcccccacccagtttgacagagaggacaaagcgtggccccgggccacatagagccacagcatatcaaagattcgaaaaaagaaaaaaaggtcgcaccagaatacacaaacacataagagaagaaactcacacactgtataccgntn

SEQ ID NO: 552110 - DNA, 219 bp, Homo sapiens
tgttctgctgtatcatcccgttcttgtacgtatggaacacacccagtggctcacgcctgtaatcccagcacgtttgggaggctgaggtgggcggcttacttgaggtcaggagttcgagaccagcttggccagcatggtgagaccccatctctaataaacttttattaataaaaacttagccagagcactggtgggcccagcctgtggatccagatagat

SEQ ID NO: 552111 - DNA, 428 bp, Homo sapiens
cccggctcgtccagacgggggggctgacgggggaagatcagcttcacggtggtcaggagcgagatcgaggaggtggcagtgagctgagaccgaccacggcactccagcctgggcaacagagcgagactccgcctcaaaaaaaaaacaaaaaaagaaaaaacgacccgaaagaaagaacccaactctacaataattttttaaaacttcggcatggtggtacatggcagccactcgggaggccgaggtgggaagacaacctaagcccaagggttcagggctacaataagctgcgatcccatcactacaccccagccggggtgacatgagtgagaccccgactcagaaaaaaaacaacccaaaaaacaaaaccacacgttaaggggatcatggttcatttggcttagttactctgagaaagattttttcta

SEQ ID NO: 552112 - DNA, 189 bp, Homo sapiens
  misc_feature (94)..(94): n is a, c, g, or t
gtagatgctgtctcagctcctgtcctcggcacttccccaggctcatttgagcaggtgtgcttcgcagctcccctaaacttcccgggtgcctcantccataatgagataatgcatgtagggcgaaaagtttctcaagcaaggtggaagcaggcagcacggacttgtgataagggagtactctgctggtca

SEQ ID NO: 552113 - DNA, 585 bp, Homo sapiens
ggagaagactgcgctcgtgcgtgttcatacttgtccgtgggcctgaggtccccggaggatgacctagcactgaaaagccccggcctggctccccagggtccccgaggacgaagttgaccctgaccgggcctgtctcccagttctgatggccctgggtcccactggaactcgcgtctgagccgccgtcccggacccccggtgccctgccggtcctgcagaccctgcaccgggcttggactcgcatgccgggacttgacgtgtagaacaatcgtttcttgtttggaagaagggtttttcccttcctttttggggtttttgtttgccttttttttttctttttctctttggtaaaattttgggacgaagggaatgtctggaacacaatggaaggaccggttcacccgctggactcagtggcttggcggcggtgactccatggaccctgtggtccagcatggaggtgtgtggacccgcagcagctgggcatgttcacgggagggcgagctgatgtcggggggtatggacacgttcatccaccggaatcgactccaaccgaggtcatctaccagccgtgccgcaagcgga

SEQ ID NO: 552114 - DNA, 91 bp, Homo sapiens
agaccctctactacgtgaaggtgtacctggtgctcggtgacatcatcttctacgacctgaagcacccgtttgatgcagccgggtactacca

SEQ ID NO: 552115 - DNA, 792 bp, Homo sapiens
  misc_feature (212)..(212): n is a, c, g, or t
  misc_feature (748)..(748): n is a, c, g, or t
aggtccccaaaaacccccctctccttttttctacaacatatgagagcagggtggctcatttcctggagggcgtctgaggactatggggtcatcaagactgacgtgtcccagcctgttgccctctttaaggcaaaagacatgcaagcagtgcagaggcccctgatggctttgggcagcttgccagtgaccaagaatgatgggcactacggtgnagatcccaactggtttatgaagaaagcgcaggagcataagagggaattcacagagagccagctgcaggagggaaagcatgtcattggccttcagatgggcagcaacagaggggcctcccaggccggcatgacaggctacggacgacctcggcagatcatcagttagagcggagagggctagccctgagcccggccctcccccagctccttggctgcagccatcccgcttagcctgcctcacccacacccgtgtggtaccttcagccctggccaagctttgaggctctgtcactgagcaatggtaattgcacttgggcagctcctccttgtgcccccagcttcagcccaattttttaccggaaggcttcatgccttgggcccttccttccgggttgcccccttcccttttctgttttcttccttgggttaaccagggaaaaagcggcttgggggaagcttggatgtggcccaagtccactgtcctctttggcggcaaaaagcccatttaaagaaagaacccagccccagccctgccnccctatctagtcctggaatatttttggggttggaactcaaaaaa

SEQ ID NO: 552116 - DNA, 107 bp, Homo sapiens
tgccagcagcgaggggtgggtgcaccccagtggcagtggctccagttccacgcaaaagcgcagcgggtgcaactcccacgtcagtcgcaacgcgtgtggggcagctc

SEQ ID NO: 552117 - DNA, 384 bp, Homo sapiens
gtctcgaccaagcgtcttaacactcagcgatcgatgtgcttccaggctacacggtcgtcaggcgccatgattacgatgcatcgcggcattgagacgggttacgagtggtatacgcgagcctcgttacagtcactagggagagtagaagttacggttagggttgactccatgatgagccactctggcctactgccagcagcgcgccgatcagggcgtagtttgagtttaatgctcaccctcgaccagaggattggcttttaatcccctgtggcggtttcctcatagatggtaagagaggatgtccaactggaatggtgacgtgcatgaaatgccaccctgggagaccatgtagccaacgcagtaacttcatagggtcctgggcat

SEQ ID NO: 552118 - DNA, 904 bp, Homo sapiens
ggagagagagaactagtctcgagttttgtttttttttttattctgaccaacgaaaaaagtgttattggcggggggcttctgagacagcagaggtggtccccagagaaaaatgctgctctggcagtgagggagggattccggtggaagctgcaggcagccactcttgtacatcctcggaggtggtggccgtgggatgtagcagataccaacgcagaggtgaggcagaagacacgtgggtgaaattgcctcacctgctgccaatgccaataccactggactttgcattttcgataagccaagaaatttccggtaaactggattaaacaatatggcctttattggtgtaacccagatcgatcgggattatcagaaacagcctagctgaattatagctcctttggggataaacagtagaagcctcactattcaccctttaaggtgtaattccagcttttccccaacaattcagatttccgtgggacaccaacacaagacacagacaccccgggtacaccgtgttttcacccgtgaagcgtgacagggcccaacacagtgcttcacggagtttgttgctcccgtgccgtaaggtgtggcattttagaacgccatattacatggcatctcacaagcctctcgagtgtgggggcgccaggggggcatctctgatagatgccctcttcaaaagcgctttacaccccattgggggcctctgtaccatacatttaccagcctgggggcacccaaaaatttgtgcccccaacaaagtgcccacaggacaagagaggtgccctcccagaacgcgcaagccttaaaccaccgcggtgaacagacctcacttggcaagggtgaaagggcccaaaatggagtcccccataatgtggatccctccaggcaataccaaccg

SEQ ID NO: 552119 - DNA, 649 bp, Homo sapiens
  misc_feature (286)..(286): n is a, c, g, or t
cccagcagcaccaggtctccagaccctaggagttccatgcctgtcctttccagaaaagcttggtgactttaccagctgtgtccagccccctttatccagacctatactgggtatccggtgccgccaggtcccttctcccctgacctgggaaccagctccactcagcttgcccggttctggcggcctctatgtgctcaggtccagaccttctattttatagcccccccggttaggttatgtcttccctgcttaagaactggcttgtttccagcccccttgcctggcnctggggatcccgccctggattagagaagccccatcccttgcctgggccggagattactgagcctgtcagtgggtcagatgaggcttgagctgggtgcaccctgacccccttcagccagaaattgcaggtcttggaatgagagccagaacctgctataggaaagtagcttgaaccaatatactccaaatggtgaacccctgccatttcaccgagggctaagattataaaccaattttatgtttcttgttagacctttgatagtctttcagatgtctggtgaccagtcatagcatttctatataatccagaccaatattaggatgtaatccattcatatgccctttgccaattttaaattgtaga

SEQ ID NO: 552120 - DNA, 253 bp, Homo sapiens
tttgagcgcgtgctatgatggatatctgcatgaagtaacgaataccagcatacggggacgttatagtgtcatcggatgctcggtacaagctgggtcatcagtgtcagagctagttgcctgtgtgacatcgggatccgcaaggtccccaagttctgaggcaggggtctgctgggtctggatgaggtcttctgcaggctgggtaagctccatggggaaaggtccccacgatttttcctctgtcccccccgacgcc

SEQ ID NO: 552121 - DNA, 495 bp, Homo sapiens
gcatacgtacagagcatcgtcaccacctgttggaatgacctgaagtgcaacaaaactccatacagaaaaaccagatctataacagtgaggccaacaagttccattcttattggaggcaagcacccaattcaattagcatccaaatgtacaaaaatgcgtaatgtccgtgtcacccacgtaatgtgtgtgttctgaggccacgatccctttagtcacaaacaatgtcaacacatgcaaatctccgtcttgtgtttacagattcccagtatgtaaattagaacaagaaaatcatatcagaacgttttatggatattgttctcaagtattttagtgtgacttggcataagggaatgagaaggcgccacagagggaacttgagttgattgcatctggtgagataaaccccaagaaatcctggcttgaagacatcaggctgatgtgagtagagagaatgtgagcctgggaataaatcagtggagaatttaaaaaaaaaaa

SEQ ID NO: 552122 - DNA, 244 bp, Homo sapiens
tacctgtactgttttcaaacaacactcattttgtaattgtctatatcaagcaacctcaactaactgtttgttttatcagcaacacatttcccttttattttaaagagtgctttttaaatgaaggcccaacaagaactactttcagatggtacagaatttcttatttcttgaagactctgtggttgacacttcttcattagttacctgcagcaagacaccttcccatggcaaataggaagaagct

SEQ ID NO: 552123 - DNA, 367 bp, Homo sapiens
tccttgctttggacggcggccccggcccagctgacgtgagcgccggggtcggatgctgttgatggagtatgaatgtgatactaccaggaaagtatgtccacagacagttatgcagtattcacaagtggtcgattgcgtcagagcctgaaatatccgtaaatggcgagaagaccaattggaacgcttggaagcccttgatgccaattctcggaagcaagaagcagagttgaaagaaaaaggccaataaatggagctagaagaatggtatgcaagacaggacgagcagctacagaaaacaaaagcaaacaacagggcagcagaagaagcctttgtaaaatgacattgacgagtcgcccccaaagcacag

SEQ ID NO: 552124 - DNA, 294 bp, Homo sapiens
tccagtacccgagcatgcatgcttgcctgcgggtcgacgtgtattcaccaatgcggtgcatgcctccctgaaacaagttccgtcggacacgtgagaaccagtgctgagctccaaatctcgttaagctggagcctggtcgacgtgtatacaacactgaggtgcatgcatccctgtacaaagttccgtcgacacgtgagcaccgttgctgacctccaaatatcgttgcgctggagcctggtcgactcttgcggatcctccagtacccggagcttgcttgaatggctgccggtcgcc

SEQ ID NO: 552125 - DNA, 150 bp, Homo sapiens
cccccccccccctggtttggggggggggtttccccaaattttggcccggggacccccacctgggggggggtttcggggggccccctggggccccttttttttccggggggcccccccccccccccggtttttttttgttttttttgggga

SEQ ID NO: 552126 - DNA, 142 bp, Homo sapiens
ttgtaagtggtgcaggagtctacgaacccgtccacggttctggccccgatatagccggacaagacaaagcaaatccattagcgcaaggttctcagtgctgctatgatgttacgctacggcttaaaccaaccaagttaccgat

SEQ ID NO: 552127 - DNA, 1202 bp, Homo sapiens
  misc_feature (167)..(167): n is a, c, g, or t
  misc_feature (247)..(247): n is a, c, g, or t
  misc_feature (1069)..(1069): n is a, c, g, or t
ggctccgctccagcccgagtttggttccctgaaggtgactcctgtgtggaggaggatccccagtcctggtaagaggatttgacatgttattagtatcaacagtcagtgagtgaattaggaggtagggataggagtgatagatcgacggacatgaagaagaatgaggngtagcgagatgaggaaaagacgtgaggaaagacctcttggagagaatgagggaatgagggagtgaagcacggagattctntgcgcaaatagggacatcaacaaggaggatggaatgaacgagtctgagagatcgtagatctcgaaggatagaactaaacggttgactttacgtaaggagataagataggaactaaaggatagagacggtatattacagcgtacgtgtatcgagagagggacttgacaccgtgagaaagcggtatgcggtgcgaatagtaccctcggtggaggtttgagaggcaattatgtcctaggatgagtacttgattggaagcagagggtctgcgtgactaggaagaaacacggggaattccttggtggatcctttattaaacatagtataattggggtacataaggtatggctaaggcccgtgcgttggccaggaagtttggttatttcagtaatacaagactattgaggcaggattatggaagcgaggaagggccacaattttgaaaaggaaccttggggccaaatattatccaaaaggtctcgatgggctttacgaggtggaacagacacaagtgggggaaagacacttacaagggtttccaaattcgagatgacgtttggtccaaacgactttaaaatagcccttggttgatttcacagttatataaggcggatactatggaacttcccttcggttctaaacatgttagggatccgtcccagagttgatatagctagtcaatctagtaacagagagggtagcacacagacagcatttttttccgcaacaaaacacacgttgggggggatcaaccacagttaatcattgggtttccagaaccaaaacgaaagtttgtaataagagaacacttgtcgtacgaaggcnatggggggaaactttaaccagaagcagaccaatccacgtcaaaagttattcactttcgtaaaaggagaacgcgaccttaaagttctgtctagtaacattggatttatcgccaccacagtttcgaagcagcgcc

SEQ ID NO: 552128 - DNA, 368 bp, Homo sapiens
  misc_feature (52)..(52): n is a, c, g, or t
  misc_feature (260)..(260): n is a, c, g, or t
  misc_feature (282)..(282): n is a, c, g, or t
  misc_feature (312)..(312): n is a, c, g, or t
  misc_feature (331)..(331): n is a, c, g, or t
ggcccctgatgcagcttaaggtggatgcagatgaacctctggtcatcgaatnaaactaatgacttttcgccaacgacatctactaatcttgtgatagtaaataaaacaattgcatgtccagagctcattcgaagcagatatttctggatattgtcataaaacaatttagtgaatttatcatcgtccacttgaatctgtggttcattacgtcttaactcttcatatttagaaatgaggctgatgagttccatatttgaaangttttcatcactacttagtttnttgatagcttcaagccagagttgtcttttnctatctactctcatacaancaataaatgctgaaatgaattctaagcggagatcgcc

SEQ ID NO: 552129 - DNA, 342 bp, Homo sapiens
  misc_feature (2)..(2): n is a, c, g, or t
  misc_feature (25)..(25): n is a, c, g, or t
  misc_feature (121)..(121): n is a, c, g, or t
  misc_feature (337)..(337): n is a, c, g, or t
tnaacccctattaacccctaccccnagctttttttttttggaaaaaaagtctcaaagctgaagtgaaatggcgcccatcaataaactcactgtagcctcccatctcccctgggttcaaagnagtcctccctacttcagcctccccaagtagggactacaggcgtccaccaccacacctgattttttgaatttttagtagagacgaggtctcactatgttactaggctggtcttgaacccctgagctcaagtgatctcctgccttgggctcccaaagtactgggattatatgcataagccacagcgcccagcctgtcgctttcttttctttcttcttntaaaa

SEQ ID NO: 552130 - DNA, 794 bp, Homo sapiens
  misc_feature (328)..(328): n is a, c, g, or t
acggagcggtgtggggccgcgtgcgatgccgcctccgcgtccttccccgagcggctggccgcctgcggggccgaggccgcggtgtacggcaggtgcgtgcagtgcctccacggccccgggtggccgccttgagtaatggactttcttgcgcgtggggagttccgaggccctgtcggagctgcttcgcctgcgtgcggccacagtaagacgcttggagtggatggctgtccgtgagggaccttcttgaggctttcagcgagccatgtcttgctgccaatgtgttgcacgaggcccatagtccgtgattggtccccatttttgccagcantattcgagagttgccttaggggcagtaagcggaacgtgggcacgttggtctgcacgatgttgatccattcccttcgcgtgttgacgatcctcgtgtgatccattaagcaaggtttgatggcggtggtgtcggcagcagggacatcttggtcttgcccaggctatttgtgtccggtaaaaccttgagttaggaataggattgtacctggaagccagggatcaagactcgggtcatagtccttgaaaacaaagaagactatgtaacaacctcaaccacaatcacacaatagagacatacgtacacgggtatggaacgaactagtagtaatttgcagaaaaaaccttgtaatcaaaagaagagagtgtggggctacccatataatgaagatcatggagtaagagtgcaaaataaccttttacactgggcctaatcaagggaaaaagcaataaaaaaggaggcccgcaaa

SEQ ID NO: 552131 - DNA, 120 bp, Homo sapiens
gagtctaagtatgaggaagttgacatggagttcacttagccaaggctgttccagagcccttgaagaagtatactaagagtgtagagagctggctgaaagactgaaaatagaagccactta

SEQ ID NO: 552132 - DNA, 759 bp, Homo sapiens
gaaccagacgatggacaggcatgactacacttctctccttctgcagagcgggctggatgctggtactagaatgttgatataaagcttgacacattgcttgcactagtggtgcatagaaaaatgcagtctttgagttgtggtgtcctcttatcagcttgcttgccaacttaggctttcggcgtcagaagattatcgaataatgctttgtctatagtgtctgttatcagtagggcgaatttctgaggccgttgttatgatcaccagtcattcaacgcagatttcgggcattgttctctcccttaatagactattctcctttccaatttcaaaatctcctaaatcaactatgtttcaataaccttagtttaccatgagtggctttttgacgtggctttgccgcagcaaccgtggttctggtttcaaagcatttaagcgcacaatttccctaacggaattttggcgaacgaggttaaaagttcaagccagggcaaattctcatggacaaggtaggccctttataacttaaataaaccaccattttgtggtatctaccaagggcgctttgccttagcaactccacggggggggttacccaaagtgagcctcaaggctttggggaacgaacaacacctcttctggtgacgcttaaattcgaaacttttgggcttaaccgaaagagccttttactttgtgggcaaaaacacaatttaaattcaaaccttaagtttttgccccccttggcaatccacaaaactcttg

SEQ ID NO: 552133 - DNA, 684 bp, Homo sapiens
  misc_feature (400)..(400): n is a, c, g, or t
  misc_feature (473)..(473): n is a, c, g, or t
  misc_feature (524)..(524): n is a, c, g, or t
  misc_feature (554)..(554): n is a, c, g, or t
  misc_feature (593)..(593): n is a, c, g, or t
  misc_feature (607)..(607): n is a, c, g, or t
ggcccgcggagcatcgcagccggcccgggcccccgccagcctccctcctcgcgtcctcggtgtcctccgcgggccggcgcgatgcggctgggcccgaggaccgcggcgttggggctgctgctgctgtgcgccgccgcggccggcgccggcaaggccgaggagctgcactacccgctgggcgagcgccgcagcgactacgaccgcgaggcgctgctgggcgtccaggaagatgtggatgaatatgttaaactcggccacgaagagcagcaaaaaagactgcaggcgatcataaagaaaatcgacttggactcagatggctttctcactgaaagtgaactcagttcatggattcagatgtcttttaagcattatgctatgcaagaagcaaaacaacagttgntgaatatgataaaaacagtgatgatactgtgacttgggatgaatataacattcagatgtatgatcgtgtgatngactttgatgagaacactgctctggatgatgcagaagaggagtccttaagnaagcttcacttaaaggacaagaagcgattngaaaaagctaaccaggattcaggtcccggttggagtctngaagaatttatggnttttgagcatctgaagaagtgatatatgacggaatttgtcattcaagaagtttagaagaacatgaaaaaaatggtga

SEQ ID NO: 552134 - DNA, 138 bp, Homo sapiens
  misc_feature (1)..(1): n is a, c, g, or t
ncttcaatatcaaccattaaccttccctctacacggatcattttcacaatactattgctactgactatcctagagagcgctggcgccttaatccaagcctacgattgcacacttctagtaggcctctagcgccacccg

SEQ ID NO: 552135 - DNA, 359 bp, Homo sapiens
ccacgcggtgacgtatcgctatacgccaccgaatacgggcaggtggcaaaaagcaccaccactcaatgcaagaagaacaagaaaaagaccgaccaactgacctgcaccagcactccaaacacctcctacggcccggtagggacctcggagcgcaccggctacaccacgctcaccaccttccgggtcaccgctcgtgatgaagtgagcaggcgcgctgtctacctgctaagggcgtcgtcctataacgacgactgccaagccgccaaggtcgaagccttcctggtgcagcagggtttgcagaacctgaatttccaggaccgcgtgcagcgcaattacacggtcacgatgcctgaaagctt

SEQ ID NO: 552136 - DNA, 340 bp, Homo sapiens
ctcaacttatttatttttgctactatggactcaaagatatttattttaccgtatgggttaaaatctaacactatcggccgggtgcggtggctcatgcctgtaatcccagcactttggcaggctaagacgggccaatcacaaggtcaggagttcaagaccagcctagccaacatggtgaaaccccgtctctactaaaaaaattagccagacgtggtggcaggtgcctgtaatcccagccactcgggaggctgaggcaggagaaccccctgaactcaggaggcggaggttgcattgagccaagatcatgccactgcactccagcctgggcaacagaacaaaa

SEQ ID NO: 552137 - DNA, 336 bp, Homo sapiens
tgctctaaggatcccgtgtcatcccccttcgtgagttggagggggatgagtggaagatgggatgagtgaaggatgggatgagtggagggggatgagtggaggatgggatcagtggatgggatgattggaggatggagatgagtggaggatgggatcagtggatgggatgattggaggatggagatgagtggaggatgggatgattggaggatggaatgaatggaggatggggatgagtggaggatgggaggagtgaatggggatgagtggaggatggggatgagtgggggatgggatgagtggtggatggaatgagtgcaggatgggatgagtgcg

SEQ ID NO: 552138 - DNA, 140 bp, Homo sapiens
cctcaggagctagcggcatgggtctgtaccttacttgatgttctgtaaaataagggagctaaaagtctctgcctcacagaattgtcataaagatgaaactatttggccaggcacagtggctcacgcctgtaatcctagca

SEQ ID NO: 552139 - DNA, 319 bp, Homo sapiens
gctcgaccctggttcgtgaaacaaggataaaccgcatgctctctcccggactggaccagatagtggcacttcagtagcatcgccgcctttcttccatatccgtcagccagggatgactaatgccggttctgtcactgtttccatcacgcttgttaaccaccacaaccctgctgctatcggcgctactcggaggttgcagcgtcaacggcacttacccggacgccacggacccagacgccgccaagctgcgtttcatcgccaatacgcaaaacgccacgctcgattacttcgatgccgagcattgcgacgggcaaaccac

SEQ ID NO: 552140 - DNA, 102 bp, Homo sapiens
tgagccggtaccgtactttataaaccaaatagcgtctggtgtctgaagcagaaactgtcggcacttcttgcagaatcgcagctgtttcagtcttattcaggt

SEQ ID NO: 552141 - DNA, 459 bp, Homo sapiens
  misc_feature (442)..(442): n is a, c, g, or t
tcagcaccatggcagatgctagggactaggacgaggtgagaattggaattacctactggggtttccttttgggcgtgatggagatattatgctatcagaccatggctcatggttgcgtaacttcatgaatatactataagccactgaattgtatactttaaattggtgaactgtatagtctatgaattacatcccatttaaagtaggtaaacaatggcttacaaaatataacttatagttctaaaacgcttctttttgtgccttctcattttttatttttatacagatagattagccctcactatgttgcccagactagtctcagattcctggcctcgagcaatcctcctgcctaagctttccaaaatgttgggattgcaggtttgagccatctcacctgtactgagtatgcagcccttcattaatgctactattacatctntgcctgctttatcctcc

SEQ ID NO: 552142 - DNA, 120 bp, Homo sapiens
attcacctctttgagataacagacctggagaaaggtgaattccaaatctagtaccatattcaagttatctggcagagaagcaggcataaaagagttttctaggtaattggggcgctcgtg

SEQ ID NO: 552143 - DNA, 330 bp, Homo sapiens
tctatggcgcgggccgatgaactgccgctggttctccaggttgtggatgaaattgatgaggaaagacttgctcgttcatcaacgattggagaactggtggacgtcctgcaccaccaccggccgtcgcggctcagggatgtccagcttgccggtgatcatcacgtccttgtcgccgtccttggagggcaggaagaagacgcggtcggtgtaggtcttgtagtccagcacggggatgccggcctcgtgcacgtcgttggtctggtcctccatctcggtcaacttgtctggagtatactccagacaagttgaccgaagggggtgatctttttt

SEQ ID NO: 552144 - DNA, 226 bp, Homo sapiens
cgcaattcatttattgtcctattctatgcggccagccgacatggcccaggtgaagctgcagaagtaaggaactgaagtggtacagcctggaggcttcagtgaagttgtcctgcaaggtaactggatacatcttcacaagtaatgatatagactggatgaggcagacgcctgaacagggcacttgagtgagataggatggatatcacctggagaggggagtactgaa

SEQ ID NO: 552145 - DNA, 295 bp, Homo sapiens
  misc_feature (33)..(33): n is a, c, g, or t
  misc_feature (37)..(37): n is a, c, g, or t
  misc_feature (43)..(43): n is a, c, g, or t
  misc_feature (46)..(46): n is a, c, g, or t
  misc_feature (134)..(134): n is a, c, g, or t
gtcattttctctaagacttcagactcagccctngggntgtttnttntttgttttatatagctgtactcacttgtataattatatacatttttaattgaaaggttacattgtatgtgcgtaaatataagtaaatngtttcctgaacactcagcaatattttaagtctcttcaaccttggtcaattgctagaccttgacaatggacaggtttatttaaatttcagctacgtctggaatgactcaaaagatgaaatccctcttaattgctattgaaattaggatgcataatatcaact

SEQ ID NO: 552146 - DNA, 615 bp, Homo sapiens
gggcgcccggaaagccggacttatggccggggccgcatggcttcgtcacagaaagcgtttatctcagctagcgccacccggtcctggccagcctggcgcctgccggtgggttaacaccgaacatcatgccttcaatcaagttgcacagtcctgatggagagatattcgaagtaagacgtggaaattgccaaacaagccgcgactattaagaccatgatggaagatttgggaatggatgatgaaggagatgatgacccagctcctctaccaaatgtgaatgcagcaatactaaaaaaggtcattcagtggggcacccaaccacaggggggacccctctcctcctggagatgatgagaccaaagaaaaagcgaacagatgatatccctggtggggaccaaaaatcccggaagctgaccaaggaacacttttggacttactctgggtgaaactacttaaacataagggtttgttgaggtacatgccaactgttgccaatatgtcaaagggaaaactccggaggagaatccgcagacctccaatatcaaaaatgactttactgggaaggagggaagcccacgcacccacaagggaaccccggggggtgaaaagaaaaga

SEQ ID NO: 552147 - DNA, 127 bp, Homo sapiens
ctatgttctcggctctacctgtctctcggctctaccttgtctctcggctctacctgctctaccactgaatgagatggatcagtggatattaagacaaggtagagccgagggacaaggtagagccgag

SEQ ID NO: 552148 - DNA, 245 bp, Homo sapiens
gttacaatgtggatacagtaaaactcagagtcgctttatactcggggagaatgaaaggacgagatggcctgggggaggtcaagagatcatacatgggtaccatagtgacagaagccactgcaagtcattgggagtaacaggtaatcttataaaatgaaaatctgtcatccatctaacgactcctccccatcccacacacacgtaaaactcctcatttgtgtcagattgcttttacagtagaggcc

SEQ ID NO: 552149 - DNA, 198 bp, Homo sapiens
ctgagtgtgcttcgctggtcgaatctgatcgcgctcgtctgcgcatcggtgcggcgatcctcacgtggccggagttcttccgcctcgagcagaccttcccgctggcgcaggtgatctcgttccgcgcgatcgtgctggttggcttcgccgccgtctttgtggtgatgctgctgctgtgcgttgcccgtccgatccgca

SEQ ID NO: 552150 - DNA, 342 bp, Homo sapiens
ccccggggtttttttttttcgggggagcccccaaaaaaaccttttaaggggtttgggccaataaaaaaaaaaatttttttaaggcggcccggggcctttttggcctgggaaaaatgtttttccccgaaacccccggtggggaaaaagaaggtggccttaaaagggccctttgttggggccccggttttttgggggaagccgctggggcctggggggaattgaaaactttcccacggggggttaagggttgcttttatgcccttgggtgggaaagggcccccgattgcggggattttggtttccttatgggttcccccataaaggggccttggtggcttttta

SEQ ID NO: 552151 - DNA, 888 bp, Homo sapiens
  misc_feature (301)..(301): n is a, c, g, or t
  misc_feature (311)..(311): n is a, c, g, or t
  misc_feature (322)..(322): n is a, c, g, or t
  misc_feature (352)..(354): n is a, c, g, or t
  misc_feature (360)..(360): n is a, c, g, or t
  misc_feature (364)..(364): n is a, c, g, or t
  misc_feature (368)..(368): n is a, c, g, or t
  misc_feature (378)..(378): n is a, c, g, or t
  misc_feature (383)..(383): n is a, c, g, or t
  misc_feature (385)..(385): n is a, c, g, or t
  misc_feature (392)..(392): n is a, c, g, or t
  misc_feature (403)..(403): n is a, c, g, or t
  misc_feature (410)..(411): n is a, c, g, or t
  misc_feature (415)..(415): n is a, c, g, or t
  misc_feature (417)..(417): n is a, c, g, or t
  misc_feature (421)..(421): n is a, c, g, or t
  misc_feature (439)..(439): n is a, c, g, or t
  misc_feature (443)..(443): n is a, c, g, or t
  misc_feature (466)..(466): n is a, c, g, or t
  misc_feature (474)..(474): n is a, c, g, or t
  misc_feature (489)..(489): n is a, c, g, or t
  misc_feature (524)..(524): n is a, c, g, or t
  misc_feature (529)..(529): n is a, c, g, or t
  misc_feature (588)..(588): n is a, c, g, or t
  misc_feature (600)..(601): n is a, c, g, or t
  misc_feature (628)..(628): n is a, c, g, or t
  misc_feature (720)..(720): n is a, c, g, or t
  misc_feature (736)..(736): n is a, c, g, or t
  misc_feature (768)..(768): n is a, c, g, or t
  misc_feature (773)..(774): n is a, c, g, or t
  misc_feature (803)..(803): n is a, c, g, or t
  misc_feature (831)..(832): n is a, c, g, or t
  misc_feature (835)..(835): n is a, c, g, or t
  misc_feature (838)..(838): n is a, c, g, or t
  misc_feature (849)..(849): n is a, c, g, or t
  misc_feature (883)..(883): n is a, c, g, or t
agcgccggcgagcgccgccgggaccgagcggggcggcgcggctggcggggccggcggcggctgaagcgagagcgcgacgcgagcgcgaccgcggcttcccgagctgcgcctggccgcccagcgccgcggcccgcccgaggcctggaggggtccgggccgccgtccatggtcgcggcgtcctgaggcgggggacgcgcccggcgcccccggccctcctccgcctcctcccgcggggcgggcggcctcctccggcgcctccccgcgcccgcccgccgctcgccgccgcctccctccctccttncctgcggctnccccggctttnggagcccgggggcggcctgtggcgcgcggnnncgcgcnggantgcncctcttttgnccttnangggaaanatgcgtttgcnttggatnntttnanattntgagtttgggatttcgcncgcncgcctgcctcttccgccccgcgngttttttncttttttccttttgntttttttccttttctccctccgggtctcctttttnactcnctccccctttatgctcgcccagccctccccctgctgctgagaagtgggggagggtctcngcgtccaggttnncgccccaccgggcccgggcgagcatgngggggcaagcagagcacggcggcccgctcccggggccccttcccgggggtctccaccgatgacagcgccgtgccgccgccgggaggggcgcnccatttcgggcactancggacgggcggcggggccatggggctgcgcancgctnnggtcagctcggtggcaggcatgggcatgnacccagcacggccgggggggtgcctttnnctntanaccccgcctcncggggcacggcgactccgagaaggcgcccgcggngaggg

SEQ ID NO: 552152 - DNA, 363 bp, Homo sapiens
gctacaccctaacatttcttcatgtgttcttaaaaaaaagttagcggcaacattacataaaacccgctggattcttaagtgccgtcctgacagcaaatattagcataagtccacaggcccacaggaacctacgtttctccttagtgggtatggtaacagcatgactcgtctacgcggcggttgccctcgttaccatgagttgcagctttggtgcagaggagccagattggacccccttcctcagaacaatggtttccaaagtacgccacagtatcctcagggtctgttaggactgttcaaggcttatttgctgaggatcctttggacagtcactcataagagacgctgagagttggtccacca

SEQ ID NO: 552153 - DNA, 272 bp, Homo sapiens
  misc_feature (254)..(254): n is a, c, g, or t
gtcaaaatccagtgttagaaattttccagtataaagaaaaaaattttaacttttagaaaagtaaacttcaaaaatttgcattgaaagctatttgtataaagtattcactaatatagaataaatgtagcgtgtgatatatattacaaagaatatttgcatataatgaattatatttctgggtacctaatttttgatattcagaggaaaggaaagggcaagtcaagggtcttgaggtccaaagggacagcccaacngggaaccctgtttgtttg

SEQ ID NO: 552154 - DNA, 261 bp, Homo sapiens
gaagtgatcctcctgctgcgctgccaaggtgctgagattacaggcgtgaaccactgtgcctgatctatccatgtttcattcagctcttcctcttacatcgggtttactttaggtcctatgaccttgaaacaagtatctaaaaacatcattgagccttacctaagtatcaaattgaaaaagtaaaaaaatgcagtagcatttgactctttactacaggagaaacttaggatccttgatctttttctctgccttgcctttgtt

SEQ ID NO: 552155 - DNA, 216 bp, Homo sapiens
gtcagttcgcctttcagaggaataaccgcccgttgcaaatagctgctgagattcttccattctgcggtttggccactactacgactccatgttgaattgttgcgcaatctccatgggcctaaattaacgccactgtttaaattcagaaaatactgtcgccagaatcactgtctcgctgctatgaatactgttagccccgctaaacgaatatcccag

SEQ ID NO: 552156 - DNA, 217 bp, Homo sapiens
acaaaagacgagatatcttatgagagcctcgtggaggaatcacagccgtatcctgataccctgcatttcagcctagttgagagtcatttttggacgtctcacctccagaatcatcaaagaatcaatttctcttgtttgttaagccactaaatatatggaaatgtgttatagaaaaaggaaacaaatacactgaccttcaatgttttgaatccttaat

SEQ ID NO: 552157 - DNA, 126 bp, Homo sapiens
gcggccgcctactactactactacttctgctcgaattcaagcttctaacgatgtacggggacatgctctaagaagctcgtttcttagacctcttcctggaataaacatctgtgtctgtgtctgctg

SEQ ID NO: 552158 - DNA, 268 bp, Homo sapiens
cgaagcagcacacggtcaatcccatctgtcccgtccttcttagtgaacattccctcaagagtgcgctcttgggagccttgctgtctcggaggaggctggtgtagagactgcaggcggggttggatgctgggtaccgggattcggacaagcacgacatgcgggagcactgcctgcagttcttacgaagcacacacggcaatcccactgtccctccttcttagtgaacatgccctcagatccgctcttgggagccttgctggttccgctg

SEQ ID NO: 552159 - DNA, 896 bp, Homo sapiens
tgccgtgtctgctaggaagaagcggactactttgtggcgtcctgccttggaaattacgtgcgggaacaggtgtgttcatcccgaatccacctccggggcatgatgtttttcagtcgccccttgcctcactcgaccgcagcagggtcttttagcagtatgcgatggttgcggtccccttccactgtaccaagcttacggcgtggcatccaggactgtctctgagtgcctggttcctttgcaccctgtagatgttctaggatagatggatgcatgttacataaattacgctatgcaagtctgtgagtgcgtactgaggggacactcgccaaggactgactgagacacgatgccgagacctcaagcccgttgaggggcagtcccaagaacccgttacagtgaagatggtttactctattgcctcccacctctggtccaacaatagaaagaagctcgccccacctccactctgtgagatccgtgaattctcggaatggcaggggaagccttgcactaggttgcagagaagcatccgtgccacatcctgtgtcagaaacccgtgggtctcacgtggcacttgtaactccacactgtgctgtcttcttggtcatgtgtaagctgttctctcaagctcagctctaggcattgcaggtccgagccaggttcacactcagaaagaggtgctccccatcctccattcggggctgacgatggggggactgatggctgcccctgcgtggcctgagtcctggtccaactctgaggcagttgacggggcagtcagatttataaagttttgtacaaagttttccatgttgtaatcactcccatttttacgtaacaaccaacttgttggtggctctatttctgattcataacctgggaatagtagaagcgcc

SEQ ID NO: 552160 - DNA, 610 bp, Homo sapiens
  misc_feature (139)..(139): n is a, c, g, or t
  misc_feature (148)..(148): n is a, c, g, or t
  misc_feature (166)..(166): n is a, c, g, or t
  misc_feature (174)..(174): n is a, c, g, or t
  misc_feature (195)..(195): n is a, c, g, or t
  misc_feature (332)..(332): n is a, c, g, or t
  misc_feature (360)..(360): n is a, c, g, or t
  misc_feature (461)..(461): n is a, c, g, or t
  misc_feature (562)..(562): n is a, c, g, or t
cgggctttgcttcaactcgagctggctcgggaaaagaagcggctgtggccattgtgaaattctgtggtggcccttgccaaggatggtggcctcaacctgacctcaaccttcgtcaggaaaaaccagtgtgagacccganccatgctgntgcagcccgcggggtccntcggctcntacagctaccggagtccccantggggcagcacctactccgtgtcagtggtggagaccgactacgaccagtacgcgctgctgtacagccagggcagcaagggccctggcgaggacttccgcatggccaccctttacagccgaacccagaccccaagggntgagttaaaggagaaattcaccgccttntgcaaggcccagggcttcacagaggataccattgtcttcctgccccaaaccgataagtgcatgacggaacaataggactccccagggctgaagctgggatnccggccagccaggtgacccccacgctttggatgtctttgctttgttccttccccgagcccctgccccggctccccgccaaagcacccctgcccactcgggnttcatcctgcacaataaactccggaagcaagtcagtaaaaaaaaaaaa

SEQ ID NO: 552161 - DNA, 503 bp, Homo sapiens
gctgaggcaagagaattgcatgaatccaggagttcaaggttgcagtgagccgtgatcacaccactgtacttcagcctgggtgagagcaagaccttgtctttaaaaagtaaaagagtaaaacaaattgtgatacagtcatacgatggagtattattgagcaagtcaaaggaaaggactgctgatacaacacggacaaatctcaaaaacattgcatttggcaaaagaagccagacacagagtacatagcatatgaatccatttatataaaatttaagaacaggaaaaagtaatctgtgtttagtatcttcttatggcagaggcagtaggttgggattttagtggaaaggattatgagggaacatggtaggatggtgaaaatgttctgcactgtctcagctgcactaatgacatatagctattaaaatctattaattaaaacaaaattcatttccactgtcacattagctacattttaaatgttcaatagccacatgtggctactg

SEQ ID NO: 552162 - DNA, 110 bp, Homo sapiens
cggttgcagcccaggatttggcggcaagttcaggactgacactgccgcgagggcggctgcccgggcgtcgagagtggctgcgaagcccccgccgagcgcggcttccatgg

SEQ ID NO: 552163 - DNA, 290 bp, Homo sapiens
  misc_feature (193)..(193): n is a, c, g, or t
  misc_feature (217)..(217): n is a, c, g, or t
agtcggttctaccatattgatgccgaacttagtgcggacacccgatcggcatagcgcactacagcccagaactcctggactcaagcgatcctccagcctcagcctaggaagcagcggacgagtagctggggccacaggcatgcaccgccatttccagctaattttttaatttttttatagaagacgagatccncactatgttactcagcgctggtcntcgaactccgtgagctcagggtgatcagatagaagagttgagataaatgtcaaaagatccacatcataagcca

SEQ ID NO: 552164 - DNA, 322 bp, Homo sapiens
ataccgccagtattctatcctatgaccaggacgagcatctaactcaaaatacgcactcatcggggccctacgagcagtagcccggacaatttaagatgaagagacgctggcgatcaccgtagtatcagggctcctagacacatgatacataaactcgatccaccctaatcacaacacaagagcacatttgaataatctttacatcctgacccctagccataatatgatttatctcaaccctagcagaaaccaaccgagccccgctcgaccttacagaaggagagtcagaacttgtatcaggctttaacgtacggcaacacca

SEQ ID NO: 552165 - DNA, 466 bp, Homo sapiens
actctctctacaaggtgatttcctagtgtgcatagagctgttcctctttggtctaccagttacatttccaagggaatctagatggttctgtgggcaaatttacagttgaactaggttcatatcttggacagccagctatagccaggcacggtaggtctgtggcctctacctatatatcttcgcaatattgtgctacatagtcgggtgtgctcgtttagctgttcctaggtagctcgcctggatcgtggggtcatagctttggctcaccgtgcacagttagatctagttatgtcatgaccatgaaggtataggggatagagcttgctatagtatgcttggttatgattgtcaatcattcccgtgcggtcctatatcttctgcaacaggtttcaagttctatcgattattctttatctgggtgaacggtaggactaaggatggctggtagtaaagtggagtgggttag

SEQ ID NO: 552166 - DNA, 104 bp, Homo sapiens
ttgtaatcttccccatgcagccagccagcagtcgcagtgttcagcagtgccaggctcccagcagcggggcagcaggctggcgcggcagttgggtggccgtggca

SEQ ID NO: 552167 - DNA, 733 bp, Homo sapiens
  misc_feature (4)..(4): n is a, c, g, or t
  misc_feature (13)..(13): n is a, c, g, or t
  misc_feature (54)..(54): n is a, c, g, or t
  misc_feature (85)..(85): n is a, c, g, or t
  misc_feature (95)..(95): n is a, c, g, or t
  misc_feature (273)..(273): n is a, c, g, or t
  misc_feature (423)..(423): n is a, c, g, or t
  misc_feature (426)..(426): n is a, c, g, or t
cccnagtaggacnggtccccctgtccctgtttgggaaaccatagcagttgtccngcccagcgaagcgccctctcaccccgcccgncagctcccgnggtgtccccagttttagtgccctcctcccgtgtatgtcctgtaaagccctctttattgattcctctgcctatatatttttaaattgcttactttgttctgattatatgctccttaagaaagtccaaatagtttatatatgctaaactctaaaaatacaaatccctaactgaacatacnggtacgtgcataaaaatacaaatccctaaatgaacataccgatctgtgcgtgtaatcacagttgctggggcagggtagggggatacagcagggggttcaggcaggaggatcacttgagcccagaagttggaggccaacctcagcaacatngcnatacgctgtctctaaaaaaaaatatatatatattttatatatataatatataattaataaatatatataatatatattacatatatattatatctatattatttatattacgtatgtaatatatattgtatttatattatttatatattatatatattatattatttatatgtaatatatttatattgtttatatatattatatttatattatttatatataatacatattatatttatattatttatatataatatatattatatttatattatttatatataatatatataataaatatataata

SEQ ID NO: 552168 - DNA, 174 bp, Homo sapiens
cccctgtcactatgtgtatatcaaatccttgaccagccaggtctgtagggcataatcaaatccaaagtgaaatagtatattaacacagtgccttgaactgggccaataacataattgctactcaaaagaatgtactgtttggactctcctagtggtcggcatgaatattctgga

SEQ ID NO: 552169 - DNA, 468 bp, Homo sapiens
accccctgaggtttcgcgggcgcagtcattttaataatgggcgcgggggttacatcctcattattattttgcctagcgaactcaaactaggagcgcactcccagtcggatcataatcctctgtcaagggcttcagactctactccccctaataggtttttgatgacttttagcgagcctcggtaacctggccttacccccccctattaacctagtgggggaactttctggggtagtaaccacgttctcgggatcaaatatcactctcctacttgcggggctcaacaaacagggcacagccctatactccctctacatatttaccccaacacaaggggggtccctcaccccccccattaacaacataaaaccctcattcacggggggaaaccccctcagggtgaaaacacctatcccccattttcctcctatccctcaaccccggcatcattacccgtttttcctttta

SEQ ID NO: 552170 - DNA, 1650 bp, Homo sapiens
  misc_feature (1133)..(1133): n is a, c, g, or t
  misc_feature (1650)..(1650): n is a, c, g, or t
gctccagtgccgccttctctggggtccaaggatgccatacagtgcctctggctcgtgacgcagtgccacattcagatcaccgttcttgcctcgatcgtcaccatgaactgtccgcaaggcaactgtggacagcaatggactgtggattcccggtcgcgtgtctccgtggtagctagactgacagccagttaggcctccctagctctcctcgacttagtggactcctatcactgactcatcagagctggaccaggcctgtgtgacatcacaacatctgctatgttcactctgctagtccggagcgatgaggctctggaggggccctgtgcgtcagctcctcgagaatcacgactcctgttcacggccagcggcttgttgaggtgcttcctatgactcttcaatcgagctgcaaccattcatattgcgtaggccgtcacgcataagtccaacacgagagaacgtgtgcgcatcggatctaggaaaacttcgcgtaccatgaagccagatataatcgcggaacagggcaaaatgaaggcgaacgcatattattctaccacgtacacactcagtggccagcgaatccaattccaaggtcccaaggaagaatctttcagacgctcacgcctcgccccaatgaaagggtccgttggtatagaaccaagacatctaatcccaaggagtcgcatgagtagtgggtagaggcccacgatagcgaaaacgccagggatgcaaaaacaccaggtgaaggcagtaagagatagctagttctaatcttggcacaatcacagagacgaatggtttaatcaaaagacgttagttatagatctcagggaagaccatatgcgccgatccggagatgtgccttgcattagttagacattcgcggaagctttaagtcggggactaccgggaaggcacacggttagcgcccttggatagagaacagacccgccaatggggatgtacgtcaccgcgcttatacaccgcacatactcagcgttaattcaaaagaggccaaagagcttagcaccccacccctgggtagaagcacggttgatagttcattccccaaaggaacagctgatgccacggggaaatggtcagggtaggttccaataatcactaaagcaccnggcttgggggccaggccgataggagtacagagtacggcggcgcgacacgccgtatatcttagtgacaccgggactcatgtgagaggacacaaaaaaagaggcgcgaataataatggcgtagctctataggctatcgcatggtagcgtatcgcgtggatagcccaatttcctatgggagcacaccagaagggattggcacggaaacacagtggaatggaatggtgggaaacgatagcgacacgtaacgacagacgtaatttcctggtggggcaactgaaaggcaaacagttatgaggattccgcgcatgtaatgccgtgcaacagcggaaagcccatgacactaaccagggacactagcttgtgagcgaaaaactcattctcgagaattgtggacattattccagtgggcaagtgaagcagatacaacagaccccgcgcgtcggcgctgtagttggatattgttgacaattctcccaccagatggagtgggaacaccggtacaatatgagaccactan

SEQ ID NO: 552171 - DNA, 235 bp, Homo sapiens
gaggatcccacctcctacgcacgacagagcagagctctctcagacagcacgggtgtatctacctctgcctcggcctggcactataatgaactgcttagatcaagctggtccaacccacggccatatgctgcccaggatggctttgaatgaggcccaacataaattcgtaaactttctcaaaacattatgagatttcttttgcaatttttttttctttgtccggggggtaggaggt

SEQ ID NO: 552172 - DNA, 271 bp, Homo sapiens
  misc_feature (62)..(62): n is a, c, g, or t
gggggtttccccccccccttccccggggggaaaattttggggggcccccccggggccccttngccggaattgggggtttttttttaaaaaaaacccgggggggggggatttttttgggaaattagggttgggggggaggggggttgcccccattttgggggtttgggtcccggttcggggggtttggggggttttccccccccccccccccctttttttttttttttttaaaaaagccaaaaaggggattacccccggggggccgggccca

SEQ ID NO: 552173 - DNA, 918 bp, Homo sapiens
cctgttttcacttggtgtgtgtggtattcgacccacagtgttgtgtgcgcccggtgcattttttatggaggtctgaagtgtccctggtcccgctccccggttaattccgcggggaaaaacaactgtgcccagttgagaaaactttcaagctttagccggcttaaacgtacgctcttaaacagctcgggacacaacccctttgtattggaatatggggaaaaagcgtcagtgcctgtgtgcaaaaggaaagtatggggataaagcccttcgttggaaaaaaccaagccgggggcctaccaaccatagggtgtaaaatcaagccggggggtattctttaattacgcggaattctttacggggtgcctcctggtctatcaaacaaacttgagtctctcacagcagcgattttgcatagtagttggtcccgcccgaaccccgggagttgcattacaccaaaacctgggaggattcgacattactttgaggcgcccaaactcacatggggtactagccactgcaaaaattcatgccgcgggattaatatccgggagggggaatgaccaaaaggaggctttaccacttatagcaacactagttttcttaattgaattcccagtcaagcctacagtggtaggataattaacaagttaaacatgttgcccttatgttaattatccacccgtgatcttataaaatggggaaccaaaatatttcttttaaaatcccctgaatactctaccccatgtttaaagcatgttttttttataataacgctcgttatcaaaatatgttaaacatttatgcacgcttccccacaagaactatcatctaacaattcacttctaataacatgtacgccaaagaatgaaatgcagcatattttatggcgcaccaaaccaaaaaaatttttaaaaaaca

SEQ ID NO: 552174 - DNA, 292 bp, Homo sapiens
cgcccccgggggttggggccccctcccgggggtgtttaacctcagcccgccctgggagtgggctcctcggggtcgggcattttctgttgctgcctcggccccgggcaaaaccgggcccccccgggggcccgttttagtgttttgccggaggacccaaccccctccaatccctgacagctccttggggttagttggggaccccaggtcggtgggaggctggttaaagggaacggggaggggcaaaggagttccccggaacccgggcagattaaagtaactgtgaagttttcca

SEQ ID NO: 552175 - DNA, 289 bp, Homo sapiens
cgacagaagggcctaaaagagtgatacagggtttcaccacattggccaggctggtctcgaattctggcctcaagtgatccacctgcctcgggccaacatggcaaaaccccgtctctacttaaaaatagcaaaaaaattagccaggcatagtgtcacatgcctgtagtcccagctactcaggaggctgaggcacaagaatcatttgaatctgggaggtggaggttgcagtgagcggagaccacgctgttgcactccagactgggtgagagatactgtctcaaaaaaaaaa

SEQ ID NO: 552176 - DNA, 882 bp, Homo sapiens
  misc_feature (123)..(123): n is a, c, g, or t
  misc_feature (293)..(293): n is a, c, g, or t
caagtgcaaggcgttcccctccgtggaccgcccaaaaagccgcgtgaaaaaagggaattggtaaccagaacccgatccgggggacccaaggtgtatcagggctccctacgggtcctgatggtnggaaggaccagcctttgttcccaagagggcaattccccgaggactttttggaggagagcatttcccaaaccttgtggtgccccaaaaaacaggggagcttacttgaaaagaggtgtttggccatttggggcagaaagccttaaatgggacactcaatggtaaatgcacanccctgggcctgagtcgaatggcacgcatgacctgtttgtacctacacaagagagacttttgaagtccagtaagatcactcactttatagggcccacgaggaattcttgagataaaagctgggttagcaaaggagactgttctcaaatttggagaacaagccacggtatcgaaattctttcacggaattgaatgtttgcacatgggaacaatcactgtaaaataaggttctttagtaagggatataagagagaatttgtaaaacgagaggacacacggcttattgggtcccacaaggagtttacacttgaaggcacattggaaactcttaaactaaattggtaacacataatggttccacggggaacaccagtgttcagccacttggagcctctttagtggcttaaaaagaggttagaaaaagtagtccttgagtactatgagagaatattcatgcccatttataacactttaaagcttaatgagttaagagagagttggccaaagattttgagattacgatcacacaagttgggagagatttttgccacagttcaaacaccaaaaatgtgaatatacgcaagggaccca

SEQ ID NO: 552177 - DNA, 149 bp, Homo sapiens
gctcggaggcgatgagctgctcgcgggagcgcaggtcccactcgcgccaggggcgatcacggtgacgtcgggcttgagggcgtagtagccgagctcgaagcgcacttggtcgttgcccttgccggtggccccgtgggagaccgcatcgg

SEQ ID NO: 552178 - DNA, 167 bp, Homo sapiens
tactacagaattggatggcgtttattcctccatctttagaggacacttgggcattagtcagctagatggaaagtccgctgtgaagtcaaactcattctgcccctagccacagctccgtgaagctcattggctcggtccaacccctagttccacgaccacgtacgaat

SEQ ID NO: 552179 - DNA, 144 bp, Homo sapiens
ggaataaaaggcatatttattggatacgaagaaataaaactgtccctattcacaggtggataattatagaaaatctattatttccgctttgaaacttctaggattaataagtagtgcaacatgtttgccggatacaagatcaac

SEQ ID NO: 552180 - DNA, 434 bp, Homo sapiens
gattgattcaggtgactttactgcagaccctgtcatgtgtaagatgccatgactgcttctttaagaccaggctcacaatctggaaacttcttgtttccgtctctgctccatacccctactctccactgtggtccagaaccagggtcatagctaatctctattgcagaaggaggcatttcaaggcagaaacagaccattctatccaggtaaaacacaaagagacgtggcataatgtcagattcaatagctctttacatgcagtagctcccttccgttgccaggacataggccacgaggccagtctctgagcctatgagctaccgtgactgttcccaacttactcagtttccatcaattaactccattctcttccatcagcctgtccttttttcccctccccgctggctcctcctgtcttcccttctttccttcct

SEQ ID NO: 552181 - DNA, 507 bp, Homo sapiens
cactgcatgttgctcccactgggggcggatataacttacctactagattgtgcaacacgcccagtctttcccttccctgctgcagccttagaaactaagtagcagtactgtttggtgtgtgttctgtttcttccccagcagtgcctactgcagctacttagtaacaactatcaggtggcgggtgtacggggaagcagttagatgagttacgtgtgatgcacaggccaatagtatcgcagcctatcaaaggtccctctgccctgcctcagtggcttgattcttcattggttgcatatctctattgtgcaggatgactgcccttctgaatcagatcagggatattccactgccagaccatggacccagacccagagccatgagatgagctagtccaaatatgggcacattcctggcccacacaggtttgacaatgatccgtcaggcatatataagccaaccctgtacatcttagctgtctttccatccagctcaggaactgctatttct

SEQ ID NO: 552182 - DNA, 155 bp, Homo sapiens
  misc_feature (80)..(80): n is a, c, g, or t
accccacgctgcacgggtcaaataattctcctcctcagctcccaagtagctgggactacaggtgcgcgcaccacgcgagntaatataggtattttatttttcttttatcgagtcgagagctgagatcacgccctataactaccagcctgggtaga

SEQ ID NO: 552183 - DNA, 114 bp, Homo sapiens
gacaatatcccacctgaatacaaacatattctggtggatagtgaacacgacaaaccagtgaacccacctgcatacatatcaaaggatttaaagaaacctgaacatgaccaagac

SEQ ID NO: 552184 - DNA, 658 bp, Homo sapiens
  misc_feature (51)..(51): n is a, c, g, or t
  misc_feature (496)..(496): n is a, c, g, or t
  misc_feature (544)..(544): n is a, c, g, or t
  misc_feature (578)..(578): n is a, c, g, or t
  misc_feature (636)..(636): n is a, c, g, or t
gccaaatgtccacattagcctgggtcagcaggcccctgggcactaaagaanatagggatgggtttgaaagcagttgatggcaaatgagacctaatttgaagggcagggacagatatcacataccgaagcaagcagccttcctccttgaaaagatggaatttctgaggaatcagtgtgtacccgggaagggcaggctggcaggtgggaatgggcgaaggctctgagggattcaaggactctgtactggtgctgcccgtggggtgcttcctcctgggcctgtgggtgtcacactggccacccacaaacagatgccgggcaccagtgcagtggggcgggagggtgtggacagttcagcacacttccaaccccattcctgggaaaaagaatccctaatcctgtaacagctcgtattggtgttaaaacaaatcctgccactgaaactcatccactctacttggaggagtcctccctggatcttgacccagattttcattgnatgattgattctaacagctttatttatctcattccccacagattgganatcacaaatcagaaggggactcaagggctgttgncaacaggatgggactggggacagcccatgtgcctgcctctgtcatgataggcaccccnaaatatttcctggatggccagc

SEQ ID NO: 552185 - DNA, 166 bp, Homo sapiens
actgatcccccacctgctccgtgggtacagtgccaggtggggagtttgactgggtgctggtacacctgtcacactggtaactgcattgtgtctaatgtgcgagctcagtgtaggacacgaaacctacccgttggatgcggtggaacacatccacctgctccatgcc

SEQ ID NO: 552186 - DNA, 281 bp, Homo sapiens
gcacgagcaagaatattagataattggaaggatgctgatatggtttggttgtgtccccccacaaatctcaacttgaattgtatctcccagaattcccacgtgttgtgggacagacccagggggaggtaattgaatcatgggggccagtctttcccgtgctattctcgtgacagtgaataagtctcatgagatctgatcagtttatcaggggtttctgcttttgcttcttcctcattttttcttgccacaatgtaagaagtgtcttttgcctccctcgtgcc

SEQ ID NO: 552187 - DNA, 240 bp, Homo sapiens
gcacccgtaaactttgttgcttatactcaagacatgtttataagctaagactttaaaatgcaaagttttttttagagctaagatttaaacaaatcctataatgtctgacattacaaattaatcaattggggaaaaggttgaataaggtctcctgaaatccttctccaatcacctaattgtggaaagggagtaattttcgagcctgattgtccggtattaacaatagccatttagatttta

SEQ ID NO: 552188 - DNA, 1467 bp, Homo sapiens
aaggccatcgagaagatgaatggcatgctcctcaatgaccgcaaagtatttgtgggcagattcaacgtctcgcaaagagcgggaagctgagcttggagccaaagccaaggaacttcaccaactgctttatatcaaacaacctttggggaacgaggctggactgactgacgagtctgcaaagcagctattcagtccagtttggtcaagaccctcaagtgtccacaggctgcatgcagagatccctaatgggcaaatccaaaaggcttcaggcttagtcgagttcacgcacaaacacacgcaggcatgcccacatcaaaggcctgcctggcaaggcagcatgcacatggccacacaagccaacatcacagctgcgctcaacacatccatccatctcctgtcaggccccgctgccaccacacccagcaaagctaaggccaacggcccagcgaccaaggagcgctctccacacacaccggccaacaacactcctcgcacaccaagccctcctggcacaccaccccacgcggcaggcaagcacagtctcagcgatccgcagtcaatccgcaggcgggcgcgcctgccccacatccctccttaccacttctgcacaagccatacgctctagggccaattgggcaaccaaccttcaatttcggcacatcggcaactgccaccgcaccacacttatccaaaggggccacaccacgacaccaatctcttacccctacgccccttctatacaggggcccacttcccaccgctttgtaaaccccaagcgatgggcccattccacgctgagtcaccacttggccctgcggcaccagcgggacactaggggcaacacgaaacaagcgccacaaacacaccgcggggagctcacaggacgccctacgtcaccggcgcaccgattcggcacgatctgccctcccaacagttactctaccccgctggcacaagagaaacacggagcaacacccaccagccaacaggcccacacgctacacaccccgtgtggcaccgcacacctcgccaacccctggacgcaccccgcgcaaacctcacggaacgagcgaggcccataccgcccaaacaggcacgcccgaacctaaacgctaagcctggcgcacgggcgcccacgtggggccccacacacacaacacgcggaaaaacgggggcaacaacgcacacggacagacacctcacggcggcactccacccccatgggaaacgccccacaacccccaaacgcacctcacctacatgtgccaccacagcgcacagaacgtctgagccctgggccaacaatggtgaacactacggccgcacaactccaccccccaggcgacagacacctgtgaccgcaactgctgtcaacaccgagcgtcacgcggcccccacgcgcacccgggcacaacaacgagagcacgtgggccaaccacccaaacgagggtagcacaaaccgccagc

SEQ ID NO: 552189 - DNA, 165 bp, Homo sapiens
  misc_feature (58)..(58): n is a, c, g, or t
  misc_feature (75)..(75): n is a, c, g, or t
tctagctagtacgagctggtggatcggcgagcagaccaagctctggtcagtgacgacnttgtgaagtggaatggncctcaggccagaacatcatgtgtggcctcctgcaatagcagccaggtggtggtggctgtaggcagggtgtgatgtgtggtggtgacttta

SEQ ID NO: 552190 - DNA, 456 bp, Homo sapiens
ggatgacatgatcgaatcgagctcggtacggtccatcgctagagccagagggcagggatgtgggtttggaagcgtgacggtcgggctctccaggtacttgtactgtgactgcacctcatcgccccatctcagcactacagccttgaaccctaagagctgtcagcggctctgcccacagaaggccctcagcctacaatcccttcccggccattcttccccatcggcgaggggcttctcctagggaacatctcatctgagctcgcatcctggtctgcaccgctccccgctgcctctaagcacagcatttatcatatgatattgatggcatctgttcatgtgctggtctctccatgctccctaatgctaacaaaggacaagggctacagattcatctgtgcgtccctagtgcccttggcccagtcctgggacgtggtactttatttgtcggtgtgaaca

SEQ ID NO: 552191 - DNA, 1121 bp, Homo sapiens
gtgaaatgtggtccctgggagcaggaggagggtcttcgaggtggcctgggggcgggggactaagatggacgcctgggaagtggaacatgtggagtgcagctggtggtgcctgtgtgtggccagagggctgagtgactggggtgctgtgagtgcgcactctgtggaatgcctgagagggtccctgcagagacgtcagtggctgccctgtgcggtgccggcggggagctgggtgggctaggggctggacgccctgacgtgatggcccttcccgcatgggcgcctgctggctctgctacttgctgctgccctgccaccatgttccaccgtgctcctggcggcccgttcgggcccctgcgcgcctgctgggtccacccggcgtccctgcccgggctggaggtgctgtggagcccacgggctgctgctgctgtggcatcgcctggactcgggctgcagtgcggggctctacctaactgccggcgcgcaacggtggccgaggcggcaggaatttgaatggacaagagtcgcctgcgccttatcctattaacggcttccaggcctggttgctgacagccctgtaggatggggatggggatgtacagcggggctgcatctgagaggcgctcccgtgaaatgctcctgcccttgggaggtaggtcgccaccttccacggttaccatcttcagcatcattatctaaatgaaggcgcaggtagccccaagaatcagacctggcaacatggaggggaagtcagggaatcggagtatcgaagtatggcagggacgagagctaagcctcgcaatcgggcggcgacatacagaatacaggaagcgggacaccggagcacacagcggggccgcaacaacagggcctgtggaaaggaggcaagcagagcgaacacccaacaggccaaggtagggccaaggaaccgagagacacgaaggaatacgcaatatgcagaggggagcgacaagcaggatacaatgaagaagcgcaaaaggacggagcgccggggaagcaagagagcacgatggacaacaacgcaagagaagcgagcgcacgagaccgagggacgacaagaaggaagaggaaccggggagggcgcgagcagccggctcgcacag

SEQ ID NO: 552192 - DNA, 912 bp, Homo sapiens
gatatgtgatatacttgttggtgaatgtctgtgaatacatgtgggaagaatcggtgtcttaatagtctccagtgtccacgcgtgattgccgtggtgtgactccagtcggtgtctcaacagtctccagtgtccacgcgttgactagcgtgtgtgactccaggcggcgtctacagcagtctccagtgtccacgcgttgactgccgtgtgtgactccagtcgacgtctcagacagtctacggtgtaccacgcgttgactgccgtgtgtgacgataccagtcgggtctcaagagactccggtgtccacagcgttgactgccgtgtgtgactccagtacggggtctcagaagtctccgatgtccactggcgttgactgccgtgtgtgactccagtcggggtctcagcaatactccggtgtaccacgacgttgactgccgtgtgtgactccagtacgggactcagacaggctccggtgtcccacggcgtagaactgcgcgtgtgactaccagatcgaggggtcatcagcagcctaccagtgtccccgacgttgaggtgccgagtgtgactccaggcggcgtactaccaaactactcagtgtgaccactgcgagttgactgccgctgtgttgataaccagtacgggcgacatacagacagactacagagtgtacaagcccgttcgactcgaccgtggtggctgagtcccaggccgggcgtctcagccagcactccgggtgtccacgcgctagaatggcagcgtgatcaacccgaaagggcgaaaaacaagcagcagcacagaccacccgcatcggactgcgctacgaaatacagcaggcacccaccaaccccagagacacagcagaaatacagagacaacaacagaggacgcacacaaaacgacgacacacacgaagcg

SEQ ID NO: 552193 - DNA, 318 bp, Homo sapiens
tctaccgatgctaggatctcgaatgcatccatgcgcattctctagagatcgagctgtcgagcattcaatttatgtgcgctgctcgccgatttacagattgtgttctcttttccttaacattgctttttacggagatgtgttacattgtaatgaattccagatttattactttttcctttcataggtcatgcttttggatgtagtatctaaaagattgtaactgaacccaaggttacctagattttctcttatgattgtccacaagttttatattttggtgttttacatttaggtctatggtctatatgcaatcagggt

SEQ ID NO: 552194 - DNA, 872 bp, Homo sapiens
gccaacatgccagtggcccggagctgggtgtgtctggaaaacttatgtgagccccgtggagagccttcgagaaatctcgttctcgaaacaatgcagctgaggctgtatcggcgagtatgggctccggaagaaacgtgaggtctggagggtcaacatttaccctggccaagatccgcaaggccgcccgggaactgctgactgcgtggcatgcagagaggaccccacagtgcagtctgattctagaagagcatactgcccgtgcagcaggctggcatgggtccagcagtttggggctgcatggatgaccggcaaacgatgaatgacttggattacaatcgcttgtggctctgacaaatggaggcattgcattaatatgagtacggcctgctaggaaccctaggatcttcacagctgggccttgacccaagcttcggatcccacctacgcctcgcgtcgctgtatcccgtctaggcgccaattattgacgggctccgcatagccaggtggtagaacaatcctcagctcactgtacaattggtccgctcgtggcattcacgcaagaagcaaatgatctggacttcttcatctgacggctacatccactaagggggagtggtcggaccgggccgatgtgaagatggatgaatggcataggaatggtgggcaggggtgggtgctggtggcttggccgacgactgatgcgaggaggcataatatgtccaaccatgttacctccctggcggctgctggcactttgtctgcgtaattcgctgccaaatataggcatggactcaaggcgcctttacaaataaccaagacctcaccaactggtggctggccttggtcggacaccctggccaaggtacagaaag

SEQ ID NO: 552195 - DNA, 750 bp, Homo sapiens
  misc_feature (587)..(587): n is a, c, g, or t
  misc_feature (605)..(605): n is a, c, g, or t
  misc_feature (612)..(612): n is a, c, g, or t
  misc_feature (686)..(686): n is a, c, g, or t
  misc_feature (709)..(709): n is a, c, g, or t
  misc_feature (713)..(714): n is a, c, g, or t
acaagtgagtctgactcatcagataacgagcctattgaagatgaacagactccatttcatatatcatggctatctgtgtcacgagtgaattgtactcagtatctcggtttatgtgctcttgcaggttgtacatttaacgatgttagaagtaatgtccaaaatgatacagaagaactagagagctgtggtatacaagacatatttgttttctgcaccagagaggaactgtcataatatagagtcccaaacctctgtgatctctaccagcaatgtggaattatcacccatcatcatccaatcgcagatggagggactcctgacatagccagctgctgtgaaataatggaagagcttacaacctgccttaaaaattaccgaaaaaccttaatacactgctatggaggacttgggagatcttgtcttgtagctgcttgtctcctactatacctgtctgacacaatatcaccagagcaagccatagacagcctgcgagacctaagaggatccggggcaatacagaccatcaagcaatacaattatcttcatgagtttcgggacaaattagctgcacatctatcatcaagagnttcacaatcaagatctgnatcaagntaaaggaattcaaatagcatatatatgaccatgtctgaaatgtcagttctctagcataatttgtattgaaatgnaaccaccagtgttatcaacttgnatgnnaatgtacatgtgcagatattcctaaaaaaatattga

SEQ ID NO: 552196 - DNA, 710 bp, Homo sapiens
tatagggaaaccagattcatgttttattcccccagagaaaactcaaaagtaggaagctcctccttccgggagaaactgtcacaggtgacttcaggtcaccaaagggaggaggtacagaaagatgctggggtatgtgacgaggctgggggccactgaagcaccacagtgcagggggaaagaaacaaggagagacaagcggggctccccagcctaggaaacagagggtgtggcagccgggccagggcgtggccacaggcgtgggggccaaggggaggagctcccgtgacgaccaggtgcttttcggaggccctcgggggtggttgcaaagaaatggcctaccaaaatttaacccactgcagcaggccaggttgcacccgggaagccgacggcaacaatggtgagactcccccctttgcaggggtctagactgaactacttcccaccataggcagggcggaatacgcatgcgggtggcacatgcgactactgaaccggcacagcctgacacgtactgcagtgatgacccgtccgcgaccctccaataatgagctagccagttgcaggaaaggactgtctcagttcgaactcttcccagagtcggctaaactagagaagggccacgtgcaggggcggcggcaccggtccagtaatgcactccaatgatacaccgctggataacatcttccttgccaacgcgaaacaaccgctgc

SEQ ID NO: 552197 - DNA, 689 bp, Homo sapiens
  misc_feature (345)..(345): n is a, c, g, or t
gattttaccactgcactccagcttgggcaacaaggtgagaccctgtctcaaaaaaaaaaaaaagttttctaaaataagcaggatgattgtttaatttgaaaatggaccaggaaactagagtgcttttaaaatactctgtcttcatttttaaacaattgttgacattggaattacctgcttaatcaccatgagtttggtttggctttccatacagactgtgtatgtgtcattggagtggttcccagattggagcgaggtaatcctgactctaaattgaaccagcaattttttccctttagcctctgtgtttgcccactctgggtaatcgtcctcctatgtgggcanaagcccatttagacaatgcttaaaacctcgaggcaccatggcttttgggcaaaaaactccagtgcacttttaaacctagcctcttttgcactaactggacgctttcaacgcgagacaacacaatattttcccttgaacaaaaacctgcggcctggtccactctttttcccccctttgtatagcctcttaacgccacgcaagaacctttacagttgccccttgccctttttaccaccattaggtacaaacgtctccctttaaaacacaacacaacacccaaacacacattcggggagcaacctacacccagggctaccacaaattccccacactctgcccccaaa

SEQ ID NO: 552198 - DNA, 1527 bp, Homo sapiens
gggctgcagaagtaccgactgcggagtaactgcaaagatgctgtacagagcgcgttgctgcggccgtcggtccgcgcccttcctcggacgggccggacctggtctaccagaaatgcttagggttccatcatttccattgctgccacaggaacttcccatagcctctcaacactccatcttcgacaacagcactgggcactagctagagcatgtccatctattcttgcaagcagcgtatttcttgcgagctagatcacctcttgttgcatcttgcacagcaacactggagcgtgtcctatcaagatcattgcgtgcatggctcatatgccacgcgatcaaaatggagcttgcacgggccactcgttcacagcaagcacagcacacatggccacccgctcagcataccacgagcatatcaagcagaggcgctacatgataccacgcgaaccaccatctgcgcaaccatgcaaacacctgactcggacgtcagaaccgcagcatcagagacaacaagacaaaaacaaatcacccacaaccagaccacggcagcacacataagacgcacaaaaaggaccaagaggagccaaactcagaacacaacagaatcaccccaccaccaagcacagtacgaggaagacaacgccaaagacgacgacagaagcaaacgacacagccctagacccacaggagactacacaagaccaacaacagactaggaaaacagagcggcccaaacagaggcaggcataccaagagccaacgaccgaacaaaagacgaacgcaacagaagacacgagcacacgacgataacaaccgaggcacagcaacaccccccaaccaaaaagatacccacactagacaccacacaacacactacaaagccacacaccaggaccacaaccacgagacagaagacagagcaaacaaacacagcagaagaccaacaacgaagagcacacacacaacacaacgcaagaacgcccacaccgactacaagtgagccaccgaaacgaaacagacaagtcgggcagactcacagcggaacccgcacgaaacaggaacacggagcacgcattacacaaccgaaaagcgcacgacacggcacgacgtatgggcccaacccacgaagaggaccaggaccgcccaacacgcgacggacacatacgcgaaaaaacagcaccgcacacaagcacccgaggaaagagtacacacgagagccggacagcaccgcagcaggaacagcaacacaacagaaagcaggctaccagacacgatgccgcagcgccgccaacggggacaggaacccgcccaggcacggcacaagcaaacacagagagagaaacggcgaacccaccagagaagaggacggaggagagaaagggcaggaaagaacgaagagaaacgaaagcgacatggcaggagcaggaccaggcgcaagcaacagaccgacggagacaaggaggaagggacacgggaggcaaggataccaacaagacgcaagtgcgaagcacagacgccgagggcaaa

SEQ ID NO: 552199 - DNA, 135 bp, Homo sapiens
ggatttgctggtgcagtacaactaggcttaatagggctcgaattcgaggctcgaattcgagctcgaattcgagcctcgaattcgaggctcgaattcgagcttctaacgttagaagcttgaattcgagcagtagta

SEQ ID NO: 552200 - DNA, 136 bp, Homo sapiens
tttgattggtggctccaagagcaatgggaagtcaacagccaggaggctggacagcgattccctgtggaccccgacggtcccagacggctgctagggcagtggttagtcggcaaagtaagacaaggtccacagaggg

SEQ ID NO: 552201 - DNA, 906 bp, Homo sapiens
tgaggcgggaggatcactggagcccaggagttggagacaagcctaggcaacatagtgagatcccatctctacaaaaattttaaaaaattagatgggtgtagtggcgcatgcctgtagtcccagctacttgggaggctgaggcaggaggatcacttaagactgggaagtcaaggctgctgtgagctgtgatggccccgctgcactccagcactccaacctgggcagcagagtgaggctctgtctcaaaaaaaaaaaaaaaagaaaaggaaaaaagaaaacaagtggagtcgggggaacattaagggcaacacagaaggtgttcagaagattgtcctctattggataacgtttcccacagggtttttgggttaccaattttggataatcctacagattgtatacgggagctggaacagagtaaagtaaggggaggggggatgtggctgaggggaaccaggtttgccgataatgggaggggggaattcagagataagccaggcaggaagcaagtcaaatgatccctggtttcaagtggtacatataaacgggaagttgatgtaaggttagtatatatgccagatggttcagatggcattcttcgctagtgtgtgctctatttcttagcgatgtgtatctacagataatatcctaaggcctggcagtggagaaggcttaaacgaaatgataccccaaggccggtgtgggagcaacgcctgtatccagcatggggaggcaggcagaagatgctaaggccggcattgtacacgctggccactggacaacctatcttctaccaaacacactgcgaattacattcgtgcgtggggcacccgtggccagccaaggagaaaggggacaccgacacggtgagaatctgcgacgatcgtctcaacaacaacagggacg

SEQ ID NO: 552202 - DNA, 930 bp, Homo sapiens
ctacctgcacccaggttcggcccgtaggcgtctaggcagacccggcgccatacttcatacgagcgccatggccgcagacctgcgggccggtgagcggccgggatactagctatgctacctacggcttgcatattgtatatcttgctgaccgctgggcacctgaccctgggctggaacgaccctgacagaatgtttgctgcgggatgtacaagctcttaccctccactatgaccgctataccacctcccgcaggctggatcccatcccacagttgaactgtgttggcaggcaccagctggtttgtgcattcttcataccccaaacagtccatcacagatgtccagcacaccaccaggctgggcatgggtcatgcatgtcacagtgggcacatgtcaagcacggcacttcagcatcattgccatcacgacacatttctggcacaacgacttgtgggtcgcagctgttgcacaggctcatgcaggtcctcttgcaagcaccagccatgatactcagcaggttctctgtgggcttggcagtctcacattccagcattcatagcaagaaacattgagcctgcaagacaacctgcacgcgagttcttggaaccagccagcacacgagacttatgcgctcctatacgtcctgacttgatcactccatcacgtagggacccgtcgggccgagactacccgtggtaaccactggacgttgcgctctcgatatgacccaatcgaatggatacgtccatagggggtactccgctcgtctggatacgtctagtgcagccgtgatggcgtgtaggtgacccggcgccgggtataccgttccatccaaccgatgacatcctaaaatatccatcacaatcttcccacacgcgtacccagaagcaatcaccaagtttcagcaggaacgctcaatccaccaggtttc

SEQ ID NO: 552203 - DNA, 885 bp, Homo sapiens
ttttcttcatcccttacattcagttaaaggtttaagatgctagacttggccaggcatggtgacacacgcctgtaatcccagcactttgggaagccaaaggcgggtggatcacttgagccaggacttcgagaccagcctgggcaagcatggcgaaaccccatctctacaaaagagaaaaaatacaaaagaaattaacctggtgtggtgctgcatgtctgtagtcgcagctacttggtaggctaaggcgggaggaccacttgagcccaggaggtcgaggctgcagtgagccatgattgtgtcaccgcacaacagcctggatgacagagcaagaccctgtctcaaaaaaaaaaaggtggattctgagctactacgaggaaccgacaaccatatcttattggtcttggaatcccaagtacttggcaaatagcatgggtggaaggggatgactgacattgattgcagtgacttgagtgagctgactgatgtgagtgccatgacctgagtgacatcctcccaggactcggacacctgatagccctataattcccctcatcctttcctcttgaatgctcggcgcgggtgggcattagacctaagtcatgacctctggagataagacctgggttgaagcccacgcttgtggccacaggtaccatcaggtgagccctgggaaatgttacgcaacattctcaagcccaagtccttgagagcggagccaaggaaaactcccccacagggtcgcggggaacaccgaacaaaacggcggggatgcaccggcacacaacgtggccatggaaatcacccaggcggggcgaacaccgcccggcaatggccccccattggagtcccgtcggccccaaaacaaaaggcgggcacaaacccgga

SEQ ID NO: 552204 - DNA, 238 bp, Homo sapiens
cccggttttatccgacttgttgcagtatcatcacgcgcttgtgtgccagttactccatattttacttaacaatgtaaaagatgcaagaggtagatactgctggacaaagggatgattcaaggcgtgatgatcgacgtggatggcacgatgatttcatcatgcttgcttatttaaacttactaagatacttggcctcagcttgtagcaaactatctaagagctaagggggtaccgacgc

SEQ ID NO: 552205 - DNA, 319 bp, Homo sapiens
tgttgatagcacaacctagggtcagttttgcaggtggtaagccatttaccaagatagttgtaggtaaggaagggcagatttattagagaaatgtgaaaatatgttgcagtgggcagctcagcagagaaggggctacctgcaaagaggcaagggctggaggaaagttttatagggtcctgctgaagggtgctacgtgtggaatgaggtcattgtgcccgcaggttgtttgtgattagctgtctctaacaattgttcatacaataattgttcattattgttctcaacttggggctctccccaacctggggacccttcctta

SEQ ID NO: 552206 - DNA, 439 bp, Homo sapiens
tatcttttgacattgtaaaaacattaaggatatgagttgtatatttcatagtagtcaaacagtaatctataatccttatatggataccaatttttaaatggtttatattttatagctaaatttcaggagtgaaaagaaaaagaggaaggaagaaaccccactcaggcaatcatgtacagccacccgaaacaatgaaatgtaatacattcataagacaagtgaaagaagagcatggcagacacacagatgcaactgtgaaagttccttatcttaagaaatgcaaggaagcaggacttcttaattacttacttgaagacatattagaccacagttcattcaattccagaaaaactcatggatgagactacttcagaatcagactatgaacaaatcggcagtgcactttctagactgtacattgttcgaagacacatccgcc

SEQ ID NO: 552207 - DNA, 384 bp, Homo sapiens
acctgcccccatcactttataaagtcagcaggatgtctctcacccaccctgtgcgtgggtctaacaaatttatcttgtcatgctctcatgtgtttggagccacaccgatcgggtgggtggtgaaccggctctctgtaattgtagcatccaaatgacaacagccgccgagcagcgaatcttgctcaggcccacagcatgtctgagacaagactccaacaagtaataattagctttttttctcctgccggctacagtagctgtcttactaaagagcttcccacagtggagggaaaggccatagaatccaggtgtcattcagagccagtccttgctgaaatgtggtcttccagtggaagcacctcttttattgagaggagacagtgt

SEQ ID NO: 552208 - DNA, 339 bp, Homo sapiens
ttaaaaaggtttaattggcttatggttctgcaggatgtacaggaagcatggtgctggcatctgctcagcttccagggaggcctcaggaagcttatgaccatggcaaaaggtgaagggggatcagacatgtcacatggtgaaagcaggagcaagaagggggcagggggaggtgccacacaattcctttagtgttttcaatcacccagtactcggttctcttagagcaaaaatcctttggtgctagctcagtgttaggaaacgtctttatctcaatggcagacgttctataccaattcaagggagttcaacaataaaattgatttggccttggtctgcagt

SEQ ID NO: 552209 - DNA, 172 bp, Homo sapiens
  misc_feature (27)..(29): n is a, c, g, or t
  misc_feature (89)..(89): n is a, c, g, or t
  misc_feature (109)..(109): n is a, c, g, or t
gccgaccctccccaaggtaaggtttgnnnccagggcccatcatgccattgactgtgggtgtctagacctcagggccctcatctggaaantagagcataggcaggtagcntggcagggactgacaccccagtgcccagtaaggaggcagtagaaaaccttccaacagcccagt

SEQ ID NO: 552210 - DNA, 169 bp, Homo sapiens
cacgagggaggtgcatattaatgggggccgcgactcacgggaaccggagccctgggacgtcggagattgactagggatgctggtgattctgaccggcacattgcaaccgcatagggttaactcttctgtctccgctgccgcaggtgcatgtgcacgctttgcccgtgtg

SEQ ID NO: 552211 - DNA, 254 bp, Homo sapiens
cggcacgaggggaaacagcccaggacaaggccaacagtgtccgggtcccagggaagcaagaccgagctgggcactgggacaccccttcccacccgggggacgcactgcaaaggagtgtgatggcgttggaatccctctggccacgcaatgtgctttaggagtgagaatcccgcagtggccgtgggagtggtgacgagagaaggcaatgcactcaggtcccctcagtaaactagagctgtgttttctcaaaaaaa

SEQ ID NO: 552212 - DNA, 262 bp, Homo sapiens
aaaaaaaaaaaaatgatggccatataaacgctttttttggatgggtcccccctggtactggaaaaatttgccagcccttccccggtaccctcctgtgaggcagcttatttttaccccaacataaaaaggatggtttggaggaggtatccaatttaaaagataaagccatccgaaaggttgggtttttttctatcttaatgtggatttcaaaattaaagtctatttattcagccattccttaaaaaaccggattttttgggga

SEQ ID NO: 552213 - DNA, 239 bp, Homo sapiens
caaaactacgcaggtgttagagcaaggaacgtgggtcccagtgagctgagtgccccaggtatcgacatgattctgaaggtcattgtcattgggtgctgcgctgggttgcaaagacaccgtctaggcttcctgggggccgtcctgggcctcggcggccacggtgctggactggagcaggaagtctttgtaggccatctcggcttcctccttggatgacctttttgccttcttgggttctt

SEQ ID NO: 552214 - DNA, 252 bp, Homo sapiens
tccagtagggaggaggaggaaacgttgttaaaaaaaaaaaggttcctttaaaaatcctgtaaacctggatttcaaaactagcctggtgaacagggtgaaaccccgtctctactaaaaatacaactatatagctgggcatggtggtgggccgctgtattcccagctactcggaaggctacggcaggagaactgtttgaacccaggaggtgaaggatgcagtgtgctgagatcgcaccattgcactccaaccgg

SEQ ID NO: 552215 - DNA, 1155 bp, Homo sapiens
tcccccccgcgcgctgcggcgcgttagatagagcgtggttttggtgctcgctgctgtttgttgggtgtactacttactctgctgtgtggtgttttgccgtcctatgttttgatgcgtgctcgtcggtatcctctctctcctgggtgtttgttttgtttgtctactttctgcggggcggcgctacttcattttttttttttctcctcggtgcgagatctggttgttttgttttatctgttctttgtctctctgtttttttgtggctgctcgtcttattgcccgctgtgttggttggtgttgctctcttcgagccggctggtgtggtttccgtctgctctgtgttttttcttcggcggggtttttttgttttcgtgtccgtctccttggtctcctgttgtgtgttgctttttgggtggtgggcccgctctcccccctcacattgttgtgtttttttgtgttgtggctcttcttctttctttggttgtggtgtgctcctctcttcctcgctcgctgttgggtgtgtttcctctctctcgtggtcgtctttcgattgatatgttattgattgtttgtggtccgcccgcccctcctctcctctcgtttaggagggtgtttctcttctctcttttctcccccccgccgcgtttttttttttgtgttggctctcctcgctcgtgggtagtaggtcctctctctttttttgtttgttgcgcactcttctctttcttttacaaaaggtttttttttttcttctctcttcttctttattatattctctctctttggtgtgttataaataaaaaaaataaaatatattttctctcccccctccccccccacataaacacccccaacccacaataagattgtttttttttcttgtgtttcgctccgtccattttatatttgttggtggtgggtgaggggcgcgcgcccctcttgttctccctctctcttcttcgcaccaccctctctctctttgttatgagaaaatgttgtgtgtgtgtggggtttttttctctcttttttttctcccccttctttttttctcctctttttttttgttttttttttttcccccccccccccctctctcctctccttctgtgtgtgtgtggtgatgatgatagaaaaacacacaccctcctacacata

SEQ ID NO: 552216 - DNA, 375 bp, Homo sapiens
gccttccaggtaacgggtgtgagagtaagacgctgcctcccaatgtcctgtacggcatgtgaccaagctcttgttcccctaacgtctcaacaggcgctcactgaagtgtatgaatatttaaagaaaggtttgtgcagtaagctagtcttcccctctgctttctcgaaagcttactgagccctgggccccaagcacgggccgggccatacgcagtttcctcttccacaagctgccgcttttctgggcaccttgaagcatcagggcgtgagatcaaactagatgtgcgccgggagagtgtcgcttacctgccctgctggggaggtcttcctgaaactgggtttaatgctttatagaaatgtgaacactgaatttatt

SEQ ID NO: 552217 - DNA, 306 bp, Homo sapiens
gcgtctctttcgcgtatgcccttgtacctaccactcagcaaaaaaagctatagttaatactctcgatctcagcatcgctgctagtgaaatcaaagagccgtctgaactatcctgcccgccatcatccgagtcctcatcgccctcccatcctctacgcagtcctttacagtaacagacgagatcaacgatcccgtcccttaccatcaagagtcaagttggccagcaatgtgtagtgaaccttaccagtacaccgactacggcggactagtcttcaactcctacatacggaagagaaccaacgctacg

SEQ ID NO: 552218 - DNA, 795 bp, Homo sapiens
ccagggcgggccccagatgagggtgcccttcgaccatcgagccgacgggcatccttaacgttcccggcccccggacaaggagcacccggcaaggccaacaagggtcaccatcccccacgacaaggccgcctgagcaaggaggagatcgagcgccctggtccaaggaggcggagaagtaccaacggaggacgaggtgccgcggcgagagggtgtcaacccagaacgcctggagtcctacgccttccaccatgaagagcgccctggaggatgaggggctccagggccagatcagacgaggccgaccagaagaaggtgctggaccagatgtccagaggtcatctcgtggctggacgcccacaaccctggccgagaaggacgagtttgagcaccagaggaaggagctggagccggtgtgtaacccccatcatccgcggactgtacccgggtgccggtggtcccgggcctgggggcttcggggctcacgggtccccagggagggtctgggtccggccccccccttgaggaggtagattaggggcccttcccagattgctgtttttgttttggagcttccagactttgcctttcctagtatttctgtttgtccgttctccatttcccgtgtttgccatgttgaaattttttggtgaagtactgaacttgctttttttccggtttctacatccgagatgaatttatactgccctcttacgactatttcttctttttaatacacttaactccggcccttttttaagttggttacttccaagtaaatcaacctttaaaattcca

SEQ ID NO: 552219 - DNA, 189 bp, Homo sapiens
ttacagctcggtaccgcaccaggcgcacttcttgggaggcggaggcaggtggatagaggtcaggagattgagaccatcctggctaacacggtgaaaccccgtctctactaaaaatacaaaaaattagccggacgtggcggcacacgcctgtagtcccagctactcgggaggcagaagtgcgcctgggtg

SEQ ID NO: 552220 - DNA, 365 bp, Homo sapiens
cagagagatcccagctacgctgcactgtctggccggagaaagagaaccatgcagtgacactggctcagtagtgcctttgcattggtttggctttgcgctacgcagcactggttgctatactggtgtggatcatatggctatgtaaaatgcaggcagcgtgccgtccctggctagcagggttagtctattggcagtctagccgggcctgagtgcttaccagctagtctcagagatccaacggaacgttatgggtattcctaagctacatcttggtaccttggctaggcattaatgggaatcgaggttctaccagatctggagaaattcatagcctgccaggtttacatttgcacggtagcccagtt

SEQ ID NO: 552221 - DNA, 1688 bp, Homo sapiens
  misc_feature (840)..(840): n is a, c, g, or t
tgcgtcttcgacatgtctgtgtggtgggacggtgttgtgttgtgtgggcgtgcgtgttcgtgcgcatatcgatgtgtgttggtctctgtcgtggggcctctaagtcgtcggcttttcgagcaggttggtgcgtggttgttcgaacgagcgctgatttctcgtcggcgtggtgtgtcgtcgcgggtgtcctccgaacgctacgtttgtcgtgtttttgtgagggcgttgggtccgttcgcccgcgtgtgatgtatggggttggttttttggtcggtagagcgctcagttgttcttggggggctgccacgcatagctgggggggcgcccgcagtgtgtcggttctggggtgtgtagtttggatctgtgtttgctccccgcgccgggcttgctccagcaaaggggtttttttcttgcgacacgaacgctctgggggggccgcttgtgaggtctatgtcacttgggaagttcgcctcgttgggggtggttcctctcgttggggggggttgcttacacaccgcttgtcgcacacccacgtggtgggcccacttaaagtgtggcgccacggcaaattgttaagttcgaaaggataagtggtgtttggataaaagggggaagcagccacagcgggagaaaaacggtggtgccgctcggagacggcaactgggtgtgatgttctgctcgagacaactggcagaggcacgtagcggctgtttggcgtcctgggaagaaggtgtgcttgggggcctcttcttgtggtggaaagaagcgggaataggtggggaacccaccacccacagctcttggtggtggtttggaaggaagtacaccacctgtgccccncccacttcgtcgtcggggagaggatcccaccgcgaagacctggtgcccaccctcgagcaccaccagcagaagagaagatgtgttcgagacgcctcggtggtgtggtttatgagagtggcccacgactggtcttgtgggggggccccgcacacgccccctggtttgtctgggcgcgcgctctggcacgctgtcctttgtggagggcactcttcgcgggcacataggcgcaacacacttgtcgtgtatgaggcacccccacttttcttttgtcgtctcggcacaggagtgtcgtgtgcccgtttatccctcatagaataaataagaagacacacacgccacacacaggcgacacacctatattttttctatatataacgcacctcggtatacacacagctctttttgcacactgttgtctcgcgcacacactattatgctcacgcccacatgtgtctatatataaagagataaggaaatatgtacatgttgtgagaaagaactctaaagaatagtgttttgtgtcttctgtgtctcggcgtgtgtcataaaatgagggcctcttgctggtgatataagatatgagaaatatatatcgataaactcgagagctcgtgtcttgttgttagatatgatagagcctcaaactctgttattcacacccactcggggatgttgagctgttgtttccctgagaattaagattcttttccacctggtgtctactacctgagccactataaacactgttctgcactttgaatttcttcttaaccctaaattctcgtggttctatgagaaaataccaatgactatttaatattattttctttactgttttctttcaccga

SEQ ID NO: 552222 - DNA, 759 bp, Homo sapiens
ggaagaaaatcacagtaacagtaacatgtgggtgtgggtgtagagggatatcttcttttccagcaccgtatctttgaatctgcccaccttcccctgagaattggctttgattaccttgatgttggttattctgatagacgaagctgcagggcagggctaatgtacattaatggagatgtgtgtataaatcatctcacagaatatacagacatcctctgtctctagaaagttggcctctttttgaacttctcactatgtcctagttgttacagaagtaatttagaaaccccagaagaaatatataacatagggtctattgcatactgggcctgaacaagctggagaggaataatttcacatttgatggcaggctattttacttgtttgtctttcttctccctttgcttcctgccttgctttgagtgactgcagaagctttttgtgattgtagggagccttggccaatgtgggaataggacccaggaattcaaatttctcacctgacatctgcagtaccttcagaatgcttctgaaactgatataaatgaacgaaatactccaaaagattactattgaacaacaaaataaaaactttcacatgattaaccatatttagtcgcattcttcccttttcaggcccaagtatatagctgagatgggtctagtgtcttacttttcatgtaaccattttaggcaagttctttctcagtttataactagaacttttcatcttcaaaccttcttatgtgggcacggaaa

SEQ ID NO: 552223 - DNA, 743 bp, Homo sapiens
caggagtcagcctcgcccccaccccctacatgtgttcagtagggttcagagtgtagggaaggattttactactactcatcttatgggagaccaggactgcctgctggcagctgcttctaagtgaaatcgaatctgatccccactttaacccaaattggggcttggaccgaagggaggtgagacactcccccaggtcccctcccctttcaaacgtccagtctcatttgccacttcatgccccgtgccctaaactgggtggacgtaacactgctttaaagaaacagagcgaccattcccatccgtatggcttcttgtaccctgtaaatagaccatgatttcgatcagtatttcttgtcccgaggcctgttcctataccgcagatgtgcccccatcccctgaaggagctggtgtctcagaacctggggtcgcggcagtatcaccgccggatgatggaggggagcgcgaaaccggagtggagacggggccagagtacggacagcttggcggccagcggcacaccccctgcccaagccagacgcggagaggacagcactcttctgataatataactacaatatactgctactgtattagtatcaaccggattggacggacacaatgccacacatgaaaaggatcgaagaccaataaaaagccaagcccccagaaaccaacaaaacaaacacggggcaccgctacacacaaaaacaccacaaggggcgcaaggataccacaacacaagt

SEQ ID NO: 552224 - DNA, 746 bp, Homo sapiens
aagttattttcatttcctgagctgggaaatttaccttttccagcaagacagaagattgatgagaaagagattatacatctattcagaattatctggcacagtgctataagtatttgaagatgatggtgataggaagaataagaaaataaaatagctgttttattgtgatgtgaataaaaatattgccatcaaagcttactcaataatgctttgagtttagatacattataaaaagtcaaaaaaccaggaaaagcattttacggtataaatacctcatagaattaataaaggaagccctgtataatttaaaaacaaaatcaaaaggaatccctgaacttcagtttacagacaggctataacagattgcatgatgtgtacacgtctgtatgattgggtaggatagacttcgcacagaatctcctggccaaggggggctgagccctggtggggctcacttagccaggaggacggagggccgttttccaatttgttttcttagaggaaataactttttataatccaaccctgtcaaagggggcgcttttcctaattcattaacaagtcttgcactaagttggtagtataaatattcaataaagaccaagaagagtccttggatagctgtagtagaacattggtctagaaatacgtaggcgcaattttaagtccttcctgcgtcactaaccatgaatgtggtcttagcgtctcttagtctcatttcctcatttgcaacattagtcggatta

SEQ ID NO: 552225 - DNA, 834 bp, Homo sapiens
  misc_feature (58)..(58): n is a, c, g, or t
  misc_feature (163)..(163): n is a, c, g, or t
  misc_feature (368)..(368): n is a, c, g, or t
  misc_feature (384)..(384): n is a, c, g, or t
  misc_feature (393)..(393): n is a, c, g, or t
  misc_feature (395)..(395): n is a, c, g, or t
  misc_feature (408)..(408): n is a, c, g, or t
  misc_feature (411)..(411): n is a, c, g, or t
  misc_feature (414)..(414): n is a, c, g, or t
  misc_feature (417)..(417): n is a, c, g, or t
  misc_feature (422)..(422): n is a, c, g, or t
  misc_feature (425)..(427): n is a, c, g, or t
  misc_feature (429)..(430): n is a, c, g, or t
  misc_feature (433)..(433): n is a, c, g, or t
  misc_feature (438)..(439): n is a, c, g, or t
  misc_feature (445)..(445): n is a, c, g, or t
  misc_feature (447)..(447): n is a, c, g, or t
  misc_feature (449)..(449): n is a, c, g, or t
  misc_feature (453)..(453): n is a, c, g, or t
  misc_feature (455)..(455): n is a, c, g, or t
  misc_feature (459)..(459): n is a, c, g, or t
  misc_feature (465)..(466): n is a, c, g, or t
  misc_feature (470)..(470): n is a, c, g, or t
  misc_feature (472)..(472): n is a, c, g, or t
  misc_feature (474)..(474): n is a, c, g, or t
  misc_feature (482)..(483): n is a, c, g, or t
  misc_feature (485)..(485): n is a, c, g, or t
  misc_feature (493)..(493): n is a, c, g, or t
  misc_feature (495)..(495): n is a, c, g, or t
  misc_feature (503)..(503): n is a, c, g, or t
  misc_feature (510)..(510): n is a, c, g, or t
  misc_feature (527)..(528): n is a, c, g, or t
  misc_feature (530)..(530): n is a, c, g, or t
  misc_feature (534)..(534): n is a, c, g, or t
  misc_feature (536)..(540): n is a, c, g, or t
  misc_feature (543)..(543): n is a, c, g, or t
  misc_feature (556)..(556): n is a, c, g, or t
  misc_feature (559)..(559): n is a, c, g, or t
  misc_feature (567)..(567): n is a, c, g, or t
  misc_feature (575)..(575): n is a, c, g, or t
  misc_feature (579)..(579): n is a, c, g, or t
  misc_feature (583)..(583): n is a, c, g, or t
  misc_feature (593)..(594): n is a, c, g, or t
  misc_feature (596)..(596): n is a, c, g, or t
  misc_feature (598)..(599): n is a, c, g, or t
  misc_feature (601)..(601): n is a, c, g, or t
  misc_feature (622)..(624): n is a, c, g, or t
  misc_feature (634)..(634): n is a, c, g, or t
  misc_feature (636)..(641): n is a, c, g, or t
  misc_feature (658)..(658): n is a, c, g, or t
  misc_feature (662)..(662): n is a, c, g, or t
  misc_feature (667)..(668): n is a, c, g, or t
  misc_feature (672)..(672): n is a, c, g, or t
  misc_feature (680)..(680): n is a, c, g, or t
  misc_feature (685)..(685): n is a, c, g, or t
  misc_feature (694)..(694): n is a, c, g, or t
  misc_feature (696)..(696): n is a, c, g, or t
  misc_feature (710)..(711): n is a, c, g, or t
  misc_feature (713)..(713): n is a, c, g, or t
  misc_feature (753)..(753): n is a, c, g, or t
  misc_feature (819)..(819): n is a, c, g, or t
tgtgtggcgagtgaaggggcatatcagtcacgaacgtgcttccaggttcgagcgattntcccgctcagctcccgagtggctgggattacagacatgtgccaccactcccagctaatttgtatttttagtagagatagggtttctccatgttggccaggccggncttgaactcccgacctcaggtgatccgcccgctcggcctcccaaagtgctgggcttacaggcctgagccaccacgctcagctcagcttcaccctgtctgcaaagaaaagttttaccaagaccagaagtgaaatatgacatttcctaggtagttgtaactctaacatagtttaaaaagtatgtggcttcagattgcctatactttnttcacaaacgtgtganttagatatnantgatttagaagtnaanaanttngtaanatnnntnnacnaaaannagtatncntnttgnangtantcagcnntcantnantaaagaanntnacattatnanaccaaatntttattnaccatcatttatagaanntntatngnnnnngantccaaaaatatanttnaataaaantaatattntttngaanataccaccgnnantnntntaatagctgaccaacttgccnnntgcctacaanannnnnngcagctaagcgatacanacanctctnnttanaacataancccanaaacttatnantattaatctctaannantatctaataaattcatcacaaaaaaatttattaaattccnaaaaaaatatctccacatataacaatattccaatattattaatacattaaccattcaatttaaatnaatctttaactaaaa

SEQ ID NO: 552226 - DNA, 356 bp, Homo sapiens
aaaattttgttttatttatttcttatttattccccccccccttttgctagtgggattagggagtgagggaaattataatcccgttttggatattttgaggttgaggagcctgtgggttccccatttggaaaagttttggaagcagaccaaatcccccgccctagaactcaaaggtggtcagggcttaaaatacaaatgtaaatgcccggctgcccatgatggccccaacctataatcctagctccttgggaggcttaggtgggaggactgcttaaacctgggagttttaggctccagtgagccctgactgcccccctgtacccccgactgggggcccaactgagatcttgtcccca

SEQ ID NO: 552227 - DNA, 180 bp, Homo sapiens
gcgctgggctttacatgatgctcgcagcggcgccatgttcatggatatctgcagcaatcggcttgcatccacttcaacattcgtcgggcatcccagctgcttcaaatatcgtgcaatcagcgtttcccagccgcacaccaaaccacgcaaccaaaattatcccaaatcgcatgcatgcag

SEQ ID NO: 552228 - DNA, 158 bp, Homo sapiens
tcgacaagcgagcgcttcgccagccgtttctctcgcttaatcgcgctggaaggcaccggggaggtgatggaggagccgggggaggacggcgaggtcgcctcgtacccggtgtacgcgttctgcagggtgagggcgcgcttccatggcgtcgagctcga

SEQ ID NO: 552229 - DNA, 590 bp, Homo sapiens
  misc_feature (28)..(28): n is a, c, g, or t
  misc_feature (41)..(41): n is a, c, g, or t
  misc_feature (46)..(46): n is a, c, g, or t
  misc_feature (278)..(278): n is a, c, g, or t
  misc_feature (402)..(402): n is a, c, g, or t
  misc_feature (421)..(421): n is a, c, g, or t
  misc_feature (426)..(426): n is a, c, g, or t
  misc_feature (504)..(504): n is a, c, g, or t
  misc_feature (586)..(586): n is a, c, g, or t
  misc_feature (589)..(590): n is a, c, g, or t
cgcagtgttccaggtcctaggatcagcncagagtggacccngttgncgccaccgattgcgttgcaggtgctgaatacctgctgggtgccggcggtgtttggcaggttgatccccagctccttggcaccggccagcgccaggttcaaatccttctggtgcaggctgatacggaagcccgggtcgaaggtgcccttgatcatccgttcgccatgcacttcgaggattttcgaggaggcaaaaccacccatcagcgcttcacgcaccttggccggatcggngccgttcttcgaggcgaacagcagcgcttcggccaccgcctggatgttcagggcaacgatgatctggttcgccactttggcggtctggccatcgcattggcgcccacagggtgatgttctttgnccatggctggaacagcggnagggnacgttcgaggtgtgcgggtcgccgccgatcatgatgtcagggtgccggccttggaccgattcaccgccggaaacgggngtcaaggtaggcgcgcgttcgtgatcttgggggaaggttggtggggaggtgagatcgatcattcgtcaccgatctttgtttncgnn

SEQ ID NO: 552230 - DNA, 792 bp, Homo sapiens
  misc_feature (230)..(230): n is a, c, g, or t
gtccctaagtgcgggagaaggaattcatagagtaattcatgtctgatgcacccaccataccattgcttccttgcaaacagtgcatgaaagattaggtgccgtcacactaagccccctcgtctggagttagaaaagtagttcttgttcaatatgtccctcacacgcgagcgctgcctaaagatcagtaagagcgttacctccccgacagacagatctagatttggtttcanatccgcgcaatgaagctcaatagtatgagctgagagatccggatctgagacccgaccgccatcctcacgtttttttaggtcttaggccggtctgaggccggtcagagaccagaattgtagaggggcgccgcgttacagggcccagtgatgtagtactggcaaagcggaaacacaaccttcaccgctctttgtttgttgttttgttgtaatgtgttttcctgctagaatgtgactttggggtcattatgttcgtactacaagtgatctgtaatccctatgagtatatatatatatatatatatatatatatatatatatatatatatataaaaacttagcacgtgtaatttattattttttcatcgtaatgcagggtaactattattgcgcattttcatttgggtcttaacttattggaactgtagagcatccatccatccatccatccagcaatgtgactttttcatgtctttcctaacacaaaaggtctatgtgtgtggttagtccatgaactcatggcattttgaatacatccagtactttaaaaatggcatatatattt

SEQ ID NO: 552231 - DNA, 655 bp, Homo sapiens
tgacgagggcggctccggcaggttctgggctccggacgcgggcgccaggtgcacatgccccagtcctgctgctgtggctggtgctgtcgacatctgccgctgtgagcgcgagctggagctacacctgctttctgtgaccctgtggatggcctgcttgtgatgctgtctggtgctcatgccatgctggctgctgtgcggtgcctgcttgcaatggacgctgtgtggcctcgtgagtgggctcctcgctggtgctgcgcgccgggccgtgtggccggatggctgttacttgcatggtcttgtgtgctgtgcctgaatctgtgctgctgcgtggtggagccattgtggtgcccatgaagttgttgtgttgccctgatggcctgaaggtggtgaatgactgatcctggcctggtgatggcccagtgctgggatggctacccctgctgccctgcgcccgtgcctacgtgagcccgcgggcgcccttctacctggcctctgtgctcctgtgagctgcgtggcacgccagctggagctgggctgccgagcactgcgttgcttgctggactgctgctggccaggtgttctcctggtggcgggggcaggcatggacagctgggccatgggaccctggatggcagaggctggagccacgggctgt

SEQ ID NO: 552232 - DNA, 375 bp, Homo sapiens
  misc_feature (93)..(93): n is a, c, g, or t
  misc_feature (97)..(97): n is a, c, g, or t
  misc_feature (159)..(159): n is a, c, g, or t
gaaagaaccatctacatagatactgaagtcatcaagaactatagcaggacatctggtagagagggagtggtgagaagagacatgagccaagantgangtcctcactgaccaagaggctgtagattaccatgccgagagcagagcagctggtggctagantttagctaattgcagctactggttagggacagcgtagagcagaggtctgcaaactttttctggaaaagaccaaaaagcaaatattgtaggttttgctggtgatatatgtgataggcagaataatgcctcctccaaagaggtccacgtcctaatccccaaaacctgtggaatatgtccgttacacgattaaaagggaatgaaggtagcagaggaaac

SEQ ID NO: 552233 - DNA, 902 bp, Homo sapiens
tactctaccatctttgcaggcacactcatcacagcgctaagctcgcgactgatggttttcatcggtgacgtatggcactagaaatacgacatgctagcttttattccagttctaaccaataaaataaaccctcgttccacagaagctgtcagcaatgtatttcctcacgcaagcaaccgcgtccagaatccttctaatagctatcctcttcaacaatatactctccggacaatgataccataagccaatactgacctaatgcaagtactcatcgatgtgaatagatcataatggtctatagcgaataaaactaggaataggccccctttcacgttctggagtcccagaggttacccaaggcacccctctgagatccgggctgcttcttctcacatgagaaaaactagccgccatctcaatcatataccaaatctctccctcaaataaacgtaagccttctcctcactctctcaattcttatccatcatagcaggcagttgaggtggattaaaccaaaaccagctacgcaaaatcttagcatactcctcaatttacccacatatggatgaataactagcagttctaccgtacaacctaacataatcattcttaatttaagtattatatgatcctagctactatcgcattcctactatcaagttaaagctccagcaccagaccgtactatattctcgcactgatacaagctaacatgattaaacccttatttcatgcacctcctctccttaggaggcttgcgcccggtaacggttttggccaaatggcattttggaagattgaaaaaaaaggctctatcccaatataggagctaccgctaactatttaagagggaaaaacataaaataccctttaaggaataggggggggaacacccttccatg

SEQ ID NO: 552234 - DNA, 332 bp, Homo sapiens
  misc_feature (36)..(36): n is a, c, g, or t
  misc_feature (49)..(49): n is a, c, g, or t
  misc_feature (70)..(70): n is a, c, g, or t
cttagtggattaatgagccagaggttgttttgaaanccaataaatagtncccacaggctgggtgtggtgncttatgcctgtaatcccagcactttcggaggccgaggtgggtggatcatgaggtcaataaattgagaccatcctggccaacatggtgaaaccccatctctactaaaaacacaaaaattagctgggcgtggtggcgcacacctgtagtcccagctacttgggaggctgaggcaggagaatcactggaacctgggaggcggaggttgcagtgagccgagattgtgccactgcactccagcctggtgacagagcgagactccatc

SEQ ID NO: 552235 - DNA, 101 bp, Homo sapiens
ccccctagcccgacaggttcccagcaccgcacgttcgtggggaaccgggcgctaaaccattcgtagacgaccggtcgggctagtcgggggggtaccgagct

SEQ ID NO: 552236 - DNA, 393 bp, Homo sapiens
atatggaaagattcccaagatgtatgataagttaaaatgaaaagagcaaggtggctgggcatgctggctcacgcctgtaatcccagcactttgggaagccaaggtgggcggattgcctgaggtcaggagttcgagatcagcctggccaacatggtgaaacaccatctctactacaaatacagaacttggccgggcgtggtggtacatgcctgtagtcccagctactggggaggctgaggcgggagaatcacgtggacccaggaggcagaggttgcagtgagctgagatcgtgccattgcactccagcctgggcaaaaagagccaaaattccaatccccaaaaaaaacaacaaaaacaacacaaaaaaaagaaacaactgtgttgggcgcgcgc

SEQ ID NO: 552237 - DNA, 467 bp, Homo sapiens
ctgagttgagtctttatcctcttattcagggtatgcttctacatgaatattaaggttggtttcctagttctttgaaaaatgtcattgagtctatacattatttggtgtcttgtgatattttgagcaacattaattcttctagtgcaaaaacacagatgatcttttcatgtttttgtttcagtttcatcattgtcgagacctctctctcctatggttaacattagtgacttagttgtatgatctgtgagtagggttatttttctgatttctttctcaacaactttattattattctttaaaatgtagctcacagcttcactgaatcaccattttcatcaattcaaatagactttggtgatgtctctttcagaagatgttggttttgagtacagcaaccagtcgtagtaggttacagagtttatgtgttctgcatggacacagaccttccaggatggaggcagcatgca

SEQ ID NO: 552238 - DNA, 260 bp, Homo sapiens
ggagggaggcagcgcgcacggtgcagccgggccgggcgggaggcatggcggggcccccggccctacccccgccggagacggcggcggccgccaccacggcggccgccgcctcgtcgtccgccgcttccccgcactaccaagagtggatcctggacaccatcgactcgctgcgctcgcgcaaggcgcggccggacctggagcgcatctgccggatggtgcggcggcggcacggcccggagccggagcgcacgcgcgccgag

SEQ ID NO: 552239 - DNA, 273 bp, Homo sapiens
agtctcatagaggatccccacgcgtcaatgtaacacgaattctcactttcatcgcagctatcagtttaatatgacatactctggaatgattttacaccacatatattatccacaattacttgctctcataggggtggatcgaagtcttcaaacttgaaaaacaatctaagaaggttatagtgatactcggttctgacatcttcatcagcgcctacacactgtggcaaacactgactaattacactgcaacaaggagtggaacgatgattccga

SEQ ID NO: 552240 - DNA, 225 bp, Homo sapiens
cgctacaaggccccgcaggagagccaggcaggacttggcctccagtgaaaatggcactgagtgccgcagtggctttgtgcggcataacggctcctgccgggtcagtgtgctgaccatcttcccaatgttacttgtcacaagtggctggccaggtgctaccgtgtgtggacgaacatatgggtgccttctgcagtgtgcaacactgcaggactactatctggcaca

SEQ ID NO: 552241 - DNA, 681 bp, Homo sapiens
agcgggaagacgtcaggtgcgctcccctaggagtgctgagcccgagaatcgagccatgagtgaggctgatgtgaatccaataggcctatgcccgttgccgatgcgcacacgtctgaccaagaagcctagtggactctcgattcatgcaactaactgtaacatagtaagcagcttctggacaacgggtagcctaagtgatggccaccgagagatagtctcgtcaacagaggcgcctctcggtgaggtgtcactcggtcgatggctgcacgacgtcgcgtaggcccactggggagtgatccatttcgtgtgcgagcgcgtgtaccgtgcgtgcccttgctgtttggagggtcatgcgagggagcaatggtggctccgtaatcggatgctatgcgggctggcgtgcttctcaaagttcaagtgtctctcttgtggtgttaactaaggcttcgttgcttgcgtcgtggtgcgttctccaaggagttgtcctgttgtggtctaagttgctggtgccatggccttgtcctgtggcttgccgtacacgtcttatgttgtcgaggacatcggcatcaggggggccattgcggggccgcaatatgctccttgggtacgctgtatcacccacttggatctcgcgcggataaggttgcccctgcagctaactttcctccctcgggtggctta

SEQ ID NO: 552242 - DNA, 152 bp, Homo sapiens
agctcggtaccccggcaaggcatccaattccggcactaagaatcatccagcgatgaccgccggtaccgacagcagccatcccacatgccgtgatggccaccggaaccatgcgcacatcgggggtcgaaacaacctggcgttgatagtcatca

SEQ ID NO: 552243 - DNA, 162 bp, Homo sapiens
acaaagcccagatcaacagctccagatatacaacaggtccagttacaacagctcagttacaacagctcagttacaacagctccagttacaacagcttgagctctagaggtccatgcatacttcatattatacttgaattcaatacgagctgtttaactggag

SEQ ID NO: 552244 - DNA, 314 bp, Homo sapiens
gtatgcacaacctagggtcagtttgcaggtggtaagccatttaccaagatagttgtaggtaaagaagggcggatttattagagaaatgtgaaaatatgttgcagtgggcagctcagcagagaaggggctacctgcaaagaggcaagggctggaggaaagttttatagggtcctgctgaagggtgctacgtgtggaatgaggtcattgtgcccgcaggttgtttgtgattagctgtttctaacaattgttcatacaataattgttcattattgttctcaacttggggctctccccaacctggggacccttcctta

SEQ ID NO: 552245 - DNA, 374 bp, Homo sapiens
cacgaggtttttttttgagacggagtctcactctgttgcccaggctggagtgcagtggcgtgattttggctcactgcaacttctacctcccaggttcaagcgattctcttgcctcagcctcctgagtagctgagattacaggcatgtgccaccatgcccggataatttttgtatttttagtagagacggggtttcaccgtgttggtcaggctggtctcgaactcctgacctcgtgatccgcccgcctcggcctcccaaagtgctgggattacaggtgtgagccaccacgcccagccgggcctagaaatctagatcaaggtcttggactagtcctaagtccagtggccactgaaagtataaaccatggtcatttt

SEQ ID NO: 552246 - DNA, 442 bp, Homo sapiens
gttattattaccatttatttattatttttttaaatgtgaaagcaatccataatttagggaaaattggaaaatataggaacctttaaacgagaaaatgaaccctttcatattccccttgcatagaaataccaagcgttaccattttcatatttttttctttcagtcatttttctatttgtggtataggtatataggtccctatatgtatttgcatttgaaattttggaatcctgctttatgtccagttttgtattatactttttaaatcttgacctttataaccattttttgaaatcattgatttttttccaaaaacatgtttttaaccagctgtaaaatattttatgatatgaatgttttatgcattatttaagcctgtttttattgtgggaatttcaggtctttttcataaatattgttgcaataaatatccttgacccca

SEQ ID NO: 552247 - DNA, 107 bp, Homo sapiens
ctccatgaggctccctcacgatcttctgacacctcctgcttaaaacccaaaaggtcagaaggatcgtgggagcctcatgtgtaggagcctcatgtgtaggagcctca

SEQ ID NO: 552248 - DNA, 134 bp, Homo sapiens
agtgttcgtacaagagctgttttagccttgtatactgttattagacctgtgatcacatacatgcagctgtagaggagcctcacaagcaagtctatgtaccttcacccatgctgtcccctatatttagcaatccc

SEQ ID NO: 552249 - DNA, 331 bp, Homo sapiens
  misc_feature (63)..(63): n is a, c, g, or t
  misc_feature (118)..(118): n is a, c, g, or t
tgtcattcttctttcctgagctttgactgaattaagattatggcatgtaggccgggcacggtngctcatgcctgtaatgccagcactttgggaggcagaggcaggtggatcaccctgnagtcaggagttcaagaggagcccagccaacatggcgaacccccatttactaaaaatacaaaaattagctgggcaaggtggcacatgcctgtagttccagctactcggaaggctgaggcaggagaattgcttaaacccaagaggcggaggttgcagtgagccgagattgcgccactgtactccagcttgggcaacagagcatgactccgtctca

SEQ ID NO: 552250 - DNA, 682 bp, Homo sapiens
ggggaccccccaataaatcttatgggtaggggtgttccaccaaaggactaaccaagggtgggacgggcataacagggtacttctgggacaaaggccatgctccccctaaggtcgaaaaaaaaaatttaattttcagcctttaccccaccaaaaccgaggaaagaaaagcatgagataatgcggatgtaaacccttcatgagaaggtagcaagaggctccaattaagctacttcagcattcccgagtacaattgtccacggaagcatttactcccgcgaatgaagttaaatgggcaaagcttttaattaaggcgtatggtaaggtacgatgcctagctgtgctttgaccacgagctcctcgtgtccactacgacatagggatccacaatatctaaagttcagaagagaatgtatcagtgatcccgtatacctccatctgtggatggagagagttctaggctataagtatgttcagttatgaatctaatcgtttcaaaagtagattccttgtttacaggtgtagctataattctgtgttttcgcaaagaggtaaaactgccagctagctagcatgttctgtgaatctaccattgctaaaaatttcatggacacctgatccttttctctcacaatggatcgctccaatgatcacacattgtgtgaatgcatccgcaataaatgga

SEQ ID NO: 552251 - DNA, 146 bp, Homo sapiens
  misc_feature (24)..(24): n is a, c, g, or t
cggtccctagtattaaccaaatcntcttgcattttggctgatagtatccaggttctctgatgtatcttcattcagaagttcttctccaactttgagagatttcacagtagtaggttccttagggctaataatcgagatggatgggt

SEQ ID NO: 552252 - DNA, 450 bp, Homo sapiens
aaggacaaagaagtagagcccgaagaggcacaggatgaggggcagacaaggcctggcacacagacggaaaagaggatccccttctccagcttggctgggaggtagccggaagtcgaggtagtgcacggtccaccatgtgcttgagcaggatgtacatgaggccaacatggcgcgatgatgggacaagtgatgctgtcggccacgatgacagtgaagcacacacagcatccatgcatacatggctccaaaactcgtactggaaggcctggttctgcttgacattcctgcggtcagcagccgtcttggccatgatcatgcggaaggtatagaggatgagacctggcagccgcagcagctccatgccattgccgatgaaggccgaggcgatgacatagttcacaaagaaggcaccctggtcaggcaggaagacgcactccaacctgatggagg

SEQ ID NO: 552253 - DNA, 187 bp, Homo sapiens
tgcttatcggataagccacaccctgagacggatgggctgcatatagccagtggagcaaggcgtcaaactgaacgccggcatgttcgaccggaaaactccgataacctggccggcaggctcctgtattgtaagcgtccagtgacatagaaagcagacacgagactccatgagccagttaaccatcatc

SEQ ID NO: 552254 - DNA, 811 bp, Homo sapiens
gggaaagaagagggcgacgaaccgcgggaaacccttgacaacagtgtagaaaccgtggaaagagcggaagaacccaaagggaggaaaaggagaaaggggaaaggaggaaaaaagggaggaacggaaggaaaccaaagggagaaacagggggaaaaaaggggacaaaaaagaggacagagaagaaacaaggaagaagagagagacaagagaaaagagaaggagagaaaagaagaaaggaagggaagagagaaaaaaagaagggaaggaaagcacgggggaaaaacggaaaagggacaaagggagaaacgagagggaaacgaagagagagagagcaacggaacaaaaagaggcagaacaggagaaagacagaaggcgagcaaggggacgaaaacgggggacggcaaagagagagagcgcaagagggggaaaaagccggaaaaccgacgacaaagaaaacgagcgacgaggaagagagaaacggacgagaagagaaggagcaaagaagaggcgatggagggcagaggcacagcaagaaaaaggagagccacggggagagagagaaaaaggggggagcaaaaggcgagacgccggagaagaggagagaagcaaggagggagaaaccagcgaaaaggggggggaaaacgggagcagaaaagagacagagacaacaggaacggagaacaggagaacagaagaatgaaagaggcaaacaacgaacggagaggagagggcgggaaagcgaaagaaagccagagagcgcagagcgacacaaacgcgacagagaagcacgaagggcggggggggacggacc

SEQ ID NO: 552255 - DNA, 986 bp, Homo sapiens
ggacgcgtgggtcgacccaacgcgtccggccccggggcagcagcggcagcagcagcagaggcagcagcgggcggcgctgagccgccgaccgccgccactgaggaagaagccggcccagccgccgccgcgtccggaccctcgcgcctggatcccagcgccccgatcccggagccccaaaaccaccacggccggcctccgccaaactttacaaggcatgacctcgggcgggccccgggacccggcatcgagggccaaaatggtaggatggcacatagctggacgttaagacgtacacaaggacgcaagaccacgacagcatgaagctgacgagtcaggcggagcggtgaaacatcaatccaacgcaaacaatcccagcgcaaagcgcaccgcattgcgcacgggctaggcgctggggcaacgcgggaccaaggcatcccaccggcgcccagcgaaccacgcgtatcagcgtccccccatgaacacacaaccgcgaggacaccagcagcacagataaccacgaaacgccgcacgtgactgaaagcaaaaacagaccccgctctctcgaccaccagacgcagacacgcgcctccccaggaaaccacaggcagccccgctcggccacccgcactacgatggcccccaacggctggcgacaacacccgtcctgatagcccaaggtcgcatgatcataggcaccaccgggcactgccgacaaacacgtgccaagccccaccctgtcaacaacacaacggcaacggcgcggacccgacaggaaaacagaatgcgacgaggagacgcacccggcgcctcgccccacagcggctagggagagacatataccacagggagccaaagccccctggggcgccaccccacgcgacaccaagttggacacctgaaatgcgcaccgccactatcggaaagcaccttggacacacaagaggattctgcgcgcccgaaactcaggcaccccaactcacgcgaag

SEQ ID NO: 552256 - DNA, 1096 bp, Homo sapiens
caggaatgaaccttccccacccaggccccatcacaggtatatggaggagtgacctactataaccccgaccagcagcaggtgcagccaaagcgctccccaccccgggaggactccccagccagacaacatcaagccccctccagctgaggtagtaagcaggggttccagattaatacaagtgtctgacatatgcgaagagtcggaacatcagtataaaaagcagcagaggtgagaactcagaagagaaatacagctggctatctactaccagaagggctcaaagatatagggagaggctcctaccagaaaacagctgaaagaggaggaccccatgccttcctctgaggaccaggcgcatagagagagggagaaacaagaggacctcgaacacatctacactcgttcacctgagataggctgtgatacgggggagcacgagagagccagacagacccaagcttctgagtctagatacagaagcccatgtctacatgctgtgctacacatactgggacactagaagatgtcatactgatacccacaggcaagactcactacctgataggtgaggcatactacagaggatacagaaaacaaggcccgggacgacagcatcccttaaatactcataagaaaggagaaacactaacggaagcaagaagagagtggaaccacctacgtcccctgcccgtagaaaatgaagagcacggtctaggtcatccaggcaagactaaggcccccaacaggagaaacaccgagggaacaactaacggggcaatcacaaaataatggacaaaggataggacaagcctataccataaccaagagcaaaacaacgacaccgcaccataaagataaagagagggacagagggagtaccaaggagaatacggaacgcccagttgaaacatacgaccctggtgagcgcacggaacggccgtcccggacgggcccgcgggggagcaaaagaccgccaaaggaaggagacaggcacaggacagtgacacatcgcagtgacgctaagcaacagcacaaaacagcacaggagggcacgaacgcagcggacacacccacaggcgacaaggccacgcagata

SEQ ID NO: 552257 - DNA, 160 bp, Homo sapiens
gtggccagcagcagctacaacatggtcatccgggaggcaaccagaccaaccgcctccaggaggctctgaacctcttcaagagcatcttgaacaacagatggctgcgaccatctctgtgatcctgttcctcaacaaggcaagatctgctcgctgagaagtc

SEQ ID NO: 552258 - DNA, 193 bp, Homo sapiens
actagataaggcgtaagtagaatagaggttaggagggtcatggtggctaagcatggtggggcatgatgaggctattgttttttgtgaattcttcgataatggaccagtgggggcaaaaagccggttagcgggggcacccctctgacatccggcctgcttcttctcacatgacaaaaactagcccccatctcaa

SEQ ID NO: 552259 - DNA, 402 bp, Homo sapiens
gctcctgtcgactgtcagacgcatcttcttttgcgtcgccagccgagccacatcgctcagcacgaccatggggacaggtgaaggtcggagtcaacggattggtcgtatggggcgcctggtcaccagggctgctatttaactctggtaaagtggatatagttgccagtcaatgagcccgttcattgatctcaaatacatggtgtacatgttccaatatgattccacccatgggcaaattccatggcaccgtcaaggctgagaagcgggaagcttgtcatcaatggtaaaatcccatacaccatcttccaggagcgagatccctccaaaatcatagtggggcgatggctgggctgctcgagtacgtcgtggagtccactggcgtcttcagcaccatggagaagg

SEQ ID NO: 552260 - DNA, 447 bp, Homo sapiens
acacgggcacacacagtctgcccccctactagagcccaagggccaggtagaggagcaaagctaaggtcagatgccctcccggtgcccgggtggctggggatgtgctcacggggagcacagagcgtgacctggctttcttcctgagcaggtcttaagctccacacgctgtgtggtcttcccagggtactcaggttataaggttcagagcagtgtgcagcatgggtgcaatgttccctcctcctttctgggccctccccaagttcccacatcaccttccagtacatccccgacatgggagctaggcccaggctacctgagctggaagacagcagatcagccacttgcccctgagggggtcttctggggtgctggtgatgttctgccccctaagttcagggctggtgacactggtatgtgacttgtgaaagtgtatcaaaggaatattta

SEQ ID NO: 552261 - DNA, 338 bp, Homo sapiens
tcctttgtggttgctgcaaaagccattattttgttttgttttatggttaagtggtattctatggtatacatatatatatcccattttatttatccattcgttggttgatgggccctttgggtggtttccattcttttgccactgtgaattgtgctgcaataaccatacttgggcatgtgtttttttcatataatgactttttttcctttgggtagatacccagttgaatcacctggcagttttccttttatttttttgggaattttccatactttttttcatgggggttgtactattttccattttagcggggtttaggctttccccctccaccctta

SEQ ID NO: 552262 - DNA, 219 bp, Homo sapiens
agcaggtggagtttatggggcggtacaccttaacggtaacgcaggtgtcctaaggcgagcaggaggagaacctcgtggcagaagggcaaaagctcgcttgatcttgatttcagtacgaatacagaccgtgaagcggggctcagatccttctgacctttgggtttaagcaggaggtgtcagaaaagttaccacagggataactggcttgtggcggccaag

SEQ ID NO: 552263 - DNA, 757 bp, Homo sapiens
  misc_feature (110)..(110): n is a, c, g, or t
  misc_feature (180)..(180): n is a, c, g, or t
  misc_feature (184)..(184): n is a, c, g, or t
  misc_feature (212)..(212): n is a, c, g, or t
  misc_feature (314)..(314): n is a, c, g, or t
  misc_feature (378)..(378): n is a, c, g, or t
  misc_feature (416)..(416): n is a, c, g, or t
  misc_feature (443)..(443): n is a, c, g, or t
  misc_feature (449)..(449): n is a, c, g, or t
  misc_feature (459)..(459): n is a, c, g, or t
  misc_feature (476)..(477): n is a, c, g, or t
gttctgtgttagttgctaaggataatggcctccagctcagatggaatatctctatcatatagacctgtgttacagggcaggatcggatgatggacactgaagtcctcagnttgctaagttcagttgctctccctagcctcctttggcttcagagtctttgattccatctatcctggtatntttngtgtgctgatgtttagttctggattggnttcagctgtgctaataggaagggcgttgtcttttcaagcaatcttaaaaggtggtcaatcaaaaggccagagtctgaatcccttctgtggcttaaataattngaggatcaagtccagtgtcttgttaatccctgttctactgtgccagacactatcttgaatgctnttatatgttcaaggttcaaaatcgctctttcataccangggatgatagtaacgtgtaacttgcantagatnccttcatctnagtaataagatgatcannctagttaggacaaaatagagaatggattaattaacttttcccagttacagaagtaaaatgaaccgaactcttgctgggtttgtgaaaaaaaattaacacttgttaataggataattttacctccacaccaatcttttaggatattatacccttaaacacggagatatggcacacgaatctttctctgggggaattatatgtggacctgcggaaaaaattaaaaatgtttttaaaggcccagtggggggctttattttttcatttcccgattctttaagat

SEQ ID NO: 552264 - DNA, 328 bp, Homo sapiens
taaattgactcaatttaaatggaacgaagtggaatgcacttgaacggattggaatggaatggaatggaacggaacggaacggacccggaatggaacggaacggacccggaatggaacggaacggacctggaatggaacggaacggaatggaatggaatggaatggaatgaagtggactctaatggaatggaatgggatggaatagactcgaatgaaatgggatggactcgaatggaatggaacggaatggaatcgactcgagtggaatggaatggaatggaatggaatagaatggaattgactcaatttaaacgcgatgaaagtgagc

SEQ ID NO: 552265 - DNA, 302 bp, Homo sapiens
cacttctgggaggtgaaggcaggcagatcacctgacctcagcagttcgagaccagcctagcccacatggtgaaaccccgcctctaccagaaatacaaataattagccgggcgttgtcgcgggtgcctgtagtcccagcctactcgggacgctccggcaggagcctggagtgaacccctggaggcggaggtttgcagcgagtcgagatcgcaccactgcactccagcctgggcgacagatcgggactccgtctcacaaaaaaaaaaaccaaaaattccccaatcccccccgccctcagtcccc

SEQ ID NO: 552266 - DNA, 647 bp, Homo sapiens
  misc_feature (140)..(140): n is a, c, g, or t
  misc_feature (435)..(435): n is a, c, g, or t
  misc_feature (504)..(504): n is a, c, g, or t
  misc_feature (594)..(594): n is a, c, g, or t
  misc_feature (623)..(623): n is a, c, g, or t
gttcgttcgctccgcgccgcccgcctgctacgagtagaacgctgtccgcagcttgcgcatttcgcagccgctgccgcctcgccgctgctccttcgtaaggccacttccgcacaccgacaccaacatgaacggacagctcnacggcttcacgaggcgtcatcgaggagggcacattccttttcacctcagagtcggtcggggaaggccacccagataagatttgtgaccaaatcagtgatgctgtccttgatgcccaccttcagcaggatcctgatgccaaagtagcttgtgaaactgttgctaaaactggaatgatccttcttgctggggaaattacatccagagctgctgttgactaccagaaagtggttcgtgaagctgttaaacacattggatatgatgattcttccaaaggttttgactacaagacttgtnacgtgctggtagccttggagcaacagtcaccagatattgctcaaggtgttcatcttgacagaaatgaanaagacattggtgctggagaccagggcttaatgtttggctatgccactgatgatttgttggcctactggaaaaaaaaaactgaggaatgtntgcctttaaccattgtcttggcacacaanctaaatgccaaactggcaaaacta

SEQ ID NO: 552267 - DNA, 899 bp, Homo sapiens
aataagtgcaaattagattagggtatagggtggaaaaaaaaacctggccgcgacactttttattctgttctggctaatactttacttgtatcatttatgagtcctcactagtcttcagtccttaatctgatttcaaaaactatggaaatgggaggttcaaaggggtcatagcacacgtcgggctggtcacttcctggattacagactttgtactgagtgttattatacaaacatgttccttttggaattactaggcattcataataactatagaacagaaaaaatgggcttaacgtgttgtcctacctcagggacctgatatatgcactgaaagcagttctctgtgtgggaagaatcattggaaacttttaccacaccaatccatgttataaggaaaataagtcccacgactatttttctcatgctttcaccatggcttgaccagtcaagtttctgtttgtactggaaccaggctggacaaactcgtagggttattttggagagattatcgaatctcggtaggcctccaaggtcacttggattcgggtataatgtggtcgaggaaatccaacgtggaatgcctttacgccttacagcccgcattttcccagcaattgtttttttttggggactgaggataggtattgcatacaaggataattccattacaactgtggccttggataggtatatgcgttggtttctaattaccatggggcaaacttactcacaattgggaacaatgcggggtgataaaaatttagggtcagaatctatgggcacgggcctccaaattctcgcggagcggggttcgttaataccccgaaatctacgtgttggaatacccttcgaaacgtatttgtttttttgcataattgtgggccaaaaataacggagga

SEQ ID NO: 552268 - DNA, 193 bp, Homo sapiens
ctacgcgctggaaaacggcggccgcggctcgatcaccgagcaactgctgaaaacccgtgccgacgtcacgctgggaggcggtgcgaagtccttcaaccagctggcgaaaagcggcgaatggcaaggaaaatcgctgaaggaccaggcggcggcacagggttatcagtgggtgagcaacgcagatgaactgcag

SEQ ID NO: 552269 - DNA, 289 bp, Homo sapiens
  misc_feature (114)..(114): n is a, c, g, or t
cttctccctcctctgcagcatactctacatgcagatgttgtggataaagatctttatgatgatctacttccacctaatgaatagtaaatgtattttctcttccttaggattttnttaataatatgctcttttctgtaacttattttactgaaagagtacagtatataatacatataacacacaaaatatatgttaattgactagctgtgttatcagtgaggctccttctggtcaacagtaggctattagtaaagttctggggcatcaaaagttatacacaattatttta

SEQ ID NO: 552270 - DNA, 313 bp, Homo sapiens
tgggaaaaattccattaaagcccccccctctggaacttttaaatgtttaaaagggcaattttaaatccaaaaaagaatgatgtttaaaattgctttgagtgattcatccaaagaggtatatatgcatccatgtatatattcataaggaaaataagcttcccccaaaagggattttaaatttgattttttttttaactctaaaaatttaagtaaaaagtaccaaaaactctgcaaccaagggaatttttttgtccggtaattttgaatggaactgaaaaattatgcccgaataaaggccttttttcatccccta

SEQ ID NO: 552271 - DNA, 261 bp, Homo sapiens
gacccaagataagagcgtattttttttatttctgtaggatggttattggcttgtttgaataatctcacaagtttactgccatatattcctctactcagtcgagagtctaccaacacagccagttcttctatcaacacaccaactgtattctacctgttactcattctctgatttcacatcccatgctaacctgtgaaattattcaaacaagccaatcacaccctcctacagaaagtaaaaaaatcagcgcacgtggtcatt

SEQ ID NO: 552272 - DNA, 215 bp, Homo sapiens
tcctccccaggcagatcttcagccagtggctagggcagcaggagagccactctcaccagccctctggccactgtggcctctgcccagctctaacagcccaccctgctccgcagctgtgcccttgcgtcctgtcacaggggaccccggcgggaagggcagggcctgagccggtctgcactacccatggaggttggcctcgttcttcttgctgtggt

SEQ ID NO: 552273 - DNA, 921 bp, Homo sapiens
  misc_feature (592)..(592): n is a, c, g, or t
ggtcgcggagacgcgtgaaggtcggagcggagtacgtctctgcaagcttggtcgccctggggatgtgattcctcctcctcttcctccgcggcgggtaagggtgctgatggacccgcgaggttgcagcattctcatcgaggtagatactcgagaagcagcgcttccagcagctggtgcaccagatgacgtgaacttgttgggagacgtgcatggacgaagcctgggccaaagttgtgacagtcgggctgaggcctgttggtgaactgcgattgagcgcttcatgtgatacaagccagttcatctgtgaatcgactggaagcatggaccaatgaaaatccaagccagtgtttctcagaaagcctttctgactgatctcagcattacctctttggaaagaggaaggtagttcaagaaatgaagagctgttgatgggatgattgaagcaaacagctatgcacgaggattggctcccatctgttggttactcttgggaccatcctgtcatctgagaatgaacaaagaccaatttttgtgtgtgagcttcagggtcatatgttgctgtaattttataactgctaatcttgtgaccaantacttgacaggcgaacgaaaactctatgagcactgcctattactgtacattgggactatgctttctcaaagacccattaagtgctactaatatttgataggggcaccacttcgttaaagtctcccatggtgcatcccctgattaggggaacctgtgttttacaacggcaacataggcgacacacctggaaccactctcgctgcggccgcgcccactctgggagtttactcaccgcttcacaccccaagacctgcaacacaacaccgaggagaaggagacaccacacagactcaagcatacagcagaacgcgaacgtgcaaccacatgct

SEQ ID NO: 552274 - DNA, 246 bp, Homo sapiens
tttttttttttccagtagagatgaggtttcaccgtgttggccaggctggtcttgaattcctgacctcatgatccacccgcctcggcctcccaaagtgctgggattacaggcgtgagccactgcacccagcccccagatcaaacatctttcaaggcacttggagcagtgcctggtctccagggtctttaggctgtaaccacagcaaagcactcaaatcacagccactctcccttctgtcgtcttctc

SEQ ID NO: 552275 - DNA, 1061 bp, Homo sapiens
gaagcggcggccctgctcctggccgtgaccactggaaccctctggagacgcctatcaaggatggcatgctctaccagcggcctgctcaagttgtggcaacaagtgctggcgtaaggtgtgggctctgctgtatgcaggaggcccatcaggcggtggccagcgggtgtggagagctgggaggtccgggatggtggcctgggagcagcgggtgagaggtcggcagggcctggccggcgaggggaactgatgggtcatcctcgctggctgactgtgtgtccgtgcttcctgactgacgggcgagagctagcccccggagaaaccggtgcgttcctgctcacctatcacgcagagcgaagcacatctactgggctgctcagcacctgttcatggctctggatgggccccgatcgtgccaggctgggcttccccggatgacaggggagggctcctcatgatcccacgagatgacccagtctcccatacgatggggcctggtccccattgggaggaaaactccaatctagcttcctcctgttgcacggaagtgcgcgccgagttttaccgtggggggatgcacgaggagctgaggggccgcgatccgttagcctagactgaaagggcctgtcctgctggtgctggggcccgacgccatccagtctgactggactggcactggaccgcaggcctcctaaagctggccgtacattcctgagcaggttcggctcgtgcagggcgtgttctccttggaggccggacgtcgcttggcaccggtgtaaaggcactctaaggcattcgggaaccccctgtgccactgactgtgacggtgtggccggggcatcgcccgccatcggacacggcggcgaaatagacggcccacgctagcccaggagaggggccccatagcctacttggaagaccagtagattgtggaaccctggtacaggatacctccggaagatgaaactagacagagataataatccccaactcggcgaatatcatggctcctggcgcgcaggcaccacgggcacaagagcccacgtatccaacacatccttctg

SEQ ID NO: 552276 - DNA, 116 bp, Homo sapiens
tccaagagaagatgcaggcaaagtaatttcctcctgatcaaacttaattttccccatctgcaaatcggaggttacttcctggatatgtttctctccttactattgccccatgttca

SEQ ID NO: 552277 - DNA, 546 bp, Homo sapiens
agattagcacagagggaagaaagaagatagctatctgcaaaccaaggaaatgcctcagaagaaactaatcctgctgacaccttcgccttggattttcagcctcgtggaaatgtgaagaaataaatttctgctgtttaagccacccagtgtgtgatactttcttatgaaagccttagcaggccaggcacagtggcaggcgcctgtaatctcagctacttgggaggctgaggcaggatagtcgcttgaacctgggaagcaggggttgcagagaggcaagatgacgccgttgcagtccaatcagggcagcaagagtgaaactctgtcccccccaaaaaaaaaagaaagaaaattgggttgggtgcagtgactcacacctataatcccaccactttgggaggccggggtggatgcatcacctgagttcagaagtttgagaccagcctgggcaacaaggtaagaccccatctctacaaaaaataacctgggtgtgtggtagcatgtattagtggttccagccaccatgtagactgaggtgggaagatcact

SEQ ID NO: 552278 - DNA, 222 bp, Homo sapiens
attcttgactttgatggctgctgactgcttagggtggtggttgctgaaggtggggtgacagtggtaatttcagtgattttggtttggtttggtttcttaaagagacaggtctcattctgtcactcaggttggagtgcagtggtacaatcatagttcactgcagccttgacttcccgggctcaagcaatccttctgcctcagtctttccagtagctaggaata

SEQ ID NO: 552279 - DNA, 724 bp, Homo sapiens
tggtaaaatttgacaaggtgaccctaacattcatatgggaagggaagggccccagaatatatccaacaccaccttgaaaaagaagaagtgtggacctcacacttctcccaatttacaaaacttactacaaaggcaaggctcaacgagacgtggggttggatacgtggcataaggacagacattatatagactcaggtggagacaaaaagtgagagcttcagaaataaccccctccaactataatggccagtgtgatttttgtgacaagggggtcccaacgacaatttcaggggggaacaaaatgtgaacaaatgtggtgtgtgggtggacgagaagactagttcctcgacattttttatttttttattttatttttttttttttattatgtttattttttttttttttttttataaaagcacacctctcatataagatgagaggagagagaacaaataaaaacaaaatgtaacaccacacactatttctaaaaaaggcacaccatattatgcgcggacgggggttagcacaatacacaacaaacacaagaggtattgtgtaagctataattatatattaaaaaaaaaaaaaaaatataaggggcggcgcttagtaaccaacaaaaataagagtgagagaagaaaagaccctcaaaaaataagatcataaaagaccggctgaacaacgtgtgtttaaaaaaaatgtttctccacaaaataacgag

SEQ ID NO: 552280 - DNA, 319 bp, Homo sapiens
ccccccaaaaaaagggggtttttcccccctttttttaaaaaatttttaaggggcccccttaggggtttttccccccccccccggggggggggggagaaaagggaaaaccttttttttttttggggttcccccccgggggcggggaatttttagggggttcccccccccaaaagaaaaggagagatttttgggttggggcgggttgccccccccccggggcccccccccccccgggggggggtttttttaaaccccccggggggcggtttttttttttttttgggggggggttttttttttttttttttgggggccccca

SEQ ID NO: 552281 - DNA, 362 bp, Homo sapiens
tacaccgactcccaggtacaagcgaggctcctgcctcagcgtcccgagtagctaggataacaggcgtgcaccaccatgcccggctaatttttgtattttagtagagatggggtatcgccatgttggccaggctggtttcgaacgcctgacctcaggcgatctgcccgcctcggcctcccaaagtgctagggattagaggcatgagccaccgtgcccagccaaggaagtagggtttcgaaggttgaataggagtactccaggtgcttttccctgaaggtagtaagagcatagactaatgctgtcatgggagactcagcaataacacatgcacggcccctgccttcctgacgggcacacccagt

SEQ ID NO: 552282 - DNA, 132 bp, Homo sapiens
tcgtcgaacgtgttatccccatattgtaacttactactccggaaaaaaagaaccattgggataatcacgtttcgcgagagataacacgctcgcgagggataacacgttcgcgagggattacacgttcgcgag

SEQ ID NO: 552283 - DNA, 1502 bp, Homo sapiens
  misc_feature (404)..(404): n is a, c, g, or t
  misc_feature (672)..(672): n is a, c, g, or t
  misc_feature (1501)..(1502): n is a, c, g, or t
ggaaggtttaagtccaatggtcaatggcagaacatactgaggttcatgcgctcaggactgtgatggtgagcagagaagggaacgtggaaggcgctagtacaggaacccgtaatacaggaatctgtcactatggatgaggctcagtagaggacattaagcatcgggggtcattagtgagaagccatggccgacggcgagagagggaacgcgtatgacaggttgccggacggctctacaagcgatggccacatggctcggcagatgaatcaatcttcgttgcctgcgagagagatagtcgggcaggactccgttggagagggctgtgtgtatggccttgtgaggtgtggcacactccatgtggctgagagaccctcgaattcacacgatgtatgaagtacgtccantgcatgcattatcactataaggtagcaactgcccatctgttcctactgagacattgtactcgtgcatagtataactcgaattcgacagtgtcttgtgataaaagtaatgaacataaaaaatgtaatgccaaataacatagatacgataagggtgaggaagagggggcgctattggaggtgcatacataggaagatggctcgatgtgtacatcggtatgaaccttgaggatgtattgcatcaagaaaaagtggagggtagacaattagnaaggaatcaattgattaaagtacgagagattcgaaaggcgaaggattacgactttagaatagattagttcaatttgtgatgcgatgataagagggagaactagagcagtggataagtaatggaggagaagatggagcgatcccaattggtgggggggtggcgcacaaaaacaatgggatgtgtacattgcattggaataggaggttttaaagaattgcgtgtgatagtagaattggcattgtcagggggttcctaataggggggtggaaaatatcaaggggtacaaaatggagtagggaagagtgtgaaaaggaagggggcataacggggaggatagagtatacaagaggaaagaggctataatcaacgtgggtggtgactatcgagggaatatacaattgtgatgagaacacatggacttatgggtgggacacagatggcgaggagaccaactggtgtaacgcacggggaagactgcgacgacgcaatgaggcgaacagcgaaaaagaacatcgaacaggtggacacacacataagggaaaggcgagagaagagacaaagagagagaaacgattcaaccaaagaggagagacataacaacagcccgcgcagcgcgacaagcaacgcacggagagacaacagaaaccaacgagacgaaagggaagaacagaaaagaaagagaacgaggacggaggaagagagagacaagagaagaaaagaacaagaaccacaacaacagaaacacgcaagaacaacaagagacacaaagcaacaaggacagagcgaacacatagcgtatacgtgcaagactgcaatgcacacagacggnn

SEQ ID NO: 552284 - DNA, 1064 bp, Homo sapiens
tggccaaccgctgttctcagcccctacgctggattccagccattgcatgcagctgcatccacagcccttttcaggacccaaacaaccgcagccgctgttcccaggatggtgatccgtgtctttcttgcatcttccatctggctctacagcgattaagacgaaacaacaagatgctgcttggtttcctcacaagcccaacaccaatcaggcatttgcagcacacccagatatcgcagcccaatgaagcagaatcggcaagtggcatgcagcagacaacatgtcacctgcaaaatagtcgaccagccaccaggttacccccatgccacctcacgacttttcaagtgaaagccagtatcgacggggactatgatgccttctttgaagccagagaaaataatgcagtgtatgccttctataggcttgcacagcccacctggttcaaaggaaagccagaagtgcaagcccacgcacgcaagcattgaaccttaacgcactgtgctacacagcatcctgaacaatgagtctcacaatagcataataccatacaacactagccagacttagcatatgcattcaaacgaaactagggcattaacatgccgaaatacatagattcgcacgagcttacaaccatgcaacacatcacaatcgactacccaactcaccacgaacaatcatggcggactactggctgaggaccgaatgggatatttctacctaacactcccactacctcagccacgacccctcacacaactactggatgttcacgcccaacccacacgatctccacacaccacccctacacatcacacacttgcccctagcgcatagaatggacactatgctatagagcgccaataccacacgcaacgaacaccaccgcaccacctacagttgacaatacaacaaaacaaaaatgccctataccacatatttaaaataatcacaacaacacaaaataaccaaataccagaccacccaaacccaccacacataaccaaaaacaaaccgacaaacaacacatacccccacaccacaatctctatccactctcacctcaa

SEQ ID NO: 552285 - DNA, 227 bp, Homo sapiens
aaaatgaatgagatacaatttggtatccatatgggaaaagtttacttggccccaacctcacacatgagagataaaatcaattctgggtagattgtagatctaaacatgaaaggtaaaataataaagctgtaagaagataatgtggaaatgtttacttaggaaaagatttcttaaacatgacacaacccccattaaccacaggaggaaaagagtaaaaaatttgcctc

SEQ ID NO: 552286 - DNA, 747 bp, Homo sapiens
agcggaattgcttgaaccaggaggtggaggttgcagtgagccaagattgtgccactgtacaccagcctgggtgacagagcaagactcttatctcaaaaaaaaaaaaaaaaatgctccagggctttaaatgaaaagtaaaattttctaagttaataaagatgaaaaaggggtgactattatgatgaacaataactaaatgtcttattaaagcaactgagtgtctagccctaaattacccaggtaaaaacggttaacactaacctgaagtttggtgaataactgttctttaccttattgagatgttgcagaaatgccatccaggtggactgggagctatgaatgactaaattcctccttgcagtgtttcccttcaagatgtgtataggtatctctcctcttcttcccccagtccccattacttattggcccactggttttacctgactcctgttggatatttatcaccaagaccttaaactcttcatatgaatttctggatgtatactccgactgtcttgatttatgtccctaaattttttagatagggtatgtgggctgtggcagaattcttttgggcttaattttacttcctttcccagcttgcttgagtcttccttaaccgtggttttctcttaacacccaatgatgaaccctgagaaaaatgcctgattgggccttggcctagaaccaggagctgagtatttaccgatgtattatcctcgggtcatcctgaaattatgtatccct

SEQ ID NO: 552287 - DNA, 203 bp, Homo sapiens
  misc_feature (19)..(19): n is a, c, g, or t
  misc_feature (57)..(57): n is a, c, g, or t
  misc_feature (76)..(76): n is a, c, g, or t
accgcgcccagcctatttngttcattttttgtttagttgatttctgctcttattttntcccttttttgaattcagnttgtccctctttctagttttatgtggaagcttaggttattatttgtaatctttcttcttttctactactaatattaaacactataagtttccctctatgcactgcattagctgtatactacaaatgt

SEQ ID NO: 552288 - DNA, 404 bp, Homo sapiens
  misc_feature (76)..(76): n is a, c, g, or t
ggggtttccccccattttgggggaaaccggttttcccccctttaggggagttaaaccccctccccccccccaaagncccggggcaaggggttttttttccaggaaaggggaaaggggcccataaacaaaacccccctcccccgggggtggggggtttttttaattaaatgggccccccgggtttccccctttgaaaaggggccgggggggcccccccattttttttggtttggtcccccctttgggccccccggggtttcccctttttttttcgggttgtttttttttggggattttgggggggaaaccatttttccccggggaccgcttttaccagattttggatttttttacccccccctttggggattttggcccccgggcccaaaatttgggcccgggga

SEQ ID NO: 552289 - DNA, 103 bp, Homo sapiens
cccccaccttagcctgtggggacaggcgtaggaatggaaggtggagtaagtgtgaatacaggtcaatgggcagagatcctggcctctgggggcagggcgaggt

SEQ ID NO: 552290 - DNA, 457 bp, Homo sapiens
cggagtagctcataaataggatgaagagattatccttcatgtttccaaggtctaatactatttgaatcgagcttgatgttatagatgcatagcgaagaaatctacaagtgaaatgatatgataactaagcactcgctcgaaaatcacatgcggaacatcactggtagagtactcaggggtaaatacttcaagatgggcacaatgttcatgttaaatgcatggttggccgactgtgggttcatttaattcaggttctctgtttgggggtatgttgaaaatttgtcataagaaaatattattcagaggtctcaagaggcaggctgccaagaatagcagttataaatagctagtatcaggcctggtgtagtggctcatgcctgtaatcccagtggcttgacaggctgagggaggagaacggcttgagcccaggagatcgagaccagccaggataacataa

SEQ ID NO: 552291 - DNA, 333 bp, Homo sapiens
ctctggcttctgtttgggtttgaagatcagaaggtagcaggataaaaaggtcagggtatatgtatacctctagtttccccattgccaagatctccttcagaagtacttatatttctctacttaagaccacagccaggggcagaactagttttttgaggtgaggtggacatttacacaaattttggaccctccttcaaataataaaaaattggctgggtgcagtggctcactcctgtaatctgagcattttgggaggctgcagtgggtggattgcttaagctcaggagttcaagaccagcctggacaacatagttaaacctcgtttctacaaaa

SEQ ID NO: 552292 - DNA, 152 bp, Homo sapiens
tatgccgtctcttcgtgatgcctgtgactccgatgggaatactcttgcgagtccaaactctgaaactgggcctggacaaccgaactctggagacgaggacattgattctttgcagaggatggtccaagagctacgaaaggacatagaaacac

SEQ ID NO: 552293 - DNA, 252 bp, Homo sapiens
cccgggaagcgcacggaggcggagaccccgcacagggcggccgacgccaggtggaggaggaccccgcgggcggggggcggcaagctgagggagcggaaacgagaagcggataaagaccgcgggccgatgcaggaggccgaacacggatgctacaccagctggagcacagacagcgaggcgtggcagggcgccaccagcgggcgcgacactgggggcgagagcgccacacggagagcggacatgatgcgggca

SEQ ID NO: 552294 - DNA, 232 bp, Homo sapiens
cgctagcggcttagtgaacgcgtcatctctagaaggagaatccacatcacacccactggaacgggagagagagttaaagtgctgactcagagagaagcaccgggagcctctgtgcgtccctggtggccgtgacccaccttgtgccaggaacacccctacggcatctcttttcattgcgtggaggaatatgctgaacagcgttgtggatacgttcacttaatgccgctagcgc

SEQ ID NO: 552295 - DNA, 507 bp, Homo sapiens
  misc_feature (472)..(472): n is a, c, g, or t
tcagagccgggcaaggtctgccttatattcttttttttttttgagacggagtctccctctgtcgcccaggctggagtgcagtgacgcgatctcagctcaccacaacctctgcctcccaggttcaaacaattctcctgcctcagcttcctgagtagctgggattacaggcattgcgccaccacgcccagctaatttggtatttttagtagagatggggtttctccatgttggtcaggatggtcttgatctcctgacctgtgtgatccaacctgtgccttcggccttccacaagaggtgccgtgggatttacagggcgttgtagccactgtgcaccgtgggcgtttggctttggttgtggttgtggttgtggagacagagttttcgcctcttgttgcccaggctggcgtgcaggggtgcaatctgtggctcactgcagcgtgggtttcaaggcgaattcttccgtggcctcagncctttccaaattagcctgggattaacccaggttgc

SEQ ID NO: 552296 - DNA, 150 bp, Homo sapiens
ctagttttagaagtttcaatagcacctagacagacaaaccccaggcagcaatgacatttgcaaagctttgatcttgctgagaaataagaatctcatcaatccatctagcctgctaaaaacttctaaaactaggtgctattgaacttctaa

SEQ ID NO: 552297 - DNA, 189 bp, Homo sapiens
ggggggggggggggccccccctttttttccccccccccggggtccttttccgggggtttttttttttggcccccccccccccccccccggggggggggggcccccgggggttttccccccttttttttttttggggggggggggggggggggttttttttttttttttttttttttttgggggggcgga

SEQ ID NO: 552298 - DNA, 381 bp, Homo sapiens
  misc_feature (42)..(42): n is a, c, g, or t
  misc_feature (45)..(45): n is a, c, g, or t
attatggccggggaggtgagggaggaagggatcgcctactcnaangaagtgctggagtcgtgtgttttgggtgctcgttatcctgcgtgggtcggcaggtgattctgtgaaaagccttaagattagactgtaagaaaagtagaagtcatgtttcgaagaccttcatcacagtacttattcagcttgttagacatgaatccgcaactatcagtttgactcttgtaagaaccctgaatctgtgtgcacttacttgggcgagtgggtcatgaccttggctttgtgacatgtcgaaggatatattgaatgttaccaattggttgttgttattctacagataacattgtctatattccttatttccgtcatgtcttacttcctgcg

SEQ ID NO: 552299 - DNA, 292 bp, Homo sapiens
  misc_feature (58)..(58): n is a, c, g, or t
  misc_feature (104)..(104): n is a, c, g, or t
  misc_feature (125)..(125): n is a, c, g, or t
  misc_feature (127)..(128): n is a, c, g, or t
  misc_feature (140)..(140): n is a, c, g, or t
  misc_feature (148)..(148): n is a, c, g, or t
  misc_feature (156)..(156): n is a, c, g, or t
  misc_feature (250)..(250): n is a, c, g, or t
  misc_feature (252)..(252): n is a, c, g, or t
aggactgagcagattgagtgatgctggggcaaaaaggcctgggaggaaaggtgttcanccagtcgtttgtaaggcgcttgtgggcccctgttgaaacgcccccncctgacagccccatcctcaangnntgttttaattantcagggcnggttttanagacttaaggggaaaagctgctttcaaggcccccacatgtttgggctccccaaccagctctatttgccttgggttcattttgttattttgtgangngagactgcaaagaccaataaaaacatattttataagacca

SEQ ID NO: 552300 - DNA, 276 bp, Homo sapiens
  misc_feature (76)..(76): n is a, c, g, or t
  misc_feature (113)..(113): n is a, c, g, or t
  misc_feature (148)..(148): n is a, c, g, or t
  misc_feature (165)..(165): n is a, c, g, or t
  misc_feature (171)..(171): n is a, c, g, or t
  misc_feature (173)..(173): n is a, c, g, or t
  misc_feature (177)..(177): n is a, c, g, or t
  misc_feature (220)..(220): n is a, c, g, or t
  misc_feature (230)..(230): n is a, c, g, or t
  misc_feature (250)..(250): n is a, c, g, or t
aggcccggaaccgttggcccgggccggccttgccctattcctttcctcctcctcctcctgggtcccccagggtggntgggcttgggctatttgggtggtggtggcggggggtnttgggggcctttcagctcccgcccatgcctccctnatgggtgggcccagggnggcctntntttnaggagacctcacccactcctcgctcagtttgacccctgtaagngcctgccctntgtattttattaataaactnaaataaagggaagacgctgctggtga

SEQ ID NO: 552301 - DNA, 854 bp, Homo sapiens
  misc_feature (538)..(538): n is a, c, g, or t
tggaaacagtctgtgctgtatggcccaggctggagtgtggtggcacaatcacagctcatggcttcctcaatcacccaggcctaagcaatcctcccaccttgtagctgggactacagctcacagcacaccgggctaaaatttttttttggtggagacggattctctatgtggcccaggcgggtctcaggctccggggctcagatggtcctcctgcctcagtttccaagggcacgggccaggtggtagcttggtccctgtgccatcttgcccaacaagaggttctatccctttaatgaatggacttccataaatgggttatgtgggggggcaagtcctttaagcgggaattggtaaatccctcctgaaatggtttttccatgcagttaccatgaactattactacaataagggatgggtctggggttgtcaacaaacaaacaaaaacacaaaaaaaaaaaaaacaaaaaaaaaaagggggggggggggaaaaaatacccccgggggggaccaattttcgccccccttttttttgggaaanggggggcccaaagagaggaggtaataaaaacgagggagaggcgaggataaacccgcgtgcgtggtggcaaagcgcgcccggcggctctgtgggaaggaccgcttgcgtgcgggtgctctgcgcaccccccacggaaattagagcccgggaaaacaactcggtgttcgttgtaaccggctttgttgcgtcgactgttctctttttttatactctccaccatctaatacaagaggaaacacaaacaaacagaacagtgactcactcaaacagcaacaggcgacaatctcgcgcacagacacccgtcttaacgctaccc

SEQ ID NO: 552302 - DNA, 419 bp, Homo sapiens
gaaataagcactttattttttggagatgcagtctccctctgtcgcccaggtgaagtgcagtggtgcgatctcagctcactgcaacctccgtctcatggattcaagggattctcctgcctcagcctcctgagtagctgggatcacaggcgcacgcaaccacacccagctaattttggtattttaagtagagatggagtttcaccacgttggtcaggctggtcttgaactcttgacctcgtgatccacctgcttcagcctcccaaagtgctgggatcacaggtgtgagccaccgaactcggccataagaatatatctaaaggtatctttttttttaccttttgggaacagagtctcgattgtcgcccaggttgaagtgcagcagcgcgatctggggccagtgagggctccgcctccggggg

SEQ ID NO: 552303 - DNA, 113 bp, Homo sapiens
actctagaggtccccacggttggctactagtctacgctgatggaattgggccaaccgtggagccaaccgtggactcgtagccaaccgtggactagtagccaaccgtggcttag

SEQ ID NO: 552304 - DNA, 105 bp, Homo sapiens
aatcttcacagcagcacaagcctgcgtgcaggctgcagtgcacttgcagccccagcaggcatccattgcagccccagggtacctgcagcgtctgcaattctgtca

SEQ ID NO: 552305 - DNA, 84 bp, Homo sapiens
catcagcggcttttaaaatacagatctcttggtagccatccggtgagattggtaaccaatctacttaactggcatcagcacttt

SEQ ID NO: 552306 - DNA, 939 bp, Homo sapiens
  misc_feature (297)..(297): n is a, c, g, or t
aagcaccgagatcacagtaagtgatgtctatctgcgcataggttgttatagccggcatatgctctgttcaggcagacacgctcctccctccgtacacgcgataatagttttgccgcgcccaaaattttggtggccccaatacatagtatactcgccactcaaactcggggcctcgctttcataagttggagtcattcttattagacagtggacggacattcaaaggggttgggttcggaccctgttcgtgcagcagatcggattgtggcggcccgtgcaggcggtcccacacataantggtcaggatgaactgggatgtaaaaattcctctgtggtgtcggctcccgtttccggagttgtcccccctcggcccccgtggactacggtctgtagcgagcctaggagattcggtatagttgtgtttcccagtagggctgtccccccagtttgcatataatggcccttcacgggaggccataccctatgactcgcccgtggtccgcccacccgttgcacgcccgcgccgcctcatgccgacgcgcttcaggtgtcctgcagttgcgccaaccgaacaggttgagattacggccctccctctgataatgtaggggggcccgctcccagtatgtgcggcgcccttgtccgtccaagttatcggctgcgtcgagtcattcccctccgctcccgagctattatgtgtgcgccccgcatgacccgccccgccctgttgtgttcatggttgagtccgcgcactgcctaacggtattaaccctcgtagctggggggcgcagcgcactcagagcaggccgccctggggaacgctgcagctctggacgacagcgatcactcgccggagatattgttcttgggcccggtgtgaaaacgttttcccccttacgccaaaattcccaagggggggcaaaaaaaaaccaacaaaca

SEQ ID NO: 552307 - DNA, 206 bp, Homo sapiens
ttagcagattcatgtcatgccttctccccgttcgctgccaaaaaaggtgtcagagggatttctgccaccgaaggactcagcaaacatggcatgagtggtctccatggaatgtgtagctgaaagaggtaccattgtgtaccacctgccgctatcgccactggggccactcccctttaggccttcctccccgtagcggtcgacggacg

SEQ ID NO: 552308 - DNA, 218 bp, Homo sapiens
ttttttttggggggggcccccccaagaatttttttctttaaaagggggtgggggggggttttgggcccttttcccccccctttggggggcttttttgggggtgggggggcccctccgggcccccgtttttttggttttttttggggccaaaattgggtttcttttgggggccccccccccccccccttgggggccccttaaggggggggggcccttta

SEQ ID NO: 552309 - DNA, 350 bp, Homo sapiens
  misc_feature (24)..(26): n is a, c, g, or t
  misc_feature (223)..(224): n is a, c, g, or t
  misc_feature (287)..(287): n is a, c, g, or t
  misc_feature (299)..(299): n is a, c, g, or t
  misc_feature (315)..(315): n is a, c, g, or t
tccaatttatatgtagtagatgcnnnaagtggaaaatagtgttatgatgacttattaagcaatgaagtcagcacagtttctatttggacagaaattctgactttatatttcttttctctctctaggtctgatagctgttgtgatttttatcttgctttgcatcactgccatagctgttcgcatttatcagcagaaaagggttatataaaaagaagtgaggcannaaggtcagaggaatggtagacagtgctgaggctgttcctggaaaaggtggagccttaatattncaaaatgccagncaatggaaaatccagnaaaggagtaccttccttcctgaattgggcagccta

SEQ ID NO: 552310 - DNA, 218 bp, Homo sapiens
tcagcgcgtaacatgatgattctgtctttgtagggcctggatgaattggaaatcatcattctcagtaaactatcacaagaacaaataaccaaacaccacatattctcactcataggtgggaactgaacaatgagaacacatggacacaggaaggggaacatcacactctggtgaacccgacgtgtctataggatttaacaaagggaggggtaccgagc

SEQ ID NO: 552311 - DNA, 977 bp, Homo sapiens
gcgggattttcccctctaattgctttccgttcgccttttccccctctctcgggacccaccccttgggaagggtatccccaccccggggagtttacatttgccacggggggcacctttttcagagcccctgggaccattggggcccttgaattgtgaggattgggaaaaccgagggcaggccccagaaaggtttcttcttcagcacaaggctggcctcccccttggcactgccccctgtaaggcttgggcctgcccccacgttcccccccacgggggcttccttctggagattgttggggaaggattcacggctgcacgaaagggccacaaccccccttggcacaccacgggcagctttttctgcctttccgcaacaacggcgtcttctctggatcaccacgctgcaacattccgagccccgtgtccccacccgcggaacccacacacaatggcccgaggcccctcctttgcacatgggcacacccacgcctgtgaactataggagattgtggaaagggcctcggagcacctcaccacgaggccccctctgtcaatcacactccttggcaccccaccccaacttcctgcacacacacacactggcacagagaaggggcgcctgggagaatcacccccacacacagggtggaaggtttcctgttggctacacctctaaaagctgctttgccttcaatgttcacaacacgagttcacggcacccacccccctccacccgcccggccaaggttatgggcactaagaagttgtctccttccccaccaccggagcccacgagaccacgcccttccctggctcaaagcctttccgcacccctcctgagctgtcctggaatgtgcaaactggtttgcacctgcaacacaccccccggccacatgtaaactttcctgtccacacacataatgataaaacccttttgcatagtattactgaactcagttacgagctatttcccggga

SEQ ID NO: 552312 - DNA, 909 bp, Homo sapiens
  misc_feature (617)..(617): n is a, c, g, or t
  misc_feature (645)..(645): n is a, c, g, or t
  misc_feature (673)..(673): n is a, c, g, or t
  misc_feature (710)..(710): n is a, c, g, or t
  misc_feature (724)..(724): n is a, c, g, or t
  misc_feature (726)..(726): n is a, c, g, or t
attctgtggtgaggagaaggcaaaataatatcgccagtgcgtcaggctgctgagtcgtttaccggtcgtctggatatgacgaaaatcctcactgacgggctcaaaaagattcagatattcatcattatgtccactgatacctgggatccagtctgcaagtgtcagaaacgagtctgcatttgatgccctgaacgtcttcatacatctgataagcccctcccggaagtctgctttctctccgtcagaaagcataccctgaccggtttcaatcacggaccgttctgtcaggtaatgctctgtccagtcatacagagccgggttgtcacccgtataagctgaagcaggcacaaatcagggaaataaacaaaatcccgcatccccggataaagaaaaatcagggaattaatggcctgatggatttcccgtggcgtcgaaagtgcggcaccataggtatcagtcaccgcgatgagatcccttaccattccagagtctggcggttgattattaatttgctgatatagagcctcagccgctggcgaaattcattacgtaaatcaaaggcttcaggtcggggtaatttaaaactaagctgaatgattttctggagataacggtgncatcttcgatattcagcgcatgttcaanggcatgagtgataatctggctgtcatancagagaatatgggtaaagcgggcagatcgggtactgncgcacaagcctgananttcgcactggatggccagtcggtccgatcatccctgcaccatgatctactcagatcacaagtggctgaattacccgagtgcgggttctgtaccgccacgtgtgaaactttcgcggacagatagggaccgcattggccggaaggccaaatcggcacagctggtcactaatagcatacggggtca

SEQ ID NO: 552313 - DNA, 120 bp, Homo sapiens
atcatacctacctccttcatctatactacctccttcatcatacctacctccaatggtcatgctttttgcttggaaagcctttccctgtttttcgcctagtcaaaaggtgactttacttct

SEQ ID NO: 552314 - DNA, 440 bp, Homo sapiens
cgagcggttgggtgttacagcttttaaggcggcgcgtctggagttgttccttccccccagtgggctcctgggctcgctggactcaggaatgaagctgcagatcttcacggtgagtgttacagctcataaaagcagcatggacccaaagagtgagcagtagcaagagttattgcaaagagcaaaagaacaaagcttccacagtgtggaaggggacgcgagcaggttgccaatgctggctcgggcagcctgcttttattctcttatctggccccacccacatcctgctgattggtagagcccagtggcctgttttgtcagggtgctgattggtgcgtttacaatccctgagctagatacaaaggttctccacgtccccatcagattagttagatacagagtttggacacacaggttctccaaggccccacccgatcggggta

SEQ ID NO: 552315 - DNA, 1141 bp, Homo sapiens
  misc_feature (1141)..(1141): n is a, c, g, or t
gagctgagatggtaccagcgcactccagccgtgggggacacagcagaaactcagtctcaccaaaaaaaaaaaaaaacaaaaaaaaaaaacaatttgtgtcgcgcgcccgcccgggcgccccacggaagaaagtttcataaacacacaatccggttgggcggcgcgcgcgggcgccccacgagggtgaaatggaacccatggggcccataacgtgggtctctcctagagagaggaacctccggggccaagagagaccatagcgtcgctggcggattctcctcacccgaatataaaaaaccagcgcccgggggggggcacccgcaggcacgcgagtttctgagaacaaacaatcccagaagatgggcgagcgctcacaaggagggggcaacataccaacgagggagactctcattcaaccaaccaaccagggagagcgctcccagcaggcgggaggccgccctagcgaaatttaatctcaaaaaattataagcgacgcccccgcgcccaccggttggagtagaacgaacatacgcaacgacggaaagcacagagacggacacaaccaaagacccaagagacagcgacagaccagaccgagacacgacaagaacacaagagccagaaccgcagacagaacgaacggcgtagacagaagccaacgacagaccaccggagcgcaagacaacaggaacctacacaagactagccaaactcagaccgaacaagtagacaaagcaagcagaacacgagagagaggagaaggagaagcgcgcgacccgcagcaggcgacgcagcacaggcggagagacgagagacaacggagcggacgaagacaggggggcaggcagcacagagacggcagtgcaggaggccaccgacagcagagacaagggagccggaggacaggagcagaggaagagcacgcaggcagaggcacgaagcaacgcgagaccacagaagaggaagagagaacgcggcgcacgacacaagcagacaagagaaggagagacggccaaacagcacacagccgacgcgcgagcacgacaagccccgagagaacgagagaggaaggcgagagacgacagagaaagagacgcgaagggagcgacaggagagagcacggagcaaagaagaagcgagn

SEQ ID NO: 552316 - DNA, 280 bp, Homo sapiens
agagttcattacaaatacagcttcccaggccccacctccagcacttctgcctggccctgggcgtccctaggacgaaactgtaaattccccagtcactccacggcaggcaggctgggccacccttagtgggcactgcttgggcttgtctgttatctcccagaggcatttcagaaatcagggcatttcggtttcaggatggctcttctataaggtttccatataaagtaatggttttatttcaagttggtcttcaaatattttcatttgggtgtgtacttca

SEQ ID NO: 552317 - DNA, 386 bp, Homo sapiens
acaacgttcatctgataacatattaggcaaggccatagggctgcttccatacctctagaaaactgcctcgtaggtcagggctgagtggtagtacaggcaggtggagtaatctgtcaagatgctgctttaagttgttttgagatgtggttcaagggtgtttgttgatcacacaccaagagctagctattaccaagaataataactagcatttgtcaatctccagattgacagtttgcaaagcactttcaagtattatttgatccttggaacaaccacgtatctcctgcaaaaatatgggaatgataatacctgctcattagggatcttgggaggattaaatgagataatataggtccaagtgtctagcctagcatttagtgggtggg

SEQ ID NO: 552318 - DNA, 510 bp, Homo sapiens
ctgatgctggcaccaggtttgctgccccaccctacctagattatgcaggctaccaccagtacatagaggagatgcttcctccagaaagcccggcactgtatggcctccacccaaatgctgaaatagaattcctgacagtgacatccaacactctcttcagaactttgctggagatgcagcccaggaatgcactcagtggtgatgaactggggcagtctacagaagaaaaggtagagggtctttccttccttttctttttcattgaagtataacttacttgtactggagtctactaatcctaattgtgcaaatcaataagtttttacctaggttttactcatacaaccaccacctagatcaaaataacatttccaacactccagaaggatactcatgccccttatcagtcaacatacccctcacctcccccagagataatcagtatctttacctctatcatcacagattagctttacctgattccaaatatatggaatcatacagtgcgca

SEQ ID NO: 552319 - DNA, 352 bp, Homo sapiens
gccaagccaagatttcgatagatttttgtgtgttgttgtgaaacatgctaatgattgaattatcttttccaaagatttttttttaaactgtgactgctcgcgctaacattgacaataacactaattttttaaaacttggatggcgagatgacgaacgcattccaccaaactcatgttttccacacggagggttcacgtgtgcgacgacgcacaaaacaccacacaggcctttgaaactctttgctttgcgattcgaactcttttttgctttgaaagcttgccctttgtttgtgcccccaccggcgcacacgggcaaagttctcagcgttgtgcccctgctgttcccatcctg

SEQ ID NO: 552320 - DNA, 408 bp, Homo sapiens
actgcattgcagcctgggcgacagaacaagactctgtctcaaaaaaaaacaaaaaaaaaaaccataatgttgccatggctattttagtggggggttttttgtttgttttgttttttttagtatttttgttgggctcagtggctcacacctgtaatcccaacactttgggaggccaaggtgggcagaacacttgagctcaggagttcgagaccagcctggggaacatggcaaaacccccatctctacaaaatacaaaaattagccaggtgcggtggtgtgtgcctatagtcccagctacttcagaggctaaaatggaaggatcacttgagcccaggaggctgaggctgcaacgagccatgagcatgccactgcactccagcctgggtgacagagcaagatcctatctca

SEQ ID NO: 552321 - DNA, 205 bp, Homo sapiens
  misc_feature (32)..(32): n is a, c, g, or t
accggaagtatctggggcatgtagtacagatnaactatatggcgaaaatagcctcaggctagcagttgatattctcagcactggtttccagaccttttcacctgggaaatatgcatgaactccactagatacccaacactagcccactgtgatattctgcaccctcctcccattctccctgattaactcagcccacagatccttg

SEQ ID NO: 552322 - DNA, 818 bp, Homo sapiens
cgggcgcatccgcctaatccgggagacctgggagacttgaggctcagtggaagaggacgatcgttatacgtgttgtgttcgggctatgctctgtgtatgtaagtttgtcttcgtgagcattcaagactacttcttggctctgtctcggaattccaccacgtcctgtccgccagggctattaagagattgggcgcgcaggacagggactttcctctgccggctgcgtggagaaggaagcggctaaaaggtattgccccggcagagttccgccattcgttgatccggggagggagggactagtacacagtacccactcaccaggaatagtctagacacgcgcttacagggccaggagtggacgtttcgcagcacaggatttcctaacgagcgagagggatttagccaagagcacagacttgggattccttctgtccgctccccaccgtttctgctcccaatgaagaaagcgttaatatcctgtgattactgctaggaaaggggcgtattaacggtcctgtgcttccccgacaggggaggataagctagacgaacttcacagaagagttcaagtattggagaactaatggagtttagtagagaataagatactatttttgagagctatagagtaagaaggaaaacacagtgcttttaaaaagtgtttaatgagagttaacagacagaaggctcgaagtggaaagaccttaatggtttatgtgagataatggtgactcgcagtctgttgttgtataaaggttgggggagctgataaggtttttgtacagtattttctcgttactgcatgggtctgtaatgaa

SEQ ID NO: 552323 - DNA, 948 bp, Homo sapiens
gggctcgggatgcggggctgagaccctcgcgattccggggcggattcgggacgcatggagaccggccataacttggtgccgtggtggggcttctccagatgccggggctgggtccttcccaaggattgagacaaacaggatggctagcggagaaatgaaatgatcgttaaaggaagtcgtccgaatctcggaacctggagaagaaggatgtggaaactagcaggttctgtacagtgtgaagaggaagcgtagacttgaggatgcattcattgtgatatccagatagttgatggaccgaggaaccaaatagggacggagacaatgggtatgcaggaaaaccgaacgacgaaaactagtcagagatatgagcacaaagtgtggtcggcgcgaagagagtgaaaaagttgtagcaggatagacaagaagaaaggaacaagtgctgcatctaggattcctctaacaatagcagtagagcccgggtagagctcagtgggatggtcgaacaggcaaggcacggagggatagaacgcatggagcctcatcgaaggggaagcgccattgggtgaaaggccgtggatataggtcgccgggacccttcgccgttgaatggcctagccccgcgatacacaaaggaatcggtcggacagcggtactggtccaacgtgggtaacgcggatactatagcgtcaagtaggcccaatacgaaaggaacgacaaaaagccagcaagaaccttctgagggactcaacttgacagaggggcgagttcttgggcaagggtggggtaacgcgttacagaaatccagatgggtatatgacaaagggggtgcgaccaaatagttcagagagtcgagggggcgaaacacgaagggcatggagggaaaaggaagaagggaagcactttgtgggaacacatggcggtagggtgaggcacgtgaaaggaaggagg

SEQ ID NO: 552324 - DNA, 546 bp, Homo sapiens
cttttccgtgccaaatcctccgccgcgctcttccagaagtgcgaaacccccaagcgctcttaccattatttatccccgggagagaccccgtaccacgcccatgccccaccaatgtattgggcccctcctgcccacccaacaactgtgatgaaatctcagaacccgtctcccctgaggtctttccccaaaggcgcacaaaaatgttttttgttctcgatcaccccgccctttggtgaccaaggtccaaaggcaccagattgagagagaaatcctgatttgggagaaccctcttatatcccgatgcctacccctacacctccctagcttaccttctacaaaaagtaggtttaagacccggcaaagcaccaaccaggtttttagtcttcaccaccacctaaaattccttagcacgccctaggaaaggacccccttattacatttattatttcttaattttacatttgagaagaacatcttctgtcacacccgcgccgcgcaggtcactgaacccaaccccccttggagcccagcgagactccgtctccg

SEQ ID NO: 552325 - DNA, 148 bp, Homo sapiens
  misc_feature (129)..(129): n is a, c, g, or t
  misc_feature (136)..(136): n is a, c, g, or t
gcctttctagcccagcggcgtgccacagagaaggctacacgagcaggatgccatgccccaatacaggccacctatgcgcaggcctcggctgggtcttggcggggcagctatcttggtagcgccaacganctggtgnacccctattgta

SEQ ID NO: 552326 - DNA, 511 bp, Homo sapiens
ccaaagggatgtttggtaacccagcctggagggcaggggctcgatctcggttcattgaaagctcagcctccagggttaaggccattttcgggctcaacctccccagtggctgaccttaaagcctccccccacaagactgggtggaaggaatcctggccctttggaaggtaagggggggagggggtttcccccgttttggccaaataggtttgaattacctgcccagggtggcgagcgaccaagtccttcgaagggcttgggttactggttttggacacaaagaacaccccctttcaaagtagtttgtctccagagtgctaaaaaatttatgttagacacatttattttgcgaagcaaaataaaattcaattggaatgggagcttgttttccacatatccaaccgtgcgagggcatagaggcggattcagggggacacatccccttagatatcactacatccccaatttcccactcgggaggctcacgggcagatgatattgagcactctcc

SEQ ID NO: 552327 - DNA, 852 bp, Homo sapiens
cgtacaacattcgaagaggaattgagaactacatatgatgatcatggatcttcaatataacatcatggactttgttcagaatatagttcaagtgctgtggcggggaggactaccgagattggagcaagaatcagtaccacgattgcagtgcccctggacccctggctgtggggtgccctatcacctgctgacttcctaggcatacatgactagcaagttcgtacaatcaccatcgtggtggttgacaaaactatctcacaaaggtagcgtgtcacggtagttgcagcgatggtcatctaacgtagctgagggctagcagcaacgccgatgatcatcttgtgttcatggacaactaacaccatcatggaagtgggcatcctcctgcagcatcctgcttccccagttgcctgtgggtgctgctagattgcttgcatgtacatcacccgggtgtaggacatcatcatggagcactctgtcacttgatgggctcctggggccaggtgtcaagcccatcgtgtaggcggcaggcacgggatgctgcttgtgctaccccaattagggcccagcctgccatggcagctccaacaaggaccgtctgggatagcacctctcagtcaacatcgtggggctggacagggctgcgggccctctgcccacactcagtactgagccaaagccagggctgtgtgtgcctgtgtgtaggtccacggctctgctccccagggagcagagcctgggctcccctaagagggtttcccccgaggcagtctggatctgtgcccacctggggccggggacaaggcctccttctccagggctgggctcggggggggaaccgaaggctgttcagcc

SEQ ID NO: 552328 - DNA, 277 bp, Homo sapiens
tactgaggcaggagaatcgcttgaacccgggaggcagaggtttcagtgagcggagattgcccactgcactccagcctgggcaacagagtgagactctgtttcacaaaaaaaaaaaaaaaaaggaaattggtttctaaacactttactttaaaacaacagatttttgccattatgggatttaatccgtggctaatttttgtttttttggtacagacggggtttcaccattgtttggtcaggcgtgttcttggaccccttaacctcgagttggtccgcc

SEQ ID NO: 552329 - DNA, 612 bp, Homo sapiens
gtgatagagttgcagtgatgttggccatttgctggacaaccaagcacccgggtagctcctttgattagagaccagatcagataacttatgcttggtaaactgattacgttgacattcttctcttttctatgaagggcagggcaagaacagaagtgtgcacaatggctctcatgtacttttaaattatacaatgatatccaagtattaaaagattataggaacctgaggtttacatacgttgtgtggtgacattttagaatgtcagtaaattgctgtttggagatgtgagaggaacaagaaggtggaaggcaggttatttattgctttctatgcttggaaccacgaatgaggtaggcacaaatacattcctttagagttaagaactatgacgtagctgagttagtgagactagacatagtaccgaattgagtgtcatgcgatgggtcttagagggtgaatggaacaagagaagtactatgcttgtgtgcgagctcaaaccaaaagcaatgtgttgtaaaaatgtctttcatgtaaaagtgcagtaaatatgtaactatttataaatgaataagacagttgatgaagaactttgacaacagagaaagaaacagg

SEQ ID NO: 552330 - DNA, 402 bp, Homo sapiens
  misc_feature (30)..(30): n is a, c, g, or t
  misc_feature (139)..(139): n is a, c, g, or t
  misc_feature (207)..(207): n is a, c, g, or t
gtatttgtgacacctttgataataaaaagnagggcttcttttaaaataaatctgatgttggccgggcgcggtggctcacacctgtaatcccagcactttgggaggctgaggcgggcagatcactagaggtcaggagttngagaccagcctggccaacatgggaaaaccccatctctattaaaaatacaaaaattagccaggcaaggnggtgcatgcctgtaatcccagctgctcaggaggctgaggcaggagaatcacttgaacccaggaggtggaggttgcagtgagcctagatcgcaccattacactccagcctgggtgacagaatgagactcctccttcttaaaatacataagctaacatctcttaaaaagacattctatcataccattaatgctatgg

SEQ ID NO: 552331 - DNA, 158 bp, Homo sapiens
tagatcgagctcggtaccgtgtacttctgctgcccctgcgcctcagaggtctcgtagggtctttcttgggatagtgtacttgctcctgcttttctgtcctgggcatgggtccaggcctgacaccccctccccgcccctgtggccctggccactaaagc

SEQ ID NO: 552332 - DNA, 931 bp, Homo sapiens
tcatcatcaagatccatgacatgaatgagaatgaaccaatattcaccatgtaggtttacacaggcactgtccctgaaatgtctgatgtcggtactaacttggtggtccaagtcactgcgaggatgcagatgatccaacatatgggaacggtgctaaagtggtctacagtgattctacagggtacagccgctatttttcacggtgaatcagaaacaggtattgatcaaggacagcttgctcaacatggatcgagacaacagggagcagtaccaccgtggtgattcaagccgacacggatatgggcggccagatgggaggattactgctgggaccagccaccgtgaacatcgacactgagctgatgtcaacgagatcctccccgatttgccccagagtacataccagtttacaactcctgaatcttctccaacggggacatgcaattggcagaagtcacaggccagcgatgctgatgtgggacgaacaatgctgaaactgagtacagcatcacagacggtgaggggctggatactgtggatgtcatcagcgaccaggacaccccagggaagggctataacgtgtcaaaaagctcttggcagtgcgaacacgcacagaaacgcgtacaccccttacaagcggcaagcctcacgtgctcaccgtagacgccacgacctcgactgggcgcttcccaagactccaccccacgtacgaactgcggccaccggctgtccactaaccccacgctgccctcacacacccgcctcactctcacactaccgcgacactgcccactaccccaccacacccccccacacgccacaccccacacgcgccacgacccccgccaccaccctccgaccgccccgctcgcccccctccccctgcccgcaccgccccccaccccccggcccgacccgccgccccccacccc

SEQ ID NO: 552333 - DNA, 81 bp, Homo sapiens
  misc_feature (5)..(5): n is a, c, g, or t
  misc_feature (39)..(39): n is a, c, g, or t
cccanacccgcacgcagcccccaggtagaccccgggttnctccgaggtccttaggtcgggacggtctcctcgggcgcttgc

SEQ ID NO: 552334 - DNA, 315 bp, Homo sapiens
atagcgttagctcttcacgctgggagctagtagatccggatctatacctattcggccatctaggctacctctctccaattctaattgggtatatatccagcagtgggatatagctggatcacataggtaatattttaatattttaagaatgaatacatacataactagtatttccagcggacagcgagctaccatattatatgtatcccactcaagcagtatcatatactagtatatctaccacatacctatggccaatcactatgctaatatttctacttatattagacgagtaacccatacctaaatagagta

SEQ ID NO: 552335 - DNA, 256 bp, Homo sapiens
tatgctaggagccaggaagactcacggattcttacttcgctagtacaaatgatacacctacgaagaggaggacaggaagtctcacggctacttactatatgctagtagaaatgatacacctacgagaggaggacaggaagtctcaacggctactttctttgctagtagaaatgatacacctacgagaggcggacaggaagtctcacggctttctatagctagtagaaatgctacacctacgagaggaggacaggaa

SEQ ID NO: 552336 - DNA, 994 bp, Homo sapiens
tttgtttgtgctcttttcgctgtggtttttgtctcttggctgtttctgtggtattgctttggtgctcttgattctggtcttgttgtttcgtgtgctggcccgtgggggcgtgtttctgggtcttatgtgtcactgttgtgtctctgctctccgctcctgttcgtgtgcttcctcggcgttaggttagcttcgtgcttccctcctgcctttgttggtattcagtctctgtccctgtgctaacctaacatacaatgcaagtttctggttgttgtgacggatacatctcttgggcccatagtctgcttgtggctctctatgtagggtgctaatttgcgtgtttaactttctctctctgctttttcagtccttggtttggtgttctgtcacaggctccagtctagccgtcttggtgtgttatctctcacagctagtactaaggtgggtctttgcgtgtttggtatggttccgctggcgggcactttggttcactgcttccgctcagagcgttccattagcgcgatgctctgtatgtagttgacgtagtgtgtgttctgatgagattgttaagtattttatttgttacatatatctccagctgatagtatagtgaatgccttcccctatagtgtccgtgctccaactctggtgcctggggctctgctctgctgctcccaggaagggggtggcgtgtacatggctaggtacttgtgaagtcctagagtcctaggcgtggagcgcgccagcatcagccccagagcagcacatgacagccacagtgtgtgcatctcgatgatgtcggccctgcatacggaggaggacagtgagacgatgccactgcgcctacgctcgcccctgcatacttacatatgtggcaaccctccctcctaaggttcctgccaccatgccatattgggacacacaatcagattaacccttcgttgacaagctcggtcagggattatttggtgctcctcatgaaggtagactatctgtt

SEQ ID NO: 552337 - DNA, 101 bp, Homo sapiens
gaaaagagcagtgtgtggagatgtacacagatggtcagtggaatgacaggaactgcctgtactcacgactgagcatctcatgatcatcctatgcatgtagg

SEQ ID NO: 552338 - DNA, 107 bp, Homo sapiens
tggtgatagatgagggagtcttgggatctggtcactacagaatgctggtaggagtcacaagatggggaaccctggagcaagggcaggtagggaagggtcccaaatca

SEQ ID NO: 552339 - DNA, 501 bp, Homo sapiens
acaggatatgaaagttgaggatggttgaaagttgggcgaggctgactaaattgtgtgtaatagccaacgtgtgaatttaaatgttggataagaggacgatgtaaaatggagaggaaaaggtccaaatgaaggacatatcaataatcccagcaagtcgggaggctgaggcaggaggattgcttgacctaggaattgaagaccagcctgggcaagatgacagaaccccatctgtatagaataatctttaaaaatttagctgagcatggtggtgcatgcctgtagtcctagctactcaagaggctaaggcaggagaatcacttgagcccaggaattcgaggctgcagtgagctatgatcatgccattgcactccagtctgggagacagagtgagaccccatctctaaaaaacaaaacaaaacaagaaaacatggaggtcttagtaattcaatggacattgttgatgataaacaaggggagattcgggtttgaggctggatggca

SEQ ID NO: 552340 - DNA, 600 bp, Homo sapiens
taagagctgtctgtttagttgcctgcctctcatcccaggcagactcatgagccagggcctgcagctgaggacagtaatgggctcctctctgaataggggctgggggagctagcagcagcctgagatcctccaaatgtgtcttcccccaggcctggaaccacctcatatctaggacggggttgaatggggccccagtcttctccgttcactgggcggcgtccttgcagaggcttaaaccgtactcgtagaatggagccaaggtgaagccttcattctacaaatagggtctgagcagaaaggagggcccctcttctcaatcctactcactcaggacctggtctcagtcacaggtgggatgagagcagaaagggaagcactgctatcctgcctctcctgggaagacaccccgctgcctgggagctggggaggtggccctgtgttcttggctgcagcaggatggagctcaagtgccacagactctccgtgtccttaccaaatgtatgtaggtgttctggagcaagtgtttcttcatttgctgggtgcccataggaccatttccaaaggctctctaaatggctgttttgggactgctcattactc

SEQ ID NO: 552341 - DNA, 200 bp, Homo sapiens
cacgaggcttctgctcctggcccttgctcgccgcctccacggcgaggccgaacatcggcctggggaactcgaacggtgcgagatggatgtggtcctcgtcgtggctgtcgtgcaccaccgcgtcgaaatgcagctcctcgaccttggcgacggcggcgatgtcgccgggaatggcctgctcgatctcgatgtgctccttg

SEQ ID NO: 552342 - DNA, 125 bp, Homo sapiens
agcgatctcgaggataactctaaagcattcatgcaaggtgctttcatgttagttggaaacaggataatccttagtcaggatatgtaggcacagcctaaaataatctttgaccacagaagataatc

SEQ ID NO: 552343 - DNA, 436 bp, Homo sapiens
  misc_feature (49)..(49): n is a, c, g, or t
  misc_feature (100)..(100): n is a, c, g, or t
  misc_feature (306)..(306): n is a, c, g, or t
  misc_feature (348)..(348): n is a, c, g, or t
  misc_feature (360)..(360): n is a, c, g, or t
  misc_feature (411)..(411): n is a, c, g, or t
tcatgcctgtgaatctcagaactttgggagcccgaggtgggtggatttnttggggctgggagtttgaggccagcctggccaacatgatgaaaccccgtcnctgctaagattacaaaaattggccgggcgtggtggcacacacctgtaatcccagctacctcttgaggctgaggcatgagaattgcttgaacccaggaagcagaggttgcaatgagccgagatcgggccactgcactctagcctgggcaacagagtgagactctgtctcaaacaaacaaacaaacaaacaaacaccaaaaaccaggnagttgatattgatataatactattaactcatctacatatgtnttacaattttgnctcttgttccacttaatgtctttttttaggttcttgagtcaatccaggagnccatgctgcaatttcagcctggggt

SEQ ID NO: 552344 - DNA, 223 bp, Homo sapiens
agcattataaaaaaacttaataccattacgatattcaagaaccaaagtcacggccgggggcggtggctcaagcctgtaatcccagcactttgggagactgaggtgggcggatcacaagggcaggagtccgataccagcctggccacatggtgaaaccccacctttattaaagacacaaaaaaattaaccgggcatggtggaatgcgcctgtaaccccagctat

SEQ ID NO: 552345 - DNA, 109 bp, Homo sapiens
  misc_feature (39)..(39): n is a, c, g, or t
tacaattcagctctgtacccacggcttcttgtggttacntgaccccaggctgacaccagcctctcacggaggcatcttatgttaacctacctgggttaggtctacctgg

SEQ ID NO: 552346 - DNA, 231 bp, Homo sapiens
atagtgagatcctcgccagtatctctcacgtcttcaccaccagcccttacgaaccctcctgtctggcccagctactcaccaaccacgcccacatttcagccccagccagttccaggaatccagggatcaccaccaagctccccactttcagctgtgttactccccagtctctagcacgtgtttatctccaaacctcagggactctcctgtctgtcccagctactttccaac

SEQ ID NO: 552347 - DNA, 208 bp, Homo sapiens
  misc_feature (69)..(69): n is a, c, g, or t
atttcccccccccaaaaaagccttttaaaaccctcttggggtttaagcattttgcccccctttttaaangcccgttttcccccccttgggggggggaaaaaacgggggattttttaggggggctttttttgttaaaaagggaggggggccgggaaaaaccccctttttaaattgttttgggcaaaagggaaaaaaaccttttttccca

SEQ ID NO: 552348 - DNA, 159 bp, Homo sapiens
  misc_feature (145)..(145): n is a, c, g, or t
gccaactcaggtcatcaaggccaaggaccagtggcgaaagtgagtcttggggtaccttaggccttggctagtctgcgttcctctccctgcatgctgtgtatcctaactcaaaacaaccccccctcaaataaatcacatttagtgntaggtgccaacaaa

SEQ ID NO: 552349 - DNA, 639 bp, Homo sapiens
cttcaatgtaaataattgggattagaaaggaatgaaccgcctaagttgcaaaatactcagaatgctcttgtgtccaggggttatgtcggccttccctcaaagggtataataggcaagttggggataatcgggcattgacacacatacaaatttgatagttccgggtctgtaaacatcagactaatcacagttgcatgggatattagtatactcaggtacagtatctttcatcatagtagtactgttgataacaccagctgtctcccatgactcttatgggtaagagtcaggtagctagtattaatatcgtgtgtagctagctggtccaagtacaatgtgtcggagcatctccataggatgacgtcatgtggtacacagatagtacagggatgttgcgtatgtttcgtgagcgagtggttgtgtttatgcatggaatgtgtagttcgagtcttcatgtcagtggtagtcaaatgaccgttggcaagtctagtcttagcatagtactgttcccagtttatgaaagtaattaagaccatctgtgttagactccgatacatagtacgtctagggtcgcggatgcttaacaggcgtcagagcctcctccggcaatatgagcaatgtcggataccaccgagtagg

SEQ ID NO: 552350 - DNA, 843 bp, Homo sapiens
  misc_feature (489)..(489): n is a, c, g, or t
ggaggctcggaccggcccgcgaagttgctgaagtccttcgcgctctcctcgccttcccaacggaatcatgctcaagttcctgctgggattcacacgtggcaacgtgcttggaatgtatctgcgctcagaaatatgatataccaaacgtggttaaaaaaaatgtgaagaatattaaaaaggactgtggaatgccaagaagaaacccttagtgcatgagatggctccagcagtggcttcaggatatacgtgattctacgtgctctgtgagggcctcgtttatatctgaaccaaaagctttgggtttggtctccagcctcagatttctcttcttgtgctagaccctgtgtttttgggtttaaagaaggcaaaatatggggcccaattgtgagaataacgatatttccaatatactcacctcttccaataatctctttccaatgcatgggaggttctaagatgcaattatggtgctagatcagtaatcatgantttaaatgagtagtgtctcttacatcgtgcggattttaactacctttttttccacacggaaaaattggatcgagttggtaataggtggtccagaatacaaaataatcagtgacattcacaggtcgaagaattcataagtggggtcatctgtgcaaccattgtggagctaaaattattgtggggcaaggtattaacttggtcttagagcacagtttgggggatatccacactattgggacaggtggcagggcaggcctgtgttggtaatttaaccacaaaggtcacttgggtttcttgaacaaacagagtctggaaactcgccggactgggggtgaaaaacacaaaacaggtttg

SEQ ID NO: 552351 - DNA, 1164 bp, Homo sapiens
  misc_feature (1)..(1): n is a, c, g, or t
nttgcgcccctcgcctctcttgttttgcacggtcccattgtggtattacccgttggcccccttgttgggtggtggcaagggccacccatttgccgccatttttttagggggcgccacaccttttttggggagaccttctcggctgaggggagtcccaccccaggtttgtggggaccccaccataaagccccgcgggccctatgggttgaaaccctggcctcggcgcccccggtgtaccttttttttcccgggggttgtcttaataagggttattccggtggaggccctgggggtgtggcccgctaattttctgggcccaaccgctagggctttattttacgctctttttttagtttataagaggttttacacaccgcagtggcctctaggcgtatgttcccgccgtgttgcacccaggggagagggtttcccacgccccttgtcgtgtgatatgctctcccccctcgggttcccataaatagggggcaccaaaagcccaatcttttaggcgcatctcctcacgccatatgccagcgttctccctaaacacgctttttttgcgctcttaagctctcacacactcccccccacccggggggaaacaccacgcccacatgtatttatcaccctgtttcgcccccattttcccgcgaagtgttttaacttatagcgttatttacttgacccccccggggtttgggtgccacatgtgtctcgtggcccccacgccgcacccgcgcggtgccaccacacggttttttacccccctcaggtccctattttgtatataccccggcgcgtgtataagagagtgtgtgtttatagagtccacaccccctgctccccacatttaaagccgttataacatctcccctgggagagtgtgtgagagaaacacactcccccgtgtgacacaccacaatatgtgagcttaccgaaagatggcgttttaacacatatatatctggcaccaccacccatatagctttagacccccaactgggattagattacccccctgatgcgtttagcccttaacctcccaccagtttgaatccacaccgaaactgctccgcccaggacccttcgagcccccagctttaaactccaagggcctggcggtgcttctatatccctttagaggggcctgttcctgttattata

SEQ ID NO: 552352 - DNA, 148 bp, Homo sapiens
  misc_feature (10)..(10): n is a, c, g, or t
gaatatgttnttcatggttacttgttttaaaagattttaaaaatcattgcactttggtcagaaaaaataataaatatatcttataaatgtttgattcccttactgcttgctttttcaataaagtttgaagtccaagtgattttctttc

SEQ ID NO: 552353 - DNA, 223 bp, Homo sapiens
cgtatctgcgagaaacacctcagtgaacccagtctggtcctggcacttggttttggaaagtttcattataatttgtttgagatgcattctcattctgtcacccaggctgcagttacagtggcacaatctcagctcactgcatcatccaccatcccaggtgcaagtaggggtaccgagacgtcaacttcgataatcatagctcataagctattttcctgttggt

SEQ ID NO: 552354 - DNA, 877 bp, Homo sapiens
aggggaaaagtaaccaaaagagagaaagagaaaggaatgctggtttatctttgtagatgtaatcgaatggagaaatttgcagtattttagccactattaggaatttttttttttggtaaaattgaagactgaactcgtgttcaaatgctttcatgaaccgggttggagacggtaggaaagcaacaaaacggtgggaaccgggtgactaagggcctgggtgcaaggactggggaaaggtcatggataatagatgggggggttttcccccctttagaaatgtgggatattaagtgatataaacacttctttaaactccgaaaatcttcggagaaatcacaaaattcacggtatgctcgggaacgatcggagattccctaggtagatgctggaatagcctagacttcaccaagtgggggtgacaccaaaatcagagtcagttggacccagacatcagccacactcgggcgtctggacaaatggttcggcctggtgggacattaatttcaacgctctaacgtatatatcaccatcatccccatggtggcacttcaacacaataccaaattcagggtcctctcaaagtcaaacaattctaaccacgtgtaaccaacagttccgggcgtcactcccctggtattaacccatctgtgttcggcccgcatctggagggtcactcaggggtgccaacacactctggtaattcccctggaacaaagtgtgattatacttcgccacttaagtcacaagtaaccctaacatacgcgaccacaacaagcacaggacaaatcaaccagcacaaacactactctggtggcgcggacccaccgcccctcttgaaaaaaccccttcataaacatcgctgctggggggcgggccc

SEQ ID NO: 552355 - DNA, 464 bp, Homo sapiens
ggatccgttgtcgggtatacacgcaggctctgggacagtttgggagataggtctggaaactgggtatatgtgacggagatgtatggccaaaggcaatttcataaacaactataaagtcaacaaacccacaaattgcttttagagctaaagttaatattatgcagttcagtctctcttttttacacacaagaaaactaaggtccaaagaggtacttgcaaatagtagataataaatattagctgattgcaaataatctaatcaagtcagtctttagacagattcattctttatggtatttaatgtcagaacgaactagtcttggttttagtcagcaattcaagactaaatcatacttgtcagcatgataactaaacaggacccatcaagggaatctggctttgctgacaccttgatttcagaccagtgaacctgacttaggacatctgacctccagaactataag

SEQ ID NO: 552356 - DNA, 172 bp, Homo sapiens
gatatggataataggccgcgtactcgacctcacggatccgtgtcgagattcggaggaataaggctcggctcgacccggtcggtccgttggaaggatccattgctggtgtagatgttgcaatagcagtgtcgggtacgtaaacgagtattggaggaagtatcattatgggtag

SEQ ID NO: 552357 - DNA, 438 bp, Homo sapiens
tgtctacaggatcttcaacacgcaatctcacctccacctcgttacccggagccaccctgctaagctgcgcacagcgcccgctgcttaccttcctgaccgtgcctgcctgttgcttacccctcgtgacacaccctgtagggaggcgttgctctgcaagggaaggggtctttggggcgaggggaacttatcccaacccttggcttaccttttgtacatccaggaggatgctggtgattggaacccaggggtggcccacccttctctgtgcttactccatcccgttccctgcagaggcgatgcccaagttcactgggtttcttttgaaaaaattatggggccgaccccatgggtccttggtgaaagtatgaaagacacgttgacagagcctctggtctggatttgcccttctgccagacgtgggaaggaggtttaatttat

SEQ ID NO: 552358 - DNA, 214 bp, Homo sapiens
tctagtagctctctcccaaagaagccactaaacgcagtaacagaaatgacgggtacaatggtggtcacaaaggccattgtgtatgtatcctgttagcctcagacgcaaagaacagcgccaggctcatctcactaaccagtatatgcagagaatggcatgtgtacgagctgttccctagctctgttatctagccacttaccagaccagcacctcc

SEQ ID NO: 552359 - DNA, 225 bp, Homo sapiens
tactttttaaaaatctttggcccttttccctgttcttgttaaattatatacattttttggaattccaggaacaatttaaattcaattgtatgatgacttttttataagtaaaaaattttcctaattaaccaaataggtccatctggtttttgtaatgcctatctataccttcccaggccgaaggttctcgggttttgggttggcacagaggaacagagaagagtc

SEQ ID NO: 552360 - DNA, 125 bp, Homo sapiens
acctgcaaactttttctgtaaaggaccagatagtaagtattttatgctttgtgagccatacagttttcgttgcaactagtcaactctcaacttcaccgtggacagcatgtaaatggatgggagtg

SEQ ID NO: 552361 - DNA, 453 bp, Homo sapiens
  misc_feature (364)..(364): n is a, c, g, or t
  misc_feature (416)..(416): n is a, c, g, or t
  misc_feature (436)..(436): n is a, c, g, or t
gagctgcattatcagtgtttgtttttatcttgctaacataaatgtaacatgttcaagaactggattcatgttttatttactaaattactattcctcataatacttagcatagtatttagtgttaggtgcaaggtagttaatcaataaattctgaattaaattaactttgctaggaaacaggaggccaacagaagaataggcaagtgtatatattcaaagatgacctaaacaggggtgcaattttgactcaacaaattaagggtctatggaatgttaataaatacagtgtttgggtatatttgggccatatctttatataggtttggggtatatgtccgctaccccaaatctccatcattggaantattattcccctgggagggtaggggccggggtggggagggtgattgggtccnggggggtaggagttcccccnggatgggtttaggccac

SEQ ID NO: 552362 - DNA, 867 bp, Homo sapiens
tggtatatagaaattttattttcttaatgcggcacagtggacatacaatcaatattattccctacaatgtgcaatatataaattattcacattaaaaaattaacagaaagcctcatatgcaggaaatatttaaaaatgtgtatctaactttgattctggggctgactatacactactagctttatagatgtggggagaatacgacatttacacatttgaatgaagaacccgggtgggtccattccagatgcttattaccccggatgaaaaatatggtcttcatttgggcattaagggtccatgggctggggcatatggggggatcccaaaaaaatttacaggaagggcatatttttactgtggcgttttaaaaacgttctgcggcctttgaaatcgcctctagaggcgagggggggctttttttgctttaaaaagaagaaaaagcctcgaagcctggtttttttgaggaatgggctggccgccctttggggcggctatattcactggcgccagagccgaaggtcgtgccggagaccggaggggatatgcggagaaaatatacattgccccgcgtataaggttggaaaacagagggatgacgctttaaagaggtgccgagggaggccccgtagtggcaatacaatgctggagactcgggtgttggataatcgcagggggaatgaaaaggaagttcgcaaggggtaatcatgggttcatactgttcctcaagactaaggcggaggttgagtttttggtactgcgttggggccgggtatagatgcgtctagctgtggtgtgcggaggtcgcgagaaggcggtagattaagatgttcctcagtactttgcgggcacatatagaggcgccgg

SEQ ID NO: 552363 - DNA, 912 bp, Homo sapiens
tagtgaggcggaagtaatagtatccggagtttgtctgtccgcgcgctcctgaagtttttggttgtgtcgtgctaggtttggctctgtcacggttccgtgtgagagttgcttgtcgcttgtccgtggctgagcccactcgtttggccttcacggggatatggtggtccatgttccatatttgtccttattgctgtttgtaagattttgcaattgctgctgggcaaaactgttagcttgctgggagatatcctaggagtgagtctatcattcatagagtgcttgtacatttaacctgttgaagtcgctccagctgtttttcttgacgtggcgatagcgttgggtgcatggcctcacacctgtaatctcatctacgcaggaggctcagcttaggaggattggcttgagcccgttgaattcaagaccagcctcggccagattagtgtgaacgcccgttctgtgactcgtgtttgtggagtccgcatgtgaaagagtgaccaaggaagaagggaagtagccctgacagaaatgggtgtacacaatttgtagggttccccaccagtaacttatagtggggttcccatggtccgtccacatctgtcgactgacaattttgtgtattccgaagatagggcgcctgtgcatcatgtctttcatggccgcagtcaatgatgccatcacagttcacgtgcagccgtgacctcccaggcacaagtgagttctctcatctcagcgcctcctgggtatgctgataattacaggtgtacgccaccatgcctggctaatttttagattttttctgtagtggtgggattttacccatgttgcccaggctggtctcatactcctggcctcaagtgatgcccactcacctcctattctgaacagcccaaacatccgtttccaacaataaca

SEQ ID NO: 552364 - DNA, 298 bp, Homo sapiens
ctagggggagagcgacgttaaaaaaaatttgaacaggactgctttattgtgtaatttatgacacaactgttacatgaattgcggatggaggcttaaaatatatagcagctacaaaaaaaatcagataactcatgcttcatgtcactcctcccacaaatacttctagtctgttcaactgcagtcaattctgtattggtttgcctgtgaattagacttctcaagtctttacacagagtaaaagaaatggataaaaatcaaagtatttttctgtactttgtatcaatgtattctattctgt

SEQ ID NO: 552365 - DNA, 864 bp, Homo sapiens
gtgtgcagacatgtttcgccccgttcagatcgggggggcgtgtcccttcctcaaacacacagcgtgggggtgtcgtccccgcccccttggtggagagtaggcgcctgcccacgaggtgggttccaccaaaaaccaccaccctgggtccgacaagatgtccacaggagccatcttggacacacttgtgcgatcagcacctccagggggggacacgaacgccaccatcacgtgcttcgtgtggccgccgccaccaactacaagtgggacttttttctcagttcgacgtataaaagcgtcggtaacccccttcttgttgcccccccgagcatggcgcagtcattagcacacgcgtccactcggatgagccaccgccacctggggccactcatctgtgcgcatacgatcatttctgtgaaagatcctccaaacatctgttcctccagtcgttttaccaccaaacaatctcttcttctggatcgacgaaattgttttggcagccgcctgtctccctgttgcaagcggggtgttacctagtccccacctctcattctctcatgcagggtcatgagaaataaaccccccgcgaccctttgcggcttagcgtagcgcagccacgatcgcgtccaccgacgcaccacactgctgcaggacactagcctataaccccccactttggcgcggggcccacccccacgaacacagaacgaaggcgcggcagcacgcgaggcatacaacaaccaccaccacgccacgcttggcgccagagacggtaacgaccacgcacgcgcgcaggtcgtgtcccccgcgccgaccatccgcgggctcaaacaaacagaaaaaaacaaacacaaaaaacaaagacaa

SEQ ID NO: 552366 - DNA, 214 bp, Homo sapiens
  misc_feature (3)..(3): n is a, c, g, or t
  misc_feature (6)..(6): n is a, c, g, or t
  misc_feature (58)..(58): n is a, c, g, or t
  misc_feature (120)..(120): n is a, c, g, or t
ctnctnaagtccacggtgaattctcgtaaacacaataatacagaagatgaaaggtcgnacagcctacgataatctccccataaaatgtgacatgaatcaggaagttttaacctcacgtgntgcgaaatcatcggtgtaaatagggctatatgccgcgtcttttctggctaattttatgaaaagatatttattggcggaacaaaataaagaacaa

SEQ ID NO: 552367 - DNA, 159 bp, Homo sapiens
tcgcttccttgtattactcgctctaataggggtaattctaacacgctccatctgcctacgacaaacagacctataaatcgctcatcgcttactcttcaatcagccacatagccctcgtagttacagtcattttcatccaaaccccctgaagctgcaccg

SEQ ID NO: 552368 - DNA, 949 bp, Homo sapiens
gagacgctgcagcgcactggacccccaccaagacacatatgacccactcatcaccagtctctgaccatgaggcctagcccatgaggtgctgggctcctgtggcttctactccatgcgtgaagatctacatctgacctggccagcagggatggggaggacgcatgacccaggactacggagcctcagtggagactcaggccgtgcagggagatggaaccttccagaagtgggcggctgtgcgtggtgccttctgtgagatggagcacgagatacacctgcctatgtgcagcttgagggtctgccctaagcccctcaccctgagatgggagctgtcttcccagcaccagcatcgcccatcgtgggcgatctattgctggcctggttctccattggagctgtgatcactggagctgtggtcgctgccgtgatgtgtgaggaggaagatgctcagatacgaaaaggagggagttaccactcaggctgcaagcaagtgacagtgccgcagggttactgatgtgtcttgtcacagtttgttaaagtgtgaagacagcttgcactagtgtgggacttgatcaggcacagagattgtcgcagggccattctcactggtgtcgaacttgaaggaagcccgtgacttgggtttctaggaaaggtgcaccgtgcatgatgtgctgtcgtctgtgtatggcataaatgtgaggaggtggcggaagaagtaatctgacaatgcccacactgtttgccaacagcatgtgaccgtttagttgtagcagagactagagacgggcgttgtactaccttggtccaaatcagtacatatcgctgggttctggaaaataagggtggggggcttggacaggtagttcttccaatgcaactaggtggttcaattatataacatgggatgaaaaatgcaggctggtataatctagattcgataacccgaaat

SEQ ID NO: 552369 - DNA, 974 bp, Homo sapiens
acgggagaggagtgtgtgtgtgtgtgtgtgtgtgtgtgtgtatacttgtgtgtgctttctcttattttactttttggtggtggctggtggaaggggggagtgatgctagcagggctcagtcttgaactcgctgcgagagacgtctacagatcctactgtggcgccatggaatgtgccgcggatgatagaaatgaggaagaaagacacgcaagaagggagttaggctgacagacaaaactcattagatgtcccaaaacattgtctctgtgagagtctgctctttcgacaagaatgctccctcagaaaaagtgcaagtcgtctctatgtcggatgttcttccacaccaatcacctagacgagctatctctctagatcggtagacttgtgcttggcatgacgacccacgaccccgagaagatgtcctctggtaccaggtctacctgaacagctcttctcgatagacaatcttagtgctacgttcgcccttacaatgacaagacagcttgtaccaagtcacctcatcaaggcctcaagagggagacgacgtcatggatgagaagtggagacagcacacacaaataggtatgcagaacaatagtcgaaacaacgcactgtaagagacgcactataccatcaatgagtgagacccctcatgaaatgcttggtaggtctacttgatcaagaagcaagaaataagcaatacaaaacgggagaagacaaaacacacaggcttgatcgcaatgcgaaaacaaggcgccaggagcaaatctgacccaagtgaaccttccacaagagtggaagaggcagggacaagaaaacacaaacgtaaaaagaagatgccatagaggagtacatgacaaacaagcgaagtagggaggagcaacacaccttcacaacgagacagcccatacagaaggggcgagaaggacagataagaacaagtagacaccaagacacgagggagagagaagacc

SEQ ID NO: 552370 - DNA, 158 bp, Homo sapiens
gagaataatttagatatttctcaattggaaaaccccggcggcgagaaacgctcaaatgccaattttaatagtagtatcacttgataactggtagagctgtcttgttaataatataaaattgcttatgtgtattgagcactagctatgtggttgggata

SEQ ID NO: 552371 - DNA, 397 bp, Homo sapiens
tagacatagtactagcatccgacaatagtaccgcaaatagggagggctgtgcgactcaaaggctacccatcgattggagtacgtgtcctatcaagtagggtggcgcagagccagacgggcatatgtcatgaaggtttctccgaacgattaatggtttgctagcttgactagcctagggacactcaatccatcaaggtccaagtcacacttttttcaatgcacatatggggcacacaataactggtgtcttgtaaatgttctgtttttttcactaaaacttctctactttagtctttactttaaaaatatgtactatttcctttacagtcgtcacttagtacgtaaaattttcttaggtactgagctcagcatagactaatactaccttaatgttaaa

SEQ ID NO: 552372 - DNA, 467 bp, Homo sapiens
  misc_feature (348)..(348): n is a, c, g, or t
  misc_feature (369)..(369): n is a, c, g, or t
  misc_feature (411)..(411): n is a, c, g, or t
  misc_feature (455)..(455): n is a, c, g, or t
  misc_feature (463)..(463): n is a, c, g, or t
atagagggagaggagcatgccagcttcctttgcaggccctgtctcataattccagtactcccaattacatctcattggccagagcttagtaacatagccacacctcactgtgcatctcctaaattatcataaatctcattttttgaaaaattaactcacaatcttctcttctcctggccattattgcaagagattgggagagagctagtacaagagtgagattctttagtgtctttctgggtgattccacgccaagaggtcttcctctgtgtcctcacaacagtaataacccgtaacatcatgaatcagtcagggtttaccagaagaatgcagacttagtaggttacntgcattaagggatttattacnaggaattgggcttcctcaattgtgggactggctaaacaagcntgaaatccacagggcaaccagtcaggcaggtagaccatgagcangctggatncctg

SEQ ID NO: 552373 - DNA, 1386 bp, Homo sapiens
ggcatataggggaacagcagagcatggtgaatccgggctgcagctcgcagtcgcccccggtgacagcgtgctccctctcgctggtaagtcggtgcagcatgcatgcgggggcaatcattgcaggtacctgggtctctcttgtcgtctcatgtccaatggcacgaggcgtaatttggacacaagaccaggtgactctcaaagatgtctccatgactgcacagggtggcagacgtgtggcggacaagtcggtccatggtccctgtttacactcaaatagttggcattgatccgtttggcatgaaactgtactaccgtttatggtttactttgtgaatattacgtcggttgctgttgcaagtcgcgtttgccgcgaacagatctgaataaccgtgcagcatgatgaaatcttcgttccctgcaggggcgcaaggggcaacattgtgttatcaatctttagagttgtttgacacttgtctctaacgcttgaccggatagtctggccctggtgatctcccggtggaacgtagtccgggttgtccagcgttagcaaattctatagtaggggccatggtgtttaagtcttctcggtgaaaacctagttgcattaaagaaacccctgaacaaaggcttacttcacttcctaaacgttggggccccatttctttgacacgtttgcgaactttgttccgaaggaaagacaaaaagtccacaatcctttgatctggggccgaatgtaaccccacgaaaaaggtgttccatttgtcttaaacatggggggtccaggcaacggttaaaactggcaacggaaaattggccaggttgtcctttttcgagtacttcaagggaatttctggggtacaagttccaaaccaagggtttgtgaattctccccaaatgggttggttcttgtgccaggttaaaggaaccaacacacggttcaaaccctttttgtttgcgtaagagctttaagggctaagcccaaaggtttgcctccatgggcgtcccccaagttggcgcgaggtttgagacaaacacccattttcctttttagtaagggttccctttatggaaattttgtggcgcccctttatctcccccggtaagttttgtaacttaagcgggtgcgatatattttgaacacaacagttttggaacctctgcgagcacattaagtttggacagcgccagttttacaatggcgcgcacccttcccgcagtttggacaaccccgttggtggggcctttagaacagttgggggggacaggaacgcattgcgttaggcaagcttaaacacacttatttggcaacgcacaaacatagtgactttccccaccccacaaggttagagggcaacacagttcccctctgggggagcgaaaacggcg

SEQ ID NO: 552374 - DNA, 233 bp, Homo sapiens
ggtggttctggcccttcctcctcctctaggcactggctcatcatgttgcacttcatcagctcaatggcagcaatcaaagactctgagatactgaagtgggcattctcctggggaaagagagcacgaaaaaggggcgcctgaccaattgtactgttgcaaagtggcttccaagatgtgcactgctgttacttgaaacacccagtgcaaaggcacagccagaaccacaaatatcg

SEQ ID NO: 552375 - DNA, 246 bp, Homo sapiens
tttcctggtatctcgtgctagatcattatacagtgttgtgtagatttatctgtttcatagtgttatactgtaaatcccacgattgtagagttcgtacaataagtcctgaagctttgtgtatggctgcacctgcatgagctgctacaaatagaataaagaatttcatagcctgtatctatcatttagatgcatggaacaaaaatgggctatagcacacaatgggtttggagctgcactgggaacaat

SEQ ID NO: 552376 - DNA, 241 bp, Homo sapiens
gttaatagaaggtacagtactgggaattcagagaatgggaatatagtctggtgccaccaatcacactagagtacctcatttctcatgaaatattgggcagcatacccacaaggtcctgcatcagaagtgggcaataactagtctagtctaaacaagattctggctttacctaaccaagcataaaataaagccaacaaatcaaatcatttccaagcaatttagctgcaacccaaaacaaagc

SEQ ID NO: 552377 - DNA, 405 bp, Homo sapiens
  misc_feature (21)..(21): n is a, c, g, or t
gctaaagcctgtaatcccaanctttgggaggctgaggcaagaggatcacttgaagccaggagttggagaccagtctgggcaacatagggagaccccatctctacaaaaaataaaaatttagccaggcatcctggagcacgcctgtagtcccagctacttggtaggctgagatgggaggattgcttgagcccagacattggaggctgcagtgaagtatgctcatgctactgcactccagccagggagacggagcacgacctgtttaaaaaaaaagaaaaaaagaaaaaaaagattgcagttaaggtataatcttgaatctttatgaattaggtacatgtcatattaagtgtaaaggcaaactatttgagatcagggggagttataggggcatagttagccccaatt

SEQ ID NO: 552378 - DNA, 860 bp, Homo sapiens
ggtagtccagcctcacaacatgcgggacgcggcgacagtccggtcccgtgaccctggacgtagtctgaagactgccgtgatctatgggtcgctgacttagtgctgggatgatcgcgcaagaagcaagacactgcccgggagaagctaacctgcacgtgttctgtagtcacaatggctagatgaaaggttgcgtgcggcccatgaacatggatactatccatctagagagtcatggcggatgcatcgaatcttccattatgtacagaccgagatcctgggaacggcatccgcggggtgaggcttcccggcctgggggcatttacaaacaaatgcgctccggaccaatcaatctccagggagatccagacggccggtgcgcctttgctgctgcccggggaatgttgggccaaagccacgccgtgtgatccgcagggggcaaccaagtggagcgtcaaccaatggtacaccaagtcgcttaaagtaaaacctgtgccaacagcgagggggaacattcctcttgcgaaatttccctggatatgacccaaggaaaagccttcctttattcaaaaaggaacggcaacaaatttggggcttttgcggtttaccctacatttatttctacgttgcagacacaggaaagacggaggacttgcaaccattacccttaagattgggattttcccacacagactaaaaggtgggccttctgggatctcattccaagattcccaagaagcaagatccatttcaccgaggttaatttgtctgtccacatggggccaatctgccttctctctaataactcttacgggtccctcaaagatggtctacttaagccatctctttaggctctgagaagc

SEQ ID NO: 552379 - DNA, 235 bp, Homo sapiens
gtccttcactcatttttctagagaactcctataagaaagcagaacacggccaggcatgatggctcatgcctgtaatcccagcacttcaggaggctgaggcaggcagatcacctgaggtcaggagttcaagaccagcctggccaacatggcgaaaccctatctctattaaaaatacaaaaaattagctgggcatgatggcgcgtgcctgtaatcccagctacttggggccgctcgg

SEQ ID NO: 552380 - DNA, 752 bp, Homo sapiens
  misc_feature (430)..(430): n is a, c, g, or t
aagcacggaatgtgaagcggggtgggggccactgaacgtcggtaagactctgctgcagaaacggctgcaggaggtgagctcccggcgtgggaaaggcgtcctgcgagagccgtctacgcctcggcccacgttatgcgatggacgcctatgacccgacccatttctctgtatcctgtgtgcagatcttaagtatactttatggacaacaacttgaaaacgcatgcgacgctgaaactcttcaataaaaccgaacctaccctgttacatagccacgcaggagatgaacagcttaattaagcttacagacatcattgcttgtggccatcacaacattaccaccggacaaattagcgaccgggaaggcactggcttatcaggggtgctagcctggctccaagccacccacagagccatcaattgacatgccggnagacgcacagctggactgaccttatggagaagaagcataggcgcggatagcgttgctggcagtaccacttctcaccaagagtgcattatccaaagtaaccctacatcatggggaagtgtgataaacgcattaagggcgaactgccgcctttggacacagaccctacataaggtctctggaaaaagggggcccaaggcctaaaatggtagcctaacctggaccccattatagttagggccggaggctgttacctgggggaagagtgggaataagctaccaccggggaaagctgcttcagtagagaaactttcctctcagggga

SEQ ID NO: 552381 - DNA, 1228 bp, Homo sapiens
agcggggcggagccccggcggggcgttggtttcggttggccctgactgggattagtgttgacgatcgaaatgggagtccccaagttttacagatggatctcagagcggtatccctgtctcagcgaagtggtgaaagagcatcagattcctgaatttgacaacttgtacctggatatgaatggaattatacatcagtgctcccatcctaatgatgatgatgttcactttagaatttcagatgataaaatctttactgatatttttcactacctggaggtgttgtttcgcattattaaacccaggaaagtgttctttatggctgtagatggtgtggctcctcgagcaaaaatgaaccagcagcgtgggaggcgttttaggtcagcaaaggaggcagaagacaaaattaaaaaggcaatagagaagggagaaactcttcctacagaggccagatttgattccaactgtatcacaccaggaactgaatttatggccaggttacatgaacatctgaagtattttgtaaatatgaaaatttccacagacaagtcatggcaaggagttaccatctacttctcaggccatgagactcctggagaaggagagcataaaatcatggaatttatcagatccgagaaagcaaagccagatcatgatccaaacaccagacactgtctttatggtttagatgctgacttgattatgcttggattaacaagtcatgaggcacatttttctctcttaagagaagaagttcgatttggtggcaaaaaaacacaacgggtatgtgctccagaagaaactacatttcaccttctacacttgtctttaatgagagagtatattgactatgagttttcagtattaaaagaaaagatcacatttaaatatgatattgaaaggataatagatgattggatttgatggggtttcttgttggtaatgattttatccctcatctacctcatttacatattaatcatgatgcactgcctcttctttatggaacatatgttaccatcctgccagaacttgggggttatattaatgaaagtgggcacctcaacttacctcgatttgagaaataccttgtgaaactatcagattttgatcgggagcacttcagtgaagtttttgtggacctaaaatggtttgaaagcaaagttggtaacaagtacctcaatgaagcagcaggtgtcgcagcagaagaagccaggaactacaaaaaaaa

SEQ ID NO: 552382 - DNA, 922 bp, Homo sapiens
agcgggagtcatatgaagacacttagcttcagggaagcctgagaactttctaacctacctggtgtcagaaggtcagcaaaggaggcagaagacaaaattaaaaaggcaatagagaagggagaaactcttcctacagaggccagatttgattccaactgtatcacaccaggaactgaatttatggccaggttacatgaacatctgaagtattttgtaaatatgaaaatttccacagacaagtcatggcaaggagttaccatctacttctcaggccatgagactcctggagaaggagagcataaaatcatggaatttatcagatccgagaaagcaaagccagatcatgatccaaacaccagacactgtctttatggtttagatgctgacttgattatgcttggattaacaagtcatgaggcacatttttctctcttaagagaagaagttcgatttggtggcaaaaaaacacaacgggtatgtgctccagaagaaactacatttcaccttctacacttgtctttaatgagagagtatattgactatgagttttcagtattaaaagaaaagatcacatttaaatatgatattgaaaggataatagatgattggatttgatggggtttcttgttggtaatgattttatccctcatctacctcatttacatattaatcatgatgcactgcctcttctttatggaacatatgttaccatcctgccagaacttgggggttatattaatgaaagtgggcacctcaacttacctcgatttgagaaataccttgtgaaactatcagattttgatcgggagcacttcagtgaagtttttgtggacctaaaatggtttgaaagcaaagttggtaacaagtacctcaatgaagcagcaggtgtcgcagcagaagaagccaggaactacaaaaaaaa

SEQ ID NO: 552383 - DNA, 153 bp, Homo sapiens
tgttcacctcggtcagtctgtgcctggtgcttgtacttctgtgtctccctggtcccaactactcctggcccctacctgctccaccacacggcgtgtggacctgcaatactctggtggtggcctttttttgtattgtctatttcataatcttgc

SEQ ID NO: 552384 - DNA, 344 bp, Homo sapiens
agcggggcggagccccggcggggcgttggtttcggttggccctgactgggattagtgttgacgatcgaaatgggagtccccaagttttacagatggatctcagagcggtatccctgtctcagcgaagtggtgaaagagcatcagtggtgagcgaggggcaacgctcagaaagccgagacccggggctccgcgggccctctccaccttagaagcttgggggctttttcgagccaacctctttttccccctcgtcgtcttggaacgaatttaattgggcaatttaagggaaagggggggaaccggaaaaaggttttttaaggaacgccccccgggttttccccggg

SEQ ID NO: 552385 - DNA, 1678 bp, Homo sapiens
  misc_feature (1)..(1): n is a, c, g, or t
natcaactacgaagtggggatgagtacaccacgtcgtacgggttgcgagcatagttgctcgcgcggctcacacacgaaggggatggttcagagagtatgctgtggcgtgccgcagaccacagaaggatcgcccgagtgttgtaagaaagccgtctctgctaagggcggcgccgtcgcatctggcctcccccctcaaatggggagcacgtggtccccccaggggaacaaaggggcaatcaggttagtgttcgtcaaagaaggggggtaacttcccctccccccagcattggggacgaggtcccccttccacgcgctcccgcgggctccacgaaacagtctgaagagggtcgttcgtgagagaatagcccacaagacggagagaaggtgggggccaccaagtttgtggaagagacaccccgtcgtatgctttctcttcggggggagcgcgtagcagcaccagtgtgggggagaaaaatacacataggtggtgtgtgtactacccagcggggtgtttattgtaagcaaatgtcgcccgagatgagttttggtgcgtatgcacacgattaggtgtgtgtggtcttgtgggttgtctaacaaacagcgttattagtttgggttttagagcagccaccacggggaaccacgcgtagtcacatgtggttgtgcttttttttttgggggggggaaaaggggggcactatatagtgtcccctcttatattaaggaaatggttgtctccgcgcaaaagagcttggggcattttgtaaatatctggggggagggagaacaaacaacccccgctggtgccgcgcttgctgtctagattttttttggagagagaaacatttcccctcgttttggggggctctccccccgcggaaagagtaagagggtatatgttccccccggagacttgtggagacacacacacacgggggcccacccactctggggaccacaaaagcccctctgtgtggggtattaagagaaaaaccacaaaaatttgttgttttttaaatggtccctcgcttttgttccccccttgtccaattcgttttcacagccacatatagagactttatacctctcccttatggccccacgaacacatttctgtgttgagagagaccctgagcccctctatggtcactttggggttaaccacgcgggtgtttcacaggcacaattttggggacattttctcacgcgggagatgtcccccttgagagagatggcacacctcgtgtcacaaaagagagcacgctgggtgttcacatttgctatagagtttgtgggatattctgtcacagagtataatattctcggccacacttttcacatgttcacactgttcctcgagaaagttcacagggtgcgggctttgtggagaaaagttggtgtaaacacacacacaggctaaaagtggagaaagtgcacaccctccacactttataactttgtccccgtgttcacgaggcactcacgatgagagactttcacttgggtgtttattaagtgggctttttgagattttgggtgagtgccctctgaagaagggagtttgtaaaattgttggtatactggtaacgagttgtctgccccagtcctgcctggaataccctgattgtttatgggaagtatctttaatataaagctggagaacccatttggcgttggg

SEQ ID NO: 552386 - DNA, 549 bp, Homo sapiens
  misc_feature (517)..(517): n is a, c, g, or t
atgcccggctaattttttgtatttttagtagagacggggtatcaccgtgttagccaggatggtctcgatctcctgaccttgtgatccgcccgcttcggcctcccaaagtgctgggattacaggcatgagccaccgcgcccggcccaggtgcatcctcttaaacagctcctacctaggagacgaggttttgccatgttgccaggctggtctccaacttctgggatcaagcaatccttccgcttgagcctccaaagtgctgtgattgcaggcgtgagccaccgcgcctagtttaggttgagcagcgaaagggatagggcccagtgctttctctgcgaggttcagttggcctgtccctgtcctatcaccgtttgtcaccgtttggggagcgccacggaatgccctgtctccaatcgagaggtgcactcgtcgccctggcaacggagtccggaagaaccacagagacgcggctccagcgtacagagcggccgccctgggccagcaaggcaccgagcgctanagaggcacgtctagtcgattgtcacgtggcag

SEQ ID NO: 552387 - DNA, 985 bp, Homo sapiens
gactatgcgtgtcattcacgtagccctcggaaaaagctggccctcacaccctagcctgggcgacaagagcgaagctccgtctcaaaaaaaaaagaaaaagaaacaaaacaaaaaacttcccaaggacccaagggacccattttcctctctatctgcctaaaataatttcttaataactcctacaacattcccccctgtggagatgccacactaactggctgttagggagtttggggcgacgactccttctggctacttcttgttgcaaaagggcgtcgaatggggaagagcagctagggctcctcctggggtcaatctaagggtcctcagaagaatgatgtgtctatgtgtggttctgtttacagcaccattgggagttcggatggcttctagatgagaagaaacaattcggagtcatagtatggtgtatacagggtccaaatatcaatacaagacacataagcaagagagggcttaataaaggggttaaccaattccataacagaagactggaatttattacaagaggcattgtagccactcggggatcactaattggatatgatttctaaagtactggtagatcttcttttaactagaggcattaatccgaaagcagcatgtcctcattggacaactgcatcactaaaaacccaatacaacagtcccaagctggaacaacacaccagacaacacaacaacacaaacatgtgtcggacggacagagcgccccaaagaaaaagtacgaagcaacaaccgcagggggcacccgggcaccccaagacagggaaggccacaacacgggcgccacagaaaggacacacgcagagacaacaccgggctgacacaaaacaggcaaggacactcagccgacaacaacaaaccgcgggggcacaacgagacgctagataaaacaacacagcagagacgagagacaaatagcgggatcaacaagaagaagtcaagcaaaccgagataaatgcga

SEQ ID NO: 552388 - DNA, 571 bp, Homo sapiens
gaggacgaagcagtagaagactcagaaagtggggtttacatgcgattcatgaggtcacacaagggttatgacatcgttccaaccagttcaaagctggtgggctttgatactacattacaagttaaaaaggccttctttgctttggtagccaacggagtccgagcagcgccactgtgggagagtaaaaaacaaagttttgtaggaatgctaacaattacaaaattcaaaaaaaatactacatagaaactataaatcacctatgggacagatttatgaattagaggaacataaaattgaaacatggagggagctttatttacaagaaaacatttaagcctttagggaaaatatctccagatgcaagcctcttcgaagctgaaaactcccggaacaaaaaaaaaatccacagattgcccggtatggaccccaacagtggggaaggcactttatatacttaacccacaaaaagaatcctcaaggtcctcccaggttttatagactggaaatgccaaaaccctgccttcatgaaagcaaaaaccgggtagaaccttgggaatagggacctaaccca

SEQ ID NO: 552389 - DNA, 467 bp, Homo sapiens
  misc_feature (41)..(41): n is a, c, g, or t
  misc_feature (160)..(160): n is a, c, g, or t
  misc_feature (381)..(382): n is a, c, g, or t
caaggctaatatccattagttatagccggtatatttcaccntacactaaatatggggcattttaaaagaagattccccccttcccccccggaaatctgcatttactaaatttgtcttaagtccagttgtgtttaaaggtcatgctggtcgggtgtgggtngcacgcctataatcccagcactttgggaggccaaggtgggcagtcacctgaggtcaggagtttcagaccagcctggccaacatggtgaaaccccgtctctactaaaaatacaaaaattagcttggcatggtggcgggtacctgtaatcccagctgcttgggagtgtgaggcaggagaatcgcttgaacctgggagaccgagtttgcagtgagctgaaaacnngccattgcactccagcttaggcaacaagagtgaaactctgtctcaatcaatccatcaatcaatcaataaaatagaggtcatgctg

SEQ ID NO: 552390 - DNA, 273 bp, Homo sapiens
ccgagtctaaaaatagccgacgtttgtgacctagtgttatataatatttattactccttttcggagtttacctgaaactgattgacttggcagtcaattgtactaccttaatactaaaagagtaggatcctcatcactagacttgatacgtaaaggcatagtcaaactacatctacgaagtgtcagtatcaggctgcggcttcaaatgccgaagtggtgtttggctgtgacagtggaattttacgttgtcgtagtaaggcatacttgctagga

SEQ ID NO: 552391 - DNA, 1012 bp, Homo sapiens
gggccgaggtgtggacacgcagatgggcctgtctcagtggtctggtgtacatgagagaagggggcctgagtgcagagccagttggtggcagtgcatgagagaagaggaggagtgaggaggaggaggaggctgagtgctggagaggagtgctgtcccgaggaagaaggccccatgtagtgctgaacccccagccgagccttgtgctacgaggagatccggaacggcgagagtcggtcggaggcctctggctgtgtggatggagctgggaagcctggggctgagggaggctcaggagccctgacgggaatgggagaacaggagcactcccagcagaaagaggaggagttgaggagatggcagtggtcccctggaaaggcctcttccgaggtgggaaagagcggacgaagctggctgcacaggacggacggagcgtgctctccaatggaagtgggagagaccctccaacagctggtacgccaagataggaccaagctggccagagggaagcttgacgtgaatgacaatgcggccatgaaggagcagtgaagacgagcgcggatagacaatgcgcgggacatgtacccactgaaggtctaactatcgggcggccccggagacctaggagctaggaggggccctggggccgcaaatgaagacgaagtggctgagaggggccaatacattccccggtgaaggagcagggcaattgtaacagcgaggctgcccatccaggttccgagaggaaccaccgacggacagaaagaagcagagggagggcaggcccgagcacaccagaaggaccagaggaccaagaacagcagagctgtgggcagttgacgcacactcgagaaggggaccacaagtggaggacacggacggtccaagaaacggtggagcggtagcccaggagacgtagggccctgttcaaaggacatagaaggtcagccgatgaccaggacgaccgcagagagcccacacgccagaaggaaagaggcaacggaagacaacagac

SEQ ID NO: 552392 - DNA, 546 bp, Homo sapiens
  misc_feature (240)..(240): n is a, c, g, or t
  misc_feature (305)..(306): n is a, c, g, or t
  misc_feature (314)..(315): n is a, c, g, or t
  misc_feature (319)..(319): n is a, c, g, or t
  misc_feature (329)..(329): n is a, c, g, or t
  misc_feature (331)..(332): n is a, c, g, or t
  misc_feature (336)..(337): n is a, c, g, or t
  misc_feature (342)..(342): n is a, c, g, or t
  misc_feature (344)..(344): n is a, c, g, or t
  misc_feature (352)..(352): n is a, c, g, or t
  misc_feature (357)..(357): n is a, c, g, or t
  misc_feature (367)..(367): n is a, c, g, or t
  misc_feature (372)..(373): n is a, c, g, or t
  misc_feature (375)..(376): n is a, c, g, or t
  misc_feature (399)..(399): n is a, c, g, or t
  misc_feature (403)..(403): n is a, c, g, or t
  misc_feature (407)..(408): n is a, c, g, or t
  misc_feature (427)..(427): n is a, c, g, or t
  misc_feature (440)..(441): n is a, c, g, or t
  misc_feature (448)..(448): n is a, c, g, or t
  misc_feature (457)..(457): n is a, c, g, or t
  misc_feature (471)..(472): n is a, c, g, or t
  misc_feature (478)..(479): n is a, c, g, or t
  misc_feature (482)..(483): n is a, c, g, or t
  misc_feature (495)..(496): n is a, c, g, or t
  misc_feature (501)..(502): n is a, c, g, or t
  misc_feature (504)..(504): n is a, c, g, or t
  misc_feature (508)..(508): n is a, c, g, or t
  misc_feature (525)..(525): n is a, c, g, or t
  misc_feature (534)..(534): n is a, c, g, or t
atggaaatgaggaaagaataatattaactgatttcaaaagaggacttgaagatgtgaatcatctattttgctgaagaaatcttaactctttgaaattactttttattgctgtgtcatactcttaggtgccaaactgcggtaaattttttatcagtgaagtggaagcatgtgtttcgttttggaaatttttatcaagtatcttcagagaagattatttcctgctttatcttcagaaactgnaaagggtcaaagaaaagacagtagctggccggtcgtggtggctcatgcctgtaatcccaacactnngggaggcnnaggngggcagaccntnnggtnnggagntngagaccancctgnccaacatggngaaanncnntctctactaaaaatacaaaaatnagcngggnntggtggcacgtgcctgtantcccagctactcnngaggctnaggcagganaatcgcttgaaccnnggaggnngannttgcagtgagcnnagatnncnccantgcactccagctgggcnacaagcganactccatctcgg

SEQ ID NO: 552393 - DNA, 314 bp, Homo sapiens
ggctacgtgcccacctcttacctccgagtcacactcaactgaaccccaccagagggggacgaggggcaggctgtcagctgctgcttctgggccacagggggggcccccaggaccttgcactttattcctgcccacgtggcttttggctgagacctgtgtaacctgctgtccctcactcacctgtcacctgtcaccctacggggacccacttgtggcttcccacgtggttgtacatatttgtcatttaagatctttcttcccgccgcttggcttgagccaagtttgttttatattaaaaaagtatatataattat

SEQ ID NO: 552394 - DNA, 156 bp, Homo sapiens
  misc_feature (94)..(94): n is a, c, g, or t
ggatatcccgaccgaggatgtggaggtattttgatgttggactgcataatttcttaatcaggtatgtgtacattccagtgggacgggtcccagncatggcctgctggtggacacgtgttttccacgtgcgatgacatttgcatttcgtgagctact

SEQ ID NO: 552395 - DNA, 344 bp, Homo sapiens
ccggagattccggacattggccatctcggcgacggtggctttcagtctcgcatggtcgaccgtcaatccgagcgaagcggcctgcgcaaccgaacggctttggcttcatcacgacgttagcatcgatctcgaccagagctcccttagacacattagccatcgaccggaatagcgtgctggccggcggctccccgggaaaagattttgaggcaggcgtgtcgtgtacgtcgcgcatcgaggcaccatcaatcgccgacacgtagacccggaaaacgaacgatatctgtgaactgaccgctttcgtgctcgatgatcttcttgatgttcgcgatggcggtcggcgt

SEQ ID NO: 552396 - DNA, 102 bp, Homo sapiens
atcctgttgtgacgctgttaggatccagggcgtacaggactcaggaagcagataggaaaatgattatagggcgtgatcattaaaggtgataagctcttctat

SEQ ID NO: 552397 - DNA, 809 bp, Homo sapiens
tcgattcatgttggttatggtcggtcatcttgtgccttgcttctgttgtctgttcatttttccttagatgttgcattttatcctgtgtcttcatcggtgtgtgcctcaattgtctttatccctgtcctctgcctctggggtctcttctgcgtctccatctcctctttcatgattgttcgcttctccgtgtatgatttcttcctgtgtttggttgttctttttgtgcgtgtgacctccgtgtaccacgtgcctttgggttactgtgtcccccagcatgctaccagctcttcacagtgtcccttcctttccctaccttctcgtacgattttctatgaagatgttgattctcatcaaacatgtctatgtagtctattgcgctagtgtaactcttggagtacgcgtgtcttcctggggactatctattatggaactcgctgttctcataggtattgagcctgtgacgctgcttgtatcgtggctctctttagacagattgtatatctccatctggaaagccatctcaaccatgttgtgcacttgtccgtctgttactcatttgtcttatcaggcggctattggcagacgggtctaaatttagtggcttcagctgtaggtaagtagatataggcatagagctagattttgcttcatgtgatcttttccaagcttcaactctaacttaactacatttctctgtatgatgatgtctcttactttgctacaggttcctcgagcaccaaagatgattcataactctgtataggtgtcagctgcttatcttagcatcttagcattaccagccgggtaaa

SEQ ID NO: 552398 - DNA, 144 bp, Homo sapiens
attagatttggtattatacttgtaggtttgtttctgtgtgaaattgtattcgaatggggagggaggtgcatgggtaatcagtgcttttgaaggtgaatttccttgctgtgaaataggcttgggttactggtcaggacaaccatt

SEQ ID NO: 552399 - DNA, 150 bp, Homo sapiens
  misc_feature (109)..(110): n is a, c, g, or t
tcctaggatggaactaatcttctaaataagaatacgctctaagatgttttacagctaaaagctccatcaagactttttcacaacgtgttagtggaaccaaaaaaaccanntaactgcattccaggtgctgtaataaatgcttaccactgc

SEQ ID NO: 552400 - DNA, 184 bp, Homo sapiens
tcattgtgacagagacacacatggggaacgaagtcactgtgaagacgaggcgagattagagtaatgagctacaaggcaaaagacactagaggcaccagaatctttaagaggtaagtaagcacttctcctgttaagccttcagagggaatgtagtctttccaacaccttgtatttcgcggcgggg

SEQ ID NO: 552401 - DNA, 808 bp, Homo sapiens
  misc_feature (559)..(559): n is a, c, g, or t
gtgtgacgtggatgtgagacatggagtcaaaggagatcatttcggagatttaagatttaaatgccctgctggattttggacttggatggggcctgtagcctctttgttttgaccaatttctaccattcagaacagctgtatttacccaatgcctttacctccattgtagcttagaagtaactaacttgcttttggttttacaggcttataagcagaagggacttgccttgtctcagatgagacattggactgtggacctttgtgttaatgctgaaatgagctaagactttgggggactgttgggaaggcaagattggttttgaaatgtgaggacattagatttgggaatggccaggggcagaatgatatggtttgactatgtccccatccatatctcatcttgaattcccatcggttatgggagggacccagtgggaggtaattgaatcatgggtgcaggtcttttccatgctgttctcgagttagggaataagtcttacgagatctgatggttacaaaaaggggagcttccctgcacaagcattcctctctttgcctngcacatacataagatgtgactttgtcctccttgccctctggcatgattgtgaggcttcccagccatgtagaattgtaagtccagttaaaccttctttcttttgtaaatttgccagtctgtgggtatggtctttatcatcaggcatgaaaacagattatacagtgtgacctcctaagctaactaatttacaaatcctaagaatgctaaccagtaatacttggtgctaaaaatatgttaattacttatgag

SEQ ID NO: 552402 - DNA, 106 bp, Homo sapiens
ttgggcacgaaatctgattaccgtcttctctagctcggattagcaattatacatgctattcaaagtcatatgagaagtaagaccatttccttgggcaggtatctcg

SEQ ID NO: 552403 - DNA, 574 bp, Homo sapiens
  misc_feature (555)..(555): n is a, c, g, or t
  misc_feature (568)..(569): n is a, c, g, or t
ggggggttgtgtgtgtttttttttttttcttcgggggaaaaggggagaggggtgcctcccaaaatatatttttgttgggggcgggcttttctttttttccccccttttttttttaaacccccccgccggtttttatattcccccccccccccgggggagggggggggggggggccccccccccccccttttttttttttttttttttttttttaaaaaaacaaaaaacatgtttttttttttttttttacaacacaatttttttttttccccccctttggtggttttttttttttttttaaccaaaaaaaacaaggggggtgttttttcccgggggggggcccctttttttaatttgttttataaaaaaggggggggggtggacccccttgtggggcgcaaaaaaattttttttttaaaaaaattttttggggggttctttttttccctttttttttgaaaaaaaaaaatatagaggcgctgtttggaaaccccaaaaggggatctggcccgggaaaaaaacaaccccccaaaccaagaaggcccacccaagtcnggaacgcagccanngccca

SEQ ID NO: 552404 - DNA, 150 bp, Homo sapiens
caacttcccagaatacccccaaggaggccaaccaggccattcaggtggccagcactgttcctcctggcttccacagctacattgctgaggcaacggacttgggaaggcgactcttcctactacctcaactctgcccagccttcactcttc

SEQ ID NO: 552405 - DNA, 616 bp, Homo sapiens
  misc_feature (442)..(442): n is a, c, g, or t
  misc_feature (536)..(536): n is a, c, g, or t
  misc_feature (549)..(549): n is a, c, g, or t
  misc_feature (587)..(587): n is a, c, g, or t
ggcatgtgcctgtagtcccagctacttgggaggctgaggtgaaggatcactttgagcccgggaggagtttcagtctgcagctgcactgagctatgaagctgccactacactccagcctgggcaacagaacaagaccctgtctcaagaaaataaacaaacaaaaaaacccgaaagaatagaaaaggcactttgggaggccaaggcgggtggatcacctgaggtcaggagttcgacaccagcctggccaacatggtgaaaccccatctctactaaaaatacaaaaaattagccgggcatggtggtgggcgcctgtaaccccagctactcaggaggctgaagcagaagaatcacttgaaccagggaggcagaggttgcagtgagccgagattgcactgctgcactccagcctggacaagagtgaaattccatcttaaaaaaacanacaagagaatatatctctgtaagaagaacagtgcagggggtgggagtgggacactgatttctacctatttagatataatccgtgcttaatgcangacctaatgaggntagtgaggcctgagcccacaagatccctctccaggaantcgcaagttaggtcgccaccctttgtggg

SEQ ID NO: 552406 - DNA, 350 bp, Homo sapiens
aacaatcatacaacaaactgtcaccaaaaaaaaaaacaacacaccccaggaagtaggtacaagttactctacgaaaaccgcctcaaccagcctcaacgattgtaaacacaaataagattgatctgcattagctacttcggaaaactccgtcaggtgacacgtgttacctcacaaccaacccccaaacccacaaccccaagaagaacaaccaaacaccaacacacacaacaaacaaaaagccagagaaggtgtgcgtaaccccccttgtaaaaaattattttggaattacaaagccacgacaacgaaccttcgcgtaagcctcgcaaagcgctgtgccccacaaatacaag

SEQ ID NO: 552407 - DNA, 1012 bp, Homo sapiens
gccaggaagctcagagtatcgaatcaaatctatgaatacgacaagaaacagtcagtcatagaaatcctggcggcgaagccgtgaactaaggatcaccattactttaagtactggcaaaatctcagcattggactctgctgcaagatggtgatgcatgccaggatcgggaggcaacttggaagtgatggctctgcattgctaggaaaatggtgtgatgagtgaaaaccgatgtatcgatatattgtgactagtatttgctttgccatagtgcgccagggcaacttgataatccggagctaagatgctcaagcgcgtgcgtgcacatcatgaattacatggcttcgctctcactattagcaatcatgctaataactagtgttgggtccagcctttgaagaatgcaaatcggggtgggttatcattagcactaccctgagcttatggggcttgcaaggcgattatccgtgggaattgaatgttaagctactcagtattgcttcaatcaatgcagtgtctctagggcaaccactttggtaagccagttgggtggattgattccaatatctaatgtgaaccaaatatccgggcagggaaatagctgaaactcttgggcggccatttaggtacaatacccaatagagggcgccatactaaaacgctttccttgaattggaagggacctatcttgaagatactccaggagctaatttccaactataaatttaaaagagctagaaaggaattcctggttgtcaccatctgggtaagaacgcacttattgtattggccctctacaaaggctcttcatttatttgtccaaaattccctaccttctggcgaattccggcgcgacattcggctttggactggctggtccgtggcacaatcacaacatagcgttggggttggagaatacctgttggagtttcttacttaagcgttggcgtttagcctaaagtggcgggaccaataaccaacttggtccgcggtctcctggagttgggccccggaa

SEQ ID NO: 552408 - DNA, 149 bp, Homo sapiens
atgggctggtgccacatttagttgctgggcagtttcttgggggcacataagggttggcttgctctggggaaggaattcatgaactcctcaagggtctctccgagccagagctcaagaaaggcccaggcagaagccaaacagggagggat

SEQ ID NO: 552409 - DNA, 390 bp, Homo sapiens
  misc_feature (372)..(372): n is a, c, g, or t
ggaattctgatgcagactttccaaaattaatgaaaaatttgtacagtttaaacaacagctgaaagaactaaagaagcaatgtaagtcaacatgctttgctttggttcggctttttgaaattagggaactgacttgatgaacagccccagttaactgattttataaagtttgcttatctgcttggcttgatcctcattctaagttgcgttttattgttgttgcaattctgtattttgtctaatttttggttcaaatcagcctgctcatttctgaaagccaacagtttccacaaagtgctcagaaaatttcccagcagctagttatgtgtattgtcacattgctggggagggaaattgggaaaacaaaataaangtgaaaactattttattt

SEQ ID NO: 552410 - DNA, 362 bp, Homo sapiens
tgtcgtccttctgcgccgagcaccaactccatgtacaggcactatagcttccatgttgaaagacacagtgcttgctctctaggaacgtggatccagtggaactatatgggggcaagtgtgtgtgtagccatggagaggtaccagctatgtgggagcgtggaggaaagagggaggataactttaatcatgacacactgccaatattagaactcccttttggccaggcgcgatggctcacacctgtaatcccagcacgttgggaggctgaggagggcggaccacgaggtcaggagatggagaccatcctggctaacacggtgaaaccccgtctctactaaaaacacaaaaaaaactagccgggc

SEQ ID NO: 552411 - DNA, 180 bp, Homo sapiens
  misc_feature (89)..(89): n is a, c, g, or t
  misc_feature (97)..(97): n is a, c, g, or t
  misc_feature (104)..(106): n is a, c, g, or t
  misc_feature (111)..(111): n is a, c, g, or t
  misc_feature (113)..(113): n is a, c, g, or t
  misc_feature (120)..(120): n is a, c, g, or t
  misc_feature (124)..(124): n is a, c, g, or t
  misc_feature (129)..(129): n is a, c, g, or t
  misc_feature (131)..(133): n is a, c, g, or t
  misc_feature (135)..(136): n is a, c, g, or t
  misc_feature (140)..(140): n is a, c, g, or t
  misc_feature (145)..(145): n is a, c, g, or t
  misc_feature (148)..(149): n is a, c, g, or t
tcatctagagtactatattccaaccctatctcaaatgcaggaatgggctctatctggtatctagaggatgatcataggaaacaaaatgnggacagangcatctnnnatctncnaaaacgncganaaaangnnncnngcgnagcgnagnnacagaaaaagagccgcagcacaaaaaaagaa

SEQ ID NO: 552412 - DNA, 869 bp, Homo sapiens
ggaccttcagacgttgccctggcggatgccagagtacaggccctcgggtgtggaggtcttcggctgtcagtaagagcctgaggagagattctttctaatgatattgtgtaacacaccaacagtactgtgacctatggaaaggctgctagggtatgtcttcacacgacaaggcatatggctttggcgtggtcaagatagacctgataaaccaagtcttgtagtgcagtggacttttctacttctggtcatgcttacactgatacagggaagagcgtcaggcaacctatgaaaccaaatagtaacggtctgtaactatggagcttatccttgcacccagaatatgggacagagacaatactctagggacagaaatctcttgggagaataagttggctgaagggttgaaagtgactcttgataccatatttgtaccgaacacaggaaagaagagtgggaaattgaaggtctcctatagaccgggattgtttagtgttggcagtaatgttgatatagatttttctgggaccaacatctatggtggggtgtgtcggcttcgaagggtggttgctggtatcagatgagttttgacacagcaaatccaaatgtcacagaataatttcgcctgggttacaaggctgcggacttccaggtgcacacacatttgaacgatggcactgcattttggaggttctaatctaccagaaggtgacatgacaaagatttgaacatccataaacctttgtttgggacagctgggaggtaacaaaacccgttttgggcattggtggtaaaggtaacttggctggatttgtttgaatttttcttactggttaaaggtaattaattggcaggctgaattgggtttgtgt

SEQ ID NO: 552413 - DNA, 573 bp, Homo sapiens
  misc_feature (532)..(532): n is a, c, g, or t
gtaacacagtaccacaacctgggtagcttaaaacaactaatagttactgtcttacggttgtggaggctagaaatccaaaattaaggtgtcagcagggccatgctccctttgaaacctgtgggggaacatgcttcgttacctcttccagctttggtagtttgtcagcaatccttagtaagttcctggcttgcaggaatctctccctccaatctctgcctccgttttcacgcagccttctccccatgtgtctctgttcacatctccctcttatgaggacaatagtcacactggattagggcctaccctgagagactcatcttaacttgactacatcttcaaagaccctgtttctaaataagatcaccttcagaggtcttggggcataggacttccacatatcttttgggggaacacagttcaacccataacagtgagtgttggagaatggtgagcagaaaggcccaagagcatagtgtctttctatgatcggctcattttttttttttcagtgcaacctatattttagttattntgggaacttgaacttgtgcttaatcaaaagcaaccccaaca

SEQ ID NO: 552414 - DNA, 272 bp, Homo sapiens
gcctgtcgagcgactggctgcttttgagctgcttgcctcgggagggcagaagctgtccgaggacgagaacctgccttgaacgagtgcgggctgtgccctctgccctcctaccttctcgtggacatggctgtgctggaggacatcaaggccgcgtgggccgaggcatcggagccagcgctgtgtgcgggcacatccggggataccttggagacccttgaggagcgagagggcagcggcgtccatcccttcaaagcggactttgttggcggaac

SEQ ID NO: 552415 - DNA, 440 bp, Homo sapiens
ggaaaggacgctgtactgggtagttattggtcaaccaattcacttgtatattaccgtagacgaacaaggaaacgttactatgtgagtcatacggcatttgtacgagtaactggcactttagggatgcaaacgtgaaatacgacatgttacttcttgttgatgtgagagtggtgcaagaatgggattatgtatagtctcaggatataaactgggaacatatctaagagaaagtttggggaggtaggttggtaattttttcttttcttggcttaggtaaatgatggggtggcccagatgtagcagtgaacagttactgcaactatggacataatggcttctcagtgtgtgtaagagggagatgctcattggtaatgggatgtctttcttttaaaaagtcatacacaagtctgccaggtatgacacggtatgaagagtcatta

SEQ ID NO: 552416 - DNA, 246 bp, Homo sapiens
  misc_feature (14)..(14): n is a, c, g, or t
  misc_feature (86)..(87): n is a, c, g, or t
  misc_feature (225)..(225): n is a, c, g, or t
cacaatggcagcancgaggccaccctgccagcccagatgagcaccctgcatgtgtctccaccccccagcgctgacccagccagacnntcccgcggagcggacatgcagagtcgacctgggctccgaggtgtacaggatgctgcgggaccagccgagcccgtggcgcggacccaagcagtcaggctccttccgctacttgcagggcatgctagaggccggcgaggncggggattggcccgggctggc

SEQ ID NO: 552417 - DNA, 302 bp, Homo sapiens
cacgaggctcaccaacatctactgtctggtagcgatcggaggctcagacaacttctacagtgtgttcttgggcgagctctccgatatcatctccgtggtgcacgcgtctatcgccggctgccgcatcatccggtgcatgtgtgtggggaacaggcacgtgtctcctgggacccaacaataccaccggccaggagctgtaacacattcgacaaagtctcccagacacagtgcaaattaggcgggtggtggagcggctctcaaccttgggcaatgttaccacctgcactgactacgtgggcttg

SEQ ID NO: 552418 - DNA, 181 bp, Homo sapiens
gatgctactggcaaagcctccgatagctgggataaggtgctgcgacgcacccagctaatttgcagtagtagagataggggttcaccacttagcaggtggctcgaactcctgacttgttgatccaccctcctcggctcccacaagtgctaggatacagtgtgagaacccaacccgagccccc

SEQ ID NO: 552419 - DNA, 369 bp, Homo sapiens
  misc_feature (139)..(139): n is a, c, g, or t
  misc_feature (158)..(158): n is a, c, g, or t
tacccggggaaaccccccctttggggggggaaatcccccgagtccagtttggcactagtgacaaggactcagacttacgcctagtggtaggagacagcttgaaagcagagaaggagctaacatgcgatcgagattcgancgttgggcaaagggcgggncccacccaaagtttatccgccagatggaagttagctcagcgagactagggagctagcttcaccatgtgctaggcttggccccctttccctttgggccccttggggaaaagggcccccccaaaaccaaaaagtttccccgaaaaggcaaaaccccatggaattctgggcactgtgtcccggagcccagctcctcaggccagcgcctgtatcc

SEQ ID NO: 552420 - DNA, 288 bp, Homo sapiens
cccagccgggaagtacctttaattaaattttgggaaagttgaaaagtttttccagcttgaatttttgcaaaaaaaaaaaaaaaattttaccattctttccagtggttgggttctttaacaattgaactgtccagggggtgttttttcaaaaagttttgataaaaaggggaagggttagtaaatttagagatgacttcttttaagctgcatcctagcccaagggggggccggggcaatgttttgcaatccagtcatccaaaagctgttttttttcccccacccctgaaa

SEQ ID NO: 552421 - DNA, 1189 bp, Homo sapiens
  misc_feature (281)..(281): n is a, c, g, or t
  misc_feature (1027)..(1027): n is a, c, g, or t
gaatgcccaccatgaaggtgtggagaggagcctctttcccggggggacaaatatggggctctcacaatgaccaagaaaaggggcgctagtcacaaagagagttttctgtgcggggaagagccacttgctggggcgcccagccacaaagtatgcgcgccccccccaggggggagacaaacacggggcgtttcaaaaagactaccaggcgagggagatatccccggggaacccatcctcccgggccccataattattaggcccccccggcttaataccccccncgtttagttggggaatagtggccccaagagggggcttctacaaacagttgggcagagaacaaagattttgcttgtagatcttttattagagcataacagaaatttgggatttcgccccgctcttttctgggcgtaaaacatagagctcgtgtaaaaagaatgggccccccctaaaaaatttctttagaaaaggttttctgtgatagatccgcctcgcgcacacatggtgtagataatggggttctcctgggcacaagcccacacacagttgtcgtttgaggagagcgttttctcacagaaccatatccaccccctctttgtggtctcgcgcttttgtccgttttctgggaatatatgaagaccacagaccacagttgtcgcggtgtgcggtgttcacatcacacaaccacgcgtgtgacacacaagaaaagggcttctctctgtagagcctgtgacacaaggggtctccccacagatcttgtcccacgcaaataggcttcacagagagagggcttcaaatggactaattatatccccaaatatcctcggcccaccccaccttcttaatatccacggtgggtgtgaagaaaaccgcgctctctcacggaaacttgtcgtttgtgtttcacacagtggcccaatcttaagagtttataggtatggtataaaggactggttatatagataaacacactaggcacttcgttaaaccctcttcacgaaagagaaagagagaataagttttngtgggaccacctcttggtgttttcttttttggcgctgtggccacgcttttaagattattagattttttaaaaccacgatacattttttatgggacaccacttgtggccccaaaaattgttcaccagaattttgggaccccctttaaaaacatttaatgggga

SEQ ID NO: 552422 - DNA, 881 bp, Homo sapiens
ggctgaggcaggtggatcacctgaggtcaggagttcgagaccagcctggccaacatggtgaaacccccatctctactaaaaatacaaaaattagctgggcatggtggtgggcgcctgtaatccctcgctactctggaggctgaggcaggagaatcgcttgaactcaggagatggaggtttcagtgagccaagatcacaccactgcactccagcctggcaacagagcgagactccatctcaaaaaaaaaaaggtaagaaagaaagggactcccttagaatggggaaagaaaattcataaaatattgagctgatgcctgtatttagaaattaagcgtttctcgaaagcggtctatgtctggcggtaatttaagcctttattctcttcctttaggtggagaaacaaagtaccactttggaagggatttgcaaatttggccttaggggatccggtcagtagaaattaaccatttgtgctaaccaaatttctggtgaagaatgtttccagtggttactccatcatatctaagtattaacttcccccaatagttatgacagagtaccctgaattggccactattggtggcacataggataagtggtaatggtgaacaccactactttcacgggaaattcttacaggttttacctttaaaaagatcactatgacgtggcacctgtgccatttaccctcctaataaccgcttgtccatgtgggtttggcagaacgagattgggttatagttaggcttcaaaaggaaacatatttcaacgggggggtcaagtgggtgtaacagttaaccatagaattccgggaatagaggggacaacgggtggacctttatacttttatatgtggaccgccagatttggtatataaccca

SEQ ID NO: 552423 - DNA, 1078 bp, Homo sapiens
ccatgtccgtccgaattcctcttaaaggttttcggttacttgggataattcctgggcttgccccccaacaaatcccgccctgggtccctggagttccaccggattaccctctttattgaggaagactctccgggtacacccgtgcccggggaaagcctccccggaactaatgtagttcgagaaccccccatggtctcgggaatttggaaaatgtcccagcttatagaccctttggacctttccccttaaattcttggccccccttgaacccctccccctcggggatatggggaataggaacccacagattccgaccccccccgggcgccaaataggcgccatgcgtgtgggcccgctgaactcatgcaggctttccgcgcaagcccacacaaccataaggtggtttgggtggagagaccctcgaggaggataagctaaaaagattttccgcaagttggaccactcactatggaggaaacccccacacgtataatgggaatttgtcccccaccaccacacctgattataaggtctctctcgttaccacgcctctctgagccccaccccgcaaaattcttgtagatgcccctcacctgacactctggaaagaagtctacccctcggacacacctggaaccccattgctgcccacaggttttcttggggaaattgtctccactggtgtttgcccccggggaataaagctgcaccctctgttgtgggattgtttctgcaccctcatggataattctcttggattcacgagacccctgatatgttgagcccccagtggcctcggatgaggtttccccaaacctcgaaggctttgcatgtggccctgtttgagggctcttggaagaaaattccctgcctgacttaccacgtgctggatgccgtgttctggcacaagatggcccatgccaccaccagatggccccactggggccacacagcctgtatgctgagcccggaggcagacttgccgagcttgttttgtttcatcctgtccctaaaggggtcagcgctcttgctttgctcttttccatgaatagcacttatgtaaaacaagaaaaaaata

SEQ ID NO: 552424 - DNA, 169 bp, Homo sapiens
gttcggtaccatgatcgtcaccgctccggccaggtggaggaagaggacgtgctcctcagagcagccggagggaggggggaggtcggaggtcgtggaggtggtttgtgtatcttagcggtctgaagggaccaagtgtgtttgtgttgttgtgtatcttgtttttctgatc

SEQ ID NO: 552425 - DNA, 162 bp, Homo sapiens
tagactctggatctaatgcttgtcagtctcttcaaactgcattttctgccttttaagtatgctttgtaattttctgttgataggtagacatgatacactgggtaaaaggaattgcagtaaacagggctttcatcctgttttcaggtgttggggataacatca

SEQ ID NO: 552426 - DNA, 174 bp, Homo sapiens
ctggcgcgtactgctcgatgaagccctgcaccatctgcccggcatcgtcgggcgtgaacagggcataggctggccaggtggtgcggaaggtatcccagaagccgttgttgacgaacaccttgccatcgcgcacgccggtgaagctgcggcgggcactgccgtcggtgttgtcat

SEQ ID NO: 552427 - DNA, 116 bp, Homo sapiens
ggtactctatcgcgcctctccattaaacccattaacatgcaggctcctcatatgcttcacaatggtgctttacagattctccagcaccagcagcagagcattacgtgggggtaccg

SEQ ID NO: 552428 - DNA, 273 bp, Homo sapiens
ctccctggttcaaatgattctcctgtctcagtctcctcagaagctgtgattacaggcacacaccatcatgcccagctaatttttgtatttttagtagagatggggtttcaccattggccaggatggtcttgatcttttgaccttgtgatccacctgctccagcctcccaaaatgctgcaattacaggtgtgagccaccacacccagccttgttttcatcttttaaaacaatgctatgggaagacttccttgattctgcagatcttgtcgacgc

SEQ ID NO: 552429 - DNA, 477 bp, Homo sapiens
  misc_feature (417)..(417): n is a, c, g, or t
  misc_feature (437)..(437): n is a, c, g, or t
cgggatatttgctgggtctggtatttctgtttttaagtctttgaggaatcaccatgctgtcttccacaatggtcgaactaatttatattcccaccaacagtgtttaagtatttctttttctctacaacttctccagggtctgttatttttttactttttagtagtagccattctaactagtatgagatgtatttcactgtggttttgatttgcatttctctaatgattagtgatgttgagttttttttcatatgattgttggccacatgtatgtcttctttaggtgtctgctcatgcctctgcccactttttactggcgttcttttttcttataacttcaagttccttcttgatgctggatagtagaccttttcagatgcatagtttgccagtattttctcccattctggaggttgnctggttactctggtgacagnttcttttccttggggctatatttttgggaactctttactg

SEQ ID NO: 552430 - DNA, 103 bp, Homo sapiens
gttttttcttatagctgctgcttttgtgtcatcacttaagtcactgtaaggttacttcctacctttgtctatttctatttctattgggagactagacctgaga

SEQ ID NO: 552431 - DNA, 1455 bp, Homo sapiens
gtcctttccggcggtgacgacctacgcacacgagaacatgcctctcgcaccaggatctccttcatccctactaccagaagaggagaatgaggacacacaagaagaaacgcctggtgcagagccccaattcctacttcatggactgtgaaatgcccaggatgctataaaatcaccacggcacacaagacacaatgccacaaacggcagcataaagactgatgatcggcatgcatccacactgacactactgaccagccatacaagggaggcaaaacgcacggacacaacaagaacgcgatgtaccccttcagccgacggcacccgcaaggccacccaaaccagcaacaccccgcagcccacgcaaagacgccagccgcacaacccaagtctccaactcaacccagcaccaccacggcgcatccacacaacacaaaaacacaagacacaccacgaccacgaccacacacacgacacgcactgcagcacagaaccgtgcgccccccacactaccagaaccgcaccgcacaactcagaccacaccgcacacagaaagcacacccccgcggcacccacccgaaaccacacaccgacaaccacaagaagagaaacagaccgccgagaccaccacgcacgcgccaacaaaaaccagagcaacagcaaacacaaaaacaaggaggaagaaaacaacaaagcaaccaccaagacaccaacaacgcaagcgcgccacggagaagaacgaacccacacacagaagacgaaacacgaccgccacaaccacaaaacaagcacagacgaaggcaacgacacagccacaccaacaaccgacacacaacgaaaacaagaagagcacgcaccaccaggagagccatagacagcaacaagcaaacaacaacaacgcaaacgccgccgcaacccgaggaacgacagcaagaaagagaacagaaagaaaaacaaacaaaacacaaacagaacaccaacaaaaaacacacaacacacagccaaccacacacaaccaaaaacaacaagacggacaacgacaaagacacgaacagcacaaagacacaagacaacacaaccgaccaacgacagacacacgcacacgaccacaacagcgagcgacacagcgaacaagaataacacaagagcacaagaggacgcggaaaggacgcaggagcaaggaggccaccaacagtacgcaacacgcacatccacccagcactgccgcagacacaggggcacaacgcaagctcaacacaagagagacggcgacataaagcccaaggacagatagcaccgcgccacccagcacaatgaagaggaagaacgacaaccgaaaggaaaagcagagaggaacaggaacagacaccaacacggccgaaccagggaagaggcgaaggagcaacaaccgagagcaggaaaagcggaacagacaccacagaagcacaaaaggaagcc

SEQ ID NO: 552432 - DNA, 146 bp, Homo sapiens
tggacagcacagaggaggtggacagcacagaggaggtggacagcacagaggaggtggacagcacagaggaggtggacaggacagaggagggcactggcccccaacaggcatcaccccgctaaatcccctagaagtcccactcctcc

SEQ ID NO: 552433 - DNA, 132 bp, Homo sapiens
gtgctgttcgctctaggctgtcagcgtactactgacagcgtagtattactcagcgtctcactggcgatatcttacactgccacgcttatccaaagtagcgcgcacagttccccgcttgatctggcagctgtt

SEQ ID NO: 552434 - DNA, 1947 bp, Homo sapiens
  misc_feature (194)..(194): n is a, c, g, or t
  misc_feature (354)..(354): n is a, c, g, or t
  misc_feature (846)..(846): n is a, c, g, or t
  misc_feature (1031)..(1031): n is a, c, g, or t
gtgtccataggaatggagttccgagttgaggagcgtgagaggtacgactggggaggagaattaaagaactgctaggcattactgggaacgcacgacgcgggtcatgggacaggcgagttgcgtgtactgactcgatctaacctgtgtgcttatcgtagcgtaggtcgatggcgacagaggtcgatcaatggcgngcgatctcaacgagcaaattcacccaaagcagaggcaagatctctctcgcaccaagcaactgctggatagcatgtgactataccggaagacagtgtggacagagacctcatctgacgctccatagtccaggaacgatgcgacgacctaggaattgactanctatgagagacatcaaatgcttgttcgactcgctagatattcgtatcacacgcaggcaccagagttgttgcacactaaggggagagccgagggggacaggagatacaggcctttgggttcccccctacgataccctcaattggggacgactacgacagggttgtcctaaattgtggcaaggaacgcaatggcagacggggagaggtgtcccagaacaaattctaatttgggttgccgaaacgaacaataggcaatattatttgtgcaaactcacttctggaccccccaagcccaagggaaataaaattcgataatccatgggatccaatacaccaacttggggcaccgtagaacacacaaacacatttggggggcacaaccggggggaaaaatcctacaggcgcccccaaccgcaatatcaggggtgtgaaacagctcgaataggcggccggatacgggggagcaccgaccatcccgggatatgagaagacntgcattaccagaacccccctgtggctgcacacgcaccccagtgggtctccaaaaggtacaccacaccgtaacccgagttggtacgcgcgcaaaaggggccatatcttctggttcctactcggcaggacatatccgagtaggattacccatctatttcggattagtgtgtaggaaatcgaagaagnaggccattcgcatcggccggctattctcaccaccgtgcacattggggagtctccaccagtccccagctctccgaaaaggggatccgcgcagatgcggccattggcaaccacttgggtgtggccaccagatagattgttcgggtgggaccagtattcgaaggaagcacccccaccccttacaagccatgccgacggctccgtggcggaggtcacccccttcccctcgaacgcctatacccaaaagaccggagcccccccccaggcgacacagagctagacccggggcatgaggtcccaaagccccaggaggtggtcccacgaacagtagaacccatctccgaaagtaagaagatggccaaaagtgcagggacaggaacaggatttgcgggcccaaccaacttacgagtagagaggtacacacagtagggtcactcgggcgtccctaagatcaagcacacaacatatgttggcggcaggcaacggggggagacccccacggtgtctaaaaaacaacccgcttcggtgcgctacaaacaagtgcgtcacgccgcggggaacacactacgagtctcgatgcgcaagcgcaagcaagatgtgccaccacaaaccggccacaccaaggaatttgctccaactaggtcttccaagcatcgacacgcagagcccacaaggggacagccaacaaaggggatatacaacagcggaaaacaaaacccagccagacccccatagactacgatagcccatgatcacacgtaggaaaccaacatcggacaaaacgcgcaccacaaacagagatgacaacaactagaaccgtacacacacagaacaagcgggcgacgagacgagacacacccagcacagagcagagacacgacaactactcggaagaacaccaaacagaaggaagcgacaa

SEQ ID NO: 552435 - DNA, 332 bp, Homo sapiens
agctcggcccgtcttactgtaatacaggacgccatattggctcgcttggaagcctacttgatctgctctgttgctctaactacgcacagtacagcaccaagctcatctttgccatcagcccacgaaaactggcgccctattcactgtgtcggtaatgaacgttcaactgcgcacgcgtactgtcactggccgaacgttgatcactcaccgagctaggacaccagcgcactgatacactgcttcggcgtcgcaccctagcctgtttcacgcgagtggtgcagttccagctcggtacgattgattactttcaggatcaggaagtcagcgacttg

SEQ ID NO: 552436 - DNA, 231 bp, Homo sapiens
cgtgaggctatcctggtgattgtctactacactcccggtgctggagagagcagcaaaatgaacgatgcttttggtggtggtccttgactgcttcgccagtcatagaaacacaggctggtgtatgtgtctagcttacattccaaacaaatgtcatttcgcatcactgagcggacagatcttcttggcaaacagaattgttctacaaaggtattcgccctgcgattaacgttg

SEQ ID NO: 552437 - DNA, 130 bp, Homo sapiens
  misc_feature (41)..(41): n is a, c, g, or t
  misc_feature (49)..(49): n is a, c, g, or t
ttacatgatacaattcgagctcgtgtacctgaacattcgtngtcaactngacacggagtgcaagaagacattgaatctagaactgctaagactcgtgcccaactgacacggaggacacgaatgttcaggc

SEQ ID NO: 552438 - DNA, 98 bp, Homo sapiens
gattaagaaaatttccagccctttaatggcccattaactgagaatgtaagaaaattgatgctggacaaggcaaataaaagctgtttttttaccttgga

SEQ ID NO: 552439 - DNA, 418 bp, Homo sapiens
  misc_feature (289)..(289): n is a, c, g, or t
aaaggtatttaaaaaactgggggtctaaacaacaagaaattatgtaaaaatcccttgaaaaaaaaggttgtcttacatgggaagaatgagggcaaataatcaggaaaagggggtgaaacatgtaaagtgtatctcatttatcgggtacagttgtgtcaatcggaatagagtactttgggtcatgaatacagaaaagggaggtaagctttcgacagttgtggccctgttcatgggaaattatgtgcacacggtaaaatgccaggaaacaaggccaggtgtggcggctcanacctgtaatccgtgccctgggggaggccaaaggggggtcacagctagagcctaggagtttgcacataccttgggcaacataatgagaccctcactctaacaacaaaaacaaaaagtctgggcctagctc

SEQ ID NO: 552440 - DNA, 202 bp, Homo sapiens
tttttttttttaaaaaggttttaaaggatttaaaaaaaagggggggggggccccccccggatttttttccccttttttggaaaattgaaaacgccgaaaaaatttttttaagggggccaaaaaaaattttggaaaaaaaatttttcccccaaaagtttttttttgggttttggggcttttttaaaaacccatttggggggga

SEQ ID NO: 552441 - DNA, 898 bp, Homo sapiens
agcggagtcccacccgggagccggcagggagcggagctgcggagccgcctggtctcccgcgtccatcggtccattcctgcgtcgttctgtccttccgaacgacacttcaggagcagccgcgagggtggcatggcagcgagcacagacatggcatgggctggaggagagcttccgcaagttgccagtccatgggtgaccccaaagggccagtgggcgaagagatgaatggcaagagaaacgtgggccaagctgtgcaacggactgcaagggtggctgacggaaagtccgtgacagggaccgatgtggacatcgtactactaccaaagtcgacggggaagtctagctcgggtcatcaagctatgagagagtcagagaaggccctggacaggagctggcgaccacagaagattcaaggggaaagagcagcggacggaggccttcgatgccatctgccagctggtggcaggcgaaagagccagaccgaatgtgggcgtcactaaagcagaacccagggggtgctgtagagcggactgacggaccaccaggagatacacagggactgccacaagggagcgcttcgatgaggagcggcaaggggcaaaggcattggcgggaccggcaggacatcctggacgacagtggctacgtgacgccgcctacaagaatgacggcacctacgatgccaagggggaacaagttgaggctggggaaggaccgcctgccaagtgcggatgacactgacaagaggctcaaggctgggtactaaggggacgtggagcaagaaatcgtggtccctttgctgattgaactgcaaccaaaagttctgctagatccacagggatggccagagctttgaccaagtgcataagaccttctctctttcaggtcaatttgcact

SEQ ID NO: 552442 - DNA, 424 bp, Homo sapiens
  misc_feature (48)..(48): n is a, c, g, or t
  misc_feature (399)..(399): n is a, c, g, or t
  misc_feature (405)..(405): n is a, c, g, or t
aaaatagaagtctaagaataactattataggattgtatttggaagaantagaataaagcatgtgaaacaattagtacagtactatatctgtcacattgttgtttaataaattgtgcaagtactcaaaaatggtagctgttattatttgtaatatgaaactaaatatctgattggtagattaatgttaaacatgcatggtccaatatatttctttctttccttttttatatttttggtataaagtctattttcttgaaaattcctgctttttttttttagaaggacaaaagtactttgatttttactgctctgaaaatatttatcccgtaaaaagctttcacattaactttgagtccctggagctagggaggagaagcagcaggatttgctactaagtanagctcnttcatttctaccatcaaaa

SEQ ID NO: 552443 - DNA, 375 bp, Homo sapiens
  misc_feature (126)..(126): n is a, c, g, or t
  misc_feature (270)..(270): n is a, c, g, or t
  misc_feature (277)..(277): n is a, c, g, or t
  misc_feature (338)..(338): n is a, c, g, or t
  misc_feature (349)..(349): n is a, c, g, or t
gactgcccttgctccatcctgtctgaccagcagcccccatccccatccttagtcccctgtcaggcccccctagtcccccaggcctcttccctctctggccccagcccagctttccagtcgtcctgntccagtctccttcactgttcatccctgggggaggtatcaagacagtcgtgctgacccctgtaggaggtagccctgtgcttggtaactcagtgagggtgaggagactcccaggaacagcgtctctcccatgccaagggctccttnacccccnaccacctatgggtacatcagcgtcccaacagcctcagagttcacggacatgggcaggactngaggaggggtngggcccaaggggggagtcttgctgtg

SEQ ID NO: 552444 - DNA, 362 bp, Homo sapiens
aatcttcccggtgcttctgttttccttccctgtgcggtatagcagcgtctcagcgcgccggaacctttgaatgcttgtttatctgtctgtagtcggttgcagttggatccaggcgtgtcctccgggccgggaaggagagcgtgtatagttgtttttcggtctccatctctccaagtgctggctgcaactgcccctcacggtgtttacctcccttctcaccccaccgggagggagcagagcagggtgtccatgggggctgcaggggggttggtgggggacagtagcccagcccacacccacagctccctcctccatccaggctcagagccatgttcccaatgtgaggcccctcgggaatgaag

SEQ ID NO: 552445 - DNA, 806 bp, Homo sapiens
tttttttataattattttattttttttgcctttgccaaaataaggttttattttgaaagtcatttgatgaaagtcatttgaaagacactgaggagggaaggaggcctaagacccaacagatgtaggatccagatctggattcgtgccagccccaccaatggtctgtcaggccaagaaggtgctttctttggtaattcatgttttttaacttcctggagaagagatcttttcccacaagccatcttcattttttttgtagagtagggctttatttccagaaaacagtgtgtgagctggagatgggtgtttttttaaaaacatcaaggtagatctaatatgttcaacaaagtggggtggctcagccagaggcgaagtggaaagattctctagtatttgcttgtcatcttggtgcaaccagaaatccacatgtggaaatggtgtccaggagtacggtcctatacgaagttgttctgtctctgcatcataaatgctaatcattggtcctcctgctaaagctcacgcggcacgcagctgctcctctggacctcgatcttgaaaggaggctctgtaggccaggcacggtggcttatgcctgtaatctcagcattttgggaggctgaggtgggcagatcacttgaggtcaggagtttgagaccagcctggccaacatggtgaaacgctgtctctactaaaaatataaaaattagccaggtgtggcagtgggcgcctgtaatcccagctacttgggaggctgaggcaggagaatggcgtgaacccagggggcagagcttgcagcaagccgagat

SEQ ID NO: 552446 - DNA, 1466 bp, Homo sapiens
  misc_feature (39)..(39): n is a, c, g, or t
aagctgagggcacgtgtttgcggttcagccctttgatgnccgcagcagttttaggaactcggggagaggatgtggatcagctcgtagcctgcatagaaagcaaactgccagtgctgtgctgtacgctccagttgcgtgaagagttcaagcaggaagtggaagcaacagcaggtctcctatatgttgatgaccctaactggtctggaataggggttgtcaggtatgaacatgctaatgatgataagagcagtttgaaatcagatcccgaaggggaaaacatccatgctggactcctgaagaagttaaatgaactggaatctgacctaacctttaaaataggccctgagtataagagcatgaagagctgcctttatgtcggcatggcgagcgacaacgtcgatgctgctgagctcgtggagaccattgcggccacagcccgggagatagaggagaactcgaggcttctggaaaacatgacagaagtggttcggaaaggcattcaggaagctcaagtggagctgcagaaggcaagtgaagaacggcttctggaagagggggtgttgcggcagatccctgtagtgggctccgtgctgaattggttttctccggtccaggctttacagaagggaagaacttttaacttgacagcaggctctctggagtccacagaacccatatatgtctacaaagcacaaggtgcaggagtcacgctgcctccaacgccctcgggcagtcgcaccaagcagaggcttccaggccagaagccttttaaaaggtccctgcgaggttcagatgctttgagtgagaccagctcagtcagtcacattgaagacttagaaaaggtggagcgcctatccagtgggccggagcagatcaccctcgaggccagcagcactgagggacacccaggggctcccagccctcagcacaccgaccagaccgaggccttccagaaaggggtcccacacccagaagatgaccactcacaaatggggaaaccagggtgcagagatttaagacttacccagcctgtaaactctccccttctagtatttgcttgtcatcttggtgcaaccagaaatccacatgtggaaatggtgtccaggagtacggtcctatacgaagttgttctgtctctgcatcataaatgctaatcattggtcctcctgctaaagctcacgcggcacgcagctgctcctctggacctcgatcttgaaaggaggctctgtaggccaggcacggtggcttatgcctgtaatctcagcattttgggaggctgaggtgggcagatcacttgaggtcaggagtttgagaccagcctggccaacatggtgaaacgctgtctctactaaaaatataaaaattagccaggtgtggcagtgggcgcctgtaatcccagctacttgggaggctgaggcaggagaatggcgtgaacccagggggcagagcttgcagcaagccgagat

SEQ ID NO: 552447 - DNA, 611 bp, Homo sapiens
  misc_feature (425)..(425): n is a, c, g, or t
tttttttataattattttattttttttgcctttgccaaaataaggttttattttgaaagtcatttgatgaaagtcatttgaaagacactgaggagggaaggaggcctaagacccaacagatgtaggatccagatctggattcgtgccagccccaccaatggtctgtcaggccaagaaggtgctttctttggtaattcatgttttttaacttcctggagaagagatcttttcccacaagccatcttcattttttttgtagagtagggctttatttccagaaaacagtgtgtgagctggagatgggtgtttttttaaaaacatcaaggtagatctaatatgttcaacaaagtggggtggctcagccagaggcgaagtggaaagattctgaaaacacaagatggtgggcattagagaagccaaccttnctgtcccctgctgtgataaagatgtcaaagtatctttgttcttggacacaaatatatataataaaatacgttaagaaatgaggtggcctgaattagtaagaaaaagttgattgcttactgctttacccacacacatttccatctaggacttgacatatccccatttgatatacaagttaaatgggg

SEQ ID NO: 552448 - DNA, 398 bp, Homo sapiens
gggcaggagggctgttggcctaagcagtcacacaattttgcaccgtctgagcttatctgagcaagacatacgtgtcatcctaacgcctcccagtcttcctcagtgtccgttccagagcctgggttgaatttttgatctctaatgtggcaagtttttgctcagggtgcagctgacagaacaggatctcattcacttcaccctcaattcgccggacatataggagggggaacactgccttgagcccagccagcactgagtcttttagccccaagtctcggcacacaaggttgagaataaaaacaccttcaggagtcaagatgcttttaaccttctgtagaaaagattgctccacaaatgctgggggcggacaactcattcccagtgttgggtcctcactg

SEQ ID NO: 552449 - DNA, 416 bp, Homo sapiens
tttttttataattattttattttttttgcctttgccaaaataaggttttattttgaaagtcatttgatgaaagtcatttgaaagacactgaggagggaaggaggcctaagacccaacagatgtaggatccagatctggattcgtgccagccccaccaatggtctgtcaggccaagaaggtgctttctttggtaattcatgttttttaacttcctggagaagagatcttttcccacaagccatcttcattttttttgtagagtagggctttatttccagaaaacagtgtgtgagctggagatgggtgtttttttaaaaacatcaaggtagatctaatatgttcaacaaagtggggtggctcagccagaggcgaagtggagtcgagcggccgcgaatttagtagtagtaggcggccgc

SEQ ID NO: 552450 - DNA, 551 bp, Homo sapiens
ggaacaatcacttatcccgttattgaatgctttctataaatttaatatataaaataaggtggctttccagttcagcgttctgtttctcaagaggattactgagttcttggtgtagccgcattcataaagtagggccaaaatatgtatatgtcttatgttatgttagaaaacaggtccttagtgtaattccagttactttgagcgtgaaaatcatggatttgagttttaatgttctaccgtattgcaagcaggagttctccatccgttgtgtacgtgtaagtaggtgtcagagtaagacttagaaaattaccaagtgccggggtccctcctccagagcctttgaacgtggaactaatggggtggggcttgagcatccacttttagaaatgttttccagtgattccaatgtgtagctctatttcccatcagatttctctgatttcttgtggcattcaattttttctattgtggtatcatgattatggtcaggtctcatgtcctgtcttaggctttatgtctcctggggtagggaccttgccttcttcagttct

SEQ ID NO: 552451 - DNA, 1354 bp, Homo sapiens
  misc_feature (229)..(229): n is a, c, g, or t
attgggtccccagttgttgcactcttctgtctcgtttccttacagcttagctttagctgctcgcagttgcaaggtgccgttgagtgtggcatatgtgccaattcggagctgcaaggaacggttctagcgggttccagcatgcaggaagcaggttcttactagtcacttatgccctacgaggaaggcgaaacacatgacttgacagaagaaggtatcgcaaccattccgnaaagcacactcgagtgcgagattcttctgtgttggccacgcctgtgtcaggattctataaggcatgtgacttctgggggaattcacccaatggacaaataccaatgatcaaaaacatgtgagcactggaagggattagcacaaccaattgttgacagcatgatcactggggctgatttagagtagtagtggggatgatacgtattggtgagacatagatatccacattaagcaaagtattaagatttcttctggagattgtatgccacatgacacggggcgtttaagatgagctcgaggacattggtcatgagtctggaaggttacgacacgtttgtaataaggttgggcgaatacgcttccaaacgtaacaggcgaggcaacggagagacttacaaccatggcttcaggaaacagaatttcacttccttggcagttgaacctggatatttcgacccgaatggagggttggcttctcgcgccccaaggttcggcctcatcaatgtttcattcacaaatttatcaggacactatacttttaggcataatttgcgcggttgtcccacccaagtgcacaaatgaaagtcggggattgtgggacgctgttctggggaagcttaattccaatggaacggcaaaagggttttgataatatggcaaagtgtaagaacacaccaataaaatagaagctatattaccaggggcatcgagggggtaactcgcacgaaaaggaaaactttggtatagaactgttttcatctaaagataaacggggcgggaaaaattaggaagagtaattcattgaagcaactataattgtacatggaaaagtaagttgtggcgtaacgagggtaatgttcccccttgggttggcgacaacgtcaattagacactattgtcatcaacagccacttggtgcgcaccccagcagcaccactggagagcaggaaacctcccacacatttggaagacgccctcattctcacgaaatttggtcgctgcaaagcgaacaactcaacactggggtagagagcgaacctcgttacatcgacgacaacatcacagacacaaccacgtcaatacacggcagacacaaaccacacaacagcgacgcgacttaagagac

SEQ ID NO: 552452 - DNA, 667 bp, Homo sapiens
  misc_feature (544)..(544): n is a, c, g, or t
  misc_feature (627)..(627): n is a, c, g, or t
  misc_feature (634)..(634): n is a, c, g, or t
ctgacttcaaattatgctacagggctatagtcaccaaaacagcatggtactggcataaaaaacagaaacatagactcatggaacagaagagagaacccacacacctatactgaactcattttcaacaaagttgccaaaaacatccattggagaaaaaagacagtcttttcaaaaaatgttactgggaaaactggatatccatatgcagaacaacaacactagatccctgtctctcatcaagtataaaaatcaaatcaaaatgaatgaaagacttaaatctaagacctcaaactatgaaactactacaagaaaacactggggaaaatcttgtggccactggtctgagtgaaaagtttcttgagcaagaccctacaagcacaggcaaccaaggcaaaataaatgggctcacatccagttgaaaaagcttctgcacatcaaaggatacaatcaatgaagtaaagagacaattcacagagtgggagaagatatttacaaactacccatctgacaagggattaataaccagaatatataaggaactcanacaactatataagaaaaaaatccaataacccaatcaaaaaatgggcaaaagatttgaatagacatttctcaaaaggaacacanatggcanacagacatacttgtgctccatcactgatcatcg

SEQ ID NO: 552453 - DNA, 151 bp, Homo sapiens
actgtctatacacaaaatataccaagttgtgaaccaaaattaagggattgaaggaggcttcagcctattatcaaaactgaagagccattattaaaaaattcccaaattattgattgagtgcccgtggaattactgaaaggcccggaggacc

SEQ ID NO: 552454 - DNA, 314 bp, Homo sapiens
  misc_feature (22)..(22): n is a, c, g, or t
  misc_feature (27)..(27): n is a, c, g, or t
  misc_feature (169)..(169): n is a, c, g, or t
  misc_feature (190)..(190): n is a, c, g, or t
  misc_feature (222)..(222): n is a, c, g, or t
  misc_feature (258)..(258): n is a, c, g, or t
  misc_feature (264)..(264): n is a, c, g, or t
  misc_feature (282)..(282): n is a, c, g, or t
  misc_feature (308)..(308): n is a, c, g, or t
ataaatgaaaaaattagtggtncacgnctgtcctctcagctactcaggaggctggggtgggacgatcccttgagcccaggaattcaaggctacagtgagctatgatcacaccactgcactccagcctgggcaacaaagcaagaccttttctcaattaaattaaaaaganaaaaaagagttagggagattnggccccacccagcccccgtgtgaccagggctngggtagacaggtcagtcgaaacaatggctgtgcttntgtggnggagtaagagggcacaangcccccatgtctagggagggcaggtncatcac

SEQ ID NO: 552455 - DNA, 279 bp, Homo sapiens
  misc_feature (21)..(21): n is a, c, g, or t
  misc_feature (210)..(210): n is a, c, g, or t
ccgctcgatcacccactattnctcctataactttaaaacgtgaacattcgataatctagccagtctttaccttctcaggtaacttcttcacctgggttgcaattcccttttaaataacatactcttgttccggaaggcagttagccagtcatcactctttctgtctaaataacatccaaagacaaatcccataggggcaaagacattganctcagaggtcccgcacatcctgaagtaattctaccattgatagctttacctgaagggctactataaaga

SEQ ID NO: 552456 - DNA, 291 bp, Homo sapiens
tcactaagatgtttgtgaagcaaagttctgtgtctactttacaagcgactccagtggagcttagagaatgaagttccttgttcaagagtgtagctaataagcagcgaaggccagggctcagacgacttgttcagtcttctttgcattcaaggtgctttctttctagcgtgctcatagcacaaattcgaatgccttctactctcttttcaggtactcctcacatggtacacaccactttgtgcctcacagattgaccgtcaaaacgcccgcgaatttagtagtagtaggcgg

SEQ ID NO: 552457 - DNA, 156 bp, Homo sapiens
gttcaggcattgtgatagtgatctcatggtatttctgcagtattacacagggctatgccaaggcggtgtattaccttggaaaagcgcaatgttgagggtaaatcaatgctaggttgtattaggctttaccaaatagcttgttctacgcagtttatc

SEQ ID NO: 552458 - DNA, 424 bp, Homo sapiens
actactatgttaggccattcttgctttgctatccagaaagacctgcgactgggtaatttataagtaagggcaattgtctcatagttctacaggctgtataggaagcatagtgctggcgtctgcttttggggaggctttaggaacctttcaacattgtggaaggtgaatggggaacaggcatctcacatagctggagcataaccaagagagtgtgaaggggagatgtcacactttacaacaaccagatctcacaagaaatcactcactatcacaaggacagcaccaggccatagggaacctgccttaataactaacgcacctcccaccaggccccacttccaacattggggattgcaatttaacatgagatgtggcacgggcatatattcaaaccatatctccttagtcccttccattcatctcg

SEQ ID NO: 552459 - DNA, 1172 bp, Homo sapiens
cccacgcgtcgcggacgcgtgggtcgaacgacgtcgttcgacccacgtcgtgccgatctcgagatcctctgatggggctagtgaatggcgagctgcagcgtttgtcatggccgggcttacaggggcattcttgggcgcacatgcagtggctagtcggtgccagttgggtacggatgtgtgcagaggtgagacgcacagagctgatgcgggatagggagacagaagggaacatgtacgcatttgtgagattctgggcacggcgccttccttacgactgtccagatagaaatgttcctcgccttgctccagtctggccagccactggccacgggtggctctctggacacctggaatgtggctagcttcgtggctgggggctggcttcaaacttatcctcgatagtctacacaaggacccccctcttcctacaaagccctataccatatgcaacacacggcgagccacacggcagccccagcagcgtggtacaaccagaccagacaacccaaaatgagcgcagccacccaccagacgctacacgcgccaacgccggcgcacatcaccccgcaacctcaactccatgcacagcaggcatcaccccacgtggcagaacggcaagcaacgaccccttacaccccatgtcaacagacaggcacctggtgaaccccacacaccagctcaaagaagcaccacagccgggggaccagcacagcccgcccgcagcagctacccacgcaaccgcaccgcacagggaccaacaacagaaacgggcacgggacacggcacagacctaaacgaaacccaacgaacatgacctgcctgaaccgaaacacaacaacaccagacaacaacacacaaaagacgaagaaaaaggcaccagaagcagcccaaagacaacaagcaaacaagaacgcaaacaagaacaacgaaaaaaaaagaaacacacaacacacaaaaccaaaacaaaaaggaggacagcaaagaggacgagcaagagacggagaccgagaagacagggacgccacgcgagaggcagacgacaccagaagaacagagccaacaaggggaaagcacacagagagggaccagggaagagagcgcacaccggaaacaggacgccggaacaaggcgacgcgaaaagagcaagagacatggagcacgtaccacaccag

SEQ ID NO: 552460 - DNA, 354 bp, Homo sapiens
cgcatcttggatcacacgactctgctcccggattcaagcgatcctcctgcctcagctcccaagtagctgggattacaggcgcccaccaccacacctggctaattttgtatttttagtagagactgggtttcaccacgttggccaggctggtctcaaactcctagcctcaagtggtcccccaacctcgggctcccaatgtgctaggattacaggcatgagccactgtgcctggccctatctttattatcttaatttcatacgcccaggtaagcatgcatacctgggcgtatgcccttttcctaacactcacaacaaaactaactattactaacatctcatacacccaggtaagca

SEQ ID NO: 552461 - DNA, 195 bp, Homo sapiens
gctactagtgacattgtgatgctgcacagccgtctgcataatgtttcagagagaggtacagatgtgttccgcaggtaatcaccccaggttaggttcagactacatgtggtgccttgtttcatggtgcatggaagttctacacttaattcaaatcctttgctatgtgggctattagggcctgctatccatgccata

SEQ ID NO: 552462 - DNA, 253 bp, Homo sapiens
cgccagagcgtggagggcgaatcaaaggctggccggggtgctggatgagctcactctgtctaagactgacctggaagatgcagatcgagagcctgaatgaagagtatgctaaattgagaaaacctggagagggttgagggatttgaccgttgtgtggcgttagggggattgtgacccagattgtgtccgtttgggattgggttagtggtaaagacggggtaaatgtcccagggtggggtggtcgtttaaaaaa

SEQ ID NO: 552463 - DNA, 1156 bp, Homo sapiens
tagaaaaaaaccagtttattaagtaatatcatataaataactggttacaaaaattggatttggcaaaaggcatatttactcttggtgagaaatcactttttaaattggcattcttttcaaatttataagtctaagaaaacaaaaccaaataaaagaagccatttcaaggagtgcgtatttggccattggactggcaacaaaaggcccggccacactgagctaaaaggtaatactctcgaccccattcttctaacacagaaaactttctcaggtaaacgggggggttatgagaatccccctaactagaaatggtggatggggaactggagcattggcgtggctttcatcaggtgtccttggtggccaaagacttggaacggatactggaggaaaacggacaagatgtggaggcattcccgccagtaaatcttcaaggggtgggcatccggtgttcaatttatacttgggaagtattttaaattaaaaacaatcaataccaaaaagctttaatttggggggtttaaaagtcacaaatcacagggggagaatgccaaatggcgtttagctgggaactactgaagacgcacatagcatttattataagggcctactcttaggcagttcactctcaaagcaatgaaaataatctcaaaccaaacattacaggtgggttgtgaagcgttcctacgtatcttccgagcagggtcagttttacattgtgctaccacagaattcccaagaatgcctggtaattcttatacattggatctttaataaccctaaactattagatcctagaaaacataaaggattagaagaggcggctcccgaacattttccgtaaataaggtagactcaagaaagaccagatctcttagggggaggggctcttccccagggggggtgcagtgcccccattggtgggattacccccctgggagggaaataggtgtggtggtgacgtggggttttgagacaacacaacacaacaggggggcgaaaaaacttagaggacgagacagacacacttataagagcacaatagtaaaataaaagcggcacagatgtgagaacaatatgaaacatgatagagaaacaaaatagttagtgttcacttctgtacgtcctggctattgaagtagtggcagcgaaatga

SEQ ID NO: 552464 - DNA, 436 bp, Homo sapiens
cgcacgcctgatggtttctattggcaaacacgcacttgctaacagcactcctgtaaagttaactgctacctctgagatttagctaggaactgcctctgatcctatcccgacggctgagatggaccgaggctgcggctctggtgtggtcacctacacgctgccctgtatcttgcgagctggcgatggaatgatcttcaaaatttgtacatctccatcttcaaaattacttcatgaataacagaattagcagttaatgatttgacccaggaaattactagtatatgatgtaatatatcagataccactaatagatggcagagggcgagaaagtagacatctagacagtgcttaattataggatcgattacaaggaaggttcaggccacatctcagctctgagcctggcctcctccatacaagttaaagcattacacag

SEQ ID NO: 552465 - DNA, 459 bp, Homo sapiens
gactgtgcccacctgggctcaggtgatttctcacttcagcctcctgagtagcaggctaatttttgtagagacagggtttcgtcatgtgtcccatgcttgtctcaaactcctgggtttaagctatccatctgccttggcctcccaaagtgctgggattacaaacgtgagccaccgtgtgcggcttgtatattttttttttttttttttttttaagtatttatggatcattctggggtgtatctcgcagagggggattgggcagggtcataggacaatagtggagggaaggtcagcagataaacaagtgaacaagggtctctggtttccctaggcagaggtccctgcggccttccgcagtgtttgtgtctctgggtacttgagattagggagtggtgatgactcttaactgccttacaagcttctgtttaacaaagcactttttgcaccgccctttatcca

SEQ ID NO: 552466 - DNA, 1016 bp, Homo sapiens
  misc_feature (21)..(21): n is a, c, g, or t
gcgcctaagtggttccgggtnggtggatgaccttgagccctcaggaacgagatggcggttctctggaggctgagtgccgtttgcggtgccctaggaggccgagctctgttgcttcgaactccagtggtcagacctgctcatatctcagcatttcttcaggaccgacctatcccagaatggtgtggagtgcagcacatacacttgtcaccgagccaccattctggctccaaggctgcatctctccactggactagcgagagggttgtcagtgttttgctcctgggtctgcttccggctgcttatttgaatccttgctctgcgatggactattccctggctgcagccctcactcttcatggtcactgggggccttggacaagttgttactgactatgttcatggggatgccttgcagaaaagctgccaaggcagggcttttggcactttcagctttaaccttgtgctgggctttgctatttcaactatcacgatgtggggcatctgcaaagctgttgccatgctgtggaagctctgacctttttgacttcatacttttgaagaattgatgtatgcctctttggctctgctttgtcatgccattaagctcacaataaggaagaaataaccagataagtccattggtggacagcttcttctcttaatcacaagattattttcagaatttaatcttgagggaaaggttgagaggattatatctaagtggtgagactgagtcctatatactggtgagtaaatgggggttgcctcccaagttctttataagactcacaagtataagtaaaacatgatatatcaagtttgtgggctttcaatttatcaatctcttaaagagaatccactttaatcgataggatatgatcaaatttccatatttggctgggaataatggccaagggaaatattttaatcatgataaacttgggaaaattgaagtgttatttgaaattcctttaaaagagataactatggggctttagggataaatagaagtgtga

SEQ ID NO: 552467 - DNA, 125 bp, Homo sapiens
tataggcgctaaggtgacagagactgtgtctcaaaaaaaaaaaaggcttttcttaataatattactggctggcccaaagacttgactccctacactaagcagcagcattgggagggggtgtcccc

SEQ ID NO: 552468 - DNA, 140 bp, Homo sapiens
ctagaggatcccctaggcagtcgtgctggtgctatgggatcgtgctggtgctctggtgctgaaacaattcacaggctccagaaaagctttacagcctatacatcttaggtgagagaacagatagcaccagcacaattcct

SEQ ID NO: 552469 - DNA, 463 bp, Homo sapiens
  misc_feature (4)..(4): n is a, c, g, or t
  misc_feature (27)..(27): n is a, c, g, or t
ttangaaggggggggcggcgagccacngggtgtggtcctcctcccccctcgcggggggtgtatcacacacccgggtgcccttctcctttgtgtgggggtttttttttcccccccccccctgtgggtgtgggggggggtggggggccgggggaaaaatattaaaaccccccccccccggggggggagggggggggctttttttttttttttaaaccccccccgtggcaaaaaggggggggggggggggggggttttttttttttcccggggggggggggggttgggccccccccccccccaagagggccttttctttttcccgggggtttttttgggggggggggggcccccccccccccccggttttttttgttggggggggggggttgtggggggcccccctttttttttttttcccccccccccggggggttttttgcccccccccccccccgggggggga

SEQ ID NO: 552470 - DNA, 1570 bp, Homo sapiens
  misc_feature (578)..(578): n is a, c, g, or t
  misc_feature (1181)..(1181): n is a, c, g, or t
  misc_feature (1188)..(1188): n is a, c, g, or t
gcgcaaccgttatccgaacgcgagaggtgtgttgctgctgaacacctatccttagggttaacacatgactgtctcaatctggtgtgcacagcatgagcgcggctcaatccccctatcaacaggccacactctgaatactgagtgcactgagtggtcctctctggaccgtccagccatcgagcatctgcccacgggagcccaccgggccgagcccctgccagcgcctcgccaagcctggcgagccgccgccgctggcatcgtagcttctagtctgtcggacctttggctccgggggatgctatctttgccactgttcgtcgcgctattgtgtgcgaggctcgtgtaactcttgatggggctcgtgcaactccaacgaccgtggcatgattgcgattccctcgcgtggggcattttataccgctgattacactaggccggttatatgcaatggctgagatgcctcctctaaaataacgtatctagaaggccggcagatattacttagatcggggattttcgtcaggaatctatcaacggttcaaaacgtagaggttatcggtttggttaccgatagtctntcttagttgccattgacacacgcagcgattagagacgcattccccgttgaccagtctataccccttgtgaatggttaaaccgtctcggcaaatgcccaaagcgggaaacggtcaagtggcctgagaggcctgtatagaagtctttttcccctctattcgcaagagggatcttattcctcaaagggagagttccccttctgggagtaattttaggctcggcaaatttcgatcggtctgtctgcgaggcaacgacggggaggcatatgaaacctttcaatacttgcggtagggttcggtccgccaattttcaaccattaatctcagttggaagagggggacattaagagcttcgttgacgttaagaactccaagggattggcactgtgcgagaactgttgcggtaatagcgtgacgtcaggcacacgaattattgggcggcgccttgagaggtgagttacccctaacataggggtaagaagctctctcgccgataaaaaatgggggtttgcatagggacactttttccaaaattatacgcccaccgaaaagccaccccaaaggtggtatttaccacttttggcacacgattatgcaacggtctantttgggntaagaaagaagcaacttgcgcaaatggataatcgccccagaaaataagaggtgggcttagtatccacgaggggcatattggacaacacgaggaaccctttatggacaaagcgccagtttaacttgaaccgaaagacggggacgggggtaaggaccttactaccgtcccttcgtgtgtggagttgaacagtaactcacgtcaattagttgcgaagtaagacggacccccacattgcaccttggaaagggatcttacaggaccgcttgagctttatatgtgaacacgcgggttactcataggggtcaggataagggccgaccgttgggattacaaaagagcttcattgatagggcacttttcccgataagaagagtacacgccg

SEQ ID NO: 552471 - DNA, 297 bp, Homo sapiens
tgcaatcgcattcctaacgggagcatctttgtcgtgtgtaatattctgctttaggtttagggcaagattagtggcattgactgtaagatttacctacaaaatatttgcatagtttatctaaatttatctaaagaacaaatctacattttataggtcatctttcaaatatcagtcctcggtttgaattatccatttactagtgcggattctagctcgcccccttgtcattgtcatacaccttcatcaaactttaaagttacactgctctagttacgaatagcttctacttttctagga

SEQ ID NO: 552472 - DNA, 653 bp, Homo sapiens
gcaaggtgcataatacgtgttcctcaatagggaccgctatgatggctccacgagggttcactgtctcttacttttaacccgtggaattgacctgcccgtgaagaggcgggcattaccccgccagacgagaagaccctatggagctttaatttagtaaatgccaaccgtgtcctaccaacccaccaggtcctatagacttcccaacctgcattaaaatttcggttggggcgacctcggagcagaaccccacctccgagcccagtacatgctaagacttcaccccgtccaagcggactactatactccatgtgatcccataacttgacccacgggaccagttaccctaggggtaacagcgccatcctattttagagtccattgatcagccatagggtttacgacctcgatgttggatcaggacatccccatggtgcagaccgctattaaaggttcgctttgttcaacgattaaagtcctacgtgattctgagttcagaccggagtaatcccggtcggtttttatttacttcaaattcctccctgtcgaaaggacacagagaaataaggcctactttccaaagcgccttcccccgttaatgatatcatttccacttagtattatacccacacccacccaagaacagggttttttta

SEQ ID NO: 552473 - DNA, 2258 bp, Homo sapiens
gttgtgtttgcgtctgcctacattcttgtggtggtttttggttgttggttgcgtatgtttgttgtcttcgtcgacgtgggtggtcgtggtggggtctgggttgttttttttcttgtgcgcttctggttggtcgtgtcccgccctcgactctggctgcgcgtcctggcgcgtgtgggtgttgtcgtccccccctccgcgtggtggttgtctggcgctcgctggtttggttgtctgtcgttgtgtggtgtgtgtgtggttgtgtgcccgtcaggcgtttgtgtgttgttcttctctcgtctggtttgttgtgtgtttctgttggtttgtttttctgccgtctgtgtgtgttgattccgcttcgcttgttctgtttatcttttgtgttttgggttggttagtggtgtgtggtttgtcgacctctccgttcgcgtggtgggtggtgtgcttctctctccgctggttggtggcgggcctcgctgtggttctgtgttgggttggttgctgcctcggtacgtttggttctgtgtggtgtggggtgggcggagtgcggagccccctccgtcgtggtcctgggttttcatcctggtgtgggtcgtgttgggttagtctcggcgccgctgcgccgcgtggtgggttgtggttgtttgtggtttatgttggtgtgtggtgggtgagtggtgggctcgtcgtcgcttgttgttcgttatttgttttgtgtttgtgtctgctcctcagtgtctgttgggtggtttttgtgtttgctgtttgtttgtttgtaggatgtgtgtgatgttgatagttgagttgtcttggttggttgtgatttgtcgttgctggtgttgtcggcgcctgggcggtgtttggtggtgtgttgtattggttgttgatcttcctcgttcctggtgttctgtgttttcttgttgtcgtggttggtgttgtgttttgtctcgttcctctcctcctcctctgcggttgttgtttcttgtttgtgggtcctcccgcgccgctcctcctcgcgcgtgcttgcgttggcttccgtctcggcgcgcgtgtggtgctgtttgtggcgtcgcccctcggttcgtggtcctctcccacttcgctcctctctttctgcactcactctctccgtcttcacgtcgtcaccctctcgacgcgcttccgcgcgcgcgcgctggcgctgctctcttcgctcgctcgtctgctgtgtggcgacctccaccactactctctcttctctttcgcgtggcgtgtgtcgcgccgacacccaccgccgccagcggtggtggctcgccgactgctgcttgtgtggtgttgttctctctctgctgctgctgtggtgtgtgttgtgtggagtggtgtgtgtttgtcgaccgccccaccgcgctggtgttgtgctgctgcttgcggtgtggcgggattagatgtggtggggttgttgtgtggtgggccgctcacctgcaccgcgtgtgttttgtggtggtgtggtgtgtggtgatgtggttgggtgtggtgttggtgtgtgtgtgggagttagatggtgttgtggtgtggtgtggtgtgatgatgagaatatcgtcagatagtagtagtaatgagatgtagtttgaatatatattgttgtagtgttgtagtgaatagattattatttcgacaactcttgtgattttgtgtgtggtgtagtggagatgaaggataataatgagaagtataatatctcatacttgttcgttctactcacataatgtggcagtgtggtgcgtgttctcccagcatagtgtcggcgcaccaccagcgagagttagatggtttgatctagtcttcgacttctctgttgtgttgtgtgtgctgctgtgcgcgagtgtggttgtgtccgccgccagccgttgcctcttgtgtcgtcgacacacaacagtagggtgttgtttgtgtgtgtatgtagttagtacgcctctctgttgctgttgtgtgcggggtgggtagtcgtagggtctgtgtgtgtgtgtgtgtgtgatatgttgtgtgtgtgtgtgctgcgtgtcctcgctccccgctctgtgtgctctctcgtgtgtgtgtgtgtgtgttcttcgcgcgatcatataatatatatatatatattatatatatataaatatatatatataatctaatatatattgacaatagtaaagtgtatgagatatgttatagcattcgaaggcaaggttaatcgtcaggggccggatgttagagggtatgtgtttgctccccctcca

SEQ ID NO: 552474 - DNA, 467 bp, Homo sapiens
agggcattactgaaacaatagcaaactgttggcaaaatgtcaattgcctaaggctgtgatttcagttgaggcaaaggaagaatctggccaggaatttaaaaggaaagtctggagaactagccaactatagggaactttggaaagctctggcatattcctgggtatttaaaaggctgtacaatgtgcaagtctgtacacatgcccggaaatgacctgggaaaggagaatgtcacctctgactgatcttgaggcactgtgtaagcaggaagtgaaaatcagtgctatttgtaagcttcctgaagtttgaaggtatgacttctcatgaagatttctttggcaaaaggtagaagacatataggcaaagcatttaaggaaatcttttaaatgatcattggttgactactacattttactggtccaggtatgacttcttggaagccaggcttacaaataaaaacaagatccta

SEQ ID NO: 552475 - DNA, 381 bp, Homo sapiens
gtccgtgtgcccttagcccacgacttcagggctcagcagctggggccttcatggcaccaaacctgggcgtaaggggtgcaaagacgcgctcataagaatcgtgaatttgtccggaggcaaaatttggggggctggctacaaaaccggaacagggagatcgtatccctaagtgaaagggactgtgtattaattgtgagttataacaatatgtaaaatgcataaaagagatagagcactgcaggccatcaaggtggggcatttgaaacaggattaaactaaattagaaggaggattaaatggcttttgtctttgtgaagaaaagaatatgcatgcagttgattgccggtgtagagaggagtaataaatcttttggcgtggtgg

SEQ ID NO: 552476 - DNA, 866 bp, Homo sapiens
  misc_feature (97)..(97): n is a, c, g, or t
  misc_feature (178)..(178): n is a, c, g, or t
  misc_feature (200)..(201): n is a, c, g, or t
tcgagatgcctcttctctgtctccttatcagatagaaatggagtcatgtgctgctgcttcatctagcagaggttggcctctggctctgacacttttngtcagttgtctttaggtggtcctgaatcttgggcccttttgattgtgaatactgtgtagcaggatcttgagagtccttgtncttacataggcattgtctagtnngtctttggcaaaaacagaaaaaaaaaagggtaaattattccaggaaacccttgcccagacttaattacttgctggggtggcattaagagaatctcaagccatttctcaagagatactttcataaccagaatttgtctgtgggctagcagcttgttcacagattaggcagggcacttgggatattgaccttttctgctccaggtgatctcacagacctaagaccttttcttatcctcctcctagaagttttggactggggacctctagttgttaacgatgatgagcccgtgcatcaggtccttctgcacttgggtggaagtctccccagggttaggttccctattggaaacagtggaatcttgttcccagctgcataaacgttaattgacctcatccttttttttttctctacatctgccattggtgtgctctacagaggggttcaaactggccttgaattgtggcctcatggtgggttctcagaaatttgggtccagttttggcccaaatatagctttctggctctgtcataactggaccccaatacccttgtaggatctggtttccagcgtttgggttaccctacttgttaagcgcggttgtccccattaacttattggcgcagattatgaaccgccactcatgggatgcctgttcaatggggc

SEQ ID NO: 552477 - DNA, 653 bp, Homo sapiens
ggacccttttcacaagatggcgccgaaagcgaagaaggaagctcctgcccctcctaaagctgaagccaaagcgaaggtttaaaggccaagaaggcagtgttgaaccgtggtgtccacagccacaaaaagaagaagatccgcatgtaaccaccttcctgggcgcggaagacactgcggatccggaggaaagccaaatatcctcgggaagagcgctcccaggagaaacaaagtttgaacaacatatgctatcatcaaagtttccgctgacccactgagtctgcccatgaagaacgataagaaggacaaaaaacacacttgtgtgtccattgtgtggggactgttcaacgaggcccaacgaaagcacccaggatttaacacccagggctggtgacagcacagcttgtattgacccattgattgttgggccccaaggtacaaaacccgttgattcggggccgtgattggcgagagaaaagaagcggcataagttgttccggaagttggactccctggatataacggagtgccttgtaggattgttgtgcccaccaaaccaattgggggacatacaatcttaaacagttgaagtacccagttggccctaaattctggaattaatataataattataataattatcatttacaaccaat

SEQ ID NO: 552478 - DNA, 604 bp, Homo sapiens
  misc_feature (25)..(25): n is a, c, g, or t
  misc_feature (79)..(79): n is a, c, g, or t
  misc_feature (82)..(82): n is a, c, g, or t
  misc_feature (91)..(91): n is a, c, g, or t
  misc_feature (95)..(95): n is a, c, g, or t
  misc_feature (97)..(98): n is a, c, g, or t
  misc_feature (109)..(109): n is a, c, g, or t
  misc_feature (242)..(242): n is a, c, g, or t
  misc_feature (294)..(294): n is a, c, g, or t
  misc_feature (303)..(303): n is a, c, g, or t
  misc_feature (319)..(320): n is a, c, g, or t
  misc_feature (331)..(331): n is a, c, g, or t
  misc_feature (360)..(360): n is a, c, g, or t
  misc_feature (392)..(392): n is a, c, g, or t
  misc_feature (405)..(405): n is a, c, g, or t
  misc_feature (417)..(417): n is a, c, g, or t
  misc_feature (437)..(437): n is a, c, g, or t
  misc_feature (478)..(479): n is a, c, g, or t
  misc_feature (591)..(591): n is a, c, g, or t
ttccttcttgatcctggatgtattncctatgtattttacagggttacaaaacgtctctcattttaatattaccccaaangtnatctcaganaaananngttttttgaanttatacttgacttttaaataatcatacgggctaacaactttcaaacaaaactggattagtaggatttcttgcctgcttaactaacatgacagacttcttgtcccaggcccttctcagaaaaacctcatgtggnaaccaagctagagataagaattcttccctgatgcagttaggggaccgggcanaggctaganacttctttggcaagcnnttccacacacngccatttatgtgtgagtgctctgcttcangcacagtacgctctttgcaggggcggggagangttcagggtgggngtggtacttttnatccagctaaatgtgcagangtcatctagtcgtctgcctcttcccactgccagtgcctgcnnccttgcagcaacttttaaccacccctatggactggaatattgagttaaaagccaaggctgagctggctgacgctgtagtctccattgaaaaggaaatggatgagatggaacnaaaaaacaccagt

SEQ ID NO: 552479 - DNA, 894 bp, Homo sapiens
  misc_feature (133)..(133): n is a, c, g, or t
  misc_feature (144)..(144): n is a, c, g, or t
  misc_feature (576)..(576): n is a, c, g, or t
ttttttttaggttttaccattcgggattattcttagcagatgctgcagataacgtggagagcatatgaaagacacatgtttgaaccaatagtgacatacaggtgctaagttctgcagtaggggaagggcaganagcatggaganggcctggcaatcctggagcctcagaaaaaagttccccgttgaattgctgttttagctgagacttctgggatgggtagtagttggagatcccagacaggaggtgaccgagttagcaagggaaaaattgggtcctggcacccatggcagagttgagtgatccagtctttctgtctccactggctggaagtccaccagatctgggaatgtccagttgggggagggggctgacaatgatcatgaccttcacctgtcctcacatgtcctctgtgtatctgcaaagcctctgcctcagtctcctcttctggaaagtgggattggaaaccacatctgcttctctcccaggactgctaggaagacaagattagatggcaggtgagagctctttgaaaatgaaaacattctgctatttgaatgcaaagtgttcttctttgnctgtgatgtttcctaatctgtgaaatcatactggacctcgaagctgtctattaaaaaaatagcaaagtggctgggcatggtgctcatgcctatagtagttctagcactttgagaggctgaggagggtggatcatttgaggccaggagttcgataccagcctggccaatatgcaaaaccacatctctactaaaaatacaaaaattagccaggtgtggtggcatctgcctgtagtcccagctactcgggaggctgaggcacaagaatcatttgagctcaggaggcagaggttgcagtgagccaaaattgcaccactgcac

SEQ ID NO: 552480 - DNA, 181 bp, Homo sapiens
taaatttcccaaaaatttttttgatgtttgcttgaatacattttattttaaaaaattgggattgtttgccttggattcccctggcaaattttgtgaggcttttaacttaaaaggggtgccaatttggaaactttaaaaatggaaattacaagcccaattttaaaactttttttaaaaattt

SEQ ID NO: 552481 - DNA, 763 bp, Homo sapiens
  misc_feature (463)..(463): n is a, c, g, or t
gtacacgtatcctgaaaactggagggccttcaaggctctcatcgctgcgtcagtacagcggggctcaggtccgcgtgctctccgcaccaccgccacttccattgttggccaaaccaaccggacccctgaatatctccgcaaatttcctgccggcaaggtccctagcattcgagggtgatgatggattctgtgctgttatgagagcaacgcctagttgtcctactatgtgagcaatgaggagctgcggggaagtactccagaggcagcacgcccaggatggttagcgagtgcgtgtgtaggtgtttgcttgattcctgatagtaggtgcccccatgaccatgataccttgggatgttccgccacccttgggctatctaagtgcactcactagacaaatcagggccagctgaagaatgtgcagagaggtaggaccgctgaggcgaagattctggggcgtggtggnatgcattacgttgaacgacagaaggacttctttctggtggagcgaagcagagtgacagttggttgacatcgacagtagtctgcaccctgttgtggctctatcaagcaggttctacgagccttcctttcccgccaggcctattcccatatacctaaccgtctggttcctcacgctgcaatgaacctagcccctagttccgggctgctgggcgggaagtgcaactgggtgaggagatgggcccgtttgctgctacaagtttgcgagacccgagctgtaagggcccccggggatgggaggtcc

SEQ ID NO: 552482 - DNA, 184 bp, Homo sapiens
accaggcggtcaggtgctgattggtgtccaggaaagatggccaagggtctactggtcctatgggtcctcctggcccagctggccagcctggagatacgggtgaaggtggtgccccctggacttccagtgtatagcttggaccttccttgtgtgccgtcgtgggggtaccggaggcttcgaagtt

SEQ ID NO: 552483 - DNA, 513 bp, Homo sapiens
tgatggtcttctagagagaatgctgattatgccactgctagaaccttcgtaccttggtctgtaccaatctcttaagagatccaggtttctggcatgctcctcgctgctttgagaccatttgtcatgtctttaccgggacaaggctttgattagattgttcacagcagaatgaaggtgaaaactatcaccagagtaactgcaatccatacagaagtcttttacctgtaaatgcctttcccaatggagaatcaacagattgggtgatggtggagtcggtcaggaagactcaggtcttctagaggaaaggatgcctcatcaccccttgggcccaggcagctgctgtcagagaatgacacagcacctgcacagtcgctgtccacttcctgccactgctgtcggtggggtgacgggagcaaagtaggcgtggactttgacatgagggagctgagcccggcatccgcttgatgcctgcacgggtaacctgctgacagtcgtacagctctaggcgctcca

SEQ ID NO: 552484 - DNA, 121 bp, Homo sapiens
gggatgggtgatgatagtcctttgtttctgaccgagtggaggttatttgtggttgtctcttctctctgaatatcgttcagatgtctgcaactttattagccttttaaagtaactgattttg

SEQ ID NO: 552485 - DNA, 160 bp, Homo sapiens
  misc_feature (44)..(44): n is a, c, g, or t
  misc_feature (49)..(49): n is a, c, g, or t
  misc_feature (55)..(55): n is a, c, g, or t
  misc_feature (150)..(150): n is a, c, g, or t
ggcgggctccggcgacaggccagatgggaagctgctgtccaagnacaangcgctnctgagggaaagggagcctctgcatcaccaaatggcaggattttcataatatatgtagtatgagttccacatcttggcctcttaccccagcttcanaagtctcagc

SEQ ID NO: 552486 - DNA, 111 bp, Homo sapiens
ggtctcattcctggacagaaacccatgctgtcgatgctccaacttacaaattatggcatttatgatccagataccgcaatatgagatccgagttctacttacaatgacctg

SEQ ID NO: 552487 - DNA, 848 bp, Homo sapiens
gtatcggaactgtataaaagaataacttctaatagatggttcatagcaaatctggacgaagtaatgggattaaaatatgactgaaaatggtgattatcctctgacatatgtttgagtttcaatgtacttattaaattagttcattagaaagatacgttcaacgtatctattttctgtcggtagctatcaattggttttcggaaattgggaggtcttcagtctgatgattggcccgaggcttggtatgttgcgatgtgtgatgcgatcttgagtgctcgcctgtaaccttccggcctccgctagtcccaagcaaattcgtctcttgctgtgcagcctcaccggagtagctgggactgacaggcgtgtgccacacaggcccggcctgatttttatacttttggttaggggatacgggtttaacaccatgatatgcgccaggttgggtcttgaactcctgacatcaagtgatctgctcggtctggagcctcctcaaagatgctgggatgtacaggcgatgagttagctgaacctggattatcaaacttttattacatattagttctctgttaaaccaaggtttactggaaattgtggaatgagtggagccgaaagaaatttttcattctgatgaaaggagtttacgctctatacatgttattttacactccaggtaatggagtggtgtgttgcttagaattcttgggggagagatatggtatgcaatttcatgaaatttcggttaggggaatatactttattaaatttcaccgacttactgtgagatagtgccctgatgtgttggaatgggataaatcaggaagaattgtcggaacaggtataaaaaggta

SEQ ID NO: 552488 - DNA, 456 bp, Homo sapiens
  misc_feature (2)..(2): n is a, c, g, or t
  misc_feature (190)..(190): n is a, c, g, or t
  misc_feature (382)..(382): n is a, c, g, or t
  misc_feature (411)..(411): n is a, c, g, or t
tncatctggcaattcagagatttcttcttggtttggatccattgctagcaagctagtgtggtctgtgggggtgttacagaacctagtttggtcatattatcagaattacttttctgattccttctcatttgggtagactatggtagtggaaaaatgtggaactagagtgctgctgtggagattctttggnaccatggggaaatcccttgatatggtgcactccctttggtcctaggaatggggcttcctgagagccagactacagtgattgttatcactcttccgggtctagccactgaatggggctaccagactctgggctggtgctggggaatgtcttgcaaagagtcctgtgatgcaatccatactccggtctcccagnccatggataccagcacttagaataatggntacttcactttagaataacgggccccactccatccagggttggtt

SEQ ID NO: 552489 - DNA, 119 bp, Homo sapiens
ctgacggactgcccagctgccagctgtgctgctgagcgcgccggcgtagttgatgacccggtagacgccggtggtcgaatcgatgccggcgcatccgaatgtctgcatcgttgagcgtg

SEQ ID NO: 552490 - DNA, 265 bp, Homo sapiens
tgtctcgacatggtcgaagacattctatacagtattgctctaatgcgtgagaggaaactatgaaacgctttctctccacggcagcgaacgaccaaacgcagcaagcccattccacgcgacaatacgatcaaaaccgctcatcaaacgattcaatacccattgattgttcggcaagagcaataactccatgccatgtgctgacgccatccacagcaactcaaaggaagaaaggaatctctcatagcgtaagccatgtgtgcgcagt

SEQ ID NO: 552491 - DNA, 497 bp, Homo sapiens
  misc_feature (18)..(18): n is a, c, g, or t
aaaaagacaggggagatncttaaagaagatgaatctgggatcacttaaagctacaatagaagacatgcgattcaaggcaaagagaaaaagagtattggagcaccagggacaagttcgactgggaatgatgcgccacctttatgtggtagtagatggatcaagaacaagggaggaccaagatttaaagcctaatagacggacgtgtactttaaagtggtgggaatacttggtagaggaatatttggatcaaaatccggttagtcagatgggaataatggtaactaagagtaaaagagctgaaaaatggacggaactttcaggaaacccaagaaaacatatagcgtcttggaaggaagcggtggatatgaccggccagggagagccatctctttataattccctaagcagggctatgcagactctaaaacacatgccgggacatacaagtcgagaagtactaatcatctttagcagccttacaactggcgatccatcaa

SEQ ID NO: 552492 - DNA, 423 bp, Homo sapiens
cgggcagtctcagcgctgcacaaagaggcagcgatcgagtgcacacgcacaacaaagaaatctgcggtaaacatcacaaagactctctaagcaaatgtatccaataaaaacagaaacaagacagaggcgatgggactaaataactaatgcttcaatgccaagacgcagatgtacatccacaagaaacaacagcaaacaaggaatgaagacctccctaaacagacaaagcaaagaaccagtcagtgaatgacctcagtgggatggcaatatatgaactctctgaccaacaatgcaaaatagcagttctaaggaaactcagtgatctccaggataacacagaaaaaaaattcagaaatttaacaaagagattagaacaattttttttctttggagatggggtctcactctgttgcccaagctgca

SEQ ID NO: 552493 - DNA, 105 bp, Homo sapiens
tgatctctgacctcatgatcaccctacccgtggctccaaacgtgctgacgacttacaggcgtgacgcacgcacccagcatatgtgacgtacatcttaaaaatatt

SEQ ID NO: 552494 - DNA, 238 bp, Homo sapiens
tgtatgagggcgagcgctgtgccggcacggaccccgatggctgtgagttcgccacgcctttgcctgcttcgccgaggcagcctcaggttacatccctgcggaccacctccgggcgctgctcaccaccctgggtgcacgcttcaccgatgaggaagtggccgagatgtaccgggaggcaccccattgataagaaaggccacttcacactacgtggagattcaaccgcaatctcaaacat

SEQ ID NO: 552495 - DNA, 335 bp, Homo sapiens
ccacccaggcgcacttctggcctgggcctgtccccaacaaacgcctaagagagtcctccttaccacacagggtgtgtacattatcagtaaaatgctgtcgatgcagatattgtgacggatgatgacgacctggtcctacgcagagatctgagataccaagacgaggaccgactccacgttcgacgggcgccctgcctggatgcggacactgcacatccaccgcgtccatctcgttgcccctcatcctcccatacgctgagtccacctcaagcgcaccgtcgccaatatcgaggatcctttgttccggttctttgagagagaagtgcgcctgggtg

SEQ ID NO: 552496 - DNA, 126 bp, Homo sapiens
cttaagcactacaggacaagttctagtctttgccactgaataaaactcataggctgtgcctcaaataaaatacaatcaacaaatatagattaatatagtctagtgtagcgctaatgtacagtagct

SEQ ID NO: 552497 - DNA, 682 bp, Homo sapiens
ctagacaaataagcttagtgtttacgtgactgaacagtcatcctgctatggtttcaggtgtgggatttggaccatgaggggctcccgtaggaggatggcggttgtgtttgattctgatttgggatttcagtacatattctccagttcccatagaaggccacttattctttgagaaactggtggttcgatggtgttgcgcgttcgaagtgaagtccgcttgtgcaaagacgaaggacggtgcaattcacagtgtcactttcagctaggcaggaagttgtctccagataccttctggctacttgaaagttactacaatgaattccaccagctgaagtactccaggttttgcaacagggaatgtgttcattatggatcagtaccaaccgagaatggatttatcatttccagaacaaacgactggcaccgaacatgtgtacgttgggaagacttggcagagtgttagtcatgatctgttacttacgtgttcagtctgttgttctcacccccttcgttagttaccatctctttttcaagaagaaaaacgaaaagccacagtattatcaaggtctctacacttggactggggggaaacatttgagattaagcacataactttggaattagttctttgttcaatgttgaatgtggcgccgttatgccgatgattatcaggcgccctggg

SEQ ID NO: 552498 - DNA, 105 bp, Homo sapiens
atgcgcgggatgagctattgacgcttgagtgaggtaaggagtgattagttatcaatgagatggtaagggggtgcatgactcggtcgccacaggagggagtagggt

SEQ ID NO: 552499 - DNA, 596 bp, Homo sapiens
  misc_feature (2)..(2): n is a, c, g, or t
tnagttatattcccttcctgaagaaacgtacagggctgcagtcctcagtggtgggtagagccctttgttaaaaaacaaacttctctagtgggtataatttgggaaattttaaaaaataataacttagtctcatattttacagaactggaactagaaattgtctttgtccagccctttatttcagggataagggaatgaaggtacagaaaggtttagtgatctggtcaaggtcagaagcaaatctaggcctaaagaccaggtttccaagtgcattatccaacctactttactggttaatattccttgtgttttcctgacattgagactgtcatttcttgtttattttggggttttgaacataattttgagagggggggaaaaaggtgtggtttttaggtttctgggttgtattttaaaattttttgtagagacaggtctggctatgtttcccagcctgatctcaaactcctgggctcaagtgatcctcccaccttggcctccaaagtgctgggattacaggcatgagccaccacactaagctggaaacagggtttaaactttttttcccctaagttattttggaccttcagcctcaa

SEQ ID NO: 552500 - DNA, 989 bp, Homo sapiens
gtgtgccactgaagatcgtggtgtcgccatgggccgccgtccctgtccgttgttaccggtattgtaatgaacaagccgtacccaaagtctcgcttctgccgaggtgtgcctggtaagtagtggaagatgcccctgctctggttggctctgcggactccgcagtcgtctgtgacagcccccgtgcatcacttacccaatccttttagatgccaagattcgcatttttgacctggggcggaacaaaggcgaaaagtggatgagtttccgctttgtggccacatggtgtcagatgaatatgatgcagctgtcctctgaaggtaaggcaggattctttgttcgttcaccccccagttcttccttcgcgtgtctgcccgtcaacaccgcgacccatatagcaactgctctggaattgggagttgatgaaagcatgatgccttacaaaattcagtcaacactagtttcccctgagctggagatagtcagtggtgaatgtttctctattatcttctctcacatttgctgcttcgctatctcggcctacctagccctggaggctgtccgaattctgtgcccactaagtacattggtaaacacacgttgtggcaaagagtggcttccatatccgggtgtcggctctcaccccttccacgtcatccgcatcaagcaagatgttgtcctgtgctggggctgacaggctccaaacatggcatgcgaggtgccttttggaaagccccagggcactgtggccaggtttcacattgggcaagttatcatgtccatccgcaccaagcttgcagaacaaggaggcatgttgattgagggcctgacgcatggccaagttcaagtttcctgggcgcagaagggtatgtagtgttgcagcccccttctcccacctttgccccaggctcctgactcaggtcatccattgctcttagatcacatctcaaagacttgggttcaccagttcaatggtgattattgcagactgg

SEQ ID NO: 552501 - DNA, 313 bp, Homo sapiens
gaccaggcagttgccagcgctgatgcagtgcctaggggtctccatttagcagaaatggtcatgacagcgatatcatgcctggaaccaggtagggcattcggggagggcaggtagaaagaaacagtgtgcagcatctctcacatttgcagtttttcatcctattgtggcatatcatgcatttctcaaactattatctgaataaattttcccactcttggcaagggtagatttcagcctccaagttgttctcagtctcccaggaggctgccagccccatcctcgttatttaattcttgagtttttgggggccaac

SEQ ID NO: 552502 - DNA, 310 bp, Homo sapiens
tcacctgtctctccatatcgcatgaggaatgggttcggacccaccatggatacttgaagcaacaacggctcgagtctgttatatacagaggtagtattgcatgtaacttttacatcatctcagattacttataataactaatgcaacgtaaatgccatgtcaaaacttgttatattatgttgtgtacaaaataatgacgaaaaaaactcaatacatgttcagtatagatgcaaccatcctttctctggtcttatccttagatcttgtttaataagattaaagactaaggataagacaaggtagagccgag

SEQ ID NO: 552503 - DNA, 457 bp, Homo sapiens
gcgactctagacgatccctacctaaatggctgtagatcaaagcagcatatctccaggaaacaggaaagccctggatgaaacactgaagaaagcccttacagttcaccttgaggaggtagttttagctcttgtaaaactccagcgcaattgtgtgctgatgaacttcgtgctgccatgaaggggcttggaacctgatgaagatactctaattgggattttggcatccagaactaacaaagaaatcagagacattaacagggtctacagagaggaactgaagagagatctggccaaagacataacctcagacacatctggagattttcggaacgcttggctttctcttgctaagggtgaccgatctgaggactttggtgtgaatgaagacttggctgattcagatgccagggccttgtatgaagcaggagaaaggagaaaggggacagccatttaggta

SEQ ID NO: 552504 - DNA, 584 bp, Homo sapiens
agagcgcccagaatcatacttttaagcataattcattgagcactcaagatgaaaaaatccaccgccatatatgaggtgtttctataggaaatatctatatacttttatagttctaatttcattttacataaactgttttaatcagtttctaataatctatgaagataattcactgtttcttgaggggatgctatccagagggtacatccagctagccttgccttaaaatcatttgctgatcccaccggtgcaaactgatcgcctacgtgtaaggtttcagagggttggataggagattcagggttataaaattgttgcaatgctcgaacaccaagatctttccccccaatatcacaccagacatcactaccaccatcaaaacaactaaattgaattcttctagatggggcaaaagactctaaagtgttttgaagggttaaaactatttcctccagttgttccctatcaagcttaacaggaacttgtcttttagaagcttcatcgtaccgttcgcctgggacgatacccactgccctgactttacggataatagaaatctctgaaggtagttttagtctttttct

SEQ ID NO: 552505 - DNA, 925 bp, Homo sapiens
gtttgagaccagcctggccaacatggtgaaaccccgtctctacaaaaaatacaaaaatagccaggtgtggtggtgtgcacctgtaatcccagctactcggaagtctgaggcaggagaatcacttgaacctgggaggcggaggttgcagtgagtctagactgcaccattgcactccaacctgggagacagagcaagactccatctcaaaaaaaaaaaaacacaaaagaatgcccccttttatgattctgtttctataaaacaggcgggagctaattggtggtattgagaagtacacgacaactatttacctttggacgaacagggaacggagaagctgttcacgaaaagactcatgaactaggggacttctgtggtgctgatctactgttaccatttttttatccctggtccttgtgtttacccacggttgtgttcgatttcggtgacttaccttgtgcgaactatctaccttataatttggtgcttccctgtatgtctttggtacttcaaaacaaacgtttacaattttcacttataactggcagctctatggagtctagcctcccagagtgtttcattacgaacccggaaacgtagttaagctgttggaagagcctcagtgatggatgactggcgcctaaaaccaagagagttgcagaaacatcggaccagcgattgaacttgacctgtttgtactatatctaacactgagtatccattatttaatttaaatgtcacctacttctggtgcactagccacatttcagatgctcatgagccatgaaggctcatggccgccataattgaacaagcaaaactctagtgataagccataatggtgattaactacattttatcatttaatgccttcttcccaatcctgtccaattatttggcgtaccctttaaaattaacccatgtgttg

SEQ ID NO: 552506 - DNA, 625 bp, Homo sapiens
  misc_feature (614)..(614): n is a, c, g, or t
ggggttaaaaaaaaaaaaatttttaaaaaaaaaaaatttaaaaaaaaaaaaaaaagaaaaaaaaaaaaaaaaaaaaaaaaaaaaaaaaaaaaaaaaaaaaaaaaaaaaaaaaaaaaaaaaaaattttaaaaaaaaaaaaaaaaaaaacttggggccccattttgggcccttttggccctttcccccttttggggggggttttcccattccggggcccggtttttaccccgttgggcctgggaaacccctggggttcccccattttaaccccttggggaaaatcccctttttccccgggggggtttttccgaaagggccccccccgttggcctttcccaaaagttggccccccttttggggcaatggaattttgagggcttaatttttttgaaaaattcccgggaaatttttgttaaaaccgctttttttttaccccattgggccaattggggaaaatccttttttatccaaaaaatttccccctattagggttgggggttgtccccctttggcccaagggccccttttataagaacgtggccctccccttaaaggggggaaaaccccttttttgggggcgggcccccttttgggccttccccctttttttgggnctcggggcccc

SEQ ID NO: 552507 - DNA, 119 bp, Homo sapiens
ctaagagtgcatggctactcttgcaagcagtgttccttgtgctagcagtaaatgttgcctaatttggggcatgctggtgtgtctagcagactgttcttgtatagtggaaaggtaactgg

SEQ ID NO: 552508 - DNA, 232 bp, Homo sapiens
tgaagaactattgaatactattttgacagtgagaaatcacaggacttgtcagtgttgagactttttgttcatcattttcaagctgaatggaaagactcagttggtaagggagatactgaagacaaaaaaggacaagagggttctatacaaggtctcaggcattacatggaagacttgagatcctatagccacactgatcatctttttgaaatatactgccctttctggttgt

SEQ ID NO: 552509 - DNA, 263 bp, Homo sapiens
ctcatataacagttcccaccctcacacgattcctttacctattcacttcatcttgcccttcattattgcagccctagacagtcactccacctcctattcttgtcactgaaacgggatctaaacagcccctctggcaatcgcctcccattccgtctaaaatcaccttccaccctctactacactaatcaaagtacgccctcggacttacttctcttccttcatctccttaagtgacattatacacttattctcatccatgacct

SEQ ID NO: 552510 - DNA, 332 bp, Homo sapiens
atgtgcatttctagaattaaaaaaagaaaaaagaaaaaagaaaagaaacttctgagggaaggtgacttacctagtattctatacccagtctggaatgcagtcaggtatgaggatttaatgaagatacattcaaacatggaatatctgaaaaagaatttattttacccttttgaggaatctgctagaagatgaagttcaacagaacaagggactaaatcaagaaacaaaacaaaaactaatctaaaatggaaaagacaagtcctaataggaccaggcctaggcagcaactagaacaaattagaggaggctatgggagaaagatctccaggttt

SEQ ID NO: 552511 - DNA, 156 bp, Homo sapiens
tcacatcatctgtgtagtatagtattatctatcattagatacttatttgtcacaaggcggagaatatattacatgaagatatatttatctcctcactctcaatcacttattgttactcatggctacatttgtcacctgcattgagcaatatttagg

SEQ ID NO: 552512 - DNA, 308 bp, Homo sapiens
ctattaagacgacagaagggtctttacagacgtgattatagattggctgggtgcagtggctcacatctataatcccagcactttgggaggccaaggcgggcggatcacctgaggtcaggagttcgagaccaacctgaccaacatgaagaaaccccgtctctactaaaaatacaaaattagccaggcatggtggtgtgtgcctgtggtcctagctacttgtgagtctgaggcaagaggattgcttgaacccaggagtttggggttgcagtgagctatgatcgcgccactgcactccagcgtgggtgaca

SEQ ID NO: 552513 - DNA, 429 bp, Homo sapiens
atcgcaaggtgttcagttgtgtatctagacgtaatgacctgttcgaataaaggacaggactgattcagatagaatcggtcagtgtctgtgatcgtaagcagatggcaagctcaaagggtccatttaaaggatggttaatctaggctctagtgacagatgtgtgggcaggcatagggaactagcgatggtcagtcactgtgggcatgttggacctaggtagacaacagcgctgagctgagttcagttcctaacgcattgcagtacctgaagctttgggaatggggtctgctccagtgacacatgtatgtagcagcaacacaggcgccctcaatgctgcaagtgggcacagagtgggagtgcgtgaggaacaaatacctcatgatctctctactctacgttcatgtcggcagttggaacagctacgttggc

SEQ ID NO: 552514 - DNA, 124 bp, Homo sapiens
ccacgcgtccgaccttcagcgcctcggctccagcgccatggcgccctccaggaagttcttcgttgggggaaactgcccctgtcccccgccccgcccccctgtcccccctccgccgacccctccc

SEQ ID NO: 552515 - DNA, 471 bp, Homo sapiens
  misc_feature (6)..(6): n is a, c, g, or t
  misc_feature (25)..(25): n is a, c, g, or t
  misc_feature (61)..(61): n is a, c, g, or t
  misc_feature (207)..(207): n is a, c, g, or t
caaaancaagcaatccctgtccccnaccagcttttgcctctgccaaccccagggtgcccantcttaaatttcagagcatcactggtactcacccctggtccctgcagctccctgggccccagagacaggatttcgtgttagcctccctcgtactgtgctggggtgatgataaaactaacaaccccaggctggaacgcagtggctcanacccgaaatcccaacattttgggaggccgaggtgggtggatcaactgaggtcaggagttcgagaccagcctggccaacatggcgaaaccctgtctctactaaaaatacaaaaattagccaggcatggtggtgcatgcctgtagccccagctactcaggaagctgaggcagaaaaatcgcttgaacttcgggaggcagaggttgcagtgagctgagatcgcaccactgcactccagcctgggcgacagagcgagactttgtctca

SEQ ID NO: 552516 - DNA, 465 bp, Homo sapiens
tcgttagatatccaaacccagaagcagtctcatacccggaaaattggcgccacttcatccgtcatctccagaggcagcagattctagctgcttccccagaaggcttggggaccatctccagctgcaatctccagaatctcggaagtcagcccggactacctcccctgagccaaggaagccatccccttcagagtctcctgaaccttggaaagccgttccctgctgtgtacccagagcctaggcccacagcccccgatgtgtaaccaggctcttggaaaccagggacaactgggtcccataggccttgggaaatccaaatccttcagcatcatcaggaccttggaagccagctaaacctgatccatctgtgtctcctggcccttggaaaccaattccttctgtatctcctggaccttggacaacacgatcaatctgtgtcttctgcatactggaaatcatcatcag

SEQ ID NO: 552517 - DNA, 590 bp, Homo sapiens
cacattccagtagcctaggtacaattgccagattcggcagtgtatagttcaattccagttgcagcgatagatcaatcgggggcctcgagggggaagttctgagacgtctctcattttgcataataagtaatattctaccatcccaaagtctgcttttctccttaattgatctttggggagttagacaatacaatcatcattcctgagagctatttggtgctttagacagtttacaaagtgcttccatttacacaattttattcaaataacataatcaccttacaagctagaagggttggaatcatccgtctttcatactgataacaacttcaggttctaggaagttaagccacttgcctaaggccatacaactctaaagggtgaaggagggccttgatttgtcttctgacttcatatccccatgtttgctcgtgccaagttctttggtctgatgttacctctccgccaagttttacggacaaatcgctaacaatataaaggtctcatcgttttaaagtacgcatcagaggagagacatagagaccttcacagaaaaggtatcattagatcagagtggataggtggacata

SEQ ID NO: 552518 - DNA, 202 bp, Homo sapiens
atacgcgttatgagcatttccggtacatgttgtccgtgagggcgtagattgcggggtgattctcatactggtgccgcgccctgatagaggtcgcatctcatcggtcggtgcaattaaggcatctgctttaaggggtttacacgagattatgcacagagcctcatgtacgctgaacgcatgtattacgatctactcacggcgc

SEQ ID NO: 552519 - DNA, 223 bp, Homo sapiens
aggatttaggatgagcccgataggtgttggcagaccaaatggacatttctcttaaaaaaccagtatatatagtctgttcatatgtaaaattcagtggaagagaggtggacagtgctgttattttaaacagaaggttgtattattatgttgtcttgtctttctactattgcttgattaaatttggcatttaaatagtggtggaactattttatataatcgcgat

SEQ ID NO: 552520 - DNA, 290 bp, Homo sapiens
tatcgaccgctaccgtgtgacagtattaggatcatgggcctccccagaagtagctgctcgtcattccctaggcgcaacttggcattctgacatgttctctgggtgtgcttatccaaggtggcaaacatggagcttacgaggctcttaaggctaaccttaaaaatagcacattatttctgacacattctattggttcaagccaatcacaaaggcagccgagctttagggtggggaaatcgactccatgtcttaatggagtgtgtcatgtatttcattctaccaatgccctt

SEQ ID NO: 552521 - DNA, 342 bp, Homo sapiens
  misc_feature (177)..(177): n is a, c, g, or t
  misc_feature (227)..(227): n is a, c, g, or t
  misc_feature (229)..(230): n is a, c, g, or t
  misc_feature (239)..(239): n is a, c, g, or t
ggacttttaaagagcccttcttaacccagcagtaattggaacacatttgggagcagtcctatgttttagtgccctttaaatttttgccttgagccttccaggtcagtgccattggtttagaaccattaaccctgcattgttgttgattgtcacgctggcatttatagataacggctntccagacctgagctttccgggtcagcaagtaggaatcgtttttgctgcanannataaaaggnccacgtgcaatacttaatgccgcatgatttctatcccttttcccaataggggctggctcttttgacaccctttggggtctgtaaaataaatgctgtggctcct

SEQ ID NO: 552522 - DNA, 827 bp, Homo sapiens
  misc_feature (11)..(11): n is a, c, g, or t
ggggtccttcnggcgtcgccggagtgaatgatccgggagttgaagagggctgcaaggtgggaagtgaagtcagtgcctcagttgctgatcagtgtgttttttgtgtccaattcttttatcaccaaaaaagagaacgaaatattgcagtgaatgaagattcctctgcattttagcactgctttttcaactgtagttggcttttgaatgaggatgaccaatggaagagaatgaagaatgaagctgagaccacatccatgggtttctatgcccctctatgcagtcatgtatcctgtgtttaatgagctagaacgagtaaatctgtctgcagcccagacactgagagccgctttcatcaaggctgaaaaagaaaatccaggtctcacacaagacatcattatgaaaattttagagaaaaaaagcgtggaagttaacttcacggagtcccttcttcgtatggcagctgatgatgtagaagagtgtatgattgaacgaacagagccaggaatgccgagacctatgcgaacaaggcacgagcacttaaaccaaattctcagtaagatcccagattgagatcaatgacagagtgagggtttctgcagaacaatccaggatatagctagtgcaataaagaccttcttgatacagtgaataattgtcttcagagaagagtattgataccagaaccgcaggcacttgaacaccaaaagaaaggatctgttaagtaatccaagaagttcagtgataactctgaaacgggattttaaagatgggaaggcataaatgtgttgggaagtgcgacgattattgattaaccgagtatagtcgaa

SEQ ID NO: 552523 - DNA, 919 bp, Homo sapiens
  misc_feature (11)..(11): n is a, c, g, or t
ggggtccttcnggcgtcgccggagtgaatgatccgggagttgaagagggctgcaaggtgggaagtgaagtcagtgcctcagttgctgctttctcctcgtaagatcttgtgtctactgtgatcttggaacgttgactacaccacgtcattttcgcgcatgacgaatagtccctaggaaagatcagtgtgttttttgtgtccaattcttttatcaccaaaaaagagaacgaaatattgcagtgaatgaagattcctctgcattttagcactgctttttcaactgtagttggcttttgaatgaggatgaccaatggaagagaatgaagaatgaagctgagaccacatccatgggtttctatgcccctctatgcagtcatgtatcctgtgtttaatgagctagaacgagtaaatctgtctgcagcccagacactgagagccgctttcatcaaggctgaaaaagaaaatccaggtctcacacaagacatcattatgaaaattttagagaaaaaaagcgtggaagttaacttcacggagtcccttcttcgtatggcagctgatgatgtagaagagtgtatgattgaacgaacagagccaggaatgccgagacctatgcgaacaaggcacgagcacttaaaccaaattctcagtaagatcccagattgagatcaatgacagagtgagggtttctgcagaacaatccaggatatagctagtgcaataaagaccttcttgatacagtgaataattgtcttcagagaagagtattgataccagaaccgcaggcacttgaacaccaaaagaaaggatctgttaagtaatccaagaagttcagtgataactctgaaacgggattttaaagatgggaaggcataaatgtgttgggaagtgcgacgattattgattaaccgagtatagtcgaa

SEQ ID NO: 552524 - DNA, 361 bp, Homo sapiens
tcagtgcctaggacgtctatggcacggtgaatctcgagagtactattcgtgcatgtgtcagaaacagaaattcttttggtcttttcctggctctggtgttgccggcagttgtgcagaaatgagtgaccagtcacggttacattcatggcgcaccagagagtcttcagtgagatagtctctccggtatagcccgttaatgtatctctcgagcatgtctctggtacaagcgactatgccggtaacatcctgcttgatactctagatctagatagtccaagtgaggtcaggtctacgcttgcggagcagaccatggtatgcgaatcatgggtcccggtcctcttgggggatcctgctagagtcg

SEQ ID NO: 552525 - DNA, 225 bp, Homo sapiens
acagaaaaataaggtcataattttccctttgcaactataaaatcacaagtctaaatacttttagatattttttacattttagattcagggagtacatgtactcgtgtgttacatgggtattatatgtgtaatagtggagactgggtttctagtgtacccatcatccaaatattgaacattatatgcaataggagattcttcaaccctttttcctgcttccggtcg

SEQ ID NO: 552526 - DNA, 102 bp, Homo sapiens
  misc_feature (97)..(97): n is a, c, g, or t
ttcccatttttgggcactaaggggtaggttccatcttgtccctttcccaacctttatatttggggtccttttttatacaggaaaaccaaacctttgnattta

SEQ ID NO: 552527 - DNA, 899 bp, Homo sapiens
  misc_feature (11)..(11): n is a, c, g, or t
  misc_feature (155)..(155): n is a, c, g, or t
ggggtccttcnggcgtcgccggagtgaatgatccgggagttgaagagggctgcaaggtgggaagtgaagtcagtgcctcagttgctgctttctcctctaaatcttggtctcttgtttggaagtgactaacagcatttggcatgagaaagccctanaaagatcagtgtgttttttgtgtccaattcttttatcaccaaaaaagagaacgaaatattgcagtgaatgaagattcctctgcattttagcactgctttttcaactgtagttggcttttgaatgaggatgaccaatggaagagaatgaagaatgaagctgagaccacatccatgggtttctatgcccctctatgcagtcatgtatcctgtgtttaatgagctagaacgagtaaatctgtctgcagcccagacactgagagccgctttcatcaaggctgaaaaagaaaatccaggtctcacacaagacatcattatgaaaattttagagaaaaaaagcgtggaagttaacttcacggagtcccttcttcgtatggcagctgatgatgtagaagagtgtatgattgaacgaacagagccaggaatgccgagacctatgcgaacaaggcacgagcacttaaaccaaattctcagtaagatcccagattgagatcaatgacagagtgagggtttctgcagaacaatccaggatatagctagtgcaataaagaccttcttgatacagtgaataattgtcttcagagaagagtattgataccagaaccgcaggcacttgaacaccaaaagaaaggatctgttaagtaatccaagaagttcagtgataactctgaaacgggattttaaagatgggaaggcataaatgtgttgggaagtgcgacgattattgattaaccgagtatagtcgaa

SEQ ID NO: 552528 - DNA, 804 bp, Homo sapiens
tcaagctgtcgtccctatggggctgtgttttccttgtcccggggagtccgcgcctcccacgccggacctggaagagaaaagagcaaagcttgcagaggctgcagagagaagacagaaaagaggctgcatctcggggaatttgagatgttcaagtctgtgcaagaaaagagaaagagaaacaggaaaaagatagaaaaacaaattgctacgatccgggcccccaccgagaaggtggagttaggtggacagtttcataaagcataacatgagtagaagaatctactgtccaataacgtgtttattatcgtgcaagtcaagtgggctgtcatcaatttagattatcgttctcgtttgagtaaatgaagattcagacgttggtaagtagttagttgcccttagagtgcaatgctaaaaaaacgtcgattttcaagcttagagaatggctagacttttcattaaatactgagttttcgctacatttggctcttctgcagttagtgggtgattggcgtatgtttcttagtagttaaagaaatggaactaaatagtgaatatacgatacactgcatgtaaacattctgcatatacctctaagattagaattcgcagtagtcttttgcatcctttataaaagtgatcgtaactacttatatttgtgctgcatcgcgttacatctgttgaattgcactatgaagatgttggatgaaacttatggacttagtgcctttaaactgatcagtcaggcagaatcttgaaaaaatcatgtgaaggggtgatgtgaaggagcactgtagattctcatag

SEQ ID NO: 552529 - DNA, 767 bp, Homo sapiens
  misc_feature (194)..(194): n is a, c, g, or t
ctctcggtgaatgtgacgcccggatgggcgtcccgcgagatgctcctttggtggtttcggaggtagccccgggtccgcccgtaaattcgtgttcctgcttggttcgcaggcacccccgtgtatatcgcggcaagggtgatctcccgtctggccgcgggtgtctcccggggcaaaatattttcttcccccggtgnatttctcgcgcccaccctttcttcggcgctcgcgggtgctaatctctcctcgcactcgcgacgctttcccgctaagatcttctttggtaactagataataagcggttcctcgaccgcgctggaggcgtgtattgtcgtcgccaaacatatcttcggctctcgtgatacatagctgtatctttgaggcaaaacatattatgtggactcatcgcttcgcccgcccgctcgatttttacaagagctcgctctcggtggagatttggtgctctccccctcctgtgagatatatctttcgtggggagacgagcggacgcccccctctcggtgttttatatgctcgcgggaaagaactaaggacgtgtctctggcagacaccttcccgcgcggtgcgtcgtgggacacaacacccagcaagctgtttgtgcaaatgtgcgcccaccacgacgtgtccgccgatctttctgtatatatcgtgtttgtaattatacttttggcgcacatctctcttctcgggcctcgtgggcgccattccacccgcagttattctccaacaaagaaacaaataacaaaaaa

SEQ ID NO: 552530 - DNA, 940 bp, Homo sapiens
tggaaacacagaaggaaattggtgggacccgggggggggggggttacggggaacggaaatttcgccatggtgtctcaaaaaaaaaaacaagggggtacttggaatttctataattattaaaaatggggctcataaaaccttactttttattattagataattgggcataattaattgtggacattcagtttggcccttttaatagagtggataattagcctttaaggttggggtgaattattttacaaattcaattttcctttttttaattctcctttaaaaattaataggaaatttcagtaataggtggtagtagtgggataatccttaaggccatttggattactggaacaggttttgtggtgcattagtgccattggggaacccttggtttccctatattgggcaggggcattctcccaaccgggggtctccattttgggttccagggagtcttctatagaaggtctcctttggtaaccctcatattgggtgtggcccacttatatacagtggtccatccgttggctggtttaccacaggcgaaccctttcaccgttgttaatttaatcctggcacacggtctcaccacaggggcctcgggttgttgggtccacaatacaaaagggatctctggaagatggtctctcttacacagttccaagagggtatcgggtccacatcattaggtggatgtgaccctcatcggtgaatattgtcttctaacataaccattttactaacttatggggtattcccactcccacttcccatggttttgtgcatggctatttttcatgaccggatattcttcaatatggtctattcttacagttggggtggggtacatggcctggggaacactcatcttagcgggggggacactccgcgtggttgaacctgtggcttcacaagcttatggatacaccggcacaaacac

SEQ ID NO: 552531 - DNA, 944 bp, Homo sapiens
ggtggttgctgtccgcggagtgaaagcgcgtggtttgtttgtgtccctggccatgggctgcagtctcctgggagcagtgaatcaccctggcgggaggcgaaatatcgggggcgagttctctctcagtcgggaatcaacgagcatgtttatatcggggggtggaatacatccaattttgaaacttttaccttccgaagtgcaggaaatagggactccacttgtgtttgtaaattaaggtggttctgtgaggcttcattaaaaatacctaaaataagtgtgggtgggacaacccacgttggaaagcatgtggtttattaccaaggtgtcgcagttcaagaaaacgtggtttgtaggttatcctcaaaacttctgtgacaggtgggtggagcgtcctggaaaaggatgggcaggttggatattggaggtgtgacaaagagtggcaaaatgatgaaggttgaaccccagagaaaatgtctcagaaaagctatcacaggaatgaaatcggtcgaaggtgatcagacagatcagcggtaagggtggacatttctgccaagtgtgggaaaagtttctggtccatgagggatcgggttgatttataacaggaaaaggattggggttggtaccctggaacaaaattagggaaagaactgcgaggaacaagaagtttgaatcaacccaaattcgttgacgaagaaggtcacgacattacggttaattttaatttattaagaatcccacagaaaatgtaaatgaggcgttgtgtggcttacaaaaatttccgtgtacatgactgtgtgttgcacttgagcaccatcattggtatttggaatttggaaaagtgggttttcgaaaacagcgggatcacatggtggaactgataagagaggtggattttaagcgggaaccaacataagagcttagtagggtggcaatgacattaggga

SEQ ID NO: 552532 - DNA, 812 bp, Homo sapiens
gcttgttcgcgcaacgggtttgtcggcagtaacgacaggtgtcgtgaaagatagccctaaaatgcgaaaatgggtataggagaagactcatatcaaccatttgtctgtctattggggactaatgttagattccggggcaaagtctctaatcttactacttgtgcccatctggatctaattaaacattgcgcgtggcactcgggaataagagaaccaagtctgcatatccatttgtccgagaccgagagcgctttgcattgcacgcatttgggtaacaggcggctcacttactagctatcggccacgtggtccttgggagtcaagactgaaaggggctggatgcgtgaacggtcgccttagtcagcgcatttgattatctctcttcgtcgcatacatgtgtggatgaccatgcaaagggtacccgtagtaggtgatctgtagtcatttggattgcccccctattgggagcaaccatgatgatctctctattccaaatatagaccacttgaatttaacaaggggggacaatcttccaatgagctagacctttgttgccctttgtccccttagactcctgagtataggcctagcctgtgtggtggttggcgctggacatttcttcgatcatcgctaggggtaatatctccccaaaggaaacttgggtgtctaggaaccaccggaggaagcgattgccccatatctttgggggttttagcacaatctgggcgtttgttggcaataggaaaccttagatttggtccaggttgttttaaaccaccaagattcgggcatttcccaaggttgatgtccaa

SEQ ID NO: 552533 - DNA, 361 bp, Homo sapiens
  misc_feature (38)..(38): n is a, c, g, or t
  misc_feature (280)..(280): n is a, c, g, or t
  misc_feature (282)..(282): n is a, c, g, or t
  misc_feature (350)..(350): n is a, c, g, or t
tttttttttgagaaggaattttactcttgttgcccagnctggagtacagtggcaagacctcggcttactgcaacctccgcctcctaggttcaagcaattctcctgcctcagcctcccaagtagctgggattacaggcatgtgccaccacgcctggctaatctttgtatttttagtagagatagggtttttctatgttgatcaggctggtcttgaactcccagcctcaggtgatccacccaccttggcctcccaaagtgctaggattacaggcgtgacacntngcgcccagacaaagcagataattctttaaaccactccccctgggtaggaatatgtatttaataaaatnaggccgatttt

SEQ ID NO: 552534 - DNA, 406 bp, Homo sapiens
aagccccggggggccaaaattagaacccggttttttgccccaattttgggtcccgggggccggggccggtttaattatttacgcctttgtagcgccttaaaaaatttaccccggggggaattcccctttcccagggggcaaatttgggccccttaggggggggggttcccccccggggttttttaaaaccctttaaaaaggtggccccccccccgaaaaggccccccccgggggttttccccgaaaaaaaggtatgggcttttttggagatgggggttttttgacccccgggggcccccggcttggacttttcgggcccagttttgggccgagggttaggtttggtttttttctttgttttttggttttttgcccttttaaaaaattaccttgttttgccaaatta

SEQ ID NO: 552535 - DNA, 299 bp, Homo sapiens
ctgttctcgtacctgaatgttgtaccatctttgggtaggcagacttccctgacgacatcagtgatacccaaagctgagcagagcgtggtttacaaagactttatttattttactgtctttgaaggaaacgttcgcaacgtttcctggaagtctcggtatgagttatttaatgctctacagccctttgtgtttgtccaactttggaagccagttagtttcatcctagagtttcagacagtaggcattccccgtggtaccaaacacaaagggtgggaacgaattgagaaaacattctttca

SEQ ID NO: 552536 - DNA, 591 bp, Homo sapiens
ggcagctacggcggcggcagcggcggcgcggttgcgattcccgagccgttgagacgctctctgcggcagctggtggcgcaggtggcttgcgtggacgcgggtagaggcgaccggccagcaatttgcagcgtcggcgcccgcggcccggcagcaggcgcgtcgggacgccccgaggcatcctcccccgtccgcgggcccggtagctgggcccgcgtcagctgaccagattcccagcgccgacgtatctcctcgccgcctccgggcttcggaacccggtctcgccccgaaacatgactcgcgatttcaaacctggagacctcatcttcgccaagatgaaaggttatcacccattggccagctcgagtagacggaagttcctgatggagctgttaaagcccacccagaaaagaaactaccgcatttgacttatgatgggaacctcatgagactgctttcttaggaccaaaggatatattgtcctttactcagaaaaataacggacaagtatggcaaacccgaaatcacgagagacaggtttttcacttgaacggtttatggggcacaatcgaataacaactccaagaagtggaa

SEQ ID NO: 552537 - DNA, 148 bp, Homo sapiens
tacgaagggcactctgggggtgtgacttgccgtctgcaaacctggtgccgttgtaaaaggggtccccctgtatcgccacaactctcactttgttgacaactctgaagtcatcctgccagtccccgcgttcaatgtcaccaacggtggt

SEQ ID NO: 552538 - DNA, 216 bp, Homo sapiens
caggtggatcacctgaagtcaggcgttcaagaccagcctggccaacatggtgaaaccctgtctctactaaaaatacaacgtggtggcacatgcctgtaatcccagctacttgggaggctgaggcaggagaattgcttgaaccagggaggtggaggttgcagtgagcccagatcgcatcctaggcggcagagcatgactccatctcaaaatagtttc

SEQ ID NO: 552539 - DNA, 169 bp, Homo sapiens
ctaaccaaagcttgtatttggaaatttcctttttggccaaattgaattatataatgcttaaaatactttgtccctttataagcaaaatgcataggacttaatttgtttatcctgtaaagtatatgttaaatgcttttatccctttgagaataaaaagttactaatgcta

SEQ ID NO: 552540 - DNA, 518 bp, Homo sapiens
  misc_feature (246)..(246): n is a, c, g, or t
  misc_feature (403)..(403): n is a, c, g, or t
gccttgattctctgcgacgggctcttgtggccaccgttcccttttttcgggggtgggagggtgctatttcccggggccgtgaacccccacgggtgaagacgcacctcttttttcccctgccggggggggcatttaaagggtttcgggggggttttcggccctttttccctgccccattcctcgggtggggattaaaggggggggcccagggggggttaaaccgggaaacccccggggggccctcangggggggtcccccccggggtttttttttttttgggaaggccttttaacaccgggcccccaggtttgccccttttccctgggggggtgggttttaaaaaattttgggggggtttcccttggggtcccccggggtttttccccccccctcccctttttntagggtgggaggccccgggggccccttggggttgtttggggttccccccccgcccctgggtggtttggccctttttttgggtttggggtttttaaatttcctttggggtttttta

SEQ ID NO: 552541 - DNA, 115 bp, Homo sapiens
  misc_feature (64)..(64): n is a, c, g, or t
  misc_feature (69)..(69): n is a, c, g, or t
aggaacaacatatgacgcactcctcccctgaactctacacaacaaattttgtcaccaggaaccntactnttggactccttgttcttaatgaattcgaacgggatacccccgattc

SEQ ID NO: 552542 - DNA, 181 bp, Homo sapiens
cttcattcatggcccccacaattcttaggcctaccggcggcagtacggatcatcctatttccccctctatggatccccacctccaattatctcatcaccaacggattatttcccacccaacaaggactaattcaaactaccctcaaaacaattgtatagccatacacaacattaatggtgc

SEQ ID NO: 552543 - DNA, 383 bp, Homo sapiens
tatgaataatacatagaagaaatgaaggcacaaggagggactgtactgcctacagaacctcagtcagaggagcaactatccaaggtatggtagactgggtgtagtgtatatatcgctaagttgaaaaaacctacgaataacagcagatcttcaccaatcacaaacatataggatagctaaaatagatacagcactaaataattgtaaatgaaaaaataaataaaaaaaaagctatgattgaatctggactgaatgccacacacagggcaaatgaaacatttacacaaaacatggatatgaaatgccaattgagaccgtggacttccagtggttaaaaaaaggctaccaggaagaaataggtaccgaagtagatggcatttaga

SEQ ID NO: 552544 - DNA, 708 bp, Homo sapiens
ggacccgccaacatgggccgtgttcgcaccaaaatccgtgaatgaaggctggccgggtcatcatagataaagtatctacacgcgcctgggcaacgacttccacacgaatcaatgcgcgtgtgcgaggagatcgccattatccccatgacaaataagtctccgcaacagagatagcaggttatgtcacgcatctgatgaagtcgaattcagagaggcccagtaatgaggtatctccatcaaggctgcaggaggaggagagagaaaggagagacaataatgttccctgaggtctcagtccttggatcaggagattattgacacgtagttcctgatcactaatggataatgcgtgaagcttcaggatcattcggtcacgtctgtccagacccttcaggggtcacgtcagacactcagcagatatcggggatcgtagactttgcacaaactgcccttcgggggaacccttgatttgggaacttcggcctactcggttagtcgcatggtactatactcattgtcaaagtcaataactccctgcgtgaacaaaatctaatcgaatacgtatcaaaaaacactcctaaagcttactaagcagtgacacatagtacataagcaagcagtcggagatgatccgaacctgttagagggcgcgcaaggggcataaccgatagtgccagcaagcaaatgcgtggggcacccgggggtcta

SEQ ID NO: 552545 - DNA, 310 bp, Homo sapiens
taggtgaaccacgaggacattacaccaagtgaaataagacagtcacaaaaatattgtatgattccacttacataaggtacataggatagtcaaattcatcgagacagaaagtagaacagtggttgccagaggctggagggagaggagaatgtggagttgtttaatgggtatagagtttcagttttgtaagatgaaaagaattctggagatgggttgcacaacaatgtaaatgcacttaatgctactaaactgtatactaaaatgttcaagatgagccaggcaaggtgggtgcctcacgcctgtaatccca

SEQ ID NO: 552546 - DNA, 366 bp, Homo sapiens
gcatccctcggtttctaaaaacgcaccacaacgtcaactgatgagtcatgggtcacactccaagttcttatgtaccaaagaaatcagggcactaaagtcttacacaccaattttaaagcattgctcaataagctctggttccaaacccaagcagttcttctcatcacggtcacaccagcatgcaccagtttttcaaacaaggctgtgcacaacaacttccaaaatcaaaacttgcaaattcccagacacagcagtgcatacaattcatttcactcatattttccagcactccatacatacactggtcagtggtttttgttctttcattcaatttgagcaccatcaccaaaccatcaaagccactgt

SEQ ID NO: 552547 - DNA, 570 bp, Homo sapiens
  misc_feature (24)..(24): n is a, c, g, or t
  misc_feature (136)..(136): n is a, c, g, or t
  misc_feature (175)..(175): n is a, c, g, or t
acagtctctagtgcgcgctcgttntattggttttaaccctagccccgccccccttgcgcccccgaacccaaggggttgtgggggtctcttgtatggtttattttgcgggcgcccagggccccaaggggtttctctntcttctcccccgggggggccggccccccccttttttccnataaaggcccctttgggggcgggcgggggcatggggaacacccccccccctttcccccccttgttttttgggggcccccgggtcccgttggttttagccccccccccccgggggggtaaagtttccccccggggccccggcactttaaatttggtccccttttaggtttttggggcccccggggttttcccttttttgtccggggggggggcccccccgggggtgccaacccccccccccgggggttttggggtgggttgggccccctttcccgggggggcctcccccggggggcccctttaaaagttaataattgggggggttttgggggggcccgggtttccctttttgggtttttttggggtttttttaaagcctttttttttggcccccca

SEQ ID NO: 552548 - DNA, 225 bp, Homo sapiens
  misc_feature (68)..(68): n is a, c, g, or t
  misc_feature (214)..(214): n is a, c, g, or t
attgctaagtctagtatttagctaacatattatcccaacttactttcaagtgccctttagtcacttantactgatttcctaggttgacatacgtttctatcagatgatatatatccttagtatgaaagctgatactcatgaattctagttgcttagtgcctttatgtttcgtttattcactaaagtagctgacaccaaacacaccataccctanagcggtgaaag

SEQ ID NO: 552549 - DNA, 818 bp, Homo sapiens
ggtgagttggctgccggtgagttgggtgccggtggagtcgtgtaggtcctcagaatccccgcgtagccgctgctcctcctaccctcgccatgtttcttacccggtctgaggtagcgatcaggggtcgtgaatactttttctcccgaaagcgaagattatttcaagtggacatatgccatatgaggctatcaagcttggttctacagtccagttgggatccagacatcaggagggtgtgtgcctatgctgtggatgaagagaattatcttccccagctgagtgtgagcccagctagcattgagaaaaaattgtagagattgatgcatcacataggttgtgccatgagtgggctaattgcgtgactgctaagagctttaattgataaagccagagtggatgacacagaagccactggttcacctacaatgaggacaatgacagtggagagtgtgacccaagctgtgtccaatctggctttgcagttcggagaagaagatgccgatccaggtgccgtgtctcgtcccttgggagtagcattattcatttggaggagttgatgagaaaggaccccaggctgtttcatatggggccctgtctggggaccttcgtacaagtgtgatgctcgaagcactgggtctgcttcagagggtgcccagagctccttgcatgaggtctttccacaagtctagtggctttgaaagaagccatcacgtttcactcatcattctcaaccagtatggaggcaaattgttgcccctttggctgccccggcagcggcaggttccctttccagccgattcgaggtcaggattggacgc

SEQ ID NO: 552550 - DNA, 591 bp, Homo sapiens
ttctatatgaattggcataaatctaagaagaaggcctttaccatgtactgcgaagaatagtggcaggatgagcgatggcaagaagcagctggagaaggacttcagcagacatgacgaagtactgccaatgtcattccgtgtctattgctccatcacccatggatgcgcctgacttcctctgcgccacgaagataggcccacctgatggagtatccaggtgaactggaggtcactgtggccgtagaagctggactgggcccgcgagaggcttgcagcacgtcgagtgtacctgtggaaccaatggtgttctgggcagcgatgagatgagtctgactgtctatcggtggtgaccaatgggctacacatggctacaaaggggtcaccagtcgttggctcaccaatgaagctgccccgcgtagaccctagccggatggcctgcgctaaggtggcctgtattggggcatgtgctatcctgctcgtgtagccttctctgtggcacgcgcttgggcagaaaggctaccatcaccgcaactgagcatcaacaatgaagatttataagtattggcctaggtcgtaccttatcatcggtaa

SEQ ID NO: 552551 - DNA, 300 bp, Homo sapiens
aagaagcccttgggccaagatgctaaatgggaatgcaaagcttgagctgctttgcaagagaaaataagcaggccagaggatttgctttggccaaagatggaagagccgggaacaaaaaagtgtggggaaaagataggaaccaccaggatggcaggggcaaagggctcaagggttaggaggccagtgggcccccccagagttggggagataaaggacccttggttgctttggtggcccgtaagctccttgtctgtttccagcccccagattttcattaaagctttttttttgtccccccca

SEQ ID NO: 552552 - DNA, 358 bp, Homo sapiens
cgggcggattgcctgaggtcaagagtttgagaccagcctgactaacatggtgaaacgctgtctctactgaaaatacggcaattagtcgggcgtggtggtacgcgtagtcccagctacttgggaggctgaggcagaagaattgcttgaacctgggagacggaggttgcagtgagccaagatctcaccactgcactatagcctgggcgacagagcaagactccctccccaaaaaaaaggaaataaaaaaaaaagaaaaagacttgagatgtttaccatgcataatctccagtgtacctctagatcaagctcgtctaccacttgtggcccaggatggttttgattgcgtccgtggggatcc

SEQ ID NO: 552553 - DNA, 830 bp, Homo sapiens
gggaagtttatttgctgtgaattgtcagatctagcaggcacagtagatacccattacatgagacatttgggaattatctccagcagatttgaaaagcacaagtaagttacacagcaagagccctcatctccacgtcacctaattcagttgaccaaatgcttctctctcaggccacactgatgatactgactatggtatacctatggtacatcactcacggtagagacgttccctacgaacttgggccttgctcatgaatgagttggctcaagctaaaactgcattgatgccttactacagctccacttaggtatagccctaaagaacagtgctaagggaaaatcctagtgggccaagctttgagcactatacttggtcattcacttcttattgagagagaagtagccttaagtagagatacacatggattcttgggccgtggcacatatgactcattggtcaggtacttaacttggaaagggcccaattcgatcagcgacaaggaaatctgggaaatgtcatccaccattgacttataaggtgtggctcttcacatatcacttcttatgcttaccagagagcatccactaccgaagagaaatcagccaccagatgtatagggtgatattggcctgaggtgcagccaccttgtcttgtgaccctaatgctgggccataggtatctacaaaaaatttgatgggatggtggacgcaatgcccacatatgggctttccggtatctgaaccaggcgaacacttgctgtactagccctcatgaaccacacagaatatggaacacatacaactttgtggcataactctaccgaccgc

SEQ ID NO: 552554 - DNA, 105 bp, Homo sapiens
acatggcgaagcggcccctgcccgggcacctcctctggaccgcccctgcacgccttgggacctacttcgcagccgggccccctcctcccaacaacccccagaggt
